United States Patent Application Publication US 2011/0177960 A1 - sequence listing, part 25

SEQ ID NO: 450776 - DNA, 25 bp, Artificial
  probe
  misc_feature (1)..(25): SEQ ID NO: 6837; WAN024BXV; Start 407; Stop 431
gttctcatatcgcattacaattagc

SEQ ID NO: 450777 - DNA, 25 bp, Artificial
  probe
  misc_feature (1)..(25): SEQ ID NO: 6837; WAN024BXV; Start 48; Stop 72
atggaagaacgacagattaagaatt

SEQ ID NO: 450778 - DNA, 25 bp, Artificial
  probe
  misc_feature (1)..(25): SEQ ID NO: 6837; WAN024BXV; Start 405; Stop 429
tggttctcatatcgcattacaatta

SEQ ID NO: 450779 - DNA, 25 bp, Artificial
  probe
  misc_feature (1)..(25): SEQ ID NO: 6837; WAN024BXV; Start 1031; Stop 1055
tcaagcacttctctaagcaatctca

SEQ ID NO: 450780 - DNA, 25 bp, Artificial
  probe
  misc_feature (1)..(25): SEQ ID NO: 6837; WAN024BXV; Start 406; Stop 430
ggttctcatatcgcattacaattag

SEQ ID NO: 450781 - DNA, 25 bp, Artificial
  probe
  misc_feature (1)..(25): SEQ ID NO: 6837; WAN024BXV; Start 320; Stop 344
attattctagtgaaggtattggtgg

SEQ ID NO: 450782 - DNA, 25 bp, Artificial
  probe
  misc_feature (1)..(25): SEQ ID NO: 6837; WAN024BXV; Start 72; Stop 96
tggagctgatgatgttgatgtatta

SEQ ID NO: 450783 - DNA, 25 bp, Artificial
  probe
  misc_feature (1)..(25): SEQ ID NO: 6837; WAN024BXV; Start 65; Stop 89
taagaattggagctgatgatgttga

SEQ ID NO: 450784 - DNA, 25 bp, Artificial
  probe
  misc_feature (1)..(25): SEQ ID NO: 6837; WAN024BXV; Start 660; Stop 684
ttgttgtatggatgaacctccttat

SEQ ID NO: 450785 - DNA, 25 bp, Artificial
  probe
  misc_feature (1)..(25): SEQ ID NO: 6837; WAN024BXV; Start 70; Stop 94
attggagctgatgatgttgatgtat

SEQ ID NO: 450786 - DNA, 25 bp, Artificial
  probe
  misc_feature (1)..(25): SEQ ID NO: 6837; WAN024BXV; Start 64; Stop 88
ttaagaattggagctgatgatgttg

SEQ ID NO: 450787 - DNA, 25 bp, Artificial
  probe
  misc_feature (1)..(25): SEQ ID NO: 6837; WAN024BXV; Start 71; Stop 95
ttggagctgatgatgttgatgtatt

SEQ ID NO: 450788 - DNA, 25 bp, Artificial
  probe
  misc_feature (1)..(25): SEQ ID NO: 6837; WAN024BXV; Start 69; Stop 93
aattggagctgatgatgttgatgta

SEQ ID NO: 450789 - DNA, 25 bp, Artificial
  probe
  misc_feature (1)..(25): SEQ ID NO: 6837; WAN024BXV; Start 73; Stop 97
ggagctgatgatgttgatgtattag

SEQ ID NO: 450790 - DNA, 25 bp, Artificial
  probe
  misc_feature (1)..(25): SEQ ID NO: 6838; WAN024GKV; Start 32; Stop 56
ttatggatactgaaatgcttgcttg

SEQ ID NO: 450791 - DNA, 25 bp, Artificial
  probe
  misc_feature (1)..(25): SEQ ID NO: 6838; WAN024GKV; Start 31; Stop 55
gttatggatactgaaatgcttgctt

SEQ ID NO: 450792 - DNA, 25 bp, Artificial
  probe
  misc_feature (1)..(25): SEQ ID NO: 6838; WAN024GKV; Start 29; Stop 53
ctgttatggatactgaaatgcttgc

SEQ ID NO: 450793 - DNA, 25 bp, Artificial
  probe
  misc_feature (1)..(25): SEQ ID NO: 6838; WAN024GKV; Start 30; Stop 54
tgttatggatactgaaatgcttgct

SEQ ID NO: 450794 - DNA, 25 bp, Artificial
  probe
  misc_feature (1)..(25): SEQ ID NO: 6838; WAN024GKV; Start 28; Stop 52
tctgttatggatactgaaatgcttg

SEQ ID NO: 450795 - DNA, 25 bp, Artificial
  probe
  misc_feature (1)..(25): SEQ ID NO: 6838; WAN024GKV; Start 27; Stop 51
ttctgttatggatactgaaatgctt

SEQ ID NO: 450796 - DNA, 25 bp, Artificial
  probe
  misc_feature (1)..(25): SEQ ID NO: 6838; WAN024GKV; Start 33; Stop 57
tatggatactgaaatgcttgcttgc

SEQ ID NO: 450797 - DNA, 25 bp, Artificial
  probe
  misc_feature (1)..(25): SEQ ID NO: 6838; WAN024GKV; Start 26; Stop 50
tttctgttatggatactgaaatgct

SEQ ID NO: 450798 - DNA, 25 bp, Artificial
  probe
  misc_feature (1)..(25): SEQ ID NO: 6838; WAN024GKV; Start 145; Stop 169
ggtggagtgaaatatgggaaaattc

SEQ ID NO: 450799 - DNA, 25 bp, Artificial
  probe
  misc_feature (1)..(25): SEQ ID NO: 6838; WAN024GKV; Start 146; Stop 170
gtggagtgaaatatgggaaaattct

SEQ ID NO: 450800 - DNA, 25 bp, Artificial
  probe
  misc_feature (1)..(25): SEQ ID NO: 6838; WAN024GKV; Start 144; Stop 168
gggtggagtgaaatatgggaaaatt

SEQ ID NO: 450801 - DNA, 25 bp, Artificial
  probe
  misc_feature (1)..(25): SEQ ID NO: 6838; WAN024GKV; Start 37; Stop 61
gatactgaaatgcttgcttgcgttg

SEQ ID NO: 450802 - DNA, 25 bp, Artificial
  probe
  misc_feature (1)..(25): SEQ ID NO: 6838; WAN024GKV; Start 152; Stop 176
tgaaatatgggaaaattctaggacc

SEQ ID NO: 450803 - DNA, 25 bp, Artificial
  probe
  misc_feature (1)..(25): SEQ ID NO: 6838; WAN024GKV; Start 38; Stop 62
atactgaaatgcttgcttgcgttga

SEQ ID NO: 450804 - DNA, 25 bp, Artificial
  probe
  misc_feature (1)..(25): SEQ ID NO: 6838; WAN024GKV; Start 147; Stop 171
tggagtgaaatatgggaaaattcta

SEQ ID NO: 450805 - DNA, 25 bp, Artificial
  probe
  misc_feature (1)..(25): SEQ ID NO: 6838; WAN024GKV; Start 39; Stop 63
tactgaaatgcttgcttgcgttgaa

SEQ ID NO: 450806 - DNA, 25 bp, Artificial
  probe
  misc_feature (1)..(25): SEQ ID NO: 6838; WAN024GKV; Start 151; Stop 175
gtgaaatatgggaaaattctaggac

SEQ ID NO: 450807 - DNA, 25 bp, Artificial
  probe
  misc_feature (1)..(25): SEQ ID NO: 6838; WAN024GKV; Start 150; Stop 174
agtgaaatatgggaaaattctagga

SEQ ID NO: 450808 - DNA, 25 bp, Artificial
  probe
  misc_feature (1)..(25): SEQ ID NO: 6838; WAN024GKV; Start 149; Stop 173
gagtgaaatatgggaaaattctagg

SEQ ID NO: 450809 - DNA, 25 bp, Artificial
  probe
  misc_feature (1)..(25): SEQ ID NO: 6838; WAN024GKV; Start 148; Stop 172
ggagtgaaatatgggaaaattctag

SEQ ID NO: 450810 - DNA, 25 bp, Artificial
  probe
  misc_feature (1)..(25): SEQ ID NO: 6838; WAN024GKV; Start 34; Stop 58
atggatactgaaatgcttgcttgcg

SEQ ID NO: 450811 - DNA, 25 bp, Artificial
  probe
  misc_feature (1)..(25): SEQ ID NO: 6838; WAN024GKV; Start 143; Stop 167
cgggtggagtgaaatatgggaaaat

SEQ ID NO: 450812 - DNA, 25 bp, Artificial
  probe
  misc_feature (1)..(25): SEQ ID NO: 6838; WAN024GKV; Start 17; Stop 41
tgtcacaattttctgttatggatac

SEQ ID NO: 450813 - DNA, 25 bp, Artificial
  probe
  misc_feature (1)..(25): SEQ ID NO: 6838; WAN024GKV; Start 153; Stop 177
gaaatatgggaaaattctaggacca

SEQ ID NO: 450814 - DNA, 25 bp, Artificial
  probe
  misc_feature (1)..(25): SEQ ID NO: 6838; WAN024GKV; Start 36; Stop 60
ggatactgaaatgcttgcttgcgtt

SEQ ID NO: 450815 - DNA, 25 bp, Artificial
  probe
  misc_feature (1)..(25): SEQ ID NO: 6838; WAN024GKV; Start 20; Stop 44
cacaattttctgttatggatactga

SEQ ID NO: 450816 - DNA, 25 bp, Artificial
  probe
  misc_feature (1)..(25): SEQ ID NO: 6838; WAN024GKV; Start 19; Stop 43
tcacaattttctgttatggatactg

SEQ ID NO: 450817 - DNA, 25 bp, Artificial
  probe
  misc_feature (1)..(25): SEQ ID NO: 6838; WAN024GKV; Start 18; Stop 42
gtcacaattttctgttatggatact

SEQ ID NO: 450818 - DNA, 25 bp, Artificial
  probe
  misc_feature (1)..(25): SEQ ID NO: 6838; WAN024GKV; Start 25; Stop 49
ttttctgttatggatactgaaatgc

SEQ ID NO: 450819 - DNA, 25 bp, Artificial
  probe
  misc_feature (1)..(25): SEQ ID NO: 6838; WAN024GKV; Start 21; Stop 45
acaattttctgttatggatactgaa

SEQ ID NO: 450820 - DNA, 25 bp, Artificial
  probe
  misc_feature (1)..(25): SEQ ID NO: 6838; WAN024GKV; Start 155; Stop 179
aatatgggaaaattctaggaccatg

SEQ ID NO: 450821 - DNA, 25 bp, Artificial
  probe
  misc_feature (1)..(25): SEQ ID NO: 6838; WAN024GKV; Start 154; Stop 178
aaatatgggaaaattctaggaccat

SEQ ID NO: 450822 - DNA, 25 bp, Artificial
  probe
  misc_feature (1)..(25): SEQ ID NO: 6838; WAN024GKV; Start 22; Stop 46
caattttctgttatggatactgaaa

SEQ ID NO: 450823 - DNA, 25 bp, Artificial
  probe
  misc_feature (1)..(25): SEQ ID NO: 6839; WAN024BSU; Start 63; Stop 87
tgatagagcaggaattgactacatt

SEQ ID NO: 450824 - DNA, 25 bp, Artificial
  probe
  misc_feature (1)..(25): SEQ ID NO: 6839; WAN024BSU; Start 62; Stop 86
ttgatagagcaggaattgactacat

SEQ ID NO: 450825 - DNA, 25 bp, Artificial
  probe
  misc_feature (1)..(25): SEQ ID NO: 6839; WAN024BSU; Start 61; Stop 85
attgatagagcaggaattgactaca

SEQ ID NO: 450826 - DNA, 25 bp, Artificial
  probe
  misc_feature (1)..(25): SEQ ID NO: 6839; WAN024BSU; Start 64; Stop 88
gatagagcaggaattgactacatta

SEQ ID NO: 450827 - DNA, 25 bp, Artificial
  probe
  misc_feature (1)..(25): SEQ ID NO: 6839; WAN024BSU; Start 60; Stop 84
aattgatagagcaggaattgactac

SEQ ID NO: 450828 - DNA, 25 bp, Artificial
  probe
  misc_feature (1)..(25): SEQ ID NO: 6839; WAN024BSU; Start 218; Stop 242
ttatagaagccgtcgatatactcac

SEQ ID NO: 450829 - DNA, 25 bp, Artificial
  probe
  misc_feature (1)..(25): SEQ ID NO: 6839; WAN024BSU; Start 219; Stop 243
tatagaagccgtcgatatactcaca

SEQ ID NO: 450830 - DNA, 25 bp, Artificial
  probe
  misc_feature (1)..(25): SEQ ID NO: 6839; WAN024BSU; Start 65; Stop 89
atagagcaggaattgactacattaa

SEQ ID NO: 450831 - DNA, 25 bp, Artificial
  probe
  misc_feature (1)..(25): SEQ ID NO: 6839; WAN024BSU; Start 215; Stop 239
acattatagaagccgtcgatatact

SEQ ID NO: 450832 - DNA, 25 bp, Artificial
  probe
  misc_feature (1)..(25): SEQ ID NO: 6839; WAN024BSU; Start 220; Stop 244
atagaagccgtcgatatactcacaa

SEQ ID NO: 450833 - DNA, 25 bp, Artificial
  probe
  misc_feature (1)..(25): SEQ ID NO: 6839; WAN024BSU; Start 217; Stop 241
attatagaagccgtcgatatactca

SEQ ID NO: 450834 - DNA, 25 bp, Artificial
  probe
  misc_feature (1)..(25): SEQ ID NO: 6839; WAN024BSU; Start 216; Stop 240
cattatagaagccgtcgatatactc

SEQ ID NO: 450835 - DNA, 25 bp, Artificial
  probe
  misc_feature (1)..(25): SEQ ID NO: 6839; WAN024BSU; Start 78; Stop 102
tgactacattaaacaccctgaaaca

SEQ ID NO: 450836 - DNA, 25 bp, Artificial
  probe
  misc_feature (1)..(25): SEQ ID NO: 6839; WAN024BSU; Start 320; Stop 344
cggatttacggcataattcagattt

SEQ ID NO: 450837 - DNA, 25 bp, Artificial
  probe
  misc_feature (1)..(25): SEQ ID NO: 6839; WAN024BSU; Start 214; Stop 238
aacattatagaagccgtcgatatac

SEQ ID NO: 450838 - DNA, 25 bp, Artificial
  probe
  misc_feature (1)..(25): SEQ ID NO: 6839; WAN024BSU; Start 77; Stop 101
ttgactacattaaacaccctgaaac

SEQ ID NO: 450839 - DNA, 25 bp, Artificial
  probe
  misc_feature (1)..(25): SEQ ID NO: 6839; WAN024BSU; Start 73; Stop 97
ggaattgactacattaaacaccctg

SEQ ID NO: 450840 - DNA, 25 bp, Artificial
  probe
  misc_feature (1)..(25): SEQ ID NO: 6839; WAN024BSU; Start 71; Stop 95
caggaattgactacattaaacaccc

SEQ ID NO: 450841 - DNA, 25 bp, Artificial
  probe
  misc_feature (1)..(25): SEQ ID NO: 6839; WAN024BSU; Start 70; Stop 94
gcaggaattgactacattaaacacc

SEQ ID NO: 450842 - DNA, 25 bp, Artificial
  probe
  misc_feature (1)..(25): SEQ ID NO: 6839; WAN024BSU; Start 69; Stop 93
agcaggaattgactacattaaacac

SEQ ID NO: 450843 - DNA, 25 bp, Artificial
  probe
  misc_feature (1)..(25): SEQ ID NO: 6839; WAN024BSU; Start 53; Stop 77
ttggacaaattgatagagcaggaat

SEQ ID NO: 450844 - DNA, 25 bp, Artificial
  probe
  misc_feature (1)..(25): SEQ ID NO: 6839; WAN024BSU; Start 68; Stop 92
gagcaggaattgactacattaaaca

SEQ ID NO: 450845 - DNA, 25 bp, Artificial
  probe
  misc_feature (1)..(25): SEQ ID NO: 6839; WAN024BSU; Start 327; Stop 351
acggcataattcagatttaacaaga

SEQ ID NO: 450846 - DNA, 25 bp, Artificial
  probe
  misc_feature (1)..(25): SEQ ID NO: 6839; WAN024BSU; Start 67; Stop 91
agagcaggaattgactacattaaac

SEQ ID NO: 450847 - DNA, 25 bp, Artificial
  probe
  misc_feature (1)..(25): SEQ ID NO: 6839; WAN024BSU; Start 303; Stop 327
tagagttgtaaagttggcggattta

SEQ ID NO: 450848 - DNA, 25 bp, Artificial
  probe
  misc_feature (1)..(25): SEQ ID NO: 6839; WAN024BSU; Start 169; Stop 193
acttcactaaccctactagacctaa

SEQ ID NO: 450849 - DNA, 25 bp, Artificial
  probe
  misc_feature (1)..(25): SEQ ID NO: 6839; WAN024BSU; Start 74; Stop 98
gaattgactacattaaacaccctga

SEQ ID NO: 450850 - DNA, 25 bp, Artificial
  probe
  misc_feature (1)..(25): SEQ ID NO: 6839; WAN024BSU; Start 328; Stop 352
cggcataattcagatttaacaagac

SEQ ID NO: 450851 - DNA, 25 bp, Artificial
  probe
  misc_feature (1)..(25): SEQ ID NO: 6839; WAN024BSU; Start 167; Stop 191
atacttcactaaccctactagacct

SEQ ID NO: 450852 - DNA, 25 bp, Artificial
  probe
  misc_feature (1)..(25): SEQ ID NO: 6839; WAN024BSU; Start 166; Stop 190
gatacttcactaaccctactagacc

SEQ ID NO: 450853 - DNA, 25 bp, Artificial
  probe
  misc_feature (1)..(25): SEQ ID NO: 6839; WAN024BSU; Start 76; Stop 100
attgactacattaaacaccctgaaa

SEQ ID NO: 450854 - DNA, 25 bp, Artificial
  probe
  misc_feature (1)..(25): SEQ ID NO: 6839; WAN024BSU; Start 49; Stop 73
cactttggacaaattgatagagcag

SEQ ID NO: 450855 - DNA, 25 bp, Artificial
  probe
  misc_feature (1)..(25): SEQ ID NO: 6839; WAN024BSU; Start 75; Stop 99
aattgactacattaaacaccctgaa

SEQ ID NO: 450856 - DNA, 25 bp, Artificial
  probe
  misc_feature (1)..(25): SEQ ID NO: 6840; WAN024D2P; Start 53; Stop 77
tagataaagaaacagatggcggaat

SEQ ID NO: 450857 - DNA, 25 bp, Artificial
  probe
  misc_feature (1)..(25): SEQ ID NO: 6840; WAN024D2P; Start 52; Stop 76
ttagataaagaaacagatggcggaa

SEQ ID NO: 450858 - DNA, 25 bp, Artificial
  probe
  misc_feature (1)..(25): SEQ ID NO: 6840; WAN024D2P; Start 51; Stop 75
cttagataaagaaacagatggcgga

SEQ ID NO: 450859 - DNA, 25 bp, Artificial
  probe
  misc_feature (1)..(25): SEQ ID NO: 6840; WAN024D2P; Start 55; Stop 79
gataaagaaacagatggcggaattg

SEQ ID NO: 450860 - DNA, 25 bp, Artificial
  probe
  misc_feature (1)..(25): SEQ ID NO: 6840; WAN024D2P; Start 54; Stop 78
agataaagaaacagatggcggaatt

SEQ ID NO: 450861 - DNA, 25 bp, Artificial
  probe
  misc_feature (1)..(25): SEQ ID NO: 6840; WAN024D2P; Start 56; Stop 80
ataaagaaacagatggcggaattgc

SEQ ID NO: 450862 - DNA, 25 bp, Artificial
  probe
  misc_feature (1)..(25): SEQ ID NO: 6840; WAN024D2P; Start 66; Stop 90
agatggcggaattgcagataacatt

SEQ ID NO: 450863 - DNA, 25 bp, Artificial
  probe
  misc_feature (1)..(25): SEQ ID NO: 6840; WAN024D2P; Start 49; Stop 73
gtcttagataaagaaacagatggcg

SEQ ID NO: 450864 - DNA, 25 bp, Artificial
  probe
  misc_feature (1)..(25): SEQ ID NO: 6840; WAN024D2P; Start 48; Stop 72
ggtcttagataaagaaacagatggc

SEQ ID NO: 450865 - DNA, 25 bp, Artificial
  probe
  misc_feature (1)..(25): SEQ ID NO: 6840; WAN024D2P; Start 50; Stop 74
tcttagataaagaaacagatggcgg

SEQ ID NO: 450866 - DNA, 25 bp, Artificial
  probe
  misc_feature (1)..(25): SEQ ID NO: 6840; WAN024D2P; Start 22; Stop 46
cctatatccccagttaaaccaaatg

SEQ ID NO: 450867 - DNA, 25 bp, Artificial
  probe
  misc_feature (1)..(25): SEQ ID NO: 6840; WAN024D2P; Start 21; Stop 45
tcctatatccccagttaaaccaaat

SEQ ID NO: 450868 - DNA, 25 bp, Artificial
  probe
  misc_feature (1)..(25): SEQ ID NO: 6840; WAN024D2P; Start 20; Stop 44
atcctatatccccagttaaaccaaa

SEQ ID NO: 450869 - DNA, 25 bp, Artificial
  probe
  misc_feature (1)..(25): SEQ ID NO: 6840; WAN024D2P; Start 24; Stop 48
tatatccccagttaaaccaaatgtg

SEQ ID NO: 450870 - DNA, 25 bp, Artificial
  probe
  misc_feature (1)..(25): SEQ ID NO: 6840; WAN024D2P; Start 47; Stop 71
tggtcttagataaagaaacagatgg

SEQ ID NO: 450871 - DNA, 25 bp, Artificial
  probe
  misc_feature (1)..(25): SEQ ID NO: 6840; WAN024D2P; Start 23; Stop 47
ctatatccccagttaaaccaaatgt

SEQ ID NO: 450872 - DNA, 25 bp, Artificial
  probe
  misc_feature (1)..(25): SEQ ID NO: 6840; WAN024D2P; Start 19; Stop 43
tatcctatatccccagttaaaccaa

SEQ ID NO: 450873 - DNA, 25 bp, Artificial
  probe
  misc_feature (1)..(25): SEQ ID NO: 6840; WAN024D2P; Start 67; Stop 91
gatggcggaattgcagataacattt

SEQ ID NO: 450874 - DNA, 25 bp, Artificial
  probe
  misc_feature (1)..(25): SEQ ID NO: 6840; WAN024D2P; Start 65; Stop 89
cagatggcggaattgcagataacat

SEQ ID NO: 450875 - DNA, 25 bp, Artificial
  probe
  misc_feature (1)..(25): SEQ ID NO: 6840; WAN024D2P; Start 63; Stop 87
aacagatggcggaattgcagataac

SEQ ID NO: 450876 - DNA, 25 bp, Artificial
  probe
  misc_feature (1)..(25): SEQ ID NO: 6840; WAN024D2P; Start 18; Stop 42
atatcctatatccccagttaaacca

SEQ ID NO: 450877 - DNA, 25 bp, Artificial
  probe
  misc_feature (1)..(25): SEQ ID NO: 6840; WAN024D2P; Start 45; Stop 69
tgtggtcttagataaagaaacagat

SEQ ID NO: 450878 - DNA, 25 bp, Artificial
  probe
  misc_feature (1)..(25): SEQ ID NO: 6840; WAN024D2P; Start 44; Stop 68
atgtggtcttagataaagaaacaga

SEQ ID NO: 450879 - DNA, 25 bp, Artificial
  probe
  misc_feature (1)..(25): SEQ ID NO: 6840; WAN024D2P; Start 46; Stop 70
gtggtcttagataaagaaacagatg

SEQ ID NO: 450880 - DNA, 25 bp, Artificial
  probe
  misc_feature (1)..(25): SEQ ID NO: 6840; WAN024D2P; Start 11; Stop 35
caatgaaatatcctatatccccagt

SEQ ID NO: 450881 - DNA, 25 bp, Artificial
  probe
  misc_feature (1)..(25): SEQ ID NO: 6840; WAN024D2P; Start 10; Stop 34
acaatgaaatatcctatatccccag

SEQ ID NO: 450882 - DNA, 25 bp, Artificial
  probe
  misc_feature (1)..(25): SEQ ID NO: 6840; WAN024D2P; Start 40; Stop 64
ccaaatgtggtcttagataaagaaa

SEQ ID NO: 450883 - DNA, 25 bp, Artificial
  probe
  misc_feature (1)..(25): SEQ ID NO: 6840; WAN024D2P; Start 7; Stop 31
agaacaatgaaatatcctatatccc

SEQ ID NO: 450884 - DNA, 25 bp, Artificial
  probe
  misc_feature (1)..(25): SEQ ID NO: 6840; WAN024D2P; Start 62; Stop 86
aaacagatggcggaattgcagataa

SEQ ID NO: 450885 - DNA, 25 bp, Artificial
  probe
  misc_feature (1)..(25): SEQ ID NO: 6840; WAN024D2P; Start 25; Stop 49
atatccccagttaaaccaaatgtgg

SEQ ID NO: 450886 - DNA, 25 bp, Artificial
  probe
  misc_feature (1)..(25): SEQ ID NO: 6840; WAN024D2P; Start 57; Stop 81
taaagaaacagatggcggaattgca

SEQ ID NO: 450887 - DNA, 25 bp, Artificial
  probe
  misc_feature (1)..(25): SEQ ID NO: 6840; WAN024D2P; Start 43; Stop 67
aatgtggtcttagataaagaaacag

SEQ ID NO: 450888 - DNA, 25 bp, Artificial
  probe
  misc_feature (1)..(25): SEQ ID NO: 6840; WAN024D2P; Start 17; Stop 41
aatatcctatatccccagttaaacc

SEQ ID NO: 450889 - DNA, 25 bp, Artificial
  probe
  misc_feature (1)..(25): SEQ ID NO: 6841; WAN024BZ5; Start 225; Stop 249
agaggcaggatggaatgataataag

SEQ ID NO: 450890 - DNA, 25 bp, Artificial
  probe
  misc_feature (1)..(25): SEQ ID NO: 6841; WAN024BZ5; Start 228; Stop 252
ggcaggatggaatgataataagttg

SEQ ID NO: 450891 - DNA, 25 bp, Artificial
  probe
  misc_feature (1)..(25): SEQ ID NO: 6841; WAN024BZ5; Start 227; Stop 251
aggcaggatggaatgataataagtt

SEQ ID NO: 450892 - DNA, 25 bp, Artificial
  probe
  misc_feature (1)..(25): SEQ ID NO: 6841; WAN024BZ5; Start 226; Stop 250
gaggcaggatggaatgataataagt

SEQ ID NO: 450893 - DNA, 25 bp, Artificial
  probe
  misc_feature (1)..(25): SEQ ID NO: 6841; WAN024BZ5; Start 229; Stop 253
gcaggatggaatgataataagttgt

SEQ ID NO: 450894 - DNA, 25 bp, Artificial
  probe
  misc_feature (1)..(25): SEQ ID NO: 6841; WAN024BZ5; Start 224; Stop 248
tagaggcaggatggaatgataataa

SEQ ID NO: 450895 - DNA, 25 bp, Artificial
  probe
  misc_feature (1)..(25): SEQ ID NO: 6841; WAN024BZ5; Start 223; Stop 247
ttagaggcaggatggaatgataata

SEQ ID NO: 450896 - DNA, 25 bp, Artificial
  probe
  misc_feature (1)..(25): SEQ ID NO: 6841; WAN024BZ5; Start 310; Stop 334
gtggcaatctatgtgaaggagaatt

SEQ ID NO: 450897 - DNA, 25 bp, Artificial
  probe
  misc_feature (1)..(25): SEQ ID NO: 6841; WAN024BZ5; Start 197; Stop 221
atgatgcgatagacattaagaagtt

SEQ ID NO: 450898 - DNA, 25 bp, Artificial
  probe
  misc_feature (1)..(25): SEQ ID NO: 6841; WAN024BZ5; Start 303; Stop 327
aatcagtgtggcaatctatgtgaag

SEQ ID NO: 450899 - DNA, 25 bp, Artificial
  probe
  misc_feature (1)..(25): SEQ ID NO: 6841; WAN024BZ5; Start 302; Stop 326
gaatcagtgtggcaatctatgtgaa

SEQ ID NO: 450900 - DNA, 25 bp, Artificial
  probe
  misc_feature (1)..(25): SEQ ID NO: 6841; WAN024BZ5; Start 309; Stop 333
tgtggcaatctatgtgaaggagaat

SEQ ID NO: 450901 - DNA, 25 bp, Artificial
  probe
  misc_feature (1)..(25): SEQ ID NO: 6841; WAN024BZ5; Start 299; Stop 323
aacgaatcagtgtggcaatctatgt

SEQ ID NO: 450902 - DNA, 25 bp, Artificial
  probe
  misc_feature (1)..(25): SEQ ID NO: 6841; WAN024BZ5; Start 250; Stop 274
ttgttcctatgtaaagtctgtcgtt

SEQ ID NO: 450903 - DNA, 25 bp, Artificial
  probe
  misc_feature (1)..(25): SEQ ID NO: 6841; WAN024BZ5; Start 251; Stop 275
tgttcctatgtaaagtctgtcgttt

SEQ ID NO: 450904 - DNA, 25 bp, Artificial
  probe
  misc_feature (1)..(25): SEQ ID NO: 6841; WAN024BZ5; Start 222; Stop 246
tttagaggcaggatggaatgataat

SEQ ID NO: 450905 - DNA, 25 bp, Artificial
  probe
  misc_feature (1)..(25): SEQ ID NO: 6841; WAN024BZ5; Start 297; Stop 321
taaacgaatcagtgtggcaatctat

SEQ ID NO: 450906 - DNA, 25 bp, Artificial
  probe
  misc_feature (1)..(25): SEQ ID NO: 6841; WAN024BZ5; Start 296; Stop 320
ataaacgaatcagtgtggcaatcta

SEQ ID NO: 450907 - DNA, 25 bp, Artificial
  probe
  misc_feature (1)..(25): SEQ ID NO: 6841; WAN024BZ5; Start 294; Stop 318
aaataaacgaatcagtgtggcaatc

SEQ ID NO: 450908 - DNA, 25 bp, Artificial
  probe
  misc_feature (1)..(25): SEQ ID NO: 6841; WAN024BZ5; Start 248; Stop 272
agttgttcctatgtaaagtctgtcg

SEQ ID NO: 450909 - DNA, 25 bp, Artificial
  probe
  misc_feature (1)..(25): SEQ ID NO: 6841; WAN024BZ5; Start 249; Stop 273
gttgttcctatgtaaagtctgtcgt

SEQ ID NO: 450910 - DNA, 25 bp, Artificial
  probe
  misc_feature (1)..(25): SEQ ID NO: 6841; WAN024BZ5; Start 230; Stop 254
caggatggaatgataataagttgtt

SEQ ID NO: 450911 - DNA, 25 bp, Artificial
  probe
  misc_feature (1)..(25): SEQ ID NO: 6841; WAN024BZ5; Start 104; Stop 128
aattggatgttaatgaagacgggaa

SEQ ID NO: 450912 - DNA, 25 bp, Artificial
  probe
  misc_feature (1)..(25): SEQ ID NO: 6841; WAN024BZ5; Start 103; Stop 127
aaattggatgttaatgaagacggga

SEQ ID NO: 450913 - DNA, 25 bp, Artificial
  probe
  misc_feature (1)..(25): SEQ ID NO: 6841; WAN024BZ5; Start 102; Stop 126
caaattggatgttaatgaagacggg

SEQ ID NO: 450914 - DNA, 25 bp, Artificial
  probe
  misc_feature (1)..(25): SEQ ID NO: 6841; WAN024BZ5; Start 308; Stop 332
gtgtggcaatctatgtgaaggagaa

SEQ ID NO: 450915 - DNA, 25 bp, Artificial
  probe
  misc_feature (1)..(25): SEQ ID NO: 6841; WAN024BZ5; Start 105; Stop 129
attggatgttaatgaagacgggaag

SEQ ID NO: 450916 - DNA, 25 bp, Artificial
  probe
  misc_feature (1)..(25): SEQ ID NO: 6841; WAN024BZ5; Start 295; Stop 319
aataaacgaatcagtgtggcaatct

SEQ ID NO: 450917 - DNA, 25 bp, Artificial
  probe
  misc_feature (1)..(25): SEQ ID NO: 6841; WAN024BZ5; Start 247; Stop 271
aagttgttcctatgtaaagtctgtc

SEQ ID NO: 450918 - DNA, 25 bp, Artificial
  probe
  misc_feature (1)..(25): SEQ ID NO: 6841; WAN024BZ5; Start 311; Stop 335
tggcaatctatgtgaaggagaattt

SEQ ID NO: 450919 - DNA, 25 bp, Artificial
  probe
  misc_feature (1)..(25): SEQ ID NO: 6841; WAN024BZ5; Start 312; Stop 336
ggcaatctatgtgaaggagaatttg

SEQ ID NO: 450920 - DNA, 25 bp, Artificial
  probe
  misc_feature (1)..(25): SEQ ID NO: 6841; WAN024BZ5; Start 304; Stop 328
atcagtgtggcaatctatgtgaagg

SEQ ID NO: 450921 - DNA, 25 bp, Artificial
  probe
  misc_feature (1)..(25): SEQ ID NO: 6841; WAN024BZ5; Start 109; Stop 133
gatgttaatgaagacgggaaggaag

SEQ ID NO: 450922 - DNA, 25 bp, Artificial
  probe
  misc_feature (1)..(25): SEQ ID NO: 6842; WAN024CV9; Start 200; Stop 224
aaagaatcacaatcaaaccaactgc

SEQ ID NO: 450923 - DNA, 25 bp, Artificial
  probe
  misc_feature (1)..(25): SEQ ID NO: 6842; WAN024CV9; Start 207; Stop 231
cacaatcaaaccaactgccacataa

SEQ ID NO: 450924 - DNA, 25 bp, Artificial
  probe
  misc_feature (1)..(25): SEQ ID NO: 6842; WAN024CV9; Start 201; Stop 225
aagaatcacaatcaaaccaactgcc

SEQ ID NO: 450925 - DNA, 25 bp, Artificial
  probe
  misc_feature (1)..(25): SEQ ID NO: 6842; WAN024CV9; Start 36; Stop 60
atcagaagaaggatcagcggatgtt

SEQ ID NO: 450926 - DNA, 25 bp, Artificial
  probe
  misc_feature (1)..(25): SEQ ID NO: 6842; WAN024CV9; Start 35; Stop 59
aatcagaagaaggatcagcggatgt

SEQ ID NO: 450927 - DNA, 25 bp, Artificial
  probe
  misc_feature (1)..(25): SEQ ID NO: 6842; WAN024CV9; Start 206; Stop 230
tcacaatcaaaccaactgccacata

SEQ ID NO: 450928 - DNA, 25 bp, Artificial
  probe
  misc_feature (1)..(25): SEQ ID NO: 6842; WAN024CV9; Start 93; Stop 117
ctactgttgtccatcctccaccttc

SEQ ID NO: 450929 - DNA, 25 bp, Artificial
  probe
  misc_feature (1)..(25): SEQ ID NO: 6842; WAN024CV9; Start 44; Stop 68
aaggatcagcggatgtttcttcttt

SEQ ID NO: 450930 - DNA, 25 bp, Artificial
  probe
  misc_feature (1)..(25): SEQ ID NO: 6842; WAN024CV9; Start 203; Stop 227
gaatcacaatcaaaccaactgccac

SEQ ID NO: 450931 - DNA, 25 bp, Artificial
  probe
  misc_feature (1)..(25): SEQ ID NO: 6842; WAN024CV9; Start 202; Stop 226
agaatcacaatcaaaccaactgcca

SEQ ID NO: 450932 - DNA, 25 bp, Artificial
  probe
  misc_feature (1)..(25): SEQ ID NO: 6842; WAN024CV9; Start 17; Stop 41
ggcgaatcctactaagaaaatcaga

SEQ ID NO: 450933 - DNA, 25 bp, Artificial
  probe
  misc_feature (1)..(25): SEQ ID NO: 6842; WAN024CV9; Start 34; Stop 58
aaatcagaagaaggatcagcggatg

SEQ ID NO: 450934 - DNA, 25 bp, Artificial
  probe
  misc_feature (1)..(25): SEQ ID NO: 6842; WAN024CV9; Start 18; Stop 42
gcgaatcctactaagaaaatcagaa

SEQ ID NO: 450935 - DNA, 25 bp, Artificial
  probe
  misc_feature (1)..(25): SEQ ID NO: 6842; WAN024CV9; Start 199; Stop 223
aaaagaatcacaatcaaaccaactg

SEQ ID NO: 450936 - DNA, 25 bp, Artificial
  probe
  misc_feature (1)..(25): SEQ ID NO: 6842; WAN024CV9; Start 14; Stop 38
aacggcgaatcctactaagaaaatc

SEQ ID NO: 450937 - DNA, 25 bp, Artificial
  probe
  misc_feature (1)..(25): SEQ ID NO: 6842; WAN024CV9; Start 205; Stop 229
atcacaatcaaaccaactgccacat

SEQ ID NO: 450938 - DNA, 25 bp, Artificial
  probe
  misc_feature (1)..(25): SEQ ID NO: 6842; WAN024CV9; Start 13; Stop 37
caacggcgaatcctactaagaaaat

SEQ ID NO: 450939 - DNA, 25 bp, Artificial
  probe
  misc_feature (1)..(25): SEQ ID NO: 6842; WAN024CV9; Start 92; Stop 116
tctactgttgtccatcctccacctt

SEQ ID NO: 450940 - DNA, 25 bp, Artificial
  probe
  misc_feature (1)..(25): SEQ ID NO: 6842; WAN024CV9; Start 16; Stop 40
cggcgaatcctactaagaaaatcag

SEQ ID NO: 450941 - DNA, 25 bp, Artificial
  probe
  misc_feature (1)..(25): SEQ ID NO: 6842; WAN024CV9; Start 195; Stop 219
ccataaaagaatcacaatcaaacca

SEQ ID NO: 450942 - DNA, 25 bp, Artificial
  probe
  misc_feature (1)..(25): SEQ ID NO: 6842; WAN024CV9; Start 204; Stop 228
aatcacaatcaaaccaactgccaca

SEQ ID NO: 450943 - DNA, 25 bp, Artificial
  probe
  misc_feature (1)..(25): SEQ ID NO: 6842; WAN024CV9; Start 194; Stop 218
tccataaaagaatcacaatcaaacc

SEQ ID NO: 450944 - DNA, 25 bp, Artificial
  probe
  misc_feature (1)..(25): SEQ ID NO: 6842; WAN024CV9; Start 29; Stop 53
taagaaaatcagaagaaggatcagc

SEQ ID NO: 450945 - DNA, 25 bp, Artificial
  probe
  misc_feature (1)..(25): SEQ ID NO: 6842; WAN024CV9; Start 105; Stop 129
atcctccaccttcacttccttcctt

SEQ ID NO: 450946 - DNA, 25 bp, Artificial
  probe
  misc_feature (1)..(25): SEQ ID NO: 6842; WAN024CV9; Start 94; Stop 118
tactgttgtccatcctccaccttca

SEQ ID NO: 450947 - DNA, 25 bp, Artificial
  probe
  misc_feature (1)..(25): SEQ ID NO: 6842; WAN024CV9; Start 15; Stop 39
acggcgaatcctactaagaaaatca

SEQ ID NO: 450948 - DNA, 25 bp, Artificial
  probe
  misc_feature (1)..(25): SEQ ID NO: 6842; WAN024CV9; Start 30; Stop 54
aagaaaatcagaagaaggatcagcg

SEQ ID NO: 450949 - DNA, 25 bp, Artificial
  probe
  misc_feature (1)..(25): SEQ ID NO: 6842; WAN024CV9; Start 38; Stop 62
cagaagaaggatcagcggatgtttc

SEQ ID NO: 450950 - DNA, 25 bp, Artificial
  probe
  misc_feature (1)..(25): SEQ ID NO: 6842; WAN024CV9; Start 98; Stop 122
gttgtccatcctccaccttcacttc

SEQ ID NO: 450951 - DNA, 25 bp, Artificial
  probe
  misc_feature (1)..(25): SEQ ID NO: 6842; WAN024CV9; Start 198; Stop 222
taaaagaatcacaatcaaaccaact

SEQ ID NO: 450952 - DNA, 25 bp, Artificial
  probe
  misc_feature (1)..(25): SEQ ID NO: 6842; WAN024CV9; Start 86; Stop 110
tgaacgtctactgttgtccatcctc

SEQ ID NO: 450953 - DNA, 25 bp, Artificial
  probe
  misc_feature (1)..(25): SEQ ID NO: 6842; WAN024CV9; Start 180; Stop 204
caagcgtcgaataatccataaaaga

SEQ ID NO: 450954 - DNA, 25 bp, Artificial
  probe
  misc_feature (1)..(25): SEQ ID NO: 6842; WAN024CV9; Start 114; Stop 138
cttcacttccttccttgctgctttc

SEQ ID NO: 450955 - DNA, 25 bp, Artificial
  probe
  misc_feature (1)..(25): SEQ ID NO: 6843; WAN024B3F; Start 603; Stop 627
aggagagaactacgatattggagaa

SEQ ID NO: 450956 - DNA, 25 bp, Artificial
  probe
  misc_feature (1)..(25): SEQ ID NO: 6843; WAN024B3F; Start 602; Stop 626
caggagagaactacgatattggaga

SEQ ID NO: 450957 - DNA, 25 bp, Artificial
  probe
  misc_feature (1)..(25): SEQ ID NO: 6843; WAN024B3F; Start 1218; Stop 1242
ttggcagattagtggtagaagtaat

SEQ ID NO: 450958 - DNA, 25 bp, Artificial
  probe
  misc_feature (1)..(25): SEQ ID NO: 6843; WAN024B3F; Start 598; Stop 622
cttccaggagagaactacgatattg

SEQ ID NO: 450959 - DNA, 25 bp, Artificial
  probe
  misc_feature (1)..(25): SEQ ID NO: 6843; WAN024B3F; Start 596; Stop 620
atcttccaggagagaactacgatat

SEQ ID NO: 450960 - DNA, 25 bp, Artificial
  probe
  misc_feature (1)..(25): SEQ ID NO: 6843; WAN024B3F; Start 597; Stop 621
tcttccaggagagaactacgatatt

SEQ ID NO: 450961 - DNA, 25 bp, Artificial
  probe
  misc_feature (1)..(25): SEQ ID NO: 6843; WAN024B3F; Start 595; Stop 619
aatcttccaggagagaactacgata

SEQ ID NO: 450962 - DNA, 25 bp, Artificial
  probe
  misc_feature (1)..(25): SEQ ID NO: 6843; WAN024B3F; Start 590; Stop 614
ttgtcaatcttccaggagagaacta

SEQ ID NO: 450963 - DNA, 25 bp, Artificial
  probe
  misc_feature (1)..(25): SEQ ID NO: 6843; WAN024B3F; Start 1219; Stop 1243
tggcagattagtggtagaagtaata

SEQ ID NO: 450964 - DNA, 25 bp, Artificial
  probe
  misc_feature (1)..(25): SEQ ID NO: 6843; WAN024B3F; Start 591; Stop 615
tgtcaatcttccaggagagaactac

SEQ ID NO: 450965 - DNA, 25 bp, Artificial
  probe
  misc_feature (1)..(25): SEQ ID NO: 6843; WAN024B3F; Start 594; Stop 618
caatcttccaggagagaactacgat

SEQ ID NO: 450966 - DNA, 25 bp, Artificial
  probe
  misc_feature (1)..(25): SEQ ID NO: 6843; WAN024B3F; Start 1220; Stop 1244
ggcagattagtggtagaagtaatat

SEQ ID NO: 450967 - DNA, 25 bp, Artificial
  probe
  misc_feature (1)..(25): SEQ ID NO: 6843; WAN024B3F; Start 1131; Stop 1155
tactagaccaccgactatagatgag

SEQ ID NO: 450968 - DNA, 25 bp, Artificial
  probe
  misc_feature (1)..(25): SEQ ID NO: 6843; WAN024B3F; Start 1130; Stop 1154
gtactagaccaccgactatagatga

SEQ ID NO: 450969 - DNA, 25 bp, Artificial
  probe
  misc_feature (1)..(25): SEQ ID NO: 6843; WAN024B3F; Start 1340; Stop 1364
ttgtagtaatgaaagatggagcgaa

SEQ ID NO: 450970 - DNA, 25 bp, Artificial
  probe
  misc_feature (1)..(25): SEQ ID NO: 6843; WAN024B3F; Start 593; Stop 617
tcaatcttccaggagagaactacga

SEQ ID NO: 450971 - DNA, 25 bp, Artificial
  probe
  misc_feature (1)..(25): SEQ ID NO: 6843; WAN024B3F; Start 592; Stop 616
gtcaatcttccaggagagaactacg

SEQ ID NO: 450972 - DNA, 25 bp, Artificial
  probe
  misc_feature (1)..(25): SEQ ID NO: 6843; WAN024B3F; Start 1217; Stop 1241
tttggcagattagtggtagaagtaa

SEQ ID NO: 450973 - DNA, 25 bp, Artificial
  probe
  misc_feature (1)..(25): SEQ ID NO: 6843; WAN024B3F; Start 604; Stop 628
ggagagaactacgatattggagaaa

SEQ ID NO: 450974 - DNA, 25 bp, Artificial
  probe
  misc_feature (1)..(25): SEQ ID NO: 6843; WAN024B3F; Start 1341; Stop 1365
tgtagtaatgaaagatggagcgaag

SEQ ID NO: 450975 - DNA, 25 bp, Artificial
  probe
  misc_feature (1)..(25): SEQ ID NO: 6843; WAN024B3F; Start 1339; Stop 1363
gttgtagtaatgaaagatggagcga

SEQ ID NO: 450976 - DNA, 25 bp, Artificial
  probe
  misc_feature (1)..(25): SEQ ID NO: 6843; WAN024B3F; Start 1338; Stop 1362
agttgtagtaatgaaagatggagcg

SEQ ID NO: 450977 - DNA, 25 bp, Artificial
  probe
  misc_feature (1)..(25): SEQ ID NO: 6843; WAN024B3F; Start 1337; Stop 1361
aagttgtagtaatgaaagatggagc

SEQ ID NO: 450978 - DNA, 25 bp, Artificial
  probe
  misc_feature (1)..(25): SEQ ID NO: 6843; WAN024B3F; Start 1286; Stop 1310
tagatggttggacaatttggaaaga

SEQ ID NO: 450979 - DNA, 25 bp, Artificial
  probe
  misc_feature (1)..(25): SEQ ID NO: 6843; WAN024B3F; Start 1285; Stop 1309
ttagatggttggacaatttggaaag

SEQ ID NO: 450980 - DNA, 25 bp, Artificial
  probe
  misc_feature (1)..(25): SEQ ID NO: 6843; WAN024B3F; Start 1205; Stop 1229
gaattacaggactttggcagattag

SEQ ID NO: 450981 - DNA, 25 bp, Artificial
  probe
  misc_feature (1)..(25): SEQ ID NO: 6843; WAN024B3F; Start 1216; Stop 1240
ctttggcagattagtggtagaagta

SEQ ID NO: 450982 - DNA, 25 bp, Artificial
  probe
  misc_feature (1)..(25): SEQ ID NO: 6843; WAN024B3F; Start 1288; Stop 1312
gatggttggacaatttggaaagata

SEQ ID NO: 450983 - DNA, 25 bp, Artificial
  probe
  misc_feature (1)..(25): SEQ ID NO: 6843; WAN024B3F; Start 599; Stop 623
ttccaggagagaactacgatattgg

SEQ ID NO: 450984 - DNA, 25 bp, Artificial
  probe
  misc_feature (1)..(25): SEQ ID NO: 6843; WAN024B3F; Start 1133; Stop 1157
ctagaccaccgactatagatgagta

SEQ ID NO: 450985 - DNA, 25 bp, Artificial
  probe
  misc_feature (1)..(25): SEQ ID NO: 6843; WAN024B3F; Start 1284; Stop 1308
tttagatggttggacaatttggaaa

SEQ ID NO: 450986 - DNA, 25 bp, Artificial
  probe
  misc_feature (1)..(25): SEQ ID NO: 6843; WAN024B3F; Start 1275; Stop 1299
cgttacttatttagatggttggaca

SEQ ID NO: 450987 - DNA, 25 bp, Artificial
  probe
  misc_feature (1)..(25): SEQ ID NO: 6843; WAN024B3F; Start 1287; Stop 1311
agatggttggacaatttggaaagat

SEQ ID NO: 450988 - DNA, 25 bp, Artificial
  probe
  misc_feature (1)..(25): SEQ ID NO: 6844; WAN024BV9; Start 40; Stop 64
atgactgttgatgaagtaagttctt

SEQ ID NO: 450989 - DNA, 25 bp, Artificial
  probe
  misc_feature (1)..(25): SEQ ID NO: 6844; WAN024BV9; Start 39; Stop 63
tatgactgttgatgaagtaagttct

SEQ ID NO: 450990 - DNA, 25 bp, Artificial
  probe
  misc_feature (1)..(25): SEQ ID NO: 6844; WAN024BV9; Start 282; Stop 306
taaattagaacgcattgaacggaaa

SEQ ID NO: 450991 - DNA, 25 bp, Artificial
  probe
  misc_feature (1)..(25): SEQ ID NO: 6844; WAN024BV9; Start 281; Stop 305
ttaaattagaacgcattgaacggaa

SEQ ID NO: 450992 - DNA, 25 bp, Artificial
  probe
  misc_feature (1)..(25): SEQ ID NO: 6844; WAN024BV9; Start 280; Stop 304
attaaattagaacgcattgaacgga

SEQ ID NO: 450993 - DNA, 25 bp, Artificial
  probe
  misc_feature (1)..(25): SEQ ID NO: 6844; WAN024BV9; Start 44; Stop 68
ctgttgatgaagtaagttctttgct

SEQ ID NO: 450994 - DNA, 25 bp, Artificial
  probe
  misc_feature (1)..(25): SEQ ID NO: 6844; WAN024BV9; Start 45; Stop 69
tgttgatgaagtaagttctttgctt

SEQ ID NO: 450995 - DNA, 25 bp, Artificial
  probe
  misc_feature (1)..(25): SEQ ID NO: 6844; WAN024BV9; Start 279; Stop 303
aattaaattagaacgcattgaacgg

SEQ ID NO: 450996 - DNA, 25 bp, Artificial
  probe
  misc_feature (1)..(25): SEQ ID NO: 6844; WAN024BV9; Start 270; Stop 294
cgaggaagaaattaaattagaacgc

SEQ ID NO: 450997 - DNA, 25 bp, Artificial
  probe
  misc_feature (1)..(25): SEQ ID NO: 6844; WAN024BV9; Start 43; Stop 67
actgttgatgaagtaagttctttgc

SEQ ID NO: 450998 - DNA, 25 bp, Artificial
  probe
  misc_feature (1)..(25): SEQ ID NO: 6844; WAN024BV9; Start 269; Stop 293
ccgaggaagaaattaaattagaacg

SEQ ID NO: 450999 - DNA, 25 bp, Artificial
  probe
  misc_feature (1)..(25): SEQ ID NO: 6844; WAN024BV9; Start 89; Stop 113
caccacagatttatgaaatgttcgt

SEQ ID NO: 451000 - DNA, 25 bp, Artificial
  probe
  misc_feature (1)..(25): SEQ ID NO: 6844; WAN024BV9; Start 90; Stop 114
accacagatttatgaaatgttcgtt

SEQ ID NO: 451001 - DNA, 25 bp, Artificial
  probe
  misc_feature (1)..(25): SEQ ID NO: 6844; WAN024BV9; Start 38; Stop 62
atatgactgttgatgaagtaagttc

SEQ ID NO: 451002 - DNA, 25 bp, Artificial
  probe
  misc_feature (1)..(25): SEQ ID NO: 6844; WAN024BV9; Start 41; Stop 65
tgactgttgatgaagtaagttcttt

SEQ ID NO: 451003 - DNA, 25 bp, Artificial
  probe
  misc_feature (1)..(25): SEQ ID NO: 6844; WAN024BV9; Start 32; Stop 56
tgctaaatatgactgttgatgaagt

SEQ ID NO: 451004 - DNA, 25 bp, Artificial
  probe
  misc_feature (1)..(25): SEQ ID NO: 6844; WAN024BV9; Start 42; Stop 66
gactgttgatgaagtaagttctttg

SEQ ID NO: 451005 - DNA, 25 bp, Artificial
  probe
  misc_feature (1)..(25): SEQ ID NO: 6844; WAN024BV9; Start 271; Stop 295
gaggaagaaattaaattagaacgca

SEQ ID NO: 451006 - DNA, 25 bp, Artificial
  probe
  misc_feature (1)..(25): SEQ ID NO: 6844; WAN024BV9; Start 88; Stop 112
gcaccacagatttatgaaatgttcg

SEQ ID NO: 451007 - DNA, 25 bp, Artificial
  probe
  misc_feature (1)..(25): SEQ ID NO: 6844; WAN024BV9; Start 31; Stop 55
atgctaaatatgactgttgatgaag

SEQ ID NO: 451008 - DNA, 25 bp, Artificial
  probe
  misc_feature (1)..(25): SEQ ID NO: 6844; WAN024BV9; Start 278; Stop 302
aaattaaattagaacgcattgaacg

SEQ ID NO: 451009 - DNA, 25 bp, Artificial
  probe
  misc_feature (1)..(25): SEQ ID NO: 6844; WAN024BV9; Start 37; Stop 61
aatatgactgttgatgaagtaagtt

SEQ ID NO: 451010 - DNA, 25 bp, Artificial
  probe
  misc_feature (1)..(25): SEQ ID NO: 6844; WAN024BV9; Start 268; Stop 292
accgaggaagaaattaaattagaac

SEQ ID NO: 451011 - DNA, 25 bp, Artificial
  probe
  misc_feature (1)..(25): SEQ ID NO: 6844; WAN024BV9; Start 91; Stop 115
ccacagatttatgaaatgttcgtta

SEQ ID NO: 451012 - DNA, 25 bp, Artificial
  probe
  misc_feature (1)..(25): SEQ ID NO: 6844; WAN024BV9; Start 272; Stop 296
aggaagaaattaaattagaacgcat

SEQ ID NO: 451013 - DNA, 25 bp, Artificial
  probe
  misc_feature (1)..(25): SEQ ID NO: 6844; WAN024BV9; Start 30; Stop 54
aatgctaaatatgactgttgatgaa

SEQ ID NO: 451014 - DNA, 25 bp, Artificial
  probe
  misc_feature (1)..(25): SEQ ID NO: 6844; WAN024BV9; Start 29; Stop 53
aaatgctaaatatgactgttgatga

SEQ ID NO: 451015 - DNA, 25 bp, Artificial
  probe
  misc_feature (1)..(25): SEQ ID NO: 6844; WAN024BV9; Start 75; Stop 99
atttaaagggaatgcaccacagatt

SEQ ID NO: 451016 - DNA, 25 bp, Artificial
  probe
  misc_feature (1)..(25): SEQ ID NO: 6844; WAN024BV9; Start 46; Stop 70
gttgatgaagtaagttctttgctta

SEQ ID NO: 451017 - DNA, 25 bp, Artificial
  probe
  misc_feature (1)..(25): SEQ ID NO: 6844; WAN024BV9; Start 78; Stop 102
taaagggaatgcaccacagatttat

SEQ ID NO: 451018 - DNA, 25 bp, Artificial
  probe
  misc_feature (1)..(25): SEQ ID NO: 6844; WAN024BV9; Start 77; Stop 101
ttaaagggaatgcaccacagattta

SEQ ID NO: 451019 - DNA, 25 bp, Artificial
  probe
  misc_feature (1)..(25): SEQ ID NO: 6844; WAN024BV9; Start 76; Stop 100
tttaaagggaatgcaccacagattt

SEQ ID NO: 451020 - DNA, 25 bp, Artificial
  probe
  misc_feature (1)..(25): SEQ ID NO: 6844; WAN024BV9; Start 87; Stop 111
tgcaccacagatttatgaaatgttc

SEQ ID NO: 451021 - DNA, 25 bp, Artificial
  probe
  misc_feature (1)..(25): SEQ ID NO: 6845; WAN024BG2; Start 1; Stop 25
atggatgatgaagcaagtaaacaat

SEQ ID NO: 451022 - DNA, 25 bp, Artificial
  probe
  misc_feature (1)..(25): SEQ ID NO: 6845; WAN024BG2; Start 9; Stop 33
tgaagcaagtaaacaattaagcgat

SEQ ID NO: 451023 - DNA, 25 bp, Artificial
  probe
  misc_feature (1)..(25): SEQ ID NO: 6845; WAN024BG2; Start 8; Stop 32
atgaagcaagtaaacaattaagcga

SEQ ID NO: 451024 - DNA, 25 bp, Artificial
  probe
  misc_feature (1)..(25): SEQ ID NO: 6845; WAN024BG2; Start 12; Stop 36
agcaagtaaacaattaagcgatagc

SEQ ID NO: 451025 - DNA, 25 bp, Artificial
  probe
  misc_feature (1)..(25): SEQ ID NO: 6845; WAN024BG2; Start 7; Stop 31
gatgaagcaagtaaacaattaagcg

SEQ ID NO: 451026 - DNA, 25 bp, Artificial
  probe
  misc_feature (1)..(25): SEQ ID NO: 6845; WAN024BG2; Start 2; Stop 26
tggatgatgaagcaagtaaacaatt

SEQ ID NO: 451027 - DNA, 25 bp, Artificial
  probe
  misc_feature (1)..(25): SEQ ID NO: 6845; WAN024BG2; Start 14; Stop 38
caagtaaacaattaagcgatagccg

SEQ ID NO: 451028 - DNA, 25 bp, Artificial
  probe
  misc_feature (1)..(25): SEQ ID NO: 6845; WAN024BG2; Start 15; Stop 39
aagtaaacaattaagcgatagccgt

SEQ ID NO: 451029 - DNA, 25 bp, Artificial
  probe
  misc_feature (1)..(25): SEQ ID NO: 6845; WAN024BG2; Start 13; Stop 37
gcaagtaaacaattaagcgatagcc

SEQ ID NO: 451030 - DNA, 25 bp, Artificial
  probe
  misc_feature (1)..(25): SEQ ID NO: 6845; WAN024BG2; Start 6; Stop 30
tgatgaagcaagtaaacaattaagc

SEQ ID NO: 451031 - DNA, 25 bp, Artificial
  probe
  misc_feature (1)..(25): SEQ ID NO: 6845; WAN024BG2; Start 16; Stop 40
agtaaacaattaagcgatagccgtt

SEQ ID NO: 451032 - DNA, 25 bp, Artificial
  probe
  misc_feature (1)..(25): SEQ ID NO: 6845; WAN024BG2; Start 23; Stop 47
aattaagcgatagccgtttcaagag

SEQ ID NO: 451033 - DNA, 25 bp, Artificial
  probe
  misc_feature (1)..(25): SEQ ID NO: 6845; WAN024BG2; Start 11; Stop 35
aagcaagtaaacaattaagcgatag

SEQ ID NO: 451034 - DNA, 25 bp, Artificial
  probe
  misc_feature (1)..(25): SEQ ID NO: 6845; WAN024BG2; Start 10; Stop 34
gaagcaagtaaacaattaagcgata

SEQ ID NO: 451035 - DNA, 25 bp, Artificial
  probe
  misc_feature (1)..(25): SEQ ID NO: 6845; WAN024BG2; Start 22; Stop 46
caattaagcgatagccgtttcaaga

SEQ ID NO: 451036 - DNA, 25 bp, Artificial
  probe
  misc_feature (1)..(25): SEQ ID NO: 6845; WAN024BG2; Start 20; Stop 44
aacaattaagcgatagccgtttcaa

SEQ ID NO: 451037 - DNA, 25 bp, Artificial
  probe
  misc_feature (1)..(25): SEQ ID NO: 6845; WAN024BG2; Start 3; Stop 27
ggatgatgaagcaagtaaacaatta

SEQ ID NO: 451038 - DNA, 25 bp, Artificial
  probe
  misc_feature (1)..(25): SEQ ID NO: 6845; WAN024BG2; Start 21; Stop 45
acaattaagcgatagccgtttcaag

SEQ ID NO: 451039 - DNA, 25 bp, Artificial
  probe
  misc_feature (1)..(25): SEQ ID NO: 6845; WAN024BG2; Start 18; Stop 42
taaacaattaagcgatagccgtttc

SEQ ID NO: 451040 - DNA, 25 bp, Artificial
  probe
  misc_feature (1)..(25): SEQ ID NO: 6845; WAN024BG2; Start 17; Stop 41
gtaaacaattaagcgatagccgttt

SEQ ID NO: 451041 - DNA, 25 bp, Artificial
  probe
  misc_feature (1)..(25): SEQ ID NO: 6845; WAN024BG2; Start 19; Stop 43
aaacaattaagcgatagccgtttca

SEQ ID NO: 451042 - DNA, 25 bp, Artificial
  probe
  misc_feature (1)..(25): SEQ ID NO: 6845; WAN024BG2; Start 5; Stop 29
atgatgaagcaagtaaacaattaag

SEQ ID NO: 451043 - DNA, 25 bp, Artificial
  probe
  misc_feature (1)..(25): SEQ ID NO: 6845; WAN024BG2; Start 4; Stop 28
gatgatgaagcaagtaaacaattaa

SEQ ID NO: 451044 - DNA, 25 bp, Artificial
  probe
  misc_feature (1)..(25): SEQ ID NO: 6845; WAN024BG2; Start 24; Stop 48
attaagcgatagccgtttcaagagc

SEQ ID NO: 451045 - DNA, 25 bp, Artificial
  probe
  misc_feature (1)..(25): SEQ ID NO: 6845; WAN024BG2; Start 39; Stop 63
tttcaagagccttgtaggtgttcag

SEQ ID NO: 451046 - DNA, 25 bp, Artificial
  probe
  misc_feature (1)..(25): SEQ ID NO: 6845; WAN024BG2; Start 38; Stop 62
gtttcaagagccttgtaggtgttca

SEQ ID NO: 451047 - DNA, 25 bp, Artificial
  probe
  misc_feature (1)..(25): SEQ ID NO: 6845; WAN024BG2; Start 31; Stop 55
gatagccgtttcaagagccttgtag

SEQ ID NO: 451048 - DNA, 25 bp, Artificial
  probe
  misc_feature (1)..(25): SEQ ID NO: 6845; WAN024BG2; Start 37; Stop 61
cgtttcaagagccttgtaggtgttc

SEQ ID NO: 451049 - DNA, 25 bp, Artificial
  probe
  misc_feature (1)..(25): SEQ ID NO: 6845; WAN024BG2; Start 40; Stop 64
ttcaagagccttgtaggtgttcagc

SEQ ID NO: 451050 - DNA, 25 bp, Artificial
  probe
  misc_feature (1)..(25): SEQ ID NO: 6845; WAN024BG2; Start 32; Stop 56
atagccgtttcaagagccttgtagg

SEQ ID NO: 451051 - DNA, 25 bp, Artificial
  probe
  misc_feature (1)..(25): SEQ ID NO: 6845; WAN024BG2; Start 30; Stop 54
cgatagccgtttcaagagccttgta

SEQ ID NO: 451052 - DNA, 25 bp, Artificial
  probe
  misc_feature (1)..(25): SEQ ID NO: 6846; WAN024BMA; Start 58; Stop 82
aattggaatttggttggtaaagttt

SEQ ID NO: 451053 - DNA, 25 bp, Artificial
  probe
  misc_feature (1)..(25): SEQ ID NO: 6846; WAN024BMA; Start 57; Stop 81
aaattggaatttggttggtaaagtt

SEQ ID NO: 451054 - DNA, 25 bp, Artificial
  probe
  misc_feature (1)..(25): SEQ ID NO: 6846; WAN024BMA; Start 51; Stop 75
ggtattaaattggaatttggttggt

SEQ ID NO: 451055 - DNA, 25 bp, Artificial
  probe
  misc_feature (1)..(25): SEQ ID NO: 6846; WAN024BMA; Start 50; Stop 74
tggtattaaattggaatttggttgg

SEQ ID NO: 451056 - DNA, 25 bp, Artificial
  probe
  misc_feature (1)..(25): SEQ ID NO: 6846; WAN024BMA; Start 56; Stop 80
taaattggaatttggttggtaaagt

SEQ ID NO: 451057 - DNA, 25 bp, Artificial
  probe
  misc_feature (1)..(25): SEQ ID NO: 6846; WAN024BMA; Start 59; Stop 83
attggaatttggttggtaaagtttt

SEQ ID NO: 451058 - DNA, 25 bp, Artificial
  probe
  misc_feature (1)..(25): SEQ ID NO: 6846; WAN024BMA; Start 55; Stop 79
ttaaattggaatttggttggtaaag

SEQ ID NO: 451059 - DNA, 25 bp, Artificial
  probe
  misc_feature (1)..(25): SEQ ID NO: 6846; WAN024BMA; Start 49; Stop 73
ttggtattaaattggaatttggttg

SEQ ID NO: 451060 - DNA, 25 bp, Artificial
  probe
  misc_feature (1)..(25): SEQ ID NO: 6846; WAN024BMA; Start 60; Stop 84
ttggaatttggttggtaaagtttta

SEQ ID NO: 451061 - DNA, 25 bp, Artificial
  probe
  misc_feature (1)..(25): SEQ ID NO: 6846; WAN024BMA; Start 61; Stop 85
tggaatttggttggtaaagttttat

SEQ ID NO: 451062 - DNA, 25 bp, Artificial
  probe
  misc_feature (1)..(25): SEQ ID NO: 6846; WAN024BMA; Start 54; Stop 78
attaaattggaatttggttggtaaa

SEQ ID NO: 451063 - DNA, 25 bp, Artificial
  probe
  misc_feature (1)..(25): SEQ ID NO: 6846; WAN024BMA; Start 52; Stop 76
gtattaaattggaatttggttggta

SEQ ID NO: 451064 - DNA, 25 bp, Artificial
  probe
  misc_feature (1)..(25): SEQ ID NO: 6846; WAN024BMA; Start 62; Stop 86
ggaatttggttggtaaagttttatt

SEQ ID NO: 451065 - DNA, 25 bp, Artificial
  probe
  misc_feature (1)..(25): SEQ ID NO: 6846; WAN024BMA; Start 48; Stop 72
attggtattaaattggaatttggtt

SEQ ID NO: 451066 - DNA, 25 bp, Artificial
  probe
  misc_feature (1)..(25): SEQ ID NO: 6846; WAN024BMA; Start 53; Stop 77
tattaaattggaatttggttggtaa

SEQ ID NO: 451067 - DNA, 25 bp, Artificial
  probe
  misc_feature (1)..(25): SEQ ID NO: 6846; WAN024BMA; Start 47; Stop 71
tattggtattaaattggaatttggt

SEQ ID NO: 451068 - DNA, 25 bp, Artificial
  probe
  misc_feature (1)..(25): SEQ ID NO: 6846; WAN024BMA; Start 68; Stop 92
tggttggtaaagttttattttatgt

SEQ ID NO: 451069 - DNA, 25 bp, Artificial
  probe
  misc_feature (1)..(25): SEQ ID NO: 6846; WAN024BMA; Start 29; Stop 53
agatgtttggaattattttattggt

SEQ ID NO: 451070 - DNA, 25 bp, Artificial
  probe
  misc_feature (1)..(25): SEQ ID NO: 6846; WAN024BMA; Start 63; Stop 87
gaatttggttggtaaagttttattt

SEQ ID NO: 451071 - DNA, 25 bp, Artificial
  probe
  misc_feature (1)..(25): SEQ ID NO: 6847; WAN024BWR; Start 151; Stop 175
attgtaggtctagcactatgttcac

SEQ ID NO: 451072 - DNA, 25 bp, Artificial
  probe
  misc_feature (1)..(25): SEQ ID NO: 6847; WAN024BWR; Start 150; Stop 174
aattgtaggtctagcactatgttca

SEQ ID NO: 451073 - DNA, 25 bp, Artificial
  probe
  misc_feature (1)..(25): SEQ ID NO: 6847; WAN024BWR; Start 152; Stop 176
ttgtaggtctagcactatgttcact

SEQ ID NO: 451074 - DNA, 25 bp, Artificial
  probe
  misc_feature (1)..(25): SEQ ID NO: 6847; WAN024BWR; Start 158; Stop 182
gtctagcactatgttcactcagatt

SEQ ID NO: 451075 - DNA, 25 bp, Artificial
  probe
  misc_feature (1)..(25): SEQ ID NO: 6847; WAN024BWR; Start 129; Stop 153
tactgaagttgaaggtgacacaatt

SEQ ID NO: 451076 - DNA, 25 bp, Artificial
  probe
  misc_feature (1)..(25): SEQ ID NO: 6847; WAN024BWR; Start 128; Stop 152
ttactgaagttgaaggtgacacaat

SEQ ID NO: 451077 - DNA, 25 bp, Artificial
  probe
  misc_feature (1)..(25): SEQ ID NO: 6847; WAN024BWR; Start 155; Stop 179
taggtctagcactatgttcactcag

SEQ ID NO: 451078 - DNA, 25 bp, Artificial
  probe
  misc_feature (1)..(25): SEQ ID NO: 6847; WAN024BWR; Start 154; Stop 178
gtaggtctagcactatgttcactca

SEQ ID NO: 451079 - DNA, 25 bp, Artificial
  probe
  misc_feature (1)..(25): SEQ ID NO: 6847; WAN024BWR; Start 153; Stop 177
tgtaggtctagcactatgttcactc

SEQ ID NO: 451080 - DNA, 25 bp, Artificial
  probe
  misc_feature (1)..(25): SEQ ID NO: 6847; WAN024BWR; Start 157; Stop 181
ggtctagcactatgttcactcagat

SEQ ID NO: 451081 - DNA, 25 bp, Artificial
  probe
  misc_feature (1)..(25): SEQ ID NO: 6847; WAN024BWR; Start 206; Stop 230
atagtcctgttggattcttagaagg

SEQ ID NO: 451082 - DNA, 25 bp, Artificial
  probe
  misc_feature (1)..(25): SEQ ID NO: 6847; WAN024BWR; Start 223; Stop 247
ttagaagggattattgttgacgagg

SEQ ID NO: 451083 - DNA, 25 bp, Artificial
  probe
  misc_feature (1)..(25): SEQ ID NO: 6847; WAN024BWR; Start 221; Stop 245
tcttagaagggattattgttgacga

SEQ ID NO: 451084 - DNA, 25 bp, Artificial
  probe
  misc_feature (1)..(25): SEQ ID NO: 6847; WAN024BWR; Start 156; Stop 180
aggtctagcactatgttcactcaga

SEQ ID NO: 451085 - DNA, 25 bp, Artificial
  probe
  misc_feature (1)..(25): SEQ ID NO: 6847; WAN024BWR; Start 222; Stop 246
cttagaagggattattgttgacgag

SEQ ID NO: 451086 - DNA, 25 bp, Artificial
  probe
  misc_feature (1)..(25): SEQ ID NO: 6847; WAN024BWR; Start 226; Stop 250
gaagggattattgttgacgaggaat

SEQ ID NO: 451087 - DNA, 25 bp, Artificial
  probe
  misc_feature (1)..(25): SEQ ID NO: 6847; WAN024BWR; Start 224; Stop 248
tagaagggattattgttgacgagga

SEQ ID NO: 451088 - DNA, 25 bp, Artificial
  probe
  misc_feature (1)..(25): SEQ ID NO: 6847; WAN024BWR; Start 124; Stop 148
atctttactgaagttgaaggtgaca

SEQ ID NO: 451089 - DNA, 25 bp, Artificial
  probe
  misc_feature (1)..(25): SEQ ID NO: 6847; WAN024BWR; Start 227; Stop 251
aagggattattgttgacgaggaata

SEQ ID NO: 451090 - DNA, 25 bp, Artificial
  probe
  misc_feature (1)..(25): SEQ ID NO: 6847; WAN024BWR; Start 228; Stop 252
agggattattgttgacgaggaatat

SEQ ID NO: 451091 - DNA, 25 bp, Artificial
  probe
  misc_feature (1)..(25): SEQ ID NO: 6847; WAN024BWR; Start 229; Stop 253
gggattattgttgacgaggaatatc

SEQ ID NO: 451092 - DNA, 25 bp, Artificial
  probe
  misc_feature (1)..(25): SEQ ID NO: 6847; WAN024BWR; Start 160; Stop 184
ctagcactatgttcactcagatttg

SEQ ID NO: 451093 - DNA, 25 bp, Artificial
  probe
  misc_feature (1)..(25): SEQ ID NO: 6847; WAN024BWR; Start 123; Stop 147
aatctttactgaagttgaaggtgac

SEQ ID NO: 451094 - DNA, 25 bp, Artificial
  probe
  misc_feature (1)..(25): SEQ ID NO: 6847; WAN024BWR; Start 121; Stop 145
gcaatctttactgaagttgaaggtg

SEQ ID NO: 451095 - DNA, 25 bp, Artificial
  probe
  misc_feature (1)..(25): SEQ ID NO: 6847; WAN024BWR; Start 230; Stop 254
ggattattgttgacgaggaatatcg

SEQ ID NO: 451096 - DNA, 25 bp, Artificial
  probe
  misc_feature (1)..(25): SEQ ID NO: 6847; WAN024BWR; Start 162; Stop 186
agcactatgttcactcagatttgat

SEQ ID NO: 451097 - DNA, 25 bp, Artificial
  probe
  misc_feature (1)..(25): SEQ ID NO: 6847; WAN024BWR; Start 161; Stop 185
tagcactatgttcactcagatttga

SEQ ID NO: 451098 - DNA, 25 bp, Artificial
  probe
  misc_feature (1)..(25): SEQ ID NO: 6847; WAN024BWR; Start 163; Stop 187
gcactatgttcactcagatttgatt

SEQ ID NO: 451099 - DNA, 25 bp, Artificial
  probe
  misc_feature (1)..(25): SEQ ID NO: 6847; WAN024BWR; Start 122; Stop 146
caatctttactgaagttgaaggtga

SEQ ID NO: 451100 - DNA, 25 bp, Artificial
  probe
  misc_feature (1)..(25): SEQ ID NO: 6847; WAN024BWR; Start 125; Stop 149
tctttactgaagttgaaggtgacac

SEQ ID NO: 451101 - DNA, 25 bp, Artificial
  probe
  misc_feature (1)..(25): SEQ ID NO: 6847; WAN024BWR; Start 333; Stop 357
tgactgtactttaacgaatacggat

SEQ ID NO: 451102 - DNA, 25 bp, Artificial
  probe
  misc_feature (1)..(25): SEQ ID NO: 6847; WAN024BWR; Start 159; Stop 183
tctagcactatgttcactcagattt

SEQ ID NO: 451103 - DNA, 25 bp, Artificial
  probe
  misc_feature (1)..(25): SEQ ID NO: 6847; WAN024BWR; Start 225; Stop 249
agaagggattattgttgacgaggaa

SEQ ID NO: 451104 - DNA, 25 bp, Artificial
  probe
  misc_feature (1)..(25): SEQ ID NO: 6848; WAN024BOP; Start 947; Stop 971
tactaagtgaaggagagattgatgc

SEQ ID NO: 451105 - DNA, 25 bp, Artificial
  probe
  misc_feature (1)..(25): SEQ ID NO: 6848; WAN024BOP; Start 697; Stop 721
tcggaacacaattatatgatggact

SEQ ID NO: 451106 - DNA, 25 bp, Artificial
  probe
  misc_feature (1)..(25): SEQ ID NO: 6848; WAN024BOP; Start 637; Stop 661
tgtgcgaagtctaatcatccaatac

SEQ ID NO: 451107 - DNA, 25 bp, Artificial
  probe
  misc_feature (1)..(25): SEQ ID NO: 6848; WAN024BOP; Start 695; Stop 719
ggtcggaacacaattatatgatgga

SEQ ID NO: 451108 - DNA, 25 bp, Artificial
  probe
  misc_feature (1)..(25): SEQ ID NO: 6848; WAN024BOP; Start 261; Stop 285
tagtaaggtgtggatattgtggtta

SEQ ID NO: 451109 - DNA, 25 bp, Artificial
  probe
  misc_feature (1)..(25): SEQ ID NO: 6848; WAN024BOP; Start 694; Stop 718
tggtcggaacacaattatatgatgg

SEQ ID NO: 451110 - DNA, 25 bp, Artificial
  probe
  misc_feature (1)..(25): SEQ ID NO: 6848; WAN024BOP; Start 260; Stop 284
ctagtaaggtgtggatattgtggtt

SEQ ID NO: 451111 - DNA, 25 bp, Artificial
  probe
  misc_feature (1)..(25): SEQ ID NO: 6848; WAN024BOP; Start 786; Stop 810
gattccattctctagttctccttcc

SEQ ID NO: 451112 - DNA, 25 bp, Artificial
  probe
  misc_feature (1)..(25): SEQ ID NO: 6848; WAN024BOP; Start 784; Stop 808
gtgattccattctctagttctcctt

SEQ ID NO: 451113 - DNA, 25 bp, Artificial
  probe
  misc_feature (1)..(25): SEQ ID NO: 6848; WAN024BOP; Start 782; Stop 806
aagtgattccattctctagttctcc

SEQ ID NO: 451114 - DNA, 25 bp, Artificial
  probe
  misc_feature (1)..(25): SEQ ID NO: 6848; WAN024BOP; Start 258; Stop 282
ttctagtaaggtgtggatattgtgg

SEQ ID NO: 451115 - DNA, 25 bp, Artificial
  probe
  misc_feature (1)..(25): SEQ ID NO: 6848; WAN024BOP; Start 783; Stop 807
agtgattccattctctagttctcct

SEQ ID NO: 451116 - DNA, 25 bp, Artificial
  probe
  misc_feature (1)..(25): SEQ ID NO: 6848; WAN024BOP; Start 666; Stop 690
tcttaccaaggagttgttgtatcaa

SEQ ID NO: 451117 - DNA, 25 bp, Artificial
  probe
  misc_feature (1)..(25): SEQ ID NO: 6848; WAN024BOP; Start 665; Stop 689
ttcttaccaaggagttgttgtatca

SEQ ID NO: 451118 - DNA, 25 bp, Artificial
  probe
  misc_feature (1)..(25): SEQ ID NO: 6848; WAN024BOP; Start 663; Stop 687
tgttcttaccaaggagttgttgtat

SEQ ID NO: 451119 - DNA, 25 bp, Artificial
  probe
  misc_feature (1)..(25): SEQ ID NO: 6848; WAN024BOP; Start 662; Stop 686
ttgttcttaccaaggagttgttgta

SEQ ID NO: 451120 - DNA, 25 bp, Artificial
  probe
  misc_feature (1)..(25): SEQ ID NO: 6848; WAN024BOP; Start 636; Stop 660
ttgtgcgaagtctaatcatccaata

SEQ ID NO: 451121 - DNA, 25 bp, Artificial
  probe
  misc_feature (1)..(25): SEQ ID NO: 6848; WAN024BOP; Start 785; Stop 809
tgattccattctctagttctccttc

SEQ ID NO: 451122 - DNA, 25 bp, Artificial
  probe
  misc_feature (1)..(25): SEQ ID NO: 6848; WAN024BOP; Start 664; Stop 688
gttcttaccaaggagttgttgtatc

SEQ ID NO: 451123 - DNA, 25 bp, Artificial
  probe
  misc_feature (1)..(25): SEQ ID NO: 6848; WAN024BOP; Start 259; Stop 283
tctagtaaggtgtggatattgtggt

SEQ ID NO: 451124 - DNA, 25 bp, Artificial
  probe
  misc_feature (1)..(25): SEQ ID NO: 6848; WAN024BOP; Start 693; Stop 717
ttggtcggaacacaattatatgatg

SEQ ID NO: 451125 - DNA, 25 bp, Artificial
  probe
  misc_feature (1)..(25): SEQ ID NO: 6848; WAN024BOP; Start 251; Stop 275
gtcaatcttctagtaaggtgtggat

SEQ ID NO: 451126 - DNA, 25 bp, Artificial
  probe
  misc_feature (1)..(25): SEQ ID NO: 6848; WAN024BOP; Start 667; Stop 691
cttaccaaggagttgttgtatcaat

SEQ ID NO: 451127 - DNA, 25 bp, Artificial
  probe
  misc_feature (1)..(25): SEQ ID NO: 6848; WAN024BOP; Start 638; Stop 662
gtgcgaagtctaatcatccaatact

SEQ ID NO: 451128 - DNA, 25 bp, Artificial
  probe
  misc_feature (1)..(25): SEQ ID NO: 6848; WAN024BOP; Start 698; Stop 722
cggaacacaattatatgatggacta

SEQ ID NO: 451129 - DNA, 25 bp, Artificial
  probe
  misc_feature (1)..(25): SEQ ID NO: 6848; WAN024BOP; Start 480; Stop 504
actgctaactctgtatggaggtatt

SEQ ID NO: 451130 - DNA, 25 bp, Artificial
  probe
  misc_feature (1)..(25): SEQ ID NO: 6848; WAN024BOP; Start 479; Stop 503
aactgctaactctgtatggaggtat

SEQ ID NO: 451131 - DNA, 25 bp, Artificial
  probe
  misc_feature (1)..(25): SEQ ID NO: 6848; WAN024BOP; Start 264; Stop 288
taaggtgtggatattgtggttacag

SEQ ID NO: 451132 - DNA, 25 bp, Artificial
  probe
  misc_feature (1)..(25): SEQ ID NO: 6848; WAN024BOP; Start 257; Stop 281
cttctagtaaggtgtggatattgtg

SEQ ID NO: 451133 - DNA, 25 bp, Artificial
  probe
  misc_feature (1)..(25): SEQ ID NO: 6848; WAN024BOP; Start 256; Stop 280
tcttctagtaaggtgtggatattgt

SEQ ID NO: 451134 - DNA, 25 bp, Artificial
  probe
  misc_feature (1)..(25): SEQ ID NO: 6848; WAN024BOP; Start 476; Stop 500
tagaactgctaactctgtatggagg

SEQ ID NO: 451135 - DNA, 25 bp, Artificial
  probe
  misc_feature (1)..(25): SEQ ID NO: 6848; WAN024BOP; Start 696; Stop 720
gtcggaacacaattatatgatggac

SEQ ID NO: 451136 - DNA, 25 bp, Artificial
  probe
  misc_feature (1)..(25): SEQ ID NO: 6848; WAN024BOP; Start 475; Stop 499
ttagaactgctaactctgtatggag

SEQ ID NO: 451137 - DNA, 25 bp, Artificial
  probe
  misc_feature (1)..(25): SEQ ID NO: 6849; WAN024DNZ; Start 2; Stop 26
tggattattatagcatgattgtgag

SEQ ID NO: 451138 - DNA, 25 bp, Artificial
  probe
  misc_feature (1)..(25): SEQ ID NO: 6849; WAN024DNZ; Start 3; Stop 27
ggattattatagcatgattgtgaga

SEQ ID NO: 451139 - DNA, 25 bp, Artificial
  probe
  misc_feature (1)..(25): SEQ ID NO: 6849; WAN024DNZ; Start 1; Stop 25
atggattattatagcatgattgtga

SEQ ID NO: 451140 - DNA, 25 bp, Artificial
  probe
  misc_feature (1)..(25): SEQ ID NO: 6849; WAN024DNZ; Start 29; Stop 53
ttttcaaggattttgtgaaagtttt

SEQ ID NO: 451141 - DNA, 25 bp, Artificial
  probe
  misc_feature (1)..(25): SEQ ID NO: 6850; WAN024BX5; Start 47; Stop 71
caaactgttcattttcaaaggaaga

SEQ ID NO: 451142 - DNA, 25 bp, Artificial
  probe
  misc_feature (1)..(25): SEQ ID NO: 6850; WAN024BX5; Start 46; Stop 70
tcaaactgttcattttcaaaggaag

SEQ ID NO: 451143 - DNA, 25 bp, Artificial
  probe
  misc_feature (1)..(25): SEQ ID NO: 6850; WAN024BX5; Start 44; Stop 68
aatcaaactgttcattttcaaagga

SEQ ID NO: 451144 - DNA, 25 bp, Artificial
  probe
  misc_feature (1)..(25): SEQ ID NO: 6850; WAN024BX5; Start 45; Stop 69
atcaaactgttcattttcaaaggaa

SEQ ID NO: 451145 - DNA, 25 bp, Artificial
  probe
  misc_feature (1)..(25): SEQ ID NO: 6850; WAN024BX5; Start 49; Stop 73
aactgttcattttcaaaggaagatt

SEQ ID NO: 451146 - DNA, 25 bp, Artificial
  probe
  misc_feature (1)..(25): SEQ ID NO: 6850; WAN024BX5; Start 48; Stop 72
aaactgttcattttcaaaggaagat

SEQ ID NO: 451147 - DNA, 25 bp, Artificial
  probe
  misc_feature (1)..(25): SEQ ID NO: 6850; WAN024BX5; Start 35; Stop 59
atgctagaaaatcaaactgttcatt

SEQ ID NO: 451148 - DNA, 25 bp, Artificial
  probe
  misc_feature (1)..(25): SEQ ID NO: 6850; WAN024BX5; Start 34; Stop 58
aatgctagaaaatcaaactgttcat

SEQ ID NO: 451149 - DNA, 25 bp, Artificial
  probe
  misc_feature (1)..(25): SEQ ID NO: 6850; WAN024BX5; Start 36; Stop 60
tgctagaaaatcaaactgttcattt

SEQ ID NO: 451150 - DNA, 25 bp, Artificial
  probe
  misc_feature (1)..(25): SEQ ID NO: 6850; WAN024BX5; Start 50; Stop 74
actgttcattttcaaaggaagatta

SEQ ID NO: 451151 - DNA, 25 bp, Artificial
  probe
  misc_feature (1)..(25): SEQ ID NO: 6850; WAN024BX5; Start 43; Stop 67
aaatcaaactgttcattttcaaagg

SEQ ID NO: 451152 - DNA, 25 bp, Artificial
  probe
  misc_feature (1)..(25): SEQ ID NO: 6850; WAN024BX5; Start 33; Stop 57
taatgctagaaaatcaaactgttca

SEQ ID NO: 451153 - DNA, 25 bp, Artificial
  probe
  misc_feature (1)..(25): SEQ ID NO: 6850; WAN024BX5; Start 51; Stop 75
ctgttcattttcaaaggaagattat

SEQ ID NO: 451154 - DNA, 25 bp, Artificial
  probe
  misc_feature (1)..(25): SEQ ID NO: 6850; WAN024BX5; Start 31; Stop 55
gataatgctagaaaatcaaactgtt

SEQ ID NO: 451155 - DNA, 25 bp, Artificial
  probe
  misc_feature (1)..(25): SEQ ID NO: 6850; WAN024BX5; Start 32; Stop 56
ataatgctagaaaatcaaactgttc

SEQ ID NO: 451156 - DNA, 25 bp, Artificial
  probe
  misc_feature (1)..(25): SEQ ID NO: 6850; WAN024BX5; Start 52; Stop 76
tgttcattttcaaaggaagattatt

SEQ ID NO: 451157 - DNA, 25 bp, Artificial
  probe
  misc_feature (1)..(25): SEQ ID NO: 6850; WAN024BX5; Start 30; Stop 54
tgataatgctagaaaatcaaactgt

SEQ ID NO: 451158 - DNA, 25 bp, Artificial
  probe
  misc_feature (1)..(25): SEQ ID NO: 6850; WAN024BX5; Start 37; Stop 61
gctagaaaatcaaactgttcatttt

SEQ ID NO: 451159 - DNA, 25 bp, Artificial
  probe
  misc_feature (1)..(25): SEQ ID NO: 6850; WAN024BX5; Start 29; Stop 53
atgataatgctagaaaatcaaactg

SEQ ID NO: 451160 - DNA, 25 bp, Artificial
  probe
  misc_feature (1)..(25): SEQ ID NO: 6850; WAN024BX5; Start 42; Stop 66
aaaatcaaactgttcattttcaaag

SEQ ID NO: 451161 - DNA, 25 bp, Artificial
  probe
  misc_feature (1)..(25): SEQ ID NO: 6850; WAN024BX5; Start 28; Stop 52
aatgataatgctagaaaatcaaact

SEQ ID NO: 451162 - DNA, 25 bp, Artificial
  probe
  misc_feature (1)..(25): SEQ ID NO: 6851; WAN024BPL; Start 29; Stop 53
gctatgctgaaattgtaaatgtcct

SEQ ID NO: 451163 - DNA, 25 bp, Artificial
  probe
  misc_feature (1)..(25): SEQ ID NO: 6851; WAN024BPL; Start 27; Stop 51
tcgctatgctgaaattgtaaatgtc

SEQ ID NO: 451164 - DNA, 25 bp, Artificial
  probe
  misc_feature (1)..(25): SEQ ID NO: 6851; WAN024BPL; Start 26; Stop 50
ctcgctatgctgaaattgtaaatgt

SEQ ID NO: 451165 - DNA, 25 bp, Artificial
  probe
  misc_feature (1)..(25): SEQ ID NO: 6851; WAN024BPL; Start 31; Stop 55
tatgctgaaattgtaaatgtcctcc

SEQ ID NO: 451166 - DNA, 25 bp, Artificial
  probe
  misc_feature (1)..(25): SEQ ID NO: 6851; WAN024BPL; Start 32; Stop 56
atgctgaaattgtaaatgtcctcca

SEQ ID NO: 451167 - DNA, 25 bp, Artificial
  probe
  misc_feature (1)..(25): SEQ ID NO: 6851; WAN024BPL; Start 25; Stop 49
cctcgctatgctgaaattgtaaatg

SEQ ID NO: 451168 - DNA, 25 bp, Artificial
  probe
  misc_feature (1)..(25): SEQ ID NO: 6851; WAN024BPL; Start 28; Stop 52
cgctatgctgaaattgtaaatgtcc

SEQ ID NO: 451169 - DNA, 25 bp, Artificial
  probe
  misc_feature (1)..(25): SEQ ID NO: 6851; WAN024BPL; Start 24; Stop 48
acctcgctatgctgaaattgtaaat

SEQ ID NO: 451170 - DNA, 25 bp, Artificial
  probe
  misc_feature (1)..(25): SEQ ID NO: 6851; WAN024BPL; Start 33; Stop 57
tgctgaaattgtaaatgtcctccaa

SEQ ID NO: 451171 - DNA, 25 bp, Artificial
  probe
  misc_feature (1)..(25): SEQ ID NO: 6851; WAN024BPL; Start 30; Stop 54
ctatgctgaaattgtaaatgtcctc

SEQ ID NO: 451172 - DNA, 25 bp, Artificial
  probe
  misc_feature (1)..(25): SEQ ID NO: 6851; WAN024BPL; Start 23; Stop 47
cacctcgctatgctgaaattgtaaa

SEQ ID NO: 451173 - DNA, 25 bp, Artificial
  probe
  misc_feature (1)..(25): SEQ ID NO: 6851; WAN024BPL; Start 34; Stop 58
gctgaaattgtaaatgtcctccaat

SEQ ID NO: 451174 - DNA, 25 bp, Artificial
  probe
  misc_feature (1)..(25): SEQ ID NO: 6851; WAN024BPL; Start 22; Stop 46
acacctcgctatgctgaaattgtaa

SEQ ID NO: 451175 - DNA, 25 bp, Artificial
  probe
  misc_feature (1)..(25): SEQ ID NO: 6851; WAN024BPL; Start 18; Stop 42
aatcacacctcgctatgctgaaatt

SEQ ID NO: 451176 - DNA, 25 bp, Artificial
  probe
  misc_feature (1)..(25): SEQ ID NO: 6851; WAN024BPL; Start 5; Stop 29
atttccttttcacaatcacacctcg

SEQ ID NO: 451177 - DNA, 25 bp, Artificial
  probe
  misc_feature (1)..(25): SEQ ID NO: 6851; WAN024BPL; Start 21; Stop 45
cacacctcgctatgctgaaattgta

SEQ ID NO: 451178 - DNA, 25 bp, Artificial
  probe
  misc_feature (1)..(25): SEQ ID NO: 6851; WAN024BPL; Start 17; Stop 41
caatcacacctcgctatgctgaaat

SEQ ID NO: 451179 - DNA, 25 bp, Artificial
  probe
  misc_feature (1)..(25): SEQ ID NO: 6851; WAN024BPL; Start 19; Stop 43
atcacacctcgctatgctgaaattg

SEQ ID NO: 451180 - DNA, 25 bp, Artificial
  probe
  misc_feature (1)..(25): SEQ ID NO: 6851; WAN024BPL; Start 10; Stop 34
cttttcacaatcacacctcgctatg

SEQ ID NO: 451181 - DNA, 25 bp, Artificial
  probe
  misc_feature (1)..(25): SEQ ID NO: 6851; WAN024BPL; Start 1; Stop 25
atggatttccttttcacaatcacac

SEQ ID NO: 451182 - DNA, 25 bp, Artificial
  probe
  misc_feature (1)..(25): SEQ ID NO: 6851; WAN024BPL; Start 4; Stop 28
gatttccttttcacaatcacacctc

SEQ ID NO: 451183 - DNA, 25 bp, Artificial
  probe
  misc_feature (1)..(25): SEQ ID NO: 6851; WAN024BPL; Start 3; Stop 27
ggatttccttttcacaatcacacct

SEQ ID NO: 451184 - DNA, 25 bp, Artificial
  probe
  misc_feature (1)..(25): SEQ ID NO: 6851; WAN024BPL; Start 2; Stop 26
tggatttccttttcacaatcacacc

SEQ ID NO: 451185 - DNA, 25 bp, Artificial
  probe
  misc_feature (1)..(25): SEQ ID NO: 6851; WAN024BPL; Start 9; Stop 33
ccttttcacaatcacacctcgctat

SEQ ID NO: 451186 - DNA, 25 bp, Artificial
  probe
  misc_feature (1)..(25): SEQ ID NO: 6851; WAN024BPL; Start 12; Stop 36
tttcacaatcacacctcgctatgct

SEQ ID NO: 451187 - DNA, 25 bp, Artificial
  probe
  misc_feature (1)..(25): SEQ ID NO: 6851; WAN024BPL; Start 16; Stop 40
acaatcacacctcgctatgctgaaa

SEQ ID NO: 451188 - DNA, 25 bp, Artificial
  probe
  misc_feature (1)..(25): SEQ ID NO: 6851; WAN024BPL; Start 20; Stop 44
tcacacctcgctatgctgaaattgt

SEQ ID NO: 451189 - DNA, 25 bp, Artificial
  probe
  misc_feature (1)..(25): SEQ ID NO: 6851; WAN024BPL; Start 45; Stop 69
aaatgtcctccaattttatctacaa

SEQ ID NO: 451190 - DNA, 25 bp, Artificial
  probe
  misc_feature (1)..(25): SEQ ID NO: 6851; WAN024BPL; Start 41; Stop 65
ttgtaaatgtcctccaattttatct

SEQ ID NO: 451191 - DNA, 25 bp, Artificial
  probe
  misc_feature (1)..(25): SEQ ID NO: 6851; WAN024BPL; Start 11; Stop 35
ttttcacaatcacacctcgctatgc

SEQ ID NO: 451192 - DNA, 25 bp, Artificial
  probe
  misc_feature (1)..(25): SEQ ID NO: 6851; WAN024BPL; Start 47; Stop 71
atgtcctccaattttatctacaatt

SEQ ID NO: 451193 - DNA, 25 bp, Artificial
  probe
  misc_feature (1)..(25): SEQ ID NO: 6851; WAN024BPL; Start 46; Stop 70
aatgtcctccaattttatctacaat

SEQ ID NO: 451194 - DNA, 25 bp, Artificial
  probe
  misc_feature (1)..(25): SEQ ID NO: 6851; WAN024BPL; Start 8; Stop 32
tccttttcacaatcacacctcgcta

SEQ ID NO: 451195 - DNA, 25 bp, Artificial
  probe
  misc_feature (1)..(25): SEQ ID NO: 6852; WAN024BLD; Start 84; Stop 108
tactaatggtcataccgcaactatc

SEQ ID NO: 451196 - DNA, 25 bp, Artificial
  probe
  misc_feature (1)..(25): SEQ ID NO: 6852; WAN024BLD; Start 83; Stop 107
ttactaatggtcataccgcaactat

SEQ ID NO: 451197 - DNA, 25 bp, Artificial
  probe
  misc_feature (1)..(25): SEQ ID NO: 6852; WAN024BLD; Start 82; Stop 106
gttactaatggtcataccgcaacta

SEQ ID NO: 451198 - DNA, 25 bp, Artificial
  probe
  misc_feature (1)..(25): SEQ ID NO: 6852; WAN024BLD; Start 80; Stop 104
aagttactaatggtcataccgcaac

SEQ ID NO: 451199 - DNA, 25 bp, Artificial
  probe
  misc_feature (1)..(25): SEQ ID NO: 6852; WAN024BLD; Start 20; Stop 44
aacctggaacagataatcagaaacc

SEQ ID NO: 451200 - DNA, 25 bp, Artificial
  probe
  misc_feature (1)..(25): SEQ ID NO: 6852; WAN024BLD; Start 19; Stop 43
aaacctggaacagataatcagaaac

SEQ ID NO: 451201 - DNA, 25 bp, Artificial
  probe
  misc_feature (1)..(25): SEQ ID NO: 6852; WAN024BLD; Start 85; Stop 109
actaatggtcataccgcaactatcg

SEQ ID NO: 451202 - DNA, 25 bp, Artificial
  probe
  misc_feature (1)..(25): SEQ ID NO: 6852; WAN024BLD; Start 23; Stop 47
ctggaacagataatcagaaacctgg

SEQ ID NO: 451203 - DNA, 25 bp, Artificial
  probe
  misc_feature (1)..(25): SEQ ID NO: 6852; WAN024BLD; Start 22; Stop 46
cctggaacagataatcagaaacctg

SEQ ID NO: 451204 - DNA, 25 bp, Artificial
  probe
  misc_feature (1)..(25): SEQ ID NO: 6852; WAN024BLD; Start 25; Stop 49
ggaacagataatcagaaacctggtc

SEQ ID NO: 451205 - DNA, 25 bp, Artificial
  probe
  misc_feature (1)..(25): SEQ ID NO: 6852; WAN024BLD; Start 21; Stop 45
acctggaacagataatcagaaacct

SEQ ID NO: 451206 - DNA, 25 bp, Artificial
  probe
  misc_feature (1)..(25): SEQ ID NO: 6852; WAN024BLD; Start 33; Stop 57
taatcagaaacctggtcgctatgta

SEQ ID NO: 451207 - DNA, 25 bp, Artificial
  probe
  misc_feature (1)..(25): SEQ ID NO: 6852; WAN024BLD; Start 31; Stop 55
gataatcagaaacctggtcgctatg

SEQ ID NO: 451208 - DNA, 25 bp, Artificial
  probe
  misc_feature (1)..(25): SEQ ID NO: 6852; WAN024BLD; Start 30; Stop 54
agataatcagaaacctggtcgctat

SEQ ID NO: 451209 - DNA, 25 bp, Artificial
  probe
  misc_feature (1)..(25): SEQ ID NO: 6852; WAN024BLD; Start 26; Stop 50
gaacagataatcagaaacctggtcg

SEQ ID NO: 451210 - DNA, 25 bp, Artificial
  probe
  misc_feature (1)..(25): SEQ ID NO: 6852; WAN024BLD; Start 79; Stop 103
aaagttactaatggtcataccgcaa

SEQ ID NO: 451211 - DNA, 25 bp, Artificial
  probe
  misc_feature (1)..(25): SEQ ID NO: 6852; WAN024BLD; Start 24; Stop 48
tggaacagataatcagaaacctggt

SEQ ID NO: 451212 - DNA, 25 bp, Artificial
  probe
  misc_feature (1)..(25): SEQ ID NO: 6852; WAN024BLD; Start 81; Stop 105
agttactaatggtcataccgcaact

SEQ ID NO: 451213 - DNA, 25 bp, Artificial
  probe
  misc_feature (1)..(25): SEQ ID NO: 6852; WAN024BLD; Start 32; Stop 56
ataatcagaaacctggtcgctatgt

SEQ ID NO: 451214 - DNA, 25 bp, Artificial
  probe
  misc_feature (1)..(25): SEQ ID NO: 6852; WAN024BLD; Start 29; Stop 53
cagataatcagaaacctggtcgcta

SEQ ID NO: 451215 - DNA, 25 bp, Artificial
  probe
  misc_feature (1)..(25): SEQ ID NO: 6852; WAN024BLD; Start 34; Stop 58
aatcagaaacctggtcgctatgtag

SEQ ID NO: 451216 - DNA, 25 bp, Artificial
  probe
  misc_feature (1)..(25): SEQ ID NO: 6852; WAN024BLD; Start 74; Stop 98
gcggaaaagttactaatggtcatac

SEQ ID NO: 451217 - DNA, 25 bp, Artificial
  probe
  misc_feature (1)..(25): SEQ ID NO: 6852; WAN024BLD; Start 73; Stop 97
ggcggaaaagttactaatggtcata

SEQ ID NO: 451218 - DNA, 25 bp, Artificial
  probe
  misc_feature (1)..(25): SEQ ID NO: 6852; WAN024BLD; Start 35; Stop 59
atcagaaacctggtcgctatgtaga

SEQ ID NO: 451219 - DNA, 25 bp, Artificial
  probe
  misc_feature (1)..(25): SEQ ID NO: 6852; WAN024BLD; Start 27; Stop 51
aacagataatcagaaacctggtcgc

SEQ ID NO: 451220 - DNA, 25 bp, Artificial
  probe
  misc_feature (1)..(25): SEQ ID NO: 6852; WAN024BLD; Start 18; Stop 42
aaaacctggaacagataatcagaaa

SEQ ID NO: 451221 - DNA, 25 bp, Artificial
  probe
  misc_feature (1)..(25): SEQ ID NO: 6852; WAN024BLD; Start 72; Stop 96
tggcggaaaagttactaatggtcat

SEQ ID NO: 451222 - DNA, 25 bp, Artificial
  probe
  misc_feature (1)..(25): SEQ ID NO: 6852; WAN024BLD; Start 77; Stop 101
gaaaagttactaatggtcataccgc

SEQ ID NO: 451223 - DNA, 25 bp, Artificial
  probe
  misc_feature (1)..(25): SEQ ID NO: 6852; WAN024BLD; Start 36; Stop 60
tcagaaacctggtcgctatgtagag

SEQ ID NO: 451224 - DNA, 25 bp, Artificial
  probe
  misc_feature (1)..(25): SEQ ID NO: 6852; WAN024BLD; Start 1; Stop 25
atggcaaatactccaataaaacctg

SEQ ID NO: 451225 - DNA, 25 bp, Artificial
  probe
  misc_feature (1)..(25): SEQ ID NO: 6852; WAN024BLD; Start 78; Stop 102
aaaagttactaatggtcataccgca

SEQ ID NO: 451226 - DNA, 25 bp, Artificial
  probe
  misc_feature (1)..(25): SEQ ID NO: 6852; WAN024BLD; Start 76; Stop 100
ggaaaagttactaatggtcataccg

SEQ ID NO: 451227 - DNA, 25 bp, Artificial
  probe
  misc_feature (1)..(25): SEQ ID NO: 6852; WAN024BLD; Start 75; Stop 99
cggaaaagttactaatggtcatacc

SEQ ID NO: 451228 - DNA, 25 bp, Artificial
  probe
  misc_feature (1)..(25): SEQ ID NO: 6853; WAN024BMV; Start 379; Stop 403
aaggaacaagaagcaacaattacat

SEQ ID NO: 451229 - DNA, 25 bp, Artificial
  probe
  misc_feature (1)..(25): SEQ ID NO: 6853; WAN024BMV; Start 378; Stop 402
taaggaacaagaagcaacaattaca

SEQ ID NO: 451230 - DNA, 25 bp, Artificial
  probe
  misc_feature (1)..(25): SEQ ID NO: 6853; WAN024BMV; Start 380; Stop 404
aggaacaagaagcaacaattacata

SEQ ID NO: 451231 - DNA, 25 bp, Artificial
  probe
  misc_feature (1)..(25): SEQ ID NO: 6853; WAN024BMV; Start 151; Stop 175
atagtctcctcaagaacaactcaag

SEQ ID NO: 451232 - DNA, 25 bp, Artificial
  probe
  misc_feature (1)..(25): SEQ ID NO: 6853; WAN024BMV; Start 152; Stop 176
tagtctcctcaagaacaactcaaga

SEQ ID NO: 451233 - DNA, 25 bp, Artificial
  probe
  misc_feature (1)..(25): SEQ ID NO: 6853; WAN024BMV; Start 150; Stop 174
tatagtctcctcaagaacaactcaa

SEQ ID NO: 451234 - DNA, 25 bp, Artificial
  probe
  misc_feature (1)..(25): SEQ ID NO: 6853; WAN024BMV; Start 146; Stop 170
cagatatagtctcctcaagaacaac

SEQ ID NO: 451235 - DNA, 25 bp, Artificial
  probe
  misc_feature (1)..(25): SEQ ID NO: 6853; WAN024BMV; Start 377; Stop 401
ttaaggaacaagaagcaacaattac

SEQ ID NO: 451236 - DNA, 25 bp, Artificial
  probe
  misc_feature (1)..(25): SEQ ID NO: 6853; WAN024BMV; Start 145; Stop 169
tcagatatagtctcctcaagaacaa

SEQ ID NO: 451237 - DNA, 25 bp, Artificial
  probe
  misc_feature (1)..(25): SEQ ID NO: 6853; WAN024BMV; Start 149; Stop 173
atatagtctcctcaagaacaactca

SEQ ID NO: 451238 - DNA, 25 bp, Artificial
  probe
  misc_feature (1)..(25): SEQ ID NO: 6853; WAN024BMV; Start 144; Stop 168
atcagatatagtctcctcaagaaca

SEQ ID NO: 451239 - DNA, 25 bp, Artificial
  probe
  misc_feature (1)..(25): SEQ ID NO: 6853; WAN024BMV; Start 381; Stop 405
ggaacaagaagcaacaattacatat

SEQ ID NO: 451240 - DNA, 25 bp, Artificial
  probe
  misc_feature (1)..(25): SEQ ID NO: 6853; WAN024BMV; Start 153; Stop 177
agtctcctcaagaacaactcaagaa

SEQ ID NO: 451241 - DNA, 25 bp, Artificial
  probe
  misc_feature (1)..(25): SEQ ID NO: 6853; WAN024BMV; Start 376; Stop 400
gttaaggaacaagaagcaacaatta

SEQ ID NO: 451242 - DNA, 25 bp, Artificial
  probe
  misc_feature (1)..(25): SEQ ID NO: 6853; WAN024BMV; Start 147; Stop 171
agatatagtctcctcaagaacaact

SEQ ID NO: 451243 - DNA, 25 bp, Artificial
  probe
  misc_feature (1)..(25): SEQ ID NO: 6853; WAN024BMV; Start 148; Stop 172
gatatagtctcctcaagaacaactc

SEQ ID NO: 451244 - DNA, 25 bp, Artificial
  probe
  misc_feature (1)..(25): SEQ ID NO: 6853; WAN024BMV; Start 341; Stop 365
ttgagtatgtagatgctgaagctag

SEQ ID NO: 451245 - DNA, 25 bp, Artificial
  probe
  misc_feature (1)..(25): SEQ ID NO: 6853; WAN024BMV; Start 343; Stop 367
gagtatgtagatgctgaagctagtc

SEQ ID NO: 451246 - DNA, 25 bp, Artificial
  probe
  misc_feature (1)..(25): SEQ ID NO: 6853; WAN024BMV; Start 342; Stop 366
tgagtatgtagatgctgaagctagt

SEQ ID NO: 451247 - DNA, 25 bp, Artificial
  probe
  misc_feature (1)..(25): SEQ ID NO: 6853; WAN024BMV; Start 344; Stop 368
agtatgtagatgctgaagctagtca

SEQ ID NO: 451248 - DNA, 25 bp, Artificial
  probe
  misc_feature (1)..(25): SEQ ID NO: 6853; WAN024BMV; Start 25; Stop 49
ggcagagtttacattaaagcatcaa

SEQ ID NO: 451249 - DNA, 25 bp, Artificial
  probe
  misc_feature (1)..(25): SEQ ID NO: 6853; WAN024BMV; Start 23; Stop 47
atggcagagtttacattaaagcatc

SEQ ID NO: 451250 - DNA, 25 bp, Artificial
  probe
  misc_feature (1)..(25): SEQ ID NO: 6853; WAN024BMV; Start 154; Stop 178
gtctcctcaagaacaactcaagaaa

SEQ ID NO: 451251 - DNA, 25 bp, Artificial
  probe
  misc_feature (1)..(25): SEQ ID NO: 6853; WAN024BMV; Start 338; Stop 362
aatttgagtatgtagatgctgaagc

SEQ ID NO: 451252 - DNA, 25 bp, Artificial
  probe
  misc_feature (1)..(25): SEQ ID NO: 6853; WAN024BMV; Start 111; Stop 135
tccaactgatattatagatagccaa

SEQ ID NO: 451253 - DNA, 25 bp, Artificial
  probe
  misc_feature (1)..(25): SEQ ID NO: 6853; WAN024BMV; Start 24; Stop 48
tggcagagtttacattaaagcatca

SEQ ID NO: 451254 - DNA, 25 bp, Artificial
  probe
  misc_feature (1)..(25): SEQ ID NO: 6853; WAN024BMV; Start 26; Stop 50
gcagagtttacattaaagcatcaaa

SEQ ID NO: 451255 - DNA, 25 bp, Artificial
  probe
  misc_feature (1)..(25): SEQ ID NO: 6853; WAN024BMV; Start 110; Stop 134
atccaactgatattatagatagcca

SEQ ID NO: 451256 - DNA, 25 bp, Artificial
  probe
  misc_feature (1)..(25): SEQ ID NO: 6853; WAN024BMV; Start 22; Stop 46
catggcagagtttacattaaagcat

SEQ ID NO: 451257 - DNA, 25 bp, Artificial
  probe
  misc_feature (1)..(25): SEQ ID NO: 6853; WAN024BMV; Start 143; Stop 167
tatcagatatagtctcctcaagaac

SEQ ID NO: 451258 - DNA, 25 bp, Artificial
  probe
  misc_feature (1)..(25): SEQ ID NO: 6853; WAN024BMV; Start 20; Stop 44
cacatggcagagtttacattaaagc

SEQ ID NO: 451259 - DNA, 25 bp, Artificial
  probe
  misc_feature (1)..(25): SEQ ID NO: 6853; WAN024BMV; Start 19; Stop 43
gcacatggcagagtttacattaaag

SEQ ID NO: 451260 - DNA, 25 bp, Artificial
  probe
  misc_feature (1)..(25): SEQ ID NO: 6853; WAN024BMV; Start 17; Stop 41
aagcacatggcagagtttacattaa

SEQ ID NO: 451261 - DNA, 25 bp, Artificial
  probe
  misc_feature (1)..(25): SEQ ID NO: 6854; WAN024DBV; Start 407; Stop 431
tccgacaagagatagagatagagaa

SEQ ID NO: 451262 - DNA, 25 bp, Artificial
  probe
  misc_feature (1)..(25): SEQ ID NO: 6854; WAN024DBV; Start 406; Stop 430
gtccgacaagagatagagatagaga

SEQ ID NO: 451263 - DNA, 25 bp, Artificial
  probe
  misc_feature (1)..(25): SEQ ID NO: 6854; WAN024DBV; Start 69; Stop 93
aaggttaaggagaatatctggagga

SEQ ID NO: 451264 - DNA, 25 bp, Artificial
  probe
  misc_feature (1)..(25): SEQ ID NO: 6854; WAN024DBV; Start 71; Stop 95
ggttaaggagaatatctggaggaga

SEQ ID NO: 451265 - DNA, 25 bp, Artificial
  probe
  misc_feature (1)..(25): SEQ ID NO: 6854; WAN024DBV; Start 70; Stop 94
aggttaaggagaatatctggaggag

SEQ ID NO: 451266 - DNA, 25 bp, Artificial
  probe
  misc_feature (1)..(25): SEQ ID NO: 6854; WAN024DBV; Start 213; Stop 237
aacagacgatgatgtaatggtaaca

SEQ ID NO: 451267 - DNA, 25 bp, Artificial
  probe
  misc_feature (1)..(25): SEQ ID NO: 6854; WAN024DBV; Start 216; Stop 240
agacgatgatgtaatggtaacagta

SEQ ID NO: 451268 - DNA, 25 bp, Artificial
  probe
  misc_feature (1)..(25): SEQ ID NO: 6854; WAN024DBV; Start 215; Stop 239
cagacgatgatgtaatggtaacagt

SEQ ID NO: 451269 - DNA, 25 bp, Artificial
  probe
  misc_feature (1)..(25): SEQ ID NO: 6854; WAN024DBV; Start 214; Stop 238
acagacgatgatgtaatggtaacag

SEQ ID NO: 451270 - DNA, 25 bp, Artificial
  probe
  misc_feature (1)..(25): SEQ ID NO: 6854; WAN024DBV; Start 251; Stop 275
tcaatcaaggcttattagaagttgt

SEQ ID NO: 451271 - DNA, 25 bp, Artificial
  probe
  misc_feature (1)..(25): SEQ ID NO: 6854; WAN024DBV; Start 217; Stop 241
gacgatgatgtaatggtaacagtaa

SEQ ID NO: 451272 - DNA, 25 bp, Artificial
  probe
  misc_feature (1)..(25): SEQ ID NO: 6854; WAN024DBV; Start 255; Stop 279
tcaaggcttattagaagttgtaaca

SEQ ID NO: 451273 - DNA, 25 bp, Artificial
  probe
  misc_feature (1)..(25): SEQ ID NO: 6854; WAN024DBV; Start 258; Stop 282
aggcttattagaagttgtaacagaa

SEQ ID NO: 451274 - DNA, 25 bp, Artificial
  probe
  misc_feature (1)..(25): SEQ ID NO: 6854; WAN024DBV; Start 257; Stop 281
aaggcttattagaagttgtaacaga

SEQ ID NO: 451275 - DNA, 25 bp, Artificial
  probe
  misc_feature (1)..(25): SEQ ID NO: 6854; WAN024DBV; Start 85; Stop 109
tctggaggagatacctatacgataa

SEQ ID NO: 451276 - DNA, 25 bp, Artificial
  probe
  misc_feature (1)..(25): SEQ ID NO: 6854; WAN024DBV; Start 256; Stop 280
caaggcttattagaagttgtaacag

SEQ ID NO: 451277 - DNA, 25 bp, Artificial
  probe
  misc_feature (1)..(25): SEQ ID NO: 6854; WAN024DBV; Start 404; Stop 428
atgtccgacaagagatagagataga

SEQ ID NO: 451278 - DNA, 25 bp, Artificial
  probe
  misc_feature (1)..(25): SEQ ID NO: 6854; WAN024DBV; Start 403; Stop 427
catgtccgacaagagatagagatag

SEQ ID NO: 451279 - DNA, 25 bp, Artificial
  probe
  misc_feature (1)..(25): SEQ ID NO: 6854; WAN024DBV; Start 405; Stop 429
tgtccgacaagagatagagatagag

SEQ ID NO: 451280 - DNA, 25 bp, Artificial
  probe
  misc_feature (1)..(25): SEQ ID NO: 6854; WAN024DBV; Start 87; Stop 111
tggaggagatacctatacgataatc

SEQ ID NO: 451281 - DNA, 25 bp, Artificial
  probe
  misc_feature (1)..(25): SEQ ID NO: 6854; WAN024DBV; Start 86; Stop 110
ctggaggagatacctatacgataat

SEQ ID NO: 451282 - DNA, 25 bp, Artificial
  probe
  misc_feature (1)..(25): SEQ ID NO: 6854; WAN024DBV; Start 402; Stop 426
ccatgtccgacaagagatagagata

SEQ ID NO: 451283 - DNA, 25 bp, Artificial
  probe
  misc_feature (1)..(25): SEQ ID NO: 6854; WAN024DBV; Start 198; Stop 222
actaaccatagatgaaacagacgat

SEQ ID NO: 451284 - DNA, 25 bp, Artificial
  probe
  misc_feature (1)..(25): SEQ ID NO: 6854; WAN024DBV; Start 197; Stop 221
cactaaccatagatgaaacagacga

SEQ ID NO: 451285 - DNA, 25 bp, Artificial
  probe
  misc_feature (1)..(25): SEQ ID NO: 6854; WAN024DBV; Start 195; Stop 219
agcactaaccatagatgaaacagac

SEQ ID NO: 451286 - DNA, 25 bp, Artificial
  probe
  misc_feature (1)..(25): SEQ ID NO: 6854; WAN024DBV; Start 250; Stop 274
atcaatcaaggcttattagaagttg

SEQ ID NO: 451287 - DNA, 25 bp, Artificial
  probe
  misc_feature (1)..(25): SEQ ID NO: 6854; WAN024DBV; Start 194; Stop 218
tagcactaaccatagatgaaacaga

SEQ ID NO: 451288 - DNA, 25 bp, Artificial
  probe
  misc_feature (1)..(25): SEQ ID NO: 6854; WAN024DBV; Start 201; Stop 225
aaccatagatgaaacagacgatgat

SEQ ID NO: 451289 - DNA, 25 bp, Artificial
  probe
  misc_feature (1)..(25): SEQ ID NO: 6854; WAN024DBV; Start 408; Stop 432
ccgacaagagatagagatagagaaa

SEQ ID NO: 451290 - DNA, 25 bp, Artificial
  probe
  misc_feature (1)..(25): SEQ ID NO: 6854; WAN024DBV; Start 200; Stop 224
taaccatagatgaaacagacgatga

SEQ ID NO: 451291 - DNA, 25 bp, Artificial
  probe
  misc_feature (1)..(25): SEQ ID NO: 6854; WAN024DBV; Start 199; Stop 223
ctaaccatagatgaaacagacgatg

SEQ ID NO: 451292 - DNA, 25 bp, Artificial
  probe
  misc_feature (1)..(25): SEQ ID NO: 6854; WAN024DBV; Start 202; Stop 226
accatagatgaaacagacgatgatg

SEQ ID NO: 451293 - DNA, 25 bp, Artificial
  probe
  misc_feature (1)..(25): SEQ ID NO: 6854; WAN024DBV; Start 68; Stop 92
aaaggttaaggagaatatctggagg

SEQ ID NO: 451294 - DNA, 25 bp, Artificial
  probe
  misc_feature (1)..(25): SEQ ID NO: 6855; WAN024AZ8; Start 36; Stop 60
tactgttgctgaagtcttctcatta

SEQ ID NO: 451295 - DNA, 25 bp, Artificial
  probe
  misc_feature (1)..(25): SEQ ID NO: 6855; WAN024AZ8; Start 20; Stop 44
ctcttaatattgcgactactgttgc

SEQ ID NO: 451296 - DNA, 25 bp, Artificial
  probe
  misc_feature (1)..(25): SEQ ID NO: 6855; WAN024AZ8; Start 19; Stop 43
gctcttaatattgcgactactgttg

SEQ ID NO: 451297 - DNA, 25 bp, Artificial
  probe
  misc_feature (1)..(25): SEQ ID NO: 6855; WAN024AZ8; Start 17; Stop 41
atgctcttaatattgcgactactgt

SEQ ID NO: 451298 - DNA, 25 bp, Artificial
  probe
  misc_feature (1)..(25): SEQ ID NO: 6855; WAN024AZ8; Start 22; Stop 46
cttaatattgcgactactgttgctg

SEQ ID NO: 451299 - DNA, 25 bp, Artificial
  probe
  misc_feature (1)..(25): SEQ ID NO: 6855; WAN024AZ8; Start 21; Stop 45
tcttaatattgcgactactgttgct

SEQ ID NO: 451300 - DNA, 25 bp, Artificial
  probe
  misc_feature (1)..(25): SEQ ID NO: 6855; WAN024AZ8; Start 18; Stop 42
tgctcttaatattgcgactactgtt

SEQ ID NO: 451301 - DNA, 25 bp, Artificial
  probe
  misc_feature (1)..(25): SEQ ID NO: 6855; WAN024AZ8; Start 24; Stop 48
taatattgcgactactgttgctgaa

SEQ ID NO: 451302 - DNA, 25 bp, Artificial
  probe
  misc_feature (1)..(25): SEQ ID NO: 6855; WAN024AZ8; Start 23; Stop 47
ttaatattgcgactactgttgctga

SEQ ID NO: 451303 - DNA, 25 bp, Artificial
  probe
  misc_feature (1)..(25): SEQ ID NO: 6855; WAN024AZ8; Start 37; Stop 61
actgttgctgaagtcttctcattag

SEQ ID NO: 451304 - DNA, 25 bp, Artificial
  probe
  misc_feature (1)..(25): SEQ ID NO: 6855; WAN024AZ8; Start 35; Stop 59
ctactgttgctgaagtcttctcatt

SEQ ID NO: 451305 - DNA, 25 bp, Artificial
  probe
  misc_feature (1)..(25): SEQ ID NO: 6855; WAN024AZ8; Start 16; Stop 40
aatgctcttaatattgcgactactg

SEQ ID NO: 451306 - DNA, 25 bp, Artificial
  probe
  misc_feature (1)..(25): SEQ ID NO: 6855; WAN024AZ8; Start 40; Stop 64
gttgctgaagtcttctcattaggag

SEQ ID NO: 451307 - DNA, 25 bp, Artificial
  probe
  misc_feature (1)..(25): SEQ ID NO: 6855; WAN024AZ8; Start 38; Stop 62
ctgttgctgaagtcttctcattagg

SEQ ID NO: 451308 - DNA, 25 bp, Artificial
  probe
  misc_feature (1)..(25): SEQ ID NO: 6855; WAN024AZ8; Start 39; Stop 63
tgttgctgaagtcttctcattagga

SEQ ID NO: 451309 - DNA, 25 bp, Artificial
  probe
  misc_feature (1)..(25): SEQ ID NO: 6855; WAN024AZ8; Start 34; Stop 58
actactgttgctgaagtcttctcat

SEQ ID NO: 451310 - DNA, 25 bp, Artificial
  probe
  misc_feature (1)..(25): SEQ ID NO: 6855; WAN024AZ8; Start 25; Stop 49
aatattgcgactactgttgctgaag

SEQ ID NO: 451311 - DNA, 25 bp, Artificial
  probe
  misc_feature (1)..(25): SEQ ID NO: 6855; WAN024AZ8; Start 26; Stop 50
atattgcgactactgttgctgaagt

SEQ ID NO: 451312 - DNA, 25 bp, Artificial
  probe
  misc_feature (1)..(25): SEQ ID NO: 6855; WAN024AZ8; Start 15; Stop 39
taatgctcttaatattgcgactact

SEQ ID NO: 451313 - DNA, 25 bp, Artificial
  probe
  misc_feature (1)..(25): SEQ ID NO: 6855; WAN024AZ8; Start 13; Stop 37
actaatgctcttaatattgcgacta

SEQ ID NO: 451314 - DNA, 25 bp, Artificial
  probe
  misc_feature (1)..(25): SEQ ID NO: 6855; WAN024AZ8; Start 12; Stop 36
tactaatgctcttaatattgcgact

SEQ ID NO: 451315 - DNA, 25 bp, Artificial
  probe
  misc_feature (1)..(25): SEQ ID NO: 6855; WAN024AZ8; Start 41; Stop 65
ttgctgaagtcttctcattaggagg

SEQ ID NO: 451316 - DNA, 25 bp, Artificial
  probe
  misc_feature (1)..(25): SEQ ID NO: 6855; WAN024AZ8; Start 44; Stop 68
ctgaagtcttctcattaggaggagc

SEQ ID NO: 451317 - DNA, 25 bp, Artificial
  probe
  misc_feature (1)..(25): SEQ ID NO: 6855; WAN024AZ8; Start 43; Stop 67
gctgaagtcttctcattaggaggag

SEQ ID NO: 451318 - DNA, 25 bp, Artificial
  probe
  misc_feature (1)..(25): SEQ ID NO: 6855; WAN024AZ8; Start 49; Stop 73
gtcttctcattaggaggagccattg

SEQ ID NO: 451319 - DNA, 25 bp, Artificial
  probe
  misc_feature (1)..(25): SEQ ID NO: 6855; WAN024AZ8; Start 14; Stop 38
ctaatgctcttaatattgcgactac

SEQ ID NO: 451320 - DNA, 25 bp, Artificial
  probe
  misc_feature (1)..(25): SEQ ID NO: 6855; WAN024AZ8; Start 48; Stop 72
agtcttctcattaggaggagccatt

SEQ ID NO: 451321 - DNA, 25 bp, Artificial
  probe
  misc_feature (1)..(25): SEQ ID NO: 6855; WAN024AZ8; Start 47; Stop 71
aagtcttctcattaggaggagccat

SEQ ID NO: 451322 - DNA, 25 bp, Artificial
  probe
  misc_feature (1)..(25): SEQ ID NO: 6855; WAN024AZ8; Start 11; Stop 35
ttactaatgctcttaatattgcgac

SEQ ID NO: 451323 - DNA, 25 bp, Artificial
  probe
  misc_feature (1)..(25): SEQ ID NO: 6855; WAN024AZ8; Start 42; Stop 66
tgctgaagtcttctcattaggagga

SEQ ID NO: 451324 - DNA, 25 bp, Artificial
  probe
  misc_feature (1)..(25): SEQ ID NO: 6855; WAN024AZ8; Start 46; Stop 70
gaagtcttctcattaggaggagcca

SEQ ID NO: 451325 - DNA, 25 bp, Artificial
  probe
  misc_feature (1)..(25): SEQ ID NO: 6855; WAN024AZ8; Start 45; Stop 69
tgaagtcttctcattaggaggagcc

SEQ ID NO: 451326 - DNA, 25 bp, Artificial
  probe
  misc_feature (1)..(25): SEQ ID NO: 6855; WAN024AZ8; Start 10; Stop 34
attactaatgctcttaatattgcga

SEQ ID NO: 451327 - DNA, 25 bp, Artificial
  probe
  misc_feature (1)..(25): SEQ ID NO: 6856; WAN024GNT; Start 135; Stop 159
ctcaatagactgctcatctccaata

SEQ ID NO: 451328 - DNA, 25 bp, Artificial
  probe
  misc_feature (1)..(25): SEQ ID NO: 6856; WAN024GNT; Start 138; Stop 162
aatagactgctcatctccaatatca

SEQ ID NO: 451329 - DNA, 25 bp, Artificial
  probe
  misc_feature (1)..(25): SEQ ID NO: 6856; WAN024GNT; Start 136; Stop 160
tcaatagactgctcatctccaatat

SEQ ID NO: 451330 - DNA, 25 bp, Artificial
  probe
  misc_feature (1)..(25): SEQ ID NO: 6856; WAN024GNT; Start 137; Stop 161
caatagactgctcatctccaatatc

SEQ ID NO: 451331 - DNA, 25 bp, Artificial
  probe
  misc_feature (1)..(25): SEQ ID NO: 6856; WAN024GNT; Start 74; Stop 98
tgaccttaccaagaatatccacgat

SEQ ID NO: 451332 - DNA, 25 bp, Artificial
  probe
  misc_feature (1)..(25): SEQ ID NO: 6856; WAN024GNT; Start 54; Stop 78
aagtaagagtgaatgttggttgacc

SEQ ID NO: 451333 - DNA, 25 bp, Artificial
  probe
  misc_feature (1)..(25): SEQ ID NO: 6856; WAN024GNT; Start 58; Stop 82
aagagtgaatgttggttgaccttac

SEQ ID NO: 451334 - DNA, 25 bp, Artificial
  probe
  misc_feature (1)..(25): SEQ ID NO: 6856; WAN024GNT; Start 56; Stop 80
gtaagagtgaatgttggttgacctt

SEQ ID NO: 451335 - DNA, 25 bp, Artificial
  probe
  misc_feature (1)..(25): SEQ ID NO: 6856; WAN024GNT; Start 75; Stop 99
gaccttaccaagaatatccacgata

SEQ ID NO: 451336 - DNA, 25 bp, Artificial
  probe
  misc_feature (1)..(25): SEQ ID NO: 6856; WAN024GNT; Start 72; Stop 96
gttgaccttaccaagaatatccacg

SEQ ID NO: 451337 - DNA, 25 bp, Artificial
  probe
  misc_feature (1)..(25): SEQ ID NO: 6856; WAN024GNT; Start 73; Stop 97
ttgaccttaccaagaatatccacga

SEQ ID NO: 451338 - DNA, 25 bp, Artificial
  probe
  misc_feature (1)..(25): SEQ ID NO: 6856; WAN024GNT; Start 139; Stop 163
atagactgctcatctccaatatcag

SEQ ID NO: 451339 - DNA, 25 bp, Artificial
  probe
  misc_feature (1)..(25): SEQ ID NO: 6856; WAN024GNT; Start 55; Stop 79
agtaagagtgaatgttggttgacct

SEQ ID NO: 451340 - DNA, 25 bp, Artificial
  probe
  misc_feature (1)..(25): SEQ ID NO: 6856; WAN024GNT; Start 57; Stop 81
taagagtgaatgttggttgacctta

SEQ ID NO: 451341 - DNA, 25 bp, Artificial
  probe
  misc_feature (1)..(25): SEQ ID NO: 6856; WAN024GNT; Start 134; Stop 158
gctcaatagactgctcatctccaat

SEQ ID NO: 451342 - DNA, 25 bp, Artificial
  probe
  misc_feature (1)..(25): SEQ ID NO: 6856; WAN024GNT; Start 130; Stop 154
ctctgctcaatagactgctcatctc

SEQ ID NO: 451343 - DNA, 25 bp, Artificial
  probe
  misc_feature (1)..(25): SEQ ID NO: 6856; WAN024GNT; Start 53; Stop 77
aaagtaagagtgaatgttggttgac

SEQ ID NO: 451344 - DNA, 25 bp, Artificial
  probe
  misc_feature (1)..(25): SEQ ID NO: 6856; WAN024GNT; Start 71; Stop 95
ggttgaccttaccaagaatatccac

SEQ ID NO: 451345 - DNA, 25 bp, Artificial
  probe
  misc_feature (1)..(25): SEQ ID NO: 6856; WAN024GNT; Start 286; Stop 310
ggacctgtaatgacaatagctgtta

SEQ ID NO: 451346 - DNA, 25 bp, Artificial
  probe
  misc_feature (1)..(25): SEQ ID NO: 6856; WAN024GNT; Start 287; Stop 311
gacctgtaatgacaatagctgttaa

SEQ ID NO: 451347 - DNA, 25 bp, Artificial
  probe
  misc_feature (1)..(25): SEQ ID NO: 6856; WAN024GNT; Start 105; Stop 129
catatggctagagaaggtagacaag

SEQ ID NO: 451348 - DNA, 25 bp, Artificial
  probe
  misc_feature (1)..(25): SEQ ID NO: 6856; WAN024GNT; Start 104; Stop 128
tcatatggctagagaaggtagacaa

SEQ ID NO: 451349 - DNA, 25 bp, Artificial
  probe
  misc_feature (1)..(25): SEQ ID NO: 6856; WAN024GNT; Start 99; Stop 123
attggtcatatggctagagaaggta

SEQ ID NO: 451350 - DNA, 25 bp, Artificial
  probe
  misc_feature (1)..(25): SEQ ID NO: 6856; WAN024GNT; Start 98; Stop 122
tattggtcatatggctagagaaggt

SEQ ID NO: 451351 - DNA, 25 bp, Artificial
  probe
  misc_feature (1)..(25): SEQ ID NO: 6856; WAN024GNT; Start 95; Stop 119
cgatattggtcatatggctagagaa

SEQ ID NO: 451352 - DNA, 25 bp, Artificial
  probe
  misc_feature (1)..(25): SEQ ID NO: 6856; WAN024GNT; Start 97; Stop 121
atattggtcatatggctagagaagg

SEQ ID NO: 451353 - DNA, 25 bp, Artificial
  probe
  misc_feature (1)..(25): SEQ ID NO: 6856; WAN024GNT; Start 94; Stop 118
acgatattggtcatatggctagaga

SEQ ID NO: 451354 - DNA, 25 bp, Artificial
  probe
  misc_feature (1)..(25): SEQ ID NO: 6856; WAN024GNT; Start 93; Stop 117
cacgatattggtcatatggctagag

SEQ ID NO: 451355 - DNA, 25 bp, Artificial
  probe
  misc_feature (1)..(25): SEQ ID NO: 6856; WAN024GNT; Start 100; Stop 124
ttggtcatatggctagagaaggtag

SEQ ID NO: 451356 - DNA, 25 bp, Artificial
  probe
  misc_feature (1)..(25): SEQ ID NO: 6856; WAN024GNT; Start 106; Stop 130
atatggctagagaaggtagacaagc

SEQ ID NO: 451357 - DNA, 25 bp, Artificial
  probe
  misc_feature (1)..(25): SEQ ID NO: 6856; WAN024GNT; Start 153; Stop 177
tccaatatcagcaaagatttcttca

SEQ ID NO: 451358 - DNA, 25 bp, Artificial
  probe
  misc_feature (1)..(25): SEQ ID NO: 6856; WAN024GNT; Start 140; Stop 164
tagactgctcatctccaatatcagc

SEQ ID NO: 451359 - DNA, 25 bp, Artificial
  probe
  misc_feature (1)..(25): SEQ ID NO: 6856; WAN024GNT; Start 151; Stop 175
tctccaatatcagcaaagatttctt

SEQ ID NO: 451360 - DNA, 25 bp, Artificial
  probe
  misc_feature (1)..(25): SEQ ID NO: 6857; WAN024EXM; Start 83; Stop 107
tgaccagccataaagatgacattat

SEQ ID NO: 451361 - DNA, 25 bp, Artificial
  probe
  misc_feature (1)..(25): SEQ ID NO: 6857; WAN024EXM; Start 82; Stop 106
gtgaccagccataaagatgacatta

SEQ ID NO: 451362 - DNA, 25 bp, Artificial
  probe
  misc_feature (1)..(25): SEQ ID NO: 6857; WAN024EXM; Start 84; Stop 108
gaccagccataaagatgacattatt

SEQ ID NO: 451363 - DNA, 25 bp, Artificial
  probe
  misc_feature (1)..(25): SEQ ID NO: 6857; WAN024EXM; Start 85; Stop 109
accagccataaagatgacattattt

SEQ ID NO: 451364 - DNA, 25 bp, Artificial
  probe
  misc_feature (1)..(25): SEQ ID NO: 6857; WAN024EXM; Start 77; Stop 101
atgatgtgaccagccataaagatga

SEQ ID NO: 451365 - DNA, 25 bp, Artificial
  probe
  misc_feature (1)..(25): SEQ ID NO: 6857; WAN024EXM; Start 2; Stop 26
tggcaataaagaactttaccgattt

SEQ ID NO: 451366 - DNA, 25 bp, Artificial
  probe
  misc_feature (1)..(25): SEQ ID NO: 6857; WAN024EXM; Start 34; Stop 58
agtaatcaattctttagcatggtgt

SEQ ID NO: 451367 - DNA, 25 bp, Artificial
  probe
  misc_feature (1)..(25): SEQ ID NO: 6857; WAN024EXM; Start 1; Stop 25
atggcaataaagaactttaccgatt

SEQ ID NO: 451368 - DNA, 25 bp, Artificial
  probe
  misc_feature (1)..(25): SEQ ID NO: 6857; WAN024EXM; Start 33; Stop 57
gagtaatcaattctttagcatggtg

SEQ ID NO: 451369 - DNA, 25 bp, Artificial
  probe
  misc_feature (1)..(25): SEQ ID NO: 6857; WAN024EXM; Start 32; Stop 56
tgagtaatcaattctttagcatggt

SEQ ID NO: 451370 - DNA, 25 bp, Artificial
  probe
  misc_feature (1)..(25): SEQ ID NO: 6857; WAN024EXM; Start 76; Stop 100
catgatgtgaccagccataaagatg

SEQ ID NO: 451371 - DNA, 25 bp, Artificial
  probe
  misc_feature (1)..(25): SEQ ID NO: 6857; WAN024EXM; Start 78; Stop 102
tgatgtgaccagccataaagatgac

SEQ ID NO: 451372 - DNA, 25 bp, Artificial
  probe
  misc_feature (1)..(25): SEQ ID NO: 6857; WAN024EXM; Start 81; Stop 105
tgtgaccagccataaagatgacatt

SEQ ID NO: 451373 - DNA, 25 bp, Artificial
  probe
  misc_feature (1)..(25): SEQ ID NO: 6857; WAN024EXM; Start 36; Stop 60
taatcaattctttagcatggtgtac

SEQ ID NO: 451374 - DNA, 25 bp, Artificial
  probe
  misc_feature (1)..(25): SEQ ID NO: 6857; WAN024EXM; Start 35; Stop 59
gtaatcaattctttagcatggtgta

SEQ ID NO: 451375 - DNA, 25 bp, Artificial
  probe
  misc_feature (1)..(25): SEQ ID NO: 6857; WAN024EXM; Start 79; Stop 103
gatgtgaccagccataaagatgaca

SEQ ID NO: 451376 - DNA, 25 bp, Artificial
  probe
  misc_feature (1)..(25): SEQ ID NO: 6857; WAN024EXM; Start 129; Stop 153
tggctttacaatcttcataagacaa

SEQ ID NO: 451377 - DNA, 25 bp, Artificial
  probe
  misc_feature (1)..(25): SEQ ID NO: 6857; WAN024EXM; Start 11; Stop 35
agaactttaccgattttaccttgag

SEQ ID NO: 451378 - DNA, 25 bp, Artificial
  probe
  misc_feature (1)..(25): SEQ ID NO: 6857; WAN024EXM; Start 128; Stop 152
atggctttacaatcttcataagaca

SEQ ID NO: 451379 - DNA, 25 bp, Artificial
  probe
  misc_feature (1)..(25): SEQ ID NO: 6857; WAN024EXM; Start 136; Stop 160
acaatcttcataagacaatgcaatt

SEQ ID NO: 451380 - DNA, 25 bp, Artificial
  probe
  misc_feature (1)..(25): SEQ ID NO: 6857; WAN024EXM; Start 141; Stop 165
cttcataagacaatgcaattggctt

SEQ ID NO: 451381 - DNA, 25 bp, Artificial
  probe
  misc_feature (1)..(25): SEQ ID NO: 6857; WAN024EXM; Start 12; Stop 36
gaactttaccgattttaccttgagt

SEQ ID NO: 451382 - DNA, 25 bp, Artificial
  probe
  misc_feature (1)..(25): SEQ ID NO: 6857; WAN024EXM; Start 10; Stop 34
aagaactttaccgattttaccttga

SEQ ID NO: 451383 - DNA, 25 bp, Artificial
  probe
  misc_feature (1)..(25): SEQ ID NO: 6857; WAN024EXM; Start 139; Stop 163
atcttcataagacaatgcaattggc

SEQ ID NO: 451384 - DNA, 25 bp, Artificial
  probe
  misc_feature (1)..(25): SEQ ID NO: 6857; WAN024EXM; Start 127; Stop 151
catggctttacaatcttcataagac

SEQ ID NO: 451385 - DNA, 25 bp, Artificial
  probe
  misc_feature (1)..(25): SEQ ID NO: 6857; WAN024EXM; Start 104; Stop 128
ttattttctttacatgcgtcaacca

SEQ ID NO: 451386 - DNA, 25 bp, Artificial
  probe
  misc_feature (1)..(25): SEQ ID NO: 6857; WAN024EXM; Start 140; Stop 164
tcttcataagacaatgcaattggct

SEQ ID NO: 451387 - DNA, 25 bp, Artificial
  probe
  misc_feature (1)..(25): SEQ ID NO: 6857; WAN024EXM; Start 134; Stop 158
ttacaatcttcataagacaatgcaa

SEQ ID NO: 451388 - DNA, 25 bp, Artificial
  probe
  misc_feature (1)..(25): SEQ ID NO: 6857; WAN024EXM; Start 71; Stop 95
aagttcatgatgtgaccagccataa

SEQ ID NO: 451389 - DNA, 25 bp, Artificial
  probe
  misc_feature (1)..(25): SEQ ID NO: 6857; WAN024EXM; Start 28; Stop 52
accttgagtaatcaattctttagca

SEQ ID NO: 451390 - DNA, 25 bp, Artificial
  probe
  misc_feature (1)..(25): SEQ ID NO: 6857; WAN024EXM; Start 105; Stop 129
tattttctttacatgcgtcaaccat

SEQ ID NO: 451391 - DNA, 25 bp, Artificial
  probe
  misc_feature (1)..(25): SEQ ID NO: 6857; WAN024EXM; Start 56; Stop 80
tgtacaccgttaaagaagttcatga

SEQ ID NO: 451392 - DNA, 25 bp, Artificial
  probe
  misc_feature (1)..(25): SEQ ID NO: 6857; WAN024EXM; Start 58; Stop 82
tacaccgttaaagaagttcatgatg

SEQ ID NO: 451393 - DNA, 25 bp, Artificial
  probe
  misc_feature (1)..(25): SEQ ID NO: 6858; WAN024BST; Start 842; Stop 866
ccaacaatagcctaacattacaagt

SEQ ID NO: 451394 - DNA, 25 bp, Artificial
  probe
  misc_feature (1)..(25): SEQ ID NO: 6858; WAN024BST; Start 841; Stop 865
accaacaatagcctaacattacaag

SEQ ID NO: 451395 - DNA, 25 bp, Artificial
  probe
  misc_feature (1)..(25): SEQ ID NO: 6858; WAN024BST; Start 1052; Stop 1076
taacaaccacgattgatacctactc

SEQ ID NO: 451396 - DNA, 25 bp, Artificial
  probe
  misc_feature (1)..(25): SEQ ID NO: 6858; WAN024BST; Start 1051; Stop 1075
ataacaaccacgattgatacctact

SEQ ID NO: 451397 - DNA, 25 bp, Artificial
  probe
  misc_feature (1)..(25): SEQ ID NO: 6858; WAN024BST; Start 1044; Stop 1068
tgcttctataacaaccacgattgat

SEQ ID NO: 451398 - DNA, 25 bp, Artificial
  probe
  misc_feature (1)..(25): SEQ ID NO: 6858; WAN024BST; Start 1043; Stop 1067
atgcttctataacaaccacgattga

SEQ ID NO: 451399 - DNA, 25 bp, Artificial
  probe
  misc_feature (1)..(25): SEQ ID NO: 6858; WAN024BST; Start 1048; Stop 1072
tctataacaaccacgattgatacct

SEQ ID NO: 451400 - DNA, 25 bp, Artificial
  probe
  misc_feature (1)..(25): SEQ ID NO: 6858; WAN024BST; Start 843; Stop 867
caacaatagcctaacattacaagtg

SEQ ID NO: 451401 - DNA, 25 bp, Artificial
  probe
  misc_feature (1)..(25): SEQ ID NO: 6858; WAN024BST; Start 1061; Stop 1085
cgattgatacctactctcacttgta

SEQ ID NO: 451402 - DNA, 25 bp, Artificial
  probe
  misc_feature (1)..(25): SEQ ID NO: 6858; WAN024BST; Start 321; Stop 345
actaacctatgaagacatctaccaa

SEQ ID NO: 451403 - DNA, 25 bp, Artificial
  probe
  misc_feature (1)..(25): SEQ ID NO: 6858; WAN024BST; Start 320; Stop 344
aactaacctatgaagacatctacca

SEQ ID NO: 451404 - DNA, 25 bp, Artificial
  probe
  misc_feature (1)..(25): SEQ ID NO: 6858; WAN024BST; Start 1045; Stop 1069
gcttctataacaaccacgattgata

SEQ ID NO: 451405 - DNA, 25 bp, Artificial
  probe
  misc_feature (1)..(25): SEQ ID NO: 6858; WAN024BST; Start 1059; Stop 1083
cacgattgatacctactctcacttg

SEQ ID NO: 451406 - DNA, 25 bp, Artificial
  probe
  misc_feature (1)..(25): SEQ ID NO: 6858; WAN024BST; Start 1060; Stop 1084
acgattgatacctactctcacttgt

SEQ ID NO: 451407 - DNA, 25 bp, Artificial
  probe
  misc_feature (1)..(25): SEQ ID NO: 6858; WAN024BST; Start 840; Stop 864
taccaacaatagcctaacattacaa

SEQ ID NO: 451408 - DNA, 25 bp, Artificial
  probe
  misc_feature (1)..(25): SEQ ID NO: 6858; WAN024BST; Start 839; Stop 863
ttaccaacaatagcctaacattaca

SEQ ID NO: 451409 - DNA, 25 bp, Artificial
  probe
  misc_feature (1)..(25): SEQ ID NO: 6858; WAN024BST; Start 1047; Stop 1071
ttctataacaaccacgattgatacc

SEQ ID NO: 451410 - DNA, 25 bp, Artificial
  probe
  misc_feature (1)..(25): SEQ ID NO: 6858; WAN024BST; Start 1036; Stop 1060
ctaggacatgcttctataacaacca

SEQ ID NO: 451411 - DNA, 25 bp, Artificial
  probe
  misc_feature (1)..(25): SEQ ID NO: 6858; WAN024BST; Start 1035; Stop 1059
actaggacatgcttctataacaacc

SEQ ID NO: 451412 - DNA, 25 bp, Artificial
  probe
  misc_feature (1)..(25): SEQ ID NO: 6858; WAN024BST; Start 1033; Stop 1057
cgactaggacatgcttctataacaa

SEQ ID NO: 451413 - DNA, 25 bp, Artificial
  probe
  misc_feature (1)..(25): SEQ ID NO: 6858; WAN024BST; Start 1037; Stop 1061
taggacatgcttctataacaaccac

SEQ ID NO: 451414 - DNA, 25 bp, Artificial
  probe
  misc_feature (1)..(25): SEQ ID NO: 6858; WAN024BST; Start 1053; Stop 1077
aacaaccacgattgatacctactct

SEQ ID NO: 451415 - DNA, 25 bp, Artificial
  probe
  misc_feature (1)..(25): SEQ ID NO: 6858; WAN024BST; Start 1041; Stop 1065
acatgcttctataacaaccacgatt

SEQ ID NO: 451416 - DNA, 25 bp, Artificial
  probe
  misc_feature (1)..(25): SEQ ID NO: 6858; WAN024BST; Start 1034; Stop 1058
gactaggacatgcttctataacaac

SEQ ID NO: 451417 - DNA, 25 bp, Artificial
  probe
  misc_feature (1)..(25): SEQ ID NO: 6858; WAN024BST; Start 1063; Stop 1087
attgatacctactctcacttgtacc

SEQ ID NO: 451418 - DNA, 25 bp, Artificial
  probe
  misc_feature (1)..(25): SEQ ID NO: 6858; WAN024BST; Start 1058; Stop 1082
ccacgattgatacctactctcactt

SEQ ID NO: 451419 - DNA, 25 bp, Artificial
  probe
  misc_feature (1)..(25): SEQ ID NO: 6858; WAN024BST; Start 1040; Stop 1064
gacatgcttctataacaaccacgat

SEQ ID NO: 451420 - DNA, 25 bp, Artificial
  probe
  misc_feature (1)..(25): SEQ ID NO: 6858; WAN024BST; Start 1050; Stop 1074
tataacaaccacgattgatacctac

SEQ ID NO: 451421 - DNA, 25 bp, Artificial
  probe
  misc_feature (1)..(25): SEQ ID NO: 6858; WAN024BST; Start 1042; Stop 1066
catgcttctataacaaccacgattg

SEQ ID NO: 451422 - DNA, 25 bp, Artificial
  probe
  misc_feature (1)..(25): SEQ ID NO: 6858; WAN024BST; Start 844; Stop 868
aacaatagcctaacattacaagtgt

SEQ ID NO: 451423 - DNA, 25 bp, Artificial
  probe
  misc_feature (1)..(25): SEQ ID NO: 6858; WAN024BST; Start 1054; Stop 1078
acaaccacgattgatacctactctc

SEQ ID NO: 451424 - DNA, 25 bp, Artificial
  probe
  misc_feature (1)..(25): SEQ ID NO: 6858; WAN024BST; Start 1049; Stop 1073
ctataacaaccacgattgataccta

SEQ ID NO: 451425 - DNA, 25 bp, Artificial
  probe
  misc_feature (1)..(25): SEQ ID NO: 6858; WAN024BST; Start 1056; Stop 1080
aaccacgattgatacctactctcac

SEQ ID NO: 451426 - DNA, 25 bp, Artificial
  probe
  misc_feature (1)..(25): SEQ ID NO: 6859; WAN024BVM; Start 154; Stop 178
ggtatgatgactcagggagaaataa

SEQ ID NO: 451427 - DNA, 25 bp, Artificial
  probe
  misc_feature (1)..(25): SEQ ID NO: 6859; WAN024BVM; Start 153; Stop 177
gggtatgatgactcagggagaaata

SEQ ID NO: 451428 - DNA, 25 bp, Artificial
  probe
  misc_feature (1)..(25): SEQ ID NO: 6859; WAN024BVM; Start 156; Stop 180
tatgatgactcagggagaaataagt

SEQ ID NO: 451429 - DNA, 25 bp, Artificial
  probe
  misc_feature (1)..(25): SEQ ID NO: 6859; WAN024BVM; Start 253; Stop 277
aagactttctatgtcggtgatagga

SEQ ID NO: 451430 - DNA, 25 bp, Artificial
  probe
  misc_feature (1)..(25): SEQ ID NO: 6859; WAN024BVM; Start 155; Stop 179
gtatgatgactcagggagaaataag

SEQ ID NO: 451431 - DNA, 25 bp, Artificial
  probe
  misc_feature (1)..(25): SEQ ID NO: 6859; WAN024BVM; Start 252; Stop 276
aaagactttctatgtcggtgatagg

SEQ ID NO: 451432 - DNA, 25 bp, Artificial
  probe
  misc_feature (1)..(25): SEQ ID NO: 6859; WAN024BVM; Start 250; Stop 274
acaaagactttctatgtcggtgata

SEQ ID NO: 451433 - DNA, 25 bp, Artificial
  probe
  misc_feature (1)..(25): SEQ ID NO: 6859; WAN024BVM; Start 251; Stop 275
caaagactttctatgtcggtgatag

SEQ ID NO: 451434 - DNA, 25 bp, Artificial
  probe
  misc_feature (1)..(25): SEQ ID NO: 6859; WAN024BVM; Start 254; Stop 278
agactttctatgtcggtgataggac

SEQ ID NO: 451435 - DNA, 25 bp, Artificial
  probe
  misc_feature (1)..(25): SEQ ID NO: 6859; WAN024BVM; Start 249; Stop 273
cacaaagactttctatgtcggtgat

SEQ ID NO: 451436 - DNA, 25 bp, Artificial
  probe
  misc_feature (1)..(25): SEQ ID NO: 6859; WAN024BVM; Start 50; Stop 74
ttcaagtcggtattcaagatatcga

SEQ ID NO: 451437 - DNA, 25 bp, Artificial
  probe
  misc_feature (1)..(25): SEQ ID NO: 6859; WAN024BVM; Start 61; Stop 85
attcaagatatcgatggagagacag

SEQ ID NO: 451438 - DNA, 25 bp, Artificial
  probe
  misc_feature (1)..(25): SEQ ID NO: 6859; WAN024BVM; Start 57; Stop 81
cggtattcaagatatcgatggagag

SEQ ID NO: 451439 - DNA, 25 bp, Artificial
  probe
  misc_feature (1)..(25): SEQ ID NO: 6859; WAN024BVM; Start 58; Stop 82
ggtattcaagatatcgatggagaga

SEQ ID NO: 451440 - DNA, 25 bp, Artificial
  probe
  misc_feature (1)..(25): SEQ ID NO: 6859; WAN024BVM; Start 49; Stop 73
tttcaagtcggtattcaagatatcg

SEQ ID NO: 451441 - DNA, 25 bp, Artificial
  probe
  misc_feature (1)..(25): SEQ ID NO: 6859; WAN024BVM; Start 247; Stop 271
gtcacaaagactttctatgtcggtg

SEQ ID NO: 451442 - DNA, 25 bp, Artificial
  probe
  misc_feature (1)..(25): SEQ ID NO: 6859; WAN024BVM; Start 129; Stop 153
caaacgcaaactagactgtgaatgg

SEQ ID NO: 451443 - DNA, 25 bp, Artificial
  probe
  misc_feature (1)..(25): SEQ ID NO: 6859; WAN024BVM; Start 128; Stop 152
ccaaacgcaaactagactgtgaatg

SEQ ID NO: 451444 - DNA, 25 bp, Artificial
  probe
  misc_feature (1)..(25): SEQ ID NO: 6859; WAN024BVM; Start 60; Stop 84
tattcaagatatcgatggagagaca

SEQ ID NO: 451445 - DNA, 25 bp, Artificial
  probe
  misc_feature (1)..(25): SEQ ID NO: 6859; WAN024BVM; Start 163; Stop 187
actcagggagaaataagtcagcttt

SEQ ID NO: 451446 - DNA, 25 bp, Artificial
  probe
  misc_feature (1)..(25): SEQ ID NO: 6859; WAN024BVM; Start 62; Stop 86
ttcaagatatcgatggagagacagg

SEQ ID NO: 451447 - DNA, 25 bp, Artificial
  probe
  misc_feature (1)..(25): SEQ ID NO: 6859; WAN024BVM; Start 59; Stop 83
gtattcaagatatcgatggagagac

SEQ ID NO: 451448 - DNA, 25 bp, Artificial
  probe
  misc_feature (1)..(25): SEQ ID NO: 6859; WAN024BVM; Start 127; Stop 151
accaaacgcaaactagactgtgaat

SEQ ID NO: 451449 - DNA, 25 bp, Artificial
  probe
  misc_feature (1)..(25): SEQ ID NO: 6859; WAN024BVM; Start 41; Stop 65
ccaaatcttttcaagtcggtattca

SEQ ID NO: 451450 - DNA, 25 bp, Artificial
  probe
  misc_feature (1)..(25): SEQ ID NO: 6859; WAN024BVM; Start 40; Stop 64
cccaaatcttttcaagtcggtattc

SEQ ID NO: 451451 - DNA, 25 bp, Artificial
  probe
  misc_feature (1)..(25): SEQ ID NO: 6859; WAN024BVM; Start 39; Stop 63
tcccaaatcttttcaagtcggtatt

SEQ ID NO: 451452 - DNA, 25 bp, Artificial
  probe
  misc_feature (1)..(25): SEQ ID NO: 6859; WAN024BVM; Start 120; Stop 144
tatcacgaccaaacgcaaactagac

SEQ ID NO: 451453 - DNA, 25 bp, Artificial
  probe
  misc_feature (1)..(25): SEQ ID NO: 6859; WAN024BVM; Start 119; Stop 143
gtatcacgaccaaacgcaaactaga

SEQ ID NO: 451454 - DNA, 25 bp, Artificial
  probe
  misc_feature (1)..(25): SEQ ID NO: 6859; WAN024BVM; Start 38; Stop 62
ctcccaaatcttttcaagtcggtat

SEQ ID NO: 451455 - DNA, 25 bp, Artificial
  probe
  misc_feature (1)..(25): SEQ ID NO: 6859; WAN024BVM; Start 137; Stop 161
aactagactgtgaatggggtatgat

SEQ ID NO: 451456 - DNA, 25 bp, Artificial
  probe
  misc_feature (1)..(25): SEQ ID NO: 6859; WAN024BVM; Start 140; Stop 164
tagactgtgaatggggtatgatgac

SEQ ID NO: 451457 - DNA, 25 bp, Artificial
  probe
  misc_feature (1)..(25): SEQ ID NO: 6859; WAN024BVM; Start 136; Stop 160
aaactagactgtgaatggggtatga

SEQ ID NO: 451458 - DNA, 25 bp, Artificial
  probe
  misc_feature (1)..(25): SEQ ID NO: 6859; WAN024BVM; Start 135; Stop 159
caaactagactgtgaatggggtatg

SEQ ID NO: 451459 - DNA, 25 bp, Artificial
  probe
  misc_feature (1)..(25): SEQ ID NO: 6860; WAN024DFF; Start 28; Stop 52
gtacgatctactgttgattggacaa

SEQ ID NO: 451460 - DNA, 25 bp, Artificial
  probe
  misc_feature (1)..(25): SEQ ID NO: 6860; WAN024DFF; Start 127; Stop 151
gaacggaaggtatccatcttgatat

SEQ ID NO: 451461 - DNA, 25 bp, Artificial
  probe
  misc_feature (1)..(25): SEQ ID NO: 6860; WAN024DFF; Start 172; Stop 196
tcaatagtatcatccaattctggca

SEQ ID NO: 451462 - DNA, 25 bp, Artificial
  probe
  misc_feature (1)..(25): SEQ ID NO: 6860; WAN024DFF; Start 126; Stop 150
tgaacggaaggtatccatcttgata

SEQ ID NO: 451463 - DNA, 25 bp, Artificial
  probe
  misc_feature (1)..(25): SEQ ID NO: 6860; WAN024DFF; Start 176; Stop 200
tagtatcatccaattctggcatcac

SEQ ID NO: 451464 - DNA, 25 bp, Artificial
  probe
  misc_feature (1)..(25): SEQ ID NO: 6860; WAN024DFF; Start 175; Stop 199
atagtatcatccaattctggcatca

SEQ ID NO: 451465 - DNA, 25 bp, Artificial
  probe
  misc_feature (1)..(25): SEQ ID NO: 6860; WAN024DFF; Start 165; Stop 189
ttccacttcaatagtatcatccaat

SEQ ID NO: 451466 - DNA, 25 bp, Artificial
  probe
  misc_feature (1)..(25): SEQ ID NO: 6860; WAN024DFF; Start 179; Stop 203
tatcatccaattctggcatcacttc

SEQ ID NO: 451467 - DNA, 25 bp, Artificial
  probe
  misc_feature (1)..(25): SEQ ID NO: 6860; WAN024DFF; Start 166; Stop 190
tccacttcaatagtatcatccaatt

SEQ ID NO: 451468 - DNA, 25 bp, Artificial
  probe
  misc_feature (1)..(25): SEQ ID NO: 6860; WAN024DFF; Start 173; Stop 197
caatagtatcatccaattctggcat

SEQ ID NO: 451469 - DNA, 25 bp, Artificial
  probe
  misc_feature (1)..(25): SEQ ID NO: 6860; WAN024DFF; Start 178; Stop 202
gtatcatccaattctggcatcactt

SEQ ID NO: 451470 - DNA, 25 bp, Artificial
  probe
  misc_feature (1)..(25): SEQ ID NO: 6860; WAN024DFF; Start 171; Stop 195
ttcaatagtatcatccaattctggc

SEQ ID NO: 451471 - DNA, 25 bp, Artificial
  probe
  misc_feature (1)..(25): SEQ ID NO: 6860; WAN024DFF; Start 167; Stop 191
ccacttcaatagtatcatccaattc

SEQ ID NO: 451472 - DNA, 25 bp, Artificial
  probe
  misc_feature (1)..(25): SEQ ID NO: 6860; WAN024DFF; Start 174; Stop 198
aatagtatcatccaattctggcatc

SEQ ID NO: 451473 - DNA, 25 bp, Artificial
  probe
  misc_feature (1)..(25): SEQ ID NO: 6860; WAN024DFF; Start 148; Stop 172
atatcatcttcacggatttccactt

SEQ ID NO: 451474 - DNA, 25 bp, Artificial
  probe
  misc_feature (1)..(25): SEQ ID NO: 6860; WAN024DFF; Start 153; Stop 177
atcttcacggatttccacttcaata

SEQ ID NO: 451475 - DNA, 25 bp, Artificial
  probe
  misc_feature (1)..(25): SEQ ID NO: 6860; WAN024DFF; Start 201; Stop 225
ttctacagatgtgaaagaggtatgg

SEQ ID NO: 451476 - DNA, 25 bp, Artificial
  probe
  misc_feature (1)..(25): SEQ ID NO: 6860; WAN024DFF; Start 154; Stop 178
tcttcacggatttccacttcaatag

SEQ ID NO: 451477 - DNA, 25 bp, Artificial
  probe
  misc_feature (1)..(25): SEQ ID NO: 6860; WAN024DFF; Start 149; Stop 173
tatcatcttcacggatttccacttc

SEQ ID NO: 451478 - DNA, 25 bp, Artificial
  probe
  misc_feature (1)..(25): SEQ ID NO: 6860; WAN024DFF; Start 182; Stop 206
catccaattctggcatcacttctac

SEQ ID NO: 451479 - DNA, 25 bp, Artificial
  probe
  misc_feature (1)..(25): SEQ ID NO: 6860; WAN024DFF; Start 181; Stop 205
tcatccaattctggcatcacttcta

SEQ ID NO: 451480 - DNA, 25 bp, Artificial
  probe
  misc_feature (1)..(25): SEQ ID NO: 6860; WAN024DFF; Start 27; Stop 51
ggtacgatctactgttgattggaca

SEQ ID NO: 451481 - DNA, 25 bp, Artificial
  probe
  misc_feature (1)..(25): SEQ ID NO: 6860; WAN024DFF; Start 81; Stop 105
tacacctgttgaaaccttattgacg

SEQ ID NO: 451482 - DNA, 25 bp, Artificial
  probe
  misc_feature (1)..(25): SEQ ID NO: 6860; WAN024DFF; Start 177; Stop 201
agtatcatccaattctggcatcact

SEQ ID NO: 451483 - DNA, 25 bp, Artificial
  probe
  misc_feature (1)..(25): SEQ ID NO: 6860; WAN024DFF; Start 125; Stop 149
ctgaacggaaggtatccatcttgat

SEQ ID NO: 451484 - DNA, 25 bp, Artificial
  probe
  misc_feature (1)..(25): SEQ ID NO: 6860; WAN024DFF; Start 80; Stop 104
gtacacctgttgaaaccttattgac

SEQ ID NO: 451485 - DNA, 25 bp, Artificial
  probe
  misc_feature (1)..(25): SEQ ID NO: 6860; WAN024DFF; Start 199; Stop 223
acttctacagatgtgaaagaggtat

SEQ ID NO: 451486 - DNA, 25 bp, Artificial
  probe
  misc_feature (1)..(25): SEQ ID NO: 6860; WAN024DFF; Start 156; Stop 180
ttcacggatttccacttcaatagta

SEQ ID NO: 451487 - DNA, 25 bp, Artificial
  probe
  misc_feature (1)..(25): SEQ ID NO: 6860; WAN024DFF; Start 183; Stop 207
atccaattctggcatcacttctaca

SEQ ID NO: 451488 - DNA, 25 bp, Artificial
  probe
  misc_feature (1)..(25): SEQ ID NO: 6860; WAN024DFF; Start 159; Stop 183
acggatttccacttcaatagtatca

SEQ ID NO: 451489 - DNA, 25 bp, Artificial
  probe
  misc_feature (1)..(25): SEQ ID NO: 6860; WAN024DFF; Start 157; Stop 181
tcacggatttccacttcaatagtat

SEQ ID NO: 451490 - DNA, 25 bp, Artificial
  probe
  misc_feature (1)..(25): SEQ ID NO: 6860; WAN024DFF; Start 158; Stop 182
cacggatttccacttcaatagtatc

SEQ ID NO: 451491 - DNA, 25 bp, Artificial
  probe
  misc_feature (1)..(25): SEQ ID NO: 6860; WAN024DFF; Start 21; Stop 45
atactgggtacgatctactgttgat

SEQ ID NO: 451492 - DNA, 25 bp, Artificial
  probe
  misc_feature (1)..(25): SEQ ID NO: 6861; WAN024BO8; Start 63; Stop 87
cgatgacattattgaacttgatgaa

SEQ ID NO: 451493 - DNA, 25 bp, Artificial
  probe
  misc_feature (1)..(25): SEQ ID NO: 6861; WAN024BO8; Start 62; Stop 86
tcgatgacattattgaacttgatga

SEQ ID NO: 451494 - DNA, 25 bp, Artificial
  probe
  misc_feature (1)..(25): SEQ ID NO: 6861; WAN024BO8; Start 92; Stop 116
atgctaaagaagtcaacaagaaact

SEQ ID NO: 451495 - DNA, 25 bp, Artificial
  probe
  misc_feature (1)..(25): SEQ ID NO: 6861; WAN024BO8; Start 74; Stop 98
ttgaacttgatgaagattatgctaa

SEQ ID NO: 451496 - DNA, 25 bp, Artificial
  probe
  misc_feature (1)..(25): SEQ ID NO: 6861; WAN024BO8; Start 66; Stop 90
tgacattattgaacttgatgaagat

SEQ ID NO: 451497 - DNA, 25 bp, Artificial
  probe
  misc_feature (1)..(25): SEQ ID NO: 6861; WAN024BO8; Start 65; Stop 89
atgacattattgaacttgatgaaga

SEQ ID NO: 451498 - DNA, 25 bp, Artificial
  probe
  misc_feature (1)..(25): SEQ ID NO: 6861; WAN024BO8; Start 61; Stop 85
gtcgatgacattattgaacttgatg

SEQ ID NO: 451499 - DNA, 25 bp, Artificial
  probe
  misc_feature (1)..(25): SEQ ID NO: 6861; WAN024BO8; Start 93; Stop 117
tgctaaagaagtcaacaagaaacta

SEQ ID NO: 451500 - DNA, 25 bp, Artificial
  probe
  misc_feature (1)..(25): SEQ ID NO: 6861; WAN024BO8; Start 73; Stop 97
attgaacttgatgaagattatgcta

SEQ ID NO: 451501 - DNA, 25 bp, Artificial
  probe
  misc_feature (1)..(25): SEQ ID NO: 6861; WAN024BO8; Start 72; Stop 96
tattgaacttgatgaagattatgct

SEQ ID NO: 451502 - DNA, 25 bp, Artificial
  probe
  misc_feature (1)..(25): SEQ ID NO: 6861; WAN024BO8; Start 64; Stop 88
gatgacattattgaacttgatgaag

SEQ ID NO: 451503 - DNA, 25 bp, Artificial
  probe
  misc_feature (1)..(25): SEQ ID NO: 6861; WAN024BO8; Start 91; Stop 115
tatgctaaagaagtcaacaagaaac

SEQ ID NO: 451504 - DNA, 25 bp, Artificial
  probe
  misc_feature (1)..(25): SEQ ID NO: 6861; WAN024BO8; Start 37; Stop 61
gagcaactcaacatggatgtgattg

SEQ ID NO: 451505 - DNA, 25 bp, Artificial
  probe
  misc_feature (1)..(25): SEQ ID NO: 6861; WAN024BO8; Start 40; Stop 64
caactcaacatggatgtgattgtcg

SEQ ID NO: 451506 - DNA, 25 bp, Artificial
  probe
  misc_feature (1)..(25): SEQ ID NO: 6861; WAN024BO8; Start 43; Stop 67
ctcaacatggatgtgattgtcgatg

SEQ ID NO: 451507 - DNA, 25 bp, Artificial
  probe
  misc_feature (1)..(25): SEQ ID NO: 6861; WAN024BO8; Start 88; Stop 112
gattatgctaaagaagtcaacaaga

SEQ ID NO: 451508 - DNA, 25 bp, Artificial
  probe
  misc_feature (1)..(25): SEQ ID NO: 6861; WAN024BO8; Start 87; Stop 111
agattatgctaaagaagtcaacaag

SEQ ID NO: 451509 - DNA, 25 bp, Artificial
  probe
  misc_feature (1)..(25): SEQ ID NO: 6861; WAN024BO8; Start 85; Stop 109
gaagattatgctaaagaagtcaaca

SEQ ID NO: 451510 - DNA, 25 bp, Artificial
  probe
  misc_feature (1)..(25): SEQ ID NO: 6861; WAN024BO8; Start 39; Stop 63
gcaactcaacatggatgtgattgtc

SEQ ID NO: 451511 - DNA, 25 bp, Artificial
  probe
  misc_feature (1)..(25): SEQ ID NO: 6861; WAN024BO8; Start 94; Stop 118
gctaaagaagtcaacaagaaactaa

SEQ ID NO: 451512 - DNA, 25 bp, Artificial
  probe
  misc_feature (1)..(25): SEQ ID NO: 6861; WAN024BO8; Start 44; Stop 68
tcaacatggatgtgattgtcgatga

SEQ ID NO: 451513 - DNA, 25 bp, Artificial
  probe
  misc_feature (1)..(25): SEQ ID NO: 6861; WAN024BO8; Start 42; Stop 66
actcaacatggatgtgattgtcgat

SEQ ID NO: 451514 - DNA, 25 bp, Artificial
  probe
  misc_feature (1)..(25): SEQ ID NO: 6861; WAN024BO8; Start 90; Stop 114
ttatgctaaagaagtcaacaagaaa

SEQ ID NO: 451515 - DNA, 25 bp, Artificial
  probe
  misc_feature (1)..(25): SEQ ID NO: 6861; WAN024BO8; Start 38; Stop 62
agcaactcaacatggatgtgattgt

SEQ ID NO: 451516 - DNA, 25 bp, Artificial
  probe
  misc_feature (1)..(25): SEQ ID NO: 6861; WAN024BO8; Start 45; Stop 69
caacatggatgtgattgtcgatgac

SEQ ID NO: 451517 - DNA, 25 bp, Artificial
  probe
  misc_feature (1)..(25): SEQ ID NO: 6861; WAN024BO8; Start 41; Stop 65
aactcaacatggatgtgattgtcga

SEQ ID NO: 451518 - DNA, 25 bp, Artificial
  probe
  misc_feature (1)..(25): SEQ ID NO: 6861; WAN024BO8; Start 89; Stop 113
attatgctaaagaagtcaacaagaa

SEQ ID NO: 451519 - DNA, 25 bp, Artificial
  probe
  misc_feature (1)..(25): SEQ ID NO: 6861; WAN024BO8; Start 86; Stop 110
aagattatgctaaagaagtcaacaa

SEQ ID NO: 451520 - DNA, 25 bp, Artificial
  probe
  misc_feature (1)..(25): SEQ ID NO: 6861; WAN024BO8; Start 84; Stop 108
tgaagattatgctaaagaagtcaac

SEQ ID NO: 451521 - DNA, 25 bp, Artificial
  probe
  misc_feature (1)..(25): SEQ ID NO: 6861; WAN024BO8; Start 81; Stop 105
tgatgaagattatgctaaagaagtc

SEQ ID NO: 451522 - DNA, 25 bp, Artificial
  probe
  misc_feature (1)..(25): SEQ ID NO: 6861; WAN024BO8; Start 71; Stop 95
ttattgaacttgatgaagattatgc

SEQ ID NO: 451523 - DNA, 25 bp, Artificial
  probe
  misc_feature (1)..(25): SEQ ID NO: 6861; WAN024BO8; Start 67; Stop 91
gacattattgaacttgatgaagatt

SEQ ID NO: 451524 - DNA, 25 bp, Artificial
  probe
  misc_feature (1)..(25): SEQ ID NO: 6861; WAN024BO8; Start 75; Stop 99
tgaacttgatgaagattatgctaaa

SEQ ID NO: 451525 - DNA, 25 bp, Artificial
  probe
  misc_feature (1)..(25): SEQ ID NO: 6862; WAN024BUS; Start 316; Stop 340
tatatggacggattcgctaagaaga

SEQ ID NO: 451526 - DNA, 25 bp, Artificial
  probe
  misc_feature (1)..(25): SEQ ID NO: 6862; WAN024BUS; Start 426; Stop 450
cgatggattgattactggtaacatt

SEQ ID NO: 451527 - DNA, 25 bp, Artificial
  probe
  misc_feature (1)..(25): SEQ ID NO: 6862; WAN024BUS; Start 317; Stop 341
atatggacggattcgctaagaagat

SEQ ID NO: 451528 - DNA, 25 bp, Artificial
  probe
  misc_feature (1)..(25): SEQ ID NO: 6862; WAN024BUS; Start 315; Stop 339
atatatggacggattcgctaagaag

SEQ ID NO: 451529 - DNA, 25 bp, Artificial
  probe
  misc_feature (1)..(25): SEQ ID NO: 6862; WAN024BUS; Start 654; Stop 678
tatcaacaagaaccttactgtgact

SEQ ID NO: 451530 - DNA, 25 bp, Artificial
  probe
  misc_feature (1)..(25): SEQ ID NO: 6862; WAN024BUS; Start 318; Stop 342
tatggacggattcgctaagaagatt

SEQ ID NO: 451531 - DNA, 25 bp, Artificial
  probe
  misc_feature (1)..(25): SEQ ID NO: 6862; WAN024BUS; Start 428; Stop 452
atggattgattactggtaacattgt

SEQ ID NO: 451532 - DNA, 25 bp, Artificial
  probe
  misc_feature (1)..(25): SEQ ID NO: 6862; WAN024BUS; Start 587; Stop 611
gagttgttcaatatcctgagttccg

SEQ ID NO: 451533 - DNA, 25 bp, Artificial
  probe
  misc_feature (1)..(25): SEQ ID NO: 6862; WAN024BUS; Start 655; Stop 679
atcaacaagaaccttactgtgactg

SEQ ID NO: 451534 - DNA, 25 bp, Artificial
  probe
  misc_feature (1)..(25): SEQ ID NO: 6862; WAN024BUS; Start 653; Stop 677
atatcaacaagaaccttactgtgac

SEQ ID NO: 451535 - DNA, 25 bp, Artificial
  probe
  misc_feature (1)..(25): SEQ ID NO: 6862; WAN024BUS; Start 523; Stop 547
gaagtaacaggtattgccttatcac

SEQ ID NO: 451536 - DNA, 25 bp, Artificial
  probe
  misc_feature (1)..(25): SEQ ID NO: 6862; WAN024BUS; Start 522; Stop 546
cgaagtaacaggtattgccttatca

SEQ ID NO: 451537 - DNA, 25 bp, Artificial
  probe
  misc_feature (1)..(25): SEQ ID NO: 6862; WAN024BUS; Start 427; Stop 451
gatggattgattactggtaacattg

SEQ ID NO: 451538 - DNA, 25 bp, Artificial
  probe
  misc_feature (1)..(25): SEQ ID NO: 6862; WAN024BUS; Start 429; Stop 453
tggattgattactggtaacattgtt

SEQ ID NO: 451539 - DNA, 25 bp, Artificial
  probe
  misc_feature (1)..(25): SEQ ID NO: 6862; WAN024BUS; Start 424; Stop 448
ttcgatggattgattactggtaaca

SEQ ID NO: 451540 - DNA, 25 bp, Artificial
  probe
  misc_feature (1)..(25): SEQ ID NO: 6862; WAN024BUS; Start 425; Stop 449
tcgatggattgattactggtaacat

SEQ ID NO: 451541 - DNA, 25 bp, Artificial
  probe
  misc_feature (1)..(25): SEQ ID NO: 6862; WAN024BUS; Start 524; Stop 548
aagtaacaggtattgccttatcacc

SEQ ID NO: 451542 - DNA, 25 bp, Artificial
  probe
  misc_feature (1)..(25): SEQ ID NO: 6862; WAN024BUS; Start 586; Stop 610
ggagttgttcaatatcctgagttcc

SEQ ID NO: 451543 - DNA, 25 bp, Artificial
  probe
  misc_feature (1)..(25): SEQ ID NO: 6862; WAN024BUS; Start 423; Stop 447
attcgatggattgattactggtaac

SEQ ID NO: 451544 - DNA, 25 bp, Artificial
  probe
  misc_feature (1)..(25): SEQ ID NO: 6862; WAN024BUS; Start 527; Stop 551
taacaggtattgccttatcaccaac

SEQ ID NO: 451545 - DNA, 25 bp, Artificial
  probe
  misc_feature (1)..(25): SEQ ID NO: 6862; WAN024BUS; Start 526; Stop 550
gtaacaggtattgccttatcaccaa

SEQ ID NO: 451546 - DNA, 25 bp, Artificial
  probe
  misc_feature (1)..(25): SEQ ID NO: 6862; WAN024BUS; Start 585; Stop 609
cggagttgttcaatatcctgagttc

SEQ ID NO: 451547 - DNA, 25 bp, Artificial
  probe
  misc_feature (1)..(25): SEQ ID NO: 6862; WAN024BUS; Start 809; Stop 833
aagcctataatgaaatctgtttgcg

SEQ ID NO: 451548 - DNA, 25 bp, Artificial
  probe
  misc_feature (1)..(25): SEQ ID NO: 6862; WAN024BUS; Start 422; Stop 446
cattcgatggattgattactggtaa

SEQ ID NO: 451549 - DNA, 25 bp, Artificial
  probe
  misc_feature (1)..(25): SEQ ID NO: 6862; WAN024BUS; Start 246; Stop 270
ttatcaagctcgtatcacagatgag

SEQ ID NO: 451550 - DNA, 25 bp, Artificial
  probe
  misc_feature (1)..(25): SEQ ID NO: 6862; WAN024BUS; Start 798; Stop 822
tcgtgaccttaaagcctataatgaa

SEQ ID NO: 451551 - DNA, 25 bp, Artificial
  probe
  misc_feature (1)..(25): SEQ ID NO: 6862; WAN024BUS; Start 521; Stop 545
gcgaagtaacaggtattgccttatc

SEQ ID NO: 451552 - DNA, 25 bp, Artificial
  probe
  misc_feature (1)..(25): SEQ ID NO: 6862; WAN024BUS; Start 421; Stop 445
tcattcgatggattgattactggta

SEQ ID NO: 451553 - DNA, 25 bp, Artificial
  probe
  misc_feature (1)..(25): SEQ ID NO: 6862; WAN024BUS; Start 590; Stop 614
ttgttcaatatcctgagttccgctt

SEQ ID NO: 451554 - DNA, 25 bp, Artificial
  probe
  misc_feature (1)..(25): SEQ ID NO: 6862; WAN024BUS; Start 420; Stop 444
ctcattcgatggattgattactggt

SEQ ID NO: 451555 - DNA, 25 bp, Artificial
  probe
  misc_feature (1)..(25): SEQ ID NO: 6862; WAN024BUS; Start 419; Stop 443
actcattcgatggattgattactgg

SEQ ID NO: 451556 - DNA, 25 bp, Artificial
  probe
  misc_feature (1)..(25): SEQ ID NO: 6862; WAN024BUS; Start 418; Stop 442
aactcattcgatggattgattactg

SEQ ID NO: 451557 - DNA, 25 bp, Artificial
  probe
  misc_feature (1)..(25): SEQ ID NO: 6862; WAN024BUS; Start 125; Stop 149
atggagtggagcaatttatcttcaa

SEQ ID NO: 451558 - DNA, 25 bp, Artificial
  probe
  misc_feature (1)..(25): SEQ ID NO: 6863; WAN024GDY; Start 98; Stop 122
tatacacatatcctgaaccaacgaa

SEQ ID NO: 451559 - DNA, 25 bp, Artificial
  probe
  misc_feature (1)..(25): SEQ ID NO: 6863; WAN024GDY; Start 97; Stop 121
ttatacacatatcctgaaccaacga

SEQ ID NO: 451560 - DNA, 25 bp, Artificial
  probe
  misc_feature (1)..(25): SEQ ID NO: 6863; WAN024GDY; Start 68; Stop 92
caagaggtgttaagagtagactgaa

SEQ ID NO: 451561 - DNA, 25 bp, Artificial
  probe
  misc_feature (1)..(25): SEQ ID NO: 6863; WAN024GDY; Start 96; Stop 120
attatacacatatcctgaaccaacg

SEQ ID NO: 451562 - DNA, 25 bp, Artificial
  probe
  misc_feature (1)..(25): SEQ ID NO: 6863; WAN024GDY; Start 67; Stop 91
ccaagaggtgttaagagtagactga

SEQ ID NO: 451563 - DNA, 25 bp, Artificial
  probe
  misc_feature (1)..(25): SEQ ID NO: 6863; WAN024GDY; Start 65; Stop 89
aaccaagaggtgttaagagtagact

SEQ ID NO: 451564 - DNA, 25 bp, Artificial
  probe
  misc_feature (1)..(25): SEQ ID NO: 6863; WAN024GDY; Start 135; Stop 159
aaagatagacaagaaagcaagcaag

SEQ ID NO: 451565 - DNA, 25 bp, Artificial
  probe
  misc_feature (1)..(25): SEQ ID NO: 6863; WAN024GDY; Start 142; Stop 166
gacaagaaagcaagcaagataacat

SEQ ID NO: 451566 - DNA, 25 bp, Artificial
  probe
  misc_feature (1)..(25): SEQ ID NO: 6863; WAN024GDY; Start 140; Stop 164
tagacaagaaagcaagcaagataac

SEQ ID NO: 451567 - DNA, 25 bp, Artificial
  probe
  misc_feature (1)..(25): SEQ ID NO: 6863; WAN024GDY; Start 99; Stop 123
atacacatatcctgaaccaacgaaa

SEQ ID NO: 451568 - DNA, 25 bp, Artificial
  probe
  misc_feature (1)..(25): SEQ ID NO: 6863; WAN024GDY; Start 137; Stop 161
agatagacaagaaagcaagcaagat

SEQ ID NO: 451569 - DNA, 25 bp, Artificial
  probe
  misc_feature (1)..(25): SEQ ID NO: 6863; WAN024GDY; Start 143; Stop 167
acaagaaagcaagcaagataacatc

SEQ ID NO: 451570 - DNA, 25 bp, Artificial
  probe
  misc_feature (1)..(25): SEQ ID NO: 6863; WAN024GDY; Start 136; Stop 160
aagatagacaagaaagcaagcaaga

SEQ ID NO: 451571 - DNA, 25 bp, Artificial
  probe
  misc_feature (1)..(25): SEQ ID NO: 6863; WAN024GDY; Start 138; Stop 162
gatagacaagaaagcaagcaagata

SEQ ID NO: 451572 - DNA, 25 bp, Artificial
  probe
  misc_feature (1)..(25): SEQ ID NO: 6863; WAN024GDY; Start 223; Stop 247
actcaagaagaccgacctaaatact

SEQ ID NO: 451573 - DNA, 25 bp, Artificial
  probe
  misc_feature (1)..(25): SEQ ID NO: 6863; WAN024GDY; Start 222; Stop 246
cactcaagaagaccgacctaaatac

SEQ ID NO: 451574 - DNA, 25 bp, Artificial
  probe
  misc_feature (1)..(25): SEQ ID NO: 6863; WAN024GDY; Start 227; Stop 251
aagaagaccgacctaaatactttgt

SEQ ID NO: 451575 - DNA, 25 bp, Artificial
  probe
  misc_feature (1)..(25): SEQ ID NO: 6863; WAN024GDY; Start 224; Stop 248
ctcaagaagaccgacctaaatactt

SEQ ID NO: 451576 - DNA, 25 bp, Artificial
  probe
  misc_feature (1)..(25): SEQ ID NO: 6863; WAN024GDY; Start 225; Stop 249
tcaagaagaccgacctaaatacttt

SEQ ID NO: 451577 - DNA, 25 bp, Artificial
  probe
  misc_feature (1)..(25): SEQ ID NO: 6863; WAN024GDY; Start 66; Stop 90
accaagaggtgttaagagtagactg

SEQ ID NO: 451578 - DNA, 25 bp, Artificial
  probe
  misc_feature (1)..(25): SEQ ID NO: 6863; WAN024GDY; Start 141; Stop 165
agacaagaaagcaagcaagataaca

SEQ ID NO: 451579 - DNA, 25 bp, Artificial
  probe
  misc_feature (1)..(25): SEQ ID NO: 6863; WAN024GDY; Start 69; Stop 93
aagaggtgttaagagtagactgaaa

SEQ ID NO: 451580 - DNA, 25 bp, Artificial
  probe
  misc_feature (1)..(25): SEQ ID NO: 6863; WAN024GDY; Start 221; Stop 245
acactcaagaagaccgacctaaata

SEQ ID NO: 451581 - DNA, 25 bp, Artificial
  probe
  misc_feature (1)..(25): SEQ ID NO: 6863; WAN024GDY; Start 139; Stop 163
atagacaagaaagcaagcaagataa

SEQ ID NO: 451582 - DNA, 25 bp, Artificial
  probe
  misc_feature (1)..(25): SEQ ID NO: 6863; WAN024GDY; Start 228; Stop 252
agaagaccgacctaaatactttgta

SEQ ID NO: 451583 - DNA, 25 bp, Artificial
  probe
  misc_feature (1)..(25): SEQ ID NO: 6863; WAN024GDY; Start 226; Stop 250
caagaagaccgacctaaatactttg

SEQ ID NO: 451584 - DNA, 25 bp, Artificial
  probe
  misc_feature (1)..(25): SEQ ID NO: 6863; WAN024GDY; Start 21; Stop 45
catacaccagagaccgaagaggatt

SEQ ID NO: 451585 - DNA, 25 bp, Artificial
  probe
  misc_feature (1)..(25): SEQ ID NO: 6863; WAN024GDY; Start 220; Stop 244
gacactcaagaagaccgacctaaat

SEQ ID NO: 451586 - DNA, 25 bp, Artificial
  probe
  misc_feature (1)..(25): SEQ ID NO: 6863; WAN024GDY; Start 95; Stop 119
tattatacacatatcctgaaccaac

SEQ ID NO: 451587 - DNA, 25 bp, Artificial
  probe
  misc_feature (1)..(25): SEQ ID NO: 6863; WAN024GDY; Start 64; Stop 88
aaaccaagaggtgttaagagtagac

SEQ ID NO: 451588 - DNA, 25 bp, Artificial
  probe
  misc_feature (1)..(25): SEQ ID NO: 6863; WAN024GDY; Start 63; Stop 87
caaaccaagaggtgttaagagtaga

SEQ ID NO: 451589 - DNA, 25 bp, Artificial
  probe
  misc_feature (1)..(25): SEQ ID NO: 6863; WAN024GDY; Start 229; Stop 253
gaagaccgacctaaatactttgtat

SEQ ID NO: 451590 - DNA, 25 bp, Artificial
  probe
  misc_feature (1)..(25): SEQ ID NO: 6863; WAN024GDY; Start 144; Stop 168
caagaaagcaagcaagataacatct

SEQ ID NO: 451591 - DNA, 25 bp, Artificial
  probe
  misc_feature (1)..(25): SEQ ID NO: 6864; WAN024FNY; Start 110; Stop 134
gtagattaagacgactgaatgagga

SEQ ID NO: 451592 - DNA, 25 bp, Artificial
  probe
  misc_feature (1)..(25): SEQ ID NO: 6864; WAN024FNY; Start 111; Stop 135
tagattaagacgactgaatgaggaa

SEQ ID NO: 451593 - DNA, 25 bp, Artificial
  probe
  misc_feature (1)..(25): SEQ ID NO: 6864; WAN024FNY; Start 24; Stop 48
acttattgaagagaagactgaagaa

SEQ ID NO: 451594 - DNA, 25 bp, Artificial
  probe
  misc_feature (1)..(25): SEQ ID NO: 6864; WAN024FNY; Start 27; Stop 51
tattgaagagaagactgaagaagaa

SEQ ID NO: 451595 - DNA, 25 bp, Artificial
  probe
  misc_feature (1)..(25): SEQ ID NO: 6864; WAN024FNY; Start 26; Stop 50
ttattgaagagaagactgaagaaga

SEQ ID NO: 451596 - DNA, 25 bp, Artificial
  probe
  misc_feature (1)..(25): SEQ ID NO: 6864; WAN024FNY; Start 112; Stop 136
agattaagacgactgaatgaggaaa

SEQ ID NO: 451597 - DNA, 25 bp, Artificial
  probe
  misc_feature (1)..(25): SEQ ID NO: 6864; WAN024FNY; Start 113; Stop 137
gattaagacgactgaatgaggaaag

SEQ ID NO: 451598 - DNA, 25 bp, Artificial
  probe
  misc_feature (1)..(25): SEQ ID NO: 6864; WAN024FNY; Start 143; Stop 167
gcttgaaagtgtttagtaaggagac

SEQ ID NO: 451599 - DNA, 25 bp, Artificial
  probe
  misc_feature (1)..(25): SEQ ID NO: 6864; WAN024FNY; Start 25; Stop 49
cttattgaagagaagactgaagaag

SEQ ID NO: 451600 - DNA, 25 bp, Artificial
  probe
  misc_feature (1)..(25): SEQ ID NO: 6864; WAN024FNY; Start 144; Stop 168
cttgaaagtgtttagtaaggagacg

SEQ ID NO: 451601 - DNA, 25 bp, Artificial
  probe
  misc_feature (1)..(25): SEQ ID NO: 6864; WAN024FNY; Start 127; Stop 151
aatgaggaaagtaaacgcttgaaag

SEQ ID NO: 451602 - DNA, 25 bp, Artificial
  probe
  misc_feature (1)..(25): SEQ ID NO: 6864; WAN024FNY; Start 126; Stop 150
gaatgaggaaagtaaacgcttgaaa

SEQ ID NO: 451603 - DNA, 25 bp, Artificial
  probe
  misc_feature (1)..(25): SEQ ID NO: 6864; WAN024FNY; Start 96; Stop 120
tgatgatgtaagtcgtagattaaga

SEQ ID NO: 451604 - DNA, 25 bp, Artificial
  probe
  misc_feature (1)..(25): SEQ ID NO: 6864; WAN024FNY; Start 95; Stop 119
ctgatgatgtaagtcgtagattaag

SEQ ID NO: 451605 - DNA, 25 bp, Artificial
  probe
  misc_feature (1)..(25): SEQ ID NO: 6864; WAN024FNY; Start 145; Stop 169
ttgaaagtgtttagtaaggagacgc

SEQ ID NO: 451606 - DNA, 25 bp, Artificial
  probe
  misc_feature (1)..(25): SEQ ID NO: 6864; WAN024FNY; Start 142; Stop 166
cgcttgaaagtgtttagtaaggaga

SEQ ID NO: 451607 - DNA, 25 bp, Artificial
  probe
  misc_feature (1)..(25): SEQ ID NO: 6864; WAN024FNY; Start 94; Stop 118
tctgatgatgtaagtcgtagattaa

SEQ ID NO: 451608 - DNA, 25 bp, Artificial
  probe
  misc_feature (1)..(25): SEQ ID NO: 6864; WAN024FNY; Start 140; Stop 164
aacgcttgaaagtgtttagtaagga

SEQ ID NO: 451609 - DNA, 25 bp, Artificial
  probe
  misc_feature (1)..(25): SEQ ID NO: 6864; WAN024FNY; Start 90; Stop 114
cttatctgatgatgtaagtcgtaga

SEQ ID NO: 451610 - DNA, 25 bp, Artificial
  probe
  misc_feature (1)..(25): SEQ ID NO: 6864; WAN024FNY; Start 21; Stop 45
tgtacttattgaagagaagactgaa

SEQ ID NO: 451611 - DNA, 25 bp, Artificial
  probe
  misc_feature (1)..(25): SEQ ID NO: 6864; WAN024FNY; Start 114; Stop 138
attaagacgactgaatgaggaaagt

SEQ ID NO: 451612 - DNA, 25 bp, Artificial
  probe
  misc_feature (1)..(25): SEQ ID NO: 6864; WAN024FNY; Start 128; Stop 152
atgaggaaagtaaacgcttgaaagt

SEQ ID NO: 451613 - DNA, 25 bp, Artificial
  probe
  misc_feature (1)..(25): SEQ ID NO: 6864; WAN024FNY; Start 125; Stop 149
tgaatgaggaaagtaaacgcttgaa

SEQ ID NO: 451614 - DNA, 25 bp, Artificial
  probe
  misc_feature (1)..(25): SEQ ID NO: 6864; WAN024FNY; Start 117; Stop 141
aagacgactgaatgaggaaagtaaa

SEQ ID NO: 451615 - DNA, 25 bp, Artificial
  probe
  misc_feature (1)..(25): SEQ ID NO: 6864; WAN024FNY; Start 116; Stop 140
taagacgactgaatgaggaaagtaa

SEQ ID NO: 451616 - DNA, 25 bp, Artificial
  probe
  misc_feature (1)..(25): SEQ ID NO: 6864; WAN024FNY; Start 115; Stop 139
ttaagacgactgaatgaggaaagta

SEQ ID NO: 451617 - DNA, 25 bp, Artificial
  probe
  misc_feature (1)..(25): SEQ ID NO: 6864; WAN024FNY; Start 141; Stop 165
acgcttgaaagtgtttagtaaggag

SEQ ID NO: 451618 - DNA, 25 bp, Artificial
  probe
  misc_feature (1)..(25): SEQ ID NO: 6864; WAN024FNY; Start 23; Stop 47
tacttattgaagagaagactgaaga

SEQ ID NO: 451619 - DNA, 25 bp, Artificial
  probe
  misc_feature (1)..(25): SEQ ID NO: 6864; WAN024FNY; Start 118; Stop 142
agacgactgaatgaggaaagtaaac

SEQ ID NO: 451620 - DNA, 25 bp, Artificial
  probe
  misc_feature (1)..(25): SEQ ID NO: 6864; WAN024FNY; Start 124; Stop 148
ctgaatgaggaaagtaaacgcttga

SEQ ID NO: 451621 - DNA, 25 bp, Artificial
  probe
  misc_feature (1)..(25): SEQ ID NO: 6864; WAN024FNY; Start 20; Stop 44
atgtacttattgaagagaagactga

SEQ ID NO: 451622 - DNA, 25 bp, Artificial
  probe
  misc_feature (1)..(25): SEQ ID NO: 6864; WAN024FNY; Start 28; Stop 52
attgaagagaagactgaagaagaaa

SEQ ID NO: 451623 - DNA, 25 bp, Artificial
  probe
  misc_feature (1)..(25): SEQ ID NO: 6864; WAN024FNY; Start 131; Stop 155
aggaaagtaaacgcttgaaagtgtt

SEQ ID NO: 451624 - DNA, 25 bp, Artificial
  probe
  misc_feature (1)..(25): SEQ ID NO: 6865; WAN024FM3; Start 933; Stop 957
agcaattcaatcacatattccaacg

SEQ ID NO: 451625 - DNA, 25 bp, Artificial
  probe
  misc_feature (1)..(25): SEQ ID NO: 6865; WAN024FM3; Start 694; Stop 718
tcaacggcaggtataagtattatcg

SEQ ID NO: 451626 - DNA, 25 bp, Artificial
  probe
  misc_feature (1)..(25): SEQ ID NO: 6865; WAN024FM3; Start 695; Stop 719
caacggcaggtataagtattatcgg

SEQ ID NO: 451627 - DNA, 25 bp, Artificial
  probe
  misc_feature (1)..(25): SEQ ID NO: 6865; WAN024FM3; Start 693; Stop 717
ttcaacggcaggtataagtattatc

SEQ ID NO: 451628 - DNA, 25 bp, Artificial
  probe
  misc_feature (1)..(25): SEQ ID NO: 6865; WAN024FM3; Start 112; Stop 136
atcgtgccattattaattacaaccg

SEQ ID NO: 451629 - DNA, 25 bp, Artificial
  probe
  misc_feature (1)..(25): SEQ ID NO: 6865; WAN024FM3; Start 114; Stop 138
cgtgccattattaattacaaccgta

SEQ ID NO: 451630 - DNA, 25 bp, Artificial
  probe
  misc_feature (1)..(25): SEQ ID NO: 6865; WAN024FM3; Start 932; Stop 956
tagcaattcaatcacatattccaac

SEQ ID NO: 451631 - DNA, 25 bp, Artificial
  probe
  misc_feature (1)..(25): SEQ ID NO: 6865; WAN024FM3; Start 113; Stop 137
tcgtgccattattaattacaaccgt

SEQ ID NO: 451632 - DNA, 25 bp, Artificial
  probe
  misc_feature (1)..(25): SEQ ID NO: 6865; WAN024FM3; Start 450; Stop 474
tacctcgacagtaattaatcagtgg

SEQ ID NO: 451633 - DNA, 25 bp, Artificial
  probe
  misc_feature (1)..(25): SEQ ID NO: 6865; WAN024FM3; Start 448; Stop 472
cctacctcgacagtaattaatcagt

SEQ ID NO: 451634 - DNA, 25 bp, Artificial
  probe
  misc_feature (1)..(25): SEQ ID NO: 6865; WAN024FM3; Start 447; Stop 471
tcctacctcgacagtaattaatcag

SEQ ID NO: 451635 - DNA, 25 bp, Artificial
  probe
  misc_feature (1)..(25): SEQ ID NO: 6865; WAN024FM3; Start 442; Stop 466
gtacatcctacctcgacagtaatta

SEQ ID NO: 451636 - DNA, 25 bp, Artificial
  probe
  misc_feature (1)..(25): SEQ ID NO: 6865; WAN024FM3; Start 444; Stop 468
acatcctacctcgacagtaattaat

SEQ ID NO: 451637 - DNA, 25 bp, Artificial
  probe
  misc_feature (1)..(25): SEQ ID NO: 6865; WAN024FM3; Start 111; Stop 135
aatcgtgccattattaattacaacc

SEQ ID NO: 451638 - DNA, 25 bp, Artificial
  probe
  misc_feature (1)..(25): SEQ ID NO: 6865; WAN024FM3; Start 449; Stop 473
ctacctcgacagtaattaatcagtg

SEQ ID NO: 451639 - DNA, 25 bp, Artificial
  probe
  misc_feature (1)..(25): SEQ ID NO: 6865; WAN024FM3; Start 446; Stop 470
atcctacctcgacagtaattaatca

SEQ ID NO: 451640 - DNA, 25 bp, Artificial
  probe
  misc_feature (1)..(25): SEQ ID NO: 6865; WAN024FM3; Start 826; Stop 850
aaatcagagacagtttcagcaaatc

SEQ ID NO: 451641 - DNA, 25 bp, Artificial
  probe
  misc_feature (1)..(25): SEQ ID NO: 6865; WAN024FM3; Start 796; Stop 820
ggcttctctttgttactcctattga

SEQ ID NO: 451642 - DNA, 25 bp, Artificial
  probe
  misc_feature (1)..(25): SEQ ID NO: 6865; WAN024FM3; Start 931; Stop 955
ttagcaattcaatcacatattccaa

SEQ ID NO: 451643 - DNA, 25 bp, Artificial
  probe
  misc_feature (1)..(25): SEQ ID NO: 6865; WAN024FM3; Start 789; Stop 813
aggtttaggcttctctttgttactc

SEQ ID NO: 451644 - DNA, 25 bp, Artificial
  probe
  misc_feature (1)..(25): SEQ ID NO: 6865; WAN024FM3; Start 414; Stop 438
ttggatatttgggacacttctgaat

SEQ ID NO: 451645 - DNA, 25 bp, Artificial
  probe
  misc_feature (1)..(25): SEQ ID NO: 6865; WAN024FM3; Start 934; Stop 958
gcaattcaatcacatattccaacgt

SEQ ID NO: 451646 - DNA, 25 bp, Artificial
  probe
  misc_feature (1)..(25): SEQ ID NO: 6865; WAN024FM3; Start 413; Stop 437
tttggatatttgggacacttctgaa

SEQ ID NO: 451647 - DNA, 25 bp, Artificial
  probe
  misc_feature (1)..(25): SEQ ID NO: 6865; WAN024FM3; Start 79; Stop 103
atatacaccgtaaagtctgaacctc

SEQ ID NO: 451648 - DNA, 25 bp, Artificial
  probe
  misc_feature (1)..(25): SEQ ID NO: 6865; WAN024FM3; Start 797; Stop 821
gcttctctttgttactcctattgac

SEQ ID NO: 451649 - DNA, 25 bp, Artificial
  probe
  misc_feature (1)..(25): SEQ ID NO: 6865; WAN024FM3; Start 456; Stop 480
gacagtaattaatcagtggtctggt

SEQ ID NO: 451650 - DNA, 25 bp, Artificial
  probe
  misc_feature (1)..(25): SEQ ID NO: 6865; WAN024FM3; Start 788; Stop 812
taggtttaggcttctctttgttact

SEQ ID NO: 451651 - DNA, 25 bp, Artificial
  probe
  misc_feature (1)..(25): SEQ ID NO: 6865; WAN024FM3; Start 787; Stop 811
gtaggtttaggcttctctttgttac

SEQ ID NO: 451652 - DNA, 25 bp, Artificial
  probe
  misc_feature (1)..(25): SEQ ID NO: 6865; WAN024FM3; Start 786; Stop 810
agtaggtttaggcttctctttgtta

SEQ ID NO: 451653 - DNA, 25 bp, Artificial
  probe
  misc_feature (1)..(25): SEQ ID NO: 6865; WAN024FM3; Start 785; Stop 809
cagtaggtttaggcttctctttgtt

SEQ ID NO: 451654 - DNA, 25 bp, Artificial
  probe
  misc_feature (1)..(25): SEQ ID NO: 6865; WAN024FM3; Start 457; Stop 481
acagtaattaatcagtggtctggtg

SEQ ID NO: 451655 - DNA, 25 bp, Artificial
  probe
  misc_feature (1)..(25): SEQ ID NO: 6865; WAN024FM3; Start 445; Stop 469
catcctacctcgacagtaattaatc

SEQ ID NO: 451656 - DNA, 25 bp, Artificial
  probe
  misc_feature (1)..(25): SEQ ID NO: 6865; WAN024FM3; Start 93; Stop 117
gtctgaacctcttactttaatcgtg

SEQ ID NO: 451657 - DNA, 25 bp, Artificial
  probe
  misc_feature (1)..(25): SEQ ID NO: 6866; WAN024G8F; Start 198; Stop 222
gacagatgagataggcaatggttca

SEQ ID NO: 451658 - DNA, 25 bp, Artificial
  probe
  misc_feature (1)..(25): SEQ ID NO: 6866; WAN024G8F; Start 197; Stop 221
ggacagatgagataggcaatggttc

SEQ ID NO: 451659 - DNA, 25 bp, Artificial
  probe
  misc_feature (1)..(25): SEQ ID NO: 6866; WAN024G8F; Start 199; Stop 223
acagatgagataggcaatggttcac

SEQ ID NO: 451660 - DNA, 25 bp, Artificial
  probe
  misc_feature (1)..(25): SEQ ID NO: 6866; WAN024G8F; Start 195; Stop 219
atggacagatgagataggcaatggt

SEQ ID NO: 451661 - DNA, 25 bp, Artificial
  probe
  misc_feature (1)..(25): SEQ ID NO: 6866; WAN024G8F; Start 196; Stop 220
tggacagatgagataggcaatggtt

SEQ ID NO: 451662 - DNA, 25 bp, Artificial
  probe
  misc_feature (1)..(25): SEQ ID NO: 6866; WAN024G8F; Start 194; Stop 218
catggacagatgagataggcaatgg

SEQ ID NO: 451663 - DNA, 25 bp, Artificial
  probe
  misc_feature (1)..(25): SEQ ID NO: 6866; WAN024G8F; Start 29; Stop 53
gactagcaataacacggtcttctcc

SEQ ID NO: 451664 - DNA, 25 bp, Artificial
  probe
  misc_feature (1)..(25): SEQ ID NO: 6866; WAN024G8F; Start 28; Stop 52
ggactagcaataacacggtcttctc

SEQ ID NO: 451665 - DNA, 25 bp, Artificial
  probe
  misc_feature (1)..(25): SEQ ID NO: 6866; WAN024G8F; Start 200; Stop 224
cagatgagataggcaatggttcacc

SEQ ID NO: 451666 - DNA, 25 bp, Artificial
  probe
  misc_feature (1)..(25): SEQ ID NO: 6866; WAN024G8F; Start 105; Stop 129
gctaaacttaatgacatctggattt

SEQ ID NO: 451667 - DNA, 25 bp, Artificial
  probe
  misc_feature (1)..(25): SEQ ID NO: 6866; WAN024G8F; Start 93; Stop 117
acgaccaatcaagctaaacttaatg

SEQ ID NO: 451668 - DNA, 25 bp, Artificial
  probe
  misc_feature (1)..(25): SEQ ID NO: 6866; WAN024G8F; Start 92; Stop 116
gacgaccaatcaagctaaacttaat

SEQ ID NO: 451669 - DNA, 25 bp, Artificial
  probe
  misc_feature (1)..(25): SEQ ID NO: 6866; WAN024G8F; Start 26; Stop 50
caggactagcaataacacggtcttc

SEQ ID NO: 451670 - DNA, 25 bp, Artificial
  probe
  misc_feature (1)..(25): SEQ ID NO: 6866; WAN024G8F; Start 102; Stop 126
caagctaaacttaatgacatctgga

SEQ ID NO: 451671 - DNA, 25 bp, Artificial
  probe
  misc_feature (1)..(25): SEQ ID NO: 6866; WAN024G8F; Start 27; Stop 51
aggactagcaataacacggtcttct

SEQ ID NO: 451672 - DNA, 25 bp, Artificial
  probe
  misc_feature (1)..(25): SEQ ID NO: 6866; WAN024G8F; Start 17; Stop 41
ttccagcaacaggactagcaataac

SEQ ID NO: 451673 - DNA, 25 bp, Artificial
  probe
  misc_feature (1)..(25): SEQ ID NO: 6866; WAN024G8F; Start 16; Stop 40
gttccagcaacaggactagcaataa

SEQ ID NO: 451674 - DNA, 25 bp, Artificial
  probe
  misc_feature (1)..(25): SEQ ID NO: 6866; WAN024G8F; Start 94; Stop 118
cgaccaatcaagctaaacttaatga

SEQ ID NO: 451675 - DNA, 25 bp, Artificial
  probe
  misc_feature (1)..(25): SEQ ID NO: 6866; WAN024G8F; Start 19; Stop 43
ccagcaacaggactagcaataacac

SEQ ID NO: 451676 - DNA, 25 bp, Artificial
  probe
  misc_feature (1)..(25): SEQ ID NO: 6866; WAN024G8F; Start 91; Stop 115
ggacgaccaatcaagctaaacttaa

SEQ ID NO: 451677 - DNA, 25 bp, Artificial
  probe
  misc_feature (1)..(25): SEQ ID NO: 6866; WAN024G8F; Start 101; Stop 125
tcaagctaaacttaatgacatctgg

SEQ ID NO: 451678 - DNA, 25 bp, Artificial
  probe
  misc_feature (1)..(25): SEQ ID NO: 6866; WAN024G8F; Start 96; Stop 120
accaatcaagctaaacttaatgaca

SEQ ID NO: 451679 - DNA, 25 bp, Artificial
  probe
  misc_feature (1)..(25): SEQ ID NO: 6866; WAN024G8F; Start 104; Stop 128
agctaaacttaatgacatctggatt

SEQ ID NO: 451680 - DNA, 25 bp, Artificial
  probe
  misc_feature (1)..(25): SEQ ID NO: 6866; WAN024G8F; Start 103; Stop 127
aagctaaacttaatgacatctggat

SEQ ID NO: 451681 - DNA, 25 bp, Artificial
  probe
  misc_feature (1)..(25): SEQ ID NO: 6866; WAN024G8F; Start 95; Stop 119
gaccaatcaagctaaacttaatgac

SEQ ID NO: 451682 - DNA, 25 bp, Artificial
  probe
  misc_feature (1)..(25): SEQ ID NO: 6866; WAN024G8F; Start 23; Stop 47
caacaggactagcaataacacggtc

SEQ ID NO: 451683 - DNA, 25 bp, Artificial
  probe
  misc_feature (1)..(25): SEQ ID NO: 6866; WAN024G8F; Start 90; Stop 114
aggacgaccaatcaagctaaactta

SEQ ID NO: 451684 - DNA, 25 bp, Artificial
  probe
  misc_feature (1)..(25): SEQ ID NO: 6866; WAN024G8F; Start 89; Stop 113
taggacgaccaatcaagctaaactt

SEQ ID NO: 451685 - DNA, 25 bp, Artificial
  probe
  misc_feature (1)..(25): SEQ ID NO: 6866; WAN024G8F; Start 20; Stop 44
cagcaacaggactagcaataacacg

SEQ ID NO: 451686 - DNA, 25 bp, Artificial
  probe
  misc_feature (1)..(25): SEQ ID NO: 6866; WAN024G8F; Start 25; Stop 49
acaggactagcaataacacggtctt

SEQ ID NO: 451687 - DNA, 25 bp, Artificial
  probe
  misc_feature (1)..(25): SEQ ID NO: 6866; WAN024G8F; Start 24; Stop 48
aacaggactagcaataacacggtct

SEQ ID NO: 451688 - DNA, 25 bp, Artificial
  probe
  misc_feature (1)..(25): SEQ ID NO: 6866; WAN024G8F; Start 45; Stop 69
gtcttctcccaagatagcattgatc

SEQ ID NO: 451689 - DNA, 25 bp, Artificial
  probe
  misc_feature (1)..(25): SEQ ID NO: 6866; WAN024G8F; Start 36; Stop 60
aataacacggtcttctcccaagata

SEQ ID NO: 451690 - DNA, 25 bp, Artificial
  probe
  misc_feature (1)..(25): SEQ ID NO: 6867; WAN024BO6; Start 359; Stop 383
ttgatgttgatgctatccagttaga

SEQ ID NO: 451691 - DNA, 25 bp, Artificial
  probe
  misc_feature (1)..(25): SEQ ID NO: 6867; WAN024BO6; Start 360; Stop 384
tgatgttgatgctatccagttagac

SEQ ID NO: 451692 - DNA, 25 bp, Artificial
  probe
  misc_feature (1)..(25): SEQ ID NO: 6867; WAN024BO6; Start 358; Stop 382
attgatgttgatgctatccagttag

SEQ ID NO: 451693 - DNA, 25 bp, Artificial
  probe
  misc_feature (1)..(25): SEQ ID NO: 6867; WAN024BO6; Start 357; Stop 381
cattgatgttgatgctatccagtta

SEQ ID NO: 451694 - DNA, 25 bp, Artificial
  probe
  misc_feature (1)..(25): SEQ ID NO: 6867; WAN024BO6; Start 361; Stop 385
gatgttgatgctatccagttagacg

SEQ ID NO: 451695 - DNA, 25 bp, Artificial
  probe
  misc_feature (1)..(25): SEQ ID NO: 6867; WAN024BO6; Start 356; Stop 380
tcattgatgttgatgctatccagtt

SEQ ID NO: 451696 - DNA, 25 bp, Artificial
  probe
  misc_feature (1)..(25): SEQ ID NO: 6867; WAN024BO6; Start 355; Stop 379
ttcattgatgttgatgctatccagt

SEQ ID NO: 451697 - DNA, 25 bp, Artificial
  probe
  misc_feature (1)..(25): SEQ ID NO: 6867; WAN024BO6; Start 354; Stop 378
attcattgatgttgatgctatccag

SEQ ID NO: 451698 - DNA, 25 bp, Artificial
  probe
  misc_feature (1)..(25): SEQ ID NO: 6867; WAN024BO6; Start 362; Stop 386
atgttgatgctatccagttagacga

SEQ ID NO: 451699 - DNA, 25 bp, Artificial
  probe
  misc_feature (1)..(25): SEQ ID NO: 6867; WAN024BO6; Start 353; Stop 377
aattcattgatgttgatgctatcca

SEQ ID NO: 451700 - DNA, 25 bp, Artificial
  probe
  misc_feature (1)..(25): SEQ ID NO: 6867; WAN024BO6; Start 365; Stop 389
ttgatgctatccagttagacgacaa

SEQ ID NO: 451701 - DNA, 25 bp, Artificial
  probe
  misc_feature (1)..(25): SEQ ID NO: 6867; WAN024BO6; Start 364; Stop 388
gttgatgctatccagttagacgaca

SEQ ID NO: 451702 - DNA, 25 bp, Artificial
  probe
  misc_feature (1)..(25): SEQ ID NO: 6867; WAN024BO6; Start 363; Stop 387
tgttgatgctatccagttagacgac

SEQ ID NO: 451703 - DNA, 25 bp, Artificial
  probe
  misc_feature (1)..(25): SEQ ID NO: 6867; WAN024BO6; Start 366; Stop 390
tgatgctatccagttagacgacaac

SEQ ID NO: 451704 - DNA, 25 bp, Artificial
  probe
  misc_feature (1)..(25): SEQ ID NO: 6867; WAN024BO6; Start 322; Stop 346
acaaatgctttcaatccagacaaat

SEQ ID NO: 451705 - DNA, 25 bp, Artificial
  probe
  misc_feature (1)..(25): SEQ ID NO: 6867; WAN024BO6; Start 107; Stop 131
tagaaactatcaaacaagagcgaga

SEQ ID NO: 451706 - DNA, 25 bp, Artificial
  probe
  misc_feature (1)..(25): SEQ ID NO: 6867; WAN024BO6; Start 3; Stop 27
ggcatttacaactgaagaactactc

SEQ ID NO: 451707 - DNA, 25 bp, Artificial
  probe
  misc_feature (1)..(25): SEQ ID NO: 6867; WAN024BO6; Start 321; Stop 345
tacaaatgctttcaatccagacaaa

SEQ ID NO: 451708 - DNA, 25 bp, Artificial
  probe
  misc_feature (1)..(25): SEQ ID NO: 6867; WAN024BO6; Start 8; Stop 32
ttacaactgaagaactactcaatct

SEQ ID NO: 451709 - DNA, 25 bp, Artificial
  probe
  misc_feature (1)..(25): SEQ ID NO: 6867; WAN024BO6; Start 2; Stop 26
tggcatttacaactgaagaactact

SEQ ID NO: 451710 - DNA, 25 bp, Artificial
  probe
  misc_feature (1)..(25): SEQ ID NO: 6867; WAN024BO6; Start 93; Stop 117
ggacaaatcagccttagaaactatc

SEQ ID NO: 451711 - DNA, 25 bp, Artificial
  probe
  misc_feature (1)..(25): SEQ ID NO: 6867; WAN024BO6; Start 319; Stop 343
gatacaaatgctttcaatccagaca

SEQ ID NO: 451712 - DNA, 25 bp, Artificial
  probe
  misc_feature (1)..(25): SEQ ID NO: 6867; WAN024BO6; Start 1; Stop 25
atggcatttacaactgaagaactac

SEQ ID NO: 451713 - DNA, 25 bp, Artificial
  probe
  misc_feature (1)..(25): SEQ ID NO: 6867; WAN024BO6; Start 320; Stop 344
atacaaatgctttcaatccagacaa

SEQ ID NO: 451714 - DNA, 25 bp, Artificial
  probe
  misc_feature (1)..(25): SEQ ID NO: 6867; WAN024BO6; Start 108; Stop 132
agaaactatcaaacaagagcgagat

SEQ ID NO: 451715 - DNA, 25 bp, Artificial
  probe
  misc_feature (1)..(25): SEQ ID NO: 6867; WAN024BO6; Start 318; Stop 342
agatacaaatgctttcaatccagac

SEQ ID NO: 451716 - DNA, 25 bp, Artificial
  probe
  misc_feature (1)..(25): SEQ ID NO: 6867; WAN024BO6; Start 106; Stop 130
ttagaaactatcaaacaagagcgag

SEQ ID NO: 451717 - DNA, 25 bp, Artificial
  probe
  misc_feature (1)..(25): SEQ ID NO: 6867; WAN024BO6; Start 104; Stop 128
ccttagaaactatcaaacaagagcg

SEQ ID NO: 451718 - DNA, 25 bp, Artificial
  probe
  misc_feature (1)..(25): SEQ ID NO: 6867; WAN024BO6; Start 103; Stop 127
gccttagaaactatcaaacaagagc

SEQ ID NO: 451719 - DNA, 25 bp, Artificial
  probe
  misc_feature (1)..(25): SEQ ID NO: 6867; WAN024BO6; Start 323; Stop 347
caaatgctttcaatccagacaaatt

SEQ ID NO: 451720 - DNA, 25 bp, Artificial
  probe
  misc_feature (1)..(25): SEQ ID NO: 6867; WAN024BO6; Start 94; Stop 118
gacaaatcagccttagaaactatca

SEQ ID NO: 451721 - DNA, 25 bp, Artificial
  probe
  misc_feature (1)..(25): SEQ ID NO: 6867; WAN024BO6; Start 105; Stop 129
cttagaaactatcaaacaagagcga

SEQ ID NO: 451722 - DNA, 25 bp, Artificial
  probe
  misc_feature (1)..(25): SEQ ID NO: 6867; WAN024BO6; Start 230; Stop 254
tgcaagctgaatatgacaagtataa

SEQ ID NO: 451723 - DNA, 25 bp, Artificial
  probe
  misc_feature (1)..(25): SEQ ID NO: 6868; WAN024BWK; Start 496; Stop 520
ttagatgaagtgtgtgtgttacctc

SEQ ID NO: 451724 - DNA, 25 bp, Artificial
  probe
  misc_feature (1)..(25): SEQ ID NO: 6868; WAN024BWK; Start 497; Stop 521
tagatgaagtgtgtgtgttacctcc

SEQ ID NO: 451725 - DNA, 25 bp, Artificial
  probe
  misc_feature (1)..(25): SEQ ID NO: 6868; WAN024BWK; Start 495; Stop 519
tttagatgaagtgtgtgtgttacct

SEQ ID NO: 451726 - DNA, 25 bp, Artificial
  probe
  misc_feature (1)..(25): SEQ ID NO: 6868; WAN024BWK; Start 494; Stop 518
ctttagatgaagtgtgtgtgttacc

SEQ ID NO: 451727 - DNA, 25 bp, Artificial
  probe
  misc_feature (1)..(25): SEQ ID NO: 6868; WAN024BWK; Start 491; Stop 515
tctctttagatgaagtgtgtgtgtt

SEQ ID NO: 451728 - DNA, 25 bp, Artificial
  probe
  misc_feature (1)..(25): SEQ ID NO: 6868; WAN024BWK; Start 490; Stop 514
ctctctttagatgaagtgtgtgtgt

SEQ ID NO: 451729 - DNA, 25 bp, Artificial
  probe
  misc_feature (1)..(25): SEQ ID NO: 6868; WAN024BWK; Start 493; Stop 517
tctttagatgaagtgtgtgtgttac

SEQ ID NO: 451730 - DNA, 25 bp, Artificial
  probe
  misc_feature (1)..(25): SEQ ID NO: 6868; WAN024BWK; Start 492; Stop 516
ctctttagatgaagtgtgtgtgtta

SEQ ID NO: 451731 - DNA, 25 bp, Artificial
  probe
  misc_feature (1)..(25): SEQ ID NO: 6868; WAN024BWK; Start 489; Stop 513
actctctttagatgaagtgtgtgtg

SEQ ID NO: 451732 - DNA, 25 bp, Artificial
  probe
  misc_feature (1)..(25): SEQ ID NO: 6868; WAN024BWK; Start 470; Stop 494
gaacagaacgtaccgaattactctc

SEQ ID NO: 451733 - DNA, 25 bp, Artificial
  probe
  misc_feature (1)..(25): SEQ ID NO: 6868; WAN024BWK; Start 488; Stop 512
tactctctttagatgaagtgtgtgt

SEQ ID NO: 451734 - DNA, 25 bp, Artificial
  probe
  misc_feature (1)..(25): SEQ ID NO: 6868; WAN024BWK; Start 472; Stop 496
acagaacgtaccgaattactctctt

SEQ ID NO: 451735 - DNA, 25 bp, Artificial
  probe
  misc_feature (1)..(25): SEQ ID NO: 6868; WAN024BWK; Start 471; Stop 495
aacagaacgtaccgaattactctct

SEQ ID NO: 451736 - DNA, 25 bp, Artificial
  probe
  misc_feature (1)..(25): SEQ ID NO: 6868; WAN024BWK; Start 478; Stop 502
cgtaccgaattactctctttagatg

SEQ ID NO: 451737 - DNA, 25 bp, Artificial
  probe
  misc_feature (1)..(25): SEQ ID NO: 6868; WAN024BWK; Start 481; Stop 505
accgaattactctctttagatgaag

SEQ ID NO: 451738 - DNA, 25 bp, Artificial
  probe
  misc_feature (1)..(25): SEQ ID NO: 6868; WAN024BWK; Start 487; Stop 511
ttactctctttagatgaagtgtgtg

SEQ ID NO: 451739 - DNA, 25 bp, Artificial
  probe
  misc_feature (1)..(25): SEQ ID NO: 6868; WAN024BWK; Start 482; Stop 506
ccgaattactctctttagatgaagt

SEQ ID NO: 451740 - DNA, 25 bp, Artificial
  probe
  misc_feature (1)..(25): SEQ ID NO: 6868; WAN024BWK; Start 469; Stop 493
ggaacagaacgtaccgaattactct

SEQ ID NO: 451741 - DNA, 25 bp, Artificial
  probe
  misc_feature (1)..(25): SEQ ID NO: 6868; WAN024BWK; Start 355; Stop 379
cgttatcccgatgtcagcttaaata

SEQ ID NO: 451742 - DNA, 25 bp, Artificial
  probe
  misc_feature (1)..(25): SEQ ID NO: 6868; WAN024BWK; Start 431; Stop 455
atgatttaggactcactgaaacgct

SEQ ID NO: 451743 - DNA, 25 bp, Artificial
  probe
  misc_feature (1)..(25): SEQ ID NO: 6868; WAN024BWK; Start 356; Stop 380
gttatcccgatgtcagcttaaatat

SEQ ID NO: 451744 - DNA, 25 bp, Artificial
  probe
  misc_feature (1)..(25): SEQ ID NO: 6868; WAN024BWK; Start 357; Stop 381
ttatcccgatgtcagcttaaatatc

SEQ ID NO: 451745 - DNA, 25 bp, Artificial
  probe
  misc_feature (1)..(25): SEQ ID NO: 6868; WAN024BWK; Start 475; Stop 499
gaacgtaccgaattactctctttag

SEQ ID NO: 451746 - DNA, 25 bp, Artificial
  probe
  misc_feature (1)..(25): SEQ ID NO: 6868; WAN024BWK; Start 479; Stop 503
gtaccgaattactctctttagatga

SEQ ID NO: 451747 - DNA, 25 bp, Artificial
  probe
  misc_feature (1)..(25): SEQ ID NO: 6868; WAN024BWK; Start 473; Stop 497
cagaacgtaccgaattactctcttt

SEQ ID NO: 451748 - DNA, 25 bp, Artificial
  probe
  misc_feature (1)..(25): SEQ ID NO: 6868; WAN024BWK; Start 486; Stop 510
attactctctttagatgaagtgtgt

SEQ ID NO: 451749 - DNA, 25 bp, Artificial
  probe
  misc_feature (1)..(25): SEQ ID NO: 6868; WAN024BWK; Start 476; Stop 500
aacgtaccgaattactctctttaga

SEQ ID NO: 451750 - DNA, 25 bp, Artificial
  probe
  misc_feature (1)..(25): SEQ ID NO: 6868; WAN024BWK; Start 474; Stop 498
agaacgtaccgaattactctcttta

SEQ ID NO: 451751 - DNA, 25 bp, Artificial
  probe
  misc_feature (1)..(25): SEQ ID NO: 6868; WAN024BWK; Start 483; Stop 507
cgaattactctctttagatgaagtg

SEQ ID NO: 451752 - DNA, 25 bp, Artificial
  probe
  misc_feature (1)..(25): SEQ ID NO: 6868; WAN024BWK; Start 477; Stop 501
acgtaccgaattactctctttagat

SEQ ID NO: 451753 - DNA, 25 bp, Artificial
  probe
  misc_feature (1)..(25): SEQ ID NO: 6868; WAN024BWK; Start 430; Stop 454
catgatttaggactcactgaaacgc

SEQ ID NO: 451754 - DNA, 25 bp, Artificial
  probe
  misc_feature (1)..(25): SEQ ID NO: 6868; WAN024BWK; Start 432; Stop 456
tgatttaggactcactgaaacgctc

SEQ ID NO: 451755 - DNA, 25 bp, Artificial
  probe
  misc_feature (1)..(25): SEQ ID NO: 6868; WAN024BWK; Start 480; Stop 504
taccgaattactctctttagatgaa

SEQ ID NO: 451756 - DNA, 25 bp, Artificial
  probe
  misc_feature (1)..(25): SEQ ID NO: 6869; WAN024ASW; Start 121; Stop 145
aatctcatcttccaaggtcttgact

SEQ ID NO: 451757 - DNA, 25 bp, Artificial
  probe
  misc_feature (1)..(25): SEQ ID NO: 6869; WAN024ASW; Start 122; Stop 146
atctcatcttccaaggtcttgactg

SEQ ID NO: 451758 - DNA, 25 bp, Artificial
  probe
  misc_feature (1)..(25): SEQ ID NO: 6869; WAN024ASW; Start 117; Stop 141
aataaatctcatcttccaaggtctt

SEQ ID NO: 451759 - DNA, 25 bp, Artificial
  probe
  misc_feature (1)..(25): SEQ ID NO: 6869; WAN024ASW; Start 119; Stop 143
taaatctcatcttccaaggtcttga

SEQ ID NO: 451760 - DNA, 25 bp, Artificial
  probe
  misc_feature (1)..(25): SEQ ID NO: 6869; WAN024ASW; Start 120; Stop 144
aaatctcatcttccaaggtcttgac

SEQ ID NO: 451761 - DNA, 25 bp, Artificial
  probe
  misc_feature (1)..(25): SEQ ID NO: 6869; WAN024ASW; Start 118; Stop 142
ataaatctcatcttccaaggtcttg

SEQ ID NO: 451762 - DNA, 25 bp, Artificial
  probe
  misc_feature (1)..(25): SEQ ID NO: 6869; WAN024ASW; Start 175; Stop 199
tggcaaactagcatagtcaaagata

SEQ ID NO: 451763 - DNA, 25 bp, Artificial
  probe
  misc_feature (1)..(25): SEQ ID NO: 6869; WAN024ASW; Start 176; Stop 200
ggcaaactagcatagtcaaagatat

SEQ ID NO: 451764 - DNA, 25 bp, Artificial
  probe
  misc_feature (1)..(25): SEQ ID NO: 6869; WAN024ASW; Start 116; Stop 140
taataaatctcatcttccaaggtct

SEQ ID NO: 451765 - DNA, 25 bp, Artificial
  probe
  misc_feature (1)..(25): SEQ ID NO: 6869; WAN024ASW; Start 174; Stop 198
ctggcaaactagcatagtcaaagat

SEQ ID NO: 451766 - DNA, 25 bp, Artificial
  probe
  misc_feature (1)..(25): SEQ ID NO: 6869; WAN024ASW; Start 183; Stop 207
tagcatagtcaaagatatcctcagc

SEQ ID NO: 451767 - DNA, 25 bp, Artificial
  probe
  misc_feature (1)..(25): SEQ ID NO: 6869; WAN024ASW; Start 185; Stop 209
gcatagtcaaagatatcctcagcat

SEQ ID NO: 451768 - DNA, 25 bp, Artificial
  probe
  misc_feature (1)..(25): SEQ ID NO: 6869; WAN024ASW; Start 187; Stop 211
atagtcaaagatatcctcagcatcc

SEQ ID NO: 451769 - DNA, 25 bp, Artificial
  probe
  misc_feature (1)..(25): SEQ ID NO: 6869; WAN024ASW; Start 172; Stop 196
ctctggcaaactagcatagtcaaag

SEQ ID NO: 451770 - DNA, 25 bp, Artificial
  probe
  misc_feature (1)..(25): SEQ ID NO: 6869; WAN024ASW; Start 186; Stop 210
catagtcaaagatatcctcagcatc

SEQ ID NO: 451771 - DNA, 25 bp, Artificial
  probe
  misc_feature (1)..(25): SEQ ID NO: 6869; WAN024ASW; Start 184; Stop 208
agcatagtcaaagatatcctcagca

SEQ ID NO: 451772 - DNA, 25 bp, Artificial
  probe
  misc_feature (1)..(25): SEQ ID NO: 6869; WAN024ASW; Start 173; Stop 197
tctggcaaactagcatagtcaaaga

SEQ ID NO: 451773 - DNA, 25 bp, Artificial
  probe
  misc_feature (1)..(25): SEQ ID NO: 6869; WAN024ASW; Start 188; Stop 212
tagtcaaagatatcctcagcatccg

SEQ ID NO: 451774 - DNA, 25 bp, Artificial
  probe
  misc_feature (1)..(25): SEQ ID NO: 6869; WAN024ASW; Start 182; Stop 206
ctagcatagtcaaagatatcctcag

SEQ ID NO: 451775 - DNA, 25 bp, Artificial
  probe
  misc_feature (1)..(25): SEQ ID NO: 6869; WAN024ASW; Start 115; Stop 139
ataataaatctcatcttccaaggtc

SEQ ID NO: 451776 - DNA, 25 bp, Artificial
  probe
  misc_feature (1)..(25): SEQ ID NO: 6869; WAN024ASW; Start 114; Stop 138
gataataaatctcatcttccaaggt

SEQ ID NO: 451777 - DNA, 25 bp, Artificial
  probe
  misc_feature (1)..(25): SEQ ID NO: 6869; WAN024ASW; Start 73; Stop 97
gagattttccttttgattacgctcc

SEQ ID NO: 451778 - DNA, 25 bp, Artificial
  probe
  misc_feature (1)..(25): SEQ ID NO: 6869; WAN024ASW; Start 74; Stop 98
agattttccttttgattacgctccg

SEQ ID NO: 451779 - DNA, 25 bp, Artificial
  probe
  misc_feature (1)..(25): SEQ ID NO: 6869; WAN024ASW; Start 123; Stop 147
tctcatcttccaaggtcttgactgg

SEQ ID NO: 451780 - DNA, 25 bp, Artificial
  probe
  misc_feature (1)..(25): SEQ ID NO: 6869; WAN024ASW; Start 171; Stop 195
cctctggcaaactagcatagtcaaa

SEQ ID NO: 451781 - DNA, 25 bp, Artificial
  probe
  misc_feature (1)..(25): SEQ ID NO: 6869; WAN024ASW; Start 181; Stop 205
actagcatagtcaaagatatcctca

SEQ ID NO: 451782 - DNA, 25 bp, Artificial
  probe
  misc_feature (1)..(25): SEQ ID NO: 6869; WAN024ASW; Start 34; Stop 58
cttatccgttcctttgacgacaatc

SEQ ID NO: 451783 - DNA, 25 bp, Artificial
  probe
  misc_feature (1)..(25): SEQ ID NO: 6869; WAN024ASW; Start 69; Stop 93
ctgggagattttccttttgattacg

SEQ ID NO: 451784 - DNA, 25 bp, Artificial
  probe
  misc_feature (1)..(25): SEQ ID NO: 6869; WAN024ASW; Start 68; Stop 92
gctgggagattttccttttgattac

SEQ ID NO: 451785 - DNA, 25 bp, Artificial
  probe
  misc_feature (1)..(25): SEQ ID NO: 6869; WAN024ASW; Start 72; Stop 96
ggagattttccttttgattacgctc

SEQ ID NO: 451786 - DNA, 25 bp, Artificial
  probe
  misc_feature (1)..(25): SEQ ID NO: 6869; WAN024ASW; Start 67; Stop 91
tgctgggagattttccttttgatta

SEQ ID NO: 451787 - DNA, 25 bp, Artificial
  probe
  misc_feature (1)..(25): SEQ ID NO: 6869; WAN024ASW; Start 33; Stop 57
tcttatccgttcctttgacgacaat

SEQ ID NO: 451788 - DNA, 25 bp, Artificial
  probe
  misc_feature (1)..(25): SEQ ID NO: 6869; WAN024ASW; Start 32; Stop 56
atcttatccgttcctttgacgacaa

SEQ ID NO: 451789 - DNA, 25 bp, Artificial
  probe
  misc_feature (1)..(25): SEQ ID NO: 6870; WAN024DUN; Start 227; Stop 251
taggcgatcttcatcttgtcttcaa

SEQ ID NO: 451790 - DNA, 25 bp, Artificial
  probe
  misc_feature (1)..(25): SEQ ID NO: 6870; WAN024DUN; Start 205; Stop 229
aatcaatcgtttcaagtgttcgtag

SEQ ID NO: 451791 - DNA, 25 bp, Artificial
  probe
  misc_feature (1)..(25): SEQ ID NO: 6870; WAN024DUN; Start 203; Stop 227
ttaatcaatcgtttcaagtgttcgt

SEQ ID NO: 451792 - DNA, 25 bp, Artificial
  probe
  misc_feature (1)..(25): SEQ ID NO: 6870; WAN024DUN; Start 199; Stop 223
gaggttaatcaatcgtttcaagtgt

SEQ ID NO: 451793 - DNA, 25 bp, Artificial
  probe
  misc_feature (1)..(25): SEQ ID NO: 6870; WAN024DUN; Start 202; Stop 226
gttaatcaatcgtttcaagtgttcg

SEQ ID NO: 451794 - DNA, 25 bp, Artificial
  probe
  misc_feature (1)..(25): SEQ ID NO: 6870; WAN024DUN; Start 243; Stop 267
tgtcttcaaaggtcaaatcaggtag

SEQ ID NO: 451795 - DNA, 25 bp, Artificial
  probe
  misc_feature (1)..(25): SEQ ID NO: 6870; WAN024DUN; Start 226; Stop 250
gtaggcgatcttcatcttgtcttca

SEQ ID NO: 451796 - DNA, 25 bp, Artificial
  probe
  misc_feature (1)..(25): SEQ ID NO: 6870; WAN024DUN; Start 200; Stop 224
aggttaatcaatcgtttcaagtgtt

SEQ ID NO: 451797 - DNA, 25 bp, Artificial
  probe
  misc_feature (1)..(25): SEQ ID NO: 6870; WAN024DUN; Start 204; Stop 228
taatcaatcgtttcaagtgttcgta

SEQ ID NO: 451798 - DNA, 25 bp, Artificial
  probe
  misc_feature (1)..(25): SEQ ID NO: 6870; WAN024DUN; Start 201; Stop 225
ggttaatcaatcgtttcaagtgttc

SEQ ID NO: 451799 - DNA, 25 bp, Artificial
  probe
  misc_feature (1)..(25): SEQ ID NO: 6870; WAN024DUN; Start 233; Stop 257
atcttcatcttgtcttcaaaggtca

SEQ ID NO: 451800 - DNA, 25 bp, Artificial
  probe
  misc_feature (1)..(25): SEQ ID NO: 6870; WAN024DUN; Start 242; Stop 266
ttgtcttcaaaggtcaaatcaggta

SEQ ID NO: 451801 - DNA, 25 bp, Artificial
  probe
  misc_feature (1)..(25): SEQ ID NO: 6870; WAN024DUN; Start 238; Stop 262
catcttgtcttcaaaggtcaaatca

SEQ ID NO: 451802 - DNA, 25 bp, Artificial
  probe
  misc_feature (1)..(25): SEQ ID NO: 6870; WAN024DUN; Start 235; Stop 259
cttcatcttgtcttcaaaggtcaaa

SEQ ID NO: 451803 - DNA, 25 bp, Artificial
  probe
  misc_feature (1)..(25): SEQ ID NO: 6870; WAN024DUN; Start 234; Stop 258
tcttcatcttgtcttcaaaggtcaa

SEQ ID NO: 451804 - DNA, 25 bp, Artificial
  probe
  misc_feature (1)..(25): SEQ ID NO: 6870; WAN024DUN; Start 239; Stop 263
atcttgtcttcaaaggtcaaatcag

SEQ ID NO: 451805 - DNA, 25 bp, Artificial
  probe
  misc_feature (1)..(25): SEQ ID NO: 6870; WAN024DUN; Start 237; Stop 261
tcatcttgtcttcaaaggtcaaatc

SEQ ID NO: 451806 - DNA, 25 bp, Artificial
  probe
  misc_feature (1)..(25): SEQ ID NO: 6870; WAN024DUN; Start 198; Stop 222
tgaggttaatcaatcgtttcaagtg

SEQ ID NO: 451807 - DNA, 25 bp, Artificial
  probe
  misc_feature (1)..(25): SEQ ID NO: 6870; WAN024DUN; Start 236; Stop 260
ttcatcttgtcttcaaaggtcaaat

SEQ ID NO: 451808 - DNA, 25 bp, Artificial
  probe
  misc_feature (1)..(25): SEQ ID NO: 6870; WAN024DUN; Start 206; Stop 230
atcaatcgtttcaagtgttcgtagg

SEQ ID NO: 451809 - DNA, 25 bp, Artificial
  probe
  misc_feature (1)..(25): SEQ ID NO: 6870; WAN024DUN; Start 240; Stop 264
tcttgtcttcaaaggtcaaatcagg

SEQ ID NO: 451810 - DNA, 25 bp, Artificial
  probe
  misc_feature (1)..(25): SEQ ID NO: 6870; WAN024DUN; Start 241; Stop 265
cttgtcttcaaaggtcaaatcaggt

SEQ ID NO: 451811 - DNA, 25 bp, Artificial
  probe
  misc_feature (1)..(25): SEQ ID NO: 6870; WAN024DUN; Start 232; Stop 256
gatcttcatcttgtcttcaaaggtc

SEQ ID NO: 451812 - DNA, 25 bp, Artificial
  probe
  misc_feature (1)..(25): SEQ ID NO: 6870; WAN024DUN; Start 231; Stop 255
cgatcttcatcttgtcttcaaaggt

SEQ ID NO: 451813 - DNA, 25 bp, Artificial
  probe
  misc_feature (1)..(25): SEQ ID NO: 6870; WAN024DUN; Start 225; Stop 249
cgtaggcgatcttcatcttgtcttc

SEQ ID NO: 451814 - DNA, 25 bp, Artificial
  probe
  misc_feature (1)..(25): SEQ ID NO: 6870; WAN024DUN; Start 44; Stop 68
aactattaagccttctccaattgca

SEQ ID NO: 451815 - DNA, 25 bp, Artificial
  probe
  misc_feature (1)..(25): SEQ ID NO: 6870; WAN024DUN; Start 230; Stop 254
gcgatcttcatcttgtcttcaaagg

SEQ ID NO: 451816 - DNA, 25 bp, Artificial
  probe
  misc_feature (1)..(25): SEQ ID NO: 6870; WAN024DUN; Start 229; Stop 253
ggcgatcttcatcttgtcttcaaag

SEQ ID NO: 451817 - DNA, 25 bp, Artificial
  probe
  misc_feature (1)..(25): SEQ ID NO: 6870; WAN024DUN; Start 228; Stop 252
aggcgatcttcatcttgtcttcaaa

SEQ ID NO: 451818 - DNA, 25 bp, Artificial
  probe
  misc_feature (1)..(25): SEQ ID NO: 6870; WAN024DUN; Start 194; Stop 218
cctttgaggttaatcaatcgtttca

SEQ ID NO: 451819 - DNA, 25 bp, Artificial
  probe
  misc_feature (1)..(25): SEQ ID NO: 6870; WAN024DUN; Start 191; Stop 215
tctcctttgaggttaatcaatcgtt

SEQ ID NO: 451820 - DNA, 25 bp, Artificial
  probe
  misc_feature (1)..(25): SEQ ID NO: 6870; WAN024DUN; Start 190; Stop 214
ttctcctttgaggttaatcaatcgt

SEQ ID NO: 451821 - DNA, 25 bp, Artificial
  probe
  misc_feature (1)..(25): SEQ ID NO: 6870; WAN024DUN; Start 193; Stop 217
tcctttgaggttaatcaatcgtttc

SEQ ID NO: 451822 - DNA, 25 bp, Artificial
  probe
  misc_feature (1)..(25): SEQ ID NO: 6871; WAN024C37; Start 594; Stop 618
ctacctgtctccttacttcatcaac

SEQ ID NO: 451823 - DNA, 25 bp, Artificial
  probe
  misc_feature (1)..(25): SEQ ID NO: 6871; WAN024C37; Start 593; Stop 617
gctacctgtctccttacttcatcaa

SEQ ID NO: 451824 - DNA, 25 bp, Artificial
  probe
  misc_feature (1)..(25): SEQ ID NO: 6871; WAN024C37; Start 595; Stop 619
tacctgtctccttacttcatcaaca

SEQ ID NO: 451825 - DNA, 25 bp, Artificial
  probe
  misc_feature (1)..(25): SEQ ID NO: 6871; WAN024C37; Start 597; Stop 621
cctgtctccttacttcatcaacaag

SEQ ID NO: 451826 - DNA, 25 bp, Artificial
  probe
  misc_feature (1)..(25): SEQ ID NO: 6871; WAN024C37; Start 598; Stop 622
ctgtctccttacttcatcaacaagc

SEQ ID NO: 451827 - DNA, 25 bp, Artificial
  probe
  misc_feature (1)..(25): SEQ ID NO: 6871; WAN024C37; Start 596; Stop 620
acctgtctccttacttcatcaacaa

SEQ ID NO: 451828 - DNA, 25 bp, Artificial
  probe
  misc_feature (1)..(25): SEQ ID NO: 6871; WAN024C37; Start 1443; Stop 1467
aactgaagaatacggcaacatgatc

SEQ ID NO: 451829 - DNA, 25 bp, Artificial
  probe
  misc_feature (1)..(25): SEQ ID NO: 6871; WAN024C37; Start 1442; Stop 1466
caactgaagaatacggcaacatgat

SEQ ID NO: 451830 - DNA, 25 bp, Artificial
  probe
  misc_feature (1)..(25): SEQ ID NO: 6871; WAN024C37; Start 1158; Stop 1182
agttgaaatgaaagagaagaaagcc

SEQ ID NO: 451831 - DNA, 25 bp, Artificial
  probe
  misc_feature (1)..(25): SEQ ID NO: 6871; WAN024C37; Start 112; Stop 136
gtagttctggataaatctttcggtg

SEQ ID NO: 451832 - DNA, 25 bp, Artificial
  probe
  misc_feature (1)..(25): SEQ ID NO: 6871; WAN024C37; Start 1151; Stop 1175
cgactgaagttgaaatgaaagagaa

SEQ ID NO: 451833 - DNA, 25 bp, Artificial
  probe
  misc_feature (1)..(25): SEQ ID NO: 6871; WAN024C37; Start 111; Stop 135
cgtagttctggataaatctttcggt

SEQ ID NO: 451834 - DNA, 25 bp, Artificial
  probe
  misc_feature (1)..(25): SEQ ID NO: 6871; WAN024C37; Start 1159; Stop 1183
gttgaaatgaaagagaagaaagccc

SEQ ID NO: 451835 - DNA, 25 bp, Artificial
  probe
  misc_feature (1)..(25): SEQ ID NO: 6871; WAN024C37; Start 113; Stop 137
tagttctggataaatctttcggtgc

SEQ ID NO: 451836 - DNA, 25 bp, Artificial
  probe
  misc_feature (1)..(25): SEQ ID NO: 6871; WAN024C37; Start 1157; Stop 1181
aagttgaaatgaaagagaagaaagc

SEQ ID NO: 451837 - DNA, 25 bp, Artificial
  probe
  misc_feature (1)..(25): SEQ ID NO: 6871; WAN024C37; Start 1153; Stop 1177
actgaagttgaaatgaaagagaaga

SEQ ID NO: 451838 - DNA, 25 bp, Artificial
  probe
  misc_feature (1)..(25): SEQ ID NO: 6871; WAN024C37; Start 217; Stop 241
atggtgaaagaagttgcctctaaag

SEQ ID NO: 451839 - DNA, 25 bp, Artificial
  probe
  misc_feature (1)..(25): SEQ ID NO: 6871; WAN024C37; Start 216; Stop 240
gatggtgaaagaagttgcctctaaa

SEQ ID NO: 451840 - DNA, 25 bp, Artificial
  probe
  misc_feature (1)..(25): SEQ ID NO: 6871; WAN024C37; Start 599; Stop 623
tgtctccttacttcatcaacaagcc

SEQ ID NO: 451841 - DNA, 25 bp, Artificial
  probe
  misc_feature (1)..(25): SEQ ID NO: 6871; WAN024C37; Start 1152; Stop 1176
gactgaagttgaaatgaaagagaag

SEQ ID NO: 451842 - DNA, 25 bp, Artificial
  probe
  misc_feature (1)..(25): SEQ ID NO: 6871; WAN024C37; Start 592; Stop 616
ggctacctgtctccttacttcatca

SEQ ID NO: 451843 - DNA, 25 bp, Artificial
  probe
  misc_feature (1)..(25): SEQ ID NO: 6871; WAN024C37; Start 591; Stop 615
tggctacctgtctccttacttcatc

SEQ ID NO: 451844 - DNA, 25 bp, Artificial
  probe
  misc_feature (1)..(25): SEQ ID NO: 6871; WAN024C37; Start 971; Stop 995
ttatcaacaaagataccaccaccat

SEQ ID NO: 451845 - DNA, 25 bp, Artificial
  probe
  misc_feature (1)..(25): SEQ ID NO: 6871; WAN024C37; Start 1150; Stop 1174
gcgactgaagttgaaatgaaagaga

SEQ ID NO: 451846 - DNA, 25 bp, Artificial
  probe
  misc_feature (1)..(25): SEQ ID NO: 6871; WAN024C37; Start 972; Stop 996
tatcaacaaagataccaccaccatc

SEQ ID NO: 451847 - DNA, 25 bp, Artificial
  probe
  misc_feature (1)..(25): SEQ ID NO: 6871; WAN024C37; Start 975; Stop 999
caacaaagataccaccaccatcatc

SEQ ID NO: 451848 - DNA, 25 bp, Artificial
  probe
  misc_feature (1)..(25): SEQ ID NO: 6871; WAN024C37; Start 1160; Stop 1184
ttgaaatgaaagagaagaaagcccg

SEQ ID NO: 451849 - DNA, 25 bp, Artificial
  probe
  misc_feature (1)..(25): SEQ ID NO: 6871; WAN024C37; Start 1431; Stop 1455
ttacaacgctgcaactgaagaatac

SEQ ID NO: 451850 - DNA, 25 bp, Artificial
  probe
  misc_feature (1)..(25): SEQ ID NO: 6871; WAN024C37; Start 1149; Stop 1173
tgcgactgaagttgaaatgaaagag

SEQ ID NO: 451851 - DNA, 25 bp, Artificial
  probe
  misc_feature (1)..(25): SEQ ID NO: 6871; WAN024C37; Start 1148; Stop 1172
ctgcgactgaagttgaaatgaaaga

SEQ ID NO: 451852 - DNA, 25 bp, Artificial
  probe
  misc_feature (1)..(25): SEQ ID NO: 6871; WAN024C37; Start 970; Stop 994
gttatcaacaaagataccaccacca

SEQ ID NO: 451853 - DNA, 25 bp, Artificial
  probe
  misc_feature (1)..(25): SEQ ID NO: 6871; WAN024C37; Start 590; Stop 614
gtggctacctgtctccttacttcat

SEQ ID NO: 451854 - DNA, 25 bp, Artificial
  probe
  misc_feature (1)..(25): SEQ ID NO: 6871; WAN024C37; Start 974; Stop 998
tcaacaaagataccaccaccatcat

SEQ ID NO: 451855 - DNA, 25 bp, Artificial
  probe
  misc_feature (1)..(25): SEQ ID NO: 6872; WAN024BSO; Start 441; Stop 465
tggttattcgatcagtcctattctc

SEQ ID NO: 451856 - DNA, 25 bp, Artificial
  probe
  misc_feature (1)..(25): SEQ ID NO: 6872; WAN024BSO; Start 442; Stop 466
ggttattcgatcagtcctattctct

SEQ ID NO: 451857 - DNA, 25 bp, Artificial
  probe
  misc_feature (1)..(25): SEQ ID NO: 6872; WAN024BSO; Start 440; Stop 464
ttggttattcgatcagtcctattct

SEQ ID NO: 451858 - DNA, 25 bp, Artificial
  probe
  misc_feature (1)..(25): SEQ ID NO: 6872; WAN024BSO; Start 439; Stop 463
gttggttattcgatcagtcctattc

SEQ ID NO: 451859 - DNA, 25 bp, Artificial
  probe
  misc_feature (1)..(25): SEQ ID NO: 6872; WAN024BSO; Start 438; Stop 462
cgttggttattcgatcagtcctatt

SEQ ID NO: 451860 - DNA, 25 bp, Artificial
  probe
  misc_feature (1)..(25): SEQ ID NO: 6872; WAN024BSO; Start 426; Stop 450
cttagacagaatcgttggttattcg

SEQ ID NO: 451861 - DNA, 25 bp, Artificial
  probe
  misc_feature (1)..(25): SEQ ID NO: 6872; WAN024BSO; Start 424; Stop 448
accttagacagaatcgttggttatt

SEQ ID NO: 451862 - DNA, 25 bp, Artificial
  probe
  misc_feature (1)..(25): SEQ ID NO: 6872; WAN024BSO; Start 425; Stop 449
ccttagacagaatcgttggttattc

SEQ ID NO: 451863 - DNA, 25 bp, Artificial
  probe
  misc_feature (1)..(25): SEQ ID NO: 6872; WAN024BSO; Start 423; Stop 447
taccttagacagaatcgttggttat

SEQ ID NO: 451864 - DNA, 25 bp, Artificial
  probe
  misc_feature (1)..(25): SEQ ID NO: 6872; WAN024BSO; Start 568; Stop 592
gaatattggagcatcgacggtaatt

SEQ ID NO: 451865 - DNA, 25 bp, Artificial
  probe
  misc_feature (1)..(25): SEQ ID NO: 6872; WAN024BSO; Start 422; Stop 446
gtaccttagacagaatcgttggtta

SEQ ID NO: 451866 - DNA, 25 bp, Artificial
  probe
  misc_feature (1)..(25): SEQ ID NO: 6872; WAN024BSO; Start 548; Stop 572
tccgagaatttgttccagaagaata

SEQ ID NO: 451867 - DNA, 25 bp, Artificial
  probe
  misc_feature (1)..(25): SEQ ID NO: 6872; WAN024BSO; Start 547; Stop 571
atccgagaatttgttccagaagaat

SEQ ID NO: 451868 - DNA, 25 bp, Artificial
  probe
  misc_feature (1)..(25): SEQ ID NO: 6872; WAN024BSO; Start 567; Stop 591
agaatattggagcatcgacggtaat

SEQ ID NO: 451869 - DNA, 25 bp, Artificial
  probe
  misc_feature (1)..(25): SEQ ID NO: 6872; WAN024BSO; Start 444; Stop 468
ttattcgatcagtcctattctctgg

SEQ ID NO: 451870 - DNA, 25 bp, Artificial
  probe
  misc_feature (1)..(25): SEQ ID NO: 6872; WAN024BSO; Start 549; Stop 573
ccgagaatttgttccagaagaatat

SEQ ID NO: 451871 - DNA, 25 bp, Artificial
  probe
  misc_feature (1)..(25): SEQ ID NO: 6872; WAN024BSO; Start 469; Stop 493
cgtaaggtcaagaaagggttaagtg

SEQ ID NO: 451872 - DNA, 25 bp, Artificial
  probe
  misc_feature (1)..(25): SEQ ID NO: 6872; WAN024BSO; Start 65; Stop 89
ttggacgaaactataaagtaatggc

SEQ ID NO: 451873 - DNA, 25 bp, Artificial
  probe
  misc_feature (1)..(25): SEQ ID NO: 6872; WAN024BSO; Start 566; Stop 590
aagaatattggagcatcgacggtaa

SEQ ID NO: 451874 - DNA, 25 bp, Artificial
  probe
  misc_feature (1)..(25): SEQ ID NO: 6872; WAN024BSO; Start 450; Stop 474
gatcagtcctattctctggcgtaag

SEQ ID NO: 451875 - DNA, 25 bp, Artificial
  probe
  misc_feature (1)..(25): SEQ ID NO: 6872; WAN024BSO; Start 443; Stop 467
gttattcgatcagtcctattctctg

SEQ ID NO: 451876 - DNA, 25 bp, Artificial
  probe
  misc_feature (1)..(25): SEQ ID NO: 6872; WAN024BSO; Start 52; Stop 76
attgagaaatatcttggacgaaact

SEQ ID NO: 451877 - DNA, 25 bp, Artificial
  probe
  misc_feature (1)..(25): SEQ ID NO: 6872; WAN024BSO; Start 470; Stop 494
gtaaggtcaagaaagggttaagtgc

SEQ ID NO: 451878 - DNA, 25 bp, Artificial
  probe
  misc_feature (1)..(25): SEQ ID NO: 6872; WAN024BSO; Start 445; Stop 469
tattcgatcagtcctattctctggc

SEQ ID NO: 451879 - DNA, 25 bp, Artificial
  probe
  misc_feature (1)..(25): SEQ ID NO: 6872; WAN024BSO; Start 292; Stop 316
ctacttgggttggatctgaaagaaa

SEQ ID NO: 451880 - DNA, 25 bp, Artificial
  probe
  misc_feature (1)..(25): SEQ ID NO: 6872; WAN024BSO; Start 541; Stop 565
aaagagatccgagaatttgttccag

SEQ ID NO: 451881 - DNA, 25 bp, Artificial
  probe
  misc_feature (1)..(25): SEQ ID NO: 6872; WAN024BSO; Start 546; Stop 570
gatccgagaatttgttccagaagaa

SEQ ID NO: 451882 - DNA, 25 bp, Artificial
  probe
  misc_feature (1)..(25): SEQ ID NO: 6872; WAN024BSO; Start 565; Stop 589
gaagaatattggagcatcgacggta

SEQ ID NO: 451883 - DNA, 25 bp, Artificial
  probe
  misc_feature (1)..(25): SEQ ID NO: 6872; WAN024BSO; Start 544; Stop 568
gagatccgagaatttgttccagaag

SEQ ID NO: 451884 - DNA, 25 bp, Artificial
  probe
  misc_feature (1)..(25): SEQ ID NO: 6872; WAN024BSO; Start 53; Stop 77
ttgagaaatatcttggacgaaacta

SEQ ID NO: 451885 - DNA, 25 bp, Artificial
  probe
  misc_feature (1)..(25): SEQ ID NO: 6872; WAN024BSO; Start 545; Stop 569
agatccgagaatttgttccagaaga

SEQ ID NO: 451886 - DNA, 25 bp, Artificial
  probe
  misc_feature (1)..(25): SEQ ID NO: 6872; WAN024BSO; Start 543; Stop 567
agagatccgagaatttgttccagaa

SEQ ID NO: 451887 - DNA, 25 bp, Artificial
  probe
  misc_feature (1)..(25): SEQ ID NO: 6872; WAN024BSO; Start 542; Stop 566
aagagatccgagaatttgttccaga

SEQ ID NO: 451888 - DNA, 25 bp, Artificial
  probe
  misc_feature (1)..(25): SEQ ID NO: 6873; WAN024DOB; Start 37; Stop 61
caagtagggcaaaataaagggctgg

SEQ ID NO: 451889 - DNA, 25 bp, Artificial
  probe
  misc_feature (1)..(25): SEQ ID NO: 6873; WAN024DOB; Start 36; Stop 60
ccaagtagggcaaaataaagggctg

SEQ ID NO: 451890 - DNA, 25 bp, Artificial
  probe
  misc_feature (1)..(25): SEQ ID NO: 6873; WAN024DOB; Start 60; Stop 84
ggcgctttctgtagtattttcaaaa

SEQ ID NO: 451891 - DNA, 25 bp, Artificial
  probe
  misc_feature (1)..(25): SEQ ID NO: 6873; WAN024DOB; Start 59; Stop 83
tggcgctttctgtagtattttcaaa

SEQ ID NO: 451892 - DNA, 25 bp, Artificial
  probe
  misc_feature (1)..(25): SEQ ID NO: 6873; WAN024DOB; Start 58; Stop 82
ctggcgctttctgtagtattttcaa

SEQ ID NO: 451893 - DNA, 25 bp, Artificial
  probe
  misc_feature (1)..(25): SEQ ID NO: 6873; WAN024DOB; Start 57; Stop 81
gctggcgctttctgtagtattttca

SEQ ID NO: 451894 - DNA, 25 bp, Artificial
  probe
  misc_feature (1)..(25): SEQ ID NO: 6873; WAN024DOB; Start 33; Stop 57
gagccaagtagggcaaaataaaggg

SEQ ID NO: 451895 - DNA, 25 bp, Artificial
  probe
  misc_feature (1)..(25): SEQ ID NO: 6873; WAN024DOB; Start 32; Stop 56
ggagccaagtagggcaaaataaagg

SEQ ID NO: 451896 - DNA, 25 bp, Artificial
  probe
  misc_feature (1)..(25): SEQ ID NO: 6873; WAN024DOB; Start 31; Stop 55
gggagccaagtagggcaaaataaag

SEQ ID NO: 451897 - DNA, 25 bp, Artificial
  probe
  misc_feature (1)..(25): SEQ ID NO: 6873; WAN024DOB; Start 56; Stop 80
ggctggcgctttctgtagtattttc

SEQ ID NO: 451898 - DNA, 25 bp, Artificial
  probe
  misc_feature (1)..(25): SEQ ID NO: 6873; WAN024DOB; Start 48; Stop 72
aaataaagggctggcgctttctgta

SEQ ID NO: 451899 - DNA, 25 bp, Artificial
  probe
  misc_feature (1)..(25): SEQ ID NO: 6873; WAN024DOB; Start 30; Stop 54
tgggagccaagtagggcaaaataaa

SEQ ID NO: 451900 - DNA, 25 bp, Artificial
  probe
  misc_feature (1)..(25): SEQ ID NO: 6873; WAN024DOB; Start 7; Stop 31
ttcttcaagcgagcttgggatagtg

SEQ ID NO: 451901 - DNA, 25 bp, Artificial
  probe
  misc_feature (1)..(25): SEQ ID NO: 6873; WAN024DOB; Start 6; Stop 30
gttcttcaagcgagcttgggatagt

SEQ ID NO: 451902 - DNA, 25 bp, Artificial
  probe
  misc_feature (1)..(25): SEQ ID NO: 6873; WAN024DOB; Start 29; Stop 53
gtgggagccaagtagggcaaaataa

SEQ ID NO: 451903 - DNA, 25 bp, Artificial
  probe
  misc_feature (1)..(25): SEQ ID NO: 6874; WAN024BTS; Start 111; Stop 135
agaacaaattgagtcagatgaaagt

SEQ ID NO: 451904 - DNA, 25 bp, Artificial
  probe
  misc_feature (1)..(25): SEQ ID NO: 6874; WAN024BTS; Start 119; Stop 143
ttgagtcagatgaaagttaccattc

SEQ ID NO: 451905 - DNA, 25 bp, Artificial
  probe
  misc_feature (1)..(25): SEQ ID NO: 6874; WAN024BTS; Start 34; Stop 58
gagaatcttcacaaatgtatgggaa

SEQ ID NO: 451906 - DNA, 25 bp, Artificial
  probe
  misc_feature (1)..(25): SEQ ID NO: 6874; WAN024BTS; Start 33; Stop 57
tgagaatcttcacaaatgtatggga

SEQ ID NO: 451907 - DNA, 25 bp, Artificial
  probe
  misc_feature (1)..(25): SEQ ID NO: 6874; WAN024BTS; Start 116; Stop 140
aaattgagtcagatgaaagttacca

SEQ ID NO: 451908 - DNA, 25 bp, Artificial
  probe
  misc_feature (1)..(25): SEQ ID NO: 6874; WAN024BTS; Start 274; Stop 298
gcagaacaaatgaagggagaagaaa

SEQ ID NO: 451909 - DNA, 25 bp, Artificial
  probe
  misc_feature (1)..(25): SEQ ID NO: 6874; WAN024BTS; Start 32; Stop 56
ttgagaatcttcacaaatgtatggg

SEQ ID NO: 451910 - DNA, 25 bp, Artificial
  probe
  misc_feature (1)..(25): SEQ ID NO: 6874; WAN024BTS; Start 47; Stop 71
aatgtatgggaatttctgattggaa

SEQ ID NO: 451911 - DNA, 25 bp, Artificial
  probe
  misc_feature (1)..(25): SEQ ID NO: 6874; WAN024BTS; Start 115; Stop 139
caaattgagtcagatgaaagttacc

SEQ ID NO: 451912 - DNA, 25 bp, Artificial
  probe
  misc_feature (1)..(25): SEQ ID NO: 6874; WAN024BTS; Start 118; Stop 142
attgagtcagatgaaagttaccatt

SEQ ID NO: 451913 - DNA, 25 bp, Artificial
  probe
  misc_feature (1)..(25): SEQ ID NO: 6874; WAN024BTS; Start 169; Stop 193
aaacgaatttgtatcttctgtgaac

SEQ ID NO: 451914 - DNA, 25 bp, Artificial
  probe
  misc_feature (1)..(25): SEQ ID NO: 6874; WAN024BTS; Start 117; Stop 141
aattgagtcagatgaaagttaccat

SEQ ID NO: 451915 - DNA, 25 bp, Artificial
  probe
  misc_feature (1)..(25): SEQ ID NO: 6874; WAN024BTS; Start 35; Stop 59
agaatcttcacaaatgtatgggaat

SEQ ID NO: 451916 - DNA, 25 bp, Artificial
  probe
  misc_feature (1)..(25): SEQ ID NO: 6874; WAN024BTS; Start 170; Stop 194
aacgaatttgtatcttctgtgaaca

SEQ ID NO: 451917 - DNA, 25 bp, Artificial
  probe
  misc_feature (1)..(25): SEQ ID NO: 6874; WAN024BTS; Start 185; Stop 209
tctgtgaacaagtgaagagaaataa

SEQ ID NO: 451918 - DNA, 25 bp, Artificial
  probe
  misc_feature (1)..(25): SEQ ID NO: 6874; WAN024BTS; Start 20; Stop 44
tggatctagcatttgagaatcttca

SEQ ID NO: 451919 - DNA, 25 bp, Artificial
  probe
  misc_feature (1)..(25): SEQ ID NO: 6874; WAN024BTS; Start 112; Stop 136
gaacaaattgagtcagatgaaagtt

SEQ ID NO: 451920 - DNA, 25 bp, Artificial
  probe
  misc_feature (1)..(25): SEQ ID NO: 6874; WAN024BTS; Start 21; Stop 45
ggatctagcatttgagaatcttcac

SEQ ID NO: 451921 - DNA, 25 bp, Artificial
  probe
  misc_feature (1)..(25): SEQ ID NO: 6874; WAN024BTS; Start 110; Stop 134
aagaacaaattgagtcagatgaaag

SEQ ID NO: 451922 - DNA, 25 bp, Artificial
  probe
  misc_feature (1)..(25): SEQ ID NO: 6874; WAN024BTS; Start 41; Stop 65
ttcacaaatgtatgggaatttctga

SEQ ID NO: 451923 - DNA, 25 bp, Artificial
  probe
  misc_feature (1)..(25): SEQ ID NO: 6874; WAN024BTS; Start 46; Stop 70
aaatgtatgggaatttctgattgga

SEQ ID NO: 451924 - DNA, 25 bp, Artificial
  probe
  misc_feature (1)..(25): SEQ ID NO: 6874; WAN024BTS; Start 45; Stop 69
caaatgtatgggaatttctgattgg

SEQ ID NO: 451925 - DNA, 25 bp, Artificial
  probe
  misc_feature (1)..(25): SEQ ID NO: 6874; WAN024BTS; Start 42; Stop 66
tcacaaatgtatgggaatttctgat

SEQ ID NO: 451926 - DNA, 25 bp, Artificial
  probe
  misc_feature (1)..(25): SEQ ID NO: 6874; WAN024BTS; Start 40; Stop 64
cttcacaaatgtatgggaatttctg

SEQ ID NO: 451927 - DNA, 25 bp, Artificial
  probe
  misc_feature (1)..(25): SEQ ID NO: 6874; WAN024BTS; Start 19; Stop 43
atggatctagcatttgagaatcttc

SEQ ID NO: 451928 - DNA, 25 bp, Artificial
  probe
  misc_feature (1)..(25): SEQ ID NO: 6874; WAN024BTS; Start 39; Stop 63
tcttcacaaatgtatgggaatttct

SEQ ID NO: 451929 - DNA, 25 bp, Artificial
  probe
  misc_feature (1)..(25): SEQ ID NO: 6874; WAN024BTS; Start 114; Stop 138
acaaattgagtcagatgaaagttac

SEQ ID NO: 451930 - DNA, 25 bp, Artificial
  probe
  misc_feature (1)..(25): SEQ ID NO: 6874; WAN024BTS; Start 22; Stop 46
gatctagcatttgagaatcttcaca

SEQ ID NO: 451931 - DNA, 25 bp, Artificial
  probe
  misc_feature (1)..(25): SEQ ID NO: 6874; WAN024BTS; Start 23; Stop 47
atctagcatttgagaatcttcacaa

SEQ ID NO: 451932 - DNA, 25 bp, Artificial
  probe
  misc_feature (1)..(25): SEQ ID NO: 6874; WAN024BTS; Start 36; Stop 60
gaatcttcacaaatgtatgggaatt

SEQ ID NO: 451933 - DNA, 25 bp, Artificial
  probe
  misc_feature (1)..(25): SEQ ID NO: 6874; WAN024BTS; Start 186; Stop 210
ctgtgaacaagtgaagagaaataat

SEQ ID NO: 451934 - DNA, 25 bp, Artificial
  probe
  misc_feature (1)..(25): SEQ ID NO: 6874; WAN024BTS; Start 109; Stop 133
aaagaacaaattgagtcagatgaaa

SEQ ID NO: 451935 - DNA, 25 bp, Artificial
  probe
  misc_feature (1)..(25): SEQ ID NO: 6874; WAN024BTS; Start 44; Stop 68
acaaatgtatgggaatttctgattg

SEQ ID NO: 451936 - DNA, 25 bp, Artificial
  probe
  misc_feature (1)..(25): SEQ ID NO: 6875; WAN024BQZ; Start 9; Stop 33
aatgagaatatcaccggaattgaaa

SEQ ID NO: 451937 - DNA, 25 bp, Artificial
  probe
  misc_feature (1)..(25): SEQ ID NO: 6875; WAN024BQZ; Start 8; Stop 32
aaatgagaatatcaccggaattgaa

SEQ ID NO: 451938 - DNA, 25 bp, Artificial
  probe
  misc_feature (1)..(25): SEQ ID NO: 6875; WAN024BQZ; Start 4; Stop 28
gctaaaatgagaatatcaccggaat

SEQ ID NO: 451939 - DNA, 25 bp, Artificial
  probe
  misc_feature (1)..(25): SEQ ID NO: 6875; WAN024BQZ; Start 3; Stop 27
ggctaaaatgagaatatcaccggaa

SEQ ID NO: 451940 - DNA, 25 bp, Artificial
  probe
  misc_feature (1)..(25): SEQ ID NO: 6875; WAN024BQZ; Start 1; Stop 25
atggctaaaatgagaatatcaccgg

SEQ ID NO: 451941 - DNA, 25 bp, Artificial
  probe
  misc_feature (1)..(25): SEQ ID NO: 6875; WAN024BQZ; Start 10; Stop 34
atgagaatatcaccggaattgaaaa

SEQ ID NO: 451942 - DNA, 25 bp, Artificial
  probe
  misc_feature (1)..(25): SEQ ID NO: 6875; WAN024BQZ; Start 7; Stop 31
aaaatgagaatatcaccggaattga

SEQ ID NO: 451943 - DNA, 25 bp, Artificial
  probe
  misc_feature (1)..(25): SEQ ID NO: 6875; WAN024BQZ; Start 2; Stop 26
tggctaaaatgagaatatcaccgga

SEQ ID NO: 451944 - DNA, 25 bp, Artificial
  probe
  misc_feature (1)..(25): SEQ ID NO: 6875; WAN024BQZ; Start 6; Stop 30
taaaatgagaatatcaccggaattg

SEQ ID NO: 451945 - DNA, 25 bp, Artificial
  probe
  misc_feature (1)..(25): SEQ ID NO: 6875; WAN024BQZ; Start 5; Stop 29
ctaaaatgagaatatcaccggaatt

SEQ ID NO: 451946 - DNA, 25 bp, Artificial
  probe
  misc_feature (1)..(25): SEQ ID NO: 6875; WAN024BQZ; Start 57; Stop 81
cgtaaaagatacggaaggaatgtct

SEQ ID NO: 451947 - DNA, 25 bp, Artificial
  probe
  misc_feature (1)..(25): SEQ ID NO: 6875; WAN024BQZ; Start 56; Stop 80
gcgtaaaagatacggaaggaatgtc

SEQ ID NO: 451948 - DNA, 25 bp, Artificial
  probe
  misc_feature (1)..(25): SEQ ID NO: 6875; WAN024BQZ; Start 54; Stop 78
ctgcgtaaaagatacggaaggaatg

SEQ ID NO: 451949 - DNA, 25 bp, Artificial
  probe
  misc_feature (1)..(25): SEQ ID NO: 6875; WAN024BQZ; Start 55; Stop 79
tgcgtaaaagatacggaaggaatgt

SEQ ID NO: 451950 - DNA, 25 bp, Artificial
  probe
  misc_feature (1)..(25): SEQ ID NO: 6875; WAN024BQZ; Start 45; Stop 69
aaaataccgctgcgtaaaagatacg

SEQ ID NO: 451951 - DNA, 25 bp, Artificial
  probe
  misc_feature (1)..(25): SEQ ID NO: 6875; WAN024BQZ; Start 53; Stop 77
gctgcgtaaaagatacggaaggaat

SEQ ID NO: 451952 - DNA, 25 bp, Artificial
  probe
  misc_feature (1)..(25): SEQ ID NO: 6875; WAN024BQZ; Start 46; Stop 70
aaataccgctgcgtaaaagatacgg

SEQ ID NO: 451953 - DNA, 25 bp, Artificial
  probe
  misc_feature (1)..(25): SEQ ID NO: 6875; WAN024BQZ; Start 48; Stop 72
ataccgctgcgtaaaagatacggaa

SEQ ID NO: 451954 - DNA, 25 bp, Artificial
  probe
  misc_feature (1)..(25): SEQ ID NO: 6875; WAN024BQZ; Start 47; Stop 71
aataccgctgcgtaaaagatacgga

SEQ ID NO: 451955 - DNA, 25 bp, Artificial
  probe
  misc_feature (1)..(25): SEQ ID NO: 6875; WAN024BQZ; Start 49; Stop 73
taccgctgcgtaaaagatacggaag

SEQ ID NO: 451956 - DNA, 25 bp, Artificial
  probe
  misc_feature (1)..(25): SEQ ID NO: 6876; WAN024BSW; Start 652; Stop 676
attgatggagatgtaacgaatagca

SEQ ID NO: 451957 - DNA, 25 bp, Artificial
  probe
  misc_feature (1)..(25): SEQ ID NO: 6876; WAN024BSW; Start 653; Stop 677
ttgatggagatgtaacgaatagcaa

SEQ ID NO: 451958 - DNA, 25 bp, Artificial
  probe
  misc_feature (1)..(25): SEQ ID NO: 6876; WAN024BSW; Start 651; Stop 675
tattgatggagatgtaacgaatagc

SEQ ID NO: 451959 - DNA, 25 bp, Artificial
  probe
  misc_feature (1)..(25): SEQ ID NO: 6876; WAN024BSW; Start 423; Stop 447
acgctattatgaaactgatacccaa

SEQ ID NO: 451960 - DNA, 25 bp, Artificial
  probe
  misc_feature (1)..(25): SEQ ID NO: 6876; WAN024BSW; Start 422; Stop 446
aacgctattatgaaactgataccca

SEQ ID NO: 451961 - DNA, 25 bp, Artificial
  probe
  misc_feature (1)..(25): SEQ ID NO: 6876; WAN024BSW; Start 654; Stop 678
tgatggagatgtaacgaatagcaaa

SEQ ID NO: 451962 - DNA, 25 bp, Artificial
  probe
  misc_feature (1)..(25): SEQ ID NO: 6876; WAN024BSW; Start 287; Stop 311
tcttctctccagaggaattgaacta

SEQ ID NO: 451963 - DNA, 25 bp, Artificial
  probe
  misc_feature (1)..(25): SEQ ID NO: 6876; WAN024BSW; Start 288; Stop 312
cttctctccagaggaattgaactat

SEQ ID NO: 451964 - DNA, 25 bp, Artificial
  probe
  misc_feature (1)..(25): SEQ ID NO: 6876; WAN024BSW; Start 324; Stop 348
gaatgctaacaactttgaaacaggt

SEQ ID NO: 451965 - DNA, 25 bp, Artificial
  probe
  misc_feature (1)..(25): SEQ ID NO: 6876; WAN024BSW; Start 285; Stop 309
cttcttctctccagaggaattgaac

SEQ ID NO: 451966 - DNA, 25 bp, Artificial
  probe
  misc_feature (1)..(25): SEQ ID NO: 6876; WAN024BSW; Start 424; Stop 448
cgctattatgaaactgatacccaaa

SEQ ID NO: 451967 - DNA, 25 bp, Artificial
  probe
  misc_feature (1)..(25): SEQ ID NO: 6876; WAN024BSW; Start 421; Stop 445
aaacgctattatgaaactgataccc

SEQ ID NO: 451968 - DNA, 25 bp, Artificial
  probe
  misc_feature (1)..(25): SEQ ID NO: 6876; WAN024BSW; Start 325; Stop 349
aatgctaacaactttgaaacaggtg

SEQ ID NO: 451969 - DNA, 25 bp, Artificial
  probe
  misc_feature (1)..(25): SEQ ID NO: 6876; WAN024BSW; Start 286; Stop 310
ttcttctctccagaggaattgaact

SEQ ID NO: 451970 - DNA, 25 bp, Artificial
  probe
  misc_feature (1)..(25): SEQ ID NO: 6876; WAN024BSW; Start 416; Stop 440
gggataaacgctattatgaaactga

SEQ ID NO: 451971 - DNA, 25 bp, Artificial
  probe
  misc_feature (1)..(25): SEQ ID NO: 6876; WAN024BSW; Start 415; Stop 439
agggataaacgctattatgaaactg

SEQ ID NO: 451972 - DNA, 25 bp, Artificial
  probe
  misc_feature (1)..(25): SEQ ID NO: 6876; WAN024BSW; Start 323; Stop 347
cgaatgctaacaactttgaaacagg

SEQ ID NO: 451973 - DNA, 25 bp, Artificial
  probe
  misc_feature (1)..(25): SEQ ID NO: 6876; WAN024BSW; Start 23; Stop 47
ctgatatacatggatacttggatga

SEQ ID NO: 451974 - DNA, 25 bp, Artificial
  probe
  misc_feature (1)..(25): SEQ ID NO: 6876; WAN024BSW; Start 22; Stop 46
tctgatatacatggatacttggatg

SEQ ID NO: 451975 - DNA, 25 bp, Artificial
  probe
  misc_feature (1)..(25): SEQ ID NO: 6876; WAN024BSW; Start 289; Stop 313
ttctctccagaggaattgaactata

SEQ ID NO: 451976 - DNA, 25 bp, Artificial
  probe
  misc_feature (1)..(25): SEQ ID NO: 6876; WAN024BSW; Start 256; Stop 280
gcttcagcatttccagaaacaataa

SEQ ID NO: 451977 - DNA, 25 bp, Artificial
  probe
  misc_feature (1)..(25): SEQ ID NO: 6876; WAN024BSW; Start 290; Stop 314
tctctccagaggaattgaactatat

SEQ ID NO: 451978 - DNA, 25 bp, Artificial
  probe
  misc_feature (1)..(25): SEQ ID NO: 6876; WAN024BSW; Start 13; Stop 37
tacgcaatatctgatatacatggat

SEQ ID NO: 451979 - DNA, 25 bp, Artificial
  probe
  misc_feature (1)..(25): SEQ ID NO: 6876; WAN024BSW; Start 12; Stop 36
atacgcaatatctgatatacatgga

SEQ ID NO: 451980 - DNA, 25 bp, Artificial
  probe
  misc_feature (1)..(25): SEQ ID NO: 6876; WAN024BSW; Start 2; Stop 26
tggctaaattatacgcaatatctga

SEQ ID NO: 451981 - DNA, 25 bp, Artificial
  probe
  misc_feature (1)..(25): SEQ ID NO: 6876; WAN024BSW; Start 502; Stop 526
acgagttcagagatatttacaaaca

SEQ ID NO: 451982 - DNA, 25 bp, Artificial
  probe
  misc_feature (1)..(25): SEQ ID NO: 6876; WAN024BSW; Start 595; Stop 619
gctaaagatagaagatacctgggta

SEQ ID NO: 451983 - DNA, 25 bp, Artificial
  probe
  misc_feature (1)..(25): SEQ ID NO: 6876; WAN024BSW; Start 24; Stop 48
tgatatacatggatacttggatgaa

SEQ ID NO: 451984 - DNA, 25 bp, Artificial
  probe
  misc_feature (1)..(25): SEQ ID NO: 6876; WAN024BSW; Start 257; Stop 281
cttcagcatttccagaaacaataaa

SEQ ID NO: 451985 - DNA, 25 bp, Artificial
  probe
  misc_feature (1)..(25): SEQ ID NO: 6876; WAN024BSW; Start 284; Stop 308
gcttcttctctccagaggaattgaa

SEQ ID NO: 451986 - DNA, 25 bp, Artificial
  probe
  misc_feature (1)..(25): SEQ ID NO: 6876; WAN024BSW; Start 650; Stop 674
ttattgatggagatgtaacgaatag

SEQ ID NO: 451987 - DNA, 25 bp, Artificial
  probe
  misc_feature (1)..(25): SEQ ID NO: 6876; WAN024BSW; Start 335; Stop 359
actttgaaacaggtgttagaaatga

SEQ ID NO: 451988 - DNA, 25 bp, Artificial
  probe
  misc_feature (1)..(25): SEQ ID NO: 6876; WAN024BSW; Start 690; Stop 714
tctttgctatgatacaattacccaa

SEQ ID NO: 451989 - DNA, 25 bp, Artificial
  probe
  misc_feature (1)..(25): SEQ ID NO: 6877; WAN024CCC; Start 1027; Stop 1051
gatgtgttggcaggtatgttatcta

SEQ ID NO: 451990 - DNA, 25 bp, Artificial
  probe
  misc_feature (1)..(25): SEQ ID NO: 6877; WAN024CCC; Start 263; Stop 287
atatgaatatggaagtgttgctgac

SEQ ID NO: 451991 - DNA, 25 bp, Artificial
  probe
  misc_feature (1)..(25): SEQ ID NO: 6877; WAN024CCC; Start 1028; Stop 1052
atgtgttggcaggtatgttatctag

SEQ ID NO: 451992 - DNA, 25 bp, Artificial
  probe
  misc_feature (1)..(25): SEQ ID NO: 6877; WAN024CCC; Start 367; Stop 391
tatctcaaggaacaactaggctatg

SEQ ID NO: 451993 - DNA, 25 bp, Artificial
  probe
  misc_feature (1)..(25): SEQ ID NO: 6877; WAN024CCC; Start 366; Stop 390
gtatctcaaggaacaactaggctat

SEQ ID NO: 451994 - DNA, 25 bp, Artificial
  probe
  misc_feature (1)..(25): SEQ ID NO: 6877; WAN024CCC; Start 1030; Stop 1054
gtgttggcaggtatgttatctagtt

SEQ ID NO: 451995 - DNA, 25 bp, Artificial
  probe
  misc_feature (1)..(25): SEQ ID NO: 6877; WAN024CCC; Start 801; Stop 825
ccaattcattaccttgtcagatacg

SEQ ID NO: 451996 - DNA, 25 bp, Artificial
  probe
  misc_feature (1)..(25): SEQ ID NO: 6877; WAN024CCC; Start 1242; Stop 1266
aacctatcattctctcattaccgag

SEQ ID NO: 451997 - DNA, 25 bp, Artificial
  probe
  misc_feature (1)..(25): SEQ ID NO: 6877; WAN024CCC; Start 1245; Stop 1269
ctatcattctctcattaccgaggat

SEQ ID NO: 451998 - DNA, 25 bp, Artificial
  probe
  misc_feature (1)..(25): SEQ ID NO: 6877; WAN024CCC; Start 1029; Stop 1053
tgtgttggcaggtatgttatctagt

SEQ ID NO: 451999 - DNA, 25 bp, Artificial
  probe
  misc_feature (1)..(25): SEQ ID NO: 6877; WAN024CCC; Start 800; Stop 824
accaattcattaccttgtcagatac

SEQ ID NO: 452000 - DNA, 25 bp, Artificial
  probe
  misc_feature (1)..(25): SEQ ID NO: 6877; WAN024CCC; Start 264; Stop 288
tatgaatatggaagtgttgctgaca

SEQ ID NO: 452001 - DNA, 25 bp, Artificial
  probe
  misc_feature (1)..(25): SEQ ID NO: 6877; WAN024CCC; Start 512; Stop 536
acctgatggcttactacaatatgtt

SEQ ID NO: 452002 - DNA, 25 bp, Artificial
  probe
  misc_feature (1)..(25): SEQ ID NO: 6877; WAN024CCC; Start 511; Stop 535
cacctgatggcttactacaatatgt

SEQ ID NO: 452003 - DNA, 25 bp, Artificial
  probe
  misc_feature (1)..(25): SEQ ID NO: 6877; WAN024CCC; Start 797; Stop 821
agtaccaattcattaccttgtcaga

SEQ ID NO: 452004 - DNA, 25 bp, Artificial
  probe
  misc_feature (1)..(25): SEQ ID NO: 6877; WAN024CCC; Start 796; Stop 820
gagtaccaattcattaccttgtcag

SEQ ID NO: 452005 - DNA, 25 bp, Artificial
  probe
  misc_feature (1)..(25): SEQ ID NO: 6877; WAN024CCC; Start 795; Stop 819
tgagtaccaattcattaccttgtca

SEQ ID NO: 452006 - DNA, 25 bp, Artificial
  probe
  misc_feature (1)..(25): SEQ ID NO: 6877; WAN024CCC; Start 1247; Stop 1271
atcattctctcattaccgaggatat

SEQ ID NO: 452007 - DNA, 25 bp, Artificial
  probe
  misc_feature (1)..(25): SEQ ID NO: 6877; WAN024CCC; Start 1174; Stop 1198
ggaagattagtgctagactctatca

SEQ ID NO: 452008 - DNA, 25 bp, Artificial
  probe
  misc_feature (1)..(25): SEQ ID NO: 6877; WAN024CCC; Start 365; Stop 389
tgtatctcaaggaacaactaggcta

SEQ ID NO: 452009 - DNA, 25 bp, Artificial
  probe
  misc_feature (1)..(25): SEQ ID NO: 6877; WAN024CCC; Start 563; Stop 587
ttaaccagaagcatacagacctatg

SEQ ID NO: 452010 - DNA, 25 bp, Artificial
  probe
  misc_feature (1)..(25): SEQ ID NO: 6877; WAN024CCC; Start 794; Stop 818
ttgagtaccaattcattaccttgtc

SEQ ID NO: 452011 - DNA, 25 bp, Artificial
  probe
  misc_feature (1)..(25): SEQ ID NO: 6877; WAN024CCC; Start 798; Stop 822
gtaccaattcattaccttgtcagat

SEQ ID NO: 452012 - DNA, 25 bp, Artificial
  probe
  misc_feature (1)..(25): SEQ ID NO: 6877; WAN024CCC; Start 267; Stop 291
gaatatggaagtgttgctgacagaa

SEQ ID NO: 452013 - DNA, 25 bp, Artificial
  probe
  misc_feature (1)..(25): SEQ ID NO: 6877; WAN024CCC; Start 265; Stop 289
atgaatatggaagtgttgctgacag

SEQ ID NO: 452014 - DNA, 25 bp, Artificial
  probe
  misc_feature (1)..(25): SEQ ID NO: 6877; WAN024CCC; Start 1244; Stop 1268
cctatcattctctcattaccgagga

SEQ ID NO: 452015 - DNA, 25 bp, Artificial
  probe
  misc_feature (1)..(25): SEQ ID NO: 6877; WAN024CCC; Start 368; Stop 392
atctcaaggaacaactaggctatgt

SEQ ID NO: 452016 - DNA, 25 bp, Artificial
  probe
  misc_feature (1)..(25): SEQ ID NO: 6877; WAN024CCC; Start 1177; Stop 1201
agattagtgctagactctatcaagt

SEQ ID NO: 452017 - DNA, 25 bp, Artificial
  probe
  misc_feature (1)..(25): SEQ ID NO: 6877; WAN024CCC; Start 1243; Stop 1267
acctatcattctctcattaccgagg

SEQ ID NO: 452018 - DNA, 25 bp, Artificial
  probe
  misc_feature (1)..(25): SEQ ID NO: 6877; WAN024CCC; Start 1246; Stop 1270
tatcattctctcattaccgaggata

SEQ ID NO: 452019 - DNA, 25 bp, Artificial
  probe
  misc_feature (1)..(25): SEQ ID NO: 6877; WAN024CCC; Start 862; Stop 886
aatccagatatggctgagttgattc

SEQ ID NO: 452020 - DNA, 25 bp, Artificial
  probe
  misc_feature (1)..(25): SEQ ID NO: 6877; WAN024CCC; Start 508; Stop 532
taccacctgatggcttactacaata

SEQ ID NO: 452021 - DNA, 25 bp, Artificial
  probe
  misc_feature (1)..(25): SEQ ID NO: 6877; WAN024CCC; Start 369; Stop 393
tctcaaggaacaactaggctatgtc

SEQ ID NO: 452022 - DNA, 25 bp, Artificial
  probe
  misc_feature (1)..(25): SEQ ID NO: 6878; WAN024BXR; Start 101; Stop 125
aatctattgaatcacaggacgctac

SEQ ID NO: 452023 - DNA, 25 bp, Artificial
  probe
  misc_feature (1)..(25): SEQ ID NO: 6878; WAN024BXR; Start 102; Stop 126
atctattgaatcacaggacgctacc

SEQ ID NO: 452024 - DNA, 25 bp, Artificial
  probe
  misc_feature (1)..(25): SEQ ID NO: 6878; WAN024BXR; Start 100; Stop 124
aaatctattgaatcacaggacgcta

SEQ ID NO: 452025 - DNA, 25 bp, Artificial
  probe
  misc_feature (1)..(25): SEQ ID NO: 6878; WAN024BXR; Start 89; Stop 113
aagccgtcttgaaatctattgaatc

SEQ ID NO: 452026 - DNA, 25 bp, Artificial
  probe
  misc_feature (1)..(25): SEQ ID NO: 6878; WAN024BXR; Start 99; Stop 123
gaaatctattgaatcacaggacgct

SEQ ID NO: 452027 - DNA, 25 bp, Artificial
  probe
  misc_feature (1)..(25): SEQ ID NO: 6878; WAN024BXR; Start 32; Stop 56
aactaacaaacgaagatgctctaaa

SEQ ID NO: 452028 - DNA, 25 bp, Artificial
  probe
  misc_feature (1)..(25): SEQ ID NO: 6878; WAN024BXR; Start 31; Stop 55
aaactaacaaacgaagatgctctaa

SEQ ID NO: 452029 - DNA, 25 bp, Artificial
  probe
  misc_feature (1)..(25): SEQ ID NO: 6878; WAN024BXR; Start 97; Stop 121
ttgaaatctattgaatcacaggacg

SEQ ID NO: 452030 - DNA, 25 bp, Artificial
  probe
  misc_feature (1)..(25): SEQ ID NO: 6878; WAN024BXR; Start 92; Stop 116
ccgtcttgaaatctattgaatcaca

SEQ ID NO: 452031 - DNA, 25 bp, Artificial
  probe
  misc_feature (1)..(25): SEQ ID NO: 6878; WAN024BXR; Start 91; Stop 115
gccgtcttgaaatctattgaatcac

SEQ ID NO: 452032 - DNA, 25 bp, Artificial
  probe
  misc_feature (1)..(25): SEQ ID NO: 6878; WAN024BXR; Start 90; Stop 114
agccgtcttgaaatctattgaatca

SEQ ID NO: 452033 - DNA, 25 bp, Artificial
  probe
  misc_feature (1)..(25): SEQ ID NO: 6878; WAN024BXR; Start 98; Stop 122
tgaaatctattgaatcacaggacgc

SEQ ID NO: 452034 - DNA, 25 bp, Artificial
  probe
  misc_feature (1)..(25): SEQ ID NO: 6878; WAN024BXR; Start 93; Stop 117
cgtcttgaaatctattgaatcacag

SEQ ID NO: 452035 - DNA, 25 bp, Artificial
  probe
  misc_feature (1)..(25): SEQ ID NO: 6878; WAN024BXR; Start 96; Stop 120
cttgaaatctattgaatcacaggac

SEQ ID NO: 452036 - DNA, 25 bp, Artificial
  probe
  misc_feature (1)..(25): SEQ ID NO: 6878; WAN024BXR; Start 94; Stop 118
gtcttgaaatctattgaatcacagg

SEQ ID NO: 452037 - DNA, 25 bp, Artificial
  probe
  misc_feature (1)..(25): SEQ ID NO: 6878; WAN024BXR; Start 95; Stop 119
tcttgaaatctattgaatcacagga

SEQ ID NO: 452038 - DNA, 25 bp, Artificial
  probe
  misc_feature (1)..(25): SEQ ID NO: 6878; WAN024BXR; Start 103; Stop 127
tctattgaatcacaggacgctaccg

SEQ ID NO: 452039 - DNA, 25 bp, Artificial
  probe
  misc_feature (1)..(25): SEQ ID NO: 6878; WAN024BXR; Start 33; Stop 57
actaacaaacgaagatgctctaaaa

SEQ ID NO: 452040 - DNA, 25 bp, Artificial
  probe
  misc_feature (1)..(25): SEQ ID NO: 6878; WAN024BXR; Start 30; Stop 54
aaaactaacaaacgaagatgctcta

SEQ ID NO: 452041 - DNA, 25 bp, Artificial
  probe
  misc_feature (1)..(25): SEQ ID NO: 6878; WAN024BXR; Start 29; Stop 53
taaaactaacaaacgaagatgctct

SEQ ID NO: 452042 - DNA, 25 bp, Artificial
  probe
  misc_feature (1)..(25): SEQ ID NO: 6878; WAN024BXR; Start 28; Stop 52
ataaaactaacaaacgaagatgctc

SEQ ID NO: 452043 - DNA, 25 bp, Artificial
  probe
  misc_feature (1)..(25): SEQ ID NO: 6878; WAN024BXR; Start 88; Stop 112
caagccgtcttgaaatctattgaat

SEQ ID NO: 452044 - DNA, 25 bp, Artificial
  probe
  misc_feature (1)..(25): SEQ ID NO: 6878; WAN024BXR; Start 85; Stop 109
ctacaagccgtcttgaaatctattg

SEQ ID NO: 452045 - DNA, 25 bp, Artificial
  probe
  misc_feature (1)..(25): SEQ ID NO: 6878; WAN024BXR; Start 86; Stop 110
tacaagccgtcttgaaatctattga

SEQ ID NO: 452046 - DNA, 25 bp, Artificial
  probe
  misc_feature (1)..(25): SEQ ID NO: 6878; WAN024BXR; Start 87; Stop 111
acaagccgtcttgaaatctattgaa

SEQ ID NO: 452047 - DNA, 25 bp, Artificial
  probe
  misc_feature (1)..(25): SEQ ID NO: 6878; WAN024BXR; Start 84; Stop 108
gctacaagccgtcttgaaatctatt

SEQ ID NO: 452048 - DNA, 25 bp, Artificial
  probe
  misc_feature (1)..(25): SEQ ID NO: 6878; WAN024BXR; Start 27; Stop 51
tataaaactaacaaacgaagatgct

SEQ ID NO: 452049 - DNA, 25 bp, Artificial
  probe
  misc_feature (1)..(25): SEQ ID NO: 6878; WAN024BXR; Start 83; Stop 107
agctacaagccgtcttgaaatctat

SEQ ID NO: 452050 - DNA, 25 bp, Artificial
  probe
  misc_feature (1)..(25): SEQ ID NO: 6878; WAN024BXR; Start 82; Stop 106
aagctacaagccgtcttgaaatcta

SEQ ID NO: 452051 - DNA, 25 bp, Artificial
  probe
  misc_feature (1)..(25): SEQ ID NO: 6878; WAN024BXR; Start 26; Stop 50
atataaaactaacaaacgaagatgc

SEQ ID NO: 452052 - DNA, 25 bp, Artificial
  probe
  misc_feature (1)..(25): SEQ ID NO: 6878; WAN024BXR; Start 81; Stop 105
aaagctacaagccgtcttgaaatct

SEQ ID NO: 452053 - DNA, 25 bp, Artificial
  probe
  misc_feature (1)..(25): SEQ ID NO: 6878; WAN024BXR; Start 23; Stop 47
gtgatataaaactaacaaacgaaga

SEQ ID NO: 452054 - DNA, 25 bp, Artificial
  probe
  misc_feature (1)..(25): SEQ ID NO: 6878; WAN024BXR; Start 22; Stop 46
cgtgatataaaactaacaaacgaag

SEQ ID NO: 452055 - DNA, 25 bp, Artificial
  probe
  misc_feature (1)..(25): SEQ ID NO: 6879; WAN024BUU; Start 21; Stop 45
caatcagaatcctactcaatcggta

SEQ ID NO: 452056 - DNA, 25 bp, Artificial
  probe
  misc_feature (1)..(25): SEQ ID NO: 6879; WAN024BUU; Start 541; Stop 565
tatacggtaacggatagtagcaatc

SEQ ID NO: 452057 - DNA, 25 bp, Artificial
  probe
  misc_feature (1)..(25): SEQ ID NO: 6879; WAN024BUU; Start 22; Stop 46
aatcagaatcctactcaatcggtaa

SEQ ID NO: 452058 - DNA, 25 bp, Artificial
  probe
  misc_feature (1)..(25): SEQ ID NO: 6879; WAN024BUU; Start 539; Stop 563
aatatacggtaacggatagtagcaa

SEQ ID NO: 452059 - DNA, 25 bp, Artificial
  probe
  misc_feature (1)..(25): SEQ ID NO: 6879; WAN024BUU; Start 23; Stop 47
atcagaatcctactcaatcggtaat

SEQ ID NO: 452060 - DNA, 25 bp, Artificial
  probe
  misc_feature (1)..(25): SEQ ID NO: 6879; WAN024BUU; Start 540; Stop 564
atatacggtaacggatagtagcaat

SEQ ID NO: 452061 - DNA, 25 bp, Artificial
  probe
  misc_feature (1)..(25): SEQ ID NO: 6879; WAN024BUU; Start 24; Stop 48
tcagaatcctactcaatcggtaatt

SEQ ID NO: 452062 - DNA, 25 bp, Artificial
  probe
  misc_feature (1)..(25): SEQ ID NO: 6879; WAN024BUU; Start 17; Stop 41
ttggcaatcagaatcctactcaatc

SEQ ID NO: 452063 - DNA, 25 bp, Artificial
  probe
  misc_feature (1)..(25): SEQ ID NO: 6879; WAN024BUU; Start 16; Stop 40
cttggcaatcagaatcctactcaat

SEQ ID NO: 452064 - DNA, 25 bp, Artificial
  probe
  misc_feature (1)..(25): SEQ ID NO: 6879; WAN024BUU; Start 554; Stop 578
atagtagcaatccgatcacaatcat

SEQ ID NO: 452065 - DNA, 25 bp, Artificial
  probe
  misc_feature (1)..(25): SEQ ID NO: 6879; WAN024BUU; Start 553; Stop 577
gatagtagcaatccgatcacaatca

SEQ ID NO: 452066 - DNA, 25 bp, Artificial
  probe
  misc_feature (1)..(25): SEQ ID NO: 6879; WAN024BUU; Start 506; Stop 530
aggaatatacgactgagcaggaatc

SEQ ID NO: 452067 - DNA, 25 bp, Artificial
  probe
  misc_feature (1)..(25): SEQ ID NO: 6879; WAN024BUU; Start 14; Stop 38
aacttggcaatcagaatcctactca

SEQ ID NO: 452068 - DNA, 25 bp, Artificial
  probe
  misc_feature (1)..(25): SEQ ID NO: 6879; WAN024BUU; Start 555; Stop 579
tagtagcaatccgatcacaatcatg

SEQ ID NO: 452069 - DNA, 25 bp, Artificial
  probe
  misc_feature (1)..(25): SEQ ID NO: 6879; WAN024BUU; Start 15; Stop 39
acttggcaatcagaatcctactcaa

SEQ ID NO: 452070 - DNA, 25 bp, Artificial
  probe
  misc_feature (1)..(25): SEQ ID NO: 6879; WAN024BUU; Start 197; Stop 221
gctactctattcctcgtcgtaatgg

SEQ ID NO: 452071 - DNA, 25 bp, Artificial
  probe
  misc_feature (1)..(25): SEQ ID NO: 6879; WAN024BUU; Start 196; Stop 220
ggctactctattcctcgtcgtaatg

SEQ ID NO: 452072 - DNA, 25 bp, Artificial
  probe
  misc_feature (1)..(25): SEQ ID NO: 6879; WAN024BUU; Start 776; Stop 800
ctgaacttggtgatgataagctaga

SEQ ID NO: 452073 - DNA, 25 bp, Artificial
  probe
  misc_feature (1)..(25): SEQ ID NO: 6879; WAN024BUU; Start 151; Stop 175
attatggctgttgataaggacggtt

SEQ ID NO: 452074 - DNA, 25 bp, Artificial
  probe
  misc_feature (1)..(25): SEQ ID NO: 6879; WAN024BUU; Start 770; Stop 794
tagaagctgaacttggtgatgataa

SEQ ID NO: 452075 - DNA, 25 bp, Artificial
  probe
  misc_feature (1)..(25): SEQ ID NO: 6879; WAN024BUU; Start 1170; Stop 1194
aatcatcgtggctaactctatgtgg

SEQ ID NO: 452076 - DNA, 25 bp, Artificial
  probe
  misc_feature (1)..(25): SEQ ID NO: 6879; WAN024BUU; Start 777; Stop 801
tgaacttggtgatgataagctagac

SEQ ID NO: 452077 - DNA, 25 bp, Artificial
  probe
  misc_feature (1)..(25): SEQ ID NO: 6879; WAN024BUU; Start 791; Stop 815
ataagctagaccataatgttcaacg

SEQ ID NO: 452078 - DNA, 25 bp, Artificial
  probe
  misc_feature (1)..(25): SEQ ID NO: 6879; WAN024BUU; Start 769; Stop 793
atagaagctgaacttggtgatgata

SEQ ID NO: 452079 - DNA, 25 bp, Artificial
  probe
  misc_feature (1)..(25): SEQ ID NO: 6879; WAN024BUU; Start 434; Stop 458
tacaattccgtaccagaacatccaa

SEQ ID NO: 452080 - DNA, 25 bp, Artificial
  probe
  misc_feature (1)..(25): SEQ ID NO: 6879; WAN024BUU; Start 768; Stop 792
gatagaagctgaacttggtgatgat

SEQ ID NO: 452081 - DNA, 25 bp, Artificial
  probe
  misc_feature (1)..(25): SEQ ID NO: 6879; WAN024BUU; Start 765; Stop 789
gaagatagaagctgaacttggtgat

SEQ ID NO: 452082 - DNA, 25 bp, Artificial
  probe
  misc_feature (1)..(25): SEQ ID NO: 6879; WAN024BUU; Start 195; Stop 219
tggctactctattcctcgtcgtaat

SEQ ID NO: 452083 - DNA, 25 bp, Artificial
  probe
  misc_feature (1)..(25): SEQ ID NO: 6879; WAN024BUU; Start 771; Stop 795
agaagctgaacttggtgatgataag

SEQ ID NO: 452084 - DNA, 25 bp, Artificial
  probe
  misc_feature (1)..(25): SEQ ID NO: 6879; WAN024BUU; Start 766; Stop 790
aagatagaagctgaacttggtgatg

SEQ ID NO: 452085 - DNA, 25 bp, Artificial
  probe
  misc_feature (1)..(25): SEQ ID NO: 6879; WAN024BUU; Start 294; Stop 318
ccgaatatctacctctcattcctct

SEQ ID NO: 452086 - DNA, 25 bp, Artificial
  probe
  misc_feature (1)..(25): SEQ ID NO: 6879; WAN024BUU; Start 20; Stop 44
gcaatcagaatcctactcaatcggt

SEQ ID NO: 452087 - DNA, 25 bp, Artificial
  probe
  misc_feature (1)..(25): SEQ ID NO: 6879; WAN024BUU; Start 18; Stop 42
tggcaatcagaatcctactcaatcg

SEQ ID NO: 452088 - DNA, 25 bp, Artificial
  probe
  misc_feature (1)..(25): SEQ ID NO: 6880; WAN024FBX; Start 41; Stop 65
aactggcattattacggtcaattcc

SEQ ID NO: 452089 - DNA, 25 bp, Artificial
  probe
  misc_feature (1)..(25): SEQ ID NO: 6880; WAN024FBX; Start 35; Stop 59
aaatcaaactggcattattacggtc

SEQ ID NO: 452090 - DNA, 25 bp, Artificial
  probe
  misc_feature (1)..(25): SEQ ID NO: 6880; WAN024FBX; Start 40; Stop 64
aaactggcattattacggtcaattc

SEQ ID NO: 452091 - DNA, 25 bp, Artificial
  probe
  misc_feature (1)..(25): SEQ ID NO: 6880; WAN024FBX; Start 39; Stop 63
caaactggcattattacggtcaatt

SEQ ID NO: 452092 - DNA, 25 bp, Artificial
  probe
  misc_feature (1)..(25): SEQ ID NO: 6880; WAN024FBX; Start 38; Stop 62
tcaaactggcattattacggtcaat

SEQ ID NO: 452093 - DNA, 25 bp, Artificial
  probe
  misc_feature (1)..(25): SEQ ID NO: 6880; WAN024FBX; Start 37; Stop 61
atcaaactggcattattacggtcaa

SEQ ID NO: 452094 - DNA, 25 bp, Artificial
  probe
  misc_feature (1)..(25): SEQ ID NO: 6880; WAN024FBX; Start 36; Stop 60
aatcaaactggcattattacggtca

SEQ ID NO: 452095 - DNA, 25 bp, Artificial
  probe
  misc_feature (1)..(25): SEQ ID NO: 6880; WAN024FBX; Start 45; Stop 69
ggcattattacggtcaattcccaaa

SEQ ID NO: 452096 - DNA, 25 bp, Artificial
  probe
  misc_feature (1)..(25): SEQ ID NO: 6880; WAN024FBX; Start 256; Stop 280
attcccttcagcccagtgatagtat

SEQ ID NO: 452097 - DNA, 25 bp, Artificial
  probe
  misc_feature (1)..(25): SEQ ID NO: 6880; WAN024FBX; Start 42; Stop 66
actggcattattacggtcaattccc

SEQ ID NO: 452098 - DNA, 25 bp, Artificial
  probe
  misc_feature (1)..(25): SEQ ID NO: 6880; WAN024FBX; Start 258; Stop 282
tcccttcagcccagtgatagtattt

SEQ ID NO: 452099 - DNA, 25 bp, Artificial
  probe
  misc_feature (1)..(25): SEQ ID NO: 6880; WAN024FBX; Start 257; Stop 281
ttcccttcagcccagtgatagtatt

SEQ ID NO: 452100 - DNA, 25 bp, Artificial
  probe
  misc_feature (1)..(25): SEQ ID NO: 6880; WAN024FBX; Start 189; Stop 213
aaatttcttgagacgttcccatctg

SEQ ID NO: 452101 - DNA, 25 bp, Artificial
  probe
  misc_feature (1)..(25): SEQ ID NO: 6880; WAN024FBX; Start 149; Stop 173
gaatcccagacatgataacaggcat

SEQ ID NO: 452102 - DNA, 25 bp, Artificial
  probe
  misc_feature (1)..(25): SEQ ID NO: 6880; WAN024FBX; Start 255; Stop 279
aattcccttcagcccagtgatagta

SEQ ID NO: 452103 - DNA, 25 bp, Artificial
  probe
  misc_feature (1)..(25): SEQ ID NO: 6880; WAN024FBX; Start 34; Stop 58
aaaatcaaactggcattattacggt

SEQ ID NO: 452104 - DNA, 25 bp, Artificial
  probe
  misc_feature (1)..(25): SEQ ID NO: 6880; WAN024FBX; Start 188; Stop 212
caaatttcttgagacgttcccatct

SEQ ID NO: 452105 - DNA, 25 bp, Artificial
  probe
  misc_feature (1)..(25): SEQ ID NO: 6880; WAN024FBX; Start 33; Stop 57
caaaatcaaactggcattattacgg

SEQ ID NO: 452106 - DNA, 25 bp, Artificial
  probe
  misc_feature (1)..(25): SEQ ID NO: 6880; WAN024FBX; Start 46; Stop 70
gcattattacggtcaattcccaaaa

SEQ ID NO: 452107 - DNA, 25 bp, Artificial
  probe
  misc_feature (1)..(25): SEQ ID NO: 6880; WAN024FBX; Start 174; Stop 198
ggcgagtggaatttcaaatttcttg

SEQ ID NO: 452108 - DNA, 25 bp, Artificial
  probe
  misc_feature (1)..(25): SEQ ID NO: 6880; WAN024FBX; Start 32; Stop 56
tcaaaatcaaactggcattattacg

SEQ ID NO: 452109 - DNA, 25 bp, Artificial
  probe
  misc_feature (1)..(25): SEQ ID NO: 6880; WAN024FBX; Start 172; Stop 196
atggcgagtggaatttcaaatttct

SEQ ID NO: 452110 - DNA, 25 bp, Artificial
  probe
  misc_feature (1)..(25): SEQ ID NO: 6880; WAN024FBX; Start 171; Stop 195
catggcgagtggaatttcaaatttc

SEQ ID NO: 452111 - DNA, 25 bp, Artificial
  probe
  misc_feature (1)..(25): SEQ ID NO: 6880; WAN024FBX; Start 64; Stop 88
cccaaaagaataaaggaacctagtc

SEQ ID NO: 452112 - DNA, 25 bp, Artificial
  probe
  misc_feature (1)..(25): SEQ ID NO: 6880; WAN024FBX; Start 47; Stop 71
cattattacggtcaattcccaaaag

SEQ ID NO: 452113 - DNA, 25 bp, Artificial
  probe
  misc_feature (1)..(25): SEQ ID NO: 6880; WAN024FBX; Start 48; Stop 72
attattacggtcaattcccaaaaga

SEQ ID NO: 452114 - DNA, 25 bp, Artificial
  probe
  misc_feature (1)..(25): SEQ ID NO: 6880; WAN024FBX; Start 173; Stop 197
tggcgagtggaatttcaaatttctt

SEQ ID NO: 452115 - DNA, 25 bp, Artificial
  probe
  misc_feature (1)..(25): SEQ ID NO: 6880; WAN024FBX; Start 49; Stop 73
ttattacggtcaattcccaaaagaa

SEQ ID NO: 452116 - DNA, 25 bp, Artificial
  probe
  misc_feature (1)..(25): SEQ ID NO: 6880; WAN024FBX; Start 44; Stop 68
tggcattattacggtcaattcccaa

SEQ ID NO: 452117 - DNA, 25 bp, Artificial
  probe
  misc_feature (1)..(25): SEQ ID NO: 6880; WAN024FBX; Start 19; Stop 43
gaaagtgccccaatcaaaatcaaac

SEQ ID NO: 452118 - DNA, 25 bp, Artificial
  probe
  misc_feature (1)..(25): SEQ ID NO: 6880; WAN024FBX; Start 18; Stop 42
agaaagtgccccaatcaaaatcaaa

SEQ ID NO: 452119 - DNA, 25 bp, Artificial
  probe
  misc_feature (1)..(25): SEQ ID NO: 6880; WAN024FBX; Start 17; Stop 41
aagaaagtgccccaatcaaaatcaa

SEQ ID NO: 452120 - DNA, 25 bp, Artificial
  probe
  misc_feature (1)..(25): SEQ ID NO: 6880; WAN024FBX; Start 15; Stop 39
agaagaaagtgccccaatcaaaatc

SEQ ID NO: 452121 - DNA, 25 bp, Artificial
  probe
  misc_feature (1)..(25): SEQ ID NO: 6881; WAN024BLY; Start 563; Stop 587
caagtcatattcttagtgaactgga

SEQ ID NO: 452122 - DNA, 25 bp, Artificial
  probe
  misc_feature (1)..(25): SEQ ID NO: 6881; WAN024BLY; Start 562; Stop 586
tcaagtcatattcttagtgaactgg

SEQ ID NO: 452123 - DNA, 25 bp, Artificial
  probe
  misc_feature (1)..(25): SEQ ID NO: 6881; WAN024BLY; Start 420; Stop 444
aagtatagctgcatcattgttaggt

SEQ ID NO: 452124 - DNA, 25 bp, Artificial
  probe
  misc_feature (1)..(25): SEQ ID NO: 6881; WAN024BLY; Start 413; Stop 437
aacgtctaagtatagctgcatcatt

SEQ ID NO: 452125 - DNA, 25 bp, Artificial
  probe
  misc_feature (1)..(25): SEQ ID NO: 6881; WAN024BLY; Start 424; Stop 448
atagctgcatcattgttaggtagtc

SEQ ID NO: 452126 - DNA, 25 bp, Artificial
  probe
  misc_feature (1)..(25): SEQ ID NO: 6881; WAN024BLY; Start 423; Stop 447
tatagctgcatcattgttaggtagt

SEQ ID NO: 452127 - DNA, 25 bp, Artificial
  probe
  misc_feature (1)..(25): SEQ ID NO: 6881; WAN024BLY; Start 421; Stop 445
agtatagctgcatcattgttaggta

SEQ ID NO: 452128 - DNA, 25 bp, Artificial
  probe
  misc_feature (1)..(25): SEQ ID NO: 6881; WAN024BLY; Start 415; Stop 439
cgtctaagtatagctgcatcattgt

SEQ ID NO: 452129 - DNA, 25 bp, Artificial
  probe
  misc_feature (1)..(25): SEQ ID NO: 6881; WAN024BLY; Start 414; Stop 438
acgtctaagtatagctgcatcattg

SEQ ID NO: 452130 - DNA, 25 bp, Artificial
  probe
  misc_feature (1)..(25): SEQ ID NO: 6881; WAN024BLY; Start 412; Stop 436
caacgtctaagtatagctgcatcat

SEQ ID NO: 452131 - DNA, 25 bp, Artificial
  probe
  misc_feature (1)..(25): SEQ ID NO: 6881; WAN024BLY; Start 422; Stop 446
gtatagctgcatcattgttaggtag

SEQ ID NO: 452132 - DNA, 25 bp, Artificial
  probe
  misc_feature (1)..(25): SEQ ID NO: 6881; WAN024BLY; Start 564; Stop 588
aagtcatattcttagtgaactggat

SEQ ID NO: 452133 - DNA, 25 bp, Artificial
  probe
  misc_feature (1)..(25): SEQ ID NO: 6881; WAN024BLY; Start 430; Stop 454
gcatcattgttaggtagtccagaaa

SEQ ID NO: 452134 - DNA, 25 bp, Artificial
  probe
  misc_feature (1)..(25): SEQ ID NO: 6881; WAN024BLY; Start 416; Stop 440
gtctaagtatagctgcatcattgtt

SEQ ID NO: 452135 - DNA, 25 bp, Artificial
  probe
  misc_feature (1)..(25): SEQ ID NO: 6881; WAN024BLY; Start 410; Stop 434
aacaacgtctaagtatagctgcatc

SEQ ID NO: 452136 - DNA, 25 bp, Artificial
  probe
  misc_feature (1)..(25): SEQ ID NO: 6881; WAN024BLY; Start 431; Stop 455
catcattgttaggtagtccagaaat

SEQ ID NO: 452137 - DNA, 25 bp, Artificial
  probe
  misc_feature (1)..(25): SEQ ID NO: 6881; WAN024BLY; Start 419; Stop 443
taagtatagctgcatcattgttagg

SEQ ID NO: 452138 - DNA, 25 bp, Artificial
  probe
  misc_feature (1)..(25): SEQ ID NO: 6881; WAN024BLY; Start 676; Stop 700
cgaaatctggaagaagcctacttag

SEQ ID NO: 452139 - DNA, 25 bp, Artificial
  probe
  misc_feature (1)..(25): SEQ ID NO: 6881; WAN024BLY; Start 298; Stop 322
gcaaatatgaaagggcttagtttag

SEQ ID NO: 452140 - DNA, 25 bp, Artificial
  probe
  misc_feature (1)..(25): SEQ ID NO: 6881; WAN024BLY; Start 429; Stop 453
tgcatcattgttaggtagtccagaa

SEQ ID NO: 452141 - DNA, 25 bp, Artificial
  probe
  misc_feature (1)..(25): SEQ ID NO: 6881; WAN024BLY; Start 677; Stop 701
gaaatctggaagaagcctacttagc

SEQ ID NO: 452142 - DNA, 25 bp, Artificial
  probe
  misc_feature (1)..(25): SEQ ID NO: 6881; WAN024BLY; Start 305; Stop 329
tgaaagggcttagtttagatactga

SEQ ID NO: 452143 - DNA, 25 bp, Artificial
  probe
  misc_feature (1)..(25): SEQ ID NO: 6881; WAN024BLY; Start 411; Stop 435
acaacgtctaagtatagctgcatca

SEQ ID NO: 452144 - DNA, 25 bp, Artificial
  probe
  misc_feature (1)..(25): SEQ ID NO: 6881; WAN024BLY; Start 310; Stop 334
gggcttagtttagatactgaaagac

SEQ ID NO: 452145 - DNA, 25 bp, Artificial
  probe
  misc_feature (1)..(25): SEQ ID NO: 6881; WAN024BLY; Start 309; Stop 333
agggcttagtttagatactgaaaga

SEQ ID NO: 452146 - DNA, 25 bp, Artificial
  probe
  misc_feature (1)..(25): SEQ ID NO: 6881; WAN024BLY; Start 425; Stop 449
tagctgcatcattgttaggtagtcc

SEQ ID NO: 452147 - DNA, 25 bp, Artificial
  probe
  misc_feature (1)..(25): SEQ ID NO: 6881; WAN024BLY; Start 289; Stop 313
aagttaatagcaaatatgaaagggc

SEQ ID NO: 452148 - DNA, 25 bp, Artificial
  probe
  misc_feature (1)..(25): SEQ ID NO: 6881; WAN024BLY; Start 308; Stop 332
aagggcttagtttagatactgaaag

SEQ ID NO: 452149 - DNA, 25 bp, Artificial
  probe
  misc_feature (1)..(25): SEQ ID NO: 6881; WAN024BLY; Start 306; Stop 330
gaaagggcttagtttagatactgaa

SEQ ID NO: 452150 - DNA, 25 bp, Artificial
  probe
  misc_feature (1)..(25): SEQ ID NO: 6881; WAN024BLY; Start 304; Stop 328
atgaaagggcttagtttagatactg

SEQ ID NO: 452151 - DNA, 25 bp, Artificial
  probe
  misc_feature (1)..(25): SEQ ID NO: 6881; WAN024BLY; Start 565; Stop 589
agtcatattcttagtgaactggata

SEQ ID NO: 452152 - DNA, 25 bp, Artificial
  probe
  misc_feature (1)..(25): SEQ ID NO: 6881; WAN024BLY; Start 561; Stop 585
atcaagtcatattcttagtgaactg

SEQ ID NO: 452153 - DNA, 25 bp, Artificial
  probe
  misc_feature (1)..(25): SEQ ID NO: 6881; WAN024BLY; Start 417; Stop 441
tctaagtatagctgcatcattgtta

SEQ ID NO: 452154 - DNA, 25 bp, Artificial
  probe
  misc_feature (1)..(25): SEQ ID NO: 6882; WAN024D53; Start 61; Stop 85
gataataatggttgccaagatggtc

SEQ ID NO: 452155 - DNA, 25 bp, Artificial
  probe
  misc_feature (1)..(25): SEQ ID NO: 6882; WAN024D53; Start 62; Stop 86
ataataatggttgccaagatggtca

SEQ ID NO: 452156 - DNA, 25 bp, Artificial
  probe
  misc_feature (1)..(25): SEQ ID NO: 6882; WAN024D53; Start 60; Stop 84
tgataataatggttgccaagatggt

SEQ ID NO: 452157 - DNA, 25 bp, Artificial
  probe
  misc_feature (1)..(25): SEQ ID NO: 6882; WAN024D53; Start 59; Stop 83
atgataataatggttgccaagatgg

SEQ ID NO: 452158 - DNA, 25 bp, Artificial
  probe
  misc_feature (1)..(25): SEQ ID NO: 6882; WAN024D53; Start 63; Stop 87
taataatggttgccaagatggtcac

SEQ ID NO: 452159 - DNA, 25 bp, Artificial
  probe
  misc_feature (1)..(25): SEQ ID NO: 6882; WAN024D53; Start 58; Stop 82
aatgataataatggttgccaagatg

SEQ ID NO: 452160 - DNA, 25 bp, Artificial
  probe
  misc_feature (1)..(25): SEQ ID NO: 6882; WAN024D53; Start 15; Stop 39
tagtcaagaaatctcccaagaattg

SEQ ID NO: 452161 - DNA, 25 bp, Artificial
  probe
  misc_feature (1)..(25): SEQ ID NO: 6882; WAN024D53; Start 13; Stop 37
cttagtcaagaaatctcccaagaat

SEQ ID NO: 452162 - DNA, 25 bp, Artificial
  probe
  misc_feature (1)..(25): SEQ ID NO: 6882; WAN024D53; Start 94; Stop 118
attgtagcggttaaatccataagcg

SEQ ID NO: 452163 - DNA, 25 bp, Artificial
  probe
  misc_feature (1)..(25): SEQ ID NO: 6882; WAN024D53; Start 14; Stop 38
ttagtcaagaaatctcccaagaatt

SEQ ID NO: 452164 - DNA, 25 bp, Artificial
  probe
  misc_feature (1)..(25): SEQ ID NO: 6882; WAN024D53; Start 97; Stop 121
gtagcggttaaatccataagcgatg

SEQ ID NO: 452165 - DNA, 25 bp, Artificial
  probe
  misc_feature (1)..(25): SEQ ID NO: 6882; WAN024D53; Start 96; Stop 120
tgtagcggttaaatccataagcgat

SEQ ID NO: 452166 - DNA, 25 bp, Artificial
  probe
  misc_feature (1)..(25): SEQ ID NO: 6882; WAN024D53; Start 65; Stop 89
ataatggttgccaagatggtcacat

SEQ ID NO: 452167 - DNA, 25 bp, Artificial
  probe
  misc_feature (1)..(25): SEQ ID NO: 6882; WAN024D53; Start 93; Stop 117
gattgtagcggttaaatccataagc

SEQ ID NO: 452168 - DNA, 25 bp, Artificial
  probe
  misc_feature (1)..(25): SEQ ID NO: 6882; WAN024D53; Start 91; Stop 115
gtgattgtagcggttaaatccataa

SEQ ID NO: 452169 - DNA, 25 bp, Artificial
  probe
  misc_feature (1)..(25): SEQ ID NO: 6882; WAN024D53; Start 95; Stop 119
ttgtagcggttaaatccataagcga

SEQ ID NO: 452170 - DNA, 25 bp, Artificial
  probe
  misc_feature (1)..(25): SEQ ID NO: 6882; WAN024D53; Start 92; Stop 116
tgattgtagcggttaaatccataag

SEQ ID NO: 452171 - DNA, 25 bp, Artificial
  probe
  misc_feature (1)..(25): SEQ ID NO: 6882; WAN024D53; Start 64; Stop 88
aataatggttgccaagatggtcaca

SEQ ID NO: 452172 - DNA, 25 bp, Artificial
  probe
  misc_feature (1)..(25): SEQ ID NO: 6882; WAN024D53; Start 90; Stop 114
cgtgattgtagcggttaaatccata

SEQ ID NO: 452173 - DNA, 25 bp, Artificial
  probe
  misc_feature (1)..(25): SEQ ID NO: 6882; WAN024D53; Start 207; Stop 231
ggatcaaatctggaagaccttctga

SEQ ID NO: 452174 - DNA, 25 bp, Artificial
  probe
  misc_feature (1)..(25): SEQ ID NO: 6882; WAN024D53; Start 85; Stop 109
cacatcgtgattgtagcggttaaat

SEQ ID NO: 452175 - DNA, 25 bp, Artificial
  probe
  misc_feature (1)..(25): SEQ ID NO: 6882; WAN024D53; Start 175; Stop 199
aacaagggaaatcaaggtcacagtc

SEQ ID NO: 452176 - DNA, 25 bp, Artificial
  probe
  misc_feature (1)..(25): SEQ ID NO: 6882; WAN024D53; Start 86; Stop 110
acatcgtgattgtagcggttaaatc

SEQ ID NO: 452177 - DNA, 25 bp, Artificial
  probe
  misc_feature (1)..(25): SEQ ID NO: 6882; WAN024D53; Start 12; Stop 36
tcttagtcaagaaatctcccaagaa

SEQ ID NO: 452178 - DNA, 25 bp, Artificial
  probe
  misc_feature (1)..(25): SEQ ID NO: 6882; WAN024D53; Start 174; Stop 198
caacaagggaaatcaaggtcacagt

SEQ ID NO: 452179 - DNA, 25 bp, Artificial
  probe
  misc_feature (1)..(25): SEQ ID NO: 6882; WAN024D53; Start 87; Stop 111
catcgtgattgtagcggttaaatcc

SEQ ID NO: 452180 - DNA, 25 bp, Artificial
  probe
  misc_feature (1)..(25): SEQ ID NO: 6882; WAN024D53; Start 206; Stop 230
cggatcaaatctggaagaccttctg

SEQ ID NO: 452181 - DNA, 25 bp, Artificial
  probe
  misc_feature (1)..(25): SEQ ID NO: 6882; WAN024D53; Start 89; Stop 113
tcgtgattgtagcggttaaatccat

SEQ ID NO: 452182 - DNA, 25 bp, Artificial
  probe
  misc_feature (1)..(25): SEQ ID NO: 6882; WAN024D53; Start 88; Stop 112
atcgtgattgtagcggttaaatcca

SEQ ID NO: 452183 - DNA, 25 bp, Artificial
  probe
  misc_feature (1)..(25): SEQ ID NO: 6882; WAN024D53; Start 57; Stop 81
aaatgataataatggttgccaagat

SEQ ID NO: 452184 - DNA, 25 bp, Artificial
  probe
  misc_feature (1)..(25): SEQ ID NO: 6882; WAN024D53; Start 173; Stop 197
ccaacaagggaaatcaaggtcacag

SEQ ID NO: 452185 - DNA, 25 bp, Artificial
  probe
  misc_feature (1)..(25): SEQ ID NO: 6882; WAN024D53; Start 205; Stop 229
acggatcaaatctggaagaccttct

SEQ ID NO: 452186 - DNA, 25 bp, Artificial
  probe
  misc_feature (1)..(25): SEQ ID NO: 6882; WAN024D53; Start 204; Stop 228
cacggatcaaatctggaagaccttc

SEQ ID NO: 452187 - DNA, 25 bp, Artificial
  probe
  misc_feature (1)..(25): SEQ ID NO: 6883; WAN024C2W; Start 57; Stop 81
ggtctctggtaagtggtattattct

SEQ ID NO: 452188 - DNA, 25 bp, Artificial
  probe
  misc_feature (1)..(25): SEQ ID NO: 6883; WAN024C2W; Start 56; Stop 80
aggtctctggtaagtggtattattc

SEQ ID NO: 452189 - DNA, 25 bp, Artificial
  probe
  misc_feature (1)..(25): SEQ ID NO: 6883; WAN024C2W; Start 55; Stop 79
caggtctctggtaagtggtattatt

SEQ ID NO: 452190 - DNA, 25 bp, Artificial
  probe
  misc_feature (1)..(25): SEQ ID NO: 6883; WAN024C2W; Start 5; Stop 29
ctcgtggtattatctgggtctgttc

SEQ ID NO: 452191 - DNA, 25 bp, Artificial
  probe
  misc_feature (1)..(25): SEQ ID NO: 6883; WAN024C2W; Start 6; Stop 30
tcgtggtattatctgggtctgttca

SEQ ID NO: 452192 - DNA, 25 bp, Artificial
  probe
  misc_feature (1)..(25): SEQ ID NO: 6883; WAN024C2W; Start 8; Stop 32
gtggtattatctgggtctgttcagg

SEQ ID NO: 452193 - DNA, 25 bp, Artificial
  probe
  misc_feature (1)..(25): SEQ ID NO: 6883; WAN024C2W; Start 7; Stop 31
cgtggtattatctgggtctgttcag

SEQ ID NO: 452194 - DNA, 25 bp, Artificial
  probe
  misc_feature (1)..(25): SEQ ID NO: 6883; WAN024C2W; Start 9; Stop 33
tggtattatctgggtctgttcaggg

SEQ ID NO: 452195 - DNA, 25 bp, Artificial
  probe
  misc_feature (1)..(25): SEQ ID NO: 6883; WAN024C2W; Start 4; Stop 28
gctcgtggtattatctgggtctgtt

SEQ ID NO: 452196 - DNA, 25 bp, Artificial
  probe
  misc_feature (1)..(25): SEQ ID NO: 6883; WAN024C2W; Start 54; Stop 78
ccaggtctctggtaagtggtattat

SEQ ID NO: 452197 - DNA, 25 bp, Artificial
  probe
  misc_feature (1)..(25): SEQ ID NO: 6883; WAN024C2W; Start 1; Stop 25
atggctcgtggtattatctgggtct

SEQ ID NO: 452198 - DNA, 25 bp, Artificial
  probe
  misc_feature (1)..(25): SEQ ID NO: 6883; WAN024C2W; Start 10; Stop 34
ggtattatctgggtctgttcagggg

SEQ ID NO: 452199 - DNA, 25 bp, Artificial
  probe
  misc_feature (1)..(25): SEQ ID NO: 6883; WAN024C2W; Start 11; Stop 35
gtattatctgggtctgttcaggggc

SEQ ID NO: 452200 - DNA, 25 bp, Artificial
  probe
  misc_feature (1)..(25): SEQ ID NO: 6883; WAN024C2W; Start 12; Stop 36
tattatctgggtctgttcaggggca

SEQ ID NO: 452201 - DNA, 25 bp, Artificial
  probe
  misc_feature (1)..(25): SEQ ID NO: 6884; WAN024BMU; Start 377; Stop 401
cttacgaacattcctcagagtatcc

SEQ ID NO: 452202 - DNA, 25 bp, Artificial
  probe
  misc_feature (1)..(25): SEQ ID NO: 6884; WAN024BMU; Start 379; Stop 403
tacgaacattcctcagagtatcctt

SEQ ID NO: 452203 - DNA, 25 bp, Artificial
  probe
  misc_feature (1)..(25): SEQ ID NO: 6884; WAN024BMU; Start 378; Stop 402
ttacgaacattcctcagagtatcct

SEQ ID NO: 452204 - DNA, 25 bp, Artificial
  probe
  misc_feature (1)..(25): SEQ ID NO: 6884; WAN024BMU; Start 376; Stop 400
gcttacgaacattcctcagagtatc

SEQ ID NO: 452205 - DNA, 25 bp, Artificial
  probe
  misc_feature (1)..(25): SEQ ID NO: 6884; WAN024BMU; Start 375; Stop 399
agcttacgaacattcctcagagtat

SEQ ID NO: 452206 - DNA, 25 bp, Artificial
  probe
  misc_feature (1)..(25): SEQ ID NO: 6884; WAN024BMU; Start 229; Stop 253
caagctgatgacactacagaagata

SEQ ID NO: 452207 - DNA, 25 bp, Artificial
  probe
  misc_feature (1)..(25): SEQ ID NO: 6884; WAN024BMU; Start 382; Stop 406
gaacattcctcagagtatcctttcc

SEQ ID NO: 452208 - DNA, 25 bp, Artificial
  probe
  misc_feature (1)..(25): SEQ ID NO: 6884; WAN024BMU; Start 110; Stop 134
aagatggactgattcaggctagatc

SEQ ID NO: 452209 - DNA, 25 bp, Artificial
  probe
  misc_feature (1)..(25): SEQ ID NO: 6884; WAN024BMU; Start 231; Stop 255
agctgatgacactacagaagatatt

SEQ ID NO: 452210 - DNA, 25 bp, Artificial
  probe
  misc_feature (1)..(25): SEQ ID NO: 6884; WAN024BMU; Start 230; Stop 254
aagctgatgacactacagaagatat

SEQ ID NO: 452211 - DNA, 25 bp, Artificial
  probe
  misc_feature (1)..(25): SEQ ID NO: 6884; WAN024BMU; Start 381; Stop 405
cgaacattcctcagagtatcctttc

SEQ ID NO: 452212 - DNA, 25 bp, Artificial
  probe
  misc_feature (1)..(25): SEQ ID NO: 6884; WAN024BMU; Start 380; Stop 404
acgaacattcctcagagtatccttt

SEQ ID NO: 452213 - DNA, 25 bp, Artificial
  probe
  misc_feature (1)..(25): SEQ ID NO: 6884; WAN024BMU; Start 386; Stop 410
attcctcagagtatcctttcccaac

SEQ ID NO: 452214 - DNA, 25 bp, Artificial
  probe
  misc_feature (1)..(25): SEQ ID NO: 6884; WAN024BMU; Start 385; Stop 409
cattcctcagagtatcctttcccaa

SEQ ID NO: 452215 - DNA, 25 bp, Artificial
  probe
  misc_feature (1)..(25): SEQ ID NO: 6884; WAN024BMU; Start 383; Stop 407
aacattcctcagagtatcctttccc

SEQ ID NO: 452216 - DNA, 25 bp, Artificial
  probe
  misc_feature (1)..(25): SEQ ID NO: 6884; WAN024BMU; Start 604; Stop 628
caacaccttgctcaatgtctaaata

SEQ ID NO: 452217 - DNA, 25 bp, Artificial
  probe
  misc_feature (1)..(25): SEQ ID NO: 6884; WAN024BMU; Start 228; Stop 252
tcaagctgatgacactacagaagat

SEQ ID NO: 452218 - DNA, 25 bp, Artificial
  probe
  misc_feature (1)..(25): SEQ ID NO: 6884; WAN024BMU; Start 606; Stop 630
acaccttgctcaatgtctaaataag

SEQ ID NO: 452219 - DNA, 25 bp, Artificial
  probe
  misc_feature (1)..(25): SEQ ID NO: 6884; WAN024BMU; Start 601; Stop 625
cctcaacaccttgctcaatgtctaa

SEQ ID NO: 452220 - DNA, 25 bp, Artificial
  probe
  misc_feature (1)..(25): SEQ ID NO: 6884; WAN024BMU; Start 332; Stop 356
gtggtgtttgtgttggtgtttataa

SEQ ID NO: 452221 - DNA, 25 bp, Artificial
  probe
  misc_feature (1)..(25): SEQ ID NO: 6884; WAN024BMU; Start 603; Stop 627
tcaacaccttgctcaatgtctaaat

SEQ ID NO: 452222 - DNA, 25 bp, Artificial
  probe
  misc_feature (1)..(25): SEQ ID NO: 6884; WAN024BMU; Start 227; Stop 251
ttcaagctgatgacactacagaaga

SEQ ID NO: 452223 - DNA, 25 bp, Artificial
  probe
  misc_feature (1)..(25): SEQ ID NO: 6884; WAN024BMU; Start 605; Stop 629
aacaccttgctcaatgtctaaataa

SEQ ID NO: 452224 - DNA, 25 bp, Artificial
  probe
  misc_feature (1)..(25): SEQ ID NO: 6884; WAN024BMU; Start 586; Stop 610
gatggatcagatgtacctcaacacc

SEQ ID NO: 452225 - DNA, 25 bp, Artificial
  probe
  misc_feature (1)..(25): SEQ ID NO: 6884; WAN024BMU; Start 585; Stop 609
ggatggatcagatgtacctcaacac

SEQ ID NO: 452226 - DNA, 25 bp, Artificial
  probe
  misc_feature (1)..(25): SEQ ID NO: 6884; WAN024BMU; Start 331; Stop 355
cgtggtgtttgtgttggtgtttata

SEQ ID NO: 452227 - DNA, 25 bp, Artificial
  probe
  misc_feature (1)..(25): SEQ ID NO: 6884; WAN024BMU; Start 589; Stop 613
ggatcagatgtacctcaacaccttg

SEQ ID NO: 452228 - DNA, 25 bp, Artificial
  probe
  misc_feature (1)..(25): SEQ ID NO: 6884; WAN024BMU; Start 268; Stop 292
cgtggtgtttggaatatttctgaat

SEQ ID NO: 452229 - DNA, 25 bp, Artificial
  probe
  misc_feature (1)..(25): SEQ ID NO: 6884; WAN024BMU; Start 602; Stop 626
ctcaacaccttgctcaatgtctaaa

SEQ ID NO: 452230 - DNA, 25 bp, Artificial
  probe
  misc_feature (1)..(25): SEQ ID NO: 6884; WAN024BMU; Start 587; Stop 611
atggatcagatgtacctcaacacct

SEQ ID NO: 452231 - DNA, 25 bp, Artificial
  probe
  misc_feature (1)..(25): SEQ ID NO: 6884; WAN024BMU; Start 232; Stop 256
gctgatgacactacagaagatattt

SEQ ID NO: 452232 - DNA, 25 bp, Artificial
  probe
  misc_feature (1)..(25): SEQ ID NO: 6884; WAN024BMU; Start 310; Stop 334
gagtatgctcttgccttataccgtg

SEQ ID NO: 452233 - DNA, 25 bp, Artificial
  probe
  misc_feature (1)..(25): SEQ ID NO: 6884; WAN024BMU; Start 595; Stop 619
gatgtacctcaacaccttgctcaat

SEQ ID NO: 452234 - DNA, 25 bp, Artificial
  probe
  misc_feature (1)..(25): SEQ ID NO: 6885; WAN024BOF-5; Start 1392; Stop 1416
atcagaacaagaggagttagtcaag

SEQ ID NO: 452235 - DNA, 25 bp, Artificial
  probe
  misc_feature (1)..(25): SEQ ID NO: 6885; WAN024BOF-5; Start 1391; Stop 1415
aatcagaacaagaggagttagtcaa

SEQ ID NO: 452236 - DNA, 25 bp, Artificial
  probe
  misc_feature (1)..(25): SEQ ID NO: 6885; WAN024BOF-5; Start 1396; Stop 1420
gaacaagaggagttagtcaagagta

SEQ ID NO: 452237 - DNA, 25 bp, Artificial
  probe
  misc_feature (1)..(25): SEQ ID NO: 6885; WAN024BOF-5; Start 1394; Stop 1418
cagaacaagaggagttagtcaagag

SEQ ID NO: 452238 - DNA, 25 bp, Artificial
  probe
  misc_feature (1)..(25): SEQ ID NO: 6885; WAN024BOF-5; Start 1395; Stop 1419
agaacaagaggagttagtcaagagt

SEQ ID NO: 452239 - DNA, 25 bp, Artificial
  probe
  misc_feature (1)..(25): SEQ ID NO: 6885; WAN024BOF-5; Start 1393; Stop 1417
tcagaacaagaggagttagtcaaga

SEQ ID NO: 452240 - DNA, 25 bp, Artificial
  probe
  misc_feature (1)..(25): SEQ ID NO: 6885; WAN024BOF-5; Start 389; Stop 413
taacacttgctcttaataatgcctt

SEQ ID NO: 452241 - DNA, 25 bp, Artificial
  probe
  misc_feature (1)..(25): SEQ ID NO: 6885; WAN024BOF-5; Start 1604; Stop 1628
cctctgttagtggattgaatctagt

SEQ ID NO: 452242 - DNA, 25 bp, Artificial
  probe
  misc_feature (1)..(25): SEQ ID NO: 6885; WAN024BOF-5; Start 1603; Stop 1627
gcctctgttagtggattgaatctag

SEQ ID NO: 452243 - DNA, 25 bp, Artificial
  probe
  misc_feature (1)..(25): SEQ ID NO: 6885; WAN024BOF-5; Start 1405; Stop 1429
gagttagtcaagagtacggatcaat

SEQ ID NO: 452244 - DNA, 25 bp, Artificial
  probe
  misc_feature (1)..(25): SEQ ID NO: 6885; WAN024BOF-5; Start 1414; Stop 1438
aagagtacggatcaattaacggatt

SEQ ID NO: 452245 - DNA, 25 bp, Artificial
  probe
  misc_feature (1)..(25): SEQ ID NO: 6885; WAN024BOF-5; Start 1406; Stop 1430
agttagtcaagagtacggatcaatt

SEQ ID NO: 452246 - DNA, 25 bp, Artificial
  probe
  misc_feature (1)..(25): SEQ ID NO: 6885; WAN024BOF-5; Start 1600; Stop 1624
aatgcctctgttagtggattgaatc

SEQ ID NO: 452247 - DNA, 25 bp, Artificial
  probe
  misc_feature (1)..(25): SEQ ID NO: 6885; WAN024BOF-5; Start 1416; Stop 1440
gagtacggatcaattaacggattct

SEQ ID NO: 452248 - DNA, 25 bp, Artificial
  probe
  misc_feature (1)..(25): SEQ ID NO: 6885; WAN024BOF-5; Start 1415; Stop 1439
agagtacggatcaattaacggattc

SEQ ID NO: 452249 - DNA, 25 bp, Artificial
  probe
  misc_feature (1)..(25): SEQ ID NO: 6885; WAN024BOF-5; Start 1410; Stop 1434
agtcaagagtacggatcaattaacg

SEQ ID NO: 452250 - DNA, 25 bp, Artificial
  probe
  misc_feature (1)..(25): SEQ ID NO: 6885; WAN024BOF-5; Start 1602; Stop 1626
tgcctctgttagtggattgaatcta

SEQ ID NO: 452251 - DNA, 25 bp, Artificial
  probe
  misc_feature (1)..(25): SEQ ID NO: 6885; WAN024BOF-5; Start 1417; Stop 1441
agtacggatcaattaacggattctg

SEQ ID NO: 452252 - DNA, 25 bp, Artificial
  probe
  misc_feature (1)..(25): SEQ ID NO: 6885; WAN024BOF-5; Start 1413; Stop 1437
caagagtacggatcaattaacggat

SEQ ID NO: 452253 - DNA, 25 bp, Artificial
  probe
  misc_feature (1)..(25): SEQ ID NO: 6885; WAN024BOF-5; Start 388; Stop 412
ttaacacttgctcttaataatgcct

SEQ ID NO: 452254 - DNA, 25 bp, Artificial
  probe
  misc_feature (1)..(25): SEQ ID NO: 6885; WAN024BOF-5; Start 1606; Stop 1630
tctgttagtggattgaatctagtct

SEQ ID NO: 452255 - DNA, 25 bp, Artificial
  probe
  misc_feature (1)..(25): SEQ ID NO: 6885; WAN024BOF-5; Start 1419; Stop 1443
tacggatcaattaacggattctgtt

SEQ ID NO: 452256 - DNA, 25 bp, Artificial
  probe
  misc_feature (1)..(25): SEQ ID NO: 6885; WAN024BOF-5; Start 1397; Stop 1421
aacaagaggagttagtcaagagtac

SEQ ID NO: 452257 - DNA, 25 bp, Artificial
  probe
  misc_feature (1)..(25): SEQ ID NO: 6885; WAN024BOF-5; Start 1418; Stop 1442
gtacggatcaattaacggattctgt

SEQ ID NO: 452258 - DNA, 25 bp, Artificial
  probe
  misc_feature (1)..(25): SEQ ID NO: 6885; WAN024BOF-5; Start 1605; Stop 1629
ctctgttagtggattgaatctagtc

SEQ ID NO: 452259 - DNA, 25 bp, Artificial
  probe
  misc_feature (1)..(25): SEQ ID NO: 6885; WAN024BOF-5; Start 1601; Stop 1625
atgcctctgttagtggattgaatct

SEQ ID NO: 452260 - DNA, 25 bp, Artificial
  probe
  misc_feature (1)..(25): SEQ ID NO: 6885; WAN024BOF-5; Start 1411; Stop 1435
gtcaagagtacggatcaattaacgg

SEQ ID NO: 452261 - DNA, 25 bp, Artificial
  probe
  misc_feature (1)..(25): SEQ ID NO: 6885; WAN024BOF-5; Start 1398; Stop 1422
acaagaggagttagtcaagagtacg

SEQ ID NO: 452262 - DNA, 25 bp, Artificial
  probe
  misc_feature (1)..(25): SEQ ID NO: 6885; WAN024BOF-5; Start 1412; Stop 1436
tcaagagtacggatcaattaacgga

SEQ ID NO: 452263 - DNA, 25 bp, Artificial
  probe
  misc_feature (1)..(25): SEQ ID NO: 6885; WAN024BOF-5; Start 1404; Stop 1428
ggagttagtcaagagtacggatcaa

SEQ ID NO: 452264 - DNA, 25 bp, Artificial
  probe
  misc_feature (1)..(25): SEQ ID NO: 6885; WAN024BOF-5; Start 1402; Stop 1426
gaggagttagtcaagagtacggatc

SEQ ID NO: 452265 - DNA, 25 bp, Artificial
  probe
  misc_feature (1)..(25): SEQ ID NO: 6885; WAN024BOF-5; Start 1409; Stop 1433
tagtcaagagtacggatcaattaac

SEQ ID NO: 452266 - DNA, 25 bp, Artificial
  probe
  misc_feature (1)..(25): SEQ ID NO: 6885; WAN024BOF-5; Start 1407; Stop 1431
gttagtcaagagtacggatcaatta

SEQ ID NO: 452267 - DNA, 25 bp, Artificial
  probe
  misc_feature (1)..(25): SEQ ID NO: 6886; WAN024BNO; Start 422; Stop 446
aaggacagaataatcagcaacagaa

SEQ ID NO: 452268 - DNA, 25 bp, Artificial
  probe
  misc_feature (1)..(25): SEQ ID NO: 6886; WAN024BNO; Start 421; Stop 445
caaggacagaataatcagcaacaga

SEQ ID NO: 452269 - DNA, 25 bp, Artificial
  probe
  misc_feature (1)..(25): SEQ ID NO: 6886; WAN024BNO; Start 387; Stop 411
tgttgatgagtatccagtagaagaa

SEQ ID NO: 452270 - DNA, 25 bp, Artificial
  probe
  misc_feature (1)..(25): SEQ ID NO: 6886; WAN024BNO; Start 414; Stop 438
ccaagagcaaggacagaataatcag

SEQ ID NO: 452271 - DNA, 25 bp, Artificial
  probe
  misc_feature (1)..(25): SEQ ID NO: 6886; WAN024BNO; Start 386; Stop 410
atgttgatgagtatccagtagaaga

SEQ ID NO: 452272 - DNA, 25 bp, Artificial
  probe
  misc_feature (1)..(25): SEQ ID NO: 6886; WAN024BNO; Start 385; Stop 409
gatgttgatgagtatccagtagaag

SEQ ID NO: 452273 - DNA, 25 bp, Artificial
  probe
  misc_feature (1)..(25): SEQ ID NO: 6886; WAN024BNO; Start 566; Stop 590
cgcttgctaactatgtactatctga

SEQ ID NO: 452274 - DNA, 25 bp, Artificial
  probe
  misc_feature (1)..(25): SEQ ID NO: 6886; WAN024BNO; Start 246; Stop 270
ggctagagaagaagatgtaccaatt

SEQ ID NO: 452275 - DNA, 25 bp, Artificial
  probe
  misc_feature (1)..(25): SEQ ID NO: 6886; WAN024BNO; Start 565; Stop 589
acgcttgctaactatgtactatctg

SEQ ID NO: 452276 - DNA, 25 bp, Artificial
  probe
  misc_feature (1)..(25): SEQ ID NO: 6886; WAN024BNO; Start 561; Stop 585
cgatacgcttgctaactatgtacta

SEQ ID NO: 452277 - DNA, 25 bp, Artificial
  probe
  misc_feature (1)..(25): SEQ ID NO: 6886; WAN024BNO; Start 564; Stop 588
tacgcttgctaactatgtactatct

SEQ ID NO: 452278 - DNA, 25 bp, Artificial
  probe
  misc_feature (1)..(25): SEQ ID NO: 6886; WAN024BNO; Start 415; Stop 439
caagagcaaggacagaataatcagc

SEQ ID NO: 452279 - DNA, 25 bp, Artificial
  probe
  misc_feature (1)..(25): SEQ ID NO: 6886; WAN024BNO; Start 623; Stop 647
tacaagttggtgactacgaggtatt

SEQ ID NO: 452280 - DNA, 25 bp, Artificial
  probe
  misc_feature (1)..(25): SEQ ID NO: 6886; WAN024BNO; Start 615; Stop 639
tcatagagtacaagttggtgactac

SEQ ID NO: 452281 - DNA, 25 bp, Artificial
  probe
  misc_feature (1)..(25): SEQ ID NO: 6886; WAN024BNO; Start 626; Stop 650
aagttggtgactacgaggtattgaa

SEQ ID NO: 452282 - DNA, 25 bp, Artificial
  probe
  misc_feature (1)..(25): SEQ ID NO: 6886; WAN024BNO; Start 617; Stop 641
atagagtacaagttggtgactacga

SEQ ID NO: 452283 - DNA, 25 bp, Artificial
  probe
  misc_feature (1)..(25): SEQ ID NO: 6886; WAN024BNO; Start 616; Stop 640
catagagtacaagttggtgactacg

SEQ ID NO: 452284 - DNA, 25 bp, Artificial
  probe
  misc_feature (1)..(25): SEQ ID NO: 6886; WAN024BNO; Start 418; Stop 442
gagcaaggacagaataatcagcaac

SEQ ID NO: 452285 - DNA, 25 bp, Artificial
  probe
  misc_feature (1)..(25): SEQ ID NO: 6886; WAN024BNO; Start 417; Stop 441
agagcaaggacagaataatcagcaa

SEQ ID NO: 452286 - DNA, 25 bp, Artificial
  probe
  misc_feature (1)..(25): SEQ ID NO: 6886; WAN024BNO; Start 416; Stop 440
aagagcaaggacagaataatcagca

SEQ ID NO: 452287 - DNA, 25 bp, Artificial
  probe
  misc_feature (1)..(25): SEQ ID NO: 6886; WAN024BNO; Start 376; Stop 400
ggaggtgaggatgttgatgagtatc

SEQ ID NO: 452288 - DNA, 25 bp, Artificial
  probe
  misc_feature (1)..(25): SEQ ID NO: 6886; WAN024BNO; Start 614; Stop 638
ttcatagagtacaagttggtgacta

SEQ ID NO: 452289 - DNA, 25 bp, Artificial
  probe
  misc_feature (1)..(25): SEQ ID NO: 6886; WAN024BNO; Start 567; Stop 591
gcttgctaactatgtactatctgaa

SEQ ID NO: 452290 - DNA, 25 bp, Artificial
  probe
  misc_feature (1)..(25): SEQ ID NO: 6886; WAN024BNO; Start 420; Stop 444
gcaaggacagaataatcagcaacag

SEQ ID NO: 452291 - DNA, 25 bp, Artificial
  probe
  misc_feature (1)..(25): SEQ ID NO: 6886; WAN024BNO; Start 411; Stop 435
aagccaagagcaaggacagaataat

SEQ ID NO: 452292 - DNA, 25 bp, Artificial
  probe
  misc_feature (1)..(25): SEQ ID NO: 6886; WAN024BNO; Start 563; Stop 587
atacgcttgctaactatgtactatc

SEQ ID NO: 452293 - DNA, 25 bp, Artificial
  probe
  misc_feature (1)..(25): SEQ ID NO: 6886; WAN024BNO; Start 562; Stop 586
gatacgcttgctaactatgtactat

SEQ ID NO: 452294 - DNA, 25 bp, Artificial
  probe
  misc_feature (1)..(25): SEQ ID NO: 6886; WAN024BNO; Start 618; Stop 642
tagagtacaagttggtgactacgag

SEQ ID NO: 452295 - DNA, 25 bp, Artificial
  probe
  misc_feature (1)..(25): SEQ ID NO: 6886; WAN024BNO; Start 559; Stop 583
ttcgatacgcttgctaactatgtac

SEQ ID NO: 452296 - DNA, 25 bp, Artificial
  probe
  misc_feature (1)..(25): SEQ ID NO: 6886; WAN024BNO; Start 419; Stop 443
agcaaggacagaataatcagcaaca

SEQ ID NO: 452297 - DNA, 25 bp, Artificial
  probe
  misc_feature (1)..(25): SEQ ID NO: 6886; WAN024BNO; Start 375; Stop 399
tggaggtgaggatgttgatgagtat

SEQ ID NO: 452298 - DNA, 25 bp, Artificial
  probe
  misc_feature (1)..(25): SEQ ID NO: 6886; WAN024BNO; Start 625; Stop 649
caagttggtgactacgaggtattga

SEQ ID NO: 452299 - DNA, 25 bp, Artificial
  probe
  misc_feature (1)..(25): SEQ ID NO: 6886; WAN024BNO; Start 622; Stop 646
gtacaagttggtgactacgaggtat

SEQ ID NO: 452300 - DNA, 25 bp, Artificial
  probe
  misc_feature (1)..(25): SEQ ID NO: 6887; WAN024C3L; Start 416; Stop 440
tggctattgctgataaggtgataat

SEQ ID NO: 452301 - DNA, 25 bp, Artificial
  probe
  misc_feature (1)..(25): SEQ ID NO: 6887; WAN024C3L; Start 415; Stop 439
atggctattgctgataaggtgataa

SEQ ID NO: 452302 - DNA, 25 bp, Artificial
  probe
  misc_feature (1)..(25): SEQ ID NO: 6887; WAN024C3L; Start 414; Stop 438
gatggctattgctgataaggtgata

SEQ ID NO: 452303 - DNA, 25 bp, Artificial
  probe
  misc_feature (1)..(25): SEQ ID NO: 6887; WAN024C3L; Start 422; Stop 446
ttgctgataaggtgataatagagga

SEQ ID NO: 452304 - DNA, 25 bp, Artificial
  probe
  misc_feature (1)..(25): SEQ ID NO: 6887; WAN024C3L; Start 423; Stop 447
tgctgataaggtgataatagaggat

SEQ ID NO: 452305 - DNA, 25 bp, Artificial
  probe
  misc_feature (1)..(25): SEQ ID NO: 6887; WAN024C3L; Start 342; Stop 366
gaatgagtatggagagactgtatcg

SEQ ID NO: 452306 - DNA, 25 bp, Artificial
  probe
  misc_feature (1)..(25): SEQ ID NO: 6887; WAN024C3L; Start 413; Stop 437
agatggctattgctgataaggtgat

SEQ ID NO: 452307 - DNA, 25 bp, Artificial
  probe
  misc_feature (1)..(25): SEQ ID NO: 6887; WAN024C3L; Start 452; Stop 476
ctgcttatgttgagttgttctcttc

SEQ ID NO: 452308 - DNA, 25 bp, Artificial
  probe
  misc_feature (1)..(25): SEQ ID NO: 6887; WAN024C3L; Start 450; Stop 474
tactgcttatgttgagttgttctct

SEQ ID NO: 452309 - DNA, 25 bp, Artificial
  probe
  misc_feature (1)..(25): SEQ ID NO: 6887; WAN024C3L; Start 341; Stop 365
tgaatgagtatggagagactgtatc

SEQ ID NO: 452310 - DNA, 25 bp, Artificial
  probe
  misc_feature (1)..(25): SEQ ID NO: 6887; WAN024C3L; Start 453; Stop 477
tgcttatgttgagttgttctcttct

SEQ ID NO: 452311 - DNA, 25 bp, Artificial
  probe
  misc_feature (1)..(25): SEQ ID NO: 6887; WAN024C3L; Start 451; Stop 475
actgcttatgttgagttgttctctt

SEQ ID NO: 452312 - DNA, 25 bp, Artificial
  probe
  misc_feature (1)..(25): SEQ ID NO: 6887; WAN024C3L; Start 449; Stop 473
ttactgcttatgttgagttgttctc

SEQ ID NO: 452313 - DNA, 25 bp, Artificial
  probe
  misc_feature (1)..(25): SEQ ID NO: 6887; WAN024C3L; Start 338; Stop 362
ttatgaatgagtatggagagactgt

SEQ ID NO: 452314 - DNA, 25 bp, Artificial
  probe
  misc_feature (1)..(25): SEQ ID NO: 6887; WAN024C3L; Start 421; Stop 445
attgctgataaggtgataatagagg

SEQ ID NO: 452315 - DNA, 25 bp, Artificial
  probe
  misc_feature (1)..(25): SEQ ID NO: 6887; WAN024C3L; Start 417; Stop 441
ggctattgctgataaggtgataata

SEQ ID NO: 452316 - DNA, 25 bp, Artificial
  probe
  misc_feature (1)..(25): SEQ ID NO: 6887; WAN024C3L; Start 454; Stop 478
gcttatgttgagttgttctcttcta

SEQ ID NO: 452317 - DNA, 25 bp, Artificial
  probe
  misc_feature (1)..(25): SEQ ID NO: 6887; WAN024C3L; Start 409; Stop 433
atacagatggctattgctgataagg

SEQ ID NO: 452318 - DNA, 25 bp, Artificial
  probe
  misc_feature (1)..(25): SEQ ID NO: 6887; WAN024C3L; Start 340; Stop 364
atgaatgagtatggagagactgtat

SEQ ID NO: 452319 - DNA, 25 bp, Artificial
  probe
  misc_feature (1)..(25): SEQ ID NO: 6887; WAN024C3L; Start 222; Stop 246
acctagcaatagaagtgtagttact

SEQ ID NO: 452320 - DNA, 25 bp, Artificial
  probe
  misc_feature (1)..(25): SEQ ID NO: 6887; WAN024C3L; Start 424; Stop 448
gctgataaggtgataatagaggatt

SEQ ID NO: 452321 - DNA, 25 bp, Artificial
  probe
  misc_feature (1)..(25): SEQ ID NO: 6887; WAN024C3L; Start 410; Stop 434
tacagatggctattgctgataaggt

SEQ ID NO: 452322 - DNA, 25 bp, Artificial
  probe
  misc_feature (1)..(25): SEQ ID NO: 6887; WAN024C3L; Start 339; Stop 363
tatgaatgagtatggagagactgta

SEQ ID NO: 452323 - DNA, 25 bp, Artificial
  probe
  misc_feature (1)..(25): SEQ ID NO: 6887; WAN024C3L; Start 337; Stop 361
attatgaatgagtatggagagactg

SEQ ID NO: 452324 - DNA, 25 bp, Artificial
  probe
  misc_feature (1)..(25): SEQ ID NO: 6887; WAN024C3L; Start 408; Stop 432
tatacagatggctattgctgataag

SEQ ID NO: 452325 - DNA, 25 bp, Artificial
  probe
  misc_feature (1)..(25): SEQ ID NO: 6887; WAN024C3L; Start 343; Stop 367
aatgagtatggagagactgtatcga

SEQ ID NO: 452326 - DNA, 25 bp, Artificial
  probe
  misc_feature (1)..(25): SEQ ID NO: 6887; WAN024C3L; Start 221; Stop 245
tacctagcaatagaagtgtagttac

SEQ ID NO: 452327 - DNA, 25 bp, Artificial
  probe
  misc_feature (1)..(25): SEQ ID NO: 6887; WAN024C3L; Start 346; Stop 370
gagtatggagagactgtatcgagaa

SEQ ID NO: 452328 - DNA, 25 bp, Artificial
  probe
  misc_feature (1)..(25): SEQ ID NO: 6887; WAN024C3L; Start 344; Stop 368
atgagtatggagagactgtatcgag

SEQ ID NO: 452329 - DNA, 25 bp, Artificial
  probe
  misc_feature (1)..(25): SEQ ID NO: 6887; WAN024C3L; Start 306; Stop 330
atcacaaattaagcctagcgagtat

SEQ ID NO: 452330 - DNA, 25 bp, Artificial
  probe
  misc_feature (1)..(25): SEQ ID NO: 6887; WAN024C3L; Start 309; Stop 333
acaaattaagcctagcgagtatcaa

SEQ ID NO: 452331 - DNA, 25 bp, Artificial
  probe
  misc_feature (1)..(25): SEQ ID NO: 6887; WAN024C3L; Start 305; Stop 329
tatcacaaattaagcctagcgagta

SEQ ID NO: 452332 - DNA, 25 bp, Artificial
  probe
  misc_feature (1)..(25): SEQ ID NO: 6887; WAN024C3L; Start 310; Stop 334
caaattaagcctagcgagtatcaaa

SEQ ID NO: 452333 - DNA, 25 bp, Artificial
  probe
  misc_feature (1)..(25): SEQ ID NO: 6888; WAN024EWF; Start 4; Stop 28
gcttatcagtctcatagtcgtgttg

SEQ ID NO: 452334 - DNA, 25 bp, Artificial
  probe
  misc_feature (1)..(25): SEQ ID NO: 6888; WAN024EWF; Start 5; Stop 29
cttatcagtctcatagtcgtgttga

SEQ ID NO: 452335 - DNA, 25 bp, Artificial
  probe
  misc_feature (1)..(25): SEQ ID NO: 6888; WAN024EWF; Start 6; Stop 30
ttatcagtctcatagtcgtgttgac

SEQ ID NO: 452336 - DNA, 25 bp, Artificial
  probe
  misc_feature (1)..(25): SEQ ID NO: 6888; WAN024EWF; Start 3; Stop 27
ggcttatcagtctcatagtcgtgtt

SEQ ID NO: 452337 - DNA, 25 bp, Artificial
  probe
  misc_feature (1)..(25): SEQ ID NO: 6888; WAN024EWF; Start 1; Stop 25
atggcttatcagtctcatagtcgtg

SEQ ID NO: 452338 - DNA, 25 bp, Artificial
  probe
  misc_feature (1)..(25): SEQ ID NO: 6888; WAN024EWF; Start 105; Stop 129
tgagtatatgggtgaattggattgt

SEQ ID NO: 452339 - DNA, 25 bp, Artificial
  probe
  misc_feature (1)..(25): SEQ ID NO: 6888; WAN024EWF; Start 102; Stop 126
gcttgagtatatgggtgaattggat

SEQ ID NO: 452340 - DNA, 25 bp, Artificial
  probe
  misc_feature (1)..(25): SEQ ID NO: 6888; WAN024EWF; Start 2; Stop 26
tggcttatcagtctcatagtcgtgt

SEQ ID NO: 452341 - DNA, 25 bp, Artificial
  probe
  misc_feature (1)..(25): SEQ ID NO: 6888; WAN024EWF; Start 99; Stop 123
aaggcttgagtatatgggtgaattg

SEQ ID NO: 452342 - DNA, 25 bp, Artificial
  probe
  misc_feature (1)..(25): SEQ ID NO: 6888; WAN024EWF; Start 104; Stop 128
ttgagtatatgggtgaattggattg

SEQ ID NO: 452343 - DNA, 25 bp, Artificial
  probe
  misc_feature (1)..(25): SEQ ID NO: 6888; WAN024EWF; Start 103; Stop 127
cttgagtatatgggtgaattggatt

SEQ ID NO: 452344 - DNA, 25 bp, Artificial
  probe
  misc_feature (1)..(25): SEQ ID NO: 6888; WAN024EWF; Start 98; Stop 122
caaggcttgagtatatgggtgaatt

SEQ ID NO: 452345 - DNA, 25 bp, Artificial
  probe
  misc_feature (1)..(25): SEQ ID NO: 6888; WAN024EWF; Start 101; Stop 125
ggcttgagtatatgggtgaattgga

SEQ ID NO: 452346 - DNA, 25 bp, Artificial
  probe
  misc_feature (1)..(25): SEQ ID NO: 6888; WAN024EWF; Start 100; Stop 124
aggcttgagtatatgggtgaattgg

SEQ ID NO: 452347 - DNA, 25 bp, Artificial
  probe
  misc_feature (1)..(25): SEQ ID NO: 6888; WAN024EWF; Start 23; Stop 47
gtgttgacttggatcgtaaaccttc

SEQ ID NO: 452348 - DNA, 25 bp, Artificial
  probe
  misc_feature (1)..(25): SEQ ID NO: 6888; WAN024EWF; Start 31; Stop 55
ttggatcgtaaaccttcaagacctt

SEQ ID NO: 452349 - DNA, 25 bp, Artificial
  probe
  misc_feature (1)..(25): SEQ ID NO: 6888; WAN024EWF; Start 33; Stop 57
ggatcgtaaaccttcaagaccttct

SEQ ID NO: 452350 - DNA, 25 bp, Artificial
  probe
  misc_feature (1)..(25): SEQ ID NO: 6888; WAN024EWF; Start 32; Stop 56
tggatcgtaaaccttcaagaccttc

SEQ ID NO: 452351 - DNA, 25 bp, Artificial
  probe
  misc_feature (1)..(25): SEQ ID NO: 6888; WAN024EWF; Start 35; Stop 59
atcgtaaaccttcaagaccttctta

SEQ ID NO: 452352 - DNA, 25 bp, Artificial
  probe
  misc_feature (1)..(25): SEQ ID NO: 6888; WAN024EWF; Start 24; Stop 48
tgttgacttggatcgtaaaccttca

SEQ ID NO: 452353 - DNA, 25 bp, Artificial
  probe
  misc_feature (1)..(25): SEQ ID NO: 6888; WAN024EWF; Start 36; Stop 60
tcgtaaaccttcaagaccttcttac

SEQ ID NO: 452354 - DNA, 25 bp, Artificial
  probe
  misc_feature (1)..(25): SEQ ID NO: 6888; WAN024EWF; Start 34; Stop 58
gatcgtaaaccttcaagaccttctt

SEQ ID NO: 452355 - DNA, 25 bp, Artificial
  probe
  misc_feature (1)..(25): SEQ ID NO: 6888; WAN024EWF; Start 7; Stop 31
tatcagtctcatagtcgtgttgact

SEQ ID NO: 452356 - DNA, 25 bp, Artificial
  probe
  misc_feature (1)..(25): SEQ ID NO: 6888; WAN024EWF; Start 8; Stop 32
atcagtctcatagtcgtgttgactt

SEQ ID NO: 452357 - DNA, 25 bp, Artificial
  probe
  misc_feature (1)..(25): SEQ ID NO: 6888; WAN024EWF; Start 97; Stop 121
gcaaggcttgagtatatgggtgaat

SEQ ID NO: 452358 - DNA, 25 bp, Artificial
  probe
  misc_feature (1)..(25): SEQ ID NO: 6888; WAN024EWF; Start 17; Stop 41
atagtcgtgttgacttggatcgtaa

SEQ ID NO: 452359 - DNA, 25 bp, Artificial
  probe
  misc_feature (1)..(25): SEQ ID NO: 6888; WAN024EWF; Start 25; Stop 49
gttgacttggatcgtaaaccttcaa

SEQ ID NO: 452360 - DNA, 25 bp, Artificial
  probe
  misc_feature (1)..(25): SEQ ID NO: 6888; WAN024EWF; Start 13; Stop 37
tctcatagtcgtgttgacttggatc

SEQ ID NO: 452361 - DNA, 25 bp, Artificial
  probe
  misc_feature (1)..(25): SEQ ID NO: 6888; WAN024EWF; Start 43; Stop 67
ccttcaagaccttcttacgttccaa

SEQ ID NO: 452362 - DNA, 25 bp, Artificial
  probe
  misc_feature (1)..(25): SEQ ID NO: 6888; WAN024EWF; Start 41; Stop 65
aaccttcaagaccttcttacgttcc

SEQ ID NO: 452363 - DNA, 25 bp, Artificial
  probe
  misc_feature (1)..(25): SEQ ID NO: 6888; WAN024EWF; Start 39; Stop 63
taaaccttcaagaccttcttacgtt

SEQ ID NO: 452364 - DNA, 25 bp, Artificial
  probe
  misc_feature (1)..(25): SEQ ID NO: 6888; WAN024EWF; Start 22; Stop 46
cgtgttgacttggatcgtaaacctt

SEQ ID NO: 452365 - DNA, 25 bp, Artificial
  probe
  misc_feature (1)..(25): SEQ ID NO: 6888; WAN024EWF; Start 12; Stop 36
gtctcatagtcgtgttgacttggat

SEQ ID NO: 452366 - DNA, 25 bp, Artificial
  probe
  misc_feature (1)..(25): SEQ ID NO: 6889; WAN024BUR; Start 122; Stop 146
tgaagtctagtttggatgaattggg

SEQ ID NO: 452367 - DNA, 25 bp, Artificial
  probe
  misc_feature (1)..(25): SEQ ID NO: 6889; WAN024BUR; Start 121; Stop 145
ttgaagtctagtttggatgaattgg

SEQ ID NO: 452368 - DNA, 25 bp, Artificial
  probe
  misc_feature (1)..(25): SEQ ID NO: 6889; WAN024BUR; Start 116; Stop 140
cggaattgaagtctagtttggatga

SEQ ID NO: 452369 - DNA, 25 bp, Artificial
  probe
  misc_feature (1)..(25): SEQ ID NO: 6889; WAN024BUR; Start 117; Stop 141
ggaattgaagtctagtttggatgaa

SEQ ID NO: 452370 - DNA, 25 bp, Artificial
  probe
  misc_feature (1)..(25): SEQ ID NO: 6889; WAN024BUR; Start 113; Stop 137
tagcggaattgaagtctagtttgga

SEQ ID NO: 452371 - DNA, 25 bp, Artificial
  probe
  misc_feature (1)..(25): SEQ ID NO: 6889; WAN024BUR; Start 112; Stop 136
gtagcggaattgaagtctagtttgg

SEQ ID NO: 452372 - DNA, 25 bp, Artificial
  probe
  misc_feature (1)..(25): SEQ ID NO: 6889; WAN024BUR; Start 123; Stop 147
gaagtctagtttggatgaattgggc

SEQ ID NO: 452373 - DNA, 25 bp, Artificial
  probe
  misc_feature (1)..(25): SEQ ID NO: 6889; WAN024BUR; Start 111; Stop 135
cgtagcggaattgaagtctagtttg

SEQ ID NO: 452374 - DNA, 25 bp, Artificial
  probe
  misc_feature (1)..(25): SEQ ID NO: 6889; WAN024BUR; Start 132; Stop 156
tttggatgaattgggcgttgattac

SEQ ID NO: 452375 - DNA, 25 bp, Artificial
  probe
  misc_feature (1)..(25): SEQ ID NO: 6889; WAN024BUR; Start 131; Stop 155
gtttggatgaattgggcgttgatta

SEQ ID NO: 452376 - DNA, 25 bp, Artificial
  probe
  misc_feature (1)..(25): SEQ ID NO: 6889; WAN024BUR; Start 115; Stop 139
gcggaattgaagtctagtttggatg

SEQ ID NO: 452377 - DNA, 25 bp, Artificial
  probe
  misc_feature (1)..(25): SEQ ID NO: 6889; WAN024BUR; Start 114; Stop 138
agcggaattgaagtctagtttggat

SEQ ID NO: 452378 - DNA, 25 bp, Artificial
  probe
  misc_feature (1)..(25): SEQ ID NO: 6889; WAN024BUR; Start 120; Stop 144
attgaagtctagtttggatgaattg

SEQ ID NO: 452379 - DNA, 25 bp, Artificial
  probe
  misc_feature (1)..(25): SEQ ID NO: 6889; WAN024BUR; Start 118; Stop 142
gaattgaagtctagtttggatgaat

SEQ ID NO: 452380 - DNA, 25 bp, Artificial
  probe
  misc_feature (1)..(25): SEQ ID NO: 6889; WAN024BUR; Start 33; Stop 57
gattatctctgctgagagtgttctt

SEQ ID NO: 452381 - DNA, 25 bp, Artificial
  probe
  misc_feature (1)..(25): SEQ ID NO: 6889; WAN024BUR; Start 34; Stop 58
attatctctgctgagagtgttcttg

SEQ ID NO: 452382 - DNA, 25 bp, Artificial
  probe
  misc_feature (1)..(25): SEQ ID NO: 6889; WAN024BUR; Start 129; Stop 153
tagtttggatgaattgggcgttgat

SEQ ID NO: 452383 - DNA, 25 bp, Artificial
  probe
  misc_feature (1)..(25): SEQ ID NO: 6889; WAN024BUR; Start 32; Stop 56
tgattatctctgctgagagtgttct

SEQ ID NO: 452384 - DNA, 25 bp, Artificial
  probe
  misc_feature (1)..(25): SEQ ID NO: 6889; WAN024BUR; Start 31; Stop 55
gtgattatctctgctgagagtgttc

SEQ ID NO: 452385 - DNA, 25 bp, Artificial
  probe
  misc_feature (1)..(25): SEQ ID NO: 6889; WAN024BUR; Start 62; Stop 86
gagattgggtgcctgttgaagatac

SEQ ID NO: 452386 - DNA, 25 bp, Artificial
  probe
  misc_feature (1)..(25): SEQ ID NO: 6889; WAN024BUR; Start 124; Stop 148
aagtctagtttggatgaattgggcg

SEQ ID NO: 452387 - DNA, 25 bp, Artificial
  probe
  misc_feature (1)..(25): SEQ ID NO: 6889; WAN024BUR; Start 35; Stop 59
ttatctctgctgagagtgttcttgg

SEQ ID NO: 452388 - DNA, 25 bp, Artificial
  probe
  misc_feature (1)..(25): SEQ ID NO: 6889; WAN024BUR; Start 128; Stop 152
ctagtttggatgaattgggcgttga

SEQ ID NO: 452389 - DNA, 25 bp, Artificial
  probe
  misc_feature (1)..(25): SEQ ID NO: 6889; WAN024BUR; Start 127; Stop 151
tctagtttggatgaattgggcgttg

SEQ ID NO: 452390 - DNA, 25 bp, Artificial
  probe
  misc_feature (1)..(25): SEQ ID NO: 6889; WAN024BUR; Start 126; Stop 150
gtctagtttggatgaattgggcgtt

SEQ ID NO: 452391 - DNA, 25 bp, Artificial
  probe
  misc_feature (1)..(25): SEQ ID NO: 6889; WAN024BUR; Start 137; Stop 161
atgaattgggcgttgattacgataa

SEQ ID NO: 452392 - DNA, 25 bp, Artificial
  probe
  misc_feature (1)..(25): SEQ ID NO: 6889; WAN024BUR; Start 119; Stop 143
aattgaagtctagtttggatgaatt

SEQ ID NO: 452393 - DNA, 25 bp, Artificial
  probe
  misc_feature (1)..(25): SEQ ID NO: 6889; WAN024BUR; Start 178; Stop 202
gatttggtagccttgtacgaggaaa

SEQ ID NO: 452394 - DNA, 25 bp, Artificial
  probe
  misc_feature (1)..(25): SEQ ID NO: 6889; WAN024BUR; Start 130; Stop 154
agtttggatgaattgggcgttgatt

SEQ ID NO: 452395 - DNA, 25 bp, Artificial
  probe
  misc_feature (1)..(25): SEQ ID NO: 6889; WAN024BUR; Start 30; Stop 54
cgtgattatctctgctgagagtgtt

SEQ ID NO: 452396 - DNA, 25 bp, Artificial
  probe
  misc_feature (1)..(25): SEQ ID NO: 6889; WAN024BUR; Start 136; Stop 160
gatgaattgggcgttgattacgata

SEQ ID NO: 452397 - DNA, 25 bp, Artificial
  probe
  misc_feature (1)..(25): SEQ ID NO: 6889; WAN024BUR; Start 138; Stop 162
tgaattgggcgttgattacgataag

SEQ ID NO: 452398 - DNA, 25 bp, Artificial
  probe
  misc_feature (1)..(25): SEQ ID NO: 6889; WAN024BUR; Start 146; Stop 170
gcgttgattacgataagggttcaaa

SEQ ID NO: 452399 - DNA, 25 bp, Artificial
  probe
  misc_feature (1)..(25): SEQ ID NO: 6890; WAN024G6Z; Start 486; Stop 510
acgaacaattaactacaactcctac

SEQ ID NO: 452400 - DNA, 25 bp, Artificial
  probe
  misc_feature (1)..(25): SEQ ID NO: 6890; WAN024G6Z; Start 487; Stop 511
cgaacaattaactacaactcctact

SEQ ID NO: 452401 - DNA, 25 bp, Artificial
  probe
  misc_feature (1)..(25): SEQ ID NO: 6890; WAN024G6Z; Start 240; Stop 264
tgccaacttaatacagtatatccgt

SEQ ID NO: 452402 - DNA, 25 bp, Artificial
  probe
  misc_feature (1)..(25): SEQ ID NO: 6890; WAN024G6Z; Start 484; Stop 508
gtacgaacaattaactacaactcct

SEQ ID NO: 452403 - DNA, 25 bp, Artificial
  probe
  misc_feature (1)..(25): SEQ ID NO: 6890; WAN024G6Z; Start 239; Stop 263
ttgccaacttaatacagtatatccg

SEQ ID NO: 452404 - DNA, 25 bp, Artificial
  probe
  misc_feature (1)..(25): SEQ ID NO: 6890; WAN024G6Z; Start 475; Stop 499
ggtaactgtgtacgaacaattaact

SEQ ID NO: 452405 - DNA, 25 bp, Artificial
  probe
  misc_feature (1)..(25): SEQ ID NO: 6890; WAN024G6Z; Start 474; Stop 498
aggtaactgtgtacgaacaattaac

SEQ ID NO: 452406 - DNA, 25 bp, Artificial
  probe
  misc_feature (1)..(25): SEQ ID NO: 6890; WAN024G6Z; Start 241; Stop 265
gccaacttaatacagtatatccgta

SEQ ID NO: 452407 - DNA, 25 bp, Artificial
  probe
  misc_feature (1)..(25): SEQ ID NO: 6890; WAN024G6Z; Start 485; Stop 509
tacgaacaattaactacaactccta

SEQ ID NO: 452408 - DNA, 25 bp, Artificial
  probe
  misc_feature (1)..(25): SEQ ID NO: 6890; WAN024G6Z; Start 471; Stop 495
attaggtaactgtgtacgaacaatt

SEQ ID NO: 452409 - DNA, 25 bp, Artificial
  probe
  misc_feature (1)..(25): SEQ ID NO: 6890; WAN024G6Z; Start 49; Stop 73
cgtaaaggcaaacaaatcagtctat

SEQ ID NO: 452410 - DNA, 25 bp, Artificial
  probe
  misc_feature (1)..(25): SEQ ID NO: 6890; WAN024G6Z; Start 48; Stop 72
tcgtaaaggcaaacaaatcagtcta

SEQ ID NO: 452411 - DNA, 25 bp, Artificial
  probe
  misc_feature (1)..(25): SEQ ID NO: 6890; WAN024G6Z; Start 301; Stop 325
tctctactttcggattcctcaaatt

SEQ ID NO: 452412 - DNA, 25 bp, Artificial
  probe
  misc_feature (1)..(25): SEQ ID NO: 6890; WAN024G6Z; Start 307; Stop 331
ctttcggattcctcaaattacactt

SEQ ID NO: 452413 - DNA, 25 bp, Artificial
  probe
  misc_feature (1)..(25): SEQ ID NO: 6890; WAN024G6Z; Start 306; Stop 330
actttcggattcctcaaattacact

SEQ ID NO: 452414 - DNA, 25 bp, Artificial
  probe
  misc_feature (1)..(25): SEQ ID NO: 6890; WAN024G6Z; Start 43; Stop 67
aaagttcgtaaaggcaaacaaatca

SEQ ID NO: 452415 - DNA, 25 bp, Artificial
  probe
  misc_feature (1)..(25): SEQ ID NO: 6890; WAN024G6Z; Start 473; Stop 497
taggtaactgtgtacgaacaattaa

SEQ ID NO: 452416 - DNA, 25 bp, Artificial
  probe
  misc_feature (1)..(25): SEQ ID NO: 6890; WAN024G6Z; Start 472; Stop 496
ttaggtaactgtgtacgaacaatta

SEQ ID NO: 452417 - DNA, 25 bp, Artificial
  probe
  misc_feature (1)..(25): SEQ ID NO: 6890; WAN024G6Z; Start 469; Stop 493
ttattaggtaactgtgtacgaacaa

SEQ ID NO: 452418 - DNA, 25 bp, Artificial
  probe
  misc_feature (1)..(25): SEQ ID NO: 6890; WAN024G6Z; Start 300; Stop 324
atctctactttcggattcctcaaat

SEQ ID NO: 452419 - DNA, 25 bp, Artificial
  probe
  misc_feature (1)..(25): SEQ ID NO: 6890; WAN024G6Z; Start 50; Stop 74
gtaaaggcaaacaaatcagtctatg

SEQ ID NO: 452420 - DNA, 25 bp, Artificial
  probe
  misc_feature (1)..(25): SEQ ID NO: 6890; WAN024G6Z; Start 125; Stop 149
gtggagagtcagagatatcatgtat

SEQ ID NO: 452421 - DNA, 25 bp, Artificial
  probe
  misc_feature (1)..(25): SEQ ID NO: 6890; WAN024G6Z; Start 124; Stop 148
cgtggagagtcagagatatcatgta

SEQ ID NO: 452422 - DNA, 25 bp, Artificial
  probe
  misc_feature (1)..(25): SEQ ID NO: 6890; WAN024G6Z; Start 308; Stop 332
tttcggattcctcaaattacacttt

SEQ ID NO: 452423 - DNA, 25 bp, Artificial
  probe
  misc_feature (1)..(25): SEQ ID NO: 6890; WAN024G6Z; Start 44; Stop 68
aagttcgtaaaggcaaacaaatcag

SEQ ID NO: 452424 - DNA, 25 bp, Artificial
  probe
  misc_feature (1)..(25): SEQ ID NO: 6890; WAN024G6Z; Start 47; Stop 71
ttcgtaaaggcaaacaaatcagtct

SEQ ID NO: 452425 - DNA, 25 bp, Artificial
  probe
  misc_feature (1)..(25): SEQ ID NO: 6890; WAN024G6Z; Start 305; Stop 329
tactttcggattcctcaaattacac

SEQ ID NO: 452426 - DNA, 25 bp, Artificial
  probe
  misc_feature (1)..(25): SEQ ID NO: 6890; WAN024G6Z; Start 470; Stop 494
tattaggtaactgtgtacgaacaat

SEQ ID NO: 452427 - DNA, 25 bp, Artificial
  probe
  misc_feature (1)..(25): SEQ ID NO: 6890; WAN024G6Z; Start 311; Stop 335
cggattcctcaaattacactttaga

SEQ ID NO: 452428 - DNA, 25 bp, Artificial
  probe
  misc_feature (1)..(25): SEQ ID NO: 6890; WAN024G6Z; Start 310; Stop 334
tcggattcctcaaattacactttag

SEQ ID NO: 452429 - DNA, 25 bp, Artificial
  probe
  misc_feature (1)..(25): SEQ ID NO: 6890; WAN024G6Z; Start 304; Stop 328
ctactttcggattcctcaaattaca

SEQ ID NO: 452430 - DNA, 25 bp, Artificial
  probe
  misc_feature (1)..(25): SEQ ID NO: 6890; WAN024G6Z; Start 232; Stop 256
gagtcatttgccaacttaatacagt

SEQ ID NO: 452431 - DNA, 25 bp, Artificial
  probe
  misc_feature (1)..(25): SEQ ID NO: 6890; WAN024G6Z; Start 231; Stop 255
tgagtcatttgccaacttaatacag

SEQ ID NO: 452432 - DNA, 25 bp, Artificial
  probe
  misc_feature (1)..(25): SEQ ID NO: 6891; WAN024BUW; Start 108; Stop 132
ggtgttggtagtttctttggataaa

SEQ ID NO: 452433 - DNA, 25 bp, Artificial
  probe
  misc_feature (1)..(25): SEQ ID NO: 6891; WAN024BUW; Start 107; Stop 131
cggtgttggtagtttctttggataa

SEQ ID NO: 452434 - DNA, 25 bp, Artificial
  probe
  misc_feature (1)..(25): SEQ ID NO: 6891; WAN024BUW; Start 180; Stop 204
attgggaatgctagatgttgctaaa

SEQ ID NO: 452435 - DNA, 25 bp, Artificial
  probe
  misc_feature (1)..(25): SEQ ID NO: 6891; WAN024BUW; Start 106; Stop 130
tcggtgttggtagtttctttggata

SEQ ID NO: 452436 - DNA, 25 bp, Artificial
  probe
  misc_feature (1)..(25): SEQ ID NO: 6891; WAN024BUW; Start 133; Stop 157
gatggtgagataaatcttggctata

SEQ ID NO: 452437 - DNA, 25 bp, Artificial
  probe
  misc_feature (1)..(25): SEQ ID NO: 6891; WAN024BUW; Start 105; Stop 129
ttcggtgttggtagtttctttggat

SEQ ID NO: 452438 - DNA, 25 bp, Artificial
  probe
  misc_feature (1)..(25): SEQ ID NO: 6891; WAN024BUW; Start 132; Stop 156
agatggtgagataaatcttggctat

SEQ ID NO: 452439 - DNA, 25 bp, Artificial
  probe
  misc_feature (1)..(25): SEQ ID NO: 6891; WAN024BUW; Start 104; Stop 128
cttcggtgttggtagtttctttgga

SEQ ID NO: 452440 - DNA, 25 bp, Artificial
  probe
  misc_feature (1)..(25): SEQ ID NO: 6891; WAN024BUW; Start 179; Stop 203
cattgggaatgctagatgttgctaa

SEQ ID NO: 452441 - DNA, 25 bp, Artificial
  probe
  misc_feature (1)..(25): SEQ ID NO: 6891; WAN024BUW; Start 153; Stop 177
ctatagctgggatagtagtttgcag

SEQ ID NO: 452442 - DNA, 25 bp, Artificial
  probe
  misc_feature (1)..(25): SEQ ID NO: 6891; WAN024BUW; Start 102; Stop 126
cacttcggtgttggtagtttctttg

SEQ ID NO: 452443 - DNA, 25 bp, Artificial
  probe
  misc_feature (1)..(25): SEQ ID NO: 6891; WAN024BUW; Start 109; Stop 133
gtgttggtagtttctttggataaag

SEQ ID NO: 452444 - DNA, 25 bp, Artificial
  probe
  misc_feature (1)..(25): SEQ ID NO: 6891; WAN024BUW; Start 124; Stop 148
ttggataaagatggtgagataaatc

SEQ ID NO: 452445 - DNA, 25 bp, Artificial
  probe
  misc_feature (1)..(25): SEQ ID NO: 6891; WAN024BUW; Start 134; Stop 158
atggtgagataaatcttggctatag

SEQ ID NO: 452446 - DNA, 25 bp, Artificial
  probe
  misc_feature (1)..(25): SEQ ID NO: 6891; WAN024BUW; Start 154; Stop 178
tatagctgggatagtagtttgcagg

SEQ ID NO: 452447 - DNA, 25 bp, Artificial
  probe
  misc_feature (1)..(25): SEQ ID NO: 6891; WAN024BUW; Start 103; Stop 127
acttcggtgttggtagtttctttgg

SEQ ID NO: 452448 - DNA, 25 bp, Artificial
  probe
  misc_feature (1)..(25): SEQ ID NO: 6891; WAN024BUW; Start 181; Stop 205
ttgggaatgctagatgttgctaaaa

SEQ ID NO: 452449 - DNA, 25 bp, Artificial
  probe
  misc_feature (1)..(25): SEQ ID NO: 6891; WAN024BUW; Start 164; Stop 188
atagtagtttgcaggcattgggaat

SEQ ID NO: 452450 - DNA, 25 bp, Artificial
  probe
  misc_feature (1)..(25): SEQ ID NO: 6891; WAN024BUW; Start 123; Stop 147
tttggataaagatggtgagataaat

SEQ ID NO: 452451 - DNA, 25 bp, Artificial
  probe
  misc_feature (1)..(25): SEQ ID NO: 6891; WAN024BUW; Start 69; Stop 93
tttggaggaaaatcttgaggctagt

SEQ ID NO: 452452 - DNA, 25 bp, Artificial
  probe
  misc_feature (1)..(25): SEQ ID NO: 6891; WAN024BUW; Start 163; Stop 187
gatagtagtttgcaggcattgggaa

SEQ ID NO: 452453 - DNA, 25 bp, Artificial
  probe
  misc_feature (1)..(25): SEQ ID NO: 6891; WAN024BUW; Start 125; Stop 149
tggataaagatggtgagataaatct

SEQ ID NO: 452454 - DNA, 25 bp, Artificial
  probe
  misc_feature (1)..(25): SEQ ID NO: 6891; WAN024BUW; Start 70; Stop 94
ttggaggaaaatcttgaggctagtc

SEQ ID NO: 452455 - DNA, 25 bp, Artificial
  probe
  misc_feature (1)..(25): SEQ ID NO: 6891; WAN024BUW; Start 68; Stop 92
ttttggaggaaaatcttgaggctag

SEQ ID NO: 452456 - DNA, 25 bp, Artificial
  probe
  misc_feature (1)..(25): SEQ ID NO: 6891; WAN024BUW; Start 73; Stop 97
gaggaaaatcttgaggctagtcatg

SEQ ID NO: 452457 - DNA, 25 bp, Artificial
  probe
  misc_feature (1)..(25): SEQ ID NO: 6891; WAN024BUW; Start 72; Stop 96
ggaggaaaatcttgaggctagtcat

SEQ ID NO: 452458 - DNA, 25 bp, Artificial
  probe
  misc_feature (1)..(25): SEQ ID NO: 6891; WAN024BUW; Start 122; Stop 146
ctttggataaagatggtgagataaa

SEQ ID NO: 452459 - DNA, 25 bp, Artificial
  probe
  misc_feature (1)..(25): SEQ ID NO: 6891; WAN024BUW; Start 56; Stop 80
ccgtgaaagaaattttggaggaaaa

SEQ ID NO: 452460 - DNA, 25 bp, Artificial
  probe
  misc_feature (1)..(25): SEQ ID NO: 6891; WAN024BUW; Start 159; Stop 183
ctgggatagtagtttgcaggcattg

SEQ ID NO: 452461 - DNA, 25 bp, Artificial
  probe
  misc_feature (1)..(25): SEQ ID NO: 6891; WAN024BUW; Start 71; Stop 95
tggaggaaaatcttgaggctagtca

SEQ ID NO: 452462 - DNA, 25 bp, Artificial
  probe
  misc_feature (1)..(25): SEQ ID NO: 6891; WAN024BUW; Start 55; Stop 79
tccgtgaaagaaattttggaggaaa

SEQ ID NO: 452463 - DNA, 25 bp, Artificial
  probe
  misc_feature (1)..(25): SEQ ID NO: 6891; WAN024BUW; Start 130; Stop 154
aaagatggtgagataaatcttggct

SEQ ID NO: 452464 - DNA, 25 bp, Artificial
  probe
  misc_feature (1)..(25): SEQ ID NO: 6891; WAN024BUW; Start 94; Stop 118
catgactacacttcggtgttggtag

SEQ ID NO: 452465 - DNA, 25 bp, Artificial
  probe
  misc_feature (1)..(25): SEQ ID NO: 6892; WAN024BW7; Start 376; Stop 400
gacagaatcccagataaacattacg

SEQ ID NO: 452466 - DNA, 25 bp, Artificial
  probe
  misc_feature (1)..(25): SEQ ID NO: 6892; WAN024BW7; Start 385; Stop 409
ccagataaacattacgccctacttt

SEQ ID NO: 452467 - DNA, 25 bp, Artificial
  probe
  misc_feature (1)..(25): SEQ ID NO: 6892; WAN024BW7; Start 392; Stop 416
aacattacgccctactttatgacat

SEQ ID NO: 452468 - DNA, 25 bp, Artificial
  probe
  misc_feature (1)..(25): SEQ ID NO: 6892; WAN024BW7; Start 227; Stop 251
tggaagataaagaattgtcagaacg

SEQ ID NO: 452469 - DNA, 25 bp, Artificial
  probe
  misc_feature (1)..(25): SEQ ID NO: 6892; WAN024BW7; Start 391; Stop 415
aaacattacgccctactttatgaca

SEQ ID NO: 452470 - DNA, 25 bp, Artificial
  probe
  misc_feature (1)..(25): SEQ ID NO: 6892; WAN024BW7; Start 377; Stop 401
acagaatcccagataaacattacgc

SEQ ID NO: 452471 - DNA, 25 bp, Artificial
  probe
  misc_feature (1)..(25): SEQ ID NO: 6892; WAN024BW7; Start 381; Stop 405
aatcccagataaacattacgcccta

SEQ ID NO: 452472 - DNA, 25 bp, Artificial
  probe
  misc_feature (1)..(25): SEQ ID NO: 6892; WAN024BW7; Start 2; Stop 26
tgggaaagaaacatcaagtagtaaa

SEQ ID NO: 452473 - DNA, 25 bp, Artificial
  probe
  misc_feature (1)..(25): SEQ ID NO: 6892; WAN024BW7; Start 390; Stop 414
taaacattacgccctactttatgac

SEQ ID NO: 452474 - DNA, 25 bp, Artificial
  probe
  misc_feature (1)..(25): SEQ ID NO: 6892; WAN024BW7; Start 175; Stop 199
aaaggagtttatagcaagttcgcac

SEQ ID NO: 452475 - DNA, 25 bp, Artificial
  probe
  misc_feature (1)..(25): SEQ ID NO: 6892; WAN024BW7; Start 395; Stop 419
attacgccctactttatgacatgat

SEQ ID NO: 452476 - DNA, 25 bp, Artificial
  probe
  misc_feature (1)..(25): SEQ ID NO: 6892; WAN024BW7; Start 386; Stop 410
cagataaacattacgccctacttta

SEQ ID NO: 452477 - DNA, 25 bp, Artificial
  probe
  misc_feature (1)..(25): SEQ ID NO: 6892; WAN024BW7; Start 378; Stop 402
cagaatcccagataaacattacgcc

SEQ ID NO: 452478 - DNA, 25 bp, Artificial
  probe
  misc_feature (1)..(25): SEQ ID NO: 6892; WAN024BW7; Start 396; Stop 420
ttacgccctactttatgacatgatg

SEQ ID NO: 452479 - DNA, 25 bp, Artificial
  probe
  misc_feature (1)..(25): SEQ ID NO: 6892; WAN024BW7; Start 1; Stop 25
atgggaaagaaacatcaagtagtaa

SEQ ID NO: 452480 - DNA, 25 bp, Artificial
  probe
  misc_feature (1)..(25): SEQ ID NO: 6892; WAN024BW7; Start 394; Stop 418
cattacgccctactttatgacatga

SEQ ID NO: 452481 - DNA, 25 bp, Artificial
  probe
  misc_feature (1)..(25): SEQ ID NO: 6892; WAN024BW7; Start 393; Stop 417
acattacgccctactttatgacatg

SEQ ID NO: 452482 - DNA, 25 bp, Artificial
  probe
  misc_feature (1)..(25): SEQ ID NO: 6892; WAN024BW7; Start 382; Stop 406
atcccagataaacattacgccctac

SEQ ID NO: 452483 - DNA, 25 bp, Artificial
  probe
  misc_feature (1)..(25): SEQ ID NO: 6892; WAN024BW7; Start 46; Stop 70
aaattgccagaattagagggtaagc

SEQ ID NO: 452484 - DNA, 25 bp, Artificial
  probe
  misc_feature (1)..(25): SEQ ID NO: 6892; WAN024BW7; Start 384; Stop 408
cccagataaacattacgccctactt

SEQ ID NO: 452485 - DNA, 25 bp, Artificial
  probe
  misc_feature (1)..(25): SEQ ID NO: 6892; WAN024BW7; Start 104; Stop 128
gtaacctagagagttgcagaaccaa

SEQ ID NO: 452486 - DNA, 25 bp, Artificial
  probe
  misc_feature (1)..(25): SEQ ID NO: 6892; WAN024BW7; Start 375; Stop 399
ggacagaatcccagataaacattac

SEQ ID NO: 452487 - DNA, 25 bp, Artificial
  probe
  misc_feature (1)..(25): SEQ ID NO: 6892; WAN024BW7; Start 373; Stop 397
ttggacagaatcccagataaacatt

SEQ ID NO: 452488 - DNA, 25 bp, Artificial
  probe
  misc_feature (1)..(25): SEQ ID NO: 6892; WAN024BW7; Start 226; Stop 250
ttggaagataaagaattgtcagaac

SEQ ID NO: 452489 - DNA, 25 bp, Artificial
  probe
  misc_feature (1)..(25): SEQ ID NO: 6892; WAN024BW7; Start 380; Stop 404
gaatcccagataaacattacgccct

SEQ ID NO: 452490 - DNA, 25 bp, Artificial
  probe
  misc_feature (1)..(25): SEQ ID NO: 6892; WAN024BW7; Start 379; Stop 403
agaatcccagataaacattacgccc

SEQ ID NO: 452491 - DNA, 25 bp, Artificial
  probe
  misc_feature (1)..(25): SEQ ID NO: 6892; WAN024BW7; Start 372; Stop 396
cttggacagaatcccagataaacat

SEQ ID NO: 452492 - DNA, 25 bp, Artificial
  probe
  misc_feature (1)..(25): SEQ ID NO: 6892; WAN024BW7; Start 374; Stop 398
tggacagaatcccagataaacatta

SEQ ID NO: 452493 - DNA, 25 bp, Artificial
  probe
  misc_feature (1)..(25): SEQ ID NO: 6892; WAN024BW7; Start 230; Stop 254
aagataaagaattgtcagaacgtgg

SEQ ID NO: 452494 - DNA, 25 bp, Artificial
  probe
  misc_feature (1)..(25): SEQ ID NO: 6892; WAN024BW7; Start 228; Stop 252
ggaagataaagaattgtcagaacgt

SEQ ID NO: 452495 - DNA, 25 bp, Artificial
  probe
  misc_feature (1)..(25): SEQ ID NO: 6892; WAN024BW7; Start 100; Stop 124
taccgtaacctagagagttgcagaa

SEQ ID NO: 452496 - DNA, 25 bp, Artificial
  probe
  misc_feature (1)..(25): SEQ ID NO: 6892; WAN024BW7; Start 99; Stop 123
ttaccgtaacctagagagttgcaga

SEQ ID NO: 452497 - DNA, 25 bp, Artificial
  probe
  misc_feature (1)..(25): SEQ ID NO: 6892; WAN024BW7; Start 397; Stop 421
tacgccctactttatgacatgatgg

SEQ ID NO: 452498 - DNA, 25 bp, Artificial
  probe
  misc_feature (1)..(25): SEQ ID NO: 6893; WAN024BM3; Start 43; Stop 67
tcagacttcttcaacacaccttatt

SEQ ID NO: 452499 - DNA, 25 bp, Artificial
  probe
  misc_feature (1)..(25): SEQ ID NO: 6893; WAN024BM3; Start 42; Stop 66
ctcagacttcttcaacacaccttat

SEQ ID NO: 452500 - DNA, 25 bp, Artificial
  probe
  misc_feature (1)..(25): SEQ ID NO: 6893; WAN024BM3; Start 38; Stop 62
ttatctcagacttcttcaacacacc

SEQ ID NO: 452501 - DNA, 25 bp, Artificial
  probe
  misc_feature (1)..(25): SEQ ID NO: 6893; WAN024BM3; Start 39; Stop 63
tatctcagacttcttcaacacacct

SEQ ID NO: 452502 - DNA, 25 bp, Artificial
  probe
  misc_feature (1)..(25): SEQ ID NO: 6893; WAN024BM3; Start 44; Stop 68
cagacttcttcaacacaccttatta

SEQ ID NO: 452503 - DNA, 25 bp, Artificial
  probe
  misc_feature (1)..(25): SEQ ID NO: 6893; WAN024BM3; Start 41; Stop 65
tctcagacttcttcaacacacctta

SEQ ID NO: 452504 - DNA, 25 bp, Artificial
  probe
  misc_feature (1)..(25): SEQ ID NO: 6893; WAN024BM3; Start 40; Stop 64
atctcagacttcttcaacacacctt

SEQ ID NO: 452505 - DNA, 25 bp, Artificial
  probe
  misc_feature (1)..(25): SEQ ID NO: 6893; WAN024BM3; Start 45; Stop 69
agacttcttcaacacaccttattat

SEQ ID NO: 452506 - DNA, 25 bp, Artificial
  probe
  misc_feature (1)..(25): SEQ ID NO: 6893; WAN024BM3; Start 48; Stop 72
cttcttcaacacaccttattattgg

SEQ ID NO: 452507 - DNA, 25 bp, Artificial
  probe
  misc_feature (1)..(25): SEQ ID NO: 6893; WAN024BM3; Start 46; Stop 70
gacttcttcaacacaccttattatt

SEQ ID NO: 452508 - DNA, 25 bp, Artificial
  probe
  misc_feature (1)..(25): SEQ ID NO: 6893; WAN024BM3; Start 47; Stop 71
acttcttcaacacaccttattattg

SEQ ID NO: 452509 - DNA, 25 bp, Artificial
  probe
  misc_feature (1)..(25): SEQ ID NO: 6893; WAN024BM3; Start 55; Stop 79
aacacaccttattattgggcactta

SEQ ID NO: 452510 - DNA, 25 bp, Artificial
  probe
  misc_feature (1)..(25): SEQ ID NO: 6893; WAN024BM3; Start 56; Stop 80
acacaccttattattgggcacttac

SEQ ID NO: 452511 - DNA, 25 bp, Artificial
  probe
  misc_feature (1)..(25): SEQ ID NO: 6893; WAN024BM3; Start 37; Stop 61
tttatctcagacttcttcaacacac

SEQ ID NO: 452512 - DNA, 25 bp, Artificial
  probe
  misc_feature (1)..(25): SEQ ID NO: 6893; WAN024BM3; Start 49; Stop 73
ttcttcaacacaccttattattggg

SEQ ID NO: 452513 - DNA, 25 bp, Artificial
  probe
  misc_feature (1)..(25): SEQ ID NO: 6893; WAN024BM3; Start 62; Stop 86
cttattattgggcacttacggaagg

SEQ ID NO: 452514 - DNA, 25 bp, Artificial
  probe
  misc_feature (1)..(25): SEQ ID NO: 6893; WAN024BM3; Start 61; Stop 85
ccttattattgggcacttacggaag

SEQ ID NO: 452515 - DNA, 25 bp, Artificial
  probe
  misc_feature (1)..(25): SEQ ID NO: 6893; WAN024BM3; Start 50; Stop 74
tcttcaacacaccttattattgggc

SEQ ID NO: 452516 - DNA, 25 bp, Artificial
  probe
  misc_feature (1)..(25): SEQ ID NO: 6893; WAN024BM3; Start 57; Stop 81
cacaccttattattgggcacttacg

SEQ ID NO: 452517 - DNA, 25 bp, Artificial
  probe
  misc_feature (1)..(25): SEQ ID NO: 6893; WAN024BM3; Start 51; Stop 75
cttcaacacaccttattattgggca

SEQ ID NO: 452518 - DNA, 25 bp, Artificial
  probe
  misc_feature (1)..(25): SEQ ID NO: 6893; WAN024BM3; Start 60; Stop 84
accttattattgggcacttacggaa

SEQ ID NO: 452519 - DNA, 25 bp, Artificial
  probe
  misc_feature (1)..(25): SEQ ID NO: 6893; WAN024BM3; Start 54; Stop 78
caacacaccttattattgggcactt

SEQ ID NO: 452520 - DNA, 25 bp, Artificial
  probe
  misc_feature (1)..(25): SEQ ID NO: 6893; WAN024BM3; Start 52; Stop 76
ttcaacacaccttattattgggcac

SEQ ID NO: 452521 - DNA, 25 bp, Artificial
  probe
  misc_feature (1)..(25): SEQ ID NO: 6893; WAN024BM3; Start 63; Stop 87
ttattattgggcacttacggaaggt

SEQ ID NO: 452522 - DNA, 25 bp, Artificial
  probe
  misc_feature (1)..(25): SEQ ID NO: 6893; WAN024BM3; Start 59; Stop 83
caccttattattgggcacttacgga

SEQ ID NO: 452523 - DNA, 25 bp, Artificial
  probe
  misc_feature (1)..(25): SEQ ID NO: 6893; WAN024BM3; Start 53; Stop 77
tcaacacaccttattattgggcact

SEQ ID NO: 452524 - DNA, 25 bp, Artificial
  probe
  misc_feature (1)..(25): SEQ ID NO: 6893; WAN024BM3; Start 58; Stop 82
acaccttattattgggcacttacgg

SEQ ID NO: 452525 - DNA, 25 bp, Artificial
  probe
  misc_feature (1)..(25): SEQ ID NO: 6893; WAN024BM3; Start 36; Stop 60
ttttatctcagacttcttcaacaca

SEQ ID NO: 452526 - DNA, 25 bp, Artificial
  probe
  misc_feature (1)..(25): SEQ ID NO: 6893; WAN024BM3; Start 35; Stop 59
attttatctcagacttcttcaacac

SEQ ID NO: 452527 - DNA, 25 bp, Artificial
  probe
  misc_feature (1)..(25): SEQ ID NO: 6893; WAN024BM3; Start 19; Stop 43
tttgtgactgagaactattttatct

SEQ ID NO: 452528 - DNA, 25 bp, Artificial
  probe
  misc_feature (1)..(25): SEQ ID NO: 6893; WAN024BM3; Start 34; Stop 58
tattttatctcagacttcttcaaca

SEQ ID NO: 452529 - DNA, 25 bp, Artificial
  probe
  misc_feature (1)..(25): SEQ ID NO: 6893; WAN024BM3; Start 32; Stop 56
actattttatctcagacttcttcaa

SEQ ID NO: 452530 - DNA, 25 bp, Artificial
  probe
  misc_feature (1)..(25): SEQ ID NO: 6893; WAN024BM3; Start 31; Stop 55
aactattttatctcagacttcttca

SEQ ID NO: 452531 - DNA, 25 bp, Artificial
  probe
  misc_feature (1)..(25): SEQ ID NO: 6894; WAN024BQT; Start 4; Stop 28
ggacgcttagcagattatacatatt

SEQ ID NO: 452532 - DNA, 25 bp, Artificial
  probe
  misc_feature (1)..(25): SEQ ID NO: 6894; WAN024BQT; Start 7; Stop 31
cgcttagcagattatacatattacg

SEQ ID NO: 452533 - DNA, 25 bp, Artificial
  probe
  misc_feature (1)..(25): SEQ ID NO: 6894; WAN024BQT; Start 3; Stop 27
gggacgcttagcagattatacatat

SEQ ID NO: 452534 - DNA, 25 bp, Artificial
  probe
  misc_feature (1)..(25): SEQ ID NO: 6894; WAN024BQT; Start 2; Stop 26
tgggacgcttagcagattatacata

SEQ ID NO: 452535 - DNA, 25 bp, Artificial
  probe
  misc_feature (1)..(25): SEQ ID NO: 6894; WAN024BQT; Start 6; Stop 30
acgcttagcagattatacatattac

SEQ ID NO: 452536 - DNA, 25 bp, Artificial
  probe
  misc_feature (1)..(25): SEQ ID NO: 6894; WAN024BQT; Start 1; Stop 25
atgggacgcttagcagattatacat

SEQ ID NO: 452537 - DNA, 25 bp, Artificial
  probe
  misc_feature (1)..(25): SEQ ID NO: 6894; WAN024BQT; Start 8; Stop 32
gcttagcagattatacatattacga

SEQ ID NO: 452538 - DNA, 25 bp, Artificial
  probe
  misc_feature (1)..(25): SEQ ID NO: 6894; WAN024BQT; Start 5; Stop 29
gacgcttagcagattatacatatta

SEQ ID NO: 452539 - DNA, 25 bp, Artificial
  probe
  misc_feature (1)..(25): SEQ ID NO: 6894; WAN024BQT; Start 27; Stop 51
ttacgatatgcatgttgtgattgaa

SEQ ID NO: 452540 - DNA, 25 bp, Artificial
  probe
  misc_feature (1)..(25): SEQ ID NO: 6894; WAN024BQT; Start 26; Stop 50
attacgatatgcatgttgtgattga

SEQ ID NO: 452541 - DNA, 25 bp, Artificial
  probe
  misc_feature (1)..(25): SEQ ID NO: 6894; WAN024BQT; Start 28; Stop 52
tacgatatgcatgttgtgattgaac

SEQ ID NO: 452542 - DNA, 25 bp, Artificial
  probe
  misc_feature (1)..(25): SEQ ID NO: 6894; WAN024BQT; Start 31; Stop 55
gatatgcatgttgtgattgaacgag

SEQ ID NO: 452543 - DNA, 25 bp, Artificial
  probe
  misc_feature (1)..(25): SEQ ID NO: 6894; WAN024BQT; Start 25; Stop 49
tattacgatatgcatgttgtgattg

SEQ ID NO: 452544 - DNA, 25 bp, Artificial
  probe
  misc_feature (1)..(25): SEQ ID NO: 6894; WAN024BQT; Start 30; Stop 54
cgatatgcatgttgtgattgaacga

SEQ ID NO: 452545 - DNA, 25 bp, Artificial
  probe
  misc_feature (1)..(25): SEQ ID NO: 6894; WAN024BQT; Start 32; Stop 56
atatgcatgttgtgattgaacgagc

SEQ ID NO: 452546 - DNA, 25 bp, Artificial
  probe
  misc_feature (1)..(25): SEQ ID NO: 6894; WAN024BQT; Start 29; Stop 53
acgatatgcatgttgtgattgaacg

SEQ ID NO: 452547 - DNA, 25 bp, Artificial
  probe
  misc_feature (1)..(25): SEQ ID NO: 6894; WAN024BQT; Start 24; Stop 48
atattacgatatgcatgttgtgatt

SEQ ID NO: 452548 - DNA, 25 bp, Artificial
  probe
  misc_feature (1)..(25): SEQ ID NO: 6894; WAN024BQT; Start 22; Stop 46
acatattacgatatgcatgttgtga

SEQ ID NO: 452549 - DNA, 25 bp, Artificial
  probe
  misc_feature (1)..(25): SEQ ID NO: 6894; WAN024BQT; Start 13; Stop 37
gcagattatacatattacgatatgc

SEQ ID NO: 452550 - DNA, 25 bp, Artificial
  probe
  misc_feature (1)..(25): SEQ ID NO: 6894; WAN024BQT; Start 23; Stop 47
catattacgatatgcatgttgtgat

SEQ ID NO: 452551 - DNA, 25 bp, Artificial
  probe
  misc_feature (1)..(25): SEQ ID NO: 6894; WAN024BQT; Start 21; Stop 45
tacatattacgatatgcatgttgtg

SEQ ID NO: 452552 - DNA, 25 bp, Artificial
  probe
  misc_feature (1)..(25): SEQ ID NO: 6894; WAN024BQT; Start 33; Stop 57
tatgcatgttgtgattgaacgagcg

SEQ ID NO: 452553 - DNA, 25 bp, Artificial
  probe
  misc_feature (1)..(25): SEQ ID NO: 6894; WAN024BQT; Start 20; Stop 44
atacatattacgatatgcatgttgt

SEQ ID NO: 452554 - DNA, 25 bp, Artificial
  probe
  misc_feature (1)..(25): SEQ ID NO: 6894; WAN024BQT; Start 19; Stop 43
tatacatattacgatatgcatgttg

SEQ ID NO: 452555 - DNA, 25 bp, Artificial
  probe
  misc_feature (1)..(25): SEQ ID NO: 6895; WAN024GIM; Start 122; Stop 146
ttattgccgacaagttaatggatac

SEQ ID NO: 452556 - DNA, 25 bp, Artificial
  probe
  misc_feature (1)..(25): SEQ ID NO: 6895; WAN024GIM; Start 123; Stop 147
tattgccgacaagttaatggatacg

SEQ ID NO: 452557 - DNA, 25 bp, Artificial
  probe
  misc_feature (1)..(25): SEQ ID NO: 6895; WAN024GIM; Start 157; Stop 181
ctcattaagccagaggagagagaat

SEQ ID NO: 452558 - DNA, 25 bp, Artificial
  probe
  misc_feature (1)..(25): SEQ ID NO: 6895; WAN024GIM; Start 81; Stop 105
aaagaaagatgataatgccgttgtc

SEQ ID NO: 452559 - DNA, 25 bp, Artificial
  probe
  misc_feature (1)..(25): SEQ ID NO: 6895; WAN024GIM; Start 77; Stop 101
cgataaagaaagatgataatgccgt

SEQ ID NO: 452560 - DNA, 25 bp, Artificial
  probe
  misc_feature (1)..(25): SEQ ID NO: 6895; WAN024GIM; Start 76; Stop 100
acgataaagaaagatgataatgccg

SEQ ID NO: 452561 - DNA, 25 bp, Artificial
  probe
  misc_feature (1)..(25): SEQ ID NO: 6895; WAN024GIM; Start 80; Stop 104
taaagaaagatgataatgccgttgt

SEQ ID NO: 452562 - DNA, 25 bp, Artificial
  probe
  misc_feature (1)..(25): SEQ ID NO: 6895; WAN024GIM; Start 121; Stop 145
tttattgccgacaagttaatggata

SEQ ID NO: 452563 - DNA, 25 bp, Artificial
  probe
  misc_feature (1)..(25): SEQ ID NO: 6895; WAN024GIM; Start 159; Stop 183
cattaagccagaggagagagaatga

SEQ ID NO: 452564 - DNA, 25 bp, Artificial
  probe
  misc_feature (1)..(25): SEQ ID NO: 6895; WAN024GIM; Start 158; Stop 182
tcattaagccagaggagagagaatg

SEQ ID NO: 452565 - DNA, 25 bp, Artificial
  probe
  misc_feature (1)..(25): SEQ ID NO: 6895; WAN024GIM; Start 82; Stop 106
aagaaagatgataatgccgttgtcg

SEQ ID NO: 452566 - DNA, 25 bp, Artificial
  probe
  misc_feature (1)..(25): SEQ ID NO: 6895; WAN024GIM; Start 79; Stop 103
ataaagaaagatgataatgccgttg

SEQ ID NO: 452567 - DNA, 25 bp, Artificial
  probe
  misc_feature (1)..(25): SEQ ID NO: 6895; WAN024GIM; Start 78; Stop 102
gataaagaaagatgataatgccgtt

SEQ ID NO: 452568 - DNA, 25 bp, Artificial
  probe
  misc_feature (1)..(25): SEQ ID NO: 6895; WAN024GIM; Start 75; Stop 99
aacgataaagaaagatgataatgcc

SEQ ID NO: 452569 - DNA, 25 bp, Artificial
  probe
  misc_feature (1)..(25): SEQ ID NO: 6895; WAN024GIM; Start 54; Stop 78
gcaaggtgtaaaagtaatgaaaacg

SEQ ID NO: 452570 - DNA, 25 bp, Artificial
  probe
  misc_feature (1)..(25): SEQ ID NO: 6895; WAN024GIM; Start 120; Stop 144
ttttattgccgacaagttaatggat

SEQ ID NO: 452571 - DNA, 25 bp, Artificial
  probe
  misc_feature (1)..(25): SEQ ID NO: 6895; WAN024GIM; Start 74; Stop 98
aaacgataaagaaagatgataatgc

SEQ ID NO: 452572 - DNA, 25 bp, Artificial
  probe
  misc_feature (1)..(25): SEQ ID NO: 6895; WAN024GIM; Start 130; Stop 154
gacaagttaatggatacggctcggt

SEQ ID NO: 452573 - DNA, 25 bp, Artificial
  probe
  misc_feature (1)..(25): SEQ ID NO: 6895; WAN024GIM; Start 55; Stop 79
caaggtgtaaaagtaatgaaaacga

SEQ ID NO: 452574 - DNA, 25 bp, Artificial
  probe
  misc_feature (1)..(25): SEQ ID NO: 6895; WAN024GIM; Start 156; Stop 180
gctcattaagccagaggagagagaa

SEQ ID NO: 452575 - DNA, 25 bp, Artificial
  probe
  misc_feature (1)..(25): SEQ ID NO: 6895; WAN024GIM; Start 131; Stop 155
acaagttaatggatacggctcggtg

SEQ ID NO: 452576 - DNA, 25 bp, Artificial
  probe
  misc_feature (1)..(25): SEQ ID NO: 6895; WAN024GIM; Start 56; Stop 80
aaggtgtaaaagtaatgaaaacgat

SEQ ID NO: 452577 - DNA, 25 bp, Artificial
  probe
  misc_feature (1)..(25): SEQ ID NO: 6895; WAN024GIM; Start 51; Stop 75
cgtgcaaggtgtaaaagtaatgaaa

SEQ ID NO: 452578 - DNA, 25 bp, Artificial
  probe
  misc_feature (1)..(25): SEQ ID NO: 6895; WAN024GIM; Start 53; Stop 77
tgcaaggtgtaaaagtaatgaaaac

SEQ ID NO: 452579 - DNA, 25 bp, Artificial
  probe
  misc_feature (1)..(25): SEQ ID NO: 6895; WAN024GIM; Start 52; Stop 76
gtgcaaggtgtaaaagtaatgaaaa

SEQ ID NO: 452580 - DNA, 25 bp, Artificial
  probe
  misc_feature (1)..(25): SEQ ID NO: 6895; WAN024GIM; Start 57; Stop 81
aggtgtaaaagtaatgaaaacgata

SEQ ID NO: 452581 - DNA, 25 bp, Artificial
  probe
  misc_feature (1)..(25): SEQ ID NO: 6895; WAN024GIM; Start 124; Stop 148
attgccgacaagttaatggatacgg

SEQ ID NO: 452582 - DNA, 25 bp, Artificial
  probe
  misc_feature (1)..(25): SEQ ID NO: 6895; WAN024GIM; Start 50; Stop 74
ccgtgcaaggtgtaaaagtaatgaa

SEQ ID NO: 452583 - DNA, 25 bp, Artificial
  probe
  misc_feature (1)..(25): SEQ ID NO: 6895; WAN024GIM; Start 58; Stop 82
ggtgtaaaagtaatgaaaacgataa

SEQ ID NO: 452584 - DNA, 25 bp, Artificial
  probe
  misc_feature (1)..(25): SEQ ID NO: 6895; WAN024GIM; Start 86; Stop 110
aagatgataatgccgttgtcggtct

SEQ ID NO: 452585 - DNA, 25 bp, Artificial
  probe
  misc_feature (1)..(25): SEQ ID NO: 6895; WAN024GIM; Start 83; Stop 107
agaaagatgataatgccgttgtcgg

SEQ ID NO: 452586 - DNA, 25 bp, Artificial
  probe
  misc_feature (1)..(25): SEQ ID NO: 6895; WAN024GIM; Start 69; Stop 93
aatgaaaacgataaagaaagatgat

SEQ ID NO: 452587 - DNA, 25 bp, Artificial
  probe
  misc_feature (1)..(25): SEQ ID NO: 6895; WAN024GIM; Start 48; Stop 72
gaccgtgcaaggtgtaaaagtaatg

SEQ ID NO: 452588 - DNA, 25 bp, Artificial
  probe
  misc_feature (1)..(25): SEQ ID NO: 6896; WAN024EVK; Start 111; Stop 135
tttactttcatttggtgggagaata

SEQ ID NO: 452589 - DNA, 25 bp, Artificial
  probe
  misc_feature (1)..(25): SEQ ID NO: 6896; WAN024EVK; Start 112; Stop 136
ttactttcatttggtgggagaatat

SEQ ID NO: 452590 - DNA, 25 bp, Artificial
  probe
  misc_feature (1)..(25): SEQ ID NO: 6896; WAN024EVK; Start 114; Stop 138
actttcatttggtgggagaatattt

SEQ ID NO: 452591 - DNA, 25 bp, Artificial
  probe
  misc_feature (1)..(25): SEQ ID NO: 6896; WAN024EVK; Start 115; Stop 139
ctttcatttggtgggagaatatttg

SEQ ID NO: 452592 - DNA, 25 bp, Artificial
  probe
  misc_feature (1)..(25): SEQ ID NO: 6896; WAN024EVK; Start 118; Stop 142
tcatttggtgggagaatatttgaaa

SEQ ID NO: 452593 - DNA, 25 bp, Artificial
  probe
  misc_feature (1)..(25): SEQ ID NO: 6896; WAN024EVK; Start 116; Stop 140
tttcatttggtgggagaatatttga

SEQ ID NO: 452594 - DNA, 25 bp, Artificial
  probe
  misc_feature (1)..(25): SEQ ID NO: 6896; WAN024EVK; Start 113; Stop 137
tactttcatttggtgggagaatatt

SEQ ID NO: 452595 - DNA, 25 bp, Artificial
  probe
  misc_feature (1)..(25): SEQ ID NO: 6896; WAN024EVK; Start 110; Stop 134
ttttactttcatttggtgggagaat

SEQ ID NO: 452596 - DNA, 25 bp, Artificial
  probe
  misc_feature (1)..(25): SEQ ID NO: 6896; WAN024EVK; Start 109; Stop 133
attttactttcatttggtgggagaa

SEQ ID NO: 452597 - DNA, 25 bp, Artificial
  probe
  misc_feature (1)..(25): SEQ ID NO: 6896; WAN024EVK; Start 108; Stop 132
tattttactttcatttggtgggaga

SEQ ID NO: 452598 - DNA, 25 bp, Artificial
  probe
  misc_feature (1)..(25): SEQ ID NO: 6896; WAN024EVK; Start 54; Stop 78
acccactacaaatattatagaacct

SEQ ID NO: 452599 - DNA, 25 bp, Artificial
  probe
  misc_feature (1)..(25): SEQ ID NO: 6896; WAN024EVK; Start 117; Stop 141
ttcatttggtgggagaatatttgaa

SEQ ID NO: 452600 - DNA, 25 bp, Artificial
  probe
  misc_feature (1)..(25): SEQ ID NO: 6896; WAN024EVK; Start 107; Stop 131
ttattttactttcatttggtgggag

SEQ ID NO: 452601 - DNA, 25 bp, Artificial
  probe
  misc_feature (1)..(25): SEQ ID NO: 6896; WAN024EVK; Start 25; Stop 49
ataggctccataatatctatagtgg

SEQ ID NO: 452602 - DNA, 25 bp, Artificial
  probe
  misc_feature (1)..(25): SEQ ID NO: 6896; WAN024EVK; Start 106; Stop 130
tttattttactttcatttggtggga

SEQ ID NO: 452603 - DNA, 25 bp, Artificial
  probe
  misc_feature (1)..(25): SEQ ID NO: 6896; WAN024EVK; Start 119; Stop 143
catttggtgggagaatatttgaaaa

SEQ ID NO: 452604 - DNA, 25 bp, Artificial
  probe
  misc_feature (1)..(25): SEQ ID NO: 6896; WAN024EVK; Start 55; Stop 79
cccactacaaatattatagaacctt

SEQ ID NO: 452605 - DNA, 25 bp, Artificial
  probe
  misc_feature (1)..(25): SEQ ID NO: 6896; WAN024EVK; Start 105; Stop 129
ttttattttactttcatttggtggg

SEQ ID NO: 452606 - DNA, 25 bp, Artificial
  probe
  misc_feature (1)..(25): SEQ ID NO: 6896; WAN024EVK; Start 27; Stop 51
aggctccataatatctatagtggat

SEQ ID NO: 452607 - DNA, 25 bp, Artificial
  probe
  misc_feature (1)..(25): SEQ ID NO: 6896; WAN024EVK; Start 53; Stop 77
tacccactacaaatattatagaacc

SEQ ID NO: 452608 - DNA, 25 bp, Artificial
  probe
  misc_feature (1)..(25): SEQ ID NO: 6896; WAN024EVK; Start 28; Stop 52
ggctccataatatctatagtggatt

SEQ ID NO: 452609 - DNA, 25 bp, Artificial
  probe
  misc_feature (1)..(25): SEQ ID NO: 6896; WAN024EVK; Start 26; Stop 50
taggctccataatatctatagtgga

SEQ ID NO: 452610 - DNA, 25 bp, Artificial
  probe
  misc_feature (1)..(25): SEQ ID NO: 6896; WAN024EVK; Start 24; Stop 48
aataggctccataatatctatagtg

SEQ ID NO: 452611 - DNA, 25 bp, Artificial
  probe
  misc_feature (1)..(25): SEQ ID NO: 6896; WAN024EVK; Start 47; Stop 71
tggatttacccactacaaatattat

SEQ ID NO: 452612 - DNA, 25 bp, Artificial
  probe
  misc_feature (1)..(25): SEQ ID NO: 6896; WAN024EVK; Start 75; Stop 99
acctttattttcagggttttatttc

SEQ ID NO: 452613 - DNA, 25 bp, Artificial
  probe
  misc_feature (1)..(25): SEQ ID NO: 6896; WAN024EVK; Start 76; Stop 100
cctttattttcagggttttatttct

SEQ ID NO: 452614 - DNA, 25 bp, Artificial
  probe
  misc_feature (1)..(25): SEQ ID NO: 6896; WAN024EVK; Start 67; Stop 91
attatagaacctttattttcagggt

SEQ ID NO: 452615 - DNA, 25 bp, Artificial
  probe
  misc_feature (1)..(25): SEQ ID NO: 6896; WAN024EVK; Start 72; Stop 96
agaacctttattttcagggttttat

SEQ ID NO: 452616 - DNA, 25 bp, Artificial
  probe
  misc_feature (1)..(25): SEQ ID NO: 6896; WAN024EVK; Start 70; Stop 94
atagaacctttattttcagggtttt

SEQ ID NO: 452617 - DNA, 25 bp, Artificial
  probe
  misc_feature (1)..(25): SEQ ID NO: 6896; WAN024EVK; Start 29; Stop 53
gctccataatatctatagtggattt

SEQ ID NO: 452618 - DNA, 25 bp, Artificial
  probe
  misc_feature (1)..(25): SEQ ID NO: 6896; WAN024EVK; Start 71; Stop 95
tagaacctttattttcagggtttta

SEQ ID NO: 452619 - DNA, 25 bp, Artificial
  probe
  misc_feature (1)..(25): SEQ ID NO: 6896; WAN024EVK; Start 73; Stop 97
gaacctttattttcagggttttatt

SEQ ID NO: 452620 - DNA, 25 bp, Artificial
  probe
  misc_feature (1)..(25): SEQ ID NO: 6896; WAN024EVK; Start 69; Stop 93
tatagaacctttattttcagggttt

SEQ ID NO: 452621 - DNA, 25 bp, Artificial
  probe
  misc_feature (1)..(25): SEQ ID NO: 6897; WAN024C36; Start 287; Stop 311
atgatttgctgtactccttgatgaa

SEQ ID NO: 452622 - DNA, 25 bp, Artificial
  probe
  misc_feature (1)..(25): SEQ ID NO: 6897; WAN024C36; Start 286; Stop 310
aatgatttgctgtactccttgatga

SEQ ID NO: 452623 - DNA, 25 bp, Artificial
  probe
  misc_feature (1)..(25): SEQ ID NO: 6897; WAN024C36; Start 285; Stop 309
caatgatttgctgtactccttgatg

SEQ ID NO: 452624 - DNA, 25 bp, Artificial
  probe
  misc_feature (1)..(25): SEQ ID NO: 6897; WAN024C36; Start 288; Stop 312
tgatttgctgtactccttgatgaag

SEQ ID NO: 452625 - DNA, 25 bp, Artificial
  probe
  misc_feature (1)..(25): SEQ ID NO: 6897; WAN024C36; Start 193; Stop 217
ctagtggtcctcatcctcggtattg

SEQ ID NO: 452626 - DNA, 25 bp, Artificial
  probe
  misc_feature (1)..(25): SEQ ID NO: 6897; WAN024C36; Start 184; Stop 208
cttatctcgctagtggtcctcatcc

SEQ ID NO: 452627 - DNA, 25 bp, Artificial
  probe
  misc_feature (1)..(25): SEQ ID NO: 6897; WAN024C36; Start 183; Stop 207
ccttatctcgctagtggtcctcatc

SEQ ID NO: 452628 - DNA, 25 bp, Artificial
  probe
  misc_feature (1)..(25): SEQ ID NO: 6897; WAN024C36; Start 175; Stop 199
gttcctttccttatctcgctagtgg

SEQ ID NO: 452629 - DNA, 25 bp, Artificial
  probe
  misc_feature (1)..(25): SEQ ID NO: 6897; WAN024C36; Start 57; Stop 81
ctttatgtctctgccgctggtattt

SEQ ID NO: 452630 - DNA, 25 bp, Artificial
  probe
  misc_feature (1)..(25): SEQ ID NO: 6897; WAN024C36; Start 343; Stop 367
aagatgtccgactcgcataatccat

SEQ ID NO: 452631 - DNA, 25 bp, Artificial
  probe
  misc_feature (1)..(25): SEQ ID NO: 6897; WAN024C36; Start 185; Stop 209
ttatctcgctagtggtcctcatcct

SEQ ID NO: 452632 - DNA, 25 bp, Artificial
  probe
  misc_feature (1)..(25): SEQ ID NO: 6897; WAN024C36; Start 182; Stop 206
tccttatctcgctagtggtcctcat

SEQ ID NO: 452633 - DNA, 25 bp, Artificial
  probe
  misc_feature (1)..(25): SEQ ID NO: 6897; WAN024C36; Start 176; Stop 200
ttcctttccttatctcgctagtggt

SEQ ID NO: 452634 - DNA, 25 bp, Artificial
  probe
  misc_feature (1)..(25): SEQ ID NO: 6897; WAN024C36; Start 174; Stop 198
cgttcctttccttatctcgctagtg

SEQ ID NO: 452635 - DNA, 25 bp, Artificial
  probe
  misc_feature (1)..(25): SEQ ID NO: 6897; WAN024C36; Start 181; Stop 205
ttccttatctcgctagtggtcctca

SEQ ID NO: 452636 - DNA, 25 bp, Artificial
  probe
  misc_feature (1)..(25): SEQ ID NO: 6897; WAN024C36; Start 58; Stop 82
tttatgtctctgccgctggtatttg

SEQ ID NO: 452637 - DNA, 25 bp, Artificial
  probe
  misc_feature (1)..(25): SEQ ID NO: 6897; WAN024C36; Start 180; Stop 204
tttccttatctcgctagtggtcctc

SEQ ID NO: 452638 - DNA, 25 bp, Artificial
  probe
  misc_feature (1)..(25): SEQ ID NO: 6897; WAN024C36; Start 179; Stop 203
ctttccttatctcgctagtggtcct

SEQ ID NO: 452639 - DNA, 25 bp, Artificial
  probe
  misc_feature (1)..(25): SEQ ID NO: 6897; WAN024C36; Start 177; Stop 201
tcctttccttatctcgctagtggtc

SEQ ID NO: 452640 - DNA, 25 bp, Artificial
  probe
  misc_feature (1)..(25): SEQ ID NO: 6897; WAN024C36; Start 186; Stop 210
tatctcgctagtggtcctcatcctc

SEQ ID NO: 452641 - DNA, 25 bp, Artificial
  probe
  misc_feature (1)..(25): SEQ ID NO: 6897; WAN024C36; Start 342; Stop 366
caagatgtccgactcgcataatcca

SEQ ID NO: 452642 - DNA, 25 bp, Artificial
  probe
  misc_feature (1)..(25): SEQ ID NO: 6897; WAN024C36; Start 59; Stop 83
ttatgtctctgccgctggtatttgt

SEQ ID NO: 452643 - DNA, 25 bp, Artificial
  probe
  misc_feature (1)..(25): SEQ ID NO: 6897; WAN024C36; Start 178; Stop 202
cctttccttatctcgctagtggtcc

SEQ ID NO: 452644 - DNA, 25 bp, Artificial
  probe
  misc_feature (1)..(25): SEQ ID NO: 6897; WAN024C36; Start 173; Stop 197
acgttcctttccttatctcgctagt

SEQ ID NO: 452645 - DNA, 25 bp, Artificial
  probe
  misc_feature (1)..(25): SEQ ID NO: 6897; WAN024C36; Start 76; Stop 100
gtatttgtgctcgggctctttgatg

SEQ ID NO: 452646 - DNA, 25 bp, Artificial
  probe
  misc_feature (1)..(25): SEQ ID NO: 6897; WAN024C36; Start 289; Stop 313
gatttgctgtactccttgatgaagg

SEQ ID NO: 452647 - DNA, 25 bp, Artificial
  probe
  misc_feature (1)..(25): SEQ ID NO: 6897; WAN024C36; Start 60; Stop 84
tatgtctctgccgctggtatttgtg

SEQ ID NO: 452648 - DNA, 25 bp, Artificial
  probe
  misc_feature (1)..(25): SEQ ID NO: 6897; WAN024C36; Start 344; Stop 368
agatgtccgactcgcataatccatc

SEQ ID NO: 452649 - DNA, 25 bp, Artificial
  probe
  misc_feature (1)..(25): SEQ ID NO: 6897; WAN024C36; Start 172; Stop 196
aacgttcctttccttatctcgctag

SEQ ID NO: 452650 - DNA, 25 bp, Artificial
  probe
  misc_feature (1)..(25): SEQ ID NO: 6897; WAN024C36; Start 290; Stop 314
atttgctgtactccttgatgaaggg

SEQ ID NO: 452651 - DNA, 25 bp, Artificial
  probe
  misc_feature (1)..(25): SEQ ID NO: 6897; WAN024C36; Start 171; Stop 195
caacgttcctttccttatctcgcta

SEQ ID NO: 452652 - DNA, 25 bp, Artificial
  probe
  misc_feature (1)..(25): SEQ ID NO: 6897; WAN024C36; Start 167; Stop 191
ggctcaacgttcctttccttatctc

SEQ ID NO: 452653 - DNA, 25 bp, Artificial
  probe
  misc_feature (1)..(25): SEQ ID NO: 6897; WAN024C36; Start 235; Stop 259
aagaagatgtgggcaagctttgaag

SEQ ID NO: 452654 - DNA, 25 bp, Artificial
  probe
  misc_feature (1)..(25): SEQ ID NO: 6898; WAN024B7D; Start 68; Stop 92
cttttgtcctgctcttgtttcaatt

SEQ ID NO: 452655 - DNA, 25 bp, Artificial
  probe
  misc_feature (1)..(25): SEQ ID NO: 6898; WAN024B7D; Start 67; Stop 91
tcttttgtcctgctcttgtttcaat

SEQ ID NO: 452656 - DNA, 25 bp, Artificial
  probe
  misc_feature (1)..(25): SEQ ID NO: 6898; WAN024B7D; Start 33; Stop 57
tattaccaagttgttgcaatacctt

SEQ ID NO: 452657 - DNA, 25 bp, Artificial
  probe
  misc_feature (1)..(25): SEQ ID NO: 6898; WAN024B7D; Start 49; Stop 73
caataccttttacgaggctcttttg

SEQ ID NO: 452658 - DNA, 25 bp, Artificial
  probe
  misc_feature (1)..(25): SEQ ID NO: 6898; WAN024B7D; Start 66; Stop 90
ctcttttgtcctgctcttgtttcaa

SEQ ID NO: 452659 - DNA, 25 bp, Artificial
  probe
  misc_feature (1)..(25): SEQ ID NO: 6898; WAN024B7D; Start 50; Stop 74
aataccttttacgaggctcttttgt

SEQ ID NO: 452660 - DNA, 25 bp, Artificial
  probe
  misc_feature (1)..(25): SEQ ID NO: 6898; WAN024B7D; Start 51; Stop 75
ataccttttacgaggctcttttgtc

SEQ ID NO: 452661 - DNA, 25 bp, Artificial
  probe
  misc_feature (1)..(25): SEQ ID NO: 6898; WAN024B7D; Start 48; Stop 72
gcaataccttttacgaggctctttt

SEQ ID NO: 452662 - DNA, 25 bp, Artificial
  probe
  misc_feature (1)..(25): SEQ ID NO: 6898; WAN024B7D; Start 29; Stop 53
aaggtattaccaagttgttgcaata

SEQ ID NO: 452663 - DNA, 25 bp, Artificial
  probe
  misc_feature (1)..(25): SEQ ID NO: 6898; WAN024B7D; Start 34; Stop 58
attaccaagttgttgcaataccttt

SEQ ID NO: 452664 - DNA, 25 bp, Artificial
  probe
  misc_feature (1)..(25): SEQ ID NO: 6898; WAN024B7D; Start 52; Stop 76
taccttttacgaggctcttttgtcc

SEQ ID NO: 452665 - DNA, 25 bp, Artificial
  probe
  misc_feature (1)..(25): SEQ ID NO: 6898; WAN024B7D; Start 65; Stop 89
gctcttttgtcctgctcttgtttca

SEQ ID NO: 452666 - DNA, 25 bp, Artificial
  probe
  misc_feature (1)..(25): SEQ ID NO: 6898; WAN024B7D; Start 69; Stop 93
ttttgtcctgctcttgtttcaattg

SEQ ID NO: 452667 - DNA, 25 bp, Artificial
  probe
  misc_feature (1)..(25): SEQ ID NO: 6898; WAN024B7D; Start 28; Stop 52
aaaggtattaccaagttgttgcaat

SEQ ID NO: 452668 - DNA, 25 bp, Artificial
  probe
  misc_feature (1)..(25): SEQ ID NO: 6898; WAN024B7D; Start 32; Stop 56
gtattaccaagttgttgcaatacct

SEQ ID NO: 452669 - DNA, 25 bp, Artificial
  probe
  misc_feature (1)..(25): SEQ ID NO: 6898; WAN024B7D; Start 30; Stop 54
aggtattaccaagttgttgcaatac

SEQ ID NO: 452670 - DNA, 25 bp, Artificial
  probe
  misc_feature (1)..(25): SEQ ID NO: 6898; WAN024B7D; Start 47; Stop 71
tgcaataccttttacgaggctcttt

SEQ ID NO: 452671 - DNA, 25 bp, Artificial
  probe
  misc_feature (1)..(25): SEQ ID NO: 6898; WAN024B7D; Start 64; Stop 88
ggctcttttgtcctgctcttgtttc

SEQ ID NO: 452672 - DNA, 25 bp, Artificial
  probe
  misc_feature (1)..(25): SEQ ID NO: 6898; WAN024B7D; Start 54; Stop 78
ccttttacgaggctcttttgtcctg

SEQ ID NO: 452673 - DNA, 25 bp, Artificial
  probe
  misc_feature (1)..(25): SEQ ID NO: 6898; WAN024B7D; Start 53; Stop 77
accttttacgaggctcttttgtcct

SEQ ID NO: 452674 - DNA, 25 bp, Artificial
  probe
  misc_feature (1)..(25): SEQ ID NO: 6898; WAN024B7D; Start 40; Stop 64
aagttgttgcaataccttttacgag

SEQ ID NO: 452675 - DNA, 25 bp, Artificial
  probe
  misc_feature (1)..(25): SEQ ID NO: 6898; WAN024B7D; Start 35; Stop 59
ttaccaagttgttgcaatacctttt

SEQ ID NO: 452676 - DNA, 25 bp, Artificial
  probe
  misc_feature (1)..(25): SEQ ID NO: 6898; WAN024B7D; Start 39; Stop 63
caagttgttgcaataccttttacga

SEQ ID NO: 452677 - DNA, 25 bp, Artificial
  probe
  misc_feature (1)..(25): SEQ ID NO: 6898; WAN024B7D; Start 37; Stop 61
accaagttgttgcaataccttttac

SEQ ID NO: 452678 - DNA, 25 bp, Artificial
  probe
  misc_feature (1)..(25): SEQ ID NO: 6898; WAN024B7D; Start 36; Stop 60
taccaagttgttgcaatacctttta

SEQ ID NO: 452679 - DNA, 25 bp, Artificial
  probe
  misc_feature (1)..(25): SEQ ID NO: 6898; WAN024B7D; Start 55; Stop 79
cttttacgaggctcttttgtcctgc

SEQ ID NO: 452680 - DNA, 25 bp, Artificial
  probe
  misc_feature (1)..(25): SEQ ID NO: 6898; WAN024B7D; Start 38; Stop 62
ccaagttgttgcaataccttttacg

SEQ ID NO: 452681 - DNA, 25 bp, Artificial
  probe
  misc_feature (1)..(25): SEQ ID NO: 6898; WAN024B7D; Start 56; Stop 80
ttttacgaggctcttttgtcctgct

SEQ ID NO: 452682 - DNA, 25 bp, Artificial
  probe
  misc_feature (1)..(25): SEQ ID NO: 6898; WAN024B7D; Start 27; Stop 51
aaaaggtattaccaagttgttgcaa

SEQ ID NO: 452683 - DNA, 25 bp, Artificial
  probe
  misc_feature (1)..(25): SEQ ID NO: 6898; WAN024B7D; Start 63; Stop 87
aggctcttttgtcctgctcttgttt

SEQ ID NO: 452684 - DNA, 25 bp, Artificial
  probe
  misc_feature (1)..(25): SEQ ID NO: 6898; WAN024B7D; Start 41; Stop 65
agttgttgcaataccttttacgagg

SEQ ID NO: 452685 - DNA, 25 bp, Artificial
  probe
  misc_feature (1)..(25): SEQ ID NO: 6898; WAN024B7D; Start 57; Stop 81
tttacgaggctcttttgtcctgctc

SEQ ID NO: 452686 - DNA, 25 bp, Artificial
  probe
  misc_feature (1)..(25): SEQ ID NO: 6898; WAN024B7D; Start 46; Stop 70
ttgcaataccttttacgaggctctt

SEQ ID NO: 452687 - DNA, 25 bp, Artificial
  probe
  misc_feature (1)..(25): SEQ ID NO: 6899; WAN024DKS; Start 160; Stop 184
atatcactttcgttcttaccagagc

SEQ ID NO: 452688 - DNA, 25 bp, Artificial
  probe
  misc_feature (1)..(25): SEQ ID NO: 6899; WAN024DKS; Start 37; Stop 61
ctagtagaagtagttggctcacttg

SEQ ID NO: 452689 - DNA, 25 bp, Artificial
  probe
  misc_feature (1)..(25): SEQ ID NO: 6899; WAN024DKS; Start 38; Stop 62
tagtagaagtagttggctcacttga

SEQ ID NO: 452690 - DNA, 25 bp, Artificial
  probe
  misc_feature (1)..(25): SEQ ID NO: 6899; WAN024DKS; Start 54; Stop 78
ctcacttgaacgatcttgtccagtt

SEQ ID NO: 452691 - DNA, 25 bp, Artificial
  probe
  misc_feature (1)..(25): SEQ ID NO: 6899; WAN024DKS; Start 47; Stop 71
tagttggctcacttgaacgatcttg

SEQ ID NO: 452692 - DNA, 25 bp, Artificial
  probe
  misc_feature (1)..(25): SEQ ID NO: 6899; WAN024DKS; Start 46; Stop 70
gtagttggctcacttgaacgatctt

SEQ ID NO: 452693 - DNA, 25 bp, Artificial
  probe
  misc_feature (1)..(25): SEQ ID NO: 6899; WAN024DKS; Start 40; Stop 64
gtagaagtagttggctcacttgaac

SEQ ID NO: 452694 - DNA, 25 bp, Artificial
  probe
  misc_feature (1)..(25): SEQ ID NO: 6899; WAN024DKS; Start 39; Stop 63
agtagaagtagttggctcacttgaa

SEQ ID NO: 452695 - DNA, 25 bp, Artificial
  probe
  misc_feature (1)..(25): SEQ ID NO: 6899; WAN024DKS; Start 161; Stop 185
tatcactttcgttcttaccagagcc

SEQ ID NO: 452696 - DNA, 25 bp, Artificial
  probe
  misc_feature (1)..(25): SEQ ID NO: 6899; WAN024DKS; Start 58; Stop 82
cttgaacgatcttgtccagtttgtg

SEQ ID NO: 452697 - DNA, 25 bp, Artificial
  probe
  misc_feature (1)..(25): SEQ ID NO: 6899; WAN024DKS; Start 45; Stop 69
agtagttggctcacttgaacgatct

SEQ ID NO: 452698 - DNA, 25 bp, Artificial
  probe
  misc_feature (1)..(25): SEQ ID NO: 6899; WAN024DKS; Start 56; Stop 80
cacttgaacgatcttgtccagtttg

SEQ ID NO: 452699 - DNA, 25 bp, Artificial
  probe
  misc_feature (1)..(25): SEQ ID NO: 6899; WAN024DKS; Start 41; Stop 65
tagaagtagttggctcacttgaacg

SEQ ID NO: 452700 - DNA, 25 bp, Artificial
  probe
  misc_feature (1)..(25): SEQ ID NO: 6899; WAN024DKS; Start 55; Stop 79
tcacttgaacgatcttgtccagttt

SEQ ID NO: 452701 - DNA, 25 bp, Artificial
  probe
  misc_feature (1)..(25): SEQ ID NO: 6899; WAN024DKS; Start 30; Stop 54
tactggactagtagaagtagttggc

SEQ ID NO: 452702 - DNA, 25 bp, Artificial
  probe
  misc_feature (1)..(25): SEQ ID NO: 6899; WAN024DKS; Start 35; Stop 59
gactagtagaagtagttggctcact

SEQ ID NO: 452703 - DNA, 25 bp, Artificial
  probe
  misc_feature (1)..(25): SEQ ID NO: 6899; WAN024DKS; Start 57; Stop 81
acttgaacgatcttgtccagtttgt

SEQ ID NO: 452704 - DNA, 25 bp, Artificial
  probe
  misc_feature (1)..(25): SEQ ID NO: 6899; WAN024DKS; Start 29; Stop 53
ttactggactagtagaagtagttgg

SEQ ID NO: 452705 - DNA, 25 bp, Artificial
  probe
  misc_feature (1)..(25): SEQ ID NO: 6899; WAN024DKS; Start 32; Stop 56
ctggactagtagaagtagttggctc

SEQ ID NO: 452706 - DNA, 25 bp, Artificial
  probe
  misc_feature (1)..(25): SEQ ID NO: 6899; WAN024DKS; Start 44; Stop 68
aagtagttggctcacttgaacgatc

SEQ ID NO: 452707 - DNA, 25 bp, Artificial
  probe
  misc_feature (1)..(25): SEQ ID NO: 6899; WAN024DKS; Start 43; Stop 67
gaagtagttggctcacttgaacgat

SEQ ID NO: 452708 - DNA, 25 bp, Artificial
  probe
  misc_feature (1)..(25): SEQ ID NO: 6899; WAN024DKS; Start 34; Stop 58
ggactagtagaagtagttggctcac

SEQ ID NO: 452709 - DNA, 25 bp, Artificial
  probe
  misc_feature (1)..(25): SEQ ID NO: 6899; WAN024DKS; Start 27; Stop 51
tgttactggactagtagaagtagtt

SEQ ID NO: 452710 - DNA, 25 bp, Artificial
  probe
  misc_feature (1)..(25): SEQ ID NO: 6899; WAN024DKS; Start 26; Stop 50
ttgttactggactagtagaagtagt

SEQ ID NO: 452711 - DNA, 25 bp, Artificial
  probe
  misc_feature (1)..(25): SEQ ID NO: 6899; WAN024DKS; Start 24; Stop 48
agttgttactggactagtagaagta

SEQ ID NO: 452712 - DNA, 25 bp, Artificial
  probe
  misc_feature (1)..(25): SEQ ID NO: 6899; WAN024DKS; Start 49; Stop 73
gttggctcacttgaacgatcttgtc

SEQ ID NO: 452713 - DNA, 25 bp, Artificial
  probe
  misc_feature (1)..(25): SEQ ID NO: 6899; WAN024DKS; Start 33; Stop 57
tggactagtagaagtagttggctca

SEQ ID NO: 452714 - DNA, 25 bp, Artificial
  probe
  misc_feature (1)..(25): SEQ ID NO: 6899; WAN024DKS; Start 31; Stop 55
actggactagtagaagtagttggct

SEQ ID NO: 452715 - DNA, 25 bp, Artificial
  probe
  misc_feature (1)..(25): SEQ ID NO: 6899; WAN024DKS; Start 28; Stop 52
gttactggactagtagaagtagttg

SEQ ID NO: 452716 - DNA, 25 bp, Artificial
  probe
  misc_feature (1)..(25): SEQ ID NO: 6899; WAN024DKS; Start 25; Stop 49
gttgttactggactagtagaagtag

SEQ ID NO: 452717 - DNA, 25 bp, Artificial
  probe
  misc_feature (1)..(25): SEQ ID NO: 6899; WAN024DKS; Start 36; Stop 60
actagtagaagtagttggctcactt

SEQ ID NO: 452718 - DNA, 25 bp, Artificial
  probe
  misc_feature (1)..(25): SEQ ID NO: 6899; WAN024DKS; Start 162; Stop 186
atcactttcgttcttaccagagcca

SEQ ID NO: 452719 - DNA, 25 bp, Artificial
  probe
  misc_feature (1)..(25): SEQ ID NO: 6899; WAN024DKS; Start 48; Stop 72
agttggctcacttgaacgatcttgt

SEQ ID NO: 452720 - DNA, 25 bp, Artificial
  probe
  misc_feature (1)..(25): SEQ ID NO: 6900; WAN024DKR; Start 37; Stop 61
ctagtagaagtagttggctctgttg

SEQ ID NO: 452721 - DNA, 25 bp, Artificial
  probe
  misc_feature (1)..(25): SEQ ID NO: 6900; WAN024DKR; Start 38; Stop 62
tagtagaagtagttggctctgttgc

SEQ ID NO: 452722 - DNA, 25 bp, Artificial
  probe
  misc_feature (1)..(25): SEQ ID NO: 6900; WAN024DKR; Start 36; Stop 60
gctagtagaagtagttggctctgtt

SEQ ID NO: 452723 - DNA, 25 bp, Artificial
  probe
  misc_feature (1)..(25): SEQ ID NO: 6900; WAN024DKR; Start 116; Stop 140
tatcactttcgttcttaccagagtc

SEQ ID NO: 452724 - DNA, 25 bp, Artificial
  probe
  misc_feature (1)..(25): SEQ ID NO: 6900; WAN024DKR; Start 115; Stop 139
atatcactttcgttcttaccagagt

SEQ ID NO: 452725 - DNA, 25 bp, Artificial
  probe
  misc_feature (1)..(25): SEQ ID NO: 6900; WAN024DKR; Start 117; Stop 141
atcactttcgttcttaccagagtca

SEQ ID NO: 452726 - DNA, 25 bp, Artificial
  probe
  misc_feature (1)..(25): SEQ ID NO: 6900; WAN024DKR; Start 35; Stop 59
ggctagtagaagtagttggctctgt

SEQ ID NO: 452727 - DNA, 25 bp, Artificial
  probe
  misc_feature (1)..(25): SEQ ID NO: 6900; WAN024DKR; Start 118; Stop 142
tcactttcgttcttaccagagtcag

SEQ ID NO: 452728 - DNA, 25 bp, Artificial
  probe
  misc_feature (1)..(25): SEQ ID NO: 6900; WAN024DKR; Start 28; Stop 52
gttactgggctagtagaagtagttg

SEQ ID NO: 452729 - DNA, 25 bp, Artificial
  probe
  misc_feature (1)..(25): SEQ ID NO: 6900; WAN024DKR; Start 25; Stop 49
gttgttactgggctagtagaagtag

SEQ ID NO: 452730 - DNA, 25 bp, Artificial
  probe
  misc_feature (1)..(25): SEQ ID NO: 6900; WAN024DKR; Start 27; Stop 51
tgttactgggctagtagaagtagtt

SEQ ID NO: 452731 - DNA, 25 bp, Artificial
  probe
  misc_feature (1)..(25): SEQ ID NO: 6900; WAN024DKR; Start 26; Stop 50
ttgttactgggctagtagaagtagt

SEQ ID NO: 452732 - DNA, 25 bp, Artificial
  probe
  misc_feature (1)..(25): SEQ ID NO: 6900; WAN024DKR; Start 24; Stop 48
agttgttactgggctagtagaagta

SEQ ID NO: 452733 - DNA, 25 bp, Artificial
  probe
  misc_feature (1)..(25): SEQ ID NO: 6900; WAN024DKR; Start 29; Stop 53
ttactgggctagtagaagtagttgg

SEQ ID NO: 452734 - DNA, 25 bp, Artificial
  probe
  misc_feature (1)..(25): SEQ ID NO: 6900; WAN024DKR; Start 39; Stop 63
agtagaagtagttggctctgttgca

SEQ ID NO: 452735 - DNA, 25 bp, Artificial
  probe
  misc_feature (1)..(25): SEQ ID NO: 6900; WAN024DKR; Start 40; Stop 64
gtagaagtagttggctctgttgcag

SEQ ID NO: 452736 - DNA, 25 bp, Artificial
  probe
  misc_feature (1)..(25): SEQ ID NO: 6900; WAN024DKR; Start 119; Stop 143
cactttcgttcttaccagagtcagc

SEQ ID NO: 452737 - DNA, 25 bp, Artificial
  probe
  misc_feature (1)..(25): SEQ ID NO: 6900; WAN024DKR; Start 30; Stop 54
tactgggctagtagaagtagttggc

SEQ ID NO: 452738 - DNA, 25 bp, Artificial
  probe
  misc_feature (1)..(25): SEQ ID NO: 6900; WAN024DKR; Start 81; Stop 105
ctctagggaagcgtttgcatttcta

SEQ ID NO: 452739 - DNA, 25 bp, Artificial
  probe
  misc_feature (1)..(25): SEQ ID NO: 6900; WAN024DKR; Start 88; Stop 112
gaagcgtttgcatttctaggtgaag

SEQ ID NO: 452740 - DNA, 25 bp, Artificial
  probe
  misc_feature (1)..(25): SEQ ID NO: 6900; WAN024DKR; Start 32; Stop 56
ctgggctagtagaagtagttggctc

SEQ ID NO: 452741 - DNA, 25 bp, Artificial
  probe
  misc_feature (1)..(25): SEQ ID NO: 6900; WAN024DKR; Start 34; Stop 58
gggctagtagaagtagttggctctg

SEQ ID NO: 452742 - DNA, 25 bp, Artificial
  probe
  misc_feature (1)..(25): SEQ ID NO: 6900; WAN024DKR; Start 89; Stop 113
aagcgtttgcatttctaggtgaaga

SEQ ID NO: 452743 - DNA, 25 bp, Artificial
  probe
  misc_feature (1)..(25): SEQ ID NO: 6900; WAN024DKR; Start 33; Stop 57
tgggctagtagaagtagttggctct

SEQ ID NO: 452744 - DNA, 25 bp, Artificial
  probe
  misc_feature (1)..(25): SEQ ID NO: 6900; WAN024DKR; Start 120; Stop 144
actttcgttcttaccagagtcagct

SEQ ID NO: 452745 - DNA, 25 bp, Artificial
  probe
  misc_feature (1)..(25): SEQ ID NO: 6900; WAN024DKR; Start 41; Stop 65
tagaagtagttggctctgttgcagg

SEQ ID NO: 452746 - DNA, 25 bp, Artificial
  probe
  misc_feature (1)..(25): SEQ ID NO: 6900; WAN024DKR; Start 82; Stop 106
tctagggaagcgtttgcatttctag

SEQ ID NO: 452747 - DNA, 25 bp, Artificial
  probe
  misc_feature (1)..(25): SEQ ID NO: 6900; WAN024DKR; Start 16; Stop 40
ttagtttcagttgttactgggctag

SEQ ID NO: 452748 - DNA, 25 bp, Artificial
  probe
  misc_feature (1)..(25): SEQ ID NO: 6900; WAN024DKR; Start 15; Stop 39
cttagtttcagttgttactgggcta

SEQ ID NO: 452749 - DNA, 25 bp, Artificial
  probe
  misc_feature (1)..(25): SEQ ID NO: 6900; WAN024DKR; Start 31; Stop 55
actgggctagtagaagtagttggct

SEQ ID NO: 452750 - DNA, 25 bp, Artificial
  probe
  misc_feature (1)..(25): SEQ ID NO: 6900; WAN024DKR; Start 21; Stop 45
ttcagttgttactgggctagtagaa

SEQ ID NO: 452751 - DNA, 25 bp, Artificial
  probe
  misc_feature (1)..(25): SEQ ID NO: 6900; WAN024DKR; Start 20; Stop 44
tttcagttgttactgggctagtaga

SEQ ID NO: 452752 - DNA, 25 bp, Artificial
  probe
  misc_feature (1)..(25): SEQ ID NO: 6900; WAN024DKR; Start 19; Stop 43
gtttcagttgttactgggctagtag

SEQ ID NO: 452753 - DNA, 25 bp, Artificial
  probe
  misc_feature (1)..(25): SEQ ID NO: 6901; WAN024BQA; Start 156; Stop 180
taagatagttagtggttcagcagtc

SEQ ID NO: 452754 - DNA, 25 bp, Artificial
  probe
  misc_feature (1)..(25): SEQ ID NO: 6901; WAN024BQA; Start 155; Stop 179
ttaagatagttagtggttcagcagt

SEQ ID NO: 452755 - DNA, 25 bp, Artificial
  probe
  misc_feature (1)..(25): SEQ ID NO: 6901; WAN024BQA; Start 157; Stop 181
aagatagttagtggttcagcagtca

SEQ ID NO: 452756 - DNA, 25 bp, Artificial
  probe
  misc_feature (1)..(25): SEQ ID NO: 6901; WAN024BQA; Start 153; Stop 177
cattaagatagttagtggttcagca

SEQ ID NO: 452757 - DNA, 25 bp, Artificial
  probe
  misc_feature (1)..(25): SEQ ID NO: 6901; WAN024BQA; Start 152; Stop 176
acattaagatagttagtggttcagc

SEQ ID NO: 452758 - DNA, 25 bp, Artificial
  probe
  misc_feature (1)..(25): SEQ ID NO: 6901; WAN024BQA; Start 154; Stop 178
attaagatagttagtggttcagcag

SEQ ID NO: 452759 - DNA, 25 bp, Artificial
  probe
  misc_feature (1)..(25): SEQ ID NO: 6901; WAN024BQA; Start 99; Stop 123
ttccgaacatacaatcacaacgaag

SEQ ID NO: 452760 - DNA, 25 bp, Artificial
  probe
  misc_feature (1)..(25): SEQ ID NO: 6901; WAN024BQA; Start 98; Stop 122
cttccgaacatacaatcacaacgaa

SEQ ID NO: 452761 - DNA, 25 bp, Artificial
  probe
  misc_feature (1)..(25): SEQ ID NO: 6901; WAN024BQA; Start 164; Stop 188
ttagtggttcagcagtcacaattaa

SEQ ID NO: 452762 - DNA, 25 bp, Artificial
  probe
  misc_feature (1)..(25): SEQ ID NO: 6901; WAN024BQA; Start 163; Stop 187
gttagtggttcagcagtcacaatta

SEQ ID NO: 452763 - DNA, 25 bp, Artificial
  probe
  misc_feature (1)..(25): SEQ ID NO: 6901; WAN024BQA; Start 95; Stop 119
ttgcttccgaacatacaatcacaac

SEQ ID NO: 452764 - DNA, 25 bp, Artificial
  probe
  misc_feature (1)..(25): SEQ ID NO: 6901; WAN024BQA; Start 113; Stop 137
tcacaacgaagggaataataggtag

SEQ ID NO: 452765 - DNA, 25 bp, Artificial
  probe
  misc_feature (1)..(25): SEQ ID NO: 6901; WAN024BQA; Start 111; Stop 135
aatcacaacgaagggaataataggt

SEQ ID NO: 452766 - DNA, 25 bp, Artificial
  probe
  misc_feature (1)..(25): SEQ ID NO: 6901; WAN024BQA; Start 110; Stop 134
caatcacaacgaagggaataatagg

SEQ ID NO: 452767 - DNA, 25 bp, Artificial
  probe
  misc_feature (1)..(25): SEQ ID NO: 6901; WAN024BQA; Start 105; Stop 129
acatacaatcacaacgaagggaata

SEQ ID NO: 452768 - DNA, 25 bp, Artificial
  probe
  misc_feature (1)..(25): SEQ ID NO: 6901; WAN024BQA; Start 55; Stop 79
ttaattgtctgcattgttaccgttg

SEQ ID NO: 452769 - DNA, 25 bp, Artificial
  probe
  misc_feature (1)..(25): SEQ ID NO: 6901; WAN024BQA; Start 119; Stop 143
cgaagggaataataggtagccattt

SEQ ID NO: 452770 - DNA, 25 bp, Artificial
  probe
  misc_feature (1)..(25): SEQ ID NO: 6901; WAN024BQA; Start 106; Stop 130
catacaatcacaacgaagggaataa

SEQ ID NO: 452771 - DNA, 25 bp, Artificial
  probe
  misc_feature (1)..(25): SEQ ID NO: 6901; WAN024BQA; Start 112; Stop 136
atcacaacgaagggaataataggta

SEQ ID NO: 452772 - DNA, 25 bp, Artificial
  probe
  misc_feature (1)..(25): SEQ ID NO: 6901; WAN024BQA; Start 109; Stop 133
acaatcacaacgaagggaataatag

SEQ ID NO: 452773 - DNA, 25 bp, Artificial
  probe
  misc_feature (1)..(25): SEQ ID NO: 6901; WAN024BQA; Start 161; Stop 185
tagttagtggttcagcagtcacaat

SEQ ID NO: 452774 - DNA, 25 bp, Artificial
  probe
  misc_feature (1)..(25): SEQ ID NO: 6901; WAN024BQA; Start 160; Stop 184
atagttagtggttcagcagtcacaa

SEQ ID NO: 452775 - DNA, 25 bp, Artificial
  probe
  misc_feature (1)..(25): SEQ ID NO: 6901; WAN024BQA; Start 104; Stop 128
aacatacaatcacaacgaagggaat

SEQ ID NO: 452776 - DNA, 25 bp, Artificial
  probe
  misc_feature (1)..(25): SEQ ID NO: 6901; WAN024BQA; Start 158; Stop 182
agatagttagtggttcagcagtcac

SEQ ID NO: 452777 - DNA, 25 bp, Artificial
  probe
  misc_feature (1)..(25): SEQ ID NO: 6901; WAN024BQA; Start 118; Stop 142
acgaagggaataataggtagccatt

SEQ ID NO: 452778 - DNA, 25 bp, Artificial
  probe
  misc_feature (1)..(25): SEQ ID NO: 6901; WAN024BQA; Start 117; Stop 141
aacgaagggaataataggtagccat

SEQ ID NO: 452779 - DNA, 25 bp, Artificial
  probe
  misc_feature (1)..(25): SEQ ID NO: 6901; WAN024BQA; Start 114; Stop 138
cacaacgaagggaataataggtagc

SEQ ID NO: 452780 - DNA, 25 bp, Artificial
  probe
  misc_feature (1)..(25): SEQ ID NO: 6901; WAN024BQA; Start 107; Stop 131
atacaatcacaacgaagggaataat

SEQ ID NO: 452781 - DNA, 25 bp, Artificial
  probe
  misc_feature (1)..(25): SEQ ID NO: 6901; WAN024BQA; Start 103; Stop 127
gaacatacaatcacaacgaagggaa

SEQ ID NO: 452782 - DNA, 25 bp, Artificial
  probe
  misc_feature (1)..(25): SEQ ID NO: 6901; WAN024BQA; Start 159; Stop 183
gatagttagtggttcagcagtcaca

SEQ ID NO: 452783 - DNA, 25 bp, Artificial
  probe
  misc_feature (1)..(25): SEQ ID NO: 6901; WAN024BQA; Start 100; Stop 124
tccgaacatacaatcacaacgaagg

SEQ ID NO: 452784 - DNA, 25 bp, Artificial
  probe
  misc_feature (1)..(25): SEQ ID NO: 6901; WAN024BQA; Start 174; Stop 198
agcagtcacaattaaaccaaccatt

SEQ ID NO: 452785 - DNA, 25 bp, Artificial
  probe
  misc_feature (1)..(25): SEQ ID NO: 6901; WAN024BQA; Start 170; Stop 194
gttcagcagtcacaattaaaccaac

SEQ ID NO: 452786 - DNA, 25 bp, Artificial
  probe
  misc_feature (1)..(25): SEQ ID NO: 6902; WAN024FTU; Start 804; Stop 828
ttcagagatgtattcggatgtcaat

SEQ ID NO: 452787 - DNA, 25 bp, Artificial
  probe
  misc_feature (1)..(25): SEQ ID NO: 6902; WAN024FTU; Start 801; Stop 825
tagttcagagatgtattcggatgtc

SEQ ID NO: 452788 - DNA, 25 bp, Artificial
  probe
  misc_feature (1)..(25): SEQ ID NO: 6902; WAN024FTU; Start 798; Stop 822
gcttagttcagagatgtattcggat

SEQ ID NO: 452789 - DNA, 25 bp, Artificial
  probe
  misc_feature (1)..(25): SEQ ID NO: 6902; WAN024FTU; Start 796; Stop 820
atgcttagttcagagatgtattcgg

SEQ ID NO: 452790 - DNA, 25 bp, Artificial
  probe
  misc_feature (1)..(25): SEQ ID NO: 6902; WAN024FTU; Start 792; Stop 816
tgctatgcttagttcagagatgtat

SEQ ID NO: 452791 - DNA, 25 bp, Artificial
  probe
  misc_feature (1)..(25): SEQ ID NO: 6902; WAN024FTU; Start 791; Stop 815
atgctatgcttagttcagagatgta

SEQ ID NO: 452792 - DNA, 25 bp, Artificial
  probe
  misc_feature (1)..(25): SEQ ID NO: 6902; WAN024FTU; Start 803; Stop 827
gttcagagatgtattcggatgtcaa

SEQ ID NO: 452793 - DNA, 25 bp, Artificial
  probe
  misc_feature (1)..(25): SEQ ID NO: 6902; WAN024FTU; Start 800; Stop 824
ttagttcagagatgtattcggatgt

SEQ ID NO: 452794 - DNA, 25 bp, Artificial
  probe
  misc_feature (1)..(25): SEQ ID NO: 6902; WAN024FTU; Start 112; Stop 136
gatgatggctctactgatgattctg

SEQ ID NO: 452795 - DNA, 25 bp, Artificial
  probe
  misc_feature (1)..(25): SEQ ID NO: 6902; WAN024FTU; Start 799; Stop 823
cttagttcagagatgtattcggatg

SEQ ID NO: 452796 - DNA, 25 bp, Artificial
  probe
  misc_feature (1)..(25): SEQ ID NO: 6902; WAN024FTU; Start 802; Stop 826
agttcagagatgtattcggatgtca

SEQ ID NO: 452797 - DNA, 25 bp, Artificial
  probe
  misc_feature (1)..(25): SEQ ID NO: 6902; WAN024FTU; Start 797; Stop 821
tgcttagttcagagatgtattcgga

SEQ ID NO: 452798 - DNA, 25 bp, Artificial
  probe
  misc_feature (1)..(25): SEQ ID NO: 6902; WAN024FTU; Start 111; Stop 135
agatgatggctctactgatgattct

SEQ ID NO: 452799 - DNA, 25 bp, Artificial
  probe
  misc_feature (1)..(25): SEQ ID NO: 6902; WAN024FTU; Start 805; Stop 829
tcagagatgtattcggatgtcaata

SEQ ID NO: 452800 - DNA, 25 bp, Artificial
  probe
  misc_feature (1)..(25): SEQ ID NO: 6902; WAN024FTU; Start 793; Stop 817
gctatgcttagttcagagatgtatt

SEQ ID NO: 452801 - DNA, 25 bp, Artificial
  probe
  misc_feature (1)..(25): SEQ ID NO: 6902; WAN024FTU; Start 135; Stop 159
tggaagaatatgtgataagtatgcc

SEQ ID NO: 452802 - DNA, 25 bp, Artificial
  probe
  misc_feature (1)..(25): SEQ ID NO: 6902; WAN024FTU; Start 795; Stop 819
tatgcttagttcagagatgtattcg

SEQ ID NO: 452803 - DNA, 25 bp, Artificial
  probe
  misc_feature (1)..(25): SEQ ID NO: 6902; WAN024FTU; Start 806; Stop 830
cagagatgtattcggatgtcaataa

SEQ ID NO: 452804 - DNA, 25 bp, Artificial
  probe
  misc_feature (1)..(25): SEQ ID NO: 6902; WAN024FTU; Start 113; Stop 137
atgatggctctactgatgattctgg

SEQ ID NO: 452805 - DNA, 25 bp, Artificial
  probe
  misc_feature (1)..(25): SEQ ID NO: 6902; WAN024FTU; Start 116; Stop 140
atggctctactgatgattctggaag

SEQ ID NO: 452806 - DNA, 25 bp, Artificial
  probe
  misc_feature (1)..(25): SEQ ID NO: 6902; WAN024FTU; Start 115; Stop 139
gatggctctactgatgattctggaa

SEQ ID NO: 452807 - DNA, 25 bp, Artificial
  probe
  misc_feature (1)..(25): SEQ ID NO: 6902; WAN024FTU; Start 787; Stop 811
gtacatgctatgcttagttcagaga

SEQ ID NO: 452808 - DNA, 25 bp, Artificial
  probe
  misc_feature (1)..(25): SEQ ID NO: 6902; WAN024FTU; Start 786; Stop 810
agtacatgctatgcttagttcagag

SEQ ID NO: 452809 - DNA, 25 bp, Artificial
  probe
  misc_feature (1)..(25): SEQ ID NO: 6902; WAN024FTU; Start 160; Stop 184
caagaagatgaccgtattagagtct

SEQ ID NO: 452810 - DNA, 25 bp, Artificial
  probe
  misc_feature (1)..(25): SEQ ID NO: 6902; WAN024FTU; Start 788; Stop 812
tacatgctatgcttagttcagagat

SEQ ID NO: 452811 - DNA, 25 bp, Artificial
  probe
  misc_feature (1)..(25): SEQ ID NO: 6902; WAN024FTU; Start 159; Stop 183
ccaagaagatgaccgtattagagtc

SEQ ID NO: 452812 - DNA, 25 bp, Artificial
  probe
  misc_feature (1)..(25): SEQ ID NO: 6902; WAN024FTU; Start 790; Stop 814
catgctatgcttagttcagagatgt

SEQ ID NO: 452813 - DNA, 25 bp, Artificial
  probe
  misc_feature (1)..(25): SEQ ID NO: 6902; WAN024FTU; Start 789; Stop 813
acatgctatgcttagttcagagatg

SEQ ID NO: 452814 - DNA, 25 bp, Artificial
  probe
  misc_feature (1)..(25): SEQ ID NO: 6902; WAN024FTU; Start 785; Stop 809
tagtacatgctatgcttagttcaga

SEQ ID NO: 452815 - DNA, 25 bp, Artificial
  probe
  misc_feature (1)..(25): SEQ ID NO: 6902; WAN024FTU; Start 784; Stop 808
gtagtacatgctatgcttagttcag

SEQ ID NO: 452816 - DNA, 25 bp, Artificial
  probe
  misc_feature (1)..(25): SEQ ID NO: 6902; WAN024FTU; Start 628; Stop 652
agacctggaagtattgtcaattctt

SEQ ID NO: 452817 - DNA, 25 bp, Artificial
  probe
  misc_feature (1)..(25): SEQ ID NO: 6902; WAN024FTU; Start 627; Stop 651
aagacctggaagtattgtcaattct

SEQ ID NO: 452818 - DNA, 25 bp, Artificial
  probe
  misc_feature (1)..(25): SEQ ID NO: 6902; WAN024FTU; Start 626; Stop 650
gaagacctggaagtattgtcaattc

SEQ ID NO: 452819 - DNA, 25 bp, Artificial
  probe
  misc_feature (1)..(25): SEQ ID NO: 6903; WAN024BVS; Start 282; Stop 306
ggaactggatgagtctatcagagaa

SEQ ID NO: 452820 - DNA, 25 bp, Artificial
  probe
  misc_feature (1)..(25): SEQ ID NO: 6903; WAN024BVS; Start 280; Stop 304
gaggaactggatgagtctatcagag

SEQ ID NO: 452821 - DNA, 25 bp, Artificial
  probe
  misc_feature (1)..(25): SEQ ID NO: 6903; WAN024BVS; Start 281; Stop 305
aggaactggatgagtctatcagaga

SEQ ID NO: 452822 - DNA, 25 bp, Artificial
  probe
  misc_feature (1)..(25): SEQ ID NO: 6903; WAN024BVS; Start 9; Stop 33
ggatggaatgaattacatagtgaag

SEQ ID NO: 452823 - DNA, 25 bp, Artificial
  probe
  misc_feature (1)..(25): SEQ ID NO: 6903; WAN024BVS; Start 276; Stop 300
agaggaggaactggatgagtctatc

SEQ ID NO: 452824 - DNA, 25 bp, Artificial
  probe
  misc_feature (1)..(25): SEQ ID NO: 6903; WAN024BVS; Start 275; Stop 299
gagaggaggaactggatgagtctat

SEQ ID NO: 452825 - DNA, 25 bp, Artificial
  probe
  misc_feature (1)..(25): SEQ ID NO: 6903; WAN024BVS; Start 277; Stop 301
gaggaggaactggatgagtctatca

SEQ ID NO: 452826 - DNA, 25 bp, Artificial
  probe
  misc_feature (1)..(25): SEQ ID NO: 6903; WAN024BVS; Start 5; Stop 29
ggagggatggaatgaattacatagt

SEQ ID NO: 452827 - DNA, 25 bp, Artificial
  probe
  misc_feature (1)..(25): SEQ ID NO: 6903; WAN024BVS; Start 4; Stop 28
gggagggatggaatgaattacatag

SEQ ID NO: 452828 - DNA, 25 bp, Artificial
  probe
  misc_feature (1)..(25): SEQ ID NO: 6903; WAN024BVS; Start 7; Stop 31
agggatggaatgaattacatagtga

SEQ ID NO: 452829 - DNA, 25 bp, Artificial
  probe
  misc_feature (1)..(25): SEQ ID NO: 6903; WAN024BVS; Start 148; Stop 172
aaacaagcgttggatttagaaactg

SEQ ID NO: 452830 - DNA, 25 bp, Artificial
  probe
  misc_feature (1)..(25): SEQ ID NO: 6903; WAN024BVS; Start 6; Stop 30
gagggatggaatgaattacatagtg

SEQ ID NO: 452831 - DNA, 25 bp, Artificial
  probe
  misc_feature (1)..(25): SEQ ID NO: 6903; WAN024BVS; Start 278; Stop 302
aggaggaactggatgagtctatcag

SEQ ID NO: 452832 - DNA, 25 bp, Artificial
  probe
  misc_feature (1)..(25): SEQ ID NO: 6903; WAN024BVS; Start 279; Stop 303
ggaggaactggatgagtctatcaga

SEQ ID NO: 452833 - DNA, 25 bp, Artificial
  probe
  misc_feature (1)..(25): SEQ ID NO: 6903; WAN024BVS; Start 8; Stop 32
gggatggaatgaattacatagtgaa

SEQ ID NO: 452834 - DNA, 25 bp, Artificial
  probe
  misc_feature (1)..(25): SEQ ID NO: 6903; WAN024BVS; Start 152; Stop 176
aagcgttggatttagaaactgagac

SEQ ID NO: 452835 - DNA, 25 bp, Artificial
  probe
  misc_feature (1)..(25): SEQ ID NO: 6903; WAN024BVS; Start 149; Stop 173
aacaagcgttggatttagaaactga

SEQ ID NO: 452836 - DNA, 25 bp, Artificial
  probe
  misc_feature (1)..(25): SEQ ID NO: 6903; WAN024BVS; Start 151; Stop 175
caagcgttggatttagaaactgaga

SEQ ID NO: 452837 - DNA, 25 bp, Artificial
  probe
  misc_feature (1)..(25): SEQ ID NO: 6903; WAN024BVS; Start 27; Stop 51
agtgaagatataccttgatagtgaa

SEQ ID NO: 452838 - DNA, 25 bp, Artificial
  probe
  misc_feature (1)..(25): SEQ ID NO: 6903; WAN024BVS; Start 125; Stop 149
ctgtaactatgggcttattgacaaa

SEQ ID NO: 452839 - DNA, 25 bp, Artificial
  probe
  misc_feature (1)..(25): SEQ ID NO: 6903; WAN024BVS; Start 10; Stop 34
gatggaatgaattacatagtgaaga

SEQ ID NO: 452840 - DNA, 25 bp, Artificial
  probe
  misc_feature (1)..(25): SEQ ID NO: 6903; WAN024BVS; Start 124; Stop 148
gctgtaactatgggcttattgacaa

SEQ ID NO: 452841 - DNA, 25 bp, Artificial
  probe
  misc_feature (1)..(25): SEQ ID NO: 6903; WAN024BVS; Start 150; Stop 174
acaagcgttggatttagaaactgag

SEQ ID NO: 452842 - DNA, 25 bp, Artificial
  probe
  misc_feature (1)..(25): SEQ ID NO: 6903; WAN024BVS; Start 153; Stop 177
agcgttggatttagaaactgagaca

SEQ ID NO: 452843 - DNA, 25 bp, Artificial
  probe
  misc_feature (1)..(25): SEQ ID NO: 6903; WAN024BVS; Start 155; Stop 179
cgttggatttagaaactgagacagc

SEQ ID NO: 452844 - DNA, 25 bp, Artificial
  probe
  misc_feature (1)..(25): SEQ ID NO: 6903; WAN024BVS; Start 154; Stop 178
gcgttggatttagaaactgagacag

SEQ ID NO: 452845 - DNA, 25 bp, Artificial
  probe
  misc_feature (1)..(25): SEQ ID NO: 6903; WAN024BVS; Start 26; Stop 50
tagtgaagatataccttgatagtga

SEQ ID NO: 452846 - DNA, 25 bp, Artificial
  probe
  misc_feature (1)..(25): SEQ ID NO: 6903; WAN024BVS; Start 192; Stop 216
ccttgatacaatcatagagactcaa

SEQ ID NO: 452847 - DNA, 25 bp, Artificial
  probe
  misc_feature (1)..(25): SEQ ID NO: 6903; WAN024BVS; Start 165; Stop 189
agaaactgagacagctatcttgaaa

SEQ ID NO: 452848 - DNA, 25 bp, Artificial
  probe
  misc_feature (1)..(25): SEQ ID NO: 6903; WAN024BVS; Start 157; Stop 181
ttggatttagaaactgagacagcta

SEQ ID NO: 452849 - DNA, 25 bp, Artificial
  probe
  misc_feature (1)..(25): SEQ ID NO: 6903; WAN024BVS; Start 158; Stop 182
tggatttagaaactgagacagctat

SEQ ID NO: 452850 - DNA, 25 bp, Artificial
  probe
  misc_feature (1)..(25): SEQ ID NO: 6903; WAN024BVS; Start 11; Stop 35
atggaatgaattacatagtgaagat

SEQ ID NO: 452851 - DNA, 25 bp, Artificial
  probe
  misc_feature (1)..(25): SEQ ID NO: 6903; WAN024BVS; Start 164; Stop 188
tagaaactgagacagctatcttgaa

SEQ ID NO: 452852 - DNA, 25 bp, Artificial
  probe
  misc_feature (1)..(25): SEQ ID NO: 6904; WAN024BI3; Start 5; Stop 29
gggctatgggaactatggaaataaa

SEQ ID NO: 452853 - DNA, 25 bp, Artificial
  probe
  misc_feature (1)..(25): SEQ ID NO: 6904; WAN024BI3; Start 6; Stop 30
ggctatgggaactatggaaataaat

SEQ ID NO: 452854 - DNA, 25 bp, Artificial
  probe
  misc_feature (1)..(25): SEQ ID NO: 6904; WAN024BI3; Start 51; Stop 75
atttgagatgattattatgggaggg

SEQ ID NO: 452855 - DNA, 25 bp, Artificial
  probe
  misc_feature (1)..(25): SEQ ID NO: 6904; WAN024BI3; Start 52; Stop 76
tttgagatgattattatgggagggg

SEQ ID NO: 452856 - DNA, 25 bp, Artificial
  probe
  misc_feature (1)..(25): SEQ ID NO: 6904; WAN024BI3; Start 7; Stop 31
gctatgggaactatggaaataaata

SEQ ID NO: 452857 - DNA, 25 bp, Artificial
  probe
  misc_feature (1)..(25): SEQ ID NO: 6904; WAN024BI3; Start 4; Stop 28
ggggctatgggaactatggaaataa

SEQ ID NO: 452858 - DNA, 25 bp, Artificial
  probe
  misc_feature (1)..(25): SEQ ID NO: 6904; WAN024BI3; Start 50; Stop 74
tatttgagatgattattatgggagg

SEQ ID NO: 452859 - DNA, 25 bp, Artificial
  probe
  misc_feature (1)..(25): SEQ ID NO: 6904; WAN024BI3; Start 36; Stop 60
tgtagtaccaagattatttgagatg

SEQ ID NO: 452860 - DNA, 25 bp, Artificial
  probe
  misc_feature (1)..(25): SEQ ID NO: 6904; WAN024BI3; Start 21; Stop 45
ggaaataaatagtcttgtagtacca

SEQ ID NO: 452861 - DNA, 25 bp, Artificial
  probe
  misc_feature (1)..(25): SEQ ID NO: 6904; WAN024BI3; Start 20; Stop 44
tggaaataaatagtcttgtagtacc

SEQ ID NO: 452862 - DNA, 25 bp, Artificial
  probe
  misc_feature (1)..(25): SEQ ID NO: 6904; WAN024BI3; Start 37; Stop 61
gtagtaccaagattatttgagatga

SEQ ID NO: 452863 - DNA, 25 bp, Artificial
  probe
  misc_feature (1)..(25): SEQ ID NO: 6904; WAN024BI3; Start 35; Stop 59
ttgtagtaccaagattatttgagat

SEQ ID NO: 452864 - DNA, 25 bp, Artificial
  probe
  misc_feature (1)..(25): SEQ ID NO: 6904; WAN024BI3; Start 38; Stop 62
tagtaccaagattatttgagatgat

SEQ ID NO: 452865 - DNA, 25 bp, Artificial
  probe
  misc_feature (1)..(25): SEQ ID NO: 6904; WAN024BI3; Start 34; Stop 58
cttgtagtaccaagattatttgaga

SEQ ID NO: 452866 - DNA, 25 bp, Artificial
  probe
  misc_feature (1)..(25): SEQ ID NO: 6904; WAN024BI3; Start 13; Stop 37
ggaactatggaaataaatagtcttg

SEQ ID NO: 452867 - DNA, 25 bp, Artificial
  probe
  misc_feature (1)..(25): SEQ ID NO: 6905; WAN024BTX; Start 30; Stop 54
cgagattgactattatccgttaagc

SEQ ID NO: 452868 - DNA, 25 bp, Artificial
  probe
  misc_feature (1)..(25): SEQ ID NO: 6905; WAN024BTX; Start 73; Stop 97
ttagcagaccaaccaattcatcaag

SEQ ID NO: 452869 - DNA, 25 bp, Artificial
  probe
  misc_feature (1)..(25): SEQ ID NO: 6905; WAN024BTX; Start 74; Stop 98
tagcagaccaaccaattcatcaagt

SEQ ID NO: 452870 - DNA, 25 bp, Artificial
  probe
  misc_feature (1)..(25): SEQ ID NO: 6905; WAN024BTX; Start 31; Stop 55
gagattgactattatccgttaagct

SEQ ID NO: 452871 - DNA, 25 bp, Artificial
  probe
  misc_feature (1)..(25): SEQ ID NO: 6905; WAN024BTX; Start 72; Stop 96
tttagcagaccaaccaattcatcaa

SEQ ID NO: 452872 - DNA, 25 bp, Artificial
  probe
  misc_feature (1)..(25): SEQ ID NO: 6905; WAN024BTX; Start 26; Stop 50
aattcgagattgactattatccgtt

SEQ ID NO: 452873 - DNA, 25 bp, Artificial
  probe
  misc_feature (1)..(25): SEQ ID NO: 6905; WAN024BTX; Start 29; Stop 53
tcgagattgactattatccgttaag

SEQ ID NO: 452874 - DNA, 25 bp, Artificial
  probe
  misc_feature (1)..(25): SEQ ID NO: 6905; WAN024BTX; Start 28; Stop 52
ttcgagattgactattatccgttaa

SEQ ID NO: 452875 - DNA, 25 bp, Artificial
  probe
  misc_feature (1)..(25): SEQ ID NO: 6905; WAN024BTX; Start 27; Stop 51
attcgagattgactattatccgtta

SEQ ID NO: 452876 - DNA, 25 bp, Artificial
  probe
  misc_feature (1)..(25): SEQ ID NO: 6905; WAN024BTX; Start 33; Stop 57
gattgactattatccgttaagctac

SEQ ID NO: 452877 - DNA, 25 bp, Artificial
  probe
  misc_feature (1)..(25): SEQ ID NO: 6905; WAN024BTX; Start 32; Stop 56
agattgactattatccgttaagcta

SEQ ID NO: 452878 - DNA, 25 bp, Artificial
  probe
  misc_feature (1)..(25): SEQ ID NO: 6905; WAN024BTX; Start 75; Stop 99
agcagaccaaccaattcatcaagtg

SEQ ID NO: 452879 - DNA, 25 bp, Artificial
  probe
  misc_feature (1)..(25): SEQ ID NO: 6905; WAN024BTX; Start 25; Stop 49
caattcgagattgactattatccgt

SEQ ID NO: 452880 - DNA, 25 bp, Artificial
  probe
  misc_feature (1)..(25): SEQ ID NO: 6905; WAN024BTX; Start 24; Stop 48
acaattcgagattgactattatccg

SEQ ID NO: 452881 - DNA, 25 bp, Artificial
  probe
  misc_feature (1)..(25): SEQ ID NO: 6905; WAN024BTX; Start 36; Stop 60
tgactattatccgttaagctacgag

SEQ ID NO: 452882 - DNA, 25 bp, Artificial
  probe
  misc_feature (1)..(25): SEQ ID NO: 6905; WAN024BTX; Start 41; Stop 65
attatccgttaagctacgagaagaa

SEQ ID NO: 452883 - DNA, 25 bp, Artificial
  probe
  misc_feature (1)..(25): SEQ ID NO: 6905; WAN024BTX; Start 37; Stop 61
gactattatccgttaagctacgaga

SEQ ID NO: 452884 - DNA, 25 bp, Artificial
  probe
  misc_feature (1)..(25): SEQ ID NO: 6905; WAN024BTX; Start 35; Stop 59
ttgactattatccgttaagctacga

SEQ ID NO: 452885 - DNA, 25 bp, Artificial
  probe
  misc_feature (1)..(25): SEQ ID NO: 6905; WAN024BTX; Start 38; Stop 62
actattatccgttaagctacgagaa

SEQ ID NO: 452886 - DNA, 25 bp, Artificial
  probe
  misc_feature (1)..(25): SEQ ID NO: 6905; WAN024BTX; Start 40; Stop 64
tattatccgttaagctacgagaaga

SEQ ID NO: 452887 - DNA, 25 bp, Artificial
  probe
  misc_feature (1)..(25): SEQ ID NO: 6905; WAN024BTX; Start 9; Stop 33
actagaactaattgaacaattcgag

SEQ ID NO: 452888 - DNA, 25 bp, Artificial
  probe
  misc_feature (1)..(25): SEQ ID NO: 6905; WAN024BTX; Start 39; Stop 63
ctattatccgttaagctacgagaag

SEQ ID NO: 452889 - DNA, 25 bp, Artificial
  probe
  misc_feature (1)..(25): SEQ ID NO: 6905; WAN024BTX; Start 15; Stop 39
actaattgaacaattcgagattgac

SEQ ID NO: 452890 - DNA, 25 bp, Artificial
  probe
  misc_feature (1)..(25): SEQ ID NO: 6905; WAN024BTX; Start 34; Stop 58
attgactattatccgttaagctacg

SEQ ID NO: 452891 - DNA, 25 bp, Artificial
  probe
  misc_feature (1)..(25): SEQ ID NO: 6905; WAN024BTX; Start 12; Stop 36
agaactaattgaacaattcgagatt

SEQ ID NO: 452892 - DNA, 25 bp, Artificial
  probe
  misc_feature (1)..(25): SEQ ID NO: 6905; WAN024BTX; Start 10; Stop 34
ctagaactaattgaacaattcgaga

SEQ ID NO: 452893 - DNA, 25 bp, Artificial
  probe
  misc_feature (1)..(25): SEQ ID NO: 6905; WAN024BTX; Start 16; Stop 40
ctaattgaacaattcgagattgact

SEQ ID NO: 452894 - DNA, 25 bp, Artificial
  probe
  misc_feature (1)..(25): SEQ ID NO: 6905; WAN024BTX; Start 70; Stop 94
cttttagcagaccaaccaattcatc

SEQ ID NO: 452895 - DNA, 25 bp, Artificial
  probe
  misc_feature (1)..(25): SEQ ID NO: 6905; WAN024BTX; Start 71; Stop 95
ttttagcagaccaaccaattcatca

SEQ ID NO: 452896 - DNA, 25 bp, Artificial
  probe
  misc_feature (1)..(25): SEQ ID NO: 6905; WAN024BTX; Start 14; Stop 38
aactaattgaacaattcgagattga

SEQ ID NO: 452897 - DNA, 25 bp, Artificial
  probe
  misc_feature (1)..(25): SEQ ID NO: 6905; WAN024BTX; Start 65; Stop 89
aaactcttttagcagaccaaccaat

SEQ ID NO: 452898 - DNA, 25 bp, Artificial
  probe
  misc_feature (1)..(25): SEQ ID NO: 6905; WAN024BTX; Start 69; Stop 93
tcttttagcagaccaaccaattcat

SEQ ID NO: 452899 - DNA, 25 bp, Artificial
  probe
  misc_feature (1)..(25): SEQ ID NO: 6905; WAN024BTX; Start 86; Stop 110
caattcatcaagtggttgcctgctt

SEQ ID NO: 452900 - DNA, 25 bp, Artificial
  probe
  misc_feature (1)..(25): SEQ ID NO: 6906; WAN024CBS; Start 107; Stop 131
agttgattatttggatgaatgtcgt

SEQ ID NO: 452901 - DNA, 25 bp, Artificial
  probe
  misc_feature (1)..(25): SEQ ID NO: 6906; WAN024CBS; Start 108; Stop 132
gttgattatttggatgaatgtcgtt

SEQ ID NO: 452902 - DNA, 25 bp, Artificial
  probe
  misc_feature (1)..(25): SEQ ID NO: 6906; WAN024CBS; Start 106; Stop 130
aagttgattatttggatgaatgtcg

SEQ ID NO: 452903 - DNA, 25 bp, Artificial
  probe
  misc_feature (1)..(25): SEQ ID NO: 6906; WAN024CBS; Start 109; Stop 133
ttgattatttggatgaatgtcgttt

SEQ ID NO: 452904 - DNA, 25 bp, Artificial
  probe
  misc_feature (1)..(25): SEQ ID NO: 6906; WAN024CBS; Start 76; Stop 100
gcctatgattttgttagcgaagaaa

SEQ ID NO: 452905 - DNA, 25 bp, Artificial
  probe
  misc_feature (1)..(25): SEQ ID NO: 6906; WAN024CBS; Start 74; Stop 98
tagcctatgattttgttagcgaaga

SEQ ID NO: 452906 - DNA, 25 bp, Artificial
  probe
  misc_feature (1)..(25): SEQ ID NO: 6906; WAN024CBS; Start 73; Stop 97
ttagcctatgattttgttagcgaag

SEQ ID NO: 452907 - DNA, 25 bp, Artificial
  probe
  misc_feature (1)..(25): SEQ ID NO: 6906; WAN024CBS; Start 75; Stop 99
agcctatgattttgttagcgaagaa

SEQ ID NO: 452908 - DNA, 25 bp, Artificial
  probe
  misc_feature (1)..(25): SEQ ID NO: 6906; WAN024CBS; Start 72; Stop 96
tttagcctatgattttgttagcgaa

SEQ ID NO: 452909 - DNA, 25 bp, Artificial
  probe
  misc_feature (1)..(25): SEQ ID NO: 6906; WAN024CBS; Start 71; Stop 95
ttttagcctatgattttgttagcga

SEQ ID NO: 452910 - DNA, 25 bp, Artificial
  probe
  misc_feature (1)..(25): SEQ ID NO: 6906; WAN024CBS; Start 105; Stop 129
aaagttgattatttggatgaatgtc

SEQ ID NO: 452911 - DNA, 25 bp, Artificial
  probe
  misc_feature (1)..(25): SEQ ID NO: 6906; WAN024CBS; Start 110; Stop 134
tgattatttggatgaatgtcgtttt

SEQ ID NO: 452912 - DNA, 25 bp, Artificial
  probe
  misc_feature (1)..(25): SEQ ID NO: 6906; WAN024CBS; Start 77; Stop 101
cctatgattttgttagcgaagaaat

SEQ ID NO: 452913 - DNA, 25 bp, Artificial
  probe
  misc_feature (1)..(25): SEQ ID NO: 6906; WAN024CBS; Start 104; Stop 128
aaaagttgattatttggatgaatgt

SEQ ID NO: 452914 - DNA, 25 bp, Artificial
  probe
  misc_feature (1)..(25): SEQ ID NO: 6906; WAN024CBS; Start 81; Stop 105
tgattttgttagcgaagaaataaaa

SEQ ID NO: 452915 - DNA, 25 bp, Artificial
  probe
  misc_feature (1)..(25): SEQ ID NO: 6906; WAN024CBS; Start 80; Stop 104
atgattttgttagcgaagaaataaa

SEQ ID NO: 452916 - DNA, 25 bp, Artificial
  probe
  misc_feature (1)..(25): SEQ ID NO: 6906; WAN024CBS; Start 78; Stop 102
ctatgattttgttagcgaagaaata

SEQ ID NO: 452917 - DNA, 25 bp, Artificial
  probe
  misc_feature (1)..(25): SEQ ID NO: 6906; WAN024CBS; Start 79; Stop 103
tatgattttgttagcgaagaaataa

SEQ ID NO: 452918 - DNA, 25 bp, Artificial
  probe
  misc_feature (1)..(25): SEQ ID NO: 6907; WAN024BYZ; Start 128; Stop 152
ctactaccaacaagaagacaatcgt

SEQ ID NO: 452919 - DNA, 25 bp, Artificial
  probe
  misc_feature (1)..(25): SEQ ID NO: 6907; WAN024BYZ; Start 130; Stop 154
actaccaacaagaagacaatcgtta

SEQ ID NO: 452920 - DNA, 25 bp, Artificial
  probe
  misc_feature (1)..(25): SEQ ID NO: 6907; WAN024BYZ; Start 129; Stop 153
tactaccaacaagaagacaatcgtt

SEQ ID NO: 452921 - DNA, 25 bp, Artificial
  probe
  misc_feature (1)..(25): SEQ ID NO: 6907; WAN024BYZ; Start 140; Stop 164
agaagacaatcgttaatctgacaca

SEQ ID NO: 452922 - DNA, 25 bp, Artificial
  probe
  misc_feature (1)..(25): SEQ ID NO: 6907; WAN024BYZ; Start 133; Stop 157
accaacaagaagacaatcgttaatc

SEQ ID NO: 452923 - DNA, 25 bp, Artificial
  probe
  misc_feature (1)..(25): SEQ ID NO: 6907; WAN024BYZ; Start 141; Stop 165
gaagacaatcgttaatctgacacac

SEQ ID NO: 452924 - DNA, 25 bp, Artificial
  probe
  misc_feature (1)..(25): SEQ ID NO: 6907; WAN024BYZ; Start 134; Stop 158
ccaacaagaagacaatcgttaatct

SEQ ID NO: 452925 - DNA, 25 bp, Artificial
  probe
  misc_feature (1)..(25): SEQ ID NO: 6907; WAN024BYZ; Start 139; Stop 163
aagaagacaatcgttaatctgacac

SEQ ID NO: 452926 - DNA, 25 bp, Artificial
  probe
  misc_feature (1)..(25): SEQ ID NO: 6907; WAN024BYZ; Start 138; Stop 162
caagaagacaatcgttaatctgaca

SEQ ID NO: 452927 - DNA, 25 bp, Artificial
  probe
  misc_feature (1)..(25): SEQ ID NO: 6907; WAN024BYZ; Start 137; Stop 161
acaagaagacaatcgttaatctgac

SEQ ID NO: 452928 - DNA, 25 bp, Artificial
  probe
  misc_feature (1)..(25): SEQ ID NO: 6907; WAN024BYZ; Start 131; Stop 155
ctaccaacaagaagacaatcgttaa

SEQ ID NO: 452929 - DNA, 25 bp, Artificial
  probe
  misc_feature (1)..(25): SEQ ID NO: 6907; WAN024BYZ; Start 126; Stop 150
ggctactaccaacaagaagacaatc

SEQ ID NO: 452930 - DNA, 25 bp, Artificial
  probe
  misc_feature (1)..(25): SEQ ID NO: 6907; WAN024BYZ; Start 135; Stop 159
caacaagaagacaatcgttaatctg

SEQ ID NO: 452931 - DNA, 25 bp, Artificial
  probe
  misc_feature (1)..(25): SEQ ID NO: 6907; WAN024BYZ; Start 127; Stop 151
gctactaccaacaagaagacaatcg

SEQ ID NO: 452932 - DNA, 25 bp, Artificial
  probe
  misc_feature (1)..(25): SEQ ID NO: 6907; WAN024BYZ; Start 142; Stop 166
aagacaatcgttaatctgacacacc

SEQ ID NO: 452933 - DNA, 25 bp, Artificial
  probe
  misc_feature (1)..(25): SEQ ID NO: 6907; WAN024BYZ; Start 136; Stop 160
aacaagaagacaatcgttaatctga

SEQ ID NO: 452934 - DNA, 25 bp, Artificial
  probe
  misc_feature (1)..(25): SEQ ID NO: 6907; WAN024BYZ; Start 132; Stop 156
taccaacaagaagacaatcgttaat

SEQ ID NO: 452935 - DNA, 25 bp, Artificial
  probe
  misc_feature (1)..(25): SEQ ID NO: 6907; WAN024BYZ; Start 27; Stop 51
ccgtatctcttcttatggtgaggaa

SEQ ID NO: 452936 - DNA, 25 bp, Artificial
  probe
  misc_feature (1)..(25): SEQ ID NO: 6907; WAN024BYZ; Start 144; Stop 168
gacaatcgttaatctgacacaccac

SEQ ID NO: 452937 - DNA, 25 bp, Artificial
  probe
  misc_feature (1)..(25): SEQ ID NO: 6907; WAN024BYZ; Start 143; Stop 167
agacaatcgttaatctgacacacca

SEQ ID NO: 452938 - DNA, 25 bp, Artificial
  probe
  misc_feature (1)..(25): SEQ ID NO: 6907; WAN024BYZ; Start 601; Stop 625
gattcacctaaccgtccatacttcc

SEQ ID NO: 452939 - DNA, 25 bp, Artificial
  probe
  misc_feature (1)..(25): SEQ ID NO: 6907; WAN024BYZ; Start 81; Stop 105
agaatttacctttaccgacaacaac

SEQ ID NO: 452940 - DNA, 25 bp, Artificial
  probe
  misc_feature (1)..(25): SEQ ID NO: 6907; WAN024BYZ; Start 76; Stop 100
acagtagaatttacctttaccgaca

SEQ ID NO: 452941 - DNA, 25 bp, Artificial
  probe
  misc_feature (1)..(25): SEQ ID NO: 6907; WAN024BYZ; Start 600; Stop 624
cgattcacctaaccgtccatacttc

SEQ ID NO: 452942 - DNA, 25 bp, Artificial
  probe
  misc_feature (1)..(25): SEQ ID NO: 6907; WAN024BYZ; Start 84; Stop 108
atttacctttaccgacaacaacgaa

SEQ ID NO: 452943 - DNA, 25 bp, Artificial
  probe
  misc_feature (1)..(25): SEQ ID NO: 6907; WAN024BYZ; Start 82; Stop 106
gaatttacctttaccgacaacaacg

SEQ ID NO: 452944 - DNA, 25 bp, Artificial
  probe
  misc_feature (1)..(25): SEQ ID NO: 6907; WAN024BYZ; Start 79; Stop 103
gtagaatttacctttaccgacaaca

SEQ ID NO: 452945 - DNA, 25 bp, Artificial
  probe
  misc_feature (1)..(25): SEQ ID NO: 6907; WAN024BYZ; Start 83; Stop 107
aatttacctttaccgacaacaacga

SEQ ID NO: 452946 - DNA, 25 bp, Artificial
  probe
  misc_feature (1)..(25): SEQ ID NO: 6907; WAN024BYZ; Start 78; Stop 102
agtagaatttacctttaccgacaac

SEQ ID NO: 452947 - DNA, 25 bp, Artificial
  probe
  misc_feature (1)..(25): SEQ ID NO: 6907; WAN024BYZ; Start 77; Stop 101
cagtagaatttacctttaccgacaa

SEQ ID NO: 452948 - DNA, 25 bp, Artificial
  probe
  misc_feature (1)..(25): SEQ ID NO: 6907; WAN024BYZ; Start 75; Stop 99
aacagtagaatttacctttaccgac

SEQ ID NO: 452949 - DNA, 25 bp, Artificial
  probe
  misc_feature (1)..(25): SEQ ID NO: 6907; WAN024BYZ; Start 125; Stop 149
tggctactaccaacaagaagacaat

SEQ ID NO: 452950 - DNA, 25 bp, Artificial
  probe
  misc_feature (1)..(25): SEQ ID NO: 6907; WAN024BYZ; Start 201; Stop 225
aacaccaagtatcgacgatcagatt

SEQ ID NO: 452951 - DNA, 25 bp, Artificial
  probe
  misc_feature (1)..(25): SEQ ID NO: 6908; WAN024GFM; Start 335; Stop 359
attcctctgtttctcgtttccatta

SEQ ID NO: 452952 - DNA, 25 bp, Artificial
  probe
  misc_feature (1)..(25): SEQ ID NO: 6908; WAN024GFM; Start 25; Stop 49
ataaaccagatacttccgaacatcc

SEQ ID NO: 452953 - DNA, 25 bp, Artificial
  probe
  misc_feature (1)..(25): SEQ ID NO: 6908; WAN024GFM; Start 336; Stop 360
ttcctctgtttctcgtttccattag

SEQ ID NO: 452954 - DNA, 25 bp, Artificial
  probe
  misc_feature (1)..(25): SEQ ID NO: 6908; WAN024GFM; Start 318; Stop 342
gcctgactttcctataaattcctct

SEQ ID NO: 452955 - DNA, 25 bp, Artificial
  probe
  misc_feature (1)..(25): SEQ ID NO: 6908; WAN024GFM; Start 317; Stop 341
agcctgactttcctataaattcctc

SEQ ID NO: 452956 - DNA, 25 bp, Artificial
  probe
  misc_feature (1)..(25): SEQ ID NO: 6908; WAN024GFM; Start 332; Stop 356
taaattcctctgtttctcgtttcca

SEQ ID NO: 452957 - DNA, 25 bp, Artificial
  probe
  misc_feature (1)..(25): SEQ ID NO: 6908; WAN024GFM; Start 331; Stop 355
ataaattcctctgtttctcgtttcc

SEQ ID NO: 452958 - DNA, 25 bp, Artificial
  probe
  misc_feature (1)..(25): SEQ ID NO: 6908; WAN024GFM; Start 327; Stop 351
tcctataaattcctctgtttctcgt

SEQ ID NO: 452959 - DNA, 25 bp, Artificial
  probe
  misc_feature (1)..(25): SEQ ID NO: 6908; WAN024GFM; Start 334; Stop 358
aattcctctgtttctcgtttccatt

SEQ ID NO: 452960 - DNA, 25 bp, Artificial
  probe
  misc_feature (1)..(25): SEQ ID NO: 6908; WAN024GFM; Start 333; Stop 357
aaattcctctgtttctcgtttccat

SEQ ID NO: 452961 - DNA, 25 bp, Artificial
  probe
  misc_feature (1)..(25): SEQ ID NO: 6908; WAN024GFM; Start 316; Stop 340
aagcctgactttcctataaattcct

SEQ ID NO: 452962 - DNA, 25 bp, Artificial
  probe
  misc_feature (1)..(25): SEQ ID NO: 6908; WAN024GFM; Start 24; Stop 48
aataaaccagatacttccgaacatc

SEQ ID NO: 452963 - DNA, 25 bp, Artificial
  probe
  misc_feature (1)..(25): SEQ ID NO: 6908; WAN024GFM; Start 319; Stop 343
cctgactttcctataaattcctctg

SEQ ID NO: 452964 - DNA, 25 bp, Artificial
  probe
  misc_feature (1)..(25): SEQ ID NO: 6908; WAN024GFM; Start 23; Stop 47
aaataaaccagatacttccgaacat

SEQ ID NO: 452965 - DNA, 25 bp, Artificial
  probe
  misc_feature (1)..(25): SEQ ID NO: 6908; WAN024GFM; Start 328; Stop 352
cctataaattcctctgtttctcgtt

SEQ ID NO: 452966 - DNA, 25 bp, Artificial
  probe
  misc_feature (1)..(25): SEQ ID NO: 6908; WAN024GFM; Start 326; Stop 350
ttcctataaattcctctgtttctcg

SEQ ID NO: 452967 - DNA, 25 bp, Artificial
  probe
  misc_feature (1)..(25): SEQ ID NO: 6908; WAN024GFM; Start 320; Stop 344
ctgactttcctataaattcctctgt

SEQ ID NO: 452968 - DNA, 25 bp, Artificial
  probe
  misc_feature (1)..(25): SEQ ID NO: 6908; WAN024GFM; Start 189; Stop 213
gacaatcaaatcccgcatcaatagg

SEQ ID NO: 452969 - DNA, 25 bp, Artificial
  probe
  misc_feature (1)..(25): SEQ ID NO: 6908; WAN024GFM; Start 26; Stop 50
taaaccagatacttccgaacatccg

SEQ ID NO: 452970 - DNA, 25 bp, Artificial
  probe
  misc_feature (1)..(25): SEQ ID NO: 6908; WAN024GFM; Start 321; Stop 345
tgactttcctataaattcctctgtt

SEQ ID NO: 452971 - DNA, 25 bp, Artificial
  probe
  misc_feature (1)..(25): SEQ ID NO: 6908; WAN024GFM; Start 330; Stop 354
tataaattcctctgtttctcgtttc

SEQ ID NO: 452972 - DNA, 25 bp, Artificial
  probe
  misc_feature (1)..(25): SEQ ID NO: 6908; WAN024GFM; Start 329; Stop 353
ctataaattcctctgtttctcgttt

SEQ ID NO: 452973 - DNA, 25 bp, Artificial
  probe
  misc_feature (1)..(25): SEQ ID NO: 6908; WAN024GFM; Start 59; Stop 83
cggtgcataaagtcaatttccttat

SEQ ID NO: 452974 - DNA, 25 bp, Artificial
  probe
  misc_feature (1)..(25): SEQ ID NO: 6908; WAN024GFM; Start 315; Stop 339
aaagcctgactttcctataaattcc

SEQ ID NO: 452975 - DNA, 25 bp, Artificial
  probe
  misc_feature (1)..(25): SEQ ID NO: 6908; WAN024GFM; Start 323; Stop 347
actttcctataaattcctctgtttc

SEQ ID NO: 452976 - DNA, 25 bp, Artificial
  probe
  misc_feature (1)..(25): SEQ ID NO: 6908; WAN024GFM; Start 322; Stop 346
gactttcctataaattcctctgttt

SEQ ID NO: 452977 - DNA, 25 bp, Artificial
  probe
  misc_feature (1)..(25): SEQ ID NO: 6908; WAN024GFM; Start 188; Stop 212
ggacaatcaaatcccgcatcaatag

SEQ ID NO: 452978 - DNA, 25 bp, Artificial
  probe
  misc_feature (1)..(25): SEQ ID NO: 6908; WAN024GFM; Start 58; Stop 82
gcggtgcataaagtcaatttcctta

SEQ ID NO: 452979 - DNA, 25 bp, Artificial
  probe
  misc_feature (1)..(25): SEQ ID NO: 6908; WAN024GFM; Start 22; Stop 46
aaaataaaccagatacttccgaaca

SEQ ID NO: 452980 - DNA, 25 bp, Artificial
  probe
  misc_feature (1)..(25): SEQ ID NO: 6908; WAN024GFM; Start 325; Stop 349
tttcctataaattcctctgtttctc

SEQ ID NO: 452981 - DNA, 25 bp, Artificial
  probe
  misc_feature (1)..(25): SEQ ID NO: 6908; WAN024GFM; Start 324; Stop 348
ctttcctataaattcctctgtttct

SEQ ID NO: 452982 - DNA, 25 bp, Artificial
  probe
  misc_feature (1)..(25): SEQ ID NO: 6908; WAN024GFM; Start 20; Stop 44
tgaaaataaaccagatacttccgaa

SEQ ID NO: 452983 - DNA, 25 bp, Artificial
  probe
  misc_feature (1)..(25): SEQ ID NO: 6908; WAN024GFM; Start 19; Stop 43
ttgaaaataaaccagatacttccga

SEQ ID NO: 452984 - DNA, 25 bp, Artificial
  probe
  misc_feature (1)..(25): SEQ ID NO: 6909; WAN024BNP; Start 768; Stop 792
taatgcgaatatcaaggcttacgat

SEQ ID NO: 452985 - DNA, 25 bp, Artificial
  probe
  misc_feature (1)..(25): SEQ ID NO: 6909; WAN024BNP; Start 764; Stop 788
atgctaatgcgaatatcaaggctta

SEQ ID NO: 452986 - DNA, 25 bp, Artificial
  probe
  misc_feature (1)..(25): SEQ ID NO: 6909; WAN024BNP; Start 767; Stop 791
ctaatgcgaatatcaaggcttacga

SEQ ID NO: 452987 - DNA, 25 bp, Artificial
  probe
  misc_feature (1)..(25): SEQ ID NO: 6909; WAN024BNP; Start 315; Stop 339
aggacttaatgcgattgatgaacat

SEQ ID NO: 452988 - DNA, 25 bp, Artificial
  probe
  misc_feature (1)..(25): SEQ ID NO: 6909; WAN024BNP; Start 763; Stop 787
aatgctaatgcgaatatcaaggctt

SEQ ID NO: 452989 - DNA, 25 bp, Artificial
  probe
  misc_feature (1)..(25): SEQ ID NO: 6909; WAN024BNP; Start 765; Stop 789
tgctaatgcgaatatcaaggcttac

SEQ ID NO: 452990 - DNA, 25 bp, Artificial
  probe
  misc_feature (1)..(25): SEQ ID NO: 6909; WAN024BNP; Start 314; Stop 338
caggacttaatgcgattgatgaaca

SEQ ID NO: 452991 - DNA, 25 bp, Artificial
  probe
  misc_feature (1)..(25): SEQ ID NO: 6909; WAN024BNP; Start 326; Stop 350
cgattgatgaacatgaacgattgat

SEQ ID NO: 452992 - DNA, 25 bp, Artificial
  probe
  misc_feature (1)..(25): SEQ ID NO: 6909; WAN024BNP; Start 769; Stop 793
aatgcgaatatcaaggcttacgatg

SEQ ID NO: 452993 - DNA, 25 bp, Artificial
  probe
  misc_feature (1)..(25): SEQ ID NO: 6909; WAN024BNP; Start 317; Stop 341
gacttaatgcgattgatgaacatga

SEQ ID NO: 452994 - DNA, 25 bp, Artificial
  probe
  misc_feature (1)..(25): SEQ ID NO: 6909; WAN024BNP; Start 318; Stop 342
acttaatgcgattgatgaacatgaa

SEQ ID NO: 452995 - DNA, 25 bp, Artificial
  probe
  misc_feature (1)..(25): SEQ ID NO: 6909; WAN024BNP; Start 319; Stop 343
cttaatgcgattgatgaacatgaac

SEQ ID NO: 452996 - DNA, 25 bp, Artificial
  probe
  misc_feature (1)..(25): SEQ ID NO: 6909; WAN024BNP; Start 328; Stop 352
attgatgaacatgaacgattgatgc

SEQ ID NO: 452997 - DNA, 25 bp, Artificial
  probe
  misc_feature (1)..(25): SEQ ID NO: 6909; WAN024BNP; Start 327; Stop 351
gattgatgaacatgaacgattgatg

SEQ ID NO: 452998 - DNA, 25 bp, Artificial
  probe
  misc_feature (1)..(25): SEQ ID NO: 6909; WAN024BNP; Start 320; Stop 344
ttaatgcgattgatgaacatgaacg

SEQ ID NO: 452999 - DNA, 25 bp, Artificial
  probe
  misc_feature (1)..(25): SEQ ID NO: 6909; WAN024BNP; Start 316; Stop 340
ggacttaatgcgattgatgaacatg

SEQ ID NO: 453000 - DNA, 25 bp, Artificial
  probe
  misc_feature (1)..(25): SEQ ID NO: 6909; WAN024BNP; Start 766; Stop 790
gctaatgcgaatatcaaggcttacg

SEQ ID NO: 453001 - DNA, 25 bp, Artificial
  probe
  misc_feature (1)..(25): SEQ ID NO: 6909; WAN024BNP; Start 321; Stop 345
taatgcgattgatgaacatgaacga

SEQ ID NO: 453002 - DNA, 25 bp, Artificial
  probe
  misc_feature (1)..(25): SEQ ID NO: 6909; WAN024BNP; Start 534; Stop 558
cctggaagaatacaaggctaacaag

SEQ ID NO: 453003 - DNA, 25 bp, Artificial
  probe
  misc_feature (1)..(25): SEQ ID NO: 6909; WAN024BNP; Start 125; Stop 149
gcgaggttactgttgataattacaa

SEQ ID NO: 453004 - DNA, 25 bp, Artificial
  probe
  misc_feature (1)..(25): SEQ ID NO: 6909; WAN024BNP; Start 323; Stop 347
atgcgattgatgaacatgaacgatt

SEQ ID NO: 453005 - DNA, 25 bp, Artificial
  probe
  misc_feature (1)..(25): SEQ ID NO: 6909; WAN024BNP; Start 322; Stop 346
aatgcgattgatgaacatgaacgat

SEQ ID NO: 453006 - DNA, 25 bp, Artificial
  probe
  misc_feature (1)..(25): SEQ ID NO: 6909; WAN024BNP; Start 628; Stop 652
ggtaagagtcttgttgatattctca

SEQ ID NO: 453007 - DNA, 25 bp, Artificial
  probe
  misc_feature (1)..(25): SEQ ID NO: 6909; WAN024BNP; Start 627; Stop 651
tggtaagagtcttgttgatattctc

SEQ ID NO: 453008 - DNA, 25 bp, Artificial
  probe
  misc_feature (1)..(25): SEQ ID NO: 6909; WAN024BNP; Start 489; Stop 513
aacacttgatgaaatggatggctta

SEQ ID NO: 453009 - DNA, 25 bp, Artificial
  probe
  misc_feature (1)..(25): SEQ ID NO: 6909; WAN024BNP; Start 146; Stop 170
acaaagaagtttatgaagagcgaac

SEQ ID NO: 453010 - DNA, 25 bp, Artificial
  probe
  misc_feature (1)..(25): SEQ ID NO: 6909; WAN024BNP; Start 626; Stop 650
atggtaagagtcttgttgatattct

SEQ ID NO: 453011 - DNA, 25 bp, Artificial
  probe
  misc_feature (1)..(25): SEQ ID NO: 6909; WAN024BNP; Start 624; Stop 648
agatggtaagagtcttgttgatatt

SEQ ID NO: 453012 - DNA, 25 bp, Artificial
  probe
  misc_feature (1)..(25): SEQ ID NO: 6909; WAN024BNP; Start 145; Stop 169
tacaaagaagtttatgaagagcgaa

SEQ ID NO: 453013 - DNA, 25 bp, Artificial
  probe
  misc_feature (1)..(25): SEQ ID NO: 6909; WAN024BNP; Start 144; Stop 168
ttacaaagaagtttatgaagagcga

SEQ ID NO: 453014 - DNA, 25 bp, Artificial
  probe
  misc_feature (1)..(25): SEQ ID NO: 6909; WAN024BNP; Start 490; Stop 514
acacttgatgaaatggatggcttag

SEQ ID NO: 453015 - DNA, 25 bp, Artificial
  probe
  misc_feature (1)..(25): SEQ ID NO: 6909; WAN024BNP; Start 484; Stop 508
aagacaacacttgatgaaatggatg

SEQ ID NO: 453016 - DNA, 25 bp, Artificial
  probe
  misc_feature (1)..(25): SEQ ID NO: 6909; WAN024BNP; Start 147; Stop 171
caaagaagtttatgaagagcgaacc

SEQ ID NO: 453017 - DNA, 25 bp, Artificial
  probe
  misc_feature (1)..(25): SEQ ID NO: 6910; WAN024BGE; Start 106; Stop 130
tgtcacaagtcaagggagaattatt

SEQ ID NO: 453018 - DNA, 25 bp, Artificial
  probe
  misc_feature (1)..(25): SEQ ID NO: 6910; WAN024BGE; Start 74; Stop 98
tagatatttctcgctatgaaggctc

SEQ ID NO: 453019 - DNA, 25 bp, Artificial
  probe
  misc_feature (1)..(25): SEQ ID NO: 6910; WAN024BGE; Start 107; Stop 131
gtcacaagtcaagggagaattattt

SEQ ID NO: 453020 - DNA, 25 bp, Artificial
  probe
  misc_feature (1)..(25): SEQ ID NO: 6910; WAN024BGE; Start 108; Stop 132
tcacaagtcaagggagaattatttc

SEQ ID NO: 453021 - DNA, 25 bp, Artificial
  probe
  misc_feature (1)..(25): SEQ ID NO: 6910; WAN024BGE; Start 76; Stop 100
gatatttctcgctatgaaggctcag

SEQ ID NO: 453022 - DNA, 25 bp, Artificial
  probe
  misc_feature (1)..(25): SEQ ID NO: 6910; WAN024BGE; Start 73; Stop 97
atagatatttctcgctatgaaggct

SEQ ID NO: 453023 - DNA, 25 bp, Artificial
  probe
  misc_feature (1)..(25): SEQ ID NO: 6910; WAN024BGE; Start 77; Stop 101
atatttctcgctatgaaggctcaga

SEQ ID NO: 453024 - DNA, 25 bp, Artificial
  probe
  misc_feature (1)..(25): SEQ ID NO: 6910; WAN024BGE; Start 75; Stop 99
agatatttctcgctatgaaggctca

SEQ ID NO: 453025 - DNA, 25 bp, Artificial
  probe
  misc_feature (1)..(25): SEQ ID NO: 6910; WAN024BGE; Start 105; Stop 129
ttgtcacaagtcaagggagaattat

SEQ ID NO: 453026 - DNA, 25 bp, Artificial
  probe
  misc_feature (1)..(25): SEQ ID NO: 6910; WAN024BGE; Start 104; Stop 128
attgtcacaagtcaagggagaatta

SEQ ID NO: 453027 - DNA, 25 bp, Artificial
  probe
  misc_feature (1)..(25): SEQ ID NO: 6910; WAN024BGE; Start 72; Stop 96
aatagatatttctcgctatgaaggc

SEQ ID NO: 453028 - DNA, 25 bp, Artificial
  probe
  misc_feature (1)..(25): SEQ ID NO: 6910; WAN024BGE; Start 87; Stop 111
ctatgaaggctcagacgattgtcac

SEQ ID NO: 453029 - DNA, 25 bp, Artificial
  probe
  misc_feature (1)..(25): SEQ ID NO: 6910; WAN024BGE; Start 78; Stop 102
tatttctcgctatgaaggctcagac

SEQ ID NO: 453030 - DNA, 25 bp, Artificial
  probe
  misc_feature (1)..(25): SEQ ID NO: 6910; WAN024BGE; Start 88; Stop 112
tatgaaggctcagacgattgtcaca

SEQ ID NO: 453031 - DNA, 25 bp, Artificial
  probe
  misc_feature (1)..(25): SEQ ID NO: 6910; WAN024BGE; Start 96; Stop 120
ctcagacgattgtcacaagtcaagg

SEQ ID NO: 453032 - DNA, 25 bp, Artificial
  probe
  misc_feature (1)..(25): SEQ ID NO: 6910; WAN024BGE; Start 114; Stop 138
gtcaagggagaattatttctttgga

SEQ ID NO: 453033 - DNA, 25 bp, Artificial
  probe
  misc_feature (1)..(25): SEQ ID NO: 6910; WAN024BGE; Start 113; Stop 137
agtcaagggagaattatttctttgg

SEQ ID NO: 453034 - DNA, 25 bp, Artificial
  probe
  misc_feature (1)..(25): SEQ ID NO: 6910; WAN024BGE; Start 109; Stop 133
cacaagtcaagggagaattatttct

SEQ ID NO: 453035 - DNA, 25 bp, Artificial
  probe
  misc_feature (1)..(25): SEQ ID NO: 6910; WAN024BGE; Start 71; Stop 95
gaatagatatttctcgctatgaagg

SEQ ID NO: 453036 - DNA, 25 bp, Artificial
  probe
  misc_feature (1)..(25): SEQ ID NO: 6910; WAN024BGE; Start 128; Stop 152
atttctttggatatcactgtgaact

SEQ ID NO: 453037 - DNA, 25 bp, Artificial
  probe
  misc_feature (1)..(25): SEQ ID NO: 6910; WAN024BGE; Start 110; Stop 134
acaagtcaagggagaattatttctt

SEQ ID NO: 453038 - DNA, 25 bp, Artificial
  probe
  misc_feature (1)..(25): SEQ ID NO: 6910; WAN024BGE; Start 115; Stop 139
tcaagggagaattatttctttggat

SEQ ID NO: 453039 - DNA, 25 bp, Artificial
  probe
  misc_feature (1)..(25): SEQ ID NO: 6910; WAN024BGE; Start 129; Stop 153
tttctttggatatcactgtgaacta

SEQ ID NO: 453040 - DNA, 25 bp, Artificial
  probe
  misc_feature (1)..(25): SEQ ID NO: 6910; WAN024BGE; Start 95; Stop 119
gctcagacgattgtcacaagtcaag

SEQ ID NO: 453041 - DNA, 25 bp, Artificial
  probe
  misc_feature (1)..(25): SEQ ID NO: 6910; WAN024BGE; Start 112; Stop 136
aagtcaagggagaattatttctttg

SEQ ID NO: 453042 - DNA, 25 bp, Artificial
  probe
  misc_feature (1)..(25): SEQ ID NO: 6910; WAN024BGE; Start 111; Stop 135
caagtcaagggagaattatttcttt

SEQ ID NO: 453043 - DNA, 25 bp, Artificial
  probe
  misc_feature (1)..(25): SEQ ID NO: 6910; WAN024BGE; Start 86; Stop 110
gctatgaaggctcagacgattgtca

SEQ ID NO: 453044 - DNA, 25 bp, Artificial
  probe
  misc_feature (1)..(25): SEQ ID NO: 6910; WAN024BGE; Start 89; Stop 113
atgaaggctcagacgattgtcacaa

SEQ ID NO: 453045 - DNA, 25 bp, Artificial
  probe
  misc_feature (1)..(25): SEQ ID NO: 6910; WAN024BGE; Start 127; Stop 151
tatttctttggatatcactgtgaac

SEQ ID NO: 453046 - DNA, 25 bp, Artificial
  probe
  misc_feature (1)..(25): SEQ ID NO: 6910; WAN024BGE; Start 116; Stop 140
caagggagaattatttctttggata

SEQ ID NO: 453047 - DNA, 25 bp, Artificial
  probe
  misc_feature (1)..(25): SEQ ID NO: 6910; WAN024BGE; Start 101; Stop 125
acgattgtcacaagtcaagggagaa

SEQ ID NO: 453048 - DNA, 25 bp, Artificial
  probe
  misc_feature (1)..(25): SEQ ID NO: 6910; WAN024BGE; Start 92; Stop 116
aaggctcagacgattgtcacaagtc

SEQ ID NO: 453049 - DNA, 25 bp, Artificial
  probe
  misc_feature (1)..(25): SEQ ID NO: 6910; WAN024BGE; Start 91; Stop 115
gaaggctcagacgattgtcacaagt

SEQ ID NO: 453050 - DNA, 25 bp, Artificial
  probe
  misc_feature (1)..(25): SEQ ID NO: 6911; WAN024BU4; Start 32; Stop 56
ttatcgaacgcaatactactcaaga

SEQ ID NO: 453051 - DNA, 25 bp, Artificial
  probe
  misc_feature (1)..(25): SEQ ID NO: 6911; WAN024BU4; Start 33; Stop 57
tatcgaacgcaatactactcaagag

SEQ ID NO: 453052 - DNA, 25 bp, Artificial
  probe
  misc_feature (1)..(25): SEQ ID NO: 6911; WAN024BU4; Start 31; Stop 55
attatcgaacgcaatactactcaag

SEQ ID NO: 453053 - DNA, 25 bp, Artificial
  probe
  misc_feature (1)..(25): SEQ ID NO: 6911; WAN024BU4; Start 30; Stop 54
aattatcgaacgcaatactactcaa

SEQ ID NO: 453054 - DNA, 25 bp, Artificial
  probe
  misc_feature (1)..(25): SEQ ID NO: 6911; WAN024BU4; Start 37; Stop 61
gaacgcaatactactcaagaggctt

SEQ ID NO: 453055 - DNA, 25 bp, Artificial
  probe
  misc_feature (1)..(25): SEQ ID NO: 6911; WAN024BU4; Start 44; Stop 68
atactactcaagaggctttagcaaa

SEQ ID NO: 453056 - DNA, 25 bp, Artificial
  probe
  misc_feature (1)..(25): SEQ ID NO: 6911; WAN024BU4; Start 43; Stop 67
aatactactcaagaggctttagcaa

SEQ ID NO: 453057 - DNA, 25 bp, Artificial
  probe
  misc_feature (1)..(25): SEQ ID NO: 6911; WAN024BU4; Start 42; Stop 66
caatactactcaagaggctttagca

SEQ ID NO: 453058 - DNA, 25 bp, Artificial
  probe
  misc_feature (1)..(25): SEQ ID NO: 6911; WAN024BU4; Start 40; Stop 64
cgcaatactactcaagaggctttag

SEQ ID NO: 453059 - DNA, 25 bp, Artificial
  probe
  misc_feature (1)..(25): SEQ ID NO: 6911; WAN024BU4; Start 39; Stop 63
acgcaatactactcaagaggcttta

SEQ ID NO: 453060 - DNA, 25 bp, Artificial
  probe
  misc_feature (1)..(25): SEQ ID NO: 6911; WAN024BU4; Start 34; Stop 58
atcgaacgcaatactactcaagagg

SEQ ID NO: 453061 - DNA, 25 bp, Artificial
  probe
  misc_feature (1)..(25): SEQ ID NO: 6911; WAN024BU4; Start 41; Stop 65
gcaatactactcaagaggctttagc

SEQ ID NO: 453062 - DNA, 25 bp, Artificial
  probe
  misc_feature (1)..(25): SEQ ID NO: 6911; WAN024BU4; Start 145; Stop 169
ttgattgtttcttccctcggtcttt

SEQ ID NO: 453063 - DNA, 25 bp, Artificial
  probe
  misc_feature (1)..(25): SEQ ID NO: 6911; WAN024BU4; Start 69; Stop 93
agatattgggattgataagagtacg

SEQ ID NO: 453064 - DNA, 25 bp, Artificial
  probe
  misc_feature (1)..(25): SEQ ID NO: 6911; WAN024BU4; Start 38; Stop 62
aacgcaatactactcaagaggcttt

SEQ ID NO: 453065 - DNA, 25 bp, Artificial
  probe
  misc_feature (1)..(25): SEQ ID NO: 6911; WAN024BU4; Start 29; Stop 53
aaattatcgaacgcaatactactca

SEQ ID NO: 453066 - DNA, 25 bp, Artificial
  probe
  misc_feature (1)..(25): SEQ ID NO: 6911; WAN024BU4; Start 148; Stop 172
attgtttcttccctcggtctttcaa

SEQ ID NO: 453067 - DNA, 25 bp, Artificial
  probe
  misc_feature (1)..(25): SEQ ID NO: 6911; WAN024BU4; Start 147; Stop 171
gattgtttcttccctcggtctttca

SEQ ID NO: 453068 - DNA, 25 bp, Artificial
  probe
  misc_feature (1)..(25): SEQ ID NO: 6911; WAN024BU4; Start 146; Stop 170
tgattgtttcttccctcggtctttc

SEQ ID NO: 453069 - DNA, 25 bp, Artificial
  probe
  misc_feature (1)..(25): SEQ ID NO: 6911; WAN024BU4; Start 144; Stop 168
cttgattgtttcttccctcggtctt

SEQ ID NO: 453070 - DNA, 25 bp, Artificial
  probe
  misc_feature (1)..(25): SEQ ID NO: 6911; WAN024BU4; Start 73; Stop 97
attgggattgataagagtacgttct

SEQ ID NO: 453071 - DNA, 25 bp, Artificial
  probe
  misc_feature (1)..(25): SEQ ID NO: 6911; WAN024BU4; Start 149; Stop 173
ttgtttcttccctcggtctttcaaa

SEQ ID NO: 453072 - DNA, 25 bp, Artificial
  probe
  misc_feature (1)..(25): SEQ ID NO: 6911; WAN024BU4; Start 74; Stop 98
ttgggattgataagagtacgttcta

SEQ ID NO: 453073 - DNA, 25 bp, Artificial
  probe
  misc_feature (1)..(25): SEQ ID NO: 6911; WAN024BU4; Start 75; Stop 99
tgggattgataagagtacgttctat

SEQ ID NO: 453074 - DNA, 25 bp, Artificial
  probe
  misc_feature (1)..(25): SEQ ID NO: 6911; WAN024BU4; Start 139; Stop 163
gtaaacttgattgtttcttccctcg

SEQ ID NO: 453075 - DNA, 25 bp, Artificial
  probe
  misc_feature (1)..(25): SEQ ID NO: 6911; WAN024BU4; Start 138; Stop 162
agtaaacttgattgtttcttccctc

SEQ ID NO: 453076 - DNA, 25 bp, Artificial
  probe
  misc_feature (1)..(25): SEQ ID NO: 6911; WAN024BU4; Start 72; Stop 96
tattgggattgataagagtacgttc

SEQ ID NO: 453077 - DNA, 25 bp, Artificial
  probe
  misc_feature (1)..(25): SEQ ID NO: 6911; WAN024BU4; Start 142; Stop 166
aacttgattgtttcttccctcggtc

SEQ ID NO: 453078 - DNA, 25 bp, Artificial
  probe
  misc_feature (1)..(25): SEQ ID NO: 6911; WAN024BU4; Start 140; Stop 164
taaacttgattgtttcttccctcgg

SEQ ID NO: 453079 - DNA, 25 bp, Artificial
  probe
  misc_feature (1)..(25): SEQ ID NO: 6911; WAN024BU4; Start 70; Stop 94
gatattgggattgataagagtacgt

SEQ ID NO: 453080 - DNA, 25 bp, Artificial
  probe
  misc_feature (1)..(25): SEQ ID NO: 6911; WAN024BU4; Start 137; Stop 161
aagtaaacttgattgtttcttccct

SEQ ID NO: 453081 - DNA, 25 bp, Artificial
  probe
  misc_feature (1)..(25): SEQ ID NO: 6911; WAN024BU4; Start 71; Stop 95
atattgggattgataagagtacgtt

SEQ ID NO: 453082 - DNA, 25 bp, Artificial
  probe
  misc_feature (1)..(25): SEQ ID NO: 6911; WAN024BU4; Start 45; Stop 69
tactactcaagaggctttagcaaaa

SEQ ID NO: 453083 - DNA, 25 bp, Artificial
  probe
  misc_feature (1)..(25): SEQ ID NO: 6912; WAN024BRC; Start 637; Stop 661
gtagtgatagatgagacagaagcaa

SEQ ID NO: 453084 - DNA, 25 bp, Artificial
  probe
  misc_feature (1)..(25): SEQ ID NO: 6912; WAN024BRC; Start 635; Stop 659
gagtagtgatagatgagacagaagc

SEQ ID NO: 453085 - DNA, 25 bp, Artificial
  probe
  misc_feature (1)..(25): SEQ ID NO: 6912; WAN024BRC; Start 634; Stop 658
cgagtagtgatagatgagacagaag

SEQ ID NO: 453086 - DNA, 25 bp, Artificial
  probe
  misc_feature (1)..(25): SEQ ID NO: 6912; WAN024BRC; Start 636; Stop 660
agtagtgatagatgagacagaagca

SEQ ID NO: 453087 - DNA, 25 bp, Artificial
  probe
  misc_feature (1)..(25): SEQ ID NO: 6912; WAN024BRC; Start 344; Stop 368
taatcgttaagagtgttagcaggtt

SEQ ID NO: 453088 - DNA, 25 bp, Artificial
  probe
  misc_feature (1)..(25): SEQ ID NO: 6912; WAN024BRC; Start 343; Stop 367
ataatcgttaagagtgttagcaggt

SEQ ID NO: 453089 - DNA, 25 bp, Artificial
  probe
  misc_feature (1)..(25): SEQ ID NO: 6912; WAN024BRC; Start 342; Stop 366
gataatcgttaagagtgttagcagg

SEQ ID NO: 453090 - DNA, 25 bp, Artificial
  probe
  misc_feature (1)..(25): SEQ ID NO: 6912; WAN024BRC; Start 230; Stop 254
attggataatggctggaatctatgc

SEQ ID NO: 453091 - DNA, 25 bp, Artificial
  probe
  misc_feature (1)..(25): SEQ ID NO: 6912; WAN024BRC; Start 954; Stop 978
acaagaattactcaagcaacctaga

SEQ ID NO: 453092 - DNA, 25 bp, Artificial
  probe
  misc_feature (1)..(25): SEQ ID NO: 6912; WAN024BRC; Start 341; Stop 365
tgataatcgttaagagtgttagcag

SEQ ID NO: 453093 - DNA, 25 bp, Artificial
  probe
  misc_feature (1)..(25): SEQ ID NO: 6912; WAN024BRC; Start 957; Stop 981
agaattactcaagcaacctagaaga

SEQ ID NO: 453094 - DNA, 25 bp, Artificial
  probe
  misc_feature (1)..(25): SEQ ID NO: 6912; WAN024BRC; Start 234; Stop 258
gataatggctggaatctatgctgac

SEQ ID NO: 453095 - DNA, 25 bp, Artificial
  probe
  misc_feature (1)..(25): SEQ ID NO: 6912; WAN024BRC; Start 955; Stop 979
caagaattactcaagcaacctagaa

SEQ ID NO: 453096 - DNA, 25 bp, Artificial
  probe
  misc_feature (1)..(25): SEQ ID NO: 6912; WAN024BRC; Start 958; Stop 982
gaattactcaagcaacctagaagaa

SEQ ID NO: 453097 - DNA, 25 bp, Artificial
  probe
  misc_feature (1)..(25): SEQ ID NO: 6912; WAN024BRC; Start 956; Stop 980
aagaattactcaagcaacctagaag

SEQ ID NO: 453098 - DNA, 25 bp, Artificial
  probe
  misc_feature (1)..(25): SEQ ID NO: 6912; WAN024BRC; Start 732; Stop 756
gaccaatcatataccaacagttact

SEQ ID NO: 453099 - DNA, 25 bp, Artificial
  probe
  misc_feature (1)..(25): SEQ ID NO: 6912; WAN024BRC; Start 340; Stop 364
ttgataatcgttaagagtgttagca

SEQ ID NO: 453100 - DNA, 25 bp, Artificial
  probe
  misc_feature (1)..(25): SEQ ID NO: 6912; WAN024BRC; Start 953; Stop 977
tacaagaattactcaagcaacctag

SEQ ID NO: 453101 - DNA, 25 bp, Artificial
  probe
  misc_feature (1)..(25): SEQ ID NO: 6912; WAN024BRC; Start 231; Stop 255
ttggataatggctggaatctatgct

SEQ ID NO: 453102 - DNA, 25 bp, Artificial
  probe
  misc_feature (1)..(25): SEQ ID NO: 6912; WAN024BRC; Start 670; Stop 694
cgcctaatatatgattcgtacatcg

SEQ ID NO: 453103 - DNA, 25 bp, Artificial
  probe
  misc_feature (1)..(25): SEQ ID NO: 6912; WAN024BRC; Start 952; Stop 976
gtacaagaattactcaagcaaccta

SEQ ID NO: 453104 - DNA, 25 bp, Artificial
  probe
  misc_feature (1)..(25): SEQ ID NO: 6912; WAN024BRC; Start 920; Stop 944
cctctatcataccagaatcaagatg

SEQ ID NO: 453105 - DNA, 25 bp, Artificial
  probe
  misc_feature (1)..(25): SEQ ID NO: 6912; WAN024BRC; Start 731; Stop 755
tgaccaatcatataccaacagttac

SEQ ID NO: 453106 - DNA, 25 bp, Artificial
  probe
  misc_feature (1)..(25): SEQ ID NO: 6912; WAN024BRC; Start 667; Stop 691
gttcgcctaatatatgattcgtaca

SEQ ID NO: 453107 - DNA, 25 bp, Artificial
  probe
  misc_feature (1)..(25): SEQ ID NO: 6912; WAN024BRC; Start 666; Stop 690
tgttcgcctaatatatgattcgtac

SEQ ID NO: 453108 - DNA, 25 bp, Artificial
  probe
  misc_feature (1)..(25): SEQ ID NO: 6912; WAN024BRC; Start 664; Stop 688
attgttcgcctaatatatgattcgt

SEQ ID NO: 453109 - DNA, 25 bp, Artificial
  probe
  misc_feature (1)..(25): SEQ ID NO: 6912; WAN024BRC; Start 831; Stop 855
gcagaagacatatactgttgattgt

SEQ ID NO: 453110 - DNA, 25 bp, Artificial
  probe
  misc_feature (1)..(25): SEQ ID NO: 6912; WAN024BRC; Start 336; Stop 360
tgacttgataatcgttaagagtgtt

SEQ ID NO: 453111 - DNA, 25 bp, Artificial
  probe
  misc_feature (1)..(25): SEQ ID NO: 6912; WAN024BRC; Start 335; Stop 359
ttgacttgataatcgttaagagtgt

SEQ ID NO: 453112 - DNA, 25 bp, Artificial
  probe
  misc_feature (1)..(25): SEQ ID NO: 6912; WAN024BRC; Start 233; Stop 257
ggataatggctggaatctatgctga

SEQ ID NO: 453113 - DNA, 25 bp, Artificial
  probe
  misc_feature (1)..(25): SEQ ID NO: 6912; WAN024BRC; Start 632; Stop 656
gtcgagtagtgatagatgagacaga

SEQ ID NO: 453114 - DNA, 25 bp, Artificial
  probe
  misc_feature (1)..(25): SEQ ID NO: 6912; WAN024BRC; Start 339; Stop 363
cttgataatcgttaagagtgttagc

SEQ ID NO: 453115 - DNA, 25 bp, Artificial
  probe
  misc_feature (1)..(25): SEQ ID NO: 6912; WAN024BRC; Start 292; Stop 316
gaacaattccaacagatgcttcatg

SEQ ID NO: 453116 - DNA, 25 bp, Artificial
  probe
  misc_feature (1)..(25): SEQ ID NO: 6913; WAN024COY; Start 243; Stop 267
catctaccttgataacataaccacc

SEQ ID NO: 453117 - DNA, 25 bp, Artificial
  probe
  misc_feature (1)..(25): SEQ ID NO: 6913; WAN024COY; Start 242; Stop 266
ccatctaccttgataacataaccac

SEQ ID NO: 453118 - DNA, 25 bp, Artificial
  probe
  misc_feature (1)..(25): SEQ ID NO: 6913; WAN024COY; Start 72; Stop 96
tataaccatcatccgttgtatagcg

SEQ ID NO: 453119 - DNA, 25 bp, Artificial
  probe
  misc_feature (1)..(25): SEQ ID NO: 6913; WAN024COY; Start 241; Stop 265
tccatctaccttgataacataacca

SEQ ID NO: 453120 - DNA, 25 bp, Artificial
  probe
  misc_feature (1)..(25): SEQ ID NO: 6913; WAN024COY; Start 66; Stop 90
tgaagatataaccatcatccgttgt

SEQ ID NO: 453121 - DNA, 25 bp, Artificial
  probe
  misc_feature (1)..(25): SEQ ID NO: 6913; WAN024COY; Start 62; Stop 86
gcattgaagatataaccatcatccg

SEQ ID NO: 453122 - DNA, 25 bp, Artificial
  probe
  misc_feature (1)..(25): SEQ ID NO: 6913; WAN024COY; Start 147; Stop 171
gattatgactgtgttcctgcttctg

SEQ ID NO: 453123 - DNA, 25 bp, Artificial
  probe
  misc_feature (1)..(25): SEQ ID NO: 6913; WAN024COY; Start 65; Stop 89
ttgaagatataaccatcatccgttg

SEQ ID NO: 453124 - DNA, 25 bp, Artificial
  probe
  misc_feature (1)..(25): SEQ ID NO: 6913; WAN024COY; Start 148; Stop 172
attatgactgtgttcctgcttctga

SEQ ID NO: 453125 - DNA, 25 bp, Artificial
  probe
  misc_feature (1)..(25): SEQ ID NO: 6913; WAN024COY; Start 146; Stop 170
tgattatgactgtgttcctgcttct

SEQ ID NO: 453126 - DNA, 25 bp, Artificial
  probe
  misc_feature (1)..(25): SEQ ID NO: 6913; WAN024COY; Start 145; Stop 169
gtgattatgactgtgttcctgcttc

SEQ ID NO: 453127 - DNA, 25 bp, Artificial
  probe
  misc_feature (1)..(25): SEQ ID NO: 6913; WAN024COY; Start 63; Stop 87
cattgaagatataaccatcatccgt

SEQ ID NO: 453128 - DNA, 25 bp, Artificial
  probe
  misc_feature (1)..(25): SEQ ID NO: 6913; WAN024COY; Start 71; Stop 95
atataaccatcatccgttgtatagc

SEQ ID NO: 453129 - DNA, 25 bp, Artificial
  probe
  misc_feature (1)..(25): SEQ ID NO: 6913; WAN024COY; Start 240; Stop 264
ttccatctaccttgataacataacc

SEQ ID NO: 453130 - DNA, 25 bp, Artificial
  probe
  misc_feature (1)..(25): SEQ ID NO: 6913; WAN024COY; Start 67; Stop 91
gaagatataaccatcatccgttgta

SEQ ID NO: 453131 - DNA, 25 bp, Artificial
  probe
  misc_feature (1)..(25): SEQ ID NO: 6913; WAN024COY; Start 73; Stop 97
ataaccatcatccgttgtatagcgt

SEQ ID NO: 453132 - DNA, 25 bp, Artificial
  probe
  misc_feature (1)..(25): SEQ ID NO: 6913; WAN024COY; Start 64; Stop 88
attgaagatataaccatcatccgtt

SEQ ID NO: 453133 - DNA, 25 bp, Artificial
  probe
  misc_feature (1)..(25): SEQ ID NO: 6913; WAN024COY; Start 114; Stop 138
caactactgcttgatcgttagaacc

SEQ ID NO: 453134 - DNA, 25 bp, Artificial
  probe
  misc_feature (1)..(25): SEQ ID NO: 6913; WAN024COY; Start 68; Stop 92
aagatataaccatcatccgttgtat

SEQ ID NO: 453135 - DNA, 25 bp, Artificial
  probe
  misc_feature (1)..(25): SEQ ID NO: 6913; WAN024COY; Start 149; Stop 173
ttatgactgtgttcctgcttctgac

SEQ ID NO: 453136 - DNA, 25 bp, Artificial
  probe
  misc_feature (1)..(25): SEQ ID NO: 6913; WAN024COY; Start 74; Stop 98
taaccatcatccgttgtatagcgtc

SEQ ID NO: 453137 - DNA, 25 bp, Artificial
  probe
  misc_feature (1)..(25): SEQ ID NO: 6913; WAN024COY; Start 115; Stop 139
aactactgcttgatcgttagaacca

SEQ ID NO: 453138 - DNA, 25 bp, Artificial
  probe
  misc_feature (1)..(25): SEQ ID NO: 6913; WAN024COY; Start 247; Stop 271
taccttgataacataaccacccttg

SEQ ID NO: 453139 - DNA, 25 bp, Artificial
  probe
  misc_feature (1)..(25): SEQ ID NO: 6913; WAN024COY; Start 246; Stop 270
ctaccttgataacataaccaccctt

SEQ ID NO: 453140 - DNA, 25 bp, Artificial
  probe
  misc_feature (1)..(25): SEQ ID NO: 6913; WAN024COY; Start 249; Stop 273
ccttgataacataaccacccttgat

SEQ ID NO: 453141 - DNA, 25 bp, Artificial
  probe
  misc_feature (1)..(25): SEQ ID NO: 6913; WAN024COY; Start 245; Stop 269
tctaccttgataacataaccaccct

SEQ ID NO: 453142 - DNA, 25 bp, Artificial
  probe
  misc_feature (1)..(25): SEQ ID NO: 6913; WAN024COY; Start 244; Stop 268
atctaccttgataacataaccaccc

SEQ ID NO: 453143 - DNA, 25 bp, Artificial
  probe
  misc_feature (1)..(25): SEQ ID NO: 6913; WAN024COY; Start 256; Stop 280
aacataaccacccttgatttcattg

SEQ ID NO: 453144 - DNA, 25 bp, Artificial
  probe
  misc_feature (1)..(25): SEQ ID NO: 6913; WAN024COY; Start 258; Stop 282
cataaccacccttgatttcattgac

SEQ ID NO: 453145 - DNA, 25 bp, Artificial
  probe
  misc_feature (1)..(25): SEQ ID NO: 6913; WAN024COY; Start 259; Stop 283
ataaccacccttgatttcattgaca

SEQ ID NO: 453146 - DNA, 25 bp, Artificial
  probe
  misc_feature (1)..(25): SEQ ID NO: 6913; WAN024COY; Start 257; Stop 281
acataaccacccttgatttcattga

SEQ ID NO: 453147 - DNA, 25 bp, Artificial
  probe
  misc_feature (1)..(25): SEQ ID NO: 6913; WAN024COY; Start 252; Stop 276
tgataacataaccacccttgatttc

SEQ ID NO: 453148 - DNA, 25 bp, Artificial
  probe
  misc_feature (1)..(25): SEQ ID NO: 6913; WAN024COY; Start 250; Stop 274
cttgataacataaccacccttgatt

SEQ ID NO: 453149 - DNA, 25 bp, Artificial
  probe
  misc_feature (1)..(25): SEQ ID NO: 6914; WAN024BZ6; Start 532; Stop 556
aatgttcttgttctccgattagtct

SEQ ID NO: 453150 - DNA, 25 bp, Artificial
  probe
  misc_feature (1)..(25): SEQ ID NO: 6914; WAN024BZ6; Start 533; Stop 557
atgttcttgttctccgattagtctg

SEQ ID NO: 453151 - DNA, 25 bp, Artificial
  probe
  misc_feature (1)..(25): SEQ ID NO: 6914; WAN024BZ6; Start 44; Stop 68
atattgaacttaacgaatccgaacg

SEQ ID NO: 453152 - DNA, 25 bp, Artificial
  probe
  misc_feature (1)..(25): SEQ ID NO: 6914; WAN024BZ6; Start 374; Stop 398
gcgattcttctatcactgtattcct

SEQ ID NO: 453153 - DNA, 25 bp, Artificial
  probe
  misc_feature (1)..(25): SEQ ID NO: 6914; WAN024BZ6; Start 373; Stop 397
agcgattcttctatcactgtattcc

SEQ ID NO: 453154 - DNA, 25 bp, Artificial
  probe
  misc_feature (1)..(25): SEQ ID NO: 6914; WAN024BZ6; Start 45; Stop 69
tattgaacttaacgaatccgaacga

SEQ ID NO: 453155 - DNA, 25 bp, Artificial
  probe
  misc_feature (1)..(25): SEQ ID NO: 6914; WAN024BZ6; Start 531; Stop 555
caatgttcttgttctccgattagtc

SEQ ID NO: 453156 - DNA, 25 bp, Artificial
  probe
  misc_feature (1)..(25): SEQ ID NO: 6914; WAN024BZ6; Start 50; Stop 74
aacttaacgaatccgaacgaatcaa

SEQ ID NO: 453157 - DNA, 25 bp, Artificial
  probe
  misc_feature (1)..(25): SEQ ID NO: 6914; WAN024BZ6; Start 47; Stop 71
ttgaacttaacgaatccgaacgaat

SEQ ID NO: 453158 - DNA, 25 bp, Artificial
  probe
  misc_feature (1)..(25): SEQ ID NO: 6914; WAN024BZ6; Start 46; Stop 70
attgaacttaacgaatccgaacgaa

SEQ ID NO: 453159 - DNA, 25 bp, Artificial
  probe
  misc_feature (1)..(25): SEQ ID NO: 6914; WAN024BZ6; Start 21; Stop 45
agaccgtattgagaagactgtatat

SEQ ID NO: 453160 - DNA, 25 bp, Artificial
  probe
  misc_feature (1)..(25): SEQ ID NO: 6914; WAN024BZ6; Start 372; Stop 396
aagcgattcttctatcactgtattc

SEQ ID NO: 453161 - DNA, 25 bp, Artificial
  probe
  misc_feature (1)..(25): SEQ ID NO: 6914; WAN024BZ6; Start 49; Stop 73
gaacttaacgaatccgaacgaatca

SEQ ID NO: 453162 - DNA, 25 bp, Artificial
  probe
  misc_feature (1)..(25): SEQ ID NO: 6914; WAN024BZ6; Start 48; Stop 72
tgaacttaacgaatccgaacgaatc

SEQ ID NO: 453163 - DNA, 25 bp, Artificial
  probe
  misc_feature (1)..(25): SEQ ID NO: 6914; WAN024BZ6; Start 375; Stop 399
cgattcttctatcactgtattcctt

SEQ ID NO: 453164 - DNA, 25 bp, Artificial
  probe
  misc_feature (1)..(25): SEQ ID NO: 6914; WAN024BZ6; Start 20; Stop 44
cagaccgtattgagaagactgtata

SEQ ID NO: 453165 - DNA, 25 bp, Artificial
  probe
  misc_feature (1)..(25): SEQ ID NO: 6914; WAN024BZ6; Start 383; Stop 407
ctatcactgtattccttatcagcct

SEQ ID NO: 453166 - DNA, 25 bp, Artificial
  probe
  misc_feature (1)..(25): SEQ ID NO: 6914; WAN024BZ6; Start 382; Stop 406
tctatcactgtattccttatcagcc

SEQ ID NO: 453167 - DNA, 25 bp, Artificial
  probe
  misc_feature (1)..(25): SEQ ID NO: 6914; WAN024BZ6; Start 386; Stop 410
tcactgtattccttatcagccttaa

SEQ ID NO: 453168 - DNA, 25 bp, Artificial
  probe
  misc_feature (1)..(25): SEQ ID NO: 6914; WAN024BZ6; Start 385; Stop 409
atcactgtattccttatcagcctta

SEQ ID NO: 453169 - DNA, 25 bp, Artificial
  probe
  misc_feature (1)..(25): SEQ ID NO: 6914; WAN024BZ6; Start 384; Stop 408
tatcactgtattccttatcagcctt

SEQ ID NO: 453170 - DNA, 25 bp, Artificial
  probe
  misc_feature (1)..(25): SEQ ID NO: 6914; WAN024BZ6; Start 19; Stop 43
ccagaccgtattgagaagactgtat

SEQ ID NO: 453171 - DNA, 25 bp, Artificial
  probe
  misc_feature (1)..(25): SEQ ID NO: 6914; WAN024BZ6; Start 43; Stop 67
tatattgaacttaacgaatccgaac

SEQ ID NO: 453172 - DNA, 25 bp, Artificial
  probe
  misc_feature (1)..(25): SEQ ID NO: 6914; WAN024BZ6; Start 534; Stop 558
tgttcttgttctccgattagtctgc

SEQ ID NO: 453173 - DNA, 25 bp, Artificial
  probe
  misc_feature (1)..(25): SEQ ID NO: 6914; WAN024BZ6; Start 62; Stop 86
ccgaacgaatcaaatataaacaggt

SEQ ID NO: 453174 - DNA, 25 bp, Artificial
  probe
  misc_feature (1)..(25): SEQ ID NO: 6914; WAN024BZ6; Start 61; Stop 85
tccgaacgaatcaaatataaacagg

SEQ ID NO: 453175 - DNA, 25 bp, Artificial
  probe
  misc_feature (1)..(25): SEQ ID NO: 6914; WAN024BZ6; Start 381; Stop 405
ttctatcactgtattccttatcagc

SEQ ID NO: 453176 - DNA, 25 bp, Artificial
  probe
  misc_feature (1)..(25): SEQ ID NO: 6914; WAN024BZ6; Start 52; Stop 76
cttaacgaatccgaacgaatcaaat

SEQ ID NO: 453177 - DNA, 25 bp, Artificial
  probe
  misc_feature (1)..(25): SEQ ID NO: 6914; WAN024BZ6; Start 64; Stop 88
gaacgaatcaaatataaacaggtgc

SEQ ID NO: 453178 - DNA, 25 bp, Artificial
  probe
  misc_feature (1)..(25): SEQ ID NO: 6914; WAN024BZ6; Start 53; Stop 77
ttaacgaatccgaacgaatcaaata

SEQ ID NO: 453179 - DNA, 25 bp, Artificial
  probe
  misc_feature (1)..(25): SEQ ID NO: 6914; WAN024BZ6; Start 56; Stop 80
acgaatccgaacgaatcaaatataa

SEQ ID NO: 453180 - DNA, 25 bp, Artificial
  probe
  misc_feature (1)..(25): SEQ ID NO: 6914; WAN024BZ6; Start 55; Stop 79
aacgaatccgaacgaatcaaatata

SEQ ID NO: 453181 - DNA, 25 bp, Artificial
  probe
  misc_feature (1)..(25): SEQ ID NO: 6914; WAN024BZ6; Start 54; Stop 78
taacgaatccgaacgaatcaaatat

SEQ ID NO: 453182 - DNA, 25 bp, Artificial
  probe
  misc_feature (1)..(25): SEQ ID NO: 6915; WAN024BTW; Start 43; Stop 67
aggaatacagaacaacaagaagagt

SEQ ID NO: 453183 - DNA, 25 bp, Artificial
  probe
  misc_feature (1)..(25): SEQ ID NO: 6915; WAN024BTW; Start 39; Stop 63
tcgtaggaatacagaacaacaagaa

SEQ ID NO: 453184 - DNA, 25 bp, Artificial
  probe
  misc_feature (1)..(25): SEQ ID NO: 6915; WAN024BTW; Start 40; Stop 64
cgtaggaatacagaacaacaagaag

SEQ ID NO: 453185 - DNA, 25 bp, Artificial
  probe
  misc_feature (1)..(25): SEQ ID NO: 6915; WAN024BTW; Start 38; Stop 62
atcgtaggaatacagaacaacaaga

SEQ ID NO: 453186 - DNA, 25 bp, Artificial
  probe
  misc_feature (1)..(25): SEQ ID NO: 6915; WAN024BTW; Start 597; Stop 621
tctctacaatatcctgaataagcgt

SEQ ID NO: 453187 - DNA, 25 bp, Artificial
  probe
  misc_feature (1)..(25): SEQ ID NO: 6915; WAN024BTW; Start 100; Stop 124
atattgaggaccgagagtgttgtat

SEQ ID NO: 453188 - DNA, 25 bp, Artificial
  probe
  misc_feature (1)..(25): SEQ ID NO: 6915; WAN024BTW; Start 464; Stop 488
tgacggacttgttgatgaagattaa

SEQ ID NO: 453189 - DNA, 25 bp, Artificial
  probe
  misc_feature (1)..(25): SEQ ID NO: 6915; WAN024BTW; Start 44; Stop 68
ggaatacagaacaacaagaagagtt

SEQ ID NO: 453190 - DNA, 25 bp, Artificial
  probe
  misc_feature (1)..(25): SEQ ID NO: 6915; WAN024BTW; Start 463; Stop 487
gtgacggacttgttgatgaagatta

SEQ ID NO: 453191 - DNA, 25 bp, Artificial
  probe
  misc_feature (1)..(25): SEQ ID NO: 6915; WAN024BTW; Start 598; Stop 622
ctctacaatatcctgaataagcgtt

SEQ ID NO: 453192 - DNA, 25 bp, Artificial
  probe
  misc_feature (1)..(25): SEQ ID NO: 6915; WAN024BTW; Start 41; Stop 65
gtaggaatacagaacaacaagaaga

SEQ ID NO: 453193 - DNA, 25 bp, Artificial
  probe
  misc_feature (1)..(25): SEQ ID NO: 6915; WAN024BTW; Start 160; Stop 184
aatcaagcaagagtgaatgaattgg

SEQ ID NO: 453194 - DNA, 25 bp, Artificial
  probe
  misc_feature (1)..(25): SEQ ID NO: 6915; WAN024BTW; Start 99; Stop 123
gatattgaggaccgagagtgttgta

SEQ ID NO: 453195 - DNA, 25 bp, Artificial
  probe
  misc_feature (1)..(25): SEQ ID NO: 6915; WAN024BTW; Start 37; Stop 61
tatcgtaggaatacagaacaacaag

SEQ ID NO: 453196 - DNA, 25 bp, Artificial
  probe
  misc_feature (1)..(25): SEQ ID NO: 6915; WAN024BTW; Start 35; Stop 59
cttatcgtaggaatacagaacaaca

SEQ ID NO: 453197 - DNA, 25 bp, Artificial
  probe
  misc_feature (1)..(25): SEQ ID NO: 6915; WAN024BTW; Start 42; Stop 66
taggaatacagaacaacaagaagag

SEQ ID NO: 453198 - DNA, 25 bp, Artificial
  probe
  misc_feature (1)..(25): SEQ ID NO: 6915; WAN024BTW; Start 599; Stop 623
tctacaatatcctgaataagcgttc

SEQ ID NO: 453199 - DNA, 25 bp, Artificial
  probe
  misc_feature (1)..(25): SEQ ID NO: 6915; WAN024BTW; Start 101; Stop 125
tattgaggaccgagagtgttgtatg

SEQ ID NO: 453200 - DNA, 25 bp, Artificial
  probe
  misc_feature (1)..(25): SEQ ID NO: 6915; WAN024BTW; Start 596; Stop 620
ttctctacaatatcctgaataagcg

SEQ ID NO: 453201 - DNA, 25 bp, Artificial
  probe
  misc_feature (1)..(25): SEQ ID NO: 6915; WAN024BTW; Start 36; Stop 60
ttatcgtaggaatacagaacaacaa

SEQ ID NO: 453202 - DNA, 25 bp, Artificial
  probe
  misc_feature (1)..(25): SEQ ID NO: 6915; WAN024BTW; Start 410; Stop 434
cgatggttaaggctctatctgagta

SEQ ID NO: 453203 - DNA, 25 bp, Artificial
  probe
  misc_feature (1)..(25): SEQ ID NO: 6915; WAN024BTW; Start 34; Stop 58
tcttatcgtaggaatacagaacaac

SEQ ID NO: 453204 - DNA, 25 bp, Artificial
  probe
  misc_feature (1)..(25): SEQ ID NO: 6915; WAN024BTW; Start 97; Stop 121
aagatattgaggaccgagagtgttg

SEQ ID NO: 453205 - DNA, 25 bp, Artificial
  probe
  misc_feature (1)..(25): SEQ ID NO: 6915; WAN024BTW; Start 411; Stop 435
gatggttaaggctctatctgagtac

SEQ ID NO: 453206 - DNA, 25 bp, Artificial
  probe
  misc_feature (1)..(25): SEQ ID NO: 6915; WAN024BTW; Start 412; Stop 436
atggttaaggctctatctgagtaca

SEQ ID NO: 453207 - DNA, 25 bp, Artificial
  probe
  misc_feature (1)..(25): SEQ ID NO: 6915; WAN024BTW; Start 27; Stop 51
cgccttatcttatcgtaggaataca

SEQ ID NO: 453208 - DNA, 25 bp, Artificial
  probe
  misc_feature (1)..(25): SEQ ID NO: 6915; WAN024BTW; Start 26; Stop 50
tcgccttatcttatcgtaggaatac

SEQ ID NO: 453209 - DNA, 25 bp, Artificial
  probe
  misc_feature (1)..(25): SEQ ID NO: 6915; WAN024BTW; Start 24; Stop 48
aatcgccttatcttatcgtaggaat

SEQ ID NO: 453210 - DNA, 25 bp, Artificial
  probe
  misc_feature (1)..(25): SEQ ID NO: 6915; WAN024BTW; Start 416; Stop 440
ttaaggctctatctgagtacacgaa

SEQ ID NO: 453211 - DNA, 25 bp, Artificial
  probe
  misc_feature (1)..(25): SEQ ID NO: 6915; WAN024BTW; Start 413; Stop 437
tggttaaggctctatctgagtacac

SEQ ID NO: 453212 - DNA, 25 bp, Artificial
  probe
  misc_feature (1)..(25): SEQ ID NO: 6915; WAN024BTW; Start 25; Stop 49
atcgccttatcttatcgtaggaata

SEQ ID NO: 453213 - DNA, 25 bp, Artificial
  probe
  misc_feature (1)..(25): SEQ ID NO: 6915; WAN024BTW; Start 415; Stop 439
gttaaggctctatctgagtacacga

SEQ ID NO: 453214 - DNA, 25 bp, Artificial
  probe
  misc_feature (1)..(25): SEQ ID NO: 6915; WAN024BTW; Start 28; Stop 52
gccttatcttatcgtaggaatacag

SEQ ID NO: 453215 - DNA, 25 bp, Artificial
  probe
  misc_feature (1)..(25): SEQ ID NO: 6916; WAN024D5Z; Start 217; Stop 241
gaatgctactgcctcgtctttgata

SEQ ID NO: 453216 - DNA, 25 bp, Artificial
  probe
  misc_feature (1)..(25): SEQ ID NO: 6916; WAN024D5Z; Start 218; Stop 242
aatgctactgcctcgtctttgatac

SEQ ID NO: 453217 - DNA, 25 bp, Artificial
  probe
  misc_feature (1)..(25): SEQ ID NO: 6916; WAN024D5Z; Start 184; Stop 208
acaatgaacaaagccaatgtcactc

SEQ ID NO: 453218 - DNA, 25 bp, Artificial
  probe
  misc_feature (1)..(25): SEQ ID NO: 6916; WAN024D5Z; Start 136; Stop 160
gaaaatcgcaaaattgtgataaccc

SEQ ID NO: 453219 - DNA, 25 bp, Artificial
  probe
  misc_feature (1)..(25): SEQ ID NO: 6916; WAN024D5Z; Start 137; Stop 161
aaaatcgcaaaattgtgataaccca

SEQ ID NO: 453220 - DNA, 25 bp, Artificial
  probe
  misc_feature (1)..(25): SEQ ID NO: 6916; WAN024D5Z; Start 135; Stop 159
agaaaatcgcaaaattgtgataacc

SEQ ID NO: 453221 - DNA, 25 bp, Artificial
  probe
  misc_feature (1)..(25): SEQ ID NO: 6916; WAN024D5Z; Start 132; Stop 156
ggaagaaaatcgcaaaattgtgata

SEQ ID NO: 453222 - DNA, 25 bp, Artificial
  probe
  misc_feature (1)..(25): SEQ ID NO: 6916; WAN024D5Z; Start 131; Stop 155
gggaagaaaatcgcaaaattgtgat

SEQ ID NO: 453223 - DNA, 25 bp, Artificial
  probe
  misc_feature (1)..(25): SEQ ID NO: 6916; WAN024D5Z; Start 138; Stop 162
aaatcgcaaaattgtgataacccaa

SEQ ID NO: 453224 - DNA, 25 bp, Artificial
  probe
  misc_feature (1)..(25): SEQ ID NO: 6916; WAN024D5Z; Start 139; Stop 163
aatcgcaaaattgtgataacccaac

SEQ ID NO: 453225 - DNA, 25 bp, Artificial
  probe
  misc_feature (1)..(25): SEQ ID NO: 6916; WAN024D5Z; Start 185; Stop 209
caatgaacaaagccaatgtcactcg

SEQ ID NO: 453226 - DNA, 25 bp, Artificial
  probe
  misc_feature (1)..(25): SEQ ID NO: 6916; WAN024D5Z; Start 129; Stop 153
ctgggaagaaaatcgcaaaattgtg

SEQ ID NO: 453227 - DNA, 25 bp, Artificial
  probe
  misc_feature (1)..(25): SEQ ID NO: 6916; WAN024D5Z; Start 146; Stop 170
aaattgtgataacccaacaagagtg

SEQ ID NO: 453228 - DNA, 25 bp, Artificial
  probe
  misc_feature (1)..(25): SEQ ID NO: 6916; WAN024D5Z; Start 130; Stop 154
tgggaagaaaatcgcaaaattgtga

SEQ ID NO: 453229 - DNA, 25 bp, Artificial
  probe
  misc_feature (1)..(25): SEQ ID NO: 6916; WAN024D5Z; Start 134; Stop 158
aagaaaatcgcaaaattgtgataac

SEQ ID NO: 453230 - DNA, 25 bp, Artificial
  probe
  misc_feature (1)..(25): SEQ ID NO: 6916; WAN024D5Z; Start 147; Stop 171
aattgtgataacccaacaagagtgg

SEQ ID NO: 453231 - DNA, 25 bp, Artificial
  probe
  misc_feature (1)..(25): SEQ ID NO: 6916; WAN024D5Z; Start 133; Stop 157
gaagaaaatcgcaaaattgtgataa

SEQ ID NO: 453232 - DNA, 25 bp, Artificial
  probe
  misc_feature (1)..(25): SEQ ID NO: 6916; WAN024D5Z; Start 140; Stop 164
atcgcaaaattgtgataacccaaca

SEQ ID NO: 453233 - DNA, 25 bp, Artificial
  probe
  misc_feature (1)..(25): SEQ ID NO: 6916; WAN024D5Z; Start 88; Stop 112
ttcttccatgcctgcataaccattt

SEQ ID NO: 453234 - DNA, 25 bp, Artificial
  probe
  misc_feature (1)..(25): SEQ ID NO: 6916; WAN024D5Z; Start 87; Stop 111
tttcttccatgcctgcataaccatt

SEQ ID NO: 453235 - DNA, 25 bp, Artificial
  probe
  misc_feature (1)..(25): SEQ ID NO: 6916; WAN024D5Z; Start 128; Stop 152
cctgggaagaaaatcgcaaaattgt

SEQ ID NO: 453236 - DNA, 25 bp, Artificial
  probe
  misc_feature (1)..(25): SEQ ID NO: 6916; WAN024D5Z; Start 127; Stop 151
acctgggaagaaaatcgcaaaattg

SEQ ID NO: 453237 - DNA, 25 bp, Artificial
  probe
  misc_feature (1)..(25): SEQ ID NO: 6916; WAN024D5Z; Start 126; Stop 150
cacctgggaagaaaatcgcaaaatt

SEQ ID NO: 453238 - DNA, 25 bp, Artificial
  probe
  misc_feature (1)..(25): SEQ ID NO: 6916; WAN024D5Z; Start 164; Stop 188
aagagtgggtagtgttcatgacaat

SEQ ID NO: 453239 - DNA, 25 bp, Artificial
  probe
  misc_feature (1)..(25): SEQ ID NO: 6916; WAN024D5Z; Start 125; Stop 149
tcacctgggaagaaaatcgcaaaat

SEQ ID NO: 453240 - DNA, 25 bp, Artificial
  probe
  misc_feature (1)..(25): SEQ ID NO: 6916; WAN024D5Z; Start 89; Stop 113
tcttccatgcctgcataaccatttg

SEQ ID NO: 453241 - DNA, 25 bp, Artificial
  probe
  misc_feature (1)..(25): SEQ ID NO: 6916; WAN024D5Z; Start 180; Stop 204
catgacaatgaacaaagccaatgtc

SEQ ID NO: 453242 - DNA, 25 bp, Artificial
  probe
  misc_feature (1)..(25): SEQ ID NO: 6916; WAN024D5Z; Start 165; Stop 189
agagtgggtagtgttcatgacaatg

SEQ ID NO: 453243 - DNA, 25 bp, Artificial
  probe
  misc_feature (1)..(25): SEQ ID NO: 6916; WAN024D5Z; Start 163; Stop 187
caagagtgggtagtgttcatgacaa

SEQ ID NO: 453244 - DNA, 25 bp, Artificial
  probe
  misc_feature (1)..(25): SEQ ID NO: 6916; WAN024D5Z; Start 186; Stop 210
aatgaacaaagccaatgtcactcgc

SEQ ID NO: 453245 - DNA, 25 bp, Artificial
  probe
  misc_feature (1)..(25): SEQ ID NO: 6916; WAN024D5Z; Start 124; Stop 148
ctcacctgggaagaaaatcgcaaaa

SEQ ID NO: 453246 - DNA, 25 bp, Artificial
  probe
  misc_feature (1)..(25): SEQ ID NO: 6916; WAN024D5Z; Start 102; Stop 126
cataaccatttggctgatgtggctc

SEQ ID NO: 453247 - DNA, 25 bp, Artificial
  probe
  misc_feature (1)..(25): SEQ ID NO: 6916; WAN024D5Z; Start 145; Stop 169
aaaattgtgataacccaacaagagt

SEQ ID NO: 453248 - DNA, 25 bp, Artificial
  probe
  misc_feature (1)..(25): SEQ ID NO: 6917; WAN024CYC; Start 1; Stop 25
atggtagatggagaaatcacacatt

SEQ ID NO: 453249 - DNA, 25 bp, Artificial
  probe
  misc_feature (1)..(25): SEQ ID NO: 6917; WAN024CYC; Start 2; Stop 26
tggtagatggagaaatcacacattc

SEQ ID NO: 453250 - DNA, 25 bp, Artificial
  probe
  misc_feature (1)..(25): SEQ ID NO: 6917; WAN024CYC; Start 37; Stop 61
ccatctggatatttcaatgtgcttg

SEQ ID NO: 453251 - DNA, 25 bp, Artificial
  probe
  misc_feature (1)..(25): SEQ ID NO: 6917; WAN024CYC; Start 83; Stop 107
tagccatgttcattgtttgtacttc

SEQ ID NO: 453252 - DNA, 25 bp, Artificial
  probe
  misc_feature (1)..(25): SEQ ID NO: 6917; WAN024CYC; Start 82; Stop 106
ttagccatgttcattgtttgtactt

SEQ ID NO: 453253 - DNA, 25 bp, Artificial
  probe
  misc_feature (1)..(25): SEQ ID NO: 6917; WAN024CYC; Start 81; Stop 105
tttagccatgttcattgtttgtact

SEQ ID NO: 453254 - DNA, 25 bp, Artificial
  probe
  misc_feature (1)..(25): SEQ ID NO: 6917; WAN024CYC; Start 36; Stop 60
cccatctggatatttcaatgtgctt

SEQ ID NO: 453255 - DNA, 25 bp, Artificial
  probe
  misc_feature (1)..(25): SEQ ID NO: 6917; WAN024CYC; Start 58; Stop 82
cttgaaatcaaatctgccacacttt

SEQ ID NO: 453256 - DNA, 25 bp, Artificial
  probe
  misc_feature (1)..(25): SEQ ID NO: 6917; WAN024CYC; Start 94; Stop 118
attgtttgtacttcaagtgattcgc

SEQ ID NO: 453257 - DNA, 25 bp, Artificial
  probe
  misc_feature (1)..(25): SEQ ID NO: 6917; WAN024CYC; Start 93; Stop 117
cattgtttgtacttcaagtgattcg

SEQ ID NO: 453258 - DNA, 25 bp, Artificial
  probe
  misc_feature (1)..(25): SEQ ID NO: 6917; WAN024CYC; Start 89; Stop 113
tgttcattgtttgtacttcaagtga

SEQ ID NO: 453259 - DNA, 25 bp, Artificial
  probe
  misc_feature (1)..(25): SEQ ID NO: 6917; WAN024CYC; Start 85; Stop 109
gccatgttcattgtttgtacttcaa

SEQ ID NO: 453260 - DNA, 25 bp, Artificial
  probe
  misc_feature (1)..(25): SEQ ID NO: 6917; WAN024CYC; Start 11; Stop 35
gagaaatcacacattccacaggttc

SEQ ID NO: 453261 - DNA, 25 bp, Artificial
  probe
  misc_feature (1)..(25): SEQ ID NO: 6917; WAN024CYC; Start 84; Stop 108
agccatgttcattgtttgtacttca

SEQ ID NO: 453262 - DNA, 25 bp, Artificial
  probe
  misc_feature (1)..(25): SEQ ID NO: 6917; WAN024CYC; Start 86; Stop 110
ccatgttcattgtttgtacttcaag

SEQ ID NO: 453263 - DNA, 25 bp, Artificial
  probe
  misc_feature (1)..(25): SEQ ID NO: 6917; WAN024CYC; Start 88; Stop 112
atgttcattgtttgtacttcaagtg

SEQ ID NO: 453264 - DNA, 25 bp, Artificial
  probe
  misc_feature (1)..(25): SEQ ID NO: 6917; WAN024CYC; Start 90; Stop 114
gttcattgtttgtacttcaagtgat

SEQ ID NO: 453265 - DNA, 25 bp, Artificial
  probe
  misc_feature (1)..(25): SEQ ID NO: 6917; WAN024CYC; Start 3; Stop 27
ggtagatggagaaatcacacattcc

SEQ ID NO: 453266 - DNA, 25 bp, Artificial
  probe
  misc_feature (1)..(25): SEQ ID NO: 6917; WAN024CYC; Start 87; Stop 111
catgttcattgtttgtacttcaagt

SEQ ID NO: 453267 - DNA, 25 bp, Artificial
  probe
  misc_feature (1)..(25): SEQ ID NO: 6917; WAN024CYC; Start 51; Stop 75
caatgtgcttgaaatcaaatctgcc

SEQ ID NO: 453268 - DNA, 25 bp, Artificial
  probe
  misc_feature (1)..(25): SEQ ID NO: 6917; WAN024CYC; Start 92; Stop 116
tcattgtttgtacttcaagtgattc

SEQ ID NO: 453269 - DNA, 25 bp, Artificial
  probe
  misc_feature (1)..(25): SEQ ID NO: 6917; WAN024CYC; Start 52; Stop 76
aatgtgcttgaaatcaaatctgcca

SEQ ID NO: 453270 - DNA, 25 bp, Artificial
  probe
  misc_feature (1)..(25): SEQ ID NO: 6917; WAN024CYC; Start 91; Stop 115
ttcattgtttgtacttcaagtgatt

SEQ ID NO: 453271 - DNA, 25 bp, Artificial
  probe
  misc_feature (1)..(25): SEQ ID NO: 6917; WAN024CYC; Start 12; Stop 36
agaaatcacacattccacaggttcc

SEQ ID NO: 453272 - DNA, 25 bp, Artificial
  probe
  misc_feature (1)..(25): SEQ ID NO: 6917; WAN024CYC; Start 57; Stop 81
gcttgaaatcaaatctgccacactt

SEQ ID NO: 453273 - DNA, 25 bp, Artificial
  probe
  misc_feature (1)..(25): SEQ ID NO: 6917; WAN024CYC; Start 62; Stop 86
aaatcaaatctgccacacttttagc

SEQ ID NO: 453274 - DNA, 25 bp, Artificial
  probe
  misc_feature (1)..(25): SEQ ID NO: 6917; WAN024CYC; Start 61; Stop 85
gaaatcaaatctgccacacttttag

SEQ ID NO: 453275 - DNA, 25 bp, Artificial
  probe
  misc_feature (1)..(25): SEQ ID NO: 6917; WAN024CYC; Start 60; Stop 84
tgaaatcaaatctgccacactttta

SEQ ID NO: 453276 - DNA, 25 bp, Artificial
  probe
  misc_feature (1)..(25): SEQ ID NO: 6917; WAN024CYC; Start 38; Stop 62
catctggatatttcaatgtgcttga

SEQ ID NO: 453277 - DNA, 25 bp, Artificial
  probe
  misc_feature (1)..(25): SEQ ID NO: 6917; WAN024CYC; Start 50; Stop 74
tcaatgtgcttgaaatcaaatctgc

SEQ ID NO: 453278 - DNA, 25 bp, Artificial
  probe
  misc_feature (1)..(25): SEQ ID NO: 6917; WAN024CYC; Start 78; Stop 102
acttttagccatgttcattgtttgt

SEQ ID NO: 453279 - DNA, 25 bp, Artificial
  probe
  misc_feature (1)..(25): SEQ ID NO: 6917; WAN024CYC; Start 77; Stop 101
cacttttagccatgttcattgtttg

SEQ ID NO: 453280 - DNA, 25 bp, Artificial
  probe
  misc_feature (1)..(25): SEQ ID NO: 6917; WAN024CYC; Start 53; Stop 77
atgtgcttgaaatcaaatctgccac

SEQ ID NO: 453281 - DNA, 25 bp, Artificial
  probe
  misc_feature (1)..(25): SEQ ID NO: 6918; WAN024DM5; Start 109; Stop 133
ttacattctactcgctctcatacag

SEQ ID NO: 453282 - DNA, 25 bp, Artificial
  probe
  misc_feature (1)..(25): SEQ ID NO: 6918; WAN024DM5; Start 56; Stop 80
gtcaatggaactatggagtaggatg

SEQ ID NO: 453283 - DNA, 25 bp, Artificial
  probe
  misc_feature (1)..(25): SEQ ID NO: 6918; WAN024DM5; Start 59; Stop 83
aatggaactatggagtaggatggtc

SEQ ID NO: 453284 - DNA, 25 bp, Artificial
  probe
  misc_feature (1)..(25): SEQ ID NO: 6918; WAN024DM5; Start 57; Stop 81
tcaatggaactatggagtaggatgg

SEQ ID NO: 453285 - DNA, 25 bp, Artificial
  probe
  misc_feature (1)..(25): SEQ ID NO: 6918; WAN024DM5; Start 55; Stop 79
ggtcaatggaactatggagtaggat

SEQ ID NO: 453286 - DNA, 25 bp, Artificial
  probe
  misc_feature (1)..(25): SEQ ID NO: 6918; WAN024DM5; Start 58; Stop 82
caatggaactatggagtaggatggt

SEQ ID NO: 453287 - DNA, 25 bp, Artificial
  probe
  misc_feature (1)..(25): SEQ ID NO: 6918; WAN024DM5; Start 64; Stop 88
aactatggagtaggatggtcaggaa

SEQ ID NO: 453288 - DNA, 25 bp, Artificial
  probe
  misc_feature (1)..(25): SEQ ID NO: 6918; WAN024DM5; Start 60; Stop 84
atggaactatggagtaggatggtca

SEQ ID NO: 453289 - DNA, 25 bp, Artificial
  probe
  misc_feature (1)..(25): SEQ ID NO: 6918; WAN024DM5; Start 54; Stop 78
tggtcaatggaactatggagtagga

SEQ ID NO: 453290 - DNA, 25 bp, Artificial
  probe
  misc_feature (1)..(25): SEQ ID NO: 6918; WAN024DM5; Start 108; Stop 132
tttacattctactcgctctcataca

SEQ ID NO: 453291 - DNA, 25 bp, Artificial
  probe
  misc_feature (1)..(25): SEQ ID NO: 6918; WAN024DM5; Start 63; Stop 87
gaactatggagtaggatggtcagga

SEQ ID NO: 453292 - DNA, 25 bp, Artificial
  probe
  misc_feature (1)..(25): SEQ ID NO: 6918; WAN024DM5; Start 49; Stop 73
gatggtggtcaatggaactatggag

SEQ ID NO: 453293 - DNA, 25 bp, Artificial
  probe
  misc_feature (1)..(25): SEQ ID NO: 6918; WAN024DM5; Start 67; Stop 91
tatggagtaggatggtcaggaaatt

SEQ ID NO: 453294 - DNA, 25 bp, Artificial
  probe
  misc_feature (1)..(25): SEQ ID NO: 6918; WAN024DM5; Start 66; Stop 90
ctatggagtaggatggtcaggaaat

SEQ ID NO: 453295 - DNA, 25 bp, Artificial
  probe
  misc_feature (1)..(25): SEQ ID NO: 6918; WAN024DM5; Start 197; Stop 221
cttcaatcttcaaattcccaccaac

SEQ ID NO: 453296 - DNA, 25 bp, Artificial
  probe
  misc_feature (1)..(25): SEQ ID NO: 6918; WAN024DM5; Start 61; Stop 85
tggaactatggagtaggatggtcag

SEQ ID NO: 453297 - DNA, 25 bp, Artificial
  probe
  misc_feature (1)..(25): SEQ ID NO: 6918; WAN024DM5; Start 51; Stop 75
tggtggtcaatggaactatggagta

SEQ ID NO: 453298 - DNA, 25 bp, Artificial
  probe
  misc_feature (1)..(25): SEQ ID NO: 6918; WAN024DM5; Start 107; Stop 131
atttacattctactcgctctcatac

SEQ ID NO: 453299 - DNA, 25 bp, Artificial
  probe
  misc_feature (1)..(25): SEQ ID NO: 6918; WAN024DM5; Start 105; Stop 129
ttatttacattctactcgctctcat

SEQ ID NO: 453300 - DNA, 25 bp, Artificial
  probe
  misc_feature (1)..(25): SEQ ID NO: 6918; WAN024DM5; Start 104; Stop 128
attatttacattctactcgctctca

SEQ ID NO: 453301 - DNA, 25 bp, Artificial
  probe
  misc_feature (1)..(25): SEQ ID NO: 6918; WAN024DM5; Start 102; Stop 126
tgattatttacattctactcgctct

SEQ ID NO: 453302 - DNA, 25 bp, Artificial
  probe
  misc_feature (1)..(25): SEQ ID NO: 6918; WAN024DM5; Start 100; Stop 124
tctgattatttacattctactcgct

SEQ ID NO: 453303 - DNA, 25 bp, Artificial
  probe
  misc_feature (1)..(25): SEQ ID NO: 6918; WAN024DM5; Start 219; Stop 243
aacgggaatggaatatttctatgga

SEQ ID NO: 453304 - DNA, 25 bp, Artificial
  probe
  misc_feature (1)..(25): SEQ ID NO: 6918; WAN024DM5; Start 218; Stop 242
caacgggaatggaatatttctatgg

SEQ ID NO: 453305 - DNA, 25 bp, Artificial
  probe
  misc_feature (1)..(25): SEQ ID NO: 6918; WAN024DM5; Start 110; Stop 134
tacattctactcgctctcatacagc

SEQ ID NO: 453306 - DNA, 25 bp, Artificial
  probe
  misc_feature (1)..(25): SEQ ID NO: 6918; WAN024DM5; Start 220; Stop 244
acgggaatggaatatttctatggat

SEQ ID NO: 453307 - DNA, 25 bp, Artificial
  probe
  misc_feature (1)..(25): SEQ ID NO: 6918; WAN024DM5; Start 198; Stop 222
ttcaatcttcaaattcccaccaacg

SEQ ID NO: 453308 - DNA, 25 bp, Artificial
  probe
  misc_feature (1)..(25): SEQ ID NO: 6918; WAN024DM5; Start 196; Stop 220
gcttcaatcttcaaattcccaccaa

SEQ ID NO: 453309 - DNA, 25 bp, Artificial
  probe
  misc_feature (1)..(25): SEQ ID NO: 6918; WAN024DM5; Start 62; Stop 86
ggaactatggagtaggatggtcagg

SEQ ID NO: 453310 - DNA, 25 bp, Artificial
  probe
  misc_feature (1)..(25): SEQ ID NO: 6918; WAN024DM5; Start 50; Stop 74
atggtggtcaatggaactatggagt

SEQ ID NO: 453311 - DNA, 25 bp, Artificial
  probe
  misc_feature (1)..(25): SEQ ID NO: 6918; WAN024DM5; Start 48; Stop 72
tgatggtggtcaatggaactatgga

SEQ ID NO: 453312 - DNA, 25 bp, Artificial
  probe
  misc_feature (1)..(25): SEQ ID NO: 6918; WAN024DM5; Start 101; Stop 125
ctgattatttacattctactcgctc

SEQ ID NO: 453313 - DNA, 25 bp, Artificial
  probe
  misc_feature (1)..(25): SEQ ID NO: 6918; WAN024DM5; Start 149; Stop 173
gaaataaattctctaaggatcgtgc

SEQ ID NO: 453314 - DNA, 25 bp, Artificial
  probe
  misc_feature (1)..(25): SEQ ID NO: 6919; WAN024BQE; Start 1045; Stop 1069
gatgagcagtatggttacggttatt

SEQ ID NO: 453315 - DNA, 25 bp, Artificial
  probe
  misc_feature (1)..(25): SEQ ID NO: 6919; WAN024BQE; Start 518; Stop 542
ttgagaacttagaagagatgactgt

SEQ ID NO: 453316 - DNA, 25 bp, Artificial
  probe
  misc_feature (1)..(25): SEQ ID NO: 6919; WAN024BQE; Start 519; Stop 543
tgagaacttagaagagatgactgtt

SEQ ID NO: 453317 - DNA, 25 bp, Artificial
  probe
  misc_feature (1)..(25): SEQ ID NO: 6919; WAN024BQE; Start 1044; Stop 1068
tgatgagcagtatggttacggttat

SEQ ID NO: 453318 - DNA, 25 bp, Artificial
  probe
  misc_feature (1)..(25): SEQ ID NO: 6919; WAN024BQE; Start 517; Stop 541
attgagaacttagaagagatgactg

SEQ ID NO: 453319 - DNA, 25 bp, Artificial
  probe
  misc_feature (1)..(25): SEQ ID NO: 6919; WAN024BQE; Start 77; Stop 101
ttactgaatggactaatgtgaagaa

SEQ ID NO: 453320 - DNA, 25 bp, Artificial
  probe
  misc_feature (1)..(25): SEQ ID NO: 6919; WAN024BQE; Start 163; Stop 187
aacctcttagatacagaagttcaag

SEQ ID NO: 453321 - DNA, 25 bp, Artificial
  probe
  misc_feature (1)..(25): SEQ ID NO: 6919; WAN024BQE; Start 112; Stop 136
caatacagaggacatattcagcctg

SEQ ID NO: 453322 - DNA, 25 bp, Artificial
  probe
  misc_feature (1)..(25): SEQ ID NO: 6919; WAN024BQE; Start 660; Stop 684
tgaaccaatctatacggtatctgag

SEQ ID NO: 453323 - DNA, 25 bp, Artificial
  probe
  misc_feature (1)..(25): SEQ ID NO: 6919; WAN024BQE; Start 661; Stop 685
gaaccaatctatacggtatctgaga

SEQ ID NO: 453324 - DNA, 25 bp, Artificial
  probe
  misc_feature (1)..(25): SEQ ID NO: 6919; WAN024BQE; Start 516; Stop 540
aattgagaacttagaagagatgact

SEQ ID NO: 453325 - DNA, 25 bp, Artificial
  probe
  misc_feature (1)..(25): SEQ ID NO: 6919; WAN024BQE; Start 659; Stop 683
ttgaaccaatctatacggtatctga

SEQ ID NO: 453326 - DNA, 25 bp, Artificial
  probe
  misc_feature (1)..(25): SEQ ID NO: 6919; WAN024BQE; Start 781; Stop 805
cgttcgctcttatttgactatgatg

SEQ ID NO: 453327 - DNA, 25 bp, Artificial
  probe
  misc_feature (1)..(25): SEQ ID NO: 6919; WAN024BQE; Start 396; Stop 420
ttactcagatactttggatggatgg

SEQ ID NO: 453328 - DNA, 25 bp, Artificial
  probe
  misc_feature (1)..(25): SEQ ID NO: 6919; WAN024BQE; Start 15; Stop 39
tgctttctatcttcctcagtttcat

SEQ ID NO: 453329 - DNA, 25 bp, Artificial
  probe
  misc_feature (1)..(25): SEQ ID NO: 6919; WAN024BQE; Start 14; Stop 38
ttgctttctatcttcctcagtttca

SEQ ID NO: 453330 - DNA, 25 bp, Artificial
  probe
  misc_feature (1)..(25): SEQ ID NO: 6919; WAN024BQE; Start 23; Stop 47
atcttcctcagtttcataccattcc

SEQ ID NO: 453331 - DNA, 25 bp, Artificial
  probe
  misc_feature (1)..(25): SEQ ID NO: 6919; WAN024BQE; Start 1053; Stop 1077
gtatggttacggttatttagaagcg

SEQ ID NO: 453332 - DNA, 25 bp, Artificial
  probe
  misc_feature (1)..(25): SEQ ID NO: 6919; WAN024BQE; Start 1047; Stop 1071
tgagcagtatggttacggttattta

SEQ ID NO: 453333 - DNA, 25 bp, Artificial
  probe
  misc_feature (1)..(25): SEQ ID NO: 6919; WAN024BQE; Start 1046; Stop 1070
atgagcagtatggttacggttattt

SEQ ID NO: 453334 - DNA, 25 bp, Artificial
  probe
  misc_feature (1)..(25): SEQ ID NO: 6919; WAN024BQE; Start 397; Stop 421
tactcagatactttggatggatgga

SEQ ID NO: 453335 - DNA, 25 bp, Artificial
  probe
  misc_feature (1)..(25): SEQ ID NO: 6919; WAN024BQE; Start 320; Stop 344
tttgtatttgttgggctaatgagag

SEQ ID NO: 453336 - DNA, 25 bp, Artificial
  probe
  misc_feature (1)..(25): SEQ ID NO: 6919; WAN024BQE; Start 1049; Stop 1073
agcagtatggttacggttatttaga

SEQ ID NO: 453337 - DNA, 25 bp, Artificial
  probe
  misc_feature (1)..(25): SEQ ID NO: 6919; WAN024BQE; Start 997; Stop 1021
tttattaacgcttggaatgaatggg

SEQ ID NO: 453338 - DNA, 25 bp, Artificial
  probe
  misc_feature (1)..(25): SEQ ID NO: 6919; WAN024BQE; Start 1054; Stop 1078
tatggttacggttatttagaagcgg

SEQ ID NO: 453339 - DNA, 25 bp, Artificial
  probe
  misc_feature (1)..(25): SEQ ID NO: 6919; WAN024BQE; Start 1048; Stop 1072
gagcagtatggttacggttatttag

SEQ ID NO: 453340 - DNA, 25 bp, Artificial
  probe
  misc_feature (1)..(25): SEQ ID NO: 6919; WAN024BQE; Start 270; Stop 294
ggagaaacctatggagaatatgctg

SEQ ID NO: 453341 - DNA, 25 bp, Artificial
  probe
  misc_feature (1)..(25): SEQ ID NO: 6919; WAN024BQE; Start 268; Stop 292
ctggagaaacctatggagaatatgc

SEQ ID NO: 453342 - DNA, 25 bp, Artificial
  probe
  misc_feature (1)..(25): SEQ ID NO: 6919; WAN024BQE; Start 1043; Stop 1067
ctgatgagcagtatggttacggtta

SEQ ID NO: 453343 - DNA, 25 bp, Artificial
  probe
  misc_feature (1)..(25): SEQ ID NO: 6919; WAN024BQE; Start 111; Stop 135
ccaatacagaggacatattcagcct

SEQ ID NO: 453344 - DNA, 25 bp, Artificial
  probe
  misc_feature (1)..(25): SEQ ID NO: 6919; WAN024BQE; Start 13; Stop 37
attgctttctatcttcctcagtttc

SEQ ID NO: 453345 - DNA, 25 bp, Artificial
  probe
  misc_feature (1)..(25): SEQ ID NO: 6919; WAN024BQE; Start 113; Stop 137
aatacagaggacatattcagcctga

SEQ ID NO: 453346 - DNA, 25 bp, Artificial
  probe
  misc_feature (1)..(25): SEQ ID NO: 6919; WAN024BQE; Start 797; Stop 821
actatgatgaagtatggtcagctat

SEQ ID NO: 453347 - DNA, 25 bp, Artificial
  probe
  misc_feature (1)..(25): SEQ ID NO: 6920; WAN024G6V; Start 1062; Stop 1086
aagatatagtggcggtgattatagc

SEQ ID NO: 453348 - DNA, 25 bp, Artificial
  probe
  misc_feature (1)..(25): SEQ ID NO: 6920; WAN024G6V; Start 1059; Stop 1083
gagaagatatagtggcggtgattat

SEQ ID NO: 453349 - DNA, 25 bp, Artificial
  probe
  misc_feature (1)..(25): SEQ ID NO: 6920; WAN024G6V; Start 751; Stop 775
ccgactcctaatcatacaattcctt

SEQ ID NO: 453350 - DNA, 25 bp, Artificial
  probe
  misc_feature (1)..(25): SEQ ID NO: 6920; WAN024G6V; Start 749; Stop 773
taccgactcctaatcatacaattcc

SEQ ID NO: 453351 - DNA, 25 bp, Artificial
  probe
  misc_feature (1)..(25): SEQ ID NO: 6920; WAN024G6V; Start 750; Stop 774
accgactcctaatcatacaattcct

SEQ ID NO: 453352 - DNA, 25 bp, Artificial
  probe
  misc_feature (1)..(25): SEQ ID NO: 6920; WAN024G6V; Start 1060; Stop 1084
agaagatatagtggcggtgattata

SEQ ID NO: 453353 - DNA, 25 bp, Artificial
  probe
  misc_feature (1)..(25): SEQ ID NO: 6920; WAN024G6V; Start 658; Stop 682
actaatacaccgctaggctcatata

SEQ ID NO: 453354 - DNA, 25 bp, Artificial
  probe
  misc_feature (1)..(25): SEQ ID NO: 6920; WAN024G6V; Start 1111; Stop 1135
attagtggaactgatgaagacgatt

SEQ ID NO: 453355 - DNA, 25 bp, Artificial
  probe
  misc_feature (1)..(25): SEQ ID NO: 6920; WAN024G6V; Start 1058; Stop 1082
ggagaagatatagtggcggtgatta

SEQ ID NO: 453356 - DNA, 25 bp, Artificial
  probe
  misc_feature (1)..(25): SEQ ID NO: 6920; WAN024G6V; Start 1110; Stop 1134
gattagtggaactgatgaagacgat

SEQ ID NO: 453357 - DNA, 25 bp, Artificial
  probe
  misc_feature (1)..(25): SEQ ID NO: 6920; WAN024G6V; Start 1061; Stop 1085
gaagatatagtggcggtgattatag

SEQ ID NO: 453358 - DNA, 25 bp, Artificial
  probe
  misc_feature (1)..(25): SEQ ID NO: 6920; WAN024G6V; Start 1108; Stop 1132
ttgattagtggaactgatgaagacg

SEQ ID NO: 453359 - DNA, 25 bp, Artificial
  probe
  misc_feature (1)..(25): SEQ ID NO: 6920; WAN024G6V; Start 657; Stop 681
aactaatacaccgctaggctcatat

SEQ ID NO: 453360 - DNA, 25 bp, Artificial
  probe
  misc_feature (1)..(25): SEQ ID NO: 6920; WAN024G6V; Start 659; Stop 683
ctaatacaccgctaggctcatatat

SEQ ID NO: 453361 - DNA, 25 bp, Artificial
  probe
  misc_feature (1)..(25): SEQ ID NO: 6920; WAN024G6V; Start 1063; Stop 1087
agatatagtggcggtgattatagcg

SEQ ID NO: 453362 - DNA, 25 bp, Artificial
  probe
  misc_feature (1)..(25): SEQ ID NO: 6920; WAN024G6V; Start 1109; Stop 1133
tgattagtggaactgatgaagacga

SEQ ID NO: 453363 - DNA, 25 bp, Artificial
  probe
  misc_feature (1)..(25): SEQ ID NO: 6920; WAN024G6V; Start 748; Stop 772
ataccgactcctaatcatacaattc

SEQ ID NO: 453364 - DNA, 25 bp, Artificial
  probe
  misc_feature (1)..(25): SEQ ID NO: 6920; WAN024G6V; Start 747; Stop 771
aataccgactcctaatcatacaatt

SEQ ID NO: 453365 - DNA, 25 bp, Artificial
  probe
  misc_feature (1)..(25): SEQ ID NO: 6920; WAN024G6V; Start 945; Stop 969
tgataagagaacagcttggataaca

SEQ ID NO: 453366 - DNA, 25 bp, Artificial
  probe
  misc_feature (1)..(25): SEQ ID NO: 6920; WAN024G6V; Start 949; Stop 973
aagagaacagcttggataacaattc

SEQ ID NO: 453367 - DNA, 25 bp, Artificial
  probe
  misc_feature (1)..(25): SEQ ID NO: 6920; WAN024G6V; Start 1118; Stop 1142
gaactgatgaagacgatttgaagaa

SEQ ID NO: 453368 - DNA, 25 bp, Artificial
  probe
  misc_feature (1)..(25): SEQ ID NO: 6920; WAN024G6V; Start 946; Stop 970
gataagagaacagcttggataacaa

SEQ ID NO: 453369 - DNA, 25 bp, Artificial
  probe
  misc_feature (1)..(25): SEQ ID NO: 6920; WAN024G6V; Start 1119; Stop 1143
aactgatgaagacgatttgaagaat

SEQ ID NO: 453370 - DNA, 25 bp, Artificial
  probe
  misc_feature (1)..(25): SEQ ID NO: 6920; WAN024G6V; Start 791; Stop 815
ttgtagatggtgagaaggttacttt

SEQ ID NO: 453371 - DNA, 25 bp, Artificial
  probe
  misc_feature (1)..(25): SEQ ID NO: 6920; WAN024G6V; Start 790; Stop 814
tttgtagatggtgagaaggttactt

SEQ ID NO: 453372 - DNA, 25 bp, Artificial
  probe
  misc_feature (1)..(25): SEQ ID NO: 6920; WAN024G6V; Start 1117; Stop 1141
ggaactgatgaagacgatttgaaga

SEQ ID NO: 453373 - DNA, 25 bp, Artificial
  probe
  misc_feature (1)..(25): SEQ ID NO: 6920; WAN024G6V; Start 941; Stop 965
aatctgataagagaacagcttggat

SEQ ID NO: 453374 - DNA, 25 bp, Artificial
  probe
  misc_feature (1)..(25): SEQ ID NO: 6920; WAN024G6V; Start 1116; Stop 1140
tggaactgatgaagacgatttgaag

SEQ ID NO: 453375 - DNA, 25 bp, Artificial
  probe
  misc_feature (1)..(25): SEQ ID NO: 6920; WAN024G6V; Start 944; Stop 968
ctgataagagaacagcttggataac

SEQ ID NO: 453376 - DNA, 25 bp, Artificial
  probe
  misc_feature (1)..(25): SEQ ID NO: 6920; WAN024G6V; Start 948; Stop 972
taagagaacagcttggataacaatt

SEQ ID NO: 453377 - DNA, 25 bp, Artificial
  probe
  misc_feature (1)..(25): SEQ ID NO: 6920; WAN024G6V; Start 836; Stop 860
taggaggagggctgataaatgattc

SEQ ID NO: 453378 - DNA, 25 bp, Artificial
  probe
  misc_feature (1)..(25): SEQ ID NO: 6920; WAN024G6V; Start 943; Stop 967
tctgataagagaacagcttggataa

SEQ ID NO: 453379 - DNA, 25 bp, Artificial
  probe
  misc_feature (1)..(25): SEQ ID NO: 6920; WAN024G6V; Start 1115; Stop 1139
gtggaactgatgaagacgatttgaa

SEQ ID NO: 453380 - DNA, 25 bp, Artificial
  probe
  misc_feature (1)..(25): SEQ ID NO: 6921; WAN024BCD; Start 46; Stop 70
gtgacttggattctccgtatgattc

SEQ ID NO: 453381 - DNA, 25 bp, Artificial
  probe
  misc_feature (1)..(25): SEQ ID NO: 6921; WAN024BCD; Start 135; Stop 159
cgtttccattatctttgccttgatt

SEQ ID NO: 453382 - DNA, 25 bp, Artificial
  probe
  misc_feature (1)..(25): SEQ ID NO: 6921; WAN024BCD; Start 192; Stop 216
ccttcctcaaattaaatggctagac

SEQ ID NO: 453383 - DNA, 25 bp, Artificial
  probe
  misc_feature (1)..(25): SEQ ID NO: 6921; WAN024BCD; Start 47; Stop 71
tgacttggattctccgtatgattcc

SEQ ID NO: 453384 - DNA, 25 bp, Artificial
  probe
  misc_feature (1)..(25): SEQ ID NO: 6921; WAN024BCD; Start 65; Stop 89
tgattcccttcatcttagtcaagta

SEQ ID NO: 453385 - DNA, 25 bp, Artificial
  probe
  misc_feature (1)..(25): SEQ ID NO: 6921; WAN024BCD; Start 134; Stop 158
ccgtttccattatctttgccttgat

SEQ ID NO: 453386 - DNA, 25 bp, Artificial
  probe
  misc_feature (1)..(25): SEQ ID NO: 6921; WAN024BCD; Start 45; Stop 69
ggtgacttggattctccgtatgatt

SEQ ID NO: 453387 - DNA, 25 bp, Artificial
  probe
  misc_feature (1)..(25): SEQ ID NO: 6921; WAN024BCD; Start 127; Stop 151
ttcttgcccgtttccattatctttg

SEQ ID NO: 453388 - DNA, 25 bp, Artificial
  probe
  misc_feature (1)..(25): SEQ ID NO: 6921; WAN024BCD; Start 126; Stop 150
gttcttgcccgtttccattatcttt

SEQ ID NO: 453389 - DNA, 25 bp, Artificial
  probe
  misc_feature (1)..(25): SEQ ID NO: 6921; WAN024BCD; Start 74; Stop 98
tcatcttagtcaagtataagggctt

SEQ ID NO: 453390 - DNA, 25 bp, Artificial
  probe
  misc_feature (1)..(25): SEQ ID NO: 6921; WAN024BCD; Start 73; Stop 97
ttcatcttagtcaagtataagggct

SEQ ID NO: 453391 - DNA, 25 bp, Artificial
  probe
  misc_feature (1)..(25): SEQ ID NO: 6921; WAN024BCD; Start 66; Stop 90
gattcccttcatcttagtcaagtat

SEQ ID NO: 453392 - DNA, 25 bp, Artificial
  probe
  misc_feature (1)..(25): SEQ ID NO: 6921; WAN024BCD; Start 72; Stop 96
cttcatcttagtcaagtataagggc

SEQ ID NO: 453393 - DNA, 25 bp, Artificial
  probe
  misc_feature (1)..(25): SEQ ID NO: 6921; WAN024BCD; Start 123; Stop 147
gaagttcttgcccgtttccattatc

SEQ ID NO: 453394 - DNA, 25 bp, Artificial
  probe
  misc_feature (1)..(25): SEQ ID NO: 6921; WAN024BCD; Start 125; Stop 149
agttcttgcccgtttccattatctt

SEQ ID NO: 453395 - DNA, 25 bp, Artificial
  probe
  misc_feature (1)..(25): SEQ ID NO: 6921; WAN024BCD; Start 124; Stop 148
aagttcttgcccgtttccattatct

SEQ ID NO: 453396 - DNA, 25 bp, Artificial
  probe
  misc_feature (1)..(25): SEQ ID NO: 6921; WAN024BCD; Start 42; Stop 66
cttggtgacttggattctccgtatg

SEQ ID NO: 453397 - DNA, 25 bp, Artificial
  probe
  misc_feature (1)..(25): SEQ ID NO: 6921; WAN024BCD; Start 44; Stop 68
tggtgacttggattctccgtatgat

SEQ ID NO: 453398 - DNA, 25 bp, Artificial
  probe
  misc_feature (1)..(25): SEQ ID NO: 6921; WAN024BCD; Start 122; Stop 146
tgaagttcttgcccgtttccattat

SEQ ID NO: 453399 - DNA, 25 bp, Artificial
  probe
  misc_feature (1)..(25): SEQ ID NO: 6921; WAN024BCD; Start 43; Stop 67
ttggtgacttggattctccgtatga

SEQ ID NO: 453400 - DNA, 25 bp, Artificial
  probe
  misc_feature (1)..(25): SEQ ID NO: 6921; WAN024BCD; Start 51; Stop 75
ttggattctccgtatgattcccttc

SEQ ID NO: 453401 - DNA, 25 bp, Artificial
  probe
  misc_feature (1)..(25): SEQ ID NO: 6921; WAN024BCD; Start 50; Stop 74
cttggattctccgtatgattccctt

SEQ ID NO: 453402 - DNA, 25 bp, Artificial
  probe
  misc_feature (1)..(25): SEQ ID NO: 6921; WAN024BCD; Start 121; Stop 145
ttgaagttcttgcccgtttccatta

SEQ ID NO: 453403 - DNA, 25 bp, Artificial
  probe
  misc_feature (1)..(25): SEQ ID NO: 6921; WAN024BCD; Start 68; Stop 92
ttcccttcatcttagtcaagtataa

SEQ ID NO: 453404 - DNA, 25 bp, Artificial
  probe
  misc_feature (1)..(25): SEQ ID NO: 6921; WAN024BCD; Start 61; Stop 85
cgtatgattcccttcatcttagtca

SEQ ID NO: 453405 - DNA, 25 bp, Artificial
  probe
  misc_feature (1)..(25): SEQ ID NO: 6921; WAN024BCD; Start 58; Stop 82
ctccgtatgattcccttcatcttag

SEQ ID NO: 453406 - DNA, 25 bp, Artificial
  probe
  misc_feature (1)..(25): SEQ ID NO: 6921; WAN024BCD; Start 69; Stop 93
tcccttcatcttagtcaagtataag

SEQ ID NO: 453407 - DNA, 25 bp, Artificial
  probe
  misc_feature (1)..(25): SEQ ID NO: 6921; WAN024BCD; Start 64; Stop 88
atgattcccttcatcttagtcaagt

SEQ ID NO: 453408 - DNA, 25 bp, Artificial
  probe
  misc_feature (1)..(25): SEQ ID NO: 6921; WAN024BCD; Start 60; Stop 84
ccgtatgattcccttcatcttagtc

SEQ ID NO: 453409 - DNA, 25 bp, Artificial
  probe
  misc_feature (1)..(25): SEQ ID NO: 6921; WAN024BCD; Start 57; Stop 81
tctccgtatgattcccttcatctta

SEQ ID NO: 453410 - DNA, 25 bp, Artificial
  probe
  misc_feature (1)..(25): SEQ ID NO: 6921; WAN024BCD; Start 67; Stop 91
attcccttcatcttagtcaagtata

SEQ ID NO: 453411 - DNA, 25 bp, Artificial
  probe
  misc_feature (1)..(25): SEQ ID NO: 6921; WAN024BCD; Start 59; Stop 83
tccgtatgattcccttcatcttagt

SEQ ID NO: 453412 - DNA, 25 bp, Artificial
  probe
  misc_feature (1)..(25): SEQ ID NO: 6921; WAN024BCD; Start 54; Stop 78
gattctccgtatgattcccttcatc

SEQ ID NO: 453413 - DNA, 25 bp, Artificial
  probe
  misc_feature (1)..(25): SEQ ID NO: 6922; WAN024BCB; Start 162; Stop 186
ttcaagtgtagtgacaggtaaggtt

SEQ ID NO: 453414 - DNA, 25 bp, Artificial
  probe
  misc_feature (1)..(25): SEQ ID NO: 6922; WAN024BCB; Start 163; Stop 187
tcaagtgtagtgacaggtaaggttg

SEQ ID NO: 453415 - DNA, 25 bp, Artificial
  probe
  misc_feature (1)..(25): SEQ ID NO: 6922; WAN024BCB; Start 134; Stop 158
ctgtttccattatctttgccttgat

SEQ ID NO: 453416 - DNA, 25 bp, Artificial
  probe
  misc_feature (1)..(25): SEQ ID NO: 6922; WAN024BCB; Start 135; Stop 159
tgtttccattatctttgccttgatt

SEQ ID NO: 453417 - DNA, 25 bp, Artificial
  probe
  misc_feature (1)..(25): SEQ ID NO: 6922; WAN024BCB; Start 133; Stop 157
cctgtttccattatctttgccttga

SEQ ID NO: 453418 - DNA, 25 bp, Artificial
  probe
  misc_feature (1)..(25): SEQ ID NO: 6922; WAN024BCB; Start 159; Stop 183
tctttcaagtgtagtgacaggtaag

SEQ ID NO: 453419 - DNA, 25 bp, Artificial
  probe
  misc_feature (1)..(25): SEQ ID NO: 6922; WAN024BCB; Start 158; Stop 182
ttctttcaagtgtagtgacaggtaa

SEQ ID NO: 453420 - DNA, 25 bp, Artificial
  probe
  misc_feature (1)..(25): SEQ ID NO: 6922; WAN024BCB; Start 157; Stop 181
attctttcaagtgtagtgacaggta

SEQ ID NO: 453421 - DNA, 25 bp, Artificial
  probe
  misc_feature (1)..(25): SEQ ID NO: 6922; WAN024BCB; Start 156; Stop 180
gattctttcaagtgtagtgacaggt

SEQ ID NO: 453422 - DNA, 25 bp, Artificial
  probe
  misc_feature (1)..(25): SEQ ID NO: 6922; WAN024BCB; Start 155; Stop 179
tgattctttcaagtgtagtgacagg

SEQ ID NO: 453423 - DNA, 25 bp, Artificial
  probe
  misc_feature (1)..(25): SEQ ID NO: 6922; WAN024BCB; Start 164; Stop 188
caagtgtagtgacaggtaaggttgg

SEQ ID NO: 453424 - DNA, 25 bp, Artificial
  probe
  misc_feature (1)..(25): SEQ ID NO: 6922; WAN024BCB; Start 160; Stop 184
ctttcaagtgtagtgacaggtaagg

SEQ ID NO: 453425 - DNA, 25 bp, Artificial
  probe
  misc_feature (1)..(25): SEQ ID NO: 6922; WAN024BCB; Start 161; Stop 185
tttcaagtgtagtgacaggtaaggt

SEQ ID NO: 453426 - DNA, 25 bp, Artificial
  probe
  misc_feature (1)..(25): SEQ ID NO: 6922; WAN024BCB; Start 132; Stop 156
gcctgtttccattatctttgccttg

SEQ ID NO: 453427 - DNA, 25 bp, Artificial
  probe
  misc_feature (1)..(25): SEQ ID NO: 6922; WAN024BCB; Start 131; Stop 155
tgcctgtttccattatctttgcctt

SEQ ID NO: 453428 - DNA, 25 bp, Artificial
  probe
  misc_feature (1)..(25): SEQ ID NO: 6922; WAN024BCB; Start 130; Stop 154
ttgcctgtttccattatctttgcct

SEQ ID NO: 453429 - DNA, 25 bp, Artificial
  probe
  misc_feature (1)..(25): SEQ ID NO: 6922; WAN024BCB; Start 21; Stop 45
attagcggttattttctctggtctt

SEQ ID NO: 453430 - DNA, 25 bp, Artificial
  probe
  misc_feature (1)..(25): SEQ ID NO: 6922; WAN024BCB; Start 20; Stop 44
tattagcggttattttctctggtct

SEQ ID NO: 453431 - DNA, 25 bp, Artificial
  probe
  misc_feature (1)..(25): SEQ ID NO: 6922; WAN024BCB; Start 22; Stop 46
ttagcggttattttctctggtcttg

SEQ ID NO: 453432 - DNA, 25 bp, Artificial
  probe
  misc_feature (1)..(25): SEQ ID NO: 6922; WAN024BCB; Start 19; Stop 43
ttattagcggttattttctctggtc

SEQ ID NO: 453433 - DNA, 25 bp, Artificial
  probe
  misc_feature (1)..(25): SEQ ID NO: 6922; WAN024BCB; Start 154; Stop 178
ttgattctttcaagtgtagtgacag

SEQ ID NO: 453434 - DNA, 25 bp, Artificial
  probe
  misc_feature (1)..(25): SEQ ID NO: 6922; WAN024BCB; Start 18; Stop 42
tttattagcggttattttctctggt

SEQ ID NO: 453435 - DNA, 25 bp, Artificial
  probe
  misc_feature (1)..(25): SEQ ID NO: 6922; WAN024BCB; Start 23; Stop 47
tagcggttattttctctggtcttgt

SEQ ID NO: 453436 - DNA, 25 bp, Artificial
  probe
  misc_feature (1)..(25): SEQ ID NO: 6922; WAN024BCB; Start 17; Stop 41
ttttattagcggttattttctctgg

SEQ ID NO: 453437 - DNA, 25 bp, Artificial
  probe
  misc_feature (1)..(25): SEQ ID NO: 6922; WAN024BCB; Start 5; Stop 29
tcagtaagtatcttttattagcggt

SEQ ID NO: 453438 - DNA, 25 bp, Artificial
  probe
  misc_feature (1)..(25): SEQ ID NO: 6922; WAN024BCB; Start 168; Stop 192
tgtagtgacaggtaaggttgggaac

SEQ ID NO: 453439 - DNA, 25 bp, Artificial
  probe
  misc_feature (1)..(25): SEQ ID NO: 6922; WAN024BCB; Start 167; Stop 191
gtgtagtgacaggtaaggttgggaa

SEQ ID NO: 453440 - DNA, 25 bp, Artificial
  probe
  misc_feature (1)..(25): SEQ ID NO: 6922; WAN024BCB; Start 165; Stop 189
aagtgtagtgacaggtaaggttggg

SEQ ID NO: 453441 - DNA, 25 bp, Artificial
  probe
  misc_feature (1)..(25): SEQ ID NO: 6922; WAN024BCB; Start 26; Stop 50
cggttattttctctggtcttgtgac

SEQ ID NO: 453442 - DNA, 25 bp, Artificial
  probe
  misc_feature (1)..(25): SEQ ID NO: 6922; WAN024BCB; Start 4; Stop 28
gtcagtaagtatcttttattagcgg

SEQ ID NO: 453443 - DNA, 25 bp, Artificial
  probe
  misc_feature (1)..(25): SEQ ID NO: 6922; WAN024BCB; Start 3; Stop 27
ggtcagtaagtatcttttattagcg

SEQ ID NO: 453444 - DNA, 25 bp, Artificial
  probe
  misc_feature (1)..(25): SEQ ID NO: 6922; WAN024BCB; Start 6; Stop 30
cagtaagtatcttttattagcggtt

SEQ ID NO: 453445 - DNA, 25 bp, Artificial
  probe
  misc_feature (1)..(25): SEQ ID NO: 6922; WAN024BCB; Start 25; Stop 49
gcggttattttctctggtcttgtga

SEQ ID NO: 453446 - DNA, 25 bp, Artificial
  probe
  misc_feature (1)..(25): SEQ ID NO: 6923; WAN024CT3; Start 549; Stop 573
ttatcgcaagaccaatcacaagtat

SEQ ID NO: 453447 - DNA, 25 bp, Artificial
  probe
  misc_feature (1)..(25): SEQ ID NO: 6923; WAN024CT3; Start 99; Stop 123
agtgtcggattatgatatgaggaat

SEQ ID NO: 453448 - DNA, 25 bp, Artificial
  probe
  misc_feature (1)..(25): SEQ ID NO: 6923; WAN024CT3; Start 242; Stop 266
atgctcaccatattattcagtcctt

SEQ ID NO: 453449 - DNA, 25 bp, Artificial
  probe
  misc_feature (1)..(25): SEQ ID NO: 6923; WAN024CT3; Start 1102; Stop 1126
ttctatcaagagttcaagagcaaca

SEQ ID NO: 453450 - DNA, 25 bp, Artificial
  probe
  misc_feature (1)..(25): SEQ ID NO: 6923; WAN024CT3; Start 94; Stop 118
accttagtgtcggattatgatatga

SEQ ID NO: 453451 - DNA, 25 bp, Artificial
  probe
  misc_feature (1)..(25): SEQ ID NO: 6923; WAN024CT3; Start 743; Stop 767
gcaagcaaccttatacagaagaatt

SEQ ID NO: 453452 - DNA, 25 bp, Artificial
  probe
  misc_feature (1)..(25): SEQ ID NO: 6923; WAN024CT3; Start 550; Stop 574
tatcgcaagaccaatcacaagtatg

SEQ ID NO: 453453 - DNA, 25 bp, Artificial
  probe
  misc_feature (1)..(25): SEQ ID NO: 6923; WAN024CT3; Start 90; Stop 114
tcttaccttagtgtcggattatgat

SEQ ID NO: 453454 - DNA, 25 bp, Artificial
  probe
  misc_feature (1)..(25): SEQ ID NO: 6923; WAN024CT3; Start 1105; Stop 1129
tatcaagagttcaagagcaacagag

SEQ ID NO: 453455 - DNA, 25 bp, Artificial
  probe
  misc_feature (1)..(25): SEQ ID NO: 6923; WAN024CT3; Start 1104; Stop 1128
ctatcaagagttcaagagcaacaga

SEQ ID NO: 453456 - DNA, 25 bp, Artificial
  probe
  misc_feature (1)..(25): SEQ ID NO: 6923; WAN024CT3; Start 1103; Stop 1127
tctatcaagagttcaagagcaacag

SEQ ID NO: 453457 - DNA, 25 bp, Artificial
  probe
  misc_feature (1)..(25): SEQ ID NO: 6923; WAN024CT3; Start 827; Stop 851
aggctgagaatatagatgacttgat

SEQ ID NO: 453458 - DNA, 25 bp, Artificial
  probe
  misc_feature (1)..(25): SEQ ID NO: 6923; WAN024CT3; Start 89; Stop 113
atcttaccttagtgtcggattatga

SEQ ID NO: 453459 - DNA, 25 bp, Artificial
  probe
  misc_feature (1)..(25): SEQ ID NO: 6923; WAN024CT3; Start 826; Stop 850
aaggctgagaatatagatgacttga

SEQ ID NO: 453460 - DNA, 25 bp, Artificial
  probe
  misc_feature (1)..(25): SEQ ID NO: 6923; WAN024CT3; Start 1101; Stop 1125
attctatcaagagttcaagagcaac

SEQ ID NO: 453461 - DNA, 25 bp, Artificial
  probe
  misc_feature (1)..(25): SEQ ID NO: 6923; WAN024CT3; Start 98; Stop 122
tagtgtcggattatgatatgaggaa

SEQ ID NO: 453462 - DNA, 25 bp, Artificial
  probe
  misc_feature (1)..(25): SEQ ID NO: 6923; WAN024CT3; Start 97; Stop 121
ttagtgtcggattatgatatgagga

SEQ ID NO: 453463 - DNA, 25 bp, Artificial
  probe
  misc_feature (1)..(25): SEQ ID NO: 6923; WAN024CT3; Start 558; Stop 582
gaccaatcacaagtatgaactcaag

SEQ ID NO: 453464 - DNA, 25 bp, Artificial
  probe
  misc_feature (1)..(25): SEQ ID NO: 6923; WAN024CT3; Start 557; Stop 581
agaccaatcacaagtatgaactcaa

SEQ ID NO: 453465 - DNA, 25 bp, Artificial
  probe
  misc_feature (1)..(25): SEQ ID NO: 6923; WAN024CT3; Start 556; Stop 580
aagaccaatcacaagtatgaactca

SEQ ID NO: 453466 - DNA, 25 bp, Artificial
  probe
  misc_feature (1)..(25): SEQ ID NO: 6923; WAN024CT3; Start 555; Stop 579
caagaccaatcacaagtatgaactc

SEQ ID NO: 453467 - DNA, 25 bp, Artificial
  probe
  misc_feature (1)..(25): SEQ ID NO: 6923; WAN024CT3; Start 525; Stop 549
ctattctcaccagcagtatgaagtt

SEQ ID NO: 453468 - DNA, 25 bp, Artificial
  probe
  misc_feature (1)..(25): SEQ ID NO: 6923; WAN024CT3; Start 561; Stop 585
caatcacaagtatgaactcaagcag

SEQ ID NO: 453469 - DNA, 25 bp, Artificial
  probe
  misc_feature (1)..(25): SEQ ID NO: 6923; WAN024CT3; Start 100; Stop 124
gtgtcggattatgatatgaggaatt

SEQ ID NO: 453470 - DNA, 25 bp, Artificial
  probe
  misc_feature (1)..(25): SEQ ID NO: 6923; WAN024CT3; Start 96; Stop 120
cttagtgtcggattatgatatgagg

SEQ ID NO: 453471 - DNA, 25 bp, Artificial
  probe
  misc_feature (1)..(25): SEQ ID NO: 6923; WAN024CT3; Start 95; Stop 119
ccttagtgtcggattatgatatgag

SEQ ID NO: 453472 - DNA, 25 bp, Artificial
  probe
  misc_feature (1)..(25): SEQ ID NO: 6923; WAN024CT3; Start 828; Stop 852
ggctgagaatatagatgacttgatt

SEQ ID NO: 453473 - DNA, 25 bp, Artificial
  probe
  misc_feature (1)..(25): SEQ ID NO: 6923; WAN024CT3; Start 51; Stop 75
gctcatcaagtatattctcaatcct

SEQ ID NO: 453474 - DNA, 25 bp, Artificial
  probe
  misc_feature (1)..(25): SEQ ID NO: 6923; WAN024CT3; Start 742; Stop 766
cgcaagcaaccttatacagaagaat

SEQ ID NO: 453475 - DNA, 25 bp, Artificial
  probe
  misc_feature (1)..(25): SEQ ID NO: 6923; WAN024CT3; Start 739; Stop 763
aatcgcaagcaaccttatacagaag

SEQ ID NO: 453476 - DNA, 25 bp, Artificial
  probe
  misc_feature (1)..(25): SEQ ID NO: 6923; WAN024CT3; Start 1100; Stop 1124
aattctatcaagagttcaagagcaa

SEQ ID NO: 453477 - DNA, 25 bp, Artificial
  probe
  misc_feature (1)..(25): SEQ ID NO: 6923; WAN024CT3; Start 238; Stop 262
atccatgctcaccatattattcagt

SEQ ID NO: 453478 - DNA, 25 bp, Artificial
  probe
  misc_feature (1)..(25): SEQ ID NO: 6923; WAN024CT3; Start 241; Stop 265
catgctcaccatattattcagtcct

SEQ ID NO: 453479 - DNA, 25 bp, Artificial
  probe
  misc_feature (1)..(25): SEQ ID NO: 6924; WAN024B6I; Start 216; Stop 240
tgatgactgttacattattagcgga

SEQ ID NO: 453480 - DNA, 25 bp, Artificial
  probe
  misc_feature (1)..(25): SEQ ID NO: 6924; WAN024B6I; Start 215; Stop 239
ttgatgactgttacattattagcgg

SEQ ID NO: 453481 - DNA, 25 bp, Artificial
  probe
  misc_feature (1)..(25): SEQ ID NO: 6924; WAN024B6I; Start 217; Stop 241
gatgactgttacattattagcggaa

SEQ ID NO: 453482 - DNA, 25 bp, Artificial
  probe
  misc_feature (1)..(25): SEQ ID NO: 6924; WAN024B6I; Start 214; Stop 238
gttgatgactgttacattattagcg

SEQ ID NO: 453483 - DNA, 25 bp, Artificial
  probe
  misc_feature (1)..(25): SEQ ID NO: 6924; WAN024B6I; Start 213; Stop 237
ggttgatgactgttacattattagc

SEQ ID NO: 453484 - DNA, 25 bp, Artificial
  probe
  misc_feature (1)..(25): SEQ ID NO: 6924; WAN024B6I; Start 210; Stop 234
agaggttgatgactgttacattatt

SEQ ID NO: 453485 - DNA, 25 bp, Artificial
  probe
  misc_feature (1)..(25): SEQ ID NO: 6924; WAN024B6I; Start 209; Stop 233
aagaggttgatgactgttacattat

SEQ ID NO: 453486 - DNA, 25 bp, Artificial
  probe
  misc_feature (1)..(25): SEQ ID NO: 6924; WAN024B6I; Start 56; Stop 80
ttatacagctcagtgattggattgc

SEQ ID NO: 453487 - DNA, 25 bp, Artificial
  probe
  misc_feature (1)..(25): SEQ ID NO: 6924; WAN024B6I; Start 67; Stop 91
agtgattggattgctacagactcag

SEQ ID NO: 453488 - DNA, 25 bp, Artificial
  probe
  misc_feature (1)..(25): SEQ ID NO: 6924; WAN024B6I; Start 65; Stop 89
tcagtgattggattgctacagactc

SEQ ID NO: 453489 - DNA, 25 bp, Artificial
  probe
  misc_feature (1)..(25): SEQ ID NO: 6924; WAN024B6I; Start 64; Stop 88
ctcagtgattggattgctacagact

SEQ ID NO: 453490 - DNA, 25 bp, Artificial
  probe
  misc_feature (1)..(25): SEQ ID NO: 6924; WAN024B6I; Start 204; Stop 228
agagaaagaggttgatgactgttac

SEQ ID NO: 453491 - DNA, 25 bp, Artificial
  probe
  misc_feature (1)..(25): SEQ ID NO: 6924; WAN024B6I; Start 199; Stop 223
ttgaaagagaaagaggttgatgact

SEQ ID NO: 453492 - DNA, 25 bp, Artificial
  probe
  misc_feature (1)..(25): SEQ ID NO: 6924; WAN024B6I; Start 202; Stop 226
aaagagaaagaggttgatgactgtt

SEQ ID NO: 453493 - DNA, 25 bp, Artificial
  probe
  misc_feature (1)..(25): SEQ ID NO: 6924; WAN024B6I; Start 203; Stop 227
aagagaaagaggttgatgactgtta

SEQ ID NO: 453494 - DNA, 25 bp, Artificial
  probe
  misc_feature (1)..(25): SEQ ID NO: 6924; WAN024B6I; Start 201; Stop 225
gaaagagaaagaggttgatgactgt

SEQ ID NO: 453495 - DNA, 25 bp, Artificial
  probe
  misc_feature (1)..(25): SEQ ID NO: 6924; WAN024B6I; Start 200; Stop 224
tgaaagagaaagaggttgatgactg

SEQ ID NO: 453496 - DNA, 25 bp, Artificial
  probe
  misc_feature (1)..(25): SEQ ID NO: 6924; WAN024B6I; Start 198; Stop 222
attgaaagagaaagaggttgatgac

SEQ ID NO: 453497 - DNA, 25 bp, Artificial
  probe
  misc_feature (1)..(25): SEQ ID NO: 6924; WAN024B6I; Start 66; Stop 90
cagtgattggattgctacagactca

SEQ ID NO: 453498 - DNA, 25 bp, Artificial
  probe
  misc_feature (1)..(25): SEQ ID NO: 6924; WAN024B6I; Start 205; Stop 229
gagaaagaggttgatgactgttaca

SEQ ID NO: 453499 - DNA, 25 bp, Artificial
  probe
  misc_feature (1)..(25): SEQ ID NO: 6924; WAN024B6I; Start 254; Stop 278
gagaaagagaacgagtttactggag

SEQ ID NO: 453500 - DNA, 25 bp, Artificial
  probe
  misc_feature (1)..(25): SEQ ID NO: 6924; WAN024B6I; Start 206; Stop 230
agaaagaggttgatgactgttacat

SEQ ID NO: 453501 - DNA, 25 bp, Artificial
  probe
  misc_feature (1)..(25): SEQ ID NO: 6924; WAN024B6I; Start 256; Stop 280
gaaagagaacgagtttactggagac

SEQ ID NO: 453502 - DNA, 25 bp, Artificial
  probe
  misc_feature (1)..(25): SEQ ID NO: 6924; WAN024B6I; Start 255; Stop 279
agaaagagaacgagtttactggaga

SEQ ID NO: 453503 - DNA, 25 bp, Artificial
  probe
  misc_feature (1)..(25): SEQ ID NO: 6924; WAN024B6I; Start 207; Stop 231
gaaagaggttgatgactgttacatt

SEQ ID NO: 453504 - DNA, 25 bp, Artificial
  probe
  misc_feature (1)..(25): SEQ ID NO: 6924; WAN024B6I; Start 248; Stop 272
aagtccgagaaagagaacgagttta

SEQ ID NO: 453505 - DNA, 25 bp, Artificial
  probe
  misc_feature (1)..(25): SEQ ID NO: 6924; WAN024B6I; Start 218; Stop 242
atgactgttacattattagcggaaa

SEQ ID NO: 453506 - DNA, 25 bp, Artificial
  probe
  misc_feature (1)..(25): SEQ ID NO: 6924; WAN024B6I; Start 194; Stop 218
agttattgaaagagaaagaggttga

SEQ ID NO: 453507 - DNA, 25 bp, Artificial
  probe
  misc_feature (1)..(25): SEQ ID NO: 6924; WAN024B6I; Start 197; Stop 221
tattgaaagagaaagaggttgatga

SEQ ID NO: 453508 - DNA, 25 bp, Artificial
  probe
  misc_feature (1)..(25): SEQ ID NO: 6924; WAN024B6I; Start 211; Stop 235
gaggttgatgactgttacattatta

SEQ ID NO: 453509 - DNA, 25 bp, Artificial
  probe
  misc_feature (1)..(25): SEQ ID NO: 6924; WAN024B6I; Start 208; Stop 232
aaagaggttgatgactgttacatta

SEQ ID NO: 453510 - DNA, 25 bp, Artificial
  probe
  misc_feature (1)..(25): SEQ ID NO: 6924; WAN024B6I; Start 212; Stop 236
aggttgatgactgttacattattag

SEQ ID NO: 453511 - DNA, 25 bp, Artificial
  probe
  misc_feature (1)..(25): SEQ ID NO: 6924; WAN024B6I; Start 249; Stop 273
agtccgagaaagagaacgagtttac

SEQ ID NO: 453512 - DNA, 25 bp, Artificial
  probe
  misc_feature (1)..(25): SEQ ID NO: 6925; WAN024BQ2; Start 330; Stop 354
taggattaaggaattgagtgagcag

SEQ ID NO: 453513 - DNA, 25 bp, Artificial
  probe
  misc_feature (1)..(25): SEQ ID NO: 6925; WAN024BQ2; Start 329; Stop 353
ttaggattaaggaattgagtgagca

SEQ ID NO: 453514 - DNA, 25 bp, Artificial
  probe
  misc_feature (1)..(25): SEQ ID NO: 6925; WAN024BQ2; Start 333; Stop 357
gattaaggaattgagtgagcagttc

SEQ ID NO: 453515 - DNA, 25 bp, Artificial
  probe
  misc_feature (1)..(25): SEQ ID NO: 6925; WAN024BQ2; Start 332; Stop 356
ggattaaggaattgagtgagcagtt

SEQ ID NO: 453516 - DNA, 25 bp, Artificial
  probe
  misc_feature (1)..(25): SEQ ID NO: 6925; WAN024BQ2; Start 334; Stop 358
attaaggaattgagtgagcagttcg

SEQ ID NO: 453517 - DNA, 25 bp, Artificial
  probe
  misc_feature (1)..(25): SEQ ID NO: 6925; WAN024BQ2; Start 331; Stop 355
aggattaaggaattgagtgagcagt

SEQ ID NO: 453518 - DNA, 25 bp, Artificial
  probe
  misc_feature (1)..(25): SEQ ID NO: 6925; WAN024BQ2; Start 754; Stop 778
tggttgatgagctattggaatattg

SEQ ID NO: 453519 - DNA, 25 bp, Artificial
  probe
  misc_feature (1)..(25): SEQ ID NO: 6925; WAN024BQ2; Start 755; Stop 779
ggttgatgagctattggaatattga

SEQ ID NO: 453520 - DNA, 25 bp, Artificial
  probe
  misc_feature (1)..(25): SEQ ID NO: 6925; WAN024BQ2; Start 751; Stop 775
cattggttgatgagctattggaata

SEQ ID NO: 453521 - DNA, 25 bp, Artificial
  probe
  misc_feature (1)..(25): SEQ ID NO: 6925; WAN024BQ2; Start 336; Stop 360
taaggaattgagtgagcagttcgtt

SEQ ID NO: 453522 - DNA, 25 bp, Artificial
  probe
  misc_feature (1)..(25): SEQ ID NO: 6925; WAN024BQ2; Start 335; Stop 359
ttaaggaattgagtgagcagttcgt

SEQ ID NO: 453523 - DNA, 25 bp, Artificial
  probe
  misc_feature (1)..(25): SEQ ID NO: 6925; WAN024BQ2; Start 354; Stop 378
gttcgttctgtttagtgatgatgtt

SEQ ID NO: 453524 - DNA, 25 bp, Artificial
  probe
  misc_feature (1)..(25): SEQ ID NO: 6925; WAN024BQ2; Start 888; Stop 912
tataaacgacgatgaacataccgaa

SEQ ID NO: 453525 - DNA, 25 bp, Artificial
  probe
  misc_feature (1)..(25): SEQ ID NO: 6925; WAN024BQ2; Start 753; Stop 777
ttggttgatgagctattggaatatt

SEQ ID NO: 453526 - DNA, 25 bp, Artificial
  probe
  misc_feature (1)..(25): SEQ ID NO: 6925; WAN024BQ2; Start 353; Stop 377
agttcgttctgtttagtgatgatgt

SEQ ID NO: 453527 - DNA, 25 bp, Artificial
  probe
  misc_feature (1)..(25): SEQ ID NO: 6925; WAN024BQ2; Start 355; Stop 379
ttcgttctgtttagtgatgatgttt

SEQ ID NO: 453528 - DNA, 25 bp, Artificial
  probe
  misc_feature (1)..(25): SEQ ID NO: 6925; WAN024BQ2; Start 781; Stop 805
acaaattcatttatgccacagactc

SEQ ID NO: 453529 - DNA, 25 bp, Artificial
  probe
  misc_feature (1)..(25): SEQ ID NO: 6925; WAN024BQ2; Start 782; Stop 806
caaattcatttatgccacagactct

SEQ ID NO: 453530 - DNA, 25 bp, Artificial
  probe
  misc_feature (1)..(25): SEQ ID NO: 6925; WAN024BQ2; Start 780; Stop 804
aacaaattcatttatgccacagact

SEQ ID NO: 453531 - DNA, 25 bp, Artificial
  probe
  misc_feature (1)..(25): SEQ ID NO: 6925; WAN024BQ2; Start 784; Stop 808
aattcatttatgccacagactcttc

SEQ ID NO: 453532 - DNA, 25 bp, Artificial
  probe
  misc_feature (1)..(25): SEQ ID NO: 6925; WAN024BQ2; Start 752; Stop 776
attggttgatgagctattggaatat

SEQ ID NO: 453533 - DNA, 25 bp, Artificial
  probe
  misc_feature (1)..(25): SEQ ID NO: 6925; WAN024BQ2; Start 889; Stop 913
ataaacgacgatgaacataccgaaa

SEQ ID NO: 453534 - DNA, 25 bp, Artificial
  probe
  misc_feature (1)..(25): SEQ ID NO: 6925; WAN024BQ2; Start 783; Stop 807
aaattcatttatgccacagactctt

SEQ ID NO: 453535 - DNA, 25 bp, Artificial
  probe
  misc_feature (1)..(25): SEQ ID NO: 6925; WAN024BQ2; Start 779; Stop 803
aaacaaattcatttatgccacagac

SEQ ID NO: 453536 - DNA, 25 bp, Artificial
  probe
  misc_feature (1)..(25): SEQ ID NO: 6925; WAN024BQ2; Start 328; Stop 352
tttaggattaaggaattgagtgagc

SEQ ID NO: 453537 - DNA, 25 bp, Artificial
  probe
  misc_feature (1)..(25): SEQ ID NO: 6925; WAN024BQ2; Start 785; Stop 809
attcatttatgccacagactcttcg

SEQ ID NO: 453538 - DNA, 25 bp, Artificial
  probe
  misc_feature (1)..(25): SEQ ID NO: 6925; WAN024BQ2; Start 778; Stop 802
gaaacaaattcatttatgccacaga

SEQ ID NO: 453539 - DNA, 25 bp, Artificial
  probe
  misc_feature (1)..(25): SEQ ID NO: 6925; WAN024BQ2; Start 882; Stop 906
tttgtgtataaacgacgatgaacat

SEQ ID NO: 453540 - DNA, 25 bp, Artificial
  probe
  misc_feature (1)..(25): SEQ ID NO: 6925; WAN024BQ2; Start 352; Stop 376
cagttcgttctgtttagtgatgatg

SEQ ID NO: 453541 - DNA, 25 bp, Artificial
  probe
  misc_feature (1)..(25): SEQ ID NO: 6925; WAN024BQ2; Start 756; Stop 780
gttgatgagctattggaatattgaa

SEQ ID NO: 453542 - DNA, 25 bp, Artificial
  probe
  misc_feature (1)..(25): SEQ ID NO: 6925; WAN024BQ2; Start 885; Stop 909
gtgtataaacgacgatgaacatacc

SEQ ID NO: 453543 - DNA, 25 bp, Artificial
  probe
  misc_feature (1)..(25): SEQ ID NO: 6925; WAN024BQ2; Start 883; Stop 907
ttgtgtataaacgacgatgaacata

SEQ ID NO: 453544 - DNA, 25 bp, Artificial
  probe
  misc_feature (1)..(25): SEQ ID NO: 6925; WAN024BQ2; Start 232; Stop 256
gcaaatcaccctaaattgaagatag

SEQ ID NO: 453545 - DNA, 25 bp, Artificial
  probe
  misc_feature (1)..(25): SEQ ID NO: 6926; WAN024BZ3; Start 301; Stop 325
gcagcaggtatagatccaataattc

SEQ ID NO: 453546 - DNA, 25 bp, Artificial
  probe
  misc_feature (1)..(25): SEQ ID NO: 6926; WAN024BZ3; Start 365; Stop 389
gctcattgttactgataggattacc

SEQ ID NO: 453547 - DNA, 25 bp, Artificial
  probe
  misc_feature (1)..(25): SEQ ID NO: 6926; WAN024BZ3; Start 311; Stop 335
tagatccaataattcaagcgacagg

SEQ ID NO: 453548 - DNA, 25 bp, Artificial
  probe
  misc_feature (1)..(25): SEQ ID NO: 6926; WAN024BZ3; Start 310; Stop 334
atagatccaataattcaagcgacag

SEQ ID NO: 453549 - DNA, 25 bp, Artificial
  probe
  misc_feature (1)..(25): SEQ ID NO: 6926; WAN024BZ3; Start 339; Stop 363
aatcaagtggtatcaattatctgct

SEQ ID NO: 453550 - DNA, 25 bp, Artificial
  probe
  misc_feature (1)..(25): SEQ ID NO: 6926; WAN024BZ3; Start 307; Stop 331
ggtatagatccaataattcaagcga

SEQ ID NO: 453551 - DNA, 25 bp, Artificial
  probe
  misc_feature (1)..(25): SEQ ID NO: 6926; WAN024BZ3; Start 306; Stop 330
aggtatagatccaataattcaagcg

SEQ ID NO: 453552 - DNA, 25 bp, Artificial
  probe
  misc_feature (1)..(25): SEQ ID NO: 6926; WAN024BZ3; Start 341; Stop 365
tcaagtggtatcaattatctgctag

SEQ ID NO: 453553 - DNA, 25 bp, Artificial
  probe
  misc_feature (1)..(25): SEQ ID NO: 6926; WAN024BZ3; Start 302; Stop 326
cagcaggtatagatccaataattca

SEQ ID NO: 453554 - DNA, 25 bp, Artificial
  probe
  misc_feature (1)..(25): SEQ ID NO: 6926; WAN024BZ3; Start 579; Stop 603
ttgttgtgtgtataatatgttgctt

SEQ ID NO: 453555 - DNA, 25 bp, Artificial
  probe
  misc_feature (1)..(25): SEQ ID NO: 6926; WAN024BZ3; Start 340; Stop 364
atcaagtggtatcaattatctgcta

SEQ ID NO: 453556 - DNA, 25 bp, Artificial
  probe
  misc_feature (1)..(25): SEQ ID NO: 6926; WAN024BZ3; Start 313; Stop 337
gatccaataattcaagcgacaggtc

SEQ ID NO: 453557 - DNA, 25 bp, Artificial
  probe
  misc_feature (1)..(25): SEQ ID NO: 6926; WAN024BZ3; Start 366; Stop 390
ctcattgttactgataggattacca

SEQ ID NO: 453558 - DNA, 25 bp, Artificial
  probe
  misc_feature (1)..(25): SEQ ID NO: 6926; WAN024BZ3; Start 309; Stop 333
tatagatccaataattcaagcgaca

SEQ ID NO: 453559 - DNA, 25 bp, Artificial
  probe
  misc_feature (1)..(25): SEQ ID NO: 6926; WAN024BZ3; Start 314; Stop 338
atccaataattcaagcgacaggtca

SEQ ID NO: 453560 - DNA, 25 bp, Artificial
  probe
  misc_feature (1)..(25): SEQ ID NO: 6926; WAN024BZ3; Start 308; Stop 332
gtatagatccaataattcaagcgac

SEQ ID NO: 453561 - DNA, 25 bp, Artificial
  probe
  misc_feature (1)..(25): SEQ ID NO: 6926; WAN024BZ3; Start 578; Stop 602
attgttgtgtgtataatatgttgct

SEQ ID NO: 453562 - DNA, 25 bp, Artificial
  probe
  misc_feature (1)..(25): SEQ ID NO: 6926; WAN024BZ3; Start 300; Stop 324
tgcagcaggtatagatccaataatt

SEQ ID NO: 453563 - DNA, 25 bp, Artificial
  probe
  misc_feature (1)..(25): SEQ ID NO: 6926; WAN024BZ3; Start 312; Stop 336
agatccaataattcaagcgacaggt

SEQ ID NO: 453564 - DNA, 25 bp, Artificial
  probe
  misc_feature (1)..(25): SEQ ID NO: 6926; WAN024BZ3; Start 331; Stop 355
acaggtcaaatcaagtggtatcaat

SEQ ID NO: 453565 - DNA, 25 bp, Artificial
  probe
  misc_feature (1)..(25): SEQ ID NO: 6926; WAN024BZ3; Start 315; Stop 339
tccaataattcaagcgacaggtcaa

SEQ ID NO: 453566 - DNA, 25 bp, Artificial
  probe
  misc_feature (1)..(25): SEQ ID NO: 6926; WAN024BZ3; Start 174; Stop 198
gttacttattgtctttcctgtctgg

SEQ ID NO: 453567 - DNA, 25 bp, Artificial
  probe
  misc_feature (1)..(25): SEQ ID NO: 6926; WAN024BZ3; Start 382; Stop 406
ggattaccaatatctttctgcctct

SEQ ID NO: 453568 - DNA, 25 bp, Artificial
  probe
  misc_feature (1)..(25): SEQ ID NO: 6926; WAN024BZ3; Start 60; Stop 84
taacaaccttaatactgctgcaaca

SEQ ID NO: 453569 - DNA, 25 bp, Artificial
  probe
  misc_feature (1)..(25): SEQ ID NO: 6926; WAN024BZ3; Start 318; Stop 342
aataattcaagcgacaggtcaaatc

SEQ ID NO: 453570 - DNA, 25 bp, Artificial
  probe
  misc_feature (1)..(25): SEQ ID NO: 6926; WAN024BZ3; Start 332; Stop 356
caggtcaaatcaagtggtatcaatt

SEQ ID NO: 453571 - DNA, 25 bp, Artificial
  probe
  misc_feature (1)..(25): SEQ ID NO: 6926; WAN024BZ3; Start 303; Stop 327
agcaggtatagatccaataattcaa

SEQ ID NO: 453572 - DNA, 25 bp, Artificial
  probe
  misc_feature (1)..(25): SEQ ID NO: 6926; WAN024BZ3; Start 483; Stop 507
ctatttcctggctaaacttacaaca

SEQ ID NO: 453573 - DNA, 25 bp, Artificial
  probe
  misc_feature (1)..(25): SEQ ID NO: 6926; WAN024BZ3; Start 317; Stop 341
caataattcaagcgacaggtcaaat

SEQ ID NO: 453574 - DNA, 25 bp, Artificial
  probe
  misc_feature (1)..(25): SEQ ID NO: 6926; WAN024BZ3; Start 299; Stop 323
ttgcagcaggtatagatccaataat

SEQ ID NO: 453575 - DNA, 25 bp, Artificial
  probe
  misc_feature (1)..(25): SEQ ID NO: 6926; WAN024BZ3; Start 59; Stop 83
ttaacaaccttaatactgctgcaac

SEQ ID NO: 453576 - DNA, 25 bp, Artificial
  probe
  misc_feature (1)..(25): SEQ ID NO: 6926; WAN024BZ3; Start 367; Stop 391
tcattgttactgataggattaccaa

SEQ ID NO: 453577 - DNA, 25 bp, Artificial
  probe
  misc_feature (1)..(25): SEQ ID NO: 6926; WAN024BZ3; Start 538; Stop 562
tacaacccatcactaagaatcgttt

SEQ ID NO: 453578 - DNA, 25 bp, Artificial
  probe
  misc_feature (1)..(25): SEQ ID NO: 6927; WAN024BZY; Start 1058; Stop 1082
aagaagaagttagttcgttggctat

SEQ ID NO: 453579 - DNA, 25 bp, Artificial
  probe
  misc_feature (1)..(25): SEQ ID NO: 6927; WAN024BZY; Start 1059; Stop 1083
agaagaagttagttcgttggctata

SEQ ID NO: 453580 - DNA, 25 bp, Artificial
  probe
  misc_feature (1)..(25): SEQ ID NO: 6927; WAN024BZY; Start 239; Stop 263
gctcggatggttctatgtctatact

SEQ ID NO: 453581 - DNA, 25 bp, Artificial
  probe
  misc_feature (1)..(25): SEQ ID NO: 6927; WAN024BZY; Start 430; Stop 454
cttgagattcttgattcacttgagc

SEQ ID NO: 453582 - DNA, 25 bp, Artificial
  probe
  misc_feature (1)..(25): SEQ ID NO: 6927; WAN024BZY; Start 240; Stop 264
ctcggatggttctatgtctatacta

SEQ ID NO: 453583 - DNA, 25 bp, Artificial
  probe
  misc_feature (1)..(25): SEQ ID NO: 6927; WAN024BZY; Start 241; Stop 265
tcggatggttctatgtctatactaa

SEQ ID NO: 453584 - DNA, 25 bp, Artificial
  probe
  misc_feature (1)..(25): SEQ ID NO: 6927; WAN024BZY; Start 429; Stop 453
tcttgagattcttgattcacttgag

SEQ ID NO: 453585 - DNA, 25 bp, Artificial
  probe
  misc_feature (1)..(25): SEQ ID NO: 6927; WAN024BZY; Start 242; Stop 266
cggatggttctatgtctatactaag

SEQ ID NO: 453586 - DNA, 25 bp, Artificial
  probe
  misc_feature (1)..(25): SEQ ID NO: 6927; WAN024BZY; Start 428; Stop 452
ttcttgagattcttgattcacttga

SEQ ID NO: 453587 - DNA, 25 bp, Artificial
  probe
  misc_feature (1)..(25): SEQ ID NO: 6927; WAN024BZY; Start 237; Stop 261
aagctcggatggttctatgtctata

SEQ ID NO: 453588 - DNA, 25 bp, Artificial
  probe
  misc_feature (1)..(25): SEQ ID NO: 6927; WAN024BZY; Start 236; Stop 260
taagctcggatggttctatgtctat

SEQ ID NO: 453589 - DNA, 25 bp, Artificial
  probe
  misc_feature (1)..(25): SEQ ID NO: 6927; WAN024BZY; Start 433; Stop 457
gagattcttgattcacttgagctag

SEQ ID NO: 453590 - DNA, 25 bp, Artificial
  probe
  misc_feature (1)..(25): SEQ ID NO: 6927; WAN024BZY; Start 434; Stop 458
agattcttgattcacttgagctaga

SEQ ID NO: 453591 - DNA, 25 bp, Artificial
  probe
  misc_feature (1)..(25): SEQ ID NO: 6927; WAN024BZY; Start 235; Stop 259
ctaagctcggatggttctatgtcta

SEQ ID NO: 453592 - DNA, 25 bp, Artificial
  probe
  misc_feature (1)..(25): SEQ ID NO: 6927; WAN024BZY; Start 238; Stop 262
agctcggatggttctatgtctatac

SEQ ID NO: 453593 - DNA, 25 bp, Artificial
  probe
  misc_feature (1)..(25): SEQ ID NO: 6927; WAN024BZY; Start 432; Stop 456
tgagattcttgattcacttgagcta

SEQ ID NO: 453594 - DNA, 25 bp, Artificial
  probe
  misc_feature (1)..(25): SEQ ID NO: 6927; WAN024BZY; Start 431; Stop 455
ttgagattcttgattcacttgagct

SEQ ID NO: 453595 - DNA, 25 bp, Artificial
  probe
  misc_feature (1)..(25): SEQ ID NO: 6927; WAN024BZY; Start 963; Stop 987
tgtgaaatatgttggtggagagaat

SEQ ID NO: 453596 - DNA, 25 bp, Artificial
  probe
  misc_feature (1)..(25): SEQ ID NO: 6927; WAN024BZY; Start 962; Stop 986
ttgtgaaatatgttggtggagagaa

SEQ ID NO: 453597 - DNA, 25 bp, Artificial
  probe
  misc_feature (1)..(25): SEQ ID NO: 6927; WAN024BZY; Start 427; Stop 451
attcttgagattcttgattcacttg

SEQ ID NO: 453598 - DNA, 25 bp, Artificial
  probe
  misc_feature (1)..(25): SEQ ID NO: 6927; WAN024BZY; Start 961; Stop 985
tttgtgaaatatgttggtggagaga

SEQ ID NO: 453599 - DNA, 25 bp, Artificial
  probe
  misc_feature (1)..(25): SEQ ID NO: 6927; WAN024BZY; Start 140; Stop 164
tgtcatctgctgtttatagtcgttt

SEQ ID NO: 453600 - DNA, 25 bp, Artificial
  probe
  misc_feature (1)..(25): SEQ ID NO: 6927; WAN024BZY; Start 135; Stop 159
caaagtgtcatctgctgtttatagt

SEQ ID NO: 453601 - DNA, 25 bp, Artificial
  probe
  misc_feature (1)..(25): SEQ ID NO: 6927; WAN024BZY; Start 1060; Stop 1084
gaagaagttagttcgttggctatag

SEQ ID NO: 453602 - DNA, 25 bp, Artificial
  probe
  misc_feature (1)..(25): SEQ ID NO: 6927; WAN024BZY; Start 137; Stop 161
aagtgtcatctgctgtttatagtcg

SEQ ID NO: 453603 - DNA, 25 bp, Artificial
  probe
  misc_feature (1)..(25): SEQ ID NO: 6927; WAN024BZY; Start 136; Stop 160
aaagtgtcatctgctgtttatagtc

SEQ ID NO: 453604 - DNA, 25 bp, Artificial
  probe
  misc_feature (1)..(25): SEQ ID NO: 6927; WAN024BZY; Start 134; Stop 158
tcaaagtgtcatctgctgtttatag

SEQ ID NO: 453605 - DNA, 25 bp, Artificial
  probe
  misc_feature (1)..(25): SEQ ID NO: 6927; WAN024BZY; Start 1057; Stop 1081
aaagaagaagttagttcgttggcta

SEQ ID NO: 453606 - DNA, 25 bp, Artificial
  probe
  misc_feature (1)..(25): SEQ ID NO: 6927; WAN024BZY; Start 1056; Stop 1080
taaagaagaagttagttcgttggct

SEQ ID NO: 453607 - DNA, 25 bp, Artificial
  probe
  misc_feature (1)..(25): SEQ ID NO: 6927; WAN024BZY; Start 141; Stop 165
gtcatctgctgtttatagtcgttta

SEQ ID NO: 453608 - DNA, 25 bp, Artificial
  probe
  misc_feature (1)..(25): SEQ ID NO: 6927; WAN024BZY; Start 1055; Stop 1079
ttaaagaagaagttagttcgttggc

SEQ ID NO: 453609 - DNA, 25 bp, Artificial
  probe
  misc_feature (1)..(25): SEQ ID NO: 6927; WAN024BZY; Start 964; Stop 988
gtgaaatatgttggtggagagaatt

SEQ ID NO: 453610 - DNA, 25 bp, Artificial
  probe
  misc_feature (1)..(25): SEQ ID NO: 6927; WAN024BZY; Start 139; Stop 163
gtgtcatctgctgtttatagtcgtt

SEQ ID NO: 453611 - DNA, 25 bp, Artificial
  probe
  misc_feature (1)..(25): SEQ ID NO: 6928; WAN024BN8; Start 1090; Stop 1114
tggtattattcaggtgattcaacaa

SEQ ID NO: 453612 - DNA, 25 bp, Artificial
  probe
  misc_feature (1)..(25): SEQ ID NO: 6928; WAN024BN8; Start 1089; Stop 1113
ttggtattattcaggtgattcaaca

SEQ ID NO: 453613 - DNA, 25 bp, Artificial
  probe
  misc_feature (1)..(25): SEQ ID NO: 6928; WAN024BN8; Start 604; Stop 628
ggactccataattacatgacgatct

SEQ ID NO: 453614 - DNA, 25 bp, Artificial
  probe
  misc_feature (1)..(25): SEQ ID NO: 6928; WAN024BN8; Start 402; Stop 426
agacaagtattctagtaactacgct

SEQ ID NO: 453615 - DNA, 25 bp, Artificial
  probe
  misc_feature (1)..(25): SEQ ID NO: 6928; WAN024BN8; Start 605; Stop 629
gactccataattacatgacgatctg

SEQ ID NO: 453616 - DNA, 25 bp, Artificial
  probe
  misc_feature (1)..(25): SEQ ID NO: 6928; WAN024BN8; Start 1086; Stop 1110
tcattggtattattcaggtgattca

SEQ ID NO: 453617 - DNA, 25 bp, Artificial
  probe
  misc_feature (1)..(25): SEQ ID NO: 6928; WAN024BN8; Start 1084; Stop 1108
agtcattggtattattcaggtgatt

SEQ ID NO: 453618 - DNA, 25 bp, Artificial
  probe
  misc_feature (1)..(25): SEQ ID NO: 6928; WAN024BN8; Start 1043; Stop 1067
gattaggacacgctgataagtcaac

SEQ ID NO: 453619 - DNA, 25 bp, Artificial
  probe
  misc_feature (1)..(25): SEQ ID NO: 6928; WAN024BN8; Start 1085; Stop 1109
gtcattggtattattcaggtgattc

SEQ ID NO: 453620 - DNA, 25 bp, Artificial
  probe
  misc_feature (1)..(25): SEQ ID NO: 6928; WAN024BN8; Start 1091; Stop 1115
ggtattattcaggtgattcaacaat

SEQ ID NO: 453621 - DNA, 25 bp, Artificial
  probe
  misc_feature (1)..(25): SEQ ID NO: 6928; WAN024BN8; Start 755; Stop 779
atgctaaacaacaaacaaagacagt

SEQ ID NO: 453622 - DNA, 25 bp, Artificial
  probe
  misc_feature (1)..(25): SEQ ID NO: 6928; WAN024BN8; Start 303; Stop 327
cgctttaccacatcatcagttattt

SEQ ID NO: 453623 - DNA, 25 bp, Artificial
  probe
  misc_feature (1)..(25): SEQ ID NO: 6928; WAN024BN8; Start 759; Stop 783
taaacaacaaacaaagacagtagca

SEQ ID NO: 453624 - DNA, 25 bp, Artificial
  probe
  misc_feature (1)..(25): SEQ ID NO: 6928; WAN024BN8; Start 756; Stop 780
tgctaaacaacaaacaaagacagta

SEQ ID NO: 453625 - DNA, 25 bp, Artificial
  probe
  misc_feature (1)..(25): SEQ ID NO: 6928; WAN024BN8; Start 751; Stop 775
tggtatgctaaacaacaaacaaaga

SEQ ID NO: 453626 - DNA, 25 bp, Artificial
  probe
  misc_feature (1)..(25): SEQ ID NO: 6928; WAN024BN8; Start 760; Stop 784
aaacaacaaacaaagacagtagcag

SEQ ID NO: 453627 - DNA, 25 bp, Artificial
  probe
  misc_feature (1)..(25): SEQ ID NO: 6928; WAN024BN8; Start 752; Stop 776
ggtatgctaaacaacaaacaaagac

SEQ ID NO: 453628 - DNA, 25 bp, Artificial
  probe
  misc_feature (1)..(25): SEQ ID NO: 6928; WAN024BN8; Start 283; Stop 307
caatttgtaacttatcagaccgctt

SEQ ID NO: 453629 - DNA, 25 bp, Artificial
  probe
  misc_feature (1)..(25): SEQ ID NO: 6928; WAN024BN8; Start 281; Stop 305
ttcaatttgtaacttatcagaccgc

SEQ ID NO: 453630 - DNA, 25 bp, Artificial
  probe
  misc_feature (1)..(25): SEQ ID NO: 6928; WAN024BN8; Start 1088; Stop 1112
attggtattattcaggtgattcaac

SEQ ID NO: 453631 - DNA, 25 bp, Artificial
  probe
  misc_feature (1)..(25): SEQ ID NO: 6928; WAN024BN8; Start 1087; Stop 1111
cattggtattattcaggtgattcaa

SEQ ID NO: 453632 - DNA, 25 bp, Artificial
  probe
  misc_feature (1)..(25): SEQ ID NO: 6928; WAN024BN8; Start 758; Stop 782
ctaaacaacaaacaaagacagtagc

SEQ ID NO: 453633 - DNA, 25 bp, Artificial
  probe
  misc_feature (1)..(25): SEQ ID NO: 6928; WAN024BN8; Start 757; Stop 781
gctaaacaacaaacaaagacagtag

SEQ ID NO: 453634 - DNA, 25 bp, Artificial
  probe
  misc_feature (1)..(25): SEQ ID NO: 6928; WAN024BN8; Start 282; Stop 306
tcaatttgtaacttatcagaccgct

SEQ ID NO: 453635 - DNA, 25 bp, Artificial
  probe
  misc_feature (1)..(25): SEQ ID NO: 6928; WAN024BN8; Start 284; Stop 308
aatttgtaacttatcagaccgcttt

SEQ ID NO: 453636 - DNA, 25 bp, Artificial
  probe
  misc_feature (1)..(25): SEQ ID NO: 6928; WAN024BN8; Start 753; Stop 777
gtatgctaaacaacaaacaaagaca

SEQ ID NO: 453637 - DNA, 25 bp, Artificial
  probe
  misc_feature (1)..(25): SEQ ID NO: 6928; WAN024BN8; Start 750; Stop 774
atggtatgctaaacaacaaacaaag

SEQ ID NO: 453638 - DNA, 25 bp, Artificial
  probe
  misc_feature (1)..(25): SEQ ID NO: 6928; WAN024BN8; Start 705; Stop 729
atggattcatgttcattcgacaatt

SEQ ID NO: 453639 - DNA, 25 bp, Artificial
  probe
  misc_feature (1)..(25): SEQ ID NO: 6928; WAN024BN8; Start 126; Stop 150
aaatcaacagggactaccgtttaat

SEQ ID NO: 453640 - DNA, 25 bp, Artificial
  probe
  misc_feature (1)..(25): SEQ ID NO: 6928; WAN024BN8; Start 608; Stop 632
tccataattacatgacgatctggtt

SEQ ID NO: 453641 - DNA, 25 bp, Artificial
  probe
  misc_feature (1)..(25): SEQ ID NO: 6928; WAN024BN8; Start 607; Stop 631
ctccataattacatgacgatctggt

SEQ ID NO: 453642 - DNA, 25 bp, Artificial
  probe
  misc_feature (1)..(25): SEQ ID NO: 6928; WAN024BN8; Start 606; Stop 630
actccataattacatgacgatctgg

SEQ ID NO: 453643 - DNA, 25 bp, Artificial
  probe
  misc_feature (1)..(25): SEQ ID NO: 6928; WAN024BN8; Start 403; Stop 427
gacaagtattctagtaactacgcta

SEQ ID NO: 453644 - DNA, 25 bp, Artificial
  probe
  misc_feature (1)..(25): SEQ ID NO: 6929; WAN024CC2; Start 37; Stop 61
gcaggaattggtgaaataaactttg

SEQ ID NO: 453645 - DNA, 25 bp, Artificial
  probe
  misc_feature (1)..(25): SEQ ID NO: 6929; WAN024CC2; Start 38; Stop 62
caggaattggtgaaataaactttgt

SEQ ID NO: 453646 - DNA, 25 bp, Artificial
  probe
  misc_feature (1)..(25): SEQ ID NO: 6929; WAN024CC2; Start 36; Stop 60
tgcaggaattggtgaaataaacttt

SEQ ID NO: 453647 - DNA, 25 bp, Artificial
  probe
  misc_feature (1)..(25): SEQ ID NO: 6929; WAN024CC2; Start 35; Stop 59
ttgcaggaattggtgaaataaactt

SEQ ID NO: 453648 - DNA, 25 bp, Artificial
  probe
  misc_feature (1)..(25): SEQ ID NO: 6929; WAN024CC2; Start 34; Stop 58
tttgcaggaattggtgaaataaact

SEQ ID NO: 453649 - DNA, 25 bp, Artificial
  probe
  misc_feature (1)..(25): SEQ ID NO: 6929; WAN024CC2; Start 73; Stop 97
ttgtatatatgtgtaggaatagccc

SEQ ID NO: 453650 - DNA, 25 bp, Artificial
  probe
  misc_feature (1)..(25): SEQ ID NO: 6929; WAN024CC2; Start 39; Stop 63
aggaattggtgaaataaactttgta

SEQ ID NO: 453651 - DNA, 25 bp, Artificial
  probe
  misc_feature (1)..(25): SEQ ID NO: 6929; WAN024CC2; Start 72; Stop 96
attgtatatatgtgtaggaatagcc

SEQ ID NO: 453652 - DNA, 25 bp, Artificial
  probe
  misc_feature (1)..(25): SEQ ID NO: 6929; WAN024CC2; Start 40; Stop 64
ggaattggtgaaataaactttgtaa

SEQ ID NO: 453653 - DNA, 25 bp, Artificial
  probe
  misc_feature (1)..(25): SEQ ID NO: 6929; WAN024CC2; Start 187; Stop 211
actattgctcgaatttataggactt

SEQ ID NO: 453654 - DNA, 25 bp, Artificial
  probe
  misc_feature (1)..(25): SEQ ID NO: 6929; WAN024CC2; Start 186; Stop 210
aactattgctcgaatttataggact

SEQ ID NO: 453655 - DNA, 25 bp, Artificial
  probe
  misc_feature (1)..(25): SEQ ID NO: 6929; WAN024CC2; Start 74; Stop 98
tgtatatatgtgtaggaatagcccc

SEQ ID NO: 453656 - DNA, 25 bp, Artificial
  probe
  misc_feature (1)..(25): SEQ ID NO: 6929; WAN024CC2; Start 120; Stop 144
aggttctgaaatgaattttgtgaaa

SEQ ID NO: 453657 - DNA, 25 bp, Artificial
  probe
  misc_feature (1)..(25): SEQ ID NO: 6929; WAN024CC2; Start 78; Stop 102
tatatgtgtaggaatagcccctttt

SEQ ID NO: 453658 - DNA, 25 bp, Artificial
  probe
  misc_feature (1)..(25): SEQ ID NO: 6929; WAN024CC2; Start 188; Stop 212
ctattgctcgaatttataggacttt

SEQ ID NO: 453659 - DNA, 25 bp, Artificial
  probe
  misc_feature (1)..(25): SEQ ID NO: 6929; WAN024CC2; Start 77; Stop 101
atatatgtgtaggaatagccccttt

SEQ ID NO: 453660 - DNA, 25 bp, Artificial
  probe
  misc_feature (1)..(25): SEQ ID NO: 6929; WAN024CC2; Start 33; Stop 57
ttttgcaggaattggtgaaataaac

SEQ ID NO: 453661 - DNA, 25 bp, Artificial
  probe
  misc_feature (1)..(25): SEQ ID NO: 6929; WAN024CC2; Start 75; Stop 99
gtatatatgtgtaggaatagcccct

SEQ ID NO: 453662 - DNA, 25 bp, Artificial
  probe
  misc_feature (1)..(25): SEQ ID NO: 6929; WAN024CC2; Start 119; Stop 143
taggttctgaaatgaattttgtgaa

SEQ ID NO: 453663 - DNA, 25 bp, Artificial
  probe
  misc_feature (1)..(25): SEQ ID NO: 6929; WAN024CC2; Start 118; Stop 142
ataggttctgaaatgaattttgtga

SEQ ID NO: 453664 - DNA, 25 bp, Artificial
  probe
  misc_feature (1)..(25): SEQ ID NO: 6929; WAN024CC2; Start 185; Stop 209
taactattgctcgaatttataggac

SEQ ID NO: 453665 - DNA, 25 bp, Artificial
  probe
  misc_feature (1)..(25): SEQ ID NO: 6929; WAN024CC2; Start 41; Stop 65
gaattggtgaaataaactttgtaag

SEQ ID NO: 453666 - DNA, 25 bp, Artificial
  probe
  misc_feature (1)..(25): SEQ ID NO: 6929; WAN024CC2; Start 76; Stop 100
tatatatgtgtaggaatagcccctt

SEQ ID NO: 453667 - DNA, 25 bp, Artificial
  probe
  misc_feature (1)..(25): SEQ ID NO: 6929; WAN024CC2; Start 121; Stop 145
ggttctgaaatgaattttgtgaaaa

SEQ ID NO: 453668 - DNA, 25 bp, Artificial
  probe
  misc_feature (1)..(25): SEQ ID NO: 6929; WAN024CC2; Start 173; Stop 197
ttgtttgtattttaactattgctcg

SEQ ID NO: 453669 - DNA, 25 bp, Artificial
  probe
  misc_feature (1)..(25): SEQ ID NO: 6929; WAN024CC2; Start 117; Stop 141
aataggttctgaaatgaattttgtg

SEQ ID NO: 453670 - DNA, 25 bp, Artificial
  probe
  misc_feature (1)..(25): SEQ ID NO: 6929; WAN024CC2; Start 174; Stop 198
tgtttgtattttaactattgctcga

SEQ ID NO: 453671 - DNA, 25 bp, Artificial
  probe
  misc_feature (1)..(25): SEQ ID NO: 6929; WAN024CC2; Start 184; Stop 208
ttaactattgctcgaatttatagga

SEQ ID NO: 453672 - DNA, 25 bp, Artificial
  probe
  misc_feature (1)..(25): SEQ ID NO: 6929; WAN024CC2; Start 189; Stop 213
tattgctcgaatttataggactttt

SEQ ID NO: 453673 - DNA, 25 bp, Artificial
  probe
  misc_feature (1)..(25): SEQ ID NO: 6929; WAN024CC2; Start 42; Stop 66
aattggtgaaataaactttgtaagt

SEQ ID NO: 453674 - DNA, 25 bp, Artificial
  probe
  misc_feature (1)..(25): SEQ ID NO: 6929; WAN024CC2; Start 175; Stop 199
gtttgtattttaactattgctcgaa

SEQ ID NO: 453675 - DNA, 25 bp, Artificial
  probe
  misc_feature (1)..(25): SEQ ID NO: 6929; WAN024CC2; Start 183; Stop 207
tttaactattgctcgaatttatagg

SEQ ID NO: 453676 - DNA, 25 bp, Artificial
  probe
  misc_feature (1)..(25): SEQ ID NO: 6929; WAN024CC2; Start 116; Stop 140
taataggttctgaaatgaattttgt

SEQ ID NO: 453677 - DNA, 25 bp, Artificial
  probe
  misc_feature (1)..(25): SEQ ID NO: 6930; WAN024BM6; Start 56; Stop 80
cagacgccttatccttgaatagtaa

SEQ ID NO: 453678 - DNA, 25 bp, Artificial
  probe
  misc_feature (1)..(25): SEQ ID NO: 6930; WAN024BM6; Start 1092; Stop 1116
aggaggaactactacagatgaacta

SEQ ID NO: 453679 - DNA, 25 bp, Artificial
  probe
  misc_feature (1)..(25): SEQ ID NO: 6930; WAN024BM6; Start 483; Stop 507
gattgatgacggaatggattgtaat

SEQ ID NO: 453680 - DNA, 25 bp, Artificial
  probe
  misc_feature (1)..(25): SEQ ID NO: 6930; WAN024BM6; Start 482; Stop 506
tgattgatgacggaatggattgtaa

SEQ ID NO: 453681 - DNA, 25 bp, Artificial
  probe
  misc_feature (1)..(25): SEQ ID NO: 6930; WAN024BM6; Start 481; Stop 505
ttgattgatgacggaatggattgta

SEQ ID NO: 453682 - DNA, 25 bp, Artificial
  probe
  misc_feature (1)..(25): SEQ ID NO: 6930; WAN024BM6; Start 1091; Stop 1115
caggaggaactactacagatgaact

SEQ ID NO: 453683 - DNA, 25 bp, Artificial
  probe
  misc_feature (1)..(25): SEQ ID NO: 6930; WAN024BM6; Start 1331; Stop 1355
aacctattgttcgtcagatgaagaa

SEQ ID NO: 453684 - DNA, 25 bp, Artificial
  probe
  misc_feature (1)..(25): SEQ ID NO: 6930; WAN024BM6; Start 484; Stop 508
attgatgacggaatggattgtaatt

SEQ ID NO: 453685 - DNA, 25 bp, Artificial
  probe
  misc_feature (1)..(25): SEQ ID NO: 6930; WAN024BM6; Start 1114; Stop 1138
ctagatggacggagtgttaagaatt

SEQ ID NO: 453686 - DNA, 25 bp, Artificial
  probe
  misc_feature (1)..(25): SEQ ID NO: 6930; WAN024BM6; Start 1100; Stop 1124
ctactacagatgaactagatggacg

SEQ ID NO: 453687 - DNA, 25 bp, Artificial
  probe
  misc_feature (1)..(25): SEQ ID NO: 6930; WAN024BM6; Start 1093; Stop 1117
ggaggaactactacagatgaactag

SEQ ID NO: 453688 - DNA, 25 bp, Artificial
  probe
  misc_feature (1)..(25): SEQ ID NO: 6930; WAN024BM6; Start 1328; Stop 1352
atcaacctattgttcgtcagatgaa

SEQ ID NO: 453689 - DNA, 25 bp, Artificial
  probe
  misc_feature (1)..(25): SEQ ID NO: 6930; WAN024BM6; Start 1101; Stop 1125
tactacagatgaactagatggacgg

SEQ ID NO: 453690 - DNA, 25 bp, Artificial
  probe
  misc_feature (1)..(25): SEQ ID NO: 6930; WAN024BM6; Start 1327; Stop 1351
tatcaacctattgttcgtcagatga

SEQ ID NO: 453691 - DNA, 25 bp, Artificial
  probe
  misc_feature (1)..(25): SEQ ID NO: 6930; WAN024BM6; Start 1330; Stop 1354
caacctattgttcgtcagatgaaga

SEQ ID NO: 453692 - DNA, 25 bp, Artificial
  probe
  misc_feature (1)..(25): SEQ ID NO: 6930; WAN024BM6; Start 142; Stop 166
aatgcctattctccagttccttctt

SEQ ID NO: 453693 - DNA, 25 bp, Artificial
  probe
  misc_feature (1)..(25): SEQ ID NO: 6930; WAN024BM6; Start 1099; Stop 1123
actactacagatgaactagatggac

SEQ ID NO: 453694 - DNA, 25 bp, Artificial
  probe
  misc_feature (1)..(25): SEQ ID NO: 6930; WAN024BM6; Start 1329; Stop 1353
tcaacctattgttcgtcagatgaag

SEQ ID NO: 453695 - DNA, 25 bp, Artificial
  probe
  misc_feature (1)..(25): SEQ ID NO: 6930; WAN024BM6; Start 1326; Stop 1350
atatcaacctattgttcgtcagatg

SEQ ID NO: 453696 - DNA, 25 bp, Artificial
  probe
  misc_feature (1)..(25): SEQ ID NO: 6930; WAN024BM6; Start 1094; Stop 1118
gaggaactactacagatgaactaga

SEQ ID NO: 453697 - DNA, 25 bp, Artificial
  probe
  misc_feature (1)..(25): SEQ ID NO: 6930; WAN024BM6; Start 93; Stop 117
tagcactccaacattagatatgatg

SEQ ID NO: 453698 - DNA, 25 bp, Artificial
  probe
  misc_feature (1)..(25): SEQ ID NO: 6930; WAN024BM6; Start 106; Stop 130
ttagatatgatggctagtgtaggtt

SEQ ID NO: 453699 - DNA, 25 bp, Artificial
  probe
  misc_feature (1)..(25): SEQ ID NO: 6930; WAN024BM6; Start 91; Stop 115
gttagcactccaacattagatatga

SEQ ID NO: 453700 - DNA, 25 bp, Artificial
  probe
  misc_feature (1)..(25): SEQ ID NO: 6930; WAN024BM6; Start 57; Stop 81
agacgccttatccttgaatagtaag

SEQ ID NO: 453701 - DNA, 25 bp, Artificial
  probe
  misc_feature (1)..(25): SEQ ID NO: 6930; WAN024BM6; Start 680; Stop 704
tatatatggaacgcttgcctcaatt

SEQ ID NO: 453702 - DNA, 25 bp, Artificial
  probe
  misc_feature (1)..(25): SEQ ID NO: 6930; WAN024BM6; Start 1113; Stop 1137
actagatggacggagtgttaagaat

SEQ ID NO: 453703 - DNA, 25 bp, Artificial
  probe
  misc_feature (1)..(25): SEQ ID NO: 6930; WAN024BM6; Start 108; Stop 132
agatatgatggctagtgtaggttat

SEQ ID NO: 453704 - DNA, 25 bp, Artificial
  probe
  misc_feature (1)..(25): SEQ ID NO: 6930; WAN024BM6; Start 105; Stop 129
attagatatgatggctagtgtaggt

SEQ ID NO: 453705 - DNA, 25 bp, Artificial
  probe
  misc_feature (1)..(25): SEQ ID NO: 6930; WAN024BM6; Start 1112; Stop 1136
aactagatggacggagtgttaagaa

SEQ ID NO: 453706 - DNA, 25 bp, Artificial
  probe
  misc_feature (1)..(25): SEQ ID NO: 6930; WAN024BM6; Start 1109; Stop 1133
atgaactagatggacggagtgttaa

SEQ ID NO: 453707 - DNA, 25 bp, Artificial
  probe
  misc_feature (1)..(25): SEQ ID NO: 6930; WAN024BM6; Start 1103; Stop 1127
ctacagatgaactagatggacggag

SEQ ID NO: 453708 - DNA, 25 bp, Artificial
  probe
  misc_feature (1)..(25): SEQ ID NO: 6930; WAN024BM6; Start 1098; Stop 1122
aactactacagatgaactagatgga

SEQ ID NO: 453709 - DNA, 25 bp, Artificial
  probe
  misc_feature (1)..(25): SEQ ID NO: 6930; WAN024BM6; Start 90; Stop 114
agttagcactccaacattagatatg

SEQ ID NO: 453710 - DNA, 25 bp, Artificial
  probe
  misc_feature (1)..(25): SEQ ID NO: 6931; WAN024BHQ; Start 122; Stop 146
ggtgtttgtatgtttcattgggaat

SEQ ID NO: 453711 - DNA, 25 bp, Artificial
  probe
  misc_feature (1)..(25): SEQ ID NO: 6931; WAN024BHQ; Start 119; Stop 143
cttggtgtttgtatgtttcattggg

SEQ ID NO: 453712 - DNA, 25 bp, Artificial
  probe
  misc_feature (1)..(25): SEQ ID NO: 6931; WAN024BHQ; Start 121; Stop 145
tggtgtttgtatgtttcattgggaa

SEQ ID NO: 453713 - DNA, 25 bp, Artificial
  probe
  misc_feature (1)..(25): SEQ ID NO: 6931; WAN024BHQ; Start 120; Stop 144
ttggtgtttgtatgtttcattggga

SEQ ID NO: 453714 - DNA, 25 bp, Artificial
  probe
  misc_feature (1)..(25): SEQ ID NO: 6931; WAN024BHQ; Start 118; Stop 142
gcttggtgtttgtatgtttcattgg

SEQ ID NO: 453715 - DNA, 25 bp, Artificial
  probe
  misc_feature (1)..(25): SEQ ID NO: 6931; WAN024BHQ; Start 115; Stop 139
ctagcttggtgtttgtatgtttcat

SEQ ID NO: 453716 - DNA, 25 bp, Artificial
  probe
  misc_feature (1)..(25): SEQ ID NO: 6931; WAN024BHQ; Start 116; Stop 140
tagcttggtgtttgtatgtttcatt

SEQ ID NO: 453717 - DNA, 25 bp, Artificial
  probe
  misc_feature (1)..(25): SEQ ID NO: 6931; WAN024BHQ; Start 117; Stop 141
agcttggtgtttgtatgtttcattg

SEQ ID NO: 453718 - DNA, 25 bp, Artificial
  probe
  misc_feature (1)..(25): SEQ ID NO: 6931; WAN024BHQ; Start 93; Stop 117
ggctcatcatccaggaaccattcta

SEQ ID NO: 453719 - DNA, 25 bp, Artificial
  probe
  misc_feature (1)..(25): SEQ ID NO: 6931; WAN024BHQ; Start 124; Stop 148
tgtttgtatgtttcattgggaatgt

SEQ ID NO: 453720 - DNA, 25 bp, Artificial
  probe
  misc_feature (1)..(25): SEQ ID NO: 6931; WAN024BHQ; Start 123; Stop 147
gtgtttgtatgtttcattgggaatg

SEQ ID NO: 453721 - DNA, 25 bp, Artificial
  probe
  misc_feature (1)..(25): SEQ ID NO: 6931; WAN024BHQ; Start 125; Stop 149
gtttgtatgtttcattgggaatgtt

SEQ ID NO: 453722 - DNA, 25 bp, Artificial
  probe
  misc_feature (1)..(25): SEQ ID NO: 6931; WAN024BHQ; Start 195; Stop 219
gctacatttggtgtggaacctacta

SEQ ID NO: 453723 - DNA, 25 bp, Artificial
  probe
  misc_feature (1)..(25): SEQ ID NO: 6931; WAN024BHQ; Start 126; Stop 150
tttgtatgtttcattgggaatgttt

SEQ ID NO: 453724 - DNA, 25 bp, Artificial
  probe
  misc_feature (1)..(25): SEQ ID NO: 6931; WAN024BHQ; Start 33; Stop 57
atggaacttggtcagaaaattagat

SEQ ID NO: 453725 - DNA, 25 bp, Artificial
  probe
  misc_feature (1)..(25): SEQ ID NO: 6931; WAN024BHQ; Start 34; Stop 58
tggaacttggtcagaaaattagata

SEQ ID NO: 453726 - DNA, 25 bp, Artificial
  probe
  misc_feature (1)..(25): SEQ ID NO: 6931; WAN024BHQ; Start 32; Stop 56
tatggaacttggtcagaaaattaga

SEQ ID NO: 453727 - DNA, 25 bp, Artificial
  probe
  misc_feature (1)..(25): SEQ ID NO: 6931; WAN024BHQ; Start 20; Stop 44
gtcgagaaattttatggaacttggt

SEQ ID NO: 453728 - DNA, 25 bp, Artificial
  probe
  misc_feature (1)..(25): SEQ ID NO: 6931; WAN024BHQ; Start 19; Stop 43
tgtcgagaaattttatggaacttgg

SEQ ID NO: 453729 - DNA, 25 bp, Artificial
  probe
  misc_feature (1)..(25): SEQ ID NO: 6931; WAN024BHQ; Start 60; Stop 84
cagaattgcgttgacaagtgttttg

SEQ ID NO: 453730 - DNA, 25 bp, Artificial
  probe
  misc_feature (1)..(25): SEQ ID NO: 6931; WAN024BHQ; Start 17; Stop 41
tgtgtcgagaaattttatggaactt

SEQ ID NO: 453731 - DNA, 25 bp, Artificial
  probe
  misc_feature (1)..(25): SEQ ID NO: 6931; WAN024BHQ; Start 16; Stop 40
ttgtgtcgagaaattttatggaact

SEQ ID NO: 453732 - DNA, 25 bp, Artificial
  probe
  misc_feature (1)..(25): SEQ ID NO: 6931; WAN024BHQ; Start 31; Stop 55
ttatggaacttggtcagaaaattag

SEQ ID NO: 453733 - DNA, 25 bp, Artificial
  probe
  misc_feature (1)..(25): SEQ ID NO: 6931; WAN024BHQ; Start 18; Stop 42
gtgtcgagaaattttatggaacttg

SEQ ID NO: 453734 - DNA, 25 bp, Artificial
  probe
  misc_feature (1)..(25): SEQ ID NO: 6931; WAN024BHQ; Start 169; Stop 193
aaatctgatttatggggcagtatgg

SEQ ID NO: 453735 - DNA, 25 bp, Artificial
  probe
  misc_feature (1)..(25): SEQ ID NO: 6931; WAN024BHQ; Start 24; Stop 48
agaaattttatggaacttggtcaga

SEQ ID NO: 453736 - DNA, 25 bp, Artificial
  probe
  misc_feature (1)..(25): SEQ ID NO: 6931; WAN024BHQ; Start 15; Stop 39
tttgtgtcgagaaattttatggaac

SEQ ID NO: 453737 - DNA, 25 bp, Artificial
  probe
  misc_feature (1)..(25): SEQ ID NO: 6931; WAN024BHQ; Start 23; Stop 47
gagaaattttatggaacttggtcag

SEQ ID NO: 453738 - DNA, 25 bp, Artificial
  probe
  misc_feature (1)..(25): SEQ ID NO: 6931; WAN024BHQ; Start 170; Stop 194
aatctgatttatggggcagtatggg

SEQ ID NO: 453739 - DNA, 25 bp, Artificial
  probe
  misc_feature (1)..(25): SEQ ID NO: 6931; WAN024BHQ; Start 35; Stop 59
ggaacttggtcagaaaattagatat

SEQ ID NO: 453740 - DNA, 25 bp, Artificial
  probe
  misc_feature (1)..(25): SEQ ID NO: 6931; WAN024BHQ; Start 30; Stop 54
tttatggaacttggtcagaaaatta

SEQ ID NO: 453741 - DNA, 25 bp, Artificial
  probe
  misc_feature (1)..(25): SEQ ID NO: 6931; WAN024BHQ; Start 91; Stop 115
ttggctcatcatccaggaaccattc

SEQ ID NO: 453742 - DNA, 25 bp, Artificial
  probe
  misc_feature (1)..(25): SEQ ID NO: 6931; WAN024BHQ; Start 25; Stop 49
gaaattttatggaacttggtcagaa

SEQ ID NO: 453743 - DNA, 25 bp, Artificial
  probe
  misc_feature (1)..(25): SEQ ID NO: 6932; WAN024BUY; Start 735; Stop 759
gaacatcggaatacaatctgaagtc

SEQ ID NO: 453744 - DNA, 25 bp, Artificial
  probe
  misc_feature (1)..(25): SEQ ID NO: 6932; WAN024BUY; Start 410; Stop 434
ttgatgatgttcgttggctattaga

SEQ ID NO: 453745 - DNA, 25 bp, Artificial
  probe
  misc_feature (1)..(25): SEQ ID NO: 6932; WAN024BUY; Start 736; Stop 760
aacatcggaatacaatctgaagtca

SEQ ID NO: 453746 - DNA, 25 bp, Artificial
  probe
  misc_feature (1)..(25): SEQ ID NO: 6932; WAN024BUY; Start 425; Stop 449
ggctattagaagaacctgttgtgaa

SEQ ID NO: 453747 - DNA, 25 bp, Artificial
  probe
  misc_feature (1)..(25): SEQ ID NO: 6932; WAN024BUY; Start 844; Stop 868
attattcaagcgattagtggtggag

SEQ ID NO: 453748 - DNA, 25 bp, Artificial
  probe
  misc_feature (1)..(25): SEQ ID NO: 6932; WAN024BUY; Start 413; Stop 437
atgatgttcgttggctattagaaga

SEQ ID NO: 453749 - DNA, 25 bp, Artificial
  probe
  misc_feature (1)..(25): SEQ ID NO: 6932; WAN024BUY; Start 412; Stop 436
gatgatgttcgttggctattagaag

SEQ ID NO: 453750 - DNA, 25 bp, Artificial
  probe
  misc_feature (1)..(25): SEQ ID NO: 6932; WAN024BUY; Start 843; Stop 867
aattattcaagcgattagtggtgga

SEQ ID NO: 453751 - DNA, 25 bp, Artificial
  probe
  misc_feature (1)..(25): SEQ ID NO: 6932; WAN024BUY; Start 414; Stop 438
tgatgttcgttggctattagaagaa

SEQ ID NO: 453752 - DNA, 25 bp, Artificial
  probe
  misc_feature (1)..(25): SEQ ID NO: 6932; WAN024BUY; Start 411; Stop 435
tgatgatgttcgttggctattagaa

SEQ ID NO: 453753 - DNA, 25 bp, Artificial
  probe
  misc_feature (1)..(25): SEQ ID NO: 6932; WAN024BUY; Start 426; Stop 450
gctattagaagaacctgttgtgaat

SEQ ID NO: 453754 - DNA, 25 bp, Artificial
  probe
  misc_feature (1)..(25): SEQ ID NO: 6932; WAN024BUY; Start 734; Stop 758
agaacatcggaatacaatctgaagt

SEQ ID NO: 453755 - DNA, 25 bp, Artificial
  probe
  misc_feature (1)..(25): SEQ ID NO: 6932; WAN024BUY; Start 423; Stop 447
ttggctattagaagaacctgttgtg

SEQ ID NO: 453756 - DNA, 25 bp, Artificial
  probe
  misc_feature (1)..(25): SEQ ID NO: 6932; WAN024BUY; Start 733; Stop 757
aagaacatcggaatacaatctgaag

SEQ ID NO: 453757 - DNA, 25 bp, Artificial
  probe
  misc_feature (1)..(25): SEQ ID NO: 6932; WAN024BUY; Start 422; Stop 446
gttggctattagaagaacctgttgt

SEQ ID NO: 453758 - DNA, 25 bp, Artificial
  probe
  misc_feature (1)..(25): SEQ ID NO: 6932; WAN024BUY; Start 276; Stop 300
tgtgagtgattatactgagcaagtt

SEQ ID NO: 453759 - DNA, 25 bp, Artificial
  probe
  misc_feature (1)..(25): SEQ ID NO: 6932; WAN024BUY; Start 275; Stop 299
ttgtgagtgattatactgagcaagt

SEQ ID NO: 453760 - DNA, 25 bp, Artificial
  probe
  misc_feature (1)..(25): SEQ ID NO: 6932; WAN024BUY; Start 278; Stop 302
tgagtgattatactgagcaagttca

SEQ ID NO: 453761 - DNA, 25 bp, Artificial
  probe
  misc_feature (1)..(25): SEQ ID NO: 6932; WAN024BUY; Start 277; Stop 301
gtgagtgattatactgagcaagttc

SEQ ID NO: 453762 - DNA, 25 bp, Artificial
  probe
  misc_feature (1)..(25): SEQ ID NO: 6932; WAN024BUY; Start 847; Stop 871
attcaagcgattagtggtggagata

SEQ ID NO: 453763 - DNA, 25 bp, Artificial
  probe
  misc_feature (1)..(25): SEQ ID NO: 6932; WAN024BUY; Start 846; Stop 870
tattcaagcgattagtggtggagat

SEQ ID NO: 453764 - DNA, 25 bp, Artificial
  probe
  misc_feature (1)..(25): SEQ ID NO: 6932; WAN024BUY; Start 424; Stop 448
tggctattagaagaacctgttgtga

SEQ ID NO: 453765 - DNA, 25 bp, Artificial
  probe
  misc_feature (1)..(25): SEQ ID NO: 6932; WAN024BUY; Start 848; Stop 872
ttcaagcgattagtggtggagataa

SEQ ID NO: 453766 - DNA, 25 bp, Artificial
  probe
  misc_feature (1)..(25): SEQ ID NO: 6932; WAN024BUY; Start 845; Stop 869
ttattcaagcgattagtggtggaga

SEQ ID NO: 453767 - DNA, 25 bp, Artificial
  probe
  misc_feature (1)..(25): SEQ ID NO: 6932; WAN024BUY; Start 854; Stop 878
cgattagtggtggagataagacgaa

SEQ ID NO: 453768 - DNA, 25 bp, Artificial
  probe
  misc_feature (1)..(25): SEQ ID NO: 6932; WAN024BUY; Start 851; Stop 875
aagcgattagtggtggagataagac

SEQ ID NO: 453769 - DNA, 25 bp, Artificial
  probe
  misc_feature (1)..(25): SEQ ID NO: 6932; WAN024BUY; Start 850; Stop 874
caagcgattagtggtggagataaga

SEQ ID NO: 453770 - DNA, 25 bp, Artificial
  probe
  misc_feature (1)..(25): SEQ ID NO: 6932; WAN024BUY; Start 849; Stop 873
tcaagcgattagtggtggagataag

SEQ ID NO: 453771 - DNA, 25 bp, Artificial
  probe
  misc_feature (1)..(25): SEQ ID NO: 6932; WAN024BUY; Start 347; Stop 371
ttcctgaattgaatcaagaccgaat

SEQ ID NO: 453772 - DNA, 25 bp, Artificial
  probe
  misc_feature (1)..(25): SEQ ID NO: 6932; WAN024BUY; Start 421; Stop 445
cgttggctattagaagaacctgttg

SEQ ID NO: 453773 - DNA, 25 bp, Artificial
  probe
  misc_feature (1)..(25): SEQ ID NO: 6932; WAN024BUY; Start 420; Stop 444
tcgttggctattagaagaacctgtt

SEQ ID NO: 453774 - DNA, 25 bp, Artificial
  probe
  misc_feature (1)..(25): SEQ ID NO: 6932; WAN024BUY; Start 419; Stop 443
ttcgttggctattagaagaacctgt

SEQ ID NO: 453775 - DNA, 25 bp, Artificial
  probe
  misc_feature (1)..(25): SEQ ID NO: 6932; WAN024BUY; Start 100; Stop 124
ctacaacacagcaaggcaagttatt

SEQ ID NO: 453776 - DNA, 25 bp, Artificial
  probe
  misc_feature (1)..(25): SEQ ID NO: 6933; WAN024BTR; Start 79; Stop 103
tatattgaagccctgaacgacttag

SEQ ID NO: 453777 - DNA, 25 bp, Artificial
  probe
  misc_feature (1)..(25): SEQ ID NO: 6933; WAN024BTR; Start 78; Stop 102
ctatattgaagccctgaacgactta

SEQ ID NO: 453778 - DNA, 25 bp, Artificial
  probe
  misc_feature (1)..(25): SEQ ID NO: 6933; WAN024BTR; Start 80; Stop 104
atattgaagccctgaacgacttaga

SEQ ID NO: 453779 - DNA, 25 bp, Artificial
  probe
  misc_feature (1)..(25): SEQ ID NO: 6933; WAN024BTR; Start 19; Stop 43
caggaaattcatctctttgttgagt

SEQ ID NO: 453780 - DNA, 25 bp, Artificial
  probe
  misc_feature (1)..(25): SEQ ID NO: 6933; WAN024BTR; Start 18; Stop 42
tcaggaaattcatctctttgttgag

SEQ ID NO: 453781 - DNA, 25 bp, Artificial
  probe
  misc_feature (1)..(25): SEQ ID NO: 6933; WAN024BTR; Start 77; Stop 101
actatattgaagccctgaacgactt

SEQ ID NO: 453782 - DNA, 25 bp, Artificial
  probe
  misc_feature (1)..(25): SEQ ID NO: 6933; WAN024BTR; Start 17; Stop 41
atcaggaaattcatctctttgttga

SEQ ID NO: 453783 - DNA, 25 bp, Artificial
  probe
  misc_feature (1)..(25): SEQ ID NO: 6933; WAN024BTR; Start 20; Stop 44
aggaaattcatctctttgttgagtt

SEQ ID NO: 453784 - DNA, 25 bp, Artificial
  probe
  misc_feature (1)..(25): SEQ ID NO: 6933; WAN024BTR; Start 76; Stop 100
gactatattgaagccctgaacgact

SEQ ID NO: 453785 - DNA, 25 bp, Artificial
  probe
  misc_feature (1)..(25): SEQ ID NO: 6933; WAN024BTR; Start 75; Stop 99
agactatattgaagccctgaacgac

SEQ ID NO: 453786 - DNA, 25 bp, Artificial
  probe
  misc_feature (1)..(25): SEQ ID NO: 6933; WAN024BTR; Start 5; Stop 29
ttggagtaacctatcaggaaattca

SEQ ID NO: 453787 - DNA, 25 bp, Artificial
  probe
  misc_feature (1)..(25): SEQ ID NO: 6933; WAN024BTR; Start 6; Stop 30
tggagtaacctatcaggaaattcat

SEQ ID NO: 453788 - DNA, 25 bp, Artificial
  probe
  misc_feature (1)..(25): SEQ ID NO: 6933; WAN024BTR; Start 4; Stop 28
gttggagtaacctatcaggaaattc

SEQ ID NO: 453789 - DNA, 25 bp, Artificial
  probe
  misc_feature (1)..(25): SEQ ID NO: 6933; WAN024BTR; Start 81; Stop 105
tattgaagccctgaacgacttagac

SEQ ID NO: 453790 - DNA, 25 bp, Artificial
  probe
  misc_feature (1)..(25): SEQ ID NO: 6933; WAN024BTR; Start 21; Stop 45
ggaaattcatctctttgttgagttt

SEQ ID NO: 453791 - DNA, 25 bp, Artificial
  probe
  misc_feature (1)..(25): SEQ ID NO: 6933; WAN024BTR; Start 7; Stop 31
ggagtaacctatcaggaaattcatc

SEQ ID NO: 453792 - DNA, 25 bp, Artificial
  probe
  misc_feature (1)..(25): SEQ ID NO: 6933; WAN024BTR; Start 121; Stop 145
tcctacagagaagctattgaaagat

SEQ ID NO: 453793 - DNA, 25 bp, Artificial
  probe
  misc_feature (1)..(25): SEQ ID NO: 6933; WAN024BTR; Start 14; Stop 38
cctatcaggaaattcatctctttgt

SEQ ID NO: 453794 - DNA, 25 bp, Artificial
  probe
  misc_feature (1)..(25): SEQ ID NO: 6933; WAN024BTR; Start 13; Stop 37
acctatcaggaaattcatctctttg

SEQ ID NO: 453795 - DNA, 25 bp, Artificial
  probe
  misc_feature (1)..(25): SEQ ID NO: 6933; WAN024BTR; Start 72; Stop 96
tccagactatattgaagccctgaac

SEQ ID NO: 453796 - DNA, 25 bp, Artificial
  probe
  misc_feature (1)..(25): SEQ ID NO: 6933; WAN024BTR; Start 71; Stop 95
gtccagactatattgaagccctgaa

SEQ ID NO: 453797 - DNA, 25 bp, Artificial
  probe
  misc_feature (1)..(25): SEQ ID NO: 6933; WAN024BTR; Start 16; Stop 40
tatcaggaaattcatctctttgttg

SEQ ID NO: 453798 - DNA, 25 bp, Artificial
  probe
  misc_feature (1)..(25): SEQ ID NO: 6933; WAN024BTR; Start 120; Stop 144
ctcctacagagaagctattgaaaga

SEQ ID NO: 453799 - DNA, 25 bp, Artificial
  probe
  misc_feature (1)..(25): SEQ ID NO: 6933; WAN024BTR; Start 122; Stop 146
cctacagagaagctattgaaagatt

SEQ ID NO: 453800 - DNA, 25 bp, Artificial
  probe
  misc_feature (1)..(25): SEQ ID NO: 6933; WAN024BTR; Start 74; Stop 98
cagactatattgaagccctgaacga

SEQ ID NO: 453801 - DNA, 25 bp, Artificial
  probe
  misc_feature (1)..(25): SEQ ID NO: 6933; WAN024BTR; Start 15; Stop 39
ctatcaggaaattcatctctttgtt

SEQ ID NO: 453802 - DNA, 25 bp, Artificial
  probe
  misc_feature (1)..(25): SEQ ID NO: 6933; WAN024BTR; Start 12; Stop 36
aacctatcaggaaattcatctcttt

SEQ ID NO: 453803 - DNA, 25 bp, Artificial
  probe
  misc_feature (1)..(25): SEQ ID NO: 6933; WAN024BTR; Start 10; Stop 34
gtaacctatcaggaaattcatctct

SEQ ID NO: 453804 - DNA, 25 bp, Artificial
  probe
  misc_feature (1)..(25): SEQ ID NO: 6933; WAN024BTR; Start 9; Stop 33
agtaacctatcaggaaattcatctc

SEQ ID NO: 453805 - DNA, 25 bp, Artificial
  probe
  misc_feature (1)..(25): SEQ ID NO: 6933; WAN024BTR; Start 8; Stop 32
gagtaacctatcaggaaattcatct

SEQ ID NO: 453806 - DNA, 25 bp, Artificial
  probe
  misc_feature (1)..(25): SEQ ID NO: 6933; WAN024BTR; Start 64; Stop 88
caagggcgtccagactatattgaag

SEQ ID NO: 453807 - DNA, 25 bp, Artificial
  probe
  misc_feature (1)..(25): SEQ ID NO: 6933; WAN024BTR; Start 115; Stop 139
gaagtctcctacagagaagctattg

SEQ ID NO: 453808 - DNA, 25 bp, Artificial
  probe
  misc_feature (1)..(25): SEQ ID NO: 6933; WAN024BTR; Start 117; Stop 141
agtctcctacagagaagctattgaa

SEQ ID NO: 453809 - DNA, 25 bp, Artificial
  probe
  misc_feature (1)..(25): SEQ ID NO: 6934; WAN024BSC; Start 59; Stop 83
gcgactcttctttattatctgatta

SEQ ID NO: 453810 - DNA, 25 bp, Artificial
  probe
  misc_feature (1)..(25): SEQ ID NO: 6934; WAN024BSC; Start 28; Stop 52
tataggcatgtgtttagaacagtcg

SEQ ID NO: 453811 - DNA, 25 bp, Artificial
  probe
  misc_feature (1)..(25): SEQ ID NO: 6934; WAN024BSC; Start 21; Stop 45
cacctactataggcatgtgtttaga

SEQ ID NO: 453812 - DNA, 25 bp, Artificial
  probe
  misc_feature (1)..(25): SEQ ID NO: 6934; WAN024BSC; Start 13; Stop 37
gtttaccacacctactataggcatg

SEQ ID NO: 453813 - DNA, 25 bp, Artificial
  probe
  misc_feature (1)..(25): SEQ ID NO: 6934; WAN024BSC; Start 22; Stop 46
acctactataggcatgtgtttagaa

SEQ ID NO: 453814 - DNA, 25 bp, Artificial
  probe
  misc_feature (1)..(25): SEQ ID NO: 6934; WAN024BSC; Start 14; Stop 38
tttaccacacctactataggcatgt

SEQ ID NO: 453815 - DNA, 25 bp, Artificial
  probe
  misc_feature (1)..(25): SEQ ID NO: 6934; WAN024BSC; Start 23; Stop 47
cctactataggcatgtgtttagaac

SEQ ID NO: 453816 - DNA, 25 bp, Artificial
  probe
  misc_feature (1)..(25): SEQ ID NO: 6934; WAN024BSC; Start 58; Stop 82
cgcgactcttctttattatctgatt

SEQ ID NO: 453817 - DNA, 25 bp, Artificial
  probe
  misc_feature (1)..(25): SEQ ID NO: 6934; WAN024BSC; Start 57; Stop 81
gcgcgactcttctttattatctgat

SEQ ID NO: 453818 - DNA, 25 bp, Artificial
  probe
  misc_feature (1)..(25): SEQ ID NO: 6934; WAN024BSC; Start 91; Stop 115
cttttagagaagtttgatgcagtcg

SEQ ID NO: 453819 - DNA, 25 bp, Artificial
  probe
  misc_feature (1)..(25): SEQ ID NO: 6934; WAN024BSC; Start 26; Stop 50
actataggcatgtgtttagaacagt

SEQ ID NO: 453820 - DNA, 25 bp, Artificial
  probe
  misc_feature (1)..(25): SEQ ID NO: 6934; WAN024BSC; Start 90; Stop 114
gcttttagagaagtttgatgcagtc

SEQ ID NO: 453821 - DNA, 25 bp, Artificial
  probe
  misc_feature (1)..(25): SEQ ID NO: 6934; WAN024BSC; Start 12; Stop 36
ggtttaccacacctactataggcat

SEQ ID NO: 453822 - DNA, 25 bp, Artificial
  probe
  misc_feature (1)..(25): SEQ ID NO: 6934; WAN024BSC; Start 27; Stop 51
ctataggcatgtgtttagaacagtc

SEQ ID NO: 453823 - DNA, 25 bp, Artificial
  probe
  misc_feature (1)..(25): SEQ ID NO: 6934; WAN024BSC; Start 89; Stop 113
agcttttagagaagtttgatgcagt

SEQ ID NO: 453824 - DNA, 25 bp, Artificial
  probe
  misc_feature (1)..(25): SEQ ID NO: 6934; WAN024BSC; Start 55; Stop 79
aagcgcgactcttctttattatctg

SEQ ID NO: 453825 - DNA, 25 bp, Artificial
  probe
  misc_feature (1)..(25): SEQ ID NO: 6934; WAN024BSC; Start 56; Stop 80
agcgcgactcttctttattatctga

SEQ ID NO: 453826 - DNA, 25 bp, Artificial
  probe
  misc_feature (1)..(25): SEQ ID NO: 6934; WAN024BSC; Start 15; Stop 39
ttaccacacctactataggcatgtg

SEQ ID NO: 453827 - DNA, 25 bp, Artificial
  probe
  misc_feature (1)..(25): SEQ ID NO: 6934; WAN024BSC; Start 25; Stop 49
tactataggcatgtgtttagaacag

SEQ ID NO: 453828 - DNA, 25 bp, Artificial
  probe
  misc_feature (1)..(25): SEQ ID NO: 6934; WAN024BSC; Start 24; Stop 48
ctactataggcatgtgtttagaaca

SEQ ID NO: 453829 - DNA, 25 bp, Artificial
  probe
  misc_feature (1)..(25): SEQ ID NO: 6934; WAN024BSC; Start 92; Stop 116
ttttagagaagtttgatgcagtcgc

SEQ ID NO: 453830 - DNA, 25 bp, Artificial
  probe
  misc_feature (1)..(25): SEQ ID NO: 6934; WAN024BSC; Start 29; Stop 53
ataggcatgtgtttagaacagtcgg

SEQ ID NO: 453831 - DNA, 25 bp, Artificial
  probe
  misc_feature (1)..(25): SEQ ID NO: 6934; WAN024BSC; Start 4; Stop 28
gtttatgaggtttaccacacctact

SEQ ID NO: 453832 - DNA, 25 bp, Artificial
  probe
  misc_feature (1)..(25): SEQ ID NO: 6934; WAN024BSC; Start 16; Stop 40
taccacacctactataggcatgtgt

SEQ ID NO: 453833 - DNA, 25 bp, Artificial
  probe
  misc_feature (1)..(25): SEQ ID NO: 6934; WAN024BSC; Start 20; Stop 44
acacctactataggcatgtgtttag

SEQ ID NO: 453834 - DNA, 25 bp, Artificial
  probe
  misc_feature (1)..(25): SEQ ID NO: 6934; WAN024BSC; Start 3; Stop 27
ggtttatgaggtttaccacacctac

SEQ ID NO: 453835 - DNA, 25 bp, Artificial
  probe
  misc_feature (1)..(25): SEQ ID NO: 6934; WAN024BSC; Start 93; Stop 117
tttagagaagtttgatgcagtcgca

SEQ ID NO: 453836 - DNA, 25 bp, Artificial
  probe
  misc_feature (1)..(25): SEQ ID NO: 6934; WAN024BSC; Start 5; Stop 29
tttatgaggtttaccacacctacta

SEQ ID NO: 453837 - DNA, 25 bp, Artificial
  probe
  misc_feature (1)..(25): SEQ ID NO: 6934; WAN024BSC; Start 6; Stop 30
ttatgaggtttaccacacctactat

SEQ ID NO: 453838 - DNA, 25 bp, Artificial
  probe
  misc_feature (1)..(25): SEQ ID NO: 6934; WAN024BSC; Start 19; Stop 43
cacacctactataggcatgtgttta

SEQ ID NO: 453839 - DNA, 25 bp, Artificial
  probe
  misc_feature (1)..(25): SEQ ID NO: 6934; WAN024BSC; Start 9; Stop 33
tgaggtttaccacacctactatagg

SEQ ID NO: 453840 - DNA, 25 bp, Artificial
  probe
  misc_feature (1)..(25): SEQ ID NO: 6934; WAN024BSC; Start 8; Stop 32
atgaggtttaccacacctactatag

SEQ ID NO: 453841 - DNA, 25 bp, Artificial
  probe
  misc_feature (1)..(25): SEQ ID NO: 6934; WAN024BSC; Start 94; Stop 118
ttagagaagtttgatgcagtcgcag

SEQ ID NO: 453842 - DNA, 25 bp, Artificial
  probe
  misc_feature (1)..(25): SEQ ID NO: 6935; WAN024DUZ; Start 15; Stop 39
atctgctattggtttatttgacaca

SEQ ID NO: 453843 - DNA, 25 bp, Artificial
  probe
  misc_feature (1)..(25): SEQ ID NO: 6935; WAN024DUZ; Start 16; Stop 40
tctgctattggtttatttgacacaa

SEQ ID NO: 453844 - DNA, 25 bp, Artificial
  probe
  misc_feature (1)..(25): SEQ ID NO: 6935; WAN024DUZ; Start 24; Stop 48
tggtttatttgacacaatagggatt

SEQ ID NO: 453845 - DNA, 25 bp, Artificial
  probe
  misc_feature (1)..(25): SEQ ID NO: 6935; WAN024DUZ; Start 23; Stop 47
ttggtttatttgacacaatagggat

SEQ ID NO: 453846 - DNA, 25 bp, Artificial
  probe
  misc_feature (1)..(25): SEQ ID NO: 6935; WAN024DUZ; Start 25; Stop 49
ggtttatttgacacaatagggattc

SEQ ID NO: 453847 - DNA, 25 bp, Artificial
  probe
  misc_feature (1)..(25): SEQ ID NO: 6935; WAN024DUZ; Start 30; Stop 54
atttgacacaatagggattctcctt

SEQ ID NO: 453848 - DNA, 25 bp, Artificial
  probe
  misc_feature (1)..(25): SEQ ID NO: 6935; WAN024DUZ; Start 36; Stop 60
cacaatagggattctccttcaagtt

SEQ ID NO: 453849 - DNA, 25 bp, Artificial
  probe
  misc_feature (1)..(25): SEQ ID NO: 6935; WAN024DUZ; Start 31; Stop 55
tttgacacaatagggattctccttc

SEQ ID NO: 453850 - DNA, 25 bp, Artificial
  probe
  misc_feature (1)..(25): SEQ ID NO: 6935; WAN024DUZ; Start 29; Stop 53
tatttgacacaatagggattctcct

SEQ ID NO: 453851 - DNA, 25 bp, Artificial
  probe
  misc_feature (1)..(25): SEQ ID NO: 6935; WAN024DUZ; Start 37; Stop 61
acaatagggattctccttcaagtta

SEQ ID NO: 453852 - DNA, 25 bp, Artificial
  probe
  misc_feature (1)..(25): SEQ ID NO: 6935; WAN024DUZ; Start 34; Stop 58
gacacaatagggattctccttcaag

SEQ ID NO: 453853 - DNA, 25 bp, Artificial
  probe
  misc_feature (1)..(25): SEQ ID NO: 6935; WAN024DUZ; Start 14; Stop 38
tatctgctattggtttatttgacac

SEQ ID NO: 453854 - DNA, 25 bp, Artificial
  probe
  misc_feature (1)..(25): SEQ ID NO: 6935; WAN024DUZ; Start 35; Stop 59
acacaatagggattctccttcaagt

SEQ ID NO: 453855 - DNA, 25 bp, Artificial
  probe
  misc_feature (1)..(25): SEQ ID NO: 6935; WAN024DUZ; Start 33; Stop 57
tgacacaatagggattctccttcaa

SEQ ID NO: 453856 - DNA, 25 bp, Artificial
  probe
  misc_feature (1)..(25): SEQ ID NO: 6935; WAN024DUZ; Start 32; Stop 56
ttgacacaatagggattctccttca

SEQ ID NO: 453857 - DNA, 25 bp, Artificial
  probe
  misc_feature (1)..(25): SEQ ID NO: 6935; WAN024DUZ; Start 28; Stop 52
ttatttgacacaatagggattctcc

SEQ ID NO: 453858 - DNA, 25 bp, Artificial
  probe
  misc_feature (1)..(25): SEQ ID NO: 6935; WAN024DUZ; Start 26; Stop 50
gtttatttgacacaatagggattct

SEQ ID NO: 453859 - DNA, 25 bp, Artificial
  probe
  misc_feature (1)..(25): SEQ ID NO: 6935; WAN024DUZ; Start 38; Stop 62
caatagggattctccttcaagttaa

SEQ ID NO: 453860 - DNA, 25 bp, Artificial
  probe
  misc_feature (1)..(25): SEQ ID NO: 6935; WAN024DUZ; Start 3; Stop 27
ggtttcaatcatatctgctattggt

SEQ ID NO: 453861 - DNA, 25 bp, Artificial
  probe
  misc_feature (1)..(25): SEQ ID NO: 6935; WAN024DUZ; Start 2; Stop 26
tggtttcaatcatatctgctattgg

SEQ ID NO: 453862 - DNA, 25 bp, Artificial
  probe
  misc_feature (1)..(25): SEQ ID NO: 6935; WAN024DUZ; Start 27; Stop 51
tttatttgacacaatagggattctc

SEQ ID NO: 453863 - DNA, 25 bp, Artificial
  probe
  misc_feature (1)..(25): SEQ ID NO: 6935; WAN024DUZ; Start 22; Stop 46
attggtttatttgacacaataggga

SEQ ID NO: 453864 - DNA, 25 bp, Artificial
  probe
  misc_feature (1)..(25): SEQ ID NO: 6935; WAN024DUZ; Start 17; Stop 41
ctgctattggtttatttgacacaat

SEQ ID NO: 453865 - DNA, 25 bp, Artificial
  probe
  misc_feature (1)..(25): SEQ ID NO: 6935; WAN024DUZ; Start 39; Stop 63
aatagggattctccttcaagttaaa

SEQ ID NO: 453866 - DNA, 25 bp, Artificial
  probe
  misc_feature (1)..(25): SEQ ID NO: 6935; WAN024DUZ; Start 13; Stop 37
atatctgctattggtttatttgaca

SEQ ID NO: 453867 - DNA, 25 bp, Artificial
  probe
  misc_feature (1)..(25): SEQ ID NO: 6935; WAN024DUZ; Start 12; Stop 36
catatctgctattggtttatttgac

SEQ ID NO: 453868 - DNA, 25 bp, Artificial
  probe
  misc_feature (1)..(25): SEQ ID NO: 6935; WAN024DUZ; Start 4; Stop 28
gtttcaatcatatctgctattggtt

SEQ ID NO: 453869 - DNA, 25 bp, Artificial
  probe
  misc_feature (1)..(25): SEQ ID NO: 6935; WAN024DUZ; Start 1; Stop 25
atggtttcaatcatatctgctattg

SEQ ID NO: 453870 - DNA, 25 bp, Artificial
  probe
  misc_feature (1)..(25): SEQ ID NO: 6935; WAN024DUZ; Start 11; Stop 35
tcatatctgctattggtttatttga

SEQ ID NO: 453871 - DNA, 25 bp, Artificial
  probe
  misc_feature (1)..(25): SEQ ID NO: 6935; WAN024DUZ; Start 5; Stop 29
tttcaatcatatctgctattggttt

SEQ ID NO: 453872 - DNA, 25 bp, Artificial
  probe
  misc_feature (1)..(25): SEQ ID NO: 6935; WAN024DUZ; Start 42; Stop 66
agggattctccttcaagttaaaatt

SEQ ID NO: 453873 - DNA, 25 bp, Artificial
  probe
  misc_feature (1)..(25): SEQ ID NO: 6935; WAN024DUZ; Start 10; Stop 34
atcatatctgctattggtttatttg

SEQ ID NO: 453874 - DNA, 25 bp, Artificial
  probe
  misc_feature (1)..(25): SEQ ID NO: 6935; WAN024DUZ; Start 43; Stop 67
gggattctccttcaagttaaaattc

SEQ ID NO: 453875 - DNA, 25 bp, Artificial
  probe
  misc_feature (1)..(25): SEQ ID NO: 6936; WAN024BR4; Start 576; Stop 600
ttcactcaatcggaactattcagat

SEQ ID NO: 453876 - DNA, 25 bp, Artificial
  probe
  misc_feature (1)..(25): SEQ ID NO: 6936; WAN024BR4; Start 233; Stop 257
caacacttcattatgctacagaact

SEQ ID NO: 453877 - DNA, 25 bp, Artificial
  probe
  misc_feature (1)..(25): SEQ ID NO: 6936; WAN024BR4; Start 577; Stop 601
tcactcaatcggaactattcagata

SEQ ID NO: 453878 - DNA, 25 bp, Artificial
  probe
  misc_feature (1)..(25): SEQ ID NO: 6936; WAN024BR4; Start 610; Stop 634
ccttatgatgagaatcctcgcatta

SEQ ID NO: 453879 - DNA, 25 bp, Artificial
  probe
  misc_feature (1)..(25): SEQ ID NO: 6936; WAN024BR4; Start 578; Stop 602
cactcaatcggaactattcagataa

SEQ ID NO: 453880 - DNA, 25 bp, Artificial
  probe
  misc_feature (1)..(25): SEQ ID NO: 6936; WAN024BR4; Start 579; Stop 603
actcaatcggaactattcagataag

SEQ ID NO: 453881 - DNA, 25 bp, Artificial
  probe
  misc_feature (1)..(25): SEQ ID NO: 6936; WAN024BR4; Start 611; Stop 635
cttatgatgagaatcctcgcattat

SEQ ID NO: 453882 - DNA, 25 bp, Artificial
  probe
  misc_feature (1)..(25): SEQ ID NO: 6936; WAN024BR4; Start 234; Stop 258
aacacttcattatgctacagaacta

SEQ ID NO: 453883 - DNA, 25 bp, Artificial
  probe
  misc_feature (1)..(25): SEQ ID NO: 6936; WAN024BR4; Start 614; Stop 638
atgatgagaatcctcgcattatagg

SEQ ID NO: 453884 - DNA, 25 bp, Artificial
  probe
  misc_feature (1)..(25): SEQ ID NO: 6936; WAN024BR4; Start 580; Stop 604
ctcaatcggaactattcagataagt

SEQ ID NO: 453885 - DNA, 25 bp, Artificial
  probe
  misc_feature (1)..(25): SEQ ID NO: 6936; WAN024BR4; Start 235; Stop 259
acacttcattatgctacagaactat

SEQ ID NO: 453886 - DNA, 25 bp, Artificial
  probe
  misc_feature (1)..(25): SEQ ID NO: 6936; WAN024BR4; Start 39; Stop 63
gccaaggattatctcaatctcactt

SEQ ID NO: 453887 - DNA, 25 bp, Artificial
  probe
  misc_feature (1)..(25): SEQ ID NO: 6936; WAN024BR4; Start 613; Stop 637
tatgatgagaatcctcgcattatag

SEQ ID NO: 453888 - DNA, 25 bp, Artificial
  probe
  misc_feature (1)..(25): SEQ ID NO: 6936; WAN024BR4; Start 207; Stop 231
caaactaacggaaaggaatcaagaa

SEQ ID NO: 453889 - DNA, 25 bp, Artificial
  probe
  misc_feature (1)..(25): SEQ ID NO: 6936; WAN024BR4; Start 205; Stop 229
ctcaaactaacggaaaggaatcaag

SEQ ID NO: 453890 - DNA, 25 bp, Artificial
  probe
  misc_feature (1)..(25): SEQ ID NO: 6936; WAN024BR4; Start 203; Stop 227
atctcaaactaacggaaaggaatca

SEQ ID NO: 453891 - DNA, 25 bp, Artificial
  probe
  misc_feature (1)..(25): SEQ ID NO: 6936; WAN024BR4; Start 241; Stop 265
cattatgctacagaactattgaaca

SEQ ID NO: 453892 - DNA, 25 bp, Artificial
  probe
  misc_feature (1)..(25): SEQ ID NO: 6936; WAN024BR4; Start 206; Stop 230
tcaaactaacggaaaggaatcaaga

SEQ ID NO: 453893 - DNA, 25 bp, Artificial
  probe
  misc_feature (1)..(25): SEQ ID NO: 6936; WAN024BR4; Start 204; Stop 228
tctcaaactaacggaaaggaatcaa

SEQ ID NO: 453894 - DNA, 25 bp, Artificial
  probe
  misc_feature (1)..(25): SEQ ID NO: 6936; WAN024BR4; Start 208; Stop 232
aaactaacggaaaggaatcaagaag

SEQ ID NO: 453895 - DNA, 25 bp, Artificial
  probe
  misc_feature (1)..(25): SEQ ID NO: 6936; WAN024BR4; Start 100; Stop 124
aaacctttcacaaaccctaatcaaa

SEQ ID NO: 453896 - DNA, 25 bp, Artificial
  probe
  misc_feature (1)..(25): SEQ ID NO: 6936; WAN024BR4; Start 254; Stop 278
aactattgaacaaacagaatgcgaa

SEQ ID NO: 453897 - DNA, 25 bp, Artificial
  probe
  misc_feature (1)..(25): SEQ ID NO: 6936; WAN024BR4; Start 255; Stop 279
actattgaacaaacagaatgcgaag

SEQ ID NO: 453898 - DNA, 25 bp, Artificial
  probe
  misc_feature (1)..(25): SEQ ID NO: 6936; WAN024BR4; Start 253; Stop 277
gaactattgaacaaacagaatgcga

SEQ ID NO: 453899 - DNA, 25 bp, Artificial
  probe
  misc_feature (1)..(25): SEQ ID NO: 6936; WAN024BR4; Start 252; Stop 276
agaactattgaacaaacagaatgcg

SEQ ID NO: 453900 - DNA, 25 bp, Artificial
  probe
  misc_feature (1)..(25): SEQ ID NO: 6936; WAN024BR4; Start 246; Stop 270
tgctacagaactattgaacaaacag

SEQ ID NO: 453901 - DNA, 25 bp, Artificial
  probe
  misc_feature (1)..(25): SEQ ID NO: 6936; WAN024BR4; Start 575; Stop 599
tttcactcaatcggaactattcaga

SEQ ID NO: 453902 - DNA, 25 bp, Artificial
  probe
  misc_feature (1)..(25): SEQ ID NO: 6936; WAN024BR4; Start 247; Stop 271
gctacagaactattgaacaaacaga

SEQ ID NO: 453903 - DNA, 25 bp, Artificial
  probe
  misc_feature (1)..(25): SEQ ID NO: 6936; WAN024BR4; Start 251; Stop 275
cagaactattgaacaaacagaatgc

SEQ ID NO: 453904 - DNA, 25 bp, Artificial
  probe
  misc_feature (1)..(25): SEQ ID NO: 6936; WAN024BR4; Start 46; Stop 70
attatctcaatctcacttgcatcca

SEQ ID NO: 453905 - DNA, 25 bp, Artificial
  probe
  misc_feature (1)..(25): SEQ ID NO: 6936; WAN024BR4; Start 612; Stop 636
ttatgatgagaatcctcgcattata

SEQ ID NO: 453906 - DNA, 25 bp, Artificial
  probe
  misc_feature (1)..(25): SEQ ID NO: 6936; WAN024BR4; Start 574; Stop 598
gtttcactcaatcggaactattcag

SEQ ID NO: 453907 - DNA, 25 bp, Artificial
  probe
  misc_feature (1)..(25): SEQ ID NO: 6936; WAN024BR4; Start 448; Stop 472
gaagatggttctgtagcccttatta

SEQ ID NO: 453908 - DNA, 25 bp, Artificial
  probe
  misc_feature (1)..(25): SEQ ID NO: 6937; WAN024BYG; Start 283; Stop 307
ttggctattgctaacaagattgatg

SEQ ID NO: 453909 - DNA, 25 bp, Artificial
  probe
  misc_feature (1)..(25): SEQ ID NO: 6937; WAN024BYG; Start 285; Stop 309
ggctattgctaacaagattgatgat

SEQ ID NO: 453910 - DNA, 25 bp, Artificial
  probe
  misc_feature (1)..(25): SEQ ID NO: 6937; WAN024BYG; Start 284; Stop 308
tggctattgctaacaagattgatga

SEQ ID NO: 453911 - DNA, 25 bp, Artificial
  probe
  misc_feature (1)..(25): SEQ ID NO: 6937; WAN024BYG; Start 286; Stop 310
gctattgctaacaagattgatgatg

SEQ ID NO: 453912 - DNA, 25 bp, Artificial
  probe
  misc_feature (1)..(25): SEQ ID NO: 6937; WAN024BYG; Start 715; Stop 739
gttatcactggcgatgaacactatg

SEQ ID NO: 453913 - DNA, 25 bp, Artificial
  probe
  misc_feature (1)..(25): SEQ ID NO: 6937; WAN024BYG; Start 197; Stop 221
aggctgctaaaggttatgaaattac

SEQ ID NO: 453914 - DNA, 25 bp, Artificial
  probe
  misc_feature (1)..(25): SEQ ID NO: 6937; WAN024BYG; Start 195; Stop 219
aaaggctgctaaaggttatgaaatt

SEQ ID NO: 453915 - DNA, 25 bp, Artificial
  probe
  misc_feature (1)..(25): SEQ ID NO: 6937; WAN024BYG; Start 334; Stop 358
gcaacacaacatattacagaaactc

SEQ ID NO: 453916 - DNA, 25 bp, Artificial
  probe
  misc_feature (1)..(25): SEQ ID NO: 6937; WAN024BYG; Start 289; Stop 313
attgctaacaagattgatgatgatt

SEQ ID NO: 453917 - DNA, 25 bp, Artificial
  probe
  misc_feature (1)..(25): SEQ ID NO: 6937; WAN024BYG; Start 287; Stop 311
ctattgctaacaagattgatgatga

SEQ ID NO: 453918 - DNA, 25 bp, Artificial
  probe
  misc_feature (1)..(25): SEQ ID NO: 6937; WAN024BYG; Start 716; Stop 740
ttatcactggcgatgaacactatgg

SEQ ID NO: 453919 - DNA, 25 bp, Artificial
  probe
  misc_feature (1)..(25): SEQ ID NO: 6937; WAN024BYG; Start 714; Stop 738
ggttatcactggcgatgaacactat

SEQ ID NO: 453920 - DNA, 25 bp, Artificial
  probe
  misc_feature (1)..(25): SEQ ID NO: 6937; WAN024BYG; Start 295; Stop 319
aacaagattgatgatgatttggtcg

SEQ ID NO: 453921 - DNA, 25 bp, Artificial
  probe
  misc_feature (1)..(25): SEQ ID NO: 6937; WAN024BYG; Start 281; Stop 305
gtttggctattgctaacaagattga

SEQ ID NO: 453922 - DNA, 25 bp, Artificial
  probe
  misc_feature (1)..(25): SEQ ID NO: 6937; WAN024BYG; Start 475; Stop 499
aaagaatggactaaaggttcagagc

SEQ ID NO: 453923 - DNA, 25 bp, Artificial
  probe
  misc_feature (1)..(25): SEQ ID NO: 6937; WAN024BYG; Start 347; Stop 371
ttacagaaactcctacaactcttgc

SEQ ID NO: 453924 - DNA, 25 bp, Artificial
  probe
  misc_feature (1)..(25): SEQ ID NO: 6937; WAN024BYG; Start 301; Stop 325
attgatgatgatttggtcgcagtag

SEQ ID NO: 453925 - DNA, 25 bp, Artificial
  probe
  misc_feature (1)..(25): SEQ ID NO: 6937; WAN024BYG; Start 300; Stop 324
gattgatgatgatttggtcgcagta

SEQ ID NO: 453926 - DNA, 25 bp, Artificial
  probe
  misc_feature (1)..(25): SEQ ID NO: 6937; WAN024BYG; Start 282; Stop 306
tttggctattgctaacaagattgat

SEQ ID NO: 453927 - DNA, 25 bp, Artificial
  probe
  misc_feature (1)..(25): SEQ ID NO: 6937; WAN024BYG; Start 196; Stop 220
aaggctgctaaaggttatgaaatta

SEQ ID NO: 453928 - DNA, 25 bp, Artificial
  probe
  misc_feature (1)..(25): SEQ ID NO: 6937; WAN024BYG; Start 81; Stop 105
gaatactctaacagttccagcatgg

SEQ ID NO: 453929 - DNA, 25 bp, Artificial
  probe
  misc_feature (1)..(25): SEQ ID NO: 6937; WAN024BYG; Start 280; Stop 304
ggtttggctattgctaacaagattg

SEQ ID NO: 453930 - DNA, 25 bp, Artificial
  probe
  misc_feature (1)..(25): SEQ ID NO: 6937; WAN024BYG; Start 336; Stop 360
aacacaacatattacagaaactcct

SEQ ID NO: 453931 - DNA, 25 bp, Artificial
  probe
  misc_feature (1)..(25): SEQ ID NO: 6937; WAN024BYG; Start 335; Stop 359
caacacaacatattacagaaactcc

SEQ ID NO: 453932 - DNA, 25 bp, Artificial
  probe
  misc_feature (1)..(25): SEQ ID NO: 6937; WAN024BYG; Start 73; Stop 97
caaccagggaatactctaacagttc

SEQ ID NO: 453933 - DNA, 25 bp, Artificial
  probe
  misc_feature (1)..(25): SEQ ID NO: 6937; WAN024BYG; Start 68; Stop 92
aaggacaaccagggaatactctaac

SEQ ID NO: 453934 - DNA, 25 bp, Artificial
  probe
  misc_feature (1)..(25): SEQ ID NO: 6937; WAN024BYG; Start 67; Stop 91
caaggacaaccagggaatactctaa

SEQ ID NO: 453935 - DNA, 25 bp, Artificial
  probe
  misc_feature (1)..(25): SEQ ID NO: 6937; WAN024BYG; Start 6; Stop 30
ttccgctaaactacctaaattgatt

SEQ ID NO: 453936 - DNA, 25 bp, Artificial
  probe
  misc_feature (1)..(25): SEQ ID NO: 6937; WAN024BYG; Start 5; Stop 29
tttccgctaaactacctaaattgat

SEQ ID NO: 453937 - DNA, 25 bp, Artificial
  probe
  misc_feature (1)..(25): SEQ ID NO: 6937; WAN024BYG; Start 292; Stop 316
gctaacaagattgatgatgatttgg

SEQ ID NO: 453938 - DNA, 25 bp, Artificial
  probe
  misc_feature (1)..(25): SEQ ID NO: 6937; WAN024BYG; Start 279; Stop 303
tggtttggctattgctaacaagatt

SEQ ID NO: 453939 - DNA, 25 bp, Artificial
  probe
  misc_feature (1)..(25): SEQ ID NO: 6937; WAN024BYG; Start 278; Stop 302
ttggtttggctattgctaacaagat

SEQ ID NO: 453940 - DNA, 25 bp, Artificial
  probe
  misc_feature (1)..(25): SEQ ID NO: 6937; WAN024BYG; Start 330; Stop 354
aactgcaacacaacatattacagaa

SEQ ID NO: 453941 - DNA, 25 bp, Artificial
  probe
  misc_feature (1)..(25): SEQ ID NO: 6938; WAN024BMD; Start 127; Stop 151
aactacggaaccaattatgaagaat

SEQ ID NO: 453942 - DNA, 25 bp, Artificial
  probe
  misc_feature (1)..(25): SEQ ID NO: 6938; WAN024BMD; Start 119; Stop 143
gcttgtataactacggaaccaatta

SEQ ID NO: 453943 - DNA, 25 bp, Artificial
  probe
  misc_feature (1)..(25): SEQ ID NO: 6938; WAN024BMD; Start 118; Stop 142
ggcttgtataactacggaaccaatt

SEQ ID NO: 453944 - DNA, 25 bp, Artificial
  probe
  misc_feature (1)..(25): SEQ ID NO: 6938; WAN024BMD; Start 126; Stop 150
taactacggaaccaattatgaagaa

SEQ ID NO: 453945 - DNA, 25 bp, Artificial
  probe
  misc_feature (1)..(25): SEQ ID NO: 6938; WAN024BMD; Start 128; Stop 152
actacggaaccaattatgaagaatt

SEQ ID NO: 453946 - DNA, 25 bp, Artificial
  probe
  misc_feature (1)..(25): SEQ ID NO: 6938; WAN024BMD; Start 125; Stop 149
ataactacggaaccaattatgaaga

SEQ ID NO: 453947 - DNA, 25 bp, Artificial
  probe
  misc_feature (1)..(25): SEQ ID NO: 6938; WAN024BMD; Start 107; Stop 131
ttgctgttggtggcttgtataacta

SEQ ID NO: 453948 - DNA, 25 bp, Artificial
  probe
  misc_feature (1)..(25): SEQ ID NO: 6938; WAN024BMD; Start 103; Stop 127
atgattgctgttggtggcttgtata

SEQ ID NO: 453949 - DNA, 25 bp, Artificial
  probe
  misc_feature (1)..(25): SEQ ID NO: 6938; WAN024BMD; Start 122; Stop 146
tgtataactacggaaccaattatga

SEQ ID NO: 453950 - DNA, 25 bp, Artificial
  probe
  misc_feature (1)..(25): SEQ ID NO: 6938; WAN024BMD; Start 113; Stop 137
ttggtggcttgtataactacggaac

SEQ ID NO: 453951 - DNA, 25 bp, Artificial
  probe
  misc_feature (1)..(25): SEQ ID NO: 6938; WAN024BMD; Start 105; Stop 129
gattgctgttggtggcttgtataac

SEQ ID NO: 453952 - DNA, 25 bp, Artificial
  probe
  misc_feature (1)..(25): SEQ ID NO: 6938; WAN024BMD; Start 282; Stop 306
tattagtaagttagaaggcaaggaa

SEQ ID NO: 453953 - DNA, 25 bp, Artificial
  probe
  misc_feature (1)..(25): SEQ ID NO: 6938; WAN024BMD; Start 104; Stop 128
tgattgctgttggtggcttgtataa

SEQ ID NO: 453954 - DNA, 25 bp, Artificial
  probe
  misc_feature (1)..(25): SEQ ID NO: 6938; WAN024BMD; Start 141; Stop 165
ttatgaagaattgggaagacagaca

SEQ ID NO: 453955 - DNA, 25 bp, Artificial
  probe
  misc_feature (1)..(25): SEQ ID NO: 6938; WAN024BMD; Start 142; Stop 166
tatgaagaattgggaagacagacag

SEQ ID NO: 453956 - DNA, 25 bp, Artificial
  probe
  misc_feature (1)..(25): SEQ ID NO: 6938; WAN024BMD; Start 112; Stop 136
gttggtggcttgtataactacggaa

SEQ ID NO: 453957 - DNA, 25 bp, Artificial
  probe
  misc_feature (1)..(25): SEQ ID NO: 6938; WAN024BMD; Start 64; Stop 88
attaaacacaaggttccagtattcg

SEQ ID NO: 453958 - DNA, 25 bp, Artificial
  probe
  misc_feature (1)..(25): SEQ ID NO: 6938; WAN024BMD; Start 106; Stop 130
attgctgttggtggcttgtataact

SEQ ID NO: 453959 - DNA, 25 bp, Artificial
  probe
  misc_feature (1)..(25): SEQ ID NO: 6938; WAN024BMD; Start 281; Stop 305
atattagtaagttagaaggcaagga

SEQ ID NO: 453960 - DNA, 25 bp, Artificial
  probe
  misc_feature (1)..(25): SEQ ID NO: 6938; WAN024BMD; Start 140; Stop 164
attatgaagaattgggaagacagac

SEQ ID NO: 453961 - DNA, 25 bp, Artificial
  probe
  misc_feature (1)..(25): SEQ ID NO: 6938; WAN024BMD; Start 108; Stop 132
tgctgttggtggcttgtataactac

SEQ ID NO: 453962 - DNA, 25 bp, Artificial
  probe
  misc_feature (1)..(25): SEQ ID NO: 6938; WAN024BMD; Start 280; Stop 304
gatattagtaagttagaaggcaagg

SEQ ID NO: 453963 - DNA, 25 bp, Artificial
  probe
  misc_feature (1)..(25): SEQ ID NO: 6938; WAN024BMD; Start 83; Stop 107
tattcggtggttcaacagaaatgat

SEQ ID NO: 453964 - DNA, 25 bp, Artificial
  probe
  misc_feature (1)..(25): SEQ ID NO: 6938; WAN024BMD; Start 65; Stop 89
ttaaacacaaggttccagtattcgg

SEQ ID NO: 453965 - DNA, 25 bp, Artificial
  probe
  misc_feature (1)..(25): SEQ ID NO: 6938; WAN024BMD; Start 117; Stop 141
tggcttgtataactacggaaccaat

SEQ ID NO: 453966 - DNA, 25 bp, Artificial
  probe
  misc_feature (1)..(25): SEQ ID NO: 6938; WAN024BMD; Start 81; Stop 105
agtattcggtggttcaacagaaatg

SEQ ID NO: 453967 - DNA, 25 bp, Artificial
  probe
  misc_feature (1)..(25): SEQ ID NO: 6938; WAN024BMD; Start 80; Stop 104
cagtattcggtggttcaacagaaat

SEQ ID NO: 453968 - DNA, 25 bp, Artificial
  probe
  misc_feature (1)..(25): SEQ ID NO: 6938; WAN024BMD; Start 121; Stop 145
ttgtataactacggaaccaattatg

SEQ ID NO: 453969 - DNA, 25 bp, Artificial
  probe
  misc_feature (1)..(25): SEQ ID NO: 6938; WAN024BMD; Start 59; Stop 83
tttctattaaacacaaggttccagt

SEQ ID NO: 453970 - DNA, 25 bp, Artificial
  probe
  misc_feature (1)..(25): SEQ ID NO: 6938; WAN024BMD; Start 102; Stop 126
aatgattgctgttggtggcttgtat

SEQ ID NO: 453971 - DNA, 25 bp, Artificial
  probe
  misc_feature (1)..(25): SEQ ID NO: 6938; WAN024BMD; Start 84; Stop 108
attcggtggttcaacagaaatgatt

SEQ ID NO: 453972 - DNA, 25 bp, Artificial
  probe
  misc_feature (1)..(25): SEQ ID NO: 6938; WAN024BMD; Start 82; Stop 106
gtattcggtggttcaacagaaatga

SEQ ID NO: 453973 - DNA, 25 bp, Artificial
  probe
  misc_feature (1)..(25): SEQ ID NO: 6938; WAN024BMD; Start 123; Stop 147
gtataactacggaaccaattatgaa

SEQ ID NO: 453974 - DNA, 25 bp, Artificial
  probe
  misc_feature (1)..(25): SEQ ID NO: 6939; WAN024DKU; Start 9; Stop 33
ttcaaagagttccttgggtagaaag

SEQ ID NO: 453975 - DNA, 25 bp, Artificial
  probe
  misc_feature (1)..(25): SEQ ID NO: 6939; WAN024DKU; Start 87; Stop 111
actagccttccaaggttcttcaatt

SEQ ID NO: 453976 - DNA, 25 bp, Artificial
  probe
  misc_feature (1)..(25): SEQ ID NO: 6939; WAN024DKU; Start 93; Stop 117
cttccaaggttcttcaattgtcaag

SEQ ID NO: 453977 - DNA, 25 bp, Artificial
  probe
  misc_feature (1)..(25): SEQ ID NO: 6939; WAN024DKU; Start 86; Stop 110
cactagccttccaaggttcttcaat

SEQ ID NO: 453978 - DNA, 25 bp, Artificial
  probe
  misc_feature (1)..(25): SEQ ID NO: 6939; WAN024DKU; Start 104; Stop 128
cttcaattgtcaagacatccatacc

SEQ ID NO: 453979 - DNA, 25 bp, Artificial
  probe
  misc_feature (1)..(25): SEQ ID NO: 6939; WAN024DKU; Start 10; Stop 34
tcaaagagttccttgggtagaaagc

SEQ ID NO: 453980 - DNA, 25 bp, Artificial
  probe
  misc_feature (1)..(25): SEQ ID NO: 6939; WAN024DKU; Start 8; Stop 32
tttcaaagagttccttgggtagaaa

SEQ ID NO: 453981 - DNA, 25 bp, Artificial
  probe
  misc_feature (1)..(25): SEQ ID NO: 6939; WAN024DKU; Start 139; Stop 163
caaggatatctctctgcaaactctc

SEQ ID NO: 453982 - DNA, 25 bp, Artificial
  probe
  misc_feature (1)..(25): SEQ ID NO: 6939; WAN024DKU; Start 26; Stop 50
gtagaaagccaacagacatcccttc

SEQ ID NO: 453983 - DNA, 25 bp, Artificial
  probe
  misc_feature (1)..(25): SEQ ID NO: 6939; WAN024DKU; Start 92; Stop 116
ccttccaaggttcttcaattgtcaa

SEQ ID NO: 453984 - DNA, 25 bp, Artificial
  probe
  misc_feature (1)..(25): SEQ ID NO: 6939; WAN024DKU; Start 85; Stop 109
tcactagccttccaaggttcttcaa

SEQ ID NO: 453985 - DNA, 25 bp, Artificial
  probe
  misc_feature (1)..(25): SEQ ID NO: 6939; WAN024DKU; Start 7; Stop 31
ttttcaaagagttccttgggtagaa

SEQ ID NO: 453986 - DNA, 25 bp, Artificial
  probe
  misc_feature (1)..(25): SEQ ID NO: 6939; WAN024DKU; Start 88; Stop 112
ctagccttccaaggttcttcaattg

SEQ ID NO: 453987 - DNA, 25 bp, Artificial
  probe
  misc_feature (1)..(25): SEQ ID NO: 6939; WAN024DKU; Start 36; Stop 60
aacagacatcccttcgacaatcaaa

SEQ ID NO: 453988 - DNA, 25 bp, Artificial
  probe
  misc_feature (1)..(25): SEQ ID NO: 6939; WAN024DKU; Start 101; Stop 125
gttcttcaattgtcaagacatccat

SEQ ID NO: 453989 - DNA, 25 bp, Artificial
  probe
  misc_feature (1)..(25): SEQ ID NO: 6939; WAN024DKU; Start 97; Stop 121
caaggttcttcaattgtcaagacat

SEQ ID NO: 453990 - DNA, 25 bp, Artificial
  probe
  misc_feature (1)..(25): SEQ ID NO: 6939; WAN024DKU; Start 98; Stop 122
aaggttcttcaattgtcaagacatc

SEQ ID NO: 453991 - DNA, 25 bp, Artificial
  probe
  misc_feature (1)..(25): SEQ ID NO: 6939; WAN024DKU; Start 11; Stop 35
caaagagttccttgggtagaaagcc

SEQ ID NO: 453992 - DNA, 25 bp, Artificial
  probe
  misc_feature (1)..(25): SEQ ID NO: 6939; WAN024DKU; Start 94; Stop 118
ttccaaggttcttcaattgtcaaga

SEQ ID NO: 453993 - DNA, 25 bp, Artificial
  probe
  misc_feature (1)..(25): SEQ ID NO: 6939; WAN024DKU; Start 143; Stop 167
gatatctctctgcaaactctccagt

SEQ ID NO: 453994 - DNA, 25 bp, Artificial
  probe
  misc_feature (1)..(25): SEQ ID NO: 6939; WAN024DKU; Start 103; Stop 127
tcttcaattgtcaagacatccatac

SEQ ID NO: 453995 - DNA, 25 bp, Artificial
  probe
  misc_feature (1)..(25): SEQ ID NO: 6939; WAN024DKU; Start 76; Stop 100
gacaagacctcactagccttccaag

SEQ ID NO: 453996 - DNA, 25 bp, Artificial
  probe
  misc_feature (1)..(25): SEQ ID NO: 6939; WAN024DKU; Start 89; Stop 113
tagccttccaaggttcttcaattgt

SEQ ID NO: 453997 - DNA, 25 bp, Artificial
  probe
  misc_feature (1)..(25): SEQ ID NO: 6939; WAN024DKU; Start 99; Stop 123
aggttcttcaattgtcaagacatcc

SEQ ID NO: 453998 - DNA, 25 bp, Artificial
  probe
  misc_feature (1)..(25): SEQ ID NO: 6939; WAN024DKU; Start 84; Stop 108
ctcactagccttccaaggttcttca

SEQ ID NO: 453999 - DNA, 25 bp, Artificial
  probe
  misc_feature (1)..(25): SEQ ID NO: 6939; WAN024DKU; Start 100; Stop 124
ggttcttcaattgtcaagacatcca

SEQ ID NO: 454000 - DNA, 25 bp, Artificial
  probe
  misc_feature (1)..(25): SEQ ID NO: 6939; WAN024DKU; Start 95; Stop 119
tccaaggttcttcaattgtcaagac

SEQ ID NO: 454001 - DNA, 25 bp, Artificial
  probe
  misc_feature (1)..(25): SEQ ID NO: 6939; WAN024DKU; Start 140; Stop 164
aaggatatctctctgcaaactctcc

SEQ ID NO: 454002 - DNA, 25 bp, Artificial
  probe
  misc_feature (1)..(25): SEQ ID NO: 6939; WAN024DKU; Start 102; Stop 126
ttcttcaattgtcaagacatccata

SEQ ID NO: 454003 - DNA, 25 bp, Artificial
  probe
  misc_feature (1)..(25): SEQ ID NO: 6939; WAN024DKU; Start 96; Stop 120
ccaaggttcttcaattgtcaagaca

SEQ ID NO: 454004 - DNA, 25 bp, Artificial
  probe
  misc_feature (1)..(25): SEQ ID NO: 6939; WAN024DKU; Start 35; Stop 59
caacagacatcccttcgacaatcaa

SEQ ID NO: 454005 - DNA, 25 bp, Artificial
  probe
  misc_feature (1)..(25): SEQ ID NO: 6939; WAN024DKU; Start 105; Stop 129
ttcaattgtcaagacatccataccc

SEQ ID NO: 454006 - DNA, 25 bp, Artificial
  probe
  misc_feature (1)..(25): SEQ ID NO: 6939; WAN024DKU; Start 75; Stop 99
agacaagacctcactagccttccaa

SEQ ID NO: 454007 - DNA, 25 bp, Artificial
  probe
  misc_feature (1)..(25): SEQ ID NO: 6940; WAN024DBT; Start 12; Stop 36
tgacctcttatcatctgcctatgtt

SEQ ID NO: 454008 - DNA, 25 bp, Artificial
  probe
  misc_feature (1)..(25): SEQ ID NO: 6940; WAN024DBT; Start 13; Stop 37
gacctcttatcatctgcctatgttt

SEQ ID NO: 454009 - DNA, 25 bp, Artificial
  probe
  misc_feature (1)..(25): SEQ ID NO: 6940; WAN024DBT; Start 20; Stop 44
tatcatctgcctatgtttacaacca

SEQ ID NO: 454010 - DNA, 25 bp, Artificial
  probe
  misc_feature (1)..(25): SEQ ID NO: 6940; WAN024DBT; Start 21; Stop 45
atcatctgcctatgtttacaaccat

SEQ ID NO: 454011 - DNA, 25 bp, Artificial
  probe
  misc_feature (1)..(25): SEQ ID NO: 6940; WAN024DBT; Start 14; Stop 38
acctcttatcatctgcctatgttta

SEQ ID NO: 454012 - DNA, 25 bp, Artificial
  probe
  misc_feature (1)..(25): SEQ ID NO: 6940; WAN024DBT; Start 15; Stop 39
cctcttatcatctgcctatgtttac

SEQ ID NO: 454013 - DNA, 25 bp, Artificial
  probe
  misc_feature (1)..(25): SEQ ID NO: 6940; WAN024DBT; Start 57; Stop 81
tctttatactttgtgccatctttct

SEQ ID NO: 454014 - DNA, 25 bp, Artificial
  probe
  misc_feature (1)..(25): SEQ ID NO: 6940; WAN024DBT; Start 19; Stop 43
ttatcatctgcctatgtttacaacc

SEQ ID NO: 454015 - DNA, 25 bp, Artificial
  probe
  misc_feature (1)..(25): SEQ ID NO: 6940; WAN024DBT; Start 5; Stop 29
acacttatgacctcttatcatctgc

SEQ ID NO: 454016 - DNA, 25 bp, Artificial
  probe
  misc_feature (1)..(25): SEQ ID NO: 6940; WAN024DBT; Start 11; Stop 35
atgacctcttatcatctgcctatgt

SEQ ID NO: 454017 - DNA, 25 bp, Artificial
  probe
  misc_feature (1)..(25): SEQ ID NO: 6940; WAN024DBT; Start 10; Stop 34
tatgacctcttatcatctgcctatg

SEQ ID NO: 454018 - DNA, 25 bp, Artificial
  probe
  misc_feature (1)..(25): SEQ ID NO: 6940; WAN024DBT; Start 8; Stop 32
cttatgacctcttatcatctgccta

SEQ ID NO: 454019 - DNA, 25 bp, Artificial
  probe
  misc_feature (1)..(25): SEQ ID NO: 6940; WAN024DBT; Start 7; Stop 31
acttatgacctcttatcatctgcct

SEQ ID NO: 454020 - DNA, 25 bp, Artificial
  probe
  misc_feature (1)..(25): SEQ ID NO: 6940; WAN024DBT; Start 6; Stop 30
cacttatgacctcttatcatctgcc

SEQ ID NO: 454021 - DNA, 25 bp, Artificial
  probe
  misc_feature (1)..(25): SEQ ID NO: 6940; WAN024DBT; Start 16; Stop 40
ctcttatcatctgcctatgtttaca

SEQ ID NO: 454022 - DNA, 25 bp, Artificial
  probe
  misc_feature (1)..(25): SEQ ID NO: 6940; WAN024DBT; Start 58; Stop 82
ctttatactttgtgccatctttctt

SEQ ID NO: 454023 - DNA, 25 bp, Artificial
  probe
  misc_feature (1)..(25): SEQ ID NO: 6940; WAN024DBT; Start 22; Stop 46
tcatctgcctatgtttacaaccata

SEQ ID NO: 454024 - DNA, 25 bp, Artificial
  probe
  misc_feature (1)..(25): SEQ ID NO: 6940; WAN024DBT; Start 9; Stop 33
ttatgacctcttatcatctgcctat

SEQ ID NO: 454025 - DNA, 25 bp, Artificial
  probe
  misc_feature (1)..(25): SEQ ID NO: 6940; WAN024DBT; Start 56; Stop 80
atctttatactttgtgccatctttc

SEQ ID NO: 454026 - DNA, 25 bp, Artificial
  probe
  misc_feature (1)..(25): SEQ ID NO: 6940; WAN024DBT; Start 17; Stop 41
tcttatcatctgcctatgtttacaa

SEQ ID NO: 454027 - DNA, 25 bp, Artificial
  probe
  misc_feature (1)..(25): SEQ ID NO: 6940; WAN024DBT; Start 18; Stop 42
cttatcatctgcctatgtttacaac

SEQ ID NO: 454028 - DNA, 25 bp, Artificial
  probe
  misc_feature (1)..(25): SEQ ID NO: 6940; WAN024DBT; Start 59; Stop 83
tttatactttgtgccatctttcttt

SEQ ID NO: 454029 - DNA, 25 bp, Artificial
  probe
  misc_feature (1)..(25): SEQ ID NO: 6940; WAN024DBT; Start 55; Stop 79
aatctttatactttgtgccatcttt

SEQ ID NO: 454030 - DNA, 25 bp, Artificial
  probe
  misc_feature (1)..(25): SEQ ID NO: 6940; WAN024DBT; Start 54; Stop 78
aaatctttatactttgtgccatctt

SEQ ID NO: 454031 - DNA, 25 bp, Artificial
  probe
  misc_feature (1)..(25): SEQ ID NO: 6940; WAN024DBT; Start 4; Stop 28
tacacttatgacctcttatcatctg

SEQ ID NO: 454032 - DNA, 25 bp, Artificial
  probe
  misc_feature (1)..(25): SEQ ID NO: 6940; WAN024DBT; Start 3; Stop 27
gtacacttatgacctcttatcatct

SEQ ID NO: 454033 - DNA, 25 bp, Artificial
  probe
  misc_feature (1)..(25): SEQ ID NO: 6940; WAN024DBT; Start 60; Stop 84
ttatactttgtgccatctttctttt

SEQ ID NO: 454034 - DNA, 25 bp, Artificial
  probe
  misc_feature (1)..(25): SEQ ID NO: 6940; WAN024DBT; Start 53; Stop 77
aaaatctttatactttgtgccatct

SEQ ID NO: 454035 - DNA, 25 bp, Artificial
  probe
  misc_feature (1)..(25): SEQ ID NO: 6940; WAN024DBT; Start 2; Stop 26
tgtacacttatgacctcttatcatc

SEQ ID NO: 454036 - DNA, 25 bp, Artificial
  probe
  misc_feature (1)..(25): SEQ ID NO: 6940; WAN024DBT; Start 24; Stop 48
atctgcctatgtttacaaccatagt

SEQ ID NO: 454037 - DNA, 25 bp, Artificial
  probe
  misc_feature (1)..(25): SEQ ID NO: 6940; WAN024DBT; Start 23; Stop 47
catctgcctatgtttacaaccatag

SEQ ID NO: 454038 - DNA, 25 bp, Artificial
  probe
  misc_feature (1)..(25): SEQ ID NO: 6940; WAN024DBT; Start 1; Stop 25
atgtacacttatgacctcttatcat

SEQ ID NO: 454039 - DNA, 25 bp, Artificial
  probe
  misc_feature (1)..(25): SEQ ID NO: 6940; WAN024DBT; Start 25; Stop 49
tctgcctatgtttacaaccatagta

SEQ ID NO: 454040 - DNA, 25 bp, Artificial
  probe
  misc_feature (1)..(25): SEQ ID NO: 6941; WAN024FOM; Start 827; Stop 851
aggtggatgttcaagaattactcaa

SEQ ID NO: 454041 - DNA, 25 bp, Artificial
  probe
  misc_feature (1)..(25): SEQ ID NO: 6941; WAN024FOM; Start 826; Stop 850
aaggtggatgttcaagaattactca

SEQ ID NO: 454042 - DNA, 25 bp, Artificial
  probe
  misc_feature (1)..(25): SEQ ID NO: 6941; WAN024FOM; Start 824; Stop 848
agaaggtggatgttcaagaattact

SEQ ID NO: 454043 - DNA, 25 bp, Artificial
  probe
  misc_feature (1)..(25): SEQ ID NO: 6941; WAN024FOM; Start 825; Stop 849
gaaggtggatgttcaagaattactc

SEQ ID NO: 454044 - DNA, 25 bp, Artificial
  probe
  misc_feature (1)..(25): SEQ ID NO: 6941; WAN024FOM; Start 823; Stop 847
gagaaggtggatgttcaagaattac

SEQ ID NO: 454045 - DNA, 25 bp, Artificial
  probe
  misc_feature (1)..(25): SEQ ID NO: 6941; WAN024FOM; Start 43; Stop 67
ttatacattagtagttcggtgccta

SEQ ID NO: 454046 - DNA, 25 bp, Artificial
  probe
  misc_feature (1)..(25): SEQ ID NO: 6941; WAN024FOM; Start 820; Stop 844
aatgagaaggtggatgttcaagaat

SEQ ID NO: 454047 - DNA, 25 bp, Artificial
  probe
  misc_feature (1)..(25): SEQ ID NO: 6941; WAN024FOM; Start 822; Stop 846
tgagaaggtggatgttcaagaatta

SEQ ID NO: 454048 - DNA, 25 bp, Artificial
  probe
  misc_feature (1)..(25): SEQ ID NO: 6941; WAN024FOM; Start 821; Stop 845
atgagaaggtggatgttcaagaatt

SEQ ID NO: 454049 - DNA, 25 bp, Artificial
  probe
  misc_feature (1)..(25): SEQ ID NO: 6941; WAN024FOM; Start 579; Stop 603
tgataagtctaatccagtgagttca

SEQ ID NO: 454050 - DNA, 25 bp, Artificial
  probe
  misc_feature (1)..(25): SEQ ID NO: 6941; WAN024FOM; Start 894; Stop 918
tgactacttattgttgaatcgtcca

SEQ ID NO: 454051 - DNA, 25 bp, Artificial
  probe
  misc_feature (1)..(25): SEQ ID NO: 6941; WAN024FOM; Start 45; Stop 69
atacattagtagttcggtgcctaag

SEQ ID NO: 454052 - DNA, 25 bp, Artificial
  probe
  misc_feature (1)..(25): SEQ ID NO: 6941; WAN024FOM; Start 578; Stop 602
atgataagtctaatccagtgagttc

SEQ ID NO: 454053 - DNA, 25 bp, Artificial
  probe
  misc_feature (1)..(25): SEQ ID NO: 6941; WAN024FOM; Start 336; Stop 360
cgttggaggtgcctatctaattaat

SEQ ID NO: 454054 - DNA, 25 bp, Artificial
  probe
  misc_feature (1)..(25): SEQ ID NO: 6941; WAN024FOM; Start 46; Stop 70
tacattagtagttcggtgcctaaga

SEQ ID NO: 454055 - DNA, 25 bp, Artificial
  probe
  misc_feature (1)..(25): SEQ ID NO: 6941; WAN024FOM; Start 895; Stop 919
gactacttattgttgaatcgtccaa

SEQ ID NO: 454056 - DNA, 25 bp, Artificial
  probe
  misc_feature (1)..(25): SEQ ID NO: 6941; WAN024FOM; Start 893; Stop 917
ttgactacttattgttgaatcgtcc

SEQ ID NO: 454057 - DNA, 25 bp, Artificial
  probe
  misc_feature (1)..(25): SEQ ID NO: 6941; WAN024FOM; Start 580; Stop 604
gataagtctaatccagtgagttcat

SEQ ID NO: 454058 - DNA, 25 bp, Artificial
  probe
  misc_feature (1)..(25): SEQ ID NO: 6941; WAN024FOM; Start 44; Stop 68
tatacattagtagttcggtgcctaa

SEQ ID NO: 454059 - DNA, 25 bp, Artificial
  probe
  misc_feature (1)..(25): SEQ ID NO: 6941; WAN024FOM; Start 338; Stop 362
ttggaggtgcctatctaattaatct

SEQ ID NO: 454060 - DNA, 25 bp, Artificial
  probe
  misc_feature (1)..(25): SEQ ID NO: 6941; WAN024FOM; Start 337; Stop 361
gttggaggtgcctatctaattaatc

SEQ ID NO: 454061 - DNA, 25 bp, Artificial
  probe
  misc_feature (1)..(25): SEQ ID NO: 6941; WAN024FOM; Start 335; Stop 359
tcgttggaggtgcctatctaattaa

SEQ ID NO: 454062 - DNA, 25 bp, Artificial
  probe
  misc_feature (1)..(25): SEQ ID NO: 6941; WAN024FOM; Start 334; Stop 358
ttcgttggaggtgcctatctaatta

SEQ ID NO: 454063 - DNA, 25 bp, Artificial
  probe
  misc_feature (1)..(25): SEQ ID NO: 6941; WAN024FOM; Start 221; Stop 245
aacaatatctcgtgatgatggcaga

SEQ ID NO: 454064 - DNA, 25 bp, Artificial
  probe
  misc_feature (1)..(25): SEQ ID NO: 6941; WAN024FOM; Start 355; Stop 379
attaatctatggcatggcattcctt

SEQ ID NO: 454065 - DNA, 25 bp, Artificial
  probe
  misc_feature (1)..(25): SEQ ID NO: 6941; WAN024FOM; Start 354; Stop 378
aattaatctatggcatggcattcct

SEQ ID NO: 454066 - DNA, 25 bp, Artificial
  probe
  misc_feature (1)..(25): SEQ ID NO: 6941; WAN024FOM; Start 353; Stop 377
taattaatctatggcatggcattcc

SEQ ID NO: 454067 - DNA, 25 bp, Artificial
  probe
  misc_feature (1)..(25): SEQ ID NO: 6941; WAN024FOM; Start 49; Stop 73
attagtagttcggtgcctaagacaa

SEQ ID NO: 454068 - DNA, 25 bp, Artificial
  probe
  misc_feature (1)..(25): SEQ ID NO: 6941; WAN024FOM; Start 589; Stop 613
aatccagtgagttcattaatacagg

SEQ ID NO: 454069 - DNA, 25 bp, Artificial
  probe
  misc_feature (1)..(25): SEQ ID NO: 6941; WAN024FOM; Start 581; Stop 605
ataagtctaatccagtgagttcatt

SEQ ID NO: 454070 - DNA, 25 bp, Artificial
  probe
  misc_feature (1)..(25): SEQ ID NO: 6941; WAN024FOM; Start 933; Stop 957
ttatgattatgatgattacttgcgg

SEQ ID NO: 454071 - DNA, 25 bp, Artificial
  probe
  misc_feature (1)..(25): SEQ ID NO: 6941; WAN024FOM; Start 333; Stop 357
cttcgttggaggtgcctatctaatt

SEQ ID NO: 454072 - DNA, 25 bp, Artificial
  probe
  misc_feature (1)..(25): SEQ ID NO: 6941; WAN024FOM; Start 583; Stop 607
aagtctaatccagtgagttcattaa

SEQ ID NO: 454073 - DNA, 25 bp, Artificial
  probe
  misc_feature (1)..(25): SEQ ID NO: 6942; WAN024BYN; Start 1053; Stop 1077
taagaccaaggaagcgaactataag

SEQ ID NO: 454074 - DNA, 25 bp, Artificial
  probe
  misc_feature (1)..(25): SEQ ID NO: 6942; WAN024BYN; Start 1052; Stop 1076
ctaagaccaaggaagcgaactataa

SEQ ID NO: 454075 - DNA, 25 bp, Artificial
  probe
  misc_feature (1)..(25): SEQ ID NO: 6942; WAN024BYN; Start 1043; Stop 1067
agatgattactaagaccaaggaagc

SEQ ID NO: 454076 - DNA, 25 bp, Artificial
  probe
  misc_feature (1)..(25): SEQ ID NO: 6942; WAN024BYN; Start 260; Stop 284
ataacaatactgctgacggtgatat

SEQ ID NO: 454077 - DNA, 25 bp, Artificial
  probe
  misc_feature (1)..(25): SEQ ID NO: 6942; WAN024BYN; Start 74; Stop 98
tgataacgatacatagcactgaagg

SEQ ID NO: 454078 - DNA, 25 bp, Artificial
  probe
  misc_feature (1)..(25): SEQ ID NO: 6942; WAN024BYN; Start 445; Stop 469
atggtctacgatgatagtattgagc

SEQ ID NO: 454079 - DNA, 25 bp, Artificial
  probe
  misc_feature (1)..(25): SEQ ID NO: 6942; WAN024BYN; Start 259; Stop 283
tataacaatactgctgacggtgata

SEQ ID NO: 454080 - DNA, 25 bp, Artificial
  probe
  misc_feature (1)..(25): SEQ ID NO: 6942; WAN024BYN; Start 450; Stop 474
ctacgatgatagtattgagcggaag

SEQ ID NO: 454081 - DNA, 25 bp, Artificial
  probe
  misc_feature (1)..(25): SEQ ID NO: 6942; WAN024BYN; Start 1138; Stop 1162
ttagagtctcattcaatcgttccac

SEQ ID NO: 454082 - DNA, 25 bp, Artificial
  probe
  misc_feature (1)..(25): SEQ ID NO: 6942; WAN024BYN; Start 1051; Stop 1075
actaagaccaaggaagcgaactata

SEQ ID NO: 454083 - DNA, 25 bp, Artificial
  probe
  misc_feature (1)..(25): SEQ ID NO: 6942; WAN024BYN; Start 1050; Stop 1074
tactaagaccaaggaagcgaactat

SEQ ID NO: 454084 - DNA, 25 bp, Artificial
  probe
  misc_feature (1)..(25): SEQ ID NO: 6942; WAN024BYN; Start 1145; Stop 1169
ctcattcaatcgttccacaattcag

SEQ ID NO: 454085 - DNA, 25 bp, Artificial
  probe
  misc_feature (1)..(25): SEQ ID NO: 6942; WAN024BYN; Start 1143; Stop 1167
gtctcattcaatcgttccacaattc

SEQ ID NO: 454086 - DNA, 25 bp, Artificial
  probe
  misc_feature (1)..(25): SEQ ID NO: 6942; WAN024BYN; Start 449; Stop 473
tctacgatgatagtattgagcggaa

SEQ ID NO: 454087 - DNA, 25 bp, Artificial
  probe
  misc_feature (1)..(25): SEQ ID NO: 6942; WAN024BYN; Start 1041; Stop 1065
tgagatgattactaagaccaaggaa

SEQ ID NO: 454088 - DNA, 25 bp, Artificial
  probe
  misc_feature (1)..(25): SEQ ID NO: 6942; WAN024BYN; Start 1049; Stop 1073
ttactaagaccaaggaagcgaacta

SEQ ID NO: 454089 - DNA, 25 bp, Artificial
  probe
  misc_feature (1)..(25): SEQ ID NO: 6942; WAN024BYN; Start 73; Stop 97
ttgataacgatacatagcactgaag

SEQ ID NO: 454090 - DNA, 25 bp, Artificial
  probe
  misc_feature (1)..(25): SEQ ID NO: 6942; WAN024BYN; Start 1044; Stop 1068
gatgattactaagaccaaggaagcg

SEQ ID NO: 454091 - DNA, 25 bp, Artificial
  probe
  misc_feature (1)..(25): SEQ ID NO: 6942; WAN024BYN; Start 1147; Stop 1171
cattcaatcgttccacaattcagtc

SEQ ID NO: 454092 - DNA, 25 bp, Artificial
  probe
  misc_feature (1)..(25): SEQ ID NO: 6942; WAN024BYN; Start 1144; Stop 1168
tctcattcaatcgttccacaattca

SEQ ID NO: 454093 - DNA, 25 bp, Artificial
  probe
  misc_feature (1)..(25): SEQ ID NO: 6942; WAN024BYN; Start 1142; Stop 1166
agtctcattcaatcgttccacaatt

SEQ ID NO: 454094 - DNA, 25 bp, Artificial
  probe
  misc_feature (1)..(25): SEQ ID NO: 6942; WAN024BYN; Start 1037; Stop 1061
gccttgagatgattactaagaccaa

SEQ ID NO: 454095 - DNA, 25 bp, Artificial
  probe
  misc_feature (1)..(25): SEQ ID NO: 6942; WAN024BYN; Start 1047; Stop 1071
gattactaagaccaaggaagcgaac

SEQ ID NO: 454096 - DNA, 25 bp, Artificial
  probe
  misc_feature (1)..(25): SEQ ID NO: 6942; WAN024BYN; Start 75; Stop 99
gataacgatacatagcactgaaggc

SEQ ID NO: 454097 - DNA, 25 bp, Artificial
  probe
  misc_feature (1)..(25): SEQ ID NO: 6942; WAN024BYN; Start 1146; Stop 1170
tcattcaatcgttccacaattcagt

SEQ ID NO: 454098 - DNA, 25 bp, Artificial
  probe
  misc_feature (1)..(25): SEQ ID NO: 6942; WAN024BYN; Start 1045; Stop 1069
atgattactaagaccaaggaagcga

SEQ ID NO: 454099 - DNA, 25 bp, Artificial
  probe
  misc_feature (1)..(25): SEQ ID NO: 6942; WAN024BYN; Start 1042; Stop 1066
gagatgattactaagaccaaggaag

SEQ ID NO: 454100 - DNA, 25 bp, Artificial
  probe
  misc_feature (1)..(25): SEQ ID NO: 6942; WAN024BYN; Start 1141; Stop 1165
gagtctcattcaatcgttccacaat

SEQ ID NO: 454101 - DNA, 25 bp, Artificial
  probe
  misc_feature (1)..(25): SEQ ID NO: 6942; WAN024BYN; Start 368; Stop 392
gtgcttacgagtacatctatgctaa

SEQ ID NO: 454102 - DNA, 25 bp, Artificial
  probe
  misc_feature (1)..(25): SEQ ID NO: 6942; WAN024BYN; Start 318; Stop 342
gattgaccaagtagatgctcagaat

SEQ ID NO: 454103 - DNA, 25 bp, Artificial
  probe
  misc_feature (1)..(25): SEQ ID NO: 6942; WAN024BYN; Start 448; Stop 472
gtctacgatgatagtattgagcgga

SEQ ID NO: 454104 - DNA, 25 bp, Artificial
  probe
  misc_feature (1)..(25): SEQ ID NO: 6942; WAN024BYN; Start 1139; Stop 1163
tagagtctcattcaatcgttccaca

SEQ ID NO: 454105 - DNA, 25 bp, Artificial
  probe
  misc_feature (1)..(25): SEQ ID NO: 6942; WAN024BYN; Start 1048; Stop 1072
attactaagaccaaggaagcgaact

SEQ ID NO: 454106 - DNA, 25 bp, Artificial
  probe
  misc_feature (1)..(25): SEQ ID NO: 6943; WAN024DGW; Start 1145; Stop 1169
ctatccatcctctctatcctctgtt

SEQ ID NO: 454107 - DNA, 25 bp, Artificial
  probe
  misc_feature (1)..(25): SEQ ID NO: 6943; WAN024DGW; Start 929; Stop 953
ttacctctgtcaatctatatgctgg

SEQ ID NO: 454108 - DNA, 25 bp, Artificial
  probe
  misc_feature (1)..(25): SEQ ID NO: 6943; WAN024DGW; Start 1148; Stop 1172
tccatcctctctatcctctgttaag

SEQ ID NO: 454109 - DNA, 25 bp, Artificial
  probe
  misc_feature (1)..(25): SEQ ID NO: 6943; WAN024DGW; Start 1147; Stop 1171
atccatcctctctatcctctgttaa

SEQ ID NO: 454110 - DNA, 25 bp, Artificial
  probe
  misc_feature (1)..(25): SEQ ID NO: 6943; WAN024DGW; Start 687; Stop 711
agattcttatatcacgctaacgagt

SEQ ID NO: 454111 - DNA, 25 bp, Artificial
  probe
  misc_feature (1)..(25): SEQ ID NO: 6943; WAN024DGW; Start 1137; Stop 1161
tacaatgcctatccatcctctctat

SEQ ID NO: 454112 - DNA, 25 bp, Artificial
  probe
  misc_feature (1)..(25): SEQ ID NO: 6943; WAN024DGW; Start 561; Stop 585
gattcaatatggtggactggaacta

SEQ ID NO: 454113 - DNA, 25 bp, Artificial
  probe
  misc_feature (1)..(25): SEQ ID NO: 6943; WAN024DGW; Start 1136; Stop 1160
ttacaatgcctatccatcctctcta

SEQ ID NO: 454114 - DNA, 25 bp, Artificial
  probe
  misc_feature (1)..(25): SEQ ID NO: 6943; WAN024DGW; Start 1146; Stop 1170
tatccatcctctctatcctctgtta

SEQ ID NO: 454115 - DNA, 25 bp, Artificial
  probe
  misc_feature (1)..(25): SEQ ID NO: 6943; WAN024DGW; Start 688; Stop 712
gattcttatatcacgctaacgagtt

SEQ ID NO: 454116 - DNA, 25 bp, Artificial
  probe
  misc_feature (1)..(25): SEQ ID NO: 6943; WAN024DGW; Start 1138; Stop 1162
acaatgcctatccatcctctctatc

SEQ ID NO: 454117 - DNA, 25 bp, Artificial
  probe
  misc_feature (1)..(25): SEQ ID NO: 6943; WAN024DGW; Start 559; Stop 583
gagattcaatatggtggactggaac

SEQ ID NO: 454118 - DNA, 25 bp, Artificial
  probe
  misc_feature (1)..(25): SEQ ID NO: 6943; WAN024DGW; Start 1144; Stop 1168
cctatccatcctctctatcctctgt

SEQ ID NO: 454119 - DNA, 25 bp, Artificial
  probe
  misc_feature (1)..(25): SEQ ID NO: 6943; WAN024DGW; Start 560; Stop 584
agattcaatatggtggactggaact

SEQ ID NO: 454120 - DNA, 25 bp, Artificial
  probe
  misc_feature (1)..(25): SEQ ID NO: 6943; WAN024DGW; Start 1140; Stop 1164
aatgcctatccatcctctctatcct

SEQ ID NO: 454121 - DNA, 25 bp, Artificial
  probe
  misc_feature (1)..(25): SEQ ID NO: 6943; WAN024DGW; Start 1139; Stop 1163
caatgcctatccatcctctctatcc

SEQ ID NO: 454122 - DNA, 25 bp, Artificial
  probe
  misc_feature (1)..(25): SEQ ID NO: 6943; WAN024DGW; Start 928; Stop 952
attacctctgtcaatctatatgctg

SEQ ID NO: 454123 - DNA, 25 bp, Artificial
  probe
  misc_feature (1)..(25): SEQ ID NO: 6943; WAN024DGW; Start 558; Stop 582
tgagattcaatatggtggactggaa

SEQ ID NO: 454124 - DNA, 25 bp, Artificial
  probe
  misc_feature (1)..(25): SEQ ID NO: 6943; WAN024DGW; Start 272; Stop 296
ccattaagtcttatgctcgcagtaa

SEQ ID NO: 454125 - DNA, 25 bp, Artificial
  probe
  misc_feature (1)..(25): SEQ ID NO: 6943; WAN024DGW; Start 686; Stop 710
aagattcttatatcacgctaacgag

SEQ ID NO: 454126 - DNA, 25 bp, Artificial
  probe
  misc_feature (1)..(25): SEQ ID NO: 6943; WAN024DGW; Start 685; Stop 709
gaagattcttatatcacgctaacga

SEQ ID NO: 454127 - DNA, 25 bp, Artificial
  probe
  misc_feature (1)..(25): SEQ ID NO: 6943; WAN024DGW; Start 684; Stop 708
agaagattcttatatcacgctaacg

SEQ ID NO: 454128 - DNA, 25 bp, Artificial
  probe
  misc_feature (1)..(25): SEQ ID NO: 6943; WAN024DGW; Start 154; Stop 178
ctggctgtggctagtattctcataa

SEQ ID NO: 454129 - DNA, 25 bp, Artificial
  probe
  misc_feature (1)..(25): SEQ ID NO: 6943; WAN024DGW; Start 1141; Stop 1165
atgcctatccatcctctctatcctc

SEQ ID NO: 454130 - DNA, 25 bp, Artificial
  probe
  misc_feature (1)..(25): SEQ ID NO: 6943; WAN024DGW; Start 271; Stop 295
tccattaagtcttatgctcgcagta

SEQ ID NO: 454131 - DNA, 25 bp, Artificial
  probe
  misc_feature (1)..(25): SEQ ID NO: 6943; WAN024DGW; Start 273; Stop 297
cattaagtcttatgctcgcagtaag

SEQ ID NO: 454132 - DNA, 25 bp, Artificial
  probe
  misc_feature (1)..(25): SEQ ID NO: 6943; WAN024DGW; Start 216; Stop 240
aagaggtcctatattggattacagg

SEQ ID NO: 454133 - DNA, 25 bp, Artificial
  probe
  misc_feature (1)..(25): SEQ ID NO: 6943; WAN024DGW; Start 1143; Stop 1167
gcctatccatcctctctatcctctg

SEQ ID NO: 454134 - DNA, 25 bp, Artificial
  probe
  misc_feature (1)..(25): SEQ ID NO: 6943; WAN024DGW; Start 708; Stop 732
gagtttggatgtttctaagcgttta

SEQ ID NO: 454135 - DNA, 25 bp, Artificial
  probe
  misc_feature (1)..(25): SEQ ID NO: 6943; WAN024DGW; Start 693; Stop 717
ttatatcacgctaacgagtttggat

SEQ ID NO: 454136 - DNA, 25 bp, Artificial
  probe
  misc_feature (1)..(25): SEQ ID NO: 6943; WAN024DGW; Start 709; Stop 733
agtttggatgtttctaagcgtttaa

SEQ ID NO: 454137 - DNA, 25 bp, Artificial
  probe
  misc_feature (1)..(25): SEQ ID NO: 6943; WAN024DGW; Start 690; Stop 714
ttcttatatcacgctaacgagtttg

SEQ ID NO: 454138 - DNA, 25 bp, Artificial
  probe
  misc_feature (1)..(25): SEQ ID NO: 6943; WAN024DGW; Start 692; Stop 716
cttatatcacgctaacgagtttgga

SEQ ID NO: 454139 - DNA, 25 bp, Artificial
  probe
  misc_feature (1)..(25): SEQ ID NO: 6944; WAN024DT3; Start 11; Stop 35
ccctttcgctacatgttactatcag

SEQ ID NO: 454140 - DNA, 25 bp, Artificial
  probe
  misc_feature (1)..(25): SEQ ID NO: 6944; WAN024DT3; Start 12; Stop 36
cctttcgctacatgttactatcagt

SEQ ID NO: 454141 - DNA, 25 bp, Artificial
  probe
  misc_feature (1)..(25): SEQ ID NO: 6944; WAN024DT3; Start 13; Stop 37
ctttcgctacatgttactatcagtt

SEQ ID NO: 454142 - DNA, 25 bp, Artificial
  probe
  misc_feature (1)..(25): SEQ ID NO: 6944; WAN024DT3; Start 14; Stop 38
tttcgctacatgttactatcagttt

SEQ ID NO: 454143 - DNA, 25 bp, Artificial
  probe
  misc_feature (1)..(25): SEQ ID NO: 6944; WAN024DT3; Start 57; Stop 81
aaacatccgacttgcgacctatttt

SEQ ID NO: 454144 - DNA, 25 bp, Artificial
  probe
  misc_feature (1)..(25): SEQ ID NO: 6944; WAN024DT3; Start 56; Stop 80
aaaacatccgacttgcgacctattt

SEQ ID NO: 454145 - DNA, 25 bp, Artificial
  probe
  misc_feature (1)..(25): SEQ ID NO: 6944; WAN024DT3; Start 16; Stop 40
tcgctacatgttactatcagtttag

SEQ ID NO: 454146 - DNA, 25 bp, Artificial
  probe
  misc_feature (1)..(25): SEQ ID NO: 6944; WAN024DT3; Start 15; Stop 39
ttcgctacatgttactatcagttta

SEQ ID NO: 454147 - DNA, 25 bp, Artificial
  probe
  misc_feature (1)..(25): SEQ ID NO: 6944; WAN024DT3; Start 17; Stop 41
cgctacatgttactatcagtttagt

SEQ ID NO: 454148 - DNA, 25 bp, Artificial
  probe
  misc_feature (1)..(25): SEQ ID NO: 6944; WAN024DT3; Start 8; Stop 32
tacccctttcgctacatgttactat

SEQ ID NO: 454149 - DNA, 25 bp, Artificial
  probe
  misc_feature (1)..(25): SEQ ID NO: 6944; WAN024DT3; Start 7; Stop 31
ctacccctttcgctacatgttacta

SEQ ID NO: 454150 - DNA, 25 bp, Artificial
  probe
  misc_feature (1)..(25): SEQ ID NO: 6944; WAN024DT3; Start 18; Stop 42
gctacatgttactatcagtttagtc

SEQ ID NO: 454151 - DNA, 25 bp, Artificial
  probe
  misc_feature (1)..(25): SEQ ID NO: 6944; WAN024DT3; Start 10; Stop 34
cccctttcgctacatgttactatca

SEQ ID NO: 454152 - DNA, 25 bp, Artificial
  probe
  misc_feature (1)..(25): SEQ ID NO: 6944; WAN024DT3; Start 9; Stop 33
acccctttcgctacatgttactatc

SEQ ID NO: 454153 - DNA, 25 bp, Artificial
  probe
  misc_feature (1)..(25): SEQ ID NO: 6944; WAN024DT3; Start 4; Stop 28
tacctacccctttcgctacatgtta

SEQ ID NO: 454154 - DNA, 25 bp, Artificial
  probe
  misc_feature (1)..(25): SEQ ID NO: 6944; WAN024DT3; Start 19; Stop 43
ctacatgttactatcagtttagtct

SEQ ID NO: 454155 - DNA, 25 bp, Artificial
  probe
  misc_feature (1)..(25): SEQ ID NO: 6944; WAN024DT3; Start 6; Stop 30
cctacccctttcgctacatgttact

SEQ ID NO: 454156 - DNA, 25 bp, Artificial
  probe
  misc_feature (1)..(25): SEQ ID NO: 6944; WAN024DT3; Start 5; Stop 29
acctacccctttcgctacatgttac

SEQ ID NO: 454157 - DNA, 25 bp, Artificial
  probe
  misc_feature (1)..(25): SEQ ID NO: 6944; WAN024DT3; Start 3; Stop 27
gtacctacccctttcgctacatgtt

SEQ ID NO: 454158 - DNA, 25 bp, Artificial
  probe
  misc_feature (1)..(25): SEQ ID NO: 6944; WAN024DT3; Start 21; Stop 45
acatgttactatcagtttagtctat

SEQ ID NO: 454159 - DNA, 25 bp, Artificial
  probe
  misc_feature (1)..(25): SEQ ID NO: 6944; WAN024DT3; Start 1; Stop 25
atgtacctacccctttcgctacatg

SEQ ID NO: 454160 - DNA, 25 bp, Artificial
  probe
  misc_feature (1)..(25): SEQ ID NO: 6944; WAN024DT3; Start 2; Stop 26
tgtacctacccctttcgctacatgt

SEQ ID NO: 454161 - DNA, 25 bp, Artificial
  probe
  misc_feature (1)..(25): SEQ ID NO: 6945; WAN024AXK; Start 226; Stop 250
aacaactatatcaattcacctgtcg

SEQ ID NO: 454162 - DNA, 25 bp, Artificial
  probe
  misc_feature (1)..(25): SEQ ID NO: 6945; WAN024AXK; Start 227; Stop 251
acaactatatcaattcacctgtcgc

SEQ ID NO: 454163 - DNA, 25 bp, Artificial
  probe
  misc_feature (1)..(25): SEQ ID NO: 6945; WAN024AXK; Start 198; Stop 222
ggactatgtcaatcaattcgctgaa

SEQ ID NO: 454164 - DNA, 25 bp, Artificial
  probe
  misc_feature (1)..(25): SEQ ID NO: 6945; WAN024AXK; Start 199; Stop 223
gactatgtcaatcaattcgctgaat

SEQ ID NO: 454165 - DNA, 25 bp, Artificial
  probe
  misc_feature (1)..(25): SEQ ID NO: 6945; WAN024AXK; Start 164; Stop 188
cccatatcttccatacctcaaacaa

SEQ ID NO: 454166 - DNA, 25 bp, Artificial
  probe
  misc_feature (1)..(25): SEQ ID NO: 6945; WAN024AXK; Start 131; Stop 155
atgtagaaggtatcaatgtccataa

SEQ ID NO: 454167 - DNA, 25 bp, Artificial
  probe
  misc_feature (1)..(25): SEQ ID NO: 6945; WAN024AXK; Start 130; Stop 154
aatgtagaaggtatcaatgtccata

SEQ ID NO: 454168 - DNA, 25 bp, Artificial
  probe
  misc_feature (1)..(25): SEQ ID NO: 6945; WAN024AXK; Start 510; Stop 534
tcttccagttcgtctaacatttgat

SEQ ID NO: 454169 - DNA, 25 bp, Artificial
  probe
  misc_feature (1)..(25): SEQ ID NO: 6945; WAN024AXK; Start 567; Stop 591
tcctattggtggttataatgtgatt

SEQ ID NO: 454170 - DNA, 25 bp, Artificial
  probe
  misc_feature (1)..(25): SEQ ID NO: 6945; WAN024AXK; Start 566; Stop 590
ttcctattggtggttataatgtgat

SEQ ID NO: 454171 - DNA, 25 bp, Artificial
  probe
  misc_feature (1)..(25): SEQ ID NO: 6945; WAN024AXK; Start 565; Stop 589
attcctattggtggttataatgtga

SEQ ID NO: 454172 - DNA, 25 bp, Artificial
  probe
  misc_feature (1)..(25): SEQ ID NO: 6945; WAN024AXK; Start 165; Stop 189
ccatatcttccatacctcaaacaaa

SEQ ID NO: 454173 - DNA, 25 bp, Artificial
  probe
  misc_feature (1)..(25): SEQ ID NO: 6945; WAN024AXK; Start 509; Stop 533
gtcttccagttcgtctaacatttga

SEQ ID NO: 454174 - DNA, 25 bp, Artificial
  probe
  misc_feature (1)..(25): SEQ ID NO: 6945; WAN024AXK; Start 511; Stop 535
cttccagttcgtctaacatttgata

SEQ ID NO: 454175 - DNA, 25 bp, Artificial
  probe
  misc_feature (1)..(25): SEQ ID NO: 6945; WAN024AXK; Start 512; Stop 536
ttccagttcgtctaacatttgataa

SEQ ID NO: 454176 - DNA, 25 bp, Artificial
  probe
  misc_feature (1)..(25): SEQ ID NO: 6945; WAN024AXK; Start 101; Stop 125
atcacattggagggaacatctactg

SEQ ID NO: 454177 - DNA, 25 bp, Artificial
  probe
  misc_feature (1)..(25): SEQ ID NO: 6945; WAN024AXK; Start 513; Stop 537
tccagttcgtctaacatttgataat

SEQ ID NO: 454178 - DNA, 25 bp, Artificial
  probe
  misc_feature (1)..(25): SEQ ID NO: 6945; WAN024AXK; Start 564; Stop 588
aattcctattggtggttataatgtg

SEQ ID NO: 454179 - DNA, 25 bp, Artificial
  probe
  misc_feature (1)..(25): SEQ ID NO: 6945; WAN024AXK; Start 129; Stop 153
aaatgtagaaggtatcaatgtccat

SEQ ID NO: 454180 - DNA, 25 bp, Artificial
  probe
  misc_feature (1)..(25): SEQ ID NO: 6945; WAN024AXK; Start 163; Stop 187
gcccatatcttccatacctcaaaca

SEQ ID NO: 454181 - DNA, 25 bp, Artificial
  probe
  misc_feature (1)..(25): SEQ ID NO: 6945; WAN024AXK; Start 162; Stop 186
tgcccatatcttccatacctcaaac

SEQ ID NO: 454182 - DNA, 25 bp, Artificial
  probe
  misc_feature (1)..(25): SEQ ID NO: 6945; WAN024AXK; Start 161; Stop 185
gtgcccatatcttccatacctcaaa

SEQ ID NO: 454183 - DNA, 25 bp, Artificial
  probe
  misc_feature (1)..(25): SEQ ID NO: 6945; WAN024AXK; Start 100; Stop 124
gatcacattggagggaacatctact

SEQ ID NO: 454184 - DNA, 25 bp, Artificial
  probe
  misc_feature (1)..(25): SEQ ID NO: 6945; WAN024AXK; Start 508; Stop 532
cgtcttccagttcgtctaacatttg

SEQ ID NO: 454185 - DNA, 25 bp, Artificial
  probe
  misc_feature (1)..(25): SEQ ID NO: 6945; WAN024AXK; Start 106; Stop 130
attggagggaacatctactgtgaaa

SEQ ID NO: 454186 - DNA, 25 bp, Artificial
  probe
  misc_feature (1)..(25): SEQ ID NO: 6945; WAN024AXK; Start 225; Stop 249
taacaactatatcaattcacctgtc

SEQ ID NO: 454187 - DNA, 25 bp, Artificial
  probe
  misc_feature (1)..(25): SEQ ID NO: 6945; WAN024AXK; Start 132; Stop 156
tgtagaaggtatcaatgtccataaa

SEQ ID NO: 454188 - DNA, 25 bp, Artificial
  probe
  misc_feature (1)..(25): SEQ ID NO: 6945; WAN024AXK; Start 573; Stop 597
tggtggttataatgtgattatcgaa

SEQ ID NO: 454189 - DNA, 25 bp, Artificial
  probe
  misc_feature (1)..(25): SEQ ID NO: 6945; WAN024AXK; Start 572; Stop 596
ttggtggttataatgtgattatcga

SEQ ID NO: 454190 - DNA, 25 bp, Artificial
  probe
  misc_feature (1)..(25): SEQ ID NO: 6945; WAN024AXK; Start 105; Stop 129
cattggagggaacatctactgtgaa

SEQ ID NO: 454191 - DNA, 25 bp, Artificial
  probe
  misc_feature (1)..(25): SEQ ID NO: 6945; WAN024AXK; Start 571; Stop 595
attggtggttataatgtgattatcg

SEQ ID NO: 454192 - DNA, 25 bp, Artificial
  probe
  misc_feature (1)..(25): SEQ ID NO: 6945; WAN024AXK; Start 224; Stop 248
ttaacaactatatcaattcacctgt

SEQ ID NO: 454193 - DNA, 25 bp, Artificial
  probe
  misc_feature (1)..(25): SEQ ID NO: 6945; WAN024AXK; Start 568; Stop 592
cctattggtggttataatgtgatta

SEQ ID NO: 454194 - DNA, 25 bp, Artificial
  probe
  misc_feature (1)..(25): SEQ ID NO: 6946; WAN024F4D; Start 600; Stop 624
tatgttgaaggatgtggaagtagaa

SEQ ID NO: 454195 - DNA, 25 bp, Artificial
  probe
  misc_feature (1)..(25): SEQ ID NO: 6946; WAN024F4D; Start 599; Stop 623
atatgttgaaggatgtggaagtaga

SEQ ID NO: 454196 - DNA, 25 bp, Artificial
  probe
  misc_feature (1)..(25): SEQ ID NO: 6946; WAN024F4D; Start 288; Stop 312
tatgaataccttctatgcgatgtgg

SEQ ID NO: 454197 - DNA, 25 bp, Artificial
  probe
  misc_feature (1)..(25): SEQ ID NO: 6946; WAN024F4D; Start 601; Stop 625
atgttgaaggatgtggaagtagaac

SEQ ID NO: 454198 - DNA, 25 bp, Artificial
  probe
  misc_feature (1)..(25): SEQ ID NO: 6946; WAN024F4D; Start 328; Stop 352
caagaagtcaaggataagattgctg

SEQ ID NO: 454199 - DNA, 25 bp, Artificial
  probe
  misc_feature (1)..(25): SEQ ID NO: 6946; WAN024F4D; Start 327; Stop 351
tcaagaagtcaaggataagattgct

SEQ ID NO: 454200 - DNA, 25 bp, Artificial
  probe
  misc_feature (1)..(25): SEQ ID NO: 6946; WAN024F4D; Start 326; Stop 350
ctcaagaagtcaaggataagattgc

SEQ ID NO: 454201 - DNA, 25 bp, Artificial
  probe
  misc_feature (1)..(25): SEQ ID NO: 6946; WAN024F4D; Start 598; Stop 622
aatatgttgaaggatgtggaagtag

SEQ ID NO: 454202 - DNA, 25 bp, Artificial
  probe
  misc_feature (1)..(25): SEQ ID NO: 6946; WAN024F4D; Start 329; Stop 353
aagaagtcaaggataagattgctga

SEQ ID NO: 454203 - DNA, 25 bp, Artificial
  probe
  misc_feature (1)..(25): SEQ ID NO: 6946; WAN024F4D; Start 330; Stop 354
agaagtcaaggataagattgctgat

SEQ ID NO: 454204 - DNA, 25 bp, Artificial
  probe
  misc_feature (1)..(25): SEQ ID NO: 6946; WAN024F4D; Start 538; Stop 562
aactacttcaatgaccgttaccaag

SEQ ID NO: 454205 - DNA, 25 bp, Artificial
  probe
  misc_feature (1)..(25): SEQ ID NO: 6946; WAN024F4D; Start 997; Stop 1021
gatgttatcttctgtggtcgtcttg

SEQ ID NO: 454206 - DNA, 25 bp, Artificial
  probe
  misc_feature (1)..(25): SEQ ID NO: 6946; WAN024F4D; Start 822; Stop 846
tccttatactcgcattattgagcat

SEQ ID NO: 454207 - DNA, 25 bp, Artificial
  probe
  misc_feature (1)..(25): SEQ ID NO: 6946; WAN024F4D; Start 287; Stop 311
atatgaataccttctatgcgatgtg

SEQ ID NO: 454208 - DNA, 25 bp, Artificial
  probe
  misc_feature (1)..(25): SEQ ID NO: 6946; WAN024F4D; Start 224; Stop 248
ttaacaactatgtcaactcacctgt

SEQ ID NO: 454209 - DNA, 25 bp, Artificial
  probe
  misc_feature (1)..(25): SEQ ID NO: 6946; WAN024F4D; Start 543; Stop 567
cttcaatgaccgttaccaaggaatt

SEQ ID NO: 454210 - DNA, 25 bp, Artificial
  probe
  misc_feature (1)..(25): SEQ ID NO: 6946; WAN024F4D; Start 225; Stop 249
taacaactatgtcaactcacctgtc

SEQ ID NO: 454211 - DNA, 25 bp, Artificial
  probe
  misc_feature (1)..(25): SEQ ID NO: 6946; WAN024F4D; Start 331; Stop 355
gaagtcaaggataagattgctgatc

SEQ ID NO: 454212 - DNA, 25 bp, Artificial
  probe
  misc_feature (1)..(25): SEQ ID NO: 6946; WAN024F4D; Start 541; Stop 565
tacttcaatgaccgttaccaaggaa

SEQ ID NO: 454213 - DNA, 25 bp, Artificial
  probe
  misc_feature (1)..(25): SEQ ID NO: 6946; WAN024F4D; Start 602; Stop 626
tgttgaaggatgtggaagtagaact

SEQ ID NO: 454214 - DNA, 25 bp, Artificial
  probe
  misc_feature (1)..(25): SEQ ID NO: 6946; WAN024F4D; Start 286; Stop 310
aatatgaataccttctatgcgatgt

SEQ ID NO: 454215 - DNA, 25 bp, Artificial
  probe
  misc_feature (1)..(25): SEQ ID NO: 6946; WAN024F4D; Start 686; Stop 710
ttacaggaatgattgaccaatactt

SEQ ID NO: 454216 - DNA, 25 bp, Artificial
  probe
  misc_feature (1)..(25): SEQ ID NO: 6946; WAN024F4D; Start 325; Stop 349
cctcaagaagtcaaggataagattg

SEQ ID NO: 454217 - DNA, 25 bp, Artificial
  probe
  misc_feature (1)..(25): SEQ ID NO: 6946; WAN024F4D; Start 285; Stop 309
caatatgaataccttctatgcgatg

SEQ ID NO: 454218 - DNA, 25 bp, Artificial
  probe
  misc_feature (1)..(25): SEQ ID NO: 6946; WAN024F4D; Start 537; Stop 561
taactacttcaatgaccgttaccaa

SEQ ID NO: 454219 - DNA, 25 bp, Artificial
  probe
  misc_feature (1)..(25): SEQ ID NO: 6946; WAN024F4D; Start 540; Stop 564
ctacttcaatgaccgttaccaagga

SEQ ID NO: 454220 - DNA, 25 bp, Artificial
  probe
  misc_feature (1)..(25): SEQ ID NO: 6946; WAN024F4D; Start 536; Stop 560
ataactacttcaatgaccgttacca

SEQ ID NO: 454221 - DNA, 25 bp, Artificial
  probe
  misc_feature (1)..(25): SEQ ID NO: 6946; WAN024F4D; Start 8; Stop 32
attatcttattgtcggagctggatt

SEQ ID NO: 454222 - DNA, 25 bp, Artificial
  probe
  misc_feature (1)..(25): SEQ ID NO: 6946; WAN024F4D; Start 7; Stop 31
gattatcttattgtcggagctggat

SEQ ID NO: 454223 - DNA, 25 bp, Artificial
  probe
  misc_feature (1)..(25): SEQ ID NO: 6946; WAN024F4D; Start 9; Stop 33
ttatcttattgtcggagctggattg

SEQ ID NO: 454224 - DNA, 25 bp, Artificial
  probe
  misc_feature (1)..(25): SEQ ID NO: 6946; WAN024F4D; Start 542; Stop 566
acttcaatgaccgttaccaaggaat

SEQ ID NO: 454225 - DNA, 25 bp, Artificial
  probe
  misc_feature (1)..(25): SEQ ID NO: 6946; WAN024F4D; Start 531; Stop 555
tgataataactacttcaatgaccgt

SEQ ID NO: 454226 - DNA, 25 bp, Artificial
  probe
  misc_feature (1)..(25): SEQ ID NO: 6946; WAN024F4D; Start 535; Stop 559
aataactacttcaatgaccgttacc

SEQ ID NO: 454227 - DNA, 25 bp, Artificial
  probe
  misc_feature (1)..(25): SEQ ID NO: 6947; WAN024BN5; Start 151; Stop 175
gcttggaatgtagaggatgtgtatt

SEQ ID NO: 454228 - DNA, 25 bp, Artificial
  probe
  misc_feature (1)..(25): SEQ ID NO: 6947; WAN024BN5; Start 77; Stop 101
ggaggtatgttacaggtgatatgat

SEQ ID NO: 454229 - DNA, 25 bp, Artificial
  probe
  misc_feature (1)..(25): SEQ ID NO: 6947; WAN024BN5; Start 150; Stop 174
tgcttggaatgtagaggatgtgtat

SEQ ID NO: 454230 - DNA, 25 bp, Artificial
  probe
  misc_feature (1)..(25): SEQ ID NO: 6947; WAN024BN5; Start 149; Stop 173
ttgcttggaatgtagaggatgtgta

SEQ ID NO: 454231 - DNA, 25 bp, Artificial
  probe
  misc_feature (1)..(25): SEQ ID NO: 6947; WAN024BN5; Start 146; Stop 170
ttcttgcttggaatgtagaggatgt

SEQ ID NO: 454232 - DNA, 25 bp, Artificial
  probe
  misc_feature (1)..(25): SEQ ID NO: 6947; WAN024BN5; Start 78; Stop 102
gaggtatgttacaggtgatatgatt

SEQ ID NO: 454233 - DNA, 25 bp, Artificial
  probe
  misc_feature (1)..(25): SEQ ID NO: 6947; WAN024BN5; Start 154; Stop 178
tggaatgtagaggatgtgtattcac

SEQ ID NO: 454234 - DNA, 25 bp, Artificial
  probe
  misc_feature (1)..(25): SEQ ID NO: 6947; WAN024BN5; Start 153; Stop 177
ttggaatgtagaggatgtgtattca

SEQ ID NO: 454235 - DNA, 25 bp, Artificial
  probe
  misc_feature (1)..(25): SEQ ID NO: 6947; WAN024BN5; Start 147; Stop 171
tcttgcttggaatgtagaggatgtg

SEQ ID NO: 454236 - DNA, 25 bp, Artificial
  probe
  misc_feature (1)..(25): SEQ ID NO: 6947; WAN024BN5; Start 152; Stop 176
cttggaatgtagaggatgtgtattc

SEQ ID NO: 454237 - DNA, 25 bp, Artificial
  probe
  misc_feature (1)..(25): SEQ ID NO: 6947; WAN024BN5; Start 148; Stop 172
cttgcttggaatgtagaggatgtgt

SEQ ID NO: 454238 - DNA, 25 bp, Artificial
  probe
  misc_feature (1)..(25): SEQ ID NO: 6947; WAN024BN5; Start 88; Stop 112
acaggtgatatgatttcgctaactt

SEQ ID NO: 454239 - DNA, 25 bp, Artificial
  probe
  misc_feature (1)..(25): SEQ ID NO: 6947; WAN024BN5; Start 87; Stop 111
tacaggtgatatgatttcgctaact

SEQ ID NO: 454240 - DNA, 25 bp, Artificial
  probe
  misc_feature (1)..(25): SEQ ID NO: 6947; WAN024BN5; Start 89; Stop 113
caggtgatatgatttcgctaacttt

SEQ ID NO: 454241 - DNA, 25 bp, Artificial
  probe
  misc_feature (1)..(25): SEQ ID NO: 6947; WAN024BN5; Start 84; Stop 108
tgttacaggtgatatgatttcgcta

SEQ ID NO: 454242 - DNA, 25 bp, Artificial
  probe
  misc_feature (1)..(25): SEQ ID NO: 6947; WAN024BN5; Start 83; Stop 107
atgttacaggtgatatgatttcgct

SEQ ID NO: 454243 - DNA, 25 bp, Artificial
  probe
  misc_feature (1)..(25): SEQ ID NO: 6947; WAN024BN5; Start 191; Stop 215
ttgatgaagatgctaaggaaatgtt

SEQ ID NO: 454244 - DNA, 25 bp, Artificial
  probe
  misc_feature (1)..(25): SEQ ID NO: 6947; WAN024BN5; Start 74; Stop 98
atgggaggtatgttacaggtgatat

SEQ ID NO: 454245 - DNA, 25 bp, Artificial
  probe
  misc_feature (1)..(25): SEQ ID NO: 6947; WAN024BN5; Start 86; Stop 110
ttacaggtgatatgatttcgctaac

SEQ ID NO: 454246 - DNA, 25 bp, Artificial
  probe
  misc_feature (1)..(25): SEQ ID NO: 6947; WAN024BN5; Start 85; Stop 109
gttacaggtgatatgatttcgctaa

SEQ ID NO: 454247 - DNA, 25 bp, Artificial
  probe
  misc_feature (1)..(25): SEQ ID NO: 6947; WAN024BN5; Start 190; Stop 214
cttgatgaagatgctaaggaaatgt

SEQ ID NO: 454248 - DNA, 25 bp, Artificial
  probe
  misc_feature (1)..(25): SEQ ID NO: 6947; WAN024BN5; Start 144; Stop 168
atttcttgcttggaatgtagaggat

SEQ ID NO: 454249 - DNA, 25 bp, Artificial
  probe
  misc_feature (1)..(25): SEQ ID NO: 6947; WAN024BN5; Start 333; Stop 357
agttaaagcggcaatgagagttatt

SEQ ID NO: 454250 - DNA, 25 bp, Artificial
  probe
  misc_feature (1)..(25): SEQ ID NO: 6947; WAN024BN5; Start 82; Stop 106
tatgttacaggtgatatgatttcgc

SEQ ID NO: 454251 - DNA, 25 bp, Artificial
  probe
  misc_feature (1)..(25): SEQ ID NO: 6947; WAN024BN5; Start 143; Stop 167
aatttcttgcttggaatgtagagga

SEQ ID NO: 454252 - DNA, 25 bp, Artificial
  probe
  misc_feature (1)..(25): SEQ ID NO: 6947; WAN024BN5; Start 76; Stop 100
gggaggtatgttacaggtgatatga

SEQ ID NO: 454253 - DNA, 25 bp, Artificial
  probe
  misc_feature (1)..(25): SEQ ID NO: 6947; WAN024BN5; Start 145; Stop 169
tttcttgcttggaatgtagaggatg

SEQ ID NO: 454254 - DNA, 25 bp, Artificial
  probe
  misc_feature (1)..(25): SEQ ID NO: 6947; WAN024BN5; Start 300; Stop 324
tcttcttggaaagttgattgatgaa

SEQ ID NO: 454255 - DNA, 25 bp, Artificial
  probe
  misc_feature (1)..(25): SEQ ID NO: 6947; WAN024BN5; Start 299; Stop 323
atcttcttggaaagttgattgatga

SEQ ID NO: 454256 - DNA, 25 bp, Artificial
  probe
  misc_feature (1)..(25): SEQ ID NO: 6947; WAN024BN5; Start 75; Stop 99
tgggaggtatgttacaggtgatatg

SEQ ID NO: 454257 - DNA, 25 bp, Artificial
  probe
  misc_feature (1)..(25): SEQ ID NO: 6947; WAN024BN5; Start 192; Stop 216
tgatgaagatgctaaggaaatgtta

SEQ ID NO: 454258 - DNA, 25 bp, Artificial
  probe
  misc_feature (1)..(25): SEQ ID NO: 6947; WAN024BN5; Start 332; Stop 356
cagttaaagcggcaatgagagttat

SEQ ID NO: 454259 - DNA, 25 bp, Artificial
  probe
  misc_feature (1)..(25): SEQ ID NO: 6947; WAN024BN5; Start 90; Stop 114
aggtgatatgatttcgctaacttta

SEQ ID NO: 454260 - DNA, 25 bp, Artificial
  probe
  misc_feature (1)..(25): SEQ ID NO: 6948; WAN024CKL; Start 469; Stop 493
gctgaattggatggatactatgtga

SEQ ID NO: 454261 - DNA, 25 bp, Artificial
  probe
  misc_feature (1)..(25): SEQ ID NO: 6948; WAN024CKL; Start 471; Stop 495
tgaattggatggatactatgtgaca

SEQ ID NO: 454262 - DNA, 25 bp, Artificial
  probe
  misc_feature (1)..(25): SEQ ID NO: 6948; WAN024CKL; Start 312; Stop 336
tgttggtgatatgagtattgtagga

SEQ ID NO: 454263 - DNA, 25 bp, Artificial
  probe
  misc_feature (1)..(25): SEQ ID NO: 6948; WAN024CKL; Start 472; Stop 496
gaattggatggatactatgtgacac

SEQ ID NO: 454264 - DNA, 25 bp, Artificial
  probe
  misc_feature (1)..(25): SEQ ID NO: 6948; WAN024CKL; Start 470; Stop 494
ctgaattggatggatactatgtgac

SEQ ID NO: 454265 - DNA, 25 bp, Artificial
  probe
  misc_feature (1)..(25): SEQ ID NO: 6948; WAN024CKL; Start 313; Stop 337
gttggtgatatgagtattgtaggac

SEQ ID NO: 454266 - DNA, 25 bp, Artificial
  probe
  misc_feature (1)..(25): SEQ ID NO: 6948; WAN024CKL; Start 320; Stop 344
atatgagtattgtaggaccaagacc

SEQ ID NO: 454267 - DNA, 25 bp, Artificial
  probe
  misc_feature (1)..(25): SEQ ID NO: 6948; WAN024CKL; Start 311; Stop 335
ttgttggtgatatgagtattgtagg

SEQ ID NO: 454268 - DNA, 25 bp, Artificial
  probe
  misc_feature (1)..(25): SEQ ID NO: 6948; WAN024CKL; Start 308; Stop 332
ttcttgttggtgatatgagtattgt

SEQ ID NO: 454269 - DNA, 25 bp, Artificial
  probe
  misc_feature (1)..(25): SEQ ID NO: 6948; WAN024CKL; Start 318; Stop 342
tgatatgagtattgtaggaccaaga

SEQ ID NO: 454270 - DNA, 25 bp, Artificial
  probe
  misc_feature (1)..(25): SEQ ID NO: 6948; WAN024CKL; Start 317; Stop 341
gtgatatgagtattgtaggaccaag

SEQ ID NO: 454271 - DNA, 25 bp, Artificial
  probe
  misc_feature (1)..(25): SEQ ID NO: 6948; WAN024CKL; Start 319; Stop 343
gatatgagtattgtaggaccaagac

SEQ ID NO: 454272 - DNA, 25 bp, Artificial
  probe
  misc_feature (1)..(25): SEQ ID NO: 6948; WAN024CKL; Start 321; Stop 345
tatgagtattgtaggaccaagacct

SEQ ID NO: 454273 - DNA, 25 bp, Artificial
  probe
  misc_feature (1)..(25): SEQ ID NO: 6948; WAN024CKL; Start 529; Stop 553
gtaagaacaataccttatgtgctga

SEQ ID NO: 454274 - DNA, 25 bp, Artificial
  probe
  misc_feature (1)..(25): SEQ ID NO: 6948; WAN024CKL; Start 528; Stop 552
agtaagaacaataccttatgtgctg

SEQ ID NO: 454275 - DNA, 25 bp, Artificial
  probe
  misc_feature (1)..(25): SEQ ID NO: 6948; WAN024CKL; Start 467; Stop 491
aagctgaattggatggatactatgt

SEQ ID NO: 454276 - DNA, 25 bp, Artificial
  probe
  misc_feature (1)..(25): SEQ ID NO: 6948; WAN024CKL; Start 468; Stop 492
agctgaattggatggatactatgtg

SEQ ID NO: 454277 - DNA, 25 bp, Artificial
  probe
  misc_feature (1)..(25): SEQ ID NO: 6948; WAN024CKL; Start 309; Stop 333
tcttgttggtgatatgagtattgta

SEQ ID NO: 454278 - DNA, 25 bp, Artificial
  probe
  misc_feature (1)..(25): SEQ ID NO: 6948; WAN024CKL; Start 316; Stop 340
ggtgatatgagtattgtaggaccaa

SEQ ID NO: 454279 - DNA, 25 bp, Artificial
  probe
  misc_feature (1)..(25): SEQ ID NO: 6948; WAN024CKL; Start 314; Stop 338
ttggtgatatgagtattgtaggacc

SEQ ID NO: 454280 - DNA, 25 bp, Artificial
  probe
  misc_feature (1)..(25): SEQ ID NO: 6948; WAN024CKL; Start 322; Stop 346
atgagtattgtaggaccaagacctg

SEQ ID NO: 454281 - DNA, 25 bp, Artificial
  probe
  misc_feature (1)..(25): SEQ ID NO: 6948; WAN024CKL; Start 310; Stop 334
cttgttggtgatatgagtattgtag

SEQ ID NO: 454282 - DNA, 25 bp, Artificial
  probe
  misc_feature (1)..(25): SEQ ID NO: 6948; WAN024CKL; Start 530; Stop 554
taagaacaataccttatgtgctgaa

SEQ ID NO: 454283 - DNA, 25 bp, Artificial
  probe
  misc_feature (1)..(25): SEQ ID NO: 6948; WAN024CKL; Start 473; Stop 497
aattggatggatactatgtgacaca

SEQ ID NO: 454284 - DNA, 25 bp, Artificial
  probe
  misc_feature (1)..(25): SEQ ID NO: 6948; WAN024CKL; Start 307; Stop 331
attcttgttggtgatatgagtattg

SEQ ID NO: 454285 - DNA, 25 bp, Artificial
  probe
  misc_feature (1)..(25): SEQ ID NO: 6948; WAN024CKL; Start 494; Stop 518
cacataaatcgttgctaatggacat

SEQ ID NO: 454286 - DNA, 25 bp, Artificial
  probe
  misc_feature (1)..(25): SEQ ID NO: 6948; WAN024CKL; Start 492; Stop 516
gacacataaatcgttgctaatggac

SEQ ID NO: 454287 - DNA, 25 bp, Artificial
  probe
  misc_feature (1)..(25): SEQ ID NO: 6948; WAN024CKL; Start 491; Stop 515
tgacacataaatcgttgctaatgga

SEQ ID NO: 454288 - DNA, 25 bp, Artificial
  probe
  misc_feature (1)..(25): SEQ ID NO: 6948; WAN024CKL; Start 493; Stop 517
acacataaatcgttgctaatggaca

SEQ ID NO: 454289 - DNA, 25 bp, Artificial
  probe
  misc_feature (1)..(25): SEQ ID NO: 6948; WAN024CKL; Start 559; Stop 583
aaaggaattgtagagggaagtcaaa

SEQ ID NO: 454290 - DNA, 25 bp, Artificial
  probe
  misc_feature (1)..(25): SEQ ID NO: 6948; WAN024CKL; Start 490; Stop 514
gtgacacataaatcgttgctaatgg

SEQ ID NO: 454291 - DNA, 25 bp, Artificial
  probe
  misc_feature (1)..(25): SEQ ID NO: 6948; WAN024CKL; Start 558; Stop 582
caaaggaattgtagagggaagtcaa

SEQ ID NO: 454292 - DNA, 25 bp, Artificial
  probe
  misc_feature (1)..(25): SEQ ID NO: 6948; WAN024CKL; Start 527; Stop 551
tagtaagaacaataccttatgtgct

SEQ ID NO: 454293 - DNA, 25 bp, Artificial
  probe
  misc_feature (1)..(25): SEQ ID NO: 6949; WAN024BLA; Start 165; Stop 189
atacagagtagagaattaccgcatc

SEQ ID NO: 454294 - DNA, 25 bp, Artificial
  probe
  misc_feature (1)..(25): SEQ ID NO: 6949; WAN024BLA; Start 164; Stop 188
gatacagagtagagaattaccgcat

SEQ ID NO: 454295 - DNA, 25 bp, Artificial
  probe
  misc_feature (1)..(25): SEQ ID NO: 6949; WAN024BLA; Start 166; Stop 190
tacagagtagagaattaccgcatca

SEQ ID NO: 454296 - DNA, 25 bp, Artificial
  probe
  misc_feature (1)..(25): SEQ ID NO: 6949; WAN024BLA; Start 168; Stop 192
cagagtagagaattaccgcatcatc

SEQ ID NO: 454297 - DNA, 25 bp, Artificial
  probe
  misc_feature (1)..(25): SEQ ID NO: 6949; WAN024BLA; Start 170; Stop 194
gagtagagaattaccgcatcatctg

SEQ ID NO: 454298 - DNA, 25 bp, Artificial
  probe
  misc_feature (1)..(25): SEQ ID NO: 6949; WAN024BLA; Start 169; Stop 193
agagtagagaattaccgcatcatct

SEQ ID NO: 454299 - DNA, 25 bp, Artificial
  probe
  misc_feature (1)..(25): SEQ ID NO: 6949; WAN024BLA; Start 167; Stop 191
acagagtagagaattaccgcatcat

SEQ ID NO: 454300 - DNA, 25 bp, Artificial
  probe
  misc_feature (1)..(25): SEQ ID NO: 6949; WAN024BLA; Start 160; Stop 184
tggcgatacagagtagagaattacc

SEQ ID NO: 454301 - DNA, 25 bp, Artificial
  probe
  misc_feature (1)..(25): SEQ ID NO: 6949; WAN024BLA; Start 172; Stop 196
gtagagaattaccgcatcatctgtg

SEQ ID NO: 454302 - DNA, 25 bp, Artificial
  probe
  misc_feature (1)..(25): SEQ ID NO: 6949; WAN024BLA; Start 171; Stop 195
agtagagaattaccgcatcatctgt

SEQ ID NO: 454303 - DNA, 25 bp, Artificial
  probe
  misc_feature (1)..(25): SEQ ID NO: 6949; WAN024BLA; Start 163; Stop 187
cgatacagagtagagaattaccgca

SEQ ID NO: 454304 - DNA, 25 bp, Artificial
  probe
  misc_feature (1)..(25): SEQ ID NO: 6949; WAN024BLA; Start 159; Stop 183
ctggcgatacagagtagagaattac

SEQ ID NO: 454305 - DNA, 25 bp, Artificial
  probe
  misc_feature (1)..(25): SEQ ID NO: 6949; WAN024BLA; Start 173; Stop 197
tagagaattaccgcatcatctgtga

SEQ ID NO: 454306 - DNA, 25 bp, Artificial
  probe
  misc_feature (1)..(25): SEQ ID NO: 6949; WAN024BLA; Start 158; Stop 182
actggcgatacagagtagagaatta

SEQ ID NO: 454307 - DNA, 25 bp, Artificial
  probe
  misc_feature (1)..(25): SEQ ID NO: 6949; WAN024BLA; Start 161; Stop 185
ggcgatacagagtagagaattaccg

SEQ ID NO: 454308 - DNA, 25 bp, Artificial
  probe
  misc_feature (1)..(25): SEQ ID NO: 6949; WAN024BLA; Start 157; Stop 181
tactggcgatacagagtagagaatt

SEQ ID NO: 454309 - DNA, 25 bp, Artificial
  probe
  misc_feature (1)..(25): SEQ ID NO: 6949; WAN024BLA; Start 156; Stop 180
ttactggcgatacagagtagagaat

SEQ ID NO: 454310 - DNA, 25 bp, Artificial
  probe
  misc_feature (1)..(25): SEQ ID NO: 6949; WAN024BLA; Start 155; Stop 179
gttactggcgatacagagtagagaa

SEQ ID NO: 454311 - DNA, 25 bp, Artificial
  probe
  misc_feature (1)..(25): SEQ ID NO: 6949; WAN024BLA; Start 176; Stop 200
agaattaccgcatcatctgtgatat

SEQ ID NO: 454312 - DNA, 25 bp, Artificial
  probe
  misc_feature (1)..(25): SEQ ID NO: 6949; WAN024BLA; Start 175; Stop 199
gagaattaccgcatcatctgtgata

SEQ ID NO: 454313 - DNA, 25 bp, Artificial
  probe
  misc_feature (1)..(25): SEQ ID NO: 6949; WAN024BLA; Start 188; Stop 212
tcatctgtgatatccaagacgataa

SEQ ID NO: 454314 - DNA, 25 bp, Artificial
  probe
  misc_feature (1)..(25): SEQ ID NO: 6949; WAN024BLA; Start 69; Stop 93
acaaatcctatcctggcttgctaaa

SEQ ID NO: 454315 - DNA, 25 bp, Artificial
  probe
  misc_feature (1)..(25): SEQ ID NO: 6949; WAN024BLA; Start 68; Stop 92
aacaaatcctatcctggcttgctaa

SEQ ID NO: 454316 - DNA, 25 bp, Artificial
  probe
  misc_feature (1)..(25): SEQ ID NO: 6949; WAN024BLA; Start 67; Stop 91
aaacaaatcctatcctggcttgcta

SEQ ID NO: 454317 - DNA, 25 bp, Artificial
  probe
  misc_feature (1)..(25): SEQ ID NO: 6949; WAN024BLA; Start 174; Stop 198
agagaattaccgcatcatctgtgat

SEQ ID NO: 454318 - DNA, 25 bp, Artificial
  probe
  misc_feature (1)..(25): SEQ ID NO: 6949; WAN024BLA; Start 154; Stop 178
ggttactggcgatacagagtagaga

SEQ ID NO: 454319 - DNA, 25 bp, Artificial
  probe
  misc_feature (1)..(25): SEQ ID NO: 6949; WAN024BLA; Start 153; Stop 177
aggttactggcgatacagagtagag

SEQ ID NO: 454320 - DNA, 25 bp, Artificial
  probe
  misc_feature (1)..(25): SEQ ID NO: 6949; WAN024BLA; Start 152; Stop 176
caggttactggcgatacagagtaga

SEQ ID NO: 454321 - DNA, 25 bp, Artificial
  probe
  misc_feature (1)..(25): SEQ ID NO: 6949; WAN024BLA; Start 177; Stop 201
gaattaccgcatcatctgtgatatc

SEQ ID NO: 454322 - DNA, 25 bp, Artificial
  probe
  misc_feature (1)..(25): SEQ ID NO: 6949; WAN024BLA; Start 186; Stop 210
catcatctgtgatatccaagacgat

SEQ ID NO: 454323 - DNA, 25 bp, Artificial
  probe
  misc_feature (1)..(25): SEQ ID NO: 6949; WAN024BLA; Start 178; Stop 202
aattaccgcatcatctgtgatatcc

SEQ ID NO: 454324 - DNA, 25 bp, Artificial
  probe
  misc_feature (1)..(25): SEQ ID NO: 6949; WAN024BLA; Start 187; Stop 211
atcatctgtgatatccaagacgata

SEQ ID NO: 454325 - DNA, 25 bp, Artificial
  probe
  misc_feature (1)..(25): SEQ ID NO: 6949; WAN024BLA; Start 50; Stop 74
tagataccccaaccagaaaacaaat

SEQ ID NO: 454326 - DNA, 25 bp, Artificial
  probe
  misc_feature (1)..(25): SEQ ID NO: 6950; WAN024C3J; Start 102; Stop 126
tatggatagtggagatatggcagaa

SEQ ID NO: 454327 - DNA, 25 bp, Artificial
  probe
  misc_feature (1)..(25): SEQ ID NO: 6950; WAN024C3J; Start 490; Stop 514
tctatgttacaaggcgatattccaa

SEQ ID NO: 454328 - DNA, 25 bp, Artificial
  probe
  misc_feature (1)..(25): SEQ ID NO: 6950; WAN024C3J; Start 489; Stop 513
ttctatgttacaaggcgatattcca

SEQ ID NO: 454329 - DNA, 25 bp, Artificial
  probe
  misc_feature (1)..(25): SEQ ID NO: 6950; WAN024C3J; Start 101; Stop 125
gtatggatagtggagatatggcaga

SEQ ID NO: 454330 - DNA, 25 bp, Artificial
  probe
  misc_feature (1)..(25): SEQ ID NO: 6950; WAN024C3J; Start 488; Stop 512
attctatgttacaaggcgatattcc

SEQ ID NO: 454331 - DNA, 25 bp, Artificial
  probe
  misc_feature (1)..(25): SEQ ID NO: 6950; WAN024C3J; Start 100; Stop 124
cgtatggatagtggagatatggcag

SEQ ID NO: 454332 - DNA, 25 bp, Artificial
  probe
  misc_feature (1)..(25): SEQ ID NO: 6950; WAN024C3J; Start 139; Stop 163
cagcaatatgataatctatggagga

SEQ ID NO: 454333 - DNA, 25 bp, Artificial
  probe
  misc_feature (1)..(25): SEQ ID NO: 6950; WAN024C3J; Start 138; Stop 162
tcagcaatatgataatctatggagg

SEQ ID NO: 454334 - DNA, 25 bp, Artificial
  probe
  misc_feature (1)..(25): SEQ ID NO: 6950; WAN024C3J; Start 97; Stop 121
gaacgtatggatagtggagatatgg

SEQ ID NO: 454335 - DNA, 25 bp, Artificial
  probe
  misc_feature (1)..(25): SEQ ID NO: 6950; WAN024C3J; Start 22; Stop 46
gggatgaaacttgagactatggatt

SEQ ID NO: 454336 - DNA, 25 bp, Artificial
  probe
  misc_feature (1)..(25): SEQ ID NO: 6950; WAN024C3J; Start 487; Stop 511
aattctatgttacaaggcgatattc

SEQ ID NO: 454337 - DNA, 25 bp, Artificial
  probe
  misc_feature (1)..(25): SEQ ID NO: 6950; WAN024C3J; Start 96; Stop 120
agaacgtatggatagtggagatatg

SEQ ID NO: 454338 - DNA, 25 bp, Artificial
  probe
  misc_feature (1)..(25): SEQ ID NO: 6950; WAN024C3J; Start 378; Stop 402
tgccgaaagtatctctgaagttaat

SEQ ID NO: 454339 - DNA, 25 bp, Artificial
  probe
  misc_feature (1)..(25): SEQ ID NO: 6950; WAN024C3J; Start 105; Stop 129
ggatagtggagatatggcagaaata

SEQ ID NO: 454340 - DNA, 25 bp, Artificial
  probe
  misc_feature (1)..(25): SEQ ID NO: 6950; WAN024C3J; Start 377; Stop 401
ttgccgaaagtatctctgaagttaa

SEQ ID NO: 454341 - DNA, 25 bp, Artificial
  probe
  misc_feature (1)..(25): SEQ ID NO: 6950; WAN024C3J; Start 495; Stop 519
gttacaaggcgatattccaaagtta

SEQ ID NO: 454342 - DNA, 25 bp, Artificial
  probe
  misc_feature (1)..(25): SEQ ID NO: 6950; WAN024C3J; Start 108; Stop 132
tagtggagatatggcagaaatagac

SEQ ID NO: 454343 - DNA, 25 bp, Artificial
  probe
  misc_feature (1)..(25): SEQ ID NO: 6950; WAN024C3J; Start 110; Stop 134
gtggagatatggcagaaatagacat

SEQ ID NO: 454344 - DNA, 25 bp, Artificial
  probe
  misc_feature (1)..(25): SEQ ID NO: 6950; WAN024C3J; Start 111; Stop 135
tggagatatggcagaaatagacatt

SEQ ID NO: 454345 - DNA, 25 bp, Artificial
  probe
  misc_feature (1)..(25): SEQ ID NO: 6950; WAN024C3J; Start 109; Stop 133
agtggagatatggcagaaatagaca

SEQ ID NO: 454346 - DNA, 25 bp, Artificial
  probe
  misc_feature (1)..(25): SEQ ID NO: 6950; WAN024C3J; Start 376; Stop 400
cttgccgaaagtatctctgaagtta

SEQ ID NO: 454347 - DNA, 25 bp, Artificial
  probe
  misc_feature (1)..(25): SEQ ID NO: 6950; WAN024C3J; Start 307; Stop 331
ttcgctcttcgtaataaacctgaat

SEQ ID NO: 454348 - DNA, 25 bp, Artificial
  probe
  misc_feature (1)..(25): SEQ ID NO: 6950; WAN024C3J; Start 493; Stop 517
atgttacaaggcgatattccaaagt

SEQ ID NO: 454349 - DNA, 25 bp, Artificial
  probe
  misc_feature (1)..(25): SEQ ID NO: 6950; WAN024C3J; Start 492; Stop 516
tatgttacaaggcgatattccaaag

SEQ ID NO: 454350 - DNA, 25 bp, Artificial
  probe
  misc_feature (1)..(25): SEQ ID NO: 6950; WAN024C3J; Start 491; Stop 515
ctatgttacaaggcgatattccaaa

SEQ ID NO: 454351 - DNA, 25 bp, Artificial
  probe
  misc_feature (1)..(25): SEQ ID NO: 6950; WAN024C3J; Start 379; Stop 403
gccgaaagtatctctgaagttaatt

SEQ ID NO: 454352 - DNA, 25 bp, Artificial
  probe
  misc_feature (1)..(25): SEQ ID NO: 6950; WAN024C3J; Start 104; Stop 128
tggatagtggagatatggcagaaat

SEQ ID NO: 454353 - DNA, 25 bp, Artificial
  probe
  misc_feature (1)..(25): SEQ ID NO: 6950; WAN024C3J; Start 103; Stop 127
atggatagtggagatatggcagaaa

SEQ ID NO: 454354 - DNA, 25 bp, Artificial
  probe
  misc_feature (1)..(25): SEQ ID NO: 6950; WAN024C3J; Start 306; Stop 330
tttcgctcttcgtaataaacctgaa

SEQ ID NO: 454355 - DNA, 25 bp, Artificial
  probe
  misc_feature (1)..(25): SEQ ID NO: 6950; WAN024C3J; Start 23; Stop 47
ggatgaaacttgagactatggattt

SEQ ID NO: 454356 - DNA, 25 bp, Artificial
  probe
  misc_feature (1)..(25): SEQ ID NO: 6950; WAN024C3J; Start 494; Stop 518
tgttacaaggcgatattccaaagtt

SEQ ID NO: 454357 - DNA, 25 bp, Artificial
  probe
  misc_feature (1)..(25): SEQ ID NO: 6950; WAN024C3J; Start 308; Stop 332
tcgctcttcgtaataaacctgaatt

SEQ ID NO: 454358 - DNA, 25 bp, Artificial
  probe
  misc_feature (1)..(25): SEQ ID NO: 6950; WAN024C3J; Start 95; Stop 119
aagaacgtatggatagtggagatat

SEQ ID NO: 454359 - DNA, 25 bp, Artificial
  probe
  misc_feature (1)..(25): SEQ ID NO: 6951; WAN024AXL; Start 497; Stop 521
ttatcattaagcgtcttccagttcg

SEQ ID NO: 454360 - DNA, 25 bp, Artificial
  probe
  misc_feature (1)..(25): SEQ ID NO: 6951; WAN024AXL; Start 198; Stop 222
ggactatatcaatcaattcgctgag

SEQ ID NO: 454361 - DNA, 25 bp, Artificial
  probe
  misc_feature (1)..(25): SEQ ID NO: 6951; WAN024AXL; Start 199; Stop 223
gactatatcaatcaattcgctgagt

SEQ ID NO: 454362 - DNA, 25 bp, Artificial
  probe
  misc_feature (1)..(25): SEQ ID NO: 6951; WAN024AXL; Start 362; Stop 386
ctgatatgaaggatgttgagcctaa

SEQ ID NO: 454363 - DNA, 25 bp, Artificial
  probe
  misc_feature (1)..(25): SEQ ID NO: 6951; WAN024AXL; Start 200; Stop 224
actatatcaatcaattcgctgagtt

SEQ ID NO: 454364 - DNA, 25 bp, Artificial
  probe
  misc_feature (1)..(25): SEQ ID NO: 6951; WAN024AXL; Start 498; Stop 522
tatcattaagcgtcttccagttcgt

SEQ ID NO: 454365 - DNA, 25 bp, Artificial
  probe
  misc_feature (1)..(25): SEQ ID NO: 6951; WAN024AXL; Start 613; Stop 637
gttgaagttgagcttggtattgatt

SEQ ID NO: 454366 - DNA, 25 bp, Artificial
  probe
  misc_feature (1)..(25): SEQ ID NO: 6951; WAN024AXL; Start 389; Stop 413
atctggaagaacaggctatcaagtt

SEQ ID NO: 454367 - DNA, 25 bp, Artificial
  probe
  misc_feature (1)..(25): SEQ ID NO: 6951; WAN024AXL; Start 388; Stop 412
aatctggaagaacaggctatcaagt

SEQ ID NO: 454368 - DNA, 25 bp, Artificial
  probe
  misc_feature (1)..(25): SEQ ID NO: 6951; WAN024AXL; Start 123; Stop 147
ttgtgagaatgtagaaggtatcaat

SEQ ID NO: 454369 - DNA, 25 bp, Artificial
  probe
  misc_feature (1)..(25): SEQ ID NO: 6951; WAN024AXL; Start 122; Stop 146
attgtgagaatgtagaaggtatcaa

SEQ ID NO: 454370 - DNA, 25 bp, Artificial
  probe
  misc_feature (1)..(25): SEQ ID NO: 6951; WAN024AXL; Start 488; Stop 512
ttcctccatttatcattaagcgtct

SEQ ID NO: 454371 - DNA, 25 bp, Artificial
  probe
  misc_feature (1)..(25): SEQ ID NO: 6951; WAN024AXL; Start 493; Stop 517
ccatttatcattaagcgtcttccag

SEQ ID NO: 454372 - DNA, 25 bp, Artificial
  probe
  misc_feature (1)..(25): SEQ ID NO: 6951; WAN024AXL; Start 489; Stop 513
tcctccatttatcattaagcgtctt

SEQ ID NO: 454373 - DNA, 25 bp, Artificial
  probe
  misc_feature (1)..(25): SEQ ID NO: 6951; WAN024AXL; Start 499; Stop 523
atcattaagcgtcttccagttcgtt

SEQ ID NO: 454374 - DNA, 25 bp, Artificial
  probe
  misc_feature (1)..(25): SEQ ID NO: 6951; WAN024AXL; Start 492; Stop 516
tccatttatcattaagcgtcttcca

SEQ ID NO: 454375 - DNA, 25 bp, Artificial
  probe
  misc_feature (1)..(25): SEQ ID NO: 6951; WAN024AXL; Start 491; Stop 515
ctccatttatcattaagcgtcttcc

SEQ ID NO: 454376 - DNA, 25 bp, Artificial
  probe
  misc_feature (1)..(25): SEQ ID NO: 6951; WAN024AXL; Start 490; Stop 514
cctccatttatcattaagcgtcttc

SEQ ID NO: 454377 - DNA, 25 bp, Artificial
  probe
  misc_feature (1)..(25): SEQ ID NO: 6951; WAN024AXL; Start 487; Stop 511
cttcctccatttatcattaagcgtc

SEQ ID NO: 454378 - DNA, 25 bp, Artificial
  probe
  misc_feature (1)..(25): SEQ ID NO: 6951; WAN024AXL; Start 486; Stop 510
acttcctccatttatcattaagcgt

SEQ ID NO: 454379 - DNA, 25 bp, Artificial
  probe
  misc_feature (1)..(25): SEQ ID NO: 6951; WAN024AXL; Start 494; Stop 518
catttatcattaagcgtcttccagt

SEQ ID NO: 454380 - DNA, 25 bp, Artificial
  probe
  misc_feature (1)..(25): SEQ ID NO: 6951; WAN024AXL; Start 196; Stop 220
tgggactatatcaatcaattcgctg

SEQ ID NO: 454381 - DNA, 25 bp, Artificial
  probe
  misc_feature (1)..(25): SEQ ID NO: 6951; WAN024AXL; Start 496; Stop 520
tttatcattaagcgtcttccagttc

SEQ ID NO: 454382 - DNA, 25 bp, Artificial
  probe
  misc_feature (1)..(25): SEQ ID NO: 6951; WAN024AXL; Start 485; Stop 509
aacttcctccatttatcattaagcg

SEQ ID NO: 454383 - DNA, 25 bp, Artificial
  probe
  misc_feature (1)..(25): SEQ ID NO: 6951; WAN024AXL; Start 117; Stop 141
catctattgtgagaatgtagaaggt

SEQ ID NO: 454384 - DNA, 25 bp, Artificial
  probe
  misc_feature (1)..(25): SEQ ID NO: 6951; WAN024AXL; Start 612; Stop 636
cgttgaagttgagcttggtattgat

SEQ ID NO: 454385 - DNA, 25 bp, Artificial
  probe
  misc_feature (1)..(25): SEQ ID NO: 6951; WAN024AXL; Start 195; Stop 219
ttgggactatatcaatcaattcgct

SEQ ID NO: 454386 - DNA, 25 bp, Artificial
  probe
  misc_feature (1)..(25): SEQ ID NO: 6951; WAN024AXL; Start 194; Stop 218
tttgggactatatcaatcaattcgc

SEQ ID NO: 454387 - DNA, 25 bp, Artificial
  probe
  misc_feature (1)..(25): SEQ ID NO: 6951; WAN024AXL; Start 495; Stop 519
atttatcattaagcgtcttccagtt

SEQ ID NO: 454388 - DNA, 25 bp, Artificial
  probe
  misc_feature (1)..(25): SEQ ID NO: 6951; WAN024AXL; Start 390; Stop 414
tctggaagaacaggctatcaagttg

SEQ ID NO: 454389 - DNA, 25 bp, Artificial
  probe
  misc_feature (1)..(25): SEQ ID NO: 6951; WAN024AXL; Start 205; Stop 229
atcaatcaattcgctgagtttaaca

SEQ ID NO: 454390 - DNA, 25 bp, Artificial
  probe
  misc_feature (1)..(25): SEQ ID NO: 6951; WAN024AXL; Start 502; Stop 526
attaagcgtcttccagttcgtttaa

SEQ ID NO: 454391 - DNA, 25 bp, Artificial
  probe
  misc_feature (1)..(25): SEQ ID NO: 6951; WAN024AXL; Start 197; Stop 221
gggactatatcaatcaattcgctga

SEQ ID NO: 454392 - DNA, 25 bp, Artificial
  probe
  misc_feature (1)..(25): SEQ ID NO: 6952; WAN024F4F; Start 107; Stop 131
ttggtggtaatatctactgtgagga

SEQ ID NO: 454393 - DNA, 25 bp, Artificial
  probe
  misc_feature (1)..(25): SEQ ID NO: 6952; WAN024F4F; Start 106; Stop 130
attggtggtaatatctactgtgagg

SEQ ID NO: 454394 - DNA, 25 bp, Artificial
  probe
  misc_feature (1)..(25): SEQ ID NO: 6952; WAN024F4F; Start 108; Stop 132
tggtggtaatatctactgtgaggac

SEQ ID NO: 454395 - DNA, 25 bp, Artificial
  probe
  misc_feature (1)..(25): SEQ ID NO: 6952; WAN024F4F; Start 91; Stop 115
gataagcgtaatcatattggtggta

SEQ ID NO: 454396 - DNA, 25 bp, Artificial
  probe
  misc_feature (1)..(25): SEQ ID NO: 6952; WAN024F4F; Start 93; Stop 117
taagcgtaatcatattggtggtaat

SEQ ID NO: 454397 - DNA, 25 bp, Artificial
  probe
  misc_feature (1)..(25): SEQ ID NO: 6952; WAN024F4F; Start 92; Stop 116
ataagcgtaatcatattggtggtaa

SEQ ID NO: 454398 - DNA, 25 bp, Artificial
  probe
  misc_feature (1)..(25): SEQ ID NO: 6952; WAN024F4F; Start 109; Stop 133
ggtggtaatatctactgtgaggacg

SEQ ID NO: 454399 - DNA, 25 bp, Artificial
  probe
  misc_feature (1)..(25): SEQ ID NO: 6952; WAN024F4F; Start 644; Stop 668
ccaatcgtcaagaattagagacttc

SEQ ID NO: 454400 - DNA, 25 bp, Artificial
  probe
  misc_feature (1)..(25): SEQ ID NO: 6952; WAN024F4F; Start 94; Stop 118
aagcgtaatcatattggtggtaata

SEQ ID NO: 454401 - DNA, 25 bp, Artificial
  probe
  misc_feature (1)..(25): SEQ ID NO: 6952; WAN024F4F; Start 643; Stop 667
gccaatcgtcaagaattagagactt

SEQ ID NO: 454402 - DNA, 25 bp, Artificial
  probe
  misc_feature (1)..(25): SEQ ID NO: 6952; WAN024F4F; Start 224; Stop 248
ttaacaactatatcaactcgcctat

SEQ ID NO: 454403 - DNA, 25 bp, Artificial
  probe
  misc_feature (1)..(25): SEQ ID NO: 6952; WAN024F4F; Start 641; Stop 665
ttgccaatcgtcaagaattagagac

SEQ ID NO: 454404 - DNA, 25 bp, Artificial
  probe
  misc_feature (1)..(25): SEQ ID NO: 6952; WAN024F4F; Start 234; Stop 258
tatcaactcgcctatagccaattac

SEQ ID NO: 454405 - DNA, 25 bp, Artificial
  probe
  misc_feature (1)..(25): SEQ ID NO: 6952; WAN024F4F; Start 233; Stop 257
atatcaactcgcctatagccaatta

SEQ ID NO: 454406 - DNA, 25 bp, Artificial
  probe
  misc_feature (1)..(25): SEQ ID NO: 6952; WAN024F4F; Start 232; Stop 256
tatatcaactcgcctatagccaatt

SEQ ID NO: 454407 - DNA, 25 bp, Artificial
  probe
  misc_feature (1)..(25): SEQ ID NO: 6952; WAN024F4F; Start 398; Stop 422
aacaagctattaagttgattggtcc

SEQ ID NO: 454408 - DNA, 25 bp, Artificial
  probe
  misc_feature (1)..(25): SEQ ID NO: 6952; WAN024F4F; Start 115; Stop 139
aatatctactgtgaggacgttgaag

SEQ ID NO: 454409 - DNA, 25 bp, Artificial
  probe
  misc_feature (1)..(25): SEQ ID NO: 6952; WAN024F4F; Start 113; Stop 137
gtaatatctactgtgaggacgttga

SEQ ID NO: 454410 - DNA, 25 bp, Artificial
  probe
  misc_feature (1)..(25): SEQ ID NO: 6952; WAN024F4F; Start 112; Stop 136
ggtaatatctactgtgaggacgttg

SEQ ID NO: 454411 - DNA, 25 bp, Artificial
  probe
  misc_feature (1)..(25): SEQ ID NO: 6952; WAN024F4F; Start 314; Stop 338
gaaccaagactcctcaagaagtgaa

SEQ ID NO: 454412 - DNA, 25 bp, Artificial
  probe
  misc_feature (1)..(25): SEQ ID NO: 6952; WAN024F4F; Start 105; Stop 129
tattggtggtaatatctactgtgag

SEQ ID NO: 454413 - DNA, 25 bp, Artificial
  probe
  misc_feature (1)..(25): SEQ ID NO: 6952; WAN024F4F; Start 642; Stop 666
tgccaatcgtcaagaattagagact

SEQ ID NO: 454414 - DNA, 25 bp, Artificial
  probe
  misc_feature (1)..(25): SEQ ID NO: 6952; WAN024F4F; Start 482; Stop 506
cagacctcccaccatttatcattaa

SEQ ID NO: 454415 - DNA, 25 bp, Artificial
  probe
  misc_feature (1)..(25): SEQ ID NO: 6952; WAN024F4F; Start 8; Stop 32
attatttaatcgttggtgctggttt

SEQ ID NO: 454416 - DNA, 25 bp, Artificial
  probe
  misc_feature (1)..(25): SEQ ID NO: 6952; WAN024F4F; Start 111; Stop 135
tggtaatatctactgtgaggacgtt

SEQ ID NO: 454417 - DNA, 25 bp, Artificial
  probe
  misc_feature (1)..(25): SEQ ID NO: 6952; WAN024F4F; Start 114; Stop 138
taatatctactgtgaggacgttgaa

SEQ ID NO: 454418 - DNA, 25 bp, Artificial
  probe
  misc_feature (1)..(25): SEQ ID NO: 6952; WAN024F4F; Start 9; Stop 33
ttatttaatcgttggtgctggtttg

SEQ ID NO: 454419 - DNA, 25 bp, Artificial
  probe
  misc_feature (1)..(25): SEQ ID NO: 6952; WAN024F4F; Start 255; Stop 279
ttacaagggcagtctttacaatctt

SEQ ID NO: 454420 - DNA, 25 bp, Artificial
  probe
  misc_feature (1)..(25): SEQ ID NO: 6952; WAN024F4F; Start 254; Stop 278
attacaagggcagtctttacaatct

SEQ ID NO: 454421 - DNA, 25 bp, Artificial
  probe
  misc_feature (1)..(25): SEQ ID NO: 6952; WAN024F4F; Start 711; Stop 735
tgattataagcatggtgagttagaa

SEQ ID NO: 454422 - DNA, 25 bp, Artificial
  probe
  misc_feature (1)..(25): SEQ ID NO: 6952; WAN024F4F; Start 710; Stop 734
ttgattataagcatggtgagttaga

SEQ ID NO: 454423 - DNA, 25 bp, Artificial
  probe
  misc_feature (1)..(25): SEQ ID NO: 6952; WAN024F4F; Start 399; Stop 423
acaagctattaagttgattggtccg

SEQ ID NO: 454424 - DNA, 25 bp, Artificial
  probe
  misc_feature (1)..(25): SEQ ID NO: 6952; WAN024F4F; Start 396; Stop 420
agaacaagctattaagttgattggt

SEQ ID NO: 454425 - DNA, 25 bp, Artificial
  probe
  misc_feature (1)..(25): SEQ ID NO: 6953; WAN024DHT; Start 83; Stop 107
ttcataacggtatagagaccaactc

SEQ ID NO: 454426 - DNA, 25 bp, Artificial
  probe
  misc_feature (1)..(25): SEQ ID NO: 6953; WAN024DHT; Start 2; Stop 26
tgtattacagtaagtacctgacgaa

SEQ ID NO: 454427 - DNA, 25 bp, Artificial
  probe
  misc_feature (1)..(25): SEQ ID NO: 6953; WAN024DHT; Start 1; Stop 25
atgtattacagtaagtacctgacga

SEQ ID NO: 454428 - DNA, 25 bp, Artificial
  probe
  misc_feature (1)..(25): SEQ ID NO: 6953; WAN024DHT; Start 86; Stop 110
ataacggtatagagaccaactcctc

SEQ ID NO: 454429 - DNA, 25 bp, Artificial
  probe
  misc_feature (1)..(25): SEQ ID NO: 6953; WAN024DHT; Start 85; Stop 109
cataacggtatagagaccaactcct

SEQ ID NO: 454430 - DNA, 25 bp, Artificial
  probe
  misc_feature (1)..(25): SEQ ID NO: 6953; WAN024DHT; Start 84; Stop 108
tcataacggtatagagaccaactcc

SEQ ID NO: 454431 - DNA, 25 bp, Artificial
  probe
  misc_feature (1)..(25): SEQ ID NO: 6953; WAN024DHT; Start 48; Stop 72
tattgagactggtattgggatgact

SEQ ID NO: 454432 - DNA, 25 bp, Artificial
  probe
  misc_feature (1)..(25): SEQ ID NO: 6953; WAN024DHT; Start 47; Stop 71
gtattgagactggtattgggatgac

SEQ ID NO: 454433 - DNA, 25 bp, Artificial
  probe
  misc_feature (1)..(25): SEQ ID NO: 6953; WAN024DHT; Start 49; Stop 73
attgagactggtattgggatgactt

SEQ ID NO: 454434 - DNA, 25 bp, Artificial
  probe
  misc_feature (1)..(25): SEQ ID NO: 6953; WAN024DHT; Start 50; Stop 74
ttgagactggtattgggatgacttt

SEQ ID NO: 454435 - DNA, 25 bp, Artificial
  probe
  misc_feature (1)..(25): SEQ ID NO: 6953; WAN024DHT; Start 46; Stop 70
ggtattgagactggtattgggatga

SEQ ID NO: 454436 - DNA, 25 bp, Artificial
  probe
  misc_feature (1)..(25): SEQ ID NO: 6953; WAN024DHT; Start 41; Stop 65
caggtggtattgagactggtattgg

SEQ ID NO: 454437 - DNA, 25 bp, Artificial
  probe
  misc_feature (1)..(25): SEQ ID NO: 6953; WAN024DHT; Start 45; Stop 69
tggtattgagactggtattgggatg

SEQ ID NO: 454438 - DNA, 25 bp, Artificial
  probe
  misc_feature (1)..(25): SEQ ID NO: 6953; WAN024DHT; Start 44; Stop 68
gtggtattgagactggtattgggat

SEQ ID NO: 454439 - DNA, 25 bp, Artificial
  probe
  misc_feature (1)..(25): SEQ ID NO: 6953; WAN024DHT; Start 51; Stop 75
tgagactggtattgggatgactttc

SEQ ID NO: 454440 - DNA, 25 bp, Artificial
  probe
  misc_feature (1)..(25): SEQ ID NO: 6953; WAN024DHT; Start 40; Stop 64
gcaggtggtattgagactggtattg

SEQ ID NO: 454441 - DNA, 25 bp, Artificial
  probe
  misc_feature (1)..(25): SEQ ID NO: 6953; WAN024DHT; Start 82; Stop 106
tttcataacggtatagagaccaact

SEQ ID NO: 454442 - DNA, 25 bp, Artificial
  probe
  misc_feature (1)..(25): SEQ ID NO: 6953; WAN024DHT; Start 59; Stop 83
gtattgggatgactttccacaattt

SEQ ID NO: 454443 - DNA, 25 bp, Artificial
  probe
  misc_feature (1)..(25): SEQ ID NO: 6953; WAN024DHT; Start 3; Stop 27
gtattacagtaagtacctgacgaaa

SEQ ID NO: 454444 - DNA, 25 bp, Artificial
  probe
  misc_feature (1)..(25): SEQ ID NO: 6953; WAN024DHT; Start 58; Stop 82
ggtattgggatgactttccacaatt

SEQ ID NO: 454445 - DNA, 25 bp, Artificial
  probe
  misc_feature (1)..(25): SEQ ID NO: 6953; WAN024DHT; Start 87; Stop 111
taacggtatagagaccaactcctct

SEQ ID NO: 454446 - DNA, 25 bp, Artificial
  probe
  misc_feature (1)..(25): SEQ ID NO: 6953; WAN024DHT; Start 69; Stop 93
gactttccacaattttcataacggt

SEQ ID NO: 454447 - DNA, 25 bp, Artificial
  probe
  misc_feature (1)..(25): SEQ ID NO: 6953; WAN024DHT; Start 33; Stop 57
gatcttggcaggtggtattgagact

SEQ ID NO: 454448 - DNA, 25 bp, Artificial
  probe
  misc_feature (1)..(25): SEQ ID NO: 6953; WAN024DHT; Start 43; Stop 67
ggtggtattgagactggtattggga

SEQ ID NO: 454449 - DNA, 25 bp, Artificial
  probe
  misc_feature (1)..(25): SEQ ID NO: 6953; WAN024DHT; Start 42; Stop 66
aggtggtattgagactggtattggg

SEQ ID NO: 454450 - DNA, 25 bp, Artificial
  probe
  misc_feature (1)..(25): SEQ ID NO: 6953; WAN024DHT; Start 70; Stop 94
actttccacaattttcataacggta

SEQ ID NO: 454451 - DNA, 25 bp, Artificial
  probe
  misc_feature (1)..(25): SEQ ID NO: 6953; WAN024DHT; Start 39; Stop 63
ggcaggtggtattgagactggtatt

SEQ ID NO: 454452 - DNA, 25 bp, Artificial
  probe
  misc_feature (1)..(25): SEQ ID NO: 6953; WAN024DHT; Start 52; Stop 76
gagactggtattgggatgactttcc

SEQ ID NO: 454453 - DNA, 25 bp, Artificial
  probe
  misc_feature (1)..(25): SEQ ID NO: 6953; WAN024DHT; Start 57; Stop 81
tggtattgggatgactttccacaat

SEQ ID NO: 454454 - DNA, 25 bp, Artificial
  probe
  misc_feature (1)..(25): SEQ ID NO: 6953; WAN024DHT; Start 32; Stop 56
tgatcttggcaggtggtattgagac

SEQ ID NO: 454455 - DNA, 25 bp, Artificial
  probe
  misc_feature (1)..(25): SEQ ID NO: 6953; WAN024DHT; Start 31; Stop 55
gtgatcttggcaggtggtattgaga

SEQ ID NO: 454456 - DNA, 25 bp, Artificial
  probe
  misc_feature (1)..(25): SEQ ID NO: 6953; WAN024DHT; Start 68; Stop 92
tgactttccacaattttcataacgg

SEQ ID NO: 454457 - DNA, 25 bp, Artificial
  probe
  misc_feature (1)..(25): SEQ ID NO: 6953; WAN024DHT; Start 34; Stop 58
atcttggcaggtggtattgagactg

SEQ ID NO: 454458 - DNA, 25 bp, Artificial
  probe
  misc_feature (1)..(25): SEQ ID NO: 6954; WAN024GJE; Start 280; Stop 304
actaattctacgattgttgcgattg

SEQ ID NO: 454459 - DNA, 25 bp, Artificial
  probe
  misc_feature (1)..(25): SEQ ID NO: 6954; WAN024GJE; Start 279; Stop 303
gactaattctacgattgttgcgatt

SEQ ID NO: 454460 - DNA, 25 bp, Artificial
  probe
  misc_feature (1)..(25): SEQ ID NO: 6954; WAN024GJE; Start 275; Stop 299
ctctgactaattctacgattgttgc

SEQ ID NO: 454461 - DNA, 25 bp, Artificial
  probe
  misc_feature (1)..(25): SEQ ID NO: 6954; WAN024GJE; Start 278; Stop 302
tgactaattctacgattgttgcgat

SEQ ID NO: 454462 - DNA, 25 bp, Artificial
  probe
  misc_feature (1)..(25): SEQ ID NO: 6954; WAN024GJE; Start 268; Stop 292
acaacttctctgactaattctacga

SEQ ID NO: 454463 - DNA, 25 bp, Artificial
  probe
  misc_feature (1)..(25): SEQ ID NO: 6954; WAN024GJE; Start 254; Stop 278
ctatgacaggttctacaacttctct

SEQ ID NO: 454464 - DNA, 25 bp, Artificial
  probe
  misc_feature (1)..(25): SEQ ID NO: 6954; WAN024GJE; Start 253; Stop 277
tctatgacaggttctacaacttctc

SEQ ID NO: 454465 - DNA, 25 bp, Artificial
  probe
  misc_feature (1)..(25): SEQ ID NO: 6954; WAN024GJE; Start 250; Stop 274
gcttctatgacaggttctacaactt

SEQ ID NO: 454466 - DNA, 25 bp, Artificial
  probe
  misc_feature (1)..(25): SEQ ID NO: 6954; WAN024GJE; Start 252; Stop 276
ttctatgacaggttctacaacttct

SEQ ID NO: 454467 - DNA, 25 bp, Artificial
  probe
  misc_feature (1)..(25): SEQ ID NO: 6954; WAN024GJE; Start 281; Stop 305
ctaattctacgattgttgcgattgc

SEQ ID NO: 454468 - DNA, 25 bp, Artificial
  probe
  misc_feature (1)..(25): SEQ ID NO: 6954; WAN024GJE; Start 277; Stop 301
ctgactaattctacgattgttgcga

SEQ ID NO: 454469 - DNA, 25 bp, Artificial
  probe
  misc_feature (1)..(25): SEQ ID NO: 6954; WAN024GJE; Start 276; Stop 300
tctgactaattctacgattgttgcg

SEQ ID NO: 454470 - DNA, 25 bp, Artificial
  probe
  misc_feature (1)..(25): SEQ ID NO: 6954; WAN024GJE; Start 261; Stop 285
aggttctacaacttctctgactaat

SEQ ID NO: 454471 - DNA, 25 bp, Artificial
  probe
  misc_feature (1)..(25): SEQ ID NO: 6954; WAN024GJE; Start 251; Stop 275
cttctatgacaggttctacaacttc

SEQ ID NO: 454472 - DNA, 25 bp, Artificial
  probe
  misc_feature (1)..(25): SEQ ID NO: 6954; WAN024GJE; Start 274; Stop 298
tctctgactaattctacgattgttg

SEQ ID NO: 454473 - DNA, 25 bp, Artificial
  probe
  misc_feature (1)..(25): SEQ ID NO: 6954; WAN024GJE; Start 272; Stop 296
cttctctgactaattctacgattgt

SEQ ID NO: 454474 - DNA, 25 bp, Artificial
  probe
  misc_feature (1)..(25): SEQ ID NO: 6954; WAN024GJE; Start 271; Stop 295
acttctctgactaattctacgattg

SEQ ID NO: 454475 - DNA, 25 bp, Artificial
  probe
  misc_feature (1)..(25): SEQ ID NO: 6954; WAN024GJE; Start 269; Stop 293
caacttctctgactaattctacgat

SEQ ID NO: 454476 - DNA, 25 bp, Artificial
  probe
  misc_feature (1)..(25): SEQ ID NO: 6954; WAN024GJE; Start 260; Stop 284
caggttctacaacttctctgactaa

SEQ ID NO: 454477 - DNA, 25 bp, Artificial
  probe
  misc_feature (1)..(25): SEQ ID NO: 6954; WAN024GJE; Start 255; Stop 279
tatgacaggttctacaacttctctg

SEQ ID NO: 454478 - DNA, 25 bp, Artificial
  probe
  misc_feature (1)..(25): SEQ ID NO: 6954; WAN024GJE; Start 259; Stop 283
acaggttctacaacttctctgacta

SEQ ID NO: 454479 - DNA, 25 bp, Artificial
  probe
  misc_feature (1)..(25): SEQ ID NO: 6954; WAN024GJE; Start 262; Stop 286
ggttctacaacttctctgactaatt

SEQ ID NO: 454480 - DNA, 25 bp, Artificial
  probe
  misc_feature (1)..(25): SEQ ID NO: 6954; WAN024GJE; Start 267; Stop 291
tacaacttctctgactaattctacg

SEQ ID NO: 454481 - DNA, 25 bp, Artificial
  probe
  misc_feature (1)..(25): SEQ ID NO: 6954; WAN024GJE; Start 256; Stop 280
atgacaggttctacaacttctctga

SEQ ID NO: 454482 - DNA, 25 bp, Artificial
  probe
  misc_feature (1)..(25): SEQ ID NO: 6954; WAN024GJE; Start 273; Stop 297
ttctctgactaattctacgattgtt

SEQ ID NO: 454483 - DNA, 25 bp, Artificial
  probe
  misc_feature (1)..(25): SEQ ID NO: 6954; WAN024GJE; Start 270; Stop 294
aacttctctgactaattctacgatt

SEQ ID NO: 454484 - DNA, 25 bp, Artificial
  probe
  misc_feature (1)..(25): SEQ ID NO: 6954; WAN024GJE; Start 258; Stop 282
gacaggttctacaacttctctgact

SEQ ID NO: 454485 - DNA, 25 bp, Artificial
  probe
  misc_feature (1)..(25): SEQ ID NO: 6954; WAN024GJE; Start 282; Stop 306
taattctacgattgttgcgattgcg

SEQ ID NO: 454486 - DNA, 25 bp, Artificial
  probe
  misc_feature (1)..(25): SEQ ID NO: 6954; WAN024GJE; Start 248; Stop 272
gagcttctatgacaggttctacaac

SEQ ID NO: 454487 - DNA, 25 bp, Artificial
  probe
  misc_feature (1)..(25): SEQ ID NO: 6954; WAN024GJE; Start 257; Stop 281
tgacaggttctacaacttctctgac

SEQ ID NO: 454488 - DNA, 25 bp, Artificial
  probe
  misc_feature (1)..(25): SEQ ID NO: 6954; WAN024GJE; Start 249; Stop 273
agcttctatgacaggttctacaact

SEQ ID NO: 454489 - DNA, 25 bp, Artificial
  probe
  misc_feature (1)..(25): SEQ ID NO: 6954; WAN024GJE; Start 162; Stop 186
ggtaattccttcgggtttatctaca

SEQ ID NO: 454490 - DNA, 25 bp, Artificial
  probe
  misc_feature (1)..(25): SEQ ID NO: 6954; WAN024GJE; Start 245; Stop 269
aaggagcttctatgacaggttctac

SEQ ID NO: 454491 - DNA, 25 bp, Artificial
  probe
  misc_feature (1)..(25): SEQ ID NO: 6955; WAN024BKF; Start 7; Stop 31
ttttacgagtcagtatcttgggata

SEQ ID NO: 454492 - DNA, 25 bp, Artificial
  probe
  misc_feature (1)..(25): SEQ ID NO: 6955; WAN024BKF; Start 54; Stop 78
ttttgactacttgttaaaactgggg

SEQ ID NO: 454493 - DNA, 25 bp, Artificial
  probe
  misc_feature (1)..(25): SEQ ID NO: 6955; WAN024BKF; Start 8; Stop 32
tttacgagtcagtatcttgggatac

SEQ ID NO: 454494 - DNA, 25 bp, Artificial
  probe
  misc_feature (1)..(25): SEQ ID NO: 6956; WAN024BQJ; Start 1118; Stop 1142
tgaagacagttatagacgagacaag

SEQ ID NO: 454495 - DNA, 25 bp, Artificial
  probe
  misc_feature (1)..(25): SEQ ID NO: 6956; WAN024BQJ; Start 1116; Stop 1140
cttgaagacagttatagacgagaca

SEQ ID NO: 454496 - DNA, 25 bp, Artificial
  probe
  misc_feature (1)..(25): SEQ ID NO: 6956; WAN024BQJ; Start 1119; Stop 1143
gaagacagttatagacgagacaagg

SEQ ID NO: 454497 - DNA, 25 bp, Artificial
  probe
  misc_feature (1)..(25): SEQ ID NO: 6956; WAN024BQJ; Start 1115; Stop 1139
ccttgaagacagttatagacgagac

SEQ ID NO: 454498 - DNA, 25 bp, Artificial
  probe
  misc_feature (1)..(25): SEQ ID NO: 6956; WAN024BQJ; Start 879; Stop 903
ggataataagatgattgctggtgct

SEQ ID NO: 454499 - DNA, 25 bp, Artificial
  probe
  misc_feature (1)..(25): SEQ ID NO: 6956; WAN024BQJ; Start 878; Stop 902
aggataataagatgattgctggtgc

SEQ ID NO: 454500 - DNA, 25 bp, Artificial
  probe
  misc_feature (1)..(25): SEQ ID NO: 6956; WAN024BQJ; Start 880; Stop 904
gataataagatgattgctggtgctt

SEQ ID NO: 454501 - DNA, 25 bp, Artificial
  probe
  misc_feature (1)..(25): SEQ ID NO: 6956; WAN024BQJ; Start 877; Stop 901
aaggataataagatgattgctggtg

SEQ ID NO: 454502 - DNA, 25 bp, Artificial
  probe
  misc_feature (1)..(25): SEQ ID NO: 6956; WAN024BQJ; Start 141; Stop 165
tcaaccacgagttccatacaataat

SEQ ID NO: 454503 - DNA, 25 bp, Artificial
  probe
  misc_feature (1)..(25): SEQ ID NO: 6956; WAN024BQJ; Start 140; Stop 164
atcaaccacgagttccatacaataa

SEQ ID NO: 454504 - DNA, 25 bp, Artificial
  probe
  misc_feature (1)..(25): SEQ ID NO: 6956; WAN024BQJ; Start 139; Stop 163
aatcaaccacgagttccatacaata

SEQ ID NO: 454505 - DNA, 25 bp, Artificial
  probe
  misc_feature (1)..(25): SEQ ID NO: 6956; WAN024BQJ; Start 138; Stop 162
taatcaaccacgagttccatacaat

SEQ ID NO: 454506 - DNA, 25 bp, Artificial
  probe
  misc_feature (1)..(25): SEQ ID NO: 6956; WAN024BQJ; Start 137; Stop 161
ataatcaaccacgagttccatacaa

SEQ ID NO: 454507 - DNA, 25 bp, Artificial
  probe
  misc_feature (1)..(25): SEQ ID NO: 6956; WAN024BQJ; Start 1117; Stop 1141
ttgaagacagttatagacgagacaa

SEQ ID NO: 454508 - DNA, 25 bp, Artificial
  probe
  misc_feature (1)..(25): SEQ ID NO: 6956; WAN024BQJ; Start 136; Stop 160
cataatcaaccacgagttccataca

SEQ ID NO: 454509 - DNA, 25 bp, Artificial
  probe
  misc_feature (1)..(25): SEQ ID NO: 6956; WAN024BQJ; Start 142; Stop 166
caaccacgagttccatacaataata

SEQ ID NO: 454510 - DNA, 25 bp, Artificial
  probe
  misc_feature (1)..(25): SEQ ID NO: 6956; WAN024BQJ; Start 144; Stop 168
accacgagttccatacaataataat

SEQ ID NO: 454511 - DNA, 25 bp, Artificial
  probe
  misc_feature (1)..(25): SEQ ID NO: 6956; WAN024BQJ; Start 1114; Stop 1138
gccttgaagacagttatagacgaga

SEQ ID NO: 454512 - DNA, 25 bp, Artificial
  probe
  misc_feature (1)..(25): SEQ ID NO: 6956; WAN024BQJ; Start 143; Stop 167
aaccacgagttccatacaataataa

SEQ ID NO: 454513 - DNA, 25 bp, Artificial
  probe
  misc_feature (1)..(25): SEQ ID NO: 6956; WAN024BQJ; Start 976; Stop 1000
gaaggttacatgcgacaactaattg

SEQ ID NO: 454514 - DNA, 25 bp, Artificial
  probe
  misc_feature (1)..(25): SEQ ID NO: 6956; WAN024BQJ; Start 135; Stop 159
gcataatcaaccacgagttccatac

SEQ ID NO: 454515 - DNA, 25 bp, Artificial
  probe
  misc_feature (1)..(25): SEQ ID NO: 6956; WAN024BQJ; Start 975; Stop 999
tgaaggttacatgcgacaactaatt

SEQ ID NO: 454516 - DNA, 25 bp, Artificial
  probe
  misc_feature (1)..(25): SEQ ID NO: 6956; WAN024BQJ; Start 978; Stop 1002
aggttacatgcgacaactaattgaa

SEQ ID NO: 454517 - DNA, 25 bp, Artificial
  probe
  misc_feature (1)..(25): SEQ ID NO: 6956; WAN024BQJ; Start 977; Stop 1001
aaggttacatgcgacaactaattga

SEQ ID NO: 454518 - DNA, 25 bp, Artificial
  probe
  misc_feature (1)..(25): SEQ ID NO: 6956; WAN024BQJ; Start 974; Stop 998
ttgaaggttacatgcgacaactaat

SEQ ID NO: 454519 - DNA, 25 bp, Artificial
  probe
  misc_feature (1)..(25): SEQ ID NO: 6956; WAN024BQJ; Start 876; Stop 900
taaggataataagatgattgctggt

SEQ ID NO: 454520 - DNA, 25 bp, Artificial
  probe
  misc_feature (1)..(25): SEQ ID NO: 6956; WAN024BQJ; Start 904; Stop 928
tttgttgattgggataataccgcta

SEQ ID NO: 454521 - DNA, 25 bp, Artificial
  probe
  misc_feature (1)..(25): SEQ ID NO: 6956; WAN024BQJ; Start 77; Stop 101
atggagaaggatttactgaatggac

SEQ ID NO: 454522 - DNA, 25 bp, Artificial
  probe
  misc_feature (1)..(25): SEQ ID NO: 6956; WAN024BQJ; Start 79; Stop 103
ggagaaggatttactgaatggacta

SEQ ID NO: 454523 - DNA, 25 bp, Artificial
  probe
  misc_feature (1)..(25): SEQ ID NO: 6956; WAN024BQJ; Start 828; Stop 852
taggagagattatgatgcaacatgg

SEQ ID NO: 454524 - DNA, 25 bp, Artificial
  probe
  misc_feature (1)..(25): SEQ ID NO: 6956; WAN024BQJ; Start 93; Stop 117
tgaatggactaatgtaaagaaagcc

SEQ ID NO: 454525 - DNA, 25 bp, Artificial
  probe
  misc_feature (1)..(25): SEQ ID NO: 6956; WAN024BQJ; Start 825; Stop 849
agataggagagattatgatgcaaca

SEQ ID NO: 454526 - DNA, 25 bp, Artificial
  probe
  misc_feature (1)..(25): SEQ ID NO: 6956; WAN024BQJ; Start 832; Stop 856
agagattatgatgcaacatggacta

SEQ ID NO: 454527 - DNA, 25 bp, Artificial
  probe
  misc_feature (1)..(25): SEQ ID NO: 6957; WAN024BHU; Start 109; Stop 133
ttaggctaccaacgagataatcaag

SEQ ID NO: 454528 - DNA, 25 bp, Artificial
  probe
  misc_feature (1)..(25): SEQ ID NO: 6957; WAN024BHU; Start 283; Stop 307
atgaatgaagttatcctatcggctg

SEQ ID NO: 454529 - DNA, 25 bp, Artificial
  probe
  misc_feature (1)..(25): SEQ ID NO: 6957; WAN024BHU; Start 285; Stop 309
gaatgaagttatcctatcggctgat

SEQ ID NO: 454530 - DNA, 25 bp, Artificial
  probe
  misc_feature (1)..(25): SEQ ID NO: 6957; WAN024BHU; Start 380; Stop 404
tctattctcattatgctcacactca

SEQ ID NO: 454531 - DNA, 25 bp, Artificial
  probe
  misc_feature (1)..(25): SEQ ID NO: 6957; WAN024BHU; Start 378; Stop 402
tctctattctcattatgctcacact

SEQ ID NO: 454532 - DNA, 25 bp, Artificial
  probe
  misc_feature (1)..(25): SEQ ID NO: 6957; WAN024BHU; Start 376; Stop 400
actctctattctcattatgctcaca

SEQ ID NO: 454533 - DNA, 25 bp, Artificial
  probe
  misc_feature (1)..(25): SEQ ID NO: 6957; WAN024BHU; Start 379; Stop 403
ctctattctcattatgctcacactc

SEQ ID NO: 454534 - DNA, 25 bp, Artificial
  probe
  misc_feature (1)..(25): SEQ ID NO: 6957; WAN024BHU; Start 377; Stop 401
ctctctattctcattatgctcacac

SEQ ID NO: 454535 - DNA, 25 bp, Artificial
  probe
  misc_feature (1)..(25): SEQ ID NO: 6957; WAN024BHU; Start 284; Stop 308
tgaatgaagttatcctatcggctga

SEQ ID NO: 454536 - DNA, 25 bp, Artificial
  probe
  misc_feature (1)..(25): SEQ ID NO: 6957; WAN024BHU; Start 215; Stop 239
atctaggattagttcattaccgacg

SEQ ID NO: 454537 - DNA, 25 bp, Artificial
  probe
  misc_feature (1)..(25): SEQ ID NO: 6957; WAN024BHU; Start 540; Stop 564
atcatcttattgtgagtggttgttc

SEQ ID NO: 454538 - DNA, 25 bp, Artificial
  probe
  misc_feature (1)..(25): SEQ ID NO: 6957; WAN024BHU; Start 286; Stop 310
aatgaagttatcctatcggctgatc

SEQ ID NO: 454539 - DNA, 25 bp, Artificial
  probe
  misc_feature (1)..(25): SEQ ID NO: 6957; WAN024BHU; Start 110; Stop 134
taggctaccaacgagataatcaagg

SEQ ID NO: 454540 - DNA, 25 bp, Artificial
  probe
  misc_feature (1)..(25): SEQ ID NO: 6957; WAN024BHU; Start 381; Stop 405
ctattctcattatgctcacactcat

SEQ ID NO: 454541 - DNA, 25 bp, Artificial
  probe
  misc_feature (1)..(25): SEQ ID NO: 6957; WAN024BHU; Start 541; Stop 565
tcatcttattgtgagtggttgttcc

SEQ ID NO: 454542 - DNA, 25 bp, Artificial
  probe
  misc_feature (1)..(25): SEQ ID NO: 6957; WAN024BHU; Start 538; Stop 562
gtatcatcttattgtgagtggttgt

SEQ ID NO: 454543 - DNA, 25 bp, Artificial
  probe
  misc_feature (1)..(25): SEQ ID NO: 6957; WAN024BHU; Start 537; Stop 561
tgtatcatcttattgtgagtggttg

SEQ ID NO: 454544 - DNA, 25 bp, Artificial
  probe
  misc_feature (1)..(25): SEQ ID NO: 6957; WAN024BHU; Start 375; Stop 399
aactctctattctcattatgctcac

SEQ ID NO: 454545 - DNA, 25 bp, Artificial
  probe
  misc_feature (1)..(25): SEQ ID NO: 6957; WAN024BHU; Start 282; Stop 306
catgaatgaagttatcctatcggct

SEQ ID NO: 454546 - DNA, 25 bp, Artificial
  probe
  misc_feature (1)..(25): SEQ ID NO: 6957; WAN024BHU; Start 165; Stop 189
ttgtgagttgacaggattatactgg

SEQ ID NO: 454547 - DNA, 25 bp, Artificial
  probe
  misc_feature (1)..(25): SEQ ID NO: 6957; WAN024BHU; Start 539; Stop 563
tatcatcttattgtgagtggttgtt

SEQ ID NO: 454548 - DNA, 25 bp, Artificial
  probe
  misc_feature (1)..(25): SEQ ID NO: 6957; WAN024BHU; Start 382; Stop 406
tattctcattatgctcacactcatg

SEQ ID NO: 454549 - DNA, 25 bp, Artificial
  probe
  misc_feature (1)..(25): SEQ ID NO: 6957; WAN024BHU; Start 164; Stop 188
attgtgagttgacaggattatactg

SEQ ID NO: 454550 - DNA, 25 bp, Artificial
  probe
  misc_feature (1)..(25): SEQ ID NO: 6957; WAN024BHU; Start 322; Stop 346
ctcatgtctgaagtagatgtcgttg

SEQ ID NO: 454551 - DNA, 25 bp, Artificial
  probe
  misc_feature (1)..(25): SEQ ID NO: 6957; WAN024BHU; Start 157; Stop 181
ccttattattgtgagttgacaggat

SEQ ID NO: 454552 - DNA, 25 bp, Artificial
  probe
  misc_feature (1)..(25): SEQ ID NO: 6957; WAN024BHU; Start 155; Stop 179
atccttattattgtgagttgacagg

SEQ ID NO: 454553 - DNA, 25 bp, Artificial
  probe
  misc_feature (1)..(25): SEQ ID NO: 6957; WAN024BHU; Start 108; Stop 132
tttaggctaccaacgagataatcaa

SEQ ID NO: 454554 - DNA, 25 bp, Artificial
  probe
  misc_feature (1)..(25): SEQ ID NO: 6957; WAN024BHU; Start 546; Stop 570
ttattgtgagtggttgttccctatc

SEQ ID NO: 454555 - DNA, 25 bp, Artificial
  probe
  misc_feature (1)..(25): SEQ ID NO: 6957; WAN024BHU; Start 545; Stop 569
cttattgtgagtggttgttccctat

SEQ ID NO: 454556 - DNA, 25 bp, Artificial
  probe
  misc_feature (1)..(25): SEQ ID NO: 6957; WAN024BHU; Start 107; Stop 131
atttaggctaccaacgagataatca

SEQ ID NO: 454557 - DNA, 25 bp, Artificial
  probe
  misc_feature (1)..(25): SEQ ID NO: 6957; WAN024BHU; Start 216; Stop 240
tctaggattagttcattaccgacgt

SEQ ID NO: 454558 - DNA, 25 bp, Artificial
  probe
  misc_feature (1)..(25): SEQ ID NO: 6957; WAN024BHU; Start 584; Stop 608
acagaagattggacataacagggta

SEQ ID NO: 454559 - DNA, 25 bp, Artificial
  probe
  misc_feature (1)..(25): SEQ ID NO: 6957; WAN024BHU; Start 583; Stop 607
tacagaagattggacataacagggt

SEQ ID NO: 454560 - DNA, 25 bp, Artificial
  probe
  misc_feature (1)..(25): SEQ ID NO: 6958; WAN024BHV; Start 537; Stop 561
tgtatcatcttattgcgagtggtta

SEQ ID NO: 454561 - DNA, 25 bp, Artificial
  probe
  misc_feature (1)..(25): SEQ ID NO: 6958; WAN024BHV; Start 135; Stop 159
taatcatatctcacacctcaatccg

SEQ ID NO: 454562 - DNA, 25 bp, Artificial
  probe
  misc_feature (1)..(25): SEQ ID NO: 6958; WAN024BHV; Start 142; Stop 166
atctcacacctcaatccgtattatt

SEQ ID NO: 454563 - DNA, 25 bp, Artificial
  probe
  misc_feature (1)..(25): SEQ ID NO: 6958; WAN024BHV; Start 139; Stop 163
catatctcacacctcaatccgtatt

SEQ ID NO: 454564 - DNA, 25 bp, Artificial
  probe
  misc_feature (1)..(25): SEQ ID NO: 6958; WAN024BHV; Start 489; Stop 513
ctgtcgtagtggctatatgttcaat

SEQ ID NO: 454565 - DNA, 25 bp, Artificial
  probe
  misc_feature (1)..(25): SEQ ID NO: 6958; WAN024BHV; Start 540; Stop 564
atcatcttattgcgagtggttattc

SEQ ID NO: 454566 - DNA, 25 bp, Artificial
  probe
  misc_feature (1)..(25): SEQ ID NO: 6958; WAN024BHV; Start 490; Stop 514
tgtcgtagtggctatatgttcaata

SEQ ID NO: 454567 - DNA, 25 bp, Artificial
  probe
  misc_feature (1)..(25): SEQ ID NO: 6958; WAN024BHV; Start 541; Stop 565
tcatcttattgcgagtggttattcc

SEQ ID NO: 454568 - DNA, 25 bp, Artificial
  probe
  misc_feature (1)..(25): SEQ ID NO: 6958; WAN024BHV; Start 138; Stop 162
tcatatctcacacctcaatccgtat

SEQ ID NO: 454569 - DNA, 25 bp, Artificial
  probe
  misc_feature (1)..(25): SEQ ID NO: 6958; WAN024BHV; Start 137; Stop 161
atcatatctcacacctcaatccgta

SEQ ID NO: 454570 - DNA, 25 bp, Artificial
  probe
  misc_feature (1)..(25): SEQ ID NO: 6958; WAN024BHV; Start 536; Stop 560
atgtatcatcttattgcgagtggtt

SEQ ID NO: 454571 - DNA, 25 bp, Artificial
  probe
  misc_feature (1)..(25): SEQ ID NO: 6958; WAN024BHV; Start 535; Stop 559
aatgtatcatcttattgcgagtggt

SEQ ID NO: 454572 - DNA, 25 bp, Artificial
  probe
  misc_feature (1)..(25): SEQ ID NO: 6958; WAN024BHV; Start 141; Stop 165
tatctcacacctcaatccgtattat

SEQ ID NO: 454573 - DNA, 25 bp, Artificial
  probe
  misc_feature (1)..(25): SEQ ID NO: 6958; WAN024BHV; Start 140; Stop 164
atatctcacacctcaatccgtatta

SEQ ID NO: 454574 - DNA, 25 bp, Artificial
  probe
  misc_feature (1)..(25): SEQ ID NO: 6958; WAN024BHV; Start 538; Stop 562
gtatcatcttattgcgagtggttat

SEQ ID NO: 454575 - DNA, 25 bp, Artificial
  probe
  misc_feature (1)..(25): SEQ ID NO: 6958; WAN024BHV; Start 110; Stop 134
taggttaccaacgagataatcaagg

SEQ ID NO: 454576 - DNA, 25 bp, Artificial
  probe
  misc_feature (1)..(25): SEQ ID NO: 6958; WAN024BHV; Start 493; Stop 517
cgtagtggctatatgttcaatatgt

SEQ ID NO: 454577 - DNA, 25 bp, Artificial
  probe
  misc_feature (1)..(25): SEQ ID NO: 6958; WAN024BHV; Start 136; Stop 160
aatcatatctcacacctcaatccgt

SEQ ID NO: 454578 - DNA, 25 bp, Artificial
  probe
  misc_feature (1)..(25): SEQ ID NO: 6958; WAN024BHV; Start 299; Stop 323
tatcggcagatcaagttaaggaatt

SEQ ID NO: 454579 - DNA, 25 bp, Artificial
  probe
  misc_feature (1)..(25): SEQ ID NO: 6958; WAN024BHV; Start 298; Stop 322
ctatcggcagatcaagttaaggaat

SEQ ID NO: 454580 - DNA, 25 bp, Artificial
  probe
  misc_feature (1)..(25): SEQ ID NO: 6958; WAN024BHV; Start 492; Stop 516
tcgtagtggctatatgttcaatatg

SEQ ID NO: 454581 - DNA, 25 bp, Artificial
  probe
  misc_feature (1)..(25): SEQ ID NO: 6958; WAN024BHV; Start 491; Stop 515
gtcgtagtggctatatgttcaatat

SEQ ID NO: 454582 - DNA, 25 bp, Artificial
  probe
  misc_feature (1)..(25): SEQ ID NO: 6958; WAN024BHV; Start 539; Stop 563
tatcatcttattgcgagtggttatt

SEQ ID NO: 454583 - DNA, 25 bp, Artificial
  probe
  misc_feature (1)..(25): SEQ ID NO: 6958; WAN024BHV; Start 157; Stop 181
ccgtattattgtgaattgacaggat

SEQ ID NO: 454584 - DNA, 25 bp, Artificial
  probe
  misc_feature (1)..(25): SEQ ID NO: 6958; WAN024BHV; Start 155; Stop 179
atccgtattattgtgaattgacagg

SEQ ID NO: 454585 - DNA, 25 bp, Artificial
  probe
  misc_feature (1)..(25): SEQ ID NO: 6958; WAN024BHV; Start 488; Stop 512
actgtcgtagtggctatatgttcaa

SEQ ID NO: 454586 - DNA, 25 bp, Artificial
  probe
  misc_feature (1)..(25): SEQ ID NO: 6958; WAN024BHV; Start 473; Stop 497
ttgataaggtgatggactgtcgtag

SEQ ID NO: 454587 - DNA, 25 bp, Artificial
  probe
  misc_feature (1)..(25): SEQ ID NO: 6958; WAN024BHV; Start 109; Stop 133
ttaggttaccaacgagataatcaag

SEQ ID NO: 454588 - DNA, 25 bp, Artificial
  probe
  misc_feature (1)..(25): SEQ ID NO: 6958; WAN024BHV; Start 165; Stop 189
ttgtgaattgacaggattatactgg

SEQ ID NO: 454589 - DNA, 25 bp, Artificial
  probe
  misc_feature (1)..(25): SEQ ID NO: 6958; WAN024BHV; Start 156; Stop 180
tccgtattattgtgaattgacagga

SEQ ID NO: 454590 - DNA, 25 bp, Artificial
  probe
  misc_feature (1)..(25): SEQ ID NO: 6958; WAN024BHV; Start 487; Stop 511
gactgtcgtagtggctatatgttca

SEQ ID NO: 454591 - DNA, 25 bp, Artificial
  probe
  misc_feature (1)..(25): SEQ ID NO: 6958; WAN024BHV; Start 483; Stop 507
gatggactgtcgtagtggctatatg

SEQ ID NO: 454592 - DNA, 25 bp, Artificial
  probe
  misc_feature (1)..(25): SEQ ID NO: 6958; WAN024BHV; Start 545; Stop 569
cttattgcgagtggttattccctat

SEQ ID NO: 454593 - DNA, 25 bp, Artificial
  probe
  misc_feature (1)..(25): SEQ ID NO: 6959; WAN024BUI; Start 382; Stop 406
ttactagaggtgataccattcaagc

SEQ ID NO: 454594 - DNA, 25 bp, Artificial
  probe
  misc_feature (1)..(25): SEQ ID NO: 6959; WAN024BUI; Start 383; Stop 407
tactagaggtgataccattcaagcc

SEQ ID NO: 454595 - DNA, 25 bp, Artificial
  probe
  misc_feature (1)..(25): SEQ ID NO: 6959; WAN024BUI; Start 451; Stop 475
gtaaagtttgaggaggacaagaatg

SEQ ID NO: 454596 - DNA, 25 bp, Artificial
  probe
  misc_feature (1)..(25): SEQ ID NO: 6959; WAN024BUI; Start 85; Stop 109
gacattaggcaagaaacatttgaga

SEQ ID NO: 454597 - DNA, 25 bp, Artificial
  probe
  misc_feature (1)..(25): SEQ ID NO: 6959; WAN024BUI; Start 82; Stop 106
atggacattaggcaagaaacatttg

SEQ ID NO: 454598 - DNA, 25 bp, Artificial
  probe
  misc_feature (1)..(25): SEQ ID NO: 6959; WAN024BUI; Start 84; Stop 108
ggacattaggcaagaaacatttgag

SEQ ID NO: 454599 - DNA, 25 bp, Artificial
  probe
  misc_feature (1)..(25): SEQ ID NO: 6959; WAN024BUI; Start 81; Stop 105
tatggacattaggcaagaaacattt

SEQ ID NO: 454600 - DNA, 25 bp, Artificial
  probe
  misc_feature (1)..(25): SEQ ID NO: 6959; WAN024BUI; Start 80; Stop 104
ttatggacattaggcaagaaacatt

SEQ ID NO: 454601 - DNA, 25 bp, Artificial
  probe
  misc_feature (1)..(25): SEQ ID NO: 6959; WAN024BUI; Start 79; Stop 103
tttatggacattaggcaagaaacat

SEQ ID NO: 454602 - DNA, 25 bp, Artificial
  probe
  misc_feature (1)..(25): SEQ ID NO: 6959; WAN024BUI; Start 452; Stop 476
taaagtttgaggaggacaagaatgg

SEQ ID NO: 454603 - DNA, 25 bp, Artificial
  probe
  misc_feature (1)..(25): SEQ ID NO: 6959; WAN024BUI; Start 391; Stop 415
gtgataccattcaagcccttatttg

SEQ ID NO: 454604 - DNA, 25 bp, Artificial
  probe
  misc_feature (1)..(25): SEQ ID NO: 6959; WAN024BUI; Start 86; Stop 110
acattaggcaagaaacatttgagat

SEQ ID NO: 454605 - DNA, 25 bp, Artificial
  probe
  misc_feature (1)..(25): SEQ ID NO: 6959; WAN024BUI; Start 125; Stop 149
tcaatgtagaccctgatattatcgg

SEQ ID NO: 454606 - DNA, 25 bp, Artificial
  probe
  misc_feature (1)..(25): SEQ ID NO: 6959; WAN024BUI; Start 83; Stop 107
tggacattaggcaagaaacatttga

SEQ ID NO: 454607 - DNA, 25 bp, Artificial
  probe
  misc_feature (1)..(25): SEQ ID NO: 6959; WAN024BUI; Start 89; Stop 113
ttaggcaagaaacatttgagataca

SEQ ID NO: 454608 - DNA, 25 bp, Artificial
  probe
  misc_feature (1)..(25): SEQ ID NO: 6959; WAN024BUI; Start 450; Stop 474
tgtaaagtttgaggaggacaagaat

SEQ ID NO: 454609 - DNA, 25 bp, Artificial
  probe
  misc_feature (1)..(25): SEQ ID NO: 6959; WAN024BUI; Start 90; Stop 114
taggcaagaaacatttgagatacat

SEQ ID NO: 454610 - DNA, 25 bp, Artificial
  probe
  misc_feature (1)..(25): SEQ ID NO: 6959; WAN024BUI; Start 92; Stop 116
ggcaagaaacatttgagatacatga

SEQ ID NO: 454611 - DNA, 25 bp, Artificial
  probe
  misc_feature (1)..(25): SEQ ID NO: 6959; WAN024BUI; Start 91; Stop 115
aggcaagaaacatttgagatacatg

SEQ ID NO: 454612 - DNA, 25 bp, Artificial
  probe
  misc_feature (1)..(25): SEQ ID NO: 6959; WAN024BUI; Start 381; Stop 405
attactagaggtgataccattcaag

SEQ ID NO: 454613 - DNA, 25 bp, Artificial
  probe
  misc_feature (1)..(25): SEQ ID NO: 6959; WAN024BUI; Start 453; Stop 477
aaagtttgaggaggacaagaatgga

SEQ ID NO: 454614 - DNA, 25 bp, Artificial
  probe
  misc_feature (1)..(25): SEQ ID NO: 6959; WAN024BUI; Start 93; Stop 117
gcaagaaacatttgagatacatgac

SEQ ID NO: 454615 - DNA, 25 bp, Artificial
  probe
  misc_feature (1)..(25): SEQ ID NO: 6959; WAN024BUI; Start 124; Stop 148
gtcaatgtagaccctgatattatcg

SEQ ID NO: 454616 - DNA, 25 bp, Artificial
  probe
  misc_feature (1)..(25): SEQ ID NO: 6959; WAN024BUI; Start 186; Stop 210
taatctagttgtgtttgatccacca

SEQ ID NO: 454617 - DNA, 25 bp, Artificial
  probe
  misc_feature (1)..(25): SEQ ID NO: 6959; WAN024BUI; Start 266; Stop 290
acaaagttacctggtcggaagattt

SEQ ID NO: 454618 - DNA, 25 bp, Artificial
  probe
  misc_feature (1)..(25): SEQ ID NO: 6959; WAN024BUI; Start 127; Stop 151
aatgtagaccctgatattatcggtg

SEQ ID NO: 454619 - DNA, 25 bp, Artificial
  probe
  misc_feature (1)..(25): SEQ ID NO: 6959; WAN024BUI; Start 126; Stop 150
caatgtagaccctgatattatcggt

SEQ ID NO: 454620 - DNA, 25 bp, Artificial
  probe
  misc_feature (1)..(25): SEQ ID NO: 6959; WAN024BUI; Start 225; Stop 249
tggacctaattcgataatgaaagct

SEQ ID NO: 454621 - DNA, 25 bp, Artificial
  probe
  misc_feature (1)..(25): SEQ ID NO: 6959; WAN024BUI; Start 224; Stop 248
ctggacctaattcgataatgaaagc

SEQ ID NO: 454622 - DNA, 25 bp, Artificial
  probe
  misc_feature (1)..(25): SEQ ID NO: 6959; WAN024BUI; Start 223; Stop 247
gctggacctaattcgataatgaaag

SEQ ID NO: 454623 - DNA, 25 bp, Artificial
  probe
  misc_feature (1)..(25): SEQ ID NO: 6959; WAN024BUI; Start 129; Stop 153
tgtagaccctgatattatcggtgat

SEQ ID NO: 454624 - DNA, 25 bp, Artificial
  probe
  misc_feature (1)..(25): SEQ ID NO: 6959; WAN024BUI; Start 128; Stop 152
atgtagaccctgatattatcggtga

SEQ ID NO: 454625 - DNA, 25 bp, Artificial
  probe
  misc_feature (1)..(25): SEQ ID NO: 6959; WAN024BUI; Start 380; Stop 404
aattactagaggtgataccattcaa

SEQ ID NO: 454626 - DNA, 25 bp, Artificial
  probe
  misc_feature (1)..(25): SEQ ID NO: 6960; WAN024BRS; Start 56; Stop 80
tgttattagatgagttagccaagca

SEQ ID NO: 454627 - DNA, 25 bp, Artificial
  probe
  misc_feature (1)..(25): SEQ ID NO: 6960; WAN024BRS; Start 55; Stop 79
atgttattagatgagttagccaagc

SEQ ID NO: 454628 - DNA, 25 bp, Artificial
  probe
  misc_feature (1)..(25): SEQ ID NO: 6960; WAN024BRS; Start 1020; Stop 1044
gcaagactataatctggaaggttca

SEQ ID NO: 454629 - DNA, 25 bp, Artificial
  probe
  misc_feature (1)..(25): SEQ ID NO: 6960; WAN024BRS; Start 57; Stop 81
gttattagatgagttagccaagcat

SEQ ID NO: 454630 - DNA, 25 bp, Artificial
  probe
  misc_feature (1)..(25): SEQ ID NO: 6960; WAN024BRS; Start 260; Stop 284
agatgttcttgatgagcagtatgtg

SEQ ID NO: 454631 - DNA, 25 bp, Artificial
  probe
  misc_feature (1)..(25): SEQ ID NO: 6960; WAN024BRS; Start 166; Stop 190
ctccaatcaatcacagaactaggtt

SEQ ID NO: 454632 - DNA, 25 bp, Artificial
  probe
  misc_feature (1)..(25): SEQ ID NO: 6960; WAN024BRS; Start 261; Stop 285
gatgttcttgatgagcagtatgtgg

SEQ ID NO: 454633 - DNA, 25 bp, Artificial
  probe
  misc_feature (1)..(25): SEQ ID NO: 6960; WAN024BRS; Start 666; Stop 690
aattatggtcggaggtacaagagaa

SEQ ID NO: 454634 - DNA, 25 bp, Artificial
  probe
  misc_feature (1)..(25): SEQ ID NO: 6960; WAN024BRS; Start 664; Stop 688
ttaattatggtcggaggtacaagag

SEQ ID NO: 454635 - DNA, 25 bp, Artificial
  probe
  misc_feature (1)..(25): SEQ ID NO: 6960; WAN024BRS; Start 663; Stop 687
gttaattatggtcggaggtacaaga

SEQ ID NO: 454636 - DNA, 25 bp, Artificial
  probe
  misc_feature (1)..(25): SEQ ID NO: 6960; WAN024BRS; Start 662; Stop 686
agttaattatggtcggaggtacaag

SEQ ID NO: 454637 - DNA, 25 bp, Artificial
  probe
  misc_feature (1)..(25): SEQ ID NO: 6960; WAN024BRS; Start 661; Stop 685
cagttaattatggtcggaggtacaa

SEQ ID NO: 454638 - DNA, 25 bp, Artificial
  probe
  misc_feature (1)..(25): SEQ ID NO: 6960; WAN024BRS; Start 1022; Stop 1046
aagactataatctggaaggttcagc

SEQ ID NO: 454639 - DNA, 25 bp, Artificial
  probe
  misc_feature (1)..(25): SEQ ID NO: 6960; WAN024BRS; Start 1024; Stop 1048
gactataatctggaaggttcagcaa

SEQ ID NO: 454640 - DNA, 25 bp, Artificial
  probe
  misc_feature (1)..(25): SEQ ID NO: 6960; WAN024BRS; Start 665; Stop 689
taattatggtcggaggtacaagaga

SEQ ID NO: 454641 - DNA, 25 bp, Artificial
  probe
  misc_feature (1)..(25): SEQ ID NO: 6960; WAN024BRS; Start 667; Stop 691
attatggtcggaggtacaagagaag

SEQ ID NO: 454642 - DNA, 25 bp, Artificial
  probe
  misc_feature (1)..(25): SEQ ID NO: 6960; WAN024BRS; Start 58; Stop 82
ttattagatgagttagccaagcatg

SEQ ID NO: 454643 - DNA, 25 bp, Artificial
  probe
  misc_feature (1)..(25): SEQ ID NO: 6960; WAN024BRS; Start 1023; Stop 1047
agactataatctggaaggttcagca

SEQ ID NO: 454644 - DNA, 25 bp, Artificial
  probe
  misc_feature (1)..(25): SEQ ID NO: 6960; WAN024BRS; Start 1021; Stop 1045
caagactataatctggaaggttcag

SEQ ID NO: 454645 - DNA, 25 bp, Artificial
  probe
  misc_feature (1)..(25): SEQ ID NO: 6960; WAN024BRS; Start 163; Stop 187
aagctccaatcaatcacagaactag

SEQ ID NO: 454646 - DNA, 25 bp, Artificial
  probe
  misc_feature (1)..(25): SEQ ID NO: 6960; WAN024BRS; Start 162; Stop 186
caagctccaatcaatcacagaacta

SEQ ID NO: 454647 - DNA, 25 bp, Artificial
  probe
  misc_feature (1)..(25): SEQ ID NO: 6960; WAN024BRS; Start 165; Stop 189
gctccaatcaatcacagaactaggt

SEQ ID NO: 454648 - DNA, 25 bp, Artificial
  probe
  misc_feature (1)..(25): SEQ ID NO: 6960; WAN024BRS; Start 226; Stop 250
atggtcttctttgatggctatactg

SEQ ID NO: 454649 - DNA, 25 bp, Artificial
  probe
  misc_feature (1)..(25): SEQ ID NO: 6960; WAN024BRS; Start 222; Stop 246
ggatatggtcttctttgatggctat

SEQ ID NO: 454650 - DNA, 25 bp, Artificial
  probe
  misc_feature (1)..(25): SEQ ID NO: 6960; WAN024BRS; Start 453; Stop 477
caaggcaaagattaaacgacacata

SEQ ID NO: 454651 - DNA, 25 bp, Artificial
  probe
  misc_feature (1)..(25): SEQ ID NO: 6960; WAN024BRS; Start 669; Stop 693
tatggtcggaggtacaagagaagaa

SEQ ID NO: 454652 - DNA, 25 bp, Artificial
  probe
  misc_feature (1)..(25): SEQ ID NO: 6960; WAN024BRS; Start 668; Stop 692
ttatggtcggaggtacaagagaaga

SEQ ID NO: 454653 - DNA, 25 bp, Artificial
  probe
  misc_feature (1)..(25): SEQ ID NO: 6960; WAN024BRS; Start 51; Stop 75
ggttatgttattagatgagttagcc

SEQ ID NO: 454654 - DNA, 25 bp, Artificial
  probe
  misc_feature (1)..(25): SEQ ID NO: 6960; WAN024BRS; Start 1017; Stop 1041
gatgcaagactataatctggaaggt

SEQ ID NO: 454655 - DNA, 25 bp, Artificial
  probe
  misc_feature (1)..(25): SEQ ID NO: 6960; WAN024BRS; Start 1016; Stop 1040
tgatgcaagactataatctggaagg

SEQ ID NO: 454656 - DNA, 25 bp, Artificial
  probe
  misc_feature (1)..(25): SEQ ID NO: 6960; WAN024BRS; Start 1019; Stop 1043
tgcaagactataatctggaaggttc

SEQ ID NO: 454657 - DNA, 25 bp, Artificial
  probe
  misc_feature (1)..(25): SEQ ID NO: 6960; WAN024BRS; Start 1018; Stop 1042
atgcaagactataatctggaaggtt

SEQ ID NO: 454658 - DNA, 25 bp, Artificial
  probe
  misc_feature (1)..(25): SEQ ID NO: 6960; WAN024BRS; Start 455; Stop 479
aggcaaagattaaacgacacatatt

SEQ ID NO: 454659 - DNA, 25 bp, Artificial
  probe
  misc_feature (1)..(25): SEQ ID NO: 6961; WAN024AWP; Start 80; Stop 104
tggatatgacaacggctgttaatat

SEQ ID NO: 454660 - DNA, 25 bp, Artificial
  probe
  misc_feature (1)..(25): SEQ ID NO: 6961; WAN024AWP; Start 79; Stop 103
atggatatgacaacggctgttaata

SEQ ID NO: 454661 - DNA, 25 bp, Artificial
  probe
  misc_feature (1)..(25): SEQ ID NO: 6961; WAN024AWP; Start 78; Stop 102
aatggatatgacaacggctgttaat

SEQ ID NO: 454662 - DNA, 25 bp, Artificial
  probe
  misc_feature (1)..(25): SEQ ID NO: 6961; WAN024AWP; Start 77; Stop 101
gaatggatatgacaacggctgttaa

SEQ ID NO: 454663 - DNA, 25 bp, Artificial
  probe
  misc_feature (1)..(25): SEQ ID NO: 6961; WAN024AWP; Start 107; Stop 131
tccttcgtcaagctattcaatatca

SEQ ID NO: 454664 - DNA, 25 bp, Artificial
  probe
  misc_feature (1)..(25): SEQ ID NO: 6961; WAN024AWP; Start 109; Stop 133
cttcgtcaagctattcaatatcagg

SEQ ID NO: 454665 - DNA, 25 bp, Artificial
  probe
  misc_feature (1)..(25): SEQ ID NO: 6961; WAN024AWP; Start 108; Stop 132
ccttcgtcaagctattcaatatcag

SEQ ID NO: 454666 - DNA, 25 bp, Artificial
  probe
  misc_feature (1)..(25): SEQ ID NO: 6961; WAN024AWP; Start 106; Stop 130
ttccttcgtcaagctattcaatatc

SEQ ID NO: 454667 - DNA, 25 bp, Artificial
  probe
  misc_feature (1)..(25): SEQ ID NO: 6961; WAN024AWP; Start 81; Stop 105
ggatatgacaacggctgttaatatt

SEQ ID NO: 454668 - DNA, 25 bp, Artificial
  probe
  misc_feature (1)..(25): SEQ ID NO: 6961; WAN024AWP; Start 69; Stop 93
taatctgggaatggatatgacaacg

SEQ ID NO: 454669 - DNA, 25 bp, Artificial
  probe
  misc_feature (1)..(25): SEQ ID NO: 6961; WAN024AWP; Start 76; Stop 100
ggaatggatatgacaacggctgtta

SEQ ID NO: 454670 - DNA, 25 bp, Artificial
  probe
  misc_feature (1)..(25): SEQ ID NO: 6961; WAN024AWP; Start 112; Stop 136
cgtcaagctattcaatatcagggat

SEQ ID NO: 454671 - DNA, 25 bp, Artificial
  probe
  misc_feature (1)..(25): SEQ ID NO: 6961; WAN024AWP; Start 110; Stop 134
ttcgtcaagctattcaatatcaggg

SEQ ID NO: 454672 - DNA, 25 bp, Artificial
  probe
  misc_feature (1)..(25): SEQ ID NO: 6961; WAN024AWP; Start 50; Stop 74
aggctcaacaggtgtttagtaatct

SEQ ID NO: 454673 - DNA, 25 bp, Artificial
  probe
  misc_feature (1)..(25): SEQ ID NO: 6961; WAN024AWP; Start 49; Stop 73
caggctcaacaggtgtttagtaatc

SEQ ID NO: 454674 - DNA, 25 bp, Artificial
  probe
  misc_feature (1)..(25): SEQ ID NO: 6961; WAN024AWP; Start 70; Stop 94
aatctgggaatggatatgacaacgg

SEQ ID NO: 454675 - DNA, 25 bp, Artificial
  probe
  misc_feature (1)..(25): SEQ ID NO: 6961; WAN024AWP; Start 163; Stop 187
aataggaagttgcttcaagtgttaa

SEQ ID NO: 454676 - DNA, 25 bp, Artificial
  probe
  misc_feature (1)..(25): SEQ ID NO: 6961; WAN024AWP; Start 111; Stop 135
tcgtcaagctattcaatatcaggga

SEQ ID NO: 454677 - DNA, 25 bp, Artificial
  probe
  misc_feature (1)..(25): SEQ ID NO: 6961; WAN024AWP; Start 53; Stop 77
ctcaacaggtgtttagtaatctggg

SEQ ID NO: 454678 - DNA, 25 bp, Artificial
  probe
  misc_feature (1)..(25): SEQ ID NO: 6961; WAN024AWP; Start 169; Stop 193
aagttgcttcaagtgttaacggatt

SEQ ID NO: 454679 - DNA, 25 bp, Artificial
  probe
  misc_feature (1)..(25): SEQ ID NO: 6961; WAN024AWP; Start 113; Stop 137
gtcaagctattcaatatcagggatt

SEQ ID NO: 454680 - DNA, 25 bp, Artificial
  probe
  misc_feature (1)..(25): SEQ ID NO: 6961; WAN024AWP; Start 54; Stop 78
tcaacaggtgtttagtaatctggga

SEQ ID NO: 454681 - DNA, 25 bp, Artificial
  probe
  misc_feature (1)..(25): SEQ ID NO: 6961; WAN024AWP; Start 105; Stop 129
tttccttcgtcaagctattcaatat

SEQ ID NO: 454682 - DNA, 25 bp, Artificial
  probe
  misc_feature (1)..(25): SEQ ID NO: 6961; WAN024AWP; Start 52; Stop 76
gctcaacaggtgtttagtaatctgg

SEQ ID NO: 454683 - DNA, 25 bp, Artificial
  probe
  misc_feature (1)..(25): SEQ ID NO: 6961; WAN024AWP; Start 51; Stop 75
ggctcaacaggtgtttagtaatctg

SEQ ID NO: 454684 - DNA, 25 bp, Artificial
  probe
  misc_feature (1)..(25): SEQ ID NO: 6961; WAN024AWP; Start 118; Stop 142
gctattcaatatcagggattgcctt

SEQ ID NO: 454685 - DNA, 25 bp, Artificial
  probe
  misc_feature (1)..(25): SEQ ID NO: 6961; WAN024AWP; Start 119; Stop 143
ctattcaatatcagggattgccttt

SEQ ID NO: 454686 - DNA, 25 bp, Artificial
  probe
  misc_feature (1)..(25): SEQ ID NO: 6961; WAN024AWP; Start 1; Stop 25
atgtcaaagacgagtatgagcatcc

SEQ ID NO: 454687 - DNA, 25 bp, Artificial
  probe
  misc_feature (1)..(25): SEQ ID NO: 6961; WAN024AWP; Start 132; Stop 156
gggattgccttttgatgttagacta

SEQ ID NO: 454688 - DNA, 25 bp, Artificial
  probe
  misc_feature (1)..(25): SEQ ID NO: 6961; WAN024AWP; Start 178; Stop 202
caagtgttaacggatttagaccaaa

SEQ ID NO: 454689 - DNA, 25 bp, Artificial
  probe
  misc_feature (1)..(25): SEQ ID NO: 6961; WAN024AWP; Start 175; Stop 199
cttcaagtgttaacggatttagacc

SEQ ID NO: 454690 - DNA, 25 bp, Artificial
  probe
  misc_feature (1)..(25): SEQ ID NO: 6961; WAN024AWP; Start 177; Stop 201
tcaagtgttaacggatttagaccaa

SEQ ID NO: 454691 - DNA, 25 bp, Artificial
  probe
  misc_feature (1)..(25): SEQ ID NO: 6961; WAN024AWP; Start 176; Stop 200
ttcaagtgttaacggatttagacca

SEQ ID NO: 454692 - DNA, 25 bp, Artificial
  probe
  misc_feature (1)..(25): SEQ ID NO: 6962; WAN024BQR; Start 59; Stop 83
gtaacttccacttgcctaaccaaag

SEQ ID NO: 454693 - DNA, 25 bp, Artificial
  probe
  misc_feature (1)..(25): SEQ ID NO: 6962; WAN024BQR; Start 58; Stop 82
agtaacttccacttgcctaaccaaa

SEQ ID NO: 454694 - DNA, 25 bp, Artificial
  probe
  misc_feature (1)..(25): SEQ ID NO: 6962; WAN024BQR; Start 57; Stop 81
aagtaacttccacttgcctaaccaa

SEQ ID NO: 454695 - DNA, 25 bp, Artificial
  probe
  misc_feature (1)..(25): SEQ ID NO: 6962; WAN024BQR; Start 45; Stop 69
ggtaacttctcaaagtaacttccac

SEQ ID NO: 454696 - DNA, 25 bp, Artificial
  probe
  misc_feature (1)..(25): SEQ ID NO: 6962; WAN024BQR; Start 40; Stop 64
caaacggtaacttctcaaagtaact

SEQ ID NO: 454697 - DNA, 25 bp, Artificial
  probe
  misc_feature (1)..(25): SEQ ID NO: 6962; WAN024BQR; Start 39; Stop 63
tcaaacggtaacttctcaaagtaac

SEQ ID NO: 454698 - DNA, 25 bp, Artificial
  probe
  misc_feature (1)..(25): SEQ ID NO: 6962; WAN024BQR; Start 48; Stop 72
aacttctcaaagtaacttccacttg

SEQ ID NO: 454699 - DNA, 25 bp, Artificial
  probe
  misc_feature (1)..(25): SEQ ID NO: 6962; WAN024BQR; Start 44; Stop 68
cggtaacttctcaaagtaacttcca

SEQ ID NO: 454700 - DNA, 25 bp, Artificial
  probe
  misc_feature (1)..(25): SEQ ID NO: 6962; WAN024BQR; Start 43; Stop 67
acggtaacttctcaaagtaacttcc

SEQ ID NO: 454701 - DNA, 25 bp, Artificial
  probe
  misc_feature (1)..(25): SEQ ID NO: 6962; WAN024BQR; Start 42; Stop 66
aacggtaacttctcaaagtaacttc

SEQ ID NO: 454702 - DNA, 25 bp, Artificial
  probe
  misc_feature (1)..(25): SEQ ID NO: 6962; WAN024BQR; Start 53; Stop 77
ctcaaagtaacttccacttgcctaa

SEQ ID NO: 454703 - DNA, 25 bp, Artificial
  probe
  misc_feature (1)..(25): SEQ ID NO: 6962; WAN024BQR; Start 38; Stop 62
ttcaaacggtaacttctcaaagtaa

SEQ ID NO: 454704 - DNA, 25 bp, Artificial
  probe
  misc_feature (1)..(25): SEQ ID NO: 6962; WAN024BQR; Start 37; Stop 61
tttcaaacggtaacttctcaaagta

SEQ ID NO: 454705 - DNA, 25 bp, Artificial
  probe
  misc_feature (1)..(25): SEQ ID NO: 6962; WAN024BQR; Start 54; Stop 78
tcaaagtaacttccacttgcctaac

SEQ ID NO: 454706 - DNA, 25 bp, Artificial
  probe
  misc_feature (1)..(25): SEQ ID NO: 6962; WAN024BQR; Start 41; Stop 65
aaacggtaacttctcaaagtaactt

SEQ ID NO: 454707 - DNA, 25 bp, Artificial
  probe
  misc_feature (1)..(25): SEQ ID NO: 6962; WAN024BQR; Start 46; Stop 70
gtaacttctcaaagtaacttccact

SEQ ID NO: 454708 - DNA, 25 bp, Artificial
  probe
  misc_feature (1)..(25): SEQ ID NO: 6962; WAN024BQR; Start 49; Stop 73
acttctcaaagtaacttccacttgc

SEQ ID NO: 454709 - DNA, 25 bp, Artificial
  probe
  misc_feature (1)..(25): SEQ ID NO: 6962; WAN024BQR; Start 52; Stop 76
tctcaaagtaacttccacttgccta

SEQ ID NO: 454710 - DNA, 25 bp, Artificial
  probe
  misc_feature (1)..(25): SEQ ID NO: 6962; WAN024BQR; Start 55; Stop 79
caaagtaacttccacttgcctaacc

SEQ ID NO: 454711 - DNA, 25 bp, Artificial
  probe
  misc_feature (1)..(25): SEQ ID NO: 6962; WAN024BQR; Start 50; Stop 74
cttctcaaagtaacttccacttgcc

SEQ ID NO: 454712 - DNA, 25 bp, Artificial
  probe
  misc_feature (1)..(25): SEQ ID NO: 6962; WAN024BQR; Start 47; Stop 71
taacttctcaaagtaacttccactt

SEQ ID NO: 454713 - DNA, 25 bp, Artificial
  probe
  misc_feature (1)..(25): SEQ ID NO: 6962; WAN024BQR; Start 60; Stop 84
taacttccacttgcctaaccaaagt

SEQ ID NO: 454714 - DNA, 25 bp, Artificial
  probe
  misc_feature (1)..(25): SEQ ID NO: 6962; WAN024BQR; Start 56; Stop 80
aaagtaacttccacttgcctaacca

SEQ ID NO: 454715 - DNA, 25 bp, Artificial
  probe
  misc_feature (1)..(25): SEQ ID NO: 6962; WAN024BQR; Start 51; Stop 75
ttctcaaagtaacttccacttgcct

SEQ ID NO: 454716 - DNA, 25 bp, Artificial
  probe
  misc_feature (1)..(25): SEQ ID NO: 6962; WAN024BQR; Start 36; Stop 60
ttttcaaacggtaacttctcaaagt

SEQ ID NO: 454717 - DNA, 25 bp, Artificial
  probe
  misc_feature (1)..(25): SEQ ID NO: 6962; WAN024BQR; Start 1; Stop 25
atgtcaacagaattttcagaatttt

SEQ ID NO: 454718 - DNA, 25 bp, Artificial
  probe
  misc_feature (1)..(25): SEQ ID NO: 6963; WAN024DE4; Start 288; Stop 312
cggtaaggtatggataagtgacaat

SEQ ID NO: 454719 - DNA, 25 bp, Artificial
  probe
  misc_feature (1)..(25): SEQ ID NO: 6963; WAN024DE4; Start 229; Stop 253
aatcctactatcatcattggtcgtg

SEQ ID NO: 454720 - DNA, 25 bp, Artificial
  probe
  misc_feature (1)..(25): SEQ ID NO: 6963; WAN024DE4; Start 292; Stop 316
aaggtatggataagtgacaatgcta

SEQ ID NO: 454721 - DNA, 25 bp, Artificial
  probe
  misc_feature (1)..(25): SEQ ID NO: 6963; WAN024DE4; Start 291; Stop 315
taaggtatggataagtgacaatgct

SEQ ID NO: 454722 - DNA, 25 bp, Artificial
  probe
  misc_feature (1)..(25): SEQ ID NO: 6963; WAN024DE4; Start 290; Stop 314
gtaaggtatggataagtgacaatgc

SEQ ID NO: 454723 - DNA, 25 bp, Artificial
  probe
  misc_feature (1)..(25): SEQ ID NO: 6963; WAN024DE4; Start 293; Stop 317
aggtatggataagtgacaatgctat

SEQ ID NO: 454724 - DNA, 25 bp, Artificial
  probe
  misc_feature (1)..(25): SEQ ID NO: 6963; WAN024DE4; Start 231; Stop 255
tcctactatcatcattggtcgtgta

SEQ ID NO: 454725 - DNA, 25 bp, Artificial
  probe
  misc_feature (1)..(25): SEQ ID NO: 6963; WAN024DE4; Start 234; Stop 258
tactatcatcattggtcgtgtaggt

SEQ ID NO: 454726 - DNA, 25 bp, Artificial
  probe
  misc_feature (1)..(25): SEQ ID NO: 6963; WAN024DE4; Start 289; Stop 313
ggtaaggtatggataagtgacaatg

SEQ ID NO: 454727 - DNA, 25 bp, Artificial
  probe
  misc_feature (1)..(25): SEQ ID NO: 6963; WAN024DE4; Start 230; Stop 254
atcctactatcatcattggtcgtgt

SEQ ID NO: 454728 - DNA, 25 bp, Artificial
  probe
  misc_feature (1)..(25): SEQ ID NO: 6963; WAN024DE4; Start 228; Stop 252
taatcctactatcatcattggtcgt

SEQ ID NO: 454729 - DNA, 25 bp, Artificial
  probe
  misc_feature (1)..(25): SEQ ID NO: 6963; WAN024DE4; Start 287; Stop 311
acggtaaggtatggataagtgacaa

SEQ ID NO: 454730 - DNA, 25 bp, Artificial
  probe
  misc_feature (1)..(25): SEQ ID NO: 6963; WAN024DE4; Start 294; Stop 318
ggtatggataagtgacaatgctata

SEQ ID NO: 454731 - DNA, 25 bp, Artificial
  probe
  misc_feature (1)..(25): SEQ ID NO: 6963; WAN024DE4; Start 235; Stop 259
actatcatcattggtcgtgtaggtg

SEQ ID NO: 454732 - DNA, 25 bp, Artificial
  probe
  misc_feature (1)..(25): SEQ ID NO: 6963; WAN024DE4; Start 227; Stop 251
ataatcctactatcatcattggtcg

SEQ ID NO: 454733 - DNA, 25 bp, Artificial
  probe
  misc_feature (1)..(25): SEQ ID NO: 6963; WAN024DE4; Start 286; Stop 310
cacggtaaggtatggataagtgaca

SEQ ID NO: 454734 - DNA, 25 bp, Artificial
  probe
  misc_feature (1)..(25): SEQ ID NO: 6963; WAN024DE4; Start 255; Stop 279
aggtgcatattgtggtaatgtaaga

SEQ ID NO: 454735 - DNA, 25 bp, Artificial
  probe
  misc_feature (1)..(25): SEQ ID NO: 6963; WAN024DE4; Start 252; Stop 276
tgtaggtgcatattgtggtaatgta

SEQ ID NO: 454736 - DNA, 25 bp, Artificial
  probe
  misc_feature (1)..(25): SEQ ID NO: 6963; WAN024DE4; Start 256; Stop 280
ggtgcatattgtggtaatgtaagaa

SEQ ID NO: 454737 - DNA, 25 bp, Artificial
  probe
  misc_feature (1)..(25): SEQ ID NO: 6963; WAN024DE4; Start 409; Stop 433
tcaggtcaaccaaagataactcaaa

SEQ ID NO: 454738 - DNA, 25 bp, Artificial
  probe
  misc_feature (1)..(25): SEQ ID NO: 6963; WAN024DE4; Start 253; Stop 277
gtaggtgcatattgtggtaatgtaa

SEQ ID NO: 454739 - DNA, 25 bp, Artificial
  probe
  misc_feature (1)..(25): SEQ ID NO: 6963; WAN024DE4; Start 251; Stop 275
gtgtaggtgcatattgtggtaatgt

SEQ ID NO: 454740 - DNA, 25 bp, Artificial
  probe
  misc_feature (1)..(25): SEQ ID NO: 6963; WAN024DE4; Start 408; Stop 432
ctcaggtcaaccaaagataactcaa

SEQ ID NO: 454741 - DNA, 25 bp, Artificial
  probe
  misc_feature (1)..(25): SEQ ID NO: 6963; WAN024DE4; Start 259; Stop 283
gcatattgtggtaatgtaagaacta

SEQ ID NO: 454742 - DNA, 25 bp, Artificial
  probe
  misc_feature (1)..(25): SEQ ID NO: 6963; WAN024DE4; Start 254; Stop 278
taggtgcatattgtggtaatgtaag

SEQ ID NO: 454743 - DNA, 25 bp, Artificial
  probe
  misc_feature (1)..(25): SEQ ID NO: 6963; WAN024DE4; Start 233; Stop 257
ctactatcatcattggtcgtgtagg

SEQ ID NO: 454744 - DNA, 25 bp, Artificial
  probe
  misc_feature (1)..(25): SEQ ID NO: 6963; WAN024DE4; Start 232; Stop 256
cctactatcatcattggtcgtgtag

SEQ ID NO: 454745 - DNA, 25 bp, Artificial
  probe
  misc_feature (1)..(25): SEQ ID NO: 6963; WAN024DE4; Start 405; Stop 429
tttctcaggtcaaccaaagataact

SEQ ID NO: 454746 - DNA, 25 bp, Artificial
  probe
  misc_feature (1)..(25): SEQ ID NO: 6963; WAN024DE4; Start 257; Stop 281
gtgcatattgtggtaatgtaagaac

SEQ ID NO: 454747 - DNA, 25 bp, Artificial
  probe
  misc_feature (1)..(25): SEQ ID NO: 6963; WAN024DE4; Start 406; Stop 430
ttctcaggtcaaccaaagataactc

SEQ ID NO: 454748 - DNA, 25 bp, Artificial
  probe
  misc_feature (1)..(25): SEQ ID NO: 6963; WAN024DE4; Start 258; Stop 282
tgcatattgtggtaatgtaagaact

SEQ ID NO: 454749 - DNA, 25 bp, Artificial
  probe
  misc_feature (1)..(25): SEQ ID NO: 6963; WAN024DE4; Start 404; Stop 428
atttctcaggtcaaccaaagataac

SEQ ID NO: 454750 - DNA, 25 bp, Artificial
  probe
  misc_feature (1)..(25): SEQ ID NO: 6963; WAN024DE4; Start 402; Stop 426
tgatttctcaggtcaaccaaagata

SEQ ID NO: 454751 - DNA, 25 bp, Artificial
  probe
  misc_feature (1)..(25): SEQ ID NO: 6964; WAN024BYH; Start 19; Stop 43
gcaactgtatctactgaatcaactg

SEQ ID NO: 454752 - DNA, 25 bp, Artificial
  probe
  misc_feature (1)..(25): SEQ ID NO: 6964; WAN024BYH; Start 24; Stop 48
tgtatctactgaatcaactgagacc

SEQ ID NO: 454753 - DNA, 25 bp, Artificial
  probe
  misc_feature (1)..(25): SEQ ID NO: 6964; WAN024BYH; Start 25; Stop 49
gtatctactgaatcaactgagaccg

SEQ ID NO: 454754 - DNA, 25 bp, Artificial
  probe
  misc_feature (1)..(25): SEQ ID NO: 6964; WAN024BYH; Start 26; Stop 50
tatctactgaatcaactgagaccgt

SEQ ID NO: 454755 - DNA, 25 bp, Artificial
  probe
  misc_feature (1)..(25): SEQ ID NO: 6964; WAN024BYH; Start 324; Stop 348
tgacttacctgttgagttagtgaac

SEQ ID NO: 454756 - DNA, 25 bp, Artificial
  probe
  misc_feature (1)..(25): SEQ ID NO: 6964; WAN024BYH; Start 323; Stop 347
gtgacttacctgttgagttagtgaa

SEQ ID NO: 454757 - DNA, 25 bp, Artificial
  probe
  misc_feature (1)..(25): SEQ ID NO: 6964; WAN024BYH; Start 20; Stop 44
caactgtatctactgaatcaactga

SEQ ID NO: 454758 - DNA, 25 bp, Artificial
  probe
  misc_feature (1)..(25): SEQ ID NO: 6964; WAN024BYH; Start 22; Stop 46
actgtatctactgaatcaactgaga

SEQ ID NO: 454759 - DNA, 25 bp, Artificial
  probe
  misc_feature (1)..(25): SEQ ID NO: 6964; WAN024BYH; Start 23; Stop 47
ctgtatctactgaatcaactgagac

SEQ ID NO: 454760 - DNA, 25 bp, Artificial
  probe
  misc_feature (1)..(25): SEQ ID NO: 6964; WAN024BYH; Start 21; Stop 45
aactgtatctactgaatcaactgag

SEQ ID NO: 454761 - DNA, 25 bp, Artificial
  probe
  misc_feature (1)..(25): SEQ ID NO: 6964; WAN024BYH; Start 325; Stop 349
gacttacctgttgagttagtgaacg

SEQ ID NO: 454762 - DNA, 25 bp, Artificial
  probe
  misc_feature (1)..(25): SEQ ID NO: 6964; WAN024BYH; Start 27; Stop 51
atctactgaatcaactgagaccgtc

SEQ ID NO: 454763 - DNA, 25 bp, Artificial
  probe
  misc_feature (1)..(25): SEQ ID NO: 6964; WAN024BYH; Start 322; Stop 346
cgtgacttacctgttgagttagtga

SEQ ID NO: 454764 - DNA, 25 bp, Artificial
  probe
  misc_feature (1)..(25): SEQ ID NO: 6964; WAN024BYH; Start 18; Stop 42
tgcaactgtatctactgaatcaact

SEQ ID NO: 454765 - DNA, 25 bp, Artificial
  probe
  misc_feature (1)..(25): SEQ ID NO: 6964; WAN024BYH; Start 17; Stop 41
atgcaactgtatctactgaatcaac

SEQ ID NO: 454766 - DNA, 25 bp, Artificial
  probe
  misc_feature (1)..(25): SEQ ID NO: 6964; WAN024BYH; Start 15; Stop 39
caatgcaactgtatctactgaatca

SEQ ID NO: 454767 - DNA, 25 bp, Artificial
  probe
  misc_feature (1)..(25): SEQ ID NO: 6964; WAN024BYH; Start 502; Stop 526
gaagaatttgctcgtatgggttatc

SEQ ID NO: 454768 - DNA, 25 bp, Artificial
  probe
  misc_feature (1)..(25): SEQ ID NO: 6964; WAN024BYH; Start 267; Stop 291
aaaggctattgctcgtaaagaattg

SEQ ID NO: 454769 - DNA, 25 bp, Artificial
  probe
  misc_feature (1)..(25): SEQ ID NO: 6964; WAN024BYH; Start 501; Stop 525
agaagaatttgctcgtatgggttat

SEQ ID NO: 454770 - DNA, 25 bp, Artificial
  probe
  misc_feature (1)..(25): SEQ ID NO: 6964; WAN024BYH; Start 503; Stop 527
aagaatttgctcgtatgggttatca

SEQ ID NO: 454771 - DNA, 25 bp, Artificial
  probe
  misc_feature (1)..(25): SEQ ID NO: 6964; WAN024BYH; Start 500; Stop 524
aagaagaatttgctcgtatgggtta

SEQ ID NO: 454772 - DNA, 25 bp, Artificial
  probe
  misc_feature (1)..(25): SEQ ID NO: 6964; WAN024BYH; Start 212; Stop 236
acgagaaacagaaatatcagttgga

SEQ ID NO: 454773 - DNA, 25 bp, Artificial
  probe
  misc_feature (1)..(25): SEQ ID NO: 6964; WAN024BYH; Start 211; Stop 235
gacgagaaacagaaatatcagttgg

SEQ ID NO: 454774 - DNA, 25 bp, Artificial
  probe
  misc_feature (1)..(25): SEQ ID NO: 6964; WAN024BYH; Start 268; Stop 292
aaggctattgctcgtaaagaattga

SEQ ID NO: 454775 - DNA, 25 bp, Artificial
  probe
  misc_feature (1)..(25): SEQ ID NO: 6964; WAN024BYH; Start 505; Stop 529
gaatttgctcgtatgggttatcaga

SEQ ID NO: 454776 - DNA, 25 bp, Artificial
  probe
  misc_feature (1)..(25): SEQ ID NO: 6964; WAN024BYH; Start 504; Stop 528
agaatttgctcgtatgggttatcag

SEQ ID NO: 454777 - DNA, 25 bp, Artificial
  probe
  misc_feature (1)..(25): SEQ ID NO: 6964; WAN024BYH; Start 213; Stop 237
cgagaaacagaaatatcagttggat

SEQ ID NO: 454778 - DNA, 25 bp, Artificial
  probe
  misc_feature (1)..(25): SEQ ID NO: 6964; WAN024BYH; Start 16; Stop 40
aatgcaactgtatctactgaatcaa

SEQ ID NO: 454779 - DNA, 25 bp, Artificial
  probe
  misc_feature (1)..(25): SEQ ID NO: 6964; WAN024BYH; Start 499; Stop 523
aaagaagaatttgctcgtatgggtt

SEQ ID NO: 454780 - DNA, 25 bp, Artificial
  probe
  misc_feature (1)..(25): SEQ ID NO: 6964; WAN024BYH; Start 269; Stop 293
aggctattgctcgtaaagaattgac

SEQ ID NO: 454781 - DNA, 25 bp, Artificial
  probe
  misc_feature (1)..(25): SEQ ID NO: 6964; WAN024BYH; Start 210; Stop 234
tgacgagaaacagaaatatcagttg

SEQ ID NO: 454782 - DNA, 25 bp, Artificial
  probe
  misc_feature (1)..(25): SEQ ID NO: 6964; WAN024BYH; Start 14; Stop 38
tcaatgcaactgtatctactgaatc

SEQ ID NO: 454783 - DNA, 25 bp, Artificial
  probe
  misc_feature (1)..(25): SEQ ID NO: 6964; WAN024BYH; Start 327; Stop 351
cttacctgttgagttagtgaacgtg

SEQ ID NO: 454784 - DNA, 25 bp, Artificial
  probe
  misc_feature (1)..(25): SEQ ID NO: 6965; WAN024CCU; Start 39; Stop 63
caagattgatgctataccaggactg

SEQ ID NO: 454785 - DNA, 25 bp, Artificial
  probe
  misc_feature (1)..(25): SEQ ID NO: 6965; WAN024CCU; Start 322; Stop 346
gtttaccagacagagattgatgcta

SEQ ID NO: 454786 - DNA, 25 bp, Artificial
  probe
  misc_feature (1)..(25): SEQ ID NO: 6965; WAN024CCU; Start 390; Stop 414
agtcctctcagatacagtttcctat

SEQ ID NO: 454787 - DNA, 25 bp, Artificial
  probe
  misc_feature (1)..(25): SEQ ID NO: 6965; WAN024CCU; Start 389; Stop 413
aagtcctctcagatacagtttccta

SEQ ID NO: 454788 - DNA, 25 bp, Artificial
  probe
  misc_feature (1)..(25): SEQ ID NO: 6965; WAN024CCU; Start 386; Stop 410
ttcaagtcctctcagatacagtttc

SEQ ID NO: 454789 - DNA, 25 bp, Artificial
  probe
  misc_feature (1)..(25): SEQ ID NO: 6965; WAN024CCU; Start 551; Stop 575
ctctattaagggatgtcaaaccact

SEQ ID NO: 454790 - DNA, 25 bp, Artificial
  probe
  misc_feature (1)..(25): SEQ ID NO: 6965; WAN024CCU; Start 385; Stop 409
tttcaagtcctctcagatacagttt

SEQ ID NO: 454791 - DNA, 25 bp, Artificial
  probe
  misc_feature (1)..(25): SEQ ID NO: 6965; WAN024CCU; Start 552; Stop 576
tctattaagggatgtcaaaccactt

SEQ ID NO: 454792 - DNA, 25 bp, Artificial
  probe
  misc_feature (1)..(25): SEQ ID NO: 6965; WAN024CCU; Start 323; Stop 347
tttaccagacagagattgatgctag

SEQ ID NO: 454793 - DNA, 25 bp, Artificial
  probe
  misc_feature (1)..(25): SEQ ID NO: 6965; WAN024CCU; Start 536; Stop 560
cagacaaacaccatcctctattaag

SEQ ID NO: 454794 - DNA, 25 bp, Artificial
  probe
  misc_feature (1)..(25): SEQ ID NO: 6965; WAN024CCU; Start 535; Stop 559
gcagacaaacaccatcctctattaa

SEQ ID NO: 454795 - DNA, 25 bp, Artificial
  probe
  misc_feature (1)..(25): SEQ ID NO: 6965; WAN024CCU; Start 444; Stop 468
tgaactcaaacccaaatatgccttt

SEQ ID NO: 454796 - DNA, 25 bp, Artificial
  probe
  misc_feature (1)..(25): SEQ ID NO: 6965; WAN024CCU; Start 391; Stop 415
gtcctctcagatacagtttcctata

SEQ ID NO: 454797 - DNA, 25 bp, Artificial
  probe
  misc_feature (1)..(25): SEQ ID NO: 6965; WAN024CCU; Start 388; Stop 412
caagtcctctcagatacagtttcct

SEQ ID NO: 454798 - DNA, 25 bp, Artificial
  probe
  misc_feature (1)..(25): SEQ ID NO: 6965; WAN024CCU; Start 387; Stop 411
tcaagtcctctcagatacagtttcc

SEQ ID NO: 454799 - DNA, 25 bp, Artificial
  probe
  misc_feature (1)..(25): SEQ ID NO: 6965; WAN024CCU; Start 316; Stop 340
ggaaatgtttaccagacagagattg

SEQ ID NO: 454800 - DNA, 25 bp, Artificial
  probe
  misc_feature (1)..(25): SEQ ID NO: 6965; WAN024CCU; Start 440; Stop 464
ctcttgaactcaaacccaaatatgc

SEQ ID NO: 454801 - DNA, 25 bp, Artificial
  probe
  misc_feature (1)..(25): SEQ ID NO: 6965; WAN024CCU; Start 439; Stop 463
gctcttgaactcaaacccaaatatg

SEQ ID NO: 454802 - DNA, 25 bp, Artificial
  probe
  misc_feature (1)..(25): SEQ ID NO: 6965; WAN024CCU; Start 319; Stop 343
aatgtttaccagacagagattgatg

SEQ ID NO: 454803 - DNA, 25 bp, Artificial
  probe
  misc_feature (1)..(25): SEQ ID NO: 6965; WAN024CCU; Start 317; Stop 341
gaaatgtttaccagacagagattga

SEQ ID NO: 454804 - DNA, 25 bp, Artificial
  probe
  misc_feature (1)..(25): SEQ ID NO: 6965; WAN024CCU; Start 320; Stop 344
atgtttaccagacagagattgatgc

SEQ ID NO: 454805 - DNA, 25 bp, Artificial
  probe
  misc_feature (1)..(25): SEQ ID NO: 6965; WAN024CCU; Start 537; Stop 561
agacaaacaccatcctctattaagg

SEQ ID NO: 454806 - DNA, 25 bp, Artificial
  probe
  misc_feature (1)..(25): SEQ ID NO: 6965; WAN024CCU; Start 51; Stop 75
tataccaggactgctagagtttgac

SEQ ID NO: 454807 - DNA, 25 bp, Artificial
  probe
  misc_feature (1)..(25): SEQ ID NO: 6965; WAN024CCU; Start 555; Stop 579
attaagggatgtcaaaccacttacg

SEQ ID NO: 454808 - DNA, 25 bp, Artificial
  probe
  misc_feature (1)..(25): SEQ ID NO: 6965; WAN024CCU; Start 443; Stop 467
ttgaactcaaacccaaatatgcctt

SEQ ID NO: 454809 - DNA, 25 bp, Artificial
  probe
  misc_feature (1)..(25): SEQ ID NO: 6965; WAN024CCU; Start 550; Stop 574
cctctattaagggatgtcaaaccac

SEQ ID NO: 454810 - DNA, 25 bp, Artificial
  probe
  misc_feature (1)..(25): SEQ ID NO: 6965; WAN024CCU; Start 538; Stop 562
gacaaacaccatcctctattaaggg

SEQ ID NO: 454811 - DNA, 25 bp, Artificial
  probe
  misc_feature (1)..(25): SEQ ID NO: 6965; WAN024CCU; Start 318; Stop 342
aaatgtttaccagacagagattgat

SEQ ID NO: 454812 - DNA, 25 bp, Artificial
  probe
  misc_feature (1)..(25): SEQ ID NO: 6965; WAN024CCU; Start 438; Stop 462
ggctcttgaactcaaacccaaatat

SEQ ID NO: 454813 - DNA, 25 bp, Artificial
  probe
  misc_feature (1)..(25): SEQ ID NO: 6965; WAN024CCU; Start 554; Stop 578
tattaagggatgtcaaaccacttac

SEQ ID NO: 454814 - DNA, 25 bp, Artificial
  probe
  misc_feature (1)..(25): SEQ ID NO: 6965; WAN024CCU; Start 534; Stop 558
ggcagacaaacaccatcctctatta

SEQ ID NO: 454815 - DNA, 25 bp, Artificial
  probe
  misc_feature (1)..(25): SEQ ID NO: 6965; WAN024CCU; Start 549; Stop 573
tcctctattaagggatgtcaaacca

SEQ ID NO: 454816 - DNA, 25 bp, Artificial
  probe
  misc_feature (1)..(25): SEQ ID NO: 6965; WAN024CCU; Start 442; Stop 466
cttgaactcaaacccaaatatgcct

SEQ ID NO: 454817 - DNA, 25 bp, Artificial
  probe
  misc_feature (1)..(25): SEQ ID NO: 6966; WAN024BN3; Start 550; Stop 574
tactatctaggacattacttgccac

SEQ ID NO: 454818 - DNA, 25 bp, Artificial
  probe
  misc_feature (1)..(25): SEQ ID NO: 6966; WAN024BN3; Start 552; Stop 576
ctatctaggacattacttgccacac

SEQ ID NO: 454819 - DNA, 25 bp, Artificial
  probe
  misc_feature (1)..(25): SEQ ID NO: 6966; WAN024BN3; Start 553; Stop 577
tatctaggacattacttgccacact

SEQ ID NO: 454820 - DNA, 25 bp, Artificial
  probe
  misc_feature (1)..(25): SEQ ID NO: 6966; WAN024BN3; Start 551; Stop 575
actatctaggacattacttgccaca

SEQ ID NO: 454821 - DNA, 25 bp, Artificial
  probe
  misc_feature (1)..(25): SEQ ID NO: 6966; WAN024BN3; Start 549; Stop 573
ttactatctaggacattacttgcca

SEQ ID NO: 454822 - DNA, 25 bp, Artificial
  probe
  misc_feature (1)..(25): SEQ ID NO: 6966; WAN024BN3; Start 554; Stop 578
atctaggacattacttgccacactt

SEQ ID NO: 454823 - DNA, 25 bp, Artificial
  probe
  misc_feature (1)..(25): SEQ ID NO: 6966; WAN024BN3; Start 548; Stop 572
cttactatctaggacattacttgcc

SEQ ID NO: 454824 - DNA, 25 bp, Artificial
  probe
  misc_feature (1)..(25): SEQ ID NO: 6966; WAN024BN3; Start 547; Stop 571
acttactatctaggacattacttgc

SEQ ID NO: 454825 - DNA, 25 bp, Artificial
  probe
  misc_feature (1)..(25): SEQ ID NO: 6966; WAN024BN3; Start 333; Stop 357
aaccgagaagaaggatgttggaatt

SEQ ID NO: 454826 - DNA, 25 bp, Artificial
  probe
  misc_feature (1)..(25): SEQ ID NO: 6966; WAN024BN3; Start 558; Stop 582
aggacattacttgccacactttata

SEQ ID NO: 454827 - DNA, 25 bp, Artificial
  probe
  misc_feature (1)..(25): SEQ ID NO: 6966; WAN024BN3; Start 557; Stop 581
taggacattacttgccacactttat

SEQ ID NO: 454828 - DNA, 25 bp, Artificial
  probe
  misc_feature (1)..(25): SEQ ID NO: 6966; WAN024BN3; Start 814; Stop 838
tggagaatcgttaagcatttagagt

SEQ ID NO: 454829 - DNA, 25 bp, Artificial
  probe
  misc_feature (1)..(25): SEQ ID NO: 6966; WAN024BN3; Start 815; Stop 839
ggagaatcgttaagcatttagagtc

SEQ ID NO: 454830 - DNA, 25 bp, Artificial
  probe
  misc_feature (1)..(25): SEQ ID NO: 6966; WAN024BN3; Start 474; Stop 498
ggatgtaagagaaacgagcagtatt

SEQ ID NO: 454831 - DNA, 25 bp, Artificial
  probe
  misc_feature (1)..(25): SEQ ID NO: 6966; WAN024BN3; Start 475; Stop 499
gatgtaagagaaacgagcagtattt

SEQ ID NO: 454832 - DNA, 25 bp, Artificial
  probe
  misc_feature (1)..(25): SEQ ID NO: 6966; WAN024BN3; Start 813; Stop 837
ttggagaatcgttaagcatttagag

SEQ ID NO: 454833 - DNA, 25 bp, Artificial
  probe
  misc_feature (1)..(25): SEQ ID NO: 6966; WAN024BN3; Start 82; Stop 106
attaacaactcttcagaactattcg

SEQ ID NO: 454834 - DNA, 25 bp, Artificial
  probe
  misc_feature (1)..(25): SEQ ID NO: 6966; WAN024BN3; Start 816; Stop 840
gagaatcgttaagcatttagagtca

SEQ ID NO: 454835 - DNA, 25 bp, Artificial
  probe
  misc_feature (1)..(25): SEQ ID NO: 6966; WAN024BN3; Start 676; Stop 700
gctaatttagaggctttcccattta

SEQ ID NO: 454836 - DNA, 25 bp, Artificial
  probe
  misc_feature (1)..(25): SEQ ID NO: 6966; WAN024BN3; Start 812; Stop 836
tttggagaatcgttaagcatttaga

SEQ ID NO: 454837 - DNA, 25 bp, Artificial
  probe
  misc_feature (1)..(25): SEQ ID NO: 6966; WAN024BN3; Start 556; Stop 580
ctaggacattacttgccacacttta

SEQ ID NO: 454838 - DNA, 25 bp, Artificial
  probe
  misc_feature (1)..(25): SEQ ID NO: 6966; WAN024BN3; Start 473; Stop 497
tggatgtaagagaaacgagcagtat

SEQ ID NO: 454839 - DNA, 25 bp, Artificial
  probe
  misc_feature (1)..(25): SEQ ID NO: 6966; WAN024BN3; Start 680; Stop 704
atttagaggctttcccatttagaag

SEQ ID NO: 454840 - DNA, 25 bp, Artificial
  probe
  misc_feature (1)..(25): SEQ ID NO: 6966; WAN024BN3; Start 821; Stop 845
tcgttaagcatttagagtcatctca

SEQ ID NO: 454841 - DNA, 25 bp, Artificial
  probe
  misc_feature (1)..(25): SEQ ID NO: 6966; WAN024BN3; Start 817; Stop 841
agaatcgttaagcatttagagtcat

SEQ ID NO: 454842 - DNA, 25 bp, Artificial
  probe
  misc_feature (1)..(25): SEQ ID NO: 6966; WAN024BN3; Start 742; Stop 766
gcaacaaactttacaaatctactga

SEQ ID NO: 454843 - DNA, 25 bp, Artificial
  probe
  misc_feature (1)..(25): SEQ ID NO: 6966; WAN024BN3; Start 741; Stop 765
agcaacaaactttacaaatctactg

SEQ ID NO: 454844 - DNA, 25 bp, Artificial
  probe
  misc_feature (1)..(25): SEQ ID NO: 6966; WAN024BN3; Start 472; Stop 496
ttggatgtaagagaaacgagcagta

SEQ ID NO: 454845 - DNA, 25 bp, Artificial
  probe
  misc_feature (1)..(25): SEQ ID NO: 6966; WAN024BN3; Start 832; Stop 856
ttagagtcatctcaacataaacccg

SEQ ID NO: 454846 - DNA, 25 bp, Artificial
  probe
  misc_feature (1)..(25): SEQ ID NO: 6966; WAN024BN3; Start 393; Stop 417
tggagacgactcattaaacatctta

SEQ ID NO: 454847 - DNA, 25 bp, Artificial
  probe
  misc_feature (1)..(25): SEQ ID NO: 6966; WAN024BN3; Start 83; Stop 107
ttaacaactcttcagaactattcga

SEQ ID NO: 454848 - DNA, 25 bp, Artificial
  probe
  misc_feature (1)..(25): SEQ ID NO: 6966; WAN024BN3; Start 822; Stop 846
cgttaagcatttagagtcatctcaa

SEQ ID NO: 454849 - DNA, 25 bp, Artificial
  probe
  misc_feature (1)..(25): SEQ ID NO: 6966; WAN024BN3; Start 634; Stop 658
actgatgagtgggatgagttagaaa

SEQ ID NO: 454850 - DNA, 25 bp, Artificial
  probe
  misc_feature (1)..(25): SEQ ID NO: 6967; WAN024BJR; Start 118; Stop 142
ggttctcatgtagccatactcattg

SEQ ID NO: 454851 - DNA, 25 bp, Artificial
  probe
  misc_feature (1)..(25): SEQ ID NO: 6967; WAN024BJR; Start 119; Stop 143
gttctcatgtagccatactcattgc

SEQ ID NO: 454852 - DNA, 25 bp, Artificial
  probe
  misc_feature (1)..(25): SEQ ID NO: 6967; WAN024BJR; Start 176; Stop 200
ctgtatgggagtatcattatcacga

SEQ ID NO: 454853 - DNA, 25 bp, Artificial
  probe
  misc_feature (1)..(25): SEQ ID NO: 6967; WAN024BJR; Start 177; Stop 201
tgtatgggagtatcattatcacgat

SEQ ID NO: 454854 - DNA, 25 bp, Artificial
  probe
  misc_feature (1)..(25): SEQ ID NO: 6967; WAN024BJR; Start 175; Stop 199
actgtatgggagtatcattatcacg

SEQ ID NO: 454855 - DNA, 25 bp, Artificial
  probe
  misc_feature (1)..(25): SEQ ID NO: 6967; WAN024BJR; Start 166; Stop 190
ggactattgactgtatgggagtatc

SEQ ID NO: 454856 - DNA, 25 bp, Artificial
  probe
  misc_feature (1)..(25): SEQ ID NO: 6967; WAN024BJR; Start 156; Stop 180
tatcacgctcggactattgactgta

SEQ ID NO: 454857 - DNA, 25 bp, Artificial
  probe
  misc_feature (1)..(25): SEQ ID NO: 6967; WAN024BJR; Start 20; Stop 44
aatcctcctttccaaatcacttatt

SEQ ID NO: 454858 - DNA, 25 bp, Artificial
  probe
  misc_feature (1)..(25): SEQ ID NO: 6967; WAN024BJR; Start 19; Stop 43
aaatcctcctttccaaatcacttat

SEQ ID NO: 454859 - DNA, 25 bp, Artificial
  probe
  misc_feature (1)..(25): SEQ ID NO: 6967; WAN024BJR; Start 167; Stop 191
gactattgactgtatgggagtatca

SEQ ID NO: 454860 - DNA, 25 bp, Artificial
  probe
  misc_feature (1)..(25): SEQ ID NO: 6967; WAN024BJR; Start 120; Stop 144
ttctcatgtagccatactcattgcc

SEQ ID NO: 454861 - DNA, 25 bp, Artificial
  probe
  misc_feature (1)..(25): SEQ ID NO: 6967; WAN024BJR; Start 117; Stop 141
tggttctcatgtagccatactcatt

SEQ ID NO: 454862 - DNA, 25 bp, Artificial
  probe
  misc_feature (1)..(25): SEQ ID NO: 6967; WAN024BJR; Start 165; Stop 189
cggactattgactgtatgggagtat

SEQ ID NO: 454863 - DNA, 25 bp, Artificial
  probe
  misc_feature (1)..(25): SEQ ID NO: 6967; WAN024BJR; Start 173; Stop 197
tgactgtatgggagtatcattatca

SEQ ID NO: 454864 - DNA, 25 bp, Artificial
  probe
  misc_feature (1)..(25): SEQ ID NO: 6967; WAN024BJR; Start 168; Stop 192
actattgactgtatgggagtatcat

SEQ ID NO: 454865 - DNA, 25 bp, Artificial
  probe
  misc_feature (1)..(25): SEQ ID NO: 6967; WAN024BJR; Start 174; Stop 198
gactgtatgggagtatcattatcac

SEQ ID NO: 454866 - DNA, 25 bp, Artificial
  probe
  misc_feature (1)..(25): SEQ ID NO: 6967; WAN024BJR; Start 157; Stop 181
atcacgctcggactattgactgtat

SEQ ID NO: 454867 - DNA, 25 bp, Artificial
  probe
  misc_feature (1)..(25): SEQ ID NO: 6967; WAN024BJR; Start 164; Stop 188
tcggactattgactgtatgggagta

SEQ ID NO: 454868 - DNA, 25 bp, Artificial
  probe
  misc_feature (1)..(25): SEQ ID NO: 6967; WAN024BJR; Start 21; Stop 45
atcctcctttccaaatcacttattt

SEQ ID NO: 454869 - DNA, 25 bp, Artificial
  probe
  misc_feature (1)..(25): SEQ ID NO: 6967; WAN024BJR; Start 122; Stop 146
ctcatgtagccatactcattgcctg

SEQ ID NO: 454870 - DNA, 25 bp, Artificial
  probe
  misc_feature (1)..(25): SEQ ID NO: 6967; WAN024BJR; Start 121; Stop 145
tctcatgtagccatactcattgcct

SEQ ID NO: 454871 - DNA, 25 bp, Artificial
  probe
  misc_feature (1)..(25): SEQ ID NO: 6967; WAN024BJR; Start 155; Stop 179
ttatcacgctcggactattgactgt

SEQ ID NO: 454872 - DNA, 25 bp, Artificial
  probe
  misc_feature (1)..(25): SEQ ID NO: 6967; WAN024BJR; Start 172; Stop 196
ttgactgtatgggagtatcattatc

SEQ ID NO: 454873 - DNA, 25 bp, Artificial
  probe
  misc_feature (1)..(25): SEQ ID NO: 6967; WAN024BJR; Start 169; Stop 193
ctattgactgtatgggagtatcatt

SEQ ID NO: 454874 - DNA, 25 bp, Artificial
  probe
  misc_feature (1)..(25): SEQ ID NO: 6967; WAN024BJR; Start 181; Stop 205
tgggagtatcattatcacgataaga

SEQ ID NO: 454875 - DNA, 25 bp, Artificial
  probe
  misc_feature (1)..(25): SEQ ID NO: 6967; WAN024BJR; Start 199; Stop 223
gataagaatgtcgttgcaggcaatc

SEQ ID NO: 454876 - DNA, 25 bp, Artificial
  probe
  misc_feature (1)..(25): SEQ ID NO: 6967; WAN024BJR; Start 154; Stop 178
tttatcacgctcggactattgactg

SEQ ID NO: 454877 - DNA, 25 bp, Artificial
  probe
  misc_feature (1)..(25): SEQ ID NO: 6967; WAN024BJR; Start 178; Stop 202
gtatgggagtatcattatcacgata

SEQ ID NO: 454878 - DNA, 25 bp, Artificial
  probe
  misc_feature (1)..(25): SEQ ID NO: 6967; WAN024BJR; Start 182; Stop 206
gggagtatcattatcacgataagaa

SEQ ID NO: 454879 - DNA, 25 bp, Artificial
  probe
  misc_feature (1)..(25): SEQ ID NO: 6967; WAN024BJR; Start 180; Stop 204
atgggagtatcattatcacgataag

SEQ ID NO: 454880 - DNA, 25 bp, Artificial
  probe
  misc_feature (1)..(25): SEQ ID NO: 6967; WAN024BJR; Start 7; Stop 31
gtctgcttcataaaatcctcctttc

SEQ ID NO: 454881 - DNA, 25 bp, Artificial
  probe
  misc_feature (1)..(25): SEQ ID NO: 6967; WAN024BJR; Start 6; Stop 30
agtctgcttcataaaatcctccttt

SEQ ID NO: 454882 - DNA, 25 bp, Artificial
  probe
  misc_feature (1)..(25): SEQ ID NO: 6967; WAN024BJR; Start 11; Stop 35
gcttcataaaatcctcctttccaaa

SEQ ID NO: 454883 - DNA, 25 bp, Artificial
  probe
  misc_feature (1)..(25): SEQ ID NO: 6968; WAN024DDU; Start 240; Stop 264
catccaatccatctatgaccaactc

SEQ ID NO: 454884 - DNA, 25 bp, Artificial
  probe
  misc_feature (1)..(25): SEQ ID NO: 6968; WAN024DDU; Start 582; Stop 606
cactatcggtatcttccaagtagac

SEQ ID NO: 454885 - DNA, 25 bp, Artificial
  probe
  misc_feature (1)..(25): SEQ ID NO: 6968; WAN024DDU; Start 581; Stop 605
acactatcggtatcttccaagtaga

SEQ ID NO: 454886 - DNA, 25 bp, Artificial
  probe
  misc_feature (1)..(25): SEQ ID NO: 6968; WAN024DDU; Start 580; Stop 604
aacactatcggtatcttccaagtag

SEQ ID NO: 454887 - DNA, 25 bp, Artificial
  probe
  misc_feature (1)..(25): SEQ ID NO: 6968; WAN024DDU; Start 575; Stop 599
actataacactatcggtatcttcca

SEQ ID NO: 454888 - DNA, 25 bp, Artificial
  probe
  misc_feature (1)..(25): SEQ ID NO: 6968; WAN024DDU; Start 578; Stop 602
ataacactatcggtatcttccaagt

SEQ ID NO: 454889 - DNA, 25 bp, Artificial
  probe
  misc_feature (1)..(25): SEQ ID NO: 6968; WAN024DDU; Start 244; Stop 268
caatccatctatgaccaactcactc

SEQ ID NO: 454890 - DNA, 25 bp, Artificial
  probe
  misc_feature (1)..(25): SEQ ID NO: 6968; WAN024DDU; Start 662; Stop 686
attgtgctgatattcaactagacga

SEQ ID NO: 454891 - DNA, 25 bp, Artificial
  probe
  misc_feature (1)..(25): SEQ ID NO: 6968; WAN024DDU; Start 661; Stop 685
gattgtgctgatattcaactagacg

SEQ ID NO: 454892 - DNA, 25 bp, Artificial
  probe
  misc_feature (1)..(25): SEQ ID NO: 6968; WAN024DDU; Start 663; Stop 687
ttgtgctgatattcaactagacgaa

SEQ ID NO: 454893 - DNA, 25 bp, Artificial
  probe
  misc_feature (1)..(25): SEQ ID NO: 6968; WAN024DDU; Start 658; Stop 682
cctgattgtgctgatattcaactag

SEQ ID NO: 454894 - DNA, 25 bp, Artificial
  probe
  misc_feature (1)..(25): SEQ ID NO: 6968; WAN024DDU; Start 583; Stop 607
actatcggtatcttccaagtagacg

SEQ ID NO: 454895 - DNA, 25 bp, Artificial
  probe
  misc_feature (1)..(25): SEQ ID NO: 6968; WAN024DDU; Start 241; Stop 265
atccaatccatctatgaccaactca

SEQ ID NO: 454896 - DNA, 25 bp, Artificial
  probe
  misc_feature (1)..(25): SEQ ID NO: 6968; WAN024DDU; Start 574; Stop 598
gactataacactatcggtatcttcc

SEQ ID NO: 454897 - DNA, 25 bp, Artificial
  probe
  misc_feature (1)..(25): SEQ ID NO: 6968; WAN024DDU; Start 584; Stop 608
ctatcggtatcttccaagtagacgg

SEQ ID NO: 454898 - DNA, 25 bp, Artificial
  probe
  misc_feature (1)..(25): SEQ ID NO: 6968; WAN024DDU; Start 579; Stop 603
taacactatcggtatcttccaagta

SEQ ID NO: 454899 - DNA, 25 bp, Artificial
  probe
  misc_feature (1)..(25): SEQ ID NO: 6968; WAN024DDU; Start 660; Stop 684
tgattgtgctgatattcaactagac

SEQ ID NO: 454900 - DNA, 25 bp, Artificial
  probe
  misc_feature (1)..(25): SEQ ID NO: 6968; WAN024DDU; Start 567; Stop 591
tcaagttgactataacactatcggt

SEQ ID NO: 454901 - DNA, 25 bp, Artificial
  probe
  misc_feature (1)..(25): SEQ ID NO: 6968; WAN024DDU; Start 659; Stop 683
ctgattgtgctgatattcaactaga

SEQ ID NO: 454902 - DNA, 25 bp, Artificial
  probe
  misc_feature (1)..(25): SEQ ID NO: 6968; WAN024DDU; Start 562; Stop 586
acacctcaagttgactataacacta

SEQ ID NO: 454903 - DNA, 25 bp, Artificial
  probe
  misc_feature (1)..(25): SEQ ID NO: 6968; WAN024DDU; Start 561; Stop 585
tacacctcaagttgactataacact

SEQ ID NO: 454904 - DNA, 25 bp, Artificial
  probe
  misc_feature (1)..(25): SEQ ID NO: 6968; WAN024DDU; Start 239; Stop 263
ccatccaatccatctatgaccaact

SEQ ID NO: 454905 - DNA, 25 bp, Artificial
  probe
  misc_feature (1)..(25): SEQ ID NO: 6968; WAN024DDU; Start 245; Stop 269
aatccatctatgaccaactcactcc

SEQ ID NO: 454906 - DNA, 25 bp, Artificial
  probe
  misc_feature (1)..(25): SEQ ID NO: 6968; WAN024DDU; Start 566; Stop 590
ctcaagttgactataacactatcgg

SEQ ID NO: 454907 - DNA, 25 bp, Artificial
  probe
  misc_feature (1)..(25): SEQ ID NO: 6968; WAN024DDU; Start 565; Stop 589
cctcaagttgactataacactatcg

SEQ ID NO: 454908 - DNA, 25 bp, Artificial
  probe
  misc_feature (1)..(25): SEQ ID NO: 6968; WAN024DDU; Start 576; Stop 600
ctataacactatcggtatcttccaa

SEQ ID NO: 454909 - DNA, 25 bp, Artificial
  probe
  misc_feature (1)..(25): SEQ ID NO: 6968; WAN024DDU; Start 568; Stop 592
caagttgactataacactatcggta

SEQ ID NO: 454910 - DNA, 25 bp, Artificial
  probe
  misc_feature (1)..(25): SEQ ID NO: 6968; WAN024DDU; Start 555; Stop 579
caagaatacacctcaagttgactat

SEQ ID NO: 454911 - DNA, 25 bp, Artificial
  probe
  misc_feature (1)..(25): SEQ ID NO: 6968; WAN024DDU; Start 243; Stop 267
ccaatccatctatgaccaactcact

SEQ ID NO: 454912 - DNA, 25 bp, Artificial
  probe
  misc_feature (1)..(25): SEQ ID NO: 6968; WAN024DDU; Start 242; Stop 266
tccaatccatctatgaccaactcac

SEQ ID NO: 454913 - DNA, 25 bp, Artificial
  probe
  misc_feature (1)..(25): SEQ ID NO: 6968; WAN024DDU; Start 577; Stop 601
tataacactatcggtatcttccaag

SEQ ID NO: 454914 - DNA, 25 bp, Artificial
  probe
  misc_feature (1)..(25): SEQ ID NO: 6968; WAN024DDU; Start 560; Stop 584
atacacctcaagttgactataacac

SEQ ID NO: 454915 - DNA, 25 bp, Artificial
  probe
  misc_feature (1)..(25): SEQ ID NO: 6968; WAN024DDU; Start 573; Stop 597
tgactataacactatcggtatcttc

SEQ ID NO: 454916 - DNA, 25 bp, Artificial
  probe
  misc_feature (1)..(25): SEQ ID NO: 6969; WAN024BLW; Start 456; Stop 480
aggagtatctggagttgtctatgaa

SEQ ID NO: 454917 - DNA, 25 bp, Artificial
  probe
  misc_feature (1)..(25): SEQ ID NO: 6969; WAN024BLW; Start 455; Stop 479
taggagtatctggagttgtctatga

SEQ ID NO: 454918 - DNA, 25 bp, Artificial
  probe
  misc_feature (1)..(25): SEQ ID NO: 6969; WAN024BLW; Start 449; Stop 473
ttatgctaggagtatctggagttgt

SEQ ID NO: 454919 - DNA, 25 bp, Artificial
  probe
  misc_feature (1)..(25): SEQ ID NO: 6969; WAN024BLW; Start 453; Stop 477
gctaggagtatctggagttgtctat

SEQ ID NO: 454920 - DNA, 25 bp, Artificial
  probe
  misc_feature (1)..(25): SEQ ID NO: 6969; WAN024BLW; Start 454; Stop 478
ctaggagtatctggagttgtctatg

SEQ ID NO: 454921 - DNA, 25 bp, Artificial
  probe
  misc_feature (1)..(25): SEQ ID NO: 6969; WAN024BLW; Start 450; Stop 474
tatgctaggagtatctggagttgtc

SEQ ID NO: 454922 - DNA, 25 bp, Artificial
  probe
  misc_feature (1)..(25): SEQ ID NO: 6969; WAN024BLW; Start 284; Stop 308
tatgtcacggttctgtaggtactat

SEQ ID NO: 454923 - DNA, 25 bp, Artificial
  probe
  misc_feature (1)..(25): SEQ ID NO: 6969; WAN024BLW; Start 283; Stop 307
ttatgtcacggttctgtaggtacta

SEQ ID NO: 454924 - DNA, 25 bp, Artificial
  probe
  misc_feature (1)..(25): SEQ ID NO: 6969; WAN024BLW; Start 520; Stop 544
ttactggagttaagaggacatgatg

SEQ ID NO: 454925 - DNA, 25 bp, Artificial
  probe
  misc_feature (1)..(25): SEQ ID NO: 6969; WAN024BLW; Start 521; Stop 545
tactggagttaagaggacatgatga

SEQ ID NO: 454926 - DNA, 25 bp, Artificial
  probe
  misc_feature (1)..(25): SEQ ID NO: 6969; WAN024BLW; Start 452; Stop 476
tgctaggagtatctggagttgtcta

SEQ ID NO: 454927 - DNA, 25 bp, Artificial
  probe
  misc_feature (1)..(25): SEQ ID NO: 6969; WAN024BLW; Start 285; Stop 309
atgtcacggttctgtaggtactatc

SEQ ID NO: 454928 - DNA, 25 bp, Artificial
  probe
  misc_feature (1)..(25): SEQ ID NO: 6969; WAN024BLW; Start 519; Stop 543
attactggagttaagaggacatgat

SEQ ID NO: 454929 - DNA, 25 bp, Artificial
  probe
  misc_feature (1)..(25): SEQ ID NO: 6969; WAN024BLW; Start 292; Stop 316
ggttctgtaggtactatcagttgtc

SEQ ID NO: 454930 - DNA, 25 bp, Artificial
  probe
  misc_feature (1)..(25): SEQ ID NO: 6969; WAN024BLW; Start 518; Stop 542
tattactggagttaagaggacatga

SEQ ID NO: 454931 - DNA, 25 bp, Artificial
  probe
  misc_feature (1)..(25): SEQ ID NO: 6969; WAN024BLW; Start 451; Stop 475
atgctaggagtatctggagttgtct

SEQ ID NO: 454932 - DNA, 25 bp, Artificial
  probe
  misc_feature (1)..(25): SEQ ID NO: 6969; WAN024BLW; Start 296; Stop 320
ctgtaggtactatcagttgtcttga

SEQ ID NO: 454933 - DNA, 25 bp, Artificial
  probe
  misc_feature (1)..(25): SEQ ID NO: 6969; WAN024BLW; Start 295; Stop 319
tctgtaggtactatcagttgtcttg

SEQ ID NO: 454934 - DNA, 25 bp, Artificial
  probe
  misc_feature (1)..(25): SEQ ID NO: 6969; WAN024BLW; Start 293; Stop 317
gttctgtaggtactatcagttgtct

SEQ ID NO: 454935 - DNA, 25 bp, Artificial
  probe
  misc_feature (1)..(25): SEQ ID NO: 6969; WAN024BLW; Start 522; Stop 546
actggagttaagaggacatgatgac

SEQ ID NO: 454936 - DNA, 25 bp, Artificial
  probe
  misc_feature (1)..(25): SEQ ID NO: 6969; WAN024BLW; Start 294; Stop 318
ttctgtaggtactatcagttgtctt

SEQ ID NO: 454937 - DNA, 25 bp, Artificial
  probe
  misc_feature (1)..(25): SEQ ID NO: 6969; WAN024BLW; Start 457; Stop 481
ggagtatctggagttgtctatgaaa

SEQ ID NO: 454938 - DNA, 25 bp, Artificial
  probe
  misc_feature (1)..(25): SEQ ID NO: 6969; WAN024BLW; Start 517; Stop 541
ttattactggagttaagaggacatg

SEQ ID NO: 454939 - DNA, 25 bp, Artificial
  probe
  misc_feature (1)..(25): SEQ ID NO: 6969; WAN024BLW; Start 291; Stop 315
cggttctgtaggtactatcagttgt

SEQ ID NO: 454940 - DNA, 25 bp, Artificial
  probe
  misc_feature (1)..(25): SEQ ID NO: 6969; WAN024BLW; Start 290; Stop 314
acggttctgtaggtactatcagttg

SEQ ID NO: 454941 - DNA, 25 bp, Artificial
  probe
  misc_feature (1)..(25): SEQ ID NO: 6969; WAN024BLW; Start 289; Stop 313
cacggttctgtaggtactatcagtt

SEQ ID NO: 454942 - DNA, 25 bp, Artificial
  probe
  misc_feature (1)..(25): SEQ ID NO: 6969; WAN024BLW; Start 280; Stop 304
aatttatgtcacggttctgtaggta

SEQ ID NO: 454943 - DNA, 25 bp, Artificial
  probe
  misc_feature (1)..(25): SEQ ID NO: 6969; WAN024BLW; Start 380; Stop 404
ataatgtcgtttctcaggtcatcaa

SEQ ID NO: 454944 - DNA, 25 bp, Artificial
  probe
  misc_feature (1)..(25): SEQ ID NO: 6969; WAN024BLW; Start 286; Stop 310
tgtcacggttctgtaggtactatca

SEQ ID NO: 454945 - DNA, 25 bp, Artificial
  probe
  misc_feature (1)..(25): SEQ ID NO: 6969; WAN024BLW; Start 381; Stop 405
taatgtcgtttctcaggtcatcaaa

SEQ ID NO: 454946 - DNA, 25 bp, Artificial
  probe
  misc_feature (1)..(25): SEQ ID NO: 6969; WAN024BLW; Start 379; Stop 403
gataatgtcgtttctcaggtcatca

SEQ ID NO: 454947 - DNA, 25 bp, Artificial
  probe
  misc_feature (1)..(25): SEQ ID NO: 6969; WAN024BLW; Start 287; Stop 311
gtcacggttctgtaggtactatcag

SEQ ID NO: 454948 - DNA, 25 bp, Artificial
  probe
  misc_feature (1)..(25): SEQ ID NO: 6969; WAN024BLW; Start 448; Stop 472
tttatgctaggagtatctggagttg

SEQ ID NO: 454949 - DNA, 25 bp, Artificial
  probe
  misc_feature (1)..(25): SEQ ID NO: 6970; WAN024B9G; Start 361; Stop 385
attggagtaggttcttctatctgtg

SEQ ID NO: 454950 - DNA, 25 bp, Artificial
  probe
  misc_feature (1)..(25): SEQ ID NO: 6970; WAN024B9G; Start 225; Stop 249
tggtctcaatatctctcaagtcttc

SEQ ID NO: 454951 - DNA, 25 bp, Artificial
  probe
  misc_feature (1)..(25): SEQ ID NO: 6970; WAN024B9G; Start 226; Stop 250
ggtctcaatatctctcaagtcttcg

SEQ ID NO: 454952 - DNA, 25 bp, Artificial
  probe
  misc_feature (1)..(25): SEQ ID NO: 6970; WAN024B9G; Start 360; Stop 384
gattggagtaggttcttctatctgt

SEQ ID NO: 454953 - DNA, 25 bp, Artificial
  probe
  misc_feature (1)..(25): SEQ ID NO: 6970; WAN024B9G; Start 359; Stop 383
tgattggagtaggttcttctatctg

SEQ ID NO: 454954 - DNA, 25 bp, Artificial
  probe
  misc_feature (1)..(25): SEQ ID NO: 6970; WAN024B9G; Start 231; Stop 255
caatatctctcaagtcttcgcagtt

SEQ ID NO: 454955 - DNA, 25 bp, Artificial
  probe
  misc_feature (1)..(25): SEQ ID NO: 6970; WAN024B9G; Start 229; Stop 253
ctcaatatctctcaagtcttcgcag

SEQ ID NO: 454956 - DNA, 25 bp, Artificial
  probe
  misc_feature (1)..(25): SEQ ID NO: 6970; WAN024B9G; Start 227; Stop 251
gtctcaatatctctcaagtcttcgc

SEQ ID NO: 454957 - DNA, 25 bp, Artificial
  probe
  misc_feature (1)..(25): SEQ ID NO: 6970; WAN024B9G; Start 559; Stop 583
gtcaatgatacttcctctgtaaccg

SEQ ID NO: 454958 - DNA, 25 bp, Artificial
  probe
  misc_feature (1)..(25): SEQ ID NO: 6970; WAN024B9G; Start 557; Stop 581
cggtcaatgatacttcctctgtaac

SEQ ID NO: 454959 - DNA, 25 bp, Artificial
  probe
  misc_feature (1)..(25): SEQ ID NO: 6970; WAN024B9G; Start 228; Stop 252
tctcaatatctctcaagtcttcgca

SEQ ID NO: 454960 - DNA, 25 bp, Artificial
  probe
  misc_feature (1)..(25): SEQ ID NO: 6970; WAN024B9G; Start 358; Stop 382
ttgattggagtaggttcttctatct

SEQ ID NO: 454961 - DNA, 25 bp, Artificial
  probe
  misc_feature (1)..(25): SEQ ID NO: 6970; WAN024B9G; Start 224; Stop 248
ttggtctcaatatctctcaagtctt

SEQ ID NO: 454962 - DNA, 25 bp, Artificial
  probe
  misc_feature (1)..(25): SEQ ID NO: 6970; WAN024B9G; Start 232; Stop 256
aatatctctcaagtcttcgcagttg

SEQ ID NO: 454963 - DNA, 25 bp, Artificial
  probe
  misc_feature (1)..(25): SEQ ID NO: 6970; WAN024B9G; Start 357; Stop 381
cttgattggagtaggttcttctatc

SEQ ID NO: 454964 - DNA, 25 bp, Artificial
  probe
  misc_feature (1)..(25): SEQ ID NO: 6970; WAN024B9G; Start 230; Stop 254
tcaatatctctcaagtcttcgcagt

SEQ ID NO: 454965 - DNA, 25 bp, Artificial
  probe
  misc_feature (1)..(25): SEQ ID NO: 6970; WAN024B9G; Start 57; Stop 81
cgtatcttggtacttaggaggattc

SEQ ID NO: 454966 - DNA, 25 bp, Artificial
  probe
  misc_feature (1)..(25): SEQ ID NO: 6970; WAN024B9G; Start 55; Stop 79
atcgtatcttggtacttaggaggat

SEQ ID NO: 454967 - DNA, 25 bp, Artificial
  probe
  misc_feature (1)..(25): SEQ ID NO: 6970; WAN024B9G; Start 56; Stop 80
tcgtatcttggtacttaggaggatt

SEQ ID NO: 454968 - DNA, 25 bp, Artificial
  probe
  misc_feature (1)..(25): SEQ ID NO: 6970; WAN024B9G; Start 54; Stop 78
tatcgtatcttggtacttaggagga

SEQ ID NO: 454969 - DNA, 25 bp, Artificial
  probe
  misc_feature (1)..(25): SEQ ID NO: 6970; WAN024B9G; Start 53; Stop 77
ctatcgtatcttggtacttaggagg

SEQ ID NO: 454970 - DNA, 25 bp, Artificial
  probe
  misc_feature (1)..(25): SEQ ID NO: 6970; WAN024B9G; Start 58; Stop 82
gtatcttggtacttaggaggattct

SEQ ID NO: 454971 - DNA, 25 bp, Artificial
  probe
  misc_feature (1)..(25): SEQ ID NO: 6970; WAN024B9G; Start 52; Stop 76
tctatcgtatcttggtacttaggag

SEQ ID NO: 454972 - DNA, 25 bp, Artificial
  probe
  misc_feature (1)..(25): SEQ ID NO: 6970; WAN024B9G; Start 356; Stop 380
ccttgattggagtaggttcttctat

SEQ ID NO: 454973 - DNA, 25 bp, Artificial
  probe
  misc_feature (1)..(25): SEQ ID NO: 6970; WAN024B9G; Start 51; Stop 75
ttctatcgtatcttggtacttagga

SEQ ID NO: 454974 - DNA, 25 bp, Artificial
  probe
  misc_feature (1)..(25): SEQ ID NO: 6970; WAN024B9G; Start 560; Stop 584
tcaatgatacttcctctgtaaccgc

SEQ ID NO: 454975 - DNA, 25 bp, Artificial
  probe
  misc_feature (1)..(25): SEQ ID NO: 6970; WAN024B9G; Start 556; Stop 580
gcggtcaatgatacttcctctgtaa

SEQ ID NO: 454976 - DNA, 25 bp, Artificial
  probe
  misc_feature (1)..(25): SEQ ID NO: 6970; WAN024B9G; Start 558; Stop 582
ggtcaatgatacttcctctgtaacc

SEQ ID NO: 454977 - DNA, 25 bp, Artificial
  probe
  misc_feature (1)..(25): SEQ ID NO: 6970; WAN024B9G; Start 233; Stop 257
atatctctcaagtcttcgcagttgg

SEQ ID NO: 454978 - DNA, 25 bp, Artificial
  probe
  misc_feature (1)..(25): SEQ ID NO: 6970; WAN024B9G; Start 191; Stop 215
aattgctccagtatgccgttatctt

SEQ ID NO: 454979 - DNA, 25 bp, Artificial
  probe
  misc_feature (1)..(25): SEQ ID NO: 6970; WAN024B9G; Start 294; Stop 318
aatagccttgattgttgcctacctc

SEQ ID NO: 454980 - DNA, 25 bp, Artificial
  probe
  misc_feature (1)..(25): SEQ ID NO: 6970; WAN024B9G; Start 274; Stop 298
gtcatcctttccaccatttcaatag

SEQ ID NO: 454981 - DNA, 25 bp, Artificial
  probe
  misc_feature (1)..(25): SEQ ID NO: 6970; WAN024B9G; Start 39; Stop 63
ctgccttctcatttctatcgtatct

SEQ ID NO: 454982 - DNA, 25 bp, Artificial
  probe
  misc_feature (1)..(25): SEQ ID NO: 6971; WAN024BKX; Start 21; Stop 45
tcctaagacaagagccaacagactg

SEQ ID NO: 454983 - DNA, 25 bp, Artificial
  probe
  misc_feature (1)..(25): SEQ ID NO: 6971; WAN024BKX; Start 20; Stop 44
ctcctaagacaagagccaacagact

SEQ ID NO: 454984 - DNA, 25 bp, Artificial
  probe
  misc_feature (1)..(25): SEQ ID NO: 6971; WAN024BKX; Start 10; Stop 34
aaaccacatgctcctaagacaagag

SEQ ID NO: 454985 - DNA, 25 bp, Artificial
  probe
  misc_feature (1)..(25): SEQ ID NO: 6971; WAN024BKX; Start 9; Stop 33
aaaaccacatgctcctaagacaaga

SEQ ID NO: 454986 - DNA, 25 bp, Artificial
  probe
  misc_feature (1)..(25): SEQ ID NO: 6971; WAN024BKX; Start 22; Stop 46
cctaagacaagagccaacagactgg

SEQ ID NO: 454987 - DNA, 25 bp, Artificial
  probe
  misc_feature (1)..(25): SEQ ID NO: 6971; WAN024BKX; Start 45; Stop 69
ggccatcaataatagtattgttctt

SEQ ID NO: 454988 - DNA, 25 bp, Artificial
  probe
  misc_feature (1)..(25): SEQ ID NO: 6971; WAN024BKX; Start 72; Stop 96
ttatcattactccttaactagtgtt

SEQ ID NO: 454989 - DNA, 25 bp, Artificial
  probe
  misc_feature (1)..(25): SEQ ID NO: 6971; WAN024BKX; Start 46; Stop 70
gccatcaataatagtattgttcttt

SEQ ID NO: 454990 - DNA, 25 bp, Artificial
  probe
  misc_feature (1)..(25): SEQ ID NO: 6971; WAN024BKX; Start 71; Stop 95
tttatcattactccttaactagtgt

SEQ ID NO: 454991 - DNA, 25 bp, Artificial
  probe
  misc_feature (1)..(25): SEQ ID NO: 6972; WAN024CQK; Start 85; Stop 109
caattcatcaagcgtggtaaggatt

SEQ ID NO: 454992 - DNA, 25 bp, Artificial
  probe
  misc_feature (1)..(25): SEQ ID NO: 6972; WAN024CQK; Start 86; Stop 110
aattcatcaagcgtggtaaggattg

SEQ ID NO: 454993 - DNA, 25 bp, Artificial
  probe
  misc_feature (1)..(25): SEQ ID NO: 6972; WAN024CQK; Start 87; Stop 111
attcatcaagcgtggtaaggattgt

SEQ ID NO: 454994 - DNA, 25 bp, Artificial
  probe
  misc_feature (1)..(25): SEQ ID NO: 6972; WAN024CQK; Start 4; Stop 28
tccgataataaacaccctctctctg

SEQ ID NO: 454995 - DNA, 25 bp, Artificial
  probe
  misc_feature (1)..(25): SEQ ID NO: 6972; WAN024CQK; Start 3; Stop 27
gtccgataataaacaccctctctct

SEQ ID NO: 454996 - DNA, 25 bp, Artificial
  probe
  misc_feature (1)..(25): SEQ ID NO: 6972; WAN024CQK; Start 1; Stop 25
atgtccgataataaacaccctctct

SEQ ID NO: 454997 - DNA, 25 bp, Artificial
  probe
  misc_feature (1)..(25): SEQ ID NO: 6972; WAN024CQK; Start 5; Stop 29
ccgataataaacaccctctctctgt

SEQ ID NO: 454998 - DNA, 25 bp, Artificial
  probe
  misc_feature (1)..(25): SEQ ID NO: 6972; WAN024CQK; Start 2; Stop 26
tgtccgataataaacaccctctctc

SEQ ID NO: 454999 - DNA, 25 bp, Artificial
  probe
  misc_feature (1)..(25): SEQ ID NO: 6972; WAN024CQK; Start 88; Stop 112
ttcatcaagcgtggtaaggattgtg

SEQ ID NO: 455000 - DNA, 25 bp, Artificial
  probe
  misc_feature (1)..(25): SEQ ID NO: 6972; WAN024CQK; Start 84; Stop 108
ccaattcatcaagcgtggtaaggat

SEQ ID NO: 455001 - DNA, 25 bp, Artificial
  probe
  misc_feature (1)..(25): SEQ ID NO: 6972; WAN024CQK; Start 72; Stop 96
caacatcaaaccccaattcatcaag

SEQ ID NO: 455002 - DNA, 25 bp, Artificial
  probe
  misc_feature (1)..(25): SEQ ID NO: 6972; WAN024CQK; Start 50; Stop 74
ttactgttaagcacctgccactcaa

SEQ ID NO: 455003 - DNA, 25 bp, Artificial
  probe
  misc_feature (1)..(25): SEQ ID NO: 6972; WAN024CQK; Start 71; Stop 95
tcaacatcaaaccccaattcatcaa

SEQ ID NO: 455004 - DNA, 25 bp, Artificial
  probe
  misc_feature (1)..(25): SEQ ID NO: 6972; WAN024CQK; Start 70; Stop 94
ctcaacatcaaaccccaattcatca

SEQ ID NO: 455005 - DNA, 25 bp, Artificial
  probe
  misc_feature (1)..(25): SEQ ID NO: 6972; WAN024CQK; Start 69; Stop 93
actcaacatcaaaccccaattcatc

SEQ ID NO: 455006 - DNA, 25 bp, Artificial
  probe
  misc_feature (1)..(25): SEQ ID NO: 6972; WAN024CQK; Start 45; Stop 69
aatccttactgttaagcacctgcca

SEQ ID NO: 455007 - DNA, 25 bp, Artificial
  probe
  misc_feature (1)..(25): SEQ ID NO: 6972; WAN024CQK; Start 68; Stop 92
cactcaacatcaaaccccaattcat

SEQ ID NO: 455008 - DNA, 25 bp, Artificial
  probe
  misc_feature (1)..(25): SEQ ID NO: 6972; WAN024CQK; Start 42; Stop 66
caaaatccttactgttaagcacctg

SEQ ID NO: 455009 - DNA, 25 bp, Artificial
  probe
  misc_feature (1)..(25): SEQ ID NO: 6972; WAN024CQK; Start 6; Stop 30
cgataataaacaccctctctctgtt

SEQ ID NO: 455010 - DNA, 25 bp, Artificial
  probe
  misc_feature (1)..(25): SEQ ID NO: 6972; WAN024CQK; Start 36; Stop 60
gaacgccaaaatccttactgttaag

SEQ ID NO: 455011 - DNA, 25 bp, Artificial
  probe
  misc_feature (1)..(25): SEQ ID NO: 6972; WAN024CQK; Start 44; Stop 68
aaatccttactgttaagcacctgcc

SEQ ID NO: 455012 - DNA, 25 bp, Artificial
  probe
  misc_feature (1)..(25): SEQ ID NO: 6972; WAN024CQK; Start 41; Stop 65
ccaaaatccttactgttaagcacct

SEQ ID NO: 455013 - DNA, 25 bp, Artificial
  probe
  misc_feature (1)..(25): SEQ ID NO: 6972; WAN024CQK; Start 56; Stop 80
ttaagcacctgccactcaacatcaa

SEQ ID NO: 455014 - DNA, 25 bp, Artificial
  probe
  misc_feature (1)..(25): SEQ ID NO: 6972; WAN024CQK; Start 73; Stop 97
aacatcaaaccccaattcatcaagc

SEQ ID NO: 455015 - DNA, 25 bp, Artificial
  probe
  misc_feature (1)..(25): SEQ ID NO: 6972; WAN024CQK; Start 89; Stop 113
tcatcaagcgtggtaaggattgtgg

SEQ ID NO: 455016 - DNA, 25 bp, Artificial
  probe
  misc_feature (1)..(25): SEQ ID NO: 6972; WAN024CQK; Start 43; Stop 67
aaaatccttactgttaagcacctgc

SEQ ID NO: 455017 - DNA, 25 bp, Artificial
  probe
  misc_feature (1)..(25): SEQ ID NO: 6972; WAN024CQK; Start 35; Stop 59
ggaacgccaaaatccttactgttaa

SEQ ID NO: 455018 - DNA, 25 bp, Artificial
  probe
  misc_feature (1)..(25): SEQ ID NO: 6972; WAN024CQK; Start 51; Stop 75
tactgttaagcacctgccactcaac

SEQ ID NO: 455019 - DNA, 25 bp, Artificial
  probe
  misc_feature (1)..(25): SEQ ID NO: 6972; WAN024CQK; Start 49; Stop 73
cttactgttaagcacctgccactca

SEQ ID NO: 455020 - DNA, 25 bp, Artificial
  probe
  misc_feature (1)..(25): SEQ ID NO: 6972; WAN024CQK; Start 46; Stop 70
atccttactgttaagcacctgccac

SEQ ID NO: 455021 - DNA, 25 bp, Artificial
  probe
  misc_feature (1)..(25): SEQ ID NO: 6972; WAN024CQK; Start 37; Stop 61
aacgccaaaatccttactgttaagc

SEQ ID NO: 455022 - DNA, 25 bp, Artificial
  probe
  misc_feature (1)..(25): SEQ ID NO: 6972; WAN024CQK; Start 40; Stop 64
gccaaaatccttactgttaagcacc

SEQ ID NO: 455023 - DNA, 25 bp, Artificial
  probe
  misc_feature (1)..(25): SEQ ID NO: 6972; WAN024CQK; Start 39; Stop 63
cgccaaaatccttactgttaagcac

SEQ ID NO: 455024 - DNA, 25 bp, Artificial
  probe
  misc_feature (1)..(25): SEQ ID NO: 6973; WAN024CVO; Start 232; Stop 256
agagatgaggttgatgatgacaatc

SEQ ID NO: 455025 - DNA, 25 bp, Artificial
  probe
  misc_feature (1)..(25): SEQ ID NO: 6973; WAN024CVO; Start 231; Stop 255
cagagatgaggttgatgatgacaat

SEQ ID NO: 455026 - DNA, 25 bp, Artificial
  probe
  misc_feature (1)..(25): SEQ ID NO: 6973; WAN024CVO; Start 230; Stop 254
tcagagatgaggttgatgatgacaa

SEQ ID NO: 455027 - DNA, 25 bp, Artificial
  probe
  misc_feature (1)..(25): SEQ ID NO: 6973; WAN024CVO; Start 227; Stop 251
gtgtcagagatgaggttgatgatga

SEQ ID NO: 455028 - DNA, 25 bp, Artificial
  probe
  misc_feature (1)..(25): SEQ ID NO: 6973; WAN024CVO; Start 163; Stop 187
caggtcgtccttaattacactgatg

SEQ ID NO: 455029 - DNA, 25 bp, Artificial
  probe
  misc_feature (1)..(25): SEQ ID NO: 6973; WAN024CVO; Start 43; Stop 67
cagagtgttgataagggaaatagtt

SEQ ID NO: 455030 - DNA, 25 bp, Artificial
  probe
  misc_feature (1)..(25): SEQ ID NO: 6973; WAN024CVO; Start 39; Stop 63
aagtcagagtgttgataagggaaat

SEQ ID NO: 455031 - DNA, 25 bp, Artificial
  probe
  misc_feature (1)..(25): SEQ ID NO: 6973; WAN024CVO; Start 38; Stop 62
aaagtcagagtgttgataagggaaa

SEQ ID NO: 455032 - DNA, 25 bp, Artificial
  probe
  misc_feature (1)..(25): SEQ ID NO: 6973; WAN024CVO; Start 164; Stop 188
aggtcgtccttaattacactgatgt

SEQ ID NO: 455033 - DNA, 25 bp, Artificial
  probe
  misc_feature (1)..(25): SEQ ID NO: 6973; WAN024CVO; Start 226; Stop 250
ggtgtcagagatgaggttgatgatg

SEQ ID NO: 455034 - DNA, 25 bp, Artificial
  probe
  misc_feature (1)..(25): SEQ ID NO: 6973; WAN024CVO; Start 225; Stop 249
aggtgtcagagatgaggttgatgat

SEQ ID NO: 455035 - DNA, 25 bp, Artificial
  probe
  misc_feature (1)..(25): SEQ ID NO: 6973; WAN024CVO; Start 42; Stop 66
tcagagtgttgataagggaaatagt

SEQ ID NO: 455036 - DNA, 25 bp, Artificial
  probe
  misc_feature (1)..(25): SEQ ID NO: 6973; WAN024CVO; Start 40; Stop 64
agtcagagtgttgataagggaaata

SEQ ID NO: 455037 - DNA, 25 bp, Artificial
  probe
  misc_feature (1)..(25): SEQ ID NO: 6973; WAN024CVO; Start 165; Stop 189
ggtcgtccttaattacactgatgta

SEQ ID NO: 455038 - DNA, 25 bp, Artificial
  probe
  misc_feature (1)..(25): SEQ ID NO: 6973; WAN024CVO; Start 41; Stop 65
gtcagagtgttgataagggaaatag

SEQ ID NO: 455039 - DNA, 25 bp, Artificial
  probe
  misc_feature (1)..(25): SEQ ID NO: 6973; WAN024CVO; Start 46; Stop 70
agtgttgataagggaaatagtttga

SEQ ID NO: 455040 - DNA, 25 bp, Artificial
  probe
  misc_feature (1)..(25): SEQ ID NO: 6973; WAN024CVO; Start 233; Stop 257
gagatgaggttgatgatgacaatca

SEQ ID NO: 455041 - DNA, 25 bp, Artificial
  probe
  misc_feature (1)..(25): SEQ ID NO: 6973; WAN024CVO; Start 224; Stop 248
aaggtgtcagagatgaggttgatga

SEQ ID NO: 455042 - DNA, 25 bp, Artificial
  probe
  misc_feature (1)..(25): SEQ ID NO: 6973; WAN024CVO; Start 223; Stop 247
caaggtgtcagagatgaggttgatg

SEQ ID NO: 455043 - DNA, 25 bp, Artificial
  probe
  misc_feature (1)..(25): SEQ ID NO: 6973; WAN024CVO; Start 166; Stop 190
gtcgtccttaattacactgatgtag

SEQ ID NO: 455044 - DNA, 25 bp, Artificial
  probe
  misc_feature (1)..(25): SEQ ID NO: 6973; WAN024CVO; Start 167; Stop 191
tcgtccttaattacactgatgtaga

SEQ ID NO: 455045 - DNA, 25 bp, Artificial
  probe
  misc_feature (1)..(25): SEQ ID NO: 6973; WAN024CVO; Start 45; Stop 69
gagtgttgataagggaaatagtttg

SEQ ID NO: 455046 - DNA, 25 bp, Artificial
  probe
  misc_feature (1)..(25): SEQ ID NO: 6973; WAN024CVO; Start 168; Stop 192
cgtccttaattacactgatgtagag

SEQ ID NO: 455047 - DNA, 25 bp, Artificial
  probe
  misc_feature (1)..(25): SEQ ID NO: 6973; WAN024CVO; Start 44; Stop 68
agagtgttgataagggaaatagttt

SEQ ID NO: 455048 - DNA, 25 bp, Artificial
  probe
  misc_feature (1)..(25): SEQ ID NO: 6973; WAN024CVO; Start 169; Stop 193
gtccttaattacactgatgtagagg

SEQ ID NO: 455049 - DNA, 25 bp, Artificial
  probe
  misc_feature (1)..(25): SEQ ID NO: 6973; WAN024CVO; Start 196; Stop 220
gttcatcatgtaggcagacaggtag

SEQ ID NO: 455050 - DNA, 25 bp, Artificial
  probe
  misc_feature (1)..(25): SEQ ID NO: 6973; WAN024CVO; Start 47; Stop 71
gtgttgataagggaaatagtttgaa

SEQ ID NO: 455051 - DNA, 25 bp, Artificial
  probe
  misc_feature (1)..(25): SEQ ID NO: 6973; WAN024CVO; Start 162; Stop 186
gcaggtcgtccttaattacactgat

SEQ ID NO: 455052 - DNA, 25 bp, Artificial
  probe
  misc_feature (1)..(25): SEQ ID NO: 6973; WAN024CVO; Start 156; Stop 180
catcatgcaggtcgtccttaattac

SEQ ID NO: 455053 - DNA, 25 bp, Artificial
  probe
  misc_feature (1)..(25): SEQ ID NO: 6973; WAN024CVO; Start 157; Stop 181
atcatgcaggtcgtccttaattaca

SEQ ID NO: 455054 - DNA, 25 bp, Artificial
  probe
  misc_feature (1)..(25): SEQ ID NO: 6973; WAN024CVO; Start 171; Stop 195
ccttaattacactgatgtagagggc

SEQ ID NO: 455055 - DNA, 25 bp, Artificial
  probe
  misc_feature (1)..(25): SEQ ID NO: 6973; WAN024CVO; Start 170; Stop 194
tccttaattacactgatgtagaggg

SEQ ID NO: 455056 - DNA, 25 bp, Artificial
  probe
  misc_feature (1)..(25): SEQ ID NO: 6973; WAN024CVO; Start 160; Stop 184
atgcaggtcgtccttaattacactg

SEQ ID NO: 455057 - DNA, 25 bp, Artificial
  probe
  misc_feature (1)..(25): SEQ ID NO: 6974; WAN024EVL; Start 84; Stop 108
tttactttcatttggtggtagaata

SEQ ID NO: 455058 - DNA, 25 bp, Artificial
  probe
  misc_feature (1)..(25): SEQ ID NO: 6974; WAN024EVL; Start 87; Stop 111
actttcatttggtggtagaatattt

SEQ ID NO: 455059 - DNA, 25 bp, Artificial
  probe
  misc_feature (1)..(25): SEQ ID NO: 6974; WAN024EVL; Start 85; Stop 109
ttactttcatttggtggtagaatat

SEQ ID NO: 455060 - DNA, 25 bp, Artificial
  probe
  misc_feature (1)..(25): SEQ ID NO: 6974; WAN024EVL; Start 91; Stop 115
tcatttggtggtagaatatttgaaa

SEQ ID NO: 455061 - DNA, 25 bp, Artificial
  probe
  misc_feature (1)..(25): SEQ ID NO: 6974; WAN024EVL; Start 89; Stop 113
tttcatttggtggtagaatatttga

SEQ ID NO: 455062 - DNA, 25 bp, Artificial
  probe
  misc_feature (1)..(25): SEQ ID NO: 6974; WAN024EVL; Start 88; Stop 112
ctttcatttggtggtagaatatttg

SEQ ID NO: 455063 - DNA, 25 bp, Artificial
  probe
  misc_feature (1)..(25): SEQ ID NO: 6974; WAN024EVL; Start 86; Stop 110
tactttcatttggtggtagaatatt

SEQ ID NO: 455064 - DNA, 25 bp, Artificial
  probe
  misc_feature (1)..(25): SEQ ID NO: 6974; WAN024EVL; Start 83; Stop 107
ttttactttcatttggtggtagaat

SEQ ID NO: 455065 - DNA, 25 bp, Artificial
  probe
  misc_feature (1)..(25): SEQ ID NO: 6974; WAN024EVL; Start 82; Stop 106
attttactttcatttggtggtagaa

SEQ ID NO: 455066 - DNA, 25 bp, Artificial
  probe
  misc_feature (1)..(25): SEQ ID NO: 6974; WAN024EVL; Start 81; Stop 105
tattttactttcatttggtggtaga

SEQ ID NO: 455067 - DNA, 25 bp, Artificial
  probe
  misc_feature (1)..(25): SEQ ID NO: 6974; WAN024EVL; Start 90; Stop 114
ttcatttggtggtagaatatttgaa

SEQ ID NO: 455068 - DNA, 25 bp, Artificial
  probe
  misc_feature (1)..(25): SEQ ID NO: 6974; WAN024EVL; Start 78; Stop 102
ttttattttactttcatttggtggt

SEQ ID NO: 455069 - DNA, 25 bp, Artificial
  probe
  misc_feature (1)..(25): SEQ ID NO: 6974; WAN024EVL; Start 80; Stop 104
ttattttactttcatttggtggtag

SEQ ID NO: 455070 - DNA, 25 bp, Artificial
  probe
  misc_feature (1)..(25): SEQ ID NO: 6974; WAN024EVL; Start 92; Stop 116
catttggtggtagaatatttgaaaa

SEQ ID NO: 455071 - DNA, 25 bp, Artificial
  probe
  misc_feature (1)..(25): SEQ ID NO: 6974; WAN024EVL; Start 79; Stop 103
tttattttactttcatttggtggta

SEQ ID NO: 455072 - DNA, 25 bp, Artificial
  probe
  misc_feature (1)..(25): SEQ ID NO: 6975; WAN024CE9; Start 12; Stop 36
cgagtggatattagttatgctcatt

SEQ ID NO: 455073 - DNA, 25 bp, Artificial
  probe
  misc_feature (1)..(25): SEQ ID NO: 6975; WAN024CE9; Start 16; Stop 40
tggatattagttatgctcattgtca

SEQ ID NO: 455074 - DNA, 25 bp, Artificial
  probe
  misc_feature (1)..(25): SEQ ID NO: 6975; WAN024CE9; Start 14; Stop 38
agtggatattagttatgctcattgt

SEQ ID NO: 455075 - DNA, 25 bp, Artificial
  probe
  misc_feature (1)..(25): SEQ ID NO: 6975; WAN024CE9; Start 15; Stop 39
gtggatattagttatgctcattgtc

SEQ ID NO: 455076 - DNA, 25 bp, Artificial
  probe
  misc_feature (1)..(25): SEQ ID NO: 6975; WAN024CE9; Start 11; Stop 35
tcgagtggatattagttatgctcat

SEQ ID NO: 455077 - DNA, 25 bp, Artificial
  probe
  misc_feature (1)..(25): SEQ ID NO: 6975; WAN024CE9; Start 10; Stop 34
atcgagtggatattagttatgctca

SEQ ID NO: 455078 - DNA, 25 bp, Artificial
  probe
  misc_feature (1)..(25): SEQ ID NO: 6975; WAN024CE9; Start 26; Stop 50
ttatgctcattgtcatttcaagtgg

SEQ ID NO: 455079 - DNA, 25 bp, Artificial
  probe
  misc_feature (1)..(25): SEQ ID NO: 6975; WAN024CE9; Start 13; Stop 37
gagtggatattagttatgctcattg

SEQ ID NO: 455080 - DNA, 25 bp, Artificial
  probe
  misc_feature (1)..(25): SEQ ID NO: 6975; WAN024CE9; Start 25; Stop 49
gttatgctcattgtcatttcaagtg

SEQ ID NO: 455081 - DNA, 25 bp, Artificial
  probe
  misc_feature (1)..(25): SEQ ID NO: 6975; WAN024CE9; Start 53; Stop 77
tgacactttggacattgatagttga

SEQ ID NO: 455082 - DNA, 25 bp, Artificial
  probe
  misc_feature (1)..(25): SEQ ID NO: 6975; WAN024CE9; Start 24; Stop 48
agttatgctcattgtcatttcaagt

SEQ ID NO: 455083 - DNA, 25 bp, Artificial
  probe
  misc_feature (1)..(25): SEQ ID NO: 6975; WAN024CE9; Start 54; Stop 78
gacactttggacattgatagttgat

SEQ ID NO: 455084 - DNA, 25 bp, Artificial
  probe
  misc_feature (1)..(25): SEQ ID NO: 6975; WAN024CE9; Start 27; Stop 51
tatgctcattgtcatttcaagtggt

SEQ ID NO: 455085 - DNA, 25 bp, Artificial
  probe
  misc_feature (1)..(25): SEQ ID NO: 6975; WAN024CE9; Start 52; Stop 76
gtgacactttggacattgatagttg

SEQ ID NO: 455086 - DNA, 25 bp, Artificial
  probe
  misc_feature (1)..(25): SEQ ID NO: 6975; WAN024CE9; Start 17; Stop 41
ggatattagttatgctcattgtcat

SEQ ID NO: 455087 - DNA, 25 bp, Artificial
  probe
  misc_feature (1)..(25): SEQ ID NO: 6975; WAN024CE9; Start 9; Stop 33
aatcgagtggatattagttatgctc

SEQ ID NO: 455088 - DNA, 25 bp, Artificial
  probe
  misc_feature (1)..(25): SEQ ID NO: 6975; WAN024CE9; Start 51; Stop 75
tgtgacactttggacattgatagtt

SEQ ID NO: 455089 - DNA, 25 bp, Artificial
  probe
  misc_feature (1)..(25): SEQ ID NO: 6975; WAN024CE9; Start 55; Stop 79
acactttggacattgatagttgatc

SEQ ID NO: 455090 - DNA, 25 bp, Artificial
  probe
  misc_feature (1)..(25): SEQ ID NO: 6975; WAN024CE9; Start 31; Stop 55
ctcattgtcatttcaagtggtgtga

SEQ ID NO: 455091 - DNA, 25 bp, Artificial
  probe
  misc_feature (1)..(25): SEQ ID NO: 6975; WAN024CE9; Start 28; Stop 52
atgctcattgtcatttcaagtggtg

SEQ ID NO: 455092 - DNA, 25 bp, Artificial
  probe
  misc_feature (1)..(25): SEQ ID NO: 6975; WAN024CE9; Start 23; Stop 47
tagttatgctcattgtcatttcaag

SEQ ID NO: 455093 - DNA, 25 bp, Artificial
  probe
  misc_feature (1)..(25): SEQ ID NO: 6975; WAN024CE9; Start 22; Stop 46
ttagttatgctcattgtcatttcaa

SEQ ID NO: 455094 - DNA, 25 bp, Artificial
  probe
  misc_feature (1)..(25): SEQ ID NO: 6975; WAN024CE9; Start 21; Stop 45
attagttatgctcattgtcatttca

SEQ ID NO: 455095 - DNA, 25 bp, Artificial
  probe
  misc_feature (1)..(25): SEQ ID NO: 6975; WAN024CE9; Start 50; Stop 74
gtgtgacactttggacattgatagt

SEQ ID NO: 455096 - DNA, 25 bp, Artificial
  probe
  misc_feature (1)..(25): SEQ ID NO: 6975; WAN024CE9; Start 30; Stop 54
gctcattgtcatttcaagtggtgtg

SEQ ID NO: 455097 - DNA, 25 bp, Artificial
  probe
  misc_feature (1)..(25): SEQ ID NO: 6975; WAN024CE9; Start 49; Stop 73
ggtgtgacactttggacattgatag

SEQ ID NO: 455098 - DNA, 25 bp, Artificial
  probe
  misc_feature (1)..(25): SEQ ID NO: 6975; WAN024CE9; Start 29; Stop 53
tgctcattgtcatttcaagtggtgt

SEQ ID NO: 455099 - DNA, 25 bp, Artificial
  probe
  misc_feature (1)..(25): SEQ ID NO: 6975; WAN024CE9; Start 48; Stop 72
tggtgtgacactttggacattgata

SEQ ID NO: 455100 - DNA, 25 bp, Artificial
  probe
  misc_feature (1)..(25): SEQ ID NO: 6975; WAN024CE9; Start 18; Stop 42
gatattagttatgctcattgtcatt

SEQ ID NO: 455101 - DNA, 25 bp, Artificial
  probe
  misc_feature (1)..(25): SEQ ID NO: 6975; WAN024CE9; Start 20; Stop 44
tattagttatgctcattgtcatttc

SEQ ID NO: 455102 - DNA, 25 bp, Artificial
  probe
  misc_feature (1)..(25): SEQ ID NO: 6975; WAN024CE9; Start 47; Stop 71
gtggtgtgacactttggacattgat

SEQ ID NO: 455103 - DNA, 25 bp, Artificial
  probe
  misc_feature (1)..(25): SEQ ID NO: 6975; WAN024CE9; Start 63; Stop 87
gacattgatagttgatcagaaaggg

SEQ ID NO: 455104 - DNA, 25 bp, Artificial
  probe
  misc_feature (1)..(25): SEQ ID NO: 6975; WAN024CE9; Start 62; Stop 86
ggacattgatagttgatcagaaagg

SEQ ID NO: 455105 - DNA, 25 bp, Artificial
  probe
  misc_feature (1)..(25): SEQ ID NO: 6976; WAN024CEA; Start 28; Stop 52
atgcttattgtcatttcaagtggag

SEQ ID NO: 455106 - DNA, 25 bp, Artificial
  probe
  misc_feature (1)..(25): SEQ ID NO: 6976; WAN024CEA; Start 30; Stop 54
gcttattgtcatttcaagtggagtg

SEQ ID NO: 455107 - DNA, 25 bp, Artificial
  probe
  misc_feature (1)..(25): SEQ ID NO: 6976; WAN024CEA; Start 29; Stop 53
tgcttattgtcatttcaagtggagt

SEQ ID NO: 455108 - DNA, 25 bp, Artificial
  probe
  misc_feature (1)..(25): SEQ ID NO: 6976; WAN024CEA; Start 31; Stop 55
cttattgtcatttcaagtggagtga

SEQ ID NO: 455109 - DNA, 25 bp, Artificial
  probe
  misc_feature (1)..(25): SEQ ID NO: 6976; WAN024CEA; Start 9; Stop 33
aatcgagtggatattagttatgctt

SEQ ID NO: 455110 - DNA, 25 bp, Artificial
  probe
  misc_feature (1)..(25): SEQ ID NO: 6976; WAN024CEA; Start 27; Stop 51
tatgcttattgtcatttcaagtgga

SEQ ID NO: 455111 - DNA, 25 bp, Artificial
  probe
  misc_feature (1)..(25): SEQ ID NO: 6976; WAN024CEA; Start 12; Stop 36
cgagtggatattagttatgcttatt

SEQ ID NO: 455112 - DNA, 25 bp, Artificial
  probe
  misc_feature (1)..(25): SEQ ID NO: 6976; WAN024CEA; Start 26; Stop 50
ttatgcttattgtcatttcaagtgg

SEQ ID NO: 455113 - DNA, 25 bp, Artificial
  probe
  misc_feature (1)..(25): SEQ ID NO: 6976; WAN024CEA; Start 11; Stop 35
tcgagtggatattagttatgcttat

SEQ ID NO: 455114 - DNA, 25 bp, Artificial
  probe
  misc_feature (1)..(25): SEQ ID NO: 6976; WAN024CEA; Start 10; Stop 34
atcgagtggatattagttatgctta

SEQ ID NO: 455115 - DNA, 25 bp, Artificial
  probe
  misc_feature (1)..(25): SEQ ID NO: 6976; WAN024CEA; Start 25; Stop 49
gttatgcttattgtcatttcaagtg

SEQ ID NO: 455116 - DNA, 25 bp, Artificial
  probe
  misc_feature (1)..(25): SEQ ID NO: 6976; WAN024CEA; Start 24; Stop 48
agttatgcttattgtcatttcaagt

SEQ ID NO: 455117 - DNA, 25 bp, Artificial
  probe
  misc_feature (1)..(25): SEQ ID NO: 6976; WAN024CEA; Start 62; Stop 86
tgacaatggtagtcgataagaaagg

SEQ ID NO: 455118 - DNA, 25 bp, Artificial
  probe
  misc_feature (1)..(25): SEQ ID NO: 6976; WAN024CEA; Start 16; Stop 40
tggatattagttatgcttattgtca

SEQ ID NO: 455119 - DNA, 25 bp, Artificial
  probe
  misc_feature (1)..(25): SEQ ID NO: 6976; WAN024CEA; Start 14; Stop 38
agtggatattagttatgcttattgt

SEQ ID NO: 455120 - DNA, 25 bp, Artificial
  probe
  misc_feature (1)..(25): SEQ ID NO: 6976; WAN024CEA; Start 63; Stop 87
gacaatggtagtcgataagaaaggg

SEQ ID NO: 455121 - DNA, 25 bp, Artificial
  probe
  misc_feature (1)..(25): SEQ ID NO: 6976; WAN024CEA; Start 61; Stop 85
ttgacaatggtagtcgataagaaag

SEQ ID NO: 455122 - DNA, 25 bp, Artificial
  probe
  misc_feature (1)..(25): SEQ ID NO: 6976; WAN024CEA; Start 15; Stop 39
gtggatattagttatgcttattgtc

SEQ ID NO: 455123 - DNA, 25 bp, Artificial
  probe
  misc_feature (1)..(25): SEQ ID NO: 6976; WAN024CEA; Start 60; Stop 84
tttgacaatggtagtcgataagaaa

SEQ ID NO: 455124 - DNA, 25 bp, Artificial
  probe
  misc_feature (1)..(25): SEQ ID NO: 6976; WAN024CEA; Start 75; Stop 99
cgataagaaaggggtgataaagaaa

SEQ ID NO: 455125 - DNA, 25 bp, Artificial
  probe
  misc_feature (1)..(25): SEQ ID NO: 6976; WAN024CEA; Start 13; Stop 37
gagtggatattagttatgcttattg

SEQ ID NO: 455126 - DNA, 25 bp, Artificial
  probe
  misc_feature (1)..(25): SEQ ID NO: 6976; WAN024CEA; Start 50; Stop 74
gagtgacagttttgacaatggtagt

SEQ ID NO: 455127 - DNA, 25 bp, Artificial
  probe
  misc_feature (1)..(25): SEQ ID NO: 6976; WAN024CEA; Start 39; Stop 63
catttcaagtggagtgacagttttg

SEQ ID NO: 455128 - DNA, 25 bp, Artificial
  probe
  misc_feature (1)..(25): SEQ ID NO: 6976; WAN024CEA; Start 38; Stop 62
tcatttcaagtggagtgacagtttt

SEQ ID NO: 455129 - DNA, 25 bp, Artificial
  probe
  misc_feature (1)..(25): SEQ ID NO: 6976; WAN024CEA; Start 49; Stop 73
ggagtgacagttttgacaatggtag

SEQ ID NO: 455130 - DNA, 25 bp, Artificial
  probe
  misc_feature (1)..(25): SEQ ID NO: 6976; WAN024CEA; Start 45; Stop 69
aagtggagtgacagttttgacaatg

SEQ ID NO: 455131 - DNA, 25 bp, Artificial
  probe
  misc_feature (1)..(25): SEQ ID NO: 6976; WAN024CEA; Start 44; Stop 68
caagtggagtgacagttttgacaat

SEQ ID NO: 455132 - DNA, 25 bp, Artificial
  probe
  misc_feature (1)..(25): SEQ ID NO: 6976; WAN024CEA; Start 51; Stop 75
agtgacagttttgacaatggtagtc

SEQ ID NO: 455133 - DNA, 25 bp, Artificial
  probe
  misc_feature (1)..(25): SEQ ID NO: 6976; WAN024CEA; Start 48; Stop 72
tggagtgacagttttgacaatggta

SEQ ID NO: 455134 - DNA, 25 bp, Artificial
  probe
  misc_feature (1)..(25): SEQ ID NO: 6976; WAN024CEA; Start 73; Stop 97
gtcgataagaaaggggtgataaaga

SEQ ID NO: 455135 - DNA, 25 bp, Artificial
  probe
  misc_feature (1)..(25): SEQ ID NO: 6976; WAN024CEA; Start 72; Stop 96
agtcgataagaaaggggtgataaag

SEQ ID NO: 455136 - DNA, 25 bp, Artificial
  probe
  misc_feature (1)..(25): SEQ ID NO: 6976; WAN024CEA; Start 70; Stop 94
gtagtcgataagaaaggggtgataa

SEQ ID NO: 455137 - DNA, 25 bp, Artificial
  probe
  misc_feature (1)..(25): SEQ ID NO: 6976; WAN024CEA; Start 74; Stop 98
tcgataagaaaggggtgataaagaa

SEQ ID NO: 455138 - DNA, 25 bp, Artificial
  probe
  misc_feature (1)..(25): SEQ ID NO: 6977; WAN024FJN; Start 208; Stop 232
caggaagtgacaaacattctaagtg

SEQ ID NO: 455139 - DNA, 25 bp, Artificial
  probe
  misc_feature (1)..(25): SEQ ID NO: 6977; WAN024FJN; Start 212; Stop 236
aagtgacaaacattctaagtggaac

SEQ ID NO: 455140 - DNA, 25 bp, Artificial
  probe
  misc_feature (1)..(25): SEQ ID NO: 6977; WAN024FJN; Start 207; Stop 231
acaggaagtgacaaacattctaagt

SEQ ID NO: 455141 - DNA, 25 bp, Artificial
  probe
  misc_feature (1)..(25): SEQ ID NO: 6977; WAN024FJN; Start 206; Stop 230
gacaggaagtgacaaacattctaag

SEQ ID NO: 455142 - DNA, 25 bp, Artificial
  probe
  misc_feature (1)..(25): SEQ ID NO: 6977; WAN024FJN; Start 211; Stop 235
gaagtgacaaacattctaagtggaa

SEQ ID NO: 455143 - DNA, 25 bp, Artificial
  probe
  misc_feature (1)..(25): SEQ ID NO: 6977; WAN024FJN; Start 201; Stop 225
taaacgacaggaagtgacaaacatt

SEQ ID NO: 455144 - DNA, 25 bp, Artificial
  probe
  misc_feature (1)..(25): SEQ ID NO: 6977; WAN024FJN; Start 254; Stop 278
cgaacagtttcattcttcaggttat

SEQ ID NO: 455145 - DNA, 25 bp, Artificial
  probe
  misc_feature (1)..(25): SEQ ID NO: 6977; WAN024FJN; Start 200; Stop 224
ttaaacgacaggaagtgacaaacat

SEQ ID NO: 455146 - DNA, 25 bp, Artificial
  probe
  misc_feature (1)..(25): SEQ ID NO: 6977; WAN024FJN; Start 6; Stop 30
gcgtttgcttgctttgagtaaatat

SEQ ID NO: 455147 - DNA, 25 bp, Artificial
  probe
  misc_feature (1)..(25): SEQ ID NO: 6977; WAN024FJN; Start 210; Stop 234
ggaagtgacaaacattctaagtgga

SEQ ID NO: 455148 - DNA, 25 bp, Artificial
  probe
  misc_feature (1)..(25): SEQ ID NO: 6977; WAN024FJN; Start 209; Stop 233
aggaagtgacaaacattctaagtgg

SEQ ID NO: 455149 - DNA, 25 bp, Artificial
  probe
  misc_feature (1)..(25): SEQ ID NO: 6977; WAN024FJN; Start 217; Stop 241
acaaacattctaagtggaacgacta

SEQ ID NO: 455150 - DNA, 25 bp, Artificial
  probe
  misc_feature (1)..(25): SEQ ID NO: 6977; WAN024FJN; Start 222; Stop 246
cattctaagtggaacgactaaaggt

SEQ ID NO: 455151 - DNA, 25 bp, Artificial
  probe
  misc_feature (1)..(25): SEQ ID NO: 6977; WAN024FJN; Start 221; Stop 245
acattctaagtggaacgactaaagg

SEQ ID NO: 455152 - DNA, 25 bp, Artificial
  probe
  misc_feature (1)..(25): SEQ ID NO: 6977; WAN024FJN; Start 205; Stop 229
cgacaggaagtgacaaacattctaa

SEQ ID NO: 455153 - DNA, 25 bp, Artificial
  probe
  misc_feature (1)..(25): SEQ ID NO: 6977; WAN024FJN; Start 218; Stop 242
caaacattctaagtggaacgactaa

SEQ ID NO: 455154 - DNA, 25 bp, Artificial
  probe
  misc_feature (1)..(25): SEQ ID NO: 6977; WAN024FJN; Start 220; Stop 244
aacattctaagtggaacgactaaag

SEQ ID NO: 455155 - DNA, 25 bp, Artificial
  probe
  misc_feature (1)..(25): SEQ ID NO: 6977; WAN024FJN; Start 215; Stop 239
tgacaaacattctaagtggaacgac

SEQ ID NO: 455156 - DNA, 25 bp, Artificial
  probe
  misc_feature (1)..(25): SEQ ID NO: 6977; WAN024FJN; Start 214; Stop 238
gtgacaaacattctaagtggaacga

SEQ ID NO: 455157 - DNA, 25 bp, Artificial
  probe
  misc_feature (1)..(25): SEQ ID NO: 6977; WAN024FJN; Start 213; Stop 237
agtgacaaacattctaagtggaacg

SEQ ID NO: 455158 - DNA, 25 bp, Artificial
  probe
  misc_feature (1)..(25): SEQ ID NO: 6977; WAN024FJN; Start 219; Stop 243
aaacattctaagtggaacgactaaa

SEQ ID NO: 455159 - DNA, 25 bp, Artificial
  probe
  misc_feature (1)..(25): SEQ ID NO: 6977; WAN024FJN; Start 216; Stop 240
gacaaacattctaagtggaacgact

SEQ ID NO: 455160 - DNA, 25 bp, Artificial
  probe
  misc_feature (1)..(25): SEQ ID NO: 6977; WAN024FJN; Start 257; Stop 281
acagtttcattcttcaggttattga

SEQ ID NO: 455161 - DNA, 25 bp, Artificial
  probe
  misc_feature (1)..(25): SEQ ID NO: 6977; WAN024FJN; Start 223; Stop 247
attctaagtggaacgactaaaggtc

SEQ ID NO: 455162 - DNA, 25 bp, Artificial
  probe
  misc_feature (1)..(25): SEQ ID NO: 6977; WAN024FJN; Start 253; Stop 277
gcgaacagtttcattcttcaggtta

SEQ ID NO: 455163 - DNA, 25 bp, Artificial
  probe
  misc_feature (1)..(25): SEQ ID NO: 6977; WAN024FJN; Start 271; Stop 295
caggttattgaagattatgggattg

SEQ ID NO: 455164 - DNA, 25 bp, Artificial
  probe
  misc_feature (1)..(25): SEQ ID NO: 6977; WAN024FJN; Start 272; Stop 296
aggttattgaagattatgggattga

SEQ ID NO: 455165 - DNA, 25 bp, Artificial
  probe
  misc_feature (1)..(25): SEQ ID NO: 6977; WAN024FJN; Start 256; Stop 280
aacagtttcattcttcaggttattg

SEQ ID NO: 455166 - DNA, 25 bp, Artificial
  probe
  misc_feature (1)..(25): SEQ ID NO: 6977; WAN024FJN; Start 204; Stop 228
acgacaggaagtgacaaacattcta

SEQ ID NO: 455167 - DNA, 25 bp, Artificial
  probe
  misc_feature (1)..(25): SEQ ID NO: 6977; WAN024FJN; Start 7; Stop 31
cgtttgcttgctttgagtaaatatt

SEQ ID NO: 455168 - DNA, 25 bp, Artificial
  probe
  misc_feature (1)..(25): SEQ ID NO: 6977; WAN024FJN; Start 202; Stop 226
aaacgacaggaagtgacaaacattc

SEQ ID NO: 455169 - DNA, 25 bp, Artificial
  probe
  misc_feature (1)..(25): SEQ ID NO: 6977; WAN024FJN; Start 255; Stop 279
gaacagtttcattcttcaggttatt

SEQ ID NO: 455170 - DNA, 25 bp, Artificial
  probe
  misc_feature (1)..(25): SEQ ID NO: 6977; WAN024FJN; Start 273; Stop 297
ggttattgaagattatgggattgag

SEQ ID NO: 455171 - DNA, 25 bp, Artificial
  probe
  misc_feature (1)..(25): SEQ ID NO: 6978; WAN024DDW; Start 79; Stop 103
gaagatgccgatggtattatagtca

SEQ ID NO: 455172 - DNA, 25 bp, Artificial
  probe
  misc_feature (1)..(25): SEQ ID NO: 6978; WAN024DDW; Start 80; Stop 104
aagatgccgatggtattatagtcaa

SEQ ID NO: 455173 - DNA, 25 bp, Artificial
  probe
  misc_feature (1)..(25): SEQ ID NO: 6978; WAN024DDW; Start 76; Stop 100
ttggaagatgccgatggtattatag

SEQ ID NO: 455174 - DNA, 25 bp, Artificial
  probe
  misc_feature (1)..(25): SEQ ID NO: 6978; WAN024DDW; Start 81; Stop 105
agatgccgatggtattatagtcaat

SEQ ID NO: 455175 - DNA, 25 bp, Artificial
  probe
  misc_feature (1)..(25): SEQ ID NO: 6978; WAN024DDW; Start 75; Stop 99
cttggaagatgccgatggtattata

SEQ ID NO: 455176 - DNA, 25 bp, Artificial
  probe
  misc_feature (1)..(25): SEQ ID NO: 6978; WAN024DDW; Start 85; Stop 109
gccgatggtattatagtcaatctgt

SEQ ID NO: 455177 - DNA, 25 bp, Artificial
  probe
  misc_feature (1)..(25): SEQ ID NO: 6978; WAN024DDW; Start 84; Stop 108
tgccgatggtattatagtcaatctg

SEQ ID NO: 455178 - DNA, 25 bp, Artificial
  probe
  misc_feature (1)..(25): SEQ ID NO: 6978; WAN024DDW; Start 78; Stop 102
ggaagatgccgatggtattatagtc

SEQ ID NO: 455179 - DNA, 25 bp, Artificial
  probe
  misc_feature (1)..(25): SEQ ID NO: 6978; WAN024DDW; Start 83; Stop 107
atgccgatggtattatagtcaatct

SEQ ID NO: 455180 - DNA, 25 bp, Artificial
  probe
  misc_feature (1)..(25): SEQ ID NO: 6978; WAN024DDW; Start 82; Stop 106
gatgccgatggtattatagtcaatc

SEQ ID NO: 455181 - DNA, 25 bp, Artificial
  probe
  misc_feature (1)..(25): SEQ ID NO: 6978; WAN024DDW; Start 77; Stop 101
tggaagatgccgatggtattatagt

SEQ ID NO: 455182 - DNA, 25 bp, Artificial
  probe
  misc_feature (1)..(25): SEQ ID NO: 6978; WAN024DDW; Start 87; Stop 111
cgatggtattatagtcaatctgtgg

SEQ ID NO: 455183 - DNA, 25 bp, Artificial
  probe
  misc_feature (1)..(25): SEQ ID NO: 6978; WAN024DDW; Start 86; Stop 110
ccgatggtattatagtcaatctgtg

SEQ ID NO: 455184 - DNA, 25 bp, Artificial
  probe
  misc_feature (1)..(25): SEQ ID NO: 6978; WAN024DDW; Start 73; Stop 97
tacttggaagatgccgatggtatta

SEQ ID NO: 455185 - DNA, 25 bp, Artificial
  probe
  misc_feature (1)..(25): SEQ ID NO: 6978; WAN024DDW; Start 74; Stop 98
acttggaagatgccgatggtattat

SEQ ID NO: 455186 - DNA, 25 bp, Artificial
  probe
  misc_feature (1)..(25): SEQ ID NO: 6978; WAN024DDW; Start 58; Stop 82
atagttagtgccgtctacttggaag

SEQ ID NO: 455187 - DNA, 25 bp, Artificial
  probe
  misc_feature (1)..(25): SEQ ID NO: 6978; WAN024DDW; Start 50; Stop 74
ttcttgacatagttagtgccgtcta

SEQ ID NO: 455188 - DNA, 25 bp, Artificial
  probe
  misc_feature (1)..(25): SEQ ID NO: 6978; WAN024DDW; Start 72; Stop 96
ctacttggaagatgccgatggtatt

SEQ ID NO: 455189 - DNA, 25 bp, Artificial
  probe
  misc_feature (1)..(25): SEQ ID NO: 6978; WAN024DDW; Start 53; Stop 77
ttgacatagttagtgccgtctactt

SEQ ID NO: 455190 - DNA, 25 bp, Artificial
  probe
  misc_feature (1)..(25): SEQ ID NO: 6978; WAN024DDW; Start 57; Stop 81
catagttagtgccgtctacttggaa

SEQ ID NO: 455191 - DNA, 25 bp, Artificial
  probe
  misc_feature (1)..(25): SEQ ID NO: 6978; WAN024DDW; Start 52; Stop 76
cttgacatagttagtgccgtctact

SEQ ID NO: 455192 - DNA, 25 bp, Artificial
  probe
  misc_feature (1)..(25): SEQ ID NO: 6978; WAN024DDW; Start 51; Stop 75
tcttgacatagttagtgccgtctac

SEQ ID NO: 455193 - DNA, 25 bp, Artificial
  probe
  misc_feature (1)..(25): SEQ ID NO: 6978; WAN024DDW; Start 54; Stop 78
tgacatagttagtgccgtctacttg

SEQ ID NO: 455194 - DNA, 25 bp, Artificial
  probe
  misc_feature (1)..(25): SEQ ID NO: 6978; WAN024DDW; Start 59; Stop 83
tagttagtgccgtctacttggaaga

SEQ ID NO: 455195 - DNA, 25 bp, Artificial
  probe
  misc_feature (1)..(25): SEQ ID NO: 6978; WAN024DDW; Start 45; Stop 69
ggagtttcttgacatagttagtgcc

SEQ ID NO: 455196 - DNA, 25 bp, Artificial
  probe
  misc_feature (1)..(25): SEQ ID NO: 6978; WAN024DDW; Start 88; Stop 112
gatggtattatagtcaatctgtggg

SEQ ID NO: 455197 - DNA, 25 bp, Artificial
  probe
  misc_feature (1)..(25): SEQ ID NO: 6978; WAN024DDW; Start 46; Stop 70
gagtttcttgacatagttagtgccg

SEQ ID NO: 455198 - DNA, 25 bp, Artificial
  probe
  misc_feature (1)..(25): SEQ ID NO: 6978; WAN024DDW; Start 44; Stop 68
cggagtttcttgacatagttagtgc

SEQ ID NO: 455199 - DNA, 25 bp, Artificial
  probe
  misc_feature (1)..(25): SEQ ID NO: 6978; WAN024DDW; Start 43; Stop 67
gcggagtttcttgacatagttagtg

SEQ ID NO: 455200 - DNA, 25 bp, Artificial
  probe
  misc_feature (1)..(25): SEQ ID NO: 6978; WAN024DDW; Start 71; Stop 95
tctacttggaagatgccgatggtat

SEQ ID NO: 455201 - DNA, 25 bp, Artificial
  probe
  misc_feature (1)..(25): SEQ ID NO: 6978; WAN024DDW; Start 56; Stop 80
acatagttagtgccgtctacttgga

SEQ ID NO: 455202 - DNA, 25 bp, Artificial
  probe
  misc_feature (1)..(25): SEQ ID NO: 6978; WAN024DDW; Start 55; Stop 79
gacatagttagtgccgtctacttgg

SEQ ID NO: 455203 - DNA, 25 bp, Artificial
  probe
  misc_feature (1)..(25): SEQ ID NO: 6978; WAN024DDW; Start 61; Stop 85
gttagtgccgtctacttggaagatg

SEQ ID NO: 455204 - DNA, 25 bp, Artificial
  probe
  misc_feature (1)..(25): SEQ ID NO: 6979; WAN024C2V; Start 26; Stop 50
gtctccttgctgttgaagttgaatc

SEQ ID NO: 455205 - DNA, 25 bp, Artificial
  probe
  misc_feature (1)..(25): SEQ ID NO: 6979; WAN024C2V; Start 110; Stop 134
attcaacttcgtatattcatcctga

SEQ ID NO: 455206 - DNA, 25 bp, Artificial
  probe
  misc_feature (1)..(25): SEQ ID NO: 6979; WAN024C2V; Start 25; Stop 49
agtctccttgctgttgaagttgaat

SEQ ID NO: 455207 - DNA, 25 bp, Artificial
  probe
  misc_feature (1)..(25): SEQ ID NO: 6979; WAN024C2V; Start 127; Stop 151
catcctgaatctttgaatactgggt

SEQ ID NO: 455208 - DNA, 25 bp, Artificial
  probe
  misc_feature (1)..(25): SEQ ID NO: 6979; WAN024C2V; Start 128; Stop 152
atcctgaatctttgaatactgggta

SEQ ID NO: 455209 - DNA, 25 bp, Artificial
  probe
  misc_feature (1)..(25): SEQ ID NO: 6979; WAN024C2V; Start 204; Stop 228
ccataatattcctgttcttcaccag

SEQ ID NO: 455210 - DNA, 25 bp, Artificial
  probe
  misc_feature (1)..(25): SEQ ID NO: 6979; WAN024C2V; Start 27; Stop 51
tctccttgctgttgaagttgaatca

SEQ ID NO: 455211 - DNA, 25 bp, Artificial
  probe
  misc_feature (1)..(25): SEQ ID NO: 6979; WAN024C2V; Start 126; Stop 150
tcatcctgaatctttgaatactggg

SEQ ID NO: 455212 - DNA, 25 bp, Artificial
  probe
  misc_feature (1)..(25): SEQ ID NO: 6979; WAN024C2V; Start 129; Stop 153
tcctgaatctttgaatactgggtac

SEQ ID NO: 455213 - DNA, 25 bp, Artificial
  probe
  misc_feature (1)..(25): SEQ ID NO: 6979; WAN024C2V; Start 72; Stop 96
aagtcggcatctaactgatttcttt

SEQ ID NO: 455214 - DNA, 25 bp, Artificial
  probe
  misc_feature (1)..(25): SEQ ID NO: 6979; WAN024C2V; Start 24; Stop 48
gagtctccttgctgttgaagttgaa

SEQ ID NO: 455215 - DNA, 25 bp, Artificial
  probe
  misc_feature (1)..(25): SEQ ID NO: 6979; WAN024C2V; Start 205; Stop 229
cataatattcctgttcttcaccaga

SEQ ID NO: 455216 - DNA, 25 bp, Artificial
  probe
  misc_feature (1)..(25): SEQ ID NO: 6979; WAN024C2V; Start 73; Stop 97
agtcggcatctaactgatttctttc

SEQ ID NO: 455217 - DNA, 25 bp, Artificial
  probe
  misc_feature (1)..(25): SEQ ID NO: 6979; WAN024C2V; Start 109; Stop 133
tattcaacttcgtatattcatcctg

SEQ ID NO: 455218 - DNA, 25 bp, Artificial
  probe
  misc_feature (1)..(25): SEQ ID NO: 6979; WAN024C2V; Start 168; Stop 192
tccgaatttaactgagataggtagt

SEQ ID NO: 455219 - DNA, 25 bp, Artificial
  probe
  misc_feature (1)..(25): SEQ ID NO: 6979; WAN024C2V; Start 177; Stop 201
aactgagataggtagtattcaactt

SEQ ID NO: 455220 - DNA, 25 bp, Artificial
  probe
  misc_feature (1)..(25): SEQ ID NO: 6979; WAN024C2V; Start 182; Stop 206
agataggtagtattcaactttccca

SEQ ID NO: 455221 - DNA, 25 bp, Artificial
  probe
  misc_feature (1)..(25): SEQ ID NO: 6979; WAN024C2V; Start 74; Stop 98
gtcggcatctaactgatttctttca

SEQ ID NO: 455222 - DNA, 25 bp, Artificial
  probe
  misc_feature (1)..(25): SEQ ID NO: 6979; WAN024C2V; Start 71; Stop 95
caagtcggcatctaactgatttctt

SEQ ID NO: 455223 - DNA, 25 bp, Artificial
  probe
  misc_feature (1)..(25): SEQ ID NO: 6979; WAN024C2V; Start 202; Stop 226
tcccataatattcctgttcttcacc

SEQ ID NO: 455224 - DNA, 25 bp, Artificial
  probe
  misc_feature (1)..(25): SEQ ID NO: 6979; WAN024C2V; Start 203; Stop 227
cccataatattcctgttcttcacca

SEQ ID NO: 455225 - DNA, 25 bp, Artificial
  probe
  misc_feature (1)..(25): SEQ ID NO: 6979; WAN024C2V; Start 31; Stop 55
cttgctgttgaagttgaatcaattc

SEQ ID NO: 455226 - DNA, 25 bp, Artificial
  probe
  misc_feature (1)..(25): SEQ ID NO: 6979; WAN024C2V; Start 210; Stop 234
tattcctgttcttcaccagaattag

SEQ ID NO: 455227 - DNA, 25 bp, Artificial
  probe
  misc_feature (1)..(25): SEQ ID NO: 6979; WAN024C2V; Start 167; Stop 191
ttccgaatttaactgagataggtag

SEQ ID NO: 455228 - DNA, 25 bp, Artificial
  probe
  misc_feature (1)..(25): SEQ ID NO: 6979; WAN024C2V; Start 30; Stop 54
ccttgctgttgaagttgaatcaatt

SEQ ID NO: 455229 - DNA, 25 bp, Artificial
  probe
  misc_feature (1)..(25): SEQ ID NO: 6979; WAN024C2V; Start 181; Stop 205
gagataggtagtattcaactttccc

SEQ ID NO: 455230 - DNA, 25 bp, Artificial
  probe
  misc_feature (1)..(25): SEQ ID NO: 6979; WAN024C2V; Start 201; Stop 225
ttcccataatattcctgttcttcac

SEQ ID NO: 455231 - DNA, 25 bp, Artificial
  probe
  misc_feature (1)..(25): SEQ ID NO: 6979; WAN024C2V; Start 29; Stop 53
tccttgctgttgaagttgaatcaat

SEQ ID NO: 455232 - DNA, 25 bp, Artificial
  probe
  misc_feature (1)..(25): SEQ ID NO: 6979; WAN024C2V; Start 166; Stop 190
tttccgaatttaactgagataggta

SEQ ID NO: 455233 - DNA, 25 bp, Artificial
  probe
  misc_feature (1)..(25): SEQ ID NO: 6979; WAN024C2V; Start 183; Stop 207
gataggtagtattcaactttcccat

SEQ ID NO: 455234 - DNA, 25 bp, Artificial
  probe
  misc_feature (1)..(25): SEQ ID NO: 6979; WAN024C2V; Start 209; Stop 233
atattcctgttcttcaccagaatta

SEQ ID NO: 455235 - DNA, 25 bp, Artificial
  probe
  misc_feature (1)..(25): SEQ ID NO: 6979; WAN024C2V; Start 208; Stop 232
aatattcctgttcttcaccagaatt

SEQ ID NO: 455236 - DNA, 25 bp, Artificial
  probe
  misc_feature (1)..(25): SEQ ID NO: 6979; WAN024C2V; Start 180; Stop 204
tgagataggtagtattcaactttcc

SEQ ID NO: 455237 - DNA, 25 bp, Artificial
  probe
  misc_feature (1)..(25): SEQ ID NO: 6980; WAN024BHF; Start 696; Stop 720
acaagagatgattcaagtggatact

SEQ ID NO: 455238 - DNA, 25 bp, Artificial
  probe
  misc_feature (1)..(25): SEQ ID NO: 6980; WAN024BHF; Start 1012; Stop 1036
tcttatgatgatgtcgagttggaat

SEQ ID NO: 455239 - DNA, 25 bp, Artificial
  probe
  misc_feature (1)..(25): SEQ ID NO: 6980; WAN024BHF; Start 192; Stop 216
aatcgaactcctccatatcttgaac

SEQ ID NO: 455240 - DNA, 25 bp, Artificial
  probe
  misc_feature (1)..(25): SEQ ID NO: 6980; WAN024BHF; Start 697; Stop 721
caagagatgattcaagtggatacta

SEQ ID NO: 455241 - DNA, 25 bp, Artificial
  probe
  misc_feature (1)..(25): SEQ ID NO: 6980; WAN024BHF; Start 1013; Stop 1037
cttatgatgatgtcgagttggaatt

SEQ ID NO: 455242 - DNA, 25 bp, Artificial
  probe
  misc_feature (1)..(25): SEQ ID NO: 6980; WAN024BHF; Start 1011; Stop 1035
ttcttatgatgatgtcgagttggaa

SEQ ID NO: 455243 - DNA, 25 bp, Artificial
  probe
  misc_feature (1)..(25): SEQ ID NO: 6980; WAN024BHF; Start 216; Stop 240
ccactatgtaatcggtcaagatcgt

SEQ ID NO: 455244 - DNA, 25 bp, Artificial
  probe
  misc_feature (1)..(25): SEQ ID NO: 6980; WAN024BHF; Start 191; Stop 215
caatcgaactcctccatatcttgaa

SEQ ID NO: 455245 - DNA, 25 bp, Artificial
  probe
  misc_feature (1)..(25): SEQ ID NO: 6980; WAN024BHF; Start 95; Stop 119
cctttatttgtaatgaatgcgtgga

SEQ ID NO: 455246 - DNA, 25 bp, Artificial
  probe
  misc_feature (1)..(25): SEQ ID NO: 6980; WAN024BHF; Start 92; Stop 116
atgcctttatttgtaatgaatgcgt

SEQ ID NO: 455247 - DNA, 25 bp, Artificial
  probe
  misc_feature (1)..(25): SEQ ID NO: 6980; WAN024BHF; Start 1002; Stop 1026
aaccttgctttcttatgatgatgtc

SEQ ID NO: 455248 - DNA, 25 bp, Artificial
  probe
  misc_feature (1)..(25): SEQ ID NO: 6980; WAN024BHF; Start 97; Stop 121
tttatttgtaatgaatgcgtggagc

SEQ ID NO: 455249 - DNA, 25 bp, Artificial
  probe
  misc_feature (1)..(25): SEQ ID NO: 6980; WAN024BHF; Start 91; Stop 115
aatgcctttatttgtaatgaatgcg

SEQ ID NO: 455250 - DNA, 25 bp, Artificial
  probe
  misc_feature (1)..(25): SEQ ID NO: 6980; WAN024BHF; Start 453; Stop 477
tggttatgtaggtgaggatgtggaa

SEQ ID NO: 455251 - DNA, 25 bp, Artificial
  probe
  misc_feature (1)..(25): SEQ ID NO: 6980; WAN024BHF; Start 217; Stop 241
cactatgtaatcggtcaagatcgtg

SEQ ID NO: 455252 - DNA, 25 bp, Artificial
  probe
  misc_feature (1)..(25): SEQ ID NO: 6980; WAN024BHF; Start 1001; Stop 1025
aaaccttgctttcttatgatgatgt

SEQ ID NO: 455253 - DNA, 25 bp, Artificial
  probe
  misc_feature (1)..(25): SEQ ID NO: 6980; WAN024BHF; Start 547; Stop 571
gtggatgaaattgacaagattgcta

SEQ ID NO: 455254 - DNA, 25 bp, Artificial
  probe
  misc_feature (1)..(25): SEQ ID NO: 6980; WAN024BHF; Start 272; Stop 296
atcattacaaacgcatcaatttcca

SEQ ID NO: 455255 - DNA, 25 bp, Artificial
  probe
  misc_feature (1)..(25): SEQ ID NO: 6980; WAN024BHF; Start 195; Stop 219
cgaactcctccatatcttgaaccac

SEQ ID NO: 455256 - DNA, 25 bp, Artificial
  probe
  misc_feature (1)..(25): SEQ ID NO: 6980; WAN024BHF; Start 188; Stop 212
aaccaatcgaactcctccatatctt

SEQ ID NO: 455257 - DNA, 25 bp, Artificial
  probe
  misc_feature (1)..(25): SEQ ID NO: 6980; WAN024BHF; Start 96; Stop 120
ctttatttgtaatgaatgcgtggag

SEQ ID NO: 455258 - DNA, 25 bp, Artificial
  probe
  misc_feature (1)..(25): SEQ ID NO: 6980; WAN024BHF; Start 93; Stop 117
tgcctttatttgtaatgaatgcgtg

SEQ ID NO: 455259 - DNA, 25 bp, Artificial
  probe
  misc_feature (1)..(25): SEQ ID NO: 6980; WAN024BHF; Start 852; Stop 876
agaaatcatcgcagaggatattcaa

SEQ ID NO: 455260 - DNA, 25 bp, Artificial
  probe
  misc_feature (1)..(25): SEQ ID NO: 6980; WAN024BHF; Start 851; Stop 875
aagaaatcatcgcagaggatattca

SEQ ID NO: 455261 - DNA, 25 bp, Artificial
  probe
  misc_feature (1)..(25): SEQ ID NO: 6980; WAN024BHF; Start 850; Stop 874
caagaaatcatcgcagaggatattc

SEQ ID NO: 455262 - DNA, 25 bp, Artificial
  probe
  misc_feature (1)..(25): SEQ ID NO: 6980; WAN024BHF; Start 853; Stop 877
gaaatcatcgcagaggatattcaaa

SEQ ID NO: 455263 - DNA, 25 bp, Artificial
  probe
  misc_feature (1)..(25): SEQ ID NO: 6980; WAN024BHF; Start 548; Stop 572
tggatgaaattgacaagattgctaa

SEQ ID NO: 455264 - DNA, 25 bp, Artificial
  probe
  misc_feature (1)..(25): SEQ ID NO: 6980; WAN024BHF; Start 271; Stop 295
aatcattacaaacgcatcaatttcc

SEQ ID NO: 455265 - DNA, 25 bp, Artificial
  probe
  misc_feature (1)..(25): SEQ ID NO: 6980; WAN024BHF; Start 273; Stop 297
tcattacaaacgcatcaatttccac

SEQ ID NO: 455266 - DNA, 25 bp, Artificial
  probe
  misc_feature (1)..(25): SEQ ID NO: 6980; WAN024BHF; Start 999; Stop 1023
ccaaaccttgctttcttatgatgat

SEQ ID NO: 455267 - DNA, 25 bp, Artificial
  probe
  misc_feature (1)..(25): SEQ ID NO: 6980; WAN024BHF; Start 1048; Stop 1072
gccctacaagagattgctaataaag

SEQ ID NO: 455268 - DNA, 25 bp, Artificial
  probe
  misc_feature (1)..(25): SEQ ID NO: 6980; WAN024BHF; Start 1003; Stop 1027
accttgctttcttatgatgatgtcg

SEQ ID NO: 455269 - DNA, 25 bp, Artificial
  probe
  misc_feature (1)..(25): SEQ ID NO: 6980; WAN024BHF; Start 997; Stop 1021
taccaaaccttgctttcttatgatg

SEQ ID NO: 455270 - DNA, 25 bp, Artificial
  probe
  misc_feature (1)..(25): SEQ ID NO: 6981; WAN024BYD; Start 24; Stop 48
attaacaggcgaagaagatactcag

SEQ ID NO: 455271 - DNA, 25 bp, Artificial
  probe
  misc_feature (1)..(25): SEQ ID NO: 6981; WAN024BYD; Start 23; Stop 47
aattaacaggcgaagaagatactca

SEQ ID NO: 455272 - DNA, 25 bp, Artificial
  probe
  misc_feature (1)..(25): SEQ ID NO: 6981; WAN024BYD; Start 199; Stop 223
gaaggtggtatagcagtagtctacg

SEQ ID NO: 455273 - DNA, 25 bp, Artificial
  probe
  misc_feature (1)..(25): SEQ ID NO: 6981; WAN024BYD; Start 198; Stop 222
cgaaggtggtatagcagtagtctac

SEQ ID NO: 455274 - DNA, 25 bp, Artificial
  probe
  misc_feature (1)..(25): SEQ ID NO: 6981; WAN024BYD; Start 204; Stop 228
tggtatagcagtagtctacggagaa

SEQ ID NO: 455275 - DNA, 25 bp, Artificial
  probe
  misc_feature (1)..(25): SEQ ID NO: 6981; WAN024BYD; Start 197; Stop 221
ccgaaggtggtatagcagtagtcta

SEQ ID NO: 455276 - DNA, 25 bp, Artificial
  probe
  misc_feature (1)..(25): SEQ ID NO: 6981; WAN024BYD; Start 25; Stop 49
ttaacaggcgaagaagatactcagc

SEQ ID NO: 455277 - DNA, 25 bp, Artificial
  probe
  misc_feature (1)..(25): SEQ ID NO: 6981; WAN024BYD; Start 18; Stop 42
gaagaaattaacaggcgaagaagat

SEQ ID NO: 455278 - DNA, 25 bp, Artificial
  probe
  misc_feature (1)..(25): SEQ ID NO: 6981; WAN024BYD; Start 203; Stop 227
gtggtatagcagtagtctacggaga

SEQ ID NO: 455279 - DNA, 25 bp, Artificial
  probe
  misc_feature (1)..(25): SEQ ID NO: 6981; WAN024BYD; Start 17; Stop 41
tgaagaaattaacaggcgaagaaga

SEQ ID NO: 455280 - DNA, 25 bp, Artificial
  probe
  misc_feature (1)..(25): SEQ ID NO: 6981; WAN024BYD; Start 80; Stop 104
atcttatcttgtcagagactaatcg

SEQ ID NO: 455281 - DNA, 25 bp, Artificial
  probe
  misc_feature (1)..(25): SEQ ID NO: 6981; WAN024BYD; Start 22; Stop 46
aaattaacaggcgaagaagatactc

SEQ ID NO: 455282 - DNA, 25 bp, Artificial
  probe
  misc_feature (1)..(25): SEQ ID NO: 6981; WAN024BYD; Start 21; Stop 45
gaaattaacaggcgaagaagatact

SEQ ID NO: 455283 - DNA, 25 bp, Artificial
  probe
  misc_feature (1)..(25): SEQ ID NO: 6981; WAN024BYD; Start 20; Stop 44
agaaattaacaggcgaagaagatac

SEQ ID NO: 455284 - DNA, 25 bp, Artificial
  probe
  misc_feature (1)..(25): SEQ ID NO: 6981; WAN024BYD; Start 104; Stop 128
gaacatctttgacacctgctttaag

SEQ ID NO: 455285 - DNA, 25 bp, Artificial
  probe
  misc_feature (1)..(25): SEQ ID NO: 6981; WAN024BYD; Start 88; Stop 112
ttgtcagagactaatcgaacatctt

SEQ ID NO: 455286 - DNA, 25 bp, Artificial
  probe
  misc_feature (1)..(25): SEQ ID NO: 6981; WAN024BYD; Start 87; Stop 111
cttgtcagagactaatcgaacatct

SEQ ID NO: 455287 - DNA, 25 bp, Artificial
  probe
  misc_feature (1)..(25): SEQ ID NO: 6981; WAN024BYD; Start 86; Stop 110
tcttgtcagagactaatcgaacatc

SEQ ID NO: 455288 - DNA, 25 bp, Artificial
  probe
  misc_feature (1)..(25): SEQ ID NO: 6981; WAN024BYD; Start 85; Stop 109
atcttgtcagagactaatcgaacat

SEQ ID NO: 455289 - DNA, 25 bp, Artificial
  probe
  misc_feature (1)..(25): SEQ ID NO: 6981; WAN024BYD; Start 105; Stop 129
aacatctttgacacctgctttaagt

SEQ ID NO: 455290 - DNA, 25 bp, Artificial
  probe
  misc_feature (1)..(25): SEQ ID NO: 6981; WAN024BYD; Start 84; Stop 108
tatcttgtcagagactaatcgaaca

SEQ ID NO: 455291 - DNA, 25 bp, Artificial
  probe
  misc_feature (1)..(25): SEQ ID NO: 6981; WAN024BYD; Start 200; Stop 224
aaggtggtatagcagtagtctacgg

SEQ ID NO: 455292 - DNA, 25 bp, Artificial
  probe
  misc_feature (1)..(25): SEQ ID NO: 6981; WAN024BYD; Start 125; Stop 149
taagtctcttaatacctgaggttgc

SEQ ID NO: 455293 - DNA, 25 bp, Artificial
  probe
  misc_feature (1)..(25): SEQ ID NO: 6981; WAN024BYD; Start 128; Stop 152
gtctcttaatacctgaggttgctat

SEQ ID NO: 455294 - DNA, 25 bp, Artificial
  probe
  misc_feature (1)..(25): SEQ ID NO: 6981; WAN024BYD; Start 127; Stop 151
agtctcttaatacctgaggttgcta

SEQ ID NO: 455295 - DNA, 25 bp, Artificial
  probe
  misc_feature (1)..(25): SEQ ID NO: 6981; WAN024BYD; Start 19; Stop 43
aagaaattaacaggcgaagaagata

SEQ ID NO: 455296 - DNA, 25 bp, Artificial
  probe
  misc_feature (1)..(25): SEQ ID NO: 6981; WAN024BYD; Start 130; Stop 154
ctcttaatacctgaggttgctatcg

SEQ ID NO: 455297 - DNA, 25 bp, Artificial
  probe
  misc_feature (1)..(25): SEQ ID NO: 6981; WAN024BYD; Start 129; Stop 153
tctcttaatacctgaggttgctatc

SEQ ID NO: 455298 - DNA, 25 bp, Artificial
  probe
  misc_feature (1)..(25): SEQ ID NO: 6981; WAN024BYD; Start 205; Stop 229
ggtatagcagtagtctacggagaaa

SEQ ID NO: 455299 - DNA, 25 bp, Artificial
  probe
  misc_feature (1)..(25): SEQ ID NO: 6981; WAN024BYD; Start 81; Stop 105
tcttatcttgtcagagactaatcga

SEQ ID NO: 455300 - DNA, 25 bp, Artificial
  probe
  misc_feature (1)..(25): SEQ ID NO: 6981; WAN024BYD; Start 126; Stop 150
aagtctcttaatacctgaggttgct

SEQ ID NO: 455301 - DNA, 25 bp, Artificial
  probe
  misc_feature (1)..(25): SEQ ID NO: 6981; WAN024BYD; Start 132; Stop 156
cttaatacctgaggttgctatcgaa

SEQ ID NO: 455302 - DNA, 25 bp, Artificial
  probe
  misc_feature (1)..(25): SEQ ID NO: 6981; WAN024BYD; Start 133; Stop 157
ttaatacctgaggttgctatcgaac

SEQ ID NO: 455303 - DNA, 25 bp, Artificial
  probe
  misc_feature (1)..(25): SEQ ID NO: 6982; WAN024CT5; Start 367; Stop 391
gttgttgagaaggaattgaatgagt

SEQ ID NO: 455304 - DNA, 25 bp, Artificial
  probe
  misc_feature (1)..(25): SEQ ID NO: 6982; WAN024CT5; Start 366; Stop 390
tgttgttgagaaggaattgaatgag

SEQ ID NO: 455305 - DNA, 25 bp, Artificial
  probe
  misc_feature (1)..(25): SEQ ID NO: 6982; WAN024CT5; Start 372; Stop 396
tgagaaggaattgaatgagttaggt

SEQ ID NO: 455306 - DNA, 25 bp, Artificial
  probe
  misc_feature (1)..(25): SEQ ID NO: 6982; WAN024CT5; Start 359; Stop 383
gcattgatgttgttgagaaggaatt

SEQ ID NO: 455307 - DNA, 25 bp, Artificial
  probe
  misc_feature (1)..(25): SEQ ID NO: 6982; WAN024CT5; Start 362; Stop 386
ttgatgttgttgagaaggaattgaa

SEQ ID NO: 455308 - DNA, 25 bp, Artificial
  probe
  misc_feature (1)..(25): SEQ ID NO: 6982; WAN024CT5; Start 360; Stop 384
cattgatgttgttgagaaggaattg

SEQ ID NO: 455309 - DNA, 25 bp, Artificial
  probe
  misc_feature (1)..(25): SEQ ID NO: 6982; WAN024CT5; Start 354; Stop 378
aattggcattgatgttgttgagaag

SEQ ID NO: 455310 - DNA, 25 bp, Artificial
  probe
  misc_feature (1)..(25): SEQ ID NO: 6982; WAN024CT5; Start 368; Stop 392
ttgttgagaaggaattgaatgagtt

SEQ ID NO: 455311 - DNA, 25 bp, Artificial
  probe
  misc_feature (1)..(25): SEQ ID NO: 6982; WAN024CT5; Start 365; Stop 389
atgttgttgagaaggaattgaatga

SEQ ID NO: 455312 - DNA, 25 bp, Artificial
  probe
  misc_feature (1)..(25): SEQ ID NO: 6982; WAN024CT5; Start 363; Stop 387
tgatgttgttgagaaggaattgaat

SEQ ID NO: 455313 - DNA, 25 bp, Artificial
  probe
  misc_feature (1)..(25): SEQ ID NO: 6982; WAN024CT5; Start 361; Stop 385
attgatgttgttgagaaggaattga

SEQ ID NO: 455314 - DNA, 25 bp, Artificial
  probe
  misc_feature (1)..(25): SEQ ID NO: 6982; WAN024CT5; Start 394; Stop 418
ggtatccagatagaattagagagca

SEQ ID NO: 455315 - DNA, 25 bp, Artificial
  probe
  misc_feature (1)..(25): SEQ ID NO: 6982; WAN024CT5; Start 364; Stop 388
gatgttgttgagaaggaattgaatg

SEQ ID NO: 455316 - DNA, 25 bp, Artificial
  probe
  misc_feature (1)..(25): SEQ ID NO: 6982; WAN024CT5; Start 371; Stop 395
ttgagaaggaattgaatgagttagg

SEQ ID NO: 455317 - DNA, 25 bp, Artificial
  probe
  misc_feature (1)..(25): SEQ ID NO: 6982; WAN024CT5; Start 393; Stop 417
aggtatccagatagaattagagagc

SEQ ID NO: 455318 - DNA, 25 bp, Artificial
  probe
  misc_feature (1)..(25): SEQ ID NO: 6982; WAN024CT5; Start 369; Stop 393
tgttgagaaggaattgaatgagtta

SEQ ID NO: 455319 - DNA, 25 bp, Artificial
  probe
  misc_feature (1)..(25): SEQ ID NO: 6982; WAN024CT5; Start 358; Stop 382
ggcattgatgttgttgagaaggaat

SEQ ID NO: 455320 - DNA, 25 bp, Artificial
  probe
  misc_feature (1)..(25): SEQ ID NO: 6982; WAN024CT5; Start 379; Stop 403
gaattgaatgagttaggtatccaga

SEQ ID NO: 455321 - DNA, 25 bp, Artificial
  probe
  misc_feature (1)..(25): SEQ ID NO: 6982; WAN024CT5; Start 383; Stop 407
tgaatgagttaggtatccagataga

SEQ ID NO: 455322 - DNA, 25 bp, Artificial
  probe
  misc_feature (1)..(25): SEQ ID NO: 6982; WAN024CT5; Start 373; Stop 397
gagaaggaattgaatgagttaggta

SEQ ID NO: 455323 - DNA, 25 bp, Artificial
  probe
  misc_feature (1)..(25): SEQ ID NO: 6982; WAN024CT5; Start 355; Stop 379
attggcattgatgttgttgagaagg

SEQ ID NO: 455324 - DNA, 25 bp, Artificial
  probe
  misc_feature (1)..(25): SEQ ID NO: 6982; WAN024CT5; Start 370; Stop 394
gttgagaaggaattgaatgagttag

SEQ ID NO: 455325 - DNA, 25 bp, Artificial
  probe
  misc_feature (1)..(25): SEQ ID NO: 6982; WAN024CT5; Start 377; Stop 401
aggaattgaatgagttaggtatcca

SEQ ID NO: 455326 - DNA, 25 bp, Artificial
  probe
  misc_feature (1)..(25): SEQ ID NO: 6982; WAN024CT5; Start 378; Stop 402
ggaattgaatgagttaggtatccag

SEQ ID NO: 455327 - DNA, 25 bp, Artificial
  probe
  misc_feature (1)..(25): SEQ ID NO: 6982; WAN024CT5; Start 395; Stop 419
gtatccagatagaattagagagcaa

SEQ ID NO: 455328 - DNA, 25 bp, Artificial
  probe
  misc_feature (1)..(25): SEQ ID NO: 6982; WAN024CT5; Start 380; Stop 404
aattgaatgagttaggtatccagat

SEQ ID NO: 455329 - DNA, 25 bp, Artificial
  probe
  misc_feature (1)..(25): SEQ ID NO: 6982; WAN024CT5; Start 382; Stop 406
ttgaatgagttaggtatccagatag

SEQ ID NO: 455330 - DNA, 25 bp, Artificial
  probe
  misc_feature (1)..(25): SEQ ID NO: 6982; WAN024CT5; Start 374; Stop 398
agaaggaattgaatgagttaggtat

SEQ ID NO: 455331 - DNA, 25 bp, Artificial
  probe
  misc_feature (1)..(25): SEQ ID NO: 6982; WAN024CT5; Start 375; Stop 399
gaaggaattgaatgagttaggtatc

SEQ ID NO: 455332 - DNA, 25 bp, Artificial
  probe
  misc_feature (1)..(25): SEQ ID NO: 6982; WAN024CT5; Start 399; Stop 423
ccagatagaattagagagcaataga

SEQ ID NO: 455333 - DNA, 25 bp, Artificial
  probe
  misc_feature (1)..(25): SEQ ID NO: 6982; WAN024CT5; Start 398; Stop 422
tccagatagaattagagagcaatag

SEQ ID NO: 455334 - DNA, 25 bp, Artificial
  probe
  misc_feature (1)..(25): SEQ ID NO: 6982; WAN024CT5; Start 10; Stop 34
ataaagacgatgcctgagaagaatc

SEQ ID NO: 455335 - DNA, 25 bp, Artificial
  probe
  misc_feature (1)..(25): SEQ ID NO: 6982; WAN024CT5; Start 353; Stop 377
aaattggcattgatgttgttgagaa

SEQ ID NO: 455336 - DNA, 25 bp, Artificial
  probe
  misc_feature (1)..(25): SEQ ID NO: 6983; WAN024BZD; Start 5; Stop 29
ctattactcacccaaagcagtccta

SEQ ID NO: 455337 - DNA, 25 bp, Artificial
  probe
  misc_feature (1)..(25): SEQ ID NO: 6983; WAN024BZD; Start 1; Stop 25
atgtctattactcacccaaagcagt

SEQ ID NO: 455338 - DNA, 25 bp, Artificial
  probe
  misc_feature (1)..(25): SEQ ID NO: 6983; WAN024BZD; Start 6; Stop 30
tattactcacccaaagcagtcctac

SEQ ID NO: 455339 - DNA, 25 bp, Artificial
  probe
  misc_feature (1)..(25): SEQ ID NO: 6983; WAN024BZD; Start 70; Stop 94
gtttatacagctttgacacttcgta

SEQ ID NO: 455340 - DNA, 25 bp, Artificial
  probe
  misc_feature (1)..(25): SEQ ID NO: 6983; WAN024BZD; Start 2; Stop 26
tgtctattactcacccaaagcagtc

SEQ ID NO: 455341 - DNA, 25 bp, Artificial
  probe
  misc_feature (1)..(25): SEQ ID NO: 6983; WAN024BZD; Start 69; Stop 93
cgtttatacagctttgacacttcgt

SEQ ID NO: 455342 - DNA, 25 bp, Artificial
  probe
  misc_feature (1)..(25): SEQ ID NO: 6983; WAN024BZD; Start 73; Stop 97
tatacagctttgacacttcgtatca

SEQ ID NO: 455343 - DNA, 25 bp, Artificial
  probe
  misc_feature (1)..(25): SEQ ID NO: 6983; WAN024BZD; Start 3; Stop 27
gtctattactcacccaaagcagtcc

SEQ ID NO: 455344 - DNA, 25 bp, Artificial
  probe
  misc_feature (1)..(25): SEQ ID NO: 6983; WAN024BZD; Start 4; Stop 28
tctattactcacccaaagcagtcct

SEQ ID NO: 455345 - DNA, 25 bp, Artificial
  probe
  misc_feature (1)..(25): SEQ ID NO: 6983; WAN024BZD; Start 72; Stop 96
ttatacagctttgacacttcgtatc

SEQ ID NO: 455346 - DNA, 25 bp, Artificial
  probe
  misc_feature (1)..(25): SEQ ID NO: 6983; WAN024BZD; Start 120; Stop 144
ggtttacagaaagcagaaaaggaat

SEQ ID NO: 455347 - DNA, 25 bp, Artificial
  probe
  misc_feature (1)..(25): SEQ ID NO: 6983; WAN024BZD; Start 68; Stop 92
acgtttatacagctttgacacttcg

SEQ ID NO: 455348 - DNA, 25 bp, Artificial
  probe
  misc_feature (1)..(25): SEQ ID NO: 6983; WAN024BZD; Start 122; Stop 146
tttacagaaagcagaaaaggaatga

SEQ ID NO: 455349 - DNA, 25 bp, Artificial
  probe
  misc_feature (1)..(25): SEQ ID NO: 6983; WAN024BZD; Start 121; Stop 145
gtttacagaaagcagaaaaggaatg

SEQ ID NO: 455350 - DNA, 25 bp, Artificial
  probe
  misc_feature (1)..(25): SEQ ID NO: 6983; WAN024BZD; Start 71; Stop 95
tttatacagctttgacacttcgtat

SEQ ID NO: 455351 - DNA, 25 bp, Artificial
  probe
  misc_feature (1)..(25): SEQ ID NO: 6983; WAN024BZD; Start 123; Stop 147
ttacagaaagcagaaaaggaatgat

SEQ ID NO: 455352 - DNA, 25 bp, Artificial
  probe
  misc_feature (1)..(25): SEQ ID NO: 6983; WAN024BZD; Start 119; Stop 143
gggtttacagaaagcagaaaaggaa

SEQ ID NO: 455353 - DNA, 25 bp, Artificial
  probe
  misc_feature (1)..(25): SEQ ID NO: 6983; WAN024BZD; Start 7; Stop 31
attactcacccaaagcagtcctaca

SEQ ID NO: 455354 - DNA, 25 bp, Artificial
  probe
  misc_feature (1)..(25): SEQ ID NO: 6983; WAN024BZD; Start 124; Stop 148
tacagaaagcagaaaaggaatgatc

SEQ ID NO: 455355 - DNA, 25 bp, Artificial
  probe
  misc_feature (1)..(25): SEQ ID NO: 6983; WAN024BZD; Start 9; Stop 33
tactcacccaaagcagtcctacaaa

SEQ ID NO: 455356 - DNA, 25 bp, Artificial
  probe
  misc_feature (1)..(25): SEQ ID NO: 6983; WAN024BZD; Start 8; Stop 32
ttactcacccaaagcagtcctacaa

SEQ ID NO: 455357 - DNA, 25 bp, Artificial
  probe
  misc_feature (1)..(25): SEQ ID NO: 6983; WAN024BZD; Start 125; Stop 149
acagaaagcagaaaaggaatgatct

SEQ ID NO: 455358 - DNA, 25 bp, Artificial
  probe
  misc_feature (1)..(25): SEQ ID NO: 6983; WAN024BZD; Start 116; Stop 140
gaggggtttacagaaagcagaaaag

SEQ ID NO: 455359 - DNA, 25 bp, Artificial
  probe
  misc_feature (1)..(25): SEQ ID NO: 6983; WAN024BZD; Start 29; Stop 53
acaaagcaggaattttctgttactt

SEQ ID NO: 455360 - DNA, 25 bp, Artificial
  probe
  misc_feature (1)..(25): SEQ ID NO: 6983; WAN024BZD; Start 74; Stop 98
atacagctttgacacttcgtatcaa

SEQ ID NO: 455361 - DNA, 25 bp, Artificial
  probe
  misc_feature (1)..(25): SEQ ID NO: 6983; WAN024BZD; Start 26; Stop 50
cctacaaagcaggaattttctgtta

SEQ ID NO: 455362 - DNA, 25 bp, Artificial
  probe
  misc_feature (1)..(25): SEQ ID NO: 6983; WAN024BZD; Start 28; Stop 52
tacaaagcaggaattttctgttact

SEQ ID NO: 455363 - DNA, 25 bp, Artificial
  probe
  misc_feature (1)..(25): SEQ ID NO: 6983; WAN024BZD; Start 27; Stop 51
ctacaaagcaggaattttctgttac

SEQ ID NO: 455364 - DNA, 25 bp, Artificial
  probe
  misc_feature (1)..(25): SEQ ID NO: 6983; WAN024BZD; Start 118; Stop 142
ggggtttacagaaagcagaaaagga

SEQ ID NO: 455365 - DNA, 25 bp, Artificial
  probe
  misc_feature (1)..(25): SEQ ID NO: 6983; WAN024BZD; Start 117; Stop 141
aggggtttacagaaagcagaaaagg

SEQ ID NO: 455366 - DNA, 25 bp, Artificial
  probe
  misc_feature (1)..(25): SEQ ID NO: 6983; WAN024BZD; Start 67; Stop 91
aacgtttatacagctttgacacttc

SEQ ID NO: 455367 - DNA, 25 bp, Artificial
  probe
  misc_feature (1)..(25): SEQ ID NO: 6983; WAN024BZD; Start 65; Stop 89
gtaacgtttatacagctttgacact

SEQ ID NO: 455368 - DNA, 25 bp, Artificial
  probe
  misc_feature (1)..(25): SEQ ID NO: 6983; WAN024BZD; Start 64; Stop 88
agtaacgtttatacagctttgacac

SEQ ID NO: 455369 - DNA, 25 bp, Artificial
  probe
  misc_feature (1)..(25): SEQ ID NO: 6984; WAN024FKM; Start 98; Stop 122
gtggaacattattaggagccgttag

SEQ ID NO: 455370 - DNA, 25 bp, Artificial
  probe
  misc_feature (1)..(25): SEQ ID NO: 6984; WAN024FKM; Start 313; Stop 337
agtaatatagagcaagaggagagtt

SEQ ID NO: 455371 - DNA, 25 bp, Artificial
  probe
  misc_feature (1)..(25): SEQ ID NO: 6984; WAN024FKM; Start 637; Stop 661
cgtgagttagtgccaagttgttatt

SEQ ID NO: 455372 - DNA, 25 bp, Artificial
  probe
  misc_feature (1)..(25): SEQ ID NO: 6984; WAN024FKM; Start 146; Stop 170
atgatgatatagacattggtatgcc

SEQ ID NO: 455373 - DNA, 25 bp, Artificial
  probe
  misc_feature (1)..(25): SEQ ID NO: 6984; WAN024FKM; Start 93; Stop 117
actaggtggaacattattaggagcc

SEQ ID NO: 455374 - DNA, 25 bp, Artificial
  probe
  misc_feature (1)..(25): SEQ ID NO: 6984; WAN024FKM; Start 99; Stop 123
tggaacattattaggagccgttagg

SEQ ID NO: 455375 - DNA, 25 bp, Artificial
  probe
  misc_feature (1)..(25): SEQ ID NO: 6984; WAN024FKM; Start 92; Stop 116
cactaggtggaacattattaggagc

SEQ ID NO: 455376 - DNA, 25 bp, Artificial
  probe
  misc_feature (1)..(25): SEQ ID NO: 6984; WAN024FKM; Start 91; Stop 115
gcactaggtggaacattattaggag

SEQ ID NO: 455377 - DNA, 25 bp, Artificial
  probe
  misc_feature (1)..(25): SEQ ID NO: 6984; WAN024FKM; Start 636; Stop 660
tcgtgagttagtgccaagttgttat

SEQ ID NO: 455378 - DNA, 25 bp, Artificial
  probe
  misc_feature (1)..(25): SEQ ID NO: 6984; WAN024FKM; Start 312; Stop 336
tagtaatatagagcaagaggagagt

SEQ ID NO: 455379 - DNA, 25 bp, Artificial
  probe
  misc_feature (1)..(25): SEQ ID NO: 6984; WAN024FKM; Start 97; Stop 121
ggtggaacattattaggagccgtta

SEQ ID NO: 455380 - DNA, 25 bp, Artificial
  probe
  misc_feature (1)..(25): SEQ ID NO: 6984; WAN024FKM; Start 635; Stop 659
ttcgtgagttagtgccaagttgtta

SEQ ID NO: 455381 - DNA, 25 bp, Artificial
  probe
  misc_feature (1)..(25): SEQ ID NO: 6984; WAN024FKM; Start 75; Stop 99
taacttgacgtattatgcactaggt

SEQ ID NO: 455382 - DNA, 25 bp, Artificial
  probe
  misc_feature (1)..(25): SEQ ID NO: 6984; WAN024FKM; Start 166; Stop 190
atgcccagagaagattatgagaaat

SEQ ID NO: 455383 - DNA, 25 bp, Artificial
  probe
  misc_feature (1)..(25): SEQ ID NO: 6984; WAN024FKM; Start 164; Stop 188
gtatgcccagagaagattatgagaa

SEQ ID NO: 455384 - DNA, 25 bp, Artificial
  probe
  misc_feature (1)..(25): SEQ ID NO: 6984; WAN024FKM; Start 94; Stop 118
ctaggtggaacattattaggagccg

SEQ ID NO: 455385 - DNA, 25 bp, Artificial
  probe
  misc_feature (1)..(25): SEQ ID NO: 6984; WAN024FKM; Start 419; Stop 443
gaagaatgatggtacagttatctca

SEQ ID NO: 455386 - DNA, 25 bp, Artificial
  probe
  misc_feature (1)..(25): SEQ ID NO: 6984; WAN024FKM; Start 418; Stop 442
agaagaatgatggtacagttatctc

SEQ ID NO: 455387 - DNA, 25 bp, Artificial
  probe
  misc_feature (1)..(25): SEQ ID NO: 6984; WAN024FKM; Start 145; Stop 169
gatgatgatatagacattggtatgc

SEQ ID NO: 455388 - DNA, 25 bp, Artificial
  probe
  misc_feature (1)..(25): SEQ ID NO: 6984; WAN024FKM; Start 425; Stop 449
tgatggtacagttatctcaattcaa

SEQ ID NO: 455389 - DNA, 25 bp, Artificial
  probe
  misc_feature (1)..(25): SEQ ID NO: 6984; WAN024FKM; Start 165; Stop 189
tatgcccagagaagattatgagaaa

SEQ ID NO: 455390 - DNA, 25 bp, Artificial
  probe
  misc_feature (1)..(25): SEQ ID NO: 6984; WAN024FKM; Start 167; Stop 191
tgcccagagaagattatgagaaatt

SEQ ID NO: 455391 - DNA, 25 bp, Artificial
  probe
  misc_feature (1)..(25): SEQ ID NO: 6984; WAN024FKM; Start 147; Stop 171
tgatgatatagacattggtatgccc

SEQ ID NO: 455392 - DNA, 25 bp, Artificial
  probe
  misc_feature (1)..(25): SEQ ID NO: 6984; WAN024FKM; Start 95; Stop 119
taggtggaacattattaggagccgt

SEQ ID NO: 455393 - DNA, 25 bp, Artificial
  probe
  misc_feature (1)..(25): SEQ ID NO: 6984; WAN024FKM; Start 424; Stop 448
atgatggtacagttatctcaattca

SEQ ID NO: 455394 - DNA, 25 bp, Artificial
  probe
  misc_feature (1)..(25): SEQ ID NO: 6984; WAN024FKM; Start 141; Stop 165
ttgggatgatgatatagacattggt

SEQ ID NO: 455395 - DNA, 25 bp, Artificial
  probe
  misc_feature (1)..(25): SEQ ID NO: 6984; WAN024FKM; Start 420; Stop 444
aagaatgatggtacagttatctcaa

SEQ ID NO: 455396 - DNA, 25 bp, Artificial
  probe
  misc_feature (1)..(25): SEQ ID NO: 6984; WAN024FKM; Start 317; Stop 341
atatagagcaagaggagagtttgtg

SEQ ID NO: 455397 - DNA, 25 bp, Artificial
  probe
  misc_feature (1)..(25): SEQ ID NO: 6984; WAN024FKM; Start 163; Stop 187
ggtatgcccagagaagattatgaga

SEQ ID NO: 455398 - DNA, 25 bp, Artificial
  probe
  misc_feature (1)..(25): SEQ ID NO: 6984; WAN024FKM; Start 325; Stop 349
caagaggagagtttgtggatagata

SEQ ID NO: 455399 - DNA, 25 bp, Artificial
  probe
  misc_feature (1)..(25): SEQ ID NO: 6984; WAN024FKM; Start 140; Stop 164
cttgggatgatgatatagacattgg

SEQ ID NO: 455400 - DNA, 25 bp, Artificial
  probe
  misc_feature (1)..(25): SEQ ID NO: 6984; WAN024FKM; Start 139; Stop 163
ccttgggatgatgatatagacattg

SEQ ID NO: 455401 - DNA, 25 bp, Artificial
  probe
  misc_feature (1)..(25): SEQ ID NO: 6984; WAN024FKM; Start 326; Stop 350
aagaggagagtttgtggatagatat

SEQ ID NO: 455402 - DNA, 25 bp, Artificial
  probe
  misc_feature (1)..(25): SEQ ID NO: 6985; WAN024BJQ; Start 135; Stop 159
atgttattcaggagagcattcttgt

SEQ ID NO: 455403 - DNA, 25 bp, Artificial
  probe
  misc_feature (1)..(25): SEQ ID NO: 6985; WAN024BJQ; Start 136; Stop 160
tgttattcaggagagcattcttgtg

SEQ ID NO: 455404 - DNA, 25 bp, Artificial
  probe
  misc_feature (1)..(25): SEQ ID NO: 6985; WAN024BJQ; Start 32; Stop 56
cactaagtacagaaggtaatccagc

SEQ ID NO: 455405 - DNA, 25 bp, Artificial
  probe
  misc_feature (1)..(25): SEQ ID NO: 6985; WAN024BJQ; Start 31; Stop 55
tcactaagtacagaaggtaatccag

SEQ ID NO: 455406 - DNA, 25 bp, Artificial
  probe
  misc_feature (1)..(25): SEQ ID NO: 6985; WAN024BJQ; Start 26; Stop 50
acgaatcactaagtacagaaggtaa

SEQ ID NO: 455407 - DNA, 25 bp, Artificial
  probe
  misc_feature (1)..(25): SEQ ID NO: 6985; WAN024BJQ; Start 24; Stop 48
ttacgaatcactaagtacagaaggt

SEQ ID NO: 455408 - DNA, 25 bp, Artificial
  probe
  misc_feature (1)..(25): SEQ ID NO: 6985; WAN024BJQ; Start 137; Stop 161
gttattcaggagagcattcttgtgg

SEQ ID NO: 455409 - DNA, 25 bp, Artificial
  probe
  misc_feature (1)..(25): SEQ ID NO: 6985; WAN024BJQ; Start 62; Stop 86
atatcttgcgtgaacttagcgatag

SEQ ID NO: 455410 - DNA, 25 bp, Artificial
  probe
  misc_feature (1)..(25): SEQ ID NO: 6985; WAN024BJQ; Start 134; Stop 158
catgttattcaggagagcattcttg

SEQ ID NO: 455411 - DNA, 25 bp, Artificial
  probe
  misc_feature (1)..(25): SEQ ID NO: 6985; WAN024BJQ; Start 30; Stop 54
atcactaagtacagaaggtaatcca

SEQ ID NO: 455412 - DNA, 25 bp, Artificial
  probe
  misc_feature (1)..(25): SEQ ID NO: 6985; WAN024BJQ; Start 138; Stop 162
ttattcaggagagcattcttgtggt

SEQ ID NO: 455413 - DNA, 25 bp, Artificial
  probe
  misc_feature (1)..(25): SEQ ID NO: 6985; WAN024BJQ; Start 25; Stop 49
tacgaatcactaagtacagaaggta

SEQ ID NO: 455414 - DNA, 25 bp, Artificial
  probe
  misc_feature (1)..(25): SEQ ID NO: 6985; WAN024BJQ; Start 27; Stop 51
cgaatcactaagtacagaaggtaat

SEQ ID NO: 455415 - DNA, 25 bp, Artificial
  probe
  misc_feature (1)..(25): SEQ ID NO: 6985; WAN024BJQ; Start 152; Stop 176
attcttgtggtcgtggttgtactat

SEQ ID NO: 455416 - DNA, 25 bp, Artificial
  probe
  misc_feature (1)..(25): SEQ ID NO: 6985; WAN024BJQ; Start 133; Stop 157
gcatgttattcaggagagcattctt

SEQ ID NO: 455417 - DNA, 25 bp, Artificial
  probe
  misc_feature (1)..(25): SEQ ID NO: 6985; WAN024BJQ; Start 33; Stop 57
actaagtacagaaggtaatccagct

SEQ ID NO: 455418 - DNA, 25 bp, Artificial
  probe
  misc_feature (1)..(25): SEQ ID NO: 6985; WAN024BJQ; Start 139; Stop 163
tattcaggagagcattcttgtggtc

SEQ ID NO: 455419 - DNA, 25 bp, Artificial
  probe
  misc_feature (1)..(25): SEQ ID NO: 6985; WAN024BJQ; Start 29; Stop 53
aatcactaagtacagaaggtaatcc

SEQ ID NO: 455420 - DNA, 25 bp, Artificial
  probe
  misc_feature (1)..(25): SEQ ID NO: 6985; WAN024BJQ; Start 153; Stop 177
ttcttgtggtcgtggttgtactatc

SEQ ID NO: 455421 - DNA, 25 bp, Artificial
  probe
  misc_feature (1)..(25): SEQ ID NO: 6985; WAN024BJQ; Start 151; Stop 175
cattcttgtggtcgtggttgtacta

SEQ ID NO: 455422 - DNA, 25 bp, Artificial
  probe
  misc_feature (1)..(25): SEQ ID NO: 6985; WAN024BJQ; Start 73; Stop 97
gaacttagcgatagcgagatggatc

SEQ ID NO: 455423 - DNA, 25 bp, Artificial
  probe
  misc_feature (1)..(25): SEQ ID NO: 6985; WAN024BJQ; Start 181; Stop 205
acagagtgtcctttcttaacattca

SEQ ID NO: 455424 - DNA, 25 bp, Artificial
  probe
  misc_feature (1)..(25): SEQ ID NO: 6985; WAN024BJQ; Start 76; Stop 100
cttagcgatagcgagatggatcaag

SEQ ID NO: 455425 - DNA, 25 bp, Artificial
  probe
  misc_feature (1)..(25): SEQ ID NO: 6985; WAN024BJQ; Start 61; Stop 85
gatatcttgcgtgaacttagcgata

SEQ ID NO: 455426 - DNA, 25 bp, Artificial
  probe
  misc_feature (1)..(25): SEQ ID NO: 6985; WAN024BJQ; Start 182; Stop 206
cagagtgtcctttcttaacattcat

SEQ ID NO: 455427 - DNA, 25 bp, Artificial
  probe
  misc_feature (1)..(25): SEQ ID NO: 6985; WAN024BJQ; Start 72; Stop 96
tgaacttagcgatagcgagatggat

SEQ ID NO: 455428 - DNA, 25 bp, Artificial
  probe
  misc_feature (1)..(25): SEQ ID NO: 6985; WAN024BJQ; Start 63; Stop 87
tatcttgcgtgaacttagcgatagc

SEQ ID NO: 455429 - DNA, 25 bp, Artificial
  probe
  misc_feature (1)..(25): SEQ ID NO: 6985; WAN024BJQ; Start 180; Stop 204
cacagagtgtcctttcttaacattc

SEQ ID NO: 455430 - DNA, 25 bp, Artificial
  probe
  misc_feature (1)..(25): SEQ ID NO: 6985; WAN024BJQ; Start 28; Stop 52
gaatcactaagtacagaaggtaatc

SEQ ID NO: 455431 - DNA, 25 bp, Artificial
  probe
  misc_feature (1)..(25): SEQ ID NO: 6985; WAN024BJQ; Start 23; Stop 47
tttacgaatcactaagtacagaagg

SEQ ID NO: 455432 - DNA, 25 bp, Artificial
  probe
  misc_feature (1)..(25): SEQ ID NO: 6985; WAN024BJQ; Start 169; Stop 193
tgtactatcaccacagagtgtcctt

SEQ ID NO: 455433 - DNA, 25 bp, Artificial
  probe
  misc_feature (1)..(25): SEQ ID NO: 6985; WAN024BJQ; Start 168; Stop 192
ttgtactatcaccacagagtgtcct

SEQ ID NO: 455434 - DNA, 25 bp, Artificial
  probe
  misc_feature (1)..(25): SEQ ID NO: 6985; WAN024BJQ; Start 167; Stop 191
gttgtactatcaccacagagtgtcc

SEQ ID NO: 455435 - DNA, 25 bp, Artificial
  probe
  misc_feature (1)..(25): SEQ ID NO: 6986; WAN024CSC; Start 213; Stop 237
ttgtagaatgtttccgattgagttg

SEQ ID NO: 455436 - DNA, 25 bp, Artificial
  probe
  misc_feature (1)..(25): SEQ ID NO: 6986; WAN024CSC; Start 212; Stop 236
gttgtagaatgtttccgattgagtt

SEQ ID NO: 455437 - DNA, 25 bp, Artificial
  probe
  misc_feature (1)..(25): SEQ ID NO: 6986; WAN024CSC; Start 210; Stop 234
atgttgtagaatgtttccgattgag

SEQ ID NO: 455438 - DNA, 25 bp, Artificial
  probe
  misc_feature (1)..(25): SEQ ID NO: 6986; WAN024CSC; Start 211; Stop 235
tgttgtagaatgtttccgattgagt

SEQ ID NO: 455439 - DNA, 25 bp, Artificial
  probe
  misc_feature (1)..(25): SEQ ID NO: 6986; WAN024CSC; Start 5; Stop 29
cttctggatcaacttgtccgataga

SEQ ID NO: 455440 - DNA, 25 bp, Artificial
  probe
  misc_feature (1)..(25): SEQ ID NO: 6986; WAN024CSC; Start 4; Stop 28
tcttctggatcaacttgtccgatag

SEQ ID NO: 455441 - DNA, 25 bp, Artificial
  probe
  misc_feature (1)..(25): SEQ ID NO: 6986; WAN024CSC; Start 6; Stop 30
ttctggatcaacttgtccgatagac

SEQ ID NO: 455442 - DNA, 25 bp, Artificial
  probe
  misc_feature (1)..(25): SEQ ID NO: 6986; WAN024CSC; Start 3; Stop 27
gtcttctggatcaacttgtccgata

SEQ ID NO: 455443 - DNA, 25 bp, Artificial
  probe
  misc_feature (1)..(25): SEQ ID NO: 6986; WAN024CSC; Start 209; Stop 233
catgttgtagaatgtttccgattga

SEQ ID NO: 455444 - DNA, 25 bp, Artificial
  probe
  misc_feature (1)..(25): SEQ ID NO: 6986; WAN024CSC; Start 214; Stop 238
tgtagaatgtttccgattgagttgc

SEQ ID NO: 455445 - DNA, 25 bp, Artificial
  probe
  misc_feature (1)..(25): SEQ ID NO: 6986; WAN024CSC; Start 208; Stop 232
ccatgttgtagaatgtttccgattg

SEQ ID NO: 455446 - DNA, 25 bp, Artificial
  probe
  misc_feature (1)..(25): SEQ ID NO: 6986; WAN024CSC; Start 68; Stop 92
aaagaattgggttagcatctgaacg

SEQ ID NO: 455447 - DNA, 25 bp, Artificial
  probe
  misc_feature (1)..(25): SEQ ID NO: 6986; WAN024CSC; Start 207; Stop 231
cccatgttgtagaatgtttccgatt

SEQ ID NO: 455448 - DNA, 25 bp, Artificial
  probe
  misc_feature (1)..(25): SEQ ID NO: 6986; WAN024CSC; Start 216; Stop 240
tagaatgtttccgattgagttgcag

SEQ ID NO: 455449 - DNA, 25 bp, Artificial
  probe
  misc_feature (1)..(25): SEQ ID NO: 6986; WAN024CSC; Start 215; Stop 239
gtagaatgtttccgattgagttgca

SEQ ID NO: 455450 - DNA, 25 bp, Artificial
  probe
  misc_feature (1)..(25): SEQ ID NO: 6986; WAN024CSC; Start 168; Stop 192
gataccattgaaagtcaaagttgct

SEQ ID NO: 455451 - DNA, 25 bp, Artificial
  probe
  misc_feature (1)..(25): SEQ ID NO: 6986; WAN024CSC; Start 170; Stop 194
taccattgaaagtcaaagttgcttt

SEQ ID NO: 455452 - DNA, 25 bp, Artificial
  probe
  misc_feature (1)..(25): SEQ ID NO: 6986; WAN024CSC; Start 67; Stop 91
aaaagaattgggttagcatctgaac

SEQ ID NO: 455453 - DNA, 25 bp, Artificial
  probe
  misc_feature (1)..(25): SEQ ID NO: 6986; WAN024CSC; Start 169; Stop 193
ataccattgaaagtcaaagttgctt

SEQ ID NO: 455454 - DNA, 25 bp, Artificial
  probe
  misc_feature (1)..(25): SEQ ID NO: 6986; WAN024CSC; Start 166; Stop 190
ccgataccattgaaagtcaaagttg

SEQ ID NO: 455455 - DNA, 25 bp, Artificial
  probe
  misc_feature (1)..(25): SEQ ID NO: 6986; WAN024CSC; Start 66; Stop 90
caaaagaattgggttagcatctgaa

SEQ ID NO: 455456 - DNA, 25 bp, Artificial
  probe
  misc_feature (1)..(25): SEQ ID NO: 6986; WAN024CSC; Start 64; Stop 88
atcaaaagaattgggttagcatctg

SEQ ID NO: 455457 - DNA, 25 bp, Artificial
  probe
  misc_feature (1)..(25): SEQ ID NO: 6986; WAN024CSC; Start 2; Stop 26
tgtcttctggatcaacttgtccgat

SEQ ID NO: 455458 - DNA, 25 bp, Artificial
  probe
  misc_feature (1)..(25): SEQ ID NO: 6986; WAN024CSC; Start 1; Stop 25
atgtcttctggatcaacttgtccga

SEQ ID NO: 455459 - DNA, 25 bp, Artificial
  probe
  misc_feature (1)..(25): SEQ ID NO: 6986; WAN024CSC; Start 43; Stop 67
gcagtgacatcattttcatcaatca

SEQ ID NO: 455460 - DNA, 25 bp, Artificial
  probe
  misc_feature (1)..(25): SEQ ID NO: 6986; WAN024CSC; Start 63; Stop 87
aatcaaaagaattgggttagcatct

SEQ ID NO: 455461 - DNA, 25 bp, Artificial
  probe
  misc_feature (1)..(25): SEQ ID NO: 6986; WAN024CSC; Start 65; Stop 89
tcaaaagaattgggttagcatctga

SEQ ID NO: 455462 - DNA, 25 bp, Artificial
  probe
  misc_feature (1)..(25): SEQ ID NO: 6986; WAN024CSC; Start 167; Stop 191
cgataccattgaaagtcaaagttgc

SEQ ID NO: 455463 - DNA, 25 bp, Artificial
  probe
  misc_feature (1)..(25): SEQ ID NO: 6986; WAN024CSC; Start 7; Stop 31
tctggatcaacttgtccgatagacg

SEQ ID NO: 455464 - DNA, 25 bp, Artificial
  probe
  misc_feature (1)..(25): SEQ ID NO: 6986; WAN024CSC; Start 198; Stop 222
aaggataaccccatgttgtagaatg

SEQ ID NO: 455465 - DNA, 25 bp, Artificial
  probe
  misc_feature (1)..(25): SEQ ID NO: 6986; WAN024CSC; Start 193; Stop 217
ttttcaaggataaccccatgttgta

SEQ ID NO: 455466 - DNA, 25 bp, Artificial
  probe
  misc_feature (1)..(25): SEQ ID NO: 6986; WAN024CSC; Start 44; Stop 68
cagtgacatcattttcatcaatcaa

SEQ ID NO: 455467 - DNA, 25 bp, Artificial
  probe
  misc_feature (1)..(25): SEQ ID NO: 6986; WAN024CSC; Start 202; Stop 226
ataaccccatgttgtagaatgtttc

SEQ ID NO: 455468 - DNA, 25 bp, Artificial
  probe
  misc_feature (1)..(25): SEQ ID NO: 6987; WAN024D4V; Start 91; Stop 115
tcttcaactggaataataacacctt

SEQ ID NO: 455469 - DNA, 25 bp, Artificial
  probe
  misc_feature (1)..(25): SEQ ID NO: 6987; WAN024D4V; Start 90; Stop 114
atcttcaactggaataataacacct

SEQ ID NO: 455470 - DNA, 25 bp, Artificial
  probe
  misc_feature (1)..(25): SEQ ID NO: 6987; WAN024D4V; Start 89; Stop 113
aatcttcaactggaataataacacc

SEQ ID NO: 455471 - DNA, 25 bp, Artificial
  probe
  misc_feature (1)..(25): SEQ ID NO: 6987; WAN024D4V; Start 156; Stop 180
gttgtggatagcatctggtaaatca

SEQ ID NO: 455472 - DNA, 25 bp, Artificial
  probe
  misc_feature (1)..(25): SEQ ID NO: 6987; WAN024D4V; Start 155; Stop 179
cgttgtggatagcatctggtaaatc

SEQ ID NO: 455473 - DNA, 25 bp, Artificial
  probe
  misc_feature (1)..(25): SEQ ID NO: 6987; WAN024D4V; Start 179; Stop 203
caccactagaaatatccaagttacg

SEQ ID NO: 455474 - DNA, 25 bp, Artificial
  probe
  misc_feature (1)..(25): SEQ ID NO: 6987; WAN024D4V; Start 154; Stop 178
tcgttgtggatagcatctggtaaat

SEQ ID NO: 455475 - DNA, 25 bp, Artificial
  probe
  misc_feature (1)..(25): SEQ ID NO: 6987; WAN024D4V; Start 157; Stop 181
ttgtggatagcatctggtaaatcac

SEQ ID NO: 455476 - DNA, 25 bp, Artificial
  probe
  misc_feature (1)..(25): SEQ ID NO: 6987; WAN024D4V; Start 178; Stop 202
tcaccactagaaatatccaagttac

SEQ ID NO: 455477 - DNA, 25 bp, Artificial
  probe
  misc_feature (1)..(25): SEQ ID NO: 6987; WAN024D4V; Start 92; Stop 116
cttcaactggaataataacaccttt

SEQ ID NO: 455478 - DNA, 25 bp, Artificial
  probe
  misc_feature (1)..(25): SEQ ID NO: 6987; WAN024D4V; Start 124; Stop 148
cagttcatcaagtccacatctgaag

SEQ ID NO: 455479 - DNA, 25 bp, Artificial
  probe
  misc_feature (1)..(25): SEQ ID NO: 6987; WAN024D4V; Start 176; Stop 200
aatcaccactagaaatatccaagtt

SEQ ID NO: 455480 - DNA, 25 bp, Artificial
  probe
  misc_feature (1)..(25): SEQ ID NO: 6987; WAN024D4V; Start 175; Stop 199
aaatcaccactagaaatatccaagt

SEQ ID NO: 455481 - DNA, 25 bp, Artificial
  probe
  misc_feature (1)..(25): SEQ ID NO: 6987; WAN024D4V; Start 153; Stop 177
gtcgttgtggatagcatctggtaaa

SEQ ID NO: 455482 - DNA, 25 bp, Artificial
  probe
  misc_feature (1)..(25): SEQ ID NO: 6987; WAN024D4V; Start 30; Stop 54
cttgtactctggtttctcatccaaa

SEQ ID NO: 455483 - DNA, 25 bp, Artificial
  probe
  misc_feature (1)..(25): SEQ ID NO: 6987; WAN024D4V; Start 180; Stop 204
accactagaaatatccaagttacgt

SEQ ID NO: 455484 - DNA, 25 bp, Artificial
  probe
  misc_feature (1)..(25): SEQ ID NO: 6987; WAN024D4V; Start 78; Stop 102
tttatcaatcaaatcttcaactgga

SEQ ID NO: 455485 - DNA, 25 bp, Artificial
  probe
  misc_feature (1)..(25): SEQ ID NO: 6987; WAN024D4V; Start 82; Stop 106
tcaatcaaatcttcaactggaataa

SEQ ID NO: 455486 - DNA, 25 bp, Artificial
  probe
  misc_feature (1)..(25): SEQ ID NO: 6987; WAN024D4V; Start 79; Stop 103
ttatcaatcaaatcttcaactggaa

SEQ ID NO: 455487 - DNA, 25 bp, Artificial
  probe
  misc_feature (1)..(25): SEQ ID NO: 6987; WAN024D4V; Start 172; Stop 196
ggtaaatcaccactagaaatatcca

SEQ ID NO: 455488 - DNA, 25 bp, Artificial
  probe
  misc_feature (1)..(25): SEQ ID NO: 6987; WAN024D4V; Start 177; Stop 201
atcaccactagaaatatccaagtta

SEQ ID NO: 455489 - DNA, 25 bp, Artificial
  probe
  misc_feature (1)..(25): SEQ ID NO: 6987; WAN024D4V; Start 181; Stop 205
ccactagaaatatccaagttacgtt

SEQ ID NO: 455490 - DNA, 25 bp, Artificial
  probe
  misc_feature (1)..(25): SEQ ID NO: 6987; WAN024D4V; Start 81; Stop 105
atcaatcaaatcttcaactggaata

SEQ ID NO: 455491 - DNA, 25 bp, Artificial
  probe
  misc_feature (1)..(25): SEQ ID NO: 6987; WAN024D4V; Start 80; Stop 104
tatcaatcaaatcttcaactggaat

SEQ ID NO: 455492 - DNA, 25 bp, Artificial
  probe
  misc_feature (1)..(25): SEQ ID NO: 6987; WAN024D4V; Start 123; Stop 147
ccagttcatcaagtccacatctgaa

SEQ ID NO: 455493 - DNA, 25 bp, Artificial
  probe
  misc_feature (1)..(25): SEQ ID NO: 6987; WAN024D4V; Start 158; Stop 182
tgtggatagcatctggtaaatcacc

SEQ ID NO: 455494 - DNA, 25 bp, Artificial
  probe
  misc_feature (1)..(25): SEQ ID NO: 6987; WAN024D4V; Start 29; Stop 53
ccttgtactctggtttctcatccaa

SEQ ID NO: 455495 - DNA, 25 bp, Artificial
  probe
  misc_feature (1)..(25): SEQ ID NO: 6987; WAN024D4V; Start 173; Stop 197
gtaaatcaccactagaaatatccaa

SEQ ID NO: 455496 - DNA, 25 bp, Artificial
  probe
  misc_feature (1)..(25): SEQ ID NO: 6987; WAN024D4V; Start 152; Stop 176
cgtcgttgtggatagcatctggtaa

SEQ ID NO: 455497 - DNA, 25 bp, Artificial
  probe
  misc_feature (1)..(25): SEQ ID NO: 6987; WAN024D4V; Start 125; Stop 149
agttcatcaagtccacatctgaagc

SEQ ID NO: 455498 - DNA, 25 bp, Artificial
  probe
  misc_feature (1)..(25): SEQ ID NO: 6987; WAN024D4V; Start 174; Stop 198
taaatcaccactagaaatatccaag

SEQ ID NO: 455499 - DNA, 25 bp, Artificial
  probe
  misc_feature (1)..(25): SEQ ID NO: 6987; WAN024D4V; Start 69; Stop 93
tggcatgtatttatcaatcaaatct

SEQ ID NO: 455500 - DNA, 25 bp, Artificial
  probe
  misc_feature (1)..(25): SEQ ID NO: 6987; WAN024D4V; Start 118; Stop 142
ttagcccagttcatcaagtccacat

SEQ ID NO: 455501 - DNA, 25 bp, Artificial
  probe
  misc_feature (1)..(25): SEQ ID NO: 6988; WAN024COL; Start 146; Stop 170
tgataaacttcttccttcccttgat

SEQ ID NO: 455502 - DNA, 25 bp, Artificial
  probe
  misc_feature (1)..(25): SEQ ID NO: 6988; WAN024COL; Start 145; Stop 169
atgataaacttcttccttcccttga

SEQ ID NO: 455503 - DNA, 25 bp, Artificial
  probe
  misc_feature (1)..(25): SEQ ID NO: 6988; WAN024COL; Start 149; Stop 173
taaacttcttccttcccttgattca

SEQ ID NO: 455504 - DNA, 25 bp, Artificial
  probe
  misc_feature (1)..(25): SEQ ID NO: 6988; WAN024COL; Start 150; Stop 174
aaacttcttccttcccttgattcat

SEQ ID NO: 455505 - DNA, 25 bp, Artificial
  probe
  misc_feature (1)..(25): SEQ ID NO: 6988; WAN024COL; Start 82; Stop 106
attcaaagatttcataaaggcacgc

SEQ ID NO: 455506 - DNA, 25 bp, Artificial
  probe
  misc_feature (1)..(25): SEQ ID NO: 6988; WAN024COL; Start 151; Stop 175
aacttcttccttcccttgattcatc

SEQ ID NO: 455507 - DNA, 25 bp, Artificial
  probe
  misc_feature (1)..(25): SEQ ID NO: 6988; WAN024COL; Start 144; Stop 168
aatgataaacttcttccttcccttg

SEQ ID NO: 455508 - DNA, 25 bp, Artificial
  probe
  misc_feature (1)..(25): SEQ ID NO: 6988; WAN024COL; Start 148; Stop 172
ataaacttcttccttcccttgattc

SEQ ID NO: 455509 - DNA, 25 bp, Artificial
  probe
  misc_feature (1)..(25): SEQ ID NO: 6988; WAN024COL; Start 147; Stop 171
gataaacttcttccttcccttgatt

SEQ ID NO: 455510 - DNA, 25 bp, Artificial
  probe
  misc_feature (1)..(25): SEQ ID NO: 6988; WAN024COL; Start 141; Stop 165
tgaaatgataaacttcttccttccc

SEQ ID NO: 455511 - DNA, 25 bp, Artificial
  probe
  misc_feature (1)..(25): SEQ ID NO: 6988; WAN024COL; Start 81; Stop 105
aattcaaagatttcataaaggcacg

SEQ ID NO: 455512 - DNA, 25 bp, Artificial
  probe
  misc_feature (1)..(25): SEQ ID NO: 6988; WAN024COL; Start 142; Stop 166
gaaatgataaacttcttccttccct

SEQ ID NO: 455513 - DNA, 25 bp, Artificial
  probe
  misc_feature (1)..(25): SEQ ID NO: 6988; WAN024COL; Start 143; Stop 167
aaatgataaacttcttccttccctt

SEQ ID NO: 455514 - DNA, 25 bp, Artificial
  probe
  misc_feature (1)..(25): SEQ ID NO: 6988; WAN024COL; Start 54; Stop 78
cgagaatgaccaaatcagacttatt

SEQ ID NO: 455515 - DNA, 25 bp, Artificial
  probe
  misc_feature (1)..(25): SEQ ID NO: 6988; WAN024COL; Start 171; Stop 195
tcatcaagatatcatagactggagt

SEQ ID NO: 455516 - DNA, 25 bp, Artificial
  probe
  misc_feature (1)..(25): SEQ ID NO: 6988; WAN024COL; Start 83; Stop 107
ttcaaagatttcataaaggcacgca

SEQ ID NO: 455517 - DNA, 25 bp, Artificial
  probe
  misc_feature (1)..(25): SEQ ID NO: 6988; WAN024COL; Start 137; Stop 161
tccttgaaatgataaacttcttcct

SEQ ID NO: 455518 - DNA, 25 bp, Artificial
  probe
  misc_feature (1)..(25): SEQ ID NO: 6988; WAN024COL; Start 87; Stop 111
aagatttcataaaggcacgcacaaa

SEQ ID NO: 455519 - DNA, 25 bp, Artificial
  probe
  misc_feature (1)..(25): SEQ ID NO: 6988; WAN024COL; Start 86; Stop 110
aaagatttcataaaggcacgcacaa

SEQ ID NO: 455520 - DNA, 25 bp, Artificial
  probe
  misc_feature (1)..(25): SEQ ID NO: 6988; WAN024COL; Start 173; Stop 197
atcaagatatcatagactggagtcc

SEQ ID NO: 455521 - DNA, 25 bp, Artificial
  probe
  misc_feature (1)..(25): SEQ ID NO: 6988; WAN024COL; Start 188; Stop 212
actggagtcccgtcttcattataaa

SEQ ID NO: 455522 - DNA, 25 bp, Artificial
  probe
  misc_feature (1)..(25): SEQ ID NO: 6988; WAN024COL; Start 152; Stop 176
acttcttccttcccttgattcatca

SEQ ID NO: 455523 - DNA, 25 bp, Artificial
  probe
  misc_feature (1)..(25): SEQ ID NO: 6988; WAN024COL; Start 84; Stop 108
tcaaagatttcataaaggcacgcac

SEQ ID NO: 455524 - DNA, 25 bp, Artificial
  probe
  misc_feature (1)..(25): SEQ ID NO: 6988; WAN024COL; Start 170; Stop 194
ttcatcaagatatcatagactggag

SEQ ID NO: 455525 - DNA, 25 bp, Artificial
  probe
  misc_feature (1)..(25): SEQ ID NO: 6988; WAN024COL; Start 140; Stop 164
ttgaaatgataaacttcttccttcc

SEQ ID NO: 455526 - DNA, 25 bp, Artificial
  probe
  misc_feature (1)..(25): SEQ ID NO: 6988; WAN024COL; Start 138; Stop 162
ccttgaaatgataaacttcttcctt

SEQ ID NO: 455527 - DNA, 25 bp, Artificial
  probe
  misc_feature (1)..(25): SEQ ID NO: 6988; WAN024COL; Start 172; Stop 196
catcaagatatcatagactggagtc

SEQ ID NO: 455528 - DNA, 25 bp, Artificial
  probe
  misc_feature (1)..(25): SEQ ID NO: 6988; WAN024COL; Start 85; Stop 109
caaagatttcataaaggcacgcaca

SEQ ID NO: 455529 - DNA, 25 bp, Artificial
  probe
  misc_feature (1)..(25): SEQ ID NO: 6988; WAN024COL; Start 53; Stop 77
tcgagaatgaccaaatcagacttat

SEQ ID NO: 455530 - DNA, 25 bp, Artificial
  probe
  misc_feature (1)..(25): SEQ ID NO: 6988; WAN024COL; Start 52; Stop 76
atcgagaatgaccaaatcagactta

SEQ ID NO: 455531 - DNA, 25 bp, Artificial
  probe
  misc_feature (1)..(25): SEQ ID NO: 6988; WAN024COL; Start 51; Stop 75
tatcgagaatgaccaaatcagactt

SEQ ID NO: 455532 - DNA, 25 bp, Artificial
  probe
  misc_feature (1)..(25): SEQ ID NO: 6988; WAN024COL; Start 50; Stop 74
ctatcgagaatgaccaaatcagact

SEQ ID NO: 455533 - DNA, 25 bp, Artificial
  probe
  misc_feature (1)..(25): SEQ ID NO: 6988; WAN024COL; Start 136; Stop 160
atccttgaaatgataaacttcttcc

SEQ ID NO: 455534 - DNA, 25 bp, Artificial
  probe
  misc_feature (1)..(25): SEQ ID NO: 6989; WAN024GG9; Start 75; Stop 99
aggctatgttgttattggtgactac

SEQ ID NO: 455535 - DNA, 25 bp, Artificial
  probe
  misc_feature (1)..(25): SEQ ID NO: 6989; WAN024GG9; Start 74; Stop 98
caggctatgttgttattggtgacta

SEQ ID NO: 455536 - DNA, 25 bp, Artificial
  probe
  misc_feature (1)..(25): SEQ ID NO: 6989; WAN024GG9; Start 136; Stop 160
gatcatgtcacagaactccatcata

SEQ ID NO: 455537 - DNA, 25 bp, Artificial
  probe
  misc_feature (1)..(25): SEQ ID NO: 6989; WAN024GG9; Start 137; Stop 161
atcatgtcacagaactccatcatat

SEQ ID NO: 455538 - DNA, 25 bp, Artificial
  probe
  misc_feature (1)..(25): SEQ ID NO: 6989; WAN024GG9; Start 302; Stop 326
gaagagcaggtgatatgaagagtca

SEQ ID NO: 455539 - DNA, 25 bp, Artificial
  probe
  misc_feature (1)..(25): SEQ ID NO: 6989; WAN024GG9; Start 1; Stop 25
atgtgcttaatctgtcagagaatcg

SEQ ID NO: 455540 - DNA, 25 bp, Artificial
  probe
  misc_feature (1)..(25): SEQ ID NO: 6989; WAN024GG9; Start 135; Stop 159
agatcatgtcacagaactccatcat

SEQ ID NO: 455541 - DNA, 25 bp, Artificial
  probe
  misc_feature (1)..(25): SEQ ID NO: 6989; WAN024GG9; Start 134; Stop 158
aagatcatgtcacagaactccatca

SEQ ID NO: 455542 - DNA, 25 bp, Artificial
  probe
  misc_feature (1)..(25): SEQ ID NO: 6989; WAN024GG9; Start 301; Stop 325
cgaagagcaggtgatatgaagagtc

SEQ ID NO: 455543 - DNA, 25 bp, Artificial
  probe
  misc_feature (1)..(25): SEQ ID NO: 6989; WAN024GG9; Start 5; Stop 29
gcttaatctgtcagagaatcgaact

SEQ ID NO: 455544 - DNA, 25 bp, Artificial
  probe
  misc_feature (1)..(25): SEQ ID NO: 6989; WAN024GG9; Start 193; Stop 217
gaaatgagtttagtccaagaagcag

SEQ ID NO: 455545 - DNA, 25 bp, Artificial
  probe
  misc_feature (1)..(25): SEQ ID NO: 6989; WAN024GG9; Start 73; Stop 97
acaggctatgttgttattggtgact

SEQ ID NO: 455546 - DNA, 25 bp, Artificial
  probe
  misc_feature (1)..(25): SEQ ID NO: 6989; WAN024GG9; Start 4; Stop 28
tgcttaatctgtcagagaatcgaac

SEQ ID NO: 455547 - DNA, 25 bp, Artificial
  probe
  misc_feature (1)..(25): SEQ ID NO: 6989; WAN024GG9; Start 3; Stop 27
gtgcttaatctgtcagagaatcgaa

SEQ ID NO: 455548 - DNA, 25 bp, Artificial
  probe
  misc_feature (1)..(25): SEQ ID NO: 6989; WAN024GG9; Start 194; Stop 218
aaatgagtttagtccaagaagcagt

SEQ ID NO: 455549 - DNA, 25 bp, Artificial
  probe
  misc_feature (1)..(25): SEQ ID NO: 6989; WAN024GG9; Start 92; Stop 116
gtgactaccaatactttaagggcta

SEQ ID NO: 455550 - DNA, 25 bp, Artificial
  probe
  misc_feature (1)..(25): SEQ ID NO: 6989; WAN024GG9; Start 9; Stop 33
aatctgtcagagaatcgaactcatt

SEQ ID NO: 455551 - DNA, 25 bp, Artificial
  probe
  misc_feature (1)..(25): SEQ ID NO: 6989; WAN024GG9; Start 76; Stop 100
ggctatgttgttattggtgactacc

SEQ ID NO: 455552 - DNA, 25 bp, Artificial
  probe
  misc_feature (1)..(25): SEQ ID NO: 6989; WAN024GG9; Start 11; Stop 35
tctgtcagagaatcgaactcattaa

SEQ ID NO: 455553 - DNA, 25 bp, Artificial
  probe
  misc_feature (1)..(25): SEQ ID NO: 6989; WAN024GG9; Start 7; Stop 31
ttaatctgtcagagaatcgaactca

SEQ ID NO: 455554 - DNA, 25 bp, Artificial
  probe
  misc_feature (1)..(25): SEQ ID NO: 6989; WAN024GG9; Start 195; Stop 219
aatgagtttagtccaagaagcagtc

SEQ ID NO: 455555 - DNA, 25 bp, Artificial
  probe
  misc_feature (1)..(25): SEQ ID NO: 6989; WAN024GG9; Start 10; Stop 34
atctgtcagagaatcgaactcatta

SEQ ID NO: 455556 - DNA, 25 bp, Artificial
  probe
  misc_feature (1)..(25): SEQ ID NO: 6989; WAN024GG9; Start 8; Stop 32
taatctgtcagagaatcgaactcat

SEQ ID NO: 455557 - DNA, 25 bp, Artificial
  probe
  misc_feature (1)..(25): SEQ ID NO: 6989; WAN024GG9; Start 6; Stop 30
cttaatctgtcagagaatcgaactc

SEQ ID NO: 455558 - DNA, 25 bp, Artificial
  probe
  misc_feature (1)..(25): SEQ ID NO: 6989; WAN024GG9; Start 93; Stop 117
tgactaccaatactttaagggctat

SEQ ID NO: 455559 - DNA, 25 bp, Artificial
  probe
  misc_feature (1)..(25): SEQ ID NO: 6989; WAN024GG9; Start 313; Stop 337
gatatgaagagtcacggtttgaatg

SEQ ID NO: 455560 - DNA, 25 bp, Artificial
  probe
  misc_feature (1)..(25): SEQ ID NO: 6989; WAN024GG9; Start 312; Stop 336
tgatatgaagagtcacggtttgaat

SEQ ID NO: 455561 - DNA, 25 bp, Artificial
  probe
  misc_feature (1)..(25): SEQ ID NO: 6989; WAN024GG9; Start 2; Stop 26
tgtgcttaatctgtcagagaatcga

SEQ ID NO: 455562 - DNA, 25 bp, Artificial
  probe
  misc_feature (1)..(25): SEQ ID NO: 6989; WAN024GG9; Start 138; Stop 162
tcatgtcacagaactccatcatatg

SEQ ID NO: 455563 - DNA, 25 bp, Artificial
  probe
  misc_feature (1)..(25): SEQ ID NO: 6989; WAN024GG9; Start 314; Stop 338
atatgaagagtcacggtttgaatgg

SEQ ID NO: 455564 - DNA, 25 bp, Artificial
  probe
  misc_feature (1)..(25): SEQ ID NO: 6989; WAN024GG9; Start 96; Stop 120
ctaccaatactttaagggctatacc

SEQ ID NO: 455565 - DNA, 25 bp, Artificial
  probe
  misc_feature (1)..(25): SEQ ID NO: 6989; WAN024GG9; Start 133; Stop 157
aaagatcatgtcacagaactccatc

SEQ ID NO: 455566 - DNA, 25 bp, Artificial
  probe
  misc_feature (1)..(25): SEQ ID NO: 6989; WAN024GG9; Start 189; Stop 213
agaggaaatgagtttagtccaagaa

SEQ ID NO: 455567 - DNA, 25 bp, Artificial
  probe
  misc_feature (1)..(25): SEQ ID NO: 6990; WAN024GG8; Start 425; Stop 449
aagccttatccgatgaattagagaa

SEQ ID NO: 455568 - DNA, 25 bp, Artificial
  probe
  misc_feature (1)..(25): SEQ ID NO: 6990; WAN024GG8; Start 426; Stop 450
agccttatccgatgaattagagaag

SEQ ID NO: 455569 - DNA, 25 bp, Artificial
  probe
  misc_feature (1)..(25): SEQ ID NO: 6990; WAN024GG8; Start 427; Stop 451
gccttatccgatgaattagagaagt

SEQ ID NO: 455570 - DNA, 25 bp, Artificial
  probe
  misc_feature (1)..(25): SEQ ID NO: 6990; WAN024GG8; Start 432; Stop 456
atccgatgaattagagaagtacacg

SEQ ID NO: 455571 - DNA, 25 bp, Artificial
  probe
  misc_feature (1)..(25): SEQ ID NO: 6990; WAN024GG8; Start 435; Stop 459
cgatgaattagagaagtacacggtc

SEQ ID NO: 455572 - DNA, 25 bp, Artificial
  probe
  misc_feature (1)..(25): SEQ ID NO: 6990; WAN024GG8; Start 241; Stop 265
aagatgaacattgaacttctaggaa

SEQ ID NO: 455573 - DNA, 25 bp, Artificial
  probe
  misc_feature (1)..(25): SEQ ID NO: 6990; WAN024GG8; Start 431; Stop 455
tatccgatgaattagagaagtacac

SEQ ID NO: 455574 - DNA, 25 bp, Artificial
  probe
  misc_feature (1)..(25): SEQ ID NO: 6990; WAN024GG8; Start 137; Stop 161
agcatgtcacagaactccatcatat

SEQ ID NO: 455575 - DNA, 25 bp, Artificial
  probe
  misc_feature (1)..(25): SEQ ID NO: 6990; WAN024GG8; Start 428; Stop 452
ccttatccgatgaattagagaagta

SEQ ID NO: 455576 - DNA, 25 bp, Artificial
  probe
  misc_feature (1)..(25): SEQ ID NO: 6990; WAN024GG8; Start 95; Stop 119
accaccaatactttaagggctatac

SEQ ID NO: 455577 - DNA, 25 bp, Artificial
  probe
  misc_feature (1)..(25): SEQ ID NO: 6990; WAN024GG8; Start 94; Stop 118
gaccaccaatactttaagggctata

SEQ ID NO: 455578 - DNA, 25 bp, Artificial
  probe
  misc_feature (1)..(25): SEQ ID NO: 6990; WAN024GG8; Start 424; Stop 448
aaagccttatccgatgaattagaga

SEQ ID NO: 455579 - DNA, 25 bp, Artificial
  probe
  misc_feature (1)..(25): SEQ ID NO: 6990; WAN024GG8; Start 96; Stop 120
ccaccaatactttaagggctatacc

SEQ ID NO: 455580 - DNA, 25 bp, Artificial
  probe
  misc_feature (1)..(25): SEQ ID NO: 6990; WAN024GG8; Start 413; Stop 437
aacaaatgattaaagccttatccga

SEQ ID NO: 455581 - DNA, 25 bp, Artificial
  probe
  misc_feature (1)..(25): SEQ ID NO: 6990; WAN024GG8; Start 406; Stop 430
gagttggaacaaatgattaaagcct

SEQ ID NO: 455582 - DNA, 25 bp, Artificial
  probe
  misc_feature (1)..(25): SEQ ID NO: 6990; WAN024GG8; Start 405; Stop 429
tgagttggaacaaatgattaaagcc

SEQ ID NO: 455583 - DNA, 25 bp, Artificial
  probe
  misc_feature (1)..(25): SEQ ID NO: 6990; WAN024GG8; Start 93; Stop 117
agaccaccaatactttaagggctat

SEQ ID NO: 455584 - DNA, 25 bp, Artificial
  probe
  misc_feature (1)..(25): SEQ ID NO: 6990; WAN024GG8; Start 407; Stop 431
agttggaacaaatgattaaagcctt

SEQ ID NO: 455585 - DNA, 25 bp, Artificial
  probe
  misc_feature (1)..(25): SEQ ID NO: 6990; WAN024GG8; Start 73; Stop 97
acaggctatgttgttattggagacc

SEQ ID NO: 455586 - DNA, 25 bp, Artificial
  probe
  misc_feature (1)..(25): SEQ ID NO: 6990; WAN024GG8; Start 414; Stop 438
acaaatgattaaagccttatccgat

SEQ ID NO: 455587 - DNA, 25 bp, Artificial
  probe
  misc_feature (1)..(25): SEQ ID NO: 6990; WAN024GG8; Start 412; Stop 436
gaacaaatgattaaagccttatccg

SEQ ID NO: 455588 - DNA, 25 bp, Artificial
  probe
  misc_feature (1)..(25): SEQ ID NO: 6990; WAN024GG8; Start 415; Stop 439
caaatgattaaagccttatccgatg

SEQ ID NO: 455589 - DNA, 25 bp, Artificial
  probe
  misc_feature (1)..(25): SEQ ID NO: 6990; WAN024GG8; Start 417; Stop 441
aatgattaaagccttatccgatgaa

SEQ ID NO: 455590 - DNA, 25 bp, Artificial
  probe
  misc_feature (1)..(25): SEQ ID NO: 6990; WAN024GG8; Start 416; Stop 440
aaatgattaaagccttatccgatga

SEQ ID NO: 455591 - DNA, 25 bp, Artificial
  probe
  misc_feature (1)..(25): SEQ ID NO: 6990; WAN024GG8; Start 419; Stop 443
tgattaaagccttatccgatgaatt

SEQ ID NO: 455592 - DNA, 25 bp, Artificial
  probe
  misc_feature (1)..(25): SEQ ID NO: 6990; WAN024GG8; Start 430; Stop 454
ttatccgatgaattagagaagtaca

SEQ ID NO: 455593 - DNA, 25 bp, Artificial
  probe
  misc_feature (1)..(25): SEQ ID NO: 6990; WAN024GG8; Start 418; Stop 442
atgattaaagccttatccgatgaat

SEQ ID NO: 455594 - DNA, 25 bp, Artificial
  probe
  misc_feature (1)..(25): SEQ ID NO: 6990; WAN024GG8; Start 251; Stop 275
ttgaacttctaggaaatggagatgc

SEQ ID NO: 455595 - DNA, 25 bp, Artificial
  probe
  misc_feature (1)..(25): SEQ ID NO: 6990; WAN024GG8; Start 92; Stop 116
gagaccaccaatactttaagggcta

SEQ ID NO: 455596 - DNA, 25 bp, Artificial
  probe
  misc_feature (1)..(25): SEQ ID NO: 6990; WAN024GG8; Start 136; Stop 160
gagcatgtcacagaactccatcata

SEQ ID NO: 455597 - DNA, 25 bp, Artificial
  probe
  misc_feature (1)..(25): SEQ ID NO: 6990; WAN024GG8; Start 423; Stop 447
taaagccttatccgatgaattagag

SEQ ID NO: 455598 - DNA, 25 bp, Artificial
  probe
  misc_feature (1)..(25): SEQ ID NO: 6990; WAN024GG8; Start 404; Stop 428
atgagttggaacaaatgattaaagc

SEQ ID NO: 455599 - DNA, 25 bp, Artificial
  probe
  misc_feature (1)..(25): SEQ ID NO: 6990; WAN024GG8; Start 408; Stop 432
gttggaacaaatgattaaagcctta

SEQ ID NO: 455600 - DNA, 25 bp, Artificial
  probe
  misc_feature (1)..(25): SEQ ID NO: 6991; WAN024BL8; Start 216; Stop 240
agaatttgaggagaattggaaacac

SEQ ID NO: 455601 - DNA, 25 bp, Artificial
  probe
  misc_feature (1)..(25): SEQ ID NO: 6991; WAN024BL8; Start 217; Stop 241
gaatttgaggagaattggaaacacg

SEQ ID NO: 455602 - DNA, 25 bp, Artificial
  probe
  misc_feature (1)..(25): SEQ ID NO: 6991; WAN024BL8; Start 215; Stop 239
aagaatttgaggagaattggaaaca

SEQ ID NO: 455603 - DNA, 25 bp, Artificial
  probe
  misc_feature (1)..(25): SEQ ID NO: 6991; WAN024BL8; Start 213; Stop 237
tgaagaatttgaggagaattggaaa

SEQ ID NO: 455604 - DNA, 25 bp, Artificial
  probe
  misc_feature (1)..(25): SEQ ID NO: 6991; WAN024BL8; Start 214; Stop 238
gaagaatttgaggagaattggaaac

SEQ ID NO: 455605 - DNA, 25 bp, Artificial
  probe
  misc_feature (1)..(25): SEQ ID NO: 6991; WAN024BL8; Start 212; Stop 236
atgaagaatttgaggagaattggaa

SEQ ID NO: 455606 - DNA, 25 bp, Artificial
  probe
  misc_feature (1)..(25): SEQ ID NO: 6991; WAN024BL8; Start 257; Stop 281
ccgtctacgcttcaaagaatgtaaa

SEQ ID NO: 455607 - DNA, 25 bp, Artificial
  probe
  misc_feature (1)..(25): SEQ ID NO: 6991; WAN024BL8; Start 218; Stop 242
aatttgaggagaattggaaacacgg

SEQ ID NO: 455608 - DNA, 25 bp, Artificial
  probe
  misc_feature (1)..(25): SEQ ID NO: 6991; WAN024BL8; Start 301; Stop 325
atagagggcgactacctagttagaa

SEQ ID NO: 455609 - DNA, 25 bp, Artificial
  probe
  misc_feature (1)..(25): SEQ ID NO: 6991; WAN024BL8; Start 211; Stop 235
tatgaagaatttgaggagaattgga

SEQ ID NO: 455610 - DNA, 25 bp, Artificial
  probe
  misc_feature (1)..(25): SEQ ID NO: 6991; WAN024BL8; Start 304; Stop 328
gagggcgactacctagttagaaatt

SEQ ID NO: 455611 - DNA, 25 bp, Artificial
  probe
  misc_feature (1)..(25): SEQ ID NO: 6991; WAN024BL8; Start 302; Stop 326
tagagggcgactacctagttagaaa

SEQ ID NO: 455612 - DNA, 25 bp, Artificial
  probe
  misc_feature (1)..(25): SEQ ID NO: 6991; WAN024BL8; Start 307; Stop 331
ggcgactacctagttagaaatttga

SEQ ID NO: 455613 - DNA, 25 bp, Artificial
  probe
  misc_feature (1)..(25): SEQ ID NO: 6991; WAN024BL8; Start 300; Stop 324
gatagagggcgactacctagttaga

SEQ ID NO: 455614 - DNA, 25 bp, Artificial
  probe
  misc_feature (1)..(25): SEQ ID NO: 6991; WAN024BL8; Start 299; Stop 323
agatagagggcgactacctagttag

SEQ ID NO: 455615 - DNA, 25 bp, Artificial
  probe
  misc_feature (1)..(25): SEQ ID NO: 6991; WAN024BL8; Start 256; Stop 280
accgtctacgcttcaaagaatgtaa

SEQ ID NO: 455616 - DNA, 25 bp, Artificial
  probe
  misc_feature (1)..(25): SEQ ID NO: 6991; WAN024BL8; Start 255; Stop 279
aaccgtctacgcttcaaagaatgta

SEQ ID NO: 455617 - DNA, 25 bp, Artificial
  probe
  misc_feature (1)..(25): SEQ ID NO: 6991; WAN024BL8; Start 306; Stop 330
gggcgactacctagttagaaatttg

SEQ ID NO: 455618 - DNA, 25 bp, Artificial
  probe
  misc_feature (1)..(25): SEQ ID NO: 6991; WAN024BL8; Start 291; Stop 315
tttaaagcagatagagggcgactac

SEQ ID NO: 455619 - DNA, 25 bp, Artificial
  probe
  misc_feature (1)..(25): SEQ ID NO: 6991; WAN024BL8; Start 303; Stop 327
agagggcgactacctagttagaaat

SEQ ID NO: 455620 - DNA, 25 bp, Artificial
  probe
  misc_feature (1)..(25): SEQ ID NO: 6991; WAN024BL8; Start 298; Stop 322
cagatagagggcgactacctagtta

SEQ ID NO: 455621 - DNA, 25 bp, Artificial
  probe
  misc_feature (1)..(25): SEQ ID NO: 6991; WAN024BL8; Start 308; Stop 332
gcgactacctagttagaaatttgat

SEQ ID NO: 455622 - DNA, 25 bp, Artificial
  probe
  misc_feature (1)..(25): SEQ ID NO: 6991; WAN024BL8; Start 210; Stop 234
atatgaagaatttgaggagaattgg

SEQ ID NO: 455623 - DNA, 25 bp, Artificial
  probe
  misc_feature (1)..(25): SEQ ID NO: 6991; WAN024BL8; Start 305; Stop 329
agggcgactacctagttagaaattt

SEQ ID NO: 455624 - DNA, 25 bp, Artificial
  probe
  misc_feature (1)..(25): SEQ ID NO: 6991; WAN024BL8; Start 292; Stop 316
ttaaagcagatagagggcgactacc

SEQ ID NO: 455625 - DNA, 25 bp, Artificial
  probe
  misc_feature (1)..(25): SEQ ID NO: 6991; WAN024BL8; Start 314; Stop 338
acctagttagaaatttgatagacgt

SEQ ID NO: 455626 - DNA, 25 bp, Artificial
  probe
  misc_feature (1)..(25): SEQ ID NO: 6991; WAN024BL8; Start 252; Stop 276
ctcaaccgtctacgcttcaaagaat

SEQ ID NO: 455627 - DNA, 25 bp, Artificial
  probe
  misc_feature (1)..(25): SEQ ID NO: 6991; WAN024BL8; Start 258; Stop 282
cgtctacgcttcaaagaatgtaaaa

SEQ ID NO: 455628 - DNA, 25 bp, Artificial
  probe
  misc_feature (1)..(25): SEQ ID NO: 6991; WAN024BL8; Start 103; Stop 127
aaaactccccaagcaagaaatcaag

SEQ ID NO: 455629 - DNA, 25 bp, Artificial
  probe
  misc_feature (1)..(25): SEQ ID NO: 6991; WAN024BL8; Start 253; Stop 277
tcaaccgtctacgcttcaaagaatg

SEQ ID NO: 455630 - DNA, 25 bp, Artificial
  probe
  misc_feature (1)..(25): SEQ ID NO: 6991; WAN024BL8; Start 128; Stop 152
ctgcgattttacttcaggaaaagat

SEQ ID NO: 455631 - DNA, 25 bp, Artificial
  probe
  misc_feature (1)..(25): SEQ ID NO: 6991; WAN024BL8; Start 249; Stop 273
aaactcaaccgtctacgcttcaaag

SEQ ID NO: 455632 - DNA, 25 bp, Artificial
  probe
  misc_feature (1)..(25): SEQ ID NO: 6991; WAN024BL8; Start 46; Stop 70
agatacaaagatccatatactgaga

SEQ ID NO: 455633 - DNA, 25 bp, Artificial
  probe
  misc_feature (1)..(25): SEQ ID NO: 6992; WAN024BZW; Start 173; Stop 197
tactcttaacacttgataggaagcc

SEQ ID NO: 455634 - DNA, 25 bp, Artificial
  probe
  misc_feature (1)..(25): SEQ ID NO: 6992; WAN024BZW; Start 23; Stop 47
tactaggttcaggagatcaaggatt

SEQ ID NO: 455635 - DNA, 25 bp, Artificial
  probe
  misc_feature (1)..(25): SEQ ID NO: 6992; WAN024BZW; Start 22; Stop 46
atactaggttcaggagatcaaggat

SEQ ID NO: 455636 - DNA, 25 bp, Artificial
  probe
  misc_feature (1)..(25): SEQ ID NO: 6992; WAN024BZW; Start 21; Stop 45
tatactaggttcaggagatcaagga

SEQ ID NO: 455637 - DNA, 25 bp, Artificial
  probe
  misc_feature (1)..(25): SEQ ID NO: 6992; WAN024BZW; Start 172; Stop 196
ttactcttaacacttgataggaagc

SEQ ID NO: 455638 - DNA, 25 bp, Artificial
  probe
  misc_feature (1)..(25): SEQ ID NO: 6992; WAN024BZW; Start 20; Stop 44
ttatactaggttcaggagatcaagg

SEQ ID NO: 455639 - DNA, 25 bp, Artificial
  probe
  misc_feature (1)..(25): SEQ ID NO: 6992; WAN024BZW; Start 342; Stop 366
taccaatgtgactattcaagcactt

SEQ ID NO: 455640 - DNA, 25 bp, Artificial
  probe
  misc_feature (1)..(25): SEQ ID NO: 6992; WAN024BZW; Start 24; Stop 48
actaggttcaggagatcaaggattg

SEQ ID NO: 455641 - DNA, 25 bp, Artificial
  probe
  misc_feature (1)..(25): SEQ ID NO: 6992; WAN024BZW; Start 174; Stop 198
actcttaacacttgataggaagcct

SEQ ID NO: 455642 - DNA, 25 bp, Artificial
  probe
  misc_feature (1)..(25): SEQ ID NO: 6992; WAN024BZW; Start 348; Stop 372
tgtgactattcaagcacttgtagaa

SEQ ID NO: 455643 - DNA, 25 bp, Artificial
  probe
  misc_feature (1)..(25): SEQ ID NO: 6992; WAN024BZW; Start 347; Stop 371
atgtgactattcaagcacttgtaga

SEQ ID NO: 455644 - DNA, 25 bp, Artificial
  probe
  misc_feature (1)..(25): SEQ ID NO: 6992; WAN024BZW; Start 345; Stop 369
caatgtgactattcaagcacttgta

SEQ ID NO: 455645 - DNA, 25 bp, Artificial
  probe
  misc_feature (1)..(25): SEQ ID NO: 6992; WAN024BZW; Start 346; Stop 370
aatgtgactattcaagcacttgtag

SEQ ID NO: 455646 - DNA, 25 bp, Artificial
  probe
  misc_feature (1)..(25): SEQ ID NO: 6992; WAN024BZW; Start 341; Stop 365
gtaccaatgtgactattcaagcact

SEQ ID NO: 455647 - DNA, 25 bp, Artificial
  probe
  misc_feature (1)..(25): SEQ ID NO: 6992; WAN024BZW; Start 62; Stop 86
tttatgaaggtgaagttgagggatt

SEQ ID NO: 455648 - DNA, 25 bp, Artificial
  probe
  misc_feature (1)..(25): SEQ ID NO: 6992; WAN024BZW; Start 61; Stop 85
atttatgaaggtgaagttgagggat

SEQ ID NO: 455649 - DNA, 25 bp, Artificial
  probe
  misc_feature (1)..(25): SEQ ID NO: 6992; WAN024BZW; Start 71; Stop 95
gtgaagttgagggattggtagatat

SEQ ID NO: 455650 - DNA, 25 bp, Artificial
  probe
  misc_feature (1)..(25): SEQ ID NO: 6992; WAN024BZW; Start 63; Stop 87
ttatgaaggtgaagttgagggattg

SEQ ID NO: 455651 - DNA, 25 bp, Artificial
  probe
  misc_feature (1)..(25): SEQ ID NO: 6992; WAN024BZW; Start 25; Stop 49
ctaggttcaggagatcaaggattgg

SEQ ID NO: 455652 - DNA, 25 bp, Artificial
  probe
  misc_feature (1)..(25): SEQ ID NO: 6992; WAN024BZW; Start 72; Stop 96
tgaagttgagggattggtagatatt

SEQ ID NO: 455653 - DNA, 25 bp, Artificial
  probe
  misc_feature (1)..(25): SEQ ID NO: 6992; WAN024BZW; Start 60; Stop 84
aatttatgaaggtgaagttgaggga

SEQ ID NO: 455654 - DNA, 25 bp, Artificial
  probe
  misc_feature (1)..(25): SEQ ID NO: 6992; WAN024BZW; Start 59; Stop 83
caatttatgaaggtgaagttgaggg

SEQ ID NO: 455655 - DNA, 25 bp, Artificial
  probe
  misc_feature (1)..(25): SEQ ID NO: 6992; WAN024BZW; Start 70; Stop 94
ggtgaagttgagggattggtagata

SEQ ID NO: 455656 - DNA, 25 bp, Artificial
  probe
  misc_feature (1)..(25): SEQ ID NO: 6992; WAN024BZW; Start 344; Stop 368
ccaatgtgactattcaagcacttgt

SEQ ID NO: 455657 - DNA, 25 bp, Artificial
  probe
  misc_feature (1)..(25): SEQ ID NO: 6992; WAN024BZW; Start 343; Stop 367
accaatgtgactattcaagcacttg

SEQ ID NO: 455658 - DNA, 25 bp, Artificial
  probe
  misc_feature (1)..(25): SEQ ID NO: 6992; WAN024BZW; Start 73; Stop 97
gaagttgagggattggtagatattt

SEQ ID NO: 455659 - DNA, 25 bp, Artificial
  probe
  misc_feature (1)..(25): SEQ ID NO: 6992; WAN024BZW; Start 46; Stop 70
ttggcggtattgtcaatttatgaag

SEQ ID NO: 455660 - DNA, 25 bp, Artificial
  probe
  misc_feature (1)..(25): SEQ ID NO: 6992; WAN024BZW; Start 50; Stop 74
cggtattgtcaatttatgaaggtga

SEQ ID NO: 455661 - DNA, 25 bp, Artificial
  probe
  misc_feature (1)..(25): SEQ ID NO: 6992; WAN024BZW; Start 49; Stop 73
gcggtattgtcaatttatgaaggtg

SEQ ID NO: 455662 - DNA, 25 bp, Artificial
  probe
  misc_feature (1)..(25): SEQ ID NO: 6992; WAN024BZW; Start 353; Stop 377
ctattcaagcacttgtagaaatcgg

SEQ ID NO: 455663 - DNA, 25 bp, Artificial
  probe
  misc_feature (1)..(25): SEQ ID NO: 6992; WAN024BZW; Start 64; Stop 88
tatgaaggtgaagttgagggattgg

SEQ ID NO: 455664 - DNA, 25 bp, Artificial
  probe
  misc_feature (1)..(25): SEQ ID NO: 6992; WAN024BZW; Start 178; Stop 202
ttaacacttgataggaagcctagag

SEQ ID NO: 455665 - DNA, 25 bp, Artificial
  probe
  misc_feature (1)..(25): SEQ ID NO: 6992; WAN024BZW; Start 177; Stop 201
cttaacacttgataggaagcctaga

SEQ ID NO: 455666 - DNA, 25 bp, Artificial
  probe
  misc_feature (1)..(25): SEQ ID NO: 6993; WAN024BUF; Start 439; Stop 463
tacatcagagataatcaggaagacc

SEQ ID NO: 455667 - DNA, 25 bp, Artificial
  probe
  misc_feature (1)..(25): SEQ ID NO: 6993; WAN024BUF; Start 435; Stop 459
gcagtacatcagagataatcaggaa

SEQ ID NO: 455668 - DNA, 25 bp, Artificial
  probe
  misc_feature (1)..(25): SEQ ID NO: 6993; WAN024BUF; Start 433; Stop 457
gagcagtacatcagagataatcagg

SEQ ID NO: 455669 - DNA, 25 bp, Artificial
  probe
  misc_feature (1)..(25): SEQ ID NO: 6993; WAN024BUF; Start 434; Stop 458
agcagtacatcagagataatcagga

SEQ ID NO: 455670 - DNA, 25 bp, Artificial
  probe
  misc_feature (1)..(25): SEQ ID NO: 6993; WAN024BUF; Start 432; Stop 456
tgagcagtacatcagagataatcag

SEQ ID NO: 455671 - DNA, 25 bp, Artificial
  probe
  misc_feature (1)..(25): SEQ ID NO: 6993; WAN024BUF; Start 431; Stop 455
ttgagcagtacatcagagataatca

SEQ ID NO: 455672 - DNA, 25 bp, Artificial
  probe
  misc_feature (1)..(25): SEQ ID NO: 6993; WAN024BUF; Start 440; Stop 464
acatcagagataatcaggaagacct

SEQ ID NO: 455673 - DNA, 25 bp, Artificial
  probe
  misc_feature (1)..(25): SEQ ID NO: 6993; WAN024BUF; Start 438; Stop 462
gtacatcagagataatcaggaagac

SEQ ID NO: 455674 - DNA, 25 bp, Artificial
  probe
  misc_feature (1)..(25): SEQ ID NO: 6993; WAN024BUF; Start 437; Stop 461
agtacatcagagataatcaggaaga

SEQ ID NO: 455675 - DNA, 25 bp, Artificial
  probe
  misc_feature (1)..(25): SEQ ID NO: 6993; WAN024BUF; Start 436; Stop 460
cagtacatcagagataatcaggaag

SEQ ID NO: 455676 - DNA, 25 bp, Artificial
  probe
  misc_feature (1)..(25): SEQ ID NO: 6993; WAN024BUF; Start 88; Stop 112
gaggacctattagcgactctgtatg

SEQ ID NO: 455677 - DNA, 25 bp, Artificial
  probe
  misc_feature (1)..(25): SEQ ID NO: 6993; WAN024BUF; Start 5; Stop 29
gggtggtaagtatgacagaaattga

SEQ ID NO: 455678 - DNA, 25 bp, Artificial
  probe
  misc_feature (1)..(25): SEQ ID NO: 6993; WAN024BUF; Start 4; Stop 28
tgggtggtaagtatgacagaaattg

SEQ ID NO: 455679 - DNA, 25 bp, Artificial
  probe
  misc_feature (1)..(25): SEQ ID NO: 6993; WAN024BUF; Start 3; Stop 27
gtgggtggtaagtatgacagaaatt

SEQ ID NO: 455680 - DNA, 25 bp, Artificial
  probe
  misc_feature (1)..(25): SEQ ID NO: 6993; WAN024BUF; Start 89; Stop 113
aggacctattagcgactctgtatgg

SEQ ID NO: 455681 - DNA, 25 bp, Artificial
  probe
  misc_feature (1)..(25): SEQ ID NO: 6993; WAN024BUF; Start 6; Stop 30
ggtggtaagtatgacagaaattgaa

SEQ ID NO: 455682 - DNA, 25 bp, Artificial
  probe
  misc_feature (1)..(25): SEQ ID NO: 6993; WAN024BUF; Start 194; Stop 218
aaatatctgacagcgtagccatcta

SEQ ID NO: 455683 - DNA, 25 bp, Artificial
  probe
  misc_feature (1)..(25): SEQ ID NO: 6993; WAN024BUF; Start 272; Stop 296
ttgatttcaatgtgggagaggatag

SEQ ID NO: 455684 - DNA, 25 bp, Artificial
  probe
  misc_feature (1)..(25): SEQ ID NO: 6993; WAN024BUF; Start 271; Stop 295
cttgatttcaatgtgggagaggata

SEQ ID NO: 455685 - DNA, 25 bp, Artificial
  probe
  misc_feature (1)..(25): SEQ ID NO: 6993; WAN024BUF; Start 263; Stop 287
agtttatccttgatttcaatgtggg

SEQ ID NO: 455686 - DNA, 25 bp, Artificial
  probe
  misc_feature (1)..(25): SEQ ID NO: 6993; WAN024BUF; Start 314; Stop 338
gccaagtcgtagaaattattgacat

SEQ ID NO: 455687 - DNA, 25 bp, Artificial
  probe
  misc_feature (1)..(25): SEQ ID NO: 6993; WAN024BUF; Start 325; Stop 349
gaaattattgacatgattgagcctg

SEQ ID NO: 455688 - DNA, 25 bp, Artificial
  probe
  misc_feature (1)..(25): SEQ ID NO: 6993; WAN024BUF; Start 324; Stop 348
agaaattattgacatgattgagcct

SEQ ID NO: 455689 - DNA, 25 bp, Artificial
  probe
  misc_feature (1)..(25): SEQ ID NO: 6993; WAN024BUF; Start 403; Stop 427
aaacatgctatcgtccactttgaaa

SEQ ID NO: 455690 - DNA, 25 bp, Artificial
  probe
  misc_feature (1)..(25): SEQ ID NO: 6993; WAN024BUF; Start 273; Stop 297
tgatttcaatgtgggagaggatagc

SEQ ID NO: 455691 - DNA, 25 bp, Artificial
  probe
  misc_feature (1)..(25): SEQ ID NO: 6993; WAN024BUF; Start 2; Stop 26
tgtgggtggtaagtatgacagaaat

SEQ ID NO: 455692 - DNA, 25 bp, Artificial
  probe
  misc_feature (1)..(25): SEQ ID NO: 6993; WAN024BUF; Start 1; Stop 25
atgtgggtggtaagtatgacagaaa

SEQ ID NO: 455693 - DNA, 25 bp, Artificial
  probe
  misc_feature (1)..(25): SEQ ID NO: 6993; WAN024BUF; Start 195; Stop 219
aatatctgacagcgtagccatctac

SEQ ID NO: 455694 - DNA, 25 bp, Artificial
  probe
  misc_feature (1)..(25): SEQ ID NO: 6993; WAN024BUF; Start 94; Stop 118
ctattagcgactctgtatggcgaaa

SEQ ID NO: 455695 - DNA, 25 bp, Artificial
  probe
  misc_feature (1)..(25): SEQ ID NO: 6993; WAN024BUF; Start 262; Stop 286
gagtttatccttgatttcaatgtgg

SEQ ID NO: 455696 - DNA, 25 bp, Artificial
  probe
  misc_feature (1)..(25): SEQ ID NO: 6993; WAN024BUF; Start 430; Stop 454
tttgagcagtacatcagagataatc

SEQ ID NO: 455697 - DNA, 25 bp, Artificial
  probe
  misc_feature (1)..(25): SEQ ID NO: 6993; WAN024BUF; Start 326; Stop 350
aaattattgacatgattgagcctgt

SEQ ID NO: 455698 - DNA, 25 bp, Artificial
  probe
  misc_feature (1)..(25): SEQ ID NO: 6993; WAN024BUF; Start 143; Stop 167
cttgggatatttctccagagtcaat

SEQ ID NO: 455699 - DNA, 25 bp, Artificial
  probe
  misc_feature (1)..(25): SEQ ID NO: 6994; WAN024BND; Start 5; Stop 29
gtaaagcatacttgtgggaggtaaa

SEQ ID NO: 455700 - DNA, 25 bp, Artificial
  probe
  misc_feature (1)..(25): SEQ ID NO: 6994; WAN024BND; Start 4; Stop 28
tgtaaagcatacttgtgggaggtaa

SEQ ID NO: 455701 - DNA, 25 bp, Artificial
  probe
  misc_feature (1)..(25): SEQ ID NO: 6994; WAN024BND; Start 3; Stop 27
gtgtaaagcatacttgtgggaggta

SEQ ID NO: 455702 - DNA, 25 bp, Artificial
  probe
  misc_feature (1)..(25): SEQ ID NO: 6994; WAN024BND; Start 1; Stop 25
atgtgtaaagcatacttgtgggagg

SEQ ID NO: 455703 - DNA, 25 bp, Artificial
  probe
  misc_feature (1)..(25): SEQ ID NO: 6994; WAN024BND; Start 6; Stop 30
taaagcatacttgtgggaggtaaaa

SEQ ID NO: 455704 - DNA, 25 bp, Artificial
  probe
  misc_feature (1)..(25): SEQ ID NO: 6994; WAN024BND; Start 28; Stop 52
aaaatctctaattaccgccaaaacc

SEQ ID NO: 455705 - DNA, 25 bp, Artificial
  probe
  misc_feature (1)..(25): SEQ ID NO: 6994; WAN024BND; Start 2; Stop 26
tgtgtaaagcatacttgtgggaggt

SEQ ID NO: 455706 - DNA, 25 bp, Artificial
  probe
  misc_feature (1)..(25): SEQ ID NO: 6994; WAN024BND; Start 44; Stop 68
gccaaaaccacaaaggaggatttaa

SEQ ID NO: 455707 - DNA, 25 bp, Artificial
  probe
  misc_feature (1)..(25): SEQ ID NO: 6994; WAN024BND; Start 29; Stop 53
aaatctctaattaccgccaaaacca

SEQ ID NO: 455708 - DNA, 25 bp, Artificial
  probe
  misc_feature (1)..(25): SEQ ID NO: 6994; WAN024BND; Start 45; Stop 69
ccaaaaccacaaaggaggatttaaa

SEQ ID NO: 455709 - DNA, 25 bp, Artificial
  probe
  misc_feature (1)..(25): SEQ ID NO: 6994; WAN024BND; Start 30; Stop 54
aatctctaattaccgccaaaaccac

SEQ ID NO: 455710 - DNA, 25 bp, Artificial
  probe
  misc_feature (1)..(25): SEQ ID NO: 6994; WAN024BND; Start 46; Stop 70
caaaaccacaaaggaggatttaaaa

SEQ ID NO: 455711 - DNA, 25 bp, Artificial
  probe
  misc_feature (1)..(25): SEQ ID NO: 6994; WAN024BND; Start 34; Stop 58
tctaattaccgccaaaaccacaaag

SEQ ID NO: 455712 - DNA, 25 bp, Artificial
  probe
  misc_feature (1)..(25): SEQ ID NO: 6994; WAN024BND; Start 33; Stop 57
ctctaattaccgccaaaaccacaaa

SEQ ID NO: 455713 - DNA, 25 bp, Artificial
  probe
  misc_feature (1)..(25): SEQ ID NO: 6994; WAN024BND; Start 31; Stop 55
atctctaattaccgccaaaaccaca

SEQ ID NO: 455714 - DNA, 25 bp, Artificial
  probe
  misc_feature (1)..(25): SEQ ID NO: 6994; WAN024BND; Start 32; Stop 56
tctctaattaccgccaaaaccacaa

SEQ ID NO: 455715 - DNA, 25 bp, Artificial
  probe
  misc_feature (1)..(25): SEQ ID NO: 6994; WAN024BND; Start 35; Stop 59
ctaattaccgccaaaaccacaaagg

SEQ ID NO: 455716 - DNA, 25 bp, Artificial
  probe
  misc_feature (1)..(25): SEQ ID NO: 6994; WAN024BND; Start 36; Stop 60
taattaccgccaaaaccacaaagga

SEQ ID NO: 455717 - DNA, 25 bp, Artificial
  probe
  misc_feature (1)..(25): SEQ ID NO: 6994; WAN024BND; Start 43; Stop 67
cgccaaaaccacaaaggaggattta

SEQ ID NO: 455718 - DNA, 25 bp, Artificial
  probe
  misc_feature (1)..(25): SEQ ID NO: 6994; WAN024BND; Start 37; Stop 61
aattaccgccaaaaccacaaaggag

SEQ ID NO: 455719 - DNA, 25 bp, Artificial
  probe
  misc_feature (1)..(25): SEQ ID NO: 6995; WAN024G6X; Start 93; Stop 117
ctcatcagctacagaacatagacta

SEQ ID NO: 455720 - DNA, 25 bp, Artificial
  probe
  misc_feature (1)..(25): SEQ ID NO: 6995; WAN024G6X; Start 94; Stop 118
tcatcagctacagaacatagactaa

SEQ ID NO: 455721 - DNA, 25 bp, Artificial
  probe
  misc_feature (1)..(25): SEQ ID NO: 6995; WAN024G6X; Start 113; Stop 137
gactaatttgtttgcccttacgaat

SEQ ID NO: 455722 - DNA, 25 bp, Artificial
  probe
  misc_feature (1)..(25): SEQ ID NO: 6995; WAN024G6X; Start 111; Stop 135
tagactaatttgtttgcccttacga

SEQ ID NO: 455723 - DNA, 25 bp, Artificial
  probe
  misc_feature (1)..(25): SEQ ID NO: 6995; WAN024G6X; Start 110; Stop 134
atagactaatttgtttgcccttacg

SEQ ID NO: 455724 - DNA, 25 bp, Artificial
  probe
  misc_feature (1)..(25): SEQ ID NO: 6995; WAN024G6X; Start 112; Stop 136
agactaatttgtttgcccttacgaa

SEQ ID NO: 455725 - DNA, 25 bp, Artificial
  probe
  misc_feature (1)..(25): SEQ ID NO: 6995; WAN024G6X; Start 95; Stop 119
catcagctacagaacatagactaat

SEQ ID NO: 455726 - DNA, 25 bp, Artificial
  probe
  misc_feature (1)..(25): SEQ ID NO: 6995; WAN024G6X; Start 114; Stop 138
actaatttgtttgcccttacgaatt

SEQ ID NO: 455727 - DNA, 25 bp, Artificial
  probe
  misc_feature (1)..(25): SEQ ID NO: 6995; WAN024G6X; Start 109; Stop 133
catagactaatttgtttgcccttac

SEQ ID NO: 455728 - DNA, 25 bp, Artificial
  probe
  misc_feature (1)..(25): SEQ ID NO: 6995; WAN024G6X; Start 115; Stop 139
ctaatttgtttgcccttacgaattt

SEQ ID NO: 455729 - DNA, 25 bp, Artificial
  probe
  misc_feature (1)..(25): SEQ ID NO: 6995; WAN024G6X; Start 96; Stop 120
atcagctacagaacatagactaatt

SEQ ID NO: 455730 - DNA, 25 bp, Artificial
  probe
  misc_feature (1)..(25): SEQ ID NO: 6995; WAN024G6X; Start 108; Stop 132
acatagactaatttgtttgccctta

SEQ ID NO: 455731 - DNA, 25 bp, Artificial
  probe
  misc_feature (1)..(25): SEQ ID NO: 6995; WAN024G6X; Start 89; Stop 113
gatgctcatcagctacagaacatag

SEQ ID NO: 455732 - DNA, 25 bp, Artificial
  probe
  misc_feature (1)..(25): SEQ ID NO: 6995; WAN024G6X; Start 90; Stop 114
atgctcatcagctacagaacataga

SEQ ID NO: 455733 - DNA, 25 bp, Artificial
  probe
  misc_feature (1)..(25): SEQ ID NO: 6995; WAN024G6X; Start 88; Stop 112
agatgctcatcagctacagaacata

SEQ ID NO: 455734 - DNA, 25 bp, Artificial
  probe
  misc_feature (1)..(25): SEQ ID NO: 6995; WAN024G6X; Start 92; Stop 116
gctcatcagctacagaacatagact

SEQ ID NO: 455735 - DNA, 25 bp, Artificial
  probe
  misc_feature (1)..(25): SEQ ID NO: 6995; WAN024G6X; Start 87; Stop 111
aagatgctcatcagctacagaacat

SEQ ID NO: 455736 - DNA, 25 bp, Artificial
  probe
  misc_feature (1)..(25): SEQ ID NO: 6995; WAN024G6X; Start 91; Stop 115
tgctcatcagctacagaacatagac

SEQ ID NO: 455737 - DNA, 25 bp, Artificial
  probe
  misc_feature (1)..(25): SEQ ID NO: 6995; WAN024G6X; Start 67; Stop 91
cgagagatttgcgattttgaaagat

SEQ ID NO: 455738 - DNA, 25 bp, Artificial
  probe
  misc_feature (1)..(25): SEQ ID NO: 6995; WAN024G6X; Start 64; Stop 88
aaacgagagatttgcgattttgaaa

SEQ ID NO: 455739 - DNA, 25 bp, Artificial
  probe
  misc_feature (1)..(25): SEQ ID NO: 6995; WAN024G6X; Start 165; Stop 189
tttcatagttttcccattttcccaa

SEQ ID NO: 455740 - DNA, 25 bp, Artificial
  probe
  misc_feature (1)..(25): SEQ ID NO: 6995; WAN024G6X; Start 68; Stop 92
gagagatttgcgattttgaaagatg

SEQ ID NO: 455741 - DNA, 25 bp, Artificial
  probe
  misc_feature (1)..(25): SEQ ID NO: 6995; WAN024G6X; Start 98; Stop 122
cagctacagaacatagactaatttg

SEQ ID NO: 455742 - DNA, 25 bp, Artificial
  probe
  misc_feature (1)..(25): SEQ ID NO: 6995; WAN024G6X; Start 164; Stop 188
atttcatagttttcccattttccca

SEQ ID NO: 455743 - DNA, 25 bp, Artificial
  probe
  misc_feature (1)..(25): SEQ ID NO: 6995; WAN024G6X; Start 71; Stop 95
agatttgcgattttgaaagatgctc

SEQ ID NO: 455744 - DNA, 25 bp, Artificial
  probe
  misc_feature (1)..(25): SEQ ID NO: 6995; WAN024G6X; Start 70; Stop 94
gagatttgcgattttgaaagatgct

SEQ ID NO: 455745 - DNA, 25 bp, Artificial
  probe
  misc_feature (1)..(25): SEQ ID NO: 6995; WAN024G6X; Start 69; Stop 93
agagatttgcgattttgaaagatgc

SEQ ID NO: 455746 - DNA, 25 bp, Artificial
  probe
  misc_feature (1)..(25): SEQ ID NO: 6995; WAN024G6X; Start 65; Stop 89
aacgagagatttgcgattttgaaag

SEQ ID NO: 455747 - DNA, 25 bp, Artificial
  probe
  misc_feature (1)..(25): SEQ ID NO: 6995; WAN024G6X; Start 97; Stop 121
tcagctacagaacatagactaattt

SEQ ID NO: 455748 - DNA, 25 bp, Artificial
  probe
  misc_feature (1)..(25): SEQ ID NO: 6995; WAN024G6X; Start 31; Stop 55
cgaatacaagatatttctgattccc

SEQ ID NO: 455749 - DNA, 25 bp, Artificial
  probe
  misc_feature (1)..(25): SEQ ID NO: 6995; WAN024G6X; Start 168; Stop 192
catagttttcccattttcccaacaa

SEQ ID NO: 455750 - DNA, 25 bp, Artificial
  probe
  misc_feature (1)..(25): SEQ ID NO: 6995; WAN024G6X; Start 166; Stop 190
ttcatagttttcccattttcccaac

SEQ ID NO: 455751 - DNA, 25 bp, Artificial
  probe
  misc_feature (1)..(25): SEQ ID NO: 6995; WAN024G6X; Start 35; Stop 59
tacaagatatttctgattccccacg

SEQ ID NO: 455752 - DNA, 25 bp, Artificial
  probe
  misc_feature (1)..(25): SEQ ID NO: 6996; WAN024B6U; Start 279; Stop 303
tacaaccattactaaccgtcctgtt

SEQ ID NO: 455753 - DNA, 25 bp, Artificial
  probe
  misc_feature (1)..(25): SEQ ID NO: 6996; WAN024B6U; Start 278; Stop 302
gtacaaccattactaaccgtcctgt

SEQ ID NO: 455754 - DNA, 25 bp, Artificial
  probe
  misc_feature (1)..(25): SEQ ID NO: 6996; WAN024B6U; Start 280; Stop 304
acaaccattactaaccgtcctgttc

SEQ ID NO: 455755 - DNA, 25 bp, Artificial
  probe
  misc_feature (1)..(25): SEQ ID NO: 6996; WAN024B6U; Start 284; Stop 308
ccattactaaccgtcctgttcgtaa

SEQ ID NO: 455756 - DNA, 25 bp, Artificial
  probe
  misc_feature (1)..(25): SEQ ID NO: 6996; WAN024B6U; Start 251; Stop 275
tctctcaagaagtacaagatactct

SEQ ID NO: 455757 - DNA, 25 bp, Artificial
  probe
  misc_feature (1)..(25): SEQ ID NO: 6996; WAN024B6U; Start 283; Stop 307
accattactaaccgtcctgttcgta

SEQ ID NO: 455758 - DNA, 25 bp, Artificial
  probe
  misc_feature (1)..(25): SEQ ID NO: 6996; WAN024B6U; Start 281; Stop 305
caaccattactaaccgtcctgttcg

SEQ ID NO: 455759 - DNA, 25 bp, Artificial
  probe
  misc_feature (1)..(25): SEQ ID NO: 6996; WAN024B6U; Start 285; Stop 309
cattactaaccgtcctgttcgtaaa

SEQ ID NO: 455760 - DNA, 25 bp, Artificial
  probe
  misc_feature (1)..(25): SEQ ID NO: 6996; WAN024B6U; Start 277; Stop 301
ggtacaaccattactaaccgtcctg

SEQ ID NO: 455761 - DNA, 25 bp, Artificial
  probe
  misc_feature (1)..(25): SEQ ID NO: 6996; WAN024B6U; Start 252; Stop 276
ctctcaagaagtacaagatactctt

SEQ ID NO: 455762 - DNA, 25 bp, Artificial
  probe
  misc_feature (1)..(25): SEQ ID NO: 6996; WAN024B6U; Start 250; Stop 274
atctctcaagaagtacaagatactc

SEQ ID NO: 455763 - DNA, 25 bp, Artificial
  probe
  misc_feature (1)..(25): SEQ ID NO: 6996; WAN024B6U; Start 282; Stop 306
aaccattactaaccgtcctgttcgt

SEQ ID NO: 455764 - DNA, 25 bp, Artificial
  probe
  misc_feature (1)..(25): SEQ ID NO: 6996; WAN024B6U; Start 286; Stop 310
attactaaccgtcctgttcgtaaaa

SEQ ID NO: 455765 - DNA, 25 bp, Artificial
  probe
  misc_feature (1)..(25): SEQ ID NO: 6996; WAN024B6U; Start 271; Stop 295
actcttggtacaaccattactaacc

SEQ ID NO: 455766 - DNA, 25 bp, Artificial
  probe
  misc_feature (1)..(25): SEQ ID NO: 6996; WAN024B6U; Start 272; Stop 296
ctcttggtacaaccattactaaccg

SEQ ID NO: 455767 - DNA, 25 bp, Artificial
  probe
  misc_feature (1)..(25): SEQ ID NO: 6996; WAN024B6U; Start 267; Stop 291
agatactcttggtacaaccattact

SEQ ID NO: 455768 - DNA, 25 bp, Artificial
  probe
  misc_feature (1)..(25): SEQ ID NO: 6996; WAN024B6U; Start 274; Stop 298
cttggtacaaccattactaaccgtc

SEQ ID NO: 455769 - DNA, 25 bp, Artificial
  probe
  misc_feature (1)..(25): SEQ ID NO: 6996; WAN024B6U; Start 273; Stop 297
tcttggtacaaccattactaaccgt

SEQ ID NO: 455770 - DNA, 25 bp, Artificial
  probe
  misc_feature (1)..(25): SEQ ID NO: 6996; WAN024B6U; Start 266; Stop 290
aagatactcttggtacaaccattac

SEQ ID NO: 455771 - DNA, 25 bp, Artificial
  probe
  misc_feature (1)..(25): SEQ ID NO: 6996; WAN024B6U; Start 270; Stop 294
tactcttggtacaaccattactaac

SEQ ID NO: 455772 - DNA, 25 bp, Artificial
  probe
  misc_feature (1)..(25): SEQ ID NO: 6996; WAN024B6U; Start 249; Stop 273
tatctctcaagaagtacaagatact

SEQ ID NO: 455773 - DNA, 25 bp, Artificial
  probe
  misc_feature (1)..(25): SEQ ID NO: 6996; WAN024B6U; Start 268; Stop 292
gatactcttggtacaaccattacta

SEQ ID NO: 455774 - DNA, 25 bp, Artificial
  probe
  misc_feature (1)..(25): SEQ ID NO: 6996; WAN024B6U; Start 275; Stop 299
ttggtacaaccattactaaccgtcc

SEQ ID NO: 455775 - DNA, 25 bp, Artificial
  probe
  misc_feature (1)..(25): SEQ ID NO: 6996; WAN024B6U; Start 269; Stop 293
atactcttggtacaaccattactaa

SEQ ID NO: 455776 - DNA, 25 bp, Artificial
  probe
  misc_feature (1)..(25): SEQ ID NO: 6996; WAN024B6U; Start 276; Stop 300
tggtacaaccattactaaccgtcct

SEQ ID NO: 455777 - DNA, 25 bp, Artificial
  probe
  misc_feature (1)..(25): SEQ ID NO: 6997; WAN024C8X; Start 152; Stop 176
agatagacagtgacggaagacagat

SEQ ID NO: 455778 - DNA, 25 bp, Artificial
  probe
  misc_feature (1)..(25): SEQ ID NO: 6997; WAN024C8X; Start 532; Stop 556
aagagctacatggaagaaggatatt

SEQ ID NO: 455779 - DNA, 25 bp, Artificial
  probe
  misc_feature (1)..(25): SEQ ID NO: 6997; WAN024C8X; Start 533; Stop 557
agagctacatggaagaaggatattc

SEQ ID NO: 455780 - DNA, 25 bp, Artificial
  probe
  misc_feature (1)..(25): SEQ ID NO: 6997; WAN024C8X; Start 153; Stop 177
gatagacagtgacggaagacagatc

SEQ ID NO: 455781 - DNA, 25 bp, Artificial
  probe
  misc_feature (1)..(25): SEQ ID NO: 6997; WAN024C8X; Start 136; Stop 160
gggtatttcactcaacagatagaca

SEQ ID NO: 455782 - DNA, 25 bp, Artificial
  probe
  misc_feature (1)..(25): SEQ ID NO: 6997; WAN024C8X; Start 122; Stop 146
ttctttacaaacacgggtatttcac

SEQ ID NO: 455783 - DNA, 25 bp, Artificial
  probe
  misc_feature (1)..(25): SEQ ID NO: 6997; WAN024C8X; Start 121; Stop 145
cttctttacaaacacgggtatttca

SEQ ID NO: 455784 - DNA, 25 bp, Artificial
  probe
  misc_feature (1)..(25): SEQ ID NO: 6997; WAN024C8X; Start 119; Stop 143
gtcttctttacaaacacgggtattt

SEQ ID NO: 455785 - DNA, 25 bp, Artificial
  probe
  misc_feature (1)..(25): SEQ ID NO: 6997; WAN024C8X; Start 124; Stop 148
ctttacaaacacgggtatttcactc

SEQ ID NO: 455786 - DNA, 25 bp, Artificial
  probe
  misc_feature (1)..(25): SEQ ID NO: 6997; WAN024C8X; Start 120; Stop 144
tcttctttacaaacacgggtatttc

SEQ ID NO: 455787 - DNA, 25 bp, Artificial
  probe
  misc_feature (1)..(25): SEQ ID NO: 6997; WAN024C8X; Start 123; Stop 147
tctttacaaacacgggtatttcact

SEQ ID NO: 455788 - DNA, 25 bp, Artificial
  probe
  misc_feature (1)..(25): SEQ ID NO: 6997; WAN024C8X; Start 109; Stop 133
atagccgtaggtcttctttacaaac

SEQ ID NO: 455789 - DNA, 25 bp, Artificial
  probe
  misc_feature (1)..(25): SEQ ID NO: 6997; WAN024C8X; Start 108; Stop 132
catagccgtaggtcttctttacaaa

SEQ ID NO: 455790 - DNA, 25 bp, Artificial
  probe
  misc_feature (1)..(25): SEQ ID NO: 6997; WAN024C8X; Start 696; Stop 720
agaactgcttatgaacctttggaaa

SEQ ID NO: 455791 - DNA, 25 bp, Artificial
  probe
  misc_feature (1)..(25): SEQ ID NO: 6997; WAN024C8X; Start 148; Stop 172
caacagatagacagtgacggaagac

SEQ ID NO: 455792 - DNA, 25 bp, Artificial
  probe
  misc_feature (1)..(25): SEQ ID NO: 6997; WAN024C8X; Start 126; Stop 150
ttacaaacacgggtatttcactcaa

SEQ ID NO: 455793 - DNA, 25 bp, Artificial
  probe
  misc_feature (1)..(25): SEQ ID NO: 6997; WAN024C8X; Start 125; Stop 149
tttacaaacacgggtatttcactca

SEQ ID NO: 455794 - DNA, 25 bp, Artificial
  probe
  misc_feature (1)..(25): SEQ ID NO: 6997; WAN024C8X; Start 688; Stop 712
gaatccaaagaactgcttatgaacc

SEQ ID NO: 455795 - DNA, 25 bp, Artificial
  probe
  misc_feature (1)..(25): SEQ ID NO: 6997; WAN024C8X; Start 137; Stop 161
ggtatttcactcaacagatagacag

SEQ ID NO: 455796 - DNA, 25 bp, Artificial
  probe
  misc_feature (1)..(25): SEQ ID NO: 6997; WAN024C8X; Start 135; Stop 159
cgggtatttcactcaacagatagac

SEQ ID NO: 455797 - DNA, 25 bp, Artificial
  probe
  misc_feature (1)..(25): SEQ ID NO: 6997; WAN024C8X; Start 146; Stop 170
ctcaacagatagacagtgacggaag

SEQ ID NO: 455798 - DNA, 25 bp, Artificial
  probe
  misc_feature (1)..(25): SEQ ID NO: 6997; WAN024C8X; Start 690; Stop 714
atccaaagaactgcttatgaacctt

SEQ ID NO: 455799 - DNA, 25 bp, Artificial
  probe
  misc_feature (1)..(25): SEQ ID NO: 6997; WAN024C8X; Start 689; Stop 713
aatccaaagaactgcttatgaacct

SEQ ID NO: 455800 - DNA, 25 bp, Artificial
  probe
  misc_feature (1)..(25): SEQ ID NO: 6997; WAN024C8X; Start 687; Stop 711
cgaatccaaagaactgcttatgaac

SEQ ID NO: 455801 - DNA, 25 bp, Artificial
  probe
  misc_feature (1)..(25): SEQ ID NO: 6997; WAN024C8X; Start 134; Stop 158
acgggtatttcactcaacagataga

SEQ ID NO: 455802 - DNA, 25 bp, Artificial
  probe
  misc_feature (1)..(25): SEQ ID NO: 6997; WAN024C8X; Start 133; Stop 157
cacgggtatttcactcaacagatag

SEQ ID NO: 455803 - DNA, 25 bp, Artificial
  probe
  misc_feature (1)..(25): SEQ ID NO: 6997; WAN024C8X; Start 104; Stop 128
ctctcatagccgtaggtcttcttta

SEQ ID NO: 455804 - DNA, 25 bp, Artificial
  probe
  misc_feature (1)..(25): SEQ ID NO: 6997; WAN024C8X; Start 695; Stop 719
aagaactgcttatgaacctttggaa

SEQ ID NO: 455805 - DNA, 25 bp, Artificial
  probe
  misc_feature (1)..(25): SEQ ID NO: 6997; WAN024C8X; Start 118; Stop 142
ggtcttctttacaaacacgggtatt

SEQ ID NO: 455806 - DNA, 25 bp, Artificial
  probe
  misc_feature (1)..(25): SEQ ID NO: 6997; WAN024C8X; Start 107; Stop 131
tcatagccgtaggtcttctttacaa

SEQ ID NO: 455807 - DNA, 25 bp, Artificial
  probe
  misc_feature (1)..(25): SEQ ID NO: 6997; WAN024C8X; Start 116; Stop 140
taggtcttctttacaaacacgggta

SEQ ID NO: 455808 - DNA, 25 bp, Artificial
  probe
  misc_feature (1)..(25): SEQ ID NO: 6997; WAN024C8X; Start 105; Stop 129
tctcatagccgtaggtcttctttac

SEQ ID NO: 455809 - DNA, 25 bp, Artificial
  probe
  misc_feature (1)..(25): SEQ ID NO: 6997; WAN024C8X; Start 185; Stop 209
ttccagaatacgacatcgaagaact

SEQ ID NO: 455810 - DNA, 25 bp, Artificial
  probe
  misc_feature (1)..(25): SEQ ID NO: 6998; WAN024BP6; Start 236; Stop 260
gtgtcctatcttctggcatctattc

SEQ ID NO: 455811 - DNA, 25 bp, Artificial
  probe
  misc_feature (1)..(25): SEQ ID NO: 6998; WAN024BP6; Start 237; Stop 261
tgtcctatcttctggcatctattca

SEQ ID NO: 455812 - DNA, 25 bp, Artificial
  probe
  misc_feature (1)..(25): SEQ ID NO: 6998; WAN024BP6; Start 235; Stop 259
tgtgtcctatcttctggcatctatt

SEQ ID NO: 455813 - DNA, 25 bp, Artificial
  probe
  misc_feature (1)..(25): SEQ ID NO: 6998; WAN024BP6; Start 234; Stop 258
ttgtgtcctatcttctggcatctat

SEQ ID NO: 455814 - DNA, 25 bp, Artificial
  probe
  misc_feature (1)..(25): SEQ ID NO: 6998; WAN024BP6; Start 178; Stop 202
ttatatgacgatgtgctaggaagag

SEQ ID NO: 455815 - DNA, 25 bp, Artificial
  probe
  misc_feature (1)..(25): SEQ ID NO: 6998; WAN024BP6; Start 180; Stop 204
atatgacgatgtgctaggaagagta

SEQ ID NO: 455816 - DNA, 25 bp, Artificial
  probe
  misc_feature (1)..(25): SEQ ID NO: 6998; WAN024BP6; Start 179; Stop 203
tatatgacgatgtgctaggaagagt

SEQ ID NO: 455817 - DNA, 25 bp, Artificial
  probe
  misc_feature (1)..(25): SEQ ID NO: 6998; WAN024BP6; Start 181; Stop 205
tatgacgatgtgctaggaagagtaa

SEQ ID NO: 455818 - DNA, 25 bp, Artificial
  probe
  misc_feature (1)..(25): SEQ ID NO: 6998; WAN024BP6; Start 238; Stop 262
gtcctatcttctggcatctattcag

SEQ ID NO: 455819 - DNA, 25 bp, Artificial
  probe
  misc_feature (1)..(25): SEQ ID NO: 6998; WAN024BP6; Start 305; Stop 329
tgagtacggaacagaacaatatatc

SEQ ID NO: 455820 - DNA, 25 bp, Artificial
  probe
  misc_feature (1)..(25): SEQ ID NO: 6998; WAN024BP6; Start 641; Stop 665
gcgatggagaagtaattcctactat

SEQ ID NO: 455821 - DNA, 25 bp, Artificial
  probe
  misc_feature (1)..(25): SEQ ID NO: 6998; WAN024BP6; Start 902; Stop 926
ttggtcctcagaataaggctatgtt

SEQ ID NO: 455822 - DNA, 25 bp, Artificial
  probe
  misc_feature (1)..(25): SEQ ID NO: 6998; WAN024BP6; Start 640; Stop 664
agcgatggagaagtaattcctacta

SEQ ID NO: 455823 - DNA, 25 bp, Artificial
  probe
  misc_feature (1)..(25): SEQ ID NO: 6998; WAN024BP6; Start 306; Stop 330
gagtacggaacagaacaatatatct

SEQ ID NO: 455824 - DNA, 25 bp, Artificial
  probe
  misc_feature (1)..(25): SEQ ID NO: 6998; WAN024BP6; Start 231; Stop 255
tatttgtgtcctatcttctggcatc

SEQ ID NO: 455825 - DNA, 25 bp, Artificial
  probe
  misc_feature (1)..(25): SEQ ID NO: 6998; WAN024BP6; Start 230; Stop 254
atatttgtgtcctatcttctggcat

SEQ ID NO: 455826 - DNA, 25 bp, Artificial
  probe
  misc_feature (1)..(25): SEQ ID NO: 6998; WAN024BP6; Start 891; Stop 915
acatttatcgtttggtcctcagaat

SEQ ID NO: 455827 - DNA, 25 bp, Artificial
  probe
  misc_feature (1)..(25): SEQ ID NO: 6998; WAN024BP6; Start 903; Stop 927
tggtcctcagaataaggctatgttc

SEQ ID NO: 455828 - DNA, 25 bp, Artificial
  probe
  misc_feature (1)..(25): SEQ ID NO: 6998; WAN024BP6; Start 603; Stop 627
tatagagagtaatcccgaagtagcg

SEQ ID NO: 455829 - DNA, 25 bp, Artificial
  probe
  misc_feature (1)..(25): SEQ ID NO: 6998; WAN024BP6; Start 758; Stop 782
gcttatgggaactgatggattattt

SEQ ID NO: 455830 - DNA, 25 bp, Artificial
  probe
  misc_feature (1)..(25): SEQ ID NO: 6998; WAN024BP6; Start 602; Stop 626
ttatagagagtaatcccgaagtagc

SEQ ID NO: 455831 - DNA, 25 bp, Artificial
  probe
  misc_feature (1)..(25): SEQ ID NO: 6998; WAN024BP6; Start 892; Stop 916
catttatcgtttggtcctcagaata

SEQ ID NO: 455832 - DNA, 25 bp, Artificial
  probe
  misc_feature (1)..(25): SEQ ID NO: 6998; WAN024BP6; Start 304; Stop 328
ttgagtacggaacagaacaatatat

SEQ ID NO: 455833 - DNA, 25 bp, Artificial
  probe
  misc_feature (1)..(25): SEQ ID NO: 6998; WAN024BP6; Start 233; Stop 257
tttgtgtcctatcttctggcatcta

SEQ ID NO: 455834 - DNA, 25 bp, Artificial
  probe
  misc_feature (1)..(25): SEQ ID NO: 6998; WAN024BP6; Start 190; Stop 214
gtgctaggaagagtaaagacatttg

SEQ ID NO: 455835 - DNA, 25 bp, Artificial
  probe
  misc_feature (1)..(25): SEQ ID NO: 6998; WAN024BP6; Start 307; Stop 331
agtacggaacagaacaatatatctt

SEQ ID NO: 455836 - DNA, 25 bp, Artificial
  probe
  misc_feature (1)..(25): SEQ ID NO: 6998; WAN024BP6; Start 639; Stop 663
gagcgatggagaagtaattcctact

SEQ ID NO: 455837 - DNA, 25 bp, Artificial
  probe
  misc_feature (1)..(25): SEQ ID NO: 6998; WAN024BP6; Start 177; Stop 201
tttatatgacgatgtgctaggaaga

SEQ ID NO: 455838 - DNA, 25 bp, Artificial
  probe
  misc_feature (1)..(25): SEQ ID NO: 6998; WAN024BP6; Start 894; Stop 918
tttatcgtttggtcctcagaataag

SEQ ID NO: 455839 - DNA, 25 bp, Artificial
  probe
  misc_feature (1)..(25): SEQ ID NO: 6998; WAN024BP6; Start 534; Stop 558
aggcttggaagatgtttattatgaa

SEQ ID NO: 455840 - DNA, 25 bp, Artificial
  probe
  misc_feature (1)..(25): SEQ ID NO: 6998; WAN024BP6; Start 191; Stop 215
tgctaggaagagtaaagacatttgc

SEQ ID NO: 455841 - DNA, 25 bp, Artificial
  probe
  misc_feature (1)..(25): SEQ ID NO: 6998; WAN024BP6; Start 232; Stop 256
atttgtgtcctatcttctggcatct

SEQ ID NO: 455842 - DNA, 25 bp, Artificial
  probe
  misc_feature (1)..(25): SEQ ID NO: 6998; WAN024BP6; Start 229; Stop 253
gatatttgtgtcctatcttctggca

SEQ ID NO: 455843 - DNA, 25 bp, Artificial
  probe
  misc_feature (1)..(25): SEQ ID NO: 6999; WAN024CCD; Start 298; Stop 322
ctcggtaatgagagaatgataggtt

SEQ ID NO: 455844 - DNA, 25 bp, Artificial
  probe
  misc_feature (1)..(25): SEQ ID NO: 6999; WAN024CCD; Start 295; Stop 319
atcctcggtaatgagagaatgatag

SEQ ID NO: 455845 - DNA, 25 bp, Artificial
  probe
  misc_feature (1)..(25): SEQ ID NO: 6999; WAN024CCD; Start 293; Stop 317
atatcctcggtaatgagagaatgat

SEQ ID NO: 455846 - DNA, 25 bp, Artificial
  probe
  misc_feature (1)..(25): SEQ ID NO: 6999; WAN024CCD; Start 296; Stop 320
tcctcggtaatgagagaatgatagg

SEQ ID NO: 455847 - DNA, 25 bp, Artificial
  probe
  misc_feature (1)..(25): SEQ ID NO: 6999; WAN024CCD; Start 297; Stop 321
cctcggtaatgagagaatgataggt

SEQ ID NO: 455848 - DNA, 25 bp, Artificial
  probe
  misc_feature (1)..(25): SEQ ID NO: 6999; WAN024CCD; Start 294; Stop 318
tatcctcggtaatgagagaatgata

SEQ ID NO: 455849 - DNA, 25 bp, Artificial
  probe
  misc_feature (1)..(25): SEQ ID NO: 6999; WAN024CCD; Start 136; Stop 160
aatcgaccaacctcttattctgaac

SEQ ID NO: 455850 - DNA, 25 bp, Artificial
  probe
  misc_feature (1)..(25): SEQ ID NO: 6999; WAN024CCD; Start 135; Stop 159
caatcgaccaacctcttattctgaa

SEQ ID NO: 455851 - DNA, 25 bp, Artificial
  probe
  misc_feature (1)..(25): SEQ ID NO: 6999; WAN024CCD; Start 300; Stop 324
cggtaatgagagaatgataggtttg

SEQ ID NO: 455852 - DNA, 25 bp, Artificial
  probe
  misc_feature (1)..(25): SEQ ID NO: 6999; WAN024CCD; Start 299; Stop 323
tcggtaatgagagaatgataggttt

SEQ ID NO: 455853 - DNA, 25 bp, Artificial
  probe
  misc_feature (1)..(25): SEQ ID NO: 6999; WAN024CCD; Start 26; Stop 50
cgaacgatttaacgagaaagtatga

SEQ ID NO: 455854 - DNA, 25 bp, Artificial
  probe
  misc_feature (1)..(25): SEQ ID NO: 6999; WAN024CCD; Start 25; Stop 49
ccgaacgatttaacgagaaagtatg

SEQ ID NO: 455855 - DNA, 25 bp, Artificial
  probe
  misc_feature (1)..(25): SEQ ID NO: 6999; WAN024CCD; Start 279; Stop 303
gcaagtagacatagatatcctcggt

SEQ ID NO: 455856 - DNA, 25 bp, Artificial
  probe
  misc_feature (1)..(25): SEQ ID NO: 6999; WAN024CCD; Start 278; Stop 302
tgcaagtagacatagatatcctcgg

SEQ ID NO: 455857 - DNA, 25 bp, Artificial
  probe
  misc_feature (1)..(25): SEQ ID NO: 6999; WAN024CCD; Start 248; Stop 272
gaatttcgtctttgaacagcagttt

SEQ ID NO: 455858 - DNA, 25 bp, Artificial
  probe
  misc_feature (1)..(25): SEQ ID NO: 6999; WAN024CCD; Start 301; Stop 325
ggtaatgagagaatgataggtttgt

SEQ ID NO: 455859 - DNA, 25 bp, Artificial
  probe
  misc_feature (1)..(25): SEQ ID NO: 6999; WAN024CCD; Start 57; Stop 81
cgtttatcccaactcaattatgaca

SEQ ID NO: 455860 - DNA, 25 bp, Artificial
  probe
  misc_feature (1)..(25): SEQ ID NO: 6999; WAN024CCD; Start 280; Stop 304
caagtagacatagatatcctcggta

SEQ ID NO: 455861 - DNA, 25 bp, Artificial
  probe
  misc_feature (1)..(25): SEQ ID NO: 6999; WAN024CCD; Start 27; Stop 51
gaacgatttaacgagaaagtatgac

SEQ ID NO: 455862 - DNA, 25 bp, Artificial
  probe
  misc_feature (1)..(25): SEQ ID NO: 6999; WAN024CCD; Start 292; Stop 316
gatatcctcggtaatgagagaatga

SEQ ID NO: 455863 - DNA, 25 bp, Artificial
  probe
  misc_feature (1)..(25): SEQ ID NO: 6999; WAN024CCD; Start 291; Stop 315
agatatcctcggtaatgagagaatg

SEQ ID NO: 455864 - DNA, 25 bp, Artificial
  probe
  misc_feature (1)..(25): SEQ ID NO: 6999; WAN024CCD; Start 24; Stop 48
gccgaacgatttaacgagaaagtat

SEQ ID NO: 455865 - DNA, 25 bp, Artificial
  probe
  misc_feature (1)..(25): SEQ ID NO: 6999; WAN024CCD; Start 137; Stop 161
atcgaccaacctcttattctgaacc

SEQ ID NO: 455866 - DNA, 25 bp, Artificial
  probe
  misc_feature (1)..(25): SEQ ID NO: 6999; WAN024CCD; Start 134; Stop 158
ccaatcgaccaacctcttattctga

SEQ ID NO: 455867 - DNA, 25 bp, Artificial
  probe
  misc_feature (1)..(25): SEQ ID NO: 6999; WAN024CCD; Start 28; Stop 52
aacgatttaacgagaaagtatgact

SEQ ID NO: 455868 - DNA, 25 bp, Artificial
  probe
  misc_feature (1)..(25): SEQ ID NO: 6999; WAN024CCD; Start 287; Stop 311
acatagatatcctcggtaatgagag

SEQ ID NO: 455869 - DNA, 25 bp, Artificial
  probe
  misc_feature (1)..(25): SEQ ID NO: 6999; WAN024CCD; Start 286; Stop 310
gacatagatatcctcggtaatgaga

SEQ ID NO: 455870 - DNA, 25 bp, Artificial
  probe
  misc_feature (1)..(25): SEQ ID NO: 6999; WAN024CCD; Start 285; Stop 309
agacatagatatcctcggtaatgag

SEQ ID NO: 455871 - DNA, 25 bp, Artificial
  probe
  misc_feature (1)..(25): SEQ ID NO: 6999; WAN024CCD; Start 288; Stop 312
catagatatcctcggtaatgagaga

SEQ ID NO: 455872 - DNA, 25 bp, Artificial
  probe
  misc_feature (1)..(25): SEQ ID NO: 6999; WAN024CCD; Start 140; Stop 164
gaccaacctcttattctgaacccat

SEQ ID NO: 455873 - DNA, 25 bp, Artificial
  probe
  misc_feature (1)..(25): SEQ ID NO: 6999; WAN024CCD; Start 281; Stop 305
aagtagacatagatatcctcggtaa

SEQ ID NO: 455874 - DNA, 25 bp, Artificial
  probe
  misc_feature (1)..(25): SEQ ID NO: 6999; WAN024CCD; Start 282; Stop 306
agtagacatagatatcctcggtaat

SEQ ID NO: 455875 - DNA, 25 bp, Artificial
  probe
  misc_feature (1)..(25): SEQ ID NO: 6999; WAN024CCD; Start 245; Stop 269
aaggaatttcgtctttgaacagcag

SEQ ID NO: 455876 - DNA, 25 bp, Artificial
  probe
  misc_feature (1)..(25): SEQ ID NO: 7000; WAN024BT5; Start 177; Stop 201
ctatgttggaagtaatgaacgtgac

SEQ ID NO: 455877 - DNA, 25 bp, Artificial
  probe
  misc_feature (1)..(25): SEQ ID NO: 7000; WAN024BT5; Start 176; Stop 200
cctatgttggaagtaatgaacgtga

SEQ ID NO: 455878 - DNA, 25 bp, Artificial
  probe
  misc_feature (1)..(25): SEQ ID NO: 7000; WAN024BT5; Start 181; Stop 205
gttggaagtaatgaacgtgacaatc

SEQ ID NO: 455879 - DNA, 25 bp, Artificial
  probe
  misc_feature (1)..(25): SEQ ID NO: 7000; WAN024BT5; Start 142; Stop 166
tcgaattattatcatggttcacagt

SEQ ID NO: 455880 - DNA, 25 bp, Artificial
  probe
  misc_feature (1)..(25): SEQ ID NO: 7000; WAN024BT5; Start 183; Stop 207
tggaagtaatgaacgtgacaatcaa

SEQ ID NO: 455881 - DNA, 25 bp, Artificial
  probe
  misc_feature (1)..(25): SEQ ID NO: 7000; WAN024BT5; Start 182; Stop 206
ttggaagtaatgaacgtgacaatca

SEQ ID NO: 455882 - DNA, 25 bp, Artificial
  probe
  misc_feature (1)..(25): SEQ ID NO: 7000; WAN024BT5; Start 178; Stop 202
tatgttggaagtaatgaacgtgaca

SEQ ID NO: 455883 - DNA, 25 bp, Artificial
  probe
  misc_feature (1)..(25): SEQ ID NO: 7000; WAN024BT5; Start 180; Stop 204
tgttggaagtaatgaacgtgacaat

SEQ ID NO: 455884 - DNA, 25 bp, Artificial
  probe
  misc_feature (1)..(25): SEQ ID NO: 7000; WAN024BT5; Start 179; Stop 203
atgttggaagtaatgaacgtgacaa

SEQ ID NO: 455885 - DNA, 25 bp, Artificial
  probe
  misc_feature (1)..(25): SEQ ID NO: 7000; WAN024BT5; Start 148; Stop 172
tattatcatggttcacagtatcact

SEQ ID NO: 455886 - DNA, 25 bp, Artificial
  probe
  misc_feature (1)..(25): SEQ ID NO: 7000; WAN024BT5; Start 143; Stop 167
cgaattattatcatggttcacagta

SEQ ID NO: 455887 - DNA, 25 bp, Artificial
  probe
  misc_feature (1)..(25): SEQ ID NO: 7000; WAN024BT5; Start 46; Stop 70
gcatttagtttggctcttcctgttt

SEQ ID NO: 455888 - DNA, 25 bp, Artificial
  probe
  misc_feature (1)..(25): SEQ ID NO: 7000; WAN024BT5; Start 175; Stop 199
gcctatgttggaagtaatgaacgtg

SEQ ID NO: 455889 - DNA, 25 bp, Artificial
  probe
  misc_feature (1)..(25): SEQ ID NO: 7000; WAN024BT5; Start 147; Stop 171
ttattatcatggttcacagtatcac

SEQ ID NO: 455890 - DNA, 25 bp, Artificial
  probe
  misc_feature (1)..(25): SEQ ID NO: 7000; WAN024BT5; Start 184; Stop 208
ggaagtaatgaacgtgacaatcaaa

SEQ ID NO: 455891 - DNA, 25 bp, Artificial
  probe
  misc_feature (1)..(25): SEQ ID NO: 7000; WAN024BT5; Start 42; Stop 66
tttggcatttagtttggctcttcct

SEQ ID NO: 455892 - DNA, 25 bp, Artificial
  probe
  misc_feature (1)..(25): SEQ ID NO: 7000; WAN024BT5; Start 48; Stop 72
atttagtttggctcttcctgttttg

SEQ ID NO: 455893 - DNA, 25 bp, Artificial
  probe
  misc_feature (1)..(25): SEQ ID NO: 7000; WAN024BT5; Start 47; Stop 71
catttagtttggctcttcctgtttt

SEQ ID NO: 455894 - DNA, 25 bp, Artificial
  probe
  misc_feature (1)..(25): SEQ ID NO: 7000; WAN024BT5; Start 146; Stop 170
attattatcatggttcacagtatca

SEQ ID NO: 455895 - DNA, 25 bp, Artificial
  probe
  misc_feature (1)..(25): SEQ ID NO: 7000; WAN024BT5; Start 40; Stop 64
gttttggcatttagtttggctcttc

SEQ ID NO: 455896 - DNA, 25 bp, Artificial
  probe
  misc_feature (1)..(25): SEQ ID NO: 7000; WAN024BT5; Start 45; Stop 69
ggcatttagtttggctcttcctgtt

SEQ ID NO: 455897 - DNA, 25 bp, Artificial
  probe
  misc_feature (1)..(25): SEQ ID NO: 7000; WAN024BT5; Start 43; Stop 67
ttggcatttagtttggctcttcctg

SEQ ID NO: 455898 - DNA, 25 bp, Artificial
  probe
  misc_feature (1)..(25): SEQ ID NO: 7000; WAN024BT5; Start 150; Stop 174
ttatcatggttcacagtatcactgg

SEQ ID NO: 455899 - DNA, 25 bp, Artificial
  probe
  misc_feature (1)..(25): SEQ ID NO: 7000; WAN024BT5; Start 49; Stop 73
tttagtttggctcttcctgttttgg

SEQ ID NO: 455900 - DNA, 25 bp, Artificial
  probe
  misc_feature (1)..(25): SEQ ID NO: 7000; WAN024BT5; Start 174; Stop 198
ggcctatgttggaagtaatgaacgt

SEQ ID NO: 455901 - DNA, 25 bp, Artificial
  probe
  misc_feature (1)..(25): SEQ ID NO: 7000; WAN024BT5; Start 149; Stop 173
attatcatggttcacagtatcactg

SEQ ID NO: 455902 - DNA, 25 bp, Artificial
  probe
  misc_feature (1)..(25): SEQ ID NO: 7000; WAN024BT5; Start 41; Stop 65
ttttggcatttagtttggctcttcc

SEQ ID NO: 455903 - DNA, 25 bp, Artificial
  probe
  misc_feature (1)..(25): SEQ ID NO: 7000; WAN024BT5; Start 268; Stop 292
gagcgaattacatttgatgcgggat

SEQ ID NO: 455904 - DNA, 25 bp, Artificial
  probe
  misc_feature (1)..(25): SEQ ID NO: 7000; WAN024BT5; Start 141; Stop 165
ttcgaattattatcatggttcacag

SEQ ID NO: 455905 - DNA, 25 bp, Artificial
  probe
  misc_feature (1)..(25): SEQ ID NO: 7000; WAN024BT5; Start 119; Stop 143
atccatataattggggagcattttc

SEQ ID NO: 455906 - DNA, 25 bp, Artificial
  probe
  misc_feature (1)..(25): SEQ ID NO: 7000; WAN024BT5; Start 11; Stop 35
ttagaaaagtagttgcatcatccct

SEQ ID NO: 455907 - DNA, 25 bp, Artificial
  probe
  misc_feature (1)..(25): SEQ ID NO: 7000; WAN024BT5; Start 117; Stop 141
tgatccatataattggggagcattt

SEQ ID NO: 455908 - DNA, 25 bp, Artificial
  probe
  misc_feature (1)..(25): SEQ ID NO: 7000; WAN024BT5; Start 116; Stop 140
atgatccatataattggggagcatt

SEQ ID NO: 455909 - DNA, 25 bp, Artificial
  probe
  misc_feature (1)..(25): SEQ ID NO: 7001; WAN024DLG; Start 171; Stop 195
ttccactgttaatcgtcgccattat

SEQ ID NO: 455910 - DNA, 25 bp, Artificial
  probe
  misc_feature (1)..(25): SEQ ID NO: 7001; WAN024DLG; Start 164; Stop 188
atgattcttccactgttaatcgtcg

SEQ ID NO: 455911 - DNA, 25 bp, Artificial
  probe
  misc_feature (1)..(25): SEQ ID NO: 7001; WAN024DLG; Start 124; Stop 148
tcttggtcaatcactaatttctgga

SEQ ID NO: 455912 - DNA, 25 bp, Artificial
  probe
  misc_feature (1)..(25): SEQ ID NO: 7001; WAN024DLG; Start 123; Stop 147
gtcttggtcaatcactaatttctgg

SEQ ID NO: 455913 - DNA, 25 bp, Artificial
  probe
  misc_feature (1)..(25): SEQ ID NO: 7001; WAN024DLG; Start 122; Stop 146
cgtcttggtcaatcactaatttctg

SEQ ID NO: 455914 - DNA, 25 bp, Artificial
  probe
  misc_feature (1)..(25): SEQ ID NO: 7001; WAN024DLG; Start 163; Stop 187
catgattcttccactgttaatcgtc

SEQ ID NO: 455915 - DNA, 25 bp, Artificial
  probe
  misc_feature (1)..(25): SEQ ID NO: 7001; WAN024DLG; Start 118; Stop 142
ggaacgtcttggtcaatcactaatt

SEQ ID NO: 455916 - DNA, 25 bp, Artificial
  probe
  misc_feature (1)..(25): SEQ ID NO: 7001; WAN024DLG; Start 160; Stop 184
aaccatgattcttccactgttaatc

SEQ ID NO: 455917 - DNA, 25 bp, Artificial
  probe
  misc_feature (1)..(25): SEQ ID NO: 7001; WAN024DLG; Start 116; Stop 140
taggaacgtcttggtcaatcactaa

SEQ ID NO: 455918 - DNA, 25 bp, Artificial
  probe
  misc_feature (1)..(25): SEQ ID NO: 7001; WAN024DLG; Start 115; Stop 139
ttaggaacgtcttggtcaatcacta

SEQ ID NO: 455919 - DNA, 25 bp, Artificial
  probe
  misc_feature (1)..(25): SEQ ID NO: 7001; WAN024DLG; Start 162; Stop 186
ccatgattcttccactgttaatcgt

SEQ ID NO: 455920 - DNA, 25 bp, Artificial
  probe
  misc_feature (1)..(25): SEQ ID NO: 7001; WAN024DLG; Start 161; Stop 185
accatgattcttccactgttaatcg

SEQ ID NO: 455921 - DNA, 25 bp, Artificial
  probe
  misc_feature (1)..(25): SEQ ID NO: 7001; WAN024DLG; Start 170; Stop 194
cttccactgttaatcgtcgccatta

SEQ ID NO: 455922 - DNA, 25 bp, Artificial
  probe
  misc_feature (1)..(25): SEQ ID NO: 7001; WAN024DLG; Start 117; Stop 141
aggaacgtcttggtcaatcactaat

SEQ ID NO: 455923 - DNA, 25 bp, Artificial
  probe
  misc_feature (1)..(25): SEQ ID NO: 7001; WAN024DLG; Start 159; Stop 183
taaccatgattcttccactgttaat

SEQ ID NO: 455924 - DNA, 25 bp, Artificial
  probe
  misc_feature (1)..(25): SEQ ID NO: 7001; WAN024DLG; Start 120; Stop 144
aacgtcttggtcaatcactaatttc

SEQ ID NO: 455925 - DNA, 25 bp, Artificial
  probe
  misc_feature (1)..(25): SEQ ID NO: 7001; WAN024DLG; Start 119; Stop 143
gaacgtcttggtcaatcactaattt

SEQ ID NO: 455926 - DNA, 25 bp, Artificial
  probe
  misc_feature (1)..(25): SEQ ID NO: 7001; WAN024DLG; Start 121; Stop 145
acgtcttggtcaatcactaatttct

SEQ ID NO: 455927 - DNA, 25 bp, Artificial
  probe
  misc_feature (1)..(25): SEQ ID NO: 7001; WAN024DLG; Start 32; Stop 56
aattgacagaagctgagttggagac

SEQ ID NO: 455928 - DNA, 25 bp, Artificial
  probe
  misc_feature (1)..(25): SEQ ID NO: 7001; WAN024DLG; Start 44; Stop 68
ctgagttggagacagtttatggagg

SEQ ID NO: 455929 - DNA, 25 bp, Artificial
  probe
  misc_feature (1)..(25): SEQ ID NO: 7001; WAN024DLG; Start 165; Stop 189
tgattcttccactgttaatcgtcgc

SEQ ID NO: 455930 - DNA, 25 bp, Artificial
  probe
  misc_feature (1)..(25): SEQ ID NO: 7001; WAN024DLG; Start 157; Stop 181
tttaaccatgattcttccactgtta

SEQ ID NO: 455931 - DNA, 25 bp, Artificial
  probe
  misc_feature (1)..(25): SEQ ID NO: 7001; WAN024DLG; Start 40; Stop 64
gaagctgagttggagacagtttatg

SEQ ID NO: 455932 - DNA, 25 bp, Artificial
  probe
  misc_feature (1)..(25): SEQ ID NO: 7001; WAN024DLG; Start 39; Stop 63
agaagctgagttggagacagtttat

SEQ ID NO: 455933 - DNA, 25 bp, Artificial
  probe
  misc_feature (1)..(25): SEQ ID NO: 7001; WAN024DLG; Start 114; Stop 138
tttaggaacgtcttggtcaatcact

SEQ ID NO: 455934 - DNA, 25 bp, Artificial
  probe
  misc_feature (1)..(25): SEQ ID NO: 7001; WAN024DLG; Start 169; Stop 193
tcttccactgttaatcgtcgccatt

SEQ ID NO: 455935 - DNA, 25 bp, Artificial
  probe
  misc_feature (1)..(25): SEQ ID NO: 7001; WAN024DLG; Start 168; Stop 192
ttcttccactgttaatcgtcgccat

SEQ ID NO: 455936 - DNA, 25 bp, Artificial
  probe
  misc_feature (1)..(25): SEQ ID NO: 7001; WAN024DLG; Start 167; Stop 191
attcttccactgttaatcgtcgcca

SEQ ID NO: 455937 - DNA, 25 bp, Artificial
  probe
  misc_feature (1)..(25): SEQ ID NO: 7001; WAN024DLG; Start 113; Stop 137
gtttaggaacgtcttggtcaatcac

SEQ ID NO: 455938 - DNA, 25 bp, Artificial
  probe
  misc_feature (1)..(25): SEQ ID NO: 7001; WAN024DLG; Start 52; Stop 76
gagacagtttatggaggggaatttg

SEQ ID NO: 455939 - DNA, 25 bp, Artificial
  probe
  misc_feature (1)..(25): SEQ ID NO: 7001; WAN024DLG; Start 45; Stop 69
tgagttggagacagtttatggaggg

SEQ ID NO: 455940 - DNA, 25 bp, Artificial
  probe
  misc_feature (1)..(25): SEQ ID NO: 7001; WAN024DLG; Start 43; Stop 67
gctgagttggagacagtttatggag

SEQ ID NO: 455941 - DNA, 25 bp, Artificial
  probe
  misc_feature (1)..(25): SEQ ID NO: 7001; WAN024DLG; Start 166; Stop 190
gattcttccactgttaatcgtcgcc

SEQ ID NO: 455942 - DNA, 25 bp, Artificial
  probe
  misc_feature (1)..(25): SEQ ID NO: 7002; WAN024DLH; Start 44; Stop 68
ctgagttggagatagtttatggagg

SEQ ID NO: 455943 - DNA, 25 bp, Artificial
  probe
  misc_feature (1)..(25): SEQ ID NO: 7002; WAN024DLH; Start 43; Stop 67
gctgagttggagatagtttatggag

SEQ ID NO: 455944 - DNA, 25 bp, Artificial
  probe
  misc_feature (1)..(25): SEQ ID NO: 7002; WAN024DLH; Start 124; Stop 148
ccttggtcaatcactaatttctgga

SEQ ID NO: 455945 - DNA, 25 bp, Artificial
  probe
  misc_feature (1)..(25): SEQ ID NO: 7002; WAN024DLH; Start 122; Stop 146
caccttggtcaatcactaatttctg

SEQ ID NO: 455946 - DNA, 25 bp, Artificial
  probe
  misc_feature (1)..(25): SEQ ID NO: 7002; WAN024DLH; Start 121; Stop 145
acaccttggtcaatcactaatttct

SEQ ID NO: 455947 - DNA, 25 bp, Artificial
  probe
  misc_feature (1)..(25): SEQ ID NO: 7002; WAN024DLH; Start 160; Stop 184
aacgatagacctgactttgattctg

SEQ ID NO: 455948 - DNA, 25 bp, Artificial
  probe
  misc_feature (1)..(25): SEQ ID NO: 7002; WAN024DLH; Start 45; Stop 69
tgagttggagatagtttatggaggg

SEQ ID NO: 455949 - DNA, 25 bp, Artificial
  probe
  misc_feature (1)..(25): SEQ ID NO: 7002; WAN024DLH; Start 163; Stop 187
gatagacctgactttgattctgacc

SEQ ID NO: 455950 - DNA, 25 bp, Artificial
  probe
  misc_feature (1)..(25): SEQ ID NO: 7002; WAN024DLH; Start 159; Stop 183
taacgatagacctgactttgattct

SEQ ID NO: 455951 - DNA, 25 bp, Artificial
  probe
  misc_feature (1)..(25): SEQ ID NO: 7002; WAN024DLH; Start 158; Stop 182
ttaacgatagacctgactttgattc

SEQ ID NO: 455952 - DNA, 25 bp, Artificial
  probe
  misc_feature (1)..(25): SEQ ID NO: 7002; WAN024DLH; Start 162; Stop 186
cgatagacctgactttgattctgac

SEQ ID NO: 455953 - DNA, 25 bp, Artificial
  probe
  misc_feature (1)..(25): SEQ ID NO: 7002; WAN024DLH; Start 123; Stop 147
accttggtcaatcactaatttctgg

SEQ ID NO: 455954 - DNA, 25 bp, Artificial
  probe
  misc_feature (1)..(25): SEQ ID NO: 7002; WAN024DLH; Start 161; Stop 185
acgatagacctgactttgattctga

SEQ ID NO: 455955 - DNA, 25 bp, Artificial
  probe
  misc_feature (1)..(25): SEQ ID NO: 7002; WAN024DLH; Start 157; Stop 181
tttaacgatagacctgactttgatt

SEQ ID NO: 455956 - DNA, 25 bp, Artificial
  probe
  misc_feature (1)..(25): SEQ ID NO: 7002; WAN024DLH; Start 33; Stop 57
attgacagaagctgagttggagata

SEQ ID NO: 455957 - DNA, 25 bp, Artificial
  probe
  misc_feature (1)..(25): SEQ ID NO: 7002; WAN024DLH; Start 120; Stop 144
gacaccttggtcaatcactaatttc

SEQ ID NO: 455958 - DNA, 25 bp, Artificial
  probe
  misc_feature (1)..(25): SEQ ID NO: 7002; WAN024DLH; Start 36; Stop 60
gacagaagctgagttggagatagtt

SEQ ID NO: 455959 - DNA, 25 bp, Artificial
  probe
  misc_feature (1)..(25): SEQ ID NO: 7002; WAN024DLH; Start 34; Stop 58
ttgacagaagctgagttggagatag

SEQ ID NO: 455960 - DNA, 25 bp, Artificial
  probe
  misc_feature (1)..(25): SEQ ID NO: 7002; WAN024DLH; Start 164; Stop 188
atagacctgactttgattctgaccg

SEQ ID NO: 455961 - DNA, 25 bp, Artificial
  probe
  misc_feature (1)..(25): SEQ ID NO: 7002; WAN024DLH; Start 41; Stop 65
aagctgagttggagatagtttatgg

SEQ ID NO: 455962 - DNA, 25 bp, Artificial
  probe
  misc_feature (1)..(25): SEQ ID NO: 7002; WAN024DLH; Start 119; Stop 143
ggacaccttggtcaatcactaattt

SEQ ID NO: 455963 - DNA, 25 bp, Artificial
  probe
  misc_feature (1)..(25): SEQ ID NO: 7002; WAN024DLH; Start 32; Stop 56
aattgacagaagctgagttggagat

SEQ ID NO: 455964 - DNA, 25 bp, Artificial
  probe
  misc_feature (1)..(25): SEQ ID NO: 7002; WAN024DLH; Start 40; Stop 64
gaagctgagttggagatagtttatg

SEQ ID NO: 455965 - DNA, 25 bp, Artificial
  probe
  misc_feature (1)..(25): SEQ ID NO: 7002; WAN024DLH; Start 39; Stop 63
agaagctgagttggagatagtttat

SEQ ID NO: 455966 - DNA, 25 bp, Artificial
  probe
  misc_feature (1)..(25): SEQ ID NO: 7002; WAN024DLH; Start 42; Stop 66
agctgagttggagatagtttatgga

SEQ ID NO: 455967 - DNA, 25 bp, Artificial
  probe
  misc_feature (1)..(25): SEQ ID NO: 7002; WAN024DLH; Start 38; Stop 62
cagaagctgagttggagatagttta

SEQ ID NO: 455968 - DNA, 25 bp, Artificial
  probe
  misc_feature (1)..(25): SEQ ID NO: 7002; WAN024DLH; Start 35; Stop 59
tgacagaagctgagttggagatagt

SEQ ID NO: 455969 - DNA, 25 bp, Artificial
  probe
  misc_feature (1)..(25): SEQ ID NO: 7002; WAN024DLH; Start 49; Stop 73
ttggagatagtttatggaggggaat

SEQ ID NO: 455970 - DNA, 25 bp, Artificial
  probe
  misc_feature (1)..(25): SEQ ID NO: 7002; WAN024DLH; Start 53; Stop 77
agatagtttatggaggggaatttgg

SEQ ID NO: 455971 - DNA, 25 bp, Artificial
  probe
  misc_feature (1)..(25): SEQ ID NO: 7002; WAN024DLH; Start 51; Stop 75
ggagatagtttatggaggggaattt

SEQ ID NO: 455972 - DNA, 25 bp, Artificial
  probe
  misc_feature (1)..(25): SEQ ID NO: 7002; WAN024DLH; Start 37; Stop 61
acagaagctgagttggagatagttt

SEQ ID NO: 455973 - DNA, 25 bp, Artificial
  probe
  misc_feature (1)..(25): SEQ ID NO: 7002; WAN024DLH; Start 118; Stop 142
gggacaccttggtcaatcactaatt

SEQ ID NO: 455974 - DNA, 25 bp, Artificial
  probe
  misc_feature (1)..(25): SEQ ID NO: 7002; WAN024DLH; Start 50; Stop 74
tggagatagtttatggaggggaatt

SEQ ID NO: 455975 - DNA, 25 bp, Artificial
  probe
  misc_feature (1)..(25): SEQ ID NO: 7003; WAN024BPC; Start 69; Stop 93
tggagtagaaacagctaagattgaa

SEQ ID NO: 455976 - DNA, 25 bp, Artificial
  probe
  misc_feature (1)..(25): SEQ ID NO: 7003; WAN024BPC; Start 68; Stop 92
gtggagtagaaacagctaagattga

SEQ ID NO: 455977 - DNA, 25 bp, Artificial
  probe
  misc_feature (1)..(25): SEQ ID NO: 7003; WAN024BPC; Start 70; Stop 94
ggagtagaaacagctaagattgaat

SEQ ID NO: 455978 - DNA, 25 bp, Artificial
  probe
  misc_feature (1)..(25): SEQ ID NO: 7003; WAN024BPC; Start 66; Stop 90
ttgtggagtagaaacagctaagatt

SEQ ID NO: 455979 - DNA, 25 bp, Artificial
  probe
  misc_feature (1)..(25): SEQ ID NO: 7003; WAN024BPC; Start 65; Stop 89
tttgtggagtagaaacagctaagat

SEQ ID NO: 455980 - DNA, 25 bp, Artificial
  probe
  misc_feature (1)..(25): SEQ ID NO: 7003; WAN024BPC; Start 67; Stop 91
tgtggagtagaaacagctaagattg

SEQ ID NO: 455981 - DNA, 25 bp, Artificial
  probe
  misc_feature (1)..(25): SEQ ID NO: 7003; WAN024BPC; Start 2; Stop 26
tgttaagcaagttagggattacttc

SEQ ID NO: 455982 - DNA, 25 bp, Artificial
  probe
  misc_feature (1)..(25): SEQ ID NO: 7003; WAN024BPC; Start 71; Stop 95
gagtagaaacagctaagattgaatt

SEQ ID NO: 455983 - DNA, 25 bp, Artificial
  probe
  misc_feature (1)..(25): SEQ ID NO: 7003; WAN024BPC; Start 3; Stop 27
gttaagcaagttagggattacttct

SEQ ID NO: 455984 - DNA, 25 bp, Artificial
  probe
  misc_feature (1)..(25): SEQ ID NO: 7003; WAN024BPC; Start 1; Stop 25
atgttaagcaagttagggattactt

SEQ ID NO: 455985 - DNA, 25 bp, Artificial
  probe
  misc_feature (1)..(25): SEQ ID NO: 7003; WAN024BPC; Start 6; Stop 30
aagcaagttagggattacttctaaa

SEQ ID NO: 455986 - DNA, 25 bp, Artificial
  probe
  misc_feature (1)..(25): SEQ ID NO: 7003; WAN024BPC; Start 7; Stop 31
agcaagttagggattacttctaaat

SEQ ID NO: 455987 - DNA, 25 bp, Artificial
  probe
  misc_feature (1)..(25): SEQ ID NO: 7003; WAN024BPC; Start 64; Stop 88
ttttgtggagtagaaacagctaaga

SEQ ID NO: 455988 - DNA, 25 bp, Artificial
  probe
  misc_feature (1)..(25): SEQ ID NO: 7003; WAN024BPC; Start 17; Stop 41
ggattacttctaaatttgtctttgg

SEQ ID NO: 455989 - DNA, 25 bp, Artificial
  probe
  misc_feature (1)..(25): SEQ ID NO: 7003; WAN024BPC; Start 16; Stop 40
gggattacttctaaatttgtctttg

SEQ ID NO: 455990 - DNA, 25 bp, Artificial
  probe
  misc_feature (1)..(25): SEQ ID NO: 7003; WAN024BPC; Start 15; Stop 39
agggattacttctaaatttgtcttt

SEQ ID NO: 455991 - DNA, 25 bp, Artificial
  probe
  misc_feature (1)..(25): SEQ ID NO: 7003; WAN024BPC; Start 8; Stop 32
gcaagttagggattacttctaaatt

SEQ ID NO: 455992 - DNA, 25 bp, Artificial
  probe
  misc_feature (1)..(25): SEQ ID NO: 7003; WAN024BPC; Start 5; Stop 29
taagcaagttagggattacttctaa

SEQ ID NO: 455993 - DNA, 25 bp, Artificial
  probe
  misc_feature (1)..(25): SEQ ID NO: 7003; WAN024BPC; Start 4; Stop 28
ttaagcaagttagggattacttcta

SEQ ID NO: 455994 - DNA, 25 bp, Artificial
  probe
  misc_feature (1)..(25): SEQ ID NO: 7003; WAN024BPC; Start 76; Stop 100
gaaacagctaagattgaattaaact

SEQ ID NO: 455995 - DNA, 25 bp, Artificial
  probe
  misc_feature (1)..(25): SEQ ID NO: 7003; WAN024BPC; Start 75; Stop 99
agaaacagctaagattgaattaaac

SEQ ID NO: 455996 - DNA, 25 bp, Artificial
  probe
  misc_feature (1)..(25): SEQ ID NO: 7003; WAN024BPC; Start 72; Stop 96
agtagaaacagctaagattgaatta

SEQ ID NO: 455997 - DNA, 25 bp, Artificial
  probe
  misc_feature (1)..(25): SEQ ID NO: 7003; WAN024BPC; Start 78; Stop 102
aacagctaagattgaattaaacttt

SEQ ID NO: 455998 - DNA, 25 bp, Artificial
  probe
  misc_feature (1)..(25): SEQ ID NO: 7003; WAN024BPC; Start 77; Stop 101
aaacagctaagattgaattaaactt

SEQ ID NO: 455999 - DNA, 25 bp, Artificial
  probe
  misc_feature (1)..(25): SEQ ID NO: 7003; WAN024BPC; Start 18; Stop 42
gattacttctaaatttgtctttgga

SEQ ID NO: 456000 - DNA, 25 bp, Artificial
  probe
  misc_feature (1)..(25): SEQ ID NO: 7003; WAN024BPC; Start 14; Stop 38
tagggattacttctaaatttgtctt

SEQ ID NO: 456001 - DNA, 25 bp, Artificial
  probe
  misc_feature (1)..(25): SEQ ID NO: 7003; WAN024BPC; Start 73; Stop 97
gtagaaacagctaagattgaattaa

SEQ ID NO: 456002 - DNA, 25 bp, Artificial
  probe
  misc_feature (1)..(25): SEQ ID NO: 7003; WAN024BPC; Start 11; Stop 35
agttagggattacttctaaatttgt

SEQ ID NO: 456003 - DNA, 25 bp, Artificial
  probe
  misc_feature (1)..(25): SEQ ID NO: 7003; WAN024BPC; Start 12; Stop 36
gttagggattacttctaaatttgtc

SEQ ID NO: 456004 - DNA, 25 bp, Artificial
  probe
  misc_feature (1)..(25): SEQ ID NO: 7003; WAN024BPC; Start 20; Stop 44
ttacttctaaatttgtctttggaaa

SEQ ID NO: 456005 - DNA, 25 bp, Artificial
  probe
  misc_feature (1)..(25): SEQ ID NO: 7003; WAN024BPC; Start 13; Stop 37
ttagggattacttctaaatttgtct

SEQ ID NO: 456006 - DNA, 25 bp, Artificial
  probe
  misc_feature (1)..(25): SEQ ID NO: 7003; WAN024BPC; Start 19; Stop 43
attacttctaaatttgtctttggaa

SEQ ID NO: 456007 - DNA, 25 bp, Artificial
  probe
  misc_feature (1)..(25): SEQ ID NO: 7003; WAN024BPC; Start 21; Stop 45
tacttctaaatttgtctttggaaaa

SEQ ID NO: 456008 - DNA, 25 bp, Artificial
  probe
  misc_feature (1)..(25): SEQ ID NO: 7004; WAN024DCY; Start 1392; Stop 1416
gctaacggtattgtgcttattgatt

SEQ ID NO: 456009 - DNA, 25 bp, Artificial
  probe
  misc_feature (1)..(25): SEQ ID NO: 7004; WAN024DCY; Start 284; Stop 308
ttaaggtcaatggtgatagtctgtc

SEQ ID NO: 456010 - DNA, 25 bp, Artificial
  probe
  misc_feature (1)..(25): SEQ ID NO: 7004; WAN024DCY; Start 281; Stop 305
ctgttaaggtcaatggtgatagtct

SEQ ID NO: 456011 - DNA, 25 bp, Artificial
  probe
  misc_feature (1)..(25): SEQ ID NO: 7004; WAN024DCY; Start 283; Stop 307
gttaaggtcaatggtgatagtctgt

SEQ ID NO: 456012 - DNA, 25 bp, Artificial
  probe
  misc_feature (1)..(25): SEQ ID NO: 7004; WAN024DCY; Start 282; Stop 306
tgttaaggtcaatggtgatagtctg

SEQ ID NO: 456013 - DNA, 25 bp, Artificial
  probe
  misc_feature (1)..(25): SEQ ID NO: 7004; WAN024DCY; Start 280; Stop 304
actgttaaggtcaatggtgatagtc

SEQ ID NO: 456014 - DNA, 25 bp, Artificial
  probe
  misc_feature (1)..(25): SEQ ID NO: 7004; WAN024DCY; Start 1397; Stop 1421
cggtattgtgcttattgattacagg

SEQ ID NO: 456015 - DNA, 25 bp, Artificial
  probe
  misc_feature (1)..(25): SEQ ID NO: 7004; WAN024DCY; Start 1396; Stop 1420
acggtattgtgcttattgattacag

SEQ ID NO: 456016 - DNA, 25 bp, Artificial
  probe
  misc_feature (1)..(25): SEQ ID NO: 7004; WAN024DCY; Start 1395; Stop 1419
aacggtattgtgcttattgattaca

SEQ ID NO: 456017 - DNA, 25 bp, Artificial
  probe
  misc_feature (1)..(25): SEQ ID NO: 7004; WAN024DCY; Start 285; Stop 309
taaggtcaatggtgatagtctgtcc

SEQ ID NO: 456018 - DNA, 25 bp, Artificial
  probe
  misc_feature (1)..(25): SEQ ID NO: 7004; WAN024DCY; Start 279; Stop 303
cactgttaaggtcaatggtgatagt

SEQ ID NO: 456019 - DNA, 25 bp, Artificial
  probe
  misc_feature (1)..(25): SEQ ID NO: 7004; WAN024DCY; Start 278; Stop 302
acactgttaaggtcaatggtgatag

SEQ ID NO: 456020 - DNA, 25 bp, Artificial
  probe
  misc_feature (1)..(25): SEQ ID NO: 7004; WAN024DCY; Start 277; Stop 301
gacactgttaaggtcaatggtgata

SEQ ID NO: 456021 - DNA, 25 bp, Artificial
  probe
  misc_feature (1)..(25): SEQ ID NO: 7004; WAN024DCY; Start 1394; Stop 1418
taacggtattgtgcttattgattac

SEQ ID NO: 456022 - DNA, 25 bp, Artificial
  probe
  misc_feature (1)..(25): SEQ ID NO: 7004; WAN024DCY; Start 698; Stop 722
ccagtctaggaattatccacctctt

SEQ ID NO: 456023 - DNA, 25 bp, Artificial
  probe
  misc_feature (1)..(25): SEQ ID NO: 7004; WAN024DCY; Start 1393; Stop 1417
ctaacggtattgtgcttattgatta

SEQ ID NO: 456024 - DNA, 25 bp, Artificial
  probe
  misc_feature (1)..(25): SEQ ID NO: 7004; WAN024DCY; Start 1795; Stop 1819
acaaaggtgcgtagtatgatagtag

SEQ ID NO: 456025 - DNA, 25 bp, Artificial
  probe
  misc_feature (1)..(25): SEQ ID NO: 7004; WAN024DCY; Start 1792; Stop 1816
caaacaaaggtgcgtagtatgatag

SEQ ID NO: 456026 - DNA, 25 bp, Artificial
  probe
  misc_feature (1)..(25): SEQ ID NO: 7004; WAN024DCY; Start 1350; Stop 1374
ttctttggctttggtctatgatttg

SEQ ID NO: 456027 - DNA, 25 bp, Artificial
  probe
  misc_feature (1)..(25): SEQ ID NO: 7004; WAN024DCY; Start 1793; Stop 1817
aaacaaaggtgcgtagtatgatagt

SEQ ID NO: 456028 - DNA, 25 bp, Artificial
  probe
  misc_feature (1)..(25): SEQ ID NO: 7004; WAN024DCY; Start 1408; Stop 1432
ttattgattacagggctctttctcc

SEQ ID NO: 456029 - DNA, 25 bp, Artificial
  probe
  misc_feature (1)..(25): SEQ ID NO: 7004; WAN024DCY; Start 1164; Stop 1188
tctatttgacttgaccttcttaccg

SEQ ID NO: 456030 - DNA, 25 bp, Artificial
  probe
  misc_feature (1)..(25): SEQ ID NO: 7004; WAN024DCY; Start 1794; Stop 1818
aacaaaggtgcgtagtatgatagta

SEQ ID NO: 456031 - DNA, 25 bp, Artificial
  probe
  misc_feature (1)..(25): SEQ ID NO: 7004; WAN024DCY; Start 1352; Stop 1376
ctttggctttggtctatgatttgag

SEQ ID NO: 456032 - DNA, 25 bp, Artificial
  probe
  misc_feature (1)..(25): SEQ ID NO: 7004; WAN024DCY; Start 1159; Stop 1183
tcctttctatttgacttgaccttct

SEQ ID NO: 456033 - DNA, 25 bp, Artificial
  probe
  misc_feature (1)..(25): SEQ ID NO: 7004; WAN024DCY; Start 1796; Stop 1820
caaaggtgcgtagtatgatagtagg

SEQ ID NO: 456034 - DNA, 25 bp, Artificial
  probe
  misc_feature (1)..(25): SEQ ID NO: 7004; WAN024DCY; Start 1351; Stop 1375
tctttggctttggtctatgatttga

SEQ ID NO: 456035 - DNA, 25 bp, Artificial
  probe
  misc_feature (1)..(25): SEQ ID NO: 7004; WAN024DCY; Start 1349; Stop 1373
tttctttggctttggtctatgattt

SEQ ID NO: 456036 - DNA, 25 bp, Artificial
  probe
  misc_feature (1)..(25): SEQ ID NO: 7004; WAN024DCY; Start 1407; Stop 1431
cttattgattacagggctctttctc

SEQ ID NO: 456037 - DNA, 25 bp, Artificial
  probe
  misc_feature (1)..(25): SEQ ID NO: 7004; WAN024DCY; Start 1406; Stop 1430
gcttattgattacagggctctttct

SEQ ID NO: 456038 - DNA, 25 bp, Artificial
  probe
  misc_feature (1)..(25): SEQ ID NO: 7004; WAN024DCY; Start 1348; Stop 1372
atttctttggctttggtctatgatt

SEQ ID NO: 456039 - DNA, 25 bp, Artificial
  probe
  misc_feature (1)..(25): SEQ ID NO: 7004; WAN024DCY; Start 1342; Stop 1366
ttgttaatttctttggctttggtct

SEQ ID NO: 456040 - DNA, 25 bp, Artificial
  probe
  misc_feature (1)..(25): SEQ ID NO: 7004; WAN024DCY; Start 490; Stop 514
cagggaatttaccagactctcaata

SEQ ID NO: 456041 - DNA, 25 bp, Artificial
  probe
  misc_feature (1)..(25): SEQ ID NO: 7005; WAN024BMH; Start 72; Stop 96
aaacatagtggataaccttgtgaga

SEQ ID NO: 456042 - DNA, 25 bp, Artificial
  probe
  misc_feature (1)..(25): SEQ ID NO: 7005; WAN024BMH; Start 3; Stop 27
gttaccaaactttatccacaggttg

SEQ ID NO: 456043 - DNA, 25 bp, Artificial
  probe
  misc_feature (1)..(25): SEQ ID NO: 7005; WAN024BMH; Start 1; Stop 25
atgttaccaaactttatccacaggt

SEQ ID NO: 456044 - DNA, 25 bp, Artificial
  probe
  misc_feature (1)..(25): SEQ ID NO: 7005; WAN024BMH; Start 2; Stop 26
tgttaccaaactttatccacaggtt

SEQ ID NO: 456045 - DNA, 25 bp, Artificial
  probe
  misc_feature (1)..(25): SEQ ID NO: 7005; WAN024BMH; Start 20; Stop 44
acaggttggggataaaagaagaaat

SEQ ID NO: 456046 - DNA, 25 bp, Artificial
  probe
  misc_feature (1)..(25): SEQ ID NO: 7005; WAN024BMH; Start 21; Stop 45
caggttggggataaaagaagaaatt

SEQ ID NO: 456047 - DNA, 25 bp, Artificial
  probe
  misc_feature (1)..(25): SEQ ID NO: 7005; WAN024BMH; Start 19; Stop 43
cacaggttggggataaaagaagaaa

SEQ ID NO: 456048 - DNA, 25 bp, Artificial
  probe
  misc_feature (1)..(25): SEQ ID NO: 7005; WAN024BMH; Start 71; Stop 95
aaaacatagtggataaccttgtgag

SEQ ID NO: 456049 - DNA, 25 bp, Artificial
  probe
  misc_feature (1)..(25): SEQ ID NO: 7005; WAN024BMH; Start 22; Stop 46
aggttggggataaaagaagaaatta

SEQ ID NO: 456050 - DNA, 25 bp, Artificial
  probe
  misc_feature (1)..(25): SEQ ID NO: 7005; WAN024BMH; Start 23; Stop 47
ggttggggataaaagaagaaattat

SEQ ID NO: 456051 - DNA, 25 bp, Artificial
  probe
  misc_feature (1)..(25): SEQ ID NO: 7005; WAN024BMH; Start 4; Stop 28
ttaccaaactttatccacaggttgg

SEQ ID NO: 456052 - DNA, 25 bp, Artificial
  probe
  misc_feature (1)..(25): SEQ ID NO: 7005; WAN024BMH; Start 18; Stop 42
ccacaggttggggataaaagaagaa

SEQ ID NO: 456053 - DNA, 25 bp, Artificial
  probe
  misc_feature (1)..(25): SEQ ID NO: 7005; WAN024BMH; Start 26; Stop 50
tggggataaaagaagaaattattga

SEQ ID NO: 456054 - DNA, 25 bp, Artificial
  probe
  misc_feature (1)..(25): SEQ ID NO: 7005; WAN024BMH; Start 5; Stop 29
taccaaactttatccacaggttggg

SEQ ID NO: 456055 - DNA, 25 bp, Artificial
  probe
  misc_feature (1)..(25): SEQ ID NO: 7005; WAN024BMH; Start 17; Stop 41
tccacaggttggggataaaagaaga

SEQ ID NO: 456056 - DNA, 25 bp, Artificial
  probe
  misc_feature (1)..(25): SEQ ID NO: 7005; WAN024BMH; Start 25; Stop 49
ttggggataaaagaagaaattattg

SEQ ID NO: 456057 - DNA, 25 bp, Artificial
  probe
  misc_feature (1)..(25): SEQ ID NO: 7005; WAN024BMH; Start 24; Stop 48
gttggggataaaagaagaaattatt

SEQ ID NO: 456058 - DNA, 25 bp, Artificial
  probe
  misc_feature (1)..(25): SEQ ID NO: 7005; WAN024BMH; Start 16; Stop 40
atccacaggttggggataaaagaag

SEQ ID NO: 456059 - DNA, 25 bp, Artificial
  probe
  misc_feature (1)..(25): SEQ ID NO: 7005; WAN024BMH; Start 27; Stop 51
ggggataaaagaagaaattattgat

SEQ ID NO: 456060 - DNA, 25 bp, Artificial
  probe
  misc_feature (1)..(25): SEQ ID NO: 7005; WAN024BMH; Start 8; Stop 32
caaactttatccacaggttggggat

SEQ ID NO: 456061 - DNA, 25 bp, Artificial
  probe
  misc_feature (1)..(25): SEQ ID NO: 7005; WAN024BMH; Start 15; Stop 39
tatccacaggttggggataaaagaa

SEQ ID NO: 456062 - DNA, 25 bp, Artificial
  probe
  misc_feature (1)..(25): SEQ ID NO: 7005; WAN024BMH; Start 9; Stop 33
aaactttatccacaggttggggata

SEQ ID NO: 456063 - DNA, 25 bp, Artificial
  probe
  misc_feature (1)..(25): SEQ ID NO: 7005; WAN024BMH; Start 7; Stop 31
ccaaactttatccacaggttgggga

SEQ ID NO: 456064 - DNA, 25 bp, Artificial
  probe
  misc_feature (1)..(25): SEQ ID NO: 7005; WAN024BMH; Start 6; Stop 30
accaaactttatccacaggttgggg

SEQ ID NO: 456065 - DNA, 25 bp, Artificial
  probe
  misc_feature (1)..(25): SEQ ID NO: 7006; WAN024B8P; Start 89; Stop 113
tcattgagtataaggagaattgtaa

SEQ ID NO: 456066 - DNA, 25 bp, Artificial
  probe
  misc_feature (1)..(25): SEQ ID NO: 7006; WAN024B8P; Start 88; Stop 112
ttcattgagtataaggagaattgta

SEQ ID NO: 456067 - DNA, 25 bp, Artificial
  probe
  misc_feature (1)..(25): SEQ ID NO: 7006; WAN024B8P; Start 87; Stop 111
tttcattgagtataaggagaattgt

SEQ ID NO: 456068 - DNA, 25 bp, Artificial
  probe
  misc_feature (1)..(25): SEQ ID NO: 7006; WAN024B8P; Start 83; Stop 107
tgattttcattgagtataaggagaa

SEQ ID NO: 456069 - DNA, 25 bp, Artificial
  probe
  misc_feature (1)..(25): SEQ ID NO: 7006; WAN024B8P; Start 82; Stop 106
ttgattttcattgagtataaggaga

SEQ ID NO: 456070 - DNA, 25 bp, Artificial
  probe
  misc_feature (1)..(25): SEQ ID NO: 7006; WAN024B8P; Start 86; Stop 110
ttttcattgagtataaggagaattg

SEQ ID NO: 456071 - DNA, 25 bp, Artificial
  probe
  misc_feature (1)..(25): SEQ ID NO: 7006; WAN024B8P; Start 81; Stop 105
tttgattttcattgagtataaggag

SEQ ID NO: 456072 - DNA, 25 bp, Artificial
  probe
  misc_feature (1)..(25): SEQ ID NO: 7006; WAN024B8P; Start 80; Stop 104
ctttgattttcattgagtataagga

SEQ ID NO: 456073 - DNA, 25 bp, Artificial
  probe
  misc_feature (1)..(25): SEQ ID NO: 7007; WAN024BYI; Start 176; Stop 200
ttacgcataacggagataagaatga

SEQ ID NO: 456074 - DNA, 25 bp, Artificial
  probe
  misc_feature (1)..(25): SEQ ID NO: 7007; WAN024BYI; Start 180; Stop 204
gcataacggagataagaatgagact

SEQ ID NO: 456075 - DNA, 25 bp, Artificial
  probe
  misc_feature (1)..(25): SEQ ID NO: 7007; WAN024BYI; Start 177; Stop 201
tacgcataacggagataagaatgag

SEQ ID NO: 456076 - DNA, 25 bp, Artificial
  probe
  misc_feature (1)..(25): SEQ ID NO: 7007; WAN024BYI; Start 175; Stop 199
attacgcataacggagataagaatg

SEQ ID NO: 456077 - DNA, 25 bp, Artificial
  probe
  misc_feature (1)..(25): SEQ ID NO: 7007; WAN024BYI; Start 125; Stop 149
ttagtacgaacgcaattacatcaag

SEQ ID NO: 456078 - DNA, 25 bp, Artificial
  probe
  misc_feature (1)..(25): SEQ ID NO: 7007; WAN024BYI; Start 179; Stop 203
cgcataacggagataagaatgagac

SEQ ID NO: 456079 - DNA, 25 bp, Artificial
  probe
  misc_feature (1)..(25): SEQ ID NO: 7007; WAN024BYI; Start 174; Stop 198
aattacgcataacggagataagaat

SEQ ID NO: 456080 - DNA, 25 bp, Artificial
  probe
  misc_feature (1)..(25): SEQ ID NO: 7007; WAN024BYI; Start 124; Stop 148
gttagtacgaacgcaattacatcaa

SEQ ID NO: 456081 - DNA, 25 bp, Artificial
  probe
  misc_feature (1)..(25): SEQ ID NO: 7007; WAN024BYI; Start 178; Stop 202
acgcataacggagataagaatgaga

SEQ ID NO: 456082 - DNA, 25 bp, Artificial
  probe
  misc_feature (1)..(25): SEQ ID NO: 7007; WAN024BYI; Start 119; Stop 143
ctcttgttagtacgaacgcaattac

SEQ ID NO: 456083 - DNA, 25 bp, Artificial
  probe
  misc_feature (1)..(25): SEQ ID NO: 7007; WAN024BYI; Start 181; Stop 205
cataacggagataagaatgagactt

SEQ ID NO: 456084 - DNA, 25 bp, Artificial
  probe
  misc_feature (1)..(25): SEQ ID NO: 7007; WAN024BYI; Start 122; Stop 146
ttgttagtacgaacgcaattacatc

SEQ ID NO: 456085 - DNA, 25 bp, Artificial
  probe
  misc_feature (1)..(25): SEQ ID NO: 7007; WAN024BYI; Start 121; Stop 145
cttgttagtacgaacgcaattacat

SEQ ID NO: 456086 - DNA, 25 bp, Artificial
  probe
  misc_feature (1)..(25): SEQ ID NO: 7007; WAN024BYI; Start 126; Stop 150
tagtacgaacgcaattacatcaagc

SEQ ID NO: 456087 - DNA, 25 bp, Artificial
  probe
  misc_feature (1)..(25): SEQ ID NO: 7007; WAN024BYI; Start 120; Stop 144
tcttgttagtacgaacgcaattaca

SEQ ID NO: 456088 - DNA, 25 bp, Artificial
  probe
  misc_feature (1)..(25): SEQ ID NO: 7007; WAN024BYI; Start 123; Stop 147
tgttagtacgaacgcaattacatca

SEQ ID NO: 456089 - DNA, 25 bp, Artificial
  probe
  misc_feature (1)..(25): SEQ ID NO: 7007; WAN024BYI; Start 118; Stop 142
gctcttgttagtacgaacgcaatta

SEQ ID NO: 456090 - DNA, 25 bp, Artificial
  probe
  misc_feature (1)..(25): SEQ ID NO: 7007; WAN024BYI; Start 196; Stop 220
aatgagacttatgtggatgtttacg

SEQ ID NO: 456091 - DNA, 25 bp, Artificial
  probe
  misc_feature (1)..(25): SEQ ID NO: 7007; WAN024BYI; Start 225; Stop 249
ggtttcaaatcgtgccattaaagat

SEQ ID NO: 456092 - DNA, 25 bp, Artificial
  probe
  misc_feature (1)..(25): SEQ ID NO: 7007; WAN024BYI; Start 223; Stop 247
aaggtttcaaatcgtgccattaaag

SEQ ID NO: 456093 - DNA, 25 bp, Artificial
  probe
  misc_feature (1)..(25): SEQ ID NO: 7007; WAN024BYI; Start 170; Stop 194
cagaaattacgcataacggagataa

SEQ ID NO: 456094 - DNA, 25 bp, Artificial
  probe
  misc_feature (1)..(25): SEQ ID NO: 7007; WAN024BYI; Start 222; Stop 246
caaggtttcaaatcgtgccattaaa

SEQ ID NO: 456095 - DNA, 25 bp, Artificial
  probe
  misc_feature (1)..(25): SEQ ID NO: 7007; WAN024BYI; Start 197; Stop 221
atgagacttatgtggatgtttacgc

SEQ ID NO: 456096 - DNA, 25 bp, Artificial
  probe
  misc_feature (1)..(25): SEQ ID NO: 7007; WAN024BYI; Start 172; Stop 196
gaaattacgcataacggagataaga

SEQ ID NO: 456097 - DNA, 25 bp, Artificial
  probe
  misc_feature (1)..(25): SEQ ID NO: 7007; WAN024BYI; Start 171; Stop 195
agaaattacgcataacggagataag

SEQ ID NO: 456098 - DNA, 25 bp, Artificial
  probe
  misc_feature (1)..(25): SEQ ID NO: 7007; WAN024BYI; Start 192; Stop 216
taagaatgagacttatgtggatgtt

SEQ ID NO: 456099 - DNA, 25 bp, Artificial
  probe
  misc_feature (1)..(25): SEQ ID NO: 7007; WAN024BYI; Start 224; Stop 248
aggtttcaaatcgtgccattaaaga

SEQ ID NO: 456100 - DNA, 25 bp, Artificial
  probe
  misc_feature (1)..(25): SEQ ID NO: 7007; WAN024BYI; Start 211; Stop 235
gatgtttacgccaaggtttcaaatc

SEQ ID NO: 456101 - DNA, 25 bp, Artificial
  probe
  misc_feature (1)..(25): SEQ ID NO: 7007; WAN024BYI; Start 71; Stop 95
aagactgctttgtagtttggtttag

SEQ ID NO: 456102 - DNA, 25 bp, Artificial
  probe
  misc_feature (1)..(25): SEQ ID NO: 7007; WAN024BYI; Start 70; Stop 94
gaagactgctttgtagtttggttta

SEQ ID NO: 456103 - DNA, 25 bp, Artificial
  probe
  misc_feature (1)..(25): SEQ ID NO: 7007; WAN024BYI; Start 173; Stop 197
aaattacgcataacggagataagaa

SEQ ID NO: 456104 - DNA, 25 bp, Artificial
  probe
  misc_feature (1)..(25): SEQ ID NO: 7007; WAN024BYI; Start 169; Stop 193
gcagaaattacgcataacggagata

SEQ ID NO: 456105 - DNA, 25 bp, Artificial
  probe
  misc_feature (1)..(25): SEQ ID NO: 7007; WAN024BYI; Start 69; Stop 93
agaagactgctttgtagtttggttt

SEQ ID NO: 456106 - DNA, 25 bp, Artificial
  probe
  misc_feature (1)..(25): SEQ ID NO: 7008; WAN024B2I; Start 250; Stop 274
gtggactacattgattactacaaca

SEQ ID NO: 456107 - DNA, 25 bp, Artificial
  probe
  misc_feature (1)..(25): SEQ ID NO: 7008; WAN024B2I; Start 244; Stop 268
gctattgtggactacattgattact

SEQ ID NO: 456108 - DNA, 25 bp, Artificial
  probe
  misc_feature (1)..(25): SEQ ID NO: 7008; WAN024B2I; Start 249; Stop 273
tgtggactacattgattactacaac

SEQ ID NO: 456109 - DNA, 25 bp, Artificial
  probe
  misc_feature (1)..(25): SEQ ID NO: 7008; WAN024B2I; Start 251; Stop 275
tggactacattgattactacaacaa

SEQ ID NO: 456110 - DNA, 25 bp, Artificial
  probe
  misc_feature (1)..(25): SEQ ID NO: 7008; WAN024B2I; Start 252; Stop 276
ggactacattgattactacaacaac

SEQ ID NO: 456111 - DNA, 25 bp, Artificial
  probe
  misc_feature (1)..(25): SEQ ID NO: 7008; WAN024B2I; Start 247; Stop 271
attgtggactacattgattactaca

SEQ ID NO: 456112 - DNA, 25 bp, Artificial
  probe
  misc_feature (1)..(25): SEQ ID NO: 7008; WAN024B2I; Start 266; Stop 290
actacaacaacaaacgaattaaggt

SEQ ID NO: 456113 - DNA, 25 bp, Artificial
  probe
  misc_feature (1)..(25): SEQ ID NO: 7008; WAN024B2I; Start 253; Stop 277
gactacattgattactacaacaaca

SEQ ID NO: 456114 - DNA, 25 bp, Artificial
  probe
  misc_feature (1)..(25): SEQ ID NO: 7008; WAN024B2I; Start 243; Stop 267
agctattgtggactacattgattac

SEQ ID NO: 456115 - DNA, 25 bp, Artificial
  probe
  misc_feature (1)..(25): SEQ ID NO: 7008; WAN024B2I; Start 98; Stop 122
tagagagtaaggaaattcaagcatc

SEQ ID NO: 456116 - DNA, 25 bp, Artificial
  probe
  misc_feature (1)..(25): SEQ ID NO: 7008; WAN024B2I; Start 257; Stop 281
acattgattactacaacaacaaacg

SEQ ID NO: 456117 - DNA, 25 bp, Artificial
  probe
  misc_feature (1)..(25): SEQ ID NO: 7008; WAN024B2I; Start 97; Stop 121
ctagagagtaaggaaattcaagcat

SEQ ID NO: 456118 - DNA, 25 bp, Artificial
  probe
  misc_feature (1)..(25): SEQ ID NO: 7008; WAN024B2I; Start 269; Stop 293
acaacaacaaacgaattaaggtaaa

SEQ ID NO: 456119 - DNA, 25 bp, Artificial
  probe
  misc_feature (1)..(25): SEQ ID NO: 7008; WAN024B2I; Start 258; Stop 282
cattgattactacaacaacaaacga

SEQ ID NO: 456120 - DNA, 25 bp, Artificial
  probe
  misc_feature (1)..(25): SEQ ID NO: 7008; WAN024B2I; Start 13; Stop 37
gcctttacagagaaatactatgaga

SEQ ID NO: 456121 - DNA, 25 bp, Artificial
  probe
  misc_feature (1)..(25): SEQ ID NO: 7008; WAN024B2I; Start 254; Stop 278
actacattgattactacaacaacaa

SEQ ID NO: 456122 - DNA, 25 bp, Artificial
  probe
  misc_feature (1)..(25): SEQ ID NO: 7008; WAN024B2I; Start 265; Stop 289
tactacaacaacaaacgaattaagg

SEQ ID NO: 456123 - DNA, 25 bp, Artificial
  probe
  misc_feature (1)..(25): SEQ ID NO: 7008; WAN024B2I; Start 267; Stop 291
ctacaacaacaaacgaattaaggta

SEQ ID NO: 456124 - DNA, 25 bp, Artificial
  probe
  misc_feature (1)..(25): SEQ ID NO: 7008; WAN024B2I; Start 96; Stop 120
cctagagagtaaggaaattcaagca

SEQ ID NO: 456125 - DNA, 25 bp, Artificial
  probe
  misc_feature (1)..(25): SEQ ID NO: 7008; WAN024B2I; Start 200; Stop 224
atggctatgagaagaactttagatc

SEQ ID NO: 456126 - DNA, 25 bp, Artificial
  probe
  misc_feature (1)..(25): SEQ ID NO: 7008; WAN024B2I; Start 101; Stop 125
agagtaaggaaattcaagcatccat

SEQ ID NO: 456127 - DNA, 25 bp, Artificial
  probe
  misc_feature (1)..(25): SEQ ID NO: 7008; WAN024B2I; Start 261; Stop 285
tgattactacaacaacaaacgaatt

SEQ ID NO: 456128 - DNA, 25 bp, Artificial
  probe
  misc_feature (1)..(25): SEQ ID NO: 7008; WAN024B2I; Start 99; Stop 123
agagagtaaggaaattcaagcatcc

SEQ ID NO: 456129 - DNA, 25 bp, Artificial
  probe
  misc_feature (1)..(25): SEQ ID NO: 7008; WAN024B2I; Start 100; Stop 124
gagagtaaggaaattcaagcatcca

SEQ ID NO: 456130 - DNA, 25 bp, Artificial
  probe
  misc_feature (1)..(25): SEQ ID NO: 7008; WAN024B2I; Start 260; Stop 284
ttgattactacaacaacaaacgaat

SEQ ID NO: 456131 - DNA, 25 bp, Artificial
  probe
  misc_feature (1)..(25): SEQ ID NO: 7008; WAN024B2I; Start 259; Stop 283
attgattactacaacaacaaacgaa

SEQ ID NO: 456132 - DNA, 25 bp, Artificial
  probe
  misc_feature (1)..(25): SEQ ID NO: 7008; WAN024B2I; Start 268; Stop 292
tacaacaacaaacgaattaaggtaa

SEQ ID NO: 456133 - DNA, 25 bp, Artificial
  probe
  misc_feature (1)..(25): SEQ ID NO: 7008; WAN024B2I; Start 198; Stop 222
ttatggctatgagaagaactttaga

SEQ ID NO: 456134 - DNA, 25 bp, Artificial
  probe
  misc_feature (1)..(25): SEQ ID NO: 7008; WAN024B2I; Start 102; Stop 126
gagtaaggaaattcaagcatccatg

SEQ ID NO: 456135 - DNA, 25 bp, Artificial
  probe
  misc_feature (1)..(25): SEQ ID NO: 7008; WAN024B2I; Start 104; Stop 128
gtaaggaaattcaagcatccatgtc

SEQ ID NO: 456136 - DNA, 25 bp, Artificial
  probe
  misc_feature (1)..(25): SEQ ID NO: 7008; WAN024B2I; Start 105; Stop 129
taaggaaattcaagcatccatgtca

SEQ ID NO: 456137 - DNA, 25 bp, Artificial
  probe
  misc_feature (1)..(25): SEQ ID NO: 7008; WAN024B2I; Start 103; Stop 127
agtaaggaaattcaagcatccatgt

SEQ ID NO: 456138 - DNA, 25 bp, Artificial
  probe
  misc_feature (1)..(25): SEQ ID NO: 7008; WAN024B2I; Start 199; Stop 223
tatggctatgagaagaactttagat

SEQ ID NO: 456139 - DNA, 25 bp, Artificial
  probe
  misc_feature (1)..(25): SEQ ID NO: 7009; WAN024BS3; Start 94; Stop 118
gaccacggaatgaataatgttgaat

SEQ ID NO: 456140 - DNA, 25 bp, Artificial
  probe
  misc_feature (1)..(25): SEQ ID NO: 7009; WAN024BS3; Start 91; Stop 115
attgaccacggaatgaataatgttg

SEQ ID NO: 456141 - DNA, 25 bp, Artificial
  probe
  misc_feature (1)..(25): SEQ ID NO: 7009; WAN024BS3; Start 90; Stop 114
gattgaccacggaatgaataatgtt

SEQ ID NO: 456142 - DNA, 25 bp, Artificial
  probe
  misc_feature (1)..(25): SEQ ID NO: 7009; WAN024BS3; Start 88; Stop 112
atgattgaccacggaatgaataatg

SEQ ID NO: 456143 - DNA, 25 bp, Artificial
  probe
  misc_feature (1)..(25): SEQ ID NO: 7009; WAN024BS3; Start 86; Stop 110
gaatgattgaccacggaatgaataa

SEQ ID NO: 456144 - DNA, 25 bp, Artificial
  probe
  misc_feature (1)..(25): SEQ ID NO: 7009; WAN024BS3; Start 89; Stop 113
tgattgaccacggaatgaataatgt

SEQ ID NO: 456145 - DNA, 25 bp, Artificial
  probe
  misc_feature (1)..(25): SEQ ID NO: 7009; WAN024BS3; Start 87; Stop 111
aatgattgaccacggaatgaataat

SEQ ID NO: 456146 - DNA, 25 bp, Artificial
  probe
  misc_feature (1)..(25): SEQ ID NO: 7009; WAN024BS3; Start 95; Stop 119
accacggaatgaataatgttgaatt

SEQ ID NO: 456147 - DNA, 25 bp, Artificial
  probe
  misc_feature (1)..(25): SEQ ID NO: 7009; WAN024BS3; Start 93; Stop 117
tgaccacggaatgaataatgttgaa

SEQ ID NO: 456148 - DNA, 25 bp, Artificial
  probe
  misc_feature (1)..(25): SEQ ID NO: 7009; WAN024BS3; Start 92; Stop 116
ttgaccacggaatgaataatgttga

SEQ ID NO: 456149 - DNA, 25 bp, Artificial
  probe
  misc_feature (1)..(25): SEQ ID NO: 7009; WAN024BS3; Start 581; Stop 605
tacaaggtatctcagacttaatcgc

SEQ ID NO: 456150 - DNA, 25 bp, Artificial
  probe
  misc_feature (1)..(25): SEQ ID NO: 7009; WAN024BS3; Start 729; Stop 753
agcaatctcttctccattacttgaa

SEQ ID NO: 456151 - DNA, 25 bp, Artificial
  probe
  misc_feature (1)..(25): SEQ ID NO: 7009; WAN024BS3; Start 728; Stop 752
aagcaatctcttctccattacttga

SEQ ID NO: 456152 - DNA, 25 bp, Artificial
  probe
  misc_feature (1)..(25): SEQ ID NO: 7009; WAN024BS3; Start 377; Stop 401
cattaactgttggtgttgtaactcg

SEQ ID NO: 456153 - DNA, 25 bp, Artificial
  probe
  misc_feature (1)..(25): SEQ ID NO: 7009; WAN024BS3; Start 376; Stop 400
gcattaactgttggtgttgtaactc

SEQ ID NO: 456154 - DNA, 25 bp, Artificial
  probe
  misc_feature (1)..(25): SEQ ID NO: 7009; WAN024BS3; Start 378; Stop 402
attaactgttggtgttgtaactcgt

SEQ ID NO: 456155 - DNA, 25 bp, Artificial
  probe
  misc_feature (1)..(25): SEQ ID NO: 7009; WAN024BS3; Start 85; Stop 109
cgaatgattgaccacggaatgaata

SEQ ID NO: 456156 - DNA, 25 bp, Artificial
  probe
  misc_feature (1)..(25): SEQ ID NO: 7009; WAN024BS3; Start 582; Stop 606
acaaggtatctcagacttaatcgct

SEQ ID NO: 456157 - DNA, 25 bp, Artificial
  probe
  misc_feature (1)..(25): SEQ ID NO: 7009; WAN024BS3; Start 379; Stop 403
ttaactgttggtgttgtaactcgtc

SEQ ID NO: 456158 - DNA, 25 bp, Artificial
  probe
  misc_feature (1)..(25): SEQ ID NO: 7009; WAN024BS3; Start 1065; Stop 1089
acaagcaactgatagtgtaagtgaa

SEQ ID NO: 456159 - DNA, 25 bp, Artificial
  probe
  misc_feature (1)..(25): SEQ ID NO: 7009; WAN024BS3; Start 776; Stop 800
gtgtgcttatgaatattactggtgg

SEQ ID NO: 456160 - DNA, 25 bp, Artificial
  probe
  misc_feature (1)..(25): SEQ ID NO: 7009; WAN024BS3; Start 775; Stop 799
ggtgtgcttatgaatattactggtg

SEQ ID NO: 456161 - DNA, 25 bp, Artificial
  probe
  misc_feature (1)..(25): SEQ ID NO: 7009; WAN024BS3; Start 774; Stop 798
aggtgtgcttatgaatattactggt

SEQ ID NO: 456162 - DNA, 25 bp, Artificial
  probe
  misc_feature (1)..(25): SEQ ID NO: 7009; WAN024BS3; Start 580; Stop 604
gtacaaggtatctcagacttaatcg

SEQ ID NO: 456163 - DNA, 25 bp, Artificial
  probe
  misc_feature (1)..(25): SEQ ID NO: 7009; WAN024BS3; Start 647; Stop 671
caattatgtctaaccaaggttctgc

SEQ ID NO: 456164 - DNA, 25 bp, Artificial
  probe
  misc_feature (1)..(25): SEQ ID NO: 7009; WAN024BS3; Start 583; Stop 607
caaggtatctcagacttaatcgctg

SEQ ID NO: 456165 - DNA, 25 bp, Artificial
  probe
  misc_feature (1)..(25): SEQ ID NO: 7009; WAN024BS3; Start 585; Stop 609
aggtatctcagacttaatcgctgtt

SEQ ID NO: 456166 - DNA, 25 bp, Artificial
  probe
  misc_feature (1)..(25): SEQ ID NO: 7009; WAN024BS3; Start 584; Stop 608
aaggtatctcagacttaatcgctgt

SEQ ID NO: 456167 - DNA, 25 bp, Artificial
  probe
  misc_feature (1)..(25): SEQ ID NO: 7009; WAN024BS3; Start 1064; Stop 1088
cacaagcaactgatagtgtaagtga

SEQ ID NO: 456168 - DNA, 25 bp, Artificial
  probe
  misc_feature (1)..(25): SEQ ID NO: 7009; WAN024BS3; Start 777; Stop 801
tgtgcttatgaatattactggtggc

SEQ ID NO: 456169 - DNA, 25 bp, Artificial
  probe
  misc_feature (1)..(25): SEQ ID NO: 7009; WAN024BS3; Start 375; Stop 399
cgcattaactgttggtgttgtaact

SEQ ID NO: 456170 - DNA, 25 bp, Artificial
  probe
  misc_feature (1)..(25): SEQ ID NO: 7009; WAN024BS3; Start 773; Stop 797
aaggtgtgcttatgaatattactgg

SEQ ID NO: 456171 - DNA, 25 bp, Artificial
  probe
  misc_feature (1)..(25): SEQ ID NO: 7009; WAN024BS3; Start 782; Stop 806
ttatgaatattactggtggcgagtc

SEQ ID NO: 456172 - DNA, 25 bp, Artificial
  probe
  misc_feature (1)..(25): SEQ ID NO: 7010; WAN024BY9; Start 303; Stop 327
aggtcaagtatctgttaagttaggc

SEQ ID NO: 456173 - DNA, 25 bp, Artificial
  probe
  misc_feature (1)..(25): SEQ ID NO: 7010; WAN024BY9; Start 305; Stop 329
gtcaagtatctgttaagttaggcgg

SEQ ID NO: 456174 - DNA, 25 bp, Artificial
  probe
  misc_feature (1)..(25): SEQ ID NO: 7010; WAN024BY9; Start 304; Stop 328
ggtcaagtatctgttaagttaggcg

SEQ ID NO: 456175 - DNA, 25 bp, Artificial
  probe
  misc_feature (1)..(25): SEQ ID NO: 7010; WAN024BY9; Start 307; Stop 331
caagtatctgttaagttaggcggtg

SEQ ID NO: 456176 - DNA, 25 bp, Artificial
  probe
  misc_feature (1)..(25): SEQ ID NO: 7010; WAN024BY9; Start 306; Stop 330
tcaagtatctgttaagttaggcggt

SEQ ID NO: 456177 - DNA, 25 bp, Artificial
  probe
  misc_feature (1)..(25): SEQ ID NO: 7010; WAN024BY9; Start 124; Stop 148
gaagatacagtgaagaagtacgagt

SEQ ID NO: 456178 - DNA, 25 bp, Artificial
  probe
  misc_feature (1)..(25): SEQ ID NO: 7010; WAN024BY9; Start 123; Stop 147
tgaagatacagtgaagaagtacgag

SEQ ID NO: 456179 - DNA, 25 bp, Artificial
  probe
  misc_feature (1)..(25): SEQ ID NO: 7010; WAN024BY9; Start 125; Stop 149
aagatacagtgaagaagtacgagtt

SEQ ID NO: 456180 - DNA, 25 bp, Artificial
  probe
  misc_feature (1)..(25): SEQ ID NO: 7010; WAN024BY9; Start 122; Stop 146
ttgaagatacagtgaagaagtacga

SEQ ID NO: 456181 - DNA, 25 bp, Artificial
  probe
  misc_feature (1)..(25): SEQ ID NO: 7010; WAN024BY9; Start 121; Stop 145
cttgaagatacagtgaagaagtacg

SEQ ID NO: 456182 - DNA, 25 bp, Artificial
  probe
  misc_feature (1)..(25): SEQ ID NO: 7010; WAN024BY9; Start 302; Stop 326
aaggtcaagtatctgttaagttagg

SEQ ID NO: 456183 - DNA, 25 bp, Artificial
  probe
  misc_feature (1)..(25): SEQ ID NO: 7010; WAN024BY9; Start 308; Stop 332
aagtatctgttaagttaggcggtgg

SEQ ID NO: 456184 - DNA, 25 bp, Artificial
  probe
  misc_feature (1)..(25): SEQ ID NO: 7010; WAN024BY9; Start 9; Stop 33
aaatggaattacgctatcttatggc

SEQ ID NO: 456185 - DNA, 25 bp, Artificial
  probe
  misc_feature (1)..(25): SEQ ID NO: 7010; WAN024BY9; Start 300; Stop 324
tgaaggtcaagtatctgttaagtta

SEQ ID NO: 456186 - DNA, 25 bp, Artificial
  probe
  misc_feature (1)..(25): SEQ ID NO: 7010; WAN024BY9; Start 209; Stop 233
ctgctccttatcgtgtattgcgtaa

SEQ ID NO: 456187 - DNA, 25 bp, Artificial
  probe
  misc_feature (1)..(25): SEQ ID NO: 7010; WAN024BY9; Start 301; Stop 325
gaaggtcaagtatctgttaagttag

SEQ ID NO: 456188 - DNA, 25 bp, Artificial
  probe
  misc_feature (1)..(25): SEQ ID NO: 7010; WAN024BY9; Start 239; Stop 263
cagacgacaagaagaaactctactt

SEQ ID NO: 456189 - DNA, 25 bp, Artificial
  probe
  misc_feature (1)..(25): SEQ ID NO: 7010; WAN024BY9; Start 7; Stop 31
gcaaatggaattacgctatcttatg

SEQ ID NO: 456190 - DNA, 25 bp, Artificial
  probe
  misc_feature (1)..(25): SEQ ID NO: 7010; WAN024BY9; Start 133; Stop 157
gtgaagaagtacgagtttggtattg

SEQ ID NO: 456191 - DNA, 25 bp, Artificial
  probe
  misc_feature (1)..(25): SEQ ID NO: 7010; WAN024BY9; Start 132; Stop 156
agtgaagaagtacgagtttggtatt

SEQ ID NO: 456192 - DNA, 25 bp, Artificial
  probe
  misc_feature (1)..(25): SEQ ID NO: 7010; WAN024BY9; Start 118; Stop 142
actcttgaagatacagtgaagaagt

SEQ ID NO: 456193 - DNA, 25 bp, Artificial
  probe
  misc_feature (1)..(25): SEQ ID NO: 7010; WAN024BY9; Start 127; Stop 151
gatacagtgaagaagtacgagtttg

SEQ ID NO: 456194 - DNA, 25 bp, Artificial
  probe
  misc_feature (1)..(25): SEQ ID NO: 7010; WAN024BY9; Start 126; Stop 150
agatacagtgaagaagtacgagttt

SEQ ID NO: 456195 - DNA, 25 bp, Artificial
  probe
  misc_feature (1)..(25): SEQ ID NO: 7010; WAN024BY9; Start 131; Stop 155
cagtgaagaagtacgagtttggtat

SEQ ID NO: 456196 - DNA, 25 bp, Artificial
  probe
  misc_feature (1)..(25): SEQ ID NO: 7010; WAN024BY9; Start 128; Stop 152
atacagtgaagaagtacgagtttgg

SEQ ID NO: 456197 - DNA, 25 bp, Artificial
  probe
  misc_feature (1)..(25): SEQ ID NO: 7010; WAN024BY9; Start 134; Stop 158
tgaagaagtacgagtttggtattgg

SEQ ID NO: 456198 - DNA, 25 bp, Artificial
  probe
  misc_feature (1)..(25): SEQ ID NO: 7010; WAN024BY9; Start 114; Stop 138
tactactcttgaagatacagtgaag

SEQ ID NO: 456199 - DNA, 25 bp, Artificial
  probe
  misc_feature (1)..(25): SEQ ID NO: 7010; WAN024BY9; Start 115; Stop 139
actactcttgaagatacagtgaaga

SEQ ID NO: 456200 - DNA, 25 bp, Artificial
  probe
  misc_feature (1)..(25): SEQ ID NO: 7010; WAN024BY9; Start 8; Stop 32
caaatggaattacgctatcttatgg

SEQ ID NO: 456201 - DNA, 25 bp, Artificial
  probe
  misc_feature (1)..(25): SEQ ID NO: 7010; WAN024BY9; Start 135; Stop 159
gaagaagtacgagtttggtattggg

SEQ ID NO: 456202 - DNA, 25 bp, Artificial
  probe
  misc_feature (1)..(25): SEQ ID NO: 7010; WAN024BY9; Start 130; Stop 154
acagtgaagaagtacgagtttggta

SEQ ID NO: 456203 - DNA, 25 bp, Artificial
  probe
  misc_feature (1)..(25): SEQ ID NO: 7010; WAN024BY9; Start 129; Stop 153
tacagtgaagaagtacgagtttggt

SEQ ID NO: 456204 - DNA, 25 bp, Artificial
  probe
  misc_feature (1)..(25): SEQ ID NO: 7010; WAN024BY9; Start 52; Stop 76
actaaacttgttggattgaaagaag

SEQ ID NO: 456205 - DNA, 25 bp, Artificial
  probe
  misc_feature (1)..(25): SEQ ID NO: 7011; WAN024ERC; Start 170; Stop 194
caatcggaattacaccttcaacaat

SEQ ID NO: 456206 - DNA, 25 bp, Artificial
  probe
  misc_feature (1)..(25): SEQ ID NO: 7011; WAN024ERC; Start 167; Stop 191
taacaatcggaattacaccttcaac

SEQ ID NO: 456207 - DNA, 25 bp, Artificial
  probe
  misc_feature (1)..(25): SEQ ID NO: 7011; WAN024ERC; Start 165; Stop 189
cataacaatcggaattacaccttca

SEQ ID NO: 456208 - DNA, 25 bp, Artificial
  probe
  misc_feature (1)..(25): SEQ ID NO: 7011; WAN024ERC; Start 164; Stop 188
tcataacaatcggaattacaccttc

SEQ ID NO: 456209 - DNA, 25 bp, Artificial
  probe
  misc_feature (1)..(25): SEQ ID NO: 7011; WAN024ERC; Start 144; Stop 168
gagacctggaaccaagttattcata

SEQ ID NO: 456210 - DNA, 25 bp, Artificial
  probe
  misc_feature (1)..(25): SEQ ID NO: 7011; WAN024ERC; Start 145; Stop 169
agacctggaaccaagttattcataa

SEQ ID NO: 456211 - DNA, 25 bp, Artificial
  probe
  misc_feature (1)..(25): SEQ ID NO: 7011; WAN024ERC; Start 169; Stop 193
acaatcggaattacaccttcaacaa

SEQ ID NO: 456212 - DNA, 25 bp, Artificial
  probe
  misc_feature (1)..(25): SEQ ID NO: 7011; WAN024ERC; Start 168; Stop 192
aacaatcggaattacaccttcaaca

SEQ ID NO: 456213 - DNA, 25 bp, Artificial
  probe
  misc_feature (1)..(25): SEQ ID NO: 7011; WAN024ERC; Start 141; Stop 165
aatgagacctggaaccaagttattc

SEQ ID NO: 456214 - DNA, 25 bp, Artificial
  probe
  misc_feature (1)..(25): SEQ ID NO: 7011; WAN024ERC; Start 171; Stop 195
aatcggaattacaccttcaacaata

SEQ ID NO: 456215 - DNA, 25 bp, Artificial
  probe
  misc_feature (1)..(25): SEQ ID NO: 7011; WAN024ERC; Start 166; Stop 190
ataacaatcggaattacaccttcaa

SEQ ID NO: 456216 - DNA, 25 bp, Artificial
  probe
  misc_feature (1)..(25): SEQ ID NO: 7011; WAN024ERC; Start 163; Stop 187
ttcataacaatcggaattacacctt

SEQ ID NO: 456217 - DNA, 25 bp, Artificial
  probe
  misc_feature (1)..(25): SEQ ID NO: 7011; WAN024ERC; Start 140; Stop 164
caatgagacctggaaccaagttatt

SEQ ID NO: 456218 - DNA, 25 bp, Artificial
  probe
  misc_feature (1)..(25): SEQ ID NO: 7011; WAN024ERC; Start 172; Stop 196
atcggaattacaccttcaacaatat

SEQ ID NO: 456219 - DNA, 25 bp, Artificial
  probe
  misc_feature (1)..(25): SEQ ID NO: 7011; WAN024ERC; Start 143; Stop 167
tgagacctggaaccaagttattcat

SEQ ID NO: 456220 - DNA, 25 bp, Artificial
  probe
  misc_feature (1)..(25): SEQ ID NO: 7011; WAN024ERC; Start 142; Stop 166
atgagacctggaaccaagttattca

SEQ ID NO: 456221 - DNA, 25 bp, Artificial
  probe
  misc_feature (1)..(25): SEQ ID NO: 7011; WAN024ERC; Start 35; Stop 59
gacgagtcatggttggtaacataag

SEQ ID NO: 456222 - DNA, 25 bp, Artificial
  probe
  misc_feature (1)..(25): SEQ ID NO: 7011; WAN024ERC; Start 173; Stop 197
tcggaattacaccttcaacaatatt

SEQ ID NO: 456223 - DNA, 25 bp, Artificial
  probe
  misc_feature (1)..(25): SEQ ID NO: 7011; WAN024ERC; Start 40; Stop 64
gtcatggttggtaacataagcactc

SEQ ID NO: 456224 - DNA, 25 bp, Artificial
  probe
  misc_feature (1)..(25): SEQ ID NO: 7011; WAN024ERC; Start 38; Stop 62
gagtcatggttggtaacataagcac

SEQ ID NO: 456225 - DNA, 25 bp, Artificial
  probe
  misc_feature (1)..(25): SEQ ID NO: 7011; WAN024ERC; Start 147; Stop 171
acctggaaccaagttattcataaca

SEQ ID NO: 456226 - DNA, 25 bp, Artificial
  probe
  misc_feature (1)..(25): SEQ ID NO: 7011; WAN024ERC; Start 146; Stop 170
gacctggaaccaagttattcataac

SEQ ID NO: 456227 - DNA, 25 bp, Artificial
  probe
  misc_feature (1)..(25): SEQ ID NO: 7011; WAN024ERC; Start 162; Stop 186
attcataacaatcggaattacacct

SEQ ID NO: 456228 - DNA, 25 bp, Artificial
  probe
  misc_feature (1)..(25): SEQ ID NO: 7011; WAN024ERC; Start 148; Stop 172
cctggaaccaagttattcataacaa

SEQ ID NO: 456229 - DNA, 25 bp, Artificial
  probe
  misc_feature (1)..(25): SEQ ID NO: 7011; WAN024ERC; Start 39; Stop 63
agtcatggttggtaacataagcact

SEQ ID NO: 456230 - DNA, 25 bp, Artificial
  probe
  misc_feature (1)..(25): SEQ ID NO: 7011; WAN024ERC; Start 154; Stop 178
accaagttattcataacaatcggaa

SEQ ID NO: 456231 - DNA, 25 bp, Artificial
  probe
  misc_feature (1)..(25): SEQ ID NO: 7011; WAN024ERC; Start 153; Stop 177
aaccaagttattcataacaatcgga

SEQ ID NO: 456232 - DNA, 25 bp, Artificial
  probe
  misc_feature (1)..(25): SEQ ID NO: 7011; WAN024ERC; Start 152; Stop 176
gaaccaagttattcataacaatcgg

SEQ ID NO: 456233 - DNA, 25 bp, Artificial
  probe
  misc_feature (1)..(25): SEQ ID NO: 7011; WAN024ERC; Start 151; Stop 175
ggaaccaagttattcataacaatcg

SEQ ID NO: 456234 - DNA, 25 bp, Artificial
  probe
  misc_feature (1)..(25): SEQ ID NO: 7011; WAN024ERC; Start 34; Stop 58
ggacgagtcatggttggtaacataa

SEQ ID NO: 456235 - DNA, 25 bp, Artificial
  probe
  misc_feature (1)..(25): SEQ ID NO: 7011; WAN024ERC; Start 139; Stop 163
gcaatgagacctggaaccaagttat

SEQ ID NO: 456236 - DNA, 25 bp, Artificial
  probe
  misc_feature (1)..(25): SEQ ID NO: 7011; WAN024ERC; Start 41; Stop 65
tcatggttggtaacataagcactcc

SEQ ID NO: 456237 - DNA, 25 bp, Artificial
  probe
  misc_feature (1)..(25): SEQ ID NO: 7011; WAN024ERC; Start 82; Stop 106
gaatcagcacccattgtcaaagaaa

SEQ ID NO: 456238 - DNA, 25 bp, Artificial
  probe
  misc_feature (1)..(25): SEQ ID NO: 7012; WAN024DKA; Start 97; Stop 121
ctcggatggattggtgcctttatag

SEQ ID NO: 456239 - DNA, 25 bp, Artificial
  probe
  misc_feature (1)..(25): SEQ ID NO: 7012; WAN024DKA; Start 96; Stop 120
tctcggatggattggtgcctttata

SEQ ID NO: 456240 - DNA, 25 bp, Artificial
  probe
  misc_feature (1)..(25): SEQ ID NO: 7012; WAN024DKA; Start 177; Stop 201
ggcagtactaggttccatgattgtt

SEQ ID NO: 456241 - DNA, 25 bp, Artificial
  probe
  misc_feature (1)..(25): SEQ ID NO: 7012; WAN024DKA; Start 168; Stop 192
cattattccggcagtactaggttcc

SEQ ID NO: 456242 - DNA, 25 bp, Artificial
  probe
  misc_feature (1)..(25): SEQ ID NO: 7012; WAN024DKA; Start 167; Stop 191
ccattattccggcagtactaggttc

SEQ ID NO: 456243 - DNA, 25 bp, Artificial
  probe
  misc_feature (1)..(25): SEQ ID NO: 7012; WAN024DKA; Start 178; Stop 202
gcagtactaggttccatgattgttt

SEQ ID NO: 456244 - DNA, 25 bp, Artificial
  probe
  misc_feature (1)..(25): SEQ ID NO: 7012; WAN024DKA; Start 170; Stop 194
ttattccggcagtactaggttccat

SEQ ID NO: 456245 - DNA, 25 bp, Artificial
  probe
  misc_feature (1)..(25): SEQ ID NO: 7012; WAN024DKA; Start 169; Stop 193
attattccggcagtactaggttcca

SEQ ID NO: 456246 - DNA, 25 bp, Artificial
  probe
  misc_feature (1)..(25): SEQ ID NO: 7012; WAN024DKA; Start 88; Stop 112
aaaatgtttctcggatggattggtg

SEQ ID NO: 456247 - DNA, 25 bp, Artificial
  probe
  misc_feature (1)..(25): SEQ ID NO: 7012; WAN024DKA; Start 48; Stop 72
tactctgaccaatcgtggagaacac

SEQ ID NO: 456248 - DNA, 25 bp, Artificial
  probe
  misc_feature (1)..(25): SEQ ID NO: 7012; WAN024DKA; Start 182; Stop 206
tactaggttccatgattgttttagc

SEQ ID NO: 456249 - DNA, 25 bp, Artificial
  probe
  misc_feature (1)..(25): SEQ ID NO: 7012; WAN024DKA; Start 95; Stop 119
ttctcggatggattggtgcctttat

SEQ ID NO: 456250 - DNA, 25 bp, Artificial
  probe
  misc_feature (1)..(25): SEQ ID NO: 7012; WAN024DKA; Start 89; Stop 113
aaatgtttctcggatggattggtgc

SEQ ID NO: 456251 - DNA, 25 bp, Artificial
  probe
  misc_feature (1)..(25): SEQ ID NO: 7012; WAN024DKA; Start 47; Stop 71
gtactctgaccaatcgtggagaaca

SEQ ID NO: 456252 - DNA, 25 bp, Artificial
  probe
  misc_feature (1)..(25): SEQ ID NO: 7012; WAN024DKA; Start 40; Stop 64
ttagcaggtactctgaccaatcgtg

SEQ ID NO: 456253 - DNA, 25 bp, Artificial
  probe
  misc_feature (1)..(25): SEQ ID NO: 7012; WAN024DKA; Start 183; Stop 207
actaggttccatgattgttttagct

SEQ ID NO: 456254 - DNA, 25 bp, Artificial
  probe
  misc_feature (1)..(25): SEQ ID NO: 7012; WAN024DKA; Start 94; Stop 118
tttctcggatggattggtgccttta

SEQ ID NO: 456255 - DNA, 25 bp, Artificial
  probe
  misc_feature (1)..(25): SEQ ID NO: 7012; WAN024DKA; Start 171; Stop 195
tattccggcagtactaggttccatg

SEQ ID NO: 456256 - DNA, 25 bp, Artificial
  probe
  misc_feature (1)..(25): SEQ ID NO: 7012; WAN024DKA; Start 50; Stop 74
ctctgaccaatcgtggagaacacat

SEQ ID NO: 456257 - DNA, 25 bp, Artificial
  probe
  misc_feature (1)..(25): SEQ ID NO: 7012; WAN024DKA; Start 39; Stop 63
tttagcaggtactctgaccaatcgt

SEQ ID NO: 456258 - DNA, 25 bp, Artificial
  probe
  misc_feature (1)..(25): SEQ ID NO: 7012; WAN024DKA; Start 46; Stop 70
ggtactctgaccaatcgtggagaac

SEQ ID NO: 456259 - DNA, 25 bp, Artificial
  probe
  misc_feature (1)..(25): SEQ ID NO: 7012; WAN024DKA; Start 181; Stop 205
gtactaggttccatgattgttttag

SEQ ID NO: 456260 - DNA, 25 bp, Artificial
  probe
  misc_feature (1)..(25): SEQ ID NO: 7012; WAN024DKA; Start 45; Stop 69
aggtactctgaccaatcgtggagaa

SEQ ID NO: 456261 - DNA, 25 bp, Artificial
  probe
  misc_feature (1)..(25): SEQ ID NO: 7012; WAN024DKA; Start 98; Stop 122
tcggatggattggtgcctttatagg

SEQ ID NO: 456262 - DNA, 25 bp, Artificial
  probe
  misc_feature (1)..(25): SEQ ID NO: 7012; WAN024DKA; Start 132; Stop 156
ttttgggacttggggaccgataata

SEQ ID NO: 456263 - DNA, 25 bp, Artificial
  probe
  misc_feature (1)..(25): SEQ ID NO: 7012; WAN024DKA; Start 51; Stop 75
tctgaccaatcgtggagaacacatg

SEQ ID NO: 456264 - DNA, 25 bp, Artificial
  probe
  misc_feature (1)..(25): SEQ ID NO: 7012; WAN024DKA; Start 176; Stop 200
cggcagtactaggttccatgattgt

SEQ ID NO: 456265 - DNA, 25 bp, Artificial
  probe
  misc_feature (1)..(25): SEQ ID NO: 7012; WAN024DKA; Start 179; Stop 203
cagtactaggttccatgattgtttt

SEQ ID NO: 456266 - DNA, 25 bp, Artificial
  probe
  misc_feature (1)..(25): SEQ ID NO: 7012; WAN024DKA; Start 38; Stop 62
ttttagcaggtactctgaccaatcg

SEQ ID NO: 456267 - DNA, 25 bp, Artificial
  probe
  misc_feature (1)..(25): SEQ ID NO: 7012; WAN024DKA; Start 133; Stop 157
tttgggacttggggaccgataatag

SEQ ID NO: 456268 - DNA, 25 bp, Artificial
  probe
  misc_feature (1)..(25): SEQ ID NO: 7012; WAN024DKA; Start 186; Stop 210
aggttccatgattgttttagctatt

SEQ ID NO: 456269 - DNA, 25 bp, Artificial
  probe
  misc_feature (1)..(25): SEQ ID NO: 7012; WAN024DKA; Start 184; Stop 208
ctaggttccatgattgttttagcta

SEQ ID NO: 456270 - DNA, 25 bp, Artificial
  probe
  misc_feature (1)..(25): SEQ ID NO: 7012; WAN024DKA; Start 187; Stop 211
ggttccatgattgttttagctattt

SEQ ID NO: 456271 - DNA, 25 bp, Artificial
  probe
  misc_feature (1)..(25): SEQ ID NO: 7013; WAN024B96; Start 5; Stop 29
tatcgttgctaatacagtggaagag

SEQ ID NO: 456272 - DNA, 25 bp, Artificial
  probe
  misc_feature (1)..(25): SEQ ID NO: 7013; WAN024B96; Start 4; Stop 28
ttatcgttgctaatacagtggaaga

SEQ ID NO: 456273 - DNA, 25 bp, Artificial
  probe
  misc_feature (1)..(25): SEQ ID NO: 7013; WAN024B96; Start 3; Stop 27
gttatcgttgctaatacagtggaag

SEQ ID NO: 456274 - DNA, 25 bp, Artificial
  probe
  misc_feature (1)..(25): SEQ ID NO: 7013; WAN024B96; Start 8; Stop 32
cgttgctaatacagtggaagagatg

SEQ ID NO: 456275 - DNA, 25 bp, Artificial
  probe
  misc_feature (1)..(25): SEQ ID NO: 7013; WAN024B96; Start 7; Stop 31
tcgttgctaatacagtggaagagat

SEQ ID NO: 456276 - DNA, 25 bp, Artificial
  probe
  misc_feature (1)..(25): SEQ ID NO: 7013; WAN024B96; Start 6; Stop 30
atcgttgctaatacagtggaagaga

SEQ ID NO: 456277 - DNA, 25 bp, Artificial
  probe
  misc_feature (1)..(25): SEQ ID NO: 7013; WAN024B96; Start 10; Stop 34
ttgctaatacagtggaagagatgct

SEQ ID NO: 456278 - DNA, 25 bp, Artificial
  probe
  misc_feature (1)..(25): SEQ ID NO: 7013; WAN024B96; Start 9; Stop 33
gttgctaatacagtggaagagatgc

SEQ ID NO: 456279 - DNA, 25 bp, Artificial
  probe
  misc_feature (1)..(25): SEQ ID NO: 7013; WAN024B96; Start 13; Stop 37
ctaatacagtggaagagatgctcag

SEQ ID NO: 456280 - DNA, 25 bp, Artificial
  probe
  misc_feature (1)..(25): SEQ ID NO: 7013; WAN024B96; Start 1; Stop 25
atgttatcgttgctaatacagtgga

SEQ ID NO: 456281 - DNA, 25 bp, Artificial
  probe
  misc_feature (1)..(25): SEQ ID NO: 7013; WAN024B96; Start 2; Stop 26
tgttatcgttgctaatacagtggaa

SEQ ID NO: 456282 - DNA, 25 bp, Artificial
  probe
  misc_feature (1)..(25): SEQ ID NO: 7013; WAN024B96; Start 186; Stop 210
ctcaatatccgatggacttccttac

SEQ ID NO: 456283 - DNA, 25 bp, Artificial
  probe
  misc_feature (1)..(25): SEQ ID NO: 7013; WAN024B96; Start 12; Stop 36
gctaatacagtggaagagatgctca

SEQ ID NO: 456284 - DNA, 25 bp, Artificial
  probe
  misc_feature (1)..(25): SEQ ID NO: 7013; WAN024B96; Start 11; Stop 35
tgctaatacagtggaagagatgctc

SEQ ID NO: 456285 - DNA, 25 bp, Artificial
  probe
  misc_feature (1)..(25): SEQ ID NO: 7013; WAN024B96; Start 185; Stop 209
cctcaatatccgatggacttcctta

SEQ ID NO: 456286 - DNA, 25 bp, Artificial
  probe
  misc_feature (1)..(25): SEQ ID NO: 7013; WAN024B96; Start 187; Stop 211
tcaatatccgatggacttccttacc

SEQ ID NO: 456287 - DNA, 25 bp, Artificial
  probe
  misc_feature (1)..(25): SEQ ID NO: 7013; WAN024B96; Start 14; Stop 38
taatacagtggaagagatgctcagc

SEQ ID NO: 456288 - DNA, 25 bp, Artificial
  probe
  misc_feature (1)..(25): SEQ ID NO: 7013; WAN024B96; Start 56; Stop 80
cagaccttgatattgacaatgcaac

SEQ ID NO: 456289 - DNA, 25 bp, Artificial
  probe
  misc_feature (1)..(25): SEQ ID NO: 7013; WAN024B96; Start 61; Stop 85
cttgatattgacaatgcaacgacag

SEQ ID NO: 456290 - DNA, 25 bp, Artificial
  probe
  misc_feature (1)..(25): SEQ ID NO: 7013; WAN024B96; Start 55; Stop 79
acagaccttgatattgacaatgcaa

SEQ ID NO: 456291 - DNA, 25 bp, Artificial
  probe
  misc_feature (1)..(25): SEQ ID NO: 7013; WAN024B96; Start 54; Stop 78
aacagaccttgatattgacaatgca

SEQ ID NO: 456292 - DNA, 25 bp, Artificial
  probe
  misc_feature (1)..(25): SEQ ID NO: 7013; WAN024B96; Start 62; Stop 86
ttgatattgacaatgcaacgacaga

SEQ ID NO: 456293 - DNA, 25 bp, Artificial
  probe
  misc_feature (1)..(25): SEQ ID NO: 7013; WAN024B96; Start 53; Stop 77
aaacagaccttgatattgacaatgc

SEQ ID NO: 456294 - DNA, 25 bp, Artificial
  probe
  misc_feature (1)..(25): SEQ ID NO: 7013; WAN024B96; Start 65; Stop 89
atattgacaatgcaacgacagacag

SEQ ID NO: 456295 - DNA, 25 bp, Artificial
  probe
  misc_feature (1)..(25): SEQ ID NO: 7013; WAN024B96; Start 64; Stop 88
gatattgacaatgcaacgacagaca

SEQ ID NO: 456296 - DNA, 25 bp, Artificial
  probe
  misc_feature (1)..(25): SEQ ID NO: 7013; WAN024B96; Start 63; Stop 87
tgatattgacaatgcaacgacagac

SEQ ID NO: 456297 - DNA, 25 bp, Artificial
  probe
  misc_feature (1)..(25): SEQ ID NO: 7013; WAN024B96; Start 58; Stop 82
gaccttgatattgacaatgcaacga

SEQ ID NO: 456298 - DNA, 25 bp, Artificial
  probe
  misc_feature (1)..(25): SEQ ID NO: 7013; WAN024B96; Start 57; Stop 81
agaccttgatattgacaatgcaacg

SEQ ID NO: 456299 - DNA, 25 bp, Artificial
  probe
  misc_feature (1)..(25): SEQ ID NO: 7013; WAN024B96; Start 60; Stop 84
ccttgatattgacaatgcaacgaca

SEQ ID NO: 456300 - DNA, 25 bp, Artificial
  probe
  misc_feature (1)..(25): SEQ ID NO: 7013; WAN024B96; Start 59; Stop 83
accttgatattgacaatgcaacgac

SEQ ID NO: 456301 - DNA, 25 bp, Artificial
  probe
  misc_feature (1)..(25): SEQ ID NO: 7013; WAN024B96; Start 171; Stop 195
tttcaagggtaaagcctcaatatcc

SEQ ID NO: 456302 - DNA, 25 bp, Artificial
  probe
  misc_feature (1)..(25): SEQ ID NO: 7013; WAN024B96; Start 180; Stop 204
taaagcctcaatatccgatggactt

SEQ ID NO: 456303 - DNA, 25 bp, Artificial
  probe
  misc_feature (1)..(25): SEQ ID NO: 7013; WAN024B96; Start 147; Stop 171
cttctataaagttgatggcaagatt

SEQ ID NO: 456304 - DNA, 25 bp, Artificial
  probe
  misc_feature (1)..(25): SEQ ID NO: 7014; WAN024BPH; Start 700; Stop 724
ccttattctgtagttctatgttcgt

SEQ ID NO: 456305 - DNA, 25 bp, Artificial
  probe
  misc_feature (1)..(25): SEQ ID NO: 7014; WAN024BPH; Start 704; Stop 728
attctgtagttctatgttcgtcaat

SEQ ID NO: 456306 - DNA, 25 bp, Artificial
  probe
  misc_feature (1)..(25): SEQ ID NO: 7014; WAN024BPH; Start 706; Stop 730
tctgtagttctatgttcgtcaataa

SEQ ID NO: 456307 - DNA, 25 bp, Artificial
  probe
  misc_feature (1)..(25): SEQ ID NO: 7014; WAN024BPH; Start 705; Stop 729
ttctgtagttctatgttcgtcaata

SEQ ID NO: 456308 - DNA, 25 bp, Artificial
  probe
  misc_feature (1)..(25): SEQ ID NO: 7014; WAN024BPH; Start 703; Stop 727
tattctgtagttctatgttcgtcaa

SEQ ID NO: 456309 - DNA, 25 bp, Artificial
  probe
  misc_feature (1)..(25): SEQ ID NO: 7014; WAN024BPH; Start 702; Stop 726
ttattctgtagttctatgttcgtca

SEQ ID NO: 456310 - DNA, 25 bp, Artificial
  probe
  misc_feature (1)..(25): SEQ ID NO: 7014; WAN024BPH; Start 956; Stop 980
gtgttatacctcttgtactgcttat

SEQ ID NO: 456311 - DNA, 25 bp, Artificial
  probe
  misc_feature (1)..(25): SEQ ID NO: 7014; WAN024BPH; Start 964; Stop 988
cctcttgtactgcttatatgtatgt

SEQ ID NO: 456312 - DNA, 25 bp, Artificial
  probe
  misc_feature (1)..(25): SEQ ID NO: 7014; WAN024BPH; Start 963; Stop 987
acctcttgtactgcttatatgtatg

SEQ ID NO: 456313 - DNA, 25 bp, Artificial
  probe
  misc_feature (1)..(25): SEQ ID NO: 7014; WAN024BPH; Start 109; Stop 133
tctactacaatgctggatagaactt

SEQ ID NO: 456314 - DNA, 25 bp, Artificial
  probe
  misc_feature (1)..(25): SEQ ID NO: 7014; WAN024BPH; Start 108; Stop 132
atctactacaatgctggatagaact

SEQ ID NO: 456315 - DNA, 25 bp, Artificial
  probe
  misc_feature (1)..(25): SEQ ID NO: 7014; WAN024BPH; Start 1002; Stop 1026
gagagaacagtataaacagggtcaa

SEQ ID NO: 456316 - DNA, 25 bp, Artificial
  probe
  misc_feature (1)..(25): SEQ ID NO: 7014; WAN024BPH; Start 701; Stop 725
cttattctgtagttctatgttcgtc

SEQ ID NO: 456317 - DNA, 25 bp, Artificial
  probe
  misc_feature (1)..(25): SEQ ID NO: 7014; WAN024BPH; Start 65; Stop 89
tggttagtattgttgtatctgtagt

SEQ ID NO: 456318 - DNA, 25 bp, Artificial
  probe
  misc_feature (1)..(25): SEQ ID NO: 7014; WAN024BPH; Start 955; Stop 979
ggtgttatacctcttgtactgctta

SEQ ID NO: 456319 - DNA, 25 bp, Artificial
  probe
  misc_feature (1)..(25): SEQ ID NO: 7014; WAN024BPH; Start 952; Stop 976
tatggtgttatacctcttgtactgc

SEQ ID NO: 456320 - DNA, 25 bp, Artificial
  probe
  misc_feature (1)..(25): SEQ ID NO: 7014; WAN024BPH; Start 712; Stop 736
gttctatgttcgtcaataatgatgt

SEQ ID NO: 456321 - DNA, 25 bp, Artificial
  probe
  misc_feature (1)..(25): SEQ ID NO: 7014; WAN024BPH; Start 1003; Stop 1027
agagaacagtataaacagggtcaat

SEQ ID NO: 456322 - DNA, 25 bp, Artificial
  probe
  misc_feature (1)..(25): SEQ ID NO: 7014; WAN024BPH; Start 708; Stop 732
tgtagttctatgttcgtcaataatg

SEQ ID NO: 456323 - DNA, 25 bp, Artificial
  probe
  misc_feature (1)..(25): SEQ ID NO: 7014; WAN024BPH; Start 66; Stop 90
ggttagtattgttgtatctgtagtg

SEQ ID NO: 456324 - DNA, 25 bp, Artificial
  probe
  misc_feature (1)..(25): SEQ ID NO: 7014; WAN024BPH; Start 699; Stop 723
cccttattctgtagttctatgttcg

SEQ ID NO: 456325 - DNA, 25 bp, Artificial
  probe
  misc_feature (1)..(25): SEQ ID NO: 7014; WAN024BPH; Start 953; Stop 977
atggtgttatacctcttgtactgct

SEQ ID NO: 456326 - DNA, 25 bp, Artificial
  probe
  misc_feature (1)..(25): SEQ ID NO: 7014; WAN024BPH; Start 711; Stop 735
agttctatgttcgtcaataatgatg

SEQ ID NO: 456327 - DNA, 25 bp, Artificial
  probe
  misc_feature (1)..(25): SEQ ID NO: 7014; WAN024BPH; Start 954; Stop 978
tggtgttatacctcttgtactgctt

SEQ ID NO: 456328 - DNA, 25 bp, Artificial
  probe
  misc_feature (1)..(25): SEQ ID NO: 7014; WAN024BPH; Start 63; Stop 87
actggttagtattgttgtatctgta

SEQ ID NO: 456329 - DNA, 25 bp, Artificial
  probe
  misc_feature (1)..(25): SEQ ID NO: 7014; WAN024BPH; Start 707; Stop 731
ctgtagttctatgttcgtcaataat

SEQ ID NO: 456330 - DNA, 25 bp, Artificial
  probe
  misc_feature (1)..(25): SEQ ID NO: 7014; WAN024BPH; Start 64; Stop 88
ctggttagtattgttgtatctgtag

SEQ ID NO: 456331 - DNA, 25 bp, Artificial
  probe
  misc_feature (1)..(25): SEQ ID NO: 7014; WAN024BPH; Start 110; Stop 134
ctactacaatgctggatagaacttt

SEQ ID NO: 456332 - DNA, 25 bp, Artificial
  probe
  misc_feature (1)..(25): SEQ ID NO: 7014; WAN024BPH; Start 918; Stop 942
cgtagattcatcgtatgttcaaatg

SEQ ID NO: 456333 - DNA, 25 bp, Artificial
  probe
  misc_feature (1)..(25): SEQ ID NO: 7014; WAN024BPH; Start 1001; Stop 1025
cgagagaacagtataaacagggtca

SEQ ID NO: 456334 - DNA, 25 bp, Artificial
  probe
  misc_feature (1)..(25): SEQ ID NO: 7014; WAN024BPH; Start 1004; Stop 1028
gagaacagtataaacagggtcaata

SEQ ID NO: 456335 - DNA, 25 bp, Artificial
  probe
  misc_feature (1)..(25): SEQ ID NO: 7014; WAN024BPH; Start 369; Stop 393
gggcattcttgtactaagtgtattt

SEQ ID NO: 456336 - DNA, 25 bp, Artificial
  probe
  misc_feature (1)..(25): SEQ ID NO: 7014; WAN024BPH; Start 368; Stop 392
cgggcattcttgtactaagtgtatt

SEQ ID NO: 456337 - DNA, 25 bp, Artificial
  probe
  misc_feature (1)..(25): SEQ ID NO: 7015; WAN024G75; Start 182; Stop 206
tgttcgtgttagatagttcaatcat

SEQ ID NO: 456338 - DNA, 25 bp, Artificial
  probe
  misc_feature (1)..(25): SEQ ID NO: 7015; WAN024G75; Start 35; Stop 59
ttctaccgatctcatcttcactctt

SEQ ID NO: 456339 - DNA, 25 bp, Artificial
  probe
  misc_feature (1)..(25): SEQ ID NO: 7015; WAN024G75; Start 38; Stop 62
taccgatctcatcttcactcttcaa

SEQ ID NO: 456340 - DNA, 25 bp, Artificial
  probe
  misc_feature (1)..(25): SEQ ID NO: 7015; WAN024G75; Start 181; Stop 205
ttgttcgtgttagatagttcaatca

SEQ ID NO: 456341 - DNA, 25 bp, Artificial
  probe
  misc_feature (1)..(25): SEQ ID NO: 7015; WAN024G75; Start 36; Stop 60
tctaccgatctcatcttcactcttc

SEQ ID NO: 456342 - DNA, 25 bp, Artificial
  probe
  misc_feature (1)..(25): SEQ ID NO: 7015; WAN024G75; Start 37; Stop 61
ctaccgatctcatcttcactcttca

SEQ ID NO: 456343 - DNA, 25 bp, Artificial
  probe
  misc_feature (1)..(25): SEQ ID NO: 7015; WAN024G75; Start 116; Stop 140
cttctagcttcatatcaatctctgc

SEQ ID NO: 456344 - DNA, 25 bp, Artificial
  probe
  misc_feature (1)..(25): SEQ ID NO: 7015; WAN024G75; Start 62; Stop 86
aattgataaggacttccgccatctt

SEQ ID NO: 456345 - DNA, 25 bp, Artificial
  probe
  misc_feature (1)..(25): SEQ ID NO: 7015; WAN024G75; Start 118; Stop 142
tctagcttcatatcaatctctgcaa

SEQ ID NO: 456346 - DNA, 25 bp, Artificial
  probe
  misc_feature (1)..(25): SEQ ID NO: 7015; WAN024G75; Start 117; Stop 141
ttctagcttcatatcaatctctgca

SEQ ID NO: 456347 - DNA, 25 bp, Artificial
  probe
  misc_feature (1)..(25): SEQ ID NO: 7015; WAN024G75; Start 170; Stop 194
cttggtattgtttgttcgtgttaga

SEQ ID NO: 456348 - DNA, 25 bp, Artificial
  probe
  misc_feature (1)..(25): SEQ ID NO: 7015; WAN024G75; Start 169; Stop 193
tcttggtattgtttgttcgtgttag

SEQ ID NO: 456349 - DNA, 25 bp, Artificial
  probe
  misc_feature (1)..(25): SEQ ID NO: 7015; WAN024G75; Start 167; Stop 191
tttcttggtattgtttgttcgtgtt

SEQ ID NO: 456350 - DNA, 25 bp, Artificial
  probe
  misc_feature (1)..(25): SEQ ID NO: 7015; WAN024G75; Start 166; Stop 190
atttcttggtattgtttgttcgtgt

SEQ ID NO: 456351 - DNA, 25 bp, Artificial
  probe
  misc_feature (1)..(25): SEQ ID NO: 7015; WAN024G75; Start 164; Stop 188
tgatttcttggtattgtttgttcgt

SEQ ID NO: 456352 - DNA, 25 bp, Artificial
  probe
  misc_feature (1)..(25): SEQ ID NO: 7015; WAN024G75; Start 165; Stop 189
gatttcttggtattgtttgttcgtg

SEQ ID NO: 456353 - DNA, 25 bp, Artificial
  probe
  misc_feature (1)..(25): SEQ ID NO: 7015; WAN024G75; Start 168; Stop 192
ttcttggtattgtttgttcgtgtta

SEQ ID NO: 456354 - DNA, 25 bp, Artificial
  probe
  misc_feature (1)..(25): SEQ ID NO: 7015; WAN024G75; Start 171; Stop 195
ttggtattgtttgttcgtgttagat

SEQ ID NO: 456355 - DNA, 25 bp, Artificial
  probe
  misc_feature (1)..(25): SEQ ID NO: 7015; WAN024G75; Start 177; Stop 201
ttgtttgttcgtgttagatagttca

SEQ ID NO: 456356 - DNA, 25 bp, Artificial
  probe
  misc_feature (1)..(25): SEQ ID NO: 7015; WAN024G75; Start 119; Stop 143
ctagcttcatatcaatctctgcaat

SEQ ID NO: 456357 - DNA, 25 bp, Artificial
  probe
  misc_feature (1)..(25): SEQ ID NO: 7015; WAN024G75; Start 163; Stop 187
ttgatttcttggtattgtttgttcg

SEQ ID NO: 456358 - DNA, 25 bp, Artificial
  probe
  misc_feature (1)..(25): SEQ ID NO: 7015; WAN024G75; Start 172; Stop 196
tggtattgtttgttcgtgttagata

SEQ ID NO: 456359 - DNA, 25 bp, Artificial
  probe
  misc_feature (1)..(25): SEQ ID NO: 7015; WAN024G75; Start 120; Stop 144
tagcttcatatcaatctctgcaatt

SEQ ID NO: 456360 - DNA, 25 bp, Artificial
  probe
  misc_feature (1)..(25): SEQ ID NO: 7015; WAN024G75; Start 63; Stop 87
attgataaggacttccgccatcttg

SEQ ID NO: 456361 - DNA, 25 bp, Artificial
  probe
  misc_feature (1)..(25): SEQ ID NO: 7015; WAN024G75; Start 183; Stop 207
gttcgtgttagatagttcaatcata

SEQ ID NO: 456362 - DNA, 25 bp, Artificial
  probe
  misc_feature (1)..(25): SEQ ID NO: 7015; WAN024G75; Start 178; Stop 202
tgtttgttcgtgttagatagttcaa

SEQ ID NO: 456363 - DNA, 25 bp, Artificial
  probe
  misc_feature (1)..(25): SEQ ID NO: 7015; WAN024G75; Start 115; Stop 139
tcttctagcttcatatcaatctctg

SEQ ID NO: 456364 - DNA, 25 bp, Artificial
  probe
  misc_feature (1)..(25): SEQ ID NO: 7015; WAN024G75; Start 40; Stop 64
ccgatctcatcttcactcttcaaat

SEQ ID NO: 456365 - DNA, 25 bp, Artificial
  probe
  misc_feature (1)..(25): SEQ ID NO: 7015; WAN024G75; Start 41; Stop 65
cgatctcatcttcactcttcaaatt

SEQ ID NO: 456366 - DNA, 25 bp, Artificial
  probe
  misc_feature (1)..(25): SEQ ID NO: 7015; WAN024G75; Start 34; Stop 58
tttctaccgatctcatcttcactct

SEQ ID NO: 456367 - DNA, 25 bp, Artificial
  probe
  misc_feature (1)..(25): SEQ ID NO: 7015; WAN024G75; Start 173; Stop 197
ggtattgtttgttcgtgttagatag

SEQ ID NO: 456368 - DNA, 25 bp, Artificial
  probe
  misc_feature (1)..(25): SEQ ID NO: 7015; WAN024G75; Start 155; Stop 179
gctcatctttgatttcttggtattg

SEQ ID NO: 456369 - DNA, 25 bp, Artificial
  probe
  misc_feature (1)..(25): SEQ ID NO: 7015; WAN024G75; Start 186; Stop 210
cgtgttagatagttcaatcataaga

SEQ ID NO: 456370 - DNA, 25 bp, Artificial
  probe
  misc_feature (1)..(25): SEQ ID NO: 7016; WAN024C35; Start 371; Stop 395
cgctgaaagagggttacatcaaacc

SEQ ID NO: 456371 - DNA, 25 bp, Artificial
  probe
  misc_feature (1)..(25): SEQ ID NO: 7016; WAN024C35; Start 370; Stop 394
gcgctgaaagagggttacatcaaac

SEQ ID NO: 456372 - DNA, 25 bp, Artificial
  probe
  misc_feature (1)..(25): SEQ ID NO: 7016; WAN024C35; Start 365; Stop 389
aaaaggcgctgaaagagggttacat

SEQ ID NO: 456373 - DNA, 25 bp, Artificial
  probe
  misc_feature (1)..(25): SEQ ID NO: 7017; WAN024D4U; Start 316; Stop 340
tcttggatagttattgacattgctc

SEQ ID NO: 456374 - DNA, 25 bp, Artificial
  probe
  misc_feature (1)..(25): SEQ ID NO: 7017; WAN024D4U; Start 315; Stop 339
ctcttggatagttattgacattgct

SEQ ID NO: 456375 - DNA, 25 bp, Artificial
  probe
  misc_feature (1)..(25): SEQ ID NO: 7017; WAN024D4U; Start 317; Stop 341
cttggatagttattgacattgctca

SEQ ID NO: 456376 - DNA, 25 bp, Artificial
  probe
  misc_feature (1)..(25): SEQ ID NO: 7017; WAN024D4U; Start 314; Stop 338
actcttggatagttattgacattgc

SEQ ID NO: 456377 - DNA, 25 bp, Artificial
  probe
  misc_feature (1)..(25): SEQ ID NO: 7017; WAN024D4U; Start 318; Stop 342
ttggatagttattgacattgctcat

SEQ ID NO: 456378 - DNA, 25 bp, Artificial
  probe
  misc_feature (1)..(25): SEQ ID NO: 7017; WAN024D4U; Start 319; Stop 343
tggatagttattgacattgctcatg

SEQ ID NO: 456379 - DNA, 25 bp, Artificial
  probe
  misc_feature (1)..(25): SEQ ID NO: 7017; WAN024D4U; Start 181; Stop 205
ttctttcttgtaatcatcccactca

SEQ ID NO: 456380 - DNA, 25 bp, Artificial
  probe
  misc_feature (1)..(25): SEQ ID NO: 7017; WAN024D4U; Start 144; Stop 168
taatagcgaggtaatcagaaagtcc

SEQ ID NO: 456381 - DNA, 25 bp, Artificial
  probe
  misc_feature (1)..(25): SEQ ID NO: 7017; WAN024D4U; Start 288; Stop 312
tgtccaaatcttcctgtgtcataaa

SEQ ID NO: 456382 - DNA, 25 bp, Artificial
  probe
  misc_feature (1)..(25): SEQ ID NO: 7017; WAN024D4U; Start 182; Stop 206
tctttcttgtaatcatcccactcag

SEQ ID NO: 456383 - DNA, 25 bp, Artificial
  probe
  misc_feature (1)..(25): SEQ ID NO: 7017; WAN024D4U; Start 180; Stop 204
gttctttcttgtaatcatcccactc

SEQ ID NO: 456384 - DNA, 25 bp, Artificial
  probe
  misc_feature (1)..(25): SEQ ID NO: 7017; WAN024D4U; Start 114; Stop 138
ttgcttggtattggtcgtagtattt

SEQ ID NO: 456385 - DNA, 25 bp, Artificial
  probe
  misc_feature (1)..(25): SEQ ID NO: 7017; WAN024D4U; Start 113; Stop 137
tttgcttggtattggtcgtagtatt

SEQ ID NO: 456386 - DNA, 25 bp, Artificial
  probe
  misc_feature (1)..(25): SEQ ID NO: 7017; WAN024D4U; Start 10; Stop 34
aggcttatattgagtattaacgaga

SEQ ID NO: 456387 - DNA, 25 bp, Artificial
  probe
  misc_feature (1)..(25): SEQ ID NO: 7017; WAN024D4U; Start 9; Stop 33
caggcttatattgagtattaacgag

SEQ ID NO: 456388 - DNA, 25 bp, Artificial
  probe
  misc_feature (1)..(25): SEQ ID NO: 7017; WAN024D4U; Start 287; Stop 311
ttgtccaaatcttcctgtgtcataa

SEQ ID NO: 456389 - DNA, 25 bp, Artificial
  probe
  misc_feature (1)..(25): SEQ ID NO: 7017; WAN024D4U; Start 187; Stop 211
cttgtaatcatcccactcagtatca

SEQ ID NO: 456390 - DNA, 25 bp, Artificial
  probe
  misc_feature (1)..(25): SEQ ID NO: 7017; WAN024D4U; Start 150; Stop 174
cgaggtaatcagaaagtccgtattt

SEQ ID NO: 456391 - DNA, 25 bp, Artificial
  probe
  misc_feature (1)..(25): SEQ ID NO: 7017; WAN024D4U; Start 313; Stop 337
gactcttggatagttattgacattg

SEQ ID NO: 456392 - DNA, 25 bp, Artificial
  probe
  misc_feature (1)..(25): SEQ ID NO: 7017; WAN024D4U; Start 312; Stop 336
agactcttggatagttattgacatt

SEQ ID NO: 456393 - DNA, 25 bp, Artificial
  probe
  misc_feature (1)..(25): SEQ ID NO: 7017; WAN024D4U; Start 186; Stop 210
tcttgtaatcatcccactcagtatc

SEQ ID NO: 456394 - DNA, 25 bp, Artificial
  probe
  misc_feature (1)..(25): SEQ ID NO: 7017; WAN024D4U; Start 2; Stop 26
tgttcttcaggcttatattgagtat

SEQ ID NO: 456395 - DNA, 25 bp, Artificial
  probe
  misc_feature (1)..(25): SEQ ID NO: 7017; WAN024D4U; Start 1; Stop 25
atgttcttcaggcttatattgagta

SEQ ID NO: 456396 - DNA, 25 bp, Artificial
  probe
  misc_feature (1)..(25): SEQ ID NO: 7017; WAN024D4U; Start 183; Stop 207
ctttcttgtaatcatcccactcagt

SEQ ID NO: 456397 - DNA, 25 bp, Artificial
  probe
  misc_feature (1)..(25): SEQ ID NO: 7017; WAN024D4U; Start 184; Stop 208
tttcttgtaatcatcccactcagta

SEQ ID NO: 456398 - DNA, 25 bp, Artificial
  probe
  misc_feature (1)..(25): SEQ ID NO: 7017; WAN024D4U; Start 289; Stop 313
gtccaaatcttcctgtgtcataaag

SEQ ID NO: 456399 - DNA, 25 bp, Artificial
  probe
  misc_feature (1)..(25): SEQ ID NO: 7017; WAN024D4U; Start 286; Stop 310
cttgtccaaatcttcctgtgtcata

SEQ ID NO: 456400 - DNA, 25 bp, Artificial
  probe
  misc_feature (1)..(25): SEQ ID NO: 7017; WAN024D4U; Start 189; Stop 213
tgtaatcatcccactcagtatcaat

SEQ ID NO: 456401 - DNA, 25 bp, Artificial
  probe
  misc_feature (1)..(25): SEQ ID NO: 7017; WAN024D4U; Start 185; Stop 209
ttcttgtaatcatcccactcagtat

SEQ ID NO: 456402 - DNA, 25 bp, Artificial
  probe
  misc_feature (1)..(25): SEQ ID NO: 7017; WAN024D4U; Start 112; Stop 136
gtttgcttggtattggtcgtagtat

SEQ ID NO: 456403 - DNA, 25 bp, Artificial
  probe
  misc_feature (1)..(25): SEQ ID NO: 7017; WAN024D4U; Start 8; Stop 32
tcaggcttatattgagtattaacga

SEQ ID NO: 456404 - DNA, 25 bp, Artificial
  probe
  misc_feature (1)..(25): SEQ ID NO: 7017; WAN024D4U; Start 178; Stop 202
aagttctttcttgtaatcatcccac

SEQ ID NO: 456405 - DNA, 25 bp, Artificial
  probe
  misc_feature (1)..(25): SEQ ID NO: 7017; WAN024D4U; Start 283; Stop 307
aatcttgtccaaatcttcctgtgtc

SEQ ID NO: 456406 - DNA, 25 bp, Artificial
  probe
  misc_feature (1)..(25): SEQ ID NO: 7018; WAN024ATD; Start 23; Stop 47
tacgagaagatgatgatttgacaca

SEQ ID NO: 456407 - DNA, 25 bp, Artificial
  probe
  misc_feature (1)..(25): SEQ ID NO: 7018; WAN024ATD; Start 22; Stop 46
ttacgagaagatgatgatttgacac

SEQ ID NO: 456408 - DNA, 25 bp, Artificial
  probe
  misc_feature (1)..(25): SEQ ID NO: 7018; WAN024ATD; Start 25; Stop 49
cgagaagatgatgatttgacacaag

SEQ ID NO: 456409 - DNA, 25 bp, Artificial
  probe
  misc_feature (1)..(25): SEQ ID NO: 7018; WAN024ATD; Start 112; Stop 136
agcaggctaatctctataaatgacc

SEQ ID NO: 456410 - DNA, 25 bp, Artificial
  probe
  misc_feature (1)..(25): SEQ ID NO: 7018; WAN024ATD; Start 21; Stop 45
tttacgagaagatgatgatttgaca

SEQ ID NO: 456411 - DNA, 25 bp, Artificial
  probe
  misc_feature (1)..(25): SEQ ID NO: 7018; WAN024ATD; Start 24; Stop 48
acgagaagatgatgatttgacacaa

SEQ ID NO: 456412 - DNA, 25 bp, Artificial
  probe
  misc_feature (1)..(25): SEQ ID NO: 7018; WAN024ATD; Start 26; Stop 50
gagaagatgatgatttgacacaaga

SEQ ID NO: 456413 - DNA, 25 bp, Artificial
  probe
  misc_feature (1)..(25): SEQ ID NO: 7018; WAN024ATD; Start 27; Stop 51
agaagatgatgatttgacacaagaa

SEQ ID NO: 456414 - DNA, 25 bp, Artificial
  probe
  misc_feature (1)..(25): SEQ ID NO: 7018; WAN024ATD; Start 11; Stop 35
ggattagagatttacgagaagatga

SEQ ID NO: 456415 - DNA, 25 bp, Artificial
  probe
  misc_feature (1)..(25): SEQ ID NO: 7018; WAN024ATD; Start 113; Stop 137
gcaggctaatctctataaatgacct

SEQ ID NO: 456416 - DNA, 25 bp, Artificial
  probe
  misc_feature (1)..(25): SEQ ID NO: 7018; WAN024ATD; Start 10; Stop 34
aggattagagatttacgagaagatg

SEQ ID NO: 456417 - DNA, 25 bp, Artificial
  probe
  misc_feature (1)..(25): SEQ ID NO: 7018; WAN024ATD; Start 108; Stop 132
tggtagcaggctaatctctataaat

SEQ ID NO: 456418 - DNA, 25 bp, Artificial
  probe
  misc_feature (1)..(25): SEQ ID NO: 7018; WAN024ATD; Start 16; Stop 40
agagatttacgagaagatgatgatt

SEQ ID NO: 456419 - DNA, 25 bp, Artificial
  probe
  misc_feature (1)..(25): SEQ ID NO: 7018; WAN024ATD; Start 109; Stop 133
ggtagcaggctaatctctataaatg

SEQ ID NO: 456420 - DNA, 25 bp, Artificial
  probe
  misc_feature (1)..(25): SEQ ID NO: 7018; WAN024ATD; Start 28; Stop 52
gaagatgatgatttgacacaagaat

SEQ ID NO: 456421 - DNA, 25 bp, Artificial
  probe
  misc_feature (1)..(25): SEQ ID NO: 7018; WAN024ATD; Start 20; Stop 44
atttacgagaagatgatgatttgac

SEQ ID NO: 456422 - DNA, 25 bp, Artificial
  probe
  misc_feature (1)..(25): SEQ ID NO: 7018; WAN024ATD; Start 106; Stop 130
gctggtagcaggctaatctctataa

SEQ ID NO: 456423 - DNA, 25 bp, Artificial
  probe
  misc_feature (1)..(25): SEQ ID NO: 7018; WAN024ATD; Start 19; Stop 43
gatttacgagaagatgatgatttga

SEQ ID NO: 456424 - DNA, 25 bp, Artificial
  probe
  misc_feature (1)..(25): SEQ ID NO: 7018; WAN024ATD; Start 18; Stop 42
agatttacgagaagatgatgatttg

SEQ ID NO: 456425 - DNA, 25 bp, Artificial
  probe
  misc_feature (1)..(25): SEQ ID NO: 7018; WAN024ATD; Start 8; Stop 32
aaaggattagagatttacgagaaga

SEQ ID NO: 456426 - DNA, 25 bp, Artificial
  probe
  misc_feature (1)..(25): SEQ ID NO: 7018; WAN024ATD; Start 107; Stop 131
ctggtagcaggctaatctctataaa

SEQ ID NO: 456427 - DNA, 25 bp, Artificial
  probe
  misc_feature (1)..(25): SEQ ID NO: 7018; WAN024ATD; Start 17; Stop 41
gagatttacgagaagatgatgattt

SEQ ID NO: 456428 - DNA, 25 bp, Artificial
  probe
  misc_feature (1)..(25): SEQ ID NO: 7018; WAN024ATD; Start 14; Stop 38
ttagagatttacgagaagatgatga

SEQ ID NO: 456429 - DNA, 25 bp, Artificial
  probe
  misc_feature (1)..(25): SEQ ID NO: 7018; WAN024ATD; Start 9; Stop 33
aaggattagagatttacgagaagat

SEQ ID NO: 456430 - DNA, 25 bp, Artificial
  probe
  misc_feature (1)..(25): SEQ ID NO: 7018; WAN024ATD; Start 111; Stop 135
tagcaggctaatctctataaatgac

SEQ ID NO: 456431 - DNA, 25 bp, Artificial
  probe
  misc_feature (1)..(25): SEQ ID NO: 7018; WAN024ATD; Start 110; Stop 134
gtagcaggctaatctctataaatga

SEQ ID NO: 456432 - DNA, 25 bp, Artificial
  probe
  misc_feature (1)..(25): SEQ ID NO: 7018; WAN024ATD; Start 114; Stop 138
caggctaatctctataaatgacctt

SEQ ID NO: 456433 - DNA, 25 bp, Artificial
  probe
  misc_feature (1)..(25): SEQ ID NO: 7018; WAN024ATD; Start 15; Stop 39
tagagatttacgagaagatgatgat

SEQ ID NO: 456434 - DNA, 25 bp, Artificial
  probe
  misc_feature (1)..(25): SEQ ID NO: 7018; WAN024ATD; Start 130; Stop 154
aatgaccttatcaaacttgcagatt

SEQ ID NO: 456435 - DNA, 25 bp, Artificial
  probe
  misc_feature (1)..(25): SEQ ID NO: 7018; WAN024ATD; Start 129; Stop 153
aaatgaccttatcaaacttgcagat

SEQ ID NO: 456436 - DNA, 25 bp, Artificial
  probe
  misc_feature (1)..(25): SEQ ID NO: 7018; WAN024ATD; Start 105; Stop 129
agctggtagcaggctaatctctata

SEQ ID NO: 456437 - DNA, 25 bp, Artificial
  probe
  misc_feature (1)..(25): SEQ ID NO: 7018; WAN024ATD; Start 128; Stop 152
taaatgaccttatcaaacttgcaga

SEQ ID NO: 456438 - DNA, 25 bp, Artificial
  probe
  misc_feature (1)..(25): SEQ ID NO: 7018; WAN024ATD; Start 29; Stop 53
aagatgatgatttgacacaagaata

SEQ ID NO: 456439 - DNA, 25 bp, Artificial
  probe
  misc_feature (1)..(25): SEQ ID NO: 7019; WAN024ATC; Start 28; Stop 52
gaggatgatgatttgacacaagaat

SEQ ID NO: 456440 - DNA, 25 bp, Artificial
  probe
  misc_feature (1)..(25): SEQ ID NO: 7019; WAN024ATC; Start 27; Stop 51
cgaggatgatgatttgacacaagaa

SEQ ID NO: 456441 - DNA, 25 bp, Artificial
  probe
  misc_feature (1)..(25): SEQ ID NO: 7019; WAN024ATC; Start 29; Stop 53
aggatgatgatttgacacaagaata

SEQ ID NO: 456442 - DNA, 25 bp, Artificial
  probe
  misc_feature (1)..(25): SEQ ID NO: 7019; WAN024ATC; Start 35; Stop 59
atgatttgacacaagaatatgttgc

SEQ ID NO: 456443 - DNA, 25 bp, Artificial
  probe
  misc_feature (1)..(25): SEQ ID NO: 7019; WAN024ATC; Start 30; Stop 54
ggatgatgatttgacacaagaatat

SEQ ID NO: 456444 - DNA, 25 bp, Artificial
  probe
  misc_feature (1)..(25): SEQ ID NO: 7019; WAN024ATC; Start 129; Stop 153
agatgaccttatcaaacttgcagat

SEQ ID NO: 456445 - DNA, 25 bp, Artificial
  probe
  misc_feature (1)..(25): SEQ ID NO: 7019; WAN024ATC; Start 128; Stop 152
tagatgaccttatcaaacttgcaga

SEQ ID NO: 456446 - DNA, 25 bp, Artificial
  probe
  misc_feature (1)..(25): SEQ ID NO: 7019; WAN024ATC; Start 130; Stop 154
gatgaccttatcaaacttgcagatt

SEQ ID NO: 456447 - DNA, 25 bp, Artificial
  probe
  misc_feature (1)..(25): SEQ ID NO: 7019; WAN024ATC; Start 36; Stop 60
tgatttgacacaagaatatgttgca

SEQ ID NO: 456448 - DNA, 25 bp, Artificial
  probe
  misc_feature (1)..(25): SEQ ID NO: 7019; WAN024ATC; Start 127; Stop 151
atagatgaccttatcaaacttgcag

SEQ ID NO: 456449 - DNA, 25 bp, Artificial
  probe
  misc_feature (1)..(25): SEQ ID NO: 7019; WAN024ATC; Start 33; Stop 57
tgatgatttgacacaagaatatgtt

SEQ ID NO: 456450 - DNA, 25 bp, Artificial
  probe
  misc_feature (1)..(25): SEQ ID NO: 7019; WAN024ATC; Start 34; Stop 58
gatgatttgacacaagaatatgttg

SEQ ID NO: 456451 - DNA, 25 bp, Artificial
  probe
  misc_feature (1)..(25): SEQ ID NO: 7019; WAN024ATC; Start 32; Stop 56
atgatgatttgacacaagaatatgt

SEQ ID NO: 456452 - DNA, 25 bp, Artificial
  probe
  misc_feature (1)..(25): SEQ ID NO: 7019; WAN024ATC; Start 31; Stop 55
gatgatgatttgacacaagaatatg

SEQ ID NO: 456453 - DNA, 25 bp, Artificial
  probe
  misc_feature (1)..(25): SEQ ID NO: 7019; WAN024ATC; Start 3; Stop 27
gttgaaaaggattagagatttacgc

SEQ ID NO: 456454 - DNA, 25 bp, Artificial
  probe
  misc_feature (1)..(25): SEQ ID NO: 7019; WAN024ATC; Start 26; Stop 50
gcgaggatgatgatttgacacaaga

SEQ ID NO: 456455 - DNA, 25 bp, Artificial
  probe
  misc_feature (1)..(25): SEQ ID NO: 7019; WAN024ATC; Start 126; Stop 150
tatagatgaccttatcaaacttgca

SEQ ID NO: 456456 - DNA, 25 bp, Artificial
  probe
  misc_feature (1)..(25): SEQ ID NO: 7019; WAN024ATC; Start 79; Stop 103
acaagatcagcgtattctaaaatgg

SEQ ID NO: 456457 - DNA, 25 bp, Artificial
  probe
  misc_feature (1)..(25): SEQ ID NO: 7019; WAN024ATC; Start 80; Stop 104
caagatcagcgtattctaaaatgga

SEQ ID NO: 456458 - DNA, 25 bp, Artificial
  probe
  misc_feature (1)..(25): SEQ ID NO: 7019; WAN024ATC; Start 103; Stop 127
gaatcaggtaccaggttaatctcta

SEQ ID NO: 456459 - DNA, 25 bp, Artificial
  probe
  misc_feature (1)..(25): SEQ ID NO: 7019; WAN024ATC; Start 125; Stop 149
ctatagatgaccttatcaaacttgc

SEQ ID NO: 456460 - DNA, 25 bp, Artificial
  probe
  misc_feature (1)..(25): SEQ ID NO: 7019; WAN024ATC; Start 81; Stop 105
aagatcagcgtattctaaaatggaa

SEQ ID NO: 456461 - DNA, 25 bp, Artificial
  probe
  misc_feature (1)..(25): SEQ ID NO: 7019; WAN024ATC; Start 102; Stop 126
ggaatcaggtaccaggttaatctct

SEQ ID NO: 456462 - DNA, 25 bp, Artificial
  probe
  misc_feature (1)..(25): SEQ ID NO: 7019; WAN024ATC; Start 104; Stop 128
aatcaggtaccaggttaatctctat

SEQ ID NO: 456463 - DNA, 25 bp, Artificial
  probe
  misc_feature (1)..(25): SEQ ID NO: 7019; WAN024ATC; Start 106; Stop 130
tcaggtaccaggttaatctctatag

SEQ ID NO: 456464 - DNA, 25 bp, Artificial
  probe
  misc_feature (1)..(25): SEQ ID NO: 7019; WAN024ATC; Start 86; Stop 110
cagcgtattctaaaatggaatcagg

SEQ ID NO: 456465 - DNA, 25 bp, Artificial
  probe
  misc_feature (1)..(25): SEQ ID NO: 7019; WAN024ATC; Start 87; Stop 111
agcgtattctaaaatggaatcaggt

SEQ ID NO: 456466 - DNA, 25 bp, Artificial
  probe
  misc_feature (1)..(25): SEQ ID NO: 7019; WAN024ATC; Start 12; Stop 36
gattagagatttacgcgaggatgat

SEQ ID NO: 456467 - DNA, 25 bp, Artificial
  probe
  misc_feature (1)..(25): SEQ ID NO: 7019; WAN024ATC; Start 85; Stop 109
tcagcgtattctaaaatggaatcag

SEQ ID NO: 456468 - DNA, 25 bp, Artificial
  probe
  misc_feature (1)..(25): SEQ ID NO: 7019; WAN024ATC; Start 13; Stop 37
attagagatttacgcgaggatgatg

SEQ ID NO: 456469 - DNA, 25 bp, Artificial
  probe
  misc_feature (1)..(25): SEQ ID NO: 7019; WAN024ATC; Start 107; Stop 131
caggtaccaggttaatctctataga

SEQ ID NO: 456470 - DNA, 25 bp, Artificial
  probe
  misc_feature (1)..(25): SEQ ID NO: 7019; WAN024ATC; Start 88; Stop 112
gcgtattctaaaatggaatcaggta

SEQ ID NO: 456471 - DNA, 25 bp, Artificial
  probe
  misc_feature (1)..(25): SEQ ID NO: 7019; WAN024ATC; Start 174; Stop 198
ttaccttgtaggtcgagtggataat

SEQ ID NO: 456472 - DNA, 25 bp, Artificial
  probe
  misc_feature (1)..(25): SEQ ID NO: 7020; WAN024BMQ; Start 458; Stop 482
ctgctggtattattgtcctcttctt

SEQ ID NO: 456473 - DNA, 25 bp, Artificial
  probe
  misc_feature (1)..(25): SEQ ID NO: 7020; WAN024BMQ; Start 459; Stop 483
tgctggtattattgtcctcttctta

SEQ ID NO: 456474 - DNA, 25 bp, Artificial
  probe
  misc_feature (1)..(25): SEQ ID NO: 7020; WAN024BMQ; Start 457; Stop 481
tctgctggtattattgtcctcttct

SEQ ID NO: 456475 - DNA, 25 bp, Artificial
  probe
  misc_feature (1)..(25): SEQ ID NO: 7020; WAN024BMQ; Start 456; Stop 480
gtctgctggtattattgtcctcttc

SEQ ID NO: 456476 - DNA, 25 bp, Artificial
  probe
  misc_feature (1)..(25): SEQ ID NO: 7020; WAN024BMQ; Start 460; Stop 484
gctggtattattgtcctcttcttag

SEQ ID NO: 456477 - DNA, 25 bp, Artificial
  probe
  misc_feature (1)..(25): SEQ ID NO: 7020; WAN024BMQ; Start 129; Stop 153
tagtgtgaatggctggtatgtagaa

SEQ ID NO: 456478 - DNA, 25 bp, Artificial
  probe
  misc_feature (1)..(25): SEQ ID NO: 7020; WAN024BMQ; Start 455; Stop 479
tgtctgctggtattattgtcctctt

SEQ ID NO: 456479 - DNA, 25 bp, Artificial
  probe
  misc_feature (1)..(25): SEQ ID NO: 7020; WAN024BMQ; Start 454; Stop 478
ctgtctgctggtattattgtcctct

SEQ ID NO: 456480 - DNA, 25 bp, Artificial
  probe
  misc_feature (1)..(25): SEQ ID NO: 7020; WAN024BMQ; Start 128; Stop 152
gtagtgtgaatggctggtatgtaga

SEQ ID NO: 456481 - DNA, 25 bp, Artificial
  probe
  misc_feature (1)..(25): SEQ ID NO: 7020; WAN024BMQ; Start 450; Stop 474
tacactgtctgctggtattattgtc

SEQ ID NO: 456482 - DNA, 25 bp, Artificial
  probe
  misc_feature (1)..(25): SEQ ID NO: 7020; WAN024BMQ; Start 453; Stop 477
actgtctgctggtattattgtcctc

SEQ ID NO: 456483 - DNA, 25 bp, Artificial
  probe
  misc_feature (1)..(25): SEQ ID NO: 7020; WAN024BMQ; Start 449; Stop 473
atacactgtctgctggtattattgt

SEQ ID NO: 456484 - DNA, 25 bp, Artificial
  probe
  misc_feature (1)..(25): SEQ ID NO: 7020; WAN024BMQ; Start 445; Stop 469
gcttatacactgtctgctggtatta

SEQ ID NO: 456485 - DNA, 25 bp, Artificial
  probe
  misc_feature (1)..(25): SEQ ID NO: 7020; WAN024BMQ; Start 452; Stop 476
cactgtctgctggtattattgtcct

SEQ ID NO: 456486 - DNA, 25 bp, Artificial
  probe
  misc_feature (1)..(25): SEQ ID NO: 7020; WAN024BMQ; Start 361; Stop 385
gtcctagagttaatggatggtgatt

SEQ ID NO: 456487 - DNA, 25 bp, Artificial
  probe
  misc_feature (1)..(25): SEQ ID NO: 7020; WAN024BMQ; Start 354; Stop 378
tatgctggtcctagagttaatggat

SEQ ID NO: 456488 - DNA, 25 bp, Artificial
  probe
  misc_feature (1)..(25): SEQ ID NO: 7020; WAN024BMQ; Start 127; Stop 151
ggtagtgtgaatggctggtatgtag

SEQ ID NO: 456489 - DNA, 25 bp, Artificial
  probe
  misc_feature (1)..(25): SEQ ID NO: 7020; WAN024BMQ; Start 353; Stop 377
ctatgctggtcctagagttaatgga

SEQ ID NO: 456490 - DNA, 25 bp, Artificial
  probe
  misc_feature (1)..(25): SEQ ID NO: 7020; WAN024BMQ; Start 352; Stop 376
gctatgctggtcctagagttaatgg

SEQ ID NO: 456491 - DNA, 25 bp, Artificial
  probe
  misc_feature (1)..(25): SEQ ID NO: 7020; WAN024BMQ; Start 351; Stop 375
ggctatgctggtcctagagttaatg

SEQ ID NO: 456492 - DNA, 25 bp, Artificial
  probe
  misc_feature (1)..(25): SEQ ID NO: 7020; WAN024BMQ; Start 98; Stop 122
gtcatcagatttatcaagggcattc

SEQ ID NO: 456493 - DNA, 25 bp, Artificial
  probe
  misc_feature (1)..(25): SEQ ID NO: 7020; WAN024BMQ; Start 22; Stop 46
aaactaagaaggcgaaagatactgt

SEQ ID NO: 456494 - DNA, 25 bp, Artificial
  probe
  misc_feature (1)..(25): SEQ ID NO: 7020; WAN024BMQ; Start 360; Stop 384
ggtcctagagttaatggatggtgat

SEQ ID NO: 456495 - DNA, 25 bp, Artificial
  probe
  misc_feature (1)..(25): SEQ ID NO: 7020; WAN024BMQ; Start 101; Stop 125
atcagatttatcaagggcattcgta

SEQ ID NO: 456496 - DNA, 25 bp, Artificial
  probe
  misc_feature (1)..(25): SEQ ID NO: 7020; WAN024BMQ; Start 43; Stop 67
ctgtatatgattccctttgtagcca

SEQ ID NO: 456497 - DNA, 25 bp, Artificial
  probe
  misc_feature (1)..(25): SEQ ID NO: 7020; WAN024BMQ; Start 42; Stop 66
actgtatatgattccctttgtagcc

SEQ ID NO: 456498 - DNA, 25 bp, Artificial
  probe
  misc_feature (1)..(25): SEQ ID NO: 7020; WAN024BMQ; Start 23; Stop 47
aactaagaaggcgaaagatactgta

SEQ ID NO: 456499 - DNA, 25 bp, Artificial
  probe
  misc_feature (1)..(25): SEQ ID NO: 7020; WAN024BMQ; Start 461; Stop 485
ctggtattattgtcctcttcttagg

SEQ ID NO: 456500 - DNA, 25 bp, Artificial
  probe
  misc_feature (1)..(25): SEQ ID NO: 7020; WAN024BMQ; Start 448; Stop 472
tatacactgtctgctggtattattg

SEQ ID NO: 456501 - DNA, 25 bp, Artificial
  probe
  misc_feature (1)..(25): SEQ ID NO: 7020; WAN024BMQ; Start 444; Stop 468
tgcttatacactgtctgctggtatt

SEQ ID NO: 456502 - DNA, 25 bp, Artificial
  probe
  misc_feature (1)..(25): SEQ ID NO: 7020; WAN024BMQ; Start 443; Stop 467
ttgcttatacactgtctgctggtat

SEQ ID NO: 456503 - DNA, 25 bp, Artificial
  probe
  misc_feature (1)..(25): SEQ ID NO: 7020; WAN024BMQ; Start 46; Stop 70
tatatgattccctttgtagccatcc

SEQ ID NO: 456504 - DNA, 25 bp, Artificial
  probe
  misc_feature (1)..(25): SEQ ID NO: 7020; WAN024BMQ; Start 44; Stop 68
tgtatatgattccctttgtagccat

SEQ ID NO: 456505 - DNA, 25 bp, Artificial
  probe
  misc_feature (1)..(25): SEQ ID NO: 7021; WAN024C25; Start 50; Stop 74
ttacagagtatgtcaacaacaggaa

SEQ ID NO: 456506 - DNA, 25 bp, Artificial
  probe
  misc_feature (1)..(25): SEQ ID NO: 7021; WAN024C25; Start 49; Stop 73
attacagagtatgtcaacaacagga

SEQ ID NO: 456507 - DNA, 25 bp, Artificial
  probe
  misc_feature (1)..(25): SEQ ID NO: 7021; WAN024C25; Start 48; Stop 72
aattacagagtatgtcaacaacagg

SEQ ID NO: 456508 - DNA, 25 bp, Artificial
  probe
  misc_feature (1)..(25): SEQ ID NO: 7021; WAN024C25; Start 21; Stop 45
agttattgttgcattcctgtatcat

SEQ ID NO: 456509 - DNA, 25 bp, Artificial
  probe
  misc_feature (1)..(25): SEQ ID NO: 7021; WAN024C25; Start 20; Stop 44
cagttattgttgcattcctgtatca

SEQ ID NO: 456510 - DNA, 25 bp, Artificial
  probe
  misc_feature (1)..(25): SEQ ID NO: 7021; WAN024C25; Start 19; Stop 43
tcagttattgttgcattcctgtatc

SEQ ID NO: 456511 - DNA, 25 bp, Artificial
  probe
  misc_feature (1)..(25): SEQ ID NO: 7021; WAN024C25; Start 51; Stop 75
tacagagtatgtcaacaacaggaaa

SEQ ID NO: 456512 - DNA, 25 bp, Artificial
  probe
  misc_feature (1)..(25): SEQ ID NO: 7021; WAN024C25; Start 148; Stop 172
atattgatagcaatcagtggagcaa

SEQ ID NO: 456513 - DNA, 25 bp, Artificial
  probe
  misc_feature (1)..(25): SEQ ID NO: 7021; WAN024C25; Start 18; Stop 42
ttcagttattgttgcattcctgtat

SEQ ID NO: 456514 - DNA, 25 bp, Artificial
  probe
  misc_feature (1)..(25): SEQ ID NO: 7021; WAN024C25; Start 22; Stop 46
gttattgttgcattcctgtatcata

SEQ ID NO: 456515 - DNA, 25 bp, Artificial
  probe
  misc_feature (1)..(25): SEQ ID NO: 7021; WAN024C25; Start 147; Stop 171
aatattgatagcaatcagtggagca

SEQ ID NO: 456516 - DNA, 25 bp, Artificial
  probe
  misc_feature (1)..(25): SEQ ID NO: 7021; WAN024C25; Start 154; Stop 178
atagcaatcagtggagcaaatttac

SEQ ID NO: 456517 - DNA, 25 bp, Artificial
  probe
  misc_feature (1)..(25): SEQ ID NO: 7021; WAN024C25; Start 153; Stop 177
gatagcaatcagtggagcaaattta

SEQ ID NO: 456518 - DNA, 25 bp, Artificial
  probe
  misc_feature (1)..(25): SEQ ID NO: 7021; WAN024C25; Start 157; Stop 181
gcaatcagtggagcaaatttactat

SEQ ID NO: 456519 - DNA, 25 bp, Artificial
  probe
  misc_feature (1)..(25): SEQ ID NO: 7021; WAN024C25; Start 47; Stop 71
aaattacagagtatgtcaacaacag

SEQ ID NO: 456520 - DNA, 25 bp, Artificial
  probe
  misc_feature (1)..(25): SEQ ID NO: 7021; WAN024C25; Start 156; Stop 180
agcaatcagtggagcaaatttacta

SEQ ID NO: 456521 - DNA, 25 bp, Artificial
  probe
  misc_feature (1)..(25): SEQ ID NO: 7021; WAN024C25; Start 155; Stop 179
tagcaatcagtggagcaaatttact

SEQ ID NO: 456522 - DNA, 25 bp, Artificial
  probe
  misc_feature (1)..(25): SEQ ID NO: 7021; WAN024C25; Start 23; Stop 47
ttattgttgcattcctgtatcataa

SEQ ID NO: 456523 - DNA, 25 bp, Artificial
  probe
  misc_feature (1)..(25): SEQ ID NO: 7021; WAN024C25; Start 16; Stop 40
atttcagttattgttgcattcctgt

SEQ ID NO: 456524 - DNA, 25 bp, Artificial
  probe
  misc_feature (1)..(25): SEQ ID NO: 7021; WAN024C25; Start 149; Stop 173
tattgatagcaatcagtggagcaaa

SEQ ID NO: 456525 - DNA, 25 bp, Artificial
  probe
  misc_feature (1)..(25): SEQ ID NO: 7021; WAN024C25; Start 17; Stop 41
tttcagttattgttgcattcctgta

SEQ ID NO: 456526 - DNA, 25 bp, Artificial
  probe
  misc_feature (1)..(25): SEQ ID NO: 7021; WAN024C25; Start 150; Stop 174
attgatagcaatcagtggagcaaat

SEQ ID NO: 456527 - DNA, 25 bp, Artificial
  probe
  misc_feature (1)..(25): SEQ ID NO: 7021; WAN024C25; Start 15; Stop 39
aatttcagttattgttgcattcctg

SEQ ID NO: 456528 - DNA, 25 bp, Artificial
  probe
  misc_feature (1)..(25): SEQ ID NO: 7021; WAN024C25; Start 151; Stop 175
ttgatagcaatcagtggagcaaatt

SEQ ID NO: 456529 - DNA, 25 bp, Artificial
  probe
  misc_feature (1)..(25): SEQ ID NO: 7021; WAN024C25; Start 158; Stop 182
caatcagtggagcaaatttactatt

SEQ ID NO: 456530 - DNA, 25 bp, Artificial
  probe
  misc_feature (1)..(25): SEQ ID NO: 7021; WAN024C25; Start 14; Stop 38
taatttcagttattgttgcattcct

SEQ ID NO: 456531 - DNA, 25 bp, Artificial
  probe
  misc_feature (1)..(25): SEQ ID NO: 7021; WAN024C25; Start 146; Stop 170
aaatattgatagcaatcagtggagc

SEQ ID NO: 456532 - DNA, 25 bp, Artificial
  probe
  misc_feature (1)..(25): SEQ ID NO: 7021; WAN024C25; Start 53; Stop 77
cagagtatgtcaacaacaggaaaat

SEQ ID NO: 456533 - DNA, 25 bp, Artificial
  probe
  misc_feature (1)..(25): SEQ ID NO: 7021; WAN024C25; Start 52; Stop 76
acagagtatgtcaacaacaggaaaa

SEQ ID NO: 456534 - DNA, 25 bp, Artificial
  probe
  misc_feature (1)..(25): SEQ ID NO: 7021; WAN024C25; Start 55; Stop 79
gagtatgtcaacaacaggaaaattg

SEQ ID NO: 456535 - DNA, 25 bp, Artificial
  probe
  misc_feature (1)..(25): SEQ ID NO: 7021; WAN024C25; Start 162; Stop 186
cagtggagcaaatttactattaagt

SEQ ID NO: 456536 - DNA, 25 bp, Artificial
  probe
  misc_feature (1)..(25): SEQ ID NO: 7021; WAN024C25; Start 54; Stop 78
agagtatgtcaacaacaggaaaatt

SEQ ID NO: 456537 - DNA, 25 bp, Artificial
  probe
  misc_feature (1)..(25): SEQ ID NO: 7021; WAN024C25; Start 144; Stop 168
tgaaatattgatagcaatcagtgga

SEQ ID NO: 456538 - DNA, 25 bp, Artificial
  probe
  misc_feature (1)..(25): SEQ ID NO: 7022; WAN024FVY; Start 173; Stop 197
aagtagatggagtaggtagaggaag

SEQ ID NO: 456539 - DNA, 25 bp, Artificial
  probe
  misc_feature (1)..(25): SEQ ID NO: 7022; WAN024FVY; Start 178; Stop 202
gatggagtaggtagaggaagtgatt

SEQ ID NO: 456540 - DNA, 25 bp, Artificial
  probe
  misc_feature (1)..(25): SEQ ID NO: 7022; WAN024FVY; Start 176; Stop 200
tagatggagtaggtagaggaagtga

SEQ ID NO: 456541 - DNA, 25 bp, Artificial
  probe
  misc_feature (1)..(25): SEQ ID NO: 7022; WAN024FVY; Start 175; Stop 199
gtagatggagtaggtagaggaagtg

SEQ ID NO: 456542 - DNA, 25 bp, Artificial
  probe
  misc_feature (1)..(25): SEQ ID NO: 7022; WAN024FVY; Start 174; Stop 198
agtagatggagtaggtagaggaagt

SEQ ID NO: 456543 - DNA, 25 bp, Artificial
  probe
  misc_feature (1)..(25): SEQ ID NO: 7022; WAN024FVY; Start 185; Stop 209
taggtagaggaagtgattcattgac

SEQ ID NO: 456544 - DNA, 25 bp, Artificial
  probe
  misc_feature (1)..(25): SEQ ID NO: 7022; WAN024FVY; Start 184; Stop 208
gtaggtagaggaagtgattcattga

SEQ ID NO: 456545 - DNA, 25 bp, Artificial
  probe
  misc_feature (1)..(25): SEQ ID NO: 7022; WAN024FVY; Start 183; Stop 207
agtaggtagaggaagtgattcattg

SEQ ID NO: 456546 - DNA, 25 bp, Artificial
  probe
  misc_feature (1)..(25): SEQ ID NO: 7022; WAN024FVY; Start 179; Stop 203
atggagtaggtagaggaagtgattc

SEQ ID NO: 456547 - DNA, 25 bp, Artificial
  probe
  misc_feature (1)..(25): SEQ ID NO: 7022; WAN024FVY; Start 182; Stop 206
gagtaggtagaggaagtgattcatt

SEQ ID NO: 456548 - DNA, 25 bp, Artificial
  probe
  misc_feature (1)..(25): SEQ ID NO: 7022; WAN024FVY; Start 181; Stop 205
ggagtaggtagaggaagtgattcat

SEQ ID NO: 456549 - DNA, 25 bp, Artificial
  probe
  misc_feature (1)..(25): SEQ ID NO: 7022; WAN024FVY; Start 177; Stop 201
agatggagtaggtagaggaagtgat

SEQ ID NO: 456550 - DNA, 25 bp, Artificial
  probe
  misc_feature (1)..(25): SEQ ID NO: 7022; WAN024FVY; Start 180; Stop 204
tggagtaggtagaggaagtgattca

SEQ ID NO: 456551 - DNA, 25 bp, Artificial
  probe
  misc_feature (1)..(25): SEQ ID NO: 7022; WAN024FVY; Start 172; Stop 196
aaagtagatggagtaggtagaggaa

SEQ ID NO: 456552 - DNA, 25 bp, Artificial
  probe
  misc_feature (1)..(25): SEQ ID NO: 7022; WAN024FVY; Start 375; Stop 399
tatatttggtattgtgggttcctca

SEQ ID NO: 456553 - DNA, 25 bp, Artificial
  probe
  misc_feature (1)..(25): SEQ ID NO: 7022; WAN024FVY; Start 219; Stop 243
aattggacgacagttatattgggaa

SEQ ID NO: 456554 - DNA, 25 bp, Artificial
  probe
  misc_feature (1)..(25): SEQ ID NO: 7022; WAN024FVY; Start 376; Stop 400
atatttggtattgtgggttcctcaa

SEQ ID NO: 456555 - DNA, 25 bp, Artificial
  probe
  misc_feature (1)..(25): SEQ ID NO: 7022; WAN024FVY; Start 220; Stop 244
attggacgacagttatattgggaac

SEQ ID NO: 456556 - DNA, 25 bp, Artificial
  probe
  misc_feature (1)..(25): SEQ ID NO: 7022; WAN024FVY; Start 84; Stop 108
gaaagtaatttattggttgctgaca

SEQ ID NO: 456557 - DNA, 25 bp, Artificial
  probe
  misc_feature (1)..(25): SEQ ID NO: 7022; WAN024FVY; Start 83; Stop 107
agaaagtaatttattggttgctgac

SEQ ID NO: 456558 - DNA, 25 bp, Artificial
  probe
  misc_feature (1)..(25): SEQ ID NO: 7022; WAN024FVY; Start 221; Stop 245
ttggacgacagttatattgggaaca

SEQ ID NO: 456559 - DNA, 25 bp, Artificial
  probe
  misc_feature (1)..(25): SEQ ID NO: 7022; WAN024FVY; Start 222; Stop 246
tggacgacagttatattgggaacaa

SEQ ID NO: 456560 - DNA, 25 bp, Artificial
  probe
  misc_feature (1)..(25): SEQ ID NO: 7022; WAN024FVY; Start 374; Stop 398
atatatttggtattgtgggttcctc

SEQ ID NO: 456561 - DNA, 25 bp, Artificial
  probe
  misc_feature (1)..(25): SEQ ID NO: 7022; WAN024FVY; Start 85; Stop 109
aaagtaatttattggttgctgacaa

SEQ ID NO: 456562 - DNA, 25 bp, Artificial
  probe
  misc_feature (1)..(25): SEQ ID NO: 7022; WAN024FVY; Start 65; Stop 89
gtaagattaacggaagaaagaaagt

SEQ ID NO: 456563 - DNA, 25 bp, Artificial
  probe
  misc_feature (1)..(25): SEQ ID NO: 7022; WAN024FVY; Start 82; Stop 106
aagaaagtaatttattggttgctga

SEQ ID NO: 456564 - DNA, 25 bp, Artificial
  probe
  misc_feature (1)..(25): SEQ ID NO: 7022; WAN024FVY; Start 64; Stop 88
agtaagattaacggaagaaagaaag

SEQ ID NO: 456565 - DNA, 25 bp, Artificial
  probe
  misc_feature (1)..(25): SEQ ID NO: 7022; WAN024FVY; Start 380; Stop 404
ttggtattgtgggttcctcaattat

SEQ ID NO: 456566 - DNA, 25 bp, Artificial
  probe
  misc_feature (1)..(25): SEQ ID NO: 7022; WAN024FVY; Start 377; Stop 401
tatttggtattgtgggttcctcaat

SEQ ID NO: 456567 - DNA, 25 bp, Artificial
  probe
  misc_feature (1)..(25): SEQ ID NO: 7022; WAN024FVY; Start 379; Stop 403
tttggtattgtgggttcctcaatta

SEQ ID NO: 456568 - DNA, 25 bp, Artificial
  probe
  misc_feature (1)..(25): SEQ ID NO: 7022; WAN024FVY; Start 224; Stop 248
gacgacagttatattgggaacaatt

SEQ ID NO: 456569 - DNA, 25 bp, Artificial
  probe
  misc_feature (1)..(25): SEQ ID NO: 7022; WAN024FVY; Start 378; Stop 402
atttggtattgtgggttcctcaatt

SEQ ID NO: 456570 - DNA, 25 bp, Artificial
  probe
  misc_feature (1)..(25): SEQ ID NO: 7022; WAN024FVY; Start 223; Stop 247
ggacgacagttatattgggaacaat

SEQ ID NO: 456571 - DNA, 25 bp, Artificial
  probe
  misc_feature (1)..(25): SEQ ID NO: 7023; WAN024FNZ; Start 52; Stop 76
tactaccattattcacacctcattg

SEQ ID NO: 456572 - DNA, 25 bp, Artificial
  probe
  misc_feature (1)..(25): SEQ ID NO: 7023; WAN024FNZ; Start 51; Stop 75
ttactaccattattcacacctcatt

SEQ ID NO: 456573 - DNA, 25 bp, Artificial
  probe
  misc_feature (1)..(25): SEQ ID NO: 7023; WAN024FNZ; Start 49; Stop 73
aattactaccattattcacacctca

SEQ ID NO: 456574 - DNA, 25 bp, Artificial
  probe
  misc_feature (1)..(25): SEQ ID NO: 7023; WAN024FNZ; Start 50; Stop 74
attactaccattattcacacctcat

SEQ ID NO: 456575 - DNA, 25 bp, Artificial
  probe
  misc_feature (1)..(25): SEQ ID NO: 7023; WAN024FNZ; Start 53; Stop 77
actaccattattcacacctcattgg

SEQ ID NO: 456576 - DNA, 25 bp, Artificial
  probe
  misc_feature (1)..(25): SEQ ID NO: 7023; WAN024FNZ; Start 48; Stop 72
aaattactaccattattcacacctc

SEQ ID NO: 456577 - DNA, 25 bp, Artificial
  probe
  misc_feature (1)..(25): SEQ ID NO: 7023; WAN024FNZ; Start 13; Stop 37
ttcatcagttttctcttcaacaagt

SEQ ID NO: 456578 - DNA, 25 bp, Artificial
  probe
  misc_feature (1)..(25): SEQ ID NO: 7023; WAN024FNZ; Start 11; Stop 35
tcttcatcagttttctcttcaacaa

SEQ ID NO: 456579 - DNA, 25 bp, Artificial
  probe
  misc_feature (1)..(25): SEQ ID NO: 7023; WAN024FNZ; Start 10; Stop 34
ttcttcatcagttttctcttcaaca

SEQ ID NO: 456580 - DNA, 25 bp, Artificial
  probe
  misc_feature (1)..(25): SEQ ID NO: 7023; WAN024FNZ; Start 12; Stop 36
cttcatcagttttctcttcaacaag

SEQ ID NO: 456581 - DNA, 25 bp, Artificial
  probe
  misc_feature (1)..(25): SEQ ID NO: 7023; WAN024FNZ; Start 14; Stop 38
tcatcagttttctcttcaacaagta

SEQ ID NO: 456582 - DNA, 25 bp, Artificial
  probe
  misc_feature (1)..(25): SEQ ID NO: 7023; WAN024FNZ; Start 23; Stop 47
ttctcttcaacaagtacatctttaa

SEQ ID NO: 456583 - DNA, 25 bp, Artificial
  probe
  misc_feature (1)..(25): SEQ ID NO: 7023; WAN024FNZ; Start 22; Stop 46
tttctcttcaacaagtacatcttta

SEQ ID NO: 456584 - DNA, 25 bp, Artificial
  probe
  misc_feature (1)..(25): SEQ ID NO: 7023; WAN024FNZ; Start 9; Stop 33
tttcttcatcagttttctcttcaac

SEQ ID NO: 456585 - DNA, 25 bp, Artificial
  probe
  misc_feature (1)..(25): SEQ ID NO: 7023; WAN024FNZ; Start 17; Stop 41
tcagttttctcttcaacaagtacat

SEQ ID NO: 456586 - DNA, 25 bp, Artificial
  probe
  misc_feature (1)..(25): SEQ ID NO: 7023; WAN024FNZ; Start 16; Stop 40
atcagttttctcttcaacaagtaca

SEQ ID NO: 456587 - DNA, 25 bp, Artificial
  probe
  misc_feature (1)..(25): SEQ ID NO: 7023; WAN024FNZ; Start 18; Stop 42
cagttttctcttcaacaagtacatc

SEQ ID NO: 456588 - DNA, 25 bp, Artificial
  probe
  misc_feature (1)..(25): SEQ ID NO: 7023; WAN024FNZ; Start 15; Stop 39
catcagttttctcttcaacaagtac

SEQ ID NO: 456589 - DNA, 25 bp, Artificial
  probe
  misc_feature (1)..(25): SEQ ID NO: 7023; WAN024FNZ; Start 19; Stop 43
agttttctcttcaacaagtacatct

SEQ ID NO: 456590 - DNA, 25 bp, Artificial
  probe
  misc_feature (1)..(25): SEQ ID NO: 7023; WAN024FNZ; Start 8; Stop 32
ttttcttcatcagttttctcttcaa

SEQ ID NO: 456591 - DNA, 25 bp, Artificial
  probe
  misc_feature (1)..(25): SEQ ID NO: 7023; WAN024FNZ; Start 24; Stop 48
tctcttcaacaagtacatctttaaa

SEQ ID NO: 456592 - DNA, 25 bp, Artificial
  probe
  misc_feature (1)..(25): SEQ ID NO: 7023; WAN024FNZ; Start 54; Stop 78
ctaccattattcacacctcattggt

SEQ ID NO: 456593 - DNA, 25 bp, Artificial
  probe
  misc_feature (1)..(25): SEQ ID NO: 7023; WAN024FNZ; Start 20; Stop 44
gttttctcttcaacaagtacatctt

SEQ ID NO: 456594 - DNA, 25 bp, Artificial
  probe
  misc_feature (1)..(25): SEQ ID NO: 7023; WAN024FNZ; Start 21; Stop 45
ttttctcttcaacaagtacatcttt

SEQ ID NO: 456595 - DNA, 25 bp, Artificial
  probe
  misc_feature (1)..(25): SEQ ID NO: 7023; WAN024FNZ; Start 47; Stop 71
aaaattactaccattattcacacct

SEQ ID NO: 456596 - DNA, 25 bp, Artificial
  probe
  misc_feature (1)..(25): SEQ ID NO: 7023; WAN024FNZ; Start 25; Stop 49
ctcttcaacaagtacatctttaaaa

SEQ ID NO: 456597 - DNA, 25 bp, Artificial
  probe
  misc_feature (1)..(25): SEQ ID NO: 7024; WAN024BX8; Start 225; Stop 249
aattgaagatgtggagcaggaagat

SEQ ID NO: 456598 - DNA, 25 bp, Artificial
  probe
  misc_feature (1)..(25): SEQ ID NO: 7024; WAN024BX8; Start 226; Stop 250
attgaagatgtggagcaggaagatg

SEQ ID NO: 456599 - DNA, 25 bp, Artificial
  probe
  misc_feature (1)..(25): SEQ ID NO: 7024; WAN024BX8; Start 31; Stop 55
atcaaacaacttcagaaagaaatgc

SEQ ID NO: 456600 - DNA, 25 bp, Artificial
  probe
  misc_feature (1)..(25): SEQ ID NO: 7024; WAN024BX8; Start 105; Stop 129
agaaactgaaagaagtaaggcaaag

SEQ ID NO: 456601 - DNA, 25 bp, Artificial
  probe
  misc_feature (1)..(25): SEQ ID NO: 7024; WAN024BX8; Start 106; Stop 130
gaaactgaaagaagtaaggcaaagg

SEQ ID NO: 456602 - DNA, 25 bp, Artificial
  probe
  misc_feature (1)..(25): SEQ ID NO: 7024; WAN024BX8; Start 112; Stop 136
gaaagaagtaaggcaaaggctcaaa

SEQ ID NO: 456603 - DNA, 25 bp, Artificial
  probe
  misc_feature (1)..(25): SEQ ID NO: 7024; WAN024BX8; Start 104; Stop 128
cagaaactgaaagaagtaaggcaaa

SEQ ID NO: 456604 - DNA, 25 bp, Artificial
  probe
  misc_feature (1)..(25): SEQ ID NO: 7024; WAN024BX8; Start 99; Stop 123
gatgccagaaactgaaagaagtaag

SEQ ID NO: 456605 - DNA, 25 bp, Artificial
  probe
  misc_feature (1)..(25): SEQ ID NO: 7024; WAN024BX8; Start 113; Stop 137
aaagaagtaaggcaaaggctcaaac

SEQ ID NO: 456606 - DNA, 25 bp, Artificial
  probe
  misc_feature (1)..(25): SEQ ID NO: 7024; WAN024BX8; Start 98; Stop 122
tgatgccagaaactgaaagaagtaa

SEQ ID NO: 456607 - DNA, 25 bp, Artificial
  probe
  misc_feature (1)..(25): SEQ ID NO: 7024; WAN024BX8; Start 97; Stop 121
ttgatgccagaaactgaaagaagta

SEQ ID NO: 456608 - DNA, 25 bp, Artificial
  probe
  misc_feature (1)..(25): SEQ ID NO: 7024; WAN024BX8; Start 116; Stop 140
gaagtaaggcaaaggctcaaacaat

SEQ ID NO: 456609 - DNA, 25 bp, Artificial
  probe
  misc_feature (1)..(25): SEQ ID NO: 7024; WAN024BX8; Start 100; Stop 124
atgccagaaactgaaagaagtaagg

SEQ ID NO: 456610 - DNA, 25 bp, Artificial
  probe
  misc_feature (1)..(25): SEQ ID NO: 7024; WAN024BX8; Start 117; Stop 141
aagtaaggcaaaggctcaaacaatg

SEQ ID NO: 456611 - DNA, 25 bp, Artificial
  probe
  misc_feature (1)..(25): SEQ ID NO: 7024; WAN024BX8; Start 227; Stop 251
ttgaagatgtggagcaggaagatga

SEQ ID NO: 456612 - DNA, 25 bp, Artificial
  probe
  misc_feature (1)..(25): SEQ ID NO: 7024; WAN024BX8; Start 103; Stop 127
ccagaaactgaaagaagtaaggcaa

SEQ ID NO: 456613 - DNA, 25 bp, Artificial
  probe
  misc_feature (1)..(25): SEQ ID NO: 7024; WAN024BX8; Start 224; Stop 248
aaattgaagatgtggagcaggaaga

SEQ ID NO: 456614 - DNA, 25 bp, Artificial
  probe
  misc_feature (1)..(25): SEQ ID NO: 7024; WAN024BX8; Start 107; Stop 131
aaactgaaagaagtaaggcaaaggc

SEQ ID NO: 456615 - DNA, 25 bp, Artificial
  probe
  misc_feature (1)..(25): SEQ ID NO: 7024; WAN024BX8; Start 71; Stop 95
cctttctagctctacaagatatggg

SEQ ID NO: 456616 - DNA, 25 bp, Artificial
  probe
  misc_feature (1)..(25): SEQ ID NO: 7024; WAN024BX8; Start 69; Stop 93
tgcctttctagctctacaagatatg

SEQ ID NO: 456617 - DNA, 25 bp, Artificial
  probe
  misc_feature (1)..(25): SEQ ID NO: 7024; WAN024BX8; Start 96; Stop 120
cttgatgccagaaactgaaagaagt

SEQ ID NO: 456618 - DNA, 25 bp, Artificial
  probe
  misc_feature (1)..(25): SEQ ID NO: 7024; WAN024BX8; Start 72; Stop 96
ctttctagctctacaagatatgggc

SEQ ID NO: 456619 - DNA, 25 bp, Artificial
  probe
  misc_feature (1)..(25): SEQ ID NO: 7024; WAN024BX8; Start 70; Stop 94
gcctttctagctctacaagatatgg

SEQ ID NO: 456620 - DNA, 25 bp, Artificial
  probe
  misc_feature (1)..(25): SEQ ID NO: 7024; WAN024BX8; Start 201; Stop 225
gaaacgtctaaatagcgaagtgaaa

SEQ ID NO: 456621 - DNA, 25 bp, Artificial
  probe
  misc_feature (1)..(25): SEQ ID NO: 7024; WAN024BX8; Start 68; Stop 92
ttgcctttctagctctacaagatat

SEQ ID NO: 456622 - DNA, 25 bp, Artificial
  probe
  misc_feature (1)..(25): SEQ ID NO: 7024; WAN024BX8; Start 199; Stop 223
atgaaacgtctaaatagcgaagtga

SEQ ID NO: 456623 - DNA, 25 bp, Artificial
  probe
  misc_feature (1)..(25): SEQ ID NO: 7024; WAN024BX8; Start 198; Stop 222
catgaaacgtctaaatagcgaagtg

SEQ ID NO: 456624 - DNA, 25 bp, Artificial
  probe
  misc_feature (1)..(25): SEQ ID NO: 7024; WAN024BX8; Start 200; Stop 224
tgaaacgtctaaatagcgaagtgaa

SEQ ID NO: 456625 - DNA, 25 bp, Artificial
  probe
  misc_feature (1)..(25): SEQ ID NO: 7024; WAN024BX8; Start 33; Stop 57
caaacaacttcagaaagaaatgcac

SEQ ID NO: 456626 - DNA, 25 bp, Artificial
  probe
  misc_feature (1)..(25): SEQ ID NO: 7024; WAN024BX8; Start 32; Stop 56
tcaaacaacttcagaaagaaatgca

SEQ ID NO: 456627 - DNA, 25 bp, Artificial
  probe
  misc_feature (1)..(25): SEQ ID NO: 7024; WAN024BX8; Start 191; Stop 215
atgaagccatgaaacgtctaaatag

SEQ ID NO: 456628 - DNA, 25 bp, Artificial
  probe
  misc_feature (1)..(25): SEQ ID NO: 7024; WAN024BX8; Start 190; Stop 214
gatgaagccatgaaacgtctaaata

SEQ ID NO: 456629 - DNA, 25 bp, Artificial
  probe
  misc_feature (1)..(25): SEQ ID NO: 7024; WAN024BX8; Start 115; Stop 139
agaagtaaggcaaaggctcaaacaa

SEQ ID NO: 456630 - DNA, 25 bp, Artificial
  probe
  misc_feature (1)..(25): SEQ ID NO: 7025; WAN024DS3; Start 863; Stop 887
gaggaattgacttagaacgaacgaa

SEQ ID NO: 456631 - DNA, 25 bp, Artificial
  probe
  misc_feature (1)..(25): SEQ ID NO: 7025; WAN024DS3; Start 664; Stop 688
ttgaacacttatatgcttactcgtt

SEQ ID NO: 456632 - DNA, 25 bp, Artificial
  probe
  misc_feature (1)..(25): SEQ ID NO: 7025; WAN024DS3; Start 955; Stop 979
gagcaacatatcaatactgtagagc

SEQ ID NO: 456633 - DNA, 25 bp, Artificial
  probe
  misc_feature (1)..(25): SEQ ID NO: 7025; WAN024DS3; Start 375; Stop 399
aacgaagctagatgaattggtagac

SEQ ID NO: 456634 - DNA, 25 bp, Artificial
  probe
  misc_feature (1)..(25): SEQ ID NO: 7025; WAN024DS3; Start 954; Stop 978
agagcaacatatcaatactgtagag

SEQ ID NO: 456635 - DNA, 25 bp, Artificial
  probe
  misc_feature (1)..(25): SEQ ID NO: 7025; WAN024DS3; Start 377; Stop 401
cgaagctagatgaattggtagacaa

SEQ ID NO: 456636 - DNA, 25 bp, Artificial
  probe
  misc_feature (1)..(25): SEQ ID NO: 7025; WAN024DS3; Start 376; Stop 400
acgaagctagatgaattggtagaca

SEQ ID NO: 456637 - DNA, 25 bp, Artificial
  probe
  misc_feature (1)..(25): SEQ ID NO: 7025; WAN024DS3; Start 864; Stop 888
aggaattgacttagaacgaacgaaa

SEQ ID NO: 456638 - DNA, 25 bp, Artificial
  probe
  misc_feature (1)..(25): SEQ ID NO: 7025; WAN024DS3; Start 862; Stop 886
cgaggaattgacttagaacgaacga

SEQ ID NO: 456639 - DNA, 25 bp, Artificial
  probe
  misc_feature (1)..(25): SEQ ID NO: 7025; WAN024DS3; Start 953; Stop 977
aagagcaacatatcaatactgtaga

SEQ ID NO: 456640 - DNA, 25 bp, Artificial
  probe
  misc_feature (1)..(25): SEQ ID NO: 7025; WAN024DS3; Start 865; Stop 889
ggaattgacttagaacgaacgaaag

SEQ ID NO: 456641 - DNA, 25 bp, Artificial
  probe
  misc_feature (1)..(25): SEQ ID NO: 7025; WAN024DS3; Start 663; Stop 687
tttgaacacttatatgcttactcgt

SEQ ID NO: 456642 - DNA, 25 bp, Artificial
  probe
  misc_feature (1)..(25): SEQ ID NO: 7025; WAN024DS3; Start 152; Stop 176
agatggcaaatgaaagtcagataga

SEQ ID NO: 456643 - DNA, 25 bp, Artificial
  probe
  misc_feature (1)..(25): SEQ ID NO: 7025; WAN024DS3; Start 199; Stop 223
gctatcgttagtttgtctggttata

SEQ ID NO: 456644 - DNA, 25 bp, Artificial
  probe
  misc_feature (1)..(25): SEQ ID NO: 7025; WAN024DS3; Start 148; Stop 172
tctaagatggcaaatgaaagtcaga

SEQ ID NO: 456645 - DNA, 25 bp, Artificial
  probe
  misc_feature (1)..(25): SEQ ID NO: 7025; WAN024DS3; Start 866; Stop 890
gaattgacttagaacgaacgaaagc

SEQ ID NO: 456646 - DNA, 25 bp, Artificial
  probe
  misc_feature (1)..(25): SEQ ID NO: 7025; WAN024DS3; Start 154; Stop 178
atggcaaatgaaagtcagatagaac

SEQ ID NO: 456647 - DNA, 25 bp, Artificial
  probe
  misc_feature (1)..(25): SEQ ID NO: 7025; WAN024DS3; Start 147; Stop 171
ttctaagatggcaaatgaaagtcag

SEQ ID NO: 456648 - DNA, 25 bp, Artificial
  probe
  misc_feature (1)..(25): SEQ ID NO: 7025; WAN024DS3; Start 146; Stop 170
cttctaagatggcaaatgaaagtca

SEQ ID NO: 456649 - DNA, 25 bp, Artificial
  probe
  misc_feature (1)..(25): SEQ ID NO: 7025; WAN024DS3; Start 916; Stop 940
acaggattattagatgacatcaaga

SEQ ID NO: 456650 - DNA, 25 bp, Artificial
  probe
  misc_feature (1)..(25): SEQ ID NO: 7025; WAN024DS3; Start 290; Stop 314
ctaagggaattgtagaagagtaccg

SEQ ID NO: 456651 - DNA, 25 bp, Artificial
  probe
  misc_feature (1)..(25): SEQ ID NO: 7025; WAN024DS3; Start 153; Stop 177
gatggcaaatgaaagtcagatagaa

SEQ ID NO: 456652 - DNA, 25 bp, Artificial
  probe
  misc_feature (1)..(25): SEQ ID NO: 7025; WAN024DS3; Start 151; Stop 175
aagatggcaaatgaaagtcagatag

SEQ ID NO: 456653 - DNA, 25 bp, Artificial
  probe
  misc_feature (1)..(25): SEQ ID NO: 7025; WAN024DS3; Start 149; Stop 173
ctaagatggcaaatgaaagtcagat

SEQ ID NO: 456654 - DNA, 25 bp, Artificial
  probe
  misc_feature (1)..(25): SEQ ID NO: 7025; WAN024DS3; Start 827; Stop 851
aggagatagaagctctagtcgttaa

SEQ ID NO: 456655 - DNA, 25 bp, Artificial
  probe
  misc_feature (1)..(25): SEQ ID NO: 7025; WAN024DS3; Start 289; Stop 313
gctaagggaattgtagaagagtacc

SEQ ID NO: 456656 - DNA, 25 bp, Artificial
  probe
  misc_feature (1)..(25): SEQ ID NO: 7025; WAN024DS3; Start 476; Stop 500
tacagggagatgattcttcagtagg

SEQ ID NO: 456657 - DNA, 25 bp, Artificial
  probe
  misc_feature (1)..(25): SEQ ID NO: 7025; WAN024DS3; Start 733; Stop 757
agagaatccaaagaatctgtagaga

SEQ ID NO: 456658 - DNA, 25 bp, Artificial
  probe
  misc_feature (1)..(25): SEQ ID NO: 7025; WAN024DS3; Start 826; Stop 850
caggagatagaagctctagtcgtta

SEQ ID NO: 456659 - DNA, 25 bp, Artificial
  probe
  misc_feature (1)..(25): SEQ ID NO: 7025; WAN024DS3; Start 665; Stop 689
tgaacacttatatgcttactcgttt

SEQ ID NO: 456660 - DNA, 25 bp, Artificial
  probe
  misc_feature (1)..(25): SEQ ID NO: 7025; WAN024DS3; Start 141; Stop 165
cacttcttctaagatggcaaatgaa

SEQ ID NO: 456661 - DNA, 25 bp, Artificial
  probe
  misc_feature (1)..(25): SEQ ID NO: 7025; WAN024DS3; Start 662; Stop 686
ctttgaacacttatatgcttactcg

SEQ ID NO: 456662 - DNA, 25 bp, Artificial
  probe
  misc_feature (1)..(25): SEQ ID NO: 7025; WAN024DS3; Start 145; Stop 169
tcttctaagatggcaaatgaaagtc

SEQ ID NO: 456663 - DNA, 25 bp, Artificial
  probe
  misc_feature (1)..(25): SEQ ID NO: 7026; WAN024BWT; Start 273; Stop 297
gacttatgatgctatgttgatgacg

SEQ ID NO: 456664 - DNA, 25 bp, Artificial
  probe
  misc_feature (1)..(25): SEQ ID NO: 7026; WAN024BWT; Start 721; Stop 745
acggtgcttcctatgtatatgttac

SEQ ID NO: 456665 - DNA, 25 bp, Artificial
  probe
  misc_feature (1)..(25): SEQ ID NO: 7026; WAN024BWT; Start 714; Stop 738
cttgataacggtgcttcctatgtat

SEQ ID NO: 456666 - DNA, 25 bp, Artificial
  probe
  misc_feature (1)..(25): SEQ ID NO: 7026; WAN024BWT; Start 715; Stop 739
ttgataacggtgcttcctatgtata

SEQ ID NO: 456667 - DNA, 25 bp, Artificial
  probe
  misc_feature (1)..(25): SEQ ID NO: 7026; WAN024BWT; Start 718; Stop 742
ataacggtgcttcctatgtatatgt

SEQ ID NO: 456668 - DNA, 25 bp, Artificial
  probe
  misc_feature (1)..(25): SEQ ID NO: 7026; WAN024BWT; Start 716; Stop 740
tgataacggtgcttcctatgtatat

SEQ ID NO: 456669 - DNA, 25 bp, Artificial
  probe
  misc_feature (1)..(25): SEQ ID NO: 7026; WAN024BWT; Start 717; Stop 741
gataacggtgcttcctatgtatatg

SEQ ID NO: 456670 - DNA, 25 bp, Artificial
  probe
  misc_feature (1)..(25): SEQ ID NO: 7026; WAN024BWT; Start 720; Stop 744
aacggtgcttcctatgtatatgtta

SEQ ID NO: 456671 - DNA, 25 bp, Artificial
  probe
  misc_feature (1)..(25): SEQ ID NO: 7026; WAN024BWT; Start 719; Stop 743
taacggtgcttcctatgtatatgtt

SEQ ID NO: 456672 - DNA, 25 bp, Artificial
  probe
  misc_feature (1)..(25): SEQ ID NO: 7026; WAN024BWT; Start 411; Stop 435
tgtcttgatgttattgattcctctg

SEQ ID NO: 456673 - DNA, 25 bp, Artificial
  probe
  misc_feature (1)..(25): SEQ ID NO: 7026; WAN024BWT; Start 272; Stop 296
agacttatgatgctatgttgatgac

SEQ ID NO: 456674 - DNA, 25 bp, Artificial
  probe
  misc_feature (1)..(25): SEQ ID NO: 7026; WAN024BWT; Start 713; Stop 737
tcttgataacggtgcttcctatgta

SEQ ID NO: 456675 - DNA, 25 bp, Artificial
  probe
  misc_feature (1)..(25): SEQ ID NO: 7026; WAN024BWT; Start 412; Stop 436
gtcttgatgttattgattcctctga

SEQ ID NO: 456676 - DNA, 25 bp, Artificial
  probe
  misc_feature (1)..(25): SEQ ID NO: 7026; WAN024BWT; Start 274; Stop 298
acttatgatgctatgttgatgacgc

SEQ ID NO: 456677 - DNA, 25 bp, Artificial
  probe
  misc_feature (1)..(25): SEQ ID NO: 7026; WAN024BWT; Start 684; Stop 708
tcatcttatctggttgatagccttg

SEQ ID NO: 456678 - DNA, 25 bp, Artificial
  probe
  misc_feature (1)..(25): SEQ ID NO: 7026; WAN024BWT; Start 682; Stop 706
cttcatcttatctggttgatagcct

SEQ ID NO: 456679 - DNA, 25 bp, Artificial
  probe
  misc_feature (1)..(25): SEQ ID NO: 7026; WAN024BWT; Start 681; Stop 705
tcttcatcttatctggttgatagcc

SEQ ID NO: 456680 - DNA, 25 bp, Artificial
  probe
  misc_feature (1)..(25): SEQ ID NO: 7026; WAN024BWT; Start 683; Stop 707
ttcatcttatctggttgatagcctt

SEQ ID NO: 456681 - DNA, 25 bp, Artificial
  probe
  misc_feature (1)..(25): SEQ ID NO: 7026; WAN024BWT; Start 271; Stop 295
aagacttatgatgctatgttgatga

SEQ ID NO: 456682 - DNA, 25 bp, Artificial
  probe
  misc_feature (1)..(25): SEQ ID NO: 7026; WAN024BWT; Start 410; Stop 434
atgtcttgatgttattgattcctct

SEQ ID NO: 456683 - DNA, 25 bp, Artificial
  probe
  misc_feature (1)..(25): SEQ ID NO: 7026; WAN024BWT; Start 275; Stop 299
cttatgatgctatgttgatgacgcc

SEQ ID NO: 456684 - DNA, 25 bp, Artificial
  probe
  misc_feature (1)..(25): SEQ ID NO: 7026; WAN024BWT; Start 685; Stop 709
catcttatctggttgatagccttgg

SEQ ID NO: 456685 - DNA, 25 bp, Artificial
  probe
  misc_feature (1)..(25): SEQ ID NO: 7026; WAN024BWT; Start 413; Stop 437
tcttgatgttattgattcctctgat

SEQ ID NO: 456686 - DNA, 25 bp, Artificial
  probe
  misc_feature (1)..(25): SEQ ID NO: 7026; WAN024BWT; Start 712; Stop 736
ctcttgataacggtgcttcctatgt

SEQ ID NO: 456687 - DNA, 25 bp, Artificial
  probe
  misc_feature (1)..(25): SEQ ID NO: 7026; WAN024BWT; Start 680; Stop 704
atcttcatcttatctggttgatagc

SEQ ID NO: 456688 - DNA, 25 bp, Artificial
  probe
  misc_feature (1)..(25): SEQ ID NO: 7026; WAN024BWT; Start 276; Stop 300
ttatgatgctatgttgatgacgcca

SEQ ID NO: 456689 - DNA, 25 bp, Artificial
  probe
  misc_feature (1)..(25): SEQ ID NO: 7026; WAN024BWT; Start 409; Stop 433
catgtcttgatgttattgattcctc

SEQ ID NO: 456690 - DNA, 25 bp, Artificial
  probe
  misc_feature (1)..(25): SEQ ID NO: 7026; WAN024BWT; Start 561; Stop 585
taccttctttcccattacttccttg

SEQ ID NO: 456691 - DNA, 25 bp, Artificial
  probe
  misc_feature (1)..(25): SEQ ID NO: 7026; WAN024BWT; Start 559; Stop 583
gataccttctttcccattacttcct

SEQ ID NO: 456692 - DNA, 25 bp, Artificial
  probe
  misc_feature (1)..(25): SEQ ID NO: 7026; WAN024BWT; Start 591; Stop 615
aatacttggtgatttgacttggttt

SEQ ID NO: 456693 - DNA, 25 bp, Artificial
  probe
  misc_feature (1)..(25): SEQ ID NO: 7026; WAN024BWT; Start 560; Stop 584
ataccttctttcccattacttcctt

SEQ ID NO: 456694 - DNA, 25 bp, Artificial
  probe
  misc_feature (1)..(25): SEQ ID NO: 7026; WAN024BWT; Start 445; Stop 469
atagtgggttatttgtttggtgttt

SEQ ID NO: 456695 - DNA, 25 bp, Artificial
  probe
  misc_feature (1)..(25): SEQ ID NO: 7026; WAN024BWT; Start 408; Stop 432
tcatgtcttgatgttattgattcct

SEQ ID NO: 456696 - DNA, 25 bp, Artificial
  probe
  misc_feature (1)..(25): SEQ ID NO: 7027; WAN024BRR; Start 710; Stop 734
atcttactgtaggctatcggttgaa

SEQ ID NO: 456697 - DNA, 25 bp, Artificial
  probe
  misc_feature (1)..(25): SEQ ID NO: 7027; WAN024BRR; Start 709; Stop 733
aatcttactgtaggctatcggttga

SEQ ID NO: 456698 - DNA, 25 bp, Artificial
  probe
  misc_feature (1)..(25): SEQ ID NO: 7027; WAN024BRR; Start 306; Stop 330
aatggaagaggatacaagtattgct

SEQ ID NO: 456699 - DNA, 25 bp, Artificial
  probe
  misc_feature (1)..(25): SEQ ID NO: 7027; WAN024BRR; Start 713; Stop 737
ttactgtaggctatcggttgaagag

SEQ ID NO: 456700 - DNA, 25 bp, Artificial
  probe
  misc_feature (1)..(25): SEQ ID NO: 7027; WAN024BRR; Start 309; Stop 333
ggaagaggatacaagtattgctagt

SEQ ID NO: 456701 - DNA, 25 bp, Artificial
  probe
  misc_feature (1)..(25): SEQ ID NO: 7027; WAN024BRR; Start 308; Stop 332
tggaagaggatacaagtattgctag

SEQ ID NO: 456702 - DNA, 25 bp, Artificial
  probe
  misc_feature (1)..(25): SEQ ID NO: 7027; WAN024BRR; Start 290; Stop 314
aagaactactgtctctaatggaaga

SEQ ID NO: 456703 - DNA, 25 bp, Artificial
  probe
  misc_feature (1)..(25): SEQ ID NO: 7027; WAN024BRR; Start 288; Stop 312
agaagaactactgtctctaatggaa

SEQ ID NO: 456704 - DNA, 25 bp, Artificial
  probe
  misc_feature (1)..(25): SEQ ID NO: 7027; WAN024BRR; Start 307; Stop 331
atggaagaggatacaagtattgcta

SEQ ID NO: 456705 - DNA, 25 bp, Artificial
  probe
  misc_feature (1)..(25): SEQ ID NO: 7027; WAN024BRR; Start 712; Stop 736
cttactgtaggctatcggttgaaga

SEQ ID NO: 456706 - DNA, 25 bp, Artificial
  probe
  misc_feature (1)..(25): SEQ ID NO: 7027; WAN024BRR; Start 711; Stop 735
tcttactgtaggctatcggttgaag

SEQ ID NO: 456707 - DNA, 25 bp, Artificial
  probe
  misc_feature (1)..(25): SEQ ID NO: 7027; WAN024BRR; Start 289; Stop 313
gaagaactactgtctctaatggaag

SEQ ID NO: 456708 - DNA, 25 bp, Artificial
  probe
  misc_feature (1)..(25): SEQ ID NO: 7027; WAN024BRR; Start 56; Stop 80
tagtcaatctcctcatccagtccat

SEQ ID NO: 456709 - DNA, 25 bp, Artificial
  probe
  misc_feature (1)..(25): SEQ ID NO: 7027; WAN024BRR; Start 305; Stop 329
taatggaagaggatacaagtattgc

SEQ ID NO: 456710 - DNA, 25 bp, Artificial
  probe
  misc_feature (1)..(25): SEQ ID NO: 7027; WAN024BRR; Start 714; Stop 738
tactgtaggctatcggttgaagaga

SEQ ID NO: 456711 - DNA, 25 bp, Artificial
  probe
  misc_feature (1)..(25): SEQ ID NO: 7027; WAN024BRR; Start 214; Stop 238
caagttactgaagagcgagtcattg

SEQ ID NO: 456712 - DNA, 25 bp, Artificial
  probe
  misc_feature (1)..(25): SEQ ID NO: 7027; WAN024BRR; Start 315; Stop 339
ggatacaagtattgctagtattgcc

SEQ ID NO: 456713 - DNA, 25 bp, Artificial
  probe
  misc_feature (1)..(25): SEQ ID NO: 7027; WAN024BRR; Start 552; Stop 576
agaggatgatatgttccaacctatc

SEQ ID NO: 456714 - DNA, 25 bp, Artificial
  probe
  misc_feature (1)..(25): SEQ ID NO: 7027; WAN024BRR; Start 44; Stop 68
ctaatcagcaggtagtcaatctcct

SEQ ID NO: 456715 - DNA, 25 bp, Artificial
  probe
  misc_feature (1)..(25): SEQ ID NO: 7027; WAN024BRR; Start 45; Stop 69
taatcagcaggtagtcaatctcctc

SEQ ID NO: 456716 - DNA, 25 bp, Artificial
  probe
  misc_feature (1)..(25): SEQ ID NO: 7027; WAN024BRR; Start 216; Stop 240
agttactgaagagcgagtcattgtt

SEQ ID NO: 456717 - DNA, 25 bp, Artificial
  probe
  misc_feature (1)..(25): SEQ ID NO: 7027; WAN024BRR; Start 215; Stop 239
aagttactgaagagcgagtcattgt

SEQ ID NO: 456718 - DNA, 25 bp, Artificial
  probe
  misc_feature (1)..(25): SEQ ID NO: 7027; WAN024BRR; Start 213; Stop 237
acaagttactgaagagcgagtcatt

SEQ ID NO: 456719 - DNA, 25 bp, Artificial
  probe
  misc_feature (1)..(25): SEQ ID NO: 7027; WAN024BRR; Start 212; Stop 236
aacaagttactgaagagcgagtcat

SEQ ID NO: 456720 - DNA, 25 bp, Artificial
  probe
  misc_feature (1)..(25): SEQ ID NO: 7027; WAN024BRR; Start 314; Stop 338
aggatacaagtattgctagtattgc

SEQ ID NO: 456721 - DNA, 25 bp, Artificial
  probe
  misc_feature (1)..(25): SEQ ID NO: 7027; WAN024BRR; Start 343; Stop 367
tcacaaatatctggagggaatacac

SEQ ID NO: 456722 - DNA, 25 bp, Artificial
  probe
  misc_feature (1)..(25): SEQ ID NO: 7027; WAN024BRR; Start 342; Stop 366
gtcacaaatatctggagggaataca

SEQ ID NO: 456723 - DNA, 25 bp, Artificial
  probe
  misc_feature (1)..(25): SEQ ID NO: 7027; WAN024BRR; Start 708; Stop 732
aaatcttactgtaggctatcggttg

SEQ ID NO: 456724 - DNA, 25 bp, Artificial
  probe
  misc_feature (1)..(25): SEQ ID NO: 7027; WAN024BRR; Start 721; Stop 745
ggctatcggttgaagagaaagatta

SEQ ID NO: 456725 - DNA, 25 bp, Artificial
  probe
  misc_feature (1)..(25): SEQ ID NO: 7027; WAN024BRR; Start 550; Stop 574
ttagaggatgatatgttccaaccta

SEQ ID NO: 456726 - DNA, 25 bp, Artificial
  probe
  misc_feature (1)..(25): SEQ ID NO: 7027; WAN024BRR; Start 341; Stop 365
tgtcacaaatatctggagggaatac

SEQ ID NO: 456727 - DNA, 25 bp, Artificial
  probe
  misc_feature (1)..(25): SEQ ID NO: 7027; WAN024BRR; Start 340; Stop 364
ctgtcacaaatatctggagggaata

SEQ ID NO: 456728 - DNA, 25 bp, Artificial
  probe
  misc_feature (1)..(25): SEQ ID NO: 7027; WAN024BRR; Start 551; Stop 575
tagaggatgatatgttccaacctat

SEQ ID NO: 456729 - DNA, 25 bp, Artificial
  probe
  misc_feature (1)..(25): SEQ ID NO: 7028; WAN024BHI; Start 156; Stop 180
aacagaagcaacttatagagaagaa

SEQ ID NO: 456730 - DNA, 25 bp, Artificial
  probe
  misc_feature (1)..(25): SEQ ID NO: 7028; WAN024BHI; Start 193; Stop 217
acattaaaggaagccaagaatcaac

SEQ ID NO: 456731 - DNA, 25 bp, Artificial
  probe
  misc_feature (1)..(25): SEQ ID NO: 7028; WAN024BHI; Start 192; Stop 216
cacattaaaggaagccaagaatcaa

SEQ ID NO: 456732 - DNA, 25 bp, Artificial
  probe
  misc_feature (1)..(25): SEQ ID NO: 7028; WAN024BHI; Start 194; Stop 218
cattaaaggaagccaagaatcaact

SEQ ID NO: 456733 - DNA, 25 bp, Artificial
  probe
  misc_feature (1)..(25): SEQ ID NO: 7028; WAN024BHI; Start 190; Stop 214
gacacattaaaggaagccaagaatc

SEQ ID NO: 456734 - DNA, 25 bp, Artificial
  probe
  misc_feature (1)..(25): SEQ ID NO: 7028; WAN024BHI; Start 169; Stop 193
tatagagaagaaactttggacgaca

SEQ ID NO: 456735 - DNA, 25 bp, Artificial
  probe
  misc_feature (1)..(25): SEQ ID NO: 7028; WAN024BHI; Start 191; Stop 215
acacattaaaggaagccaagaatca

SEQ ID NO: 456736 - DNA, 25 bp, Artificial
  probe
  misc_feature (1)..(25): SEQ ID NO: 7028; WAN024BHI; Start 174; Stop 198
agaagaaactttggacgacacatta

SEQ ID NO: 456737 - DNA, 25 bp, Artificial
  probe
  misc_feature (1)..(25): SEQ ID NO: 7028; WAN024BHI; Start 170; Stop 194
atagagaagaaactttggacgacac

SEQ ID NO: 456738 - DNA, 25 bp, Artificial
  probe
  misc_feature (1)..(25): SEQ ID NO: 7028; WAN024BHI; Start 195; Stop 219
attaaaggaagccaagaatcaactt

SEQ ID NO: 456739 - DNA, 25 bp, Artificial
  probe
  misc_feature (1)..(25): SEQ ID NO: 7028; WAN024BHI; Start 168; Stop 192
ttatagagaagaaactttggacgac

SEQ ID NO: 456740 - DNA, 25 bp, Artificial
  probe
  misc_feature (1)..(25): SEQ ID NO: 7028; WAN024BHI; Start 166; Stop 190
acttatagagaagaaactttggacg

SEQ ID NO: 456741 - DNA, 25 bp, Artificial
  probe
  misc_feature (1)..(25): SEQ ID NO: 7028; WAN024BHI; Start 234; Stop 258
ggagaagaatttagagaggtttagg

SEQ ID NO: 456742 - DNA, 25 bp, Artificial
  probe
  misc_feature (1)..(25): SEQ ID NO: 7028; WAN024BHI; Start 167; Stop 191
cttatagagaagaaactttggacga

SEQ ID NO: 456743 - DNA, 25 bp, Artificial
  probe
  misc_feature (1)..(25): SEQ ID NO: 7028; WAN024BHI; Start 189; Stop 213
cgacacattaaaggaagccaagaat

SEQ ID NO: 456744 - DNA, 25 bp, Artificial
  probe
  misc_feature (1)..(25): SEQ ID NO: 7028; WAN024BHI; Start 173; Stop 197
gagaagaaactttggacgacacatt

SEQ ID NO: 456745 - DNA, 25 bp, Artificial
  probe
  misc_feature (1)..(25): SEQ ID NO: 7028; WAN024BHI; Start 171; Stop 195
tagagaagaaactttggacgacaca

SEQ ID NO: 456746 - DNA, 25 bp, Artificial
  probe
  misc_feature (1)..(25): SEQ ID NO: 7028; WAN024BHI; Start 130; Stop 154
ccagatcaaggatcagaacaactaa

SEQ ID NO: 456747 - DNA, 25 bp, Artificial
  probe
  misc_feature (1)..(25): SEQ ID NO: 7028; WAN024BHI; Start 163; Stop 187
gcaacttatagagaagaaactttgg

SEQ ID NO: 456748 - DNA, 25 bp, Artificial
  probe
  misc_feature (1)..(25): SEQ ID NO: 7028; WAN024BHI; Start 157; Stop 181
acagaagcaacttatagagaagaaa

SEQ ID NO: 456749 - DNA, 25 bp, Artificial
  probe
  misc_feature (1)..(25): SEQ ID NO: 7028; WAN024BHI; Start 155; Stop 179
aaacagaagcaacttatagagaaga

SEQ ID NO: 456750 - DNA, 25 bp, Artificial
  probe
  misc_feature (1)..(25): SEQ ID NO: 7028; WAN024BHI; Start 231; Stop 255
attggagaagaatttagagaggttt

SEQ ID NO: 456751 - DNA, 25 bp, Artificial
  probe
  misc_feature (1)..(25): SEQ ID NO: 7028; WAN024BHI; Start 129; Stop 153
tccagatcaaggatcagaacaacta

SEQ ID NO: 456752 - DNA, 25 bp, Artificial
  probe
  misc_feature (1)..(25): SEQ ID NO: 7028; WAN024BHI; Start 158; Stop 182
cagaagcaacttatagagaagaaac

SEQ ID NO: 456753 - DNA, 25 bp, Artificial
  probe
  misc_feature (1)..(25): SEQ ID NO: 7028; WAN024BHI; Start 233; Stop 257
tggagaagaatttagagaggtttag

SEQ ID NO: 456754 - DNA, 25 bp, Artificial
  probe
  misc_feature (1)..(25): SEQ ID NO: 7028; WAN024BHI; Start 200; Stop 224
aggaagccaagaatcaacttcatat

SEQ ID NO: 456755 - DNA, 25 bp, Artificial
  probe
  misc_feature (1)..(25): SEQ ID NO: 7028; WAN024BHI; Start 159; Stop 183
agaagcaacttatagagaagaaact

SEQ ID NO: 456756 - DNA, 25 bp, Artificial
  probe
  misc_feature (1)..(25): SEQ ID NO: 7028; WAN024BHI; Start 199; Stop 223
aaggaagccaagaatcaacttcata

SEQ ID NO: 456757 - DNA, 25 bp, Artificial
  probe
  misc_feature (1)..(25): SEQ ID NO: 7028; WAN024BHI; Start 172; Stop 196
agagaagaaactttggacgacacat

SEQ ID NO: 456758 - DNA, 25 bp, Artificial
  probe
  misc_feature (1)..(25): SEQ ID NO: 7028; WAN024BHI; Start 235; Stop 259
gagaagaatttagagaggtttagga

SEQ ID NO: 456759 - DNA, 25 bp, Artificial
  probe
  misc_feature (1)..(25): SEQ ID NO: 7028; WAN024BHI; Start 65; Stop 89
gactatctgatatgtctatccaaga

SEQ ID NO: 456760 - DNA, 25 bp, Artificial
  probe
  misc_feature (1)..(25): SEQ ID NO: 7028; WAN024BHI; Start 214; Stop 238
caacttcatatggaacaattggaga

SEQ ID NO: 456761 - DNA, 25 bp, Artificial
  probe
  misc_feature (1)..(25): SEQ ID NO: 7028; WAN024BHI; Start 213; Stop 237
tcaacttcatatggaacaattggag

SEQ ID NO: 456762 - DNA, 25 bp, Artificial
  probe
  misc_feature (1)..(25): SEQ ID NO: 7029; WAN024CVZ; Start 514; Stop 538
aatgttctatgtagtcgtggttctg

SEQ ID NO: 456763 - DNA, 25 bp, Artificial
  probe
  misc_feature (1)..(25): SEQ ID NO: 7029; WAN024CVZ; Start 513; Stop 537
caatgttctatgtagtcgtggttct

SEQ ID NO: 456764 - DNA, 25 bp, Artificial
  probe
  misc_feature (1)..(25): SEQ ID NO: 7029; WAN024CVZ; Start 613; Stop 637
attatgtccttagaagaagcggtag

SEQ ID NO: 456765 - DNA, 25 bp, Artificial
  probe
  misc_feature (1)..(25): SEQ ID NO: 7029; WAN024CVZ; Start 520; Stop 544
ctatgtagtcgtggttctgtgattc

SEQ ID NO: 456766 - DNA, 25 bp, Artificial
  probe
  misc_feature (1)..(25): SEQ ID NO: 7029; WAN024CVZ; Start 611; Stop 635
ttattatgtccttagaagaagcggt

SEQ ID NO: 456767 - DNA, 25 bp, Artificial
  probe
  misc_feature (1)..(25): SEQ ID NO: 7029; WAN024CVZ; Start 614; Stop 638
ttatgtccttagaagaagcggtaga

SEQ ID NO: 456768 - DNA, 25 bp, Artificial
  probe
  misc_feature (1)..(25): SEQ ID NO: 7029; WAN024CVZ; Start 519; Stop 543
tctatgtagtcgtggttctgtgatt

SEQ ID NO: 456769 - DNA, 25 bp, Artificial
  probe
  misc_feature (1)..(25): SEQ ID NO: 7029; WAN024CVZ; Start 518; Stop 542
ttctatgtagtcgtggttctgtgat

SEQ ID NO: 456770 - DNA, 25 bp, Artificial
  probe
  misc_feature (1)..(25): SEQ ID NO: 7029; WAN024CVZ; Start 581; Stop 605
taacgattacggaacctagtatgac

SEQ ID NO: 456771 - DNA, 25 bp, Artificial
  probe
  misc_feature (1)..(25): SEQ ID NO: 7029; WAN024CVZ; Start 515; Stop 539
atgttctatgtagtcgtggttctgt

SEQ ID NO: 456772 - DNA, 25 bp, Artificial
  probe
  misc_feature (1)..(25): SEQ ID NO: 7029; WAN024CVZ; Start 612; Stop 636
tattatgtccttagaagaagcggta

SEQ ID NO: 456773 - DNA, 25 bp, Artificial
  probe
  misc_feature (1)..(25): SEQ ID NO: 7029; WAN024CVZ; Start 806; Stop 830
tgttgactactgaagaatgtacgaa

SEQ ID NO: 456774 - DNA, 25 bp, Artificial
  probe
  misc_feature (1)..(25): SEQ ID NO: 7029; WAN024CVZ; Start 805; Stop 829
ttgttgactactgaagaatgtacga

SEQ ID NO: 456775 - DNA, 25 bp, Artificial
  probe
  misc_feature (1)..(25): SEQ ID NO: 7029; WAN024CVZ; Start 804; Stop 828
gttgttgactactgaagaatgtacg

SEQ ID NO: 456776 - DNA, 25 bp, Artificial
  probe
  misc_feature (1)..(25): SEQ ID NO: 7029; WAN024CVZ; Start 803; Stop 827
cgttgttgactactgaagaatgtac

SEQ ID NO: 456777 - DNA, 25 bp, Artificial
  probe
  misc_feature (1)..(25): SEQ ID NO: 7029; WAN024CVZ; Start 577; Stop 601
cctataacgattacggaacctagta

SEQ ID NO: 456778 - DNA, 25 bp, Artificial
  probe
  misc_feature (1)..(25): SEQ ID NO: 7029; WAN024CVZ; Start 580; Stop 604
ataacgattacggaacctagtatga

SEQ ID NO: 456779 - DNA, 25 bp, Artificial
  probe
  misc_feature (1)..(25): SEQ ID NO: 7029; WAN024CVZ; Start 809; Stop 833
tgactactgaagaatgtacgaatgc

SEQ ID NO: 456780 - DNA, 25 bp, Artificial
  probe
  misc_feature (1)..(25): SEQ ID NO: 7029; WAN024CVZ; Start 808; Stop 832
ttgactactgaagaatgtacgaatg

SEQ ID NO: 456781 - DNA, 25 bp, Artificial
  probe
  misc_feature (1)..(25): SEQ ID NO: 7029; WAN024CVZ; Start 807; Stop 831
gttgactactgaagaatgtacgaat

SEQ ID NO: 456782 - DNA, 25 bp, Artificial
  probe
  misc_feature (1)..(25): SEQ ID NO: 7029; WAN024CVZ; Start 622; Stop 646
ttagaagaagcggtagacctagttc

SEQ ID NO: 456783 - DNA, 25 bp, Artificial
  probe
  misc_feature (1)..(25): SEQ ID NO: 7029; WAN024CVZ; Start 621; Stop 645
cttagaagaagcggtagacctagtt

SEQ ID NO: 456784 - DNA, 25 bp, Artificial
  probe
  misc_feature (1)..(25): SEQ ID NO: 7029; WAN024CVZ; Start 517; Stop 541
gttctatgtagtcgtggttctgtga

SEQ ID NO: 456785 - DNA, 25 bp, Artificial
  probe
  misc_feature (1)..(25): SEQ ID NO: 7029; WAN024CVZ; Start 512; Stop 536
gcaatgttctatgtagtcgtggttc

SEQ ID NO: 456786 - DNA, 25 bp, Artificial
  probe
  misc_feature (1)..(25): SEQ ID NO: 7029; WAN024CVZ; Start 812; Stop 836
ctactgaagaatgtacgaatgccat

SEQ ID NO: 456787 - DNA, 25 bp, Artificial
  probe
  misc_feature (1)..(25): SEQ ID NO: 7029; WAN024CVZ; Start 521; Stop 545
tatgtagtcgtggttctgtgattcc

SEQ ID NO: 456788 - DNA, 25 bp, Artificial
  probe
  misc_feature (1)..(25): SEQ ID NO: 7029; WAN024CVZ; Start 582; Stop 606
aacgattacggaacctagtatgact

SEQ ID NO: 456789 - DNA, 25 bp, Artificial
  probe
  misc_feature (1)..(25): SEQ ID NO: 7029; WAN024CVZ; Start 459; Stop 483
taagtcaaggacggtagaagaagat

SEQ ID NO: 456790 - DNA, 25 bp, Artificial
  probe
  misc_feature (1)..(25): SEQ ID NO: 7029; WAN024CVZ; Start 810; Stop 834
gactactgaagaatgtacgaatgcc

SEQ ID NO: 456791 - DNA, 25 bp, Artificial
  probe
  misc_feature (1)..(25): SEQ ID NO: 7029; WAN024CVZ; Start 516; Stop 540
tgttctatgtagtcgtggttctgtg

SEQ ID NO: 456792 - DNA, 25 bp, Artificial
  probe
  misc_feature (1)..(25): SEQ ID NO: 7029; WAN024CVZ; Start 583; Stop 607
acgattacggaacctagtatgactc

SEQ ID NO: 456793 - DNA, 25 bp, Artificial
  probe
  misc_feature (1)..(25): SEQ ID NO: 7029; WAN024CVZ; Start 458; Stop 482
ctaagtcaaggacggtagaagaaga

SEQ ID NO: 456794 - DNA, 25 bp, Artificial
  probe
  misc_feature (1)..(25): SEQ ID NO: 7029; WAN024CVZ; Start 615; Stop 639
tatgtccttagaagaagcggtagac

SEQ ID NO: 456795 - DNA, 25 bp, Artificial
  probe
  misc_feature (1)..(25): SEQ ID NO: 7030; WAN024BVB; Start 81; Stop 105
cggtatctctgaactagaacggtac

SEQ ID NO: 456796 - DNA, 25 bp, Artificial
  probe
  misc_feature (1)..(25): SEQ ID NO: 7030; WAN024BVB; Start 80; Stop 104
gcggtatctctgaactagaacggta

SEQ ID NO: 456797 - DNA, 25 bp, Artificial
  probe
  misc_feature (1)..(25): SEQ ID NO: 7030; WAN024BVB; Start 30; Stop 54
tgatcaagacactacgtacaacatc

SEQ ID NO: 456798 - DNA, 25 bp, Artificial
  probe
  misc_feature (1)..(25): SEQ ID NO: 7030; WAN024BVB; Start 31; Stop 55
gatcaagacactacgtacaacatcg

SEQ ID NO: 456799 - DNA, 25 bp, Artificial
  probe
  misc_feature (1)..(25): SEQ ID NO: 7030; WAN024BVB; Start 123; Stop 147
gtatgaacctgaaaatagatgggga

SEQ ID NO: 456800 - DNA, 25 bp, Artificial
  probe
  misc_feature (1)..(25): SEQ ID NO: 7030; WAN024BVB; Start 122; Stop 146
agtatgaacctgaaaatagatgggg

SEQ ID NO: 456801 - DNA, 25 bp, Artificial
  probe
  misc_feature (1)..(25): SEQ ID NO: 7030; WAN024BVB; Start 112; Stop 136
aagtatgtgcagtatgaacctgaaa

SEQ ID NO: 456802 - DNA, 25 bp, Artificial
  probe
  misc_feature (1)..(25): SEQ ID NO: 7030; WAN024BVB; Start 111; Stop 135
aaagtatgtgcagtatgaacctgaa

SEQ ID NO: 456803 - DNA, 25 bp, Artificial
  probe
  misc_feature (1)..(25): SEQ ID NO: 7030; WAN024BVB; Start 124; Stop 148
tatgaacctgaaaatagatggggaa

SEQ ID NO: 456804 - DNA, 25 bp, Artificial
  probe
  misc_feature (1)..(25): SEQ ID NO: 7030; WAN024BVB; Start 125; Stop 149
atgaacctgaaaatagatggggaac

SEQ ID NO: 456805 - DNA, 25 bp, Artificial
  probe
  misc_feature (1)..(25): SEQ ID NO: 7030; WAN024BVB; Start 132; Stop 156
tgaaaatagatggggaacagttagc

SEQ ID NO: 456806 - DNA, 25 bp, Artificial
  probe
  misc_feature (1)..(25): SEQ ID NO: 7030; WAN024BVB; Start 5; Stop 29
ttagagttgctatgaactgggattt

SEQ ID NO: 456807 - DNA, 25 bp, Artificial
  probe
  misc_feature (1)..(25): SEQ ID NO: 7030; WAN024BVB; Start 4; Stop 28
tttagagttgctatgaactgggatt

SEQ ID NO: 456808 - DNA, 25 bp, Artificial
  probe
  misc_feature (1)..(25): SEQ ID NO: 7030; WAN024BVB; Start 3; Stop 27
gtttagagttgctatgaactgggat

SEQ ID NO: 456809 - DNA, 25 bp, Artificial
  probe
  misc_feature (1)..(25): SEQ ID NO: 7030; WAN024BVB; Start 1; Stop 25
atgtttagagttgctatgaactggg

SEQ ID NO: 456810 - DNA, 25 bp, Artificial
  probe
  misc_feature (1)..(25): SEQ ID NO: 7030; WAN024BVB; Start 133; Stop 157
gaaaatagatggggaacagttagcg

SEQ ID NO: 456811 - DNA, 25 bp, Artificial
  probe
  misc_feature (1)..(25): SEQ ID NO: 7030; WAN024BVB; Start 126; Stop 150
tgaacctgaaaatagatggggaaca

SEQ ID NO: 456812 - DNA, 25 bp, Artificial
  probe
  misc_feature (1)..(25): SEQ ID NO: 7030; WAN024BVB; Start 10; Stop 34
gttgctatgaactgggattttgatc

SEQ ID NO: 456813 - DNA, 25 bp, Artificial
  probe
  misc_feature (1)..(25): SEQ ID NO: 7030; WAN024BVB; Start 2; Stop 26
tgtttagagttgctatgaactggga

SEQ ID NO: 456814 - DNA, 25 bp, Artificial
  probe
  misc_feature (1)..(25): SEQ ID NO: 7030; WAN024BVB; Start 130; Stop 154
cctgaaaatagatggggaacagtta

SEQ ID NO: 456815 - DNA, 25 bp, Artificial
  probe
  misc_feature (1)..(25): SEQ ID NO: 7030; WAN024BVB; Start 120; Stop 144
gcagtatgaacctgaaaatagatgg

SEQ ID NO: 456816 - DNA, 25 bp, Artificial
  probe
  misc_feature (1)..(25): SEQ ID NO: 7030; WAN024BVB; Start 121; Stop 145
cagtatgaacctgaaaatagatggg

SEQ ID NO: 456817 - DNA, 25 bp, Artificial
  probe
  misc_feature (1)..(25): SEQ ID NO: 7030; WAN024BVB; Start 131; Stop 155
ctgaaaatagatggggaacagttag

SEQ ID NO: 456818 - DNA, 25 bp, Artificial
  probe
  misc_feature (1)..(25): SEQ ID NO: 7030; WAN024BVB; Start 134; Stop 158
aaaatagatggggaacagttagcgt

SEQ ID NO: 456819 - DNA, 25 bp, Artificial
  probe
  misc_feature (1)..(25): SEQ ID NO: 7030; WAN024BVB; Start 68; Stop 92
ataacattcaacgcggtatctctga

SEQ ID NO: 456820 - DNA, 25 bp, Artificial
  probe
  misc_feature (1)..(25): SEQ ID NO: 7030; WAN024BVB; Start 67; Stop 91
gataacattcaacgcggtatctctg

SEQ ID NO: 456821 - DNA, 25 bp, Artificial
  probe
  misc_feature (1)..(25): SEQ ID NO: 7030; WAN024BVB; Start 165; Stop 189
ggaggttttaaagtcactgaaagag

SEQ ID NO: 456822 - DNA, 25 bp, Artificial
  probe
  misc_feature (1)..(25): SEQ ID NO: 7030; WAN024BVB; Start 164; Stop 188
tggaggttttaaagtcactgaaaga

SEQ ID NO: 456823 - DNA, 25 bp, Artificial
  probe
  misc_feature (1)..(25): SEQ ID NO: 7030; WAN024BVB; Start 127; Stop 151
gaacctgaaaatagatggggaacag

SEQ ID NO: 456824 - DNA, 25 bp, Artificial
  probe
  misc_feature (1)..(25): SEQ ID NO: 7030; WAN024BVB; Start 163; Stop 187
ttggaggttttaaagtcactgaaag

SEQ ID NO: 456825 - DNA, 25 bp, Artificial
  probe
  misc_feature (1)..(25): SEQ ID NO: 7030; WAN024BVB; Start 161; Stop 185
cattggaggttttaaagtcactgaa

SEQ ID NO: 456826 - DNA, 25 bp, Artificial
  probe
  misc_feature (1)..(25): SEQ ID NO: 7030; WAN024BVB; Start 135; Stop 159
aaatagatggggaacagttagcgtt

SEQ ID NO: 456827 - DNA, 25 bp, Artificial
  probe
  misc_feature (1)..(25): SEQ ID NO: 7030; WAN024BVB; Start 32; Stop 56
atcaagacactacgtacaacatcgc

SEQ ID NO: 456828 - DNA, 25 bp, Artificial
  probe
  misc_feature (1)..(25): SEQ ID NO: 7031; WAN024BVU; Start 91; Stop 115
ccgccaagattgaccaagttaataa

SEQ ID NO: 456829 - DNA, 25 bp, Artificial
  probe
  misc_feature (1)..(25): SEQ ID NO: 7031; WAN024BVU; Start 144; Stop 168
aattagtgacaacacgctgaataag

SEQ ID NO: 456830 - DNA, 25 bp, Artificial
  probe
  misc_feature (1)..(25): SEQ ID NO: 7031; WAN024BVU; Start 145; Stop 169
attagtgacaacacgctgaataagt

SEQ ID NO: 456831 - DNA, 25 bp, Artificial
  probe
  misc_feature (1)..(25): SEQ ID NO: 7031; WAN024BVU; Start 90; Stop 114
accgccaagattgaccaagttaata

SEQ ID NO: 456832 - DNA, 25 bp, Artificial
  probe
  misc_feature (1)..(25): SEQ ID NO: 7031; WAN024BVU; Start 89; Stop 113
taccgccaagattgaccaagttaat

SEQ ID NO: 456833 - DNA, 25 bp, Artificial
  probe
  misc_feature (1)..(25): SEQ ID NO: 7031; WAN024BVU; Start 146; Stop 170
ttagtgacaacacgctgaataagtg

SEQ ID NO: 456834 - DNA, 25 bp, Artificial
  probe
  misc_feature (1)..(25): SEQ ID NO: 7031; WAN024BVU; Start 162; Stop 186
gaataagtgggaaagtcagggttta

SEQ ID NO: 456835 - DNA, 25 bp, Artificial
  probe
  misc_feature (1)..(25): SEQ ID NO: 7031; WAN024BVU; Start 163; Stop 187
aataagtgggaaagtcagggtttaa

SEQ ID NO: 456836 - DNA, 25 bp, Artificial
  probe
  misc_feature (1)..(25): SEQ ID NO: 7031; WAN024BVU; Start 92; Stop 116
cgccaagattgaccaagttaataaa

SEQ ID NO: 456837 - DNA, 25 bp, Artificial
  probe
  misc_feature (1)..(25): SEQ ID NO: 7031; WAN024BVU; Start 164; Stop 188
ataagtgggaaagtcagggtttaag

SEQ ID NO: 456838 - DNA, 25 bp, Artificial
  probe
  misc_feature (1)..(25): SEQ ID NO: 7031; WAN024BVU; Start 45; Stop 69
cattctggaggtagtggaaagatac

SEQ ID NO: 456839 - DNA, 25 bp, Artificial
  probe
  misc_feature (1)..(25): SEQ ID NO: 7031; WAN024BVU; Start 165; Stop 189
taagtgggaaagtcagggtttaaga

SEQ ID NO: 456840 - DNA, 25 bp, Artificial
  probe
  misc_feature (1)..(25): SEQ ID NO: 7031; WAN024BVU; Start 204; Stop 228
ggacgatggttcaagaatgatttac

SEQ ID NO: 456841 - DNA, 25 bp, Artificial
  probe
  misc_feature (1)..(25): SEQ ID NO: 7031; WAN024BVU; Start 205; Stop 229
gacgatggttcaagaatgatttact

SEQ ID NO: 456842 - DNA, 25 bp, Artificial
  probe
  misc_feature (1)..(25): SEQ ID NO: 7031; WAN024BVU; Start 93; Stop 117
gccaagattgaccaagttaataaat

SEQ ID NO: 456843 - DNA, 25 bp, Artificial
  probe
  misc_feature (1)..(25): SEQ ID NO: 7031; WAN024BVU; Start 203; Stop 227
cggacgatggttcaagaatgattta

SEQ ID NO: 456844 - DNA, 25 bp, Artificial
  probe
  misc_feature (1)..(25): SEQ ID NO: 7031; WAN024BVU; Start 44; Stop 68
gcattctggaggtagtggaaagata

SEQ ID NO: 456845 - DNA, 25 bp, Artificial
  probe
  misc_feature (1)..(25): SEQ ID NO: 7031; WAN024BVU; Start 88; Stop 112
gtaccgccaagattgaccaagttaa

SEQ ID NO: 456846 - DNA, 25 bp, Artificial
  probe
  misc_feature (1)..(25): SEQ ID NO: 7031; WAN024BVU; Start 206; Stop 230
acgatggttcaagaatgatttacta

SEQ ID NO: 456847 - DNA, 25 bp, Artificial
  probe
  misc_feature (1)..(25): SEQ ID NO: 7031; WAN024BVU; Start 143; Stop 167
aaattagtgacaacacgctgaataa

SEQ ID NO: 456848 - DNA, 25 bp, Artificial
  probe
  misc_feature (1)..(25): SEQ ID NO: 7031; WAN024BVU; Start 172; Stop 196
gaaagtcagggtttaagacgctatc

SEQ ID NO: 456849 - DNA, 25 bp, Artificial
  probe
  misc_feature (1)..(25): SEQ ID NO: 7031; WAN024BVU; Start 161; Stop 185
tgaataagtgggaaagtcagggttt

SEQ ID NO: 456850 - DNA, 25 bp, Artificial
  probe
  misc_feature (1)..(25): SEQ ID NO: 7031; WAN024BVU; Start 147; Stop 171
tagtgacaacacgctgaataagtgg

SEQ ID NO: 456851 - DNA, 25 bp, Artificial
  probe
  misc_feature (1)..(25): SEQ ID NO: 7031; WAN024BVU; Start 174; Stop 198
aagtcagggtttaagacgctatcaa

SEQ ID NO: 456852 - DNA, 25 bp, Artificial
  probe
  misc_feature (1)..(25): SEQ ID NO: 7031; WAN024BVU; Start 173; Stop 197
aaagtcagggtttaagacgctatca

SEQ ID NO: 456853 - DNA, 25 bp, Artificial
  probe
  misc_feature (1)..(25): SEQ ID NO: 7031; WAN024BVU; Start 207; Stop 231
cgatggttcaagaatgatttactat

SEQ ID NO: 456854 - DNA, 25 bp, Artificial
  probe
  misc_feature (1)..(25): SEQ ID NO: 7031; WAN024BVU; Start 87; Stop 111
agtaccgccaagattgaccaagtta

SEQ ID NO: 456855 - DNA, 25 bp, Artificial
  probe
  misc_feature (1)..(25): SEQ ID NO: 7031; WAN024BVU; Start 229; Stop 253
tatttagtaactgacatctggaagt

SEQ ID NO: 456856 - DNA, 25 bp, Artificial
  probe
  misc_feature (1)..(25): SEQ ID NO: 7031; WAN024BVU; Start 175; Stop 199
agtcagggtttaagacgctatcaac

SEQ ID NO: 456857 - DNA, 25 bp, Artificial
  probe
  misc_feature (1)..(25): SEQ ID NO: 7031; WAN024BVU; Start 171; Stop 195
ggaaagtcagggtttaagacgctat

SEQ ID NO: 456858 - DNA, 25 bp, Artificial
  probe
  misc_feature (1)..(25): SEQ ID NO: 7031; WAN024BVU; Start 228; Stop 252
ctatttagtaactgacatctggaag

SEQ ID NO: 456859 - DNA, 25 bp, Artificial
  probe
  misc_feature (1)..(25): SEQ ID NO: 7031; WAN024BVU; Start 227; Stop 251
actatttagtaactgacatctggaa

SEQ ID NO: 456860 - DNA, 25 bp, Artificial
  probe
  misc_feature (1)..(25): SEQ ID NO: 7031; WAN024BVU; Start 166; Stop 190
aagtgggaaagtcagggtttaagac

SEQ ID NO: 456861 - DNA, 25 bp, Artificial
  probe
  misc_feature (1)..(25): SEQ ID NO: 7032; WAN024CQR; Start 137; Stop 161
aagcaggtctggatactaggttatt

SEQ ID NO: 456862 - DNA, 25 bp, Artificial
  probe
  misc_feature (1)..(25): SEQ ID NO: 7032; WAN024CQR; Start 136; Stop 160
gaagcaggtctggatactaggttat

SEQ ID NO: 456863 - DNA, 25 bp, Artificial
  probe
  misc_feature (1)..(25): SEQ ID NO: 7032; WAN024CQR; Start 195; Stop 219
caactcaccattgtctctaaggaac

SEQ ID NO: 456864 - DNA, 25 bp, Artificial
  probe
  misc_feature (1)..(25): SEQ ID NO: 7032; WAN024CQR; Start 202; Stop 226
ccattgtctctaaggaacacatcta

SEQ ID NO: 456865 - DNA, 25 bp, Artificial
  probe
  misc_feature (1)..(25): SEQ ID NO: 7032; WAN024CQR; Start 205; Stop 229
ttgtctctaaggaacacatctacat

SEQ ID NO: 456866 - DNA, 25 bp, Artificial
  probe
  misc_feature (1)..(25): SEQ ID NO: 7032; WAN024CQR; Start 204; Stop 228
attgtctctaaggaacacatctaca

SEQ ID NO: 456867 - DNA, 25 bp, Artificial
  probe
  misc_feature (1)..(25): SEQ ID NO: 7032; WAN024CQR; Start 203; Stop 227
cattgtctctaaggaacacatctac

SEQ ID NO: 456868 - DNA, 25 bp, Artificial
  probe
  misc_feature (1)..(25): SEQ ID NO: 7032; WAN024CQR; Start 201; Stop 225
accattgtctctaaggaacacatct

SEQ ID NO: 456869 - DNA, 25 bp, Artificial
  probe
  misc_feature (1)..(25): SEQ ID NO: 7032; WAN024CQR; Start 200; Stop 224
caccattgtctctaaggaacacatc

SEQ ID NO: 456870 - DNA, 25 bp, Artificial
  probe
  misc_feature (1)..(25): SEQ ID NO: 7032; WAN024CQR; Start 207; Stop 231
gtctctaaggaacacatctacataa

SEQ ID NO: 456871 - DNA, 25 bp, Artificial
  probe
  misc_feature (1)..(25): SEQ ID NO: 7032; WAN024CQR; Start 206; Stop 230
tgtctctaaggaacacatctacata

SEQ ID NO: 456872 - DNA, 25 bp, Artificial
  probe
  misc_feature (1)..(25): SEQ ID NO: 7032; WAN024CQR; Start 199; Stop 223
tcaccattgtctctaaggaacacat

SEQ ID NO: 456873 - DNA, 25 bp, Artificial
  probe
  misc_feature (1)..(25): SEQ ID NO: 7032; WAN024CQR; Start 196; Stop 220
aactcaccattgtctctaaggaaca

SEQ ID NO: 456874 - DNA, 25 bp, Artificial
  probe
  misc_feature (1)..(25): SEQ ID NO: 7032; WAN024CQR; Start 135; Stop 159
tgaagcaggtctggatactaggtta

SEQ ID NO: 456875 - DNA, 25 bp, Artificial
  probe
  misc_feature (1)..(25): SEQ ID NO: 7032; WAN024CQR; Start 194; Stop 218
ccaactcaccattgtctctaaggaa

SEQ ID NO: 456876 - DNA, 25 bp, Artificial
  probe
  misc_feature (1)..(25): SEQ ID NO: 7032; WAN024CQR; Start 198; Stop 222
ctcaccattgtctctaaggaacaca

SEQ ID NO: 456877 - DNA, 25 bp, Artificial
  probe
  misc_feature (1)..(25): SEQ ID NO: 7032; WAN024CQR; Start 197; Stop 221
actcaccattgtctctaaggaacac

SEQ ID NO: 456878 - DNA, 25 bp, Artificial
  probe
  misc_feature (1)..(25): SEQ ID NO: 7032; WAN024CQR; Start 138; Stop 162
agcaggtctggatactaggttattt

SEQ ID NO: 456879 - DNA, 25 bp, Artificial
  probe
  misc_feature (1)..(25): SEQ ID NO: 7032; WAN024CQR; Start 42; Stop 66
accatttgcgtataaagaatatgtt

SEQ ID NO: 456880 - DNA, 25 bp, Artificial
  probe
  misc_feature (1)..(25): SEQ ID NO: 7032; WAN024CQR; Start 98; Stop 122
tgttagtcacagcctcttgtttgta

SEQ ID NO: 456881 - DNA, 25 bp, Artificial
  probe
  misc_feature (1)..(25): SEQ ID NO: 7032; WAN024CQR; Start 134; Stop 158
ctgaagcaggtctggatactaggtt

SEQ ID NO: 456882 - DNA, 25 bp, Artificial
  probe
  misc_feature (1)..(25): SEQ ID NO: 7032; WAN024CQR; Start 132; Stop 156
aactgaagcaggtctggatactagg

SEQ ID NO: 456883 - DNA, 25 bp, Artificial
  probe
  misc_feature (1)..(25): SEQ ID NO: 7032; WAN024CQR; Start 131; Stop 155
aaactgaagcaggtctggatactag

SEQ ID NO: 456884 - DNA, 25 bp, Artificial
  probe
  misc_feature (1)..(25): SEQ ID NO: 7032; WAN024CQR; Start 130; Stop 154
caaactgaagcaggtctggatacta

SEQ ID NO: 456885 - DNA, 25 bp, Artificial
  probe
  misc_feature (1)..(25): SEQ ID NO: 7032; WAN024CQR; Start 37; Stop 61
tttgtaccatttgcgtataaagaat

SEQ ID NO: 456886 - DNA, 25 bp, Artificial
  probe
  misc_feature (1)..(25): SEQ ID NO: 7032; WAN024CQR; Start 103; Stop 127
gtcacagcctcttgtttgtacttac

SEQ ID NO: 456887 - DNA, 25 bp, Artificial
  probe
  misc_feature (1)..(25): SEQ ID NO: 7032; WAN024CQR; Start 102; Stop 126
agtcacagcctcttgtttgtactta

SEQ ID NO: 456888 - DNA, 25 bp, Artificial
  probe
  misc_feature (1)..(25): SEQ ID NO: 7032; WAN024CQR; Start 101; Stop 125
tagtcacagcctcttgtttgtactt

SEQ ID NO: 456889 - DNA, 25 bp, Artificial
  probe
  misc_feature (1)..(25): SEQ ID NO: 7032; WAN024CQR; Start 100; Stop 124
ttagtcacagcctcttgtttgtact

SEQ ID NO: 456890 - DNA, 25 bp, Artificial
  probe
  misc_feature (1)..(25): SEQ ID NO: 7032; WAN024CQR; Start 99; Stop 123
gttagtcacagcctcttgtttgtac

SEQ ID NO: 456891 - DNA, 25 bp, Artificial
  probe
  misc_feature (1)..(25): SEQ ID NO: 7032; WAN024CQR; Start 41; Stop 65
taccatttgcgtataaagaatatgt

SEQ ID NO: 456892 - DNA, 25 bp, Artificial
  probe
  misc_feature (1)..(25): SEQ ID NO: 7032; WAN024CQR; Start 68; Stop 92
ttttgactgaatctgctactactgc

SEQ ID NO: 456893 - DNA, 25 bp, Artificial
  probe
  misc_feature (1)..(25): SEQ ID NO: 7032; WAN024CQR; Start 38; Stop 62
ttgtaccatttgcgtataaagaata

SEQ ID NO: 456894 - DNA, 25 bp, Artificial
  probe
  misc_feature (1)..(25): SEQ ID NO: 7033; WAN024BKD; Start 55; Stop 79
cactgtggattagttcatttcctct

SEQ ID NO: 456895 - DNA, 25 bp, Artificial
  probe
  misc_feature (1)..(25): SEQ ID NO: 7033; WAN024BKD; Start 58; Stop 82
tgtggattagttcatttcctctaca

SEQ ID NO: 456896 - DNA, 25 bp, Artificial
  probe
  misc_feature (1)..(25): SEQ ID NO: 7033; WAN024BKD; Start 56; Stop 80
actgtggattagttcatttcctcta

SEQ ID NO: 456897 - DNA, 25 bp, Artificial
  probe
  misc_feature (1)..(25): SEQ ID NO: 7033; WAN024BKD; Start 57; Stop 81
ctgtggattagttcatttcctctac

SEQ ID NO: 456898 - DNA, 25 bp, Artificial
  probe
  misc_feature (1)..(25): SEQ ID NO: 7033; WAN024BKD; Start 59; Stop 83
gtggattagttcatttcctctacat

SEQ ID NO: 456899 - DNA, 25 bp, Artificial
  probe
  misc_feature (1)..(25): SEQ ID NO: 7033; WAN024BKD; Start 60; Stop 84
tggattagttcatttcctctacatg

SEQ ID NO: 456900 - DNA, 25 bp, Artificial
  probe
  misc_feature (1)..(25): SEQ ID NO: 7033; WAN024BKD; Start 54; Stop 78
ccactgtggattagttcatttcctc

SEQ ID NO: 456901 - DNA, 25 bp, Artificial
  probe
  misc_feature (1)..(25): SEQ ID NO: 7033; WAN024BKD; Start 51; Stop 75
aagccactgtggattagttcatttc

SEQ ID NO: 456902 - DNA, 25 bp, Artificial
  probe
  misc_feature (1)..(25): SEQ ID NO: 7033; WAN024BKD; Start 61; Stop 85
ggattagttcatttcctctacatga

SEQ ID NO: 456903 - DNA, 25 bp, Artificial
  probe
  misc_feature (1)..(25): SEQ ID NO: 7033; WAN024BKD; Start 53; Stop 77
gccactgtggattagttcatttcct

SEQ ID NO: 456904 - DNA, 25 bp, Artificial
  probe
  misc_feature (1)..(25): SEQ ID NO: 7033; WAN024BKD; Start 52; Stop 76
agccactgtggattagttcatttcc

SEQ ID NO: 456905 - DNA, 25 bp, Artificial
  probe
  misc_feature (1)..(25): SEQ ID NO: 7033; WAN024BKD; Start 62; Stop 86
gattagttcatttcctctacatgat

SEQ ID NO: 456906 - DNA, 25 bp, Artificial
  probe
  misc_feature (1)..(25): SEQ ID NO: 7033; WAN024BKD; Start 64; Stop 88
ttagttcatttcctctacatgatat

SEQ ID NO: 456907 - DNA, 25 bp, Artificial
  probe
  misc_feature (1)..(25): SEQ ID NO: 7033; WAN024BKD; Start 63; Stop 87
attagttcatttcctctacatgata

SEQ ID NO: 456908 - DNA, 25 bp, Artificial
  probe
  misc_feature (1)..(25): SEQ ID NO: 7033; WAN024BKD; Start 65; Stop 89
tagttcatttcctctacatgatatc

SEQ ID NO: 456909 - DNA, 25 bp, Artificial
  probe
  misc_feature (1)..(25): SEQ ID NO: 7034; WAN024FQT; Start 133; Stop 157
tcaatagagccttgcctatatatgc

SEQ ID NO: 456910 - DNA, 25 bp, Artificial
  probe
  misc_feature (1)..(25): SEQ ID NO: 7034; WAN024FQT; Start 197; Stop 221
agccatgtgaggataagttattaac

SEQ ID NO: 456911 - DNA, 25 bp, Artificial
  probe
  misc_feature (1)..(25): SEQ ID NO: 7034; WAN024FQT; Start 196; Stop 220
aagccatgtgaggataagttattaa

SEQ ID NO: 456912 - DNA, 25 bp, Artificial
  probe
  misc_feature (1)..(25): SEQ ID NO: 7034; WAN024FQT; Start 67; Stop 91
ggattaaagggagcatttgaagaaa

SEQ ID NO: 456913 - DNA, 25 bp, Artificial
  probe
  misc_feature (1)..(25): SEQ ID NO: 7034; WAN024FQT; Start 63; Stop 87
attgggattaaagggagcatttgaa

SEQ ID NO: 456914 - DNA, 25 bp, Artificial
  probe
  misc_feature (1)..(25): SEQ ID NO: 7034; WAN024FQT; Start 164; Stop 188
aattcctcctaagaaagcacctaag

SEQ ID NO: 456915 - DNA, 25 bp, Artificial
  probe
  misc_feature (1)..(25): SEQ ID NO: 7034; WAN024FQT; Start 132; Stop 156
ttcaatagagccttgcctatatatg

SEQ ID NO: 456916 - DNA, 25 bp, Artificial
  probe
  misc_feature (1)..(25): SEQ ID NO: 7034; WAN024FQT; Start 66; Stop 90
gggattaaagggagcatttgaagaa

SEQ ID NO: 456917 - DNA, 25 bp, Artificial
  probe
  misc_feature (1)..(25): SEQ ID NO: 7034; WAN024FQT; Start 62; Stop 86
gattgggattaaagggagcatttga

SEQ ID NO: 456918 - DNA, 25 bp, Artificial
  probe
  misc_feature (1)..(25): SEQ ID NO: 7034; WAN024FQT; Start 21; Stop 45
agttaagcctgtgataaatacgact

SEQ ID NO: 456919 - DNA, 25 bp, Artificial
  probe
  misc_feature (1)..(25): SEQ ID NO: 7034; WAN024FQT; Start 64; Stop 88
ttgggattaaagggagcatttgaag

SEQ ID NO: 456920 - DNA, 25 bp, Artificial
  probe
  misc_feature (1)..(25): SEQ ID NO: 7034; WAN024FQT; Start 22; Stop 46
gttaagcctgtgataaatacgacta

SEQ ID NO: 456921 - DNA, 25 bp, Artificial
  probe
  misc_feature (1)..(25): SEQ ID NO: 7034; WAN024FQT; Start 52; Stop 76
ttagagatcggattgggattaaagg

SEQ ID NO: 456922 - DNA, 25 bp, Artificial
  probe
  misc_feature (1)..(25): SEQ ID NO: 7034; WAN024FQT; Start 134; Stop 158
caatagagccttgcctatatatgct

SEQ ID NO: 456923 - DNA, 25 bp, Artificial
  probe
  misc_feature (1)..(25): SEQ ID NO: 7034; WAN024FQT; Start 152; Stop 176
atatgctccaagaattcctcctaag

SEQ ID NO: 456924 - DNA, 25 bp, Artificial
  probe
  misc_feature (1)..(25): SEQ ID NO: 7034; WAN024FQT; Start 146; Stop 170
gcctatatatgctccaagaattcct

SEQ ID NO: 456925 - DNA, 25 bp, Artificial
  probe
  misc_feature (1)..(25): SEQ ID NO: 7034; WAN024FQT; Start 145; Stop 169
tgcctatatatgctccaagaattcc

SEQ ID NO: 456926 - DNA, 25 bp, Artificial
  probe
  misc_feature (1)..(25): SEQ ID NO: 7034; WAN024FQT; Start 20; Stop 44
cagttaagcctgtgataaatacgac

SEQ ID NO: 456927 - DNA, 25 bp, Artificial
  probe
  misc_feature (1)..(25): SEQ ID NO: 7034; WAN024FQT; Start 153; Stop 177
tatgctccaagaattcctcctaaga

SEQ ID NO: 456928 - DNA, 25 bp, Artificial
  probe
  misc_feature (1)..(25): SEQ ID NO: 7034; WAN024FQT; Start 50; Stop 74
tcttagagatcggattgggattaaa

SEQ ID NO: 456929 - DNA, 25 bp, Artificial
  probe
  misc_feature (1)..(25): SEQ ID NO: 7034; WAN024FQT; Start 51; Stop 75
cttagagatcggattgggattaaag

SEQ ID NO: 456930 - DNA, 25 bp, Artificial
  probe
  misc_feature (1)..(25): SEQ ID NO: 7034; WAN024FQT; Start 53; Stop 77
tagagatcggattgggattaaaggg

SEQ ID NO: 456931 - DNA, 25 bp, Artificial
  probe
  misc_feature (1)..(25): SEQ ID NO: 7034; WAN024FQT; Start 65; Stop 89
tgggattaaagggagcatttgaaga

SEQ ID NO: 456932 - DNA, 25 bp, Artificial
  probe
  misc_feature (1)..(25): SEQ ID NO: 7034; WAN024FQT; Start 61; Stop 85
ggattgggattaaagggagcatttg

SEQ ID NO: 456933 - DNA, 25 bp, Artificial
  probe
  misc_feature (1)..(25): SEQ ID NO: 7034; WAN024FQT; Start 190; Stop 214
ctactaaagccatgtgaggataagt

SEQ ID NO: 456934 - DNA, 25 bp, Artificial
  probe
  misc_feature (1)..(25): SEQ ID NO: 7034; WAN024FQT; Start 23; Stop 47
ttaagcctgtgataaatacgactaa

SEQ ID NO: 456935 - DNA, 25 bp, Artificial
  probe
  misc_feature (1)..(25): SEQ ID NO: 7034; WAN024FQT; Start 253; Stop 277
tcgtcatcaaagaccactccatata

SEQ ID NO: 456936 - DNA, 25 bp, Artificial
  probe
  misc_feature (1)..(25): SEQ ID NO: 7034; WAN024FQT; Start 192; Stop 216
actaaagccatgtgaggataagtta

SEQ ID NO: 456937 - DNA, 25 bp, Artificial
  probe
  misc_feature (1)..(25): SEQ ID NO: 7034; WAN024FQT; Start 191; Stop 215
tactaaagccatgtgaggataagtt

SEQ ID NO: 456938 - DNA, 25 bp, Artificial
  probe
  misc_feature (1)..(25): SEQ ID NO: 7034; WAN024FQT; Start 151; Stop 175
tatatgctccaagaattcctcctaa

SEQ ID NO: 456939 - DNA, 25 bp, Artificial
  probe
  misc_feature (1)..(25): SEQ ID NO: 7034; WAN024FQT; Start 40; Stop 64
acgactaatatcttagagatcggat

SEQ ID NO: 456940 - DNA, 25 bp, Artificial
  probe
  misc_feature (1)..(25): SEQ ID NO: 7034; WAN024FQT; Start 25; Stop 49
aagcctgtgataaatacgactaata

SEQ ID NO: 456941 - DNA, 25 bp, Artificial
  probe
  misc_feature (1)..(25): SEQ ID NO: 7034; WAN024FQT; Start 24; Stop 48
taagcctgtgataaatacgactaat

SEQ ID NO: 456942 - DNA, 25 bp, Artificial
  probe
  misc_feature (1)..(25): SEQ ID NO: 7035; WAN024BTV; Start 41; Stop 65
ttctgaggtccgtagttattggtgt

SEQ ID NO: 456943 - DNA, 25 bp, Artificial
  probe
  misc_feature (1)..(25): SEQ ID NO: 7035; WAN024BTV; Start 11; Stop 35
taagacatgggacaagagaggataa

SEQ ID NO: 456944 - DNA, 25 bp, Artificial
  probe
  misc_feature (1)..(25): SEQ ID NO: 7035; WAN024BTV; Start 10; Stop 34
ttaagacatgggacaagagaggata

SEQ ID NO: 456945 - DNA, 25 bp, Artificial
  probe
  misc_feature (1)..(25): SEQ ID NO: 7035; WAN024BTV; Start 9; Stop 33
tttaagacatgggacaagagaggat

SEQ ID NO: 456946 - DNA, 25 bp, Artificial
  probe
  misc_feature (1)..(25): SEQ ID NO: 7035; WAN024BTV; Start 40; Stop 64
tttctgaggtccgtagttattggtg

SEQ ID NO: 456947 - DNA, 25 bp, Artificial
  probe
  misc_feature (1)..(25): SEQ ID NO: 7035; WAN024BTV; Start 39; Stop 63
gtttctgaggtccgtagttattggt

SEQ ID NO: 456948 - DNA, 25 bp, Artificial
  probe
  misc_feature (1)..(25): SEQ ID NO: 7035; WAN024BTV; Start 12; Stop 36
aagacatgggacaagagaggataag

SEQ ID NO: 456949 - DNA, 25 bp, Artificial
  probe
  misc_feature (1)..(25): SEQ ID NO: 7035; WAN024BTV; Start 43; Stop 67
ctgaggtccgtagttattggtgtga

SEQ ID NO: 456950 - DNA, 25 bp, Artificial
  probe
  misc_feature (1)..(25): SEQ ID NO: 7035; WAN024BTV; Start 42; Stop 66
tctgaggtccgtagttattggtgtg

SEQ ID NO: 456951 - DNA, 25 bp, Artificial
  probe
  misc_feature (1)..(25): SEQ ID NO: 7035; WAN024BTV; Start 52; Stop 76
gtagttattggtgtgactggcttgg

SEQ ID NO: 456952 - DNA, 25 bp, Artificial
  probe
  misc_feature (1)..(25): SEQ ID NO: 7035; WAN024BTV; Start 53; Stop 77
tagttattggtgtgactggcttgga

SEQ ID NO: 456953 - DNA, 25 bp, Artificial
  probe
  misc_feature (1)..(25): SEQ ID NO: 7035; WAN024BTV; Start 51; Stop 75
cgtagttattggtgtgactggcttg

SEQ ID NO: 456954 - DNA, 25 bp, Artificial
  probe
  misc_feature (1)..(25): SEQ ID NO: 7035; WAN024BTV; Start 38; Stop 62
cgtttctgaggtccgtagttattgg

SEQ ID NO: 456955 - DNA, 25 bp, Artificial
  probe
  misc_feature (1)..(25): SEQ ID NO: 7035; WAN024BTV; Start 37; Stop 61
ccgtttctgaggtccgtagttattg

SEQ ID NO: 456956 - DNA, 25 bp, Artificial
  probe
  misc_feature (1)..(25): SEQ ID NO: 7035; WAN024BTV; Start 23; Stop 47
caagagaggataagccgtttctgag

SEQ ID NO: 456957 - DNA, 25 bp, Artificial
  probe
  misc_feature (1)..(25): SEQ ID NO: 7035; WAN024BTV; Start 45; Stop 69
gaggtccgtagttattggtgtgact

SEQ ID NO: 456958 - DNA, 25 bp, Artificial
  probe
  misc_feature (1)..(25): SEQ ID NO: 7035; WAN024BTV; Start 21; Stop 45
gacaagagaggataagccgtttctg

SEQ ID NO: 456959 - DNA, 25 bp, Artificial
  probe
  misc_feature (1)..(25): SEQ ID NO: 7035; WAN024BTV; Start 78; Stop 102
catttcatgttcagaggagaagaaa

SEQ ID NO: 456960 - DNA, 25 bp, Artificial
  probe
  misc_feature (1)..(25): SEQ ID NO: 7035; WAN024BTV; Start 84; Stop 108
atgttcagaggagaagaaagccatg

SEQ ID NO: 456961 - DNA, 25 bp, Artificial
  probe
  misc_feature (1)..(25): SEQ ID NO: 7035; WAN024BTV; Start 83; Stop 107
catgttcagaggagaagaaagccat

SEQ ID NO: 456962 - DNA, 25 bp, Artificial
  probe
  misc_feature (1)..(25): SEQ ID NO: 7035; WAN024BTV; Start 81; Stop 105
ttcatgttcagaggagaagaaagcc

SEQ ID NO: 456963 - DNA, 25 bp, Artificial
  probe
  misc_feature (1)..(25): SEQ ID NO: 7035; WAN024BTV; Start 79; Stop 103
atttcatgttcagaggagaagaaag

SEQ ID NO: 456964 - DNA, 25 bp, Artificial
  probe
  misc_feature (1)..(25): SEQ ID NO: 7035; WAN024BTV; Start 80; Stop 104
tttcatgttcagaggagaagaaagc

SEQ ID NO: 456965 - DNA, 25 bp, Artificial
  probe
  misc_feature (1)..(25): SEQ ID NO: 7035; WAN024BTV; Start 46; Stop 70
aggtccgtagttattggtgtgactg

SEQ ID NO: 456966 - DNA, 25 bp, Artificial
  probe
  misc_feature (1)..(25): SEQ ID NO: 7035; WAN024BTV; Start 44; Stop 68
tgaggtccgtagttattggtgtgac

SEQ ID NO: 456967 - DNA, 25 bp, Artificial
  probe
  misc_feature (1)..(25): SEQ ID NO: 7035; WAN024BTV; Start 22; Stop 46
acaagagaggataagccgtttctga

SEQ ID NO: 456968 - DNA, 25 bp, Artificial
  probe
  misc_feature (1)..(25): SEQ ID NO: 7035; WAN024BTV; Start 77; Stop 101
acatttcatgttcagaggagaagaa

SEQ ID NO: 456969 - DNA, 25 bp, Artificial
  probe
  misc_feature (1)..(25): SEQ ID NO: 7035; WAN024BTV; Start 76; Stop 100
gacatttcatgttcagaggagaaga

SEQ ID NO: 456970 - DNA, 25 bp, Artificial
  probe
  misc_feature (1)..(25): SEQ ID NO: 7035; WAN024BTV; Start 7; Stop 31
attttaagacatgggacaagagagg

SEQ ID NO: 456971 - DNA, 25 bp, Artificial
  probe
  misc_feature (1)..(25): SEQ ID NO: 7035; WAN024BTV; Start 57; Stop 81
tattggtgtgactggcttggacatt

SEQ ID NO: 456972 - DNA, 25 bp, Artificial
  probe
  misc_feature (1)..(25): SEQ ID NO: 7035; WAN024BTV; Start 56; Stop 80
ttattggtgtgactggcttggacat

SEQ ID NO: 456973 - DNA, 25 bp, Artificial
  probe
  misc_feature (1)..(25): SEQ ID NO: 7035; WAN024BTV; Start 75; Stop 99
ggacatttcatgttcagaggagaag

SEQ ID NO: 456974 - DNA, 25 bp, Artificial
  probe
  misc_feature (1)..(25): SEQ ID NO: 7035; WAN024BTV; Start 13; Stop 37
agacatgggacaagagaggataagc

SEQ ID NO: 456975 - DNA, 25 bp, Artificial
  probe
  misc_feature (1)..(25): SEQ ID NO: 7036; WAN024CXC; Start 68; Stop 92
ggttaagtcagataagtagattggc

SEQ ID NO: 456976 - DNA, 25 bp, Artificial
  probe
  misc_feature (1)..(25): SEQ ID NO: 7036; WAN024CXC; Start 69; Stop 93
gttaagtcagataagtagattggct

SEQ ID NO: 456977 - DNA, 25 bp, Artificial
  probe
  misc_feature (1)..(25): SEQ ID NO: 7036; WAN024CXC; Start 67; Stop 91
tggttaagtcagataagtagattgg

SEQ ID NO: 456978 - DNA, 25 bp, Artificial
  probe
  misc_feature (1)..(25): SEQ ID NO: 7036; WAN024CXC; Start 38; Stop 62
gtttctttgctttaggatgtggtta

SEQ ID NO: 456979 - DNA, 25 bp, Artificial
  probe
  misc_feature (1)..(25): SEQ ID NO: 7036; WAN024CXC; Start 55; Stop 79
tgtggttataattggttaagtcaga

SEQ ID NO: 456980 - DNA, 25 bp, Artificial
  probe
  misc_feature (1)..(25): SEQ ID NO: 7036; WAN024CXC; Start 51; Stop 75
aggatgtggttataattggttaagt

SEQ ID NO: 456981 - DNA, 25 bp, Artificial
  probe
  misc_feature (1)..(25): SEQ ID NO: 7036; WAN024CXC; Start 34; Stop 58
aagtgtttctttgctttaggatgtg

SEQ ID NO: 456982 - DNA, 25 bp, Artificial
  probe
  misc_feature (1)..(25): SEQ ID NO: 7036; WAN024CXC; Start 30; Stop 54
aggtaagtgtttctttgctttagga

SEQ ID NO: 456983 - DNA, 25 bp, Artificial
  probe
  misc_feature (1)..(25): SEQ ID NO: 7036; WAN024CXC; Start 31; Stop 55
ggtaagtgtttctttgctttaggat

SEQ ID NO: 456984 - DNA, 25 bp, Artificial
  probe
  misc_feature (1)..(25): SEQ ID NO: 7036; WAN024CXC; Start 39; Stop 63
tttctttgctttaggatgtggttat

SEQ ID NO: 456985 - DNA, 25 bp, Artificial
  probe
  misc_feature (1)..(25): SEQ ID NO: 7036; WAN024CXC; Start 52; Stop 76
ggatgtggttataattggttaagtc

SEQ ID NO: 456986 - DNA, 25 bp, Artificial
  probe
  misc_feature (1)..(25): SEQ ID NO: 7036; WAN024CXC; Start 37; Stop 61
tgtttctttgctttaggatgtggtt

SEQ ID NO: 456987 - DNA, 25 bp, Artificial
  probe
  misc_feature (1)..(25): SEQ ID NO: 7036; WAN024CXC; Start 29; Stop 53
taggtaagtgtttctttgctttagg

SEQ ID NO: 456988 - DNA, 25 bp, Artificial
  probe
  misc_feature (1)..(25): SEQ ID NO: 7036; WAN024CXC; Start 33; Stop 57
taagtgtttctttgctttaggatgt

SEQ ID NO: 456989 - DNA, 25 bp, Artificial
  probe
  misc_feature (1)..(25): SEQ ID NO: 7036; WAN024CXC; Start 32; Stop 56
gtaagtgtttctttgctttaggatg

SEQ ID NO: 456990 - DNA, 25 bp, Artificial
  probe
  misc_feature (1)..(25): SEQ ID NO: 7036; WAN024CXC; Start 35; Stop 59
agtgtttctttgctttaggatgtgg

SEQ ID NO: 456991 - DNA, 25 bp, Artificial
  probe
  misc_feature (1)..(25): SEQ ID NO: 7036; WAN024CXC; Start 40; Stop 64
ttctttgctttaggatgtggttata

SEQ ID NO: 456992 - DNA, 25 bp, Artificial
  probe
  misc_feature (1)..(25): SEQ ID NO: 7036; WAN024CXC; Start 36; Stop 60
gtgtttctttgctttaggatgtggt

SEQ ID NO: 456993 - DNA, 25 bp, Artificial
  probe
  misc_feature (1)..(25): SEQ ID NO: 7036; WAN024CXC; Start 54; Stop 78
atgtggttataattggttaagtcag

SEQ ID NO: 456994 - DNA, 25 bp, Artificial
  probe
  misc_feature (1)..(25): SEQ ID NO: 7036; WAN024CXC; Start 53; Stop 77
gatgtggttataattggttaagtca

SEQ ID NO: 456995 - DNA, 25 bp, Artificial
  probe
  misc_feature (1)..(25): SEQ ID NO: 7036; WAN024CXC; Start 46; Stop 70
gctttaggatgtggttataattggt

SEQ ID NO: 456996 - DNA, 25 bp, Artificial
  probe
  misc_feature (1)..(25): SEQ ID NO: 7036; WAN024CXC; Start 45; Stop 69
tgctttaggatgtggttataattgg

SEQ ID NO: 456997 - DNA, 25 bp, Artificial
  probe
  misc_feature (1)..(25): SEQ ID NO: 7036; WAN024CXC; Start 66; Stop 90
ttggttaagtcagataagtagattg

SEQ ID NO: 456998 - DNA, 25 bp, Artificial
  probe
  misc_feature (1)..(25): SEQ ID NO: 7036; WAN024CXC; Start 56; Stop 80
gtggttataattggttaagtcagat

SEQ ID NO: 456999 - DNA, 25 bp, Artificial
  probe
  misc_feature (1)..(25): SEQ ID NO: 7036; WAN024CXC; Start 28; Stop 52
ttaggtaagtgtttctttgctttag

SEQ ID NO: 457000 - DNA, 25 bp, Artificial
  probe
  misc_feature (1)..(25): SEQ ID NO: 7036; WAN024CXC; Start 41; Stop 65
tctttgctttaggatgtggttataa

SEQ ID NO: 457001 - DNA, 25 bp, Artificial
  probe
  misc_feature (1)..(25): SEQ ID NO: 7036; WAN024CXC; Start 27; Stop 51
tttaggtaagtgtttctttgcttta

SEQ ID NO: 457002 - DNA, 25 bp, Artificial
  probe
  misc_feature (1)..(25): SEQ ID NO: 7036; WAN024CXC; Start 44; Stop 68
ttgctttaggatgtggttataattg

SEQ ID NO: 457003 - DNA, 25 bp, Artificial
  probe
  misc_feature (1)..(25): SEQ ID NO: 7036; WAN024CXC; Start 50; Stop 74
taggatgtggttataattggttaag

SEQ ID NO: 457004 - DNA, 25 bp, Artificial
  probe
  misc_feature (1)..(25): SEQ ID NO: 7036; WAN024CXC; Start 42; Stop 66
ctttgctttaggatgtggttataat

SEQ ID NO: 457005 - DNA, 25 bp, Artificial
  probe
  misc_feature (1)..(25): SEQ ID NO: 7036; WAN024CXC; Start 49; Stop 73
ttaggatgtggttataattggttaa

SEQ ID NO: 457006 - DNA, 25 bp, Artificial
  probe
  misc_feature (1)..(25): SEQ ID NO: 7036; WAN024CXC; Start 47; Stop 71
ctttaggatgtggttataattggtt

SEQ ID NO: 457007 - DNA, 25 bp, Artificial
  probe
  misc_feature (1)..(25): SEQ ID NO: 7036; WAN024CXC; Start 65; Stop 89
attggttaagtcagataagtagatt

SEQ ID NO: 457008 - DNA, 25 bp, Artificial
  probe
  misc_feature (1)..(25): SEQ ID NO: 7037; WAN024BTZ; Start 133; Stop 157
gcgtctatgattattcgaggctata

SEQ ID NO: 457009 - DNA, 25 bp, Artificial
  probe
  misc_feature (1)..(25): SEQ ID NO: 7037; WAN024BTZ; Start 144; Stop 168
tattcgaggctataaccatgcttac

SEQ ID NO: 457010 - DNA, 25 bp, Artificial
  probe
  misc_feature (1)..(25): SEQ ID NO: 7037; WAN024BTZ; Start 143; Stop 167
ttattcgaggctataaccatgctta

SEQ ID NO: 457011 - DNA, 25 bp, Artificial
  probe
  misc_feature (1)..(25): SEQ ID NO: 7037; WAN024BTZ; Start 142; Stop 166
attattcgaggctataaccatgctt

SEQ ID NO: 457012 - DNA, 25 bp, Artificial
  probe
  misc_feature (1)..(25): SEQ ID NO: 7037; WAN024BTZ; Start 141; Stop 165
gattattcgaggctataaccatgct

SEQ ID NO: 457013 - DNA, 25 bp, Artificial
  probe
  misc_feature (1)..(25): SEQ ID NO: 7037; WAN024BTZ; Start 140; Stop 164
tgattattcgaggctataaccatgc

SEQ ID NO: 457014 - DNA, 25 bp, Artificial
  probe
  misc_feature (1)..(25): SEQ ID NO: 7037; WAN024BTZ; Start 234; Stop 258
tacctacgacaatgaaccgcctata

SEQ ID NO: 457015 - DNA, 25 bp, Artificial
  probe
  misc_feature (1)..(25): SEQ ID NO: 7037; WAN024BTZ; Start 132; Stop 156
tgcgtctatgattattcgaggctat

SEQ ID NO: 457016 - DNA, 25 bp, Artificial
  probe
  misc_feature (1)..(25): SEQ ID NO: 7037; WAN024BTZ; Start 108; Stop 132
agaaagacgagaagagcaagaattt

SEQ ID NO: 457017 - DNA, 25 bp, Artificial
  probe
  misc_feature (1)..(25): SEQ ID NO: 7037; WAN024BTZ; Start 107; Stop 131
aagaaagacgagaagagcaagaatt

SEQ ID NO: 457018 - DNA, 25 bp, Artificial
  probe
  misc_feature (1)..(25): SEQ ID NO: 7037; WAN024BTZ; Start 106; Stop 130
gaagaaagacgagaagagcaagaat

SEQ ID NO: 457019 - DNA, 25 bp, Artificial
  probe
  misc_feature (1)..(25): SEQ ID NO: 7037; WAN024BTZ; Start 99; Stop 123
caaggaagaagaaagacgagaagag

SEQ ID NO: 457020 - DNA, 25 bp, Artificial
  probe
  misc_feature (1)..(25): SEQ ID NO: 7037; WAN024BTZ; Start 131; Stop 155
ttgcgtctatgattattcgaggcta

SEQ ID NO: 457021 - DNA, 25 bp, Artificial
  probe
  misc_feature (1)..(25): SEQ ID NO: 7037; WAN024BTZ; Start 139; Stop 163
atgattattcgaggctataaccatg

SEQ ID NO: 457022 - DNA, 25 bp, Artificial
  probe
  misc_feature (1)..(25): SEQ ID NO: 7037; WAN024BTZ; Start 109; Stop 133
gaaagacgagaagagcaagaatttg

SEQ ID NO: 457023 - DNA, 25 bp, Artificial
  probe
  misc_feature (1)..(25): SEQ ID NO: 7037; WAN024BTZ; Start 103; Stop 127
gaagaagaaagacgagaagagcaag

SEQ ID NO: 457024 - DNA, 25 bp, Artificial
  probe
  misc_feature (1)..(25): SEQ ID NO: 7037; WAN024BTZ; Start 134; Stop 158
cgtctatgattattcgaggctataa

SEQ ID NO: 457025 - DNA, 25 bp, Artificial
  probe
  misc_feature (1)..(25): SEQ ID NO: 7037; WAN024BTZ; Start 105; Stop 129
agaagaaagacgagaagagcaagaa

SEQ ID NO: 457026 - DNA, 25 bp, Artificial
  probe
  misc_feature (1)..(25): SEQ ID NO: 7037; WAN024BTZ; Start 104; Stop 128
aagaagaaagacgagaagagcaaga

SEQ ID NO: 457027 - DNA, 25 bp, Artificial
  probe
  misc_feature (1)..(25): SEQ ID NO: 7037; WAN024BTZ; Start 137; Stop 161
ctatgattattcgaggctataacca

SEQ ID NO: 457028 - DNA, 25 bp, Artificial
  probe
  misc_feature (1)..(25): SEQ ID NO: 7037; WAN024BTZ; Start 233; Stop 257
ttacctacgacaatgaaccgcctat

SEQ ID NO: 457029 - DNA, 25 bp, Artificial
  probe
  misc_feature (1)..(25): SEQ ID NO: 7037; WAN024BTZ; Start 136; Stop 160
tctatgattattcgaggctataacc

SEQ ID NO: 457030 - DNA, 25 bp, Artificial
  probe
  misc_feature (1)..(25): SEQ ID NO: 7037; WAN024BTZ; Start 100; Stop 124
aaggaagaagaaagacgagaagagc

SEQ ID NO: 457031 - DNA, 25 bp, Artificial
  probe
  misc_feature (1)..(25): SEQ ID NO: 7037; WAN024BTZ; Start 145; Stop 169
attcgaggctataaccatgcttacg

SEQ ID NO: 457032 - DNA, 25 bp, Artificial
  probe
  misc_feature (1)..(25): SEQ ID NO: 7037; WAN024BTZ; Start 128; Stop 152
aatttgcgtctatgattattcgagg

SEQ ID NO: 457033 - DNA, 25 bp, Artificial
  probe
  misc_feature (1)..(25): SEQ ID NO: 7037; WAN024BTZ; Start 138; Stop 162
tatgattattcgaggctataaccat

SEQ ID NO: 457034 - DNA, 25 bp, Artificial
  probe
  misc_feature (1)..(25): SEQ ID NO: 7037; WAN024BTZ; Start 102; Stop 126
ggaagaagaaagacgagaagagcaa

SEQ ID NO: 457035 - DNA, 25 bp, Artificial
  probe
  misc_feature (1)..(25): SEQ ID NO: 7037; WAN024BTZ; Start 98; Stop 122
gcaaggaagaagaaagacgagaaga

SEQ ID NO: 457036 - DNA, 25 bp, Artificial
  probe
  misc_feature (1)..(25): SEQ ID NO: 7037; WAN024BTZ; Start 149; Stop 173
gaggctataaccatgcttacgaacg

SEQ ID NO: 457037 - DNA, 25 bp, Artificial
  probe
  misc_feature (1)..(25): SEQ ID NO: 7037; WAN024BTZ; Start 148; Stop 172
cgaggctataaccatgcttacgaac

SEQ ID NO: 457038 - DNA, 25 bp, Artificial
  probe
  misc_feature (1)..(25): SEQ ID NO: 7037; WAN024BTZ; Start 91; Stop 115
gaacaacgcaaggaagaagaaagac

SEQ ID NO: 457039 - DNA, 25 bp, Artificial
  probe
  misc_feature (1)..(25): SEQ ID NO: 7037; WAN024BTZ; Start 129; Stop 153
atttgcgtctatgattattcgaggc

SEQ ID NO: 457040 - DNA, 25 bp, Artificial
  probe
  misc_feature (1)..(25): SEQ ID NO: 7037; WAN024BTZ; Start 189; Stop 213
acgtcaagaaatccgcaagaatatt

SEQ ID NO: 457041 - DNA, 25 bp, Artificial
  probe
  misc_feature (1)..(25): SEQ ID NO: 7038; WAN024BIL; Start 86; Stop 110
tagatgactgctttccaacaacttc

SEQ ID NO: 457042 - DNA, 25 bp, Artificial
  probe
  misc_feature (1)..(25): SEQ ID NO: 7038; WAN024BIL; Start 85; Stop 109
ctagatgactgctttccaacaactt

SEQ ID NO: 457043 - DNA, 25 bp, Artificial
  probe
  misc_feature (1)..(25): SEQ ID NO: 7038; WAN024BIL; Start 89; Stop 113
atgactgctttccaacaacttccat

SEQ ID NO: 457044 - DNA, 25 bp, Artificial
  probe
  misc_feature (1)..(25): SEQ ID NO: 7038; WAN024BIL; Start 28; Stop 52
gatttgaagcaagtcactttccctg

SEQ ID NO: 457045 - DNA, 25 bp, Artificial
  probe
  misc_feature (1)..(25): SEQ ID NO: 7038; WAN024BIL; Start 87; Stop 111
agatgactgctttccaacaacttcc

SEQ ID NO: 457046 - DNA, 25 bp, Artificial
  probe
  misc_feature (1)..(25): SEQ ID NO: 7038; WAN024BIL; Start 30; Stop 54
tttgaagcaagtcactttccctgat

SEQ ID NO: 457047 - DNA, 25 bp, Artificial
  probe
  misc_feature (1)..(25): SEQ ID NO: 7038; WAN024BIL; Start 29; Stop 53
atttgaagcaagtcactttccctga

SEQ ID NO: 457048 - DNA, 25 bp, Artificial
  probe
  misc_feature (1)..(25): SEQ ID NO: 7038; WAN024BIL; Start 88; Stop 112
gatgactgctttccaacaacttcca

SEQ ID NO: 457049 - DNA, 25 bp, Artificial
  probe
  misc_feature (1)..(25): SEQ ID NO: 7038; WAN024BIL; Start 31; Stop 55
ttgaagcaagtcactttccctgatg

SEQ ID NO: 457050 - DNA, 25 bp, Artificial
  probe
  misc_feature (1)..(25): SEQ ID NO: 7038; WAN024BIL; Start 32; Stop 56
tgaagcaagtcactttccctgatga

SEQ ID NO: 457051 - DNA, 25 bp, Artificial
  probe
  misc_feature (1)..(25): SEQ ID NO: 7038; WAN024BIL; Start 36; Stop 60
gcaagtcactttccctgatgacaaa

SEQ ID NO: 457052 - DNA, 25 bp, Artificial
  probe
  misc_feature (1)..(25): SEQ ID NO: 7038; WAN024BIL; Start 37; Stop 61
caagtcactttccctgatgacaaaa

SEQ ID NO: 457053 - DNA, 25 bp, Artificial
  probe
  misc_feature (1)..(25): SEQ ID NO: 7038; WAN024BIL; Start 33; Stop 57
gaagcaagtcactttccctgatgac

SEQ ID NO: 457054 - DNA, 25 bp, Artificial
  probe
  misc_feature (1)..(25): SEQ ID NO: 7038; WAN024BIL; Start 35; Stop 59
agcaagtcactttccctgatgacaa

SEQ ID NO: 457055 - DNA, 25 bp, Artificial
  probe
  misc_feature (1)..(25): SEQ ID NO: 7038; WAN024BIL; Start 34; Stop 58
aagcaagtcactttccctgatgaca

SEQ ID NO: 457056 - DNA, 25 bp, Artificial
  probe
  misc_feature (1)..(25): SEQ ID NO: 7039; WAN024BNI; Start 177; Stop 201
ctacttacttggtcgcacagataat

SEQ ID NO: 457057 - DNA, 25 bp, Artificial
  probe
  misc_feature (1)..(25): SEQ ID NO: 7039; WAN024BNI; Start 178; Stop 202
tacttacttggtcgcacagataatc

SEQ ID NO: 457058 - DNA, 25 bp, Artificial
  probe
  misc_feature (1)..(25): SEQ ID NO: 7039; WAN024BNI; Start 192; Stop 216
cacagataatcctaccatcgctaat

SEQ ID NO: 457059 - DNA, 25 bp, Artificial
  probe
  misc_feature (1)..(25): SEQ ID NO: 7039; WAN024BNI; Start 181; Stop 205
ttacttggtcgcacagataatccta

SEQ ID NO: 457060 - DNA, 25 bp, Artificial
  probe
  misc_feature (1)..(25): SEQ ID NO: 7039; WAN024BNI; Start 193; Stop 217
acagataatcctaccatcgctaata

SEQ ID NO: 457061 - DNA, 25 bp, Artificial
  probe
  misc_feature (1)..(25): SEQ ID NO: 7039; WAN024BNI; Start 176; Stop 200
actacttacttggtcgcacagataa

SEQ ID NO: 457062 - DNA, 25 bp, Artificial
  probe
  misc_feature (1)..(25): SEQ ID NO: 7039; WAN024BNI; Start 149; Stop 173
tcgctgactacttcaatgtatctac

SEQ ID NO: 457063 - DNA, 25 bp, Artificial
  probe
  misc_feature (1)..(25): SEQ ID NO: 7039; WAN024BNI; Start 147; Stop 171
aatcgctgactacttcaatgtatct

SEQ ID NO: 457064 - DNA, 25 bp, Artificial
  probe
  misc_feature (1)..(25): SEQ ID NO: 7039; WAN024BNI; Start 122; Stop 146
ctccatctgctgaacatatatccaa

SEQ ID NO: 457065 - DNA, 25 bp, Artificial
  probe
  misc_feature (1)..(25): SEQ ID NO: 7039; WAN024BNI; Start 148; Stop 172
atcgctgactacttcaatgtatcta

SEQ ID NO: 457066 - DNA, 25 bp, Artificial
  probe
  misc_feature (1)..(25): SEQ ID NO: 7039; WAN024BNI; Start 120; Stop 144
gactccatctgctgaacatatatcc

SEQ ID NO: 457067 - DNA, 25 bp, Artificial
  probe
  misc_feature (1)..(25): SEQ ID NO: 7039; WAN024BNI; Start 182; Stop 206
tacttggtcgcacagataatcctac

SEQ ID NO: 457068 - DNA, 25 bp, Artificial
  probe
  misc_feature (1)..(25): SEQ ID NO: 7039; WAN024BNI; Start 119; Stop 143
agactccatctgctgaacatatatc

SEQ ID NO: 457069 - DNA, 25 bp, Artificial
  probe
  misc_feature (1)..(25): SEQ ID NO: 7039; WAN024BNI; Start 121; Stop 145
actccatctgctgaacatatatcca

SEQ ID NO: 457070 - DNA, 25 bp, Artificial
  probe
  misc_feature (1)..(25): SEQ ID NO: 7039; WAN024BNI; Start 118; Stop 142
aagactccatctgctgaacatatat

SEQ ID NO: 457071 - DNA, 25 bp, Artificial
  probe
  misc_feature (1)..(25): SEQ ID NO: 7039; WAN024BNI; Start 150; Stop 174
cgctgactacttcaatgtatctaca

SEQ ID NO: 457072 - DNA, 25 bp, Artificial
  probe
  misc_feature (1)..(25): SEQ ID NO: 7039; WAN024BNI; Start 194; Stop 218
cagataatcctaccatcgctaataa

SEQ ID NO: 457073 - DNA, 25 bp, Artificial
  probe
  misc_feature (1)..(25): SEQ ID NO: 7039; WAN024BNI; Start 167; Stop 191
tatctacagactacttacttggtcg

SEQ ID NO: 457074 - DNA, 25 bp, Artificial
  probe
  misc_feature (1)..(25): SEQ ID NO: 7039; WAN024BNI; Start 191; Stop 215
gcacagataatcctaccatcgctaa

SEQ ID NO: 457075 - DNA, 25 bp, Artificial
  probe
  misc_feature (1)..(25): SEQ ID NO: 7039; WAN024BNI; Start 180; Stop 204
cttacttggtcgcacagataatcct

SEQ ID NO: 457076 - DNA, 25 bp, Artificial
  probe
  misc_feature (1)..(25): SEQ ID NO: 7039; WAN024BNI; Start 151; Stop 175
gctgactacttcaatgtatctacag

SEQ ID NO: 457077 - DNA, 25 bp, Artificial
  probe
  misc_feature (1)..(25): SEQ ID NO: 7039; WAN024BNI; Start 168; Stop 192
atctacagactacttacttggtcgc

SEQ ID NO: 457078 - DNA, 25 bp, Artificial
  probe
  misc_feature (1)..(25): SEQ ID NO: 7039; WAN024BNI; Start 179; Stop 203
acttacttggtcgcacagataatcc

SEQ ID NO: 457079 - DNA, 25 bp, Artificial
  probe
  misc_feature (1)..(25): SEQ ID NO: 7039; WAN024BNI; Start 165; Stop 189
tgtatctacagactacttacttggt

SEQ ID NO: 457080 - DNA, 25 bp, Artificial
  probe
  misc_feature (1)..(25): SEQ ID NO: 7039; WAN024BNI; Start 175; Stop 199
gactacttacttggtcgcacagata

SEQ ID NO: 457081 - DNA, 25 bp, Artificial
  probe
  misc_feature (1)..(25): SEQ ID NO: 7039; WAN024BNI; Start 59; Stop 83
acactttagaagatagggttggttt

SEQ ID NO: 457082 - DNA, 25 bp, Artificial
  probe
  misc_feature (1)..(25): SEQ ID NO: 7039; WAN024BNI; Start 61; Stop 85
actttagaagatagggttggtttgg

SEQ ID NO: 457083 - DNA, 25 bp, Artificial
  probe
  misc_feature (1)..(25): SEQ ID NO: 7039; WAN024BNI; Start 60; Stop 84
cactttagaagatagggttggtttg

SEQ ID NO: 457084 - DNA, 25 bp, Artificial
  probe
  misc_feature (1)..(25): SEQ ID NO: 7039; WAN024BNI; Start 166; Stop 190
gtatctacagactacttacttggtc

SEQ ID NO: 457085 - DNA, 25 bp, Artificial
  probe
  misc_feature (1)..(25): SEQ ID NO: 7039; WAN024BNI; Start 58; Stop 82
aacactttagaagatagggttggtt

SEQ ID NO: 457086 - DNA, 25 bp, Artificial
  probe
  misc_feature (1)..(25): SEQ ID NO: 7039; WAN024BNI; Start 57; Stop 81
aaacactttagaagatagggttggt

SEQ ID NO: 457087 - DNA, 25 bp, Artificial
  probe
  misc_feature (1)..(25): SEQ ID NO: 7039; WAN024BNI; Start 117; Stop 141
aaagactccatctgctgaacatata

SEQ ID NO: 457088 - DNA, 25 bp, Artificial
  probe
  misc_feature (1)..(25): SEQ ID NO: 7039; WAN024BNI; Start 62; Stop 86
ctttagaagatagggttggtttggg

SEQ ID NO: 457089 - DNA, 25 bp, Artificial
  probe
  misc_feature (1)..(25): SEQ ID NO: 7040; WAN024FQR; Start 66; Stop 90
agaagaagacttaggttatggtaga

SEQ ID NO: 457090 - DNA, 25 bp, Artificial
  probe
  misc_feature (1)..(25): SEQ ID NO: 7040; WAN024FQR; Start 63; Stop 87
agtagaagaagacttaggttatggt

SEQ ID NO: 457091 - DNA, 25 bp, Artificial
  probe
  misc_feature (1)..(25): SEQ ID NO: 7040; WAN024FQR; Start 67; Stop 91
gaagaagacttaggttatggtagaa

SEQ ID NO: 457092 - DNA, 25 bp, Artificial
  probe
  misc_feature (1)..(25): SEQ ID NO: 7040; WAN024FQR; Start 228; Stop 252
ccaagtaaacggacaaatcatagac

SEQ ID NO: 457093 - DNA, 25 bp, Artificial
  probe
  misc_feature (1)..(25): SEQ ID NO: 7040; WAN024FQR; Start 227; Stop 251
cccaagtaaacggacaaatcataga

SEQ ID NO: 457094 - DNA, 25 bp, Artificial
  probe
  misc_feature (1)..(25): SEQ ID NO: 7040; WAN024FQR; Start 238; Stop 262
ggacaaatcatagacttacgcaaag

SEQ ID NO: 457095 - DNA, 25 bp, Artificial
  probe
  misc_feature (1)..(25): SEQ ID NO: 7040; WAN024FQR; Start 233; Stop 257
taaacggacaaatcatagacttacg

SEQ ID NO: 457096 - DNA, 25 bp, Artificial
  probe
  misc_feature (1)..(25): SEQ ID NO: 7040; WAN024FQR; Start 288; Stop 312
cgggaaaccactaaatgaagatgat

SEQ ID NO: 457097 - DNA, 25 bp, Artificial
  probe
  misc_feature (1)..(25): SEQ ID NO: 7040; WAN024FQR; Start 241; Stop 265
caaatcatagacttacgcaaagcag

SEQ ID NO: 457098 - DNA, 25 bp, Artificial
  probe
  misc_feature (1)..(25): SEQ ID NO: 7040; WAN024FQR; Start 239; Stop 263
gacaaatcatagacttacgcaaagc

SEQ ID NO: 457099 - DNA, 25 bp, Artificial
  probe
  misc_feature (1)..(25): SEQ ID NO: 7040; WAN024FQR; Start 213; Stop 237
gagtgatgaatttgcccaagtaaac

SEQ ID NO: 457100 - DNA, 25 bp, Artificial
  probe
  misc_feature (1)..(25): SEQ ID NO: 7040; WAN024FQR; Start 277; Stop 301
atgttatttgacgggaaaccactaa

SEQ ID NO: 457101 - DNA, 25 bp, Artificial
  probe
  misc_feature (1)..(25): SEQ ID NO: 7040; WAN024FQR; Start 278; Stop 302
tgttatttgacgggaaaccactaaa

SEQ ID NO: 457102 - DNA, 25 bp, Artificial
  probe
  misc_feature (1)..(25): SEQ ID NO: 7040; WAN024FQR; Start 289; Stop 313
gggaaaccactaaatgaagatgata

SEQ ID NO: 457103 - DNA, 25 bp, Artificial
  probe
  misc_feature (1)..(25): SEQ ID NO: 7040; WAN024FQR; Start 64; Stop 88
gtagaagaagacttaggttatggta

SEQ ID NO: 457104 - DNA, 25 bp, Artificial
  probe
  misc_feature (1)..(25): SEQ ID NO: 7040; WAN024FQR; Start 312; Stop 336
tatcgacttcattacatccgtccta

SEQ ID NO: 457105 - DNA, 25 bp, Artificial
  probe
  misc_feature (1)..(25): SEQ ID NO: 7040; WAN024FQR; Start 240; Stop 264
acaaatcatagacttacgcaaagca

SEQ ID NO: 457106 - DNA, 25 bp, Artificial
  probe
  misc_feature (1)..(25): SEQ ID NO: 7040; WAN024FQR; Start 237; Stop 261
cggacaaatcatagacttacgcaaa

SEQ ID NO: 457107 - DNA, 25 bp, Artificial
  probe
  misc_feature (1)..(25): SEQ ID NO: 7040; WAN024FQR; Start 234; Stop 258
aaacggacaaatcatagacttacgc

SEQ ID NO: 457108 - DNA, 25 bp, Artificial
  probe
  misc_feature (1)..(25): SEQ ID NO: 7040; WAN024FQR; Start 283; Stop 307
tttgacgggaaaccactaaatgaag

SEQ ID NO: 457109 - DNA, 25 bp, Artificial
  probe
  misc_feature (1)..(25): SEQ ID NO: 7040; WAN024FQR; Start 229; Stop 253
caagtaaacggacaaatcatagact

SEQ ID NO: 457110 - DNA, 25 bp, Artificial
  probe
  misc_feature (1)..(25): SEQ ID NO: 7040; WAN024FQR; Start 316; Stop 340
gacttcattacatccgtcctatccg

SEQ ID NO: 457111 - DNA, 25 bp, Artificial
  probe
  misc_feature (1)..(25): SEQ ID NO: 7040; WAN024FQR; Start 315; Stop 339
cgacttcattacatccgtcctatcc

SEQ ID NO: 457112 - DNA, 25 bp, Artificial
  probe
  misc_feature (1)..(25): SEQ ID NO: 7040; WAN024FQR; Start 313; Stop 337
atcgacttcattacatccgtcctat

SEQ ID NO: 457113 - DNA, 25 bp, Artificial
  probe
  misc_feature (1)..(25): SEQ ID NO: 7040; WAN024FQR; Start 311; Stop 335
atatcgacttcattacatccgtcct

SEQ ID NO: 457114 - DNA, 25 bp, Artificial
  probe
  misc_feature (1)..(25): SEQ ID NO: 7040; WAN024FQR; Start 65; Stop 89
tagaagaagacttaggttatggtag

SEQ ID NO: 457115 - DNA, 25 bp, Artificial
  probe
  misc_feature (1)..(25): SEQ ID NO: 7040; WAN024FQR; Start 280; Stop 304
ttatttgacgggaaaccactaaatg

SEQ ID NO: 457116 - DNA, 25 bp, Artificial
  probe
  misc_feature (1)..(25): SEQ ID NO: 7040; WAN024FQR; Start 279; Stop 303
gttatttgacgggaaaccactaaat

SEQ ID NO: 457117 - DNA, 25 bp, Artificial
  probe
  misc_feature (1)..(25): SEQ ID NO: 7040; WAN024FQR; Start 286; Stop 310
gacgggaaaccactaaatgaagatg

SEQ ID NO: 457118 - DNA, 25 bp, Artificial
  probe
  misc_feature (1)..(25): SEQ ID NO: 7040; WAN024FQR; Start 281; Stop 305
tatttgacgggaaaccactaaatga

SEQ ID NO: 457119 - DNA, 25 bp, Artificial
  probe
  misc_feature (1)..(25): SEQ ID NO: 7040; WAN024FQR; Start 212; Stop 236
ggagtgatgaatttgcccaagtaaa

SEQ ID NO: 457120 - DNA, 25 bp, Artificial
  probe
  misc_feature (1)..(25): SEQ ID NO: 7040; WAN024FQR; Start 309; Stop 333
tgatatcgacttcattacatccgtc

SEQ ID NO: 457121 - DNA, 25 bp, Artificial
  probe
  misc_feature (1)..(25): SEQ ID NO: 7040; WAN024FQR; Start 282; Stop 306
atttgacgggaaaccactaaatgaa

SEQ ID NO: 457122 - DNA, 25 bp, Artificial
  probe
  misc_feature (1)..(25): SEQ ID NO: 7041; WAN024DRR; Start 226; Stop 250
ttagaccgaaataaggcaaagaaag

SEQ ID NO: 457123 - DNA, 25 bp, Artificial
  probe
  misc_feature (1)..(25): SEQ ID NO: 7041; WAN024DRR; Start 225; Stop 249
tttagaccgaaataaggcaaagaaa

SEQ ID NO: 457124 - DNA, 25 bp, Artificial
  probe
  misc_feature (1)..(25): SEQ ID NO: 7041; WAN024DRR; Start 353; Stop 377
cggagtatttgtatggattaagtgt

SEQ ID NO: 457125 - DNA, 25 bp, Artificial
  probe
  misc_feature (1)..(25): SEQ ID NO: 7041; WAN024DRR; Start 352; Stop 376
acggagtatttgtatggattaagtg

SEQ ID NO: 457126 - DNA, 25 bp, Artificial
  probe
  misc_feature (1)..(25): SEQ ID NO: 7041; WAN024DRR; Start 227; Stop 251
tagaccgaaataaggcaaagaaagc

SEQ ID NO: 457127 - DNA, 25 bp, Artificial
  probe
  misc_feature (1)..(25): SEQ ID NO: 7041; WAN024DRR; Start 144; Stop 168
ctgttcgtctagtgaggcaaataaa

SEQ ID NO: 457128 - DNA, 25 bp, Artificial
  probe
  misc_feature (1)..(25): SEQ ID NO: 7041; WAN024DRR; Start 223; Stop 247
gatttagaccgaaataaggcaaaga

SEQ ID NO: 457129 - DNA, 25 bp, Artificial
  probe
  misc_feature (1)..(25): SEQ ID NO: 7041; WAN024DRR; Start 222; Stop 246
cgatttagaccgaaataaggcaaag

SEQ ID NO: 457130 - DNA, 25 bp, Artificial
  probe
  misc_feature (1)..(25): SEQ ID NO: 7041; WAN024DRR; Start 351; Stop 375
aacggagtatttgtatggattaagt

SEQ ID NO: 457131 - DNA, 25 bp, Artificial
  probe
  misc_feature (1)..(25): SEQ ID NO: 7041; WAN024DRR; Start 224; Stop 248
atttagaccgaaataaggcaaagaa

SEQ ID NO: 457132 - DNA, 25 bp, Artificial
  probe
  misc_feature (1)..(25): SEQ ID NO: 7041; WAN024DRR; Start 182; Stop 206
atatgaaagctgctgaacaaggaaa

SEQ ID NO: 457133 - DNA, 25 bp, Artificial
  probe
  misc_feature (1)..(25): SEQ ID NO: 7041; WAN024DRR; Start 350; Stop 374
aaacggagtatttgtatggattaag

SEQ ID NO: 457134 - DNA, 25 bp, Artificial
  probe
  misc_feature (1)..(25): SEQ ID NO: 7041; WAN024DRR; Start 315; Stop 339
aaatttcgccttaaacctaaagttg

SEQ ID NO: 457135 - DNA, 25 bp, Artificial
  probe
  misc_feature (1)..(25): SEQ ID NO: 7041; WAN024DRR; Start 354; Stop 378
ggagtatttgtatggattaagtgtt

SEQ ID NO: 457136 - DNA, 25 bp, Artificial
  probe
  misc_feature (1)..(25): SEQ ID NO: 7041; WAN024DRR; Start 193; Stop 217
gctgaacaaggaaaacaacatagag

SEQ ID NO: 457137 - DNA, 25 bp, Artificial
  probe
  misc_feature (1)..(25): SEQ ID NO: 7041; WAN024DRR; Start 231; Stop 255
ccgaaataaggcaaagaaagcgatc

SEQ ID NO: 457138 - DNA, 25 bp, Artificial
  probe
  misc_feature (1)..(25): SEQ ID NO: 7041; WAN024DRR; Start 194; Stop 218
ctgaacaaggaaaacaacatagaga

SEQ ID NO: 457139 - DNA, 25 bp, Artificial
  probe
  misc_feature (1)..(25): SEQ ID NO: 7041; WAN024DRR; Start 191; Stop 215
ctgctgaacaaggaaaacaacatag

SEQ ID NO: 457140 - DNA, 25 bp, Artificial
  probe
  misc_feature (1)..(25): SEQ ID NO: 7041; WAN024DRR; Start 143; Stop 167
cctgttcgtctagtgaggcaaataa

SEQ ID NO: 457141 - DNA, 25 bp, Artificial
  probe
  misc_feature (1)..(25): SEQ ID NO: 7041; WAN024DRR; Start 157; Stop 181
gaggcaaataaaagtcagacagaac

SEQ ID NO: 457142 - DNA, 25 bp, Artificial
  probe
  misc_feature (1)..(25): SEQ ID NO: 7041; WAN024DRR; Start 192; Stop 216
tgctgaacaaggaaaacaacataga

SEQ ID NO: 457143 - DNA, 25 bp, Artificial
  probe
  misc_feature (1)..(25): SEQ ID NO: 7041; WAN024DRR; Start 230; Stop 254
accgaaataaggcaaagaaagcgat

SEQ ID NO: 457144 - DNA, 25 bp, Artificial
  probe
  misc_feature (1)..(25): SEQ ID NO: 7041; WAN024DRR; Start 199; Stop 223
caaggaaaacaacatagagaaatcg

SEQ ID NO: 457145 - DNA, 25 bp, Artificial
  probe
  misc_feature (1)..(25): SEQ ID NO: 7041; WAN024DRR; Start 195; Stop 219
tgaacaaggaaaacaacatagagaa

SEQ ID NO: 457146 - DNA, 25 bp, Artificial
  probe
  misc_feature (1)..(25): SEQ ID NO: 7041; WAN024DRR; Start 146; Stop 170
gttcgtctagtgaggcaaataaaag

SEQ ID NO: 457147 - DNA, 25 bp, Artificial
  probe
  misc_feature (1)..(25): SEQ ID NO: 7041; WAN024DRR; Start 147; Stop 171
ttcgtctagtgaggcaaataaaagt

SEQ ID NO: 457148 - DNA, 25 bp, Artificial
  probe
  misc_feature (1)..(25): SEQ ID NO: 7041; WAN024DRR; Start 145; Stop 169
tgttcgtctagtgaggcaaataaaa

SEQ ID NO: 457149 - DNA, 25 bp, Artificial
  probe
  misc_feature (1)..(25): SEQ ID NO: 7041; WAN024DRR; Start 181; Stop 205
catatgaaagctgctgaacaaggaa

SEQ ID NO: 457150 - DNA, 25 bp, Artificial
  probe
  misc_feature (1)..(25): SEQ ID NO: 7041; WAN024DRR; Start 148; Stop 172
tcgtctagtgaggcaaataaaagtc

SEQ ID NO: 457151 - DNA, 25 bp, Artificial
  probe
  misc_feature (1)..(25): SEQ ID NO: 7041; WAN024DRR; Start 116; Stop 140
cagaaggaggtaactacccaagtag

SEQ ID NO: 457152 - DNA, 25 bp, Artificial
  probe
  misc_feature (1)..(25): SEQ ID NO: 7041; WAN024DRR; Start 153; Stop 177
tagtgaggcaaataaaagtcagaca

SEQ ID NO: 457153 - DNA, 25 bp, Artificial
  probe
  misc_feature (1)..(25): SEQ ID NO: 7041; WAN024DRR; Start 156; Stop 180
tgaggcaaataaaagtcagacagaa

SEQ ID NO: 457154 - DNA, 25 bp, Artificial
  probe
  misc_feature (1)..(25): SEQ ID NO: 7041; WAN024DRR; Start 179; Stop 203
aacatatgaaagctgctgaacaagg

SEQ ID NO: 457155 - DNA, 25 bp, Artificial
  probe
  misc_feature (1)..(25): SEQ ID NO: 7042; WAN024DRM; Start 133; Stop 157
ccagtagccacttcttctaataagg

SEQ ID NO: 457156 - DNA, 25 bp, Artificial
  probe
  misc_feature (1)..(25): SEQ ID NO: 7042; WAN024DRM; Start 394; Stop 418
aaagatacattgaaaccaggagaaa

SEQ ID NO: 457157 - DNA, 25 bp, Artificial
  probe
  misc_feature (1)..(25): SEQ ID NO: 7042; WAN024DRM; Start 424; Stop 448
gaagaagctcagaagaaggttgaag

SEQ ID NO: 457158 - DNA, 25 bp, Artificial
  probe
  misc_feature (1)..(25): SEQ ID NO: 7042; WAN024DRM; Start 253; Stop 277
aatctcgccttaaacataaagttga

SEQ ID NO: 457159 - DNA, 25 bp, Artificial
  probe
  misc_feature (1)..(25): SEQ ID NO: 7042; WAN024DRM; Start 132; Stop 156
cccagtagccacttcttctaataag

SEQ ID NO: 457160 - DNA, 25 bp, Artificial
  probe
  misc_feature (1)..(25): SEQ ID NO: 7042; WAN024DRM; Start 425; Stop 449
aagaagctcagaagaaggttgaaga

SEQ ID NO: 457161 - DNA, 25 bp, Artificial
  probe
  misc_feature (1)..(25): SEQ ID NO: 7042; WAN024DRM; Start 254; Stop 278
atctcgccttaaacataaagttgag

SEQ ID NO: 457162 - DNA, 25 bp, Artificial
  probe
  misc_feature (1)..(25): SEQ ID NO: 7042; WAN024DRM; Start 423; Stop 447
tgaagaagctcagaagaaggttgaa

SEQ ID NO: 457163 - DNA, 25 bp, Artificial
  probe
  misc_feature (1)..(25): SEQ ID NO: 7042; WAN024DRM; Start 422; Stop 446
ttgaagaagctcagaagaaggttga

SEQ ID NO: 457164 - DNA, 25 bp, Artificial
  probe
  misc_feature (1)..(25): SEQ ID NO: 7042; WAN024DRM; Start 421; Stop 445
gttgaagaagctcagaagaaggttg

SEQ ID NO: 457165 - DNA, 25 bp, Artificial
  probe
  misc_feature (1)..(25): SEQ ID NO: 7042; WAN024DRM; Start 252; Stop 276
aaatctcgccttaaacataaagttg

SEQ ID NO: 457166 - DNA, 25 bp, Artificial
  probe
  misc_feature (1)..(25): SEQ ID NO: 7042; WAN024DRM; Start 290; Stop 314
cgaagtatttgcgtgaattaaatgt

SEQ ID NO: 457167 - DNA, 25 bp, Artificial
  probe
  misc_feature (1)..(25): SEQ ID NO: 7042; WAN024DRM; Start 186; Stop 210
agctgctgaacaagtcgatgaatat

SEQ ID NO: 457168 - DNA, 25 bp, Artificial
  probe
  misc_feature (1)..(25): SEQ ID NO: 7042; WAN024DRM; Start 255; Stop 279
tctcgccttaaacataaagttgagc

SEQ ID NO: 457169 - DNA, 25 bp, Artificial
  probe
  misc_feature (1)..(25): SEQ ID NO: 7042; WAN024DRM; Start 185; Stop 209
aagctgctgaacaagtcgatgaata

SEQ ID NO: 457170 - DNA, 25 bp, Artificial
  probe
  misc_feature (1)..(25): SEQ ID NO: 7042; WAN024DRM; Start 418; Stop 442
aaggttgaagaagctcagaagaagg

SEQ ID NO: 457171 - DNA, 25 bp, Artificial
  probe
  misc_feature (1)..(25): SEQ ID NO: 7042; WAN024DRM; Start 433; Stop 457
cagaagaaggttgaagaagctgaga

SEQ ID NO: 457172 - DNA, 25 bp, Artificial
  probe
  misc_feature (1)..(25): SEQ ID NO: 7042; WAN024DRM; Start 420; Stop 444
ggttgaagaagctcagaagaaggtt

SEQ ID NO: 457173 - DNA, 25 bp, Artificial
  probe
  misc_feature (1)..(25): SEQ ID NO: 7042; WAN024DRM; Start 417; Stop 441
aaaggttgaagaagctcagaagaag

SEQ ID NO: 457174 - DNA, 25 bp, Artificial
  probe
  misc_feature (1)..(25): SEQ ID NO: 7042; WAN024DRM; Start 140; Stop 164
ccacttcttctaataaggcaaataa

SEQ ID NO: 457175 - DNA, 25 bp, Artificial
  probe
  misc_feature (1)..(25): SEQ ID NO: 7042; WAN024DRM; Start 291; Stop 315
gaagtatttgcgtgaattaaatgtt

SEQ ID NO: 457176 - DNA, 25 bp, Artificial
  probe
  misc_feature (1)..(25): SEQ ID NO: 7042; WAN024DRM; Start 397; Stop 421
gatacattgaaaccaggagaaaagg

SEQ ID NO: 457177 - DNA, 25 bp, Artificial
  probe
  misc_feature (1)..(25): SEQ ID NO: 7042; WAN024DRM; Start 248; Stop 272
cccaaaatctcgccttaaacataaa

SEQ ID NO: 457178 - DNA, 25 bp, Artificial
  probe
  misc_feature (1)..(25): SEQ ID NO: 7042; WAN024DRM; Start 246; Stop 270
tacccaaaatctcgccttaaacata

SEQ ID NO: 457179 - DNA, 25 bp, Artificial
  probe
  misc_feature (1)..(25): SEQ ID NO: 7042; WAN024DRM; Start 240; Stop 264
aaaacatacccaaaatctcgcctta

SEQ ID NO: 457180 - DNA, 25 bp, Artificial
  probe
  misc_feature (1)..(25): SEQ ID NO: 7042; WAN024DRM; Start 154; Stop 178
aaggcaaataaaagtcagacagaac

SEQ ID NO: 457181 - DNA, 25 bp, Artificial
  probe
  misc_feature (1)..(25): SEQ ID NO: 7042; WAN024DRM; Start 396; Stop 420
agatacattgaaaccaggagaaaag

SEQ ID NO: 457182 - DNA, 25 bp, Artificial
  probe
  misc_feature (1)..(25): SEQ ID NO: 7042; WAN024DRM; Start 245; Stop 269
atacccaaaatctcgccttaaacat

SEQ ID NO: 457183 - DNA, 25 bp, Artificial
  probe
  misc_feature (1)..(25): SEQ ID NO: 7042; WAN024DRM; Start 176; Stop 200
aacatatgaaagctgctgaacaagt

SEQ ID NO: 457184 - DNA, 25 bp, Artificial
  probe
  misc_feature (1)..(25): SEQ ID NO: 7042; WAN024DRM; Start 419; Stop 443
aggttgaagaagctcagaagaaggt

SEQ ID NO: 457185 - DNA, 25 bp, Artificial
  probe
  misc_feature (1)..(25): SEQ ID NO: 7042; WAN024DRM; Start 247; Stop 271
acccaaaatctcgccttaaacataa

SEQ ID NO: 457186 - DNA, 25 bp, Artificial
  probe
  misc_feature (1)..(25): SEQ ID NO: 7042; WAN024DRM; Start 242; Stop 266
aacatacccaaaatctcgccttaaa

SEQ ID NO: 457187 - DNA, 25 bp, Artificial
  probe
  misc_feature (1)..(25): SEQ ID NO: 7042; WAN024DRM; Start 241; Stop 265
aaacatacccaaaatctcgccttaa

SEQ ID NO: 457188 - DNA, 25 bp, Artificial
  probe
  misc_feature (1)..(25): SEQ ID NO: 7043; WAN024DRX; Start 178; Stop 202
gctgatgaagtcaagtcgcattatc

SEQ ID NO: 457189 - DNA, 25 bp, Artificial
  probe
  misc_feature (1)..(25): SEQ ID NO: 7043; WAN024DRX; Start 184; Stop 208
gaagtcaagtcgcattatcaaagta

SEQ ID NO: 457190 - DNA, 25 bp, Artificial
  probe
  misc_feature (1)..(25): SEQ ID NO: 7043; WAN024DRX; Start 185; Stop 209
aagtcaagtcgcattatcaaagtat

SEQ ID NO: 457191 - DNA, 25 bp, Artificial
  probe
  misc_feature (1)..(25): SEQ ID NO: 7043; WAN024DRX; Start 129; Stop 153
gaatacctccacggttacatctagt

SEQ ID NO: 457192 - DNA, 25 bp, Artificial
  probe
  misc_feature (1)..(25): SEQ ID NO: 7043; WAN024DRX; Start 130; Stop 154
aatacctccacggttacatctagtg

SEQ ID NO: 457193 - DNA, 25 bp, Artificial
  probe
  misc_feature (1)..(25): SEQ ID NO: 7043; WAN024DRX; Start 182; Stop 206
atgaagtcaagtcgcattatcaaag

SEQ ID NO: 457194 - DNA, 25 bp, Artificial
  probe
  misc_feature (1)..(25): SEQ ID NO: 7043; WAN024DRX; Start 181; Stop 205
gatgaagtcaagtcgcattatcaaa

SEQ ID NO: 457195 - DNA, 25 bp, Artificial
  probe
  misc_feature (1)..(25): SEQ ID NO: 7043; WAN024DRX; Start 157; Stop 181
caagatacatcgaagaagtatgctg

SEQ ID NO: 457196 - DNA, 25 bp, Artificial
  probe
  misc_feature (1)..(25): SEQ ID NO: 7043; WAN024DRX; Start 158; Stop 182
aagatacatcgaagaagtatgctga

SEQ ID NO: 457197 - DNA, 25 bp, Artificial
  probe
  misc_feature (1)..(25): SEQ ID NO: 7043; WAN024DRX; Start 159; Stop 183
agatacatcgaagaagtatgctgat

SEQ ID NO: 457198 - DNA, 25 bp, Artificial
  probe
  misc_feature (1)..(25): SEQ ID NO: 7043; WAN024DRX; Start 183; Stop 207
tgaagtcaagtcgcattatcaaagt

SEQ ID NO: 457199 - DNA, 25 bp, Artificial
  probe
  misc_feature (1)..(25): SEQ ID NO: 7043; WAN024DRX; Start 128; Stop 152
ggaatacctccacggttacatctag

SEQ ID NO: 457200 - DNA, 25 bp, Artificial
  probe
  misc_feature (1)..(25): SEQ ID NO: 7043; WAN024DRX; Start 186; Stop 210
agtcaagtcgcattatcaaagtata

SEQ ID NO: 457201 - DNA, 25 bp, Artificial
  probe
  misc_feature (1)..(25): SEQ ID NO: 7043; WAN024DRX; Start 264; Stop 288
cttaatcacaaagttgagcgaaatt

SEQ ID NO: 457202 - DNA, 25 bp, Artificial
  probe
  misc_feature (1)..(25): SEQ ID NO: 7043; WAN024DRX; Start 127; Stop 151
aggaatacctccacggttacatcta

SEQ ID NO: 457203 - DNA, 25 bp, Artificial
  probe
  misc_feature (1)..(25): SEQ ID NO: 7043; WAN024DRX; Start 126; Stop 150
taggaatacctccacggttacatct

SEQ ID NO: 457204 - DNA, 25 bp, Artificial
  probe
  misc_feature (1)..(25): SEQ ID NO: 7043; WAN024DRX; Start 125; Stop 149
gtaggaatacctccacggttacatc

SEQ ID NO: 457205 - DNA, 25 bp, Artificial
  probe
  misc_feature (1)..(25): SEQ ID NO: 7043; WAN024DRX; Start 180; Stop 204
tgatgaagtcaagtcgcattatcaa

SEQ ID NO: 457206 - DNA, 25 bp, Artificial
  probe
  misc_feature (1)..(25): SEQ ID NO: 7043; WAN024DRX; Start 255; Stop 279
aaatgtcggcttaatcacaaagttg

SEQ ID NO: 457207 - DNA, 25 bp, Artificial
  probe
  misc_feature (1)..(25): SEQ ID NO: 7043; WAN024DRX; Start 267; Stop 291
aatcacaaagttgagcgaaattaaa

SEQ ID NO: 457208 - DNA, 25 bp, Artificial
  probe
  misc_feature (1)..(25): SEQ ID NO: 7043; WAN024DRX; Start 179; Stop 203
ctgatgaagtcaagtcgcattatca

SEQ ID NO: 457209 - DNA, 25 bp, Artificial
  probe
  misc_feature (1)..(25): SEQ ID NO: 7043; WAN024DRX; Start 256; Stop 280
aatgtcggcttaatcacaaagttga

SEQ ID NO: 457210 - DNA, 25 bp, Artificial
  probe
  misc_feature (1)..(25): SEQ ID NO: 7043; WAN024DRX; Start 327; Stop 351
attagaagagaagtcgaaagctgag

SEQ ID NO: 457211 - DNA, 25 bp, Artificial
  probe
  misc_feature (1)..(25): SEQ ID NO: 7043; WAN024DRX; Start 257; Stop 281
atgtcggcttaatcacaaagttgag

SEQ ID NO: 457212 - DNA, 25 bp, Artificial
  probe
  misc_feature (1)..(25): SEQ ID NO: 7043; WAN024DRX; Start 326; Stop 350
tattagaagagaagtcgaaagctga

SEQ ID NO: 457213 - DNA, 25 bp, Artificial
  probe
  misc_feature (1)..(25): SEQ ID NO: 7043; WAN024DRX; Start 187; Stop 211
gtcaagtcgcattatcaaagtatat

SEQ ID NO: 457214 - DNA, 25 bp, Artificial
  probe
  misc_feature (1)..(25): SEQ ID NO: 7043; WAN024DRX; Start 266; Stop 290
taatcacaaagttgagcgaaattaa

SEQ ID NO: 457215 - DNA, 25 bp, Artificial
  probe
  misc_feature (1)..(25): SEQ ID NO: 7043; WAN024DRX; Start 265; Stop 289
ttaatcacaaagttgagcgaaatta

SEQ ID NO: 457216 - DNA, 25 bp, Artificial
  probe
  misc_feature (1)..(25): SEQ ID NO: 7043; WAN024DRX; Start 190; Stop 214
aagtcgcattatcaaagtatattgg

SEQ ID NO: 457217 - DNA, 25 bp, Artificial
  probe
  misc_feature (1)..(25): SEQ ID NO: 7043; WAN024DRX; Start 325; Stop 349
ttattagaagagaagtcgaaagctg

SEQ ID NO: 457218 - DNA, 25 bp, Artificial
  probe
  misc_feature (1)..(25): SEQ ID NO: 7043; WAN024DRX; Start 143; Stop 167
ttacatctagtgggcaagatacatc

SEQ ID NO: 457219 - DNA, 25 bp, Artificial
  probe
  misc_feature (1)..(25): SEQ ID NO: 7043; WAN024DRX; Start 142; Stop 166
gttacatctagtgggcaagatacat

SEQ ID NO: 457220 - DNA, 25 bp, Artificial
  probe
  misc_feature (1)..(25): SEQ ID NO: 7043; WAN024DRX; Start 156; Stop 180
gcaagatacatcgaagaagtatgct

SEQ ID NO: 457221 - DNA, 25 bp, Artificial
  probe
  misc_feature (1)..(25): SEQ ID NO: 7044; WAN024DRT; Start 84; Stop 108
cttgttcttaggaggagtagttcat

SEQ ID NO: 457222 - DNA, 25 bp, Artificial
  probe
  misc_feature (1)..(25): SEQ ID NO: 7044; WAN024DRT; Start 83; Stop 107
gcttgttcttaggaggagtagttca

SEQ ID NO: 457223 - DNA, 25 bp, Artificial
  probe
  misc_feature (1)..(25): SEQ ID NO: 7044; WAN024DRT; Start 85; Stop 109
ttgttcttaggaggagtagttcatg

SEQ ID NO: 457224 - DNA, 25 bp, Artificial
  probe
  misc_feature (1)..(25): SEQ ID NO: 7044; WAN024DRT; Start 81; Stop 105
tagcttgttcttaggaggagtagtt

SEQ ID NO: 457225 - DNA, 25 bp, Artificial
  probe
  misc_feature (1)..(25): SEQ ID NO: 7044; WAN024DRT; Start 86; Stop 110
tgttcttaggaggagtagttcatgc

SEQ ID NO: 457226 - DNA, 25 bp, Artificial
  probe
  misc_feature (1)..(25): SEQ ID NO: 7044; WAN024DRT; Start 82; Stop 106
agcttgttcttaggaggagtagttc

SEQ ID NO: 457227 - DNA, 25 bp, Artificial
  probe
  misc_feature (1)..(25): SEQ ID NO: 7044; WAN024DRT; Start 287; Stop 311
cgaagtatttgcgtgaattaagtgt

SEQ ID NO: 457228 - DNA, 25 bp, Artificial
  probe
  misc_feature (1)..(25): SEQ ID NO: 7044; WAN024DRT; Start 88; Stop 112
ttcttaggaggagtagttcatgcag

SEQ ID NO: 457229 - DNA, 25 bp, Artificial
  probe
  misc_feature (1)..(25): SEQ ID NO: 7044; WAN024DRT; Start 288; Stop 312
gaagtatttgcgtgaattaagtgtt

SEQ ID NO: 457230 - DNA, 25 bp, Artificial
  probe
  misc_feature (1)..(25): SEQ ID NO: 7044; WAN024DRT; Start 91; Stop 115
ttaggaggagtagttcatgcagaag

SEQ ID NO: 457231 - DNA, 25 bp, Artificial
  probe
  misc_feature (1)..(25): SEQ ID NO: 7044; WAN024DRT; Start 90; Stop 114
cttaggaggagtagttcatgcagaa

SEQ ID NO: 457232 - DNA, 25 bp, Artificial
  probe
  misc_feature (1)..(25): SEQ ID NO: 7044; WAN024DRT; Start 445; Stop 469
gagaagaaggttgaagaagctgaga

SEQ ID NO: 457233 - DNA, 25 bp, Artificial
  probe
  misc_feature (1)..(25): SEQ ID NO: 7044; WAN024DRT; Start 87; Stop 111
gttcttaggaggagtagttcatgca

SEQ ID NO: 457234 - DNA, 25 bp, Artificial
  probe
  misc_feature (1)..(25): SEQ ID NO: 7044; WAN024DRT; Start 289; Stop 313
aagtatttgcgtgaattaagtgttt

SEQ ID NO: 457235 - DNA, 25 bp, Artificial
  probe
  misc_feature (1)..(25): SEQ ID NO: 7044; WAN024DRT; Start 444; Stop 468
tgagaagaaggttgaagaagctgag

SEQ ID NO: 457236 - DNA, 25 bp, Artificial
  probe
  misc_feature (1)..(25): SEQ ID NO: 7044; WAN024DRT; Start 443; Stop 467
ctgagaagaaggttgaagaagctga

SEQ ID NO: 457237 - DNA, 25 bp, Artificial
  probe
  misc_feature (1)..(25): SEQ ID NO: 7044; WAN024DRT; Start 92; Stop 116
taggaggagtagttcatgcagaaga

SEQ ID NO: 457238 - DNA, 25 bp, Artificial
  probe
  misc_feature (1)..(25): SEQ ID NO: 7044; WAN024DRT; Start 89; Stop 113
tcttaggaggagtagttcatgcaga

SEQ ID NO: 457239 - DNA, 25 bp, Artificial
  probe
  misc_feature (1)..(25): SEQ ID NO: 7044; WAN024DRT; Start 182; Stop 206
atgaagtcaagtcgcatctagaaga

SEQ ID NO: 457240 - DNA, 25 bp, Artificial
  probe
  misc_feature (1)..(25): SEQ ID NO: 7044; WAN024DRT; Start 110; Stop 134
cagaagacgttggtggtaggaatac

SEQ ID NO: 457241 - DNA, 25 bp, Artificial
  probe
  misc_feature (1)..(25): SEQ ID NO: 7044; WAN024DRT; Start 183; Stop 207
tgaagtcaagtcgcatctagaagaa

SEQ ID NO: 457242 - DNA, 25 bp, Artificial
  probe
  misc_feature (1)..(25): SEQ ID NO: 7044; WAN024DRT; Start 321; Stop 345
gaaatctgagttgacgttagaaaca

SEQ ID NO: 457243 - DNA, 25 bp, Artificial
  probe
  misc_feature (1)..(25): SEQ ID NO: 7044; WAN024DRT; Start 320; Stop 344
cgaaatctgagttgacgttagaaac

SEQ ID NO: 457244 - DNA, 25 bp, Artificial
  probe
  misc_feature (1)..(25): SEQ ID NO: 7044; WAN024DRT; Start 319; Stop 343
tcgaaatctgagttgacgttagaaa

SEQ ID NO: 457245 - DNA, 25 bp, Artificial
  probe
  misc_feature (1)..(25): SEQ ID NO: 7044; WAN024DRT; Start 323; Stop 347
aatctgagttgacgttagaaacaaa

SEQ ID NO: 457246 - DNA, 25 bp, Artificial
  probe
  misc_feature (1)..(25): SEQ ID NO: 7044; WAN024DRT; Start 322; Stop 346
aaatctgagttgacgttagaaacaa

SEQ ID NO: 457247 - DNA, 25 bp, Artificial
  probe
  misc_feature (1)..(25): SEQ ID NO: 7044; WAN024DRT; Start 312; Stop 336
tttaaagtcgaaatctgagttgacg

SEQ ID NO: 457248 - DNA, 25 bp, Artificial
  probe
  misc_feature (1)..(25): SEQ ID NO: 7044; WAN024DRT; Start 315; Stop 339
aaagtcgaaatctgagttgacgtta

SEQ ID NO: 457249 - DNA, 25 bp, Artificial
  probe
  misc_feature (1)..(25): SEQ ID NO: 7044; WAN024DRT; Start 314; Stop 338
taaagtcgaaatctgagttgacgtt

SEQ ID NO: 457250 - DNA, 25 bp, Artificial
  probe
  misc_feature (1)..(25): SEQ ID NO: 7044; WAN024DRT; Start 313; Stop 337
ttaaagtcgaaatctgagttgacgt

SEQ ID NO: 457251 - DNA, 25 bp, Artificial
  probe
  misc_feature (1)..(25): SEQ ID NO: 7044; WAN024DRT; Start 318; Stop 342
gtcgaaatctgagttgacgttagaa

SEQ ID NO: 457252 - DNA, 25 bp, Artificial
  probe
  misc_feature (1)..(25): SEQ ID NO: 7044; WAN024DRT; Start 316; Stop 340
aagtcgaaatctgagttgacgttag

SEQ ID NO: 457253 - DNA, 25 bp, Artificial
  probe
  misc_feature (1)..(25): SEQ ID NO: 7044; WAN024DRT; Start 282; Stop 306
tcaaacgaagtatttgcgtgaatta

SEQ ID NO: 457254 - DNA, 25 bp, Artificial
  probe
  misc_feature (1)..(25): SEQ ID NO: 7045; WAN024DRJ; Start 381; Stop 405
actacagatactgatgatggagagt

SEQ ID NO: 457255 - DNA, 25 bp, Artificial
  probe
  misc_feature (1)..(25): SEQ ID NO: 7045; WAN024DRJ; Start 382; Stop 406
ctacagatactgatgatggagagtc

SEQ ID NO: 457256 - DNA, 25 bp, Artificial
  probe
  misc_feature (1)..(25): SEQ ID NO: 7045; WAN024DRJ; Start 375; Stop 399
aagccaactacagatactgatgatg

SEQ ID NO: 457257 - DNA, 25 bp, Artificial
  probe
  misc_feature (1)..(25): SEQ ID NO: 7045; WAN024DRJ; Start 379; Stop 403
caactacagatactgatgatggaga

SEQ ID NO: 457258 - DNA, 25 bp, Artificial
  probe
  misc_feature (1)..(25): SEQ ID NO: 7045; WAN024DRJ; Start 319; Stop 343
gagttgaacaacattaagaacgagt

SEQ ID NO: 457259 - DNA, 25 bp, Artificial
  probe
  misc_feature (1)..(25): SEQ ID NO: 7045; WAN024DRJ; Start 380; Stop 404
aactacagatactgatgatggagag

SEQ ID NO: 457260 - DNA, 25 bp, Artificial
  probe
  misc_feature (1)..(25): SEQ ID NO: 7045; WAN024DRJ; Start 203; Stop 227
attcagaacgagataaggcaaggaa

SEQ ID NO: 457261 - DNA, 25 bp, Artificial
  probe
  misc_feature (1)..(25): SEQ ID NO: 7045; WAN024DRJ; Start 316; Stop 340
aacgagttgaacaacattaagaacg

SEQ ID NO: 457262 - DNA, 25 bp, Artificial
  probe
  misc_feature (1)..(25): SEQ ID NO: 7045; WAN024DRJ; Start 446; Stop 470
actcatcttcttcgtcaagttcaga

SEQ ID NO: 457263 - DNA, 25 bp, Artificial
  probe
  misc_feature (1)..(25): SEQ ID NO: 7045; WAN024DRJ; Start 383; Stop 407
tacagatactgatgatggagagtcg

SEQ ID NO: 457264 - DNA, 25 bp, Artificial
  probe
  misc_feature (1)..(25): SEQ ID NO: 7045; WAN024DRJ; Start 318; Stop 342
cgagttgaacaacattaagaacgag

SEQ ID NO: 457265 - DNA, 25 bp, Artificial
  probe
  misc_feature (1)..(25): SEQ ID NO: 7045; WAN024DRJ; Start 543; Stop 567
agaagctaagaagaaggttgaagaa

SEQ ID NO: 457266 - DNA, 25 bp, Artificial
  probe
  misc_feature (1)..(25): SEQ ID NO: 7045; WAN024DRJ; Start 202; Stop 226
gattcagaacgagataaggcaagga

SEQ ID NO: 457267 - DNA, 25 bp, Artificial
  probe
  misc_feature (1)..(25): SEQ ID NO: 7045; WAN024DRJ; Start 544; Stop 568
gaagctaagaagaaggttgaagaag

SEQ ID NO: 457268 - DNA, 25 bp, Artificial
  probe
  misc_feature (1)..(25): SEQ ID NO: 7045; WAN024DRJ; Start 549; Stop 573
taagaagaaggttgaagaagctgag

SEQ ID NO: 457269 - DNA, 25 bp, Artificial
  probe
  misc_feature (1)..(25): SEQ ID NO: 7045; WAN024DRJ; Start 548; Stop 572
ctaagaagaaggttgaagaagctga

SEQ ID NO: 457270 - DNA, 25 bp, Artificial
  probe
  misc_feature (1)..(25): SEQ ID NO: 7045; WAN024DRJ; Start 542; Stop 566
cagaagctaagaagaaggttgaaga

SEQ ID NO: 457271 - DNA, 25 bp, Artificial
  probe
  misc_feature (1)..(25): SEQ ID NO: 7045; WAN024DRJ; Start 317; Stop 341
acgagttgaacaacattaagaacga

SEQ ID NO: 457272 - DNA, 25 bp, Artificial
  probe
  misc_feature (1)..(25): SEQ ID NO: 7045; WAN024DRJ; Start 452; Stop 476
cttcttcgtcaagttcagactcttc

SEQ ID NO: 457273 - DNA, 25 bp, Artificial
  probe
  misc_feature (1)..(25): SEQ ID NO: 7045; WAN024DRJ; Start 450; Stop 474
atcttcttcgtcaagttcagactct

SEQ ID NO: 457274 - DNA, 25 bp, Artificial
  probe
  misc_feature (1)..(25): SEQ ID NO: 7045; WAN024DRJ; Start 449; Stop 473
catcttcttcgtcaagttcagactc

SEQ ID NO: 457275 - DNA, 25 bp, Artificial
  probe
  misc_feature (1)..(25): SEQ ID NO: 7045; WAN024DRJ; Start 447; Stop 471
ctcatcttcttcgtcaagttcagac

SEQ ID NO: 457276 - DNA, 25 bp, Artificial
  probe
  misc_feature (1)..(25): SEQ ID NO: 7045; WAN024DRJ; Start 445; Stop 469
gactcatcttcttcgtcaagttcag

SEQ ID NO: 457277 - DNA, 25 bp, Artificial
  probe
  misc_feature (1)..(25): SEQ ID NO: 7045; WAN024DRJ; Start 320; Stop 344
agttgaacaacattaagaacgagta

SEQ ID NO: 457278 - DNA, 25 bp, Artificial
  probe
  misc_feature (1)..(25): SEQ ID NO: 7045; WAN024DRJ; Start 451; Stop 475
tcttcttcgtcaagttcagactctt

SEQ ID NO: 457279 - DNA, 25 bp, Artificial
  probe
  misc_feature (1)..(25): SEQ ID NO: 7045; WAN024DRJ; Start 378; Stop 402
ccaactacagatactgatgatggag

SEQ ID NO: 457280 - DNA, 25 bp, Artificial
  probe
  misc_feature (1)..(25): SEQ ID NO: 7045; WAN024DRJ; Start 448; Stop 472
tcatcttcttcgtcaagttcagact

SEQ ID NO: 457281 - DNA, 25 bp, Artificial
  probe
  misc_feature (1)..(25): SEQ ID NO: 7045; WAN024DRJ; Start 322; Stop 346
ttgaacaacattaagaacgagtatt

SEQ ID NO: 457282 - DNA, 25 bp, Artificial
  probe
  misc_feature (1)..(25): SEQ ID NO: 7045; WAN024DRJ; Start 442; Stop 466
aaggactcatcttcttcgtcaagtt

SEQ ID NO: 457283 - DNA, 25 bp, Artificial
  probe
  misc_feature (1)..(25): SEQ ID NO: 7045; WAN024DRJ; Start 140; Stop 164
ccacttcttctaatagggcaaatga

SEQ ID NO: 457284 - DNA, 25 bp, Artificial
  probe
  misc_feature (1)..(25): SEQ ID NO: 7045; WAN024DRJ; Start 315; Stop 339
taacgagttgaacaacattaagaac

SEQ ID NO: 457285 - DNA, 25 bp, Artificial
  probe
  misc_feature (1)..(25): SEQ ID NO: 7045; WAN024DRJ; Start 386; Stop 410
agatactgatgatggagagtcgatc

SEQ ID NO: 457286 - DNA, 25 bp, Artificial
  probe
  misc_feature (1)..(25): SEQ ID NO: 7045; WAN024DRJ; Start 550; Stop 574
aagaagaaggttgaagaagctgaga

SEQ ID NO: 457287 - DNA, 25 bp, Artificial
  probe
  misc_feature (1)..(25): SEQ ID NO: 7046; WAN024DRP; Start 81; Stop 105
tagcttgttcttaggaggagtagtc

SEQ ID NO: 457288 - DNA, 25 bp, Artificial
  probe
  misc_feature (1)..(25): SEQ ID NO: 7046; WAN024DRP; Start 223; Stop 247
cacaatttcgccttaaacctaaagt

SEQ ID NO: 457289 - DNA, 25 bp, Artificial
  probe
  misc_feature (1)..(25): SEQ ID NO: 7046; WAN024DRP; Start 224; Stop 248
acaatttcgccttaaacctaaagtt

SEQ ID NO: 457290 - DNA, 25 bp, Artificial
  probe
  misc_feature (1)..(25): SEQ ID NO: 7046; WAN024DRP; Start 222; Stop 246
ccacaatttcgccttaaacctaaag

SEQ ID NO: 457291 - DNA, 25 bp, Artificial
  probe
  misc_feature (1)..(25): SEQ ID NO: 7046; WAN024DRP; Start 225; Stop 249
caatttcgccttaaacctaaagttg

SEQ ID NO: 457292 - DNA, 25 bp, Artificial
  probe
  misc_feature (1)..(25): SEQ ID NO: 7046; WAN024DRP; Start 215; Stop 239
aacatacccacaatttcgccttaaa

SEQ ID NO: 457293 - DNA, 25 bp, Artificial
  probe
  misc_feature (1)..(25): SEQ ID NO: 7046; WAN024DRP; Start 214; Stop 238
aaacatacccacaatttcgccttaa

SEQ ID NO: 457294 - DNA, 25 bp, Artificial
  probe
  misc_feature (1)..(25): SEQ ID NO: 7046; WAN024DRP; Start 221; Stop 245
cccacaatttcgccttaaacctaaa

SEQ ID NO: 457295 - DNA, 25 bp, Artificial
  probe
  misc_feature (1)..(25): SEQ ID NO: 7046; WAN024DRP; Start 216; Stop 240
acatacccacaatttcgccttaaac

SEQ ID NO: 457296 - DNA, 25 bp, Artificial
  probe
  misc_feature (1)..(25): SEQ ID NO: 7046; WAN024DRP; Start 219; Stop 243
tacccacaatttcgccttaaaccta

SEQ ID NO: 457297 - DNA, 25 bp, Artificial
  probe
  misc_feature (1)..(25): SEQ ID NO: 7046; WAN024DRP; Start 217; Stop 241
catacccacaatttcgccttaaacc

SEQ ID NO: 457298 - DNA, 25 bp, Artificial
  probe
  misc_feature (1)..(25): SEQ ID NO: 7046; WAN024DRP; Start 218; Stop 242
atacccacaatttcgccttaaacct

SEQ ID NO: 457299 - DNA, 25 bp, Artificial
  probe
  misc_feature (1)..(25): SEQ ID NO: 7046; WAN024DRP; Start 220; Stop 244
acccacaatttcgccttaaacctaa

SEQ ID NO: 457300 - DNA, 25 bp, Artificial
  probe
  misc_feature (1)..(25): SEQ ID NO: 7046; WAN024DRP; Start 110; Stop 134
cagaaggggttagaagtgagaatac

SEQ ID NO: 457301 - DNA, 25 bp, Artificial
  probe
  misc_feature (1)..(25): SEQ ID NO: 7046; WAN024DRP; Start 213; Stop 237
aaaacatacccacaatttcgcctta

SEQ ID NO: 457302 - DNA, 25 bp, Artificial
  probe
  misc_feature (1)..(25): SEQ ID NO: 7046; WAN024DRP; Start 109; Stop 133
gcagaaggggttagaagtgagaata

SEQ ID NO: 457303 - DNA, 25 bp, Artificial
  probe
  misc_feature (1)..(25): SEQ ID NO: 7046; WAN024DRP; Start 152; Stop 176
gtggggatgaagtcgatgaatatat

SEQ ID NO: 457304 - DNA, 25 bp, Artificial
  probe
  misc_feature (1)..(25): SEQ ID NO: 7046; WAN024DRP; Start 151; Stop 175
agtggggatgaagtcgatgaatata

SEQ ID NO: 457305 - DNA, 25 bp, Artificial
  probe
  misc_feature (1)..(25): SEQ ID NO: 7046; WAN024DRP; Start 150; Stop 174
tagtggggatgaagtcgatgaatat

SEQ ID NO: 457306 - DNA, 25 bp, Artificial
  probe
  misc_feature (1)..(25): SEQ ID NO: 7046; WAN024DRP; Start 297; Stop 321
agaagaaaagtcaaaagctgagttg

SEQ ID NO: 457307 - DNA, 25 bp, Artificial
  probe
  misc_feature (1)..(25): SEQ ID NO: 7046; WAN024DRP; Start 153; Stop 177
tggggatgaagtcgatgaatatata

SEQ ID NO: 457308 - DNA, 25 bp, Artificial
  probe
  misc_feature (1)..(25): SEQ ID NO: 7046; WAN024DRP; Start 149; Stop 173
ctagtggggatgaagtcgatgaata

SEQ ID NO: 457309 - DNA, 25 bp, Artificial
  probe
  misc_feature (1)..(25): SEQ ID NO: 7046; WAN024DRP; Start 111; Stop 135
agaaggggttagaagtgagaatacc

SEQ ID NO: 457310 - DNA, 25 bp, Artificial
  probe
  misc_feature (1)..(25): SEQ ID NO: 7046; WAN024DRP; Start 343; Stop 367
gtagacgcagcttttgagaagttta

SEQ ID NO: 457311 - DNA, 25 bp, Artificial
  probe
  misc_feature (1)..(25): SEQ ID NO: 7046; WAN024DRP; Start 296; Stop 320
tagaagaaaagtcaaaagctgagtt

SEQ ID NO: 457312 - DNA, 25 bp, Artificial
  probe
  misc_feature (1)..(25): SEQ ID NO: 7046; WAN024DRP; Start 295; Stop 319
ttagaagaaaagtcaaaagctgagt

SEQ ID NO: 457313 - DNA, 25 bp, Artificial
  probe
  misc_feature (1)..(25): SEQ ID NO: 7046; WAN024DRP; Start 155; Stop 179
gggatgaagtcgatgaatatataaa

SEQ ID NO: 457314 - DNA, 25 bp, Artificial
  probe
  misc_feature (1)..(25): SEQ ID NO: 7046; WAN024DRP; Start 204; Stop 228
agataaaagaaaacatacccacaat

SEQ ID NO: 457315 - DNA, 25 bp, Artificial
  probe
  misc_feature (1)..(25): SEQ ID NO: 7046; WAN024DRP; Start 209; Stop 233
aaagaaaacatacccacaatttcgc

SEQ ID NO: 457316 - DNA, 25 bp, Artificial
  probe
  misc_feature (1)..(25): SEQ ID NO: 7046; WAN024DRP; Start 208; Stop 232
aaaagaaaacatacccacaatttcg

SEQ ID NO: 457317 - DNA, 25 bp, Artificial
  probe
  misc_feature (1)..(25): SEQ ID NO: 7046; WAN024DRP; Start 154; Stop 178
ggggatgaagtcgatgaatatataa

SEQ ID NO: 457318 - DNA, 25 bp, Artificial
  probe
  misc_feature (1)..(25): SEQ ID NO: 7046; WAN024DRP; Start 294; Stop 318
tttagaagaaaagtcaaaagctgag

SEQ ID NO: 457319 - DNA, 25 bp, Artificial
  probe
  misc_feature (1)..(25): SEQ ID NO: 7046; WAN024DRP; Start 203; Stop 227
tagataaaagaaaacatacccacaa

SEQ ID NO: 457320 - DNA, 25 bp, Artificial
  probe
  misc_feature (1)..(25): SEQ ID NO: 7047; WAN024F4C; Start 111; Stop 135
tgaagttgtagagaaagagttaggt

SEQ ID NO: 457321 - DNA, 25 bp, Artificial
  probe
  misc_feature (1)..(25): SEQ ID NO: 7047; WAN024F4C; Start 1; Stop 25
atgtttgctaagtatcaagaggaag

SEQ ID NO: 457322 - DNA, 25 bp, Artificial
  probe
  misc_feature (1)..(25): SEQ ID NO: 7047; WAN024F4C; Start 110; Stop 134
ttgaagttgtagagaaagagttagg

SEQ ID NO: 457323 - DNA, 25 bp, Artificial
  probe
  misc_feature (1)..(25): SEQ ID NO: 7047; WAN024F4C; Start 112; Stop 136
gaagttgtagagaaagagttaggta

SEQ ID NO: 457324 - DNA, 25 bp, Artificial
  probe
  misc_feature (1)..(25): SEQ ID NO: 7047; WAN024F4C; Start 34; Stop 58
aatgataaggttatcttctgtgggc

SEQ ID NO: 457325 - DNA, 25 bp, Artificial
  probe
  misc_feature (1)..(25): SEQ ID NO: 7047; WAN024F4C; Start 33; Stop 57
gaatgataaggttatcttctgtggg

SEQ ID NO: 457326 - DNA, 25 bp, Artificial
  probe
  misc_feature (1)..(25): SEQ ID NO: 7047; WAN024F4C; Start 114; Stop 138
agttgtagagaaagagttaggtaac

SEQ ID NO: 457327 - DNA, 25 bp, Artificial
  probe
  misc_feature (1)..(25): SEQ ID NO: 7047; WAN024F4C; Start 113; Stop 137
aagttgtagagaaagagttaggtaa

SEQ ID NO: 457328 - DNA, 25 bp, Artificial
  probe
  misc_feature (1)..(25): SEQ ID NO: 7047; WAN024F4C; Start 109; Stop 133
cttgaagttgtagagaaagagttag

SEQ ID NO: 457329 - DNA, 25 bp, Artificial
  probe
  misc_feature (1)..(25): SEQ ID NO: 7047; WAN024F4C; Start 2; Stop 26
tgtttgctaagtatcaagaggaagc

SEQ ID NO: 457330 - DNA, 25 bp, Artificial
  probe
  misc_feature (1)..(25): SEQ ID NO: 7047; WAN024F4C; Start 35; Stop 59
atgataaggttatcttctgtgggcg

SEQ ID NO: 457331 - DNA, 25 bp, Artificial
  probe
  misc_feature (1)..(25): SEQ ID NO: 7047; WAN024F4C; Start 79; Stop 103
tatgatatgcatgtggtgattgaac

SEQ ID NO: 457332 - DNA, 25 bp, Artificial
  probe
  misc_feature (1)..(25): SEQ ID NO: 7047; WAN024F4C; Start 78; Stop 102
ttatgatatgcatgtggtgattgaa

SEQ ID NO: 457333 - DNA, 25 bp, Artificial
  probe
  misc_feature (1)..(25): SEQ ID NO: 7047; WAN024F4C; Start 77; Stop 101
attatgatatgcatgtggtgattga

SEQ ID NO: 457334 - DNA, 25 bp, Artificial
  probe
  misc_feature (1)..(25): SEQ ID NO: 7047; WAN024F4C; Start 25; Stop 49
gcttcaaagaatgataaggttatct

SEQ ID NO: 457335 - DNA, 25 bp, Artificial
  probe
  misc_feature (1)..(25): SEQ ID NO: 7047; WAN024F4C; Start 3; Stop 27
gtttgctaagtatcaagaggaagct

SEQ ID NO: 457336 - DNA, 25 bp, Artificial
  probe
  misc_feature (1)..(25): SEQ ID NO: 7047; WAN024F4C; Start 31; Stop 55
aagaatgataaggttatcttctgtg

SEQ ID NO: 457337 - DNA, 25 bp, Artificial
  probe
  misc_feature (1)..(25): SEQ ID NO: 7047; WAN024F4C; Start 80; Stop 104
atgatatgcatgtggtgattgaacg

SEQ ID NO: 457338 - DNA, 25 bp, Artificial
  probe
  misc_feature (1)..(25): SEQ ID NO: 7047; WAN024F4C; Start 82; Stop 106
gatatgcatgtggtgattgaacgag

SEQ ID NO: 457339 - DNA, 25 bp, Artificial
  probe
  misc_feature (1)..(25): SEQ ID NO: 7047; WAN024F4C; Start 24; Stop 48
agcttcaaagaatgataaggttatc

SEQ ID NO: 457340 - DNA, 25 bp, Artificial
  probe
  misc_feature (1)..(25): SEQ ID NO: 7047; WAN024F4C; Start 108; Stop 132
tcttgaagttgtagagaaagagtta

SEQ ID NO: 457341 - DNA, 25 bp, Artificial
  probe
  misc_feature (1)..(25): SEQ ID NO: 7047; WAN024F4C; Start 54; Stop 78
tgggcgcttagcagattataaatat

SEQ ID NO: 457342 - DNA, 25 bp, Artificial
  probe
  misc_feature (1)..(25): SEQ ID NO: 7047; WAN024F4C; Start 55; Stop 79
gggcgcttagcagattataaatatt

SEQ ID NO: 457343 - DNA, 25 bp, Artificial
  probe
  misc_feature (1)..(25): SEQ ID NO: 7047; WAN024F4C; Start 81; Stop 105
tgatatgcatgtggtgattgaacga

SEQ ID NO: 457344 - DNA, 25 bp, Artificial
  probe
  misc_feature (1)..(25): SEQ ID NO: 7047; WAN024F4C; Start 76; Stop 100
tattatgatatgcatgtggtgattg

SEQ ID NO: 457345 - DNA, 25 bp, Artificial
  probe
  misc_feature (1)..(25): SEQ ID NO: 7047; WAN024F4C; Start 53; Stop 77
gtgggcgcttagcagattataaata

SEQ ID NO: 457346 - DNA, 25 bp, Artificial
  probe
  misc_feature (1)..(25): SEQ ID NO: 7047; WAN024F4C; Start 97; Stop 121
attgaacgagctcttgaagttgtag

SEQ ID NO: 457347 - DNA, 25 bp, Artificial
  probe
  misc_feature (1)..(25): SEQ ID NO: 7047; WAN024F4C; Start 96; Stop 120
gattgaacgagctcttgaagttgta

SEQ ID NO: 457348 - DNA, 25 bp, Artificial
  probe
  misc_feature (1)..(25): SEQ ID NO: 7047; WAN024F4C; Start 98; Stop 122
ttgaacgagctcttgaagttgtaga

SEQ ID NO: 457349 - DNA, 25 bp, Artificial
  probe
  misc_feature (1)..(25): SEQ ID NO: 7047; WAN024F4C; Start 75; Stop 99
atattatgatatgcatgtggtgatt

SEQ ID NO: 457350 - DNA, 25 bp, Artificial
  probe
  misc_feature (1)..(25): SEQ ID NO: 7047; WAN024F4C; Start 74; Stop 98
aatattatgatatgcatgtggtgat

SEQ ID NO: 457351 - DNA, 25 bp, Artificial
  probe
  misc_feature (1)..(25): SEQ ID NO: 7047; WAN024F4C; Start 52; Stop 76
tgtgggcgcttagcagattataaat

SEQ ID NO: 457352 - DNA, 25 bp, Artificial
  probe
  misc_feature (1)..(25): SEQ ID NO: 7047; WAN024F4C; Start 94; Stop 118
gtgattgaacgagctcttgaagttg

SEQ ID NO: 457353 - DNA, 25 bp, Artificial
  probe
  misc_feature (1)..(25): SEQ ID NO: 7048; WAN024BUK; Start 524; Stop 548
tgaccattgattgtaggcataagaa

SEQ ID NO: 457354 - DNA, 25 bp, Artificial
  probe
  misc_feature (1)..(25): SEQ ID NO: 7048; WAN024BUK; Start 521; Stop 545
aagtgaccattgattgtaggcataa

SEQ ID NO: 457355 - DNA, 25 bp, Artificial
  probe
  misc_feature (1)..(25): SEQ ID NO: 7048; WAN024BUK; Start 522; Stop 546
agtgaccattgattgtaggcataag

SEQ ID NO: 457356 - DNA, 25 bp, Artificial
  probe
  misc_feature (1)..(25): SEQ ID NO: 7048; WAN024BUK; Start 523; Stop 547
gtgaccattgattgtaggcataaga

SEQ ID NO: 457357 - DNA, 25 bp, Artificial
  probe
  misc_feature (1)..(25): SEQ ID NO: 7048; WAN024BUK; Start 145; Stop 169
gatggtggctatgagagttatgaac

SEQ ID NO: 457358 - DNA, 25 bp, Artificial
  probe
  misc_feature (1)..(25): SEQ ID NO: 7048; WAN024BUK; Start 611; Stop 635
ttgagttggcagttggtaataacag

SEQ ID NO: 457359 - DNA, 25 bp, Artificial
  probe
  misc_feature (1)..(25): SEQ ID NO: 7048; WAN024BUK; Start 144; Stop 168
ggatggtggctatgagagttatgaa

SEQ ID NO: 457360 - DNA, 25 bp, Artificial
  probe
  misc_feature (1)..(25): SEQ ID NO: 7048; WAN024BUK; Start 620; Stop 644
cagttggtaataacagtctggtctt

SEQ ID NO: 457361 - DNA, 25 bp, Artificial
  probe
  misc_feature (1)..(25): SEQ ID NO: 7048; WAN024BUK; Start 613; Stop 637
gagttggcagttggtaataacagtc

SEQ ID NO: 457362 - DNA, 25 bp, Artificial
  probe
  misc_feature (1)..(25): SEQ ID NO: 7048; WAN024BUK; Start 412; Stop 436
atcaacaatccaggctctgtctata

SEQ ID NO: 457363 - DNA, 25 bp, Artificial
  probe
  misc_feature (1)..(25): SEQ ID NO: 7048; WAN024BUK; Start 411; Stop 435
tatcaacaatccaggctctgtctat

SEQ ID NO: 457364 - DNA, 25 bp, Artificial
  probe
  misc_feature (1)..(25): SEQ ID NO: 7048; WAN024BUK; Start 410; Stop 434
atatcaacaatccaggctctgtcta

SEQ ID NO: 457365 - DNA, 25 bp, Artificial
  probe
  misc_feature (1)..(25): SEQ ID NO: 7048; WAN024BUK; Start 614; Stop 638
agttggcagttggtaataacagtct

SEQ ID NO: 457366 - DNA, 25 bp, Artificial
  probe
  misc_feature (1)..(25): SEQ ID NO: 7048; WAN024BUK; Start 433; Stop 457
tatagcgagcctgtgattgagattg

SEQ ID NO: 457367 - DNA, 25 bp, Artificial
  probe
  misc_feature (1)..(25): SEQ ID NO: 7048; WAN024BUK; Start 142; Stop 166
ctggatggtggctatgagagttatg

SEQ ID NO: 457368 - DNA, 25 bp, Artificial
  probe
  misc_feature (1)..(25): SEQ ID NO: 7048; WAN024BUK; Start 612; Stop 636
tgagttggcagttggtaataacagt

SEQ ID NO: 457369 - DNA, 25 bp, Artificial
  probe
  misc_feature (1)..(25): SEQ ID NO: 7048; WAN024BUK; Start 151; Stop 175
ggctatgagagttatgaacggactt

SEQ ID NO: 457370 - DNA, 25 bp, Artificial
  probe
  misc_feature (1)..(25): SEQ ID NO: 7048; WAN024BUK; Start 146; Stop 170
atggtggctatgagagttatgaacg

SEQ ID NO: 457371 - DNA, 25 bp, Artificial
  probe
  misc_feature (1)..(25): SEQ ID NO: 7048; WAN024BUK; Start 409; Stop 433
aatatcaacaatccaggctctgtct

SEQ ID NO: 457372 - DNA, 25 bp, Artificial
  probe
  misc_feature (1)..(25): SEQ ID NO: 7048; WAN024BUK; Start 178; Stop 202
tcgttctatattcctaagttactgg

SEQ ID NO: 457373 - DNA, 25 bp, Artificial
  probe
  misc_feature (1)..(25): SEQ ID NO: 7048; WAN024BUK; Start 478; Stop 502
ttgactatcggaaggacaactatgc

SEQ ID NO: 457374 - DNA, 25 bp, Artificial
  probe
  misc_feature (1)..(25): SEQ ID NO: 7048; WAN024BUK; Start 143; Stop 167
tggatggtggctatgagagttatga

SEQ ID NO: 457375 - DNA, 25 bp, Artificial
  probe
  misc_feature (1)..(25): SEQ ID NO: 7048; WAN024BUK; Start 27; Stop 51
taatacatcaactatccctcactgc

SEQ ID NO: 457376 - DNA, 25 bp, Artificial
  probe
  misc_feature (1)..(25): SEQ ID NO: 7048; WAN024BUK; Start 526; Stop 550
accattgattgtaggcataagaaac

SEQ ID NO: 457377 - DNA, 25 bp, Artificial
  probe
  misc_feature (1)..(25): SEQ ID NO: 7048; WAN024BUK; Start 520; Stop 544
aaagtgaccattgattgtaggcata

SEQ ID NO: 457378 - DNA, 25 bp, Artificial
  probe
  misc_feature (1)..(25): SEQ ID NO: 7048; WAN024BUK; Start 608; Stop 632
tctttgagttggcagttggtaataa

SEQ ID NO: 457379 - DNA, 25 bp, Artificial
  probe
  misc_feature (1)..(25): SEQ ID NO: 7048; WAN024BUK; Start 607; Stop 631
ttctttgagttggcagttggtaata

SEQ ID NO: 457380 - DNA, 25 bp, Artificial
  probe
  misc_feature (1)..(25): SEQ ID NO: 7048; WAN024BUK; Start 525; Stop 549
gaccattgattgtaggcataagaaa

SEQ ID NO: 457381 - DNA, 25 bp, Artificial
  probe
  misc_feature (1)..(25): SEQ ID NO: 7048; WAN024BUK; Start 196; Stop 220
ttactggatgtttctactatcgtgg

SEQ ID NO: 457382 - DNA, 25 bp, Artificial
  probe
  misc_feature (1)..(25): SEQ ID NO: 7048; WAN024BUK; Start 197; Stop 221
tactggatgtttctactatcgtgga

SEQ ID NO: 457383 - DNA, 25 bp, Artificial
  probe
  misc_feature (1)..(25): SEQ ID NO: 7048; WAN024BUK; Start 615; Stop 639
gttggcagttggtaataacagtctg

SEQ ID NO: 457384 - DNA, 25 bp, Artificial
  probe
  misc_feature (1)..(25): SEQ ID NO: 7048; WAN024BUK; Start 376; Stop 400
aatgttgctcctcttatctttaccg

SEQ ID NO: 457385 - DNA, 25 bp, Artificial
  probe
  misc_feature (1)..(25): SEQ ID NO: 7048; WAN024BUK; Start 375; Stop 399
aaatgttgctcctcttatctttacc

SEQ ID NO: 457386 - DNA, 25 bp, Artificial
  probe
  misc_feature (1)..(25): SEQ ID NO: 7049; WAN024BTD; Start 68; Stop 92
attggttcataggttcagcgttaat

SEQ ID NO: 457387 - DNA, 25 bp, Artificial
  probe
  misc_feature (1)..(25): SEQ ID NO: 7049; WAN024BTD; Start 67; Stop 91
gattggttcataggttcagcgttaa

SEQ ID NO: 457388 - DNA, 25 bp, Artificial
  probe
  misc_feature (1)..(25): SEQ ID NO: 7049; WAN024BTD; Start 69; Stop 93
ttggttcataggttcagcgttaatg

SEQ ID NO: 457389 - DNA, 25 bp, Artificial
  probe
  misc_feature (1)..(25): SEQ ID NO: 7049; WAN024BTD; Start 903; Stop 927
cttgagtgataggtatggaataaca

SEQ ID NO: 457390 - DNA, 25 bp, Artificial
  probe
  misc_feature (1)..(25): SEQ ID NO: 7049; WAN024BTD; Start 58; Stop 82
ttgagaggtgattggttcataggtt

SEQ ID NO: 457391 - DNA, 25 bp, Artificial
  probe
  misc_feature (1)..(25): SEQ ID NO: 7049; WAN024BTD; Start 902; Stop 926
tcttgagtgataggtatggaataac

SEQ ID NO: 457392 - DNA, 25 bp, Artificial
  probe
  misc_feature (1)..(25): SEQ ID NO: 7049; WAN024BTD; Start 61; Stop 85
agaggtgattggttcataggttcag

SEQ ID NO: 457393 - DNA, 25 bp, Artificial
  probe
  misc_feature (1)..(25): SEQ ID NO: 7049; WAN024BTD; Start 60; Stop 84
gagaggtgattggttcataggttca

SEQ ID NO: 457394 - DNA, 25 bp, Artificial
  probe
  misc_feature (1)..(25): SEQ ID NO: 7049; WAN024BTD; Start 59; Stop 83
tgagaggtgattggttcataggttc

SEQ ID NO: 457395 - DNA, 25 bp, Artificial
  probe
  misc_feature (1)..(25): SEQ ID NO: 7049; WAN024BTD; Start 66; Stop 90
tgattggttcataggttcagcgtta

SEQ ID NO: 457396 - DNA, 25 bp, Artificial
  probe
  misc_feature (1)..(25): SEQ ID NO: 7049; WAN024BTD; Start 663; Stop 687
ttccttgttggattgtcttattcaa

SEQ ID NO: 457397 - DNA, 25 bp, Artificial
  probe
  misc_feature (1)..(25): SEQ ID NO: 7049; WAN024BTD; Start 904; Stop 928
ttgagtgataggtatggaataacaa

SEQ ID NO: 457398 - DNA, 25 bp, Artificial
  probe
  misc_feature (1)..(25): SEQ ID NO: 7049; WAN024BTD; Start 139; Stop 163
caggaaacaatttggacaagaatct

SEQ ID NO: 457399 - DNA, 25 bp, Artificial
  probe
  misc_feature (1)..(25): SEQ ID NO: 7049; WAN024BTD; Start 70; Stop 94
tggttcataggttcagcgttaatgg

SEQ ID NO: 457400 - DNA, 25 bp, Artificial
  probe
  misc_feature (1)..(25): SEQ ID NO: 7049; WAN024BTD; Start 664; Stop 688
tccttgttggattgtcttattcaat

SEQ ID NO: 457401 - DNA, 25 bp, Artificial
  probe
  misc_feature (1)..(25): SEQ ID NO: 7049; WAN024BTD; Start 140; Stop 164
aggaaacaatttggacaagaatctt

SEQ ID NO: 457402 - DNA, 25 bp, Artificial
  probe
  misc_feature (1)..(25): SEQ ID NO: 7049; WAN024BTD; Start 901; Stop 925
atcttgagtgataggtatggaataa

SEQ ID NO: 457403 - DNA, 25 bp, Artificial
  probe
  misc_feature (1)..(25): SEQ ID NO: 7049; WAN024BTD; Start 710; Stop 734
tttcaggaaattataaagggcacac

SEQ ID NO: 457404 - DNA, 25 bp, Artificial
  probe
  misc_feature (1)..(25): SEQ ID NO: 7049; WAN024BTD; Start 711; Stop 735
ttcaggaaattataaagggcacaca

SEQ ID NO: 457405 - DNA, 25 bp, Artificial
  probe
  misc_feature (1)..(25): SEQ ID NO: 7049; WAN024BTD; Start 1030; Stop 1054
tcactttctattgaagagtttgaca

SEQ ID NO: 457406 - DNA, 25 bp, Artificial
  probe
  misc_feature (1)..(25): SEQ ID NO: 7049; WAN024BTD; Start 57; Stop 81
tttgagaggtgattggttcataggt

SEQ ID NO: 457407 - DNA, 25 bp, Artificial
  probe
  misc_feature (1)..(25): SEQ ID NO: 7049; WAN024BTD; Start 712; Stop 736
tcaggaaattataaagggcacacag

SEQ ID NO: 457408 - DNA, 25 bp, Artificial
  probe
  misc_feature (1)..(25): SEQ ID NO: 7049; WAN024BTD; Start 665; Stop 689
ccttgttggattgtcttattcaatt

SEQ ID NO: 457409 - DNA, 25 bp, Artificial
  probe
  misc_feature (1)..(25): SEQ ID NO: 7049; WAN024BTD; Start 62; Stop 86
gaggtgattggttcataggttcagc

SEQ ID NO: 457410 - DNA, 25 bp, Artificial
  probe
  misc_feature (1)..(25): SEQ ID NO: 7049; WAN024BTD; Start 713; Stop 737
caggaaattataaagggcacacagt

SEQ ID NO: 457411 - DNA, 25 bp, Artificial
  probe
  misc_feature (1)..(25): SEQ ID NO: 7049; WAN024BTD; Start 657; Stop 681
agtagtttccttgttggattgtctt

SEQ ID NO: 457412 - DNA, 25 bp, Artificial
  probe
  misc_feature (1)..(25): SEQ ID NO: 7049; WAN024BTD; Start 656; Stop 680
gagtagtttccttgttggattgtct

SEQ ID NO: 457413 - DNA, 25 bp, Artificial
  probe
  misc_feature (1)..(25): SEQ ID NO: 7049; WAN024BTD; Start 65; Stop 89
gtgattggttcataggttcagcgtt

SEQ ID NO: 457414 - DNA, 25 bp, Artificial
  probe
  misc_feature (1)..(25): SEQ ID NO: 7049; WAN024BTD; Start 905; Stop 929
tgagtgataggtatggaataacaaa

SEQ ID NO: 457415 - DNA, 25 bp, Artificial
  probe
  misc_feature (1)..(25): SEQ ID NO: 7049; WAN024BTD; Start 658; Stop 682
gtagtttccttgttggattgtctta

SEQ ID NO: 457416 - DNA, 25 bp, Artificial
  probe
  misc_feature (1)..(25): SEQ ID NO: 7049; WAN024BTD; Start 1031; Stop 1055
cactttctattgaagagtttgacaa

SEQ ID NO: 457417 - DNA, 25 bp, Artificial
  probe
  misc_feature (1)..(25): SEQ ID NO: 7049; WAN024BTD; Start 649; Stop 673
aatattcgagtagtttccttgttgg

SEQ ID NO: 457418 - DNA, 25 bp, Artificial
  probe
  misc_feature (1)..(25): SEQ ID NO: 7049; WAN024BTD; Start 316; Stop 340
gttattacttcaaacgaacacctaa

SEQ ID NO: 457419 - DNA, 25 bp, Artificial
  probe
  misc_feature (1)..(25): SEQ ID NO: 7050; WAN024DQJ; Start 148; Stop 172
caattcaaggaaacttctggtcttt

SEQ ID NO: 457420 - DNA, 25 bp, Artificial
  probe
  misc_feature (1)..(25): SEQ ID NO: 7050; WAN024DQJ; Start 134; Stop 158
caaacttatttcagcaattcaagga

SEQ ID NO: 457421 - DNA, 25 bp, Artificial
  probe
  misc_feature (1)..(25): SEQ ID NO: 7050; WAN024DQJ; Start 133; Stop 157
tcaaacttatttcagcaattcaagg

SEQ ID NO: 457422 - DNA, 25 bp, Artificial
  probe
  misc_feature (1)..(25): SEQ ID NO: 7050; WAN024DQJ; Start 224; Stop 248
atgatctgaaactgcgaatctgtta

SEQ ID NO: 457423 - DNA, 25 bp, Artificial
  probe
  misc_feature (1)..(25): SEQ ID NO: 7050; WAN024DQJ; Start 225; Stop 249
tgatctgaaactgcgaatctgttaa

SEQ ID NO: 457424 - DNA, 25 bp, Artificial
  probe
  misc_feature (1)..(25): SEQ ID NO: 7050; WAN024DQJ; Start 147; Stop 171
gcaattcaaggaaacttctggtctt

SEQ ID NO: 457425 - DNA, 25 bp, Artificial
  probe
  misc_feature (1)..(25): SEQ ID NO: 7050; WAN024DQJ; Start 223; Stop 247
aatgatctgaaactgcgaatctgtt

SEQ ID NO: 457426 - DNA, 25 bp, Artificial
  probe
  misc_feature (1)..(25): SEQ ID NO: 7050; WAN024DQJ; Start 222; Stop 246
gaatgatctgaaactgcgaatctgt

SEQ ID NO: 457427 - DNA, 25 bp, Artificial
  probe
  misc_feature (1)..(25): SEQ ID NO: 7050; WAN024DQJ; Start 135; Stop 159
aaacttatttcagcaattcaaggaa

SEQ ID NO: 457428 - DNA, 25 bp, Artificial
  probe
  misc_feature (1)..(25): SEQ ID NO: 7050; WAN024DQJ; Start 79; Stop 103
cgtttattcatttctttctcccata

SEQ ID NO: 457429 - DNA, 25 bp, Artificial
  probe
  misc_feature (1)..(25): SEQ ID NO: 7050; WAN024DQJ; Start 221; Stop 245
ggaatgatctgaaactgcgaatctg

SEQ ID NO: 457430 - DNA, 25 bp, Artificial
  probe
  misc_feature (1)..(25): SEQ ID NO: 7050; WAN024DQJ; Start 77; Stop 101
gacgtttattcatttctttctccca

SEQ ID NO: 457431 - DNA, 25 bp, Artificial
  probe
  misc_feature (1)..(25): SEQ ID NO: 7050; WAN024DQJ; Start 143; Stop 167
ttcagcaattcaaggaaacttctgg

SEQ ID NO: 457432 - DNA, 25 bp, Artificial
  probe
  misc_feature (1)..(25): SEQ ID NO: 7050; WAN024DQJ; Start 220; Stop 244
aggaatgatctgaaactgcgaatct

SEQ ID NO: 457433 - DNA, 25 bp, Artificial
  probe
  misc_feature (1)..(25): SEQ ID NO: 7050; WAN024DQJ; Start 146; Stop 170
agcaattcaaggaaacttctggtct

SEQ ID NO: 457434 - DNA, 25 bp, Artificial
  probe
  misc_feature (1)..(25): SEQ ID NO: 7050; WAN024DQJ; Start 78; Stop 102
acgtttattcatttctttctcccat

SEQ ID NO: 457435 - DNA, 25 bp, Artificial
  probe
  misc_feature (1)..(25): SEQ ID NO: 7050; WAN024DQJ; Start 142; Stop 166
tttcagcaattcaaggaaacttctg

SEQ ID NO: 457436 - DNA, 25 bp, Artificial
  probe
  misc_feature (1)..(25): SEQ ID NO: 7050; WAN024DQJ; Start 141; Stop 165
atttcagcaattcaaggaaacttct

SEQ ID NO: 457437 - DNA, 25 bp, Artificial
  probe
  misc_feature (1)..(25): SEQ ID NO: 7050; WAN024DQJ; Start 76; Stop 100
agacgtttattcatttctttctccc

SEQ ID NO: 457438 - DNA, 25 bp, Artificial
  probe
  misc_feature (1)..(25): SEQ ID NO: 7050; WAN024DQJ; Start 145; Stop 169
cagcaattcaaggaaacttctggtc

SEQ ID NO: 457439 - DNA, 25 bp, Artificial
  probe
  misc_feature (1)..(25): SEQ ID NO: 7050; WAN024DQJ; Start 219; Stop 243
caggaatgatctgaaactgcgaatc

SEQ ID NO: 457440 - DNA, 25 bp, Artificial
  probe
  misc_feature (1)..(25): SEQ ID NO: 7050; WAN024DQJ; Start 163; Stop 187
tctggtcttttctacaaactccttt

SEQ ID NO: 457441 - DNA, 25 bp, Artificial
  probe
  misc_feature (1)..(25): SEQ ID NO: 7050; WAN024DQJ; Start 162; Stop 186
ttctggtcttttctacaaactcctt

SEQ ID NO: 457442 - DNA, 25 bp, Artificial
  probe
  misc_feature (1)..(25): SEQ ID NO: 7050; WAN024DQJ; Start 132; Stop 156
atcaaacttatttcagcaattcaag

SEQ ID NO: 457443 - DNA, 25 bp, Artificial
  probe
  misc_feature (1)..(25): SEQ ID NO: 7050; WAN024DQJ; Start 161; Stop 185
cttctggtcttttctacaaactcct

SEQ ID NO: 457444 - DNA, 25 bp, Artificial
  probe
  misc_feature (1)..(25): SEQ ID NO: 7050; WAN024DQJ; Start 137; Stop 161
acttatttcagcaattcaaggaaac

SEQ ID NO: 457445 - DNA, 25 bp, Artificial
  probe
  misc_feature (1)..(25): SEQ ID NO: 7050; WAN024DQJ; Start 160; Stop 184
acttctggtcttttctacaaactcc

SEQ ID NO: 457446 - DNA, 25 bp, Artificial
  probe
  misc_feature (1)..(25): SEQ ID NO: 7050; WAN024DQJ; Start 159; Stop 183
aacttctggtcttttctacaaactc

SEQ ID NO: 457447 - DNA, 25 bp, Artificial
  probe
  misc_feature (1)..(25): SEQ ID NO: 7050; WAN024DQJ; Start 140; Stop 164
tatttcagcaattcaaggaaacttc

SEQ ID NO: 457448 - DNA, 25 bp, Artificial
  probe
  misc_feature (1)..(25): SEQ ID NO: 7050; WAN024DQJ; Start 138; Stop 162
cttatttcagcaattcaaggaaact

SEQ ID NO: 457449 - DNA, 25 bp, Artificial
  probe
  misc_feature (1)..(25): SEQ ID NO: 7050; WAN024DQJ; Start 144; Stop 168
tcagcaattcaaggaaacttctggt

SEQ ID NO: 457450 - DNA, 25 bp, Artificial
  probe
  misc_feature (1)..(25): SEQ ID NO: 7050; WAN024DQJ; Start 158; Stop 182
aaacttctggtcttttctacaaact

SEQ ID NO: 457451 - DNA, 25 bp, Artificial
  probe
  misc_feature (1)..(25): SEQ ID NO: 7050; WAN024DQJ; Start 185; Stop 209
tttggttttgccttattcaagacat

SEQ ID NO: 457452 - DNA, 25 bp, Artificial
  probe
  misc_feature (1)..(25): SEQ ID NO: 7051; WAN024BPE; Start 265; Stop 289
ccgacggaagagtatggttattata

SEQ ID NO: 457453 - DNA, 25 bp, Artificial
  probe
  misc_feature (1)..(25): SEQ ID NO: 7051; WAN024BPE; Start 266; Stop 290
cgacggaagagtatggttattataa

SEQ ID NO: 457454 - DNA, 25 bp, Artificial
  probe
  misc_feature (1)..(25): SEQ ID NO: 7051; WAN024BPE; Start 1011; Stop 1035
tgtttatcctttagttgccatttcg

SEQ ID NO: 457455 - DNA, 25 bp, Artificial
  probe
  misc_feature (1)..(25): SEQ ID NO: 7051; WAN024BPE; Start 1007; Stop 1031
ggtttgtttatcctttagttgccat

SEQ ID NO: 457456 - DNA, 25 bp, Artificial
  probe
  misc_feature (1)..(25): SEQ ID NO: 7051; WAN024BPE; Start 1005; Stop 1029
ttggtttgtttatcctttagttgcc

SEQ ID NO: 457457 - DNA, 25 bp, Artificial
  probe
  misc_feature (1)..(25): SEQ ID NO: 7051; WAN024BPE; Start 1124; Stop 1148
ccctatgctttattggtggagttat

SEQ ID NO: 457458 - DNA, 25 bp, Artificial
  probe
  misc_feature (1)..(25): SEQ ID NO: 7051; WAN024BPE; Start 1126; Stop 1150
ctatgctttattggtggagttatcg

SEQ ID NO: 457459 - DNA, 25 bp, Artificial
  probe
  misc_feature (1)..(25): SEQ ID NO: 7051; WAN024BPE; Start 1139; Stop 1163
gtggagttatcggaaataggagatt

SEQ ID NO: 457460 - DNA, 25 bp, Artificial
  probe
  misc_feature (1)..(25): SEQ ID NO: 7051; WAN024BPE; Start 1127; Stop 1151
tatgctttattggtggagttatcgg

SEQ ID NO: 457461 - DNA, 25 bp, Artificial
  probe
  misc_feature (1)..(25): SEQ ID NO: 7051; WAN024BPE; Start 1125; Stop 1149
cctatgctttattggtggagttatc

SEQ ID NO: 457462 - DNA, 25 bp, Artificial
  probe
  misc_feature (1)..(25): SEQ ID NO: 7051; WAN024BPE; Start 1131; Stop 1155
ctttattggtggagttatcggaaat

SEQ ID NO: 457463 - DNA, 25 bp, Artificial
  probe
  misc_feature (1)..(25): SEQ ID NO: 7051; WAN024BPE; Start 1134; Stop 1158
tattggtggagttatcggaaatagg

SEQ ID NO: 457464 - DNA, 25 bp, Artificial
  probe
  misc_feature (1)..(25): SEQ ID NO: 7051; WAN024BPE; Start 1135; Stop 1159
attggtggagttatcggaaatagga

SEQ ID NO: 457465 - DNA, 25 bp, Artificial
  probe
  misc_feature (1)..(25): SEQ ID NO: 7051; WAN024BPE; Start 233; Stop 257
attggtttgggaacttgatgtctaa

SEQ ID NO: 457466 - DNA, 25 bp, Artificial
  probe
  misc_feature (1)..(25): SEQ ID NO: 7051; WAN024BPE; Start 1004; Stop 1028
tttggtttgtttatcctttagttgc

SEQ ID NO: 457467 - DNA, 25 bp, Artificial
  probe
  misc_feature (1)..(25): SEQ ID NO: 7051; WAN024BPE; Start 1130; Stop 1154
gctttattggtggagttatcggaaa

SEQ ID NO: 457468 - DNA, 25 bp, Artificial
  probe
  misc_feature (1)..(25): SEQ ID NO: 7051; WAN024BPE; Start 234; Stop 258
ttggtttgggaacttgatgtctaaa

SEQ ID NO: 457469 - DNA, 25 bp, Artificial
  probe
  misc_feature (1)..(25): SEQ ID NO: 7051; WAN024BPE; Start 52; Stop 76
ataactacaccagtcttattactcc

SEQ ID NO: 457470 - DNA, 25 bp, Artificial
  probe
  misc_feature (1)..(25): SEQ ID NO: 7051; WAN024BPE; Start 1008; Stop 1032
gtttgtttatcctttagttgccatt

SEQ ID NO: 457471 - DNA, 25 bp, Artificial
  probe
  misc_feature (1)..(25): SEQ ID NO: 7051; WAN024BPE; Start 290; Stop 314
attatcccttatttgccttattgct

SEQ ID NO: 457472 - DNA, 25 bp, Artificial
  probe
  misc_feature (1)..(25): SEQ ID NO: 7051; WAN024BPE; Start 232; Stop 256
gattggtttgggaacttgatgtcta

SEQ ID NO: 457473 - DNA, 25 bp, Artificial
  probe
  misc_feature (1)..(25): SEQ ID NO: 7051; WAN024BPE; Start 1138; Stop 1162
ggtggagttatcggaaataggagat

SEQ ID NO: 457474 - DNA, 25 bp, Artificial
  probe
  misc_feature (1)..(25): SEQ ID NO: 7051; WAN024BPE; Start 59; Stop 83
caccagtcttattactcccaatagt

SEQ ID NO: 457475 - DNA, 25 bp, Artificial
  probe
  misc_feature (1)..(25): SEQ ID NO: 7051; WAN024BPE; Start 58; Stop 82
acaccagtcttattactcccaatag

SEQ ID NO: 457476 - DNA, 25 bp, Artificial
  probe
  misc_feature (1)..(25): SEQ ID NO: 7051; WAN024BPE; Start 56; Stop 80
ctacaccagtcttattactcccaat

SEQ ID NO: 457477 - DNA, 25 bp, Artificial
  probe
  misc_feature (1)..(25): SEQ ID NO: 7051; WAN024BPE; Start 55; Stop 79
actacaccagtcttattactcccaa

SEQ ID NO: 457478 - DNA, 25 bp, Artificial
  probe
  misc_feature (1)..(25): SEQ ID NO: 7051; WAN024BPE; Start 54; Stop 78
aactacaccagtcttattactccca

SEQ ID NO: 457479 - DNA, 25 bp, Artificial
  probe
  misc_feature (1)..(25): SEQ ID NO: 7051; WAN024BPE; Start 1010; Stop 1034
ttgtttatcctttagttgccatttc

SEQ ID NO: 457480 - DNA, 25 bp, Artificial
  probe
  misc_feature (1)..(25): SEQ ID NO: 7051; WAN024BPE; Start 712; Stop 736
tttacgctcttatctccattgttgc

SEQ ID NO: 457481 - DNA, 25 bp, Artificial
  probe
  misc_feature (1)..(25): SEQ ID NO: 7051; WAN024BPE; Start 53; Stop 77
taactacaccagtcttattactccc

SEQ ID NO: 457482 - DNA, 25 bp, Artificial
  probe
  misc_feature (1)..(25): SEQ ID NO: 7051; WAN024BPE; Start 1136; Stop 1160
ttggtggagttatcggaaataggag

SEQ ID NO: 457483 - DNA, 25 bp, Artificial
  probe
  misc_feature (1)..(25): SEQ ID NO: 7051; WAN024BPE; Start 60; Stop 84
accagtcttattactcccaatagtt

SEQ ID NO: 457484 - DNA, 25 bp, Artificial
  probe
  misc_feature (1)..(25): SEQ ID NO: 7051; WAN024BPE; Start 229; Stop 253
tttgattggtttgggaacttgatgt

SEQ ID NO: 457485 - DNA, 25 bp, Artificial
  probe
  misc_feature (1)..(25): SEQ ID NO: 7052; WAN024BYC; Start 277; Stop 301
aaggtctacacacatcatcaagttt

SEQ ID NO: 457486 - DNA, 25 bp, Artificial
  probe
  misc_feature (1)..(25): SEQ ID NO: 7052; WAN024BYC; Start 276; Stop 300
aaaggtctacacacatcatcaagtt

SEQ ID NO: 457487 - DNA, 25 bp, Artificial
  probe
  misc_feature (1)..(25): SEQ ID NO: 7052; WAN024BYC; Start 213; Stop 237
caaagtgaaagatggtgtgtgtatc

SEQ ID NO: 457488 - DNA, 25 bp, Artificial
  probe
  misc_feature (1)..(25): SEQ ID NO: 7052; WAN024BYC; Start 16; Stop 40
agtagactgaaaccttatccaatgc

SEQ ID NO: 457489 - DNA, 25 bp, Artificial
  probe
  misc_feature (1)..(25): SEQ ID NO: 7052; WAN024BYC; Start 15; Stop 39
gagtagactgaaaccttatccaatg

SEQ ID NO: 457490 - DNA, 25 bp, Artificial
  probe
  misc_feature (1)..(25): SEQ ID NO: 7052; WAN024BYC; Start 14; Stop 38
agagtagactgaaaccttatccaat

SEQ ID NO: 457491 - DNA, 25 bp, Artificial
  probe
  misc_feature (1)..(25): SEQ ID NO: 7052; WAN024BYC; Start 80; Stop 104
aagaaggatatgtcaaggaagctga

SEQ ID NO: 457492 - DNA, 25 bp, Artificial
  probe
  misc_feature (1)..(25): SEQ ID NO: 7052; WAN024BYC; Start 214; Stop 238
aaagtgaaagatggtgtgtgtatcg

SEQ ID NO: 457493 - DNA, 25 bp, Artificial
  probe
  misc_feature (1)..(25): SEQ ID NO: 7052; WAN024BYC; Start 212; Stop 236
tcaaagtgaaagatggtgtgtgtat

SEQ ID NO: 457494 - DNA, 25 bp, Artificial
  probe
  misc_feature (1)..(25): SEQ ID NO: 7052; WAN024BYC; Start 211; Stop 235
atcaaagtgaaagatggtgtgtgta

SEQ ID NO: 457495 - DNA, 25 bp, Artificial
  probe
  misc_feature (1)..(25): SEQ ID NO: 7052; WAN024BYC; Start 205; Stop 229
gctacaatcaaagtgaaagatggtg

SEQ ID NO: 457496 - DNA, 25 bp, Artificial
  probe
  misc_feature (1)..(25): SEQ ID NO: 7052; WAN024BYC; Start 17; Stop 41
gtagactgaaaccttatccaatgcg

SEQ ID NO: 457497 - DNA, 25 bp, Artificial
  probe
  misc_feature (1)..(25): SEQ ID NO: 7052; WAN024BYC; Start 82; Stop 106
gaaggatatgtcaaggaagctgaga

SEQ ID NO: 457498 - DNA, 25 bp, Artificial
  probe
  misc_feature (1)..(25): SEQ ID NO: 7052; WAN024BYC; Start 81; Stop 105
agaaggatatgtcaaggaagctgag

SEQ ID NO: 457499 - DNA, 25 bp, Artificial
  probe
  misc_feature (1)..(25): SEQ ID NO: 7052; WAN024BYC; Start 18; Stop 42
tagactgaaaccttatccaatgcga

SEQ ID NO: 457500 - DNA, 25 bp, Artificial
  probe
  misc_feature (1)..(25): SEQ ID NO: 7052; WAN024BYC; Start 209; Stop 233
caatcaaagtgaaagatggtgtgtg

SEQ ID NO: 457501 - DNA, 25 bp, Artificial
  probe
  misc_feature (1)..(25): SEQ ID NO: 7052; WAN024BYC; Start 207; Stop 231
tacaatcaaagtgaaagatggtgtg

SEQ ID NO: 457502 - DNA, 25 bp, Artificial
  probe
  misc_feature (1)..(25): SEQ ID NO: 7052; WAN024BYC; Start 206; Stop 230
ctacaatcaaagtgaaagatggtgt

SEQ ID NO: 457503 - DNA, 25 bp, Artificial
  probe
  misc_feature (1)..(25): SEQ ID NO: 7052; WAN024BYC; Start 210; Stop 234
aatcaaagtgaaagatggtgtgtgt

SEQ ID NO: 457504 - DNA, 25 bp, Artificial
  probe
  misc_feature (1)..(25): SEQ ID NO: 7052; WAN024BYC; Start 10; Stop 34
aagcagagtagactgaaaccttatc

SEQ ID NO: 457505 - DNA, 25 bp, Artificial
  probe
  misc_feature (1)..(25): SEQ ID NO: 7052; WAN024BYC; Start 9; Stop 33
gaagcagagtagactgaaaccttat

SEQ ID NO: 457506 - DNA, 25 bp, Artificial
  probe
  misc_feature (1)..(25): SEQ ID NO: 7052; WAN024BYC; Start 13; Stop 37
cagagtagactgaaaccttatccaa

SEQ ID NO: 457507 - DNA, 25 bp, Artificial
  probe
  misc_feature (1)..(25): SEQ ID NO: 7052; WAN024BYC; Start 156; Stop 180
gtatggcgagcgtgtcaatgatatt

SEQ ID NO: 457508 - DNA, 25 bp, Artificial
  probe
  misc_feature (1)..(25): SEQ ID NO: 7052; WAN024BYC; Start 140; Stop 164
aactacagtctgaattgtatggcga

SEQ ID NO: 457509 - DNA, 25 bp, Artificial
  probe
  misc_feature (1)..(25): SEQ ID NO: 7052; WAN024BYC; Start 208; Stop 232
acaatcaaagtgaaagatggtgtgt

SEQ ID NO: 457510 - DNA, 25 bp, Artificial
  probe
  misc_feature (1)..(25): SEQ ID NO: 7052; WAN024BYC; Start 8; Stop 32
tgaagcagagtagactgaaacctta

SEQ ID NO: 457511 - DNA, 25 bp, Artificial
  probe
  misc_feature (1)..(25): SEQ ID NO: 7052; WAN024BYC; Start 83; Stop 107
aaggatatgtcaaggaagctgagac

SEQ ID NO: 457512 - DNA, 25 bp, Artificial
  probe
  misc_feature (1)..(25): SEQ ID NO: 7052; WAN024BYC; Start 11; Stop 35
agcagagtagactgaaaccttatcc

SEQ ID NO: 457513 - DNA, 25 bp, Artificial
  probe
  misc_feature (1)..(25): SEQ ID NO: 7052; WAN024BYC; Start 79; Stop 103
aaagaaggatatgtcaaggaagctg

SEQ ID NO: 457514 - DNA, 25 bp, Artificial
  probe
  misc_feature (1)..(25): SEQ ID NO: 7052; WAN024BYC; Start 195; Stop 219
caacaagtcagctacaatcaaagtg

SEQ ID NO: 457515 - DNA, 25 bp, Artificial
  probe
  misc_feature (1)..(25): SEQ ID NO: 7052; WAN024BYC; Start 141; Stop 165
actacagtctgaattgtatggcgag

SEQ ID NO: 457516 - DNA, 25 bp, Artificial
  probe
  misc_feature (1)..(25): SEQ ID NO: 7052; WAN024BYC; Start 12; Stop 36
gcagagtagactgaaaccttatcca

SEQ ID NO: 457517 - DNA, 25 bp, Artificial
  probe
  misc_feature (1)..(25): SEQ ID NO: 7052; WAN024BYC; Start 7; Stop 31
ttgaagcagagtagactgaaacctt

SEQ ID NO: 457518 - DNA, 25 bp, Artificial
  probe
  misc_feature (1)..(25): SEQ ID NO: 7053; WAN024BLO; Start 72; Stop 96
aacatggctaagtcaaactttgaaa

SEQ ID NO: 457519 - DNA, 25 bp, Artificial
  probe
  misc_feature (1)..(25): SEQ ID NO: 7053; WAN024BLO; Start 71; Stop 95
aaacatggctaagtcaaactttgaa

SEQ ID NO: 457520 - DNA, 25 bp, Artificial
  probe
  misc_feature (1)..(25): SEQ ID NO: 7053; WAN024BLO; Start 73; Stop 97
acatggctaagtcaaactttgaaaa

SEQ ID NO: 457521 - DNA, 25 bp, Artificial
  probe
  misc_feature (1)..(25): SEQ ID NO: 7053; WAN024BLO; Start 70; Stop 94
aaaacatggctaagtcaaactttga

SEQ ID NO: 457522 - DNA, 25 bp, Artificial
  probe
  misc_feature (1)..(25): SEQ ID NO: 7054; WAN024BR5; Start 62; Stop 86
taatccttgcttcctctcctatgtt

SEQ ID NO: 457523 - DNA, 25 bp, Artificial
  probe
  misc_feature (1)..(25): SEQ ID NO: 7054; WAN024BR5; Start 61; Stop 85
ttaatccttgcttcctctcctatgt

SEQ ID NO: 457524 - DNA, 25 bp, Artificial
  probe
  misc_feature (1)..(25): SEQ ID NO: 7054; WAN024BR5; Start 467; Stop 491
ctggaatctattcaactgtaggcat

SEQ ID NO: 457525 - DNA, 25 bp, Artificial
  probe
  misc_feature (1)..(25): SEQ ID NO: 7054; WAN024BR5; Start 465; Stop 489
aactggaatctattcaactgtaggc

SEQ ID NO: 457526 - DNA, 25 bp, Artificial
  probe
  misc_feature (1)..(25): SEQ ID NO: 7054; WAN024BR5; Start 260; Stop 284
ggatacttaccattgctgtcaacat

SEQ ID NO: 457527 - DNA, 25 bp, Artificial
  probe
  misc_feature (1)..(25): SEQ ID NO: 7054; WAN024BR5; Start 471; Stop 495
aatctattcaactgtaggcatgtct

SEQ ID NO: 457528 - DNA, 25 bp, Artificial
  probe
  misc_feature (1)..(25): SEQ ID NO: 7054; WAN024BR5; Start 473; Stop 497
tctattcaactgtaggcatgtctaa

SEQ ID NO: 457529 - DNA, 25 bp, Artificial
  probe
  misc_feature (1)..(25): SEQ ID NO: 7054; WAN024BR5; Start 466; Stop 490
actggaatctattcaactgtaggca

SEQ ID NO: 457530 - DNA, 25 bp, Artificial
  probe
  misc_feature (1)..(25): SEQ ID NO: 7054; WAN024BR5; Start 470; Stop 494
gaatctattcaactgtaggcatgtc

SEQ ID NO: 457531 - DNA, 25 bp, Artificial
  probe
  misc_feature (1)..(25): SEQ ID NO: 7054; WAN024BR5; Start 194; Stop 218
caacgatagactatgtccgctatat

SEQ ID NO: 457532 - DNA, 25 bp, Artificial
  probe
  misc_feature (1)..(25): SEQ ID NO: 7054; WAN024BR5; Start 862; Stop 886
attgagatcatacttcgtgagatgg

SEQ ID NO: 457533 - DNA, 25 bp, Artificial
  probe
  misc_feature (1)..(25): SEQ ID NO: 7054; WAN024BR5; Start 472; Stop 496
atctattcaactgtaggcatgtcta

SEQ ID NO: 457534 - DNA, 25 bp, Artificial
  probe
  misc_feature (1)..(25): SEQ ID NO: 7054; WAN024BR5; Start 469; Stop 493
ggaatctattcaactgtaggcatgt

SEQ ID NO: 457535 - DNA, 25 bp, Artificial
  probe
  misc_feature (1)..(25): SEQ ID NO: 7054; WAN024BR5; Start 468; Stop 492
tggaatctattcaactgtaggcatg

SEQ ID NO: 457536 - DNA, 25 bp, Artificial
  probe
  misc_feature (1)..(25): SEQ ID NO: 7054; WAN024BR5; Start 261; Stop 285
gatacttaccattgctgtcaacatg

SEQ ID NO: 457537 - DNA, 25 bp, Artificial
  probe
  misc_feature (1)..(25): SEQ ID NO: 7054; WAN024BR5; Start 193; Stop 217
acaacgatagactatgtccgctata

SEQ ID NO: 457538 - DNA, 25 bp, Artificial
  probe
  misc_feature (1)..(25): SEQ ID NO: 7054; WAN024BR5; Start 475; Stop 499
tattcaactgtaggcatgtctaatg

SEQ ID NO: 457539 - DNA, 25 bp, Artificial
  probe
  misc_feature (1)..(25): SEQ ID NO: 7054; WAN024BR5; Start 474; Stop 498
ctattcaactgtaggcatgtctaat

SEQ ID NO: 457540 - DNA, 25 bp, Artificial
  probe
  misc_feature (1)..(25): SEQ ID NO: 7054; WAN024BR5; Start 1064; Stop 1088
atacttcaggagctatcaggaatgt

SEQ ID NO: 457541 - DNA, 25 bp, Artificial
  probe
  misc_feature (1)..(25): SEQ ID NO: 7054; WAN024BR5; Start 1063; Stop 1087
tatacttcaggagctatcaggaatg

SEQ ID NO: 457542 - DNA, 25 bp, Artificial
  probe
  misc_feature (1)..(25): SEQ ID NO: 7054; WAN024BR5; Start 1065; Stop 1089
tacttcaggagctatcaggaatgtt

SEQ ID NO: 457543 - DNA, 25 bp, Artificial
  probe
  misc_feature (1)..(25): SEQ ID NO: 7054; WAN024BR5; Start 856; Stop 880
agagatattgagatcatacttcgtg

SEQ ID NO: 457544 - DNA, 25 bp, Artificial
  probe
  misc_feature (1)..(25): SEQ ID NO: 7054; WAN024BR5; Start 861; Stop 885
tattgagatcatacttcgtgagatg

SEQ ID NO: 457545 - DNA, 25 bp, Artificial
  probe
  misc_feature (1)..(25): SEQ ID NO: 7054; WAN024BR5; Start 1003; Stop 1027
gaaccaactaatcaaacagcactac

SEQ ID NO: 457546 - DNA, 25 bp, Artificial
  probe
  misc_feature (1)..(25): SEQ ID NO: 7054; WAN024BR5; Start 1004; Stop 1028
aaccaactaatcaaacagcactact

SEQ ID NO: 457547 - DNA, 25 bp, Artificial
  probe
  misc_feature (1)..(25): SEQ ID NO: 7054; WAN024BR5; Start 195; Stop 219
aacgatagactatgtccgctatata

SEQ ID NO: 457548 - DNA, 25 bp, Artificial
  probe
  misc_feature (1)..(25): SEQ ID NO: 7054; WAN024BR5; Start 60; Stop 84
tttaatccttgcttcctctcctatg

SEQ ID NO: 457549 - DNA, 25 bp, Artificial
  probe
  misc_feature (1)..(25): SEQ ID NO: 7054; WAN024BR5; Start 59; Stop 83
gtttaatccttgcttcctctcctat

SEQ ID NO: 457550 - DNA, 25 bp, Artificial
  probe
  misc_feature (1)..(25): SEQ ID NO: 7054; WAN024BR5; Start 893; Stop 917
aagttgcagttagattgagaagatc

SEQ ID NO: 457551 - DNA, 25 bp, Artificial
  probe
  misc_feature (1)..(25): SEQ ID NO: 7054; WAN024BR5; Start 64; Stop 88
atccttgcttcctctcctatgttta

SEQ ID NO: 457552 - DNA, 25 bp, Artificial
  probe
  misc_feature (1)..(25): SEQ ID NO: 7054; WAN024BR5; Start 30; Stop 54
tgttatgagtcgtgcagataattct

SEQ ID NO: 457553 - DNA, 25 bp, Artificial
  probe
  misc_feature (1)..(25): SEQ ID NO: 7054; WAN024BR5; Start 29; Stop 53
gtgttatgagtcgtgcagataattc

SEQ ID NO: 457554 - DNA, 25 bp, Artificial
  probe
  misc_feature (1)..(25): SEQ ID NO: 7054; WAN024BR5; Start 871; Stop 895
atacttcgtgagatggcagaacaag

SEQ ID NO: 457555 - DNA, 25 bp, Artificial
  probe
  misc_feature (1)..(25): SEQ ID NO: 7055; WAN024BJS; Start 13; Stop 37
aagtggatattgtgtcctgtatgtg

SEQ ID NO: 457556 - DNA, 25 bp, Artificial
  probe
  misc_feature (1)..(25): SEQ ID NO: 7055; WAN024BJS; Start 12; Stop 36
caagtggatattgtgtcctgtatgt

SEQ ID NO: 457557 - DNA, 25 bp, Artificial
  probe
  misc_feature (1)..(25): SEQ ID NO: 7055; WAN024BJS; Start 16; Stop 40
tggatattgtgtcctgtatgtggaa

SEQ ID NO: 457558 - DNA, 25 bp, Artificial
  probe
  misc_feature (1)..(25): SEQ ID NO: 7055; WAN024BJS; Start 14; Stop 38
agtggatattgtgtcctgtatgtgg

SEQ ID NO: 457559 - DNA, 25 bp, Artificial
  probe
  misc_feature (1)..(25): SEQ ID NO: 7055; WAN024BJS; Start 15; Stop 39
gtggatattgtgtcctgtatgtgga

SEQ ID NO: 457560 - DNA, 25 bp, Artificial
  probe
  misc_feature (1)..(25): SEQ ID NO: 7055; WAN024BJS; Start 44; Stop 68
aaacacgattaaagataagggaaga

SEQ ID NO: 457561 - DNA, 25 bp, Artificial
  probe
  misc_feature (1)..(25): SEQ ID NO: 7055; WAN024BJS; Start 45; Stop 69
aacacgattaaagataagggaagat

SEQ ID NO: 457562 - DNA, 25 bp, Artificial
  probe
  misc_feature (1)..(25): SEQ ID NO: 7055; WAN024BJS; Start 17; Stop 41
ggatattgtgtcctgtatgtggaaa

SEQ ID NO: 457563 - DNA, 25 bp, Artificial
  probe
  misc_feature (1)..(25): SEQ ID NO: 7055; WAN024BJS; Start 18; Stop 42
gatattgtgtcctgtatgtggaaat

SEQ ID NO: 457564 - DNA, 25 bp, Artificial
  probe
  misc_feature (1)..(25): SEQ ID NO: 7055; WAN024BJS; Start 9; Stop 33
ctacaagtggatattgtgtcctgta

SEQ ID NO: 457565 - DNA, 25 bp, Artificial
  probe
  misc_feature (1)..(25): SEQ ID NO: 7055; WAN024BJS; Start 46; Stop 70
acacgattaaagataagggaagata

SEQ ID NO: 457566 - DNA, 25 bp, Artificial
  probe
  misc_feature (1)..(25): SEQ ID NO: 7055; WAN024BJS; Start 21; Stop 45
attgtgtcctgtatgtggaaataaa

SEQ ID NO: 457567 - DNA, 25 bp, Artificial
  probe
  misc_feature (1)..(25): SEQ ID NO: 7055; WAN024BJS; Start 7; Stop 31
aactacaagtggatattgtgtcctg

SEQ ID NO: 457568 - DNA, 25 bp, Artificial
  probe
  misc_feature (1)..(25): SEQ ID NO: 7055; WAN024BJS; Start 11; Stop 35
acaagtggatattgtgtcctgtatg

SEQ ID NO: 457569 - DNA, 25 bp, Artificial
  probe
  misc_feature (1)..(25): SEQ ID NO: 7055; WAN024BJS; Start 10; Stop 34
tacaagtggatattgtgtcctgtat

SEQ ID NO: 457570 - DNA, 25 bp, Artificial
  probe
  misc_feature (1)..(25): SEQ ID NO: 7055; WAN024BJS; Start 47; Stop 71
cacgattaaagataagggaagatac

SEQ ID NO: 457571 - DNA, 25 bp, Artificial
  probe
  misc_feature (1)..(25): SEQ ID NO: 7055; WAN024BJS; Start 48; Stop 72
acgattaaagataagggaagatact

SEQ ID NO: 457572 - DNA, 25 bp, Artificial
  probe
  misc_feature (1)..(25): SEQ ID NO: 7055; WAN024BJS; Start 8; Stop 32
actacaagtggatattgtgtcctgt

SEQ ID NO: 457573 - DNA, 25 bp, Artificial
  probe
  misc_feature (1)..(25): SEQ ID NO: 7055; WAN024BJS; Start 49; Stop 73
cgattaaagataagggaagatactg

SEQ ID NO: 457574 - DNA, 25 bp, Artificial
  probe
  misc_feature (1)..(25): SEQ ID NO: 7055; WAN024BJS; Start 20; Stop 44
tattgtgtcctgtatgtggaaataa

SEQ ID NO: 457575 - DNA, 25 bp, Artificial
  probe
  misc_feature (1)..(25): SEQ ID NO: 7055; WAN024BJS; Start 19; Stop 43
atattgtgtcctgtatgtggaaata

SEQ ID NO: 457576 - DNA, 25 bp, Artificial
  probe
  misc_feature (1)..(25): SEQ ID NO: 7055; WAN024BJS; Start 6; Stop 30
aaactacaagtggatattgtgtcct

SEQ ID NO: 457577 - DNA, 25 bp, Artificial
  probe
  misc_feature (1)..(25): SEQ ID NO: 7055; WAN024BJS; Start 143; Stop 167
aagtaactgtgattacagagccaga

SEQ ID NO: 457578 - DNA, 25 bp, Artificial
  probe
  misc_feature (1)..(25): SEQ ID NO: 7055; WAN024BJS; Start 28; Stop 52
cctgtatgtggaaataaaacacgat

SEQ ID NO: 457579 - DNA, 25 bp, Artificial
  probe
  misc_feature (1)..(25): SEQ ID NO: 7055; WAN024BJS; Start 27; Stop 51
tcctgtatgtggaaataaaacacga

SEQ ID NO: 457580 - DNA, 25 bp, Artificial
  probe
  misc_feature (1)..(25): SEQ ID NO: 7055; WAN024BJS; Start 26; Stop 50
gtcctgtatgtggaaataaaacacg

SEQ ID NO: 457581 - DNA, 25 bp, Artificial
  probe
  misc_feature (1)..(25): SEQ ID NO: 7055; WAN024BJS; Start 43; Stop 67
aaaacacgattaaagataagggaag

SEQ ID NO: 457582 - DNA, 25 bp, Artificial
  probe
  misc_feature (1)..(25): SEQ ID NO: 7055; WAN024BJS; Start 25; Stop 49
tgtcctgtatgtggaaataaaacac

SEQ ID NO: 457583 - DNA, 25 bp, Artificial
  probe
  misc_feature (1)..(25): SEQ ID NO: 7055; WAN024BJS; Start 24; Stop 48
gtgtcctgtatgtggaaataaaaca

SEQ ID NO: 457584 - DNA, 25 bp, Artificial
  probe
  misc_feature (1)..(25): SEQ ID NO: 7055; WAN024BJS; Start 23; Stop 47
tgtgtcctgtatgtggaaataaaac

SEQ ID NO: 457585 - DNA, 25 bp, Artificial
  probe
  misc_feature (1)..(25): SEQ ID NO: 7055; WAN024BJS; Start 5; Stop 29
taaactacaagtggatattgtgtcc

SEQ ID NO: 457586 - DNA, 25 bp, Artificial
  probe
  misc_feature (1)..(25): SEQ ID NO: 7055; WAN024BJS; Start 144; Stop 168
agtaactgtgattacagagccagac

SEQ ID NO: 457587 - DNA, 25 bp, Artificial
  probe
  misc_feature (1)..(25): SEQ ID NO: 7055; WAN024BJS; Start 22; Stop 46
ttgtgtcctgtatgtggaaataaaa

SEQ ID NO: 457588 - DNA, 25 bp, Artificial
  probe
  misc_feature (1)..(25): SEQ ID NO: 7056; WAN024EU3; Start 56; Stop 80
ggtatagcaaggtagaagttgatga

SEQ ID NO: 457589 - DNA, 25 bp, Artificial
  probe
  misc_feature (1)..(25): SEQ ID NO: 7056; WAN024EU3; Start 59; Stop 83
atagcaaggtagaagttgatgagtt

SEQ ID NO: 457590 - DNA, 25 bp, Artificial
  probe
  misc_feature (1)..(25): SEQ ID NO: 7056; WAN024EU3; Start 58; Stop 82
tatagcaaggtagaagttgatgagt

SEQ ID NO: 457591 - DNA, 25 bp, Artificial
  probe
  misc_feature (1)..(25): SEQ ID NO: 7056; WAN024EU3; Start 57; Stop 81
gtatagcaaggtagaagttgatgag

SEQ ID NO: 457592 - DNA, 25 bp, Artificial
  probe
  misc_feature (1)..(25): SEQ ID NO: 7056; WAN024EU3; Start 115; Stop 139
tatgctaccttggttaagtcacttc

SEQ ID NO: 457593 - DNA, 25 bp, Artificial
  probe
  misc_feature (1)..(25): SEQ ID NO: 7056; WAN024EU3; Start 114; Stop 138
ctatgctaccttggttaagtcactt

SEQ ID NO: 457594 - DNA, 25 bp, Artificial
  probe
  misc_feature (1)..(25): SEQ ID NO: 7056; WAN024EU3; Start 127; Stop 151
gttaagtcacttcgtcaggagattg

SEQ ID NO: 457595 - DNA, 25 bp, Artificial
  probe
  misc_feature (1)..(25): SEQ ID NO: 7056; WAN024EU3; Start 113; Stop 137
cctatgctaccttggttaagtcact

SEQ ID NO: 457596 - DNA, 25 bp, Artificial
  probe
  misc_feature (1)..(25): SEQ ID NO: 7056; WAN024EU3; Start 120; Stop 144
taccttggttaagtcacttcgtcag

SEQ ID NO: 457597 - DNA, 25 bp, Artificial
  probe
  misc_feature (1)..(25): SEQ ID NO: 7056; WAN024EU3; Start 119; Stop 143
ctaccttggttaagtcacttcgtca

SEQ ID NO: 457598 - DNA, 25 bp, Artificial
  probe
  misc_feature (1)..(25): SEQ ID NO: 7056; WAN024EU3; Start 103; Stop 127
gactatgaaacctatgctaccttgg

SEQ ID NO: 457599 - DNA, 25 bp, Artificial
  probe
  misc_feature (1)..(25): SEQ ID NO: 7056; WAN024EU3; Start 102; Stop 126
ggactatgaaacctatgctaccttg

SEQ ID NO: 457600 - DNA, 25 bp, Artificial
  probe
  misc_feature (1)..(25): SEQ ID NO: 7056; WAN024EU3; Start 126; Stop 150
ggttaagtcacttcgtcaggagatt

SEQ ID NO: 457601 - DNA, 25 bp, Artificial
  probe
  misc_feature (1)..(25): SEQ ID NO: 7056; WAN024EU3; Start 163; Stop 187
gaagaattaactcgtaaaccgcaag

SEQ ID NO: 457602 - DNA, 25 bp, Artificial
  probe
  misc_feature (1)..(25): SEQ ID NO: 7056; WAN024EU3; Start 60; Stop 84
tagcaaggtagaagttgatgagttt

SEQ ID NO: 457603 - DNA, 25 bp, Artificial
  probe
  misc_feature (1)..(25): SEQ ID NO: 7056; WAN024EU3; Start 55; Stop 79
gggtatagcaaggtagaagttgatg

SEQ ID NO: 457604 - DNA, 25 bp, Artificial
  probe
  misc_feature (1)..(25): SEQ ID NO: 7056; WAN024EU3; Start 54; Stop 78
tgggtatagcaaggtagaagttgat

SEQ ID NO: 457605 - DNA, 25 bp, Artificial
  probe
  misc_feature (1)..(25): SEQ ID NO: 7056; WAN024EU3; Start 112; Stop 136
acctatgctaccttggttaagtcac

SEQ ID NO: 457606 - DNA, 25 bp, Artificial
  probe
  misc_feature (1)..(25): SEQ ID NO: 7056; WAN024EU3; Start 128; Stop 152
ttaagtcacttcgtcaggagattgc

SEQ ID NO: 457607 - DNA, 25 bp, Artificial
  probe
  misc_feature (1)..(25): SEQ ID NO: 7056; WAN024EU3; Start 116; Stop 140
atgctaccttggttaagtcacttcg

SEQ ID NO: 457608 - DNA, 25 bp, Artificial
  probe
  misc_feature (1)..(25): SEQ ID NO: 7056; WAN024EU3; Start 160; Stop 184
aaggaagaattaactcgtaaaccgc

SEQ ID NO: 457609 - DNA, 25 bp, Artificial
  probe
  misc_feature (1)..(25): SEQ ID NO: 7056; WAN024EU3; Start 164; Stop 188
aagaattaactcgtaaaccgcaagt

SEQ ID NO: 457610 - DNA, 25 bp, Artificial
  probe
  misc_feature (1)..(25): SEQ ID NO: 7056; WAN024EU3; Start 162; Stop 186
ggaagaattaactcgtaaaccgcaa

SEQ ID NO: 457611 - DNA, 25 bp, Artificial
  probe
  misc_feature (1)..(25): SEQ ID NO: 7056; WAN024EU3; Start 123; Stop 147
cttggttaagtcacttcgtcaggag

SEQ ID NO: 457612 - DNA, 25 bp, Artificial
  probe
  misc_feature (1)..(25): SEQ ID NO: 7056; WAN024EU3; Start 53; Stop 77
gtgggtatagcaaggtagaagttga

SEQ ID NO: 457613 - DNA, 25 bp, Artificial
  probe
  misc_feature (1)..(25): SEQ ID NO: 7056; WAN024EU3; Start 125; Stop 149
tggttaagtcacttcgtcaggagat

SEQ ID NO: 457614 - DNA, 25 bp, Artificial
  probe
  misc_feature (1)..(25): SEQ ID NO: 7056; WAN024EU3; Start 98; Stop 122
tcaaggactatgaaacctatgctac

SEQ ID NO: 457615 - DNA, 25 bp, Artificial
  probe
  misc_feature (1)..(25): SEQ ID NO: 7056; WAN024EU3; Start 101; Stop 125
aggactatgaaacctatgctacctt

SEQ ID NO: 457616 - DNA, 25 bp, Artificial
  probe
  misc_feature (1)..(25): SEQ ID NO: 7056; WAN024EU3; Start 100; Stop 124
aaggactatgaaacctatgctacct

SEQ ID NO: 457617 - DNA, 25 bp, Artificial
  probe
  misc_feature (1)..(25): SEQ ID NO: 7056; WAN024EU3; Start 99; Stop 123
caaggactatgaaacctatgctacc

SEQ ID NO: 457618 - DNA, 25 bp, Artificial
  probe
  misc_feature (1)..(25): SEQ ID NO: 7056; WAN024EU3; Start 97; Stop 121
atcaaggactatgaaacctatgcta

SEQ ID NO: 457619 - DNA, 25 bp, Artificial
  probe
  misc_feature (1)..(25): SEQ ID NO: 7056; WAN024EU3; Start 166; Stop 190
gaattaactcgtaaaccgcaagtga

SEQ ID NO: 457620 - DNA, 25 bp, Artificial
  probe
  misc_feature (1)..(25): SEQ ID NO: 7056; WAN024EU3; Start 165; Stop 189
agaattaactcgtaaaccgcaagtg

SEQ ID NO: 457621 - DNA, 25 bp, Artificial
  probe
  misc_feature (1)..(25): SEQ ID NO: 7057; WAN024CPP; Start 179; Stop 203
cagatgatgtgattaaccgtgagaa

SEQ ID NO: 457622 - DNA, 25 bp, Artificial
  probe
  misc_feature (1)..(25): SEQ ID NO: 7057; WAN024CPP; Start 395; Stop 419
gaatcgcaactcaatctaacaaggt

SEQ ID NO: 457623 - DNA, 25 bp, Artificial
  probe
  misc_feature (1)..(25): SEQ ID NO: 7057; WAN024CPP; Start 396; Stop 420
aatcgcaactcaatctaacaaggtt

SEQ ID NO: 457624 - DNA, 25 bp, Artificial
  probe
  misc_feature (1)..(25): SEQ ID NO: 7057; WAN024CPP; Start 170; Stop 194
ttcagtggacagatgatgtgattaa

SEQ ID NO: 457625 - DNA, 25 bp, Artificial
  probe
  misc_feature (1)..(25): SEQ ID NO: 7057; WAN024CPP; Start 171; Stop 195
tcagtggacagatgatgtgattaac

SEQ ID NO: 457626 - DNA, 25 bp, Artificial
  probe
  misc_feature (1)..(25): SEQ ID NO: 7057; WAN024CPP; Start 169; Stop 193
gttcagtggacagatgatgtgatta

SEQ ID NO: 457627 - DNA, 25 bp, Artificial
  probe
  misc_feature (1)..(25): SEQ ID NO: 7057; WAN024CPP; Start 781; Stop 805
gcagatggttatgtcacttctacaa

SEQ ID NO: 457628 - DNA, 25 bp, Artificial
  probe
  misc_feature (1)..(25): SEQ ID NO: 7057; WAN024CPP; Start 172; Stop 196
cagtggacagatgatgtgattaacc

SEQ ID NO: 457629 - DNA, 25 bp, Artificial
  probe
  misc_feature (1)..(25): SEQ ID NO: 7057; WAN024CPP; Start 177; Stop 201
gacagatgatgtgattaaccgtgag

SEQ ID NO: 457630 - DNA, 25 bp, Artificial
  probe
  misc_feature (1)..(25): SEQ ID NO: 7057; WAN024CPP; Start 397; Stop 421
atcgcaactcaatctaacaaggtta

SEQ ID NO: 457631 - DNA, 25 bp, Artificial
  probe
  misc_feature (1)..(25): SEQ ID NO: 7057; WAN024CPP; Start 178; Stop 202
acagatgatgtgattaaccgtgaga

SEQ ID NO: 457632 - DNA, 25 bp, Artificial
  probe
  misc_feature (1)..(25): SEQ ID NO: 7057; WAN024CPP; Start 394; Stop 418
cgaatcgcaactcaatctaacaagg

SEQ ID NO: 457633 - DNA, 25 bp, Artificial
  probe
  misc_feature (1)..(25): SEQ ID NO: 7057; WAN024CPP; Start 180; Stop 204
agatgatgtgattaaccgtgagaaa

SEQ ID NO: 457634 - DNA, 25 bp, Artificial
  probe
  misc_feature (1)..(25): SEQ ID NO: 7057; WAN024CPP; Start 181; Stop 205
gatgatgtgattaaccgtgagaaat

SEQ ID NO: 457635 - DNA, 25 bp, Artificial
  probe
  misc_feature (1)..(25): SEQ ID NO: 7057; WAN024CPP; Start 184; Stop 208
gatgtgattaaccgtgagaaattcc

SEQ ID NO: 457636 - DNA, 25 bp, Artificial
  probe
  misc_feature (1)..(25): SEQ ID NO: 7057; WAN024CPP; Start 183; Stop 207
tgatgtgattaaccgtgagaaattc

SEQ ID NO: 457637 - DNA, 25 bp, Artificial
  probe
  misc_feature (1)..(25): SEQ ID NO: 7057; WAN024CPP; Start 110; Stop 134
gtgaattggcacatctaatcgtgaa

SEQ ID NO: 457638 - DNA, 25 bp, Artificial
  probe
  misc_feature (1)..(25): SEQ ID NO: 7057; WAN024CPP; Start 185; Stop 209
atgtgattaaccgtgagaaattcct

SEQ ID NO: 457639 - DNA, 25 bp, Artificial
  probe
  misc_feature (1)..(25): SEQ ID NO: 7057; WAN024CPP; Start 648; Stop 672
aggaacagatttaacacttggtttg

SEQ ID NO: 457640 - DNA, 25 bp, Artificial
  probe
  misc_feature (1)..(25): SEQ ID NO: 7057; WAN024CPP; Start 647; Stop 671
caggaacagatttaacacttggttt

SEQ ID NO: 457641 - DNA, 25 bp, Artificial
  probe
  misc_feature (1)..(25): SEQ ID NO: 7057; WAN024CPP; Start 182; Stop 206
atgatgtgattaaccgtgagaaatt

SEQ ID NO: 457642 - DNA, 25 bp, Artificial
  probe
  misc_feature (1)..(25): SEQ ID NO: 7057; WAN024CPP; Start 76; Stop 100
cacactttggctctctctattgatg

SEQ ID NO: 457643 - DNA, 25 bp, Artificial
  probe
  misc_feature (1)..(25): SEQ ID NO: 7057; WAN024CPP; Start 991; Stop 1015
ggcattaccttctttaacacccttt

SEQ ID NO: 457644 - DNA, 25 bp, Artificial
  probe
  misc_feature (1)..(25): SEQ ID NO: 7057; WAN024CPP; Start 852; Stop 876
ctttaaggatggacaaatcgtagat

SEQ ID NO: 457645 - DNA, 25 bp, Artificial
  probe
  misc_feature (1)..(25): SEQ ID NO: 7057; WAN024CPP; Start 537; Stop 561
tgtctacgaagcagatcctgttaag

SEQ ID NO: 457646 - DNA, 25 bp, Artificial
  probe
  misc_feature (1)..(25): SEQ ID NO: 7057; WAN024CPP; Start 176; Stop 200
ggacagatgatgtgattaaccgtga

SEQ ID NO: 457647 - DNA, 25 bp, Artificial
  probe
  misc_feature (1)..(25): SEQ ID NO: 7057; WAN024CPP; Start 173; Stop 197
agtggacagatgatgtgattaaccg

SEQ ID NO: 457648 - DNA, 25 bp, Artificial
  probe
  misc_feature (1)..(25): SEQ ID NO: 7057; WAN024CPP; Start 650; Stop 674
gaacagatttaacacttggtttgcc

SEQ ID NO: 457649 - DNA, 25 bp, Artificial
  probe
  misc_feature (1)..(25): SEQ ID NO: 7057; WAN024CPP; Start 649; Stop 673
ggaacagatttaacacttggtttgc

SEQ ID NO: 457650 - DNA, 25 bp, Artificial
  probe
  misc_feature (1)..(25): SEQ ID NO: 7057; WAN024CPP; Start 536; Stop 560
gtgtctacgaagcagatcctgttaa

SEQ ID NO: 457651 - DNA, 25 bp, Artificial
  probe
  misc_feature (1)..(25): SEQ ID NO: 7057; WAN024CPP; Start 175; Stop 199
tggacagatgatgtgattaaccgtg

SEQ ID NO: 457652 - DNA, 25 bp, Artificial
  probe
  misc_feature (1)..(25): SEQ ID NO: 7057; WAN024CPP; Start 174; Stop 198
gtggacagatgatgtgattaaccgt

SEQ ID NO: 457653 - DNA, 25 bp, Artificial
  probe
  misc_feature (1)..(25): SEQ ID NO: 7057; WAN024CPP; Start 189; Stop 213
gattaaccgtgagaaattcctccat

SEQ ID NO: 457654 - DNA, 25 bp, Artificial
  probe
  misc_feature (1)..(25): SEQ ID NO: 7058; WAN024AJZ; Start 197; Stop 221
taagtaccaatcccatgtcaattct

SEQ ID NO: 457655 - DNA, 25 bp, Artificial
  probe
  misc_feature (1)..(25): SEQ ID NO: 7058; WAN024AJZ; Start 198; Stop 222
aagtaccaatcccatgtcaattctc

SEQ ID NO: 457656 - DNA, 25 bp, Artificial
  probe
  misc_feature (1)..(25): SEQ ID NO: 7058; WAN024AJZ; Start 194; Stop 218
ccataagtaccaatcccatgtcaat

SEQ ID NO: 457657 - DNA, 25 bp, Artificial
  probe
  misc_feature (1)..(25): SEQ ID NO: 7058; WAN024AJZ; Start 196; Stop 220
ataagtaccaatcccatgtcaattc

SEQ ID NO: 457658 - DNA, 25 bp, Artificial
  probe
  misc_feature (1)..(25): SEQ ID NO: 7058; WAN024AJZ; Start 195; Stop 219
cataagtaccaatcccatgtcaatt

SEQ ID NO: 457659 - DNA, 25 bp, Artificial
  probe
  misc_feature (1)..(25): SEQ ID NO: 7058; WAN024AJZ; Start 200; Stop 224
gtaccaatcccatgtcaattctcac

SEQ ID NO: 457660 - DNA, 25 bp, Artificial
  probe
  misc_feature (1)..(25): SEQ ID NO: 7058; WAN024AJZ; Start 201; Stop 225
taccaatcccatgtcaattctcact

SEQ ID NO: 457661 - DNA, 25 bp, Artificial
  probe
  misc_feature (1)..(25): SEQ ID NO: 7058; WAN024AJZ; Start 199; Stop 223
agtaccaatcccatgtcaattctca

SEQ ID NO: 457662 - DNA, 25 bp, Artificial
  probe
  misc_feature (1)..(25): SEQ ID NO: 7058; WAN024AJZ; Start 245; Stop 269
cttgtaacccaaagaagcctttatc

SEQ ID NO: 457663 - DNA, 25 bp, Artificial
  probe
  misc_feature (1)..(25): SEQ ID NO: 7058; WAN024AJZ; Start 246; Stop 270
ttgtaacccaaagaagcctttatct

SEQ ID NO: 457664 - DNA, 25 bp, Artificial
  probe
  misc_feature (1)..(25): SEQ ID NO: 7058; WAN024AJZ; Start 203; Stop 227
ccaatcccatgtcaattctcacttg

SEQ ID NO: 457665 - DNA, 25 bp, Artificial
  probe
  misc_feature (1)..(25): SEQ ID NO: 7058; WAN024AJZ; Start 202; Stop 226
accaatcccatgtcaattctcactt

SEQ ID NO: 457666 - DNA, 25 bp, Artificial
  probe
  misc_feature (1)..(25): SEQ ID NO: 7058; WAN024AJZ; Start 247; Stop 271
tgtaacccaaagaagcctttatctg

SEQ ID NO: 457667 - DNA, 25 bp, Artificial
  probe
  misc_feature (1)..(25): SEQ ID NO: 7058; WAN024AJZ; Start 244; Stop 268
tcttgtaacccaaagaagcctttat

SEQ ID NO: 457668 - DNA, 25 bp, Artificial
  probe
  misc_feature (1)..(25): SEQ ID NO: 7058; WAN024AJZ; Start 238; Stop 262
tacatctcttgtaacccaaagaagc

SEQ ID NO: 457669 - DNA, 25 bp, Artificial
  probe
  misc_feature (1)..(25): SEQ ID NO: 7058; WAN024AJZ; Start 243; Stop 267
ctcttgtaacccaaagaagccttta

SEQ ID NO: 457670 - DNA, 25 bp, Artificial
  probe
  misc_feature (1)..(25): SEQ ID NO: 7058; WAN024AJZ; Start 204; Stop 228
caatcccatgtcaattctcacttgc

SEQ ID NO: 457671 - DNA, 25 bp, Artificial
  probe
  misc_feature (1)..(25): SEQ ID NO: 7058; WAN024AJZ; Start 193; Stop 217
gccataagtaccaatcccatgtcaa

SEQ ID NO: 457672 - DNA, 25 bp, Artificial
  probe
  misc_feature (1)..(25): SEQ ID NO: 7058; WAN024AJZ; Start 88; Stop 112
aggacaaaatagttctcaatcacaa

SEQ ID NO: 457673 - DNA, 25 bp, Artificial
  probe
  misc_feature (1)..(25): SEQ ID NO: 7058; WAN024AJZ; Start 155; Stop 179
tttgagtcgttctcttattgtattt

SEQ ID NO: 457674 - DNA, 25 bp, Artificial
  probe
  misc_feature (1)..(25): SEQ ID NO: 7058; WAN024AJZ; Start 248; Stop 272
gtaacccaaagaagcctttatctgc

SEQ ID NO: 457675 - DNA, 25 bp, Artificial
  probe
  misc_feature (1)..(25): SEQ ID NO: 7058; WAN024AJZ; Start 241; Stop 265
atctcttgtaacccaaagaagcctt

SEQ ID NO: 457676 - DNA, 25 bp, Artificial
  probe
  misc_feature (1)..(25): SEQ ID NO: 7058; WAN024AJZ; Start 89; Stop 113
ggacaaaatagttctcaatcacaaa

SEQ ID NO: 457677 - DNA, 25 bp, Artificial
  probe
  misc_feature (1)..(25): SEQ ID NO: 7058; WAN024AJZ; Start 242; Stop 266
tctcttgtaacccaaagaagccttt

SEQ ID NO: 457678 - DNA, 25 bp, Artificial
  probe
  misc_feature (1)..(25): SEQ ID NO: 7058; WAN024AJZ; Start 87; Stop 111
taggacaaaatagttctcaatcaca

SEQ ID NO: 457679 - DNA, 25 bp, Artificial
  probe
  misc_feature (1)..(25): SEQ ID NO: 7058; WAN024AJZ; Start 254; Stop 278
caaagaagcctttatctgcccaaag

SEQ ID NO: 457680 - DNA, 25 bp, Artificial
  probe
  misc_feature (1)..(25): SEQ ID NO: 7058; WAN024AJZ; Start 205; Stop 229
aatcccatgtcaattctcacttgcc

SEQ ID NO: 457681 - DNA, 25 bp, Artificial
  probe
  misc_feature (1)..(25): SEQ ID NO: 7058; WAN024AJZ; Start 240; Stop 264
catctcttgtaacccaaagaagcct

SEQ ID NO: 457682 - DNA, 25 bp, Artificial
  probe
  misc_feature (1)..(25): SEQ ID NO: 7058; WAN024AJZ; Start 81; Stop 105
agagtctaggacaaaatagttctca

SEQ ID NO: 457683 - DNA, 25 bp, Artificial
  probe
  misc_feature (1)..(25): SEQ ID NO: 7058; WAN024AJZ; Start 249; Stop 273
taacccaaagaagcctttatctgcc

SEQ ID NO: 457684 - DNA, 25 bp, Artificial
  probe
  misc_feature (1)..(25): SEQ ID NO: 7058; WAN024AJZ; Start 239; Stop 263
acatctcttgtaacccaaagaagcc

SEQ ID NO: 457685 - DNA, 25 bp, Artificial
  probe
  misc_feature (1)..(25): SEQ ID NO: 7058; WAN024AJZ; Start 86; Stop 110
ctaggacaaaatagttctcaatcac

SEQ ID NO: 457686 - DNA, 25 bp, Artificial
  probe
  misc_feature (1)..(25): SEQ ID NO: 7058; WAN024AJZ; Start 216; Stop 240
aattctcacttgcccctcagattac

SEQ ID NO: 457687 - DNA, 25 bp, Artificial
  probe
  misc_feature (1)..(25): SEQ ID NO: 7059; WAN024AF8; Start 49; Stop 73
agaaatcacatacctaagatgaagc

SEQ ID NO: 457688 - DNA, 25 bp, Artificial
  probe
  misc_feature (1)..(25): SEQ ID NO: 7059; WAN024AF8; Start 53; Stop 77
atcacatacctaagatgaagctatc

SEQ ID NO: 457689 - DNA, 25 bp, Artificial
  probe
  misc_feature (1)..(25): SEQ ID NO: 7059; WAN024AF8; Start 54; Stop 78
tcacatacctaagatgaagctatct

SEQ ID NO: 457690 - DNA, 25 bp, Artificial
  probe
  misc_feature (1)..(25): SEQ ID NO: 7059; WAN024AF8; Start 52; Stop 76
aatcacatacctaagatgaagctat

SEQ ID NO: 457691 - DNA, 25 bp, Artificial
  probe
  misc_feature (1)..(25): SEQ ID NO: 7059; WAN024AF8; Start 50; Stop 74
gaaatcacatacctaagatgaagct

SEQ ID NO: 457692 - DNA, 25 bp, Artificial
  probe
  misc_feature (1)..(25): SEQ ID NO: 7059; WAN024AF8; Start 48; Stop 72
aagaaatcacatacctaagatgaag

SEQ ID NO: 457693 - DNA, 25 bp, Artificial
  probe
  misc_feature (1)..(25): SEQ ID NO: 7059; WAN024AF8; Start 51; Stop 75
aaatcacatacctaagatgaagcta

SEQ ID NO: 457694 - DNA, 25 bp, Artificial
  probe
  misc_feature (1)..(25): SEQ ID NO: 7059; WAN024AF8; Start 133; Stop 157
ttcgtactctctttatttcaattca

SEQ ID NO: 457695 - DNA, 25 bp, Artificial
  probe
  misc_feature (1)..(25): SEQ ID NO: 7059; WAN024AF8; Start 134; Stop 158
tcgtactctctttatttcaattcat

SEQ ID NO: 457696 - DNA, 25 bp, Artificial
  probe
  misc_feature (1)..(25): SEQ ID NO: 7059; WAN024AF8; Start 47; Stop 71
aaagaaatcacatacctaagatgaa

SEQ ID NO: 457697 - DNA, 25 bp, Artificial
  probe
  misc_feature (1)..(25): SEQ ID NO: 7059; WAN024AF8; Start 135; Stop 159
cgtactctctttatttcaattcatt

SEQ ID NO: 457698 - DNA, 25 bp, Artificial
  probe
  misc_feature (1)..(25): SEQ ID NO: 7059; WAN024AF8; Start 132; Stop 156
tttcgtactctctttatttcaattc

SEQ ID NO: 457699 - DNA, 25 bp, Artificial
  probe
  misc_feature (1)..(25): SEQ ID NO: 7059; WAN024AF8; Start 46; Stop 70
aaaagaaatcacatacctaagatga

SEQ ID NO: 457700 - DNA, 25 bp, Artificial
  probe
  misc_feature (1)..(25): SEQ ID NO: 7059; WAN024AF8; Start 128; Stop 152
gaattttcgtactctctttatttca

SEQ ID NO: 457701 - DNA, 25 bp, Artificial
  probe
  misc_feature (1)..(25): SEQ ID NO: 7059; WAN024AF8; Start 127; Stop 151
agaattttcgtactctctttatttc

SEQ ID NO: 457702 - DNA, 25 bp, Artificial
  probe
  misc_feature (1)..(25): SEQ ID NO: 7059; WAN024AF8; Start 140; Stop 164
tctctttatttcaattcatttgagt

SEQ ID NO: 457703 - DNA, 25 bp, Artificial
  probe
  misc_feature (1)..(25): SEQ ID NO: 7059; WAN024AF8; Start 138; Stop 162
actctctttatttcaattcatttga

SEQ ID NO: 457704 - DNA, 25 bp, Artificial
  probe
  misc_feature (1)..(25): SEQ ID NO: 7059; WAN024AF8; Start 131; Stop 155
ttttcgtactctctttatttcaatt

SEQ ID NO: 457705 - DNA, 25 bp, Artificial
  probe
  misc_feature (1)..(25): SEQ ID NO: 7059; WAN024AF8; Start 129; Stop 153
aattttcgtactctctttatttcaa

SEQ ID NO: 457706 - DNA, 25 bp, Artificial
  probe
  misc_feature (1)..(25): SEQ ID NO: 7059; WAN024AF8; Start 130; Stop 154
attttcgtactctctttatttcaat

SEQ ID NO: 457707 - DNA, 25 bp, Artificial
  probe
  misc_feature (1)..(25): SEQ ID NO: 7060; WAN024CQ2; Start 199; Stop 223
cagcttctgaatctgcatcaaccag

SEQ ID NO: 457708 - DNA, 25 bp, Artificial
  probe
  misc_feature (1)..(25): SEQ ID NO: 7060; WAN024CQ2; Start 196; Stop 220
catcagcttctgaatctgcatcaac

SEQ ID NO: 457709 - DNA, 25 bp, Artificial
  probe
  misc_feature (1)..(25): SEQ ID NO: 7060; WAN024CQ2; Start 201; Stop 225
gcttctgaatctgcatcaaccagtg

SEQ ID NO: 457710 - DNA, 25 bp, Artificial
  probe
  misc_feature (1)..(25): SEQ ID NO: 7060; WAN024CQ2; Start 195; Stop 219
acatcagcttctgaatctgcatcaa

SEQ ID NO: 457711 - DNA, 25 bp, Artificial
  probe
  misc_feature (1)..(25): SEQ ID NO: 7060; WAN024CQ2; Start 200; Stop 224
agcttctgaatctgcatcaaccagt

SEQ ID NO: 457712 - DNA, 25 bp, Artificial
  probe
  misc_feature (1)..(25): SEQ ID NO: 7060; WAN024CQ2; Start 427; Stop 451
gtactagtgcatcagcatcagcatc

SEQ ID NO: 457713 - DNA, 25 bp, Artificial
  probe
  misc_feature (1)..(25): SEQ ID NO: 7060; WAN024CQ2; Start 428; Stop 452
tactagtgcatcagcatcagcatca

SEQ ID NO: 457714 - DNA, 25 bp, Artificial
  probe
  misc_feature (1)..(25): SEQ ID NO: 7060; WAN024CQ2; Start 426; Stop 450
agtactagtgcatcagcatcagcat

SEQ ID NO: 457715 - DNA, 25 bp, Artificial
  probe
  misc_feature (1)..(25): SEQ ID NO: 7060; WAN024CQ2; Start 197; Stop 221
atcagcttctgaatctgcatcaacc

SEQ ID NO: 457716 - DNA, 25 bp, Artificial
  probe
  misc_feature (1)..(25): SEQ ID NO: 7060; WAN024CQ2; Start 194; Stop 218
cacatcagcttctgaatctgcatca

SEQ ID NO: 457717 - DNA, 25 bp, Artificial
  probe
  misc_feature (1)..(25): SEQ ID NO: 7060; WAN024CQ2; Start 430; Stop 454
ctagtgcatcagcatcagcatcaac

SEQ ID NO: 457718 - DNA, 25 bp, Artificial
  probe
  misc_feature (1)..(25): SEQ ID NO: 7060; WAN024CQ2; Start 202; Stop 226
cttctgaatctgcatcaaccagtgc

SEQ ID NO: 457719 - DNA, 25 bp, Artificial
  probe
  misc_feature (1)..(25): SEQ ID NO: 7060; WAN024CQ2; Start 424; Stop 448
caagtactagtgcatcagcatcagc

SEQ ID NO: 457720 - DNA, 25 bp, Artificial
  probe
  misc_feature (1)..(25): SEQ ID NO: 7060; WAN024CQ2; Start 423; Stop 447
gcaagtactagtgcatcagcatcag

SEQ ID NO: 457721 - DNA, 25 bp, Artificial
  probe
  misc_feature (1)..(25): SEQ ID NO: 7060; WAN024CQ2; Start 421; Stop 445
cagcaagtactagtgcatcagcatc

SEQ ID NO: 457722 - DNA, 25 bp, Artificial
  probe
  misc_feature (1)..(25): SEQ ID NO: 7060; WAN024CQ2; Start 418; Stop 442
cttcagcaagtactagtgcatcagc

SEQ ID NO: 457723 - DNA, 25 bp, Artificial
  probe
  misc_feature (1)..(25): SEQ ID NO: 7060; WAN024CQ2; Start 417; Stop 441
gcttcagcaagtactagtgcatcag

SEQ ID NO: 457724 - DNA, 25 bp, Artificial
  probe
  misc_feature (1)..(25): SEQ ID NO: 7060; WAN024CQ2; Start 425; Stop 449
aagtactagtgcatcagcatcagca

SEQ ID NO: 457725 - DNA, 25 bp, Artificial
  probe
  misc_feature (1)..(25): SEQ ID NO: 7060; WAN024CQ2; Start 422; Stop 446
agcaagtactagtgcatcagcatca

SEQ ID NO: 457726 - DNA, 25 bp, Artificial
  probe
  misc_feature (1)..(25): SEQ ID NO: 7060; WAN024CQ2; Start 420; Stop 444
tcagcaagtactagtgcatcagcat

SEQ ID NO: 457727 - DNA, 25 bp, Artificial
  probe
  misc_feature (1)..(25): SEQ ID NO: 7060; WAN024CQ2; Start 419; Stop 443
ttcagcaagtactagtgcatcagca

SEQ ID NO: 457728 - DNA, 25 bp, Artificial
  probe
  misc_feature (1)..(25): SEQ ID NO: 7060; WAN024CQ2; Start 198; Stop 222
tcagcttctgaatctgcatcaacca

SEQ ID NO: 457729 - DNA, 25 bp, Artificial
  probe
  misc_feature (1)..(25): SEQ ID NO: 7060; WAN024CQ2; Start 193; Stop 217
gcacatcagcttctgaatctgcatc

SEQ ID NO: 457730 - DNA, 25 bp, Artificial
  probe
  misc_feature (1)..(25): SEQ ID NO: 7060; WAN024CQ2; Start 429; Stop 453
actagtgcatcagcatcagcatcaa

SEQ ID NO: 457731 - DNA, 25 bp, Artificial
  probe
  misc_feature (1)..(25): SEQ ID NO: 7060; WAN024CQ2; Start 192; Stop 216
agcacatcagcttctgaatctgcat

SEQ ID NO: 457732 - DNA, 25 bp, Artificial
  probe
  misc_feature (1)..(25): SEQ ID NO: 7060; WAN024CQ2; Start 190; Stop 214
caagcacatcagcttctgaatctgc

SEQ ID NO: 457733 - DNA, 25 bp, Artificial
  probe
  misc_feature (1)..(25): SEQ ID NO: 7060; WAN024CQ2; Start 189; Stop 213
gcaagcacatcagcttctgaatctg

SEQ ID NO: 457734 - DNA, 25 bp, Artificial
  probe
  misc_feature (1)..(25): SEQ ID NO: 7060; WAN024CQ2; Start 188; Stop 212
agcaagcacatcagcttctgaatct

SEQ ID NO: 457735 - DNA, 25 bp, Artificial
  probe
  misc_feature (1)..(25): SEQ ID NO: 7060; WAN024CQ2; Start 191; Stop 215
aagcacatcagcttctgaatctgca

SEQ ID NO: 457736 - DNA, 25 bp, Artificial
  probe
  misc_feature (1)..(25): SEQ ID NO: 7061; WAN024BAR; Start 36; Stop 60
agctacctagtttgatctttgattt

SEQ ID NO: 457737 - DNA, 25 bp, Artificial
  probe
  misc_feature (1)..(25): SEQ ID NO: 7061; WAN024BAR; Start 35; Stop 59
tagctacctagtttgatctttgatt

SEQ ID NO: 457738 - DNA, 25 bp, Artificial
  probe
  misc_feature (1)..(25): SEQ ID NO: 7061; WAN024BAR; Start 37; Stop 61
gctacctagtttgatctttgatttt

SEQ ID NO: 457739 - DNA, 25 bp, Artificial
  probe
  misc_feature (1)..(25): SEQ ID NO: 7061; WAN024BAR; Start 34; Stop 58
ctagctacctagtttgatctttgat

SEQ ID NO: 457740 - DNA, 25 bp, Artificial
  probe
  misc_feature (1)..(25): SEQ ID NO: 7061; WAN024BAR; Start 40; Stop 64
acctagtttgatctttgattttcat

SEQ ID NO: 457741 - DNA, 25 bp, Artificial
  probe
  misc_feature (1)..(25): SEQ ID NO: 7061; WAN024BAR; Start 39; Stop 63
tacctagtttgatctttgattttca

SEQ ID NO: 457742 - DNA, 25 bp, Artificial
  probe
  misc_feature (1)..(25): SEQ ID NO: 7061; WAN024BAR; Start 38; Stop 62
ctacctagtttgatctttgattttc

SEQ ID NO: 457743 - DNA, 25 bp, Artificial
  probe
  misc_feature (1)..(25): SEQ ID NO: 7061; WAN024BAR; Start 9; Stop 33
aaacactgttttgagcaacctgtgg

SEQ ID NO: 457744 - DNA, 25 bp, Artificial
  probe
  misc_feature (1)..(25): SEQ ID NO: 7061; WAN024BAR; Start 8; Stop 32
aaaacactgttttgagcaacctgtg

SEQ ID NO: 457745 - DNA, 25 bp, Artificial
  probe
  misc_feature (1)..(25): SEQ ID NO: 7062; WAN024ASG; Start 84; Stop 108
aggtaggaatccttcagagtagaat

SEQ ID NO: 457746 - DNA, 25 bp, Artificial
  probe
  misc_feature (1)..(25): SEQ ID NO: 7062; WAN024ASG; Start 85; Stop 109
ggtaggaatccttcagagtagaatc

SEQ ID NO: 457747 - DNA, 25 bp, Artificial
  probe
  misc_feature (1)..(25): SEQ ID NO: 7062; WAN024ASG; Start 70; Stop 94
atcgttgtgaaataaggtaggaatc

SEQ ID NO: 457748 - DNA, 25 bp, Artificial
  probe
  misc_feature (1)..(25): SEQ ID NO: 7062; WAN024ASG; Start 51; Stop 75
gccaactaaactcgttaatatcgtt

SEQ ID NO: 457749 - DNA, 25 bp, Artificial
  probe
  misc_feature (1)..(25): SEQ ID NO: 7062; WAN024ASG; Start 50; Stop 74
agccaactaaactcgttaatatcgt

SEQ ID NO: 457750 - DNA, 25 bp, Artificial
  probe
  misc_feature (1)..(25): SEQ ID NO: 7062; WAN024ASG; Start 71; Stop 95
tcgttgtgaaataaggtaggaatcc

SEQ ID NO: 457751 - DNA, 25 bp, Artificial
  probe
  misc_feature (1)..(25): SEQ ID NO: 7062; WAN024ASG; Start 86; Stop 110
gtaggaatccttcagagtagaatct

SEQ ID NO: 457752 - DNA, 25 bp, Artificial
  probe
  misc_feature (1)..(25): SEQ ID NO: 7062; WAN024ASG; Start 1; Stop 25
ccaatttatttgctgatttccaacc

SEQ ID NO: 457753 - DNA, 25 bp, Artificial
  probe
  misc_feature (1)..(25): SEQ ID NO: 7062; WAN024ASG; Start 5; Stop 29
tttatttgctgatttccaacctcaa

SEQ ID NO: 457754 - DNA, 25 bp, Artificial
  probe
  misc_feature (1)..(25): SEQ ID NO: 7062; WAN024ASG; Start 4; Stop 28
atttatttgctgatttccaacctca

SEQ ID NO: 457755 - DNA, 25 bp, Artificial
  probe
  misc_feature (1)..(25): SEQ ID NO: 7062; WAN024ASG; Start 49; Stop 73
gagccaactaaactcgttaatatcg

SEQ ID NO: 457756 - DNA, 25 bp, Artificial
  probe
  misc_feature (1)..(25): SEQ ID NO: 7062; WAN024ASG; Start 2; Stop 26
caatttatttgctgatttccaacct

SEQ ID NO: 457757 - DNA, 25 bp, Artificial
  probe
  misc_feature (1)..(25): SEQ ID NO: 7062; WAN024ASG; Start 48; Stop 72
tgagccaactaaactcgttaatatc

SEQ ID NO: 457758 - DNA, 25 bp, Artificial
  probe
  misc_feature (1)..(25): SEQ ID NO: 7062; WAN024ASG; Start 55; Stop 79
actaaactcgttaatatcgttgtga

SEQ ID NO: 457759 - DNA, 25 bp, Artificial
  probe
  misc_feature (1)..(25): SEQ ID NO: 7062; WAN024ASG; Start 3; Stop 27
aatttatttgctgatttccaacctc

SEQ ID NO: 457760 - DNA, 25 bp, Artificial
  probe
  misc_feature (1)..(25): SEQ ID NO: 7062; WAN024ASG; Start 46; Stop 70
tttgagccaactaaactcgttaata

SEQ ID NO: 457761 - DNA, 25 bp, Artificial
  probe
  misc_feature (1)..(25): SEQ ID NO: 7062; WAN024ASG; Start 69; Stop 93
tatcgttgtgaaataaggtaggaat

SEQ ID NO: 457762 - DNA, 25 bp, Artificial
  probe
  misc_feature (1)..(25): SEQ ID NO: 7062; WAN024ASG; Start 68; Stop 92
atatcgttgtgaaataaggtaggaa

SEQ ID NO: 457763 - DNA, 25 bp, Artificial
  probe
  misc_feature (1)..(25): SEQ ID NO: 7062; WAN024ASG; Start 67; Stop 91
aatatcgttgtgaaataaggtagga

SEQ ID NO: 457764 - DNA, 25 bp, Artificial
  probe
  misc_feature (1)..(25): SEQ ID NO: 7062; WAN024ASG; Start 47; Stop 71
ttgagccaactaaactcgttaatat

SEQ ID NO: 457765 - DNA, 25 bp, Artificial
  probe
  misc_feature (1)..(25): SEQ ID NO: 7062; WAN024ASG; Start 63; Stop 87
cgttaatatcgttgtgaaataaggt

SEQ ID NO: 457766 - DNA, 25 bp, Artificial
  probe
  misc_feature (1)..(25): SEQ ID NO: 7062; WAN024ASG; Start 13; Stop 37
ctgatttccaacctcaaacagtttc

SEQ ID NO: 457767 - DNA, 25 bp, Artificial
  probe
  misc_feature (1)..(25): SEQ ID NO: 7062; WAN024ASG; Start 62; Stop 86
tcgttaatatcgttgtgaaataagg

SEQ ID NO: 457768 - DNA, 25 bp, Artificial
  probe
  misc_feature (1)..(25): SEQ ID NO: 7062; WAN024ASG; Start 54; Stop 78
aactaaactcgttaatatcgttgtg

SEQ ID NO: 457769 - DNA, 25 bp, Artificial
  probe
  misc_feature (1)..(25): SEQ ID NO: 7062; WAN024ASG; Start 58; Stop 82
aaactcgttaatatcgttgtgaaat

SEQ ID NO: 457770 - DNA, 25 bp, Artificial
  probe
  misc_feature (1)..(25): SEQ ID NO: 7062; WAN024ASG; Start 14; Stop 38
tgatttccaacctcaaacagtttcc

SEQ ID NO: 457771 - DNA, 25 bp, Artificial
  probe
  misc_feature (1)..(25): SEQ ID NO: 7062; WAN024ASG; Start 56; Stop 80
ctaaactcgttaatatcgttgtgaa

SEQ ID NO: 457772 - DNA, 25 bp, Artificial
  probe
  misc_feature (1)..(25): SEQ ID NO: 7062; WAN024ASG; Start 72; Stop 96
cgttgtgaaataaggtaggaatcct

SEQ ID NO: 457773 - DNA, 25 bp, Artificial
  probe
  misc_feature (1)..(25): SEQ ID NO: 7062; WAN024ASG; Start 15; Stop 39
gatttccaacctcaaacagtttccc

SEQ ID NO: 457774 - DNA, 25 bp, Artificial
  probe
  misc_feature (1)..(25): SEQ ID NO: 7062; WAN024ASG; Start 57; Stop 81
taaactcgttaatatcgttgtgaaa

SEQ ID NO: 457775 - DNA, 25 bp, Artificial
  probe
  misc_feature (1)..(25): SEQ ID NO: 7062; WAN024ASG; Start 60; Stop 84
actcgttaatatcgttgtgaaataa

SEQ ID NO: 457776 - DNA, 25 bp, Artificial
  probe
  misc_feature (1)..(25): SEQ ID NO: 7062; WAN024ASG; Start 45; Stop 69
gtttgagccaactaaactcgttaat

SEQ ID NO: 457777 - DNA, 25 bp, Artificial
  probe
  misc_feature (1)..(25): SEQ ID NO: 7062; WAN024ASG; Start 59; Stop 83
aactcgttaatatcgttgtgaaata

SEQ ID NO: 457778 - DNA, 25 bp, Artificial
  probe
  misc_feature (1)..(25): SEQ ID NO: 7063; WAN0249PA; Start 190; Stop 214
tttcaacacctgatactatgcgttt

SEQ ID NO: 457779 - DNA, 25 bp, Artificial
  probe
  misc_feature (1)..(25): SEQ ID NO: 7063; WAN0249PA; Start 172; Stop 196
aacgcatagtatcaggtgtttcaac

SEQ ID NO: 457780 - DNA, 25 bp, Artificial
  probe
  misc_feature (1)..(25): SEQ ID NO: 7063; WAN0249PA; Start 189; Stop 213
gtttcaacacctgatactatgcgtt

SEQ ID NO: 457781 - DNA, 25 bp, Artificial
  probe
  misc_feature (1)..(25): SEQ ID NO: 7063; WAN0249PA; Start 86; Stop 110
aagagcaactttaaactaggaagcg

SEQ ID NO: 457782 - DNA, 25 bp, Artificial
  probe
  misc_feature (1)..(25): SEQ ID NO: 7063; WAN0249PA; Start 88; Stop 112
gagcaactttaaactaggaagcgag

SEQ ID NO: 457783 - DNA, 25 bp, Artificial
  probe
  misc_feature (1)..(25): SEQ ID NO: 7063; WAN0249PA; Start 205; Stop 229
ctatgcgttttattgtgggaagatt

SEQ ID NO: 457784 - DNA, 25 bp, Artificial
  probe
  misc_feature (1)..(25): SEQ ID NO: 7063; WAN0249PA; Start 203; Stop 227
tactatgcgttttattgtgggaaga

SEQ ID NO: 457785 - DNA, 25 bp, Artificial
  probe
  misc_feature (1)..(25): SEQ ID NO: 7063; WAN0249PA; Start 171; Stop 195
aaacgcatagtatcaggtgtttcaa

SEQ ID NO: 457786 - DNA, 25 bp, Artificial
  probe
  misc_feature (1)..(25): SEQ ID NO: 7063; WAN0249PA; Start 196; Stop 220
cacctgatactatgcgttttattgt

SEQ ID NO: 457787 - DNA, 25 bp, Artificial
  probe
  misc_feature (1)..(25): SEQ ID NO: 7063; WAN0249PA; Start 195; Stop 219
acacctgatactatgcgttttattg

SEQ ID NO: 457788 - DNA, 25 bp, Artificial
  probe
  misc_feature (1)..(25): SEQ ID NO: 7063; WAN0249PA; Start 91; Stop 115
caactttaaactaggaagcgagtcg

SEQ ID NO: 457789 - DNA, 25 bp, Artificial
  probe
  misc_feature (1)..(25): SEQ ID NO: 7063; WAN0249PA; Start 87; Stop 111
agagcaactttaaactaggaagcga

SEQ ID NO: 457790 - DNA, 25 bp, Artificial
  probe
  misc_feature (1)..(25): SEQ ID NO: 7063; WAN0249PA; Start 204; Stop 228
actatgcgttttattgtgggaagat

SEQ ID NO: 457791 - DNA, 25 bp, Artificial
  probe
  misc_feature (1)..(25): SEQ ID NO: 7063; WAN0249PA; Start 90; Stop 114
gcaactttaaactaggaagcgagtc

SEQ ID NO: 457792 - DNA, 25 bp, Artificial
  probe
  misc_feature (1)..(25): SEQ ID NO: 7063; WAN0249PA; Start 188; Stop 212
tgtttcaacacctgatactatgcgt

SEQ ID NO: 457793 - DNA, 25 bp, Artificial
  probe
  misc_feature (1)..(25): SEQ ID NO: 7063; WAN0249PA; Start 173; Stop 197
acgcatagtatcaggtgtttcaaca

SEQ ID NO: 457794 - DNA, 25 bp, Artificial
  probe
  misc_feature (1)..(25): SEQ ID NO: 7063; WAN0249PA; Start 193; Stop 217
caacacctgatactatgcgttttat

SEQ ID NO: 457795 - DNA, 25 bp, Artificial
  probe
  misc_feature (1)..(25): SEQ ID NO: 7063; WAN0249PA; Start 85; Stop 109
aaagagcaactttaaactaggaagc

SEQ ID NO: 457796 - DNA, 25 bp, Artificial
  probe
  misc_feature (1)..(25): SEQ ID NO: 7063; WAN0249PA; Start 192; Stop 216
tcaacacctgatactatgcgtttta

SEQ ID NO: 457797 - DNA, 25 bp, Artificial
  probe
  misc_feature (1)..(25): SEQ ID NO: 7063; WAN0249PA; Start 89; Stop 113
agcaactttaaactaggaagcgagt

SEQ ID NO: 457798 - DNA, 25 bp, Artificial
  probe
  misc_feature (1)..(25): SEQ ID NO: 7063; WAN0249PA; Start 194; Stop 218
aacacctgatactatgcgttttatt

SEQ ID NO: 457799 - DNA, 25 bp, Artificial
  probe
  misc_feature (1)..(25): SEQ ID NO: 7063; WAN0249PA; Start 71; Stop 95
actcaatgaaaatcaaagagcaact

SEQ ID NO: 457800 - DNA, 25 bp, Artificial
  probe
  misc_feature (1)..(25): SEQ ID NO: 7063; WAN0249PA; Start 83; Stop 107
tcaaagagcaactttaaactaggaa

SEQ ID NO: 457801 - DNA, 25 bp, Artificial
  probe
  misc_feature (1)..(25): SEQ ID NO: 7063; WAN0249PA; Start 72; Stop 96
ctcaatgaaaatcaaagagcaactt

SEQ ID NO: 457802 - DNA, 25 bp, Artificial
  probe
  misc_feature (1)..(25): SEQ ID NO: 7063; WAN0249PA; Start 84; Stop 108
caaagagcaactttaaactaggaag

SEQ ID NO: 457803 - DNA, 25 bp, Artificial
  probe
  misc_feature (1)..(25): SEQ ID NO: 7063; WAN0249PA; Start 82; Stop 106
atcaaagagcaactttaaactagga

SEQ ID NO: 457804 - DNA, 25 bp, Artificial
  probe
  misc_feature (1)..(25): SEQ ID NO: 7063; WAN0249PA; Start 70; Stop 94
tactcaatgaaaatcaaagagcaac

SEQ ID NO: 457805 - DNA, 25 bp, Artificial
  probe
  misc_feature (1)..(25): SEQ ID NO: 7063; WAN0249PA; Start 81; Stop 105
aatcaaagagcaactttaaactagg

SEQ ID NO: 457806 - DNA, 25 bp, Artificial
  probe
  misc_feature (1)..(25): SEQ ID NO: 7063; WAN0249PA; Start 170; Stop 194
aaaacgcatagtatcaggtgtttca

SEQ ID NO: 457807 - DNA, 25 bp, Artificial
  probe
  misc_feature (1)..(25): SEQ ID NO: 7063; WAN0249PA; Start 73; Stop 97
tcaatgaaaatcaaagagcaacttt

SEQ ID NO: 457808 - DNA, 25 bp, Artificial
  probe
  misc_feature (1)..(25): SEQ ID NO: 7063; WAN0249PA; Start 62; Stop 86
gttgcttatactcaatgaaaatcaa

SEQ ID NO: 457809 - DNA, 25 bp, Artificial
  probe
  misc_feature (1)..(25): SEQ ID NO: 7063; WAN0249PA; Start 211; Stop 235
gttttattgtgggaagatttacttt

SEQ ID NO: 457810 - DNA, 25 bp, Artificial
  probe
  misc_feature (1)..(25): SEQ ID NO: 7063; WAN0249PA; Start 80; Stop 104
aaatcaaagagcaactttaaactag

SEQ ID NO: 457811 - DNA, 25 bp, Artificial
  probe
  misc_feature (1)..(25): SEQ ID NO: 7064; WAN0249D8; Start 121; Stop 145
tgtattatagatgcttgttatctgc

SEQ ID NO: 457812 - DNA, 25 bp, Artificial
  probe
  misc_feature (1)..(25): SEQ ID NO: 7064; WAN0249D8; Start 60; Stop 84
aaggtaaaatagaaaaggtttggct

SEQ ID NO: 457813 - DNA, 25 bp, Artificial
  probe
  misc_feature (1)..(25): SEQ ID NO: 7064; WAN0249D8; Start 55; Stop 79
agagcaaggtaaaatagaaaaggtt

SEQ ID NO: 457814 - DNA, 25 bp, Artificial
  probe
  misc_feature (1)..(25): SEQ ID NO: 7064; WAN0249D8; Start 59; Stop 83
caaggtaaaatagaaaaggtttggc

SEQ ID NO: 457815 - DNA, 25 bp, Artificial
  probe
  misc_feature (1)..(25): SEQ ID NO: 7064; WAN0249D8; Start 58; Stop 82
gcaaggtaaaatagaaaaggtttgg

SEQ ID NO: 457816 - DNA, 25 bp, Artificial
  probe
  misc_feature (1)..(25): SEQ ID NO: 7064; WAN0249D8; Start 61; Stop 85
aggtaaaatagaaaaggtttggcta

SEQ ID NO: 457817 - DNA, 25 bp, Artificial
  probe
  misc_feature (1)..(25): SEQ ID NO: 7064; WAN0249D8; Start 56; Stop 80
gagcaaggtaaaatagaaaaggttt

SEQ ID NO: 457818 - DNA, 25 bp, Artificial
  probe
  misc_feature (1)..(25): SEQ ID NO: 7064; WAN0249D8; Start 54; Stop 78
tagagcaaggtaaaatagaaaaggt

SEQ ID NO: 457819 - DNA, 25 bp, Artificial
  probe
  misc_feature (1)..(25): SEQ ID NO: 7064; WAN0249D8; Start 57; Stop 81
agcaaggtaaaatagaaaaggtttg

SEQ ID NO: 457820 - DNA, 25 bp, Artificial
  probe
  misc_feature (1)..(25): SEQ ID NO: 7064; WAN0249D8; Start 62; Stop 86
ggtaaaatagaaaaggtttggctaa

SEQ ID NO: 457821 - DNA, 25 bp, Artificial
  probe
  misc_feature (1)..(25): SEQ ID NO: 7064; WAN0249D8; Start 53; Stop 77
ctagagcaaggtaaaatagaaaagg

SEQ ID NO: 457822 - DNA, 25 bp, Artificial
  probe
  misc_feature (1)..(25): SEQ ID NO: 7064; WAN0249D8; Start 122; Stop 146
gtattatagatgcttgttatctgca

SEQ ID NO: 457823 - DNA, 25 bp, Artificial
  probe
  misc_feature (1)..(25): SEQ ID NO: 7064; WAN0249D8; Start 123; Stop 147
tattatagatgcttgttatctgcaa

SEQ ID NO: 457824 - DNA, 25 bp, Artificial
  probe
  misc_feature (1)..(25): SEQ ID NO: 7064; WAN0249D8; Start 63; Stop 87
gtaaaatagaaaaggtttggctaaa

SEQ ID NO: 457825 - DNA, 25 bp, Artificial
  probe
  misc_feature (1)..(25): SEQ ID NO: 7064; WAN0249D8; Start 65; Stop 89
aaaatagaaaaggtttggctaaaat

SEQ ID NO: 457826 - DNA, 25 bp, Artificial
  probe
  misc_feature (1)..(25): SEQ ID NO: 7064; WAN0249D8; Start 66; Stop 90
aaatagaaaaggtttggctaaaatt

SEQ ID NO: 457827 - DNA, 25 bp, Artificial
  probe
  misc_feature (1)..(25): SEQ ID NO: 7064; WAN0249D8; Start 125; Stop 149
ttatagatgcttgttatctgcaaat

SEQ ID NO: 457828 - DNA, 25 bp, Artificial
  probe
  misc_feature (1)..(25): SEQ ID NO: 7064; WAN0249D8; Start 124; Stop 148
attatagatgcttgttatctgcaaa

SEQ ID NO: 457829 - DNA, 25 bp, Artificial
  probe
  misc_feature (1)..(25): SEQ ID NO: 7064; WAN0249D8; Start 95; Stop 119
agctaaaccttttgaaaagttaagt

SEQ ID NO: 457830 - DNA, 25 bp, Artificial
  probe
  misc_feature (1)..(25): SEQ ID NO: 7064; WAN0249D8; Start 64; Stop 88
taaaatagaaaaggtttggctaaaa

SEQ ID NO: 457831 - DNA, 25 bp, Artificial
  probe
  misc_feature (1)..(25): SEQ ID NO: 7064; WAN0249D8; Start 67; Stop 91
aatagaaaaggtttggctaaaattt

SEQ ID NO: 457832 - DNA, 25 bp, Artificial
  probe
  misc_feature (1)..(25): SEQ ID NO: 7064; WAN0249D8; Start 96; Stop 120
gctaaaccttttgaaaagttaagta

SEQ ID NO: 457833 - DNA, 25 bp, Artificial
  probe
  misc_feature (1)..(25): SEQ ID NO: 7064; WAN0249D8; Start 52; Stop 76
tctagagcaaggtaaaatagaaaag

SEQ ID NO: 457834 - DNA, 25 bp, Artificial
  probe
  misc_feature (1)..(25): SEQ ID NO: 7064; WAN0249D8; Start 99; Stop 123
aaaccttttgaaaagttaagtatgt

SEQ ID NO: 457835 - DNA, 25 bp, Artificial
  probe
  misc_feature (1)..(25): SEQ ID NO: 7064; WAN0249D8; Start 47; Stop 71
aaaattctagagcaaggtaaaatag

SEQ ID NO: 457836 - DNA, 25 bp, Artificial
  probe
  misc_feature (1)..(25): SEQ ID NO: 7064; WAN0249D8; Start 48; Stop 72
aaattctagagcaaggtaaaataga

SEQ ID NO: 457837 - DNA, 25 bp, Artificial
  probe
  misc_feature (1)..(25): SEQ ID NO: 7064; WAN0249D8; Start 94; Stop 118
tagctaaaccttttgaaaagttaag

SEQ ID NO: 457838 - DNA, 25 bp, Artificial
  probe
  misc_feature (1)..(25): SEQ ID NO: 7064; WAN0249D8; Start 100; Stop 124
aaccttttgaaaagttaagtatgta

SEQ ID NO: 457839 - DNA, 25 bp, Artificial
  probe
  misc_feature (1)..(25): SEQ ID NO: 7064; WAN0249D8; Start 68; Stop 92
atagaaaaggtttggctaaaatttt

SEQ ID NO: 457840 - DNA, 25 bp, Artificial
  probe
  misc_feature (1)..(25): SEQ ID NO: 7064; WAN0249D8; Start 51; Stop 75
ttctagagcaaggtaaaatagaaaa

SEQ ID NO: 457841 - DNA, 25 bp, Artificial
  probe
  misc_feature (1)..(25): SEQ ID NO: 7064; WAN0249D8; Start 50; Stop 74
attctagagcaaggtaaaatagaaa

SEQ ID NO: 457842 - DNA, 25 bp, Artificial
  probe
  misc_feature (1)..(25): SEQ ID NO: 7064; WAN0249D8; Start 49; Stop 73
aattctagagcaaggtaaaatagaa

SEQ ID NO: 457843 - DNA, 25 bp, Artificial
  probe
  misc_feature (1)..(25): SEQ ID NO: 7065; WAN024FEB-M; Start 133; Stop 157
tgactacttatctcaatgttgctcc

SEQ ID NO: 457844 - DNA, 25 bp, Artificial
  probe
  misc_feature (1)..(25): SEQ ID NO: 7065; WAN024FEB-M; Start 404; Stop 428
tcaggaagaatacgatcagtacaag

SEQ ID NO: 457845 - DNA, 25 bp, Artificial
  probe
  misc_feature (1)..(25): SEQ ID NO: 7065; WAN024FEB-M; Start 403; Stop 427
ctcaggaagaatacgatcagtacaa

SEQ ID NO: 457846 - DNA, 25 bp, Artificial
  probe
  misc_feature (1)..(25): SEQ ID NO: 7065; WAN024FEB-M; Start 407; Stop 431
ggaagaatacgatcagtacaaggat

SEQ ID NO: 457847 - DNA, 25 bp, Artificial
  probe
  misc_feature (1)..(25): SEQ ID NO: 7065; WAN024FEB-M; Start 405; Stop 429
caggaagaatacgatcagtacaagg

SEQ ID NO: 457848 - DNA, 25 bp, Artificial
  probe
  misc_feature (1)..(25): SEQ ID NO: 7065; WAN024FEB-M; Start 406; Stop 430
aggaagaatacgatcagtacaagga

SEQ ID NO: 457849 - DNA, 25 bp, Artificial
  probe
  misc_feature (1)..(25): SEQ ID NO: 7065; WAN024FEB-M; Start 401; Stop 425
gactcaggaagaatacgatcagtac

SEQ ID NO: 457850 - DNA, 25 bp, Artificial
  probe
  misc_feature (1)..(25): SEQ ID NO: 7065; WAN024FEB-M; Start 400; Stop 424
tgactcaggaagaatacgatcagta

SEQ ID NO: 457851 - DNA, 25 bp, Artificial
  probe
  misc_feature (1)..(25): SEQ ID NO: 7065; WAN024FEB-M; Start 402; Stop 426
actcaggaagaatacgatcagtaca

SEQ ID NO: 457852 - DNA, 25 bp, Artificial
  probe
  misc_feature (1)..(25): SEQ ID NO: 7065; WAN024FEB-M; Start 408; Stop 432
gaagaatacgatcagtacaaggatt

SEQ ID NO: 457853 - DNA, 25 bp, Artificial
  probe
  misc_feature (1)..(25): SEQ ID NO: 7065; WAN024FEB-M; Start 225; Stop 249
attgatgccaacaagttgagtattc

SEQ ID NO: 457854 - DNA, 25 bp, Artificial
  probe
  misc_feature (1)..(25): SEQ ID NO: 7065; WAN024FEB-M; Start 223; Stop 247
gtattgatgccaacaagttgagtat

SEQ ID NO: 457855 - DNA, 25 bp, Artificial
  probe
  misc_feature (1)..(25): SEQ ID NO: 7065; WAN024FEB-M; Start 224; Stop 248
tattgatgccaacaagttgagtatt

SEQ ID NO: 457856 - DNA, 25 bp, Artificial
  probe
  misc_feature (1)..(25): SEQ ID NO: 7065; WAN024FEB-M; Start 222; Stop 246
ggtattgatgccaacaagttgagta

SEQ ID NO: 457857 - DNA, 25 bp, Artificial
  probe
  misc_feature (1)..(25): SEQ ID NO: 7065; WAN024FEB-M; Start 324; Stop 348
aagagtgatgaagacttagagcttg

SEQ ID NO: 457858 - DNA, 25 bp, Artificial
  probe
  misc_feature (1)..(25): SEQ ID NO: 7065; WAN024FEB-M; Start 226; Stop 250
ttgatgccaacaagttgagtattcc

SEQ ID NO: 457859 - DNA, 25 bp, Artificial
  probe
  misc_feature (1)..(25): SEQ ID NO: 7065; WAN024FEB-M; Start 314; Stop 338
tggagagttaaagagtgatgaagac

SEQ ID NO: 457860 - DNA, 25 bp, Artificial
  probe
  misc_feature (1)..(25): SEQ ID NO: 7065; WAN024FEB-M; Start 137; Stop 161
tacttatctcaatgttgctcccttt

SEQ ID NO: 457861 - DNA, 25 bp, Artificial
  probe
  misc_feature (1)..(25): SEQ ID NO: 7065; WAN024FEB-M; Start 313; Stop 337
ctggagagttaaagagtgatgaaga

SEQ ID NO: 457862 - DNA, 25 bp, Artificial
  probe
  misc_feature (1)..(25): SEQ ID NO: 7065; WAN024FEB-M; Start 136; Stop 160
ctacttatctcaatgttgctccctt

SEQ ID NO: 457863 - DNA, 25 bp, Artificial
  probe
  misc_feature (1)..(25): SEQ ID NO: 7065; WAN024FEB-M; Start 481; Stop 505
cgagggattatctttactttacagc

SEQ ID NO: 457864 - DNA, 25 bp, Artificial
  probe
  misc_feature (1)..(25): SEQ ID NO: 7065; WAN024FEB-M; Start 397; Stop 421
ctctgactcaggaagaatacgatca

SEQ ID NO: 457865 - DNA, 25 bp, Artificial
  probe
  misc_feature (1)..(25): SEQ ID NO: 7065; WAN024FEB-M; Start 134; Stop 158
gactacttatctcaatgttgctccc

SEQ ID NO: 457866 - DNA, 25 bp, Artificial
  probe
  misc_feature (1)..(25): SEQ ID NO: 7065; WAN024FEB-M; Start 23; Stop 47
acagttaatcaaacaacaagtggtt

SEQ ID NO: 457867 - DNA, 25 bp, Artificial
  probe
  misc_feature (1)..(25): SEQ ID NO: 7065; WAN024FEB-M; Start 22; Stop 46
aacagttaatcaaacaacaagtggt

SEQ ID NO: 457868 - DNA, 25 bp, Artificial
  probe
  misc_feature (1)..(25): SEQ ID NO: 7065; WAN024FEB-M; Start 19; Stop 43
cccaacagttaatcaaacaacaagt

SEQ ID NO: 457869 - DNA, 25 bp, Artificial
  probe
  misc_feature (1)..(25): SEQ ID NO: 7065; WAN024FEB-M; Start 18; Stop 42
acccaacagttaatcaaacaacaag

SEQ ID NO: 457870 - DNA, 25 bp, Artificial
  probe
  misc_feature (1)..(25): SEQ ID NO: 7065; WAN024FEB-M; Start 17; Stop 41
gacccaacagttaatcaaacaacaa

SEQ ID NO: 457871 - DNA, 25 bp, Artificial
  probe
  misc_feature (1)..(25): SEQ ID NO: 7065; WAN024FEB-M; Start 21; Stop 45
caacagttaatcaaacaacaagtgg

SEQ ID NO: 457872 - DNA, 25 bp, Artificial
  probe
  misc_feature (1)..(25): SEQ ID NO: 7065; WAN024FEB-M; Start 20; Stop 44
ccaacagttaatcaaacaacaagtg

SEQ ID NO: 457873 - DNA, 25 bp, Artificial
  probe
  misc_feature (1)..(25): SEQ ID NO: 7065; WAN024FEB-M; Start 228; Stop 252
gatgccaacaagttgagtattcctc

SEQ ID NO: 457874 - DNA, 25 bp, Artificial
  probe
  misc_feature (1)..(25): SEQ ID NO: 7065; WAN024FEB-M; Start 135; Stop 159
actacttatctcaatgttgctccct

SEQ ID NO: 457875 - DNA, 25 bp, Artificial
  probe
  misc_feature (1)..(25): SEQ ID NO: 7065; WAN024FEB-M; Start 409; Stop 433
aagaatacgatcagtacaaggatta

SEQ ID NO: 457876 - DNA, 25 bp, Artificial
  probe
  misc_feature (1)..(25): SEQ ID NO: 7066; WAN024BCX; Start 66; Stop 90
tataaacagccactctccagttcaa

SEQ ID NO: 457877 - DNA, 25 bp, Artificial
  probe
  misc_feature (1)..(25): SEQ ID NO: 7066; WAN024BCX; Start 64; Stop 88
agtataaacagccactctccagttc

SEQ ID NO: 457878 - DNA, 25 bp, Artificial
  probe
  misc_feature (1)..(25): SEQ ID NO: 7066; WAN024BCX; Start 67; Stop 91
ataaacagccactctccagttcaat

SEQ ID NO: 457879 - DNA, 25 bp, Artificial
  probe
  misc_feature (1)..(25): SEQ ID NO: 7066; WAN024BCX; Start 65; Stop 89
gtataaacagccactctccagttca

SEQ ID NO: 457880 - DNA, 25 bp, Artificial
  probe
  misc_feature (1)..(25): SEQ ID NO: 7066; WAN024BCX; Start 68; Stop 92
taaacagccactctccagttcaatt

SEQ ID NO: 457881 - DNA, 25 bp, Artificial
  probe
  misc_feature (1)..(25): SEQ ID NO: 7066; WAN024BCX; Start 55; Stop 79
ttttcattgagtataaacagccact

SEQ ID NO: 457882 - DNA, 25 bp, Artificial
  probe
  misc_feature (1)..(25): SEQ ID NO: 7066; WAN024BCX; Start 54; Stop 78
attttcattgagtataaacagccac

SEQ ID NO: 457883 - DNA, 25 bp, Artificial
  probe
  misc_feature (1)..(25): SEQ ID NO: 7066; WAN024BCX; Start 53; Stop 77
gattttcattgagtataaacagcca

SEQ ID NO: 457884 - DNA, 25 bp, Artificial
  probe
  misc_feature (1)..(25): SEQ ID NO: 7066; WAN024BCX; Start 52; Stop 76
tgattttcattgagtataaacagcc

SEQ ID NO: 457885 - DNA, 25 bp, Artificial
  probe
  misc_feature (1)..(25): SEQ ID NO: 7066; WAN024BCX; Start 57; Stop 81
ttcattgagtataaacagccactct

SEQ ID NO: 457886 - DNA, 25 bp, Artificial
  probe
  misc_feature (1)..(25): SEQ ID NO: 7066; WAN024BCX; Start 58; Stop 82
tcattgagtataaacagccactctc

SEQ ID NO: 457887 - DNA, 25 bp, Artificial
  probe
  misc_feature (1)..(25): SEQ ID NO: 7066; WAN024BCX; Start 56; Stop 80
tttcattgagtataaacagccactc

SEQ ID NO: 457888 - DNA, 25 bp, Artificial
  probe
  misc_feature (1)..(25): SEQ ID NO: 7066; WAN024BCX; Start 59; Stop 83
cattgagtataaacagccactctcc

SEQ ID NO: 457889 - DNA, 25 bp, Artificial
  probe
  misc_feature (1)..(25): SEQ ID NO: 7066; WAN024BCX; Start 60; Stop 84
attgagtataaacagccactctcca

SEQ ID NO: 457890 - DNA, 25 bp, Artificial
  probe
  misc_feature (1)..(25): SEQ ID NO: 7066; WAN024BCX; Start 63; Stop 87
gagtataaacagccactctccagtt

SEQ ID NO: 457891 - DNA, 25 bp, Artificial
  probe
  misc_feature (1)..(25): SEQ ID NO: 7066; WAN024BCX; Start 61; Stop 85
ttgagtataaacagccactctccag

SEQ ID NO: 457892 - DNA, 25 bp, Artificial
  probe
  misc_feature (1)..(25): SEQ ID NO: 7066; WAN024BCX; Start 51; Stop 75
ttgattttcattgagtataaacagc

SEQ ID NO: 457893 - DNA, 25 bp, Artificial
  probe
  misc_feature (1)..(25): SEQ ID NO: 7066; WAN024BCX; Start 62; Stop 86
tgagtataaacagccactctccagt

SEQ ID NO: 457894 - DNA, 25 bp, Artificial
  probe
  misc_feature (1)..(25): SEQ ID NO: 7066; WAN024BCX; Start 69; Stop 93
aaacagccactctccagttcaattg

SEQ ID NO: 457895 - DNA, 25 bp, Artificial
  probe
  misc_feature (1)..(25): SEQ ID NO: 7067; WAN0249P9; Start 20; Stop 44
gatagtcaggctgaggacttacacc

SEQ ID NO: 457896 - DNA, 25 bp, Artificial
  probe
  misc_feature (1)..(25): SEQ ID NO: 7067; WAN0249P9; Start 21; Stop 45
atagtcaggctgaggacttacacct

SEQ ID NO: 457897 - DNA, 25 bp, Artificial
  probe
  misc_feature (1)..(25): SEQ ID NO: 7067; WAN0249P9; Start 19; Stop 43
cgatagtcaggctgaggacttacac

SEQ ID NO: 457898 - DNA, 25 bp, Artificial
  probe
  misc_feature (1)..(25): SEQ ID NO: 7067; WAN0249P9; Start 17; Stop 41
cacgatagtcaggctgaggacttac

SEQ ID NO: 457899 - DNA, 25 bp, Artificial
  probe
  misc_feature (1)..(25): SEQ ID NO: 7067; WAN0249P9; Start 16; Stop 40
tcacgatagtcaggctgaggactta

SEQ ID NO: 457900 - DNA, 25 bp, Artificial
  probe
  misc_feature (1)..(25): SEQ ID NO: 7067; WAN0249P9; Start 18; Stop 42
acgatagtcaggctgaggacttaca

SEQ ID NO: 457901 - DNA, 25 bp, Artificial
  probe
  misc_feature (1)..(25): SEQ ID NO: 7067; WAN0249P9; Start 22; Stop 46
tagtcaggctgaggacttacacctc

SEQ ID NO: 457902 - DNA, 25 bp, Artificial
  probe
  misc_feature (1)..(25): SEQ ID NO: 7068; WAN024BAD; Start 6; Stop 30
ctgtatgtatggttactgacttcgt

SEQ ID NO: 457903 - DNA, 25 bp, Artificial
  probe
  misc_feature (1)..(25): SEQ ID NO: 7068; WAN024BAD; Start 5; Stop 29
actgtatgtatggttactgacttcg

SEQ ID NO: 457904 - DNA, 25 bp, Artificial
  probe
  misc_feature (1)..(25): SEQ ID NO: 7068; WAN024BAD; Start 1; Stop 25
ccttactgtatgtatggttactgac

SEQ ID NO: 457905 - DNA, 25 bp, Artificial
  probe
  misc_feature (1)..(25): SEQ ID NO: 7068; WAN024BAD; Start 7; Stop 31
tgtatgtatggttactgacttcgtc

SEQ ID NO: 457906 - DNA, 25 bp, Artificial
  probe
  misc_feature (1)..(25): SEQ ID NO: 7068; WAN024BAD; Start 4; Stop 28
tactgtatgtatggttactgacttc

SEQ ID NO: 457907 - DNA, 25 bp, Artificial
  probe
  misc_feature (1)..(25): SEQ ID NO: 7068; WAN024BAD; Start 2; Stop 26
cttactgtatgtatggttactgact

SEQ ID NO: 457908 - DNA, 25 bp, Artificial
  probe
  misc_feature (1)..(25): SEQ ID NO: 7068; WAN024BAD; Start 3; Stop 27
ttactgtatgtatggttactgactt

SEQ ID NO: 457909 - DNA, 25 bp, Artificial
  probe
  misc_feature (1)..(25): SEQ ID NO: 7068; WAN024BAD; Start 30; Stop 54
tcagtttcatctacaacctcaaaat

SEQ ID NO: 457910 - DNA, 25 bp, Artificial
  probe
  misc_feature (1)..(25): SEQ ID NO: 7068; WAN024BAD; Start 31; Stop 55
cagtttcatctacaacctcaaaatt

SEQ ID NO: 457911 - DNA, 25 bp, Artificial
  probe
  misc_feature (1)..(25): SEQ ID NO: 7068; WAN024BAD; Start 32; Stop 56
agtttcatctacaacctcaaaattg

SEQ ID NO: 457912 - DNA, 25 bp, Artificial
  probe
  misc_feature (1)..(25): SEQ ID NO: 7068; WAN024BAD; Start 50; Stop 74
aaaattgtgttttgagtaacctgcg

SEQ ID NO: 457913 - DNA, 25 bp, Artificial
  probe
  misc_feature (1)..(25): SEQ ID NO: 7068; WAN024BAD; Start 51; Stop 75
aaattgtgttttgagtaacctgcgg

SEQ ID NO: 457914 - DNA, 25 bp, Artificial
  probe
  misc_feature (1)..(25): SEQ ID NO: 7068; WAN024BAD; Start 36; Stop 60
tcatctacaacctcaaaattgtgtt

SEQ ID NO: 457915 - DNA, 25 bp, Artificial
  probe
  misc_feature (1)..(25): SEQ ID NO: 7068; WAN024BAD; Start 35; Stop 59
ttcatctacaacctcaaaattgtgt

SEQ ID NO: 457916 - DNA, 25 bp, Artificial
  probe
  misc_feature (1)..(25): SEQ ID NO: 7068; WAN024BAD; Start 37; Stop 61
catctacaacctcaaaattgtgttt

SEQ ID NO: 457917 - DNA, 25 bp, Artificial
  probe
  misc_feature (1)..(25): SEQ ID NO: 7068; WAN024BAD; Start 34; Stop 58
tttcatctacaacctcaaaattgtg

SEQ ID NO: 457918 - DNA, 25 bp, Artificial
  probe
  misc_feature (1)..(25): SEQ ID NO: 7068; WAN024BAD; Start 33; Stop 57
gtttcatctacaacctcaaaattgt

SEQ ID NO: 457919 - DNA, 25 bp, Artificial
  probe
  misc_feature (1)..(25): SEQ ID NO: 7068; WAN024BAD; Start 38; Stop 62
atctacaacctcaaaattgtgtttt

SEQ ID NO: 457920 - DNA, 25 bp, Artificial
  probe
  misc_feature (1)..(25): SEQ ID NO: 7068; WAN024BAD; Start 97; Stop 121
tgattttcattgagtattagaacag

SEQ ID NO: 457921 - DNA, 25 bp, Artificial
  probe
  misc_feature (1)..(25): SEQ ID NO: 7068; WAN024BAD; Start 52; Stop 76
aattgtgttttgagtaacctgcggc

SEQ ID NO: 457922 - DNA, 25 bp, Artificial
  probe
  misc_feature (1)..(25): SEQ ID NO: 7068; WAN024BAD; Start 98; Stop 122
gattttcattgagtattagaacaga

SEQ ID NO: 457923 - DNA, 25 bp, Artificial
  probe
  misc_feature (1)..(25): SEQ ID NO: 7068; WAN024BAD; Start 54; Stop 78
ttgtgttttgagtaacctgcggcta

SEQ ID NO: 457924 - DNA, 25 bp, Artificial
  probe
  misc_feature (1)..(25): SEQ ID NO: 7068; WAN024BAD; Start 96; Stop 120
ttgattttcattgagtattagaaca

SEQ ID NO: 457925 - DNA, 25 bp, Artificial
  probe
  misc_feature (1)..(25): SEQ ID NO: 7068; WAN024BAD; Start 49; Stop 73
caaaattgtgttttgagtaacctgc

SEQ ID NO: 457926 - DNA, 25 bp, Artificial
  probe
  misc_feature (1)..(25): SEQ ID NO: 7068; WAN024BAD; Start 39; Stop 63
tctacaacctcaaaattgtgttttg

SEQ ID NO: 457927 - DNA, 25 bp, Artificial
  probe
  misc_feature (1)..(25): SEQ ID NO: 7069; WAN024ASH; Start 9; Stop 33
ttagctctatctgccaccttcaata

SEQ ID NO: 457928 - DNA, 25 bp, Artificial
  probe
  misc_feature (1)..(25): SEQ ID NO: 7069; WAN024ASH; Start 7; Stop 31
tattagctctatctgccaccttcaa

SEQ ID NO: 457929 - DNA, 25 bp, Artificial
  probe
  misc_feature (1)..(25): SEQ ID NO: 7069; WAN024ASH; Start 6; Stop 30
ttattagctctatctgccaccttca

SEQ ID NO: 457930 - DNA, 25 bp, Artificial
  probe
  misc_feature (1)..(25): SEQ ID NO: 7069; WAN024ASH; Start 8; Stop 32
attagctctatctgccaccttcaat

SEQ ID NO: 457931 - DNA, 25 bp, Artificial
  probe
  misc_feature (1)..(25): SEQ ID NO: 7069; WAN024ASH; Start 13; Stop 37
ctctatctgccaccttcaatagtcc

SEQ ID NO: 457932 - DNA, 25 bp, Artificial
  probe
  misc_feature (1)..(25): SEQ ID NO: 7069; WAN024ASH; Start 84; Stop 108
aagataggagtccttcagagtagaa

SEQ ID NO: 457933 - DNA, 25 bp, Artificial
  probe
  misc_feature (1)..(25): SEQ ID NO: 7069; WAN024ASH; Start 87; Stop 111
ataggagtccttcagagtagaatct

SEQ ID NO: 457934 - DNA, 25 bp, Artificial
  probe
  misc_feature (1)..(25): SEQ ID NO: 7069; WAN024ASH; Start 85; Stop 109
agataggagtccttcagagtagaat

SEQ ID NO: 457935 - DNA, 25 bp, Artificial
  probe
  misc_feature (1)..(25): SEQ ID NO: 7069; WAN024ASH; Start 16; Stop 40
tatctgccaccttcaatagtccact

SEQ ID NO: 457936 - DNA, 25 bp, Artificial
  probe
  misc_feature (1)..(25): SEQ ID NO: 7069; WAN024ASH; Start 86; Stop 110
gataggagtccttcagagtagaatc

SEQ ID NO: 457937 - DNA, 25 bp, Artificial
  probe
  misc_feature (1)..(25): SEQ ID NO: 7069; WAN024ASH; Start 83; Stop 107
taagataggagtccttcagagtaga

SEQ ID NO: 457938 - DNA, 25 bp, Artificial
  probe
  misc_feature (1)..(25): SEQ ID NO: 7069; WAN024ASH; Start 10; Stop 34
tagctctatctgccaccttcaatag

SEQ ID NO: 457939 - DNA, 25 bp, Artificial
  probe
  misc_feature (1)..(25): SEQ ID NO: 7069; WAN024ASH; Start 15; Stop 39
ctatctgccaccttcaatagtccac

SEQ ID NO: 457940 - DNA, 25 bp, Artificial
  probe
  misc_feature (1)..(25): SEQ ID NO: 7069; WAN024ASH; Start 14; Stop 38
tctatctgccaccttcaatagtcca

SEQ ID NO: 457941 - DNA, 25 bp, Artificial
  probe
  misc_feature (1)..(25): SEQ ID NO: 7069; WAN024ASH; Start 12; Stop 36
gctctatctgccaccttcaatagtc

SEQ ID NO: 457942 - DNA, 25 bp, Artificial
  probe
  misc_feature (1)..(25): SEQ ID NO: 7069; WAN024ASH; Start 72; Stop 96
ttgttgtgaaataagataggagtcc

SEQ ID NO: 457943 - DNA, 25 bp, Artificial
  probe
  misc_feature (1)..(25): SEQ ID NO: 7069; WAN024ASH; Start 82; Stop 106
ataagataggagtccttcagagtag

SEQ ID NO: 457944 - DNA, 25 bp, Artificial
  probe
  misc_feature (1)..(25): SEQ ID NO: 7069; WAN024ASH; Start 36; Stop 60
ccactggactattgaagccaactaa

SEQ ID NO: 457945 - DNA, 25 bp, Artificial
  probe
  misc_feature (1)..(25): SEQ ID NO: 7069; WAN024ASH; Start 81; Stop 105
aataagataggagtccttcagagta

SEQ ID NO: 457946 - DNA, 25 bp, Artificial
  probe
  misc_feature (1)..(25): SEQ ID NO: 7069; WAN024ASH; Start 5; Stop 29
tttattagctctatctgccaccttc

SEQ ID NO: 457947 - DNA, 25 bp, Artificial
  probe
  misc_feature (1)..(25): SEQ ID NO: 7069; WAN024ASH; Start 4; Stop 28
gtttattagctctatctgccacctt

SEQ ID NO: 457948 - DNA, 25 bp, Artificial
  probe
  misc_feature (1)..(25): SEQ ID NO: 7069; WAN024ASH; Start 38; Stop 62
actggactattgaagccaactaaat

SEQ ID NO: 457949 - DNA, 25 bp, Artificial
  probe
  misc_feature (1)..(25): SEQ ID NO: 7069; WAN024ASH; Start 3; Stop 27
agtttattagctctatctgccacct

SEQ ID NO: 457950 - DNA, 25 bp, Artificial
  probe
  misc_feature (1)..(25): SEQ ID NO: 7069; WAN024ASH; Start 39; Stop 63
ctggactattgaagccaactaaatt

SEQ ID NO: 457951 - DNA, 25 bp, Artificial
  probe
  misc_feature (1)..(25): SEQ ID NO: 7069; WAN024ASH; Start 41; Stop 65
ggactattgaagccaactaaattag

SEQ ID NO: 457952 - DNA, 25 bp, Artificial
  probe
  misc_feature (1)..(25): SEQ ID NO: 7069; WAN024ASH; Start 37; Stop 61
cactggactattgaagccaactaaa

SEQ ID NO: 457953 - DNA, 25 bp, Artificial
  probe
  misc_feature (1)..(25): SEQ ID NO: 7069; WAN024ASH; Start 70; Stop 94
cattgttgtgaaataagataggagt

SEQ ID NO: 457954 - DNA, 25 bp, Artificial
  probe
  misc_feature (1)..(25): SEQ ID NO: 7069; WAN024ASH; Start 2; Stop 26
gagtttattagctctatctgccacc

SEQ ID NO: 457955 - DNA, 25 bp, Artificial
  probe
  misc_feature (1)..(25): SEQ ID NO: 7069; WAN024ASH; Start 73; Stop 97
tgttgtgaaataagataggagtcct

SEQ ID NO: 457956 - DNA, 25 bp, Artificial
  probe
  misc_feature (1)..(25): SEQ ID NO: 7069; WAN024ASH; Start 1; Stop 25
cgagtttattagctctatctgccac

SEQ ID NO: 457957 - DNA, 25 bp, Artificial
  probe
  misc_feature (1)..(25): SEQ ID NO: 7069; WAN024ASH; Start 71; Stop 95
attgttgtgaaataagataggagtc

SEQ ID NO: 457958 - DNA, 25 bp, Artificial
  probe
  misc_feature (1)..(25): SEQ ID NO: 7069; WAN024ASH; Start 11; Stop 35
agctctatctgccaccttcaatagt

SEQ ID NO: 457959 - DNA, 25 bp, Artificial
  probe
  misc_feature (1)..(25): SEQ ID NO: 7069; WAN024ASH; Start 40; Stop 64
tggactattgaagccaactaaatta

SEQ ID NO: 457960 - DNA, 25 bp, Artificial
  probe
  misc_feature (1)..(25): SEQ ID NO: 7070; WAN024FCQ; Start 141; Stop 165
caatatcgccatgtaccaagaaatc

SEQ ID NO: 457961 - DNA, 25 bp, Artificial
  probe
  misc_feature (1)..(25): SEQ ID NO: 7070; WAN024FCQ; Start 142; Stop 166
aatatcgccatgtaccaagaaatca

SEQ ID NO: 457962 - DNA, 25 bp, Artificial
  probe
  misc_feature (1)..(25): SEQ ID NO: 7070; WAN024FCQ; Start 143; Stop 167
atatcgccatgtaccaagaaatcag

SEQ ID NO: 457963 - DNA, 25 bp, Artificial
  probe
  misc_feature (1)..(25): SEQ ID NO: 7070; WAN024FCQ; Start 150; Stop 174
catgtaccaagaaatcagtgatgag

SEQ ID NO: 457964 - DNA, 25 bp, Artificial
  probe
  misc_feature (1)..(25): SEQ ID NO: 7070; WAN024FCQ; Start 140; Stop 164
ccaatatcgccatgtaccaagaaat

SEQ ID NO: 457965 - DNA, 25 bp, Artificial
  probe
  misc_feature (1)..(25): SEQ ID NO: 7070; WAN024FCQ; Start 151; Stop 175
atgtaccaagaaatcagtgatgagc

SEQ ID NO: 457966 - DNA, 25 bp, Artificial
  probe
  misc_feature (1)..(25): SEQ ID NO: 7070; WAN024FCQ; Start 149; Stop 173
ccatgtaccaagaaatcagtgatga

SEQ ID NO: 457967 - DNA, 25 bp, Artificial
  probe
  misc_feature (1)..(25): SEQ ID NO: 7070; WAN024FCQ; Start 153; Stop 177
gtaccaagaaatcagtgatgagcag

SEQ ID NO: 457968 - DNA, 25 bp, Artificial
  probe
  misc_feature (1)..(25): SEQ ID NO: 7070; WAN024FCQ; Start 144; Stop 168
tatcgccatgtaccaagaaatcagt

SEQ ID NO: 457969 - DNA, 25 bp, Artificial
  probe
  misc_feature (1)..(25): SEQ ID NO: 7070; WAN024FCQ; Start 157; Stop 181
caagaaatcagtgatgagcaggttc

SEQ ID NO: 457970 - DNA, 25 bp, Artificial
  probe
  misc_feature (1)..(25): SEQ ID NO: 7070; WAN024FCQ; Start 148; Stop 172
gccatgtaccaagaaatcagtgatg

SEQ ID NO: 457971 - DNA, 25 bp, Artificial
  probe
  misc_feature (1)..(25): SEQ ID NO: 7070; WAN024FCQ; Start 152; Stop 176
tgtaccaagaaatcagtgatgagca

SEQ ID NO: 457972 - DNA, 25 bp, Artificial
  probe
  misc_feature (1)..(25): SEQ ID NO: 7070; WAN024FCQ; Start 158; Stop 182
aagaaatcagtgatgagcaggttca

SEQ ID NO: 457973 - DNA, 25 bp, Artificial
  probe
  misc_feature (1)..(25): SEQ ID NO: 7070; WAN024FCQ; Start 154; Stop 178
taccaagaaatcagtgatgagcagg

SEQ ID NO: 457974 - DNA, 25 bp, Artificial
  probe
  misc_feature (1)..(25): SEQ ID NO: 7070; WAN024FCQ; Start 159; Stop 183
agaaatcagtgatgagcaggttcag

SEQ ID NO: 457975 - DNA, 25 bp, Artificial
  probe
  misc_feature (1)..(25): SEQ ID NO: 7070; WAN024FCQ; Start 156; Stop 180
ccaagaaatcagtgatgagcaggtt

SEQ ID NO: 457976 - DNA, 25 bp, Artificial
  probe
  misc_feature (1)..(25): SEQ ID NO: 7070; WAN024FCQ; Start 145; Stop 169
atcgccatgtaccaagaaatcagtg

SEQ ID NO: 457977 - DNA, 25 bp, Artificial
  probe
  misc_feature (1)..(25): SEQ ID NO: 7070; WAN024FCQ; Start 147; Stop 171
cgccatgtaccaagaaatcagtgat

SEQ ID NO: 457978 - DNA, 25 bp, Artificial
  probe
  misc_feature (1)..(25): SEQ ID NO: 7070; WAN024FCQ; Start 160; Stop 184
gaaatcagtgatgagcaggttcagg

SEQ ID NO: 457979 - DNA, 25 bp, Artificial
  probe
  misc_feature (1)..(25): SEQ ID NO: 7070; WAN024FCQ; Start 88; Stop 112
aacatcggtttggttttacaggaac

SEQ ID NO: 457980 - DNA, 25 bp, Artificial
  probe
  misc_feature (1)..(25): SEQ ID NO: 7070; WAN024FCQ; Start 146; Stop 170
tcgccatgtaccaagaaatcagtga

SEQ ID NO: 457981 - DNA, 25 bp, Artificial
  probe
  misc_feature (1)..(25): SEQ ID NO: 7070; WAN024FCQ; Start 87; Stop 111
aaacatcggtttggttttacaggaa

SEQ ID NO: 457982 - DNA, 25 bp, Artificial
  probe
  misc_feature (1)..(25): SEQ ID NO: 7070; WAN024FCQ; Start 155; Stop 179
accaagaaatcagtgatgagcaggt

SEQ ID NO: 457983 - DNA, 25 bp, Artificial
  probe
  misc_feature (1)..(25): SEQ ID NO: 7070; WAN024FCQ; Start 3; Stop 27
attaagttgggtaacgccagggttt

SEQ ID NO: 457984 - DNA, 25 bp, Artificial
  probe
  misc_feature (1)..(25): SEQ ID NO: 7070; WAN024FCQ; Start 2; Stop 26
gattaagttgggtaacgccagggtt

SEQ ID NO: 457985 - DNA, 25 bp, Artificial
  probe
  misc_feature (1)..(25): SEQ ID NO: 7070; WAN024FCQ; Start 25; Stop 49
ttttcccagtcacgacgttgtaaaa

SEQ ID NO: 457986 - DNA, 25 bp, Artificial
  probe
  misc_feature (1)..(25): SEQ ID NO: 7070; WAN024FCQ; Start 24; Stop 48
gttttcccagtcacgacgttgtaaa

SEQ ID NO: 457987 - DNA, 25 bp, Artificial
  probe
  misc_feature (1)..(25): SEQ ID NO: 7070; WAN024FCQ; Start 26; Stop 50
tttcccagtcacgacgttgtaaaac

SEQ ID NO: 457988 - DNA, 25 bp, Artificial
  probe
  misc_feature (1)..(25): SEQ ID NO: 7070; WAN024FCQ; Start 4; Stop 28
ttaagttgggtaacgccagggtttt

SEQ ID NO: 457989 - DNA, 25 bp, Artificial
  probe
  misc_feature (1)..(25): SEQ ID NO: 7070; WAN024FCQ; Start 42; Stop 66
ttgtaaaacgacggccagtgaattc

SEQ ID NO: 457990 - DNA, 25 bp, Artificial
  probe
  misc_feature (1)..(25): SEQ ID NO: 7070; WAN024FCQ; Start 86; Stop 110
aaaacatcggtttggttttacagga

SEQ ID NO: 457991 - DNA, 25 bp, Artificial
  probe
  misc_feature (1)..(25): SEQ ID NO: 7070; WAN024FCQ; Start 41; Stop 65
gttgtaaaacgacggccagtgaatt

SEQ ID NO: 457992 - DNA, 25 bp, Artificial
  probe
  misc_feature (1)..(25): SEQ ID NO: 7070; WAN024FCQ; Start 89; Stop 113
acatcggtttggttttacaggaacc

SEQ ID NO: 457993 - DNA, 25 bp, Artificial
  probe
  misc_feature (1)..(25): SEQ ID NO: 7071; WAN024C34; Start 250; Stop 274
gaagagattgtacttgtggagaacg

SEQ ID NO: 457994 - DNA, 25 bp, Artificial
  probe
  misc_feature (1)..(25): SEQ ID NO: 7071; WAN024C34; Start 249; Stop 273
cgaagagattgtacttgtggagaac

SEQ ID NO: 457995 - DNA, 25 bp, Artificial
  probe
  misc_feature (1)..(25): SEQ ID NO: 7071; WAN024C34; Start 39; Stop 63
ctggagtgaacctagaacgatagac

SEQ ID NO: 457996 - DNA, 25 bp, Artificial
  probe
  misc_feature (1)..(25): SEQ ID NO: 7071; WAN024C34; Start 40; Stop 64
tggagtgaacctagaacgatagaca

SEQ ID NO: 457997 - DNA, 25 bp, Artificial
  probe
  misc_feature (1)..(25): SEQ ID NO: 7071; WAN024C34; Start 538; Stop 562
ttatatcccttaatgcctttcacca

SEQ ID NO: 457998 - DNA, 25 bp, Artificial
  probe
  misc_feature (1)..(25): SEQ ID NO: 7071; WAN024C34; Start 248; Stop 272
ccgaagagattgtacttgtggagaa

SEQ ID NO: 457999 - DNA, 25 bp, Artificial
  probe
  misc_feature (1)..(25): SEQ ID NO: 7071; WAN024C34; Start 537; Stop 561
cttatatcccttaatgcctttcacc

SEQ ID NO: 458000 - DNA, 25 bp, Artificial
  probe
  misc_feature (1)..(25): SEQ ID NO: 7071; WAN024C34; Start 539; Stop 563
tatatcccttaatgcctttcaccat

SEQ ID NO: 458001 - DNA, 25 bp, Artificial
  probe
  misc_feature (1)..(25): SEQ ID NO: 7071; WAN024C34; Start 38; Stop 62
cctggagtgaacctagaacgataga

SEQ ID NO: 458002 - DNA, 25 bp, Artificial
  probe
  misc_feature (1)..(25): SEQ ID NO: 7071; WAN024C34; Start 251; Stop 275
aagagattgtacttgtggagaacgg

SEQ ID NO: 458003 - DNA, 25 bp, Artificial
  probe
  misc_feature (1)..(25): SEQ ID NO: 7071; WAN024C34; Start 531; Stop 555
agaactcttatatcccttaatgcct

SEQ ID NO: 458004 - DNA, 25 bp, Artificial
  probe
  misc_feature (1)..(25): SEQ ID NO: 7071; WAN024C34; Start 41; Stop 65
ggagtgaacctagaacgatagacac

SEQ ID NO: 458005 - DNA, 25 bp, Artificial
  probe
  misc_feature (1)..(25): SEQ ID NO: 7071; WAN024C34; Start 37; Stop 61
acctggagtgaacctagaacgatag

SEQ ID NO: 458006 - DNA, 25 bp, Artificial
  probe
  misc_feature (1)..(25): SEQ ID NO: 7071; WAN024C34; Start 536; Stop 560
tcttatatcccttaatgcctttcac

SEQ ID NO: 458007 - DNA, 25 bp, Artificial
  probe
  misc_feature (1)..(25): SEQ ID NO: 7071; WAN024C34; Start 592; Stop 616
ttattgtggcatttagacggtcaaa

SEQ ID NO: 458008 - DNA, 25 bp, Artificial
  probe
  misc_feature (1)..(25): SEQ ID NO: 7071; WAN024C34; Start 535; Stop 559
ctcttatatcccttaatgcctttca

SEQ ID NO: 458009 - DNA, 25 bp, Artificial
  probe
  misc_feature (1)..(25): SEQ ID NO: 7071; WAN024C34; Start 534; Stop 558
actcttatatcccttaatgcctttc

SEQ ID NO: 458010 - DNA, 25 bp, Artificial
  probe
  misc_feature (1)..(25): SEQ ID NO: 7071; WAN024C34; Start 532; Stop 556
gaactcttatatcccttaatgcctt

SEQ ID NO: 458011 - DNA, 25 bp, Artificial
  probe
  misc_feature (1)..(25): SEQ ID NO: 7071; WAN024C34; Start 42; Stop 66
gagtgaacctagaacgatagacacg

SEQ ID NO: 458012 - DNA, 25 bp, Artificial
  probe
  misc_feature (1)..(25): SEQ ID NO: 7071; WAN024C34; Start 546; Stop 570
cttaatgcctttcaccatgtcaatt

SEQ ID NO: 458013 - DNA, 25 bp, Artificial
  probe
  misc_feature (1)..(25): SEQ ID NO: 7071; WAN024C34; Start 521; Stop 545
gcagccgagaagaactcttatatcc

SEQ ID NO: 458014 - DNA, 25 bp, Artificial
  probe
  misc_feature (1)..(25): SEQ ID NO: 7071; WAN024C34; Start 591; Stop 615
cttattgtggcatttagacggtcaa

SEQ ID NO: 458015 - DNA, 25 bp, Artificial
  probe
  misc_feature (1)..(25): SEQ ID NO: 7071; WAN024C34; Start 540; Stop 564
atatcccttaatgcctttcaccatg

SEQ ID NO: 458016 - DNA, 25 bp, Artificial
  probe
  misc_feature (1)..(25): SEQ ID NO: 7071; WAN024C34; Start 518; Stop 542
taggcagccgagaagaactcttata

SEQ ID NO: 458017 - DNA, 25 bp, Artificial
  probe
  misc_feature (1)..(25): SEQ ID NO: 7071; WAN024C34; Start 593; Stop 617
tattgtggcatttagacggtcaaac

SEQ ID NO: 458018 - DNA, 25 bp, Artificial
  probe
  misc_feature (1)..(25): SEQ ID NO: 7071; WAN024C34; Start 525; Stop 549
ccgagaagaactcttatatccctta

SEQ ID NO: 458019 - DNA, 25 bp, Artificial
  probe
  misc_feature (1)..(25): SEQ ID NO: 7071; WAN024C34; Start 533; Stop 557
aactcttatatcccttaatgccttt

SEQ ID NO: 458020 - DNA, 25 bp, Artificial
  probe
  misc_feature (1)..(25): SEQ ID NO: 7071; WAN024C34; Start 530; Stop 554
aagaactcttatatcccttaatgcc

SEQ ID NO: 458021 - DNA, 25 bp, Artificial
  probe
  misc_feature (1)..(25): SEQ ID NO: 7071; WAN024C34; Start 520; Stop 544
ggcagccgagaagaactcttatatc

SEQ ID NO: 458022 - DNA, 25 bp, Artificial
  probe
  misc_feature (1)..(25): SEQ ID NO: 7071; WAN024C34; Start 255; Stop 279
gattgtacttgtggagaacggcatt

SEQ ID NO: 458023 - DNA, 25 bp, Artificial
  probe
  misc_feature (1)..(25): SEQ ID NO: 7071; WAN024C34; Start 524; Stop 548
gccgagaagaactcttatatccctt

SEQ ID NO: 458024 - DNA, 25 bp, Artificial
  probe
  misc_feature (1)..(25): SEQ ID NO: 7071; WAN024C34; Start 545; Stop 569
ccttaatgcctttcaccatgtcaat

SEQ ID NO: 458025 - DNA, 25 bp, Artificial
  probe
  misc_feature (1)..(25): SEQ ID NO: 7071; WAN024C34; Start 541; Stop 565
tatcccttaatgcctttcaccatgt

SEQ ID NO: 458026 - DNA, 25 bp, Artificial
  probe
  misc_feature (1)..(25): SEQ ID NO: 7072; WAN024F6W; Start 6; Stop 30
tgccgtatgtgtaggatactaacta

SEQ ID NO: 458027 - DNA, 25 bp, Artificial
  probe
  misc_feature (1)..(25): SEQ ID NO: 7072; WAN024F6W; Start 4; Stop 28
cttgccgtatgtgtaggatactaac

SEQ ID NO: 458028 - DNA, 25 bp, Artificial
  probe
  misc_feature (1)..(25): SEQ ID NO: 7072; WAN024F6W; Start 5; Stop 29
ttgccgtatgtgtaggatactaact

SEQ ID NO: 458029 - DNA, 25 bp, Artificial
  probe
  misc_feature (1)..(25): SEQ ID NO: 7072; WAN024F6W; Start 3; Stop 27
ccttgccgtatgtgtaggatactaa

SEQ ID NO: 458030 - DNA, 25 bp, Artificial
  probe
  misc_feature (1)..(25): SEQ ID NO: 7072; WAN024F6W; Start 7; Stop 31
gccgtatgtgtaggatactaactac

SEQ ID NO: 458031 - DNA, 25 bp, Artificial
  probe
  misc_feature (1)..(25): SEQ ID NO: 7072; WAN024F6W; Start 13; Stop 37
tgtgtaggatactaactacgtcagt

SEQ ID NO: 458032 - DNA, 25 bp, Artificial
  probe
  misc_feature (1)..(25): SEQ ID NO: 7072; WAN024F6W; Start 28; Stop 52
ctacgtcagttccatccacaatctc

SEQ ID NO: 458033 - DNA, 25 bp, Artificial
  probe
  misc_feature (1)..(25): SEQ ID NO: 7072; WAN024F6W; Start 12; Stop 36
atgtgtaggatactaactacgtcag

SEQ ID NO: 458034 - DNA, 25 bp, Artificial
  probe
  misc_feature (1)..(25): SEQ ID NO: 7072; WAN024F6W; Start 17; Stop 41
taggatactaactacgtcagttcca

SEQ ID NO: 458035 - DNA, 25 bp, Artificial
  probe
  misc_feature (1)..(25): SEQ ID NO: 7072; WAN024F6W; Start 16; Stop 40
gtaggatactaactacgtcagttcc

SEQ ID NO: 458036 - DNA, 25 bp, Artificial
  probe
  misc_feature (1)..(25): SEQ ID NO: 7072; WAN024F6W; Start 20; Stop 44
gatactaactacgtcagttccatcc

SEQ ID NO: 458037 - DNA, 25 bp, Artificial
  probe
  misc_feature (1)..(25): SEQ ID NO: 7072; WAN024F6W; Start 19; Stop 43
ggatactaactacgtcagttccatc

SEQ ID NO: 458038 - DNA, 25 bp, Artificial
  probe
  misc_feature (1)..(25): SEQ ID NO: 7072; WAN024F6W; Start 18; Stop 42
aggatactaactacgtcagttccat

SEQ ID NO: 458039 - DNA, 25 bp, Artificial
  probe
  misc_feature (1)..(25): SEQ ID NO: 7072; WAN024F6W; Start 14; Stop 38
gtgtaggatactaactacgtcagtt

SEQ ID NO: 458040 - DNA, 25 bp, Artificial
  probe
  misc_feature (1)..(25): SEQ ID NO: 7072; WAN024F6W; Start 78; Stop 102
gctagtttcctagtttgatctttga

SEQ ID NO: 458041 - DNA, 25 bp, Artificial
  probe
  misc_feature (1)..(25): SEQ ID NO: 7072; WAN024F6W; Start 31; Stop 55
cgtcagttccatccacaatctcaaa

SEQ ID NO: 458042 - DNA, 25 bp, Artificial
  probe
  misc_feature (1)..(25): SEQ ID NO: 7072; WAN024F6W; Start 21; Stop 45
atactaactacgtcagttccatcca

SEQ ID NO: 458043 - DNA, 25 bp, Artificial
  probe
  misc_feature (1)..(25): SEQ ID NO: 7072; WAN024F6W; Start 15; Stop 39
tgtaggatactaactacgtcagttc

SEQ ID NO: 458044 - DNA, 25 bp, Artificial
  probe
  misc_feature (1)..(25): SEQ ID NO: 7072; WAN024F6W; Start 2; Stop 26
gccttgccgtatgtgtaggatacta

SEQ ID NO: 458045 - DNA, 25 bp, Artificial
  probe
  misc_feature (1)..(25): SEQ ID NO: 7072; WAN024F6W; Start 29; Stop 53
tacgtcagttccatccacaatctca

SEQ ID NO: 458046 - DNA, 25 bp, Artificial
  probe
  misc_feature (1)..(25): SEQ ID NO: 7072; WAN024F6W; Start 11; Stop 35
tatgtgtaggatactaactacgtca

SEQ ID NO: 458047 - DNA, 25 bp, Artificial
  probe
  misc_feature (1)..(25): SEQ ID NO: 7072; WAN024F6W; Start 10; Stop 34
gtatgtgtaggatactaactacgtc

SEQ ID NO: 458048 - DNA, 25 bp, Artificial
  probe
  misc_feature (1)..(25): SEQ ID NO: 7072; WAN024F6W; Start 22; Stop 46
tactaactacgtcagttccatccac

SEQ ID NO: 458049 - DNA, 25 bp, Artificial
  probe
  misc_feature (1)..(25): SEQ ID NO: 7072; WAN024F6W; Start 25; Stop 49
taactacgtcagttccatccacaat

SEQ ID NO: 458050 - DNA, 25 bp, Artificial
  probe
  misc_feature (1)..(25): SEQ ID NO: 7072; WAN024F6W; Start 75; Stop 99
gcagctagtttcctagtttgatctt

SEQ ID NO: 458051 - DNA, 25 bp, Artificial
  probe
  misc_feature (1)..(25): SEQ ID NO: 7072; WAN024F6W; Start 32; Stop 56
gtcagttccatccacaatctcaaaa

SEQ ID NO: 458052 - DNA, 25 bp, Artificial
  probe
  misc_feature (1)..(25): SEQ ID NO: 7072; WAN024F6W; Start 81; Stop 105
agtttcctagtttgatctttgattt

SEQ ID NO: 458053 - DNA, 25 bp, Artificial
  probe
  misc_feature (1)..(25): SEQ ID NO: 7072; WAN024F6W; Start 27; Stop 51
actacgtcagttccatccacaatct

SEQ ID NO: 458054 - DNA, 25 bp, Artificial
  probe
  misc_feature (1)..(25): SEQ ID NO: 7072; WAN024F6W; Start 77; Stop 101
agctagtttcctagtttgatctttg

SEQ ID NO: 458055 - DNA, 25 bp, Artificial
  probe
  misc_feature (1)..(25): SEQ ID NO: 7072; WAN024F6W; Start 76; Stop 100
cagctagtttcctagtttgatcttt

SEQ ID NO: 458056 - DNA, 25 bp, Artificial
  probe
  misc_feature (1)..(25): SEQ ID NO: 7072; WAN024F6W; Start 8; Stop 32
ccgtatgtgtaggatactaactacg

SEQ ID NO: 458057 - DNA, 25 bp, Artificial
  probe
  misc_feature (1)..(25): SEQ ID NO: 7072; WAN024F6W; Start 35; Stop 59
agttccatccacaatctcaaaacag

SEQ ID NO: 458058 - DNA, 25 bp, Artificial
  probe
  misc_feature (1)..(25): SEQ ID NO: 7072; WAN024F6W; Start 33; Stop 57
tcagttccatccacaatctcaaaac

SEQ ID NO: 458059 - DNA, 25 bp, Artificial
  probe
  misc_feature (1)..(25): SEQ ID NO: 7073; WAN024FCC; Start 114; Stop 138
cgttattgacagtttgagttggaat

SEQ ID NO: 458060 - DNA, 25 bp, Artificial
  probe
  misc_feature (1)..(25): SEQ ID NO: 7073; WAN024FCC; Start 110; Stop 134
taagcgttattgacagtttgagttg

SEQ ID NO: 458061 - DNA, 25 bp, Artificial
  probe
  misc_feature (1)..(25): SEQ ID NO: 7073; WAN024FCC; Start 109; Stop 133
gtaagcgttattgacagtttgagtt

SEQ ID NO: 458062 - DNA, 25 bp, Artificial
  probe
  misc_feature (1)..(25): SEQ ID NO: 7073; WAN024FCC; Start 117; Stop 141
tattgacagtttgagttggaattgg

SEQ ID NO: 458063 - DNA, 25 bp, Artificial
  probe
  misc_feature (1)..(25): SEQ ID NO: 7073; WAN024FCC; Start 33; Stop 57
ccatattcagagtctaatgtgcaga

SEQ ID NO: 458064 - DNA, 25 bp, Artificial
  probe
  misc_feature (1)..(25): SEQ ID NO: 7073; WAN024FCC; Start 4; Stop 28
tagccgattagaatttccaagtaac

SEQ ID NO: 458065 - DNA, 25 bp, Artificial
  probe
  misc_feature (1)..(25): SEQ ID NO: 7073; WAN024FCC; Start 118; Stop 142
attgacagtttgagttggaattggt

SEQ ID NO: 458066 - DNA, 25 bp, Artificial
  probe
  misc_feature (1)..(25): SEQ ID NO: 7073; WAN024FCC; Start 5; Stop 29
agccgattagaatttccaagtaacg

SEQ ID NO: 458067 - DNA, 25 bp, Artificial
  probe
  misc_feature (1)..(25): SEQ ID NO: 7073; WAN024FCC; Start 3; Stop 27
ctagccgattagaatttccaagtaa

SEQ ID NO: 458068 - DNA, 25 bp, Artificial
  probe
  misc_feature (1)..(25): SEQ ID NO: 7073; WAN024FCC; Start 116; Stop 140
ttattgacagtttgagttggaattg

SEQ ID NO: 458069 - DNA, 25 bp, Artificial
  probe
  misc_feature (1)..(25): SEQ ID NO: 7073; WAN024FCC; Start 108; Stop 132
cgtaagcgttattgacagtttgagt

SEQ ID NO: 458070 - DNA, 25 bp, Artificial
  probe
  misc_feature (1)..(25): SEQ ID NO: 7073; WAN024FCC; Start 122; Stop 146
acagtttgagttggaattggtcttg

SEQ ID NO: 458071 - DNA, 25 bp, Artificial
  probe
  misc_feature (1)..(25): SEQ ID NO: 7073; WAN024FCC; Start 115; Stop 139
gttattgacagtttgagttggaatt

SEQ ID NO: 458072 - DNA, 25 bp, Artificial
  probe
  misc_feature (1)..(25): SEQ ID NO: 7073; WAN024FCC; Start 113; Stop 137
gcgttattgacagtttgagttggaa

SEQ ID NO: 458073 - DNA, 25 bp, Artificial
  probe
  misc_feature (1)..(25): SEQ ID NO: 7073; WAN024FCC; Start 111; Stop 135
aagcgttattgacagtttgagttgg

SEQ ID NO: 458074 - DNA, 25 bp, Artificial
  probe
  misc_feature (1)..(25): SEQ ID NO: 7073; WAN024FCC; Start 150; Stop 174
gacaatcagacttcagcagagcatc

SEQ ID NO: 458075 - DNA, 25 bp, Artificial
  probe
  misc_feature (1)..(25): SEQ ID NO: 7073; WAN024FCC; Start 121; Stop 145
gacagtttgagttggaattggtctt

SEQ ID NO: 458076 - DNA, 25 bp, Artificial
  probe
  misc_feature (1)..(25): SEQ ID NO: 7073; WAN024FCC; Start 119; Stop 143
ttgacagtttgagttggaattggtc

SEQ ID NO: 458077 - DNA, 25 bp, Artificial
  probe
  misc_feature (1)..(25): SEQ ID NO: 7073; WAN024FCC; Start 149; Stop 173
agacaatcagacttcagcagagcat

SEQ ID NO: 458078 - DNA, 25 bp, Artificial
  probe
  misc_feature (1)..(25): SEQ ID NO: 7073; WAN024FCC; Start 112; Stop 136
agcgttattgacagtttgagttgga

SEQ ID NO: 458079 - DNA, 25 bp, Artificial
  probe
  misc_feature (1)..(25): SEQ ID NO: 7073; WAN024FCC; Start 272; Stop 296
tctgaaagaagaagtggagcaagtc

SEQ ID NO: 458080 - DNA, 25 bp, Artificial
  probe
  misc_feature (1)..(25): SEQ ID NO: 7073; WAN024FCC; Start 6; Stop 30
gccgattagaatttccaagtaacgc

SEQ ID NO: 458081 - DNA, 25 bp, Artificial
  probe
  misc_feature (1)..(25): SEQ ID NO: 7073; WAN024FCC; Start 107; Stop 131
gcgtaagcgttattgacagtttgag

SEQ ID NO: 458082 - DNA, 25 bp, Artificial
  probe
  misc_feature (1)..(25): SEQ ID NO: 7073; WAN024FCC; Start 32; Stop 56
cccatattcagagtctaatgtgcag

SEQ ID NO: 458083 - DNA, 25 bp, Artificial
  probe
  misc_feature (1)..(25): SEQ ID NO: 7073; WAN024FCC; Start 271; Stop 295
gtctgaaagaagaagtggagcaagt

SEQ ID NO: 458084 - DNA, 25 bp, Artificial
  probe
  misc_feature (1)..(25): SEQ ID NO: 7073; WAN024FCC; Start 123; Stop 147
cagtttgagttggaattggtcttgc

SEQ ID NO: 458085 - DNA, 25 bp, Artificial
  probe
  misc_feature (1)..(25): SEQ ID NO: 7073; WAN024FCC; Start 83; Stop 107
ggatcaaaccatcacaacaatagcg

SEQ ID NO: 458086 - DNA, 25 bp, Artificial
  probe
  misc_feature (1)..(25): SEQ ID NO: 7073; WAN024FCC; Start 82; Stop 106
cggatcaaaccatcacaacaatagc

SEQ ID NO: 458087 - DNA, 25 bp, Artificial
  probe
  misc_feature (1)..(25): SEQ ID NO: 7073; WAN024FCC; Start 120; Stop 144
tgacagtttgagttggaattggtct

SEQ ID NO: 458088 - DNA, 25 bp, Artificial
  probe
  misc_feature (1)..(25): SEQ ID NO: 7073; WAN024FCC; Start 152; Stop 176
caatcagacttcagcagagcatcct

SEQ ID NO: 458089 - DNA, 25 bp, Artificial
  probe
  misc_feature (1)..(25): SEQ ID NO: 7073; WAN024FCC; Start 148; Stop 172
gagacaatcagacttcagcagagca

SEQ ID NO: 458090 - DNA, 25 bp, Artificial
  probe
  misc_feature (1)..(25): SEQ ID NO: 7073; WAN024FCC; Start 30; Stop 54
cgcccatattcagagtctaatgtgc

SEQ ID NO: 458091 - DNA, 25 bp, Artificial
  probe
  misc_feature (1)..(25): SEQ ID NO: 7073; WAN024FCC; Start 167; Stop 191
agagcatcctgatggcatctatcat

SEQ ID NO: 458092 - DNA, 25 bp, Artificial
  probe
  misc_feature (1)..(25): SEQ ID NO: 7075; WAN0249LB; Start 67; Stop 91
tgatctagttgataggaagggagtt

SEQ ID NO: 458093 - DNA, 25 bp, Artificial
  probe
  misc_feature (1)..(25): SEQ ID NO: 7075; WAN0249LB; Start 66; Stop 90
ttgatctagttgataggaagggagt

SEQ ID NO: 458094 - DNA, 25 bp, Artificial
  probe
  misc_feature (1)..(25): SEQ ID NO: 7075; WAN0249LB; Start 65; Stop 89
gttgatctagttgataggaagggag

SEQ ID NO: 458095 - DNA, 25 bp, Artificial
  probe
  misc_feature (1)..(25): SEQ ID NO: 7075; WAN0249LB; Start 69; Stop 93
atctagttgataggaagggagttac

SEQ ID NO: 458096 - DNA, 25 bp, Artificial
  probe
  misc_feature (1)..(25): SEQ ID NO: 7075; WAN0249LB; Start 70; Stop 94
tctagttgataggaagggagttact

SEQ ID NO: 458097 - DNA, 25 bp, Artificial
  probe
  misc_feature (1)..(25): SEQ ID NO: 7075; WAN0249LB; Start 68; Stop 92
gatctagttgataggaagggagtta

SEQ ID NO: 458098 - DNA, 25 bp, Artificial
  probe
  misc_feature (1)..(25): SEQ ID NO: 7075; WAN0249LB; Start 73; Stop 97
agttgataggaagggagttactata

SEQ ID NO: 458099 - DNA, 25 bp, Artificial
  probe
  misc_feature (1)..(25): SEQ ID NO: 7075; WAN0249LB; Start 71; Stop 95
ctagttgataggaagggagttacta

SEQ ID NO: 458100 - DNA, 25 bp, Artificial
  probe
  misc_feature (1)..(25): SEQ ID NO: 7075; WAN0249LB; Start 232; Stop 256
ctgtgcatatataatagacttcctg

SEQ ID NO: 458101 - DNA, 25 bp, Artificial
  probe
  misc_feature (1)..(25): SEQ ID NO: 7075; WAN0249LB; Start 74; Stop 98
gttgataggaagggagttactataa

SEQ ID NO: 458102 - DNA, 25 bp, Artificial
  probe
  misc_feature (1)..(25): SEQ ID NO: 7075; WAN0249LB; Start 72; Stop 96
tagttgataggaagggagttactat

SEQ ID NO: 458103 - DNA, 25 bp, Artificial
  probe
  misc_feature (1)..(25): SEQ ID NO: 7075; WAN0249LB; Start 231; Stop 255
tctgtgcatatataatagacttcct

SEQ ID NO: 458104 - DNA, 25 bp, Artificial
  probe
  misc_feature (1)..(25): SEQ ID NO: 7075; WAN0249LB; Start 233; Stop 257
tgtgcatatataatagacttcctgc

SEQ ID NO: 458105 - DNA, 25 bp, Artificial
  probe
  misc_feature (1)..(25): SEQ ID NO: 7075; WAN0249LB; Start 98; Stop 122
aaatactcaggcttccatcatattt

SEQ ID NO: 458106 - DNA, 25 bp, Artificial
  probe
  misc_feature (1)..(25): SEQ ID NO: 7075; WAN0249LB; Start 5; Stop 29
gaaatgctgctcatagtcctttgct

SEQ ID NO: 458107 - DNA, 25 bp, Artificial
  probe
  misc_feature (1)..(25): SEQ ID NO: 7075; WAN0249LB; Start 93; Stop 117
ctataaaatactcaggcttccatca

SEQ ID NO: 458108 - DNA, 25 bp, Artificial
  probe
  misc_feature (1)..(25): SEQ ID NO: 7075; WAN0249LB; Start 92; Stop 116
actataaaatactcaggcttccatc

SEQ ID NO: 458109 - DNA, 25 bp, Artificial
  probe
  misc_feature (1)..(25): SEQ ID NO: 7075; WAN0249LB; Start 99; Stop 123
aatactcaggcttccatcatatttt

SEQ ID NO: 458110 - DNA, 25 bp, Artificial
  probe
  misc_feature (1)..(25): SEQ ID NO: 7075; WAN0249LB; Start 97; Stop 121
aaaatactcaggcttccatcatatt

SEQ ID NO: 458111 - DNA, 25 bp, Artificial
  probe
  misc_feature (1)..(25): SEQ ID NO: 7075; WAN0249LB; Start 6; Stop 30
aaatgctgctcatagtcctttgctg

SEQ ID NO: 458112 - DNA, 25 bp, Artificial
  probe
  misc_feature (1)..(25): SEQ ID NO: 7075; WAN0249LB; Start 75; Stop 99
ttgataggaagggagttactataaa

SEQ ID NO: 458113 - DNA, 25 bp, Artificial
  probe
  misc_feature (1)..(25): SEQ ID NO: 7075; WAN0249LB; Start 95; Stop 119
ataaaatactcaggcttccatcata

SEQ ID NO: 458114 - DNA, 25 bp, Artificial
  probe
  misc_feature (1)..(25): SEQ ID NO: 7075; WAN0249LB; Start 96; Stop 120
taaaatactcaggcttccatcatat

SEQ ID NO: 458115 - DNA, 25 bp, Artificial
  probe
  misc_feature (1)..(25): SEQ ID NO: 7075; WAN0249LB; Start 94; Stop 118
tataaaatactcaggcttccatcat

SEQ ID NO: 458116 - DNA, 25 bp, Artificial
  probe
  misc_feature (1)..(25): SEQ ID NO: 7075; WAN0249LB; Start 90; Stop 114
ttactataaaatactcaggcttcca

SEQ ID NO: 458117 - DNA, 25 bp, Artificial
  probe
  misc_feature (1)..(25): SEQ ID NO: 7075; WAN0249LB; Start 91; Stop 115
tactataaaatactcaggcttccat

SEQ ID NO: 458118 - DNA, 25 bp, Artificial
  probe
  misc_feature (1)..(25): SEQ ID NO: 7075; WAN0249LB; Start 89; Stop 113
gttactataaaatactcaggcttcc

SEQ ID NO: 458119 - DNA, 25 bp, Artificial
  probe
  misc_feature (1)..(25): SEQ ID NO: 7075; WAN0249LB; Start 7; Stop 31
aatgctgctcatagtcctttgctga

SEQ ID NO: 458120 - DNA, 25 bp, Artificial
  probe
  misc_feature (1)..(25): SEQ ID NO: 7075; WAN0249LB; Start 2; Stop 26
taggaaatgctgctcatagtccttt

SEQ ID NO: 458121 - DNA, 25 bp, Artificial
  probe
  misc_feature (1)..(25): SEQ ID NO: 7075; WAN0249LB; Start 4; Stop 28
ggaaatgctgctcatagtcctttgc

SEQ ID NO: 458122 - DNA, 25 bp, Artificial
  probe
  misc_feature (1)..(25): SEQ ID NO: 7075; WAN0249LB; Start 230; Stop 254
gtctgtgcatatataatagacttcc

SEQ ID NO: 458123 - DNA, 25 bp, Artificial
  probe
  misc_feature (1)..(25): SEQ ID NO: 7075; WAN0249LB; Start 1; Stop 25
ctaggaaatgctgctcatagtcctt

SEQ ID NO: 458124 - DNA, 25 bp, Artificial
  probe
  misc_feature (1)..(25): SEQ ID NO: 7075; WAN0249LB; Start 154; Stop 178
atattgtagtattggtacagaagat

SEQ ID NO: 458125 - DNA, 25 bp, Artificial
  probe
  misc_feature (1)..(25): SEQ ID NO: 7076; WAN024BWW; Start 46; Stop 70
gactcaattcgctatcagataggaa

SEQ ID NO: 458126 - DNA, 25 bp, Artificial
  probe
  misc_feature (1)..(25): SEQ ID NO: 7076; WAN024BWW; Start 45; Stop 69
tgactcaattcgctatcagatagga

SEQ ID NO: 458127 - DNA, 25 bp, Artificial
  probe
  misc_feature (1)..(25): SEQ ID NO: 7076; WAN024BWW; Start 37; Stop 61
gtttcaactgactcaattcgctatc

SEQ ID NO: 458128 - DNA, 25 bp, Artificial
  probe
  misc_feature (1)..(25): SEQ ID NO: 7076; WAN024BWW; Start 36; Stop 60
tgtttcaactgactcaattcgctat

SEQ ID NO: 458129 - DNA, 25 bp, Artificial
  probe
  misc_feature (1)..(25): SEQ ID NO: 7076; WAN024BWW; Start 35; Stop 59
atgtttcaactgactcaattcgcta

SEQ ID NO: 458130 - DNA, 25 bp, Artificial
  probe
  misc_feature (1)..(25): SEQ ID NO: 7076; WAN024BWW; Start 38; Stop 62
tttcaactgactcaattcgctatca

SEQ ID NO: 458131 - DNA, 25 bp, Artificial
  probe
  misc_feature (1)..(25): SEQ ID NO: 7076; WAN024BWW; Start 34; Stop 58
aatgtttcaactgactcaattcgct

SEQ ID NO: 458132 - DNA, 25 bp, Artificial
  probe
  misc_feature (1)..(25): SEQ ID NO: 7076; WAN024BWW; Start 33; Stop 57
caatgtttcaactgactcaattcgc

SEQ ID NO: 458133 - DNA, 25 bp, Artificial
  probe
  misc_feature (1)..(25): SEQ ID NO: 7076; WAN024BWW; Start 32; Stop 56
gcaatgtttcaactgactcaattcg

SEQ ID NO: 458134 - DNA, 25 bp, Artificial
  probe
  misc_feature (1)..(25): SEQ ID NO: 7076; WAN024BWW; Start 47; Stop 71
actcaattcgctatcagataggaaa

SEQ ID NO: 458135 - DNA, 25 bp, Artificial
  probe
  misc_feature (1)..(25): SEQ ID NO: 7076; WAN024BWW; Start 30; Stop 54
atgcaatgtttcaactgactcaatt

SEQ ID NO: 458136 - DNA, 25 bp, Artificial
  probe
  misc_feature (1)..(25): SEQ ID NO: 7076; WAN024BWW; Start 29; Stop 53
gatgcaatgtttcaactgactcaat

SEQ ID NO: 458137 - DNA, 25 bp, Artificial
  probe
  misc_feature (1)..(25): SEQ ID NO: 7076; WAN024BWW; Start 31; Stop 55
tgcaatgtttcaactgactcaattc

SEQ ID NO: 458138 - DNA, 25 bp, Artificial
  probe
  misc_feature (1)..(25): SEQ ID NO: 7076; WAN024BWW; Start 42; Stop 66
aactgactcaattcgctatcagata

SEQ ID NO: 458139 - DNA, 25 bp, Artificial
  probe
  misc_feature (1)..(25): SEQ ID NO: 7076; WAN024BWW; Start 43; Stop 67
actgactcaattcgctatcagatag

SEQ ID NO: 458140 - DNA, 25 bp, Artificial
  probe
  misc_feature (1)..(25): SEQ ID NO: 7076; WAN024BWW; Start 44; Stop 68
ctgactcaattcgctatcagatagg

SEQ ID NO: 458141 - DNA, 25 bp, Artificial
  probe
  misc_feature (1)..(25): SEQ ID NO: 7076; WAN024BWW; Start 41; Stop 65
caactgactcaattcgctatcagat

SEQ ID NO: 458142 - DNA, 25 bp, Artificial
  probe
  misc_feature (1)..(25): SEQ ID NO: 7076; WAN024BWW; Start 39; Stop 63
ttcaactgactcaattcgctatcag

SEQ ID NO: 458143 - DNA, 25 bp, Artificial
  probe
  misc_feature (1)..(25): SEQ ID NO: 7076; WAN024BWW; Start 40; Stop 64
tcaactgactcaattcgctatcaga

SEQ ID NO: 458144 - DNA, 25 bp, Artificial
  probe
  misc_feature (1)..(25): SEQ ID NO: 7076; WAN024BWW; Start 28; Stop 52
cgatgcaatgtttcaactgactcaa

SEQ ID NO: 458145 - DNA, 25 bp, Artificial
  probe
  misc_feature (1)..(25): SEQ ID NO: 7076; WAN024BWW; Start 27; Stop 51
tcgatgcaatgtttcaactgactca

SEQ ID NO: 458146 - DNA, 25 bp, Artificial
  probe
  misc_feature (1)..(25): SEQ ID NO: 7076; WAN024BWW; Start 54; Stop 78
tcgctatcagataggaaaactttct

SEQ ID NO: 458147 - DNA, 25 bp, Artificial
  probe
  misc_feature (1)..(25): SEQ ID NO: 7076; WAN024BWW; Start 53; Stop 77
ttcgctatcagataggaaaactttc

SEQ ID NO: 458148 - DNA, 25 bp, Artificial
  probe
  misc_feature (1)..(25): SEQ ID NO: 7076; WAN024BWW; Start 50; Stop 74
caattcgctatcagataggaaaact

SEQ ID NO: 458149 - DNA, 25 bp, Artificial
  probe
  misc_feature (1)..(25): SEQ ID NO: 7076; WAN024BWW; Start 49; Stop 73
tcaattcgctatcagataggaaaac

SEQ ID NO: 458150 - DNA, 25 bp, Artificial
  probe
  misc_feature (1)..(25): SEQ ID NO: 7076; WAN024BWW; Start 55; Stop 79
cgctatcagataggaaaactttctt

SEQ ID NO: 458151 - DNA, 25 bp, Artificial
  probe
  misc_feature (1)..(25): SEQ ID NO: 7076; WAN024BWW; Start 48; Stop 72
ctcaattcgctatcagataggaaaa

SEQ ID NO: 458152 - DNA, 25 bp, Artificial
  probe
  misc_feature (1)..(25): SEQ ID NO: 7076; WAN024BWW; Start 52; Stop 76
attcgctatcagataggaaaacttt

SEQ ID NO: 458153 - DNA, 25 bp, Artificial
  probe
  misc_feature (1)..(25): SEQ ID NO: 7076; WAN024BWW; Start 51; Stop 75
aattcgctatcagataggaaaactt

SEQ ID NO: 458154 - DNA, 25 bp, Artificial
  probe
  misc_feature (1)..(25): SEQ ID NO: 7076; WAN024BWW; Start 26; Stop 50
atcgatgcaatgtttcaactgactc

SEQ ID NO: 458155 - DNA, 25 bp, Artificial
  probe
  misc_feature (1)..(25): SEQ ID NO: 7076; WAN024BWW; Start 25; Stop 49
gatcgatgcaatgtttcaactgact

SEQ ID NO: 458156 - DNA, 25 bp, Artificial
  probe
  misc_feature (1)..(25): SEQ ID NO: 7076; WAN024BWW; Start 60; Stop 84
tcagataggaaaactttctttagct

SEQ ID NO: 458157 - DNA, 25 bp, Artificial
  probe
  misc_feature (1)..(25): SEQ ID NO: 7076; WAN024BWW; Start 59; Stop 83
atcagataggaaaactttctttagc

SEQ ID NO: 458158 - DNA, 25 bp, Artificial
  probe
  misc_feature (1)..(25): SEQ ID NO: 7077; WAN024BWY; Start 5; Stop 29
aactaattcacacaaccattcctgt

SEQ ID NO: 458159 - DNA, 25 bp, Artificial
  probe
  misc_feature (1)..(25): SEQ ID NO: 7077; WAN024BWY; Start 6; Stop 30
actaattcacacaaccattcctgtc

SEQ ID NO: 458160 - DNA, 25 bp, Artificial
  probe
  misc_feature (1)..(25): SEQ ID NO: 7077; WAN024BWY; Start 32; Stop 56
caccttctacatctcttcctcaacc

SEQ ID NO: 458161 - DNA, 25 bp, Artificial
  probe
  misc_feature (1)..(25): SEQ ID NO: 7077; WAN024BWY; Start 31; Stop 55
ccaccttctacatctcttcctcaac

SEQ ID NO: 458162 - DNA, 25 bp, Artificial
  probe
  misc_feature (1)..(25): SEQ ID NO: 7077; WAN024BWY; Start 7; Stop 31
ctaattcacacaaccattcctgtcc

SEQ ID NO: 458163 - DNA, 25 bp, Artificial
  probe
  misc_feature (1)..(25): SEQ ID NO: 7077; WAN024BWY; Start 42; Stop 66
atctcttcctcaaccctactctatt

SEQ ID NO: 458164 - DNA, 25 bp, Artificial
  probe
  misc_feature (1)..(25): SEQ ID NO: 7077; WAN024BWY; Start 45; Stop 69
tcttcctcaaccctactctattacc

SEQ ID NO: 458165 - DNA, 25 bp, Artificial
  probe
  misc_feature (1)..(25): SEQ ID NO: 7077; WAN024BWY; Start 44; Stop 68
ctcttcctcaaccctactctattac

SEQ ID NO: 458166 - DNA, 25 bp, Artificial
  probe
  misc_feature (1)..(25): SEQ ID NO: 7077; WAN024BWY; Start 43; Stop 67
tctcttcctcaaccctactctatta

SEQ ID NO: 458167 - DNA, 25 bp, Artificial
  probe
  misc_feature (1)..(25): SEQ ID NO: 7077; WAN024BWY; Start 41; Stop 65
catctcttcctcaaccctactctat

SEQ ID NO: 458168 - DNA, 25 bp, Artificial
  probe
  misc_feature (1)..(25): SEQ ID NO: 7077; WAN024BWY; Start 35; Stop 59
cttctacatctcttcctcaacccta

SEQ ID NO: 458169 - DNA, 25 bp, Artificial
  probe
  misc_feature (1)..(25): SEQ ID NO: 7077; WAN024BWY; Start 4; Stop 28
aaactaattcacacaaccattcctg

SEQ ID NO: 458170 - DNA, 25 bp, Artificial
  probe
  misc_feature (1)..(25): SEQ ID NO: 7077; WAN024BWY; Start 36; Stop 60
ttctacatctcttcctcaaccctac

SEQ ID NO: 458171 - DNA, 25 bp, Artificial
  probe
  misc_feature (1)..(25): SEQ ID NO: 7077; WAN024BWY; Start 49; Stop 73
cctcaaccctactctattacccaaa

SEQ ID NO: 458172 - DNA, 25 bp, Artificial
  probe
  misc_feature (1)..(25): SEQ ID NO: 7077; WAN024BWY; Start 3; Stop 27
gaaactaattcacacaaccattcct

SEQ ID NO: 458173 - DNA, 25 bp, Artificial
  probe
  misc_feature (1)..(25): SEQ ID NO: 7077; WAN024BWY; Start 46; Stop 70
cttcctcaaccctactctattaccc

SEQ ID NO: 458174 - DNA, 25 bp, Artificial
  probe
  misc_feature (1)..(25): SEQ ID NO: 7077; WAN024BWY; Start 38; Stop 62
ctacatctcttcctcaaccctactc

SEQ ID NO: 458175 - DNA, 25 bp, Artificial
  probe
  misc_feature (1)..(25): SEQ ID NO: 7077; WAN024BWY; Start 40; Stop 64
acatctcttcctcaaccctactcta

SEQ ID NO: 458176 - DNA, 25 bp, Artificial
  probe
  misc_feature (1)..(25): SEQ ID NO: 7077; WAN024BWY; Start 39; Stop 63
tacatctcttcctcaaccctactct

SEQ ID NO: 458177 - DNA, 25 bp, Artificial
  probe
  misc_feature (1)..(25): SEQ ID NO: 7077; WAN024BWY; Start 37; Stop 61
tctacatctcttcctcaaccctact

SEQ ID NO: 458178 - DNA, 25 bp, Artificial
  probe
  misc_feature (1)..(25): SEQ ID NO: 7077; WAN024BWY; Start 48; Stop 72
tcctcaaccctactctattacccaa

SEQ ID NO: 458179 - DNA, 25 bp, Artificial
  probe
  misc_feature (1)..(25): SEQ ID NO: 7077; WAN024BWY; Start 47; Stop 71
ttcctcaaccctactctattaccca

SEQ ID NO: 458180 - DNA, 25 bp, Artificial
  probe
  misc_feature (1)..(25): SEQ ID NO: 7077; WAN024BWY; Start 34; Stop 58
ccttctacatctcttcctcaaccct

SEQ ID NO: 458181 - DNA, 25 bp, Artificial
  probe
  misc_feature (1)..(25): SEQ ID NO: 7077; WAN024BWY; Start 33; Stop 57
accttctacatctcttcctcaaccc

SEQ ID NO: 458182 - DNA, 25 bp, Artificial
  probe
  misc_feature (1)..(25): SEQ ID NO: 7077; WAN024BWY; Start 30; Stop 54
cccaccttctacatctcttcctcaa

SEQ ID NO: 458183 - DNA, 25 bp, Artificial
  probe
  misc_feature (1)..(25): SEQ ID NO: 7077; WAN024BWY; Start 50; Stop 74
ctcaaccctactctattacccaaaa

SEQ ID NO: 458184 - DNA, 25 bp, Artificial
  probe
  misc_feature (1)..(25): SEQ ID NO: 7077; WAN024BWY; Start 8; Stop 32
taattcacacaaccattcctgtccc

SEQ ID NO: 458185 - DNA, 25 bp, Artificial
  probe
  misc_feature (1)..(25): SEQ ID NO: 7077; WAN024BWY; Start 2; Stop 26
tgaaactaattcacacaaccattcc

SEQ ID NO: 458186 - DNA, 25 bp, Artificial
  probe
  misc_feature (1)..(25): SEQ ID NO: 7077; WAN024BWY; Start 28; Stop 52
gtcccaccttctacatctcttcctc

SEQ ID NO: 458187 - DNA, 25 bp, Artificial
  probe
  misc_feature (1)..(25): SEQ ID NO: 7077; WAN024BWY; Start 22; Stop 46
attcctgtcccaccttctacatctc

SEQ ID NO: 458188 - DNA, 25 bp, Artificial
  probe
  misc_feature (1)..(25): SEQ ID NO: 7077; WAN024BWY; Start 1; Stop 25
ctgaaactaattcacacaaccattc

SEQ ID NO: 458189 - DNA, 25 bp, Artificial
  probe
  misc_feature (1)..(25): SEQ ID NO: 7077; WAN024BWY; Start 29; Stop 53
tcccaccttctacatctcttcctca

SEQ ID NO: 458190 - DNA, 25 bp, Artificial
  probe
  misc_feature (1)..(25): SEQ ID NO: 7077; WAN024BWY; Start 21; Stop 45
cattcctgtcccaccttctacatct

SEQ ID NO: 458191 - DNA, 25 bp, Artificial
  probe
  misc_feature (1)..(25): SEQ ID NO: 7078; WAN024DIN; Start 79; Stop 103
ttaatcaacaatggcatgtggagag

SEQ ID NO: 458192 - DNA, 25 bp, Artificial
  probe
  misc_feature (1)..(25): SEQ ID NO: 7078; WAN024DIN; Start 78; Stop 102
gttaatcaacaatggcatgtggaga

SEQ ID NO: 458193 - DNA, 25 bp, Artificial
  probe
  misc_feature (1)..(25): SEQ ID NO: 7078; WAN024DIN; Start 67; Stop 91
tctggtgttctgttaatcaacaatg

SEQ ID NO: 458194 - DNA, 25 bp, Artificial
  probe
  misc_feature (1)..(25): SEQ ID NO: 7078; WAN024DIN; Start 71; Stop 95
gtgttctgttaatcaacaatggcat

SEQ ID NO: 458195 - DNA, 25 bp, Artificial
  probe
  misc_feature (1)..(25): SEQ ID NO: 7078; WAN024DIN; Start 68; Stop 92
ctggtgttctgttaatcaacaatgg

SEQ ID NO: 458196 - DNA, 25 bp, Artificial
  probe
  misc_feature (1)..(25): SEQ ID NO: 7078; WAN024DIN; Start 74; Stop 98
ttctgttaatcaacaatggcatgtg

SEQ ID NO: 458197 - DNA, 25 bp, Artificial
  probe
  misc_feature (1)..(25): SEQ ID NO: 7078; WAN024DIN; Start 73; Stop 97
gttctgttaatcaacaatggcatgt

SEQ ID NO: 458198 - DNA, 25 bp, Artificial
  probe
  misc_feature (1)..(25): SEQ ID NO: 7078; WAN024DIN; Start 72; Stop 96
tgttctgttaatcaacaatggcatg

SEQ ID NO: 458199 - DNA, 25 bp, Artificial
  probe
  misc_feature (1)..(25): SEQ ID NO: 7078; WAN024DIN; Start 66; Stop 90
ttctggtgttctgttaatcaacaat

SEQ ID NO: 458200 - DNA, 25 bp, Artificial
  probe
  misc_feature (1)..(25): SEQ ID NO: 7078; WAN024DIN; Start 65; Stop 89
attctggtgttctgttaatcaacaa

SEQ ID NO: 458201 - DNA, 25 bp, Artificial
  probe
  misc_feature (1)..(25): SEQ ID NO: 7078; WAN024DIN; Start 64; Stop 88
aattctggtgttctgttaatcaaca

SEQ ID NO: 458202 - DNA, 25 bp, Artificial
  probe
  misc_feature (1)..(25): SEQ ID NO: 7078; WAN024DIN; Start 80; Stop 104
taatcaacaatggcatgtggagagc

SEQ ID NO: 458203 - DNA, 25 bp, Artificial
  probe
  misc_feature (1)..(25): SEQ ID NO: 7078; WAN024DIN; Start 77; Stop 101
tgttaatcaacaatggcatgtggag

SEQ ID NO: 458204 - DNA, 25 bp, Artificial
  probe
  misc_feature (1)..(25): SEQ ID NO: 7078; WAN024DIN; Start 76; Stop 100
ctgttaatcaacaatggcatgtgga

SEQ ID NO: 458205 - DNA, 25 bp, Artificial
  probe
  misc_feature (1)..(25): SEQ ID NO: 7078; WAN024DIN; Start 75; Stop 99
tctgttaatcaacaatggcatgtgg

SEQ ID NO: 458206 - DNA, 25 bp, Artificial
  probe
  misc_feature (1)..(25): SEQ ID NO: 7078; WAN024DIN; Start 70; Stop 94
ggtgttctgttaatcaacaatggca

SEQ ID NO: 458207 - DNA, 25 bp, Artificial
  probe
  misc_feature (1)..(25): SEQ ID NO: 7078; WAN024DIN; Start 69; Stop 93
tggtgttctgttaatcaacaatggc

SEQ ID NO: 458208 - DNA, 25 bp, Artificial
  probe
  misc_feature (1)..(25): SEQ ID NO: 7078; WAN024DIN; Start 87; Stop 111
caatggcatgtggagagcagaaaat

SEQ ID NO: 458209 - DNA, 25 bp, Artificial
  probe
  misc_feature (1)..(25): SEQ ID NO: 7078; WAN024DIN; Start 88; Stop 112
aatggcatgtggagagcagaaaatg

SEQ ID NO: 458210 - DNA, 25 bp, Artificial
  probe
  misc_feature (1)..(25): SEQ ID NO: 7079; WAN024CFO; Start 469; Stop 493
aatcgtcatagtccgctaattatca

SEQ ID NO: 458211 - DNA, 25 bp, Artificial
  probe
  misc_feature (1)..(25): SEQ ID NO: 7079; WAN024CFO; Start 470; Stop 494
atcgtcatagtccgctaattatcat

SEQ ID NO: 458212 - DNA, 25 bp, Artificial
  probe
  misc_feature (1)..(25): SEQ ID NO: 7079; WAN024CFO; Start 471; Stop 495
tcgtcatagtccgctaattatcatg

SEQ ID NO: 458213 - DNA, 25 bp, Artificial
  probe
  misc_feature (1)..(25): SEQ ID NO: 7079; WAN024CFO; Start 472; Stop 496
cgtcatagtccgctaattatcatgg

SEQ ID NO: 458214 - DNA, 25 bp, Artificial
  probe
  misc_feature (1)..(25): SEQ ID NO: 7079; WAN024CFO; Start 584; Stop 608
ttcaccgtcaagaagagatgctatc

SEQ ID NO: 458215 - DNA, 25 bp, Artificial
  probe
  misc_feature (1)..(25): SEQ ID NO: 7079; WAN024CFO; Start 536; Stop 560
aggaattagacaaggtacttagctt

SEQ ID NO: 458216 - DNA, 25 bp, Artificial
  probe
  misc_feature (1)..(25): SEQ ID NO: 7079; WAN024CFO; Start 535; Stop 559
aaggaattagacaaggtacttagct

SEQ ID NO: 458217 - DNA, 25 bp, Artificial
  probe
  misc_feature (1)..(25): SEQ ID NO: 7079; WAN024CFO; Start 473; Stop 497
gtcatagtccgctaattatcatgga

SEQ ID NO: 458218 - DNA, 25 bp, Artificial
  probe
  misc_feature (1)..(25): SEQ ID NO: 7079; WAN024CFO; Start 477; Stop 501
tagtccgctaattatcatggatgag

SEQ ID NO: 458219 - DNA, 25 bp, Artificial
  probe
  misc_feature (1)..(25): SEQ ID NO: 7079; WAN024CFO; Start 475; Stop 499
catagtccgctaattatcatggatg

SEQ ID NO: 458220 - DNA, 25 bp, Artificial
  probe
  misc_feature (1)..(25): SEQ ID NO: 7079; WAN024CFO; Start 590; Stop 614
gtcaagaagagatgctatcacgctt

SEQ ID NO: 458221 - DNA, 25 bp, Artificial
  probe
  misc_feature (1)..(25): SEQ ID NO: 7079; WAN024CFO; Start 476; Stop 500
atagtccgctaattatcatggatga

SEQ ID NO: 458222 - DNA, 25 bp, Artificial
  probe
  misc_feature (1)..(25): SEQ ID NO: 7079; WAN024CFO; Start 474; Stop 498
tcatagtccgctaattatcatggat

SEQ ID NO: 458223 - DNA, 25 bp, Artificial
  probe
  misc_feature (1)..(25): SEQ ID NO: 7079; WAN024CFO; Start 586; Stop 610
caccgtcaagaagagatgctatcac

SEQ ID NO: 458224 - DNA, 25 bp, Artificial
  probe
  misc_feature (1)..(25): SEQ ID NO: 7079; WAN024CFO; Start 321; Stop 345
ggagcacacctttatctcatcttat

SEQ ID NO: 458225 - DNA, 25 bp, Artificial
  probe
  misc_feature (1)..(25): SEQ ID NO: 7079; WAN024CFO; Start 322; Stop 346
gagcacacctttatctcatcttatg

SEQ ID NO: 458226 - DNA, 25 bp, Artificial
  probe
  misc_feature (1)..(25): SEQ ID NO: 7079; WAN024CFO; Start 585; Stop 609
tcaccgtcaagaagagatgctatca

SEQ ID NO: 458227 - DNA, 25 bp, Artificial
  probe
  misc_feature (1)..(25): SEQ ID NO: 7079; WAN024CFO; Start 468; Stop 492
aaatcgtcatagtccgctaattatc

SEQ ID NO: 458228 - DNA, 25 bp, Artificial
  probe
  misc_feature (1)..(25): SEQ ID NO: 7079; WAN024CFO; Start 269; Stop 293
atcatctccctgttcatcaactctg

SEQ ID NO: 458229 - DNA, 25 bp, Artificial
  probe
  misc_feature (1)..(25): SEQ ID NO: 7079; WAN024CFO; Start 534; Stop 558
aaaggaattagacaaggtacttagc

SEQ ID NO: 458230 - DNA, 25 bp, Artificial
  probe
  misc_feature (1)..(25): SEQ ID NO: 7079; WAN024CFO; Start 320; Stop 344
aggagcacacctttatctcatctta

SEQ ID NO: 458231 - DNA, 25 bp, Artificial
  probe
  misc_feature (1)..(25): SEQ ID NO: 7079; WAN024CFO; Start 591; Stop 615
tcaagaagagatgctatcacgcttt

SEQ ID NO: 458232 - DNA, 25 bp, Artificial
  probe
  misc_feature (1)..(25): SEQ ID NO: 7079; WAN024CFO; Start 268; Stop 292
gatcatctccctgttcatcaactct

SEQ ID NO: 458233 - DNA, 25 bp, Artificial
  probe
  misc_feature (1)..(25): SEQ ID NO: 7079; WAN024CFO; Start 592; Stop 616
caagaagagatgctatcacgctttg

SEQ ID NO: 458234 - DNA, 25 bp, Artificial
  probe
  misc_feature (1)..(25): SEQ ID NO: 7079; WAN024CFO; Start 593; Stop 617
aagaagagatgctatcacgctttga

SEQ ID NO: 458235 - DNA, 25 bp, Artificial
  probe
  misc_feature (1)..(25): SEQ ID NO: 7079; WAN024CFO; Start 578; Stop 602
ttacacttcaccgtcaagaagagat

SEQ ID NO: 458236 - DNA, 25 bp, Artificial
  probe
  misc_feature (1)..(25): SEQ ID NO: 7079; WAN024CFO; Start 319; Stop 343
caggagcacacctttatctcatctt

SEQ ID NO: 458237 - DNA, 25 bp, Artificial
  probe
  misc_feature (1)..(25): SEQ ID NO: 7079; WAN024CFO; Start 478; Stop 502
agtccgctaattatcatggatgagc

SEQ ID NO: 458238 - DNA, 25 bp, Artificial
  probe
  misc_feature (1)..(25): SEQ ID NO: 7079; WAN024CFO; Start 577; Stop 601
cttacacttcaccgtcaagaagaga

SEQ ID NO: 458239 - DNA, 25 bp, Artificial
  probe
  misc_feature (1)..(25): SEQ ID NO: 7079; WAN024CFO; Start 393; Stop 417
tgaaaagtttgaaaagataccaccc

SEQ ID NO: 458240 - DNA, 25 bp, Artificial
  probe
  misc_feature (1)..(25): SEQ ID NO: 7079; WAN024CFO; Start 394; Stop 418
gaaaagtttgaaaagataccacccc

SEQ ID NO: 458241 - DNA, 25 bp, Artificial
  probe
  misc_feature (1)..(25): SEQ ID NO: 7079; WAN024CFO; Start 317; Stop 341
aacaggagcacacctttatctcatc

SEQ ID NO: 458242 - DNA, 25 bp, Artificial
  probe
  misc_feature (1)..(25): SEQ ID NO: 7079; WAN024CFO; Start 579; Stop 603
tacacttcaccgtcaagaagagatg

SEQ ID NO: 458243 - DNA, 25 bp, Artificial
  probe
  misc_feature (1)..(25): SEQ ID NO: 7080; WAN024BVR; Start 56; Stop 80
tagatataagtaacacacaggctgc

SEQ ID NO: 458244 - DNA, 25 bp, Artificial
  probe
  misc_feature (1)..(25): SEQ ID NO: 7080; WAN024BVR; Start 54; Stop 78
gctagatataagtaacacacaggct

SEQ ID NO: 458245 - DNA, 25 bp, Artificial
  probe
  misc_feature (1)..(25): SEQ ID NO: 7080; WAN024BVR; Start 57; Stop 81
agatataagtaacacacaggctgct

SEQ ID NO: 458246 - DNA, 25 bp, Artificial
  probe
  misc_feature (1)..(25): SEQ ID NO: 7080; WAN024BVR; Start 55; Stop 79
ctagatataagtaacacacaggctg

SEQ ID NO: 458247 - DNA, 25 bp, Artificial
  probe
  misc_feature (1)..(25): SEQ ID NO: 7080; WAN024BVR; Start 53; Stop 77
agctagatataagtaacacacaggc

SEQ ID NO: 458248 - DNA, 25 bp, Artificial
  probe
  misc_feature (1)..(25): SEQ ID NO: 7080; WAN024BVR; Start 58; Stop 82
gatataagtaacacacaggctgctg

SEQ ID NO: 458249 - DNA, 25 bp, Artificial
  probe
  misc_feature (1)..(25): SEQ ID NO: 7080; WAN024BVR; Start 38; Stop 62
ggcatgacatgaatgagctagatat

SEQ ID NO: 458250 - DNA, 25 bp, Artificial
  probe
  misc_feature (1)..(25): SEQ ID NO: 7080; WAN024BVR; Start 17; Stop 41
tattaagaattatcaagcgagggca

SEQ ID NO: 458251 - DNA, 25 bp, Artificial
  probe
  misc_feature (1)..(25): SEQ ID NO: 7080; WAN024BVR; Start 52; Stop 76
gagctagatataagtaacacacagg

SEQ ID NO: 458252 - DNA, 25 bp, Artificial
  probe
  misc_feature (1)..(25): SEQ ID NO: 7080; WAN024BVR; Start 18; Stop 42
attaagaattatcaagcgagggcat

SEQ ID NO: 458253 - DNA, 25 bp, Artificial
  probe
  misc_feature (1)..(25): SEQ ID NO: 7080; WAN024BVR; Start 39; Stop 63
gcatgacatgaatgagctagatata

SEQ ID NO: 458254 - DNA, 25 bp, Artificial
  probe
  misc_feature (1)..(25): SEQ ID NO: 7080; WAN024BVR; Start 16; Stop 40
atattaagaattatcaagcgagggc

SEQ ID NO: 458255 - DNA, 25 bp, Artificial
  probe
  misc_feature (1)..(25): SEQ ID NO: 7080; WAN024BVR; Start 163; Stop 187
aaccaacagacgatagaaacaccta

SEQ ID NO: 458256 - DNA, 25 bp, Artificial
  probe
  misc_feature (1)..(25): SEQ ID NO: 7080; WAN024BVR; Start 51; Stop 75
tgagctagatataagtaacacacag

SEQ ID NO: 458257 - DNA, 25 bp, Artificial
  probe
  misc_feature (1)..(25): SEQ ID NO: 7080; WAN024BVR; Start 162; Stop 186
aaaccaacagacgatagaaacacct

SEQ ID NO: 458258 - DNA, 25 bp, Artificial
  probe
  misc_feature (1)..(25): SEQ ID NO: 7080; WAN024BVR; Start 174; Stop 198
gatagaaacacctagcgaggattta

SEQ ID NO: 458259 - DNA, 25 bp, Artificial
  probe
  misc_feature (1)..(25): SEQ ID NO: 7080; WAN024BVR; Start 164; Stop 188
accaacagacgatagaaacacctag

SEQ ID NO: 458260 - DNA, 25 bp, Artificial
  probe
  misc_feature (1)..(25): SEQ ID NO: 7080; WAN024BVR; Start 19; Stop 43
ttaagaattatcaagcgagggcatg

SEQ ID NO: 458261 - DNA, 25 bp, Artificial
  probe
  misc_feature (1)..(25): SEQ ID NO: 7080; WAN024BVR; Start 175; Stop 199
atagaaacacctagcgaggatttaa

SEQ ID NO: 458262 - DNA, 25 bp, Artificial
  probe
  misc_feature (1)..(25): SEQ ID NO: 7080; WAN024BVR; Start 107; Stop 131
tactgctttatttaaaccaccgaga

SEQ ID NO: 458263 - DNA, 25 bp, Artificial
  probe
  misc_feature (1)..(25): SEQ ID NO: 7080; WAN024BVR; Start 106; Stop 130
ttactgctttatttaaaccaccgag

SEQ ID NO: 458264 - DNA, 25 bp, Artificial
  probe
  misc_feature (1)..(25): SEQ ID NO: 7080; WAN024BVR; Start 105; Stop 129
cttactgctttatttaaaccaccga

SEQ ID NO: 458265 - DNA, 25 bp, Artificial
  probe
  misc_feature (1)..(25): SEQ ID NO: 7080; WAN024BVR; Start 103; Stop 127
ggcttactgctttatttaaaccacc

SEQ ID NO: 458266 - DNA, 25 bp, Artificial
  probe
  misc_feature (1)..(25): SEQ ID NO: 7080; WAN024BVR; Start 96; Stop 120
tttgattggcttactgctttattta

SEQ ID NO: 458267 - DNA, 25 bp, Artificial
  probe
  misc_feature (1)..(25): SEQ ID NO: 7080; WAN024BVR; Start 50; Stop 74
atgagctagatataagtaacacaca

SEQ ID NO: 458268 - DNA, 25 bp, Artificial
  probe
  misc_feature (1)..(25): SEQ ID NO: 7080; WAN024BVR; Start 42; Stop 66
tgacatgaatgagctagatataagt

SEQ ID NO: 458269 - DNA, 25 bp, Artificial
  probe
  misc_feature (1)..(25): SEQ ID NO: 7080; WAN024BVR; Start 97; Stop 121
ttgattggcttactgctttatttaa

SEQ ID NO: 458270 - DNA, 25 bp, Artificial
  probe
  misc_feature (1)..(25): SEQ ID NO: 7080; WAN024BVR; Start 104; Stop 128
gcttactgctttatttaaaccaccg

SEQ ID NO: 458271 - DNA, 25 bp, Artificial
  probe
  misc_feature (1)..(25): SEQ ID NO: 7080; WAN024BVR; Start 108; Stop 132
actgctttatttaaaccaccgagac

SEQ ID NO: 458272 - DNA, 25 bp, Artificial
  probe
  misc_feature (1)..(25): SEQ ID NO: 7080; WAN024BVR; Start 100; Stop 124
attggcttactgctttatttaaacc

SEQ ID NO: 458273 - DNA, 25 bp, Artificial
  probe
  misc_feature (1)..(25): SEQ ID NO: 7080; WAN024BVR; Start 20; Stop 44
taagaattatcaagcgagggcatga

SEQ ID NO: 458274 - DNA, 25 bp, Artificial
  probe
  misc_feature (1)..(25): SEQ ID NO: 7080; WAN024BVR; Start 185; Stop 209
ctagcgaggatttaaaccctgaata

SEQ ID NO: 458275 - DNA, 25 bp, Artificial
  probe
  misc_feature (1)..(25): SEQ ID NO: 7080; WAN024BVR; Start 176; Stop 200
tagaaacacctagcgaggatttaaa

SEQ ID NO: 458276 - DNA, 25 bp, Artificial
  probe
  misc_feature (1)..(25): SEQ ID NO: 7081; WAN024GI2; Start 471; Stop 495
gcaagatattcaggaagatattcgt

SEQ ID NO: 458277 - DNA, 25 bp, Artificial
  probe
  misc_feature (1)..(25): SEQ ID NO: 7081; WAN024GI2; Start 462; Stop 486
ggaagatgagcaagatattcaggaa

SEQ ID NO: 458278 - DNA, 25 bp, Artificial
  probe
  misc_feature (1)..(25): SEQ ID NO: 7081; WAN024GI2; Start 464; Stop 488
aagatgagcaagatattcaggaaga

SEQ ID NO: 458279 - DNA, 25 bp, Artificial
  probe
  misc_feature (1)..(25): SEQ ID NO: 7081; WAN024GI2; Start 465; Stop 489
agatgagcaagatattcaggaagat

SEQ ID NO: 458280 - DNA, 25 bp, Artificial
  probe
  misc_feature (1)..(25): SEQ ID NO: 7081; WAN024GI2; Start 463; Stop 487
gaagatgagcaagatattcaggaag

SEQ ID NO: 458281 - DNA, 25 bp, Artificial
  probe
  misc_feature (1)..(25): SEQ ID NO: 7081; WAN024GI2; Start 470; Stop 494
agcaagatattcaggaagatattcg

SEQ ID NO: 458282 - DNA, 25 bp, Artificial
  probe
  misc_feature (1)..(25): SEQ ID NO: 7081; WAN024GI2; Start 460; Stop 484
gaggaagatgagcaagatattcagg

SEQ ID NO: 458283 - DNA, 25 bp, Artificial
  probe
  misc_feature (1)..(25): SEQ ID NO: 7081; WAN024GI2; Start 459; Stop 483
ggaggaagatgagcaagatattcag

SEQ ID NO: 458284 - DNA, 25 bp, Artificial
  probe
  misc_feature (1)..(25): SEQ ID NO: 7081; WAN024GI2; Start 461; Stop 485
aggaagatgagcaagatattcagga

SEQ ID NO: 458285 - DNA, 25 bp, Artificial
  probe
  misc_feature (1)..(25): SEQ ID NO: 7081; WAN024GI2; Start 456; Stop 480
ttcggaggaagatgagcaagatatt

SEQ ID NO: 458286 - DNA, 25 bp, Artificial
  probe
  misc_feature (1)..(25): SEQ ID NO: 7081; WAN024GI2; Start 430; Stop 454
gttgctggacatcgtaatggttatt

SEQ ID NO: 458287 - DNA, 25 bp, Artificial
  probe
  misc_feature (1)..(25): SEQ ID NO: 7081; WAN024GI2; Start 457; Stop 481
tcggaggaagatgagcaagatattc

SEQ ID NO: 458288 - DNA, 25 bp, Artificial
  probe
  misc_feature (1)..(25): SEQ ID NO: 7081; WAN024GI2; Start 429; Stop 453
agttgctggacatcgtaatggttat

SEQ ID NO: 458289 - DNA, 25 bp, Artificial
  probe
  misc_feature (1)..(25): SEQ ID NO: 7081; WAN024GI2; Start 466; Stop 490
gatgagcaagatattcaggaagata

SEQ ID NO: 458290 - DNA, 25 bp, Artificial
  probe
  misc_feature (1)..(25): SEQ ID NO: 7081; WAN024GI2; Start 458; Stop 482
cggaggaagatgagcaagatattca

SEQ ID NO: 458291 - DNA, 25 bp, Artificial
  probe
  misc_feature (1)..(25): SEQ ID NO: 7081; WAN024GI2; Start 472; Stop 496
caagatattcaggaagatattcgtg

SEQ ID NO: 458292 - DNA, 25 bp, Artificial
  probe
  misc_feature (1)..(25): SEQ ID NO: 7081; WAN024GI2; Start 509; Stop 533
actttgtatttgttggaatcacctc

SEQ ID NO: 458293 - DNA, 25 bp, Artificial
  probe
  misc_feature (1)..(25): SEQ ID NO: 7081; WAN024GI2; Start 508; Stop 532
gactttgtatttgttggaatcacct

SEQ ID NO: 458294 - DNA, 25 bp, Artificial
  probe
  misc_feature (1)..(25): SEQ ID NO: 7081; WAN024GI2; Start 504; Stop 528
ccctgactttgtatttgttggaatc

SEQ ID NO: 458295 - DNA, 25 bp, Artificial
  probe
  misc_feature (1)..(25): SEQ ID NO: 7081; WAN024GI2; Start 468; Stop 492
tgagcaagatattcaggaagatatt

SEQ ID NO: 458296 - DNA, 25 bp, Artificial
  probe
  misc_feature (1)..(25): SEQ ID NO: 7081; WAN024GI2; Start 511; Stop 535
tttgtatttgttggaatcacctctc

SEQ ID NO: 458297 - DNA, 25 bp, Artificial
  probe
  misc_feature (1)..(25): SEQ ID NO: 7081; WAN024GI2; Start 510; Stop 534
ctttgtatttgttggaatcacctct

SEQ ID NO: 458298 - DNA, 25 bp, Artificial
  probe
  misc_feature (1)..(25): SEQ ID NO: 7081; WAN024GI2; Start 79; Stop 103
cccttaacaatggatgaaacagtag

SEQ ID NO: 458299 - DNA, 25 bp, Artificial
  probe
  misc_feature (1)..(25): SEQ ID NO: 7081; WAN024GI2; Start 503; Stop 527
accctgactttgtatttgttggaat

SEQ ID NO: 458300 - DNA, 25 bp, Artificial
  probe
  misc_feature (1)..(25): SEQ ID NO: 7081; WAN024GI2; Start 242; Stop 266
catcagtagttctagcctctcgatt

SEQ ID NO: 458301 - DNA, 25 bp, Artificial
  probe
  misc_feature (1)..(25): SEQ ID NO: 7081; WAN024GI2; Start 83; Stop 107
taacaatggatgaaacagtagaggc

SEQ ID NO: 458302 - DNA, 25 bp, Artificial
  probe
  misc_feature (1)..(25): SEQ ID NO: 7081; WAN024GI2; Start 469; Stop 493
gagcaagatattcaggaagatattc

SEQ ID NO: 458303 - DNA, 25 bp, Artificial
  probe
  misc_feature (1)..(25): SEQ ID NO: 7081; WAN024GI2; Start 428; Stop 452
gagttgctggacatcgtaatggtta

SEQ ID NO: 458304 - DNA, 25 bp, Artificial
  probe
  misc_feature (1)..(25): SEQ ID NO: 7081; WAN024GI2; Start 348; Stop 372
ttctgtgtatttctttggtgctaaa

SEQ ID NO: 458305 - DNA, 25 bp, Artificial
  probe
  misc_feature (1)..(25): SEQ ID NO: 7081; WAN024GI2; Start 473; Stop 497
aagatattcaggaagatattcgtga

SEQ ID NO: 458306 - DNA, 25 bp, Artificial
  probe
  misc_feature (1)..(25): SEQ ID NO: 7081; WAN024GI2; Start 467; Stop 491
atgagcaagatattcaggaagatat

SEQ ID NO: 458307 - DNA, 25 bp, Artificial
  probe
  misc_feature (1)..(25): SEQ ID NO: 7081; WAN024GI2; Start 347; Stop 371
attctgtgtatttctttggtgctaa

SEQ ID NO: 458308 - DNA, 25 bp, Artificial
  probe
  misc_feature (1)..(25): SEQ ID NO: 7081; WAN024GI2; Start 345; Stop 369
ttattctgtgtatttctttggtgct

SEQ ID NO: 458309 - DNA, 25 bp, Artificial
  probe
  misc_feature (1)..(25): SEQ ID NO: 7082; WAN024DVD; Start 12; Stop 36
ggtagtaagaatcggtgaagtaagt

SEQ ID NO: 458310 - DNA, 25 bp, Artificial
  probe
  misc_feature (1)..(25): SEQ ID NO: 7082; WAN024DVD; Start 11; Stop 35
cggtagtaagaatcggtgaagtaag

SEQ ID NO: 458311 - DNA, 25 bp, Artificial
  probe
  misc_feature (1)..(25): SEQ ID NO: 7082; WAN024DVD; Start 15; Stop 39
agtaagaatcggtgaagtaagttcc

SEQ ID NO: 458312 - DNA, 25 bp, Artificial
  probe
  misc_feature (1)..(25): SEQ ID NO: 7082; WAN024DVD; Start 10; Stop 34
tcggtagtaagaatcggtgaagtaa

SEQ ID NO: 458313 - DNA, 25 bp, Artificial
  probe
  misc_feature (1)..(25): SEQ ID NO: 7082; WAN024DVD; Start 16; Stop 40
gtaagaatcggtgaagtaagttcca

SEQ ID NO: 458314 - DNA, 25 bp, Artificial
  probe
  misc_feature (1)..(25): SEQ ID NO: 7082; WAN024DVD; Start 9; Stop 33
ttcggtagtaagaatcggtgaagta

SEQ ID NO: 458315 - DNA, 25 bp, Artificial
  probe
  misc_feature (1)..(25): SEQ ID NO: 7082; WAN024DVD; Start 13; Stop 37
gtagtaagaatcggtgaagtaagtt

SEQ ID NO: 458316 - DNA, 25 bp, Artificial
  probe
  misc_feature (1)..(25): SEQ ID NO: 7082; WAN024DVD; Start 14; Stop 38
tagtaagaatcggtgaagtaagttc

SEQ ID NO: 458317 - DNA, 25 bp, Artificial
  probe
  misc_feature (1)..(25): SEQ ID NO: 7082; WAN024DVD; Start 17; Stop 41
taagaatcggtgaagtaagttccac

SEQ ID NO: 458318 - DNA, 25 bp, Artificial
  probe
  misc_feature (1)..(25): SEQ ID NO: 7082; WAN024DVD; Start 90; Stop 114
cttaggtactgagacaatcgcactt

SEQ ID NO: 458319 - DNA, 25 bp, Artificial
  probe
  misc_feature (1)..(25): SEQ ID NO: 7082; WAN024DVD; Start 18; Stop 42
aagaatcggtgaagtaagttccact

SEQ ID NO: 458320 - DNA, 25 bp, Artificial
  probe
  misc_feature (1)..(25): SEQ ID NO: 7082; WAN024DVD; Start 8; Stop 32
attcggtagtaagaatcggtgaagt

SEQ ID NO: 458321 - DNA, 25 bp, Artificial
  probe
  misc_feature (1)..(25): SEQ ID NO: 7082; WAN024DVD; Start 19; Stop 43
agaatcggtgaagtaagttccactc

SEQ ID NO: 458322 - DNA, 25 bp, Artificial
  probe
  misc_feature (1)..(25): SEQ ID NO: 7082; WAN024DVD; Start 91; Stop 115
ttaggtactgagacaatcgcacttg

SEQ ID NO: 458323 - DNA, 25 bp, Artificial
  probe
  misc_feature (1)..(25): SEQ ID NO: 7082; WAN024DVD; Start 47; Stop 71
ccaaagaccaagtacctgatgaaat

SEQ ID NO: 458324 - DNA, 25 bp, Artificial
  probe
  misc_feature (1)..(25): SEQ ID NO: 7082; WAN024DVD; Start 48; Stop 72
caaagaccaagtacctgatgaaata

SEQ ID NO: 458325 - DNA, 25 bp, Artificial
  probe
  misc_feature (1)..(25): SEQ ID NO: 7082; WAN024DVD; Start 89; Stop 113
tcttaggtactgagacaatcgcact

SEQ ID NO: 458326 - DNA, 25 bp, Artificial
  probe
  misc_feature (1)..(25): SEQ ID NO: 7082; WAN024DVD; Start 26; Stop 50
gtgaagtaagttccactccaaccaa

SEQ ID NO: 458327 - DNA, 25 bp, Artificial
  probe
  misc_feature (1)..(25): SEQ ID NO: 7082; WAN024DVD; Start 28; Stop 52
gaagtaagttccactccaaccaaag

SEQ ID NO: 458328 - DNA, 25 bp, Artificial
  probe
  misc_feature (1)..(25): SEQ ID NO: 7082; WAN024DVD; Start 50; Stop 74
aagaccaagtacctgatgaaataaa

SEQ ID NO: 458329 - DNA, 25 bp, Artificial
  probe
  misc_feature (1)..(25): SEQ ID NO: 7082; WAN024DVD; Start 49; Stop 73
aaagaccaagtacctgatgaaataa

SEQ ID NO: 458330 - DNA, 25 bp, Artificial
  probe
  misc_feature (1)..(25): SEQ ID NO: 7082; WAN024DVD; Start 29; Stop 53
aagtaagttccactccaaccaaaga

SEQ ID NO: 458331 - DNA, 25 bp, Artificial
  probe
  misc_feature (1)..(25): SEQ ID NO: 7082; WAN024DVD; Start 46; Stop 70
accaaagaccaagtacctgatgaaa

SEQ ID NO: 458332 - DNA, 25 bp, Artificial
  probe
  misc_feature (1)..(25): SEQ ID NO: 7082; WAN024DVD; Start 45; Stop 69
aaccaaagaccaagtacctgatgaa

SEQ ID NO: 458333 - DNA, 25 bp, Artificial
  probe
  misc_feature (1)..(25): SEQ ID NO: 7082; WAN024DVD; Start 20; Stop 44
gaatcggtgaagtaagttccactcc

SEQ ID NO: 458334 - DNA, 25 bp, Artificial
  probe
  misc_feature (1)..(25): SEQ ID NO: 7082; WAN024DVD; Start 51; Stop 75
agaccaagtacctgatgaaataaat

SEQ ID NO: 458335 - DNA, 25 bp, Artificial
  probe
  misc_feature (1)..(25): SEQ ID NO: 7082; WAN024DVD; Start 27; Stop 51
tgaagtaagttccactccaaccaaa

SEQ ID NO: 458336 - DNA, 25 bp, Artificial
  probe
  misc_feature (1)..(25): SEQ ID NO: 7082; WAN024DVD; Start 30; Stop 54
agtaagttccactccaaccaaagac

SEQ ID NO: 458337 - DNA, 25 bp, Artificial
  probe
  misc_feature (1)..(25): SEQ ID NO: 7082; WAN024DVD; Start 44; Stop 68
caaccaaagaccaagtacctgatga

SEQ ID NO: 458338 - DNA, 25 bp, Artificial
  probe
  misc_feature (1)..(25): SEQ ID NO: 7082; WAN024DVD; Start 22; Stop 46
atcggtgaagtaagttccactccaa

SEQ ID NO: 458339 - DNA, 25 bp, Artificial
  probe
  misc_feature (1)..(25): SEQ ID NO: 7082; WAN024DVD; Start 21; Stop 45
aatcggtgaagtaagttccactcca

SEQ ID NO: 458340 - DNA, 25 bp, Artificial
  probe
  misc_feature (1)..(25): SEQ ID NO: 7082; WAN024DVD; Start 98; Stop 122
ctgagacaatcgcacttgctgtatc

SEQ ID NO: 458341 - DNA, 25 bp, Artificial
  probe
  misc_feature (1)..(25): SEQ ID NO: 7082; WAN024DVD; Start 96; Stop 120
tactgagacaatcgcacttgctgta

SEQ ID NO: 458342 - DNA, 25 bp, Artificial
  probe
  misc_feature (1)..(25): SEQ ID NO: 7083; WAN024BK3; Start 40; Stop 64
ctggcttctaccctctctttcattt

SEQ ID NO: 458343 - DNA, 25 bp, Artificial
  probe
  misc_feature (1)..(25): SEQ ID NO: 7083; WAN024BK3; Start 39; Stop 63
tctggcttctaccctctctttcatt

SEQ ID NO: 458344 - DNA, 25 bp, Artificial
  probe
  misc_feature (1)..(25): SEQ ID NO: 7083; WAN024BK3; Start 38; Stop 62
ttctggcttctaccctctctttcat

SEQ ID NO: 458345 - DNA, 25 bp, Artificial
  probe
  misc_feature (1)..(25): SEQ ID NO: 7083; WAN024BK3; Start 1; Stop 25
ctgaagtccgagaactctagtcacc

SEQ ID NO: 458346 - DNA, 25 bp, Artificial
  probe
  misc_feature (1)..(25): SEQ ID NO: 7083; WAN024BK3; Start 42; Stop 66
ggcttctaccctctctttcatttta

SEQ ID NO: 458347 - DNA, 25 bp, Artificial
  probe
  misc_feature (1)..(25): SEQ ID NO: 7083; WAN024BK3; Start 43; Stop 67
gcttctaccctctctttcattttat

SEQ ID NO: 458348 - DNA, 25 bp, Artificial
  probe
  misc_feature (1)..(25): SEQ ID NO: 7083; WAN024BK3; Start 37; Stop 61
gttctggcttctaccctctctttca

SEQ ID NO: 458349 - DNA, 25 bp, Artificial
  probe
  misc_feature (1)..(25): SEQ ID NO: 7083; WAN024BK3; Start 41; Stop 65
tggcttctaccctctctttcatttt

SEQ ID NO: 458350 - DNA, 25 bp, Artificial
  probe
  misc_feature (1)..(25): SEQ ID NO: 7083; WAN024BK3; Start 56; Stop 80
ctttcattttatatcaaatcgtcgc

SEQ ID NO: 458351 - DNA, 25 bp, Artificial
  probe
  misc_feature (1)..(25): SEQ ID NO: 7083; WAN024BK3; Start 36; Stop 60
ggttctggcttctaccctctctttc

SEQ ID NO: 458352 - DNA, 25 bp, Artificial
  probe
  misc_feature (1)..(25): SEQ ID NO: 7083; WAN024BK3; Start 63; Stop 87
tttatatcaaatcgtcgcgcttgtc

SEQ ID NO: 458353 - DNA, 25 bp, Artificial
  probe
  misc_feature (1)..(25): SEQ ID NO: 7083; WAN024BK3; Start 49; Stop 73
accctctctttcattttatatcaaa

SEQ ID NO: 458354 - DNA, 25 bp, Artificial
  probe
  misc_feature (1)..(25): SEQ ID NO: 7083; WAN024BK3; Start 47; Stop 71
ctaccctctctttcattttatatca

SEQ ID NO: 458355 - DNA, 25 bp, Artificial
  probe
  misc_feature (1)..(25): SEQ ID NO: 7083; WAN024BK3; Start 34; Stop 58
atggttctggcttctaccctctctt

SEQ ID NO: 458356 - DNA, 25 bp, Artificial
  probe
  misc_feature (1)..(25): SEQ ID NO: 7083; WAN024BK3; Start 44; Stop 68
cttctaccctctctttcattttata

SEQ ID NO: 458357 - DNA, 25 bp, Artificial
  probe
  misc_feature (1)..(25): SEQ ID NO: 7083; WAN024BK3; Start 55; Stop 79
tctttcattttatatcaaatcgtcg

SEQ ID NO: 458358 - DNA, 25 bp, Artificial
  probe
  misc_feature (1)..(25): SEQ ID NO: 7083; WAN024BK3; Start 65; Stop 89
tatatcaaatcgtcgcgcttgtcaa

SEQ ID NO: 458359 - DNA, 25 bp, Artificial
  probe
  misc_feature (1)..(25): SEQ ID NO: 7083; WAN024BK3; Start 64; Stop 88
ttatatcaaatcgtcgcgcttgtca

SEQ ID NO: 458360 - DNA, 25 bp, Artificial
  probe
  misc_feature (1)..(25): SEQ ID NO: 7083; WAN024BK3; Start 35; Stop 59
tggttctggcttctaccctctcttt

SEQ ID NO: 458361 - DNA, 25 bp, Artificial
  probe
  misc_feature (1)..(25): SEQ ID NO: 7083; WAN024BK3; Start 46; Stop 70
tctaccctctctttcattttatatc

SEQ ID NO: 458362 - DNA, 25 bp, Artificial
  probe
  misc_feature (1)..(25): SEQ ID NO: 7083; WAN024BK3; Start 33; Stop 57
gatggttctggcttctaccctctct

SEQ ID NO: 458363 - DNA, 25 bp, Artificial
  probe
  misc_feature (1)..(25): SEQ ID NO: 7083; WAN024BK3; Start 48; Stop 72
taccctctctttcattttatatcaa

SEQ ID NO: 458364 - DNA, 25 bp, Artificial
  probe
  misc_feature (1)..(25): SEQ ID NO: 7083; WAN024BK3; Start 61; Stop 85
attttatatcaaatcgtcgcgcttg

SEQ ID NO: 458365 - DNA, 25 bp, Artificial
  probe
  misc_feature (1)..(25): SEQ ID NO: 7083; WAN024BK3; Start 60; Stop 84
cattttatatcaaatcgtcgcgctt

SEQ ID NO: 458366 - DNA, 25 bp, Artificial
  probe
  misc_feature (1)..(25): SEQ ID NO: 7083; WAN024BK3; Start 58; Stop 82
ttcattttatatcaaatcgtcgcgc

SEQ ID NO: 458367 - DNA, 25 bp, Artificial
  probe
  misc_feature (1)..(25): SEQ ID NO: 7083; WAN024BK3; Start 57; Stop 81
tttcattttatatcaaatcgtcgcg

SEQ ID NO: 458368 - DNA, 25 bp, Artificial
  probe
  misc_feature (1)..(25): SEQ ID NO: 7083; WAN024BK3; Start 62; Stop 86
ttttatatcaaatcgtcgcgcttgt

SEQ ID NO: 458369 - DNA, 25 bp, Artificial
  probe
  misc_feature (1)..(25): SEQ ID NO: 7083; WAN024BK3; Start 59; Stop 83
tcattttatatcaaatcgtcgcgct

SEQ ID NO: 458370 - DNA, 25 bp, Artificial
  probe
  misc_feature (1)..(25): SEQ ID NO: 7083; WAN024BK3; Start 66; Stop 90
atatcaaatcgtcgcgcttgtcaaa

SEQ ID NO: 458371 - DNA, 25 bp, Artificial
  probe
  misc_feature (1)..(25): SEQ ID NO: 7083; WAN024BK3; Start 45; Stop 69
ttctaccctctctttcattttatat

SEQ ID NO: 458372 - DNA, 25 bp, Artificial
  probe
  misc_feature (1)..(25): SEQ ID NO: 7083; WAN024BK3; Start 50; Stop 74
ccctctctttcattttatatcaaat

SEQ ID NO: 458373 - DNA, 25 bp, Artificial
  probe
  misc_feature (1)..(25): SEQ ID NO: 7083; WAN024BK3; Start 81; Stop 105
gcttgtcaaaactttccttggcaag

SEQ ID NO: 458374 - DNA, 25 bp, Artificial
  probe
  misc_feature (1)..(25): SEQ ID NO: 7083; WAN024BK3; Start 67; Stop 91
tatcaaatcgtcgcgcttgtcaaaa

SEQ ID NO: 458375 - DNA, 25 bp, Artificial
  probe
  misc_feature (1)..(25): SEQ ID NO: 7084; WAN024DST; Start 75; Stop 99
aatagagtatgatgacgctgacaat

SEQ ID NO: 458376 - DNA, 25 bp, Artificial
  probe
  misc_feature (1)..(25): SEQ ID NO: 7084; WAN024DST; Start 74; Stop 98
gaatagagtatgatgacgctgacaa

SEQ ID NO: 458377 - DNA, 25 bp, Artificial
  probe
  misc_feature (1)..(25): SEQ ID NO: 7084; WAN024DST; Start 76; Stop 100
atagagtatgatgacgctgacaatg

SEQ ID NO: 458378 - DNA, 25 bp, Artificial
  probe
  misc_feature (1)..(25): SEQ ID NO: 7084; WAN024DST; Start 220; Stop 244
gatggagaggatggctatgtaacta

SEQ ID NO: 458379 - DNA, 25 bp, Artificial
  probe
  misc_feature (1)..(25): SEQ ID NO: 7084; WAN024DST; Start 632; Stop 656
gtcaagaagtagaagaagtaggaga

SEQ ID NO: 458380 - DNA, 25 bp, Artificial
  probe
  misc_feature (1)..(25): SEQ ID NO: 7084; WAN024DST; Start 631; Stop 655
agtcaagaagtagaagaagtaggag

SEQ ID NO: 458381 - DNA, 25 bp, Artificial
  probe
  misc_feature (1)..(25): SEQ ID NO: 7084; WAN024DST; Start 217; Stop 241
attgatggagaggatggctatgtaa

SEQ ID NO: 458382 - DNA, 25 bp, Artificial
  probe
  misc_feature (1)..(25): SEQ ID NO: 7084; WAN024DST; Start 221; Stop 245
atggagaggatggctatgtaactac

SEQ ID NO: 458383 - DNA, 25 bp, Artificial
  probe
  misc_feature (1)..(25): SEQ ID NO: 7084; WAN024DST; Start 216; Stop 240
aattgatggagaggatggctatgta

SEQ ID NO: 458384 - DNA, 25 bp, Artificial
  probe
  misc_feature (1)..(25): SEQ ID NO: 7084; WAN024DST; Start 630; Stop 654
aagtcaagaagtagaagaagtagga

SEQ ID NO: 458385 - DNA, 25 bp, Artificial
  probe
  misc_feature (1)..(25): SEQ ID NO: 7084; WAN024DST; Start 252; Stop 276
gacctacgatgttaatccagagact

SEQ ID NO: 458386 - DNA, 25 bp, Artificial
  probe
  misc_feature (1)..(25): SEQ ID NO: 7084; WAN024DST; Start 487; Stop 511
aagagtggacaagtaactgagagta

SEQ ID NO: 458387 - DNA, 25 bp, Artificial
  probe
  misc_feature (1)..(25): SEQ ID NO: 7084; WAN024DST; Start 633; Stop 657
tcaagaagtagaagaagtaggagaa

SEQ ID NO: 458388 - DNA, 25 bp, Artificial
  probe
  misc_feature (1)..(25): SEQ ID NO: 7084; WAN024DST; Start 218; Stop 242
ttgatggagaggatggctatgtaac

SEQ ID NO: 458389 - DNA, 25 bp, Artificial
  probe
  misc_feature (1)..(25): SEQ ID NO: 7084; WAN024DST; Start 234; Stop 258
ctatgtaactacgacaaggacctac

SEQ ID NO: 458390 - DNA, 25 bp, Artificial
  probe
  misc_feature (1)..(25): SEQ ID NO: 7084; WAN024DST; Start 73; Stop 97
ggaatagagtatgatgacgctgaca

SEQ ID NO: 458391 - DNA, 25 bp, Artificial
  probe
  misc_feature (1)..(25): SEQ ID NO: 7084; WAN024DST; Start 224; Stop 248
gagaggatggctatgtaactacgac

SEQ ID NO: 458392 - DNA, 25 bp, Artificial
  probe
  misc_feature (1)..(25): SEQ ID NO: 7084; WAN024DST; Start 77; Stop 101
tagagtatgatgacgctgacaatgg

SEQ ID NO: 458393 - DNA, 25 bp, Artificial
  probe
  misc_feature (1)..(25): SEQ ID NO: 7084; WAN024DST; Start 243; Stop 267
tacgacaaggacctacgatgttaat

SEQ ID NO: 458394 - DNA, 25 bp, Artificial
  probe
  misc_feature (1)..(25): SEQ ID NO: 7084; WAN024DST; Start 488; Stop 512
agagtggacaagtaactgagagtac

SEQ ID NO: 458395 - DNA, 25 bp, Artificial
  probe
  misc_feature (1)..(25): SEQ ID NO: 7084; WAN024DST; Start 235; Stop 259
tatgtaactacgacaaggacctacg

SEQ ID NO: 458396 - DNA, 25 bp, Artificial
  probe
  misc_feature (1)..(25): SEQ ID NO: 7084; WAN024DST; Start 233; Stop 257
gctatgtaactacgacaaggaccta

SEQ ID NO: 458397 - DNA, 25 bp, Artificial
  probe
  misc_feature (1)..(25): SEQ ID NO: 7084; WAN024DST; Start 219; Stop 243
tgatggagaggatggctatgtaact

SEQ ID NO: 458398 - DNA, 25 bp, Artificial
  probe
  misc_feature (1)..(25): SEQ ID NO: 7084; WAN024DST; Start 253; Stop 277
acctacgatgttaatccagagactg

SEQ ID NO: 458399 - DNA, 25 bp, Artificial
  probe
  misc_feature (1)..(25): SEQ ID NO: 7084; WAN024DST; Start 229; Stop 253
gatggctatgtaactacgacaagga

SEQ ID NO: 458400 - DNA, 25 bp, Artificial
  probe
  misc_feature (1)..(25): SEQ ID NO: 7084; WAN024DST; Start 227; Stop 251
aggatggctatgtaactacgacaag

SEQ ID NO: 458401 - DNA, 25 bp, Artificial
  probe
  misc_feature (1)..(25): SEQ ID NO: 7084; WAN024DST; Start 226; Stop 250
gaggatggctatgtaactacgacaa

SEQ ID NO: 458402 - DNA, 25 bp, Artificial
  probe
  misc_feature (1)..(25): SEQ ID NO: 7084; WAN024DST; Start 242; Stop 266
ctacgacaaggacctacgatgttaa

SEQ ID NO: 458403 - DNA, 25 bp, Artificial
  probe
  misc_feature (1)..(25): SEQ ID NO: 7084; WAN024DST; Start 238; Stop 262
gtaactacgacaaggacctacgatg

SEQ ID NO: 458404 - DNA, 25 bp, Artificial
  probe
  misc_feature (1)..(25): SEQ ID NO: 7084; WAN024DST; Start 311; Stop 335
aagaagccacggatacagttatcaa

SEQ ID NO: 458405 - DNA, 25 bp, Artificial
  probe
  misc_feature (1)..(25): SEQ ID NO: 7084; WAN024DST; Start 479; Stop 503
tagatggaaagagtggacaagtaac

SEQ ID NO: 458406 - DNA, 25 bp, Artificial
  probe
  misc_feature (1)..(25): SEQ ID NO: 7084; WAN024DST; Start 478; Stop 502
gtagatggaaagagtggacaagtaa

SEQ ID NO: 458407 - DNA, 25 bp, Artificial
  probe
  misc_feature (1)..(25): SEQ ID NO: 7084; WAN024DST; Start 67; Stop 91
gaagagggaatagagtatgatgacg

SEQ ID NO: 458408 - DNA, 25 bp, Artificial
  probe
  misc_feature (1)..(25): SEQ ID NO: 7085; WAN024GJL; Start 108; Stop 132
aagaggtataattaacactgtcgca

SEQ ID NO: 458409 - DNA, 25 bp, Artificial
  probe
  misc_feature (1)..(25): SEQ ID NO: 7085; WAN024GJL; Start 37; Stop 61
ccttgggaagtaacagtaatttctt

SEQ ID NO: 458410 - DNA, 25 bp, Artificial
  probe
  misc_feature (1)..(25): SEQ ID NO: 7085; WAN024GJL; Start 1; Stop 25
ctgaatggaggcaatgacactgtag

SEQ ID NO: 458411 - DNA, 25 bp, Artificial
  probe
  misc_feature (1)..(25): SEQ ID NO: 7085; WAN024GJL; Start 107; Stop 131
aaagaggtataattaacactgtcgc

SEQ ID NO: 458412 - DNA, 25 bp, Artificial
  probe
  misc_feature (1)..(25): SEQ ID NO: 7085; WAN024GJL; Start 30; Stop 54
gatttctccttgggaagtaacagta

SEQ ID NO: 458413 - DNA, 25 bp, Artificial
  probe
  misc_feature (1)..(25): SEQ ID NO: 7085; WAN024GJL; Start 36; Stop 60
tccttgggaagtaacagtaatttct

SEQ ID NO: 458414 - DNA, 25 bp, Artificial
  probe
  misc_feature (1)..(25): SEQ ID NO: 7085; WAN024GJL; Start 34; Stop 58
tctccttgggaagtaacagtaattt

SEQ ID NO: 458415 - DNA, 25 bp, Artificial
  probe
  misc_feature (1)..(25): SEQ ID NO: 7085; WAN024GJL; Start 33; Stop 57
ttctccttgggaagtaacagtaatt

SEQ ID NO: 458416 - DNA, 25 bp, Artificial
  probe
  misc_feature (1)..(25): SEQ ID NO: 7085; WAN024GJL; Start 32; Stop 56
tttctccttgggaagtaacagtaat

SEQ ID NO: 458417 - DNA, 25 bp, Artificial
  probe
  misc_feature (1)..(25): SEQ ID NO: 7085; WAN024GJL; Start 31; Stop 55
atttctccttgggaagtaacagtaa

SEQ ID NO: 458418 - DNA, 25 bp, Artificial
  probe
  misc_feature (1)..(25): SEQ ID NO: 7085; WAN024GJL; Start 35; Stop 59
ctccttgggaagtaacagtaatttc

SEQ ID NO: 458419 - DNA, 25 bp, Artificial
  probe
  misc_feature (1)..(25): SEQ ID NO: 7085; WAN024GJL; Start 38; Stop 62
cttgggaagtaacagtaatttcttt

SEQ ID NO: 458420 - DNA, 25 bp, Artificial
  probe
  misc_feature (1)..(25): SEQ ID NO: 7085; WAN024GJL; Start 106; Stop 130
gaaagaggtataattaacactgtcg

SEQ ID NO: 458421 - DNA, 25 bp, Artificial
  probe
  misc_feature (1)..(25): SEQ ID NO: 7085; WAN024GJL; Start 29; Stop 53
cgatttctccttgggaagtaacagt

SEQ ID NO: 458422 - DNA, 25 bp, Artificial
  probe
  misc_feature (1)..(25): SEQ ID NO: 7085; WAN024GJL; Start 2; Stop 26
tgaatggaggcaatgacactgtagg

SEQ ID NO: 458423 - DNA, 25 bp, Artificial
  probe
  misc_feature (1)..(25): SEQ ID NO: 7085; WAN024GJL; Start 68; Stop 92
caacaagggagaaaatcaagatgaa

SEQ ID NO: 458424 - DNA, 25 bp, Artificial
  probe
  misc_feature (1)..(25): SEQ ID NO: 7085; WAN024GJL; Start 71; Stop 95
caagggagaaaatcaagatgaaagt

SEQ ID NO: 458425 - DNA, 25 bp, Artificial
  probe
  misc_feature (1)..(25): SEQ ID NO: 7085; WAN024GJL; Start 70; Stop 94
acaagggagaaaatcaagatgaaag

SEQ ID NO: 458426 - DNA, 25 bp, Artificial
  probe
  misc_feature (1)..(25): SEQ ID NO: 7085; WAN024GJL; Start 69; Stop 93
aacaagggagaaaatcaagatgaaa

SEQ ID NO: 458427 - DNA, 25 bp, Artificial
  probe
  misc_feature (1)..(25): SEQ ID NO: 7085; WAN024GJL; Start 48; Stop 72
aacagtaatttcttttgtggcaaca

SEQ ID NO: 458428 - DNA, 25 bp, Artificial
  probe
  misc_feature (1)..(25): SEQ ID NO: 7085; WAN024GJL; Start 45; Stop 69
agtaacagtaatttcttttgtggca

SEQ ID NO: 458429 - DNA, 25 bp, Artificial
  probe
  misc_feature (1)..(25): SEQ ID NO: 7085; WAN024GJL; Start 105; Stop 129
tgaaagaggtataattaacactgtc

SEQ ID NO: 458430 - DNA, 25 bp, Artificial
  probe
  misc_feature (1)..(25): SEQ ID NO: 7085; WAN024GJL; Start 67; Stop 91
gcaacaagggagaaaatcaagatga

SEQ ID NO: 458431 - DNA, 25 bp, Artificial
  probe
  misc_feature (1)..(25): SEQ ID NO: 7085; WAN024GJL; Start 47; Stop 71
taacagtaatttcttttgtggcaac

SEQ ID NO: 458432 - DNA, 25 bp, Artificial
  probe
  misc_feature (1)..(25): SEQ ID NO: 7085; WAN024GJL; Start 46; Stop 70
gtaacagtaatttcttttgtggcaa

SEQ ID NO: 458433 - DNA, 25 bp, Artificial
  probe
  misc_feature (1)..(25): SEQ ID NO: 7085; WAN024GJL; Start 44; Stop 68
aagtaacagtaatttcttttgtggc

SEQ ID NO: 458434 - DNA, 25 bp, Artificial
  probe
  misc_feature (1)..(25): SEQ ID NO: 7085; WAN024GJL; Start 73; Stop 97
agggagaaaatcaagatgaaagtaa

SEQ ID NO: 458435 - DNA, 25 bp, Artificial
  probe
  misc_feature (1)..(25): SEQ ID NO: 7085; WAN024GJL; Start 72; Stop 96
aagggagaaaatcaagatgaaagta

SEQ ID NO: 458436 - DNA, 25 bp, Artificial
  probe
  misc_feature (1)..(25): SEQ ID NO: 7085; WAN024GJL; Start 40; Stop 64
tgggaagtaacagtaatttcttttg

SEQ ID NO: 458437 - DNA, 25 bp, Artificial
  probe
  misc_feature (1)..(25): SEQ ID NO: 7085; WAN024GJL; Start 66; Stop 90
ggcaacaagggagaaaatcaagatg

SEQ ID NO: 458438 - DNA, 25 bp, Artificial
  probe
  misc_feature (1)..(25): SEQ ID NO: 7085; WAN024GJL; Start 65; Stop 89
tggcaacaagggagaaaatcaagat

SEQ ID NO: 458439 - DNA, 25 bp, Artificial
  probe
  misc_feature (1)..(25): SEQ ID NO: 7085; WAN024GJL; Start 28; Stop 52
gcgatttctccttgggaagtaacag

SEQ ID NO: 458440 - DNA, 25 bp, Artificial
  probe
  misc_feature (1)..(25): SEQ ID NO: 7085; WAN024GJL; Start 74; Stop 98
gggagaaaatcaagatgaaagtaaa

SEQ ID NO: 458441 - DNA, 25 bp, Artificial
  probe
  misc_feature (1)..(25): SEQ ID NO: 7086; WAN024C38; Start 1; Stop 25
ctgaccaagatttctggaaggattt

SEQ ID NO: 458442 - DNA, 25 bp, Artificial
  probe
  misc_feature (1)..(25): SEQ ID NO: 7086; WAN024C38; Start 46; Stop 70
gctgatgtatatggtaattttgcct

SEQ ID NO: 458443 - DNA, 25 bp, Artificial
  probe
  misc_feature (1)..(25): SEQ ID NO: 7086; WAN024C38; Start 6; Stop 30
caagatttctggaaggattttacaa

SEQ ID NO: 458444 - DNA, 25 bp, Artificial
  probe
  misc_feature (1)..(25): SEQ ID NO: 7086; WAN024C38; Start 2; Stop 26
tgaccaagatttctggaaggatttt

SEQ ID NO: 458445 - DNA, 25 bp, Artificial
  probe
  misc_feature (1)..(25): SEQ ID NO: 7086; WAN024C38; Start 5; Stop 29
ccaagatttctggaaggattttaca

SEQ ID NO: 458446 - DNA, 25 bp, Artificial
  probe
  misc_feature (1)..(25): SEQ ID NO: 7086; WAN024C38; Start 4; Stop 28
accaagatttctggaaggattttac

SEQ ID NO: 458447 - DNA, 25 bp, Artificial
  probe
  misc_feature (1)..(25): SEQ ID NO: 7086; WAN024C38; Start 3; Stop 27
gaccaagatttctggaaggatttta

SEQ ID NO: 458448 - DNA, 25 bp, Artificial
  probe
  misc_feature (1)..(25): SEQ ID NO: 7086; WAN024C38; Start 11; Stop 35
tttctggaaggattttacaaatagc

SEQ ID NO: 458449 - DNA, 25 bp, Artificial
  probe
  misc_feature (1)..(25): SEQ ID NO: 7086; WAN024C38; Start 7; Stop 31
aagatttctggaaggattttacaaa

SEQ ID NO: 458450 - DNA, 25 bp, Artificial
  probe
  misc_feature (1)..(25): SEQ ID NO: 7086; WAN024C38; Start 15; Stop 39
tggaaggattttacaaatagctgtg

SEQ ID NO: 458451 - DNA, 25 bp, Artificial
  probe
  misc_feature (1)..(25): SEQ ID NO: 7086; WAN024C38; Start 16; Stop 40
ggaaggattttacaaatagctgtga

SEQ ID NO: 458452 - DNA, 25 bp, Artificial
  probe
  misc_feature (1)..(25): SEQ ID NO: 7086; WAN024C38; Start 14; Stop 38
ctggaaggattttacaaatagctgt

SEQ ID NO: 458453 - DNA, 25 bp, Artificial
  probe
  misc_feature (1)..(25): SEQ ID NO: 7086; WAN024C38; Start 13; Stop 37
tctggaaggattttacaaatagctg

SEQ ID NO: 458454 - DNA, 25 bp, Artificial
  probe
  misc_feature (1)..(25): SEQ ID NO: 7086; WAN024C38; Start 48; Stop 72
tgatgtatatggtaattttgcctac

SEQ ID NO: 458455 - DNA, 25 bp, Artificial
  probe
  misc_feature (1)..(25): SEQ ID NO: 7086; WAN024C38; Start 30; Stop 54
aatagctgtgaatgtagctgatgta

SEQ ID NO: 458456 - DNA, 25 bp, Artificial
  probe
  misc_feature (1)..(25): SEQ ID NO: 7086; WAN024C38; Start 31; Stop 55
atagctgtgaatgtagctgatgtat

SEQ ID NO: 458457 - DNA, 25 bp, Artificial
  probe
  misc_feature (1)..(25): SEQ ID NO: 7086; WAN024C38; Start 12; Stop 36
ttctggaaggattttacaaatagct

SEQ ID NO: 458458 - DNA, 25 bp, Artificial
  probe
  misc_feature (1)..(25): SEQ ID NO: 7086; WAN024C38; Start 47; Stop 71
ctgatgtatatggtaattttgccta

SEQ ID NO: 458459 - DNA, 25 bp, Artificial
  probe
  misc_feature (1)..(25): SEQ ID NO: 7086; WAN024C38; Start 83; Stop 107
cagcttgggatgcacatgataaaat

SEQ ID NO: 458460 - DNA, 25 bp, Artificial
  probe
  misc_feature (1)..(25): SEQ ID NO: 7086; WAN024C38; Start 20; Stop 44
ggattttacaaatagctgtgaatgt

SEQ ID NO: 458461 - DNA, 25 bp, Artificial
  probe
  misc_feature (1)..(25): SEQ ID NO: 7086; WAN024C38; Start 19; Stop 43
aggattttacaaatagctgtgaatg

SEQ ID NO: 458462 - DNA, 25 bp, Artificial
  probe
  misc_feature (1)..(25): SEQ ID NO: 7086; WAN024C38; Start 17; Stop 41
gaaggattttacaaatagctgtgaa

SEQ ID NO: 458463 - DNA, 25 bp, Artificial
  probe
  misc_feature (1)..(25): SEQ ID NO: 7086; WAN024C38; Start 8; Stop 32
agatttctggaaggattttacaaat

SEQ ID NO: 458464 - DNA, 25 bp, Artificial
  probe
  misc_feature (1)..(25): SEQ ID NO: 7086; WAN024C38; Start 18; Stop 42
aaggattttacaaatagctgtgaat

SEQ ID NO: 458465 - DNA, 25 bp, Artificial
  probe
  misc_feature (1)..(25): SEQ ID NO: 7086; WAN024C38; Start 23; Stop 47
ttttacaaatagctgtgaatgtagc

SEQ ID NO: 458466 - DNA, 25 bp, Artificial
  probe
  misc_feature (1)..(25): SEQ ID NO: 7086; WAN024C38; Start 49; Stop 73
gatgtatatggtaattttgcctaca

SEQ ID NO: 458467 - DNA, 25 bp, Artificial
  probe
  misc_feature (1)..(25): SEQ ID NO: 7086; WAN024C38; Start 26; Stop 50
tacaaatagctgtgaatgtagctga

SEQ ID NO: 458468 - DNA, 25 bp, Artificial
  probe
  misc_feature (1)..(25): SEQ ID NO: 7086; WAN024C38; Start 28; Stop 52
caaatagctgtgaatgtagctgatg

SEQ ID NO: 458469 - DNA, 25 bp, Artificial
  probe
  misc_feature (1)..(25): SEQ ID NO: 7086; WAN024C38; Start 29; Stop 53
aaatagctgtgaatgtagctgatgt

SEQ ID NO: 458470 - DNA, 25 bp, Artificial
  probe
  misc_feature (1)..(25): SEQ ID NO: 7086; WAN024C38; Start 27; Stop 51
acaaatagctgtgaatgtagctgat

SEQ ID NO: 458471 - DNA, 25 bp, Artificial
  probe
  misc_feature (1)..(25): SEQ ID NO: 7086; WAN024C38; Start 25; Stop 49
ttacaaatagctgtgaatgtagctg

SEQ ID NO: 458472 - DNA, 25 bp, Artificial
  probe
  misc_feature (1)..(25): SEQ ID NO: 7086; WAN024C38; Start 24; Stop 48
tttacaaatagctgtgaatgtagct

SEQ ID NO: 458473 - DNA, 25 bp, Artificial
  probe
  misc_feature (1)..(25): SEQ ID NO: 7086; WAN024C38; Start 51; Stop 75
tgtatatggtaattttgcctacaat

SEQ ID NO: 458474 - DNA, 25 bp, Artificial
  probe
  misc_feature (1)..(25): SEQ ID NO: 7087; WAN024BBY; Start 6; Stop 30
gaagtcagtaacatatacctacggc

SEQ ID NO: 458475 - DNA, 25 bp, Artificial
  probe
  misc_feature (1)..(25): SEQ ID NO: 7087; WAN024BBY; Start 9; Stop 33
gtcagtaacatatacctacggcaag

SEQ ID NO: 458476 - DNA, 25 bp, Artificial
  probe
  misc_feature (1)..(25): SEQ ID NO: 7087; WAN024BBY; Start 8; Stop 32
agtcagtaacatatacctacggcaa

SEQ ID NO: 458477 - DNA, 25 bp, Artificial
  probe
  misc_feature (1)..(25): SEQ ID NO: 7087; WAN024BBY; Start 7; Stop 31
aagtcagtaacatatacctacggca

SEQ ID NO: 458478 - DNA, 25 bp, Artificial
  probe
  misc_feature (1)..(25): SEQ ID NO: 7087; WAN024BBY; Start 10; Stop 34
tcagtaacatatacctacggcaagg

SEQ ID NO: 458479 - DNA, 25 bp, Artificial
  probe
  misc_feature (1)..(25): SEQ ID NO: 7087; WAN024BBY; Start 14; Stop 38
taacatatacctacggcaaggtgaa

SEQ ID NO: 458480 - DNA, 25 bp, Artificial
  probe
  misc_feature (1)..(25): SEQ ID NO: 7087; WAN024BBY; Start 13; Stop 37
gtaacatatacctacggcaaggtga

SEQ ID NO: 458481 - DNA, 25 bp, Artificial
  probe
  misc_feature (1)..(25): SEQ ID NO: 7087; WAN024BBY; Start 12; Stop 36
agtaacatatacctacggcaaggtg

SEQ ID NO: 458482 - DNA, 25 bp, Artificial
  probe
  misc_feature (1)..(25): SEQ ID NO: 7087; WAN024BBY; Start 11; Stop 35
cagtaacatatacctacggcaaggt

SEQ ID NO: 458483 - DNA, 25 bp, Artificial
  probe
  misc_feature (1)..(25): SEQ ID NO: 7087; WAN024BBY; Start 15; Stop 39
aacatatacctacggcaaggtgaag

SEQ ID NO: 458484 - DNA, 25 bp, Artificial
  probe
  misc_feature (1)..(25): SEQ ID NO: 7087; WAN024BBY; Start 18; Stop 42
atatacctacggcaaggtgaagctg

SEQ ID NO: 458485 - DNA, 25 bp, Artificial
  probe
  misc_feature (1)..(25): SEQ ID NO: 7087; WAN024BBY; Start 17; Stop 41
catatacctacggcaaggtgaagct

SEQ ID NO: 458486 - DNA, 25 bp, Artificial
  probe
  misc_feature (1)..(25): SEQ ID NO: 7087; WAN024BBY; Start 16; Stop 40
acatatacctacggcaaggtgaagc

SEQ ID NO: 458487 - DNA, 25 bp, Artificial
  probe
  misc_feature (1)..(25): SEQ ID NO: 7088; WAN024GJX; Start 8; Stop 32
cgtcgccacttaagaagagtatcaa

SEQ ID NO: 458488 - DNA, 25 bp, Artificial
  probe
  misc_feature (1)..(25): SEQ ID NO: 7088; WAN024GJX; Start 9; Stop 33
gtcgccacttaagaagagtatcaaa

SEQ ID NO: 458489 - DNA, 25 bp, Artificial
  probe
  misc_feature (1)..(25): SEQ ID NO: 7088; WAN024GJX; Start 10; Stop 34
tcgccacttaagaagagtatcaaaa

SEQ ID NO: 458490 - DNA, 25 bp, Artificial
  probe
  misc_feature (1)..(25): SEQ ID NO: 7088; WAN024GJX; Start 7; Stop 31
gcgtcgccacttaagaagagtatca

SEQ ID NO: 458491 - DNA, 25 bp, Artificial
  probe
  misc_feature (1)..(25): SEQ ID NO: 7088; WAN024GJX; Start 71; Stop 95
catgtctaaaattatcggtattgac

SEQ ID NO: 458492 - DNA, 25 bp, Artificial
  probe
  misc_feature (1)..(25): SEQ ID NO: 7088; WAN024GJX; Start 65; Stop 89
aaaacacatgtctaaaattatcggt

SEQ ID NO: 458493 - DNA, 25 bp, Artificial
  probe
  misc_feature (1)..(25): SEQ ID NO: 7088; WAN024GJX; Start 66; Stop 90
aaacacatgtctaaaattatcggta

SEQ ID NO: 458494 - DNA, 25 bp, Artificial
  probe
  misc_feature (1)..(25): SEQ ID NO: 7088; WAN024GJX; Start 68; Stop 92
acacatgtctaaaattatcggtatt

SEQ ID NO: 458495 - DNA, 25 bp, Artificial
  probe
  misc_feature (1)..(25): SEQ ID NO: 7088; WAN024GJX; Start 67; Stop 91
aacacatgtctaaaattatcggtat

SEQ ID NO: 458496 - DNA, 25 bp, Artificial
  probe
  misc_feature (1)..(25): SEQ ID NO: 7088; WAN024GJX; Start 69; Stop 93
cacatgtctaaaattatcggtattg

SEQ ID NO: 458497 - DNA, 25 bp, Artificial
  probe
  misc_feature (1)..(25): SEQ ID NO: 7088; WAN024GJX; Start 70; Stop 94
acatgtctaaaattatcggtattga

SEQ ID NO: 458498 - DNA, 25 bp, Artificial
  probe
  misc_feature (1)..(25): SEQ ID NO: 7089; WAN024BLQ; Start 27; Stop 51
ttcctttcgagtattattttcatgt

SEQ ID NO: 458499 - DNA, 25 bp, Artificial
  probe
  misc_feature (1)..(25): SEQ ID NO: 7089; WAN024BLQ; Start 32; Stop 56
ttcgagtattattttcatgtatgga

SEQ ID NO: 458500 - DNA, 25 bp, Artificial
  probe
  misc_feature (1)..(25): SEQ ID NO: 7089; WAN024BLQ; Start 28; Stop 52
tcctttcgagtattattttcatgta

SEQ ID NO: 458501 - DNA, 25 bp, Artificial
  probe
  misc_feature (1)..(25): SEQ ID NO: 7089; WAN024BLQ; Start 26; Stop 50
tttcctttcgagtattattttcatg

SEQ ID NO: 458502 - DNA, 25 bp, Artificial
  probe
  misc_feature (1)..(25): SEQ ID NO: 7089; WAN024BLQ; Start 33; Stop 57
tcgagtattattttcatgtatggat

SEQ ID NO: 458503 - DNA, 25 bp, Artificial
  probe
  misc_feature (1)..(25): SEQ ID NO: 7089; WAN024BLQ; Start 77; Stop 101
ataattatagaatagggaacccaaa

SEQ ID NO: 458504 - DNA, 25 bp, Artificial
  probe
  misc_feature (1)..(25): SEQ ID NO: 7089; WAN024BLQ; Start 31; Stop 55
tttcgagtattattttcatgtatgg

SEQ ID NO: 458505 - DNA, 25 bp, Artificial
  probe
  misc_feature (1)..(25): SEQ ID NO: 7089; WAN024BLQ; Start 78; Stop 102
taattatagaatagggaacccaaaa

SEQ ID NO: 458506 - DNA, 25 bp, Artificial
  probe
  misc_feature (1)..(25): SEQ ID NO: 7089; WAN024BLQ; Start 29; Stop 53
cctttcgagtattattttcatgtat

SEQ ID NO: 458507 - DNA, 25 bp, Artificial
  probe
  misc_feature (1)..(25): SEQ ID NO: 7089; WAN024BLQ; Start 24; Stop 48
aatttcctttcgagtattattttca

SEQ ID NO: 458508 - DNA, 25 bp, Artificial
  probe
  misc_feature (1)..(25): SEQ ID NO: 7089; WAN024BLQ; Start 25; Stop 49
atttcctttcgagtattattttcat

SEQ ID NO: 458509 - DNA, 25 bp, Artificial
  probe
  misc_feature (1)..(25): SEQ ID NO: 7091; WAN024BAB; Start 5; Stop 29
cttcgtcagtcgtatctacaacctc

SEQ ID NO: 458510 - DNA, 25 bp, Artificial
  probe
  misc_feature (1)..(25): SEQ ID NO: 7091; WAN024BAB; Start 7; Stop 31
tcgtcagtcgtatctacaacctcaa

SEQ ID NO: 458511 - DNA, 25 bp, Artificial
  probe
  misc_feature (1)..(25): SEQ ID NO: 7091; WAN024BAB; Start 6; Stop 30
ttcgtcagtcgtatctacaacctca

SEQ ID NO: 458512 - DNA, 25 bp, Artificial
  probe
  misc_feature (1)..(25): SEQ ID NO: 7091; WAN024BAB; Start 8; Stop 32
cgtcagtcgtatctacaacctcaaa

SEQ ID NO: 458513 - DNA, 25 bp, Artificial
  probe
  misc_feature (1)..(25): SEQ ID NO: 7091; WAN024BAB; Start 12; Stop 36
agtcgtatctacaacctcaaaacag

SEQ ID NO: 458514 - DNA, 25 bp, Artificial
  probe
  misc_feature (1)..(25): SEQ ID NO: 7091; WAN024BAB; Start 10; Stop 34
tcagtcgtatctacaacctcaaaac

SEQ ID NO: 458515 - DNA, 25 bp, Artificial
  probe
  misc_feature (1)..(25): SEQ ID NO: 7091; WAN024BAB; Start 9; Stop 33
gtcagtcgtatctacaacctcaaaa

SEQ ID NO: 458516 - DNA, 25 bp, Artificial
  probe
  misc_feature (1)..(25): SEQ ID NO: 7091; WAN024BAB; Start 11; Stop 35
cagtcgtatctacaacctcaaaaca

SEQ ID NO: 458517 - DNA, 25 bp, Artificial
  probe
  misc_feature (1)..(25): SEQ ID NO: 7091; WAN024BAB; Start 3; Stop 27
gacttcgtcagtcgtatctacaacc

SEQ ID NO: 458518 - DNA, 25 bp, Artificial
  probe
  misc_feature (1)..(25): SEQ ID NO: 7091; WAN024BAB; Start 2; Stop 26
tgacttcgtcagtcgtatctacaac

SEQ ID NO: 458519 - DNA, 25 bp, Artificial
  probe
  misc_feature (1)..(25): SEQ ID NO: 7095; WAN024B9U; Start 52; Stop 76
gcggctagtttcctagtttactctt

SEQ ID NO: 458520 - DNA, 25 bp, Artificial
  probe
  misc_feature (1)..(25): SEQ ID NO: 7095; WAN024B9U; Start 50; Stop 74
ctgcggctagtttcctagtttactc

SEQ ID NO: 458521 - DNA, 25 bp, Artificial
  probe
  misc_feature (1)..(25): SEQ ID NO: 7095; WAN024B9U; Start 51; Stop 75
tgcggctagtttcctagtttactct

SEQ ID NO: 458522 - DNA, 25 bp, Artificial
  probe
  misc_feature (1)..(25): SEQ ID NO: 7095; WAN024B9U; Start 47; Stop 71
aacctgcggctagtttcctagttta

SEQ ID NO: 458523 - DNA, 25 bp, Artificial
  probe
  misc_feature (1)..(25): SEQ ID NO: 7095; WAN024B9U; Start 49; Stop 73
cctgcggctagtttcctagtttact

SEQ ID NO: 458524 - DNA, 25 bp, Artificial
  probe
  misc_feature (1)..(25): SEQ ID NO: 7095; WAN024B9U; Start 48; Stop 72
acctgcggctagtttcctagtttac

SEQ ID NO: 458525 - DNA, 25 bp, Artificial
  probe
  misc_feature (1)..(25): SEQ ID NO: 7096; WAN024BAJ; Start 59; Stop 83
gcttcttagtttgctctttgatttt

SEQ ID NO: 458526 - DNA, 25 bp, Artificial
  probe
  misc_feature (1)..(25): SEQ ID NO: 7096; WAN024BAJ; Start 58; Stop 82
agcttcttagtttgctctttgattt

SEQ ID NO: 458527 - DNA, 25 bp, Artificial
  probe
  misc_feature (1)..(25): SEQ ID NO: 7096; WAN024BAJ; Start 56; Stop 80
ctagcttcttagtttgctctttgat

SEQ ID NO: 458528 - DNA, 25 bp, Artificial
  probe
  misc_feature (1)..(25): SEQ ID NO: 7096; WAN024BAJ; Start 57; Stop 81
tagcttcttagtttgctctttgatt

SEQ ID NO: 458529 - DNA, 25 bp, Artificial
  probe
  misc_feature (1)..(25): SEQ ID NO: 7096; WAN024BAJ; Start 60; Stop 84
cttcttagtttgctctttgattttc

SEQ ID NO: 458530 - DNA, 25 bp, Artificial
  probe
  misc_feature (1)..(25): SEQ ID NO: 7096; WAN024BAJ; Start 61; Stop 85
ttcttagtttgctctttgattttca

SEQ ID NO: 458531 - DNA, 25 bp, Artificial
  probe
  misc_feature (1)..(25): SEQ ID NO: 7096; WAN024BAJ; Start 62; Stop 86
tcttagtttgctctttgattttcat

SEQ ID NO: 458532 - DNA, 25 bp, Artificial
  probe
  misc_feature (1)..(25): SEQ ID NO: 7096; WAN024BAJ; Start 64; Stop 88
ttagtttgctctttgattttcattg

SEQ ID NO: 458533 - DNA, 25 bp, Artificial
  probe
  misc_feature (1)..(25): SEQ ID NO: 7096; WAN024BAJ; Start 63; Stop 87
cttagtttgctctttgattttcatt

SEQ ID NO: 458534 - DNA, 25 bp, Artificial
  probe
  misc_feature (1)..(25): SEQ ID NO: 7096; WAN024BAJ; Start 31; Stop 55
aaacagtgttttgagcatcatgcgg

SEQ ID NO: 458535 - DNA, 25 bp, Artificial
  probe
  misc_feature (1)..(25): SEQ ID NO: 7096; WAN024BAJ; Start 30; Stop 54
aaaacagtgttttgagcatcatgcg

SEQ ID NO: 458536 - DNA, 25 bp, Artificial
  probe
  misc_feature (1)..(25): SEQ ID NO: 7097; WAN024F72; Start 50; Stop 74
cttcgtcagtcttatctacaggttc

SEQ ID NO: 458537 - DNA, 25 bp, Artificial
  probe
  misc_feature (1)..(25): SEQ ID NO: 7097; WAN024F72; Start 52; Stop 76
tcgtcagtcttatctacaggttcaa

SEQ ID NO: 458538 - DNA, 25 bp, Artificial
  probe
  misc_feature (1)..(25): SEQ ID NO: 7097; WAN024F72; Start 51; Stop 75
ttcgtcagtcttatctacaggttca

SEQ ID NO: 458539 - DNA, 25 bp, Artificial
  probe
  misc_feature (1)..(25): SEQ ID NO: 7097; WAN024F72; Start 49; Stop 73
acttcgtcagtcttatctacaggtt

SEQ ID NO: 458540 - DNA, 25 bp, Artificial
  probe
  misc_feature (1)..(25): SEQ ID NO: 7097; WAN024F72; Start 53; Stop 77
cgtcagtcttatctacaggttcaaa

SEQ ID NO: 458541 - DNA, 25 bp, Artificial
  probe
  misc_feature (1)..(25): SEQ ID NO: 7097; WAN024F72; Start 57; Stop 81
agtcttatctacaggttcaaagcag

SEQ ID NO: 458542 - DNA, 25 bp, Artificial
  probe
  misc_feature (1)..(25): SEQ ID NO: 7097; WAN024F72; Start 55; Stop 79
tcagtcttatctacaggttcaaagc

SEQ ID NO: 458543 - DNA, 25 bp, Artificial
  probe
  misc_feature (1)..(25): SEQ ID NO: 7097; WAN024F72; Start 59; Stop 83
tcttatctacaggttcaaagcagtg

SEQ ID NO: 458544 - DNA, 25 bp, Artificial
  probe
  misc_feature (1)..(25): SEQ ID NO: 7097; WAN024F72; Start 58; Stop 82
gtcttatctacaggttcaaagcagt

SEQ ID NO: 458545 - DNA, 25 bp, Artificial
  probe
  misc_feature (1)..(25): SEQ ID NO: 7097; WAN024F72; Start 56; Stop 80
cagtcttatctacaggttcaaagca

SEQ ID NO: 458546 - DNA, 25 bp, Artificial
  probe
  misc_feature (1)..(25): SEQ ID NO: 7097; WAN024F72; Start 54; Stop 78
gtcagtcttatctacaggttcaaag

SEQ ID NO: 458547 - DNA, 25 bp, Artificial
  probe
  misc_feature (1)..(25): SEQ ID NO: 7097; WAN024F72; Start 62; Stop 86
tatctacaggttcaaagcagtgttt

SEQ ID NO: 458548 - DNA, 25 bp, Artificial
  probe
  misc_feature (1)..(25): SEQ ID NO: 7097; WAN024F72; Start 61; Stop 85
ttatctacaggttcaaagcagtgtt

SEQ ID NO: 458549 - DNA, 25 bp, Artificial
  probe
  misc_feature (1)..(25): SEQ ID NO: 7097; WAN024F72; Start 60; Stop 84
cttatctacaggttcaaagcagtgt

SEQ ID NO: 458550 - DNA, 25 bp, Artificial
  probe
  misc_feature (1)..(25): SEQ ID NO: 7097; WAN024F72; Start 48; Stop 72
gacttcgtcagtcttatctacaggt

SEQ ID NO: 458551 - DNA, 25 bp, Artificial
  probe
  misc_feature (1)..(25): SEQ ID NO: 7097; WAN024F72; Start 92; Stop 116
aatctgcggttagcttcctagtttg

SEQ ID NO: 458552 - DNA, 25 bp, Artificial
  probe
  misc_feature (1)..(25): SEQ ID NO: 7097; WAN024F72; Start 91; Stop 115
caatctgcggttagcttcctagttt

SEQ ID NO: 458553 - DNA, 25 bp, Artificial
  probe
  misc_feature (1)..(25): SEQ ID NO: 7097; WAN024F72; Start 63; Stop 87
atctacaggttcaaagcagtgtttt

SEQ ID NO: 458554 - DNA, 25 bp, Artificial
  probe
  misc_feature (1)..(25): SEQ ID NO: 7097; WAN024F72; Start 47; Stop 71
tgacttcgtcagtcttatctacagg

SEQ ID NO: 458555 - DNA, 25 bp, Artificial
  probe
  misc_feature (1)..(25): SEQ ID NO: 7097; WAN024F72; Start 183; Stop 207
agataaatcgaaatcagtagatcgt

SEQ ID NO: 458556 - DNA, 25 bp, Artificial
  probe
  misc_feature (1)..(25): SEQ ID NO: 7097; WAN024F72; Start 182; Stop 206
gagataaatcgaaatcagtagatcg

SEQ ID NO: 458557 - DNA, 25 bp, Artificial
  probe
  misc_feature (1)..(25): SEQ ID NO: 7097; WAN024F72; Start 181; Stop 205
agagataaatcgaaatcagtagatc

SEQ ID NO: 458558 - DNA, 25 bp, Artificial
  probe
  misc_feature (1)..(25): SEQ ID NO: 7097; WAN024F72; Start 176; Stop 200
aagatagagataaatcgaaatcagt

SEQ ID NO: 458559 - DNA, 25 bp, Artificial
  probe
  misc_feature (1)..(25): SEQ ID NO: 7097; WAN024F72; Start 64; Stop 88
tctacaggttcaaagcagtgttttg

SEQ ID NO: 458560 - DNA, 25 bp, Artificial
  probe
  misc_feature (1)..(25): SEQ ID NO: 7097; WAN024F72; Start 189; Stop 213
atcgaaatcagtagatcgtataaag

SEQ ID NO: 458561 - DNA, 25 bp, Artificial
  probe
  misc_feature (1)..(25): SEQ ID NO: 7097; WAN024F72; Start 184; Stop 208
gataaatcgaaatcagtagatcgta

SEQ ID NO: 458562 - DNA, 25 bp, Artificial
  probe
  misc_feature (1)..(25): SEQ ID NO: 7097; WAN024F72; Start 171; Stop 195
aacgaaagatagagataaatcgaaa

SEQ ID NO: 458563 - DNA, 25 bp, Artificial
  probe
  misc_feature (1)..(25): SEQ ID NO: 7097; WAN024F72; Start 128; Stop 152
tcattgagtataaatcattcaacgt

SEQ ID NO: 458564 - DNA, 25 bp, Artificial
  probe
  misc_feature (1)..(25): SEQ ID NO: 7097; WAN024F72; Start 127; Stop 151
ttcattgagtataaatcattcaacg

SEQ ID NO: 458565 - DNA, 25 bp, Artificial
  probe
  misc_feature (1)..(25): SEQ ID NO: 7097; WAN024F72; Start 172; Stop 196
acgaaagatagagataaatcgaaat

SEQ ID NO: 458566 - DNA, 25 bp, Artificial
  probe
  misc_feature (1)..(25): SEQ ID NO: 7097; WAN024F72; Start 168; Stop 192
cttaacgaaagatagagataaatcg

SEQ ID NO: 458567 - DNA, 25 bp, Artificial
  probe
  misc_feature (1)..(25): SEQ ID NO: 7097; WAN024F72; Start 188; Stop 212
aatcgaaatcagtagatcgtataaa

SEQ ID NO: 458568 - DNA, 25 bp, Artificial
  probe
  misc_feature (1)..(25): SEQ ID NO: 7097; WAN024F72; Start 187; Stop 211
aaatcgaaatcagtagatcgtataa

SEQ ID NO: 458569 - DNA, 25 bp, Artificial
  probe
  misc_feature (1)..(25): SEQ ID NO: 7098; WAN024BAA; Start 51; Stop 75
ttcgtcagttccatctacaacctta

SEQ ID NO: 458570 - DNA, 25 bp, Artificial
  probe
  misc_feature (1)..(25): SEQ ID NO: 7098; WAN024BAA; Start 52; Stop 76
tcgtcagttccatctacaaccttaa

SEQ ID NO: 458571 - DNA, 25 bp, Artificial
  probe
  misc_feature (1)..(25): SEQ ID NO: 7098; WAN024BAA; Start 50; Stop 74
cttcgtcagttccatctacaacctt

SEQ ID NO: 458572 - DNA, 25 bp, Artificial
  probe
  misc_feature (1)..(25): SEQ ID NO: 7098; WAN024BAA; Start 53; Stop 77
cgtcagttccatctacaaccttaaa

SEQ ID NO: 458573 - DNA, 25 bp, Artificial
  probe
  misc_feature (1)..(25): SEQ ID NO: 7098; WAN024BAA; Start 49; Stop 73
acttcgtcagttccatctacaacct

SEQ ID NO: 458574 - DNA, 25 bp, Artificial
  probe
  misc_feature (1)..(25): SEQ ID NO: 7098; WAN024BAA; Start 48; Stop 72
gacttcgtcagttccatctacaacc

SEQ ID NO: 458575 - DNA, 25 bp, Artificial
  probe
  misc_feature (1)..(25): SEQ ID NO: 7098; WAN024BAA; Start 59; Stop 83
ttccatctacaaccttaaaacagtg

SEQ ID NO: 458576 - DNA, 25 bp, Artificial
  probe
  misc_feature (1)..(25): SEQ ID NO: 7098; WAN024BAA; Start 58; Stop 82
gttccatctacaaccttaaaacagt

SEQ ID NO: 458577 - DNA, 25 bp, Artificial
  probe
  misc_feature (1)..(25): SEQ ID NO: 7098; WAN024BAA; Start 56; Stop 80
cagttccatctacaaccttaaaaca

SEQ ID NO: 458578 - DNA, 25 bp, Artificial
  probe
  misc_feature (1)..(25): SEQ ID NO: 7098; WAN024BAA; Start 55; Stop 79
tcagttccatctacaaccttaaaac

SEQ ID NO: 458579 - DNA, 25 bp, Artificial
  probe
  misc_feature (1)..(25): SEQ ID NO: 7098; WAN024BAA; Start 54; Stop 78
gtcagttccatctacaaccttaaaa

SEQ ID NO: 458580 - DNA, 25 bp, Artificial
  probe
  misc_feature (1)..(25): SEQ ID NO: 7098; WAN024BAA; Start 57; Stop 81
agttccatctacaaccttaaaacag

SEQ ID NO: 458581 - DNA, 25 bp, Artificial
  probe
  misc_feature (1)..(25): SEQ ID NO: 7098; WAN024BAA; Start 60; Stop 84
tccatctacaaccttaaaacagtgt

SEQ ID NO: 458582 - DNA, 25 bp, Artificial
  probe
  misc_feature (1)..(25): SEQ ID NO: 7098; WAN024BAA; Start 99; Stop 123
agctagtttcctagtttgctatttg

SEQ ID NO: 458583 - DNA, 25 bp, Artificial
  probe
  misc_feature (1)..(25): SEQ ID NO: 7098; WAN024BAA; Start 98; Stop 122
cagctagtttcctagtttgctattt

SEQ ID NO: 458584 - DNA, 25 bp, Artificial
  probe
  misc_feature (1)..(25): SEQ ID NO: 7098; WAN024BAA; Start 97; Stop 121
gcagctagtttcctagtttgctatt

SEQ ID NO: 458585 - DNA, 25 bp, Artificial
  probe
  misc_feature (1)..(25): SEQ ID NO: 7098; WAN024BAA; Start 61; Stop 85
ccatctacaaccttaaaacagtgtt

SEQ ID NO: 458586 - DNA, 25 bp, Artificial
  probe
  misc_feature (1)..(25): SEQ ID NO: 7098; WAN024BAA; Start 47; Stop 71
tgacttcgtcagttccatctacaac

SEQ ID NO: 458587 - DNA, 25 bp, Artificial
  probe
  misc_feature (1)..(25): SEQ ID NO: 7098; WAN024BAA; Start 96; Stop 120
cgcagctagtttcctagtttgctat

SEQ ID NO: 458588 - DNA, 25 bp, Artificial
  probe
  misc_feature (1)..(25): SEQ ID NO: 7098; WAN024BAA; Start 68; Stop 92
caaccttaaaacagtgtttagagca

SEQ ID NO: 458589 - DNA, 25 bp, Artificial
  probe
  misc_feature (1)..(25): SEQ ID NO: 7098; WAN024BAA; Start 67; Stop 91
acaaccttaaaacagtgtttagagc

SEQ ID NO: 458590 - DNA, 25 bp, Artificial
  probe
  misc_feature (1)..(25): SEQ ID NO: 7098; WAN024BAA; Start 69; Stop 93
aaccttaaaacagtgtttagagcag

SEQ ID NO: 458591 - DNA, 25 bp, Artificial
  probe
  misc_feature (1)..(25): SEQ ID NO: 7098; WAN024BAA; Start 70; Stop 94
accttaaaacagtgtttagagcagc

SEQ ID NO: 458592 - DNA, 25 bp, Artificial
  probe
  misc_feature (1)..(25): SEQ ID NO: 7098; WAN024BAA; Start 62; Stop 86
catctacaaccttaaaacagtgttt

SEQ ID NO: 458593 - DNA, 25 bp, Artificial
  probe
  misc_feature (1)..(25): SEQ ID NO: 7098; WAN024BAA; Start 72; Stop 96
cttaaaacagtgtttagagcagccc

SEQ ID NO: 458594 - DNA, 25 bp, Artificial
  probe
  misc_feature (1)..(25): SEQ ID NO: 7098; WAN024BAA; Start 71; Stop 95
ccttaaaacagtgtttagagcagcc

SEQ ID NO: 458595 - DNA, 25 bp, Artificial
  probe
  misc_feature (1)..(25): SEQ ID NO: 7098; WAN024BAA; Start 115; Stop 139
tgctatttgattttcattgagtatt

SEQ ID NO: 458596 - DNA, 25 bp, Artificial
  probe
  misc_feature (1)..(25): SEQ ID NO: 7098; WAN024BAA; Start 114; Stop 138
ttgctatttgattttcattgagtat

SEQ ID NO: 458597 - DNA, 25 bp, Artificial
  probe
  misc_feature (1)..(25): SEQ ID NO: 7098; WAN024BAA; Start 66; Stop 90
tacaaccttaaaacagtgtttagag

SEQ ID NO: 458598 - DNA, 25 bp, Artificial
  probe
  misc_feature (1)..(25): SEQ ID NO: 7098; WAN024BAA; Start 65; Stop 89
ctacaaccttaaaacagtgtttaga

SEQ ID NO: 458599 - DNA, 25 bp, Artificial
  probe
  misc_feature (1)..(25): SEQ ID NO: 7098; WAN024BAA; Start 64; Stop 88
tctacaaccttaaaacagtgtttag

SEQ ID NO: 458600 - DNA, 25 bp, Artificial
  probe
  misc_feature (1)..(25): SEQ ID NO: 7098; WAN024BAA; Start 95; Stop 119
ccgcagctagtttcctagtttgcta

SEQ ID NO: 458601 - DNA, 25 bp, Artificial
  probe
  misc_feature (1)..(25): SEQ ID NO: 7098; WAN024BAA; Start 63; Stop 87
atctacaaccttaaaacagtgttta

SEQ ID NO: 458602 - DNA, 25 bp, Artificial
  probe
  misc_feature (1)..(25): SEQ ID NO: 7099; WAN024BAK; Start 73; Stop 97
tctttgattttcattgagtatgagt

SEQ ID NO: 458603 - DNA, 25 bp, Artificial
  probe
  misc_feature (1)..(25): SEQ ID NO: 7099; WAN024BAK; Start 72; Stop 96
ctctttgattttcattgagtatgag

SEQ ID NO: 458604 - DNA, 25 bp, Artificial
  probe
  misc_feature (1)..(25): SEQ ID NO: 7099; WAN024BAK; Start 74; Stop 98
ctttgattttcattgagtatgagtt

SEQ ID NO: 458605 - DNA, 25 bp, Artificial
  probe
  misc_feature (1)..(25): SEQ ID NO: 7099; WAN024BAK; Start 75; Stop 99
tttgattttcattgagtatgagttt

SEQ ID NO: 458606 - DNA, 25 bp, Artificial
  probe
  misc_feature (1)..(25): SEQ ID NO: 7100; WAN024B8U; Start 73; Stop 97
tctttgattttcattgagtattggc

SEQ ID NO: 458607 - DNA, 25 bp, Artificial
  probe
  misc_feature (1)..(25): SEQ ID NO: 7100; WAN024B8U; Start 71; Stop 95
gctctttgattttcattgagtattg

SEQ ID NO: 458608 - DNA, 25 bp, Artificial
  probe
  misc_feature (1)..(25): SEQ ID NO: 7100; WAN024B8U; Start 72; Stop 96
ctctttgattttcattgagtattgg

SEQ ID NO: 458609 - DNA, 25 bp, Artificial
  probe
  misc_feature (1)..(25): SEQ ID NO: 7100; WAN024B8U; Start 98; Stop 122
ctcaggtttccatttgcaatcagaa

SEQ ID NO: 458610 - DNA, 25 bp, Artificial
  probe
  misc_feature (1)..(25): SEQ ID NO: 7100; WAN024B8U; Start 75; Stop 99
tttgattttcattgagtattggcct

SEQ ID NO: 458611 - DNA, 25 bp, Artificial
  probe
  misc_feature (1)..(25): SEQ ID NO: 7100; WAN024B8U; Start 76; Stop 100
ttgattttcattgagtattggcctc

SEQ ID NO: 458612 - DNA, 25 bp, Artificial
  probe
  misc_feature (1)..(25): SEQ ID NO: 7100; WAN024B8U; Start 74; Stop 98
ctttgattttcattgagtattggcc

SEQ ID NO: 458613 - DNA, 25 bp, Artificial
  probe
  misc_feature (1)..(25): SEQ ID NO: 7100; WAN024B8U; Start 88; Stop 112
gagtattggcctcaggtttccattt

SEQ ID NO: 458614 - DNA, 25 bp, Artificial
  probe
  misc_feature (1)..(25): SEQ ID NO: 7100; WAN024B8U; Start 106; Stop 130
tccatttgcaatcagaaagggattt

SEQ ID NO: 458615 - DNA, 25 bp, Artificial
  probe
  misc_feature (1)..(25): SEQ ID NO: 7100; WAN024B8U; Start 105; Stop 129
ttccatttgcaatcagaaagggatt

SEQ ID NO: 458616 - DNA, 25 bp, Artificial
  probe
  misc_feature (1)..(25): SEQ ID NO: 7100; WAN024B8U; Start 89; Stop 113
agtattggcctcaggtttccatttg

SEQ ID NO: 458617 - DNA, 25 bp, Artificial
  probe
  misc_feature (1)..(25): SEQ ID NO: 7100; WAN024B8U; Start 100; Stop 124
caggtttccatttgcaatcagaaag

SEQ ID NO: 458618 - DNA, 25 bp, Artificial
  probe
  misc_feature (1)..(25): SEQ ID NO: 7100; WAN024B8U; Start 104; Stop 128
tttccatttgcaatcagaaagggat

SEQ ID NO: 458619 - DNA, 25 bp, Artificial
  probe
  misc_feature (1)..(25): SEQ ID NO: 7100; WAN024B8U; Start 99; Stop 123
tcaggtttccatttgcaatcagaaa

SEQ ID NO: 458620 - DNA, 25 bp, Artificial
  probe
  misc_feature (1)..(25): SEQ ID NO: 7100; WAN024B8U; Start 97; Stop 121
cctcaggtttccatttgcaatcaga

SEQ ID NO: 458621 - DNA, 25 bp, Artificial
  probe
  misc_feature (1)..(25): SEQ ID NO: 7100; WAN024B8U; Start 103; Stop 127
gtttccatttgcaatcagaaaggga

SEQ ID NO: 458622 - DNA, 25 bp, Artificial
  probe
  misc_feature (1)..(25): SEQ ID NO: 7100; WAN024B8U; Start 101; Stop 125
aggtttccatttgcaatcagaaagg

SEQ ID NO: 458623 - DNA, 25 bp, Artificial
  probe
  misc_feature (1)..(25): SEQ ID NO: 7100; WAN024B8U; Start 82; Stop 106
ttcattgagtattggcctcaggttt

SEQ ID NO: 458624 - DNA, 25 bp, Artificial
  probe
  misc_feature (1)..(25): SEQ ID NO: 7100; WAN024B8U; Start 81; Stop 105
tttcattgagtattggcctcaggtt

SEQ ID NO: 458625 - DNA, 25 bp, Artificial
  probe
  misc_feature (1)..(25): SEQ ID NO: 7100; WAN024B8U; Start 83; Stop 107
tcattgagtattggcctcaggtttc

SEQ ID NO: 458626 - DNA, 25 bp, Artificial
  probe
  misc_feature (1)..(25): SEQ ID NO: 7100; WAN024B8U; Start 102; Stop 126
ggtttccatttgcaatcagaaaggg

SEQ ID NO: 458627 - DNA, 25 bp, Artificial
  probe
  misc_feature (1)..(25): SEQ ID NO: 7100; WAN024B8U; Start 107; Stop 131
ccatttgcaatcagaaagggatttt

SEQ ID NO: 458628 - DNA, 25 bp, Artificial
  probe
  misc_feature (1)..(25): SEQ ID NO: 7100; WAN024B8U; Start 78; Stop 102
gattttcattgagtattggcctcag

SEQ ID NO: 458629 - DNA, 25 bp, Artificial
  probe
  misc_feature (1)..(25): SEQ ID NO: 7100; WAN024B8U; Start 90; Stop 114
gtattggcctcaggtttccatttgc

SEQ ID NO: 458630 - DNA, 25 bp, Artificial
  probe
  misc_feature (1)..(25): SEQ ID NO: 7100; WAN024B8U; Start 77; Stop 101
tgattttcattgagtattggcctca

SEQ ID NO: 458631 - DNA, 25 bp, Artificial
  probe
  misc_feature (1)..(25): SEQ ID NO: 7100; WAN024B8U; Start 79; Stop 103
attttcattgagtattggcctcagg

SEQ ID NO: 458632 - DNA, 25 bp, Artificial
  probe
  misc_feature (1)..(25): SEQ ID NO: 7100; WAN024B8U; Start 84; Stop 108
cattgagtattggcctcaggtttcc

SEQ ID NO: 458633 - DNA, 25 bp, Artificial
  probe
  misc_feature (1)..(25): SEQ ID NO: 7100; WAN024B8U; Start 91; Stop 115
tattggcctcaggtttccatttgca

SEQ ID NO: 458634 - DNA, 25 bp, Artificial
  probe
  misc_feature (1)..(25): SEQ ID NO: 7100; WAN024B8U; Start 87; Stop 111
tgagtattggcctcaggtttccatt

SEQ ID NO: 458635 - DNA, 25 bp, Artificial
  probe
  misc_feature (1)..(25): SEQ ID NO: 7100; WAN024B8U; Start 86; Stop 110
ttgagtattggcctcaggtttccat

SEQ ID NO: 458636 - DNA, 25 bp, Artificial
  probe
  misc_feature (1)..(25): SEQ ID NO: 7100; WAN024B8U; Start 85; Stop 109
attgagtattggcctcaggtttcca

SEQ ID NO: 458637 - DNA, 25 bp, Artificial
  probe
  misc_feature (1)..(25): SEQ ID NO: 7100; WAN024B8U; Start 96; Stop 120
gcctcaggtttccatttgcaatcag

SEQ ID NO: 458638 - DNA, 25 bp, Artificial
  probe
  misc_feature (1)..(25): SEQ ID NO: 7100; WAN024B8U; Start 80; Stop 104
ttttcattgagtattggcctcaggt

SEQ ID NO: 458639 - DNA, 25 bp, Artificial
  probe
  misc_feature (1)..(25): SEQ ID NO: 7102; WAN024F6Y; Start 95; Stop 119
ctgtggctatcttcctagtttactt

SEQ ID NO: 458640 - DNA, 25 bp, Artificial
  probe
  misc_feature (1)..(25): SEQ ID NO: 7102; WAN024F6Y; Start 96; Stop 120
tgtggctatcttcctagtttacttt

SEQ ID NO: 458641 - DNA, 25 bp, Artificial
  probe
  misc_feature (1)..(25): SEQ ID NO: 7102; WAN024F6Y; Start 82; Stop 106
tactttgagaaacctgtggctatct

SEQ ID NO: 458642 - DNA, 25 bp, Artificial
  probe
  misc_feature (1)..(25): SEQ ID NO: 7102; WAN024F6Y; Start 94; Stop 118
cctgtggctatcttcctagtttact

SEQ ID NO: 458643 - DNA, 25 bp, Artificial
  probe
  misc_feature (1)..(25): SEQ ID NO: 7102; WAN024F6Y; Start 92; Stop 116
aacctgtggctatcttcctagttta

SEQ ID NO: 458644 - DNA, 25 bp, Artificial
  probe
  misc_feature (1)..(25): SEQ ID NO: 7102; WAN024F6Y; Start 93; Stop 117
acctgtggctatcttcctagtttac

SEQ ID NO: 458645 - DNA, 25 bp, Artificial
  probe
  misc_feature (1)..(25): SEQ ID NO: 7102; WAN024F6Y; Start 84; Stop 108
ctttgagaaacctgtggctatcttc

SEQ ID NO: 458646 - DNA, 25 bp, Artificial
  probe
  misc_feature (1)..(25): SEQ ID NO: 7102; WAN024F6Y; Start 81; Stop 105
gtactttgagaaacctgtggctatc

SEQ ID NO: 458647 - DNA, 25 bp, Artificial
  probe
  misc_feature (1)..(25): SEQ ID NO: 7102; WAN024F6Y; Start 83; Stop 107
actttgagaaacctgtggctatctt

SEQ ID NO: 458648 - DNA, 25 bp, Artificial
  probe
  misc_feature (1)..(25): SEQ ID NO: 7102; WAN024F6Y; Start 135; Stop 159
gtataagaggtctttcctaagcagt

SEQ ID NO: 458649 - DNA, 25 bp, Artificial
  probe
  misc_feature (1)..(25): SEQ ID NO: 7102; WAN024F6Y; Start 134; Stop 158
agtataagaggtctttcctaagcag

SEQ ID NO: 458650 - DNA, 25 bp, Artificial
  probe
  misc_feature (1)..(25): SEQ ID NO: 7102; WAN024F6Y; Start 133; Stop 157
gagtataagaggtctttcctaagca

SEQ ID NO: 458651 - DNA, 25 bp, Artificial
  probe
  misc_feature (1)..(25): SEQ ID NO: 7102; WAN024F6Y; Start 132; Stop 156
tgagtataagaggtctttcctaagc

SEQ ID NO: 458652 - DNA, 25 bp, Artificial
  probe
  misc_feature (1)..(25): SEQ ID NO: 7102; WAN024F6Y; Start 90; Stop 114
gaaacctgtggctatcttcctagtt

SEQ ID NO: 458653 - DNA, 25 bp, Artificial
  probe
  misc_feature (1)..(25): SEQ ID NO: 7102; WAN024F6Y; Start 88; Stop 112
gagaaacctgtggctatcttcctag

SEQ ID NO: 458654 - DNA, 25 bp, Artificial
  probe
  misc_feature (1)..(25): SEQ ID NO: 7102; WAN024F6Y; Start 60; Stop 84
tttatttacaacctcaaagcggtac

SEQ ID NO: 458655 - DNA, 25 bp, Artificial
  probe
  misc_feature (1)..(25): SEQ ID NO: 7102; WAN024F6Y; Start 62; Stop 86
tatttacaacctcaaagcggtactt

SEQ ID NO: 458656 - DNA, 25 bp, Artificial
  probe
  misc_feature (1)..(25): SEQ ID NO: 7102; WAN024F6Y; Start 61; Stop 85
ttatttacaacctcaaagcggtact

SEQ ID NO: 458657 - DNA, 25 bp, Artificial
  probe
  misc_feature (1)..(25): SEQ ID NO: 7102; WAN024F6Y; Start 87; Stop 111
tgagaaacctgtggctatcttccta

SEQ ID NO: 458658 - DNA, 25 bp, Artificial
  probe
  misc_feature (1)..(25): SEQ ID NO: 7102; WAN024F6Y; Start 85; Stop 109
tttgagaaacctgtggctatcttcc

SEQ ID NO: 458659 - DNA, 25 bp, Artificial
  probe
  misc_feature (1)..(25): SEQ ID NO: 7102; WAN024F6Y; Start 89; Stop 113
agaaacctgtggctatcttcctagt

SEQ ID NO: 458660 - DNA, 25 bp, Artificial
  probe
  misc_feature (1)..(25): SEQ ID NO: 7102; WAN024F6Y; Start 63; Stop 87
atttacaacctcaaagcggtacttt

SEQ ID NO: 458661 - DNA, 25 bp, Artificial
  probe
  misc_feature (1)..(25): SEQ ID NO: 7102; WAN024F6Y; Start 7; Stop 31
tcgtcagttttatctacaacctcaa

SEQ ID NO: 458662 - DNA, 25 bp, Artificial
  probe
  misc_feature (1)..(25): SEQ ID NO: 7102; WAN024F6Y; Start 6; Stop 30
ttcgtcagttttatctacaacctca

SEQ ID NO: 458663 - DNA, 25 bp, Artificial
  probe
  misc_feature (1)..(25): SEQ ID NO: 7102; WAN024F6Y; Start 57; Stop 81
agttttatttacaacctcaaagcgg

SEQ ID NO: 458664 - DNA, 25 bp, Artificial
  probe
  misc_feature (1)..(25): SEQ ID NO: 7102; WAN024F6Y; Start 56; Stop 80
cagttttatttacaacctcaaagcg

SEQ ID NO: 458665 - DNA, 25 bp, Artificial
  probe
  misc_feature (1)..(25): SEQ ID NO: 7102; WAN024F6Y; Start 5; Stop 29
cttcgtcagttttatctacaacctc

SEQ ID NO: 458666 - DNA, 25 bp, Artificial
  probe
  misc_feature (1)..(25): SEQ ID NO: 7102; WAN024F6Y; Start 91; Stop 115
aaacctgtggctatcttcctagttt

SEQ ID NO: 458667 - DNA, 25 bp, Artificial
  probe
  misc_feature (1)..(25): SEQ ID NO: 7102; WAN024F6Y; Start 10; Stop 34
tcagttttatctacaacctcaaagc

SEQ ID NO: 458668 - DNA, 25 bp, Artificial
  probe
  misc_feature (1)..(25): SEQ ID NO: 7102; WAN024F6Y; Start 8; Stop 32
cgtcagttttatctacaacctcaaa

SEQ ID NO: 458669 - DNA, 25 bp, Artificial
  probe
  misc_feature (1)..(25): SEQ ID NO: 7102; WAN024F6Y; Start 86; Stop 110
ttgagaaacctgtggctatcttcct

SEQ ID NO: 458670 - DNA, 25 bp, Artificial
  probe
  misc_feature (1)..(25): SEQ ID NO: 7102; WAN024F6Y; Start 4; Stop 28
acttcgtcagttttatctacaacct

SEQ ID NO: 458671 - DNA, 25 bp, Artificial
  probe
  misc_feature (1)..(25): SEQ ID NO: 7102; WAN024F6Y; Start 131; Stop 155
ttgagtataagaggtctttcctaag

SEQ ID NO: 458672 - DNA, 25 bp, Artificial
  probe
  misc_feature (1)..(25): SEQ ID NO: 7103; WAN024EVY; Start 14; Stop 38
actggcaaacttttctgatgatttt

SEQ ID NO: 458673 - DNA, 25 bp, Artificial
  probe
  misc_feature (1)..(25): SEQ ID NO: 7103; WAN024EVY; Start 15; Stop 39
ctggcaaacttttctgatgattttc

SEQ ID NO: 458674 - DNA, 25 bp, Artificial
  probe
  misc_feature (1)..(25): SEQ ID NO: 7103; WAN024EVY; Start 13; Stop 37
gactggcaaacttttctgatgattt

SEQ ID NO: 458675 - DNA, 25 bp, Artificial
  probe
  misc_feature (1)..(25): SEQ ID NO: 7103; WAN024EVY; Start 16; Stop 40
tggcaaacttttctgatgattttca

SEQ ID NO: 458676 - DNA, 25 bp, Artificial
  probe
  misc_feature (1)..(25): SEQ ID NO: 7103; WAN024EVY; Start 12; Stop 36
agactggcaaacttttctgatgatt

SEQ ID NO: 458677 - DNA, 25 bp, Artificial
  probe
  misc_feature (1)..(25): SEQ ID NO: 7103; WAN024EVY; Start 11; Stop 35
aagactggcaaacttttctgatgat

SEQ ID NO: 458678 - DNA, 25 bp, Artificial
  probe
  misc_feature (1)..(25): SEQ ID NO: 7103; WAN024EVY; Start 1; Stop 25
ctgacttttaaagactggcaaactt

SEQ ID NO: 458679 - DNA, 25 bp, Artificial
  probe
  misc_feature (1)..(25): SEQ ID NO: 7103; WAN024EVY; Start 9; Stop 33
taaagactggcaaacttttctgatg

SEQ ID NO: 458680 - DNA, 25 bp, Artificial
  probe
  misc_feature (1)..(25): SEQ ID NO: 7103; WAN024EVY; Start 8; Stop 32
ttaaagactggcaaacttttctgat

SEQ ID NO: 458681 - DNA, 25 bp, Artificial
  probe
  misc_feature (1)..(25): SEQ ID NO: 7103; WAN024EVY; Start 10; Stop 34
aaagactggcaaacttttctgatga

SEQ ID NO: 458682 - DNA, 25 bp, Artificial
  probe
  misc_feature (1)..(25): SEQ ID NO: 7103; WAN024EVY; Start 17; Stop 41
ggcaaacttttctgatgattttcat

SEQ ID NO: 458683 - DNA, 25 bp, Artificial
  probe
  misc_feature (1)..(25): SEQ ID NO: 7103; WAN024EVY; Start 2; Stop 26
tgacttttaaagactggcaaacttt

SEQ ID NO: 458684 - DNA, 25 bp, Artificial
  probe
  misc_feature (1)..(25): SEQ ID NO: 7103; WAN024EVY; Start 7; Stop 31
tttaaagactggcaaacttttctga

SEQ ID NO: 458685 - DNA, 25 bp, Artificial
  probe
  misc_feature (1)..(25): SEQ ID NO: 7103; WAN024EVY; Start 6; Stop 30
ttttaaagactggcaaacttttctg

SEQ ID NO: 458686 - DNA, 25 bp, Artificial
  probe
  misc_feature (1)..(25): SEQ ID NO: 7103; WAN024EVY; Start 4; Stop 28
acttttaaagactggcaaacttttc

SEQ ID NO: 458687 - DNA, 25 bp, Artificial
  probe
  misc_feature (1)..(25): SEQ ID NO: 7103; WAN024EVY; Start 3; Stop 27
gacttttaaagactggcaaactttt

SEQ ID NO: 458688 - DNA, 25 bp, Artificial
  probe
  misc_feature (1)..(25): SEQ ID NO: 7103; WAN024EVY; Start 5; Stop 29
cttttaaagactggcaaacttttct

SEQ ID NO: 458689 - DNA, 25 bp, Artificial
  probe
  misc_feature (1)..(25): SEQ ID NO: 7103; WAN024EVY; Start 18; Stop 42
gcaaacttttctgatgattttcatg

SEQ ID NO: 458690 - DNA, 25 bp, Artificial
  probe
  misc_feature (1)..(25): SEQ ID NO: 7103; WAN024EVY; Start 52; Stop 76
cgcttttatggtaaaatagtaacag

SEQ ID NO: 458691 - DNA, 25 bp, Artificial
  probe
  misc_feature (1)..(25): SEQ ID NO: 7103; WAN024EVY; Start 48; Stop 72
cctgcgcttttatggtaaaatagta

SEQ ID NO: 458692 - DNA, 25 bp, Artificial
  probe
  misc_feature (1)..(25): SEQ ID NO: 7103; WAN024EVY; Start 51; Stop 75
gcgcttttatggtaaaatagtaaca

SEQ ID NO: 458693 - DNA, 25 bp, Artificial
  probe
  misc_feature (1)..(25): SEQ ID NO: 7103; WAN024EVY; Start 50; Stop 74
tgcgcttttatggtaaaatagtaac

SEQ ID NO: 458694 - DNA, 25 bp, Artificial
  probe
  misc_feature (1)..(25): SEQ ID NO: 7103; WAN024EVY; Start 46; Stop 70
agcctgcgcttttatggtaaaatag

SEQ ID NO: 458695 - DNA, 25 bp, Artificial
  probe
  misc_feature (1)..(25): SEQ ID NO: 7103; WAN024EVY; Start 45; Stop 69
gagcctgcgcttttatggtaaaata

SEQ ID NO: 458696 - DNA, 25 bp, Artificial
  probe
  misc_feature (1)..(25): SEQ ID NO: 7103; WAN024EVY; Start 49; Stop 73
ctgcgcttttatggtaaaatagtaa

SEQ ID NO: 458697 - DNA, 25 bp, Artificial
  probe
  misc_feature (1)..(25): SEQ ID NO: 7103; WAN024EVY; Start 47; Stop 71
gcctgcgcttttatggtaaaatagt

SEQ ID NO: 458698 - DNA, 25 bp, Artificial
  probe
  misc_feature (1)..(25): SEQ ID NO: 7103; WAN024EVY; Start 53; Stop 77
gcttttatggtaaaatagtaacaga

SEQ ID NO: 458699 - DNA, 25 bp, Artificial
  probe
  misc_feature (1)..(25): SEQ ID NO: 7103; WAN024EVY; Start 19; Stop 43
caaacttttctgatgattttcatga

SEQ ID NO: 458700 - DNA, 25 bp, Artificial
  probe
  misc_feature (1)..(25): SEQ ID NO: 7103; WAN024EVY; Start 44; Stop 68
agagcctgcgcttttatggtaaaat

SEQ ID NO: 458701 - DNA, 25 bp, Artificial
  probe
  misc_feature (1)..(25): SEQ ID NO: 7103; WAN024EVY; Start 43; Stop 67
aagagcctgcgcttttatggtaaaa

SEQ ID NO: 458702 - DNA, 25 bp, Artificial
  probe
  misc_feature (1)..(25): SEQ ID NO: 7103; WAN024EVY; Start 42; Stop 66
gaagagcctgcgcttttatggtaaa

SEQ ID NO: 458703 - DNA, 25 bp, Artificial
  probe
  misc_feature (1)..(25): SEQ ID NO: 7103; WAN024EVY; Start 40; Stop 64
atgaagagcctgcgcttttatggta

SEQ ID NO: 458704 - DNA, 25 bp, Artificial
  probe
  misc_feature (1)..(25): SEQ ID NO: 7103; WAN024EVY; Start 41; Stop 65
tgaagagcctgcgcttttatggtaa

SEQ ID NO: 458705 - DNA, 25 bp, Artificial
  probe
  misc_feature (1)..(25): SEQ ID NO: 7104; WAN024BWG; Start 323; Stop 347
aagtgaatcagagcaacgaatacaa

SEQ ID NO: 458706 - DNA, 25 bp, Artificial
  probe
  misc_feature (1)..(25): SEQ ID NO: 7104; WAN024BWG; Start 322; Stop 346
gaagtgaatcagagcaacgaataca

SEQ ID NO: 458707 - DNA, 25 bp, Artificial
  probe
  misc_feature (1)..(25): SEQ ID NO: 7104; WAN024BWG; Start 320; Stop 344
ttgaagtgaatcagagcaacgaata

SEQ ID NO: 458708 - DNA, 25 bp, Artificial
  probe
  misc_feature (1)..(25): SEQ ID NO: 7104; WAN024BWG; Start 311; Stop 335
atctcatcgttgaagtgaatcagag

SEQ ID NO: 458709 - DNA, 25 bp, Artificial
  probe
  misc_feature (1)..(25): SEQ ID NO: 7104; WAN024BWG; Start 421; Stop 445
tctacaatagcagaactcaagatcc

SEQ ID NO: 458710 - DNA, 25 bp, Artificial
  probe
  misc_feature (1)..(25): SEQ ID NO: 7104; WAN024BWG; Start 418; Stop 442
ggatctacaatagcagaactcaaga

SEQ ID NO: 458711 - DNA, 25 bp, Artificial
  probe
  misc_feature (1)..(25): SEQ ID NO: 7104; WAN024BWG; Start 417; Stop 441
tggatctacaatagcagaactcaag

SEQ ID NO: 458712 - DNA, 25 bp, Artificial
  probe
  misc_feature (1)..(25): SEQ ID NO: 7104; WAN024BWG; Start 169; Stop 193
gaatatgtgataggaggcgatggaa

SEQ ID NO: 458713 - DNA, 25 bp, Artificial
  probe
  misc_feature (1)..(25): SEQ ID NO: 7104; WAN024BWG; Start 321; Stop 345
tgaagtgaatcagagcaacgaatac

SEQ ID NO: 458714 - DNA, 25 bp, Artificial
  probe
  misc_feature (1)..(25): SEQ ID NO: 7104; WAN024BWG; Start 310; Stop 334
gatctcatcgttgaagtgaatcaga

SEQ ID NO: 458715 - DNA, 25 bp, Artificial
  probe
  misc_feature (1)..(25): SEQ ID NO: 7104; WAN024BWG; Start 416; Stop 440
ctggatctacaatagcagaactcaa

SEQ ID NO: 458716 - DNA, 25 bp, Artificial
  probe
  misc_feature (1)..(25): SEQ ID NO: 7104; WAN024BWG; Start 414; Stop 438
aactggatctacaatagcagaactc

SEQ ID NO: 458717 - DNA, 25 bp, Artificial
  probe
  misc_feature (1)..(25): SEQ ID NO: 7104; WAN024BWG; Start 413; Stop 437
gaactggatctacaatagcagaact

SEQ ID NO: 458718 - DNA, 25 bp, Artificial
  probe
  misc_feature (1)..(25): SEQ ID NO: 7104; WAN024BWG; Start 415; Stop 439
actggatctacaatagcagaactca

SEQ ID NO: 458719 - DNA, 25 bp, Artificial
  probe
  misc_feature (1)..(25): SEQ ID NO: 7104; WAN024BWG; Start 412; Stop 436
ggaactggatctacaatagcagaac

SEQ ID NO: 458720 - DNA, 25 bp, Artificial
  probe
  misc_feature (1)..(25): SEQ ID NO: 7104; WAN024BWG; Start 411; Stop 435
tggaactggatctacaatagcagaa

SEQ ID NO: 458721 - DNA, 25 bp, Artificial
  probe
  misc_feature (1)..(25): SEQ ID NO: 7104; WAN024BWG; Start 410; Stop 434
ttggaactggatctacaatagcaga

SEQ ID NO: 458722 - DNA, 25 bp, Artificial
  probe
  misc_feature (1)..(25): SEQ ID NO: 7104; WAN024BWG; Start 167; Stop 191
gtgaatatgtgataggaggcgatgg

SEQ ID NO: 458723 - DNA, 25 bp, Artificial
  probe
  misc_feature (1)..(25): SEQ ID NO: 7104; WAN024BWG; Start 166; Stop 190
ggtgaatatgtgataggaggcgatg

SEQ ID NO: 458724 - DNA, 25 bp, Artificial
  probe
  misc_feature (1)..(25): SEQ ID NO: 7104; WAN024BWG; Start 327; Stop 351
gaatcagagcaacgaatacaaagtc

SEQ ID NO: 458725 - DNA, 25 bp, Artificial
  probe
  misc_feature (1)..(25): SEQ ID NO: 7104; WAN024BWG; Start 168; Stop 192
tgaatatgtgataggaggcgatgga

SEQ ID NO: 458726 - DNA, 25 bp, Artificial
  probe
  misc_feature (1)..(25): SEQ ID NO: 7104; WAN024BWG; Start 325; Stop 349
gtgaatcagagcaacgaatacaaag

SEQ ID NO: 458727 - DNA, 25 bp, Artificial
  probe
  misc_feature (1)..(25): SEQ ID NO: 7104; WAN024BWG; Start 264; Stop 288
tttgaacgatggaaacagaaacttc

SEQ ID NO: 458728 - DNA, 25 bp, Artificial
  probe
  misc_feature (1)..(25): SEQ ID NO: 7104; WAN024BWG; Start 326; Stop 350
tgaatcagagcaacgaatacaaagt

SEQ ID NO: 458729 - DNA, 25 bp, Artificial
  probe
  misc_feature (1)..(25): SEQ ID NO: 7104; WAN024BWG; Start 324; Stop 348
agtgaatcagagcaacgaatacaaa

SEQ ID NO: 458730 - DNA, 25 bp, Artificial
  probe
  misc_feature (1)..(25): SEQ ID NO: 7104; WAN024BWG; Start 314; Stop 338
tcatcgttgaagtgaatcagagcaa

SEQ ID NO: 458731 - DNA, 25 bp, Artificial
  probe
  misc_feature (1)..(25): SEQ ID NO: 7104; WAN024BWG; Start 328; Stop 352
aatcagagcaacgaatacaaagtct

SEQ ID NO: 458732 - DNA, 25 bp, Artificial
  probe
  misc_feature (1)..(25): SEQ ID NO: 7104; WAN024BWG; Start 271; Stop 295
gatggaaacagaaacttcacaaacc

SEQ ID NO: 458733 - DNA, 25 bp, Artificial
  probe
  misc_feature (1)..(25): SEQ ID NO: 7104; WAN024BWG; Start 270; Stop 294
cgatggaaacagaaacttcacaaac

SEQ ID NO: 458734 - DNA, 25 bp, Artificial
  probe
  misc_feature (1)..(25): SEQ ID NO: 7104; WAN024BWG; Start 170; Stop 194
aatatgtgataggaggcgatggaaa

SEQ ID NO: 458735 - DNA, 25 bp, Artificial
  probe
  misc_feature (1)..(25): SEQ ID NO: 7104; WAN024BWG; Start 336; Stop 360
caacgaatacaaagtctggagagtg

SEQ ID NO: 458736 - DNA, 25 bp, Artificial
  probe
  misc_feature (1)..(25): SEQ ID NO: 7104; WAN024BWG; Start 422; Stop 446
ctacaatagcagaactcaagatccc

SEQ ID NO: 458737 - DNA, 25 bp, Artificial
  probe
  misc_feature (1)..(25): SEQ ID NO: 7104; WAN024BWG; Start 426; Stop 450
aatagcagaactcaagatcccaatc

SEQ ID NO: 458738 - DNA, 25 bp, Artificial
  probe
  misc_feature (1)..(25): SEQ ID NO: 7105; WAN024BVW; Start 1449; Stop 1473
ccgtgttaggattgaagattatgac

SEQ ID NO: 458739 - DNA, 25 bp, Artificial
  probe
  misc_feature (1)..(25): SEQ ID NO: 7105; WAN024BVW; Start 1039; Stop 1063
ggctggtatcgtagaattatgattg

SEQ ID NO: 458740 - DNA, 25 bp, Artificial
  probe
  misc_feature (1)..(25): SEQ ID NO: 7105; WAN024BVW; Start 1038; Stop 1062
aggctggtatcgtagaattatgatt

SEQ ID NO: 458741 - DNA, 25 bp, Artificial
  probe
  misc_feature (1)..(25): SEQ ID NO: 7105; WAN024BVW; Start 1037; Stop 1061
aaggctggtatcgtagaattatgat

SEQ ID NO: 458742 - DNA, 25 bp, Artificial
  probe
  misc_feature (1)..(25): SEQ ID NO: 7105; WAN024BVW; Start 1392; Stop 1416
agatactatcagacacctacaacag

SEQ ID NO: 458743 - DNA, 25 bp, Artificial
  probe
  misc_feature (1)..(25): SEQ ID NO: 7105; WAN024BVW; Start 623; Stop 647
actcaatcgcttgtaatgatagtga

SEQ ID NO: 458744 - DNA, 25 bp, Artificial
  probe
  misc_feature (1)..(25): SEQ ID NO: 7105; WAN024BVW; Start 1040; Stop 1064
gctggtatcgtagaattatgattgt

SEQ ID NO: 458745 - DNA, 25 bp, Artificial
  probe
  misc_feature (1)..(25): SEQ ID NO: 7105; WAN024BVW; Start 622; Stop 646
aactcaatcgcttgtaatgatagtg

SEQ ID NO: 458746 - DNA, 25 bp, Artificial
  probe
  misc_feature (1)..(25): SEQ ID NO: 7105; WAN024BVW; Start 1391; Stop 1415
aagatactatcagacacctacaaca

SEQ ID NO: 458747 - DNA, 25 bp, Artificial
  probe
  misc_feature (1)..(25): SEQ ID NO: 7105; WAN024BVW; Start 1393; Stop 1417
gatactatcagacacctacaacagt

SEQ ID NO: 458748 - DNA, 25 bp, Artificial
  probe
  misc_feature (1)..(25): SEQ ID NO: 7105; WAN024BVW; Start 1127; Stop 1151
ccaatgatgaagtattagagtacgc

SEQ ID NO: 458749 - DNA, 25 bp, Artificial
  probe
  misc_feature (1)..(25): SEQ ID NO: 7105; WAN024BVW; Start 1126; Stop 1150
gccaatgatgaagtattagagtacg

SEQ ID NO: 458750 - DNA, 25 bp, Artificial
  probe
  misc_feature (1)..(25): SEQ ID NO: 7105; WAN024BVW; Start 1396; Stop 1420
actatcagacacctacaacagttaa

SEQ ID NO: 458751 - DNA, 25 bp, Artificial
  probe
  misc_feature (1)..(25): SEQ ID NO: 7105; WAN024BVW; Start 1394; Stop 1418
atactatcagacacctacaacagtt

SEQ ID NO: 458752 - DNA, 25 bp, Artificial
  probe
  misc_feature (1)..(25): SEQ ID NO: 7105; WAN024BVW; Start 403; Stop 427
ccgcagattaagttaatggttagaa

SEQ ID NO: 458753 - DNA, 25 bp, Artificial
  probe
  misc_feature (1)..(25): SEQ ID NO: 7105; WAN024BVW; Start 1042; Stop 1066
tggtatcgtagaattatgattgtcc

SEQ ID NO: 458754 - DNA, 25 bp, Artificial
  probe
  misc_feature (1)..(25): SEQ ID NO: 7105; WAN024BVW; Start 477; Stop 501
acagaacggaattatcaacttagaa

SEQ ID NO: 458755 - DNA, 25 bp, Artificial
  probe
  misc_feature (1)..(25): SEQ ID NO: 7105; WAN024BVW; Start 1129; Stop 1153
aatgatgaagtattagagtacgcac

SEQ ID NO: 458756 - DNA, 25 bp, Artificial
  probe
  misc_feature (1)..(25): SEQ ID NO: 7105; WAN024BVW; Start 1128; Stop 1152
caatgatgaagtattagagtacgca

SEQ ID NO: 458757 - DNA, 25 bp, Artificial
  probe
  misc_feature (1)..(25): SEQ ID NO: 7105; WAN024BVW; Start 83; Stop 107
aagaacaacctcctagaacgatgaa

SEQ ID NO: 458758 - DNA, 25 bp, Artificial
  probe
  misc_feature (1)..(25): SEQ ID NO: 7105; WAN024BVW; Start 1450; Stop 1474
cgtgttaggattgaagattatgaca

SEQ ID NO: 458759 - DNA, 25 bp, Artificial
  probe
  misc_feature (1)..(25): SEQ ID NO: 7105; WAN024BVW; Start 402; Stop 426
gccgcagattaagttaatggttaga

SEQ ID NO: 458760 - DNA, 25 bp, Artificial
  probe
  misc_feature (1)..(25): SEQ ID NO: 7105; WAN024BVW; Start 1130; Stop 1154
atgatgaagtattagagtacgcact

SEQ ID NO: 458761 - DNA, 25 bp, Artificial
  probe
  misc_feature (1)..(25): SEQ ID NO: 7105; WAN024BVW; Start 1395; Stop 1419
tactatcagacacctacaacagtta

SEQ ID NO: 458762 - DNA, 25 bp, Artificial
  probe
  misc_feature (1)..(25): SEQ ID NO: 7105; WAN024BVW; Start 404; Stop 428
cgcagattaagttaatggttagaac

SEQ ID NO: 458763 - DNA, 25 bp, Artificial
  probe
  misc_feature (1)..(25): SEQ ID NO: 7105; WAN024BVW; Start 84; Stop 108
agaacaacctcctagaacgatgaag

SEQ ID NO: 458764 - DNA, 25 bp, Artificial
  probe
  misc_feature (1)..(25): SEQ ID NO: 7105; WAN024BVW; Start 1317; Stop 1341
tatactgaccagaacactgaagcat

SEQ ID NO: 458765 - DNA, 25 bp, Artificial
  probe
  misc_feature (1)..(25): SEQ ID NO: 7105; WAN024BVW; Start 1319; Stop 1343
tactgaccagaacactgaagcatta

SEQ ID NO: 458766 - DNA, 25 bp, Artificial
  probe
  misc_feature (1)..(25): SEQ ID NO: 7105; WAN024BVW; Start 1316; Stop 1340
ttatactgaccagaacactgaagca

SEQ ID NO: 458767 - DNA, 25 bp, Artificial
  probe
  misc_feature (1)..(25): SEQ ID NO: 7105; WAN024BVW; Start 82; Stop 106
caagaacaacctcctagaacgatga

SEQ ID NO: 458768 - DNA, 25 bp, Artificial
  probe
  misc_feature (1)..(25): SEQ ID NO: 7105; WAN024BVW; Start 476; Stop 500
tacagaacggaattatcaacttaga

SEQ ID NO: 458769 - DNA, 25 bp, Artificial
  probe
  misc_feature (1)..(25): SEQ ID NO: 7105; WAN024BVW; Start 632; Stop 656
cttgtaatgatagtgagctagtgac

SEQ ID NO: 458770 - DNA, 25 bp, Artificial
  probe
  misc_feature (1)..(25): SEQ ID NO: 7105; WAN024BVW; Start 678; Stop 702
tgaagctatcaactctaaccatacc

SEQ ID NO: 458771 - DNA, 25 bp, Artificial
  probe
  misc_feature (1)..(25): SEQ ID NO: 7106; WAN024BU8; Start 881; Stop 905
tcaaggaacagcacaaggattatat

SEQ ID NO: 458772 - DNA, 25 bp, Artificial
  probe
  misc_feature (1)..(25): SEQ ID NO: 7106; WAN024BU8; Start 880; Stop 904
atcaaggaacagcacaaggattata

SEQ ID NO: 458773 - DNA, 25 bp, Artificial
  probe
  misc_feature (1)..(25): SEQ ID NO: 7106; WAN024BU8; Start 879; Stop 903
tatcaaggaacagcacaaggattat

SEQ ID NO: 458774 - DNA, 25 bp, Artificial
  probe
  misc_feature (1)..(25): SEQ ID NO: 7106; WAN024BU8; Start 878; Stop 902
ttatcaaggaacagcacaaggatta

SEQ ID NO: 458775 - DNA, 25 bp, Artificial
  probe
  misc_feature (1)..(25): SEQ ID NO: 7106; WAN024BU8; Start 872; Stop 896
taggaattatcaaggaacagcacaa

SEQ ID NO: 458776 - DNA, 25 bp, Artificial
  probe
  misc_feature (1)..(25): SEQ ID NO: 7106; WAN024BU8; Start 871; Stop 895
ttaggaattatcaaggaacagcaca

SEQ ID NO: 458777 - DNA, 25 bp, Artificial
  probe
  misc_feature (1)..(25): SEQ ID NO: 7106; WAN024BU8; Start 877; Stop 901
attatcaaggaacagcacaaggatt

SEQ ID NO: 458778 - DNA, 25 bp, Artificial
  probe
  misc_feature (1)..(25): SEQ ID NO: 7106; WAN024BU8; Start 317; Stop 341
atctctacaagaaccatatcaaggc

SEQ ID NO: 458779 - DNA, 25 bp, Artificial
  probe
  misc_feature (1)..(25): SEQ ID NO: 7106; WAN024BU8; Start 292; Stop 316
gacacttcctactacctcaatgata

SEQ ID NO: 458780 - DNA, 25 bp, Artificial
  probe
  misc_feature (1)..(25): SEQ ID NO: 7106; WAN024BU8; Start 876; Stop 900
aattatcaaggaacagcacaaggat

SEQ ID NO: 458781 - DNA, 25 bp, Artificial
  probe
  misc_feature (1)..(25): SEQ ID NO: 7106; WAN024BU8; Start 319; Stop 343
ctctacaagaaccatatcaaggcaa

SEQ ID NO: 458782 - DNA, 25 bp, Artificial
  probe
  misc_feature (1)..(25): SEQ ID NO: 7106; WAN024BU8; Start 870; Stop 894
gttaggaattatcaaggaacagcac

SEQ ID NO: 458783 - DNA, 25 bp, Artificial
  probe
  misc_feature (1)..(25): SEQ ID NO: 7106; WAN024BU8; Start 869; Stop 893
agttaggaattatcaaggaacagca

SEQ ID NO: 458784 - DNA, 25 bp, Artificial
  probe
  misc_feature (1)..(25): SEQ ID NO: 7106; WAN024BU8; Start 962; Stop 986
atctagtgaatgaagcaacaggatt

SEQ ID NO: 458785 - DNA, 25 bp, Artificial
  probe
  misc_feature (1)..(25): SEQ ID NO: 7106; WAN024BU8; Start 961; Stop 985
aatctagtgaatgaagcaacaggat

SEQ ID NO: 458786 - DNA, 25 bp, Artificial
  probe
  misc_feature (1)..(25): SEQ ID NO: 7106; WAN024BU8; Start 293; Stop 317
acacttcctactacctcaatgataa

SEQ ID NO: 458787 - DNA, 25 bp, Artificial
  probe
  misc_feature (1)..(25): SEQ ID NO: 7106; WAN024BU8; Start 289; Stop 313
aatgacacttcctactacctcaatg

SEQ ID NO: 458788 - DNA, 25 bp, Artificial
  probe
  misc_feature (1)..(25): SEQ ID NO: 7106; WAN024BU8; Start 288; Stop 312
gaatgacacttcctactacctcaat

SEQ ID NO: 458789 - DNA, 25 bp, Artificial
  probe
  misc_feature (1)..(25): SEQ ID NO: 7106; WAN024BU8; Start 1103; Stop 1127
gttacaatcaagtagaggacgaact

SEQ ID NO: 458790 - DNA, 25 bp, Artificial
  probe
  misc_feature (1)..(25): SEQ ID NO: 7106; WAN024BU8; Start 875; Stop 899
gaattatcaaggaacagcacaagga

SEQ ID NO: 458791 - DNA, 25 bp, Artificial
  probe
  misc_feature (1)..(25): SEQ ID NO: 7106; WAN024BU8; Start 873; Stop 897
aggaattatcaaggaacagcacaag

SEQ ID NO: 458792 - DNA, 25 bp, Artificial
  probe
  misc_feature (1)..(25): SEQ ID NO: 7106; WAN024BU8; Start 614; Stop 638
aacaattctacgctctgacctatct

SEQ ID NO: 458793 - DNA, 25 bp, Artificial
  probe
  misc_feature (1)..(25): SEQ ID NO: 7106; WAN024BU8; Start 868; Stop 892
aagttaggaattatcaaggaacagc

SEQ ID NO: 458794 - DNA, 25 bp, Artificial
  probe
  misc_feature (1)..(25): SEQ ID NO: 7106; WAN024BU8; Start 960; Stop 984
caatctagtgaatgaagcaacagga

SEQ ID NO: 458795 - DNA, 25 bp, Artificial
  probe
  misc_feature (1)..(25): SEQ ID NO: 7106; WAN024BU8; Start 318; Stop 342
tctctacaagaaccatatcaaggca

SEQ ID NO: 458796 - DNA, 25 bp, Artificial
  probe
  misc_feature (1)..(25): SEQ ID NO: 7106; WAN024BU8; Start 291; Stop 315
tgacacttcctactacctcaatgat

SEQ ID NO: 458797 - DNA, 25 bp, Artificial
  probe
  misc_feature (1)..(25): SEQ ID NO: 7106; WAN024BU8; Start 290; Stop 314
atgacacttcctactacctcaatga

SEQ ID NO: 458798 - DNA, 25 bp, Artificial
  probe
  misc_feature (1)..(25): SEQ ID NO: 7106; WAN024BU8; Start 214; Stop 238
ggtatcaatacgaatctgacacttg

SEQ ID NO: 458799 - DNA, 25 bp, Artificial
  probe
  misc_feature (1)..(25): SEQ ID NO: 7106; WAN024BU8; Start 213; Stop 237
aggtatcaatacgaatctgacactt

SEQ ID NO: 458800 - DNA, 25 bp, Artificial
  probe
  misc_feature (1)..(25): SEQ ID NO: 7106; WAN024BU8; Start 1098; Stop 1122
ggatcgttacaatcaagtagaggac

SEQ ID NO: 458801 - DNA, 25 bp, Artificial
  probe
  misc_feature (1)..(25): SEQ ID NO: 7106; WAN024BU8; Start 815; Stop 839
tcggaacagacctgatctattatct

SEQ ID NO: 458802 - DNA, 25 bp, Artificial
  probe
  misc_feature (1)..(25): SEQ ID NO: 7106; WAN024BU8; Start 617; Stop 641
aattctacgctctgacctatctgac

SEQ ID NO: 458803 - DNA, 25 bp, Artificial
  probe
  misc_feature (1)..(25): SEQ ID NO: 7106; WAN024BU8; Start 616; Stop 640
caattctacgctctgacctatctga

SEQ ID NO: 458804 - DNA, 25 bp, Artificial
  probe
  misc_feature (1)..(25): SEQ ID NO: 7107; WAN024BWE; Start 197; Stop 221
ctgatgttgacggatgtatctatga

SEQ ID NO: 458805 - DNA, 25 bp, Artificial
  probe
  misc_feature (1)..(25): SEQ ID NO: 7107; WAN024BWE; Start 198; Stop 222
tgatgttgacggatgtatctatgac

SEQ ID NO: 458806 - DNA, 25 bp, Artificial
  probe
  misc_feature (1)..(25): SEQ ID NO: 7107; WAN024BWE; Start 199; Stop 223
gatgttgacggatgtatctatgacg

SEQ ID NO: 458807 - DNA, 25 bp, Artificial
  probe
  misc_feature (1)..(25): SEQ ID NO: 7107; WAN024BWE; Start 200; Stop 224
atgttgacggatgtatctatgacga

SEQ ID NO: 458808 - DNA, 25 bp, Artificial
  probe
  misc_feature (1)..(25): SEQ ID NO: 7107; WAN024BWE; Start 201; Stop 225
tgttgacggatgtatctatgacgat

SEQ ID NO: 458809 - DNA, 25 bp, Artificial
  probe
  misc_feature (1)..(25): SEQ ID NO: 7107; WAN024BWE; Start 196; Stop 220
gctgatgttgacggatgtatctatg

SEQ ID NO: 458810 - DNA, 25 bp, Artificial
  probe
  misc_feature (1)..(25): SEQ ID NO: 7107; WAN024BWE; Start 285; Stop 309
catcagattcattctcaacttcaga

SEQ ID NO: 458811 - DNA, 25 bp, Artificial
  probe
  misc_feature (1)..(25): SEQ ID NO: 7107; WAN024BWE; Start 284; Stop 308
tcatcagattcattctcaacttcag

SEQ ID NO: 458812 - DNA, 25 bp, Artificial
  probe
  misc_feature (1)..(25): SEQ ID NO: 7107; WAN024BWE; Start 212; Stop 236
gtatctatgacgatccttacgatgg

SEQ ID NO: 458813 - DNA, 25 bp, Artificial
  probe
  misc_feature (1)..(25): SEQ ID NO: 7107; WAN024BWE; Start 211; Stop 235
tgtatctatgacgatccttacgatg

SEQ ID NO: 458814 - DNA, 25 bp, Artificial
  probe
  misc_feature (1)..(25): SEQ ID NO: 7107; WAN024BWE; Start 209; Stop 233
gatgtatctatgacgatccttacga

SEQ ID NO: 458815 - DNA, 25 bp, Artificial
  probe
  misc_feature (1)..(25): SEQ ID NO: 7107; WAN024BWE; Start 283; Stop 307
ttcatcagattcattctcaacttca

SEQ ID NO: 458816 - DNA, 25 bp, Artificial
  probe
  misc_feature (1)..(25): SEQ ID NO: 7107; WAN024BWE; Start 202; Stop 226
gttgacggatgtatctatgacgatc

SEQ ID NO: 458817 - DNA, 25 bp, Artificial
  probe
  misc_feature (1)..(25): SEQ ID NO: 7107; WAN024BWE; Start 210; Stop 234
atgtatctatgacgatccttacgat

SEQ ID NO: 458818 - DNA, 25 bp, Artificial
  probe
  misc_feature (1)..(25): SEQ ID NO: 7107; WAN024BWE; Start 213; Stop 237
tatctatgacgatccttacgatggc

SEQ ID NO: 458819 - DNA, 25 bp, Artificial
  probe
  misc_feature (1)..(25): SEQ ID NO: 7107; WAN024BWE; Start 195; Stop 219
cgctgatgttgacggatgtatctat

SEQ ID NO: 458820 - DNA, 25 bp, Artificial
  probe
  misc_feature (1)..(25): SEQ ID NO: 7107; WAN024BWE; Start 17; Stop 41
aaggatctcctgttatctactacgg

SEQ ID NO: 458821 - DNA, 25 bp, Artificial
  probe
  misc_feature (1)..(25): SEQ ID NO: 7107; WAN024BWE; Start 364; Stop 388
aacctcatagcgttctacagagaat

SEQ ID NO: 458822 - DNA, 25 bp, Artificial
  probe
  misc_feature (1)..(25): SEQ ID NO: 7107; WAN024BWE; Start 214; Stop 238
atctatgacgatccttacgatggct

SEQ ID NO: 458823 - DNA, 25 bp, Artificial
  probe
  misc_feature (1)..(25): SEQ ID NO: 7107; WAN024BWE; Start 28; Stop 52
gttatctactacggcggtgaaattg

SEQ ID NO: 458824 - DNA, 25 bp, Artificial
  probe
  misc_feature (1)..(25): SEQ ID NO: 7107; WAN024BWE; Start 367; Stop 391
ctcatagcgttctacagagaatcct

SEQ ID NO: 458825 - DNA, 25 bp, Artificial
  probe
  misc_feature (1)..(25): SEQ ID NO: 7107; WAN024BWE; Start 368; Stop 392
tcatagcgttctacagagaatcctc

SEQ ID NO: 458826 - DNA, 25 bp, Artificial
  probe
  misc_feature (1)..(25): SEQ ID NO: 7107; WAN024BWE; Start 492; Stop 516
aaacttcatctggaacgagtcaaac

SEQ ID NO: 458827 - DNA, 25 bp, Artificial
  probe
  misc_feature (1)..(25): SEQ ID NO: 7107; WAN024BWE; Start 365; Stop 389
acctcatagcgttctacagagaatc

SEQ ID NO: 458828 - DNA, 25 bp, Artificial
  probe
  misc_feature (1)..(25): SEQ ID NO: 7107; WAN024BWE; Start 27; Stop 51
tgttatctactacggcggtgaaatt

SEQ ID NO: 458829 - DNA, 25 bp, Artificial
  probe
  misc_feature (1)..(25): SEQ ID NO: 7107; WAN024BWE; Start 215; Stop 239
tctatgacgatccttacgatggctt

SEQ ID NO: 458830 - DNA, 25 bp, Artificial
  probe
  misc_feature (1)..(25): SEQ ID NO: 7107; WAN024BWE; Start 180; Stop 204
gataacctttggaaacgctgatgtt

SEQ ID NO: 458831 - DNA, 25 bp, Artificial
  probe
  misc_feature (1)..(25): SEQ ID NO: 7107; WAN024BWE; Start 286; Stop 310
atcagattcattctcaacttcagaa

SEQ ID NO: 458832 - DNA, 25 bp, Artificial
  probe
  misc_feature (1)..(25): SEQ ID NO: 7107; WAN024BWE; Start 194; Stop 218
acgctgatgttgacggatgtatcta

SEQ ID NO: 458833 - DNA, 25 bp, Artificial
  probe
  misc_feature (1)..(25): SEQ ID NO: 7107; WAN024BWE; Start 47; Stop 71
aaattggaacgagaggtttcaagtg

SEQ ID NO: 458834 - DNA, 25 bp, Artificial
  probe
  misc_feature (1)..(25): SEQ ID NO: 7107; WAN024BWE; Start 26; Stop 50
ctgttatctactacggcggtgaaat

SEQ ID NO: 458835 - DNA, 25 bp, Artificial
  probe
  misc_feature (1)..(25): SEQ ID NO: 7107; WAN024BWE; Start 375; Stop 399
gttctacagagaatcctccaacgaa

SEQ ID NO: 458836 - DNA, 25 bp, Artificial
  probe
  misc_feature (1)..(25): SEQ ID NO: 7107; WAN024BWE; Start 181; Stop 205
ataacctttggaaacgctgatgttg

SEQ ID NO: 458837 - DNA, 25 bp, Artificial
  probe
  misc_feature (1)..(25): SEQ ID NO: 7108; WAN024BZ8; Start 411; Stop 435
gttacactccatcactcaggaatac

SEQ ID NO: 458838 - DNA, 25 bp, Artificial
  probe
  misc_feature (1)..(25): SEQ ID NO: 7108; WAN024BZ8; Start 413; Stop 437
tacactccatcactcaggaatacaa

SEQ ID NO: 458839 - DNA, 25 bp, Artificial
  probe
  misc_feature (1)..(25): SEQ ID NO: 7108; WAN024BZ8; Start 412; Stop 436
ttacactccatcactcaggaataca

SEQ ID NO: 458840 - DNA, 25 bp, Artificial
  probe
  misc_feature (1)..(25): SEQ ID NO: 7108; WAN024BZ8; Start 410; Stop 434
tgttacactccatcactcaggaata

SEQ ID NO: 458841 - DNA, 25 bp, Artificial
  probe
  misc_feature (1)..(25): SEQ ID NO: 7108; WAN024BZ8; Start 420; Stop 444
catcactcaggaatacaacatgacc

SEQ ID NO: 458842 - DNA, 25 bp, Artificial
  probe
  misc_feature (1)..(25): SEQ ID NO: 7108; WAN024BZ8; Start 419; Stop 443
ccatcactcaggaatacaacatgac

SEQ ID NO: 458843 - DNA, 25 bp, Artificial
  probe
  misc_feature (1)..(25): SEQ ID NO: 7108; WAN024BZ8; Start 517; Stop 541
aataaggaatggcaaggtgtaagca

SEQ ID NO: 458844 - DNA, 25 bp, Artificial
  probe
  misc_feature (1)..(25): SEQ ID NO: 7108; WAN024BZ8; Start 515; Stop 539
gaaataaggaatggcaaggtgtaag

SEQ ID NO: 458845 - DNA, 25 bp, Artificial
  probe
  misc_feature (1)..(25): SEQ ID NO: 7108; WAN024BZ8; Start 416; Stop 440
actccatcactcaggaatacaacat

SEQ ID NO: 458846 - DNA, 25 bp, Artificial
  probe
  misc_feature (1)..(25): SEQ ID NO: 7108; WAN024BZ8; Start 421; Stop 445
atcactcaggaatacaacatgacca

SEQ ID NO: 458847 - DNA, 25 bp, Artificial
  probe
  misc_feature (1)..(25): SEQ ID NO: 7108; WAN024BZ8; Start 507; Stop 531
ttacgaaggaaataaggaatggcaa

SEQ ID NO: 458848 - DNA, 25 bp, Artificial
  probe
  misc_feature (1)..(25): SEQ ID NO: 7108; WAN024BZ8; Start 506; Stop 530
tttacgaaggaaataaggaatggca

SEQ ID NO: 458849 - DNA, 25 bp, Artificial
  probe
  misc_feature (1)..(25): SEQ ID NO: 7108; WAN024BZ8; Start 518; Stop 542
ataaggaatggcaaggtgtaagcag

SEQ ID NO: 458850 - DNA, 25 bp, Artificial
  probe
  misc_feature (1)..(25): SEQ ID NO: 7108; WAN024BZ8; Start 508; Stop 532
tacgaaggaaataaggaatggcaag

SEQ ID NO: 458851 - DNA, 25 bp, Artificial
  probe
  misc_feature (1)..(25): SEQ ID NO: 7108; WAN024BZ8; Start 514; Stop 538
ggaaataaggaatggcaaggtgtaa

SEQ ID NO: 458852 - DNA, 25 bp, Artificial
  probe
  misc_feature (1)..(25): SEQ ID NO: 7108; WAN024BZ8; Start 417; Stop 441
ctccatcactcaggaatacaacatg

SEQ ID NO: 458853 - DNA, 25 bp, Artificial
  probe
  misc_feature (1)..(25): SEQ ID NO: 7108; WAN024BZ8; Start 409; Stop 433
ctgttacactccatcactcaggaat

SEQ ID NO: 458854 - DNA, 25 bp, Artificial
  probe
  misc_feature (1)..(25): SEQ ID NO: 7108; WAN024BZ8; Start 418; Stop 442
tccatcactcaggaatacaacatga

SEQ ID NO: 458855 - DNA, 25 bp, Artificial
  probe
  misc_feature (1)..(25): SEQ ID NO: 7108; WAN024BZ8; Start 415; Stop 439
cactccatcactcaggaatacaaca

SEQ ID NO: 458856 - DNA, 25 bp, Artificial
  probe
  misc_feature (1)..(25): SEQ ID NO: 7108; WAN024BZ8; Start 414; Stop 438
acactccatcactcaggaatacaac

SEQ ID NO: 458857 - DNA, 25 bp, Artificial
  probe
  misc_feature (1)..(25): SEQ ID NO: 7108; WAN024BZ8; Start 529; Stop 553
caaggtgtaagcagtcaggttatgg

SEQ ID NO: 458858 - DNA, 25 bp, Artificial
  probe
  misc_feature (1)..(25): SEQ ID NO: 7108; WAN024BZ8; Start 516; Stop 540
aaataaggaatggcaaggtgtaagc

SEQ ID NO: 458859 - DNA, 25 bp, Artificial
  probe
  misc_feature (1)..(25): SEQ ID NO: 7108; WAN024BZ8; Start 505; Stop 529
atttacgaaggaaataaggaatggc

SEQ ID NO: 458860 - DNA, 25 bp, Artificial
  probe
  misc_feature (1)..(25): SEQ ID NO: 7108; WAN024BZ8; Start 513; Stop 537
aggaaataaggaatggcaaggtgta

SEQ ID NO: 458861 - DNA, 25 bp, Artificial
  probe
  misc_feature (1)..(25): SEQ ID NO: 7108; WAN024BZ8; Start 426; Stop 450
tcaggaatacaacatgaccaccatc

SEQ ID NO: 458862 - DNA, 25 bp, Artificial
  probe
  misc_feature (1)..(25): SEQ ID NO: 7108; WAN024BZ8; Start 425; Stop 449
ctcaggaatacaacatgaccaccat

SEQ ID NO: 458863 - DNA, 25 bp, Artificial
  probe
  misc_feature (1)..(25): SEQ ID NO: 7108; WAN024BZ8; Start 422; Stop 446
tcactcaggaatacaacatgaccac

SEQ ID NO: 458864 - DNA, 25 bp, Artificial
  probe
  misc_feature (1)..(25): SEQ ID NO: 7108; WAN024BZ8; Start 511; Stop 535
gaaggaaataaggaatggcaaggtg

SEQ ID NO: 458865 - DNA, 25 bp, Artificial
  probe
  misc_feature (1)..(25): SEQ ID NO: 7108; WAN024BZ8; Start 427; Stop 451
caggaatacaacatgaccaccatca

SEQ ID NO: 458866 - DNA, 25 bp, Artificial
  probe
  misc_feature (1)..(25): SEQ ID NO: 7108; WAN024BZ8; Start 429; Stop 453
ggaatacaacatgaccaccatcata

SEQ ID NO: 458867 - DNA, 25 bp, Artificial
  probe
  misc_feature (1)..(25): SEQ ID NO: 7108; WAN024BZ8; Start 430; Stop 454
gaatacaacatgaccaccatcataa

SEQ ID NO: 458868 - DNA, 25 bp, Artificial
  probe
  misc_feature (1)..(25): SEQ ID NO: 7108; WAN024BZ8; Start 528; Stop 552
gcaaggtgtaagcagtcaggttatg

SEQ ID NO: 458869 - DNA, 25 bp, Artificial
  probe
  misc_feature (1)..(25): SEQ ID NO: 7108; WAN024BZ8; Start 512; Stop 536
aaggaaataaggaatggcaaggtgt

SEQ ID NO: 458870 - DNA, 25 bp, Artificial
  probe
  misc_feature (1)..(25): SEQ ID NO: 7109; WAN024GEO; Start 10; Stop 34
ggacttgcagatagaatctctagtt

SEQ ID NO: 458871 - DNA, 25 bp, Artificial
  probe
  misc_feature (1)..(25): SEQ ID NO: 7109; WAN024GEO; Start 39; Stop 63
gggtttacagacagtaccatctaaa

SEQ ID NO: 458872 - DNA, 25 bp, Artificial
  probe
  misc_feature (1)..(25): SEQ ID NO: 7109; WAN024GEO; Start 38; Stop 62
cgggtttacagacagtaccatctaa

SEQ ID NO: 458873 - DNA, 25 bp, Artificial
  probe
  misc_feature (1)..(25): SEQ ID NO: 7109; WAN024GEO; Start 3; Stop 27
gatggagggacttgcagatagaatc

SEQ ID NO: 458874 - DNA, 25 bp, Artificial
  probe
  misc_feature (1)..(25): SEQ ID NO: 7109; WAN024GEO; Start 24; Stop 48
aatctctagttttgcgggtttacag

SEQ ID NO: 458875 - DNA, 25 bp, Artificial
  probe
  misc_feature (1)..(25): SEQ ID NO: 7109; WAN024GEO; Start 23; Stop 47
gaatctctagttttgcgggtttaca

SEQ ID NO: 458876 - DNA, 25 bp, Artificial
  probe
  misc_feature (1)..(25): SEQ ID NO: 7109; WAN024GEO; Start 22; Stop 46
agaatctctagttttgcgggtttac

SEQ ID NO: 458877 - DNA, 25 bp, Artificial
  probe
  misc_feature (1)..(25): SEQ ID NO: 7109; WAN024GEO; Start 30; Stop 54
tagttttgcgggtttacagacagta

SEQ ID NO: 458878 - DNA, 25 bp, Artificial
  probe
  misc_feature (1)..(25): SEQ ID NO: 7109; WAN024GEO; Start 8; Stop 32
agggacttgcagatagaatctctag

SEQ ID NO: 458879 - DNA, 25 bp, Artificial
  probe
  misc_feature (1)..(25): SEQ ID NO: 7109; WAN024GEO; Start 7; Stop 31
gagggacttgcagatagaatctcta

SEQ ID NO: 458880 - DNA, 25 bp, Artificial
  probe
  misc_feature (1)..(25): SEQ ID NO: 7109; WAN024GEO; Start 9; Stop 33
gggacttgcagatagaatctctagt

SEQ ID NO: 458881 - DNA, 25 bp, Artificial
  probe
  misc_feature (1)..(25): SEQ ID NO: 7109; WAN024GEO; Start 2; Stop 26
tgatggagggacttgcagatagaat

SEQ ID NO: 458882 - DNA, 25 bp, Artificial
  probe
  misc_feature (1)..(25): SEQ ID NO: 7109; WAN024GEO; Start 25; Stop 49
atctctagttttgcgggtttacaga

SEQ ID NO: 458883 - DNA, 25 bp, Artificial
  probe
  misc_feature (1)..(25): SEQ ID NO: 7109; WAN024GEO; Start 21; Stop 45
tagaatctctagttttgcgggttta

SEQ ID NO: 458884 - DNA, 25 bp, Artificial
  probe
  misc_feature (1)..(25): SEQ ID NO: 7109; WAN024GEO; Start 20; Stop 44
atagaatctctagttttgcgggttt

SEQ ID NO: 458885 - DNA, 25 bp, Artificial
  probe
  misc_feature (1)..(25): SEQ ID NO: 7109; WAN024GEO; Start 19; Stop 43
gatagaatctctagttttgcgggtt

SEQ ID NO: 458886 - DNA, 25 bp, Artificial
  probe
  misc_feature (1)..(25): SEQ ID NO: 7109; WAN024GEO; Start 11; Stop 35
gacttgcagatagaatctctagttt

SEQ ID NO: 458887 - DNA, 25 bp, Artificial
  probe
  misc_feature (1)..(25): SEQ ID NO: 7109; WAN024GEO; Start 26; Stop 50
tctctagttttgcgggtttacagac

SEQ ID NO: 458888 - DNA, 25 bp, Artificial
  probe
  misc_feature (1)..(25): SEQ ID NO: 7109; WAN024GEO; Start 17; Stop 41
cagatagaatctctagttttgcggg

SEQ ID NO: 458889 - DNA, 25 bp, Artificial
  probe
  misc_feature (1)..(25): SEQ ID NO: 7109; WAN024GEO; Start 40; Stop 64
ggtttacagacagtaccatctaaaa

SEQ ID NO: 458890 - DNA, 25 bp, Artificial
  probe
  misc_feature (1)..(25): SEQ ID NO: 7109; WAN024GEO; Start 18; Stop 42
agatagaatctctagttttgcgggt

SEQ ID NO: 458891 - DNA, 25 bp, Artificial
  probe
  misc_feature (1)..(25): SEQ ID NO: 7109; WAN024GEO; Start 37; Stop 61
gcgggtttacagacagtaccatcta

SEQ ID NO: 458892 - DNA, 25 bp, Artificial
  probe
  misc_feature (1)..(25): SEQ ID NO: 7109; WAN024GEO; Start 28; Stop 52
tctagttttgcgggtttacagacag

SEQ ID NO: 458893 - DNA, 25 bp, Artificial
  probe
  misc_feature (1)..(25): SEQ ID NO: 7109; WAN024GEO; Start 27; Stop 51
ctctagttttgcgggtttacagaca

SEQ ID NO: 458894 - DNA, 25 bp, Artificial
  probe
  misc_feature (1)..(25): SEQ ID NO: 7109; WAN024GEO; Start 4; Stop 28
atggagggacttgcagatagaatct

SEQ ID NO: 458895 - DNA, 25 bp, Artificial
  probe
  misc_feature (1)..(25): SEQ ID NO: 7109; WAN024GEO; Start 29; Stop 53
ctagttttgcgggtttacagacagt

SEQ ID NO: 458896 - DNA, 25 bp, Artificial
  probe
  misc_feature (1)..(25): SEQ ID NO: 7109; WAN024GEO; Start 1; Stop 25
ctgatggagggacttgcagatagaa

SEQ ID NO: 458897 - DNA, 25 bp, Artificial
  probe
  misc_feature (1)..(25): SEQ ID NO: 7109; WAN024GEO; Start 6; Stop 30
ggagggacttgcagatagaatctct

SEQ ID NO: 458898 - DNA, 25 bp, Artificial
  probe
  misc_feature (1)..(25): SEQ ID NO: 7109; WAN024GEO; Start 31; Stop 55
agttttgcgggtttacagacagtac

SEQ ID NO: 458899 - DNA, 25 bp, Artificial
  probe
  misc_feature (1)..(25): SEQ ID NO: 7109; WAN024GEO; Start 5; Stop 29
tggagggacttgcagatagaatctc

SEQ ID NO: 458900 - DNA, 25 bp, Artificial
  probe
  misc_feature (1)..(25): SEQ ID NO: 7109; WAN024GEO; Start 16; Stop 40
gcagatagaatctctagttttgcgg

SEQ ID NO: 458901 - DNA, 25 bp, Artificial
  probe
  misc_feature (1)..(25): SEQ ID NO: 7109; WAN024GEO; Start 34; Stop 58
tttgcgggtttacagacagtaccat

SEQ ID NO: 458902 - DNA, 25 bp, Artificial
  probe
  misc_feature (1)..(25): SEQ ID NO: 7109; WAN024GEO; Start 14; Stop 38
ttgcagatagaatctctagttttgc

SEQ ID NO: 458903 - DNA, 25 bp, Artificial
  probe
  misc_feature (1)..(25): SEQ ID NO: 7110; WAN024BZ9; Start 60; Stop 84
tcgaattattgctgcaaaagtaagt

SEQ ID NO: 458904 - DNA, 25 bp, Artificial
  probe
  misc_feature (1)..(25): SEQ ID NO: 7110; WAN024BZ9; Start 61; Stop 85
cgaattattgctgcaaaagtaagta

SEQ ID NO: 458905 - DNA, 25 bp, Artificial
  probe
  misc_feature (1)..(25): SEQ ID NO: 7110; WAN024BZ9; Start 91; Stop 115
tctgaatcgaacaaacttttaagaa

SEQ ID NO: 458906 - DNA, 25 bp, Artificial
  probe
  misc_feature (1)..(25): SEQ ID NO: 7110; WAN024BZ9; Start 90; Stop 114
atctgaatcgaacaaacttttaaga

SEQ ID NO: 458907 - DNA, 25 bp, Artificial
  probe
  misc_feature (1)..(25): SEQ ID NO: 7110; WAN024BZ9; Start 92; Stop 116
ctgaatcgaacaaacttttaagaaa

SEQ ID NO: 458908 - DNA, 25 bp, Artificial
  probe
  misc_feature (1)..(25): SEQ ID NO: 7110; WAN024BZ9; Start 89; Stop 113
aatctgaatcgaacaaacttttaag

SEQ ID NO: 458909 - DNA, 25 bp, Artificial
  probe
  misc_feature (1)..(25): SEQ ID NO: 7110; WAN024BZ9; Start 62; Stop 86
gaattattgctgcaaaagtaagtaa

SEQ ID NO: 458910 - DNA, 25 bp, Artificial
  probe
  misc_feature (1)..(25): SEQ ID NO: 7110; WAN024BZ9; Start 38; Stop 62
tgctaaaattggatgttataattcg

SEQ ID NO: 458911 - DNA, 25 bp, Artificial
  probe
  misc_feature (1)..(25): SEQ ID NO: 7110; WAN024BZ9; Start 88; Stop 112
aaatctgaatcgaacaaacttttaa

SEQ ID NO: 458912 - DNA, 25 bp, Artificial
  probe
  misc_feature (1)..(25): SEQ ID NO: 7110; WAN024BZ9; Start 59; Stop 83
ttcgaattattgctgcaaaagtaag

SEQ ID NO: 458913 - DNA, 25 bp, Artificial
  probe
  misc_feature (1)..(25): SEQ ID NO: 7110; WAN024BZ9; Start 93; Stop 117
tgaatcgaacaaacttttaagaaaa

SEQ ID NO: 458914 - DNA, 25 bp, Artificial
  probe
  misc_feature (1)..(25): SEQ ID NO: 7110; WAN024BZ9; Start 64; Stop 88
attattgctgcaaaagtaagtaaaa

SEQ ID NO: 458915 - DNA, 25 bp, Artificial
  probe
  misc_feature (1)..(25): SEQ ID NO: 7110; WAN024BZ9; Start 63; Stop 87
aattattgctgcaaaagtaagtaaa

SEQ ID NO: 458916 - DNA, 25 bp, Artificial
  probe
  misc_feature (1)..(25): SEQ ID NO: 7110; WAN024BZ9; Start 39; Stop 63
gctaaaattggatgttataattcga

SEQ ID NO: 458917 - DNA, 25 bp, Artificial
  probe
  misc_feature (1)..(25): SEQ ID NO: 7110; WAN024BZ9; Start 87; Stop 111
aaaatctgaatcgaacaaactttta

SEQ ID NO: 458918 - DNA, 25 bp, Artificial
  probe
  misc_feature (1)..(25): SEQ ID NO: 7111; WAN024BLE; Start 24; Stop 48
cttgaagaatagggaggaggaatgg

SEQ ID NO: 458919 - DNA, 25 bp, Artificial
  probe
  misc_feature (1)..(25): SEQ ID NO: 7111; WAN024BLE; Start 23; Stop 47
tcttgaagaatagggaggaggaatg

SEQ ID NO: 458920 - DNA, 25 bp, Artificial
  probe
  misc_feature (1)..(25): SEQ ID NO: 7111; WAN024BLE; Start 37; Stop 61
gaggaggaatggcagggtattattg

SEQ ID NO: 458921 - DNA, 25 bp, Artificial
  probe
  misc_feature (1)..(25): SEQ ID NO: 7111; WAN024BLE; Start 36; Stop 60
ggaggaggaatggcagggtattatt

SEQ ID NO: 458922 - DNA, 25 bp, Artificial
  probe
  misc_feature (1)..(25): SEQ ID NO: 7111; WAN024BLE; Start 22; Stop 46
ttcttgaagaatagggaggaggaat

SEQ ID NO: 458923 - DNA, 25 bp, Artificial
  probe
  misc_feature (1)..(25): SEQ ID NO: 7111; WAN024BLE; Start 21; Stop 45
tttcttgaagaatagggaggaggaa

SEQ ID NO: 458924 - DNA, 25 bp, Artificial
  probe
  misc_feature (1)..(25): SEQ ID NO: 7111; WAN024BLE; Start 25; Stop 49
ttgaagaatagggaggaggaatggc

SEQ ID NO: 458925 - DNA, 25 bp, Artificial
  probe
  misc_feature (1)..(25): SEQ ID NO: 7111; WAN024BLE; Start 68; Stop 92
acgccattttgttaataatagctcc

SEQ ID NO: 458926 - DNA, 25 bp, Artificial
  probe
  misc_feature (1)..(25): SEQ ID NO: 7111; WAN024BLE; Start 27; Stop 51
gaagaatagggaggaggaatggcag

SEQ ID NO: 458927 - DNA, 25 bp, Artificial
  probe
  misc_feature (1)..(25): SEQ ID NO: 7111; WAN024BLE; Start 69; Stop 93
cgccattttgttaataatagctcct

SEQ ID NO: 458928 - DNA, 25 bp, Artificial
  probe
  misc_feature (1)..(25): SEQ ID NO: 7111; WAN024BLE; Start 67; Stop 91
aacgccattttgttaataatagctc

SEQ ID NO: 458929 - DNA, 25 bp, Artificial
  probe
  misc_feature (1)..(25): SEQ ID NO: 7111; WAN024BLE; Start 70; Stop 94
gccattttgttaataatagctcctt

SEQ ID NO: 458930 - DNA, 25 bp, Artificial
  probe
  misc_feature (1)..(25): SEQ ID NO: 7111; WAN024BLE; Start 66; Stop 90
aaacgccattttgttaataatagct

SEQ ID NO: 458931 - DNA, 25 bp, Artificial
  probe
  misc_feature (1)..(25): SEQ ID NO: 7111; WAN024BLE; Start 65; Stop 89
aaaacgccattttgttaataatagc

SEQ ID NO: 458932 - DNA, 25 bp, Artificial
  probe
  misc_feature (1)..(25): SEQ ID NO: 7111; WAN024BLE; Start 26; Stop 50
tgaagaatagggaggaggaatggca

SEQ ID NO: 458933 - DNA, 25 bp, Artificial
  probe
  misc_feature (1)..(25): SEQ ID NO: 7111; WAN024BLE; Start 13; Stop 37
aaaagcgttttcttgaagaataggg

SEQ ID NO: 458934 - DNA, 25 bp, Artificial
  probe
  misc_feature (1)..(25): SEQ ID NO: 7111; WAN024BLE; Start 20; Stop 44
ttttcttgaagaatagggaggagga

SEQ ID NO: 458935 - DNA, 25 bp, Artificial
  probe
  misc_feature (1)..(25): SEQ ID NO: 7111; WAN024BLE; Start 19; Stop 43
gttttcttgaagaatagggaggagg

SEQ ID NO: 458936 - DNA, 25 bp, Artificial
  probe
  misc_feature (1)..(25): SEQ ID NO: 7111; WAN024BLE; Start 14; Stop 38
aaagcgttttcttgaagaataggga

SEQ ID NO: 458937 - DNA, 25 bp, Artificial
  probe
  misc_feature (1)..(25): SEQ ID NO: 7111; WAN024BLE; Start 18; Stop 42
cgttttcttgaagaatagggaggag

SEQ ID NO: 458938 - DNA, 25 bp, Artificial
  probe
  misc_feature (1)..(25): SEQ ID NO: 7111; WAN024BLE; Start 15; Stop 39
aagcgttttcttgaagaatagggag

SEQ ID NO: 458939 - DNA, 25 bp, Artificial
  probe
  misc_feature (1)..(25): SEQ ID NO: 7111; WAN024BLE; Start 147; Stop 171
gaccgaaatcactgcttatcagttg

SEQ ID NO: 458940 - DNA, 25 bp, Artificial
  probe
  misc_feature (1)..(25): SEQ ID NO: 7111; WAN024BLE; Start 146; Stop 170
tgaccgaaatcactgcttatcagtt

SEQ ID NO: 458941 - DNA, 25 bp, Artificial
  probe
  misc_feature (1)..(25): SEQ ID NO: 7111; WAN024BLE; Start 145; Stop 169
gtgaccgaaatcactgcttatcagt

SEQ ID NO: 458942 - DNA, 25 bp, Artificial
  probe
  misc_feature (1)..(25): SEQ ID NO: 7111; WAN024BLE; Start 38; Stop 62
aggaggaatggcagggtattattgc

SEQ ID NO: 458943 - DNA, 25 bp, Artificial
  probe
  misc_feature (1)..(25): SEQ ID NO: 7111; WAN024BLE; Start 17; Stop 41
gcgttttcttgaagaatagggagga

SEQ ID NO: 458944 - DNA, 25 bp, Artificial
  probe
  misc_feature (1)..(25): SEQ ID NO: 7111; WAN024BLE; Start 16; Stop 40
agcgttttcttgaagaatagggagg

SEQ ID NO: 458945 - DNA, 25 bp, Artificial
  probe
  misc_feature (1)..(25): SEQ ID NO: 7111; WAN024BLE; Start 71; Stop 95
ccattttgttaataatagctccttt

SEQ ID NO: 458946 - DNA, 25 bp, Artificial
  probe
  misc_feature (1)..(25): SEQ ID NO: 7112; WAN024BUV; Start 4; Stop 28
attgccaagtttctttctagccatc

SEQ ID NO: 458947 - DNA, 25 bp, Artificial
  probe
  misc_feature (1)..(25): SEQ ID NO: 7112; WAN024BUV; Start 3; Stop 27
gattgccaagtttctttctagccat

SEQ ID NO: 458948 - DNA, 25 bp, Artificial
  probe
  misc_feature (1)..(25): SEQ ID NO: 7112; WAN024BUV; Start 9; Stop 33
caagtttctttctagccatccactg

SEQ ID NO: 458949 - DNA, 25 bp, Artificial
  probe
  misc_feature (1)..(25): SEQ ID NO: 7112; WAN024BUV; Start 1; Stop 25
ctgattgccaagtttctttctagcc

SEQ ID NO: 458950 - DNA, 25 bp, Artificial
  probe
  misc_feature (1)..(25): SEQ ID NO: 7112; WAN024BUV; Start 41; Stop 65
caatcgtaccgcatgataaccctat

SEQ ID NO: 458951 - DNA, 25 bp, Artificial
  probe
  misc_feature (1)..(25): SEQ ID NO: 7112; WAN024BUV; Start 37; Stop 61
ctttcaatcgtaccgcatgataacc

SEQ ID NO: 458952 - DNA, 25 bp, Artificial
  probe
  misc_feature (1)..(25): SEQ ID NO: 7112; WAN024BUV; Start 36; Stop 60
cctttcaatcgtaccgcatgataac

SEQ ID NO: 458953 - DNA, 25 bp, Artificial
  probe
  misc_feature (1)..(25): SEQ ID NO: 7112; WAN024BUV; Start 8; Stop 32
ccaagtttctttctagccatccact

SEQ ID NO: 458954 - DNA, 25 bp, Artificial
  probe
  misc_feature (1)..(25): SEQ ID NO: 7112; WAN024BUV; Start 2; Stop 26
tgattgccaagtttctttctagcca

SEQ ID NO: 458955 - DNA, 25 bp, Artificial
  probe
  misc_feature (1)..(25): SEQ ID NO: 7112; WAN024BUV; Start 35; Stop 59
tcctttcaatcgtaccgcatgataa

SEQ ID NO: 458956 - DNA, 25 bp, Artificial
  probe
  misc_feature (1)..(25): SEQ ID NO: 7112; WAN024BUV; Start 42; Stop 66
aatcgtaccgcatgataaccctatc

SEQ ID NO: 458957 - DNA, 25 bp, Artificial
  probe
  misc_feature (1)..(25): SEQ ID NO: 7112; WAN024BUV; Start 34; Stop 58
ctcctttcaatcgtaccgcatgata

SEQ ID NO: 458958 - DNA, 25 bp, Artificial
  probe
  misc_feature (1)..(25): SEQ ID NO: 7112; WAN024BUV; Start 10; Stop 34
aagtttctttctagccatccactgc

SEQ ID NO: 458959 - DNA, 25 bp, Artificial
  probe
  misc_feature (1)..(25): SEQ ID NO: 7112; WAN024BUV; Start 5; Stop 29
ttgccaagtttctttctagccatcc

SEQ ID NO: 458960 - DNA, 25 bp, Artificial
  probe
  misc_feature (1)..(25): SEQ ID NO: 7112; WAN024BUV; Start 25; Stop 49
catccactgctcctttcaatcgtac

SEQ ID NO: 458961 - DNA, 25 bp, Artificial
  probe
  misc_feature (1)..(25): SEQ ID NO: 7112; WAN024BUV; Start 40; Stop 64
tcaatcgtaccgcatgataacccta

SEQ ID NO: 458962 - DNA, 25 bp, Artificial
  probe
  misc_feature (1)..(25): SEQ ID NO: 7112; WAN024BUV; Start 38; Stop 62
tttcaatcgtaccgcatgataaccc

SEQ ID NO: 458963 - DNA, 25 bp, Artificial
  probe
  misc_feature (1)..(25): SEQ ID NO: 7112; WAN024BUV; Start 7; Stop 31
gccaagtttctttctagccatccac

SEQ ID NO: 458964 - DNA, 25 bp, Artificial
  probe
  misc_feature (1)..(25): SEQ ID NO: 7112; WAN024BUV; Start 24; Stop 48
ccatccactgctcctttcaatcgta

SEQ ID NO: 458965 - DNA, 25 bp, Artificial
  probe
  misc_feature (1)..(25): SEQ ID NO: 7112; WAN024BUV; Start 53; Stop 77
atgataaccctatcgctgggatgat

SEQ ID NO: 458966 - DNA, 25 bp, Artificial
  probe
  misc_feature (1)..(25): SEQ ID NO: 7112; WAN024BUV; Start 6; Stop 30
tgccaagtttctttctagccatcca

SEQ ID NO: 458967 - DNA, 25 bp, Artificial
  probe
  misc_feature (1)..(25): SEQ ID NO: 7112; WAN024BUV; Start 39; Stop 63
ttcaatcgtaccgcatgataaccct

SEQ ID NO: 458968 - DNA, 25 bp, Artificial
  probe
  misc_feature (1)..(25): SEQ ID NO: 7112; WAN024BUV; Start 54; Stop 78
tgataaccctatcgctgggatgatt

SEQ ID NO: 458969 - DNA, 25 bp, Artificial
  probe
  misc_feature (1)..(25): SEQ ID NO: 7112; WAN024BUV; Start 26; Stop 50
atccactgctcctttcaatcgtacc

SEQ ID NO: 458970 - DNA, 25 bp, Artificial
  probe
  misc_feature (1)..(25): SEQ ID NO: 7112; WAN024BUV; Start 43; Stop 67
atcgtaccgcatgataaccctatcg

SEQ ID NO: 458971 - DNA, 25 bp, Artificial
  probe
  misc_feature (1)..(25): SEQ ID NO: 7112; WAN024BUV; Start 12; Stop 36
gtttctttctagccatccactgctc

SEQ ID NO: 458972 - DNA, 25 bp, Artificial
  probe
  misc_feature (1)..(25): SEQ ID NO: 7112; WAN024BUV; Start 11; Stop 35
agtttctttctagccatccactgct

SEQ ID NO: 458973 - DNA, 25 bp, Artificial
  probe
  misc_feature (1)..(25): SEQ ID NO: 7112; WAN024BUV; Start 52; Stop 76
catgataaccctatcgctgggatga

SEQ ID NO: 458974 - DNA, 25 bp, Artificial
  probe
  misc_feature (1)..(25): SEQ ID NO: 7112; WAN024BUV; Start 21; Stop 45
tagccatccactgctcctttcaatc

SEQ ID NO: 458975 - DNA, 25 bp, Artificial
  probe
  misc_feature (1)..(25): SEQ ID NO: 7112; WAN024BUV; Start 20; Stop 44
ctagccatccactgctcctttcaat

SEQ ID NO: 458976 - DNA, 25 bp, Artificial
  probe
  misc_feature (1)..(25): SEQ ID NO: 7112; WAN024BUV; Start 17; Stop 41
tttctagccatccactgctcctttc

SEQ ID NO: 458977 - DNA, 25 bp, Artificial
  probe
  misc_feature (1)..(25): SEQ ID NO: 7112; WAN024BUV; Start 16; Stop 40
ctttctagccatccactgctccttt

SEQ ID NO: 458978 - DNA, 25 bp, Artificial
  probe
  misc_feature (1)..(25): SEQ ID NO: 7112; WAN024BUV; Start 13; Stop 37
tttctttctagccatccactgctcc

SEQ ID NO: 458979 - DNA, 25 bp, Artificial
  probe
  misc_feature (1)..(25): SEQ ID NO: 7113; WAN024DYH; Start 43; Stop 67
aactctcgcaacctacaagaacttc

SEQ ID NO: 458980 - DNA, 25 bp, Artificial
  probe
  misc_feature (1)..(25): SEQ ID NO: 7113; WAN024DYH; Start 63; Stop 87
acttcctgagttgtttacctctatt

SEQ ID NO: 458981 - DNA, 25 bp, Artificial
  probe
  misc_feature (1)..(25): SEQ ID NO: 7113; WAN024DYH; Start 64; Stop 88
cttcctgagttgtttacctctatta

SEQ ID NO: 458982 - DNA, 25 bp, Artificial
  probe
  misc_feature (1)..(25): SEQ ID NO: 7113; WAN024DYH; Start 42; Stop 66
aaactctcgcaacctacaagaactt

SEQ ID NO: 458983 - DNA, 25 bp, Artificial
  probe
  misc_feature (1)..(25): SEQ ID NO: 7113; WAN024DYH; Start 53; Stop 77
acctacaagaacttcctgagttgtt

SEQ ID NO: 458984 - DNA, 25 bp, Artificial
  probe
  misc_feature (1)..(25): SEQ ID NO: 7113; WAN024DYH; Start 52; Stop 76
aacctacaagaacttcctgagttgt

SEQ ID NO: 458985 - DNA, 25 bp, Artificial
  probe
  misc_feature (1)..(25): SEQ ID NO: 7113; WAN024DYH; Start 45; Stop 69
ctctcgcaacctacaagaacttcct

SEQ ID NO: 458986 - DNA, 25 bp, Artificial
  probe
  misc_feature (1)..(25): SEQ ID NO: 7113; WAN024DYH; Start 65; Stop 89
ttcctgagttgtttacctctattat

SEQ ID NO: 458987 - DNA, 25 bp, Artificial
  probe
  misc_feature (1)..(25): SEQ ID NO: 7113; WAN024DYH; Start 41; Stop 65
caaactctcgcaacctacaagaact

SEQ ID NO: 458988 - DNA, 25 bp, Artificial
  probe
  misc_feature (1)..(25): SEQ ID NO: 7113; WAN024DYH; Start 48; Stop 72
tcgcaacctacaagaacttcctgag

SEQ ID NO: 458989 - DNA, 25 bp, Artificial
  probe
  misc_feature (1)..(25): SEQ ID NO: 7113; WAN024DYH; Start 47; Stop 71
ctcgcaacctacaagaacttcctga

SEQ ID NO: 458990 - DNA, 25 bp, Artificial
  probe
  misc_feature (1)..(25): SEQ ID NO: 7113; WAN024DYH; Start 61; Stop 85
gaacttcctgagttgtttacctcta

SEQ ID NO: 458991 - DNA, 25 bp, Artificial
  probe
  misc_feature (1)..(25): SEQ ID NO: 7113; WAN024DYH; Start 51; Stop 75
caacctacaagaacttcctgagttg

SEQ ID NO: 458992 - DNA, 25 bp, Artificial
  probe
  misc_feature (1)..(25): SEQ ID NO: 7113; WAN024DYH; Start 46; Stop 70
tctcgcaacctacaagaacttcctg

SEQ ID NO: 458993 - DNA, 25 bp, Artificial
  probe
  misc_feature (1)..(25): SEQ ID NO: 7113; WAN024DYH; Start 44; Stop 68
actctcgcaacctacaagaacttcc

SEQ ID NO: 458994 - DNA, 25 bp, Artificial
  probe
  misc_feature (1)..(25): SEQ ID NO: 7113; WAN024DYH; Start 59; Stop 83
aagaacttcctgagttgtttacctc

SEQ ID NO: 458995 - DNA, 25 bp, Artificial
  probe
  misc_feature (1)..(25): SEQ ID NO: 7113; WAN024DYH; Start 62; Stop 86
aacttcctgagttgtttacctctat

SEQ ID NO: 458996 - DNA, 25 bp, Artificial
  probe
  misc_feature (1)..(25): SEQ ID NO: 7113; WAN024DYH; Start 50; Stop 74
gcaacctacaagaacttcctgagtt

SEQ ID NO: 458997 - DNA, 25 bp, Artificial
  probe
  misc_feature (1)..(25): SEQ ID NO: 7113; WAN024DYH; Start 58; Stop 82
caagaacttcctgagttgtttacct

SEQ ID NO: 458998 - DNA, 25 bp, Artificial
  probe
  misc_feature (1)..(25): SEQ ID NO: 7113; WAN024DYH; Start 60; Stop 84
agaacttcctgagttgtttacctct

SEQ ID NO: 458999 - DNA, 25 bp, Artificial
  probe
  misc_feature (1)..(25): SEQ ID NO: 7113; WAN024DYH; Start 66; Stop 90
tcctgagttgtttacctctattata

SEQ ID NO: 459000 - DNA, 25 bp, Artificial
  probe
  misc_feature (1)..(25): SEQ ID NO: 7113; WAN024DYH; Start 54; Stop 78
cctacaagaacttcctgagttgttt

SEQ ID NO: 459001 - DNA, 25 bp, Artificial
  probe
  misc_feature (1)..(25): SEQ ID NO: 7113; WAN024DYH; Start 57; Stop 81
acaagaacttcctgagttgtttacc

SEQ ID NO: 459002 - DNA, 25 bp, Artificial
  probe
  misc_feature (1)..(25): SEQ ID NO: 7113; WAN024DYH; Start 56; Stop 80
tacaagaacttcctgagttgtttac

SEQ ID NO: 459003 - DNA, 25 bp, Artificial
  probe
  misc_feature (1)..(25): SEQ ID NO: 7113; WAN024DYH; Start 49; Stop 73
cgcaacctacaagaacttcctgagt

SEQ ID NO: 459004 - DNA, 25 bp, Artificial
  probe
  misc_feature (1)..(25): SEQ ID NO: 7113; WAN024DYH; Start 55; Stop 79
ctacaagaacttcctgagttgttta

SEQ ID NO: 459005 - DNA, 25 bp, Artificial
  probe
  misc_feature (1)..(25): SEQ ID NO: 7113; WAN024DYH; Start 40; Stop 64
ccaaactctcgcaacctacaagaac

SEQ ID NO: 459006 - DNA, 25 bp, Artificial
  probe
  misc_feature (1)..(25): SEQ ID NO: 7113; WAN024DYH; Start 70; Stop 94
gagttgtttacctctattataagca

SEQ ID NO: 459007 - DNA, 25 bp, Artificial
  probe
  misc_feature (1)..(25): SEQ ID NO: 7113; WAN024DYH; Start 69; Stop 93
tgagttgtttacctctattataagc

SEQ ID NO: 459008 - DNA, 25 bp, Artificial
  probe
  misc_feature (1)..(25): SEQ ID NO: 7113; WAN024DYH; Start 71; Stop 95
agttgtttacctctattataagcat

SEQ ID NO: 459009 - DNA, 25 bp, Artificial
  probe
  misc_feature (1)..(25): SEQ ID NO: 7113; WAN024DYH; Start 67; Stop 91
cctgagttgtttacctctattataa

SEQ ID NO: 459010 - DNA, 25 bp, Artificial
  probe
  misc_feature (1)..(25): SEQ ID NO: 7113; WAN024DYH; Start 11; Stop 35
tagccaaacgtaatcttttaatttt

SEQ ID NO: 459011 - DNA, 25 bp, Artificial
  probe
  misc_feature (1)..(25): SEQ ID NO: 7113; WAN024DYH; Start 10; Stop 34
ttagccaaacgtaatcttttaattt

SEQ ID NO: 459012 - DNA, 25 bp, Artificial
  probe
  misc_feature (1)..(25): SEQ ID NO: 7114; WAN024F4E; Start 161; Stop 185
agattccttacactcgtatcattga

SEQ ID NO: 459013 - DNA, 25 bp, Artificial
  probe
  misc_feature (1)..(25): SEQ ID NO: 7114; WAN024F4E; Start 20; Stop 44
aagttgtcttcactggaatgattga

SEQ ID NO: 459014 - DNA, 25 bp, Artificial
  probe
  misc_feature (1)..(25): SEQ ID NO: 7114; WAN024F4E; Start 265; Stop 289
gaaccatattatccgatcaacgatg

SEQ ID NO: 459015 - DNA, 25 bp, Artificial
  probe
  misc_feature (1)..(25): SEQ ID NO: 7114; WAN024F4E; Start 163; Stop 187
attccttacactcgtatcattgagc

SEQ ID NO: 459016 - DNA, 25 bp, Artificial
  probe
  misc_feature (1)..(25): SEQ ID NO: 7114; WAN024F4E; Start 159; Stop 183
tgagattccttacactcgtatcatt

SEQ ID NO: 459017 - DNA, 25 bp, Artificial
  probe
  misc_feature (1)..(25): SEQ ID NO: 7114; WAN024F4E; Start 162; Stop 186
gattccttacactcgtatcattgag

SEQ ID NO: 459018 - DNA, 25 bp, Artificial
  probe
  misc_feature (1)..(25): SEQ ID NO: 7114; WAN024F4E; Start 160; Stop 184
gagattccttacactcgtatcattg

SEQ ID NO: 459019 - DNA, 25 bp, Artificial
  probe
  misc_feature (1)..(25): SEQ ID NO: 7114; WAN024F4E; Start 267; Stop 291
accatattatccgatcaacgatgaa

SEQ ID NO: 459020 - DNA, 25 bp, Artificial
  probe
  misc_feature (1)..(25): SEQ ID NO: 7114; WAN024F4E; Start 266; Stop 290
aaccatattatccgatcaacgatga

SEQ ID NO: 459021 - DNA, 25 bp, Artificial
  probe
  misc_feature (1)..(25): SEQ ID NO: 7114; WAN024F4E; Start 264; Stop 288
tgaaccatattatccgatcaacgat

SEQ ID NO: 459022 - DNA, 25 bp, Artificial
  probe
  misc_feature (1)..(25): SEQ ID NO: 7114; WAN024F4E; Start 263; Stop 287
atgaaccatattatccgatcaacga

SEQ ID NO: 459023 - DNA, 25 bp, Artificial
  probe
  misc_feature (1)..(25): SEQ ID NO: 7114; WAN024F4E; Start 168; Stop 192
ttacactcgtatcattgagcacaag

SEQ ID NO: 459024 - DNA, 25 bp, Artificial
  probe
  misc_feature (1)..(25): SEQ ID NO: 7114; WAN024F4E; Start 167; Stop 191
cttacactcgtatcattgagcacaa

SEQ ID NO: 459025 - DNA, 25 bp, Artificial
  probe
  misc_feature (1)..(25): SEQ ID NO: 7114; WAN024F4E; Start 262; Stop 286
gatgaaccatattatccgatcaacg

SEQ ID NO: 459026 - DNA, 25 bp, Artificial
  probe
  misc_feature (1)..(25): SEQ ID NO: 7114; WAN024F4E; Start 158; Stop 182
gtgagattccttacactcgtatcat

SEQ ID NO: 459027 - DNA, 25 bp, Artificial
  probe
  misc_feature (1)..(25): SEQ ID NO: 7114; WAN024F4E; Start 21; Stop 45
agttgtcttcactggaatgattgac

SEQ ID NO: 459028 - DNA, 25 bp, Artificial
  probe
  misc_feature (1)..(25): SEQ ID NO: 7114; WAN024F4E; Start 164; Stop 188
ttccttacactcgtatcattgagca

SEQ ID NO: 459029 - DNA, 25 bp, Artificial
  probe
  misc_feature (1)..(25): SEQ ID NO: 7114; WAN024F4E; Start 261; Stop 285
agatgaaccatattatccgatcaac

SEQ ID NO: 459030 - DNA, 25 bp, Artificial
  probe
  misc_feature (1)..(25): SEQ ID NO: 7114; WAN024F4E; Start 257; Stop 281
gtggagatgaaccatattatccgat

SEQ ID NO: 459031 - DNA, 25 bp, Artificial
  probe
  misc_feature (1)..(25): SEQ ID NO: 7114; WAN024F4E; Start 260; Stop 284
gagatgaaccatattatccgatcaa

SEQ ID NO: 459032 - DNA, 25 bp, Artificial
  probe
  misc_feature (1)..(25): SEQ ID NO: 7114; WAN024F4E; Start 259; Stop 283
ggagatgaaccatattatccgatca

SEQ ID NO: 459033 - DNA, 25 bp, Artificial
  probe
  misc_feature (1)..(25): SEQ ID NO: 7114; WAN024F4E; Start 258; Stop 282
tggagatgaaccatattatccgatc

SEQ ID NO: 459034 - DNA, 25 bp, Artificial
  probe
  misc_feature (1)..(25): SEQ ID NO: 7114; WAN024F4E; Start 311; Stop 335
ctaagtatcaagaagaagcagcaaa

SEQ ID NO: 459035 - DNA, 25 bp, Artificial
  probe
  misc_feature (1)..(25): SEQ ID NO: 7114; WAN024F4E; Start 165; Stop 189
tccttacactcgtatcattgagcac

SEQ ID NO: 459036 - DNA, 25 bp, Artificial
  probe
  misc_feature (1)..(25): SEQ ID NO: 7114; WAN024F4E; Start 157; Stop 181
cgtgagattccttacactcgtatca

SEQ ID NO: 459037 - DNA, 25 bp, Artificial
  probe
  misc_feature (1)..(25): SEQ ID NO: 7114; WAN024F4E; Start 22; Stop 46
gttgtcttcactggaatgattgacc

SEQ ID NO: 459038 - DNA, 25 bp, Artificial
  probe
  misc_feature (1)..(25): SEQ ID NO: 7114; WAN024F4E; Start 409; Stop 433
gcacttagtgtagtaacgaatgagt

SEQ ID NO: 459039 - DNA, 25 bp, Artificial
  probe
  misc_feature (1)..(25): SEQ ID NO: 7114; WAN024F4E; Start 414; Stop 438
tagtgtagtaacgaatgagtttggt

SEQ ID NO: 459040 - DNA, 25 bp, Artificial
  probe
  misc_feature (1)..(25): SEQ ID NO: 7114; WAN024F4E; Start 415; Stop 439
agtgtagtaacgaatgagtttggtt

SEQ ID NO: 459041 - DNA, 25 bp, Artificial
  probe
  misc_feature (1)..(25): SEQ ID NO: 7114; WAN024F4E; Start 148; Stop 172
tatacagaacgtgagattccttaca

SEQ ID NO: 459042 - DNA, 25 bp, Artificial
  probe
  misc_feature (1)..(25): SEQ ID NO: 7114; WAN024F4E; Start 166; Stop 190
ccttacactcgtatcattgagcaca

SEQ ID NO: 459043 - DNA, 25 bp, Artificial
  probe
  misc_feature (1)..(25): SEQ ID NO: 7114; WAN024F4E; Start 19; Stop 43
aaagttgtcttcactggaatgattg

SEQ ID NO: 459044 - DNA, 25 bp, Artificial
  probe
  misc_feature (1)..(25): SEQ ID NO: 7114; WAN024F4E; Start 13; Stop 37
gcaaataaagttgtcttcactggaa

SEQ ID NO: 459045 - DNA, 25 bp, Artificial
  probe
  misc_feature (1)..(25): SEQ ID NO: 7115; WAN024BTC; Start 187; Stop 211
cataagcggattgaaattgtggatt

SEQ ID NO: 459046 - DNA, 25 bp, Artificial
  probe
  misc_feature (1)..(25): SEQ ID NO: 7115; WAN024BTC; Start 276; Stop 300
gattatccaacctgcaactgagatt

SEQ ID NO: 459047 - DNA, 25 bp, Artificial
  probe
  misc_feature (1)..(25): SEQ ID NO: 7115; WAN024BTC; Start 188; Stop 212
ataagcggattgaaattgtggattc

SEQ ID NO: 459048 - DNA, 25 bp, Artificial
  probe
  misc_feature (1)..(25): SEQ ID NO: 7115; WAN024BTC; Start 189; Stop 213
taagcggattgaaattgtggattct

SEQ ID NO: 459049 - DNA, 25 bp, Artificial
  probe
  misc_feature (1)..(25): SEQ ID NO: 7115; WAN024BTC; Start 184; Stop 208
tatcataagcggattgaaattgtgg

SEQ ID NO: 459050 - DNA, 25 bp, Artificial
  probe
  misc_feature (1)..(25): SEQ ID NO: 7115; WAN024BTC; Start 223; Stop 247
tttactaagggaatggttctaatcg

SEQ ID NO: 459051 - DNA, 25 bp, Artificial
  probe
  misc_feature (1)..(25): SEQ ID NO: 7115; WAN024BTC; Start 186; Stop 210
tcataagcggattgaaattgtggat

SEQ ID NO: 459052 - DNA, 25 bp, Artificial
  probe
  misc_feature (1)..(25): SEQ ID NO: 7115; WAN024BTC; Start 185; Stop 209
atcataagcggattgaaattgtgga

SEQ ID NO: 459053 - DNA, 25 bp, Artificial
  probe
  misc_feature (1)..(25): SEQ ID NO: 7115; WAN024BTC; Start 176; Stop 200
actttgaatatcataagcggattga

SEQ ID NO: 459054 - DNA, 25 bp, Artificial
  probe
  misc_feature (1)..(25): SEQ ID NO: 7115; WAN024BTC; Start 191; Stop 215
agcggattgaaattgtggattcttt

SEQ ID NO: 459055 - DNA, 25 bp, Artificial
  probe
  misc_feature (1)..(25): SEQ ID NO: 7115; WAN024BTC; Start 190; Stop 214
aagcggattgaaattgtggattctt

SEQ ID NO: 459056 - DNA, 25 bp, Artificial
  probe
  misc_feature (1)..(25): SEQ ID NO: 7115; WAN024BTC; Start 48; Stop 72
agatgtgattgtactgtatgatagt

SEQ ID NO: 459057 - DNA, 25 bp, Artificial
  probe
  misc_feature (1)..(25): SEQ ID NO: 7115; WAN024BTC; Start 449; Stop 473
ttatttgtgaaactttctctccaga

SEQ ID NO: 459058 - DNA, 25 bp, Artificial
  probe
  misc_feature (1)..(25): SEQ ID NO: 7115; WAN024BTC; Start 183; Stop 207
atatcataagcggattgaaattgtg

SEQ ID NO: 459059 - DNA, 25 bp, Artificial
  probe
  misc_feature (1)..(25): SEQ ID NO: 7115; WAN024BTC; Start 175; Stop 199
aactttgaatatcataagcggattg

SEQ ID NO: 459060 - DNA, 25 bp, Artificial
  probe
  misc_feature (1)..(25): SEQ ID NO: 7115; WAN024BTC; Start 174; Stop 198
caactttgaatatcataagcggatt

SEQ ID NO: 459061 - DNA, 25 bp, Artificial
  probe
  misc_feature (1)..(25): SEQ ID NO: 7115; WAN024BTC; Start 173; Stop 197
tcaactttgaatatcataagcggat

SEQ ID NO: 459062 - DNA, 25 bp, Artificial
  probe
  misc_feature (1)..(25): SEQ ID NO: 7115; WAN024BTC; Start 263; Stop 287
aaattaatagggcgattatccaacc

SEQ ID NO: 459063 - DNA, 25 bp, Artificial
  probe
  misc_feature (1)..(25): SEQ ID NO: 7115; WAN024BTC; Start 466; Stop 490
tctccagaaatgatttggtgcttat

SEQ ID NO: 459064 - DNA, 25 bp, Artificial
  probe
  misc_feature (1)..(25): SEQ ID NO: 7115; WAN024BTC; Start 177; Stop 201
ctttgaatatcataagcggattgaa

SEQ ID NO: 459065 - DNA, 25 bp, Artificial
  probe
  misc_feature (1)..(25): SEQ ID NO: 7115; WAN024BTC; Start 225; Stop 249
tactaagggaatggttctaatcgag

SEQ ID NO: 459066 - DNA, 25 bp, Artificial
  probe
  misc_feature (1)..(25): SEQ ID NO: 7115; WAN024BTC; Start 44; Stop 68
aagtagatgtgattgtactgtatga

SEQ ID NO: 459067 - DNA, 25 bp, Artificial
  probe
  misc_feature (1)..(25): SEQ ID NO: 7115; WAN024BTC; Start 467; Stop 491
ctccagaaatgatttggtgcttata

SEQ ID NO: 459068 - DNA, 25 bp, Artificial
  probe
  misc_feature (1)..(25): SEQ ID NO: 7115; WAN024BTC; Start 226; Stop 250
actaagggaatggttctaatcgaga

SEQ ID NO: 459069 - DNA, 25 bp, Artificial
  probe
  misc_feature (1)..(25): SEQ ID NO: 7115; WAN024BTC; Start 465; Stop 489
ctctccagaaatgatttggtgctta

SEQ ID NO: 459070 - DNA, 25 bp, Artificial
  probe
  misc_feature (1)..(25): SEQ ID NO: 7115; WAN024BTC; Start 224; Stop 248
ttactaagggaatggttctaatcga

SEQ ID NO: 459071 - DNA, 25 bp, Artificial
  probe
  misc_feature (1)..(25): SEQ ID NO: 7115; WAN024BTC; Start 232; Stop 256
ggaatggttctaatcgagaattgta

SEQ ID NO: 459072 - DNA, 25 bp, Artificial
  probe
  misc_feature (1)..(25): SEQ ID NO: 7115; WAN024BTC; Start 277; Stop 301
attatccaacctgcaactgagattt

SEQ ID NO: 459073 - DNA, 25 bp, Artificial
  probe
  misc_feature (1)..(25): SEQ ID NO: 7115; WAN024BTC; Start 275; Stop 299
cgattatccaacctgcaactgagat

SEQ ID NO: 459074 - DNA, 25 bp, Artificial
  probe
  misc_feature (1)..(25): SEQ ID NO: 7115; WAN024BTC; Start 126; Stop 150
atctgtagctttcgagagtagtatt

SEQ ID NO: 459075 - DNA, 25 bp, Artificial
  probe
  misc_feature (1)..(25): SEQ ID NO: 7115; WAN024BTC; Start 123; Stop 147
attatctgtagctttcgagagtagt

SEQ ID NO: 459076 - DNA, 25 bp, Artificial
  probe
  misc_feature (1)..(25): SEQ ID NO: 7115; WAN024BTC; Start 45; Stop 69
agtagatgtgattgtactgtatgat

SEQ ID NO: 459077 - DNA, 25 bp, Artificial
  probe
  misc_feature (1)..(25): SEQ ID NO: 7115; WAN024BTC; Start 448; Stop 472
attatttgtgaaactttctctccag

SEQ ID NO: 459078 - DNA, 25 bp, Artificial
  probe
  misc_feature (1)..(25): SEQ ID NO: 7116; WAN024CHI; Start 3; Stop 27
gcaagaagaatctttctcacagttt

SEQ ID NO: 459079 - DNA, 25 bp, Artificial
  probe
  misc_feature (1)..(25): SEQ ID NO: 7116; WAN024CHI; Start 2; Stop 26
tgcaagaagaatctttctcacagtt

SEQ ID NO: 459080 - DNA, 25 bp, Artificial
  probe
  misc_feature (1)..(25): SEQ ID NO: 7116; WAN024CHI; Start 1; Stop 25
ctgcaagaagaatctttctcacagt

SEQ ID NO: 459081 - DNA, 25 bp, Artificial
  probe
  misc_feature (1)..(25): SEQ ID NO: 7116; WAN024CHI; Start 4; Stop 28
caagaagaatctttctcacagttta

SEQ ID NO: 459082 - DNA, 25 bp, Artificial
  probe
  misc_feature (1)..(25): SEQ ID NO: 7116; WAN024CHI; Start 5; Stop 29
aagaagaatctttctcacagtttaa

SEQ ID NO: 459083 - DNA, 25 bp, Artificial
  probe
  misc_feature (1)..(25): SEQ ID NO: 7116; WAN024CHI; Start 6; Stop 30
agaagaatctttctcacagtttaaa

SEQ ID NO: 459084 - DNA, 25 bp, Artificial
  probe
  misc_feature (1)..(25): SEQ ID NO: 7116; WAN024CHI; Start 7; Stop 31
gaagaatctttctcacagtttaaaa

SEQ ID NO: 459085 - DNA, 25 bp, Artificial
  probe
  misc_feature (1)..(25): SEQ ID NO: 7117; WAN024AWZ; Start 33; Stop 57
tatactacttttcaagaatgctggc

SEQ ID NO: 459086 - DNA, 25 bp, Artificial
  probe
  misc_feature (1)..(25): SEQ ID NO: 7117; WAN024AWZ; Start 34; Stop 58
atactacttttcaagaatgctggca

SEQ ID NO: 459087 - DNA, 25 bp, Artificial
  probe
  misc_feature (1)..(25): SEQ ID NO: 7117; WAN024AWZ; Start 35; Stop 59
tactacttttcaagaatgctggcaa

SEQ ID NO: 459088 - DNA, 25 bp, Artificial
  probe
  misc_feature (1)..(25): SEQ ID NO: 7117; WAN024AWZ; Start 36; Stop 60
actacttttcaagaatgctggcaag

SEQ ID NO: 459089 - DNA, 25 bp, Artificial
  probe
  misc_feature (1)..(25): SEQ ID NO: 7117; WAN024AWZ; Start 32; Stop 56
ttatactacttttcaagaatgctgg

SEQ ID NO: 459090 - DNA, 25 bp, Artificial
  probe
  misc_feature (1)..(25): SEQ ID NO: 7117; WAN024AWZ; Start 37; Stop 61
ctacttttcaagaatgctggcaagc

SEQ ID NO: 459091 - DNA, 25 bp, Artificial
  probe
  misc_feature (1)..(25): SEQ ID NO: 7117; WAN024AWZ; Start 31; Stop 55
attatactacttttcaagaatgctg

SEQ ID NO: 459092 - DNA, 25 bp, Artificial
  probe
  misc_feature (1)..(25): SEQ ID NO: 7117; WAN024AWZ; Start 38; Stop 62
tacttttcaagaatgctggcaagct

SEQ ID NO: 459093 - DNA, 25 bp, Artificial
  probe
  misc_feature (1)..(25): SEQ ID NO: 7117; WAN024AWZ; Start 40; Stop 64
cttttcaagaatgctggcaagctct

SEQ ID NO: 459094 - DNA, 25 bp, Artificial
  probe
  misc_feature (1)..(25): SEQ ID NO: 7117; WAN024AWZ; Start 41; Stop 65
ttttcaagaatgctggcaagctctg

SEQ ID NO: 459095 - DNA, 25 bp, Artificial
  probe
  misc_feature (1)..(25): SEQ ID NO: 7117; WAN024AWZ; Start 39; Stop 63
acttttcaagaatgctggcaagctc

SEQ ID NO: 459096 - DNA, 25 bp, Artificial
  probe
  misc_feature (1)..(25): SEQ ID NO: 7117; WAN024AWZ; Start 45; Stop 69
caagaatgctggcaagctctgtttt

SEQ ID NO: 459097 - DNA, 25 bp, Artificial
  probe
  misc_feature (1)..(25): SEQ ID NO: 7118; WAN024C3M; Start 21; Stop 45
cttgttagaccagatagggattagc

SEQ ID NO: 459098 - DNA, 25 bp, Artificial
  probe
  misc_feature (1)..(25): SEQ ID NO: 7118; WAN024C3M; Start 25; Stop 49
ttagaccagatagggattagccaaa

SEQ ID NO: 459099 - DNA, 25 bp, Artificial
  probe
  misc_feature (1)..(25): SEQ ID NO: 7118; WAN024C3M; Start 18; Stop 42
actcttgttagaccagatagggatt

SEQ ID NO: 459100 - DNA, 25 bp, Artificial
  probe
  misc_feature (1)..(25): SEQ ID NO: 7118; WAN024C3M; Start 17; Stop 41
aactcttgttagaccagatagggat

SEQ ID NO: 459101 - DNA, 25 bp, Artificial
  probe
  misc_feature (1)..(25): SEQ ID NO: 7118; WAN024C3M; Start 16; Stop 40
aaactcttgttagaccagataggga

SEQ ID NO: 459102 - DNA, 25 bp, Artificial
  probe
  misc_feature (1)..(25): SEQ ID NO: 7118; WAN024C3M; Start 24; Stop 48
gttagaccagatagggattagccaa

SEQ ID NO: 459103 - DNA, 25 bp, Artificial
  probe
  misc_feature (1)..(25): SEQ ID NO: 7118; WAN024C3M; Start 22; Stop 46
ttgttagaccagatagggattagcc

SEQ ID NO: 459104 - DNA, 25 bp, Artificial
  probe
  misc_feature (1)..(25): SEQ ID NO: 7118; WAN024C3M; Start 20; Stop 44
tcttgttagaccagatagggattag

SEQ ID NO: 459105 - DNA, 25 bp, Artificial
  probe
  misc_feature (1)..(25): SEQ ID NO: 7118; WAN024C3M; Start 19; Stop 43
ctcttgttagaccagatagggatta

SEQ ID NO: 459106 - DNA, 25 bp, Artificial
  probe
  misc_feature (1)..(25): SEQ ID NO: 7118; WAN024C3M; Start 23; Stop 47
tgttagaccagatagggattagcca

SEQ ID NO: 459107 - DNA, 25 bp, Artificial
  probe
  misc_feature (1)..(25): SEQ ID NO: 7118; WAN024C3M; Start 26; Stop 50
tagaccagatagggattagccaaaa

SEQ ID NO: 459108 - DNA, 25 bp, Artificial
  probe
  misc_feature (1)..(25): SEQ ID NO: 7118; WAN024C3M; Start 15; Stop 39
aaaactcttgttagaccagataggg

SEQ ID NO: 459109 - DNA, 25 bp, Artificial
  probe
  misc_feature (1)..(25): SEQ ID NO: 7118; WAN024C3M; Start 62; Stop 86
gcttatatccaaatggagatgcaaa

SEQ ID NO: 459110 - DNA, 25 bp, Artificial
  probe
  misc_feature (1)..(25): SEQ ID NO: 7118; WAN024C3M; Start 67; Stop 91
tatccaaatggagatgcaaacttct

SEQ ID NO: 459111 - DNA, 25 bp, Artificial
  probe
  misc_feature (1)..(25): SEQ ID NO: 7118; WAN024C3M; Start 66; Stop 90
atatccaaatggagatgcaaacttc

SEQ ID NO: 459112 - DNA, 25 bp, Artificial
  probe
  misc_feature (1)..(25): SEQ ID NO: 7118; WAN024C3M; Start 27; Stop 51
agaccagatagggattagccaaaat

SEQ ID NO: 459113 - DNA, 25 bp, Artificial
  probe
  misc_feature (1)..(25): SEQ ID NO: 7118; WAN024C3M; Start 14; Stop 38
gaaaactcttgttagaccagatagg

SEQ ID NO: 459114 - DNA, 25 bp, Artificial
  probe
  misc_feature (1)..(25): SEQ ID NO: 7118; WAN024C3M; Start 11; Stop 35
cgagaaaactcttgttagaccagat

SEQ ID NO: 459115 - DNA, 25 bp, Artificial
  probe
  misc_feature (1)..(25): SEQ ID NO: 7118; WAN024C3M; Start 65; Stop 89
tatatccaaatggagatgcaaactt

SEQ ID NO: 459116 - DNA, 25 bp, Artificial
  probe
  misc_feature (1)..(25): SEQ ID NO: 7118; WAN024C3M; Start 64; Stop 88
ttatatccaaatggagatgcaaact

SEQ ID NO: 459117 - DNA, 25 bp, Artificial
  probe
  misc_feature (1)..(25): SEQ ID NO: 7118; WAN024C3M; Start 63; Stop 87
cttatatccaaatggagatgcaaac

SEQ ID NO: 459118 - DNA, 25 bp, Artificial
  probe
  misc_feature (1)..(25): SEQ ID NO: 7118; WAN024C3M; Start 68; Stop 92
atccaaatggagatgcaaacttctg

SEQ ID NO: 459119 - DNA, 25 bp, Artificial
  probe
  misc_feature (1)..(25): SEQ ID NO: 7118; WAN024C3M; Start 13; Stop 37
agaaaactcttgttagaccagatag

SEQ ID NO: 459120 - DNA, 25 bp, Artificial
  probe
  misc_feature (1)..(25): SEQ ID NO: 7118; WAN024C3M; Start 12; Stop 36
gagaaaactcttgttagaccagata

SEQ ID NO: 459121 - DNA, 25 bp, Artificial
  probe
  misc_feature (1)..(25): SEQ ID NO: 7118; WAN024C3M; Start 28; Stop 52
gaccagatagggattagccaaaatc

SEQ ID NO: 459122 - DNA, 25 bp, Artificial
  probe
  misc_feature (1)..(25): SEQ ID NO: 7118; WAN024C3M; Start 10; Stop 34
gcgagaaaactcttgttagaccaga

SEQ ID NO: 459123 - DNA, 25 bp, Artificial
  probe
  misc_feature (1)..(25): SEQ ID NO: 7118; WAN024C3M; Start 84; Stop 108
aaacttctgcccaactcttgaccaa

SEQ ID NO: 459124 - DNA, 25 bp, Artificial
  probe
  misc_feature (1)..(25): SEQ ID NO: 7118; WAN024C3M; Start 69; Stop 93
tccaaatggagatgcaaacttctgc

SEQ ID NO: 459125 - DNA, 25 bp, Artificial
  probe
  misc_feature (1)..(25): SEQ ID NO: 7118; WAN024C3M; Start 79; Stop 103
gatgcaaacttctgcccaactcttg

SEQ ID NO: 459126 - DNA, 25 bp, Artificial
  probe
  misc_feature (1)..(25): SEQ ID NO: 7118; WAN024C3M; Start 78; Stop 102
agatgcaaacttctgcccaactctt

SEQ ID NO: 459127 - DNA, 25 bp, Artificial
  probe
  misc_feature (1)..(25): SEQ ID NO: 7118; WAN024C3M; Start 71; Stop 95
caaatggagatgcaaacttctgccc

SEQ ID NO: 459128 - DNA, 25 bp, Artificial
  probe
  misc_feature (1)..(25): SEQ ID NO: 7118; WAN024C3M; Start 70; Stop 94
ccaaatggagatgcaaacttctgcc

SEQ ID NO: 459129 - DNA, 25 bp, Artificial
  probe
  misc_feature (1)..(25): SEQ ID NO: 7118; WAN024C3M; Start 80; Stop 104
atgcaaacttctgcccaactcttga

SEQ ID NO: 459130 - DNA, 25 bp, Artificial
  probe
  misc_feature (1)..(25): SEQ ID NO: 7118; WAN024C3M; Start 9; Stop 33
cgcgagaaaactcttgttagaccag

SEQ ID NO: 459131 - DNA, 25 bp, Artificial
  probe
  misc_feature (1)..(25): SEQ ID NO: 7119; WAN024C29; Start 39; Stop 63
ttggatggctgatgtttgtctgaaa

SEQ ID NO: 459132 - DNA, 25 bp, Artificial
  probe
  misc_feature (1)..(25): SEQ ID NO: 7119; WAN024C29; Start 38; Stop 62
tttggatggctgatgtttgtctgaa

SEQ ID NO: 459133 - DNA, 25 bp, Artificial
  probe
  misc_feature (1)..(25): SEQ ID NO: 7119; WAN024C29; Start 46; Stop 70
gctgatgtttgtctgaaaatcttga

SEQ ID NO: 459134 - DNA, 25 bp, Artificial
  probe
  misc_feature (1)..(25): SEQ ID NO: 7119; WAN024C29; Start 42; Stop 66
gatggctgatgtttgtctgaaaatc

SEQ ID NO: 459135 - DNA, 25 bp, Artificial
  probe
  misc_feature (1)..(25): SEQ ID NO: 7119; WAN024C29; Start 45; Stop 69
ggctgatgtttgtctgaaaatcttg

SEQ ID NO: 459136 - DNA, 25 bp, Artificial
  probe
  misc_feature (1)..(25): SEQ ID NO: 7119; WAN024C29; Start 43; Stop 67
atggctgatgtttgtctgaaaatct

SEQ ID NO: 459137 - DNA, 25 bp, Artificial
  probe
  misc_feature (1)..(25): SEQ ID NO: 7119; WAN024C29; Start 44; Stop 68
tggctgatgtttgtctgaaaatctt

SEQ ID NO: 459138 - DNA, 25 bp, Artificial
  probe
  misc_feature (1)..(25): SEQ ID NO: 7119; WAN024C29; Start 47; Stop 71
ctgatgtttgtctgaaaatcttgat

SEQ ID NO: 459139 - DNA, 25 bp, Artificial
  probe
  misc_feature (1)..(25): SEQ ID NO: 7119; WAN024C29; Start 41; Stop 65
ggatggctgatgtttgtctgaaaat

SEQ ID NO: 459140 - DNA, 25 bp, Artificial
  probe
  misc_feature (1)..(25): SEQ ID NO: 7119; WAN024C29; Start 51; Stop 75
tgtttgtctgaaaatcttgattgag

SEQ ID NO: 459141 - DNA, 25 bp, Artificial
  probe
  misc_feature (1)..(25): SEQ ID NO: 7119; WAN024C29; Start 52; Stop 76
gtttgtctgaaaatcttgattgaga

SEQ ID NO: 459142 - DNA, 25 bp, Artificial
  probe
  misc_feature (1)..(25): SEQ ID NO: 7119; WAN024C29; Start 50; Stop 74
atgtttgtctgaaaatcttgattga

SEQ ID NO: 459143 - DNA, 25 bp, Artificial
  probe
  misc_feature (1)..(25): SEQ ID NO: 7119; WAN024C29; Start 48; Stop 72
tgatgtttgtctgaaaatcttgatt

SEQ ID NO: 459144 - DNA, 25 bp, Artificial
  probe
  misc_feature (1)..(25): SEQ ID NO: 7119; WAN024C29; Start 49; Stop 73
gatgtttgtctgaaaatcttgattg

SEQ ID NO: 459145 - DNA, 25 bp, Artificial
  probe
  misc_feature (1)..(25): SEQ ID NO: 7119; WAN024C29; Start 54; Stop 78
ttgtctgaaaatcttgattgagaaa

SEQ ID NO: 459146 - DNA, 25 bp, Artificial
  probe
  misc_feature (1)..(25): SEQ ID NO: 7119; WAN024C29; Start 53; Stop 77
tttgtctgaaaatcttgattgagaa

SEQ ID NO: 459147 - DNA, 25 bp, Artificial
  probe
  misc_feature (1)..(25): SEQ ID NO: 7119; WAN024C29; Start 40; Stop 64
tggatggctgatgtttgtctgaaaa

SEQ ID NO: 459148 - DNA, 25 bp, Artificial
  probe
  misc_feature (1)..(25): SEQ ID NO: 7119; WAN024C29; Start 37; Stop 61
ttttggatggctgatgtttgtctga

SEQ ID NO: 459149 - DNA, 25 bp, Artificial
  probe
  misc_feature (1)..(25): SEQ ID NO: 7120; WAN024G9Z; Start 28; Stop 52
gttggacgagatttagttgaggttc

SEQ ID NO: 459150 - DNA, 25 bp, Artificial
  probe
  misc_feature (1)..(25): SEQ ID NO: 7120; WAN024G9Z; Start 46; Stop 70
gaggttcctctagctcaatcttgtg

SEQ ID NO: 459151 - DNA, 25 bp, Artificial
  probe
  misc_feature (1)..(25): SEQ ID NO: 7120; WAN024G9Z; Start 27; Stop 51
ggttggacgagatttagttgaggtt

SEQ ID NO: 459152 - DNA, 25 bp, Artificial
  probe
  misc_feature (1)..(25): SEQ ID NO: 7120; WAN024G9Z; Start 34; Stop 58
cgagatttagttgaggttcctctag

SEQ ID NO: 459153 - DNA, 25 bp, Artificial
  probe
  misc_feature (1)..(25): SEQ ID NO: 7120; WAN024G9Z; Start 35; Stop 59
gagatttagttgaggttcctctagc

SEQ ID NO: 459154 - DNA, 25 bp, Artificial
  probe
  misc_feature (1)..(25): SEQ ID NO: 7120; WAN024G9Z; Start 33; Stop 57
acgagatttagttgaggttcctcta

SEQ ID NO: 459155 - DNA, 25 bp, Artificial
  probe
  misc_feature (1)..(25): SEQ ID NO: 7120; WAN024G9Z; Start 47; Stop 71
aggttcctctagctcaatcttgtga

SEQ ID NO: 459156 - DNA, 25 bp, Artificial
  probe
  misc_feature (1)..(25): SEQ ID NO: 7120; WAN024G9Z; Start 37; Stop 61
gatttagttgaggttcctctagctc

SEQ ID NO: 459157 - DNA, 25 bp, Artificial
  probe
  misc_feature (1)..(25): SEQ ID NO: 7120; WAN024G9Z; Start 36; Stop 60
agatttagttgaggttcctctagct

SEQ ID NO: 459158 - DNA, 25 bp, Artificial
  probe
  misc_feature (1)..(25): SEQ ID NO: 7120; WAN024G9Z; Start 32; Stop 56
gacgagatttagttgaggttcctct

SEQ ID NO: 459159 - DNA, 25 bp, Artificial
  probe
  misc_feature (1)..(25): SEQ ID NO: 7120; WAN024G9Z; Start 29; Stop 53
ttggacgagatttagttgaggttcc

SEQ ID NO: 459160 - DNA, 25 bp, Artificial
  probe
  misc_feature (1)..(25): SEQ ID NO: 7120; WAN024G9Z; Start 30; Stop 54
tggacgagatttagttgaggttcct

SEQ ID NO: 459161 - DNA, 25 bp, Artificial
  probe
  misc_feature (1)..(25): SEQ ID NO: 7120; WAN024G9Z; Start 31; Stop 55
ggacgagatttagttgaggttcctc

SEQ ID NO: 459162 - DNA, 25 bp, Artificial
  probe
  misc_feature (1)..(25): SEQ ID NO: 7120; WAN024G9Z; Start 26; Stop 50
gggttggacgagatttagttgaggt

SEQ ID NO: 459163 - DNA, 25 bp, Artificial
  probe
  misc_feature (1)..(25): SEQ ID NO: 7120; WAN024G9Z; Start 48; Stop 72
ggttcctctagctcaatcttgtgag

SEQ ID NO: 459164 - DNA, 25 bp, Artificial
  probe
  misc_feature (1)..(25): SEQ ID NO: 7120; WAN024G9Z; Start 53; Stop 77
ctctagctcaatcttgtgaggaagc

SEQ ID NO: 459165 - DNA, 25 bp, Artificial
  probe
  misc_feature (1)..(25): SEQ ID NO: 7120; WAN024G9Z; Start 45; Stop 69
tgaggttcctctagctcaatcttgt

SEQ ID NO: 459166 - DNA, 25 bp, Artificial
  probe
  misc_feature (1)..(25): SEQ ID NO: 7120; WAN024G9Z; Start 38; Stop 62
atttagttgaggttcctctagctca

SEQ ID NO: 459167 - DNA, 25 bp, Artificial
  probe
  misc_feature (1)..(25): SEQ ID NO: 7120; WAN024G9Z; Start 22; Stop 46
cttggggttggacgagatttagttg

SEQ ID NO: 459168 - DNA, 25 bp, Artificial
  probe
  misc_feature (1)..(25): SEQ ID NO: 7120; WAN024G9Z; Start 23; Stop 47
ttggggttggacgagatttagttga

SEQ ID NO: 459169 - DNA, 25 bp, Artificial
  probe
  misc_feature (1)..(25): SEQ ID NO: 7120; WAN024G9Z; Start 52; Stop 76
cctctagctcaatcttgtgaggaag

SEQ ID NO: 459170 - DNA, 25 bp, Artificial
  probe
  misc_feature (1)..(25): SEQ ID NO: 7120; WAN024G9Z; Start 49; Stop 73
gttcctctagctcaatcttgtgagg

SEQ ID NO: 459171 - DNA, 25 bp, Artificial
  probe
  misc_feature (1)..(25): SEQ ID NO: 7120; WAN024G9Z; Start 24; Stop 48
tggggttggacgagatttagttgag

SEQ ID NO: 459172 - DNA, 25 bp, Artificial
  probe
  misc_feature (1)..(25): SEQ ID NO: 7120; WAN024G9Z; Start 21; Stop 45
ccttggggttggacgagatttagtt

SEQ ID NO: 459173 - DNA, 25 bp, Artificial
  probe
  misc_feature (1)..(25): SEQ ID NO: 7120; WAN024G9Z; Start 54; Stop 78
tctagctcaatcttgtgaggaagct

SEQ ID NO: 459174 - DNA, 25 bp, Artificial
  probe
  misc_feature (1)..(25): SEQ ID NO: 7120; WAN024G9Z; Start 25; Stop 49
ggggttggacgagatttagttgagg

SEQ ID NO: 459175 - DNA, 25 bp, Artificial
  probe
  misc_feature (1)..(25): SEQ ID NO: 7120; WAN024G9Z; Start 19; Stop 43
gaccttggggttggacgagatttag

SEQ ID NO: 459176 - DNA, 25 bp, Artificial
  probe
  misc_feature (1)..(25): SEQ ID NO: 7121; WAN024BX2; Start 15; Stop 39
aaatccacaaatcaataccattcgt

SEQ ID NO: 459177 - DNA, 25 bp, Artificial
  probe
  misc_feature (1)..(25): SEQ ID NO: 7121; WAN024BX2; Start 16; Stop 40
aatccacaaatcaataccattcgtg

SEQ ID NO: 459178 - DNA, 25 bp, Artificial
  probe
  misc_feature (1)..(25): SEQ ID NO: 7121; WAN024BX2; Start 20; Stop 44
cacaaatcaataccattcgtggatt

SEQ ID NO: 459179 - DNA, 25 bp, Artificial
  probe
  misc_feature (1)..(25): SEQ ID NO: 7121; WAN024BX2; Start 14; Stop 38
aaaatccacaaatcaataccattcg

SEQ ID NO: 459180 - DNA, 25 bp, Artificial
  probe
  misc_feature (1)..(25): SEQ ID NO: 7121; WAN024BX2; Start 45; Stop 69
tttcctagtgaagcgtttaggtaag

SEQ ID NO: 459181 - DNA, 25 bp, Artificial
  probe
  misc_feature (1)..(25): SEQ ID NO: 7121; WAN024BX2; Start 46; Stop 70
ttcctagtgaagcgtttaggtaagc

SEQ ID NO: 459182 - DNA, 25 bp, Artificial
  probe
  misc_feature (1)..(25): SEQ ID NO: 7121; WAN024BX2; Start 44; Stop 68
ttttcctagtgaagcgtttaggtaa

SEQ ID NO: 459183 - DNA, 25 bp, Artificial
  probe
  misc_feature (1)..(25): SEQ ID NO: 7121; WAN024BX2; Start 21; Stop 45
acaaatcaataccattcgtggattt

SEQ ID NO: 459184 - DNA, 25 bp, Artificial
  probe
  misc_feature (1)..(25): SEQ ID NO: 7121; WAN024BX2; Start 47; Stop 71
tcctagtgaagcgtttaggtaagcc

SEQ ID NO: 459185 - DNA, 25 bp, Artificial
  probe
  misc_feature (1)..(25): SEQ ID NO: 7121; WAN024BX2; Start 22; Stop 46
caaatcaataccattcgtggatttt

SEQ ID NO: 459186 - DNA, 25 bp, Artificial
  probe
  misc_feature (1)..(25): SEQ ID NO: 7122; WAN024BSE; Start 127; Stop 151
aaggttaccgttattagagatgtgg

SEQ ID NO: 459187 - DNA, 25 bp, Artificial
  probe
  misc_feature (1)..(25): SEQ ID NO: 7122; WAN024BSE; Start 128; Stop 152
aggttaccgttattagagatgtggc

SEQ ID NO: 459188 - DNA, 25 bp, Artificial
  probe
  misc_feature (1)..(25): SEQ ID NO: 7122; WAN024BSE; Start 129; Stop 153
ggttaccgttattagagatgtggca

SEQ ID NO: 459189 - DNA, 25 bp, Artificial
  probe
  misc_feature (1)..(25): SEQ ID NO: 7122; WAN024BSE; Start 33; Stop 57
cgtggtgaaagtaattgctattgta

SEQ ID NO: 459190 - DNA, 25 bp, Artificial
  probe
  misc_feature (1)..(25): SEQ ID NO: 7122; WAN024BSE; Start 22; Stop 46
ttatctgtcttcgtggtgaaagtaa

SEQ ID NO: 459191 - DNA, 25 bp, Artificial
  probe
  misc_feature (1)..(25): SEQ ID NO: 7122; WAN024BSE; Start 23; Stop 47
tatctgtcttcgtggtgaaagtaat

SEQ ID NO: 459192 - DNA, 25 bp, Artificial
  probe
  misc_feature (1)..(25): SEQ ID NO: 7122; WAN024BSE; Start 21; Stop 45
cttatctgtcttcgtggtgaaagta

SEQ ID NO: 459193 - DNA, 25 bp, Artificial
  probe
  misc_feature (1)..(25): SEQ ID NO: 7122; WAN024BSE; Start 31; Stop 55
ttcgtggtgaaagtaattgctattg

SEQ ID NO: 459194 - DNA, 25 bp, Artificial
  probe
  misc_feature (1)..(25): SEQ ID NO: 7122; WAN024BSE; Start 30; Stop 54
cttcgtggtgaaagtaattgctatt

SEQ ID NO: 459195 - DNA, 25 bp, Artificial
  probe
  misc_feature (1)..(25): SEQ ID NO: 7122; WAN024BSE; Start 24; Stop 48
atctgtcttcgtggtgaaagtaatt

SEQ ID NO: 459196 - DNA, 25 bp, Artificial
  probe
  misc_feature (1)..(25): SEQ ID NO: 7122; WAN024BSE; Start 44; Stop 68
taattgctattgtatcgactgaagt

SEQ ID NO: 459197 - DNA, 25 bp, Artificial
  probe
  misc_feature (1)..(25): SEQ ID NO: 7122; WAN024BSE; Start 29; Stop 53
tcttcgtggtgaaagtaattgctat

SEQ ID NO: 459198 - DNA, 25 bp, Artificial
  probe
  misc_feature (1)..(25): SEQ ID NO: 7122; WAN024BSE; Start 32; Stop 56
tcgtggtgaaagtaattgctattgt

SEQ ID NO: 459199 - DNA, 25 bp, Artificial
  probe
  misc_feature (1)..(25): SEQ ID NO: 7122; WAN024BSE; Start 73; Stop 97
ttagaaagtcttgaaggcgatgttt

SEQ ID NO: 459200 - DNA, 25 bp, Artificial
  probe
  misc_feature (1)..(25): SEQ ID NO: 7122; WAN024BSE; Start 72; Stop 96
tttagaaagtcttgaaggcgatgtt

SEQ ID NO: 459201 - DNA, 25 bp, Artificial
  probe
  misc_feature (1)..(25): SEQ ID NO: 7122; WAN024BSE; Start 46; Stop 70
attgctattgtatcgactgaagtcc

SEQ ID NO: 459202 - DNA, 25 bp, Artificial
  probe
  misc_feature (1)..(25): SEQ ID NO: 7122; WAN024BSE; Start 45; Stop 69
aattgctattgtatcgactgaagtc

SEQ ID NO: 459203 - DNA, 25 bp, Artificial
  probe
  misc_feature (1)..(25): SEQ ID NO: 7122; WAN024BSE; Start 43; Stop 67
gtaattgctattgtatcgactgaag

SEQ ID NO: 459204 - DNA, 25 bp, Artificial
  probe
  misc_feature (1)..(25): SEQ ID NO: 7122; WAN024BSE; Start 62; Stop 86
ctgaagtccctttagaaagtcttga

SEQ ID NO: 459205 - DNA, 25 bp, Artificial
  probe
  misc_feature (1)..(25): SEQ ID NO: 7122; WAN024BSE; Start 63; Stop 87
tgaagtccctttagaaagtcttgaa

SEQ ID NO: 459206 - DNA, 25 bp, Artificial
  probe
  misc_feature (1)..(25): SEQ ID NO: 7122; WAN024BSE; Start 19; Stop 43
gtcttatctgtcttcgtggtgaaag

SEQ ID NO: 459207 - DNA, 25 bp, Artificial
  probe
  misc_feature (1)..(25): SEQ ID NO: 7122; WAN024BSE; Start 28; Stop 52
gtcttcgtggtgaaagtaattgcta

SEQ ID NO: 459208 - DNA, 25 bp, Artificial
  probe
  misc_feature (1)..(25): SEQ ID NO: 7122; WAN024BSE; Start 25; Stop 49
tctgtcttcgtggtgaaagtaattg

SEQ ID NO: 459209 - DNA, 25 bp, Artificial
  probe
  misc_feature (1)..(25): SEQ ID NO: 7122; WAN024BSE; Start 64; Stop 88
gaagtccctttagaaagtcttgaag

SEQ ID NO: 459210 - DNA, 25 bp, Artificial
  probe
  misc_feature (1)..(25): SEQ ID NO: 7122; WAN024BSE; Start 36; Stop 60
ggtgaaagtaattgctattgtatcg

SEQ ID NO: 459211 - DNA, 25 bp, Artificial
  probe
  misc_feature (1)..(25): SEQ ID NO: 7122; WAN024BSE; Start 126; Stop 150
aaaggttaccgttattagagatgtg

SEQ ID NO: 459212 - DNA, 25 bp, Artificial
  probe
  misc_feature (1)..(25): SEQ ID NO: 7122; WAN024BSE; Start 42; Stop 66
agtaattgctattgtatcgactgaa

SEQ ID NO: 459213 - DNA, 25 bp, Artificial
  probe
  misc_feature (1)..(25): SEQ ID NO: 7122; WAN024BSE; Start 41; Stop 65
aagtaattgctattgtatcgactga

SEQ ID NO: 459214 - DNA, 25 bp, Artificial
  probe
  misc_feature (1)..(25): SEQ ID NO: 7122; WAN024BSE; Start 61; Stop 85
actgaagtccctttagaaagtcttg

SEQ ID NO: 459215 - DNA, 25 bp, Artificial
  probe
  misc_feature (1)..(25): SEQ ID NO: 7122; WAN024BSE; Start 20; Stop 44
tcttatctgtcttcgtggtgaaagt

SEQ ID NO: 459216 - DNA, 25 bp, Artificial
  probe
  misc_feature (1)..(25): SEQ ID NO: 7122; WAN024BSE; Start 71; Stop 95
ctttagaaagtcttgaaggcgatgt

SEQ ID NO: 459217 - DNA, 25 bp, Artificial
  probe
  misc_feature (1)..(25): SEQ ID NO: 7122; WAN024BSE; Start 34; Stop 58
gtggtgaaagtaattgctattgtat

SEQ ID NO: 459218 - DNA, 25 bp, Artificial
  probe
  misc_feature (1)..(25): SEQ ID NO: 7122; WAN024BSE; Start 35; Stop 59
tggtgaaagtaattgctattgtatc

SEQ ID NO: 459219 - DNA, 25 bp, Artificial
  probe
  misc_feature (1)..(25): SEQ ID NO: 7123; WAN024GO2; Start 10; Stop 34
cttgtcttcttcgatcaggtaggag

SEQ ID NO: 459220 - DNA, 25 bp, Artificial
  probe
  misc_feature (1)..(25): SEQ ID NO: 7123; WAN024GO2; Start 11; Stop 35
ttgtcttcttcgatcaggtaggaga

SEQ ID NO: 459221 - DNA, 25 bp, Artificial
  probe
  misc_feature (1)..(25): SEQ ID NO: 7123; WAN024GO2; Start 12; Stop 36
tgtcttcttcgatcaggtaggagag

SEQ ID NO: 459222 - DNA, 25 bp, Artificial
  probe
  misc_feature (1)..(25): SEQ ID NO: 7123; WAN024GO2; Start 1; Stop 25
ctgctgaaccttgtcttcttcgatc

SEQ ID NO: 459223 - DNA, 25 bp, Artificial
  probe
  misc_feature (1)..(25): SEQ ID NO: 7123; WAN024GO2; Start 9; Stop 33
ccttgtcttcttcgatcaggtagga

SEQ ID NO: 459224 - DNA, 25 bp, Artificial
  probe
  misc_feature (1)..(25): SEQ ID NO: 7123; WAN024GO2; Start 13; Stop 37
gtcttcttcgatcaggtaggagagc

SEQ ID NO: 459225 - DNA, 25 bp, Artificial
  probe
  misc_feature (1)..(25): SEQ ID NO: 7123; WAN024GO2; Start 14; Stop 38
tcttcttcgatcaggtaggagagct

SEQ ID NO: 459226 - DNA, 25 bp, Artificial
  probe
  misc_feature (1)..(25): SEQ ID NO: 7123; WAN024GO2; Start 2; Stop 26
tgctgaaccttgtcttcttcgatca

SEQ ID NO: 459227 - DNA, 25 bp, Artificial
  probe
  misc_feature (1)..(25): SEQ ID NO: 7123; WAN024GO2; Start 7; Stop 31
aaccttgtcttcttcgatcaggtag

SEQ ID NO: 459228 - DNA, 25 bp, Artificial
  probe
  misc_feature (1)..(25): SEQ ID NO: 7123; WAN024GO2; Start 6; Stop 30
gaaccttgtcttcttcgatcaggta

SEQ ID NO: 459229 - DNA, 25 bp, Artificial
  probe
  misc_feature (1)..(25): SEQ ID NO: 7123; WAN024GO2; Start 4; Stop 28
ctgaaccttgtcttcttcgatcagg

SEQ ID NO: 459230 - DNA, 25 bp, Artificial
  probe
  misc_feature (1)..(25): SEQ ID NO: 7123; WAN024GO2; Start 3; Stop 27
gctgaaccttgtcttcttcgatcag

SEQ ID NO: 459231 - DNA, 25 bp, Artificial
  probe
  misc_feature (1)..(25): SEQ ID NO: 7123; WAN024GO2; Start 8; Stop 32
accttgtcttcttcgatcaggtagg

SEQ ID NO: 459232 - DNA, 25 bp, Artificial
  probe
  misc_feature (1)..(25): SEQ ID NO: 7123; WAN024GO2; Start 5; Stop 29
tgaaccttgtcttcttcgatcaggt

SEQ ID NO: 459233 - DNA, 25 bp, Artificial
  probe
  misc_feature (1)..(25): SEQ ID NO: 7123; WAN024GO2; Start 15; Stop 39
cttcttcgatcaggtaggagagctc

SEQ ID NO: 459234 - DNA, 25 bp, Artificial
  probe
  misc_feature (1)..(25): SEQ ID NO: 7124; WAN024C2A; Start 60; Stop 84
aaccagtctgatcctctcttactta

SEQ ID NO: 459235 - DNA, 25 bp, Artificial
  probe
  misc_feature (1)..(25): SEQ ID NO: 7124; WAN024C2A; Start 59; Stop 83
gaaccagtctgatcctctcttactt

SEQ ID NO: 459236 - DNA, 25 bp, Artificial
  probe
  misc_feature (1)..(25): SEQ ID NO: 7124; WAN024C2A; Start 58; Stop 82
agaaccagtctgatcctctcttact

SEQ ID NO: 459237 - DNA, 25 bp, Artificial
  probe
  misc_feature (1)..(25): SEQ ID NO: 7124; WAN024C2A; Start 5; Stop 29
tggagaggagtttgtttagagtttc

SEQ ID NO: 459238 - DNA, 25 bp, Artificial
  probe
  misc_feature (1)..(25): SEQ ID NO: 7124; WAN024C2A; Start 4; Stop 28
ctggagaggagtttgtttagagttt

SEQ ID NO: 459239 - DNA, 25 bp, Artificial
  probe
  misc_feature (1)..(25): SEQ ID NO: 7124; WAN024C2A; Start 6; Stop 30
ggagaggagtttgtttagagtttct

SEQ ID NO: 459240 - DNA, 25 bp, Artificial
  probe
  misc_feature (1)..(25): SEQ ID NO: 7124; WAN024C2A; Start 7; Stop 31
gagaggagtttgtttagagtttctt

SEQ ID NO: 459241 - DNA, 25 bp, Artificial
  probe
  misc_feature (1)..(25): SEQ ID NO: 7124; WAN024C2A; Start 17; Stop 41
tgtttagagtttctttcatttccct

SEQ ID NO: 459242 - DNA, 25 bp, Artificial
  probe
  misc_feature (1)..(25): SEQ ID NO: 7124; WAN024C2A; Start 10; Stop 34
aggagtttgtttagagtttctttca

SEQ ID NO: 459243 - DNA, 25 bp, Artificial
  probe
  misc_feature (1)..(25): SEQ ID NO: 7124; WAN024C2A; Start 8; Stop 32
agaggagtttgtttagagtttcttt

SEQ ID NO: 459244 - DNA, 25 bp, Artificial
  probe
  misc_feature (1)..(25): SEQ ID NO: 7124; WAN024C2A; Start 9; Stop 33
gaggagtttgtttagagtttctttc

SEQ ID NO: 459245 - DNA, 25 bp, Artificial
  probe
  misc_feature (1)..(25): SEQ ID NO: 7124; WAN024C2A; Start 16; Stop 40
ttgtttagagtttctttcatttccc

SEQ ID NO: 459246 - DNA, 25 bp, Artificial
  probe
  misc_feature (1)..(25): SEQ ID NO: 7124; WAN024C2A; Start 3; Stop 27
gctggagaggagtttgtttagagtt

SEQ ID NO: 459247 - DNA, 25 bp, Artificial
  probe
  misc_feature (1)..(25): SEQ ID NO: 7124; WAN024C2A; Start 11; Stop 35
ggagtttgtttagagtttctttcat

SEQ ID NO: 459248 - DNA, 25 bp, Artificial
  probe
  misc_feature (1)..(25): SEQ ID NO: 7124; WAN024C2A; Start 1; Stop 25
ctgctggagaggagtttgtttagag

SEQ ID NO: 459249 - DNA, 25 bp, Artificial
  probe
  misc_feature (1)..(25): SEQ ID NO: 7124; WAN024C2A; Start 18; Stop 42
gtttagagtttctttcatttcccta

SEQ ID NO: 459250 - DNA, 25 bp, Artificial
  probe
  misc_feature (1)..(25): SEQ ID NO: 7124; WAN024C2A; Start 2; Stop 26
tgctggagaggagtttgtttagagt

SEQ ID NO: 459251 - DNA, 25 bp, Artificial
  probe
  misc_feature (1)..(25): SEQ ID NO: 7124; WAN024C2A; Start 57; Stop 81
gagaaccagtctgatcctctcttac

SEQ ID NO: 459252 - DNA, 25 bp, Artificial
  probe
  misc_feature (1)..(25): SEQ ID NO: 7124; WAN024C2A; Start 15; Stop 39
tttgtttagagtttctttcatttcc

SEQ ID NO: 459253 - DNA, 25 bp, Artificial
  probe
  misc_feature (1)..(25): SEQ ID NO: 7124; WAN024C2A; Start 12; Stop 36
gagtttgtttagagtttctttcatt

SEQ ID NO: 459254 - DNA, 25 bp, Artificial
  probe
  misc_feature (1)..(25): SEQ ID NO: 7124; WAN024C2A; Start 20; Stop 44
ttagagtttctttcatttccctaaa

SEQ ID NO: 459255 - DNA, 25 bp, Artificial
  probe
  misc_feature (1)..(25): SEQ ID NO: 7124; WAN024C2A; Start 19; Stop 43
tttagagtttctttcatttccctaa

SEQ ID NO: 459256 - DNA, 25 bp, Artificial
  probe
  misc_feature (1)..(25): SEQ ID NO: 7124; WAN024C2A; Start 51; Stop 75
aaaagagagaaccagtctgatcctc

SEQ ID NO: 459257 - DNA, 25 bp, Artificial
  probe
  misc_feature (1)..(25): SEQ ID NO: 7124; WAN024C2A; Start 13; Stop 37
agtttgtttagagtttctttcattt

SEQ ID NO: 459258 - DNA, 25 bp, Artificial
  probe
  misc_feature (1)..(25): SEQ ID NO: 7124; WAN024C2A; Start 14; Stop 38
gtttgtttagagtttctttcatttc

SEQ ID NO: 459259 - DNA, 25 bp, Artificial
  probe
  misc_feature (1)..(25): SEQ ID NO: 7124; WAN024C2A; Start 52; Stop 76
aaagagagaaccagtctgatcctct

SEQ ID NO: 459260 - DNA, 25 bp, Artificial
  probe
  misc_feature (1)..(25): SEQ ID NO: 7124; WAN024C2A; Start 21; Stop 45
tagagtttctttcatttccctaaaa

SEQ ID NO: 459261 - DNA, 25 bp, Artificial
  probe
  misc_feature (1)..(25): SEQ ID NO: 7125; WAN024CVL; Start 42; Stop 66
gattcaagtttatctgcgtgactac

SEQ ID NO: 459262 - DNA, 25 bp, Artificial
  probe
  misc_feature (1)..(25): SEQ ID NO: 7125; WAN024CVL; Start 41; Stop 65
ggattcaagtttatctgcgtgacta

SEQ ID NO: 459263 - DNA, 25 bp, Artificial
  probe
  misc_feature (1)..(25): SEQ ID NO: 7125; WAN024CVL; Start 39; Stop 63
ttggattcaagtttatctgcgtgac

SEQ ID NO: 459264 - DNA, 25 bp, Artificial
  probe
  misc_feature (1)..(25): SEQ ID NO: 7125; WAN024CVL; Start 40; Stop 64
tggattcaagtttatctgcgtgact

SEQ ID NO: 459265 - DNA, 25 bp, Artificial
  probe
  misc_feature (1)..(25): SEQ ID NO: 7125; WAN024CVL; Start 43; Stop 67
attcaagtttatctgcgtgactacg

SEQ ID NO: 459266 - DNA, 25 bp, Artificial
  probe
  misc_feature (1)..(25): SEQ ID NO: 7125; WAN024CVL; Start 38; Stop 62
cttggattcaagtttatctgcgtga

SEQ ID NO: 459267 - DNA, 25 bp, Artificial
  probe
  misc_feature (1)..(25): SEQ ID NO: 7125; WAN024CVL; Start 37; Stop 61
gcttggattcaagtttatctgcgtg

SEQ ID NO: 459268 - DNA, 25 bp, Artificial
  probe
  misc_feature (1)..(25): SEQ ID NO: 7125; WAN024CVL; Start 36; Stop 60
agcttggattcaagtttatctgcgt

SEQ ID NO: 459269 - DNA, 25 bp, Artificial
  probe
  misc_feature (1)..(25): SEQ ID NO: 7125; WAN024CVL; Start 31; Stop 55
aacgaagcttggattcaagtttatc

SEQ ID NO: 459270 - DNA, 25 bp, Artificial
  probe
  misc_feature (1)..(25): SEQ ID NO: 7125; WAN024CVL; Start 30; Stop 54
aaacgaagcttggattcaagtttat

SEQ ID NO: 459271 - DNA, 25 bp, Artificial
  probe
  misc_feature (1)..(25): SEQ ID NO: 7125; WAN024CVL; Start 33; Stop 57
cgaagcttggattcaagtttatctg

SEQ ID NO: 459272 - DNA, 25 bp, Artificial
  probe
  misc_feature (1)..(25): SEQ ID NO: 7125; WAN024CVL; Start 34; Stop 58
gaagcttggattcaagtttatctgc

SEQ ID NO: 459273 - DNA, 25 bp, Artificial
  probe
  misc_feature (1)..(25): SEQ ID NO: 7125; WAN024CVL; Start 32; Stop 56
acgaagcttggattcaagtttatct

SEQ ID NO: 459274 - DNA, 25 bp, Artificial
  probe
  misc_feature (1)..(25): SEQ ID NO: 7125; WAN024CVL; Start 35; Stop 59
aagcttggattcaagtttatctgcg

SEQ ID NO: 459275 - DNA, 25 bp, Artificial
  probe
  misc_feature (1)..(25): SEQ ID NO: 7125; WAN024CVL; Start 1; Stop 25
ctgcttcaagaaagcctagttgctt

SEQ ID NO: 459276 - DNA, 25 bp, Artificial
  probe
  misc_feature (1)..(25): SEQ ID NO: 7125; WAN024CVL; Start 29; Stop 53
aaaacgaagcttggattcaagttta

SEQ ID NO: 459277 - DNA, 25 bp, Artificial
  probe
  misc_feature (1)..(25): SEQ ID NO: 7125; WAN024CVL; Start 2; Stop 26
tgcttcaagaaagcctagttgcttg

SEQ ID NO: 459278 - DNA, 25 bp, Artificial
  probe
  misc_feature (1)..(25): SEQ ID NO: 7125; WAN024CVL; Start 28; Stop 52
caaaacgaagcttggattcaagttt

SEQ ID NO: 459279 - DNA, 25 bp, Artificial
  probe
  misc_feature (1)..(25): SEQ ID NO: 7125; WAN024CVL; Start 4; Stop 28
cttcaagaaagcctagttgcttggc

SEQ ID NO: 459280 - DNA, 25 bp, Artificial
  probe
  misc_feature (1)..(25): SEQ ID NO: 7125; WAN024CVL; Start 3; Stop 27
gcttcaagaaagcctagttgcttgg

SEQ ID NO: 459281 - DNA, 25 bp, Artificial
  probe
  misc_feature (1)..(25): SEQ ID NO: 7125; WAN024CVL; Start 24; Stop 48
ttggcaaaacgaagcttggattcaa

SEQ ID NO: 459282 - DNA, 25 bp, Artificial
  probe
  misc_feature (1)..(25): SEQ ID NO: 7125; WAN024CVL; Start 7; Stop 31
caagaaagcctagttgcttggcaaa

SEQ ID NO: 459283 - DNA, 25 bp, Artificial
  probe
  misc_feature (1)..(25): SEQ ID NO: 7125; WAN024CVL; Start 23; Stop 47
cttggcaaaacgaagcttggattca

SEQ ID NO: 459284 - DNA, 25 bp, Artificial
  probe
  misc_feature (1)..(25): SEQ ID NO: 7125; WAN024CVL; Start 27; Stop 51
gcaaaacgaagcttggattcaagtt

SEQ ID NO: 459285 - DNA, 25 bp, Artificial
  probe
  misc_feature (1)..(25): SEQ ID NO: 7125; WAN024CVL; Start 8; Stop 32
aagaaagcctagttgcttggcaaaa

SEQ ID NO: 459286 - DNA, 25 bp, Artificial
  probe
  misc_feature (1)..(25): SEQ ID NO: 7125; WAN024CVL; Start 9; Stop 33
agaaagcctagttgcttggcaaaac

SEQ ID NO: 459287 - DNA, 25 bp, Artificial
  probe
  misc_feature (1)..(25): SEQ ID NO: 7125; WAN024CVL; Start 26; Stop 50
ggcaaaacgaagcttggattcaagt

SEQ ID NO: 459288 - DNA, 25 bp, Artificial
  probe
  misc_feature (1)..(25): SEQ ID NO: 7125; WAN024CVL; Start 25; Stop 49
tggcaaaacgaagcttggattcaag

SEQ ID NO: 459289 - DNA, 25 bp, Artificial
  probe
  misc_feature (1)..(25): SEQ ID NO: 7125; WAN024CVL; Start 16; Stop 40
ctagttgcttggcaaaacgaagctt

SEQ ID NO: 459290 - DNA, 25 bp, Artificial
  probe
  misc_feature (1)..(25): SEQ ID NO: 7125; WAN024CVL; Start 17; Stop 41
tagttgcttggcaaaacgaagcttg

SEQ ID NO: 459291 - DNA, 25 bp, Artificial
  probe
  misc_feature (1)..(25): SEQ ID NO: 7126; WAN024BMF; Start 13; Stop 37
ttgatgcttcctatcctatcacctt

SEQ ID NO: 459292 - DNA, 25 bp, Artificial
  probe
  misc_feature (1)..(25): SEQ ID NO: 7126; WAN024BMF; Start 15; Stop 39
gatgcttcctatcctatcacctttt

SEQ ID NO: 459293 - DNA, 25 bp, Artificial
  probe
  misc_feature (1)..(25): SEQ ID NO: 7126; WAN024BMF; Start 14; Stop 38
tgatgcttcctatcctatcaccttt

SEQ ID NO: 459294 - DNA, 25 bp, Artificial
  probe
  misc_feature (1)..(25): SEQ ID NO: 7126; WAN024BMF; Start 12; Stop 36
tttgatgcttcctatcctatcacct

SEQ ID NO: 459295 - DNA, 25 bp, Artificial
  probe
  misc_feature (1)..(25): SEQ ID NO: 7126; WAN024BMF; Start 39; Stop 63
ttcatcacctgtcaataatatttca

SEQ ID NO: 459296 - DNA, 25 bp, Artificial
  probe
  misc_feature (1)..(25): SEQ ID NO: 7126; WAN024BMF; Start 41; Stop 65
catcacctgtcaataatatttcaga

SEQ ID NO: 459297 - DNA, 25 bp, Artificial
  probe
  misc_feature (1)..(25): SEQ ID NO: 7126; WAN024BMF; Start 40; Stop 64
tcatcacctgtcaataatatttcag

SEQ ID NO: 459298 - DNA, 25 bp, Artificial
  probe
  misc_feature (1)..(25): SEQ ID NO: 7126; WAN024BMF; Start 11; Stop 35
ttttgatgcttcctatcctatcacc

SEQ ID NO: 459299 - DNA, 25 bp, Artificial
  probe
  misc_feature (1)..(25): SEQ ID NO: 7126; WAN024BMF; Start 43; Stop 67
tcacctgtcaataatatttcagaat

SEQ ID NO: 459300 - DNA, 25 bp, Artificial
  probe
  misc_feature (1)..(25): SEQ ID NO: 7126; WAN024BMF; Start 42; Stop 66
atcacctgtcaataatatttcagaa

SEQ ID NO: 459301 - DNA, 25 bp, Artificial
  probe
  misc_feature (1)..(25): SEQ ID NO: 7126; WAN024BMF; Start 38; Stop 62
tttcatcacctgtcaataatatttc

SEQ ID NO: 459302 - DNA, 25 bp, Artificial
  probe
  misc_feature (1)..(25): SEQ ID NO: 7126; WAN024BMF; Start 88; Stop 112
ttctttcaggaagctttcaaagttt

SEQ ID NO: 459303 - DNA, 25 bp, Artificial
  probe
  misc_feature (1)..(25): SEQ ID NO: 7126; WAN024BMF; Start 87; Stop 111
attctttcaggaagctttcaaagtt

SEQ ID NO: 459304 - DNA, 25 bp, Artificial
  probe
  misc_feature (1)..(25): SEQ ID NO: 7126; WAN024BMF; Start 86; Stop 110
aattctttcaggaagctttcaaagt

SEQ ID NO: 459305 - DNA, 25 bp, Artificial
  probe
  misc_feature (1)..(25): SEQ ID NO: 7126; WAN024BMF; Start 44; Stop 68
cacctgtcaataatatttcagaatt

SEQ ID NO: 459306 - DNA, 25 bp, Artificial
  probe
  misc_feature (1)..(25): SEQ ID NO: 7126; WAN024BMF; Start 85; Stop 109
aaattctttcaggaagctttcaaag

SEQ ID NO: 459307 - DNA, 25 bp, Artificial
  probe
  misc_feature (1)..(25): SEQ ID NO: 7126; WAN024BMF; Start 84; Stop 108
aaaattctttcaggaagctttcaaa

SEQ ID NO: 459308 - DNA, 25 bp, Artificial
  probe
  misc_feature (1)..(25): SEQ ID NO: 7126; WAN024BMF; Start 89; Stop 113
tctttcaggaagctttcaaagtttt

SEQ ID NO: 459309 - DNA, 25 bp, Artificial
  probe
  misc_feature (1)..(25): SEQ ID NO: 7126; WAN024BMF; Start 81; Stop 105
tcgaaaattctttcaggaagctttc

SEQ ID NO: 459310 - DNA, 25 bp, Artificial
  probe
  misc_feature (1)..(25): SEQ ID NO: 7126; WAN024BMF; Start 82; Stop 106
cgaaaattctttcaggaagctttca

SEQ ID NO: 459311 - DNA, 25 bp, Artificial
  probe
  misc_feature (1)..(25): SEQ ID NO: 7126; WAN024BMF; Start 80; Stop 104
ttcgaaaattctttcaggaagcttt

SEQ ID NO: 459312 - DNA, 25 bp, Artificial
  probe
  misc_feature (1)..(25): SEQ ID NO: 7126; WAN024BMF; Start 83; Stop 107
gaaaattctttcaggaagctttcaa

SEQ ID NO: 459313 - DNA, 25 bp, Artificial
  probe
  misc_feature (1)..(25): SEQ ID NO: 7126; WAN024BMF; Start 37; Stop 61
ttttcatcacctgtcaataatattt

SEQ ID NO: 459314 - DNA, 25 bp, Artificial
  probe
  misc_feature (1)..(25): SEQ ID NO: 7127; WAN024BY3; Start 1; Stop 25
ctggaaagagatgaacaaatcaaat

SEQ ID NO: 459315 - DNA, 25 bp, Artificial
  probe
  misc_feature (1)..(25): SEQ ID NO: 7127; WAN024BY3; Start 2; Stop 26
tggaaagagatgaacaaatcaaata

SEQ ID NO: 459316 - DNA, 25 bp, Artificial
  probe
  misc_feature (1)..(25): SEQ ID NO: 7127; WAN024BY3; Start 3; Stop 27
ggaaagagatgaacaaatcaaatac

SEQ ID NO: 459317 - DNA, 25 bp, Artificial
  probe
  misc_feature (1)..(25): SEQ ID NO: 7127; WAN024BY3; Start 4; Stop 28
gaaagagatgaacaaatcaaataca

SEQ ID NO: 459318 - DNA, 25 bp, Artificial
  probe
  misc_feature (1)..(25): SEQ ID NO: 7127; WAN024BY3; Start 5; Stop 29
aaagagatgaacaaatcaaatacat

SEQ ID NO: 459319 - DNA, 25 bp, Artificial
  probe
  misc_feature (1)..(25): SEQ ID NO: 7128; WAN024FSE; Start 10; Stop 34
gcatttaagttcttttcctttcgta

SEQ ID NO: 459320 - DNA, 25 bp, Artificial
  probe
  misc_feature (1)..(25): SEQ ID NO: 7128; WAN024FSE; Start 44; Stop 68
ctgaatttcctcctgcatctcaaga

SEQ ID NO: 459321 - DNA, 25 bp, Artificial
  probe
  misc_feature (1)..(25): SEQ ID NO: 7128; WAN024FSE; Start 26; Stop 50
cctttcgtaaatataggactgaatt

SEQ ID NO: 459322 - DNA, 25 bp, Artificial
  probe
  misc_feature (1)..(25): SEQ ID NO: 7128; WAN024FSE; Start 45; Stop 69
tgaatttcctcctgcatctcaagag

SEQ ID NO: 459323 - DNA, 25 bp, Artificial
  probe
  misc_feature (1)..(25): SEQ ID NO: 7128; WAN024FSE; Start 43; Stop 67
actgaatttcctcctgcatctcaag

SEQ ID NO: 459324 - DNA, 25 bp, Artificial
  probe
  misc_feature (1)..(25): SEQ ID NO: 7128; WAN024FSE; Start 29; Stop 53
ttcgtaaatataggactgaatttcc

SEQ ID NO: 459325 - DNA, 25 bp, Artificial
  probe
  misc_feature (1)..(25): SEQ ID NO: 7128; WAN024FSE; Start 42; Stop 66
gactgaatttcctcctgcatctcaa

SEQ ID NO: 459326 - DNA, 25 bp, Artificial
  probe
  misc_feature (1)..(25): SEQ ID NO: 7128; WAN024FSE; Start 9; Stop 33
tgcatttaagttcttttcctttcgt

SEQ ID NO: 459327 - DNA, 25 bp, Artificial
  probe
  misc_feature (1)..(25): SEQ ID NO: 7128; WAN024FSE; Start 8; Stop 32
ttgcatttaagttcttttcctttcg

SEQ ID NO: 459328 - DNA, 25 bp, Artificial
  probe
  misc_feature (1)..(25): SEQ ID NO: 7128; WAN024FSE; Start 35; Stop 59
aatataggactgaatttcctcctgc

SEQ ID NO: 459329 - DNA, 25 bp, Artificial
  probe
  misc_feature (1)..(25): SEQ ID NO: 7128; WAN024FSE; Start 34; Stop 58
aaatataggactgaatttcctcctg

SEQ ID NO: 459330 - DNA, 25 bp, Artificial
  probe
  misc_feature (1)..(25): SEQ ID NO: 7128; WAN024FSE; Start 28; Stop 52
tttcgtaaatataggactgaatttc

SEQ ID NO: 459331 - DNA, 25 bp, Artificial
  probe
  misc_feature (1)..(25): SEQ ID NO: 7128; WAN024FSE; Start 11; Stop 35
catttaagttcttttcctttcgtaa

SEQ ID NO: 459332 - DNA, 25 bp, Artificial
  probe
  misc_feature (1)..(25): SEQ ID NO: 7128; WAN024FSE; Start 37; Stop 61
tataggactgaatttcctcctgcat

SEQ ID NO: 459333 - DNA, 25 bp, Artificial
  probe
  misc_feature (1)..(25): SEQ ID NO: 7128; WAN024FSE; Start 36; Stop 60
atataggactgaatttcctcctgca

SEQ ID NO: 459334 - DNA, 25 bp, Artificial
  probe
  misc_feature (1)..(25): SEQ ID NO: 7128; WAN024FSE; Start 27; Stop 51
ctttcgtaaatataggactgaattt

SEQ ID NO: 459335 - DNA, 25 bp, Artificial
  probe
  misc_feature (1)..(25): SEQ ID NO: 7128; WAN024FSE; Start 24; Stop 48
ttcctttcgtaaatataggactgaa

SEQ ID NO: 459336 - DNA, 25 bp, Artificial
  probe
  misc_feature (1)..(25): SEQ ID NO: 7128; WAN024FSE; Start 23; Stop 47
tttcctttcgtaaatataggactga

SEQ ID NO: 459337 - DNA, 25 bp, Artificial
  probe
  misc_feature (1)..(25): SEQ ID NO: 7128; WAN024FSE; Start 7; Stop 31
attgcatttaagttcttttcctttc

SEQ ID NO: 459338 - DNA, 25 bp, Artificial
  probe
  misc_feature (1)..(25): SEQ ID NO: 7128; WAN024FSE; Start 1; Stop 25
ctggaaattgcatttaagttctttt

SEQ ID NO: 459339 - DNA, 25 bp, Artificial
  probe
  misc_feature (1)..(25): SEQ ID NO: 7128; WAN024FSE; Start 30; Stop 54
tcgtaaatataggactgaatttcct

SEQ ID NO: 459340 - DNA, 25 bp, Artificial
  probe
  misc_feature (1)..(25): SEQ ID NO: 7128; WAN024FSE; Start 25; Stop 49
tcctttcgtaaatataggactgaat

SEQ ID NO: 459341 - DNA, 25 bp, Artificial
  probe
  misc_feature (1)..(25): SEQ ID NO: 7128; WAN024FSE; Start 38; Stop 62
ataggactgaatttcctcctgcatc

SEQ ID NO: 459342 - DNA, 25 bp, Artificial
  probe
  misc_feature (1)..(25): SEQ ID NO: 7128; WAN024FSE; Start 41; Stop 65
ggactgaatttcctcctgcatctca

SEQ ID NO: 459343 - DNA, 25 bp, Artificial
  probe
  misc_feature (1)..(25): SEQ ID NO: 7128; WAN024FSE; Start 31; Stop 55
cgtaaatataggactgaatttcctc

SEQ ID NO: 459344 - DNA, 25 bp, Artificial
  probe
  misc_feature (1)..(25): SEQ ID NO: 7128; WAN024FSE; Start 6; Stop 30
aattgcatttaagttcttttccttt

SEQ ID NO: 459345 - DNA, 25 bp, Artificial
  probe
  misc_feature (1)..(25): SEQ ID NO: 7128; WAN024FSE; Start 18; Stop 42
gttcttttcctttcgtaaatatagg

SEQ ID NO: 459346 - DNA, 25 bp, Artificial
  probe
  misc_feature (1)..(25): SEQ ID NO: 7128; WAN024FSE; Start 13; Stop 37
tttaagttcttttcctttcgtaaat

SEQ ID NO: 459347 - DNA, 25 bp, Artificial
  probe
  misc_feature (1)..(25): SEQ ID NO: 7128; WAN024FSE; Start 12; Stop 36
atttaagttcttttcctttcgtaaa

SEQ ID NO: 459348 - DNA, 25 bp, Artificial
  probe
  misc_feature (1)..(25): SEQ ID NO: 7128; WAN024FSE; Start 32; Stop 56
gtaaatataggactgaatttcctcc

SEQ ID NO: 459349 - DNA, 25 bp, Artificial
  probe
  misc_feature (1)..(25): SEQ ID NO: 7128; WAN024FSE; Start 5; Stop 29
aaattgcatttaagttcttttcctt

SEQ ID NO: 459350 - DNA, 25 bp, Artificial
  probe
  misc_feature (1)..(25): SEQ ID NO: 7128; WAN024FSE; Start 2; Stop 26
tggaaattgcatttaagttcttttc

SEQ ID NO: 459351 - DNA, 25 bp, Artificial
  probe
  misc_feature (1)..(25): SEQ ID NO: 7128; WAN024FSE; Start 33; Stop 57
taaatataggactgaatttcctcct

SEQ ID NO: 459352 - DNA, 25 bp, Artificial
  probe
  misc_feature (1)..(25): SEQ ID NO: 7129; WAN024B6W; Start 64; Stop 88
cccaatgacttacgaagagatgatg

SEQ ID NO: 459353 - DNA, 25 bp, Artificial
  probe
  misc_feature (1)..(25): SEQ ID NO: 7129; WAN024B6W; Start 63; Stop 87
tcccaatgacttacgaagagatgat

SEQ ID NO: 459354 - DNA, 25 bp, Artificial
  probe
  misc_feature (1)..(25): SEQ ID NO: 7129; WAN024B6W; Start 52; Stop 76
gagttaatcgctcccaatgacttac

SEQ ID NO: 459355 - DNA, 25 bp, Artificial
  probe
  misc_feature (1)..(25): SEQ ID NO: 7129; WAN024B6W; Start 62; Stop 86
ctcccaatgacttacgaagagatga

SEQ ID NO: 459356 - DNA, 25 bp, Artificial
  probe
  misc_feature (1)..(25): SEQ ID NO: 7129; WAN024B6W; Start 51; Stop 75
tgagttaatcgctcccaatgactta

SEQ ID NO: 459357 - DNA, 25 bp, Artificial
  probe
  misc_feature (1)..(25): SEQ ID NO: 7129; WAN024B6W; Start 53; Stop 77
agttaatcgctcccaatgacttacg

SEQ ID NO: 459358 - DNA, 25 bp, Artificial
  probe
  misc_feature (1)..(25): SEQ ID NO: 7129; WAN024B6W; Start 11; Stop 35
atatcagaggatttcttttggttgc

SEQ ID NO: 459359 - DNA, 25 bp, Artificial
  probe
  misc_feature (1)..(25): SEQ ID NO: 7129; WAN024B6W; Start 50; Stop 74
gtgagttaatcgctcccaatgactt

SEQ ID NO: 459360 - DNA, 25 bp, Artificial
  probe
  misc_feature (1)..(25): SEQ ID NO: 7129; WAN024B6W; Start 61; Stop 85
gctcccaatgacttacgaagagatg

SEQ ID NO: 459361 - DNA, 25 bp, Artificial
  probe
  misc_feature (1)..(25): SEQ ID NO: 7129; WAN024B6W; Start 45; Stop 69
aaatggtgagttaatcgctcccaat

SEQ ID NO: 459362 - DNA, 25 bp, Artificial
  probe
  misc_feature (1)..(25): SEQ ID NO: 7129; WAN024B6W; Start 1; Stop 25
ctggaagaagatatcagaggatttc

SEQ ID NO: 459363 - DNA, 25 bp, Artificial
  probe
  misc_feature (1)..(25): SEQ ID NO: 7129; WAN024B6W; Start 42; Stop 66
aacaaatggtgagttaatcgctccc

SEQ ID NO: 459364 - DNA, 25 bp, Artificial
  probe
  misc_feature (1)..(25): SEQ ID NO: 7129; WAN024B6W; Start 55; Stop 79
ttaatcgctcccaatgacttacgaa

SEQ ID NO: 459365 - DNA, 25 bp, Artificial
  probe
  misc_feature (1)..(25): SEQ ID NO: 7129; WAN024B6W; Start 56; Stop 80
taatcgctcccaatgacttacgaag

SEQ ID NO: 459366 - DNA, 25 bp, Artificial
  probe
  misc_feature (1)..(25): SEQ ID NO: 7129; WAN024B6W; Start 46; Stop 70
aatggtgagttaatcgctcccaatg

SEQ ID NO: 459367 - DNA, 25 bp, Artificial
  probe
  misc_feature (1)..(25): SEQ ID NO: 7129; WAN024B6W; Start 2; Stop 26
tggaagaagatatcagaggatttct

SEQ ID NO: 459368 - DNA, 25 bp, Artificial
  probe
  misc_feature (1)..(25): SEQ ID NO: 7129; WAN024B6W; Start 54; Stop 78
gttaatcgctcccaatgacttacga

SEQ ID NO: 459369 - DNA, 25 bp, Artificial
  probe
  misc_feature (1)..(25): SEQ ID NO: 7129; WAN024B6W; Start 44; Stop 68
caaatggtgagttaatcgctcccaa

SEQ ID NO: 459370 - DNA, 25 bp, Artificial
  probe
  misc_feature (1)..(25): SEQ ID NO: 7129; WAN024B6W; Start 12; Stop 36
tatcagaggatttcttttggttgca

SEQ ID NO: 459371 - DNA, 25 bp, Artificial
  probe
  misc_feature (1)..(25): SEQ ID NO: 7129; WAN024B6W; Start 20; Stop 44
gatttcttttggttgcaggtctaac

SEQ ID NO: 459372 - DNA, 25 bp, Artificial
  probe
  misc_feature (1)..(25): SEQ ID NO: 7129; WAN024B6W; Start 21; Stop 45
atttcttttggttgcaggtctaaca

SEQ ID NO: 459373 - DNA, 25 bp, Artificial
  probe
  misc_feature (1)..(25): SEQ ID NO: 7129; WAN024B6W; Start 19; Stop 43
ggatttcttttggttgcaggtctaa

SEQ ID NO: 459374 - DNA, 25 bp, Artificial
  probe
  misc_feature (1)..(25): SEQ ID NO: 7129; WAN024B6W; Start 60; Stop 84
cgctcccaatgacttacgaagagat

SEQ ID NO: 459375 - DNA, 25 bp, Artificial
  probe
  misc_feature (1)..(25): SEQ ID NO: 7129; WAN024B6W; Start 22; Stop 46
tttcttttggttgcaggtctaacaa

SEQ ID NO: 459376 - DNA, 25 bp, Artificial
  probe
  misc_feature (1)..(25): SEQ ID NO: 7129; WAN024B6W; Start 13; Stop 37
atcagaggatttcttttggttgcag

SEQ ID NO: 459377 - DNA, 25 bp, Artificial
  probe
  misc_feature (1)..(25): SEQ ID NO: 7129; WAN024B6W; Start 47; Stop 71
atggtgagttaatcgctcccaatga

SEQ ID NO: 459378 - DNA, 25 bp, Artificial
  probe
  misc_feature (1)..(25): SEQ ID NO: 7129; WAN024B6W; Start 49; Stop 73
ggtgagttaatcgctcccaatgact

SEQ ID NO: 459379 - DNA, 25 bp, Artificial
  probe
  misc_feature (1)..(25): SEQ ID NO: 7129; WAN024B6W; Start 18; Stop 42
aggatttcttttggttgcaggtcta

SEQ ID NO: 459380 - DNA, 25 bp, Artificial
  probe
  misc_feature (1)..(25): SEQ ID NO: 7129; WAN024B6W; Start 10; Stop 34
gatatcagaggatttcttttggttg

SEQ ID NO: 459381 - DNA, 25 bp, Artificial
  probe
  misc_feature (1)..(25): SEQ ID NO: 7129; WAN024B6W; Start 9; Stop 33
agatatcagaggatttcttttggtt

SEQ ID NO: 459382 - DNA, 25 bp, Artificial
  probe
  misc_feature (1)..(25): SEQ ID NO: 7129; WAN024B6W; Start 57; Stop 81
aatcgctcccaatgacttacgaaga

SEQ ID NO: 459383 - DNA, 25 bp, Artificial
  probe
  misc_feature (1)..(25): SEQ ID NO: 7129; WAN024B6W; Start 43; Stop 67
acaaatggtgagttaatcgctccca

SEQ ID NO: 459384 - DNA, 25 bp, Artificial
  probe
  misc_feature (1)..(25): SEQ ID NO: 7129; WAN024B6W; Start 27; Stop 51
tttggttgcaggtctaacaaatggt

SEQ ID NO: 459385 - DNA, 25 bp, Artificial
  probe
  misc_feature (1)..(25): SEQ ID NO: 7130; WAN024BSA; Start 20; Stop 44
tagacattattcttagcaaggtcgc

SEQ ID NO: 459386 - DNA, 25 bp, Artificial
  probe
  misc_feature (1)..(25): SEQ ID NO: 7130; WAN024BSA; Start 19; Stop 43
atagacattattcttagcaaggtcg

SEQ ID NO: 459387 - DNA, 25 bp, Artificial
  probe
  misc_feature (1)..(25): SEQ ID NO: 7130; WAN024BSA; Start 51; Stop 75
tttgggtgtggactatattgaactc

SEQ ID NO: 459388 - DNA, 25 bp, Artificial
  probe
  misc_feature (1)..(25): SEQ ID NO: 7130; WAN024BSA; Start 52; Stop 76
ttgggtgtggactatattgaactcg

SEQ ID NO: 459389 - DNA, 25 bp, Artificial
  probe
  misc_feature (1)..(25): SEQ ID NO: 7130; WAN024BSA; Start 18; Stop 42
aatagacattattcttagcaaggtc

SEQ ID NO: 459390 - DNA, 25 bp, Artificial
  probe
  misc_feature (1)..(25): SEQ ID NO: 7130; WAN024BSA; Start 50; Stop 74
ttttgggtgtggactatattgaact

SEQ ID NO: 459391 - DNA, 25 bp, Artificial
  probe
  misc_feature (1)..(25): SEQ ID NO: 7130; WAN024BSA; Start 49; Stop 73
cttttgggtgtggactatattgaac

SEQ ID NO: 459392 - DNA, 25 bp, Artificial
  probe
  misc_feature (1)..(25): SEQ ID NO: 7130; WAN024BSA; Start 48; Stop 72
tcttttgggtgtggactatattgaa

SEQ ID NO: 459393 - DNA, 25 bp, Artificial
  probe
  misc_feature (1)..(25): SEQ ID NO: 7130; WAN024BSA; Start 47; Stop 71
atcttttgggtgtggactatattga

SEQ ID NO: 459394 - DNA, 25 bp, Artificial
  probe
  misc_feature (1)..(25): SEQ ID NO: 7130; WAN024BSA; Start 45; Stop 69
ggatcttttgggtgtggactatatt

SEQ ID NO: 459395 - DNA, 25 bp, Artificial
  probe
  misc_feature (1)..(25): SEQ ID NO: 7130; WAN024BSA; Start 46; Stop 70
gatcttttgggtgtggactatattg

SEQ ID NO: 459396 - DNA, 25 bp, Artificial
  probe
  misc_feature (1)..(25): SEQ ID NO: 7130; WAN024BSA; Start 53; Stop 77
tgggtgtggactatattgaactcga

SEQ ID NO: 459397 - DNA, 25 bp, Artificial
  probe
  misc_feature (1)..(25): SEQ ID NO: 7130; WAN024BSA; Start 17; Stop 41
aaatagacattattcttagcaaggt

SEQ ID NO: 459398 - DNA, 25 bp, Artificial
  probe
  misc_feature (1)..(25): SEQ ID NO: 7130; WAN024BSA; Start 57; Stop 81
tgtggactatattgaactcgaggat

SEQ ID NO: 459399 - DNA, 25 bp, Artificial
  probe
  misc_feature (1)..(25): SEQ ID NO: 7130; WAN024BSA; Start 44; Stop 68
cggatcttttgggtgtggactatat

SEQ ID NO: 459400 - DNA, 25 bp, Artificial
  probe
  misc_feature (1)..(25): SEQ ID NO: 7130; WAN024BSA; Start 56; Stop 80
gtgtggactatattgaactcgagga

SEQ ID NO: 459401 - DNA, 25 bp, Artificial
  probe
  misc_feature (1)..(25): SEQ ID NO: 7130; WAN024BSA; Start 25; Stop 49
attattcttagcaaggtcgcggatc

SEQ ID NO: 459402 - DNA, 25 bp, Artificial
  probe
  misc_feature (1)..(25): SEQ ID NO: 7130; WAN024BSA; Start 24; Stop 48
cattattcttagcaaggtcgcggat

SEQ ID NO: 459403 - DNA, 25 bp, Artificial
  probe
  misc_feature (1)..(25): SEQ ID NO: 7130; WAN024BSA; Start 55; Stop 79
ggtgtggactatattgaactcgagg

SEQ ID NO: 459404 - DNA, 25 bp, Artificial
  probe
  misc_feature (1)..(25): SEQ ID NO: 7130; WAN024BSA; Start 21; Stop 45
agacattattcttagcaaggtcgcg

SEQ ID NO: 459405 - DNA, 25 bp, Artificial
  probe
  misc_feature (1)..(25): SEQ ID NO: 7130; WAN024BSA; Start 27; Stop 51
tattcttagcaaggtcgcggatctt

SEQ ID NO: 459406 - DNA, 25 bp, Artificial
  probe
  misc_feature (1)..(25): SEQ ID NO: 7130; WAN024BSA; Start 26; Stop 50
ttattcttagcaaggtcgcggatct

SEQ ID NO: 459407 - DNA, 25 bp, Artificial
  probe
  misc_feature (1)..(25): SEQ ID NO: 7130; WAN024BSA; Start 23; Stop 47
acattattcttagcaaggtcgcgga

SEQ ID NO: 459408 - DNA, 25 bp, Artificial
  probe
  misc_feature (1)..(25): SEQ ID NO: 7130; WAN024BSA; Start 22; Stop 46
gacattattcttagcaaggtcgcgg

SEQ ID NO: 459409 - DNA, 25 bp, Artificial
  probe
  misc_feature (1)..(25): SEQ ID NO: 7130; WAN024BSA; Start 54; Stop 78
gggtgtggactatattgaactcgag

SEQ ID NO: 459410 - DNA, 25 bp, Artificial
  probe
  misc_feature (1)..(25): SEQ ID NO: 7130; WAN024BSA; Start 43; Stop 67
gcggatcttttgggtgtggactata

SEQ ID NO: 459411 - DNA, 25 bp, Artificial
  probe
  misc_feature (1)..(25): SEQ ID NO: 7130; WAN024BSA; Start 16; Stop 40
aaaatagacattattcttagcaagg

SEQ ID NO: 459412 - DNA, 25 bp, Artificial
  probe
  misc_feature (1)..(25): SEQ ID NO: 7130; WAN024BSA; Start 28; Stop 52
attcttagcaaggtcgcggatcttt

SEQ ID NO: 459413 - DNA, 25 bp, Artificial
  probe
  misc_feature (1)..(25): SEQ ID NO: 7130; WAN024BSA; Start 29; Stop 53
ttcttagcaaggtcgcggatctttt

SEQ ID NO: 459414 - DNA, 25 bp, Artificial
  probe
  misc_feature (1)..(25): SEQ ID NO: 7131; WAN024BG4; Start 5; Stop 29
actataacttattagacttcctgcg

SEQ ID NO: 459415 - DNA, 25 bp, Artificial
  probe
  misc_feature (1)..(25): SEQ ID NO: 7131; WAN024BG4; Start 49; Stop 73
agttctatgaatgatgaagcaagta

SEQ ID NO: 459416 - DNA, 25 bp, Artificial
  probe
  misc_feature (1)..(25): SEQ ID NO: 7131; WAN024BG4; Start 48; Stop 72
tagttctatgaatgatgaagcaagt

SEQ ID NO: 459417 - DNA, 25 bp, Artificial
  probe
  misc_feature (1)..(25): SEQ ID NO: 7131; WAN024BG4; Start 6; Stop 30
ctataacttattagacttcctgcga

SEQ ID NO: 459418 - DNA, 25 bp, Artificial
  probe
  misc_feature (1)..(25): SEQ ID NO: 7131; WAN024BG4; Start 47; Stop 71
gtagttctatgaatgatgaagcaag

SEQ ID NO: 459419 - DNA, 25 bp, Artificial
  probe
  misc_feature (1)..(25): SEQ ID NO: 7131; WAN024BG4; Start 50; Stop 74
gttctatgaatgatgaagcaagtaa

SEQ ID NO: 459420 - DNA, 25 bp, Artificial
  probe
  misc_feature (1)..(25): SEQ ID NO: 7131; WAN024BG4; Start 7; Stop 31
tataacttattagacttcctgcgaa

SEQ ID NO: 459421 - DNA, 25 bp, Artificial
  probe
  misc_feature (1)..(25): SEQ ID NO: 7131; WAN024BG4; Start 55; Stop 79
atgaatgatgaagcaagtaaacaac

SEQ ID NO: 459422 - DNA, 25 bp, Artificial
  probe
  misc_feature (1)..(25): SEQ ID NO: 7131; WAN024BG4; Start 56; Stop 80
tgaatgatgaagcaagtaaacaact

SEQ ID NO: 459423 - DNA, 25 bp, Artificial
  probe
  misc_feature (1)..(25): SEQ ID NO: 7131; WAN024BG4; Start 60; Stop 84
tgatgaagcaagtaaacaactaact

SEQ ID NO: 459424 - DNA, 25 bp, Artificial
  probe
  misc_feature (1)..(25): SEQ ID NO: 7131; WAN024BG4; Start 61; Stop 85
gatgaagcaagtaaacaactaactg

SEQ ID NO: 459425 - DNA, 25 bp, Artificial
  probe
  misc_feature (1)..(25): SEQ ID NO: 7131; WAN024BG4; Start 4; Stop 28
gactataacttattagacttcctgc

SEQ ID NO: 459426 - DNA, 25 bp, Artificial
  probe
  misc_feature (1)..(25): SEQ ID NO: 7131; WAN024BG4; Start 9; Stop 33
taacttattagacttcctgcgaaat

SEQ ID NO: 459427 - DNA, 25 bp, Artificial
  probe
  misc_feature (1)..(25): SEQ ID NO: 7131; WAN024BG4; Start 8; Stop 32
ataacttattagacttcctgcgaaa

SEQ ID NO: 459428 - DNA, 25 bp, Artificial
  probe
  misc_feature (1)..(25): SEQ ID NO: 7131; WAN024BG4; Start 10; Stop 34
aacttattagacttcctgcgaaata

SEQ ID NO: 459429 - DNA, 25 bp, Artificial
  probe
  misc_feature (1)..(25): SEQ ID NO: 7131; WAN024BG4; Start 53; Stop 77
ctatgaatgatgaagcaagtaaaca

SEQ ID NO: 459430 - DNA, 25 bp, Artificial
  probe
  misc_feature (1)..(25): SEQ ID NO: 7131; WAN024BG4; Start 59; Stop 83
atgatgaagcaagtaaacaactaac

SEQ ID NO: 459431 - DNA, 25 bp, Artificial
  probe
  misc_feature (1)..(25): SEQ ID NO: 7131; WAN024BG4; Start 57; Stop 81
gaatgatgaagcaagtaaacaacta

SEQ ID NO: 459432 - DNA, 25 bp, Artificial
  probe
  misc_feature (1)..(25): SEQ ID NO: 7131; WAN024BG4; Start 52; Stop 76
tctatgaatgatgaagcaagtaaac

SEQ ID NO: 459433 - DNA, 25 bp, Artificial
  probe
  misc_feature (1)..(25): SEQ ID NO: 7131; WAN024BG4; Start 54; Stop 78
tatgaatgatgaagcaagtaaacaa

SEQ ID NO: 459434 - DNA, 25 bp, Artificial
  probe
  misc_feature (1)..(25): SEQ ID NO: 7131; WAN024BG4; Start 58; Stop 82
aatgatgaagcaagtaaacaactaa

SEQ ID NO: 459435 - DNA, 25 bp, Artificial
  probe
  misc_feature (1)..(25): SEQ ID NO: 7131; WAN024BG4; Start 128; Stop 152
ttgaagagatgttagctggattaaa

SEQ ID NO: 459436 - DNA, 25 bp, Artificial
  probe
  misc_feature (1)..(25): SEQ ID NO: 7131; WAN024BG4; Start 127; Stop 151
tttgaagagatgttagctggattaa

SEQ ID NO: 459437 - DNA, 25 bp, Artificial
  probe
  misc_feature (1)..(25): SEQ ID NO: 7131; WAN024BG4; Start 51; Stop 75
ttctatgaatgatgaagcaagtaaa

SEQ ID NO: 459438 - DNA, 25 bp, Artificial
  probe
  misc_feature (1)..(25): SEQ ID NO: 7131; WAN024BG4; Start 19; Stop 43
gacttcctgcgaaataaaatatggt

SEQ ID NO: 459439 - DNA, 25 bp, Artificial
  probe
  misc_feature (1)..(25): SEQ ID NO: 7131; WAN024BG4; Start 18; Stop 42
agacttcctgcgaaataaaatatgg

SEQ ID NO: 459440 - DNA, 25 bp, Artificial
  probe
  misc_feature (1)..(25): SEQ ID NO: 7131; WAN024BG4; Start 2; Stop 26
tggactataacttattagacttcct

SEQ ID NO: 459441 - DNA, 25 bp, Artificial
  probe
  misc_feature (1)..(25): SEQ ID NO: 7131; WAN024BG4; Start 11; Stop 35
acttattagacttcctgcgaaataa

SEQ ID NO: 459442 - DNA, 25 bp, Artificial
  probe
  misc_feature (1)..(25): SEQ ID NO: 7131; WAN024BG4; Start 20; Stop 44
acttcctgcgaaataaaatatggta

SEQ ID NO: 459443 - DNA, 25 bp, Artificial
  probe
  misc_feature (1)..(25): SEQ ID NO: 7131; WAN024BG4; Start 3; Stop 27
ggactataacttattagacttcctg

SEQ ID NO: 459444 - DNA, 25 bp, Artificial
  probe
  misc_feature (1)..(25): SEQ ID NO: 7131; WAN024BG4; Start 1; Stop 25
ctggactataacttattagacttcc

SEQ ID NO: 459445 - DNA, 25 bp, Artificial
  probe
  misc_feature (1)..(25): SEQ ID NO: 7131; WAN024BG4; Start 124; Stop 148
acttttgaagagatgttagctggat

SEQ ID NO: 459446 - DNA, 25 bp, Artificial
  probe
  misc_feature (1)..(25): SEQ ID NO: 7131; WAN024BG4; Start 125; Stop 149
cttttgaagagatgttagctggatt

SEQ ID NO: 459447 - DNA, 25 bp, Artificial
  probe
  misc_feature (1)..(25): SEQ ID NO: 7132; WAN024B9T; Start 66; Stop 90
ggttctctttggagtagtcttgatt

SEQ ID NO: 459448 - DNA, 25 bp, Artificial
  probe
  misc_feature (1)..(25): SEQ ID NO: 7132; WAN024B9T; Start 67; Stop 91
gttctctttggagtagtcttgattg

SEQ ID NO: 459449 - DNA, 25 bp, Artificial
  probe
  misc_feature (1)..(25): SEQ ID NO: 7132; WAN024B9T; Start 68; Stop 92
ttctctttggagtagtcttgattgc

SEQ ID NO: 459450 - DNA, 25 bp, Artificial
  probe
  misc_feature (1)..(25): SEQ ID NO: 7132; WAN024B9T; Start 63; Stop 87
tacggttctctttggagtagtcttg

SEQ ID NO: 459451 - DNA, 25 bp, Artificial
  probe
  misc_feature (1)..(25): SEQ ID NO: 7132; WAN024B9T; Start 65; Stop 89
cggttctctttggagtagtcttgat

SEQ ID NO: 459452 - DNA, 25 bp, Artificial
  probe
  misc_feature (1)..(25): SEQ ID NO: 7132; WAN024B9T; Start 52; Stop 76
aatctagtcggtacggttctctttg

SEQ ID NO: 459453 - DNA, 25 bp, Artificial
  probe
  misc_feature (1)..(25): SEQ ID NO: 7132; WAN024B9T; Start 51; Stop 75
caatctagtcggtacggttctcttt

SEQ ID NO: 459454 - DNA, 25 bp, Artificial
  probe
  misc_feature (1)..(25): SEQ ID NO: 7132; WAN024B9T; Start 74; Stop 98
ttggagtagtcttgattgccgtctt

SEQ ID NO: 459455 - DNA, 25 bp, Artificial
  probe
  misc_feature (1)..(25): SEQ ID NO: 7132; WAN024B9T; Start 62; Stop 86
gtacggttctctttggagtagtctt

SEQ ID NO: 459456 - DNA, 25 bp, Artificial
  probe
  misc_feature (1)..(25): SEQ ID NO: 7132; WAN024B9T; Start 69; Stop 93
tctctttggagtagtcttgattgcc

SEQ ID NO: 459457 - DNA, 25 bp, Artificial
  probe
  misc_feature (1)..(25): SEQ ID NO: 7132; WAN024B9T; Start 50; Stop 74
gcaatctagtcggtacggttctctt

SEQ ID NO: 459458 - DNA, 25 bp, Artificial
  probe
  misc_feature (1)..(25): SEQ ID NO: 7132; WAN024B9T; Start 75; Stop 99
tggagtagtcttgattgccgtcttg

SEQ ID NO: 459459 - DNA, 25 bp, Artificial
  probe
  misc_feature (1)..(25): SEQ ID NO: 7132; WAN024B9T; Start 64; Stop 88
acggttctctttggagtagtcttga

SEQ ID NO: 459460 - DNA, 25 bp, Artificial
  probe
  misc_feature (1)..(25): SEQ ID NO: 7132; WAN024B9T; Start 5; Stop 29
acttcttagcagtctttccaacagc

SEQ ID NO: 459461 - DNA, 25 bp, Artificial
  probe
  misc_feature (1)..(25): SEQ ID NO: 7132; WAN024B9T; Start 72; Stop 96
ctttggagtagtcttgattgccgtc

SEQ ID NO: 459462 - DNA, 25 bp, Artificial
  probe
  misc_feature (1)..(25): SEQ ID NO: 7132; WAN024B9T; Start 70; Stop 94
ctctttggagtagtcttgattgccg

SEQ ID NO: 459463 - DNA, 25 bp, Artificial
  probe
  misc_feature (1)..(25): SEQ ID NO: 7132; WAN024B9T; Start 61; Stop 85
ggtacggttctctttggagtagtct

SEQ ID NO: 459464 - DNA, 25 bp, Artificial
  probe
  misc_feature (1)..(25): SEQ ID NO: 7132; WAN024B9T; Start 73; Stop 97
tttggagtagtcttgattgccgtct

SEQ ID NO: 459465 - DNA, 25 bp, Artificial
  probe
  misc_feature (1)..(25): SEQ ID NO: 7132; WAN024B9T; Start 71; Stop 95
tctttggagtagtcttgattgccgt

SEQ ID NO: 459466 - DNA, 25 bp, Artificial
  probe
  misc_feature (1)..(25): SEQ ID NO: 7132; WAN024B9T; Start 53; Stop 77
atctagtcggtacggttctctttgg

SEQ ID NO: 459467 - DNA, 25 bp, Artificial
  probe
  misc_feature (1)..(25): SEQ ID NO: 7132; WAN024B9T; Start 7; Stop 31
ttcttagcagtctttccaacagctt

SEQ ID NO: 459468 - DNA, 25 bp, Artificial
  probe
  misc_feature (1)..(25): SEQ ID NO: 7132; WAN024B9T; Start 4; Stop 28
gacttcttagcagtctttccaacag

SEQ ID NO: 459469 - DNA, 25 bp, Artificial
  probe
  misc_feature (1)..(25): SEQ ID NO: 7132; WAN024B9T; Start 55; Stop 79
ctagtcggtacggttctctttggag

SEQ ID NO: 459470 - DNA, 25 bp, Artificial
  probe
  misc_feature (1)..(25): SEQ ID NO: 7132; WAN024B9T; Start 54; Stop 78
tctagtcggtacggttctctttgga

SEQ ID NO: 459471 - DNA, 25 bp, Artificial
  probe
  misc_feature (1)..(25): SEQ ID NO: 7132; WAN024B9T; Start 6; Stop 30
cttcttagcagtctttccaacagct

SEQ ID NO: 459472 - DNA, 25 bp, Artificial
  probe
  misc_feature (1)..(25): SEQ ID NO: 7132; WAN024B9T; Start 60; Stop 84
cggtacggttctctttggagtagtc

SEQ ID NO: 459473 - DNA, 25 bp, Artificial
  probe
  misc_feature (1)..(25): SEQ ID NO: 7132; WAN024B9T; Start 58; Stop 82
gtcggtacggttctctttggagtag

SEQ ID NO: 459474 - DNA, 25 bp, Artificial
  probe
  misc_feature (1)..(25): SEQ ID NO: 7132; WAN024B9T; Start 8; Stop 32
tcttagcagtctttccaacagcttg

SEQ ID NO: 459475 - DNA, 25 bp, Artificial
  probe
  misc_feature (1)..(25): SEQ ID NO: 7132; WAN024B9T; Start 3; Stop 27
ggacttcttagcagtctttccaaca

SEQ ID NO: 459476 - DNA, 25 bp, Artificial
  probe
  misc_feature (1)..(25): SEQ ID NO: 7132; WAN024B9T; Start 59; Stop 83
tcggtacggttctctttggagtagt

SEQ ID NO: 459477 - DNA, 25 bp, Artificial
  probe
  misc_feature (1)..(25): SEQ ID NO: 7132; WAN024B9T; Start 57; Stop 81
agtcggtacggttctctttggagta

SEQ ID NO: 459478 - DNA, 25 bp, Artificial
  probe
  misc_feature (1)..(25): SEQ ID NO: 7132; WAN024B9T; Start 56; Stop 80
tagtcggtacggttctctttggagt

SEQ ID NO: 459479 - DNA, 25 bp, Artificial
  probe
  misc_feature (1)..(25): SEQ ID NO: 7132; WAN024B9T; Start 1; Stop 25
ctggacttcttagcagtctttccaa

SEQ ID NO: 459480 - DNA, 25 bp, Artificial
  probe
  misc_feature (1)..(25): SEQ ID NO: 7133; WAN024DLL; Start 35; Stop 59
ttcattttgatgttcaggcttggaa

SEQ ID NO: 459481 - DNA, 25 bp, Artificial
  probe
  misc_feature (1)..(25): SEQ ID NO: 7133; WAN024DLL; Start 36; Stop 60
tcattttgatgttcaggcttggaag

SEQ ID NO: 459482 - DNA, 25 bp, Artificial
  probe
  misc_feature (1)..(25): SEQ ID NO: 7133; WAN024DLL; Start 34; Stop 58
cttcattttgatgttcaggcttgga

SEQ ID NO: 459483 - DNA, 25 bp, Artificial
  probe
  misc_feature (1)..(25): SEQ ID NO: 7133; WAN024DLL; Start 37; Stop 61
cattttgatgttcaggcttggaagg

SEQ ID NO: 459484 - DNA, 25 bp, Artificial
  probe
  misc_feature (1)..(25): SEQ ID NO: 7133; WAN024DLL; Start 33; Stop 57
gcttcattttgatgttcaggcttgg

SEQ ID NO: 459485 - DNA, 25 bp, Artificial
  probe
  misc_feature (1)..(25): SEQ ID NO: 7133; WAN024DLL; Start 38; Stop 62
attttgatgttcaggcttggaaggg

SEQ ID NO: 459486 - DNA, 25 bp, Artificial
  probe
  misc_feature (1)..(25): SEQ ID NO: 7133; WAN024DLL; Start 58; Stop 82
aaggggttgagtctggtttctcttc

SEQ ID NO: 459487 - DNA, 25 bp, Artificial
  probe
  misc_feature (1)..(25): SEQ ID NO: 7133; WAN024DLL; Start 57; Stop 81
gaaggggttgagtctggtttctctt

SEQ ID NO: 459488 - DNA, 25 bp, Artificial
  probe
  misc_feature (1)..(25): SEQ ID NO: 7133; WAN024DLL; Start 62; Stop 86
ggttgagtctggtttctcttctgca

SEQ ID NO: 459489 - DNA, 25 bp, Artificial
  probe
  misc_feature (1)..(25): SEQ ID NO: 7133; WAN024DLL; Start 32; Stop 56
agcttcattttgatgttcaggcttg

SEQ ID NO: 459490 - DNA, 25 bp, Artificial
  probe
  misc_feature (1)..(25): SEQ ID NO: 7133; WAN024DLL; Start 60; Stop 84
ggggttgagtctggtttctcttctg

SEQ ID NO: 459491 - DNA, 25 bp, Artificial
  probe
  misc_feature (1)..(25): SEQ ID NO: 7133; WAN024DLL; Start 59; Stop 83
aggggttgagtctggtttctcttct

SEQ ID NO: 459492 - DNA, 25 bp, Artificial
  probe
  misc_feature (1)..(25): SEQ ID NO: 7133; WAN024DLL; Start 31; Stop 55
aagcttcattttgatgttcaggctt

SEQ ID NO: 459493 - DNA, 25 bp, Artificial
  probe
  misc_feature (1)..(25): SEQ ID NO: 7134; WAN024BLZ; Start 394; Stop 418
attgggaaggctattgataacagtt

SEQ ID NO: 459494 - DNA, 25 bp, Artificial
  probe
  misc_feature (1)..(25): SEQ ID NO: 7134; WAN024BLZ; Start 393; Stop 417
tattgggaaggctattgataacagt

SEQ ID NO: 459495 - DNA, 25 bp, Artificial
  probe
  misc_feature (1)..(25): SEQ ID NO: 7134; WAN024BLZ; Start 396; Stop 420
tgggaaggctattgataacagttta

SEQ ID NO: 459496 - DNA, 25 bp, Artificial
  probe
  misc_feature (1)..(25): SEQ ID NO: 7134; WAN024BLZ; Start 395; Stop 419
ttgggaaggctattgataacagttt

SEQ ID NO: 459497 - DNA, 25 bp, Artificial
  probe
  misc_feature (1)..(25): SEQ ID NO: 7134; WAN024BLZ; Start 397; Stop 421
gggaaggctattgataacagtttag

SEQ ID NO: 459498 - DNA, 25 bp, Artificial
  probe
  misc_feature (1)..(25): SEQ ID NO: 7134; WAN024BLZ; Start 282; Stop 306
aaccgtaatttcattgccatttaga

SEQ ID NO: 459499 - DNA, 25 bp, Artificial
  probe
  misc_feature (1)..(25): SEQ ID NO: 7134; WAN024BLZ; Start 283; Stop 307
accgtaatttcattgccatttagaa

SEQ ID NO: 459500 - DNA, 25 bp, Artificial
  probe
  misc_feature (1)..(25): SEQ ID NO: 7134; WAN024BLZ; Start 398; Stop 422
ggaaggctattgataacagtttaga

SEQ ID NO: 459501 - DNA, 25 bp, Artificial
  probe
  misc_feature (1)..(25): SEQ ID NO: 7134; WAN024BLZ; Start 296; Stop 320
tgccatttagaaacaagtacacaat

SEQ ID NO: 459502 - DNA, 25 bp, Artificial
  probe
  misc_feature (1)..(25): SEQ ID NO: 7134; WAN024BLZ; Start 392; Stop 416
ttattgggaaggctattgataacag

SEQ ID NO: 459503 - DNA, 25 bp, Artificial
  probe
  misc_feature (1)..(25): SEQ ID NO: 7134; WAN024BLZ; Start 145; Stop 169
aatgaacttgctttatctaattggc

SEQ ID NO: 459504 - DNA, 25 bp, Artificial
  probe
  misc_feature (1)..(25): SEQ ID NO: 7134; WAN024BLZ; Start 281; Stop 305
taaccgtaatttcattgccatttag

SEQ ID NO: 459505 - DNA, 25 bp, Artificial
  probe
  misc_feature (1)..(25): SEQ ID NO: 7134; WAN024BLZ; Start 295; Stop 319
ttgccatttagaaacaagtacacaa

SEQ ID NO: 459506 - DNA, 25 bp, Artificial
  probe
  misc_feature (1)..(25): SEQ ID NO: 7134; WAN024BLZ; Start 294; Stop 318
attgccatttagaaacaagtacaca

SEQ ID NO: 459507 - DNA, 25 bp, Artificial
  probe
  misc_feature (1)..(25): SEQ ID NO: 7134; WAN024BLZ; Start 293; Stop 317
cattgccatttagaaacaagtacac

SEQ ID NO: 459508 - DNA, 25 bp, Artificial
  probe
  misc_feature (1)..(25): SEQ ID NO: 7134; WAN024BLZ; Start 292; Stop 316
tcattgccatttagaaacaagtaca

SEQ ID NO: 459509 - DNA, 25 bp, Artificial
  probe
  misc_feature (1)..(25): SEQ ID NO: 7134; WAN024BLZ; Start 565; Stop 589
acaattagcatatactacaacgatt

SEQ ID NO: 459510 - DNA, 25 bp, Artificial
  probe
  misc_feature (1)..(25): SEQ ID NO: 7134; WAN024BLZ; Start 564; Stop 588
aacaattagcatatactacaacgat

SEQ ID NO: 459511 - DNA, 25 bp, Artificial
  probe
  misc_feature (1)..(25): SEQ ID NO: 7134; WAN024BLZ; Start 280; Stop 304
ttaaccgtaatttcattgccattta

SEQ ID NO: 459512 - DNA, 25 bp, Artificial
  probe
  misc_feature (1)..(25): SEQ ID NO: 7134; WAN024BLZ; Start 333; Stop 357
actcattacagtggtttacacattt

SEQ ID NO: 459513 - DNA, 25 bp, Artificial
  probe
  misc_feature (1)..(25): SEQ ID NO: 7134; WAN024BLZ; Start 400; Stop 424
aaggctattgataacagtttagaga

SEQ ID NO: 459514 - DNA, 25 bp, Artificial
  probe
  misc_feature (1)..(25): SEQ ID NO: 7134; WAN024BLZ; Start 291; Stop 315
ttcattgccatttagaaacaagtac

SEQ ID NO: 459515 - DNA, 25 bp, Artificial
  probe
  misc_feature (1)..(25): SEQ ID NO: 7134; WAN024BLZ; Start 115; Stop 139
aggtatcgaggttatttattggtgc

SEQ ID NO: 459516 - DNA, 25 bp, Artificial
  probe
  misc_feature (1)..(25): SEQ ID NO: 7134; WAN024BLZ; Start 297; Stop 321
gccatttagaaacaagtacacaata

SEQ ID NO: 459517 - DNA, 25 bp, Artificial
  probe
  misc_feature (1)..(25): SEQ ID NO: 7134; WAN024BLZ; Start 609; Stop 633
accatttacttatctttctcatgct

SEQ ID NO: 459518 - DNA, 25 bp, Artificial
  probe
  misc_feature (1)..(25): SEQ ID NO: 7134; WAN024BLZ; Start 401; Stop 425
aggctattgataacagtttagagat

SEQ ID NO: 459519 - DNA, 25 bp, Artificial
  probe
  misc_feature (1)..(25): SEQ ID NO: 7134; WAN024BLZ; Start 399; Stop 423
gaaggctattgataacagtttagag

SEQ ID NO: 459520 - DNA, 25 bp, Artificial
  probe
  misc_feature (1)..(25): SEQ ID NO: 7134; WAN024BLZ; Start 387; Stop 411
atacgttattgggaaggctattgat

SEQ ID NO: 459521 - DNA, 25 bp, Artificial
  probe
  misc_feature (1)..(25): SEQ ID NO: 7134; WAN024BLZ; Start 242; Stop 266
acgaagtgtttgcagtagaatttaa

SEQ ID NO: 459522 - DNA, 25 bp, Artificial
  probe
  misc_feature (1)..(25): SEQ ID NO: 7134; WAN024BLZ; Start 240; Stop 264
ttacgaagtgtttgcagtagaattt

SEQ ID NO: 459523 - DNA, 25 bp, Artificial
  probe
  misc_feature (1)..(25): SEQ ID NO: 7134; WAN024BLZ; Start 239; Stop 263
tttacgaagtgtttgcagtagaatt

SEQ ID NO: 459524 - DNA, 25 bp, Artificial
  probe
  misc_feature (1)..(25): SEQ ID NO: 7134; WAN024BLZ; Start 237; Stop 261
aatttacgaagtgtttgcagtagaa

SEQ ID NO: 459525 - DNA, 25 bp, Artificial
  probe
  misc_feature (1)..(25): SEQ ID NO: 7134; WAN024BLZ; Start 119; Stop 143
atcgaggttatttattggtgcatca

SEQ ID NO: 459526 - DNA, 25 bp, Artificial
  probe
  misc_feature (1)..(25): SEQ ID NO: 7135; WAN024BVG; Start 467; Stop 491
tcaatcaatcagcagaggaattaca

SEQ ID NO: 459527 - DNA, 25 bp, Artificial
  probe
  misc_feature (1)..(25): SEQ ID NO: 7135; WAN024BVG; Start 468; Stop 492
caatcaatcagcagaggaattacat

SEQ ID NO: 459528 - DNA, 25 bp, Artificial
  probe
  misc_feature (1)..(25): SEQ ID NO: 7135; WAN024BVG; Start 1122; Stop 1146
agagagtatgccacatcattctaat

SEQ ID NO: 459529 - DNA, 25 bp, Artificial
  probe
  misc_feature (1)..(25): SEQ ID NO: 7135; WAN024BVG; Start 924; Stop 948
ctctagttcttcggttgttcttcat

SEQ ID NO: 459530 - DNA, 25 bp, Artificial
  probe
  misc_feature (1)..(25): SEQ ID NO: 7135; WAN024BVG; Start 991; Stop 1015
ataggtgacaatactaattctcgga

SEQ ID NO: 459531 - DNA, 25 bp, Artificial
  probe
  misc_feature (1)..(25): SEQ ID NO: 7135; WAN024BVG; Start 992; Stop 1016
taggtgacaatactaattctcggaa

SEQ ID NO: 459532 - DNA, 25 bp, Artificial
  probe
  misc_feature (1)..(25): SEQ ID NO: 7135; WAN024BVG; Start 466; Stop 490
ctcaatcaatcagcagaggaattac

SEQ ID NO: 459533 - DNA, 25 bp, Artificial
  probe
  misc_feature (1)..(25): SEQ ID NO: 7135; WAN024BVG; Start 465; Stop 489
tctcaatcaatcagcagaggaatta

SEQ ID NO: 459534 - DNA, 25 bp, Artificial
  probe
  misc_feature (1)..(25): SEQ ID NO: 7135; WAN024BVG; Start 1119; Stop 1143
tatagagagtatgccacatcattct

SEQ ID NO: 459535 - DNA, 25 bp, Artificial
  probe
  misc_feature (1)..(25): SEQ ID NO: 7135; WAN024BVG; Start 464; Stop 488
ttctcaatcaatcagcagaggaatt

SEQ ID NO: 459536 - DNA, 25 bp, Artificial
  probe
  misc_feature (1)..(25): SEQ ID NO: 7135; WAN024BVG; Start 237; Stop 261
ttatgatagccagttaaggtattcg

SEQ ID NO: 459537 - DNA, 25 bp, Artificial
  probe
  misc_feature (1)..(25): SEQ ID NO: 7135; WAN024BVG; Start 921; Stop 945
taactctagttcttcggttgttctt

SEQ ID NO: 459538 - DNA, 25 bp, Artificial
  probe
  misc_feature (1)..(25): SEQ ID NO: 7135; WAN024BVG; Start 469; Stop 493
aatcaatcagcagaggaattacatg

SEQ ID NO: 459539 - DNA, 25 bp, Artificial
  probe
  misc_feature (1)..(25): SEQ ID NO: 7135; WAN024BVG; Start 920; Stop 944
ataactctagttcttcggttgttct

SEQ ID NO: 459540 - DNA, 25 bp, Artificial
  probe
  misc_feature (1)..(25): SEQ ID NO: 7135; WAN024BVG; Start 918; Stop 942
agataactctagttcttcggttgtt

SEQ ID NO: 459541 - DNA, 25 bp, Artificial
  probe
  misc_feature (1)..(25): SEQ ID NO: 7135; WAN024BVG; Start 925; Stop 949
tctagttcttcggttgttcttcatg

SEQ ID NO: 459542 - DNA, 25 bp, Artificial
  probe
  misc_feature (1)..(25): SEQ ID NO: 7135; WAN024BVG; Start 922; Stop 946
aactctagttcttcggttgttcttc

SEQ ID NO: 459543 - DNA, 25 bp, Artificial
  probe
  misc_feature (1)..(25): SEQ ID NO: 7135; WAN024BVG; Start 919; Stop 943
gataactctagttcttcggttgttc

SEQ ID NO: 459544 - DNA, 25 bp, Artificial
  probe
  misc_feature (1)..(25): SEQ ID NO: 7135; WAN024BVG; Start 923; Stop 947
actctagttcttcggttgttcttca

SEQ ID NO: 459545 - DNA, 25 bp, Artificial
  probe
  misc_feature (1)..(25): SEQ ID NO: 7135; WAN024BVG; Start 1118; Stop 1142
ttatagagagtatgccacatcattc

SEQ ID NO: 459546 - DNA, 25 bp, Artificial
  probe
  misc_feature (1)..(25): SEQ ID NO: 7135; WAN024BVG; Start 470; Stop 494
atcaatcagcagaggaattacatga

SEQ ID NO: 459547 - DNA, 25 bp, Artificial
  probe
  misc_feature (1)..(25): SEQ ID NO: 7135; WAN024BVG; Start 471; Stop 495
tcaatcagcagaggaattacatgaa

SEQ ID NO: 459548 - DNA, 25 bp, Artificial
  probe
  misc_feature (1)..(25): SEQ ID NO: 7135; WAN024BVG; Start 1123; Stop 1147
gagagtatgccacatcattctaata

SEQ ID NO: 459549 - DNA, 25 bp, Artificial
  probe
  misc_feature (1)..(25): SEQ ID NO: 7135; WAN024BVG; Start 472; Stop 496
caatcagcagaggaattacatgaat

SEQ ID NO: 459550 - DNA, 25 bp, Artificial
  probe
  misc_feature (1)..(25): SEQ ID NO: 7135; WAN024BVG; Start 1337; Stop 1361
tgtatgagctgaatgatgaagactt

SEQ ID NO: 459551 - DNA, 25 bp, Artificial
  probe
  misc_feature (1)..(25): SEQ ID NO: 7135; WAN024BVG; Start 1336; Stop 1360
ttgtatgagctgaatgatgaagact

SEQ ID NO: 459552 - DNA, 25 bp, Artificial
  probe
  misc_feature (1)..(25): SEQ ID NO: 7135; WAN024BVG; Start 1340; Stop 1364
atgagctgaatgatgaagacttact

SEQ ID NO: 459553 - DNA, 25 bp, Artificial
  probe
  misc_feature (1)..(25): SEQ ID NO: 7135; WAN024BVG; Start 263; Stop 287
tgttacctagagttgaggacatcat

SEQ ID NO: 459554 - DNA, 25 bp, Artificial
  probe
  misc_feature (1)..(25): SEQ ID NO: 7135; WAN024BVG; Start 1341; Stop 1365
tgagctgaatgatgaagacttacta

SEQ ID NO: 459555 - DNA, 25 bp, Artificial
  probe
  misc_feature (1)..(25): SEQ ID NO: 7135; WAN024BVG; Start 242; Stop 266
atagccagttaaggtattcgatgtt

SEQ ID NO: 459556 - DNA, 25 bp, Artificial
  probe
  misc_feature (1)..(25): SEQ ID NO: 7135; WAN024BVG; Start 241; Stop 265
gatagccagttaaggtattcgatgt

SEQ ID NO: 459557 - DNA, 25 bp, Artificial
  probe
  misc_feature (1)..(25): SEQ ID NO: 7135; WAN024BVG; Start 240; Stop 264
tgatagccagttaaggtattcgatg

SEQ ID NO: 459558 - DNA, 25 bp, Artificial
  probe
  misc_feature (1)..(25): SEQ ID NO: 7135; WAN024BVG; Start 477; Stop 501
agcagaggaattacatgaattagga

SEQ ID NO: 459559 - DNA, 25 bp, Artificial
  probe
  misc_feature (1)..(25): SEQ ID NO: 7136; WAN024CEK; Start 23; Stop 47
ttgaaagagttcttgtaaatgctgc

SEQ ID NO: 459560 - DNA, 25 bp, Artificial
  probe
  misc_feature (1)..(25): SEQ ID NO: 7136; WAN024CEK; Start 24; Stop 48
tgaaagagttcttgtaaatgctgct

SEQ ID NO: 459561 - DNA, 25 bp, Artificial
  probe
  misc_feature (1)..(25): SEQ ID NO: 7136; WAN024CEK; Start 22; Stop 46
cttgaaagagttcttgtaaatgctg

SEQ ID NO: 459562 - DNA, 25 bp, Artificial
  probe
  misc_feature (1)..(25): SEQ ID NO: 7136; WAN024CEK; Start 21; Stop 45
tcttgaaagagttcttgtaaatgct

SEQ ID NO: 459563 - DNA, 25 bp, Artificial
  probe
  misc_feature (1)..(25): SEQ ID NO: 7136; WAN024CEK; Start 20; Stop 44
gtcttgaaagagttcttgtaaatgc

SEQ ID NO: 459564 - DNA, 25 bp, Artificial
  probe
  misc_feature (1)..(25): SEQ ID NO: 7136; WAN024CEK; Start 25; Stop 49
gaaagagttcttgtaaatgctgctc

SEQ ID NO: 459565 - DNA, 25 bp, Artificial
  probe
  misc_feature (1)..(25): SEQ ID NO: 7136; WAN024CEK; Start 16; Stop 40
caaagtcttgaaagagttcttgtaa

SEQ ID NO: 459566 - DNA, 25 bp, Artificial
  probe
  misc_feature (1)..(25): SEQ ID NO: 7136; WAN024CEK; Start 19; Stop 43
agtcttgaaagagttcttgtaaatg

SEQ ID NO: 459567 - DNA, 25 bp, Artificial
  probe
  misc_feature (1)..(25): SEQ ID NO: 7136; WAN024CEK; Start 30; Stop 54
agttcttgtaaatgctgctcttttg

SEQ ID NO: 459568 - DNA, 25 bp, Artificial
  probe
  misc_feature (1)..(25): SEQ ID NO: 7136; WAN024CEK; Start 37; Stop 61
gtaaatgctgctcttttgctcttag

SEQ ID NO: 459569 - DNA, 25 bp, Artificial
  probe
  misc_feature (1)..(25): SEQ ID NO: 7136; WAN024CEK; Start 17; Stop 41
aaagtcttgaaagagttcttgtaaa

SEQ ID NO: 459570 - DNA, 25 bp, Artificial
  probe
  misc_feature (1)..(25): SEQ ID NO: 7136; WAN024CEK; Start 36; Stop 60
tgtaaatgctgctcttttgctctta

SEQ ID NO: 459571 - DNA, 25 bp, Artificial
  probe
  misc_feature (1)..(25): SEQ ID NO: 7136; WAN024CEK; Start 38; Stop 62
taaatgctgctcttttgctcttaga

SEQ ID NO: 459572 - DNA, 25 bp, Artificial
  probe
  misc_feature (1)..(25): SEQ ID NO: 7136; WAN024CEK; Start 18; Stop 42
aagtcttgaaagagttcttgtaaat

SEQ ID NO: 459573 - DNA, 25 bp, Artificial
  probe
  misc_feature (1)..(25): SEQ ID NO: 7136; WAN024CEK; Start 29; Stop 53
gagttcttgtaaatgctgctctttt

SEQ ID NO: 459574 - DNA, 25 bp, Artificial
  probe
  misc_feature (1)..(25): SEQ ID NO: 7136; WAN024CEK; Start 39; Stop 63
aaatgctgctcttttgctcttagaa

SEQ ID NO: 459575 - DNA, 25 bp, Artificial
  probe
  misc_feature (1)..(25): SEQ ID NO: 7136; WAN024CEK; Start 35; Stop 59
ttgtaaatgctgctcttttgctctt

SEQ ID NO: 459576 - DNA, 25 bp, Artificial
  probe
  misc_feature (1)..(25): SEQ ID NO: 7136; WAN024CEK; Start 32; Stop 56
ttcttgtaaatgctgctcttttgct

SEQ ID NO: 459577 - DNA, 25 bp, Artificial
  probe
  misc_feature (1)..(25): SEQ ID NO: 7136; WAN024CEK; Start 31; Stop 55
gttcttgtaaatgctgctcttttgc

SEQ ID NO: 459578 - DNA, 25 bp, Artificial
  probe
  misc_feature (1)..(25): SEQ ID NO: 7136; WAN024CEK; Start 14; Stop 38
gacaaagtcttgaaagagttcttgt

SEQ ID NO: 459579 - DNA, 25 bp, Artificial
  probe
  misc_feature (1)..(25): SEQ ID NO: 7136; WAN024CEK; Start 40; Stop 64
aatgctgctcttttgctcttagaac

SEQ ID NO: 459580 - DNA, 25 bp, Artificial
  probe
  misc_feature (1)..(25): SEQ ID NO: 7136; WAN024CEK; Start 28; Stop 52
agagttcttgtaaatgctgctcttt

SEQ ID NO: 459581 - DNA, 25 bp, Artificial
  probe
  misc_feature (1)..(25): SEQ ID NO: 7136; WAN024CEK; Start 26; Stop 50
aaagagttcttgtaaatgctgctct

SEQ ID NO: 459582 - DNA, 25 bp, Artificial
  probe
  misc_feature (1)..(25): SEQ ID NO: 7136; WAN024CEK; Start 34; Stop 58
cttgtaaatgctgctcttttgctct

SEQ ID NO: 459583 - DNA, 25 bp, Artificial
  probe
  misc_feature (1)..(25): SEQ ID NO: 7136; WAN024CEK; Start 33; Stop 57
tcttgtaaatgctgctcttttgctc

SEQ ID NO: 459584 - DNA, 25 bp, Artificial
  probe
  misc_feature (1)..(25): SEQ ID NO: 7136; WAN024CEK; Start 15; Stop 39
acaaagtcttgaaagagttcttgta

SEQ ID NO: 459585 - DNA, 25 bp, Artificial
  probe
  misc_feature (1)..(25): SEQ ID NO: 7136; WAN024CEK; Start 11; Stop 35
tgagacaaagtcttgaaagagttct

SEQ ID NO: 459586 - DNA, 25 bp, Artificial
  probe
  misc_feature (1)..(25): SEQ ID NO: 7136; WAN024CEK; Start 10; Stop 34
gtgagacaaagtcttgaaagagttc

SEQ ID NO: 459587 - DNA, 25 bp, Artificial
  probe
  misc_feature (1)..(25): SEQ ID NO: 7136; WAN024CEK; Start 13; Stop 37
agacaaagtcttgaaagagttcttg

SEQ ID NO: 459588 - DNA, 25 bp, Artificial
  probe
  misc_feature (1)..(25): SEQ ID NO: 7136; WAN024CEK; Start 12; Stop 36
gagacaaagtcttgaaagagttctt

SEQ ID NO: 459589 - DNA, 25 bp, Artificial
  probe
  misc_feature (1)..(25): SEQ ID NO: 7136; WAN024CEK; Start 5; Stop 29
ataccgtgagacaaagtcttgaaag

SEQ ID NO: 459590 - DNA, 25 bp, Artificial
  probe
  misc_feature (1)..(25): SEQ ID NO: 7136; WAN024CEK; Start 4; Stop 28
gataccgtgagacaaagtcttgaaa

SEQ ID NO: 459591 - DNA, 25 bp, Artificial
  probe
  misc_feature (1)..(25): SEQ ID NO: 7136; WAN024CEK; Start 9; Stop 33
cgtgagacaaagtcttgaaagagtt

SEQ ID NO: 459592 - DNA, 25 bp, Artificial
  probe
  misc_feature (1)..(25): SEQ ID NO: 7137; WAN024CXB; Start 36; Stop 60
ttcggataagttttgtttgtcagtt

SEQ ID NO: 459593 - DNA, 25 bp, Artificial
  probe
  misc_feature (1)..(25): SEQ ID NO: 7137; WAN024CXB; Start 35; Stop 59
attcggataagttttgtttgtcagt

SEQ ID NO: 459594 - DNA, 25 bp, Artificial
  probe
  misc_feature (1)..(25): SEQ ID NO: 7137; WAN024CXB; Start 33; Stop 57
agattcggataagttttgtttgtca

SEQ ID NO: 459595 - DNA, 25 bp, Artificial
  probe
  misc_feature (1)..(25): SEQ ID NO: 7137; WAN024CXB; Start 34; Stop 58
gattcggataagttttgtttgtcag

SEQ ID NO: 459596 - DNA, 25 bp, Artificial
  probe
  misc_feature (1)..(25): SEQ ID NO: 7137; WAN024CXB; Start 37; Stop 61
tcggataagttttgtttgtcagtta

SEQ ID NO: 459597 - DNA, 25 bp, Artificial
  probe
  misc_feature (1)..(25): SEQ ID NO: 7137; WAN024CXB; Start 32; Stop 56
aagattcggataagttttgtttgtc

SEQ ID NO: 459598 - DNA, 25 bp, Artificial
  probe
  misc_feature (1)..(25): SEQ ID NO: 7137; WAN024CXB; Start 22; Stop 46
gcaattttgaaagattcggataagt

SEQ ID NO: 459599 - DNA, 25 bp, Artificial
  probe
  misc_feature (1)..(25): SEQ ID NO: 7137; WAN024CXB; Start 17; Stop 41
ctaaagcaattttgaaagattcgga

SEQ ID NO: 459600 - DNA, 25 bp, Artificial
  probe
  misc_feature (1)..(25): SEQ ID NO: 7137; WAN024CXB; Start 16; Stop 40
tctaaagcaattttgaaagattcgg

SEQ ID NO: 459601 - DNA, 25 bp, Artificial
  probe
  misc_feature (1)..(25): SEQ ID NO: 7137; WAN024CXB; Start 21; Stop 45
agcaattttgaaagattcggataag

SEQ ID NO: 459602 - DNA, 25 bp, Artificial
  probe
  misc_feature (1)..(25): SEQ ID NO: 7137; WAN024CXB; Start 31; Stop 55
aaagattcggataagttttgtttgt

SEQ ID NO: 459603 - DNA, 25 bp, Artificial
  probe
  misc_feature (1)..(25): SEQ ID NO: 7137; WAN024CXB; Start 38; Stop 62
cggataagttttgtttgtcagttat

SEQ ID NO: 459604 - DNA, 25 bp, Artificial
  probe
  misc_feature (1)..(25): SEQ ID NO: 7137; WAN024CXB; Start 20; Stop 44
aagcaattttgaaagattcggataa

SEQ ID NO: 459605 - DNA, 25 bp, Artificial
  probe
  misc_feature (1)..(25): SEQ ID NO: 7137; WAN024CXB; Start 19; Stop 43
aaagcaattttgaaagattcggata

SEQ ID NO: 459606 - DNA, 25 bp, Artificial
  probe
  misc_feature (1)..(25): SEQ ID NO: 7137; WAN024CXB; Start 18; Stop 42
taaagcaattttgaaagattcggat

SEQ ID NO: 459607 - DNA, 25 bp, Artificial
  probe
  misc_feature (1)..(25): SEQ ID NO: 7137; WAN024CXB; Start 29; Stop 53
tgaaagattcggataagttttgttt

SEQ ID NO: 459608 - DNA, 25 bp, Artificial
  probe
  misc_feature (1)..(25): SEQ ID NO: 7137; WAN024CXB; Start 28; Stop 52
ttgaaagattcggataagttttgtt

SEQ ID NO: 459609 - DNA, 25 bp, Artificial
  probe
  misc_feature (1)..(25): SEQ ID NO: 7137; WAN024CXB; Start 27; Stop 51
tttgaaagattcggataagttttgt

SEQ ID NO: 459610 - DNA, 25 bp, Artificial
  probe
  misc_feature (1)..(25): SEQ ID NO: 7137; WAN024CXB; Start 30; Stop 54
gaaagattcggataagttttgtttg

SEQ ID NO: 459611 - DNA, 25 bp, Artificial
  probe
  misc_feature (1)..(25): SEQ ID NO: 7137; WAN024CXB; Start 15; Stop 39
ttctaaagcaattttgaaagattcg

SEQ ID NO: 459612 - DNA, 25 bp, Artificial
  probe
  misc_feature (1)..(25): SEQ ID NO: 7137; WAN024CXB; Start 26; Stop 50
ttttgaaagattcggataagttttg

SEQ ID NO: 459613 - DNA, 25 bp, Artificial
  probe
  misc_feature (1)..(25): SEQ ID NO: 7137; WAN024CXB; Start 23; Stop 47
caattttgaaagattcggataagtt

SEQ ID NO: 459614 - DNA, 25 bp, Artificial
  probe
  misc_feature (1)..(25): SEQ ID NO: 7137; WAN024CXB; Start 25; Stop 49
attttgaaagattcggataagtttt

SEQ ID NO: 459615 - DNA, 25 bp, Artificial
  probe
  misc_feature (1)..(25): SEQ ID NO: 7137; WAN024CXB; Start 24; Stop 48
aattttgaaagattcggataagttt

SEQ ID NO: 459616 - DNA, 25 bp, Artificial
  probe
  misc_feature (1)..(25): SEQ ID NO: 7137; WAN024CXB; Start 39; Stop 63
ggataagttttgtttgtcagttata

SEQ ID NO: 459617 - DNA, 25 bp, Artificial
  probe
  misc_feature (1)..(25): SEQ ID NO: 7137; WAN024CXB; Start 43; Stop 67
aagttttgtttgtcagttatattga

SEQ ID NO: 459618 - DNA, 25 bp, Artificial
  probe
  misc_feature (1)..(25): SEQ ID NO: 7137; WAN024CXB; Start 14; Stop 38
tttctaaagcaattttgaaagattc

SEQ ID NO: 459619 - DNA, 25 bp, Artificial
  probe
  misc_feature (1)..(25): SEQ ID NO: 7137; WAN024CXB; Start 44; Stop 68
agttttgtttgtcagttatattgac

SEQ ID NO: 459620 - DNA, 25 bp, Artificial
  probe
  misc_feature (1)..(25): SEQ ID NO: 7139; WAN024GK6; Start 15; Stop 39
gctaatcaatcaaatcaatgtggtc

SEQ ID NO: 459621 - DNA, 25 bp, Artificial
  probe
  misc_feature (1)..(25): SEQ ID NO: 7139; WAN024GK6; Start 19; Stop 43
atcaatcaaatcaatgtggtcaacc

SEQ ID NO: 459622 - DNA, 25 bp, Artificial
  probe
  misc_feature (1)..(25): SEQ ID NO: 7139; WAN024GK6; Start 18; Stop 42
aatcaatcaaatcaatgtggtcaac

SEQ ID NO: 459623 - DNA, 25 bp, Artificial
  probe
  misc_feature (1)..(25): SEQ ID NO: 7139; WAN024GK6; Start 16; Stop 40
ctaatcaatcaaatcaatgtggtca

SEQ ID NO: 459624 - DNA, 25 bp, Artificial
  probe
  misc_feature (1)..(25): SEQ ID NO: 7139; WAN024GK6; Start 17; Stop 41
taatcaatcaaatcaatgtggtcaa

SEQ ID NO: 459625 - DNA, 25 bp, Artificial
  probe
  misc_feature (1)..(25): SEQ ID NO: 7139; WAN024GK6; Start 8; Stop 32
accaacagctaatcaatcaaatcaa

SEQ ID NO: 459626 - DNA, 25 bp, Artificial
  probe
  misc_feature (1)..(25): SEQ ID NO: 7139; WAN024GK6; Start 14; Stop 38
agctaatcaatcaaatcaatgtggt

SEQ ID NO: 459627 - DNA, 25 bp, Artificial
  probe
  misc_feature (1)..(25): SEQ ID NO: 7139; WAN024GK6; Start 20; Stop 44
tcaatcaaatcaatgtggtcaaccg

SEQ ID NO: 459628 - DNA, 25 bp, Artificial
  probe
  misc_feature (1)..(25): SEQ ID NO: 7139; WAN024GK6; Start 13; Stop 37
cagctaatcaatcaaatcaatgtgg

SEQ ID NO: 459629 - DNA, 25 bp, Artificial
  probe
  misc_feature (1)..(25): SEQ ID NO: 7139; WAN024GK6; Start 7; Stop 31
taccaacagctaatcaatcaaatca

SEQ ID NO: 459630 - DNA, 25 bp, Artificial
  probe
  misc_feature (1)..(25): SEQ ID NO: 7139; WAN024GK6; Start 22; Stop 46
aatcaaatcaatgtggtcaaccgtg

SEQ ID NO: 459631 - DNA, 25 bp, Artificial
  probe
  misc_feature (1)..(25): SEQ ID NO: 7139; WAN024GK6; Start 21; Stop 45
caatcaaatcaatgtggtcaaccgt

SEQ ID NO: 459632 - DNA, 25 bp, Artificial
  probe
  misc_feature (1)..(25): SEQ ID NO: 7139; WAN024GK6; Start 9; Stop 33
ccaacagctaatcaatcaaatcaat

SEQ ID NO: 459633 - DNA, 25 bp, Artificial
  probe
  misc_feature (1)..(25): SEQ ID NO: 7139; WAN024GK6; Start 6; Stop 30
ttaccaacagctaatcaatcaaatc

SEQ ID NO: 459634 - DNA, 25 bp, Artificial
  probe
  misc_feature (1)..(25): SEQ ID NO: 7139; WAN024GK6; Start 25; Stop 49
caaatcaatgtggtcaaccgtgttt

SEQ ID NO: 459635 - DNA, 25 bp, Artificial
  probe
  misc_feature (1)..(25): SEQ ID NO: 7139; WAN024GK6; Start 12; Stop 36
acagctaatcaatcaaatcaatgtg

SEQ ID NO: 459636 - DNA, 25 bp, Artificial
  probe
  misc_feature (1)..(25): SEQ ID NO: 7139; WAN024GK6; Start 10; Stop 34
caacagctaatcaatcaaatcaatg

SEQ ID NO: 459637 - DNA, 25 bp, Artificial
  probe
  misc_feature (1)..(25): SEQ ID NO: 7139; WAN024GK6; Start 23; Stop 47
atcaaatcaatgtggtcaaccgtgt

SEQ ID NO: 459638 - DNA, 25 bp, Artificial
  probe
  misc_feature (1)..(25): SEQ ID NO: 7139; WAN024GK6; Start 11; Stop 35
aacagctaatcaatcaaatcaatgt

SEQ ID NO: 459639 - DNA, 25 bp, Artificial
  probe
  misc_feature (1)..(25): SEQ ID NO: 7139; WAN024GK6; Start 5; Stop 29
attaccaacagctaatcaatcaaat

SEQ ID NO: 459640 - DNA, 25 bp, Artificial
  probe
  misc_feature (1)..(25): SEQ ID NO: 7139; WAN024GK6; Start 24; Stop 48
tcaaatcaatgtggtcaaccgtgtt

SEQ ID NO: 459641 - DNA, 25 bp, Artificial
  probe
  misc_feature (1)..(25): SEQ ID NO: 7139; WAN024GK6; Start 79; Stop 103
tacctcagcagtactcatcagcatt

SEQ ID NO: 459642 - DNA, 25 bp, Artificial
  probe
  misc_feature (1)..(25): SEQ ID NO: 7139; WAN024GK6; Start 78; Stop 102
ctacctcagcagtactcatcagcat

SEQ ID NO: 459643 - DNA, 25 bp, Artificial
  probe
  misc_feature (1)..(25): SEQ ID NO: 7139; WAN024GK6; Start 26; Stop 50
aaatcaatgtggtcaaccgtgtttt

SEQ ID NO: 459644 - DNA, 25 bp, Artificial
  probe
  misc_feature (1)..(25): SEQ ID NO: 7139; WAN024GK6; Start 89; Stop 113
gtactcatcagcattttctatcaaa

SEQ ID NO: 459645 - DNA, 25 bp, Artificial
  probe
  misc_feature (1)..(25): SEQ ID NO: 7139; WAN024GK6; Start 27; Stop 51
aatcaatgtggtcaaccgtgttttg

SEQ ID NO: 459646 - DNA, 25 bp, Artificial
  probe
  misc_feature (1)..(25): SEQ ID NO: 7139; WAN024GK6; Start 4; Stop 28
gattaccaacagctaatcaatcaaa

SEQ ID NO: 459647 - DNA, 25 bp, Artificial
  probe
  misc_feature (1)..(25): SEQ ID NO: 7139; WAN024GK6; Start 86; Stop 110
gcagtactcatcagcattttctatc

SEQ ID NO: 459648 - DNA, 25 bp, Artificial
  probe
  misc_feature (1)..(25): SEQ ID NO: 7139; WAN024GK6; Start 85; Stop 109
agcagtactcatcagcattttctat

SEQ ID NO: 459649 - DNA, 25 bp, Artificial
  probe
  misc_feature (1)..(25): SEQ ID NO: 7139; WAN024GK6; Start 84; Stop 108
cagcagtactcatcagcattttcta

SEQ ID NO: 459650 - DNA, 25 bp, Artificial
  probe
  misc_feature (1)..(25): SEQ ID NO: 7139; WAN024GK6; Start 87; Stop 111
cagtactcatcagcattttctatca

SEQ ID NO: 459651 - DNA, 25 bp, Artificial
  probe
  misc_feature (1)..(25): SEQ ID NO: 7139; WAN024GK6; Start 90; Stop 114
tactcatcagcattttctatcaaaa

SEQ ID NO: 459652 - DNA, 25 bp, Artificial
  probe
  misc_feature (1)..(25): SEQ ID NO: 7139; WAN024GK6; Start 88; Stop 112
agtactcatcagcattttctatcaa

SEQ ID NO: 459653 - DNA, 25 bp, Artificial
  probe
  misc_feature (1)..(25): SEQ ID NO: 7140; WAN024F6U; Start 54; Stop 78
ccttatctacaacctcaaaaccgtg

SEQ ID NO: 459654 - DNA, 25 bp, Artificial
  probe
  misc_feature (1)..(25): SEQ ID NO: 7140; WAN024F6U; Start 50; Stop 74
gtcgccttatctacaacctcaaaac

SEQ ID NO: 459655 - DNA, 25 bp, Artificial
  probe
  misc_feature (1)..(25): SEQ ID NO: 7140; WAN024F6U; Start 56; Stop 80
ttatctacaacctcaaaaccgtgtt

SEQ ID NO: 459656 - DNA, 25 bp, Artificial
  probe
  misc_feature (1)..(25): SEQ ID NO: 7140; WAN024F6U; Start 55; Stop 79
cttatctacaacctcaaaaccgtgt

SEQ ID NO: 459657 - DNA, 25 bp, Artificial
  probe
  misc_feature (1)..(25): SEQ ID NO: 7140; WAN024F6U; Start 47; Stop 71
aacgtcgccttatctacaacctcaa

SEQ ID NO: 459658 - DNA, 25 bp, Artificial
  probe
  misc_feature (1)..(25): SEQ ID NO: 7140; WAN024F6U; Start 45; Stop 69
tcaacgtcgccttatctacaacctc

SEQ ID NO: 459659 - DNA, 25 bp, Artificial
  probe
  misc_feature (1)..(25): SEQ ID NO: 7140; WAN024F6U; Start 51; Stop 75
tcgccttatctacaacctcaaaacc

SEQ ID NO: 459660 - DNA, 25 bp, Artificial
  probe
  misc_feature (1)..(25): SEQ ID NO: 7140; WAN024F6U; Start 53; Stop 77
gccttatctacaacctcaaaaccgt

SEQ ID NO: 459661 - DNA, 25 bp, Artificial
  probe
  misc_feature (1)..(25): SEQ ID NO: 7140; WAN024F6U; Start 46; Stop 70
caacgtcgccttatctacaacctca

SEQ ID NO: 459662 - DNA, 25 bp, Artificial
  probe
  misc_feature (1)..(25): SEQ ID NO: 7140; WAN024F6U; Start 44; Stop 68
gtcaacgtcgccttatctacaacct

SEQ ID NO: 459663 - DNA, 25 bp, Artificial
  probe
  misc_feature (1)..(25): SEQ ID NO: 7140; WAN024F6U; Start 49; Stop 73
cgtcgccttatctacaacctcaaaa

SEQ ID NO: 459664 - DNA, 25 bp, Artificial
  probe
  misc_feature (1)..(25): SEQ ID NO: 7140; WAN024F6U; Start 57; Stop 81
tatctacaacctcaaaaccgtgttt

SEQ ID NO: 459665 - DNA, 25 bp, Artificial
  probe
  misc_feature (1)..(25): SEQ ID NO: 7140; WAN024F6U; Start 48; Stop 72
acgtcgccttatctacaacctcaaa

SEQ ID NO: 459666 - DNA, 25 bp, Artificial
  probe
  misc_feature (1)..(25): SEQ ID NO: 7140; WAN024F6U; Start 2; Stop 26
tggcaataagaataatactctttga

SEQ ID NO: 459667 - DNA, 25 bp, Artificial
  probe
  misc_feature (1)..(25): SEQ ID NO: 7140; WAN024F6U; Start 1; Stop 25
ctggcaataagaataatactctttg

SEQ ID NO: 459668 - DNA, 25 bp, Artificial
  probe
  misc_feature (1)..(25): SEQ ID NO: 7140; WAN024F6U; Start 52; Stop 76
cgccttatctacaacctcaaaaccg

SEQ ID NO: 459669 - DNA, 25 bp, Artificial
  probe
  misc_feature (1)..(25): SEQ ID NO: 7140; WAN024F6U; Start 24; Stop 48
tgaaaatctcttcaaaccacgtcaa

SEQ ID NO: 459670 - DNA, 25 bp, Artificial
  probe
  misc_feature (1)..(25): SEQ ID NO: 7140; WAN024F6U; Start 3; Stop 27
ggcaataagaataatactctttgaa

SEQ ID NO: 459671 - DNA, 25 bp, Artificial
  probe
  misc_feature (1)..(25): SEQ ID NO: 7141; WAN024CX7; Start 28; Stop 52
tctccttgtatctctgttaatccac

SEQ ID NO: 459672 - DNA, 25 bp, Artificial
  probe
  misc_feature (1)..(25): SEQ ID NO: 7141; WAN024CX7; Start 29; Stop 53
ctccttgtatctctgttaatccact

SEQ ID NO: 459673 - DNA, 25 bp, Artificial
  probe
  misc_feature (1)..(25): SEQ ID NO: 7141; WAN024CX7; Start 31; Stop 55
ccttgtatctctgttaatccacttg

SEQ ID NO: 459674 - DNA, 25 bp, Artificial
  probe
  misc_feature (1)..(25): SEQ ID NO: 7141; WAN024CX7; Start 30; Stop 54
tccttgtatctctgttaatccactt

SEQ ID NO: 459675 - DNA, 25 bp, Artificial
  probe
  misc_feature (1)..(25): SEQ ID NO: 7141; WAN024CX7; Start 27; Stop 51
atctccttgtatctctgttaatcca

SEQ ID NO: 459676 - DNA, 25 bp, Artificial
  probe
  misc_feature (1)..(25): SEQ ID NO: 7141; WAN024CX7; Start 33; Stop 57
ttgtatctctgttaatccacttgac

SEQ ID NO: 459677 - DNA, 25 bp, Artificial
  probe
  misc_feature (1)..(25): SEQ ID NO: 7141; WAN024CX7; Start 26; Stop 50
catctccttgtatctctgttaatcc

SEQ ID NO: 459678 - DNA, 25 bp, Artificial
  probe
  misc_feature (1)..(25): SEQ ID NO: 7141; WAN024CX7; Start 32; Stop 56
cttgtatctctgttaatccacttga

SEQ ID NO: 459679 - DNA, 25 bp, Artificial
  probe
  misc_feature (1)..(25): SEQ ID NO: 7141; WAN024CX7; Start 39; Stop 63
ctctgttaatccacttgacaatcct

SEQ ID NO: 459680 - DNA, 25 bp, Artificial
  probe
  misc_feature (1)..(25): SEQ ID NO: 7141; WAN024CX7; Start 38; Stop 62
tctctgttaatccacttgacaatcc

SEQ ID NO: 459681 - DNA, 25 bp, Artificial
  probe
  misc_feature (1)..(25): SEQ ID NO: 7141; WAN024CX7; Start 40; Stop 64
tctgttaatccacttgacaatccta

SEQ ID NO: 459682 - DNA, 25 bp, Artificial
  probe
  misc_feature (1)..(25): SEQ ID NO: 7141; WAN024CX7; Start 34; Stop 58
tgtatctctgttaatccacttgaca

SEQ ID NO: 459683 - DNA, 25 bp, Artificial
  probe
  misc_feature (1)..(25): SEQ ID NO: 7141; WAN024CX7; Start 43; Stop 67
gttaatccacttgacaatcctatca

SEQ ID NO: 459684 - DNA, 25 bp, Artificial
  probe
  misc_feature (1)..(25): SEQ ID NO: 7141; WAN024CX7; Start 17; Stop 41
tgctagtaacatctccttgtatctc

SEQ ID NO: 459685 - DNA, 25 bp, Artificial
  probe
  misc_feature (1)..(25): SEQ ID NO: 7141; WAN024CX7; Start 37; Stop 61
atctctgttaatccacttgacaatc

SEQ ID NO: 459686 - DNA, 25 bp, Artificial
  probe
  misc_feature (1)..(25): SEQ ID NO: 7141; WAN024CX7; Start 18; Stop 42
gctagtaacatctccttgtatctct

SEQ ID NO: 459687 - DNA, 25 bp, Artificial
  probe
  misc_feature (1)..(25): SEQ ID NO: 7141; WAN024CX7; Start 16; Stop 40
ttgctagtaacatctccttgtatct

SEQ ID NO: 459688 - DNA, 25 bp, Artificial
  probe
  misc_feature (1)..(25): SEQ ID NO: 7141; WAN024CX7; Start 42; Stop 66
tgttaatccacttgacaatcctatc

SEQ ID NO: 459689 - DNA, 25 bp, Artificial
  probe
  misc_feature (1)..(25): SEQ ID NO: 7141; WAN024CX7; Start 41; Stop 65
ctgttaatccacttgacaatcctat

SEQ ID NO: 459690 - DNA, 25 bp, Artificial
  probe
  misc_feature (1)..(25): SEQ ID NO: 7141; WAN024CX7; Start 35; Stop 59
gtatctctgttaatccacttgacaa

SEQ ID NO: 459691 - DNA, 25 bp, Artificial
  probe
  misc_feature (1)..(25): SEQ ID NO: 7141; WAN024CX7; Start 20; Stop 44
tagtaacatctccttgtatctctgt

SEQ ID NO: 459692 - DNA, 25 bp, Artificial
  probe
  misc_feature (1)..(25): SEQ ID NO: 7141; WAN024CX7; Start 25; Stop 49
acatctccttgtatctctgttaatc

SEQ ID NO: 459693 - DNA, 25 bp, Artificial
  probe
  misc_feature (1)..(25): SEQ ID NO: 7141; WAN024CX7; Start 36; Stop 60
tatctctgttaatccacttgacaat

SEQ ID NO: 459694 - DNA, 25 bp, Artificial
  probe
  misc_feature (1)..(25): SEQ ID NO: 7141; WAN024CX7; Start 19; Stop 43
ctagtaacatctccttgtatctctg

SEQ ID NO: 459695 - DNA, 25 bp, Artificial
  probe
  misc_feature (1)..(25): SEQ ID NO: 7141; WAN024CX7; Start 56; Stop 80
acaatcctatcaaagaagtagaagt

SEQ ID NO: 459696 - DNA, 25 bp, Artificial
  probe
  misc_feature (1)..(25): SEQ ID NO: 7141; WAN024CX7; Start 15; Stop 39
tttgctagtaacatctccttgtatc

SEQ ID NO: 459697 - DNA, 25 bp, Artificial
  probe
  misc_feature (1)..(25): SEQ ID NO: 7141; WAN024CX7; Start 11; Stop 35
ctaatttgctagtaacatctccttg

SEQ ID NO: 459698 - DNA, 25 bp, Artificial
  probe
  misc_feature (1)..(25): SEQ ID NO: 7141; WAN024CX7; Start 13; Stop 37
aatttgctagtaacatctccttgta

SEQ ID NO: 459699 - DNA, 25 bp, Artificial
  probe
  misc_feature (1)..(25): SEQ ID NO: 7141; WAN024CX7; Start 12; Stop 36
taatttgctagtaacatctccttgt

SEQ ID NO: 459700 - DNA, 25 bp, Artificial
  probe
  misc_feature (1)..(25): SEQ ID NO: 7141; WAN024CX7; Start 21; Stop 45
agtaacatctccttgtatctctgtt

SEQ ID NO: 459701 - DNA, 25 bp, Artificial
  probe
  misc_feature (1)..(25): SEQ ID NO: 7141; WAN024CX7; Start 55; Stop 79
gacaatcctatcaaagaagtagaag

SEQ ID NO: 459702 - DNA, 25 bp, Artificial
  probe
  misc_feature (1)..(25): SEQ ID NO: 7141; WAN024CX7; Start 54; Stop 78
tgacaatcctatcaaagaagtagaa

SEQ ID NO: 459703 - DNA, 25 bp, Artificial
  probe
  misc_feature (1)..(25): SEQ ID NO: 7141; WAN024CX7; Start 44; Stop 68
ttaatccacttgacaatcctatcaa

SEQ ID NO: 459704 - DNA, 25 bp, Artificial
  probe
  misc_feature (1)..(25): SEQ ID NO: 7142; WAN024EUR; Start 149; Stop 173
gtttgaccccaaaagaatttgaaag

SEQ ID NO: 459705 - DNA, 25 bp, Artificial
  probe
  misc_feature (1)..(25): SEQ ID NO: 7142; WAN024EUR; Start 148; Stop 172
agtttgaccccaaaagaatttgaaa

SEQ ID NO: 459706 - DNA, 25 bp, Artificial
  probe
  misc_feature (1)..(25): SEQ ID NO: 7142; WAN024EUR; Start 155; Stop 179
ccccaaaagaatttgaaagcgataa

SEQ ID NO: 459707 - DNA, 25 bp, Artificial
  probe
  misc_feature (1)..(25): SEQ ID NO: 7142; WAN024EUR; Start 156; Stop 180
cccaaaagaatttgaaagcgataaa

SEQ ID NO: 459708 - DNA, 25 bp, Artificial
  probe
  misc_feature (1)..(25): SEQ ID NO: 7142; WAN024EUR; Start 150; Stop 174
tttgaccccaaaagaatttgaaagc

SEQ ID NO: 459709 - DNA, 25 bp, Artificial
  probe
  misc_feature (1)..(25): SEQ ID NO: 7142; WAN024EUR; Start 154; Stop 178
accccaaaagaatttgaaagcgata

SEQ ID NO: 459710 - DNA, 25 bp, Artificial
  probe
  misc_feature (1)..(25): SEQ ID NO: 7142; WAN024EUR; Start 157; Stop 181
ccaaaagaatttgaaagcgataaaa

SEQ ID NO: 459711 - DNA, 25 bp, Artificial
  probe
  misc_feature (1)..(25): SEQ ID NO: 7142; WAN024EUR; Start 153; Stop 177
gaccccaaaagaatttgaaagcgat

SEQ ID NO: 459712 - DNA, 25 bp, Artificial
  probe
  misc_feature (1)..(25): SEQ ID NO: 7142; WAN024EUR; Start 151; Stop 175
ttgaccccaaaagaatttgaaagcg

SEQ ID NO: 459713 - DNA, 25 bp, Artificial
  probe
  misc_feature (1)..(25): SEQ ID NO: 7142; WAN024EUR; Start 152; Stop 176
tgaccccaaaagaatttgaaagcga

SEQ ID NO: 459714 - DNA, 25 bp, Artificial
  probe
  misc_feature (1)..(25): SEQ ID NO: 7143; WAN024AVD; Start 85; Stop 109
tttgaacatttgataggaggtcttt

SEQ ID NO: 459715 - DNA, 25 bp, Artificial
  probe
  misc_feature (1)..(25): SEQ ID NO: 7143; WAN024AVD; Start 60; Stop 84
cgaaacaagacctcctatcaaagtt

SEQ ID NO: 459716 - DNA, 25 bp, Artificial
  probe
  misc_feature (1)..(25): SEQ ID NO: 7143; WAN024AVD; Start 58; Stop 82
cacgaaacaagacctcctatcaaag

SEQ ID NO: 459717 - DNA, 25 bp, Artificial
  probe
  misc_feature (1)..(25): SEQ ID NO: 7143; WAN024AVD; Start 59; Stop 83
acgaaacaagacctcctatcaaagt

SEQ ID NO: 459718 - DNA, 25 bp, Artificial
  probe
  misc_feature (1)..(25): SEQ ID NO: 7143; WAN024AVD; Start 57; Stop 81
tcacgaaacaagacctcctatcaaa

SEQ ID NO: 459719 - DNA, 25 bp, Artificial
  probe
  misc_feature (1)..(25): SEQ ID NO: 7143; WAN024AVD; Start 56; Stop 80
ttcacgaaacaagacctcctatcaa

SEQ ID NO: 459720 - DNA, 25 bp, Artificial
  probe
  misc_feature (1)..(25): SEQ ID NO: 7143; WAN024AVD; Start 55; Stop 79
tttcacgaaacaagacctcctatca

SEQ ID NO: 459721 - DNA, 25 bp, Artificial
  probe
  misc_feature (1)..(25): SEQ ID NO: 7143; WAN024AVD; Start 61; Stop 85
gaaacaagacctcctatcaaagttt

SEQ ID NO: 459722 - DNA, 25 bp, Artificial
  probe
  misc_feature (1)..(25): SEQ ID NO: 7143; WAN024AVD; Start 52; Stop 76
tattttcacgaaacaagacctccta

SEQ ID NO: 459723 - DNA, 25 bp, Artificial
  probe
  misc_feature (1)..(25): SEQ ID NO: 7143; WAN024AVD; Start 86; Stop 110
ttgaacatttgataggaggtctttt

SEQ ID NO: 459724 - DNA, 25 bp, Artificial
  probe
  misc_feature (1)..(25): SEQ ID NO: 7143; WAN024AVD; Start 84; Stop 108
ttttgaacatttgataggaggtctt

SEQ ID NO: 459725 - DNA, 25 bp, Artificial
  probe
  misc_feature (1)..(25): SEQ ID NO: 7143; WAN024AVD; Start 53; Stop 77
attttcacgaaacaagacctcctat

SEQ ID NO: 459726 - DNA, 25 bp, Artificial
  probe
  misc_feature (1)..(25): SEQ ID NO: 7143; WAN024AVD; Start 51; Stop 75
atattttcacgaaacaagacctcct

SEQ ID NO: 459727 - DNA, 25 bp, Artificial
  probe
  misc_feature (1)..(25): SEQ ID NO: 7143; WAN024AVD; Start 54; Stop 78
ttttcacgaaacaagacctcctatc

SEQ ID NO: 459728 - DNA, 25 bp, Artificial
  probe
  misc_feature (1)..(25): SEQ ID NO: 7143; WAN024AVD; Start 50; Stop 74
aatattttcacgaaacaagacctcc

SEQ ID NO: 459729 - DNA, 25 bp, Artificial
  probe
  misc_feature (1)..(25): SEQ ID NO: 7143; WAN024AVD; Start 1; Stop 25
ctggctaaaagaacctggctaacag

SEQ ID NO: 459730 - DNA, 25 bp, Artificial
  probe
  misc_feature (1)..(25): SEQ ID NO: 7143; WAN024AVD; Start 49; Stop 73
aaatattttcacgaaacaagacctc

SEQ ID NO: 459731 - DNA, 25 bp, Artificial
  probe
  misc_feature (1)..(25): SEQ ID NO: 7143; WAN024AVD; Start 5; Stop 29
ctaaaagaacctggctaacagctca

SEQ ID NO: 459732 - DNA, 25 bp, Artificial
  probe
  misc_feature (1)..(25): SEQ ID NO: 7143; WAN024AVD; Start 6; Stop 30
taaaagaacctggctaacagctcac

SEQ ID NO: 459733 - DNA, 25 bp, Artificial
  probe
  misc_feature (1)..(25): SEQ ID NO: 7143; WAN024AVD; Start 48; Stop 72
taaatattttcacgaaacaagacct

SEQ ID NO: 459734 - DNA, 25 bp, Artificial
  probe
  misc_feature (1)..(25): SEQ ID NO: 7143; WAN024AVD; Start 47; Stop 71
ataaatattttcacgaaacaagacc

SEQ ID NO: 459735 - DNA, 25 bp, Artificial
  probe
  misc_feature (1)..(25): SEQ ID NO: 7143; WAN024AVD; Start 4; Stop 28
gctaaaagaacctggctaacagctc

SEQ ID NO: 459736 - DNA, 25 bp, Artificial
  probe
  misc_feature (1)..(25): SEQ ID NO: 7143; WAN024AVD; Start 7; Stop 31
aaaagaacctggctaacagctcact

SEQ ID NO: 459737 - DNA, 25 bp, Artificial
  probe
  misc_feature (1)..(25): SEQ ID NO: 7143; WAN024AVD; Start 46; Stop 70
gataaatattttcacgaaacaagac

SEQ ID NO: 459738 - DNA, 25 bp, Artificial
  probe
  misc_feature (1)..(25): SEQ ID NO: 7143; WAN024AVD; Start 45; Stop 69
tgataaatattttcacgaaacaaga

SEQ ID NO: 459739 - DNA, 25 bp, Artificial
  probe
  misc_feature (1)..(25): SEQ ID NO: 7143; WAN024AVD; Start 3; Stop 27
ggctaaaagaacctggctaacagct

SEQ ID NO: 459740 - DNA, 25 bp, Artificial
  probe
  misc_feature (1)..(25): SEQ ID NO: 7143; WAN024AVD; Start 44; Stop 68
ttgataaatattttcacgaaacaag

SEQ ID NO: 459741 - DNA, 25 bp, Artificial
  probe
  misc_feature (1)..(25): SEQ ID NO: 7144; WAN024BWL; Start 213; Stop 237
gacagaagaagttacgagcagagta

SEQ ID NO: 459742 - DNA, 25 bp, Artificial
  probe
  misc_feature (1)..(25): SEQ ID NO: 7144; WAN024BWL; Start 217; Stop 241
gaagaagttacgagcagagtacaga

SEQ ID NO: 459743 - DNA, 25 bp, Artificial
  probe
  misc_feature (1)..(25): SEQ ID NO: 7144; WAN024BWL; Start 216; Stop 240
agaagaagttacgagcagagtacag

SEQ ID NO: 459744 - DNA, 25 bp, Artificial
  probe
  misc_feature (1)..(25): SEQ ID NO: 7144; WAN024BWL; Start 34; Stop 58
attgtaggagctgtggagagaataa

SEQ ID NO: 459745 - DNA, 25 bp, Artificial
  probe
  misc_feature (1)..(25): SEQ ID NO: 7144; WAN024BWL; Start 72; Stop 96
gaatatagcagcggcgatagaagaa

SEQ ID NO: 459746 - DNA, 25 bp, Artificial
  probe
  misc_feature (1)..(25): SEQ ID NO: 7144; WAN024BWL; Start 218; Stop 242
aagaagttacgagcagagtacagac

SEQ ID NO: 459747 - DNA, 25 bp, Artificial
  probe
  misc_feature (1)..(25): SEQ ID NO: 7144; WAN024BWL; Start 215; Stop 239
cagaagaagttacgagcagagtaca

SEQ ID NO: 459748 - DNA, 25 bp, Artificial
  probe
  misc_feature (1)..(25): SEQ ID NO: 7144; WAN024BWL; Start 214; Stop 238
acagaagaagttacgagcagagtac

SEQ ID NO: 459749 - DNA, 25 bp, Artificial
  probe
  misc_feature (1)..(25): SEQ ID NO: 7144; WAN024BWL; Start 33; Stop 57
cattgtaggagctgtggagagaata

SEQ ID NO: 459750 - DNA, 25 bp, Artificial
  probe
  misc_feature (1)..(25): SEQ ID NO: 7144; WAN024BWL; Start 147; Stop 171
aaacgcagaagaaattacaaacagt

SEQ ID NO: 459751 - DNA, 25 bp, Artificial
  probe
  misc_feature (1)..(25): SEQ ID NO: 7144; WAN024BWL; Start 73; Stop 97
aatatagcagcggcgatagaagaac

SEQ ID NO: 459752 - DNA, 25 bp, Artificial
  probe
  misc_feature (1)..(25): SEQ ID NO: 7144; WAN024BWL; Start 267; Stop 291
caaagaaatcgtcgcaagatacaaa

SEQ ID NO: 459753 - DNA, 25 bp, Artificial
  probe
  misc_feature (1)..(25): SEQ ID NO: 7144; WAN024BWL; Start 50; Stop 74
agagaataaacgagatgcttcagaa

SEQ ID NO: 459754 - DNA, 25 bp, Artificial
  probe
  misc_feature (1)..(25): SEQ ID NO: 7144; WAN024BWL; Start 49; Stop 73
gagagaataaacgagatgcttcaga

SEQ ID NO: 459755 - DNA, 25 bp, Artificial
  probe
  misc_feature (1)..(25): SEQ ID NO: 7144; WAN024BWL; Start 148; Stop 172
aacgcagaagaaattacaaacagtg

SEQ ID NO: 459756 - DNA, 25 bp, Artificial
  probe
  misc_feature (1)..(25): SEQ ID NO: 7144; WAN024BWL; Start 51; Stop 75
gagaataaacgagatgcttcagaat

SEQ ID NO: 459757 - DNA, 25 bp, Artificial
  probe
  misc_feature (1)..(25): SEQ ID NO: 7144; WAN024BWL; Start 266; Stop 290
tcaaagaaatcgtcgcaagatacaa

SEQ ID NO: 459758 - DNA, 25 bp, Artificial
  probe
  misc_feature (1)..(25): SEQ ID NO: 7144; WAN024BWL; Start 70; Stop 94
cagaatatagcagcggcgatagaag

SEQ ID NO: 459759 - DNA, 25 bp, Artificial
  probe
  misc_feature (1)..(25): SEQ ID NO: 7144; WAN024BWL; Start 48; Stop 72
ggagagaataaacgagatgcttcag

SEQ ID NO: 459760 - DNA, 25 bp, Artificial
  probe
  misc_feature (1)..(25): SEQ ID NO: 7144; WAN024BWL; Start 67; Stop 91
cttcagaatatagcagcggcgatag

SEQ ID NO: 459761 - DNA, 25 bp, Artificial
  probe
  misc_feature (1)..(25): SEQ ID NO: 7144; WAN024BWL; Start 46; Stop 70
gtggagagaataaacgagatgcttc

SEQ ID NO: 459762 - DNA, 25 bp, Artificial
  probe
  misc_feature (1)..(25): SEQ ID NO: 7144; WAN024BWL; Start 265; Stop 289
ctcaaagaaatcgtcgcaagataca

SEQ ID NO: 459763 - DNA, 25 bp, Artificial
  probe
  misc_feature (1)..(25): SEQ ID NO: 7144; WAN024BWL; Start 71; Stop 95
agaatatagcagcggcgatagaaga

SEQ ID NO: 459764 - DNA, 25 bp, Artificial
  probe
  misc_feature (1)..(25): SEQ ID NO: 7144; WAN024BWL; Start 159; Stop 183
aattacaaacagtgtcaaggaagtg

SEQ ID NO: 459765 - DNA, 25 bp, Artificial
  probe
  misc_feature (1)..(25): SEQ ID NO: 7144; WAN024BWL; Start 151; Stop 175
gcagaagaaattacaaacagtgtca

SEQ ID NO: 459766 - DNA, 25 bp, Artificial
  probe
  misc_feature (1)..(25): SEQ ID NO: 7144; WAN024BWL; Start 160; Stop 184
attacaaacagtgtcaaggaagtga

SEQ ID NO: 459767 - DNA, 25 bp, Artificial
  probe
  misc_feature (1)..(25): SEQ ID NO: 7144; WAN024BWL; Start 161; Stop 185
ttacaaacagtgtcaaggaagtgaa

SEQ ID NO: 459768 - DNA, 25 bp, Artificial
  probe
  misc_feature (1)..(25): SEQ ID NO: 7144; WAN024BWL; Start 158; Stop 182
aaattacaaacagtgtcaaggaagt

SEQ ID NO: 459769 - DNA, 25 bp, Artificial
  probe
  misc_feature (1)..(25): SEQ ID NO: 7144; WAN024BWL; Start 45; Stop 69
tgtggagagaataaacgagatgctt

SEQ ID NO: 459770 - DNA, 25 bp, Artificial
  probe
  misc_feature (1)..(25): SEQ ID NO: 7144; WAN024BWL; Start 47; Stop 71
tggagagaataaacgagatgcttca

SEQ ID NO: 459771 - DNA, 25 bp, Artificial
  probe
  misc_feature (1)..(25): SEQ ID NO: 7144; WAN024BWL; Start 156; Stop 180
agaaattacaaacagtgtcaaggaa

SEQ ID NO: 459772 - DNA, 25 bp, Artificial
  probe
  misc_feature (1)..(25): SEQ ID NO: 7144; WAN024BWL; Start 155; Stop 179
aagaaattacaaacagtgtcaagga

SEQ ID NO: 459773 - DNA, 25 bp, Artificial
  probe
  misc_feature (1)..(25): SEQ ID NO: 7144; WAN024BWL; Start 52; Stop 76
agaataaacgagatgcttcagaata

SEQ ID NO: 459774 - DNA, 25 bp, Artificial
  probe
  misc_feature (1)..(25): SEQ ID NO: 7145; WAN024BLU; Start 54; Stop 78
caaagccgttctccaaatagtagag

SEQ ID NO: 459775 - DNA, 25 bp, Artificial
  probe
  misc_feature (1)..(25): SEQ ID NO: 7145; WAN024BLU; Start 51; Stop 75
aaccaaagccgttctccaaatagta

SEQ ID NO: 459776 - DNA, 25 bp, Artificial
  probe
  misc_feature (1)..(25): SEQ ID NO: 7145; WAN024BLU; Start 53; Stop 77
ccaaagccgttctccaaatagtaga

SEQ ID NO: 459777 - DNA, 25 bp, Artificial
  probe
  misc_feature (1)..(25): SEQ ID NO: 7145; WAN024BLU; Start 52; Stop 76
accaaagccgttctccaaatagtag

SEQ ID NO: 459778 - DNA, 25 bp, Artificial
  probe
  misc_feature (1)..(25): SEQ ID NO: 7145; WAN024BLU; Start 55; Stop 79
aaagccgttctccaaatagtagagg

SEQ ID NO: 459779 - DNA, 25 bp, Artificial
  probe
  misc_feature (1)..(25): SEQ ID NO: 7145; WAN024BLU; Start 29; Stop 53
tagaaaacttcactttgacgacaac

SEQ ID NO: 459780 - DNA, 25 bp, Artificial
  probe
  misc_feature (1)..(25): SEQ ID NO: 7145; WAN024BLU; Start 28; Stop 52
gtagaaaacttcactttgacgacaa

SEQ ID NO: 459781 - DNA, 25 bp, Artificial
  probe
  misc_feature (1)..(25): SEQ ID NO: 7145; WAN024BLU; Start 50; Stop 74
caaccaaagccgttctccaaatagt

SEQ ID NO: 459782 - DNA, 25 bp, Artificial
  probe
  misc_feature (1)..(25): SEQ ID NO: 7145; WAN024BLU; Start 49; Stop 73
acaaccaaagccgttctccaaatag

SEQ ID NO: 459783 - DNA, 25 bp, Artificial
  probe
  misc_feature (1)..(25): SEQ ID NO: 7145; WAN024BLU; Start 48; Stop 72
gacaaccaaagccgttctccaaata

SEQ ID NO: 459784 - DNA, 25 bp, Artificial
  probe
  misc_feature (1)..(25): SEQ ID NO: 7145; WAN024BLU; Start 33; Stop 57
aaacttcactttgacgacaaccaaa

SEQ ID NO: 459785 - DNA, 25 bp, Artificial
  probe
  misc_feature (1)..(25): SEQ ID NO: 7145; WAN024BLU; Start 32; Stop 56
aaaacttcactttgacgacaaccaa

SEQ ID NO: 459786 - DNA, 25 bp, Artificial
  probe
  misc_feature (1)..(25): SEQ ID NO: 7145; WAN024BLU; Start 30; Stop 54
agaaaacttcactttgacgacaacc

SEQ ID NO: 459787 - DNA, 25 bp, Artificial
  probe
  misc_feature (1)..(25): SEQ ID NO: 7145; WAN024BLU; Start 62; Stop 86
ttctccaaatagtagaggccgattc

SEQ ID NO: 459788 - DNA, 25 bp, Artificial
  probe
  misc_feature (1)..(25): SEQ ID NO: 7145; WAN024BLU; Start 31; Stop 55
gaaaacttcactttgacgacaacca

SEQ ID NO: 459789 - DNA, 25 bp, Artificial
  probe
  misc_feature (1)..(25): SEQ ID NO: 7145; WAN024BLU; Start 61; Stop 85
gttctccaaatagtagaggccgatt

SEQ ID NO: 459790 - DNA, 25 bp, Artificial
  probe
  misc_feature (1)..(25): SEQ ID NO: 7145; WAN024BLU; Start 66; Stop 90
ccaaatagtagaggccgattcgatc

SEQ ID NO: 459791 - DNA, 25 bp, Artificial
  probe
  misc_feature (1)..(25): SEQ ID NO: 7145; WAN024BLU; Start 65; Stop 89
tccaaatagtagaggccgattcgat

SEQ ID NO: 459792 - DNA, 25 bp, Artificial
  probe
  misc_feature (1)..(25): SEQ ID NO: 7145; WAN024BLU; Start 24; Stop 48
gatcgtagaaaacttcactttgacg

SEQ ID NO: 459793 - DNA, 25 bp, Artificial
  probe
  misc_feature (1)..(25): SEQ ID NO: 7145; WAN024BLU; Start 27; Stop 51
cgtagaaaacttcactttgacgaca

SEQ ID NO: 459794 - DNA, 25 bp, Artificial
  probe
  misc_feature (1)..(25): SEQ ID NO: 7145; WAN024BLU; Start 64; Stop 88
ctccaaatagtagaggccgattcga

SEQ ID NO: 459795 - DNA, 25 bp, Artificial
  probe
  misc_feature (1)..(25): SEQ ID NO: 7145; WAN024BLU; Start 63; Stop 87
tctccaaatagtagaggccgattcg

SEQ ID NO: 459796 - DNA, 25 bp, Artificial
  probe
  misc_feature (1)..(25): SEQ ID NO: 7145; WAN024BLU; Start 60; Stop 84
cgttctccaaatagtagaggccgat

SEQ ID NO: 459797 - DNA, 25 bp, Artificial
  probe
  misc_feature (1)..(25): SEQ ID NO: 7145; WAN024BLU; Start 56; Stop 80
aagccgttctccaaatagtagaggc

SEQ ID NO: 459798 - DNA, 25 bp, Artificial
  probe
  misc_feature (1)..(25): SEQ ID NO: 7146; WAN024DQ8; Start 8; Stop 32
atatcattctctacaccgtcgctat

SEQ ID NO: 459799 - DNA, 25 bp, Artificial
  probe
  misc_feature (1)..(25): SEQ ID NO: 7146; WAN024DQ8; Start 9; Stop 33
tatcattctctacaccgtcgctatt

SEQ ID NO: 459800 - DNA, 25 bp, Artificial
  probe
  misc_feature (1)..(25): SEQ ID NO: 7146; WAN024DQ8; Start 43; Stop 67
aagcatattgacctaactagaacca

SEQ ID NO: 459801 - DNA, 25 bp, Artificial
  probe
  misc_feature (1)..(25): SEQ ID NO: 7146; WAN024DQ8; Start 44; Stop 68
agcatattgacctaactagaaccat

SEQ ID NO: 459802 - DNA, 25 bp, Artificial
  probe
  misc_feature (1)..(25): SEQ ID NO: 7146; WAN024DQ8; Start 45; Stop 69
gcatattgacctaactagaaccatc

SEQ ID NO: 459803 - DNA, 25 bp, Artificial
  probe
  misc_feature (1)..(25): SEQ ID NO: 7146; WAN024DQ8; Start 42; Stop 66
caagcatattgacctaactagaacc

SEQ ID NO: 459804 - DNA, 25 bp, Artificial
  probe
  misc_feature (1)..(25): SEQ ID NO: 7146; WAN024DQ8; Start 10; Stop 34
atcattctctacaccgtcgctattg

SEQ ID NO: 459805 - DNA, 25 bp, Artificial
  probe
  misc_feature (1)..(25): SEQ ID NO: 7146; WAN024DQ8; Start 46; Stop 70
catattgacctaactagaaccatct

SEQ ID NO: 459806 - DNA, 25 bp, Artificial
  probe
  misc_feature (1)..(25): SEQ ID NO: 7146; WAN024DQ8; Start 116; Stop 140
atttggaaggattcttgaagggaaa

SEQ ID NO: 459807 - DNA, 25 bp, Artificial
  probe
  misc_feature (1)..(25): SEQ ID NO: 7146; WAN024DQ8; Start 115; Stop 139
gatttggaaggattcttgaagggaa

SEQ ID NO: 459808 - DNA, 25 bp, Artificial
  probe
  misc_feature (1)..(25): SEQ ID NO: 7146; WAN024DQ8; Start 113; Stop 137
atgatttggaaggattcttgaaggg

SEQ ID NO: 459809 - DNA, 25 bp, Artificial
  probe
  misc_feature (1)..(25): SEQ ID NO: 7146; WAN024DQ8; Start 117; Stop 141
tttggaaggattcttgaagggaaag

SEQ ID NO: 459810 - DNA, 25 bp, Artificial
  probe
  misc_feature (1)..(25): SEQ ID NO: 7146; WAN024DQ8; Start 51; Stop 75
tgacctaactagaaccatctttgag

SEQ ID NO: 459811 - DNA, 25 bp, Artificial
  probe
  misc_feature (1)..(25): SEQ ID NO: 7146; WAN024DQ8; Start 52; Stop 76
gacctaactagaaccatctttgaga

SEQ ID NO: 459812 - DNA, 25 bp, Artificial
  probe
  misc_feature (1)..(25): SEQ ID NO: 7146; WAN024DQ8; Start 50; Stop 74
ttgacctaactagaaccatctttga

SEQ ID NO: 459813 - DNA, 25 bp, Artificial
  probe
  misc_feature (1)..(25): SEQ ID NO: 7146; WAN024DQ8; Start 7; Stop 31
gatatcattctctacaccgtcgcta

SEQ ID NO: 459814 - DNA, 25 bp, Artificial
  probe
  misc_feature (1)..(25): SEQ ID NO: 7146; WAN024DQ8; Start 53; Stop 77
acctaactagaaccatctttgagaa

SEQ ID NO: 459815 - DNA, 25 bp, Artificial
  probe
  misc_feature (1)..(25): SEQ ID NO: 7146; WAN024DQ8; Start 112; Stop 136
catgatttggaaggattcttgaagg

SEQ ID NO: 459816 - DNA, 25 bp, Artificial
  probe
  misc_feature (1)..(25): SEQ ID NO: 7146; WAN024DQ8; Start 114; Stop 138
tgatttggaaggattcttgaaggga

SEQ ID NO: 459817 - DNA, 25 bp, Artificial
  probe
  misc_feature (1)..(25): SEQ ID NO: 7146; WAN024DQ8; Start 111; Stop 135
acatgatttggaaggattcttgaag

SEQ ID NO: 459818 - DNA, 25 bp, Artificial
  probe
  misc_feature (1)..(25): SEQ ID NO: 7146; WAN024DQ8; Start 47; Stop 71
atattgacctaactagaaccatctt

SEQ ID NO: 459819 - DNA, 25 bp, Artificial
  probe
  misc_feature (1)..(25): SEQ ID NO: 7146; WAN024DQ8; Start 49; Stop 73
attgacctaactagaaccatctttg

SEQ ID NO: 459820 - DNA, 25 bp, Artificial
  probe
  misc_feature (1)..(25): SEQ ID NO: 7146; WAN024DQ8; Start 110; Stop 134
aacatgatttggaaggattcttgaa

SEQ ID NO: 459821 - DNA, 25 bp, Artificial
  probe
  misc_feature (1)..(25): SEQ ID NO: 7146; WAN024DQ8; Start 109; Stop 133
aaacatgatttggaaggattcttga

SEQ ID NO: 459822 - DNA, 25 bp, Artificial
  probe
  misc_feature (1)..(25): SEQ ID NO: 7146; WAN024DQ8; Start 89; Stop 113
cagccgttaattaccaacataaaca

SEQ ID NO: 459823 - DNA, 25 bp, Artificial
  probe
  misc_feature (1)..(25): SEQ ID NO: 7146; WAN024DQ8; Start 91; Stop 115
gccgttaattaccaacataaacatg

SEQ ID NO: 459824 - DNA, 25 bp, Artificial
  probe
  misc_feature (1)..(25): SEQ ID NO: 7146; WAN024DQ8; Start 90; Stop 114
agccgttaattaccaacataaacat

SEQ ID NO: 459825 - DNA, 25 bp, Artificial
  probe
  misc_feature (1)..(25): SEQ ID NO: 7146; WAN024DQ8; Start 54; Stop 78
cctaactagaaccatctttgagaaa

SEQ ID NO: 459826 - DNA, 25 bp, Artificial
  probe
  misc_feature (1)..(25): SEQ ID NO: 7146; WAN024DQ8; Start 88; Stop 112
gcagccgttaattaccaacataaac

SEQ ID NO: 459827 - DNA, 25 bp, Artificial
  probe
  misc_feature (1)..(25): SEQ ID NO: 7146; WAN024DQ8; Start 41; Stop 65
tcaagcatattgacctaactagaac

SEQ ID NO: 459828 - DNA, 25 bp, Artificial
  probe
  misc_feature (1)..(25): SEQ ID NO: 7146; WAN024DQ8; Start 37; Stop 61
gctatcaagcatattgacctaacta

SEQ ID NO: 459829 - DNA, 25 bp, Artificial
  probe
  misc_feature (1)..(25): SEQ ID NO: 7146; WAN024DQ8; Start 103; Stop 127
caacataaacatgatttggaaggat

SEQ ID NO: 459830 - DNA, 25 bp, Artificial
  probe
  misc_feature (1)..(25): SEQ ID NO: 7146; WAN024DQ8; Start 108; Stop 132
taaacatgatttggaaggattcttg

SEQ ID NO: 459831 - DNA, 25 bp, Artificial
  probe
  misc_feature (1)..(25): SEQ ID NO: 7147; WAN024BWF; Start 200; Stop 224
ttgtattcgttgctctgattcactt

SEQ ID NO: 459832 - DNA, 25 bp, Artificial
  probe
  misc_feature (1)..(25): SEQ ID NO: 7147; WAN024BWF; Start 201; Stop 225
tgtattcgttgctctgattcacttc

SEQ ID NO: 459833 - DNA, 25 bp, Artificial
  probe
  misc_feature (1)..(25): SEQ ID NO: 7147; WAN024BWF; Start 203; Stop 227
tattcgttgctctgattcacttcaa

SEQ ID NO: 459834 - DNA, 25 bp, Artificial
  probe
  misc_feature (1)..(25): SEQ ID NO: 7147; WAN024BWF; Start 212; Stop 236
ctctgattcacttcaacgatgagat

SEQ ID NO: 459835 - DNA, 25 bp, Artificial
  probe
  misc_feature (1)..(25): SEQ ID NO: 7147; WAN024BWF; Start 106; Stop 130
cttgagttctgctattgtagatcca

SEQ ID NO: 459836 - DNA, 25 bp, Artificial
  probe
  misc_feature (1)..(25): SEQ ID NO: 7147; WAN024BWF; Start 105; Stop 129
tcttgagttctgctattgtagatcc

SEQ ID NO: 459837 - DNA, 25 bp, Artificial
  probe
  misc_feature (1)..(25): SEQ ID NO: 7147; WAN024BWF; Start 102; Stop 126
ggatcttgagttctgctattgtaga

SEQ ID NO: 459838 - DNA, 25 bp, Artificial
  probe
  misc_feature (1)..(25): SEQ ID NO: 7147; WAN024BWF; Start 354; Stop 378
ttccatcgcctcctatcacatattc

SEQ ID NO: 459839 - DNA, 25 bp, Artificial
  probe
  misc_feature (1)..(25): SEQ ID NO: 7147; WAN024BWF; Start 202; Stop 226
gtattcgttgctctgattcacttca

SEQ ID NO: 459840 - DNA, 25 bp, Artificial
  probe
  misc_feature (1)..(25): SEQ ID NO: 7147; WAN024BWF; Start 213; Stop 237
tctgattcacttcaacgatgagatc

SEQ ID NO: 459841 - DNA, 25 bp, Artificial
  probe
  misc_feature (1)..(25): SEQ ID NO: 7147; WAN024BWF; Start 110; Stop 134
agttctgctattgtagatccagttc

SEQ ID NO: 459842 - DNA, 25 bp, Artificial
  probe
  misc_feature (1)..(25): SEQ ID NO: 7147; WAN024BWF; Start 109; Stop 133
gagttctgctattgtagatccagtt

SEQ ID NO: 459843 - DNA, 25 bp, Artificial
  probe
  misc_feature (1)..(25): SEQ ID NO: 7147; WAN024BWF; Start 107; Stop 131
ttgagttctgctattgtagatccag

SEQ ID NO: 459844 - DNA, 25 bp, Artificial
  probe
  misc_feature (1)..(25): SEQ ID NO: 7147; WAN024BWF; Start 12; Stop 36
ggatagaagtctcctaccactgatt

SEQ ID NO: 459845 - DNA, 25 bp, Artificial
  probe
  misc_feature (1)..(25): SEQ ID NO: 7147; WAN024BWF; Start 111; Stop 135
gttctgctattgtagatccagttcc

SEQ ID NO: 459846 - DNA, 25 bp, Artificial
  probe
  misc_feature (1)..(25): SEQ ID NO: 7147; WAN024BWF; Start 108; Stop 132
tgagttctgctattgtagatccagt

SEQ ID NO: 459847 - DNA, 25 bp, Artificial
  probe
  misc_feature (1)..(25): SEQ ID NO: 7147; WAN024BWF; Start 113; Stop 137
tctgctattgtagatccagttccaa

SEQ ID NO: 459848 - DNA, 25 bp, Artificial
  probe
  misc_feature (1)..(25): SEQ ID NO: 7147; WAN024BWF; Start 112; Stop 136
ttctgctattgtagatccagttcca

SEQ ID NO: 459849 - DNA, 25 bp, Artificial
  probe
  misc_feature (1)..(25): SEQ ID NO: 7147; WAN024BWF; Start 550; Stop 574
tccgtaaagaacaagagattagacc

SEQ ID NO: 459850 - DNA, 25 bp, Artificial
  probe
  misc_feature (1)..(25): SEQ ID NO: 7147; WAN024BWF; Start 357; Stop 381
catcgcctcctatcacatattcacc

SEQ ID NO: 459851 - DNA, 25 bp, Artificial
  probe
  misc_feature (1)..(25): SEQ ID NO: 7147; WAN024BWF; Start 356; Stop 380
ccatcgcctcctatcacatattcac

SEQ ID NO: 459852 - DNA, 25 bp, Artificial
  probe
  misc_feature (1)..(25): SEQ ID NO: 7147; WAN024BWF; Start 196; Stop 220
gactttgtattcgttgctctgattc

SEQ ID NO: 459853 - DNA, 25 bp, Artificial
  probe
  misc_feature (1)..(25): SEQ ID NO: 7147; WAN024BWF; Start 545; Stop 569
agacatccgtaaagaacaagagatt

SEQ ID NO: 459854 - DNA, 25 bp, Artificial
  probe
  misc_feature (1)..(25): SEQ ID NO: 7147; WAN024BWF; Start 544; Stop 568
cagacatccgtaaagaacaagagat

SEQ ID NO: 459855 - DNA, 25 bp, Artificial
  probe
  misc_feature (1)..(25): SEQ ID NO: 7147; WAN024BWF; Start 355; Stop 379
tccatcgcctcctatcacatattca

SEQ ID NO: 459856 - DNA, 25 bp, Artificial
  probe
  misc_feature (1)..(25): SEQ ID NO: 7147; WAN024BWF; Start 259; Stop 283
gaagtttctgtttccatcgttcaaa

SEQ ID NO: 459857 - DNA, 25 bp, Artificial
  probe
  misc_feature (1)..(25): SEQ ID NO: 7147; WAN024BWF; Start 198; Stop 222
ctttgtattcgttgctctgattcac

SEQ ID NO: 459858 - DNA, 25 bp, Artificial
  probe
  misc_feature (1)..(25): SEQ ID NO: 7147; WAN024BWF; Start 551; Stop 575
ccgtaaagaacaagagattagaccg

SEQ ID NO: 459859 - DNA, 25 bp, Artificial
  probe
  misc_feature (1)..(25): SEQ ID NO: 7147; WAN024BWF; Start 199; Stop 223
tttgtattcgttgctctgattcact

SEQ ID NO: 459860 - DNA, 25 bp, Artificial
  probe
  misc_feature (1)..(25): SEQ ID NO: 7147; WAN024BWF; Start 197; Stop 221
actttgtattcgttgctctgattca

SEQ ID NO: 459861 - DNA, 25 bp, Artificial
  probe
  misc_feature (1)..(25): SEQ ID NO: 7147; WAN024BWF; Start 209; Stop 233
ttgctctgattcacttcaacgatga

SEQ ID NO: 459862 - DNA, 25 bp, Artificial
  probe
  misc_feature (1)..(25): SEQ ID NO: 7147; WAN024BWF; Start 252; Stop 276
ggtttgtgaagtttctgtttccatc

SEQ ID NO: 459863 - DNA, 25 bp, Artificial
  probe
  misc_feature (1)..(25): SEQ ID NO: 7147; WAN024BWF; Start 195; Stop 219
agactttgtattcgttgctctgatt

SEQ ID NO: 459864 - DNA, 25 bp, Artificial
  probe
  misc_feature (1)..(25): SEQ ID NO: 7148; WAN024BNJ; Start 14; Stop 38
cggtaggtattatgatggttgttct

SEQ ID NO: 459865 - DNA, 25 bp, Artificial
  probe
  misc_feature (1)..(25): SEQ ID NO: 7148; WAN024BNJ; Start 127; Stop 151
aagttagaggatgctggttatatgc

SEQ ID NO: 459866 - DNA, 25 bp, Artificial
  probe
  misc_feature (1)..(25): SEQ ID NO: 7148; WAN024BNJ; Start 9; Stop 33
tacagcggtaggtattatgatggtt

SEQ ID NO: 459867 - DNA, 25 bp, Artificial
  probe
  misc_feature (1)..(25): SEQ ID NO: 7148; WAN024BNJ; Start 8; Stop 32
ttacagcggtaggtattatgatggt

SEQ ID NO: 459868 - DNA, 25 bp, Artificial
  probe
  misc_feature (1)..(25): SEQ ID NO: 7148; WAN024BNJ; Start 13; Stop 37
gcggtaggtattatgatggttgttc

SEQ ID NO: 459869 - DNA, 25 bp, Artificial
  probe
  misc_feature (1)..(25): SEQ ID NO: 7148; WAN024BNJ; Start 12; Stop 36
agcggtaggtattatgatggttgtt

SEQ ID NO: 459870 - DNA, 25 bp, Artificial
  probe
  misc_feature (1)..(25): SEQ ID NO: 7148; WAN024BNJ; Start 128; Stop 152
agttagaggatgctggttatatgcg

SEQ ID NO: 459871 - DNA, 25 bp, Artificial
  probe
  misc_feature (1)..(25): SEQ ID NO: 7148; WAN024BNJ; Start 15; Stop 39
ggtaggtattatgatggttgttcta

SEQ ID NO: 459872 - DNA, 25 bp, Artificial
  probe
  misc_feature (1)..(25): SEQ ID NO: 7148; WAN024BNJ; Start 11; Stop 35
cagcggtaggtattatgatggttgt

SEQ ID NO: 459873 - DNA, 25 bp, Artificial
  probe
  misc_feature (1)..(25): SEQ ID NO: 7148; WAN024BNJ; Start 10; Stop 34
acagcggtaggtattatgatggttg

SEQ ID NO: 459874 - DNA, 25 bp, Artificial
  probe
  misc_feature (1)..(25): SEQ ID NO: 7148; WAN024BNJ; Start 17; Stop 41
taggtattatgatggttgttctagc

SEQ ID NO: 459875 - DNA, 25 bp, Artificial
  probe
  misc_feature (1)..(25): SEQ ID NO: 7148; WAN024BNJ; Start 18; Stop 42
aggtattatgatggttgttctagct

SEQ ID NO: 459876 - DNA, 25 bp, Artificial
  probe
  misc_feature (1)..(25): SEQ ID NO: 7148; WAN024BNJ; Start 130; Stop 154
ttagaggatgctggttatatgcgtg

SEQ ID NO: 459877 - DNA, 25 bp, Artificial
  probe
  misc_feature (1)..(25): SEQ ID NO: 7148; WAN024BNJ; Start 129; Stop 153
gttagaggatgctggttatatgcgt

SEQ ID NO: 459878 - DNA, 25 bp, Artificial
  probe
  misc_feature (1)..(25): SEQ ID NO: 7148; WAN024BNJ; Start 7; Stop 31
tttacagcggtaggtattatgatgg

SEQ ID NO: 459879 - DNA, 25 bp, Artificial
  probe
  misc_feature (1)..(25): SEQ ID NO: 7148; WAN024BNJ; Start 5; Stop 29
ggtttacagcggtaggtattatgat

SEQ ID NO: 459880 - DNA, 25 bp, Artificial
  probe
  misc_feature (1)..(25): SEQ ID NO: 7148; WAN024BNJ; Start 6; Stop 30
gtttacagcggtaggtattatgatg

SEQ ID NO: 459881 - DNA, 25 bp, Artificial
  probe
  misc_feature (1)..(25): SEQ ID NO: 7148; WAN024BNJ; Start 186; Stop 210
tgttcagactttcagattcttctca

SEQ ID NO: 459882 - DNA, 25 bp, Artificial
  probe
  misc_feature (1)..(25): SEQ ID NO: 7148; WAN024BNJ; Start 185; Stop 209
gtgttcagactttcagattcttctc

SEQ ID NO: 459883 - DNA, 25 bp, Artificial
  probe
  misc_feature (1)..(25): SEQ ID NO: 7148; WAN024BNJ; Start 188; Stop 212
ttcagactttcagattcttctcaga

SEQ ID NO: 459884 - DNA, 25 bp, Artificial
  probe
  misc_feature (1)..(25): SEQ ID NO: 7148; WAN024BNJ; Start 187; Stop 211
gttcagactttcagattcttctcag

SEQ ID NO: 459885 - DNA, 25 bp, Artificial
  probe
  misc_feature (1)..(25): SEQ ID NO: 7148; WAN024BNJ; Start 184; Stop 208
ggtgttcagactttcagattcttct

SEQ ID NO: 459886 - DNA, 25 bp, Artificial
  probe
  misc_feature (1)..(25): SEQ ID NO: 7148; WAN024BNJ; Start 183; Stop 207
aggtgttcagactttcagattcttc

SEQ ID NO: 459887 - DNA, 25 bp, Artificial
  probe
  misc_feature (1)..(25): SEQ ID NO: 7148; WAN024BNJ; Start 182; Stop 206
gaggtgttcagactttcagattctt

SEQ ID NO: 459888 - DNA, 25 bp, Artificial
  probe
  misc_feature (1)..(25): SEQ ID NO: 7148; WAN024BNJ; Start 189; Stop 213
tcagactttcagattcttctcagat

SEQ ID NO: 459889 - DNA, 25 bp, Artificial
  probe
  misc_feature (1)..(25): SEQ ID NO: 7148; WAN024BNJ; Start 126; Stop 150
aaagttagaggatgctggttatatg

SEQ ID NO: 459890 - DNA, 25 bp, Artificial
  probe
  misc_feature (1)..(25): SEQ ID NO: 7148; WAN024BNJ; Start 4; Stop 28
gggtttacagcggtaggtattatga

SEQ ID NO: 459891 - DNA, 25 bp, Artificial
  probe
  misc_feature (1)..(25): SEQ ID NO: 7148; WAN024BNJ; Start 131; Stop 155
tagaggatgctggttatatgcgtgt

SEQ ID NO: 459892 - DNA, 25 bp, Artificial
  probe
  misc_feature (1)..(25): SEQ ID NO: 7148; WAN024BNJ; Start 234; Stop 258
atttgaaatcatgttacaacggctt

SEQ ID NO: 459893 - DNA, 25 bp, Artificial
  probe
  misc_feature (1)..(25): SEQ ID NO: 7148; WAN024BNJ; Start 233; Stop 257
aatttgaaatcatgttacaacggct

SEQ ID NO: 459894 - DNA, 25 bp, Artificial
  probe
  misc_feature (1)..(25): SEQ ID NO: 7148; WAN024BNJ; Start 232; Stop 256
caatttgaaatcatgttacaacggc

SEQ ID NO: 459895 - DNA, 25 bp, Artificial
  probe
  misc_feature (1)..(25): SEQ ID NO: 7148; WAN024BNJ; Start 192; Stop 216
gactttcagattcttctcagataca

SEQ ID NO: 459896 - DNA, 25 bp, Artificial
  probe
  misc_feature (1)..(25): SEQ ID NO: 7148; WAN024BNJ; Start 16; Stop 40
gtaggtattatgatggttgttctag

SEQ ID NO: 459897 - DNA, 25 bp, Artificial
  probe
  misc_feature (1)..(25): SEQ ID NO: 7149; WAN024BS8; Start 108; Stop 132
taatttaggtcacactatcccactg

SEQ ID NO: 459898 - DNA, 25 bp, Artificial
  probe
  misc_feature (1)..(25): SEQ ID NO: 7149; WAN024BS8; Start 105; Stop 129
gcttaatttaggtcacactatccca

SEQ ID NO: 459899 - DNA, 25 bp, Artificial
  probe
  misc_feature (1)..(25): SEQ ID NO: 7149; WAN024BS8; Start 107; Stop 131
ttaatttaggtcacactatcccact

SEQ ID NO: 459900 - DNA, 25 bp, Artificial
  probe
  misc_feature (1)..(25): SEQ ID NO: 7149; WAN024BS8; Start 106; Stop 130
cttaatttaggtcacactatcccac

SEQ ID NO: 459901 - DNA, 25 bp, Artificial
  probe
  misc_feature (1)..(25): SEQ ID NO: 7149; WAN024BS8; Start 109; Stop 133
aatttaggtcacactatcccactga

SEQ ID NO: 459902 - DNA, 25 bp, Artificial
  probe
  misc_feature (1)..(25): SEQ ID NO: 7149; WAN024BS8; Start 50; Stop 74
tggtgaacggactggactctataac

SEQ ID NO: 459903 - DNA, 25 bp, Artificial
  probe
  misc_feature (1)..(25): SEQ ID NO: 7149; WAN024BS8; Start 49; Stop 73
gtggtgaacggactggactctataa

SEQ ID NO: 459904 - DNA, 25 bp, Artificial
  probe
  misc_feature (1)..(25): SEQ ID NO: 7149; WAN024BS8; Start 104; Stop 128
agcttaatttaggtcacactatccc

SEQ ID NO: 459905 - DNA, 25 bp, Artificial
  probe
  misc_feature (1)..(25): SEQ ID NO: 7149; WAN024BS8; Start 99; Stop 123
cagagagcttaatttaggtcacact

SEQ ID NO: 459906 - DNA, 25 bp, Artificial
  probe
  misc_feature (1)..(25): SEQ ID NO: 7149; WAN024BS8; Start 98; Stop 122
acagagagcttaatttaggtcacac

SEQ ID NO: 459907 - DNA, 25 bp, Artificial
  probe
  misc_feature (1)..(25): SEQ ID NO: 7149; WAN024BS8; Start 103; Stop 127
gagcttaatttaggtcacactatcc

SEQ ID NO: 459908 - DNA, 25 bp, Artificial
  probe
  misc_feature (1)..(25): SEQ ID NO: 7149; WAN024BS8; Start 100; Stop 124
agagagcttaatttaggtcacacta

SEQ ID NO: 459909 - DNA, 25 bp, Artificial
  probe
  misc_feature (1)..(25): SEQ ID NO: 7149; WAN024BS8; Start 90; Stop 114
ttccctggacagagagcttaattta

SEQ ID NO: 459910 - DNA, 25 bp, Artificial
  probe
  misc_feature (1)..(25): SEQ ID NO: 7149; WAN024BS8; Start 27; Stop 51
aagtcttaaacaagtttccaatgtg

SEQ ID NO: 459911 - DNA, 25 bp, Artificial
  probe
  misc_feature (1)..(25): SEQ ID NO: 7149; WAN024BS8; Start 31; Stop 55
cttaaacaagtttccaatgtggtga

SEQ ID NO: 459912 - DNA, 25 bp, Artificial
  probe
  misc_feature (1)..(25): SEQ ID NO: 7149; WAN024BS8; Start 30; Stop 54
tcttaaacaagtttccaatgtggtg

SEQ ID NO: 459913 - DNA, 25 bp, Artificial
  probe
  misc_feature (1)..(25): SEQ ID NO: 7149; WAN024BS8; Start 29; Stop 53
gtcttaaacaagtttccaatgtggt

SEQ ID NO: 459914 - DNA, 25 bp, Artificial
  probe
  misc_feature (1)..(25): SEQ ID NO: 7149; WAN024BS8; Start 28; Stop 52
agtcttaaacaagtttccaatgtgg

SEQ ID NO: 459915 - DNA, 25 bp, Artificial
  probe
  misc_feature (1)..(25): SEQ ID NO: 7149; WAN024BS8; Start 32; Stop 56
ttaaacaagtttccaatgtggtgaa

SEQ ID NO: 459916 - DNA, 25 bp, Artificial
  probe
  misc_feature (1)..(25): SEQ ID NO: 7149; WAN024BS8; Start 33; Stop 57
taaacaagtttccaatgtggtgaac

SEQ ID NO: 459917 - DNA, 25 bp, Artificial
  probe
  misc_feature (1)..(25): SEQ ID NO: 7149; WAN024BS8; Start 91; Stop 115
tccctggacagagagcttaatttag

SEQ ID NO: 459918 - DNA, 25 bp, Artificial
  probe
  misc_feature (1)..(25): SEQ ID NO: 7149; WAN024BS8; Start 26; Stop 50
gaagtcttaaacaagtttccaatgt

SEQ ID NO: 459919 - DNA, 25 bp, Artificial
  probe
  misc_feature (1)..(25): SEQ ID NO: 7149; WAN024BS8; Start 97; Stop 121
gacagagagcttaatttaggtcaca

SEQ ID NO: 459920 - DNA, 25 bp, Artificial
  probe
  misc_feature (1)..(25): SEQ ID NO: 7149; WAN024BS8; Start 102; Stop 126
agagcttaatttaggtcacactatc

SEQ ID NO: 459921 - DNA, 25 bp, Artificial
  probe
  misc_feature (1)..(25): SEQ ID NO: 7149; WAN024BS8; Start 101; Stop 125
gagagcttaatttaggtcacactat

SEQ ID NO: 459922 - DNA, 25 bp, Artificial
  probe
  misc_feature (1)..(25): SEQ ID NO: 7149; WAN024BS8; Start 94; Stop 118
ctggacagagagcttaatttaggtc

SEQ ID NO: 459923 - DNA, 25 bp, Artificial
  probe
  misc_feature (1)..(25): SEQ ID NO: 7149; WAN024BS8; Start 96; Stop 120
ggacagagagcttaatttaggtcac

SEQ ID NO: 459924 - DNA, 25 bp, Artificial
  probe
  misc_feature (1)..(25): SEQ ID NO: 7149; WAN024BS8; Start 95; Stop 119
tggacagagagcttaatttaggtca

SEQ ID NO: 459925 - DNA, 25 bp, Artificial
  probe
  misc_feature (1)..(25): SEQ ID NO: 7149; WAN024BS8; Start 87; Stop 111
tagttccctggacagagagcttaat

SEQ ID NO: 459926 - DNA, 25 bp, Artificial
  probe
  misc_feature (1)..(25): SEQ ID NO: 7149; WAN024BS8; Start 48; Stop 72
tgtggtgaacggactggactctata

SEQ ID NO: 459927 - DNA, 25 bp, Artificial
  probe
  misc_feature (1)..(25): SEQ ID NO: 7149; WAN024BS8; Start 89; Stop 113
gttccctggacagagagcttaattt

SEQ ID NO: 459928 - DNA, 25 bp, Artificial
  probe
  misc_feature (1)..(25): SEQ ID NO: 7149; WAN024BS8; Start 10; Stop 34
ggagaaccagttttaggaagtctta

SEQ ID NO: 459929 - DNA, 25 bp, Artificial
  probe
  misc_feature (1)..(25): SEQ ID NO: 7149; WAN024BS8; Start 86; Stop 110
ttagttccctggacagagagcttaa

SEQ ID NO: 459930 - DNA, 25 bp, Artificial
  probe
  misc_feature (1)..(25): SEQ ID NO: 7150; WAN024BPN; Start 24; Stop 48
tatagtgatttataatggcaaaccg

SEQ ID NO: 459931 - DNA, 25 bp, Artificial
  probe
  misc_feature (1)..(25): SEQ ID NO: 7150; WAN024BPN; Start 25; Stop 49
atagtgatttataatggcaaaccgg

SEQ ID NO: 459932 - DNA, 25 bp, Artificial
  probe
  misc_feature (1)..(25): SEQ ID NO: 7150; WAN024BPN; Start 10; Stop 34
attgaccctagagatatagtgattt

SEQ ID NO: 459933 - DNA, 25 bp, Artificial
  probe
  misc_feature (1)..(25): SEQ ID NO: 7150; WAN024BPN; Start 87; Stop 111
tgaaaattattcctctcacacagtt

SEQ ID NO: 459934 - DNA, 25 bp, Artificial
  probe
  misc_feature (1)..(25): SEQ ID NO: 7150; WAN024BPN; Start 11; Stop 35
ttgaccctagagatatagtgattta

SEQ ID NO: 459935 - DNA, 25 bp, Artificial
  probe
  misc_feature (1)..(25): SEQ ID NO: 7150; WAN024BPN; Start 7; Stop 31
tttattgaccctagagatatagtga

SEQ ID NO: 459936 - DNA, 25 bp, Artificial
  probe
  misc_feature (1)..(25): SEQ ID NO: 7150; WAN024BPN; Start 80; Stop 104
gaaatggtgaaaattattcctctca

SEQ ID NO: 459937 - DNA, 25 bp, Artificial
  probe
  misc_feature (1)..(25): SEQ ID NO: 7150; WAN024BPN; Start 12; Stop 36
tgaccctagagatatagtgatttat

SEQ ID NO: 459938 - DNA, 25 bp, Artificial
  probe
  misc_feature (1)..(25): SEQ ID NO: 7150; WAN024BPN; Start 9; Stop 33
tattgaccctagagatatagtgatt

SEQ ID NO: 459939 - DNA, 25 bp, Artificial
  probe
  misc_feature (1)..(25): SEQ ID NO: 7150; WAN024BPN; Start 8; Stop 32
ttattgaccctagagatatagtgat

SEQ ID NO: 459940 - DNA, 25 bp, Artificial
  probe
  misc_feature (1)..(25): SEQ ID NO: 7150; WAN024BPN; Start 79; Stop 103
agaaatggtgaaaattattcctctc

SEQ ID NO: 459941 - DNA, 25 bp, Artificial
  probe
  misc_feature (1)..(25): SEQ ID NO: 7150; WAN024BPN; Start 88; Stop 112
gaaaattattcctctcacacagtta

SEQ ID NO: 459942 - DNA, 25 bp, Artificial
  probe
  misc_feature (1)..(25): SEQ ID NO: 7150; WAN024BPN; Start 78; Stop 102
aagaaatggtgaaaattattcctct

SEQ ID NO: 459943 - DNA, 25 bp, Artificial
  probe
  misc_feature (1)..(25): SEQ ID NO: 7150; WAN024BPN; Start 89; Stop 113
aaaattattcctctcacacagttat

SEQ ID NO: 459944 - DNA, 25 bp, Artificial
  probe
  misc_feature (1)..(25): SEQ ID NO: 7150; WAN024BPN; Start 23; Stop 47
atatagtgatttataatggcaaacc

SEQ ID NO: 459945 - DNA, 25 bp, Artificial
  probe
  misc_feature (1)..(25): SEQ ID NO: 7150; WAN024BPN; Start 19; Stop 43
agagatatagtgatttataatggca

SEQ ID NO: 459946 - DNA, 25 bp, Artificial
  probe
  misc_feature (1)..(25): SEQ ID NO: 7150; WAN024BPN; Start 75; Stop 99
actaagaaatggtgaaaattattcc

SEQ ID NO: 459947 - DNA, 25 bp, Artificial
  probe
  misc_feature (1)..(25): SEQ ID NO: 7150; WAN024BPN; Start 77; Stop 101
taagaaatggtgaaaattattcctc

SEQ ID NO: 459948 - DNA, 25 bp, Artificial
  probe
  misc_feature (1)..(25): SEQ ID NO: 7150; WAN024BPN; Start 76; Stop 100
ctaagaaatggtgaaaattattcct

SEQ ID NO: 459949 - DNA, 25 bp, Artificial
  probe
  misc_feature (1)..(25): SEQ ID NO: 7150; WAN024BPN; Start 85; Stop 109
ggtgaaaattattcctctcacacag

SEQ ID NO: 459950 - DNA, 25 bp, Artificial
  probe
  misc_feature (1)..(25): SEQ ID NO: 7150; WAN024BPN; Start 84; Stop 108
tggtgaaaattattcctctcacaca

SEQ ID NO: 459951 - DNA, 25 bp, Artificial
  probe
  misc_feature (1)..(25): SEQ ID NO: 7150; WAN024BPN; Start 86; Stop 110
gtgaaaattattcctctcacacagt

SEQ ID NO: 459952 - DNA, 25 bp, Artificial
  probe
  misc_feature (1)..(25): SEQ ID NO: 7150; WAN024BPN; Start 83; Stop 107
atggtgaaaattattcctctcacac

SEQ ID NO: 459953 - DNA, 25 bp, Artificial
  probe
  misc_feature (1)..(25): SEQ ID NO: 7150; WAN024BPN; Start 6; Stop 30
ttttattgaccctagagatatagtg

SEQ ID NO: 459954 - DNA, 25 bp, Artificial
  probe
  misc_feature (1)..(25): SEQ ID NO: 7150; WAN024BPN; Start 5; Stop 29
gttttattgaccctagagatatagt

SEQ ID NO: 459955 - DNA, 25 bp, Artificial
  probe
  misc_feature (1)..(25): SEQ ID NO: 7150; WAN024BPN; Start 4; Stop 28
ggttttattgaccctagagatatag

SEQ ID NO: 459956 - DNA, 25 bp, Artificial
  probe
  misc_feature (1)..(25): SEQ ID NO: 7150; WAN024BPN; Start 82; Stop 106
aatggtgaaaattattcctctcaca

SEQ ID NO: 459957 - DNA, 25 bp, Artificial
  probe
  misc_feature (1)..(25): SEQ ID NO: 7150; WAN024BPN; Start 81; Stop 105
aaatggtgaaaattattcctctcac

SEQ ID NO: 459958 - DNA, 25 bp, Artificial
  probe
  misc_feature (1)..(25): SEQ ID NO: 7151; WAN024C39; Start 2; Stop 26
tggtaattccaaagtctcaatcttg

SEQ ID NO: 459959 - DNA, 25 bp, Artificial
  probe
  misc_feature (1)..(25): SEQ ID NO: 7151; WAN024C39; Start 1; Stop 25
ctggtaattccaaagtctcaatctt

SEQ ID NO: 459960 - DNA, 25 bp, Artificial
  probe
  misc_feature (1)..(25): SEQ ID NO: 7151; WAN024C39; Start 3; Stop 27
ggtaattccaaagtctcaatcttgg

SEQ ID NO: 459961 - DNA, 25 bp, Artificial
  probe
  misc_feature (1)..(25): SEQ ID NO: 7151; WAN024C39; Start 7; Stop 31
attccaaagtctcaatcttggtcaa

SEQ ID NO: 459962 - DNA, 25 bp, Artificial
  probe
  misc_feature (1)..(25): SEQ ID NO: 7151; WAN024C39; Start 6; Stop 30
aattccaaagtctcaatcttggtca

SEQ ID NO: 459963 - DNA, 25 bp, Artificial
  probe
  misc_feature (1)..(25): SEQ ID NO: 7151; WAN024C39; Start 8; Stop 32
ttccaaagtctcaatcttggtcaaa

SEQ ID NO: 459964 - DNA, 25 bp, Artificial
  probe
  misc_feature (1)..(25): SEQ ID NO: 7151; WAN024C39; Start 4; Stop 28
gtaattccaaagtctcaatcttggt

SEQ ID NO: 459965 - DNA, 25 bp, Artificial
  probe
  misc_feature (1)..(25): SEQ ID NO: 7151; WAN024C39; Start 5; Stop 29
taattccaaagtctcaatcttggtc

SEQ ID NO: 459966 - DNA, 25 bp, Artificial
  probe
  misc_feature (1)..(25): SEQ ID NO: 7151; WAN024C39; Start 38; Stop 62
ttttgacggaaatcagccaaccaag

SEQ ID NO: 459967 - DNA, 25 bp, Artificial
  probe
  misc_feature (1)..(25): SEQ ID NO: 7151; WAN024C39; Start 9; Stop 33
tccaaagtctcaatcttggtcaaaa

SEQ ID NO: 459968 - DNA, 25 bp, Artificial
  probe
  misc_feature (1)..(25): SEQ ID NO: 7152; WAN024BJ4; Start 120; Stop 144
gcaatcatctattccttcgtatcct

SEQ ID NO: 459969 - DNA, 25 bp, Artificial
  probe
  misc_feature (1)..(25): SEQ ID NO: 7152; WAN024BJ4; Start 119; Stop 143
agcaatcatctattccttcgtatcc

SEQ ID NO: 459970 - DNA, 25 bp, Artificial
  probe
  misc_feature (1)..(25): SEQ ID NO: 7152; WAN024BJ4; Start 131; Stop 155
ttccttcgtatcctgtatctgttac

SEQ ID NO: 459971 - DNA, 25 bp, Artificial
  probe
  misc_feature (1)..(25): SEQ ID NO: 7152; WAN024BJ4; Start 128; Stop 152
ctattccttcgtatcctgtatctgt

SEQ ID NO: 459972 - DNA, 25 bp, Artificial
  probe
  misc_feature (1)..(25): SEQ ID NO: 7152; WAN024BJ4; Start 118; Stop 142
gagcaatcatctattccttcgtatc

SEQ ID NO: 459973 - DNA, 25 bp, Artificial
  probe
  misc_feature (1)..(25): SEQ ID NO: 7152; WAN024BJ4; Start 122; Stop 146
aatcatctattccttcgtatcctgt

SEQ ID NO: 459974 - DNA, 25 bp, Artificial
  probe
  misc_feature (1)..(25): SEQ ID NO: 7152; WAN024BJ4; Start 127; Stop 151
tctattccttcgtatcctgtatctg

SEQ ID NO: 459975 - DNA, 25 bp, Artificial
  probe
  misc_feature (1)..(25): SEQ ID NO: 7152; WAN024BJ4; Start 392; Stop 416
cggtcaatacaagtatagatggcta

SEQ ID NO: 459976 - DNA, 25 bp, Artificial
  probe
  misc_feature (1)..(25): SEQ ID NO: 7152; WAN024BJ4; Start 389; Stop 413
tagcggtcaatacaagtatagatgg

SEQ ID NO: 459977 - DNA, 25 bp, Artificial
  probe
  misc_feature (1)..(25): SEQ ID NO: 7152; WAN024BJ4; Start 121; Stop 145
caatcatctattccttcgtatcctg

SEQ ID NO: 459978 - DNA, 25 bp, Artificial
  probe
  misc_feature (1)..(25): SEQ ID NO: 7152; WAN024BJ4; Start 130; Stop 154
attccttcgtatcctgtatctgtta

SEQ ID NO: 459979 - DNA, 25 bp, Artificial
  probe
  misc_feature (1)..(25): SEQ ID NO: 7152; WAN024BJ4; Start 129; Stop 153
tattccttcgtatcctgtatctgtt

SEQ ID NO: 459980 - DNA, 25 bp, Artificial
  probe
  misc_feature (1)..(25): SEQ ID NO: 7152; WAN024BJ4; Start 386; Stop 410
agttagcggtcaatacaagtataga

SEQ ID NO: 459981 - DNA, 25 bp, Artificial
  probe
  misc_feature (1)..(25): SEQ ID NO: 7152; WAN024BJ4; Start 163; Stop 187
caaggaacagatgtagcagtagaac

SEQ ID NO: 459982 - DNA, 25 bp, Artificial
  probe
  misc_feature (1)..(25): SEQ ID NO: 7152; WAN024BJ4; Start 159; Stop 183
taaccaaggaacagatgtagcagta

SEQ ID NO: 459983 - DNA, 25 bp, Artificial
  probe
  misc_feature (1)..(25): SEQ ID NO: 7152; WAN024BJ4; Start 385; Stop 409
gagttagcggtcaatacaagtatag

SEQ ID NO: 459984 - DNA, 25 bp, Artificial
  probe
  misc_feature (1)..(25): SEQ ID NO: 7152; WAN024BJ4; Start 109; Stop 133
gttgttcctgagcaatcatctattc

SEQ ID NO: 459985 - DNA, 25 bp, Artificial
  probe
  misc_feature (1)..(25): SEQ ID NO: 7152; WAN024BJ4; Start 117; Stop 141
tgagcaatcatctattccttcgtat

SEQ ID NO: 459986 - DNA, 25 bp, Artificial
  probe
  misc_feature (1)..(25): SEQ ID NO: 7152; WAN024BJ4; Start 116; Stop 140
ctgagcaatcatctattccttcgta

SEQ ID NO: 459987 - DNA, 25 bp, Artificial
  probe
  misc_feature (1)..(25): SEQ ID NO: 7152; WAN024BJ4; Start 113; Stop 137
ttcctgagcaatcatctattccttc

SEQ ID NO: 459988 - DNA, 25 bp, Artificial
  probe
  misc_feature (1)..(25): SEQ ID NO: 7152; WAN024BJ4; Start 108; Stop 132
tgttgttcctgagcaatcatctatt

SEQ ID NO: 459989 - DNA, 25 bp, Artificial
  probe
  misc_feature (1)..(25): SEQ ID NO: 7152; WAN024BJ4; Start 107; Stop 131
ttgttgttcctgagcaatcatctat

SEQ ID NO: 459990 - DNA, 25 bp, Artificial
  probe
  misc_feature (1)..(25): SEQ ID NO: 7152; WAN024BJ4; Start 124; Stop 148
tcatctattccttcgtatcctgtat

SEQ ID NO: 459991 - DNA, 25 bp, Artificial
  probe
  misc_feature (1)..(25): SEQ ID NO: 7152; WAN024BJ4; Start 123; Stop 147
atcatctattccttcgtatcctgta

SEQ ID NO: 459992 - DNA, 25 bp, Artificial
  probe
  misc_feature (1)..(25): SEQ ID NO: 7152; WAN024BJ4; Start 112; Stop 136
gttcctgagcaatcatctattcctt

SEQ ID NO: 459993 - DNA, 25 bp, Artificial
  probe
  misc_feature (1)..(25): SEQ ID NO: 7152; WAN024BJ4; Start 110; Stop 134
ttgttcctgagcaatcatctattcc

SEQ ID NO: 459994 - DNA, 25 bp, Artificial
  probe
  misc_feature (1)..(25): SEQ ID NO: 7152; WAN024BJ4; Start 384; Stop 408
tgagttagcggtcaatacaagtata

SEQ ID NO: 459995 - DNA, 25 bp, Artificial
  probe
  misc_feature (1)..(25): SEQ ID NO: 7152; WAN024BJ4; Start 383; Stop 407
gtgagttagcggtcaatacaagtat

SEQ ID NO: 459996 - DNA, 25 bp, Artificial
  probe
  misc_feature (1)..(25): SEQ ID NO: 7152; WAN024BJ4; Start 125; Stop 149
catctattccttcgtatcctgtatc

SEQ ID NO: 459997 - DNA, 25 bp, Artificial
  probe
  misc_feature (1)..(25): SEQ ID NO: 7152; WAN024BJ4; Start 126; Stop 150
atctattccttcgtatcctgtatct

SEQ ID NO: 459998 - DNA, 25 bp, Artificial
  probe
  misc_feature (1)..(25): SEQ ID NO: 7152; WAN024BJ4; Start 388; Stop 412
ttagcggtcaatacaagtatagatg

SEQ ID NO: 459999 - DNA, 25 bp, Artificial
  probe
  misc_feature (1)..(25): SEQ ID NO: 7152; WAN024BJ4; Start 387; Stop 411
gttagcggtcaatacaagtatagat

SEQ ID NO: 460000 - DNA, 25 bp, Artificial
  probe
  misc_feature (1)..(25): SEQ ID NO: 7152; WAN024BJ4; Start 106; Stop 130
gttgttgttcctgagcaatcatcta

SEQ ID NO: 460001 - DNA, 25 bp, Artificial
  probe
  misc_feature (1)..(25): SEQ ID NO: 7153; WAN024BW9; Start 39; Stop 63
agcaatgaagaggaactatacaagg

SEQ ID NO: 460002 - DNA, 25 bp, Artificial
  probe
  misc_feature (1)..(25): SEQ ID NO: 7153; WAN024BW9; Start 37; Stop 61
caagcaatgaagaggaactatacaa

SEQ ID NO: 460003 - DNA, 25 bp, Artificial
  probe
  misc_feature (1)..(25): SEQ ID NO: 7153; WAN024BW9; Start 205; Stop 229
ttatacagagaggttaagcaagaca

SEQ ID NO: 460004 - DNA, 25 bp, Artificial
  probe
  misc_feature (1)..(25): SEQ ID NO: 7153; WAN024BW9; Start 201; Stop 225
tcagttatacagagaggttaagcaa

SEQ ID NO: 460005 - DNA, 25 bp, Artificial
  probe
  misc_feature (1)..(25): SEQ ID NO: 7153; WAN024BW9; Start 36; Stop 60
gcaagcaatgaagaggaactataca

SEQ ID NO: 460006 - DNA, 25 bp, Artificial
  probe
  misc_feature (1)..(25): SEQ ID NO: 7153; WAN024BW9; Start 206; Stop 230
tatacagagaggttaagcaagacat

SEQ ID NO: 460007 - DNA, 25 bp, Artificial
  probe
  misc_feature (1)..(25): SEQ ID NO: 7153; WAN024BW9; Start 204; Stop 228
gttatacagagaggttaagcaagac

SEQ ID NO: 460008 - DNA, 25 bp, Artificial
  probe
  misc_feature (1)..(25): SEQ ID NO: 7153; WAN024BW9; Start 202; Stop 226
cagttatacagagaggttaagcaag

SEQ ID NO: 460009 - DNA, 25 bp, Artificial
  probe
  misc_feature (1)..(25): SEQ ID NO: 7153; WAN024BW9; Start 200; Stop 224
atcagttatacagagaggttaagca

SEQ ID NO: 460010 - DNA, 25 bp, Artificial
  probe
  misc_feature (1)..(25): SEQ ID NO: 7153; WAN024BW9; Start 38; Stop 62
aagcaatgaagaggaactatacaag

SEQ ID NO: 460011 - DNA, 25 bp, Artificial
  probe
  misc_feature (1)..(25): SEQ ID NO: 7153; WAN024BW9; Start 501; Stop 525
aatgaatatgttgacagagttcgga

SEQ ID NO: 460012 - DNA, 25 bp, Artificial
  probe
  misc_feature (1)..(25): SEQ ID NO: 7153; WAN024BW9; Start 203; Stop 227
agttatacagagaggttaagcaaga

SEQ ID NO: 460013 - DNA, 25 bp, Artificial
  probe
  misc_feature (1)..(25): SEQ ID NO: 7153; WAN024BW9; Start 502; Stop 526
atgaatatgttgacagagttcggag

SEQ ID NO: 460014 - DNA, 25 bp, Artificial
  probe
  misc_feature (1)..(25): SEQ ID NO: 7153; WAN024BW9; Start 35; Stop 59
ggcaagcaatgaagaggaactatac

SEQ ID NO: 460015 - DNA, 25 bp, Artificial
  probe
  misc_feature (1)..(25): SEQ ID NO: 7153; WAN024BW9; Start 34; Stop 58
aggcaagcaatgaagaggaactata

SEQ ID NO: 460016 - DNA, 25 bp, Artificial
  probe
  misc_feature (1)..(25): SEQ ID NO: 7153; WAN024BW9; Start 207; Stop 231
atacagagaggttaagcaagacatg

SEQ ID NO: 460017 - DNA, 25 bp, Artificial
  probe
  misc_feature (1)..(25): SEQ ID NO: 7153; WAN024BW9; Start 199; Stop 223
aatcagttatacagagaggttaagc

SEQ ID NO: 460018 - DNA, 25 bp, Artificial
  probe
  misc_feature (1)..(25): SEQ ID NO: 7153; WAN024BW9; Start 503; Stop 527
tgaatatgttgacagagttcggagt

SEQ ID NO: 460019 - DNA, 25 bp, Artificial
  probe
  misc_feature (1)..(25): SEQ ID NO: 7153; WAN024BW9; Start 208; Stop 232
tacagagaggttaagcaagacatga

SEQ ID NO: 460020 - DNA, 25 bp, Artificial
  probe
  misc_feature (1)..(25): SEQ ID NO: 7153; WAN024BW9; Start 507; Stop 531
tatgttgacagagttcggagtctat

SEQ ID NO: 460021 - DNA, 25 bp, Artificial
  probe
  misc_feature (1)..(25): SEQ ID NO: 7153; WAN024BW9; Start 506; Stop 530
atatgttgacagagttcggagtcta

SEQ ID NO: 460022 - DNA, 25 bp, Artificial
  probe
  misc_feature (1)..(25): SEQ ID NO: 7153; WAN024BW9; Start 390; Stop 414
ggtagaggttgctgagatgattgaa

SEQ ID NO: 460023 - DNA, 25 bp, Artificial
  probe
  misc_feature (1)..(25): SEQ ID NO: 7153; WAN024BW9; Start 504; Stop 528
gaatatgttgacagagttcggagtc

SEQ ID NO: 460024 - DNA, 25 bp, Artificial
  probe
  misc_feature (1)..(25): SEQ ID NO: 7153; WAN024BW9; Start 505; Stop 529
aatatgttgacagagttcggagtct

SEQ ID NO: 460025 - DNA, 25 bp, Artificial
  probe
  misc_feature (1)..(25): SEQ ID NO: 7153; WAN024BW9; Start 211; Stop 235
agagaggttaagcaagacatgacaa

SEQ ID NO: 460026 - DNA, 25 bp, Artificial
  probe
  misc_feature (1)..(25): SEQ ID NO: 7153; WAN024BW9; Start 513; Stop 537
gacagagttcggagtctatgaagtt

SEQ ID NO: 460027 - DNA, 25 bp, Artificial
  probe
  misc_feature (1)..(25): SEQ ID NO: 7153; WAN024BW9; Start 511; Stop 535
ttgacagagttcggagtctatgaag

SEQ ID NO: 460028 - DNA, 25 bp, Artificial
  probe
  misc_feature (1)..(25): SEQ ID NO: 7153; WAN024BW9; Start 212; Stop 236
gagaggttaagcaagacatgacaac

SEQ ID NO: 460029 - DNA, 25 bp, Artificial
  probe
  misc_feature (1)..(25): SEQ ID NO: 7153; WAN024BW9; Start 600; Stop 624
agaaatccgactaaatggctactac

SEQ ID NO: 460030 - DNA, 25 bp, Artificial
  probe
  misc_feature (1)..(25): SEQ ID NO: 7153; WAN024BW9; Start 598; Stop 622
aaagaaatccgactaaatggctact

SEQ ID NO: 460031 - DNA, 25 bp, Artificial
  probe
  misc_feature (1)..(25): SEQ ID NO: 7153; WAN024BW9; Start 597; Stop 621
gaaagaaatccgactaaatggctac

SEQ ID NO: 460032 - DNA, 25 bp, Artificial
  probe
  misc_feature (1)..(25): SEQ ID NO: 7153; WAN024BW9; Start 392; Stop 416
tagaggttgctgagatgattgaaat

SEQ ID NO: 460033 - DNA, 25 bp, Artificial
  probe
  misc_feature (1)..(25): SEQ ID NO: 7153; WAN024BW9; Start 45; Stop 69
gaagaggaactatacaagggtcatc

SEQ ID NO: 460034 - DNA, 25 bp, Artificial
  probe
  misc_feature (1)..(25): SEQ ID NO: 7154; WAN024DOY; Start 14; Stop 38
tactcctaaatctccaacttgtcaa

SEQ ID NO: 460035 - DNA, 25 bp, Artificial
  probe
  misc_feature (1)..(25): SEQ ID NO: 7154; WAN024DOY; Start 13; Stop 37
ttactcctaaatctccaacttgtca

SEQ ID NO: 460036 - DNA, 25 bp, Artificial
  probe
  misc_feature (1)..(25): SEQ ID NO: 7154; WAN024DOY; Start 11; Stop 35
gtttactcctaaatctccaacttgt

SEQ ID NO: 460037 - DNA, 25 bp, Artificial
  probe
  misc_feature (1)..(25): SEQ ID NO: 7154; WAN024DOY; Start 12; Stop 36
tttactcctaaatctccaacttgtc

SEQ ID NO: 460038 - DNA, 25 bp, Artificial
  probe
  misc_feature (1)..(25): SEQ ID NO: 7154; WAN024DOY; Start 15; Stop 39
actcctaaatctccaacttgtcaag

SEQ ID NO: 460039 - DNA, 25 bp, Artificial
  probe
  misc_feature (1)..(25): SEQ ID NO: 7154; WAN024DOY; Start 17; Stop 41
tcctaaatctccaacttgtcaagaa

SEQ ID NO: 460040 - DNA, 25 bp, Artificial
  probe
  misc_feature (1)..(25): SEQ ID NO: 7154; WAN024DOY; Start 16; Stop 40
ctcctaaatctccaacttgtcaaga

SEQ ID NO: 460041 - DNA, 25 bp, Artificial
  probe
  misc_feature (1)..(25): SEQ ID NO: 7154; WAN024DOY; Start 18; Stop 42
cctaaatctccaacttgtcaagaat

SEQ ID NO: 460042 - DNA, 25 bp, Artificial
  probe
  misc_feature (1)..(25): SEQ ID NO: 7154; WAN024DOY; Start 19; Stop 43
ctaaatctccaacttgtcaagaatt

SEQ ID NO: 460043 - DNA, 25 bp, Artificial
  probe
  misc_feature (1)..(25): SEQ ID NO: 7154; WAN024DOY; Start 20; Stop 44
taaatctccaacttgtcaagaattt

SEQ ID NO: 460044 - DNA, 25 bp, Artificial
  probe
  misc_feature (1)..(25): SEQ ID NO: 7154; WAN024DOY; Start 10; Stop 34
agtttactcctaaatctccaacttg

SEQ ID NO: 460045 - DNA, 25 bp, Artificial
  probe
  misc_feature (1)..(25): SEQ ID NO: 7154; WAN024DOY; Start 7; Stop 31
aatagtttactcctaaatctccaac

SEQ ID NO: 460046 - DNA, 25 bp, Artificial
  probe
  misc_feature (1)..(25): SEQ ID NO: 7154; WAN024DOY; Start 24; Stop 48
tctccaacttgtcaagaattttatg

SEQ ID NO: 460047 - DNA, 25 bp, Artificial
  probe
  misc_feature (1)..(25): SEQ ID NO: 7154; WAN024DOY; Start 25; Stop 49
ctccaacttgtcaagaattttatga

SEQ ID NO: 460048 - DNA, 25 bp, Artificial
  probe
  misc_feature (1)..(25): SEQ ID NO: 7154; WAN024DOY; Start 9; Stop 33
tagtttactcctaaatctccaactt

SEQ ID NO: 460049 - DNA, 25 bp, Artificial
  probe
  misc_feature (1)..(25): SEQ ID NO: 7154; WAN024DOY; Start 29; Stop 53
aacttgtcaagaattttatgaacca

SEQ ID NO: 460050 - DNA, 25 bp, Artificial
  probe
  misc_feature (1)..(25): SEQ ID NO: 7154; WAN024DOY; Start 21; Stop 45
aaatctccaacttgtcaagaatttt

SEQ ID NO: 460051 - DNA, 25 bp, Artificial
  probe
  misc_feature (1)..(25): SEQ ID NO: 7154; WAN024DOY; Start 8; Stop 32
atagtttactcctaaatctccaact

SEQ ID NO: 460052 - DNA, 25 bp, Artificial
  probe
  misc_feature (1)..(25): SEQ ID NO: 7154; WAN024DOY; Start 30; Stop 54
acttgtcaagaattttatgaaccat

SEQ ID NO: 460053 - DNA, 25 bp, Artificial
  probe
  misc_feature (1)..(25): SEQ ID NO: 7154; WAN024DOY; Start 28; Stop 52
caacttgtcaagaattttatgaacc

SEQ ID NO: 460054 - DNA, 25 bp, Artificial
  probe
  misc_feature (1)..(25): SEQ ID NO: 7154; WAN024DOY; Start 27; Stop 51
ccaacttgtcaagaattttatgaac

SEQ ID NO: 460055 - DNA, 25 bp, Artificial
  probe
  misc_feature (1)..(25): SEQ ID NO: 7154; WAN024DOY; Start 26; Stop 50
tccaacttgtcaagaattttatgaa

SEQ ID NO: 460056 - DNA, 25 bp, Artificial
  probe
  misc_feature (1)..(25): SEQ ID NO: 7154; WAN024DOY; Start 22; Stop 46
aatctccaacttgtcaagaatttta

SEQ ID NO: 460057 - DNA, 25 bp, Artificial
  probe
  misc_feature (1)..(25): SEQ ID NO: 7154; WAN024DOY; Start 23; Stop 47
atctccaacttgtcaagaattttat

SEQ ID NO: 460058 - DNA, 25 bp, Artificial
  probe
  misc_feature (1)..(25): SEQ ID NO: 7154; WAN024DOY; Start 2; Stop 26
tggttaatagtttactcctaaatct

SEQ ID NO: 460059 - DNA, 25 bp, Artificial
  probe
  misc_feature (1)..(25): SEQ ID NO: 7154; WAN024DOY; Start 1; Stop 25
ctggttaatagtttactcctaaatc

SEQ ID NO: 460060 - DNA, 25 bp, Artificial
  probe
  misc_feature (1)..(25): SEQ ID NO: 7154; WAN024DOY; Start 31; Stop 55
cttgtcaagaattttatgaaccatt

SEQ ID NO: 460061 - DNA, 25 bp, Artificial
  probe
  misc_feature (1)..(25): SEQ ID NO: 7154; WAN024DOY; Start 32; Stop 56
ttgtcaagaattttatgaaccattt

SEQ ID NO: 460062 - DNA, 25 bp, Artificial
  probe
  misc_feature (1)..(25): SEQ ID NO: 7154; WAN024DOY; Start 153; Stop 177
tgtaactgagttgcagggacttttc

SEQ ID NO: 460063 - DNA, 25 bp, Artificial
  probe
  misc_feature (1)..(25): SEQ ID NO: 7154; WAN024DOY; Start 152; Stop 176
ctgtaactgagttgcagggactttt

SEQ ID NO: 460064 - DNA, 25 bp, Artificial
  probe
  misc_feature (1)..(25): SEQ ID NO: 7154; WAN024DOY; Start 144; Stop 168
aaaagtccctgtaactgagttgcag

SEQ ID NO: 460065 - DNA, 25 bp, Artificial
  probe
  misc_feature (1)..(25): SEQ ID NO: 7154; WAN024DOY; Start 33; Stop 57
tgtcaagaattttatgaaccattta

SEQ ID NO: 460066 - DNA, 25 bp, Artificial
  probe
  misc_feature (1)..(25): SEQ ID NO: 7154; WAN024DOY; Start 154; Stop 178
gtaactgagttgcagggacttttcg

SEQ ID NO: 460067 - DNA, 25 bp, Artificial
  probe
  misc_feature (1)..(25): SEQ ID NO: 7155; WAN024BSF; Start 13; Stop 37
gacgatttagaaagaaccgaagaag

SEQ ID NO: 460068 - DNA, 25 bp, Artificial
  probe
  misc_feature (1)..(25): SEQ ID NO: 7155; WAN024BSF; Start 12; Stop 36
agacgatttagaaagaaccgaagaa

SEQ ID NO: 460069 - DNA, 25 bp, Artificial
  probe
  misc_feature (1)..(25): SEQ ID NO: 7155; WAN024BSF; Start 11; Stop 35
tagacgatttagaaagaaccgaaga

SEQ ID NO: 460070 - DNA, 25 bp, Artificial
  probe
  misc_feature (1)..(25): SEQ ID NO: 7155; WAN024BSF; Start 10; Stop 34
ttagacgatttagaaagaaccgaag

SEQ ID NO: 460071 - DNA, 25 bp, Artificial
  probe
  misc_feature (1)..(25): SEQ ID NO: 7155; WAN024BSF; Start 9; Stop 33
tttagacgatttagaaagaaccgaa

SEQ ID NO: 460072 - DNA, 25 bp, Artificial
  probe
  misc_feature (1)..(25): SEQ ID NO: 7155; WAN024BSF; Start 14; Stop 38
acgatttagaaagaaccgaagaagc

SEQ ID NO: 460073 - DNA, 25 bp, Artificial
  probe
  misc_feature (1)..(25): SEQ ID NO: 7155; WAN024BSF; Start 8; Stop 32
atttagacgatttagaaagaaccga

SEQ ID NO: 460074 - DNA, 25 bp, Artificial
  probe
  misc_feature (1)..(25): SEQ ID NO: 7155; WAN024BSF; Start 48; Stop 72
cgactacgaccaaattgtcctattt

SEQ ID NO: 460075 - DNA, 25 bp, Artificial
  probe
  misc_feature (1)..(25): SEQ ID NO: 7155; WAN024BSF; Start 20; Stop 44
tagaaagaaccgaagaagctaaact

SEQ ID NO: 460076 - DNA, 25 bp, Artificial
  probe
  misc_feature (1)..(25): SEQ ID NO: 7155; WAN024BSF; Start 7; Stop 31
aatttagacgatttagaaagaaccg

SEQ ID NO: 460077 - DNA, 25 bp, Artificial
  probe
  misc_feature (1)..(25): SEQ ID NO: 7155; WAN024BSF; Start 49; Stop 73
gactacgaccaaattgtcctattta

SEQ ID NO: 460078 - DNA, 25 bp, Artificial
  probe
  misc_feature (1)..(25): SEQ ID NO: 7155; WAN024BSF; Start 16; Stop 40
gatttagaaagaaccgaagaagcta

SEQ ID NO: 460079 - DNA, 25 bp, Artificial
  probe
  misc_feature (1)..(25): SEQ ID NO: 7155; WAN024BSF; Start 21; Stop 45
agaaagaaccgaagaagctaaactg

SEQ ID NO: 460080 - DNA, 25 bp, Artificial
  probe
  misc_feature (1)..(25): SEQ ID NO: 7155; WAN024BSF; Start 15; Stop 39
cgatttagaaagaaccgaagaagct

SEQ ID NO: 460081 - DNA, 25 bp, Artificial
  probe
  misc_feature (1)..(25): SEQ ID NO: 7155; WAN024BSF; Start 50; Stop 74
actacgaccaaattgtcctatttat

SEQ ID NO: 460082 - DNA, 25 bp, Artificial
  probe
  misc_feature (1)..(25): SEQ ID NO: 7155; WAN024BSF; Start 19; Stop 43
ttagaaagaaccgaagaagctaaac

SEQ ID NO: 460083 - DNA, 25 bp, Artificial
  probe
  misc_feature (1)..(25): SEQ ID NO: 7155; WAN024BSF; Start 52; Stop 76
tacgaccaaattgtcctatttattg

SEQ ID NO: 460084 - DNA, 25 bp, Artificial
  probe
  misc_feature (1)..(25): SEQ ID NO: 7155; WAN024BSF; Start 17; Stop 41
atttagaaagaaccgaagaagctaa

SEQ ID NO: 460085 - DNA, 25 bp, Artificial
  probe
  misc_feature (1)..(25): SEQ ID NO: 7155; WAN024BSF; Start 51; Stop 75
ctacgaccaaattgtcctatttatt

SEQ ID NO: 460086 - DNA, 25 bp, Artificial
  probe
  misc_feature (1)..(25): SEQ ID NO: 7155; WAN024BSF; Start 22; Stop 46
gaaagaaccgaagaagctaaactgc

SEQ ID NO: 460087 - DNA, 25 bp, Artificial
  probe
  misc_feature (1)..(25): SEQ ID NO: 7155; WAN024BSF; Start 47; Stop 71
tcgactacgaccaaattgtcctatt

SEQ ID NO: 460088 - DNA, 25 bp, Artificial
  probe
  misc_feature (1)..(25): SEQ ID NO: 7155; WAN024BSF; Start 65; Stop 89
tcctatttattggactcaacagtcg

SEQ ID NO: 460089 - DNA, 25 bp, Artificial
  probe
  misc_feature (1)..(25): SEQ ID NO: 7155; WAN024BSF; Start 66; Stop 90
cctatttattggactcaacagtcgt

SEQ ID NO: 460090 - DNA, 25 bp, Artificial
  probe
  misc_feature (1)..(25): SEQ ID NO: 7155; WAN024BSF; Start 46; Stop 70
ctcgactacgaccaaattgtcctat

SEQ ID NO: 460091 - DNA, 25 bp, Artificial
  probe
  misc_feature (1)..(25): SEQ ID NO: 7155; WAN024BSF; Start 69; Stop 93
atttattggactcaacagtcgtaaa

SEQ ID NO: 460092 - DNA, 25 bp, Artificial
  probe
  misc_feature (1)..(25): SEQ ID NO: 7155; WAN024BSF; Start 39; Stop 63
taaactgctcgactacgaccaaatt

SEQ ID NO: 460093 - DNA, 25 bp, Artificial
  probe
  misc_feature (1)..(25): SEQ ID NO: 7155; WAN024BSF; Start 67; Stop 91
ctatttattggactcaacagtcgta

SEQ ID NO: 460094 - DNA, 25 bp, Artificial
  probe
  misc_feature (1)..(25): SEQ ID NO: 7155; WAN024BSF; Start 18; Stop 42
tttagaaagaaccgaagaagctaaa

SEQ ID NO: 460095 - DNA, 25 bp, Artificial
  probe
  misc_feature (1)..(25): SEQ ID NO: 7155; WAN024BSF; Start 53; Stop 77
acgaccaaattgtcctatttattgg

SEQ ID NO: 460096 - DNA, 25 bp, Artificial
  probe
  misc_feature (1)..(25): SEQ ID NO: 7155; WAN024BSF; Start 2; Stop 26
tggttaatttagacgatttagaaag

SEQ ID NO: 460097 - DNA, 25 bp, Artificial
  probe
  misc_feature (1)..(25): SEQ ID NO: 7155; WAN024BSF; Start 1; Stop 25
ctggttaatttagacgatttagaaa

SEQ ID NO: 460098 - DNA, 25 bp, Artificial
  probe
  misc_feature (1)..(25): SEQ ID NO: 7155; WAN024BSF; Start 54; Stop 78
cgaccaaattgtcctatttattgga

SEQ ID NO: 460099 - DNA, 25 bp, Artificial
  probe
  misc_feature (1)..(25): SEQ ID NO: 7155; WAN024BSF; Start 23; Stop 47
aaagaaccgaagaagctaaactgct

SEQ ID NO: 460100 - DNA, 25 bp, Artificial
  probe
  misc_feature (1)..(25): SEQ ID NO: 7156; WAN024F6O; Start 85; Stop 109
cttcatctacaacctcaaagcagtg

SEQ ID NO: 460101 - DNA, 25 bp, Artificial
  probe
  misc_feature (1)..(25): SEQ ID NO: 7156; WAN024F6O; Start 80; Stop 104
gtcagcttcatctacaacctcaaag

SEQ ID NO: 460102 - DNA, 25 bp, Artificial
  probe
  misc_feature (1)..(25): SEQ ID NO: 7156; WAN024F6O; Start 1; Stop 25
ctggttgatgagactgtgaaaagag

SEQ ID NO: 460103 - DNA, 25 bp, Artificial
  probe
  misc_feature (1)..(25): SEQ ID NO: 7156; WAN024F6O; Start 86; Stop 110
ttcatctacaacctcaaagcagtgc

SEQ ID NO: 460104 - DNA, 25 bp, Artificial
  probe
  misc_feature (1)..(25): SEQ ID NO: 7156; WAN024F6O; Start 79; Stop 103
cgtcagcttcatctacaacctcaaa

SEQ ID NO: 460105 - DNA, 25 bp, Artificial
  probe
  misc_feature (1)..(25): SEQ ID NO: 7156; WAN024F6O; Start 78; Stop 102
acgtcagcttcatctacaacctcaa

SEQ ID NO: 460106 - DNA, 25 bp, Artificial
  probe
  misc_feature (1)..(25): SEQ ID NO: 7156; WAN024F6O; Start 69; Stop 93
cttcaaaccacgtcagcttcatcta

SEQ ID NO: 460107 - DNA, 25 bp, Artificial
  probe
  misc_feature (1)..(25): SEQ ID NO: 7156; WAN024F6O; Start 70; Stop 94
ttcaaaccacgtcagcttcatctac

SEQ ID NO: 460108 - DNA, 25 bp, Artificial
  probe
  misc_feature (1)..(25): SEQ ID NO: 7156; WAN024F6O; Start 73; Stop 97
aaaccacgtcagcttcatctacaac

SEQ ID NO: 460109 - DNA, 25 bp, Artificial
  probe
  misc_feature (1)..(25): SEQ ID NO: 7156; WAN024F6O; Start 72; Stop 96
caaaccacgtcagcttcatctacaa

SEQ ID NO: 460110 - DNA, 25 bp, Artificial
  probe
  misc_feature (1)..(25): SEQ ID NO: 7156; WAN024F6O; Start 77; Stop 101
cacgtcagcttcatctacaacctca

SEQ ID NO: 460111 - DNA, 25 bp, Artificial
  probe
  misc_feature (1)..(25): SEQ ID NO: 7156; WAN024F6O; Start 4; Stop 28
gttgatgagactgtgaaaagagcac

SEQ ID NO: 460112 - DNA, 25 bp, Artificial
  probe
  misc_feature (1)..(25): SEQ ID NO: 7156; WAN024F6O; Start 3; Stop 27
ggttgatgagactgtgaaaagagca

SEQ ID NO: 460113 - DNA, 25 bp, Artificial
  probe
  misc_feature (1)..(25): SEQ ID NO: 7156; WAN024F6O; Start 2; Stop 26
tggttgatgagactgtgaaaagagc

SEQ ID NO: 460114 - DNA, 25 bp, Artificial
  probe
  misc_feature (1)..(25): SEQ ID NO: 7156; WAN024F6O; Start 74; Stop 98
aaccacgtcagcttcatctacaacc

SEQ ID NO: 460115 - DNA, 25 bp, Artificial
  probe
  misc_feature (1)..(25): SEQ ID NO: 7156; WAN024F6O; Start 71; Stop 95
tcaaaccacgtcagcttcatctaca

SEQ ID NO: 460116 - DNA, 25 bp, Artificial
  probe
  misc_feature (1)..(25): SEQ ID NO: 7156; WAN024F6O; Start 68; Stop 92
tcttcaaaccacgtcagcttcatct

SEQ ID NO: 460117 - DNA, 25 bp, Artificial
  probe
  misc_feature (1)..(25): SEQ ID NO: 7156; WAN024F6O; Start 46; Stop 70
ctggtcatactcttcgaaaatctct

SEQ ID NO: 460118 - DNA, 25 bp, Artificial
  probe
  misc_feature (1)..(25): SEQ ID NO: 7156; WAN024F6O; Start 47; Stop 71
tggtcatactcttcgaaaatctctt

SEQ ID NO: 460119 - DNA, 25 bp, Artificial
  probe
  misc_feature (1)..(25): SEQ ID NO: 7156; WAN024F6O; Start 48; Stop 72
ggtcatactcttcgaaaatctcttc

SEQ ID NO: 460120 - DNA, 25 bp, Artificial
  probe
  misc_feature (1)..(25): SEQ ID NO: 7156; WAN024F6O; Start 87; Stop 111
tcatctacaacctcaaagcagtgct

SEQ ID NO: 460121 - DNA, 25 bp, Artificial
  probe
  misc_feature (1)..(25): SEQ ID NO: 7156; WAN024F6O; Start 43; Stop 67
aagctggtcatactcttcgaaaatc

SEQ ID NO: 460122 - DNA, 25 bp, Artificial
  probe
  misc_feature (1)..(25): SEQ ID NO: 7156; WAN024F6O; Start 45; Stop 69
gctggtcatactcttcgaaaatctc

SEQ ID NO: 460123 - DNA, 25 bp, Artificial
  probe
  misc_feature (1)..(25): SEQ ID NO: 7156; WAN024F6O; Start 42; Stop 66
caagctggtcatactcttcgaaaat

SEQ ID NO: 460124 - DNA, 25 bp, Artificial
  probe
  misc_feature (1)..(25): SEQ ID NO: 7156; WAN024F6O; Start 44; Stop 68
agctggtcatactcttcgaaaatct

SEQ ID NO: 460125 - DNA, 25 bp, Artificial
  probe
  misc_feature (1)..(25): SEQ ID NO: 7156; WAN024F6O; Start 39; Stop 63
ttgcaagctggtcatactcttcgaa

SEQ ID NO: 460126 - DNA, 25 bp, Artificial
  probe
  misc_feature (1)..(25): SEQ ID NO: 7156; WAN024F6O; Start 83; Stop 107
agcttcatctacaacctcaaagcag

SEQ ID NO: 460127 - DNA, 25 bp, Artificial
  probe
  misc_feature (1)..(25): SEQ ID NO: 7156; WAN024F6O; Start 81; Stop 105
tcagcttcatctacaacctcaaagc

SEQ ID NO: 460128 - DNA, 25 bp, Artificial
  probe
  misc_feature (1)..(25): SEQ ID NO: 7156; WAN024F6O; Start 84; Stop 108
gcttcatctacaacctcaaagcagt

SEQ ID NO: 460129 - DNA, 25 bp, Artificial
  probe
  misc_feature (1)..(25): SEQ ID NO: 7156; WAN024F6O; Start 82; Stop 106
cagcttcatctacaacctcaaagca

SEQ ID NO: 460130 - DNA, 25 bp, Artificial
  probe
  misc_feature (1)..(25): SEQ ID NO: 7156; WAN024F6O; Start 40; Stop 64
tgcaagctggtcatactcttcgaaa

SEQ ID NO: 460131 - DNA, 25 bp, Artificial
  probe
  misc_feature (1)..(25): SEQ ID NO: 7156; WAN024F6O; Start 8; Stop 32
atgagactgtgaaaagagcacaaag

SEQ ID NO: 460132 - DNA, 25 bp, Artificial
  probe
  misc_feature (1)..(25): SEQ ID NO: 7156; WAN024F6O; Start 7; Stop 31
gatgagactgtgaaaagagcacaaa

SEQ ID NO: 460133 - DNA, 25 bp, Artificial
  probe
  misc_feature (1)..(25): SEQ ID NO: 7158; WAN024BQ7; Start 129; Stop 153
caatgatgctaagagattctgttct

SEQ ID NO: 460134 - DNA, 25 bp, Artificial
  probe
  misc_feature (1)..(25): SEQ ID NO: 7158; WAN024BQ7; Start 128; Stop 152
tcaatgatgctaagagattctgttc

SEQ ID NO: 460135 - DNA, 25 bp, Artificial
  probe
  misc_feature (1)..(25): SEQ ID NO: 7158; WAN024BQ7; Start 127; Stop 151
ttcaatgatgctaagagattctgtt

SEQ ID NO: 460136 - DNA, 25 bp, Artificial
  probe
  misc_feature (1)..(25): SEQ ID NO: 7158; WAN024BQ7; Start 126; Stop 150
attcaatgatgctaagagattctgt

SEQ ID NO: 460137 - DNA, 25 bp, Artificial
  probe
  misc_feature (1)..(25): SEQ ID NO: 7158; WAN024BQ7; Start 120; Stop 144
tgttctattcaatgatgctaagaga

SEQ ID NO: 460138 - DNA, 25 bp, Artificial
  probe
  misc_feature (1)..(25): SEQ ID NO: 7158; WAN024BQ7; Start 149; Stop 173
gttctttgtgtattctggtagttgc

SEQ ID NO: 460139 - DNA, 25 bp, Artificial
  probe
  misc_feature (1)..(25): SEQ ID NO: 7158; WAN024BQ7; Start 146; Stop 170
tctgttctttgtgtattctggtagt

SEQ ID NO: 460140 - DNA, 25 bp, Artificial
  probe
  misc_feature (1)..(25): SEQ ID NO: 7158; WAN024BQ7; Start 143; Stop 167
gattctgttctttgtgtattctggt

SEQ ID NO: 460141 - DNA, 25 bp, Artificial
  probe
  misc_feature (1)..(25): SEQ ID NO: 7158; WAN024BQ7; Start 148; Stop 172
tgttctttgtgtattctggtagttg

SEQ ID NO: 460142 - DNA, 25 bp, Artificial
  probe
  misc_feature (1)..(25): SEQ ID NO: 7158; WAN024BQ7; Start 147; Stop 171
ctgttctttgtgtattctggtagtt

SEQ ID NO: 460143 - DNA, 25 bp, Artificial
  probe
  misc_feature (1)..(25): SEQ ID NO: 7158; WAN024BQ7; Start 145; Stop 169
ttctgttctttgtgtattctggtag

SEQ ID NO: 460144 - DNA, 25 bp, Artificial
  probe
  misc_feature (1)..(25): SEQ ID NO: 7158; WAN024BQ7; Start 119; Stop 143
ttgttctattcaatgatgctaagag

SEQ ID NO: 460145 - DNA, 25 bp, Artificial
  probe
  misc_feature (1)..(25): SEQ ID NO: 7158; WAN024BQ7; Start 142; Stop 166
agattctgttctttgtgtattctgg

SEQ ID NO: 460146 - DNA, 25 bp, Artificial
  probe
  misc_feature (1)..(25): SEQ ID NO: 7158; WAN024BQ7; Start 144; Stop 168
attctgttctttgtgtattctggta

SEQ ID NO: 460147 - DNA, 25 bp, Artificial
  probe
  misc_feature (1)..(25): SEQ ID NO: 7158; WAN024BQ7; Start 125; Stop 149
tattcaatgatgctaagagattctg

SEQ ID NO: 460148 - DNA, 25 bp, Artificial
  probe
  misc_feature (1)..(25): SEQ ID NO: 7158; WAN024BQ7; Start 121; Stop 145
gttctattcaatgatgctaagagat

SEQ ID NO: 460149 - DNA, 25 bp, Artificial
  probe
  misc_feature (1)..(25): SEQ ID NO: 7158; WAN024BQ7; Start 130; Stop 154
aatgatgctaagagattctgttctt

SEQ ID NO: 460150 - DNA, 25 bp, Artificial
  probe
  misc_feature (1)..(25): SEQ ID NO: 7158; WAN024BQ7; Start 141; Stop 165
gagattctgttctttgtgtattctg

SEQ ID NO: 460151 - DNA, 25 bp, Artificial
  probe
  misc_feature (1)..(25): SEQ ID NO: 7158; WAN024BQ7; Start 140; Stop 164
agagattctgttctttgtgtattct

SEQ ID NO: 460152 - DNA, 25 bp, Artificial
  probe
  misc_feature (1)..(25): SEQ ID NO: 7158; WAN024BQ7; Start 124; Stop 148
ctattcaatgatgctaagagattct

SEQ ID NO: 460153 - DNA, 25 bp, Artificial
  probe
  misc_feature (1)..(25): SEQ ID NO: 7158; WAN024BQ7; Start 123; Stop 147
tctattcaatgatgctaagagattc

SEQ ID NO: 460154 - DNA, 25 bp, Artificial
  probe
  misc_feature (1)..(25): SEQ ID NO: 7158; WAN024BQ7; Start 81; Stop 105
ttctgcaccactagttatatctgaa

SEQ ID NO: 460155 - DNA, 25 bp, Artificial
  probe
  misc_feature (1)..(25): SEQ ID NO: 7158; WAN024BQ7; Start 150; Stop 174
ttctttgtgtattctggtagttgca

SEQ ID NO: 460156 - DNA, 25 bp, Artificial
  probe
  misc_feature (1)..(25): SEQ ID NO: 7158; WAN024BQ7; Start 122; Stop 146
ttctattcaatgatgctaagagatt

SEQ ID NO: 460157 - DNA, 25 bp, Artificial
  probe
  misc_feature (1)..(25): SEQ ID NO: 7158; WAN024BQ7; Start 135; Stop 159
tgctaagagattctgttctttgtgt

SEQ ID NO: 460158 - DNA, 25 bp, Artificial
  probe
  misc_feature (1)..(25): SEQ ID NO: 7158; WAN024BQ7; Start 134; Stop 158
atgctaagagattctgttctttgtg

SEQ ID NO: 460159 - DNA, 25 bp, Artificial
  probe
  misc_feature (1)..(25): SEQ ID NO: 7158; WAN024BQ7; Start 133; Stop 157
gatgctaagagattctgttctttgt

SEQ ID NO: 460160 - DNA, 25 bp, Artificial
  probe
  misc_feature (1)..(25): SEQ ID NO: 7158; WAN024BQ7; Start 132; Stop 156
tgatgctaagagattctgttctttg

SEQ ID NO: 460161 - DNA, 25 bp, Artificial
  probe
  misc_feature (1)..(25): SEQ ID NO: 7158; WAN024BQ7; Start 136; Stop 160
gctaagagattctgttctttgtgta

SEQ ID NO: 460162 - DNA, 25 bp, Artificial
  probe
  misc_feature (1)..(25): SEQ ID NO: 7158; WAN024BQ7; Start 118; Stop 142
attgttctattcaatgatgctaaga

SEQ ID NO: 460163 - DNA, 25 bp, Artificial
  probe
  misc_feature (1)..(25): SEQ ID NO: 7158; WAN024BQ7; Start 131; Stop 155
atgatgctaagagattctgttcttt

SEQ ID NO: 460164 - DNA, 25 bp, Artificial
  probe
  misc_feature (1)..(25): SEQ ID NO: 7158; WAN024BQ7; Start 113; Stop 137
cagatattgttctattcaatgatgc

SEQ ID NO: 460165 - DNA, 25 bp, Artificial
  probe
  misc_feature (1)..(25): SEQ ID NO: 7158; WAN024BQ7; Start 112; Stop 136
gcagatattgttctattcaatgatg

SEQ ID NO: 460166 - DNA, 25 bp, Artificial
  probe
  misc_feature (1)..(25): SEQ ID NO: 7159; WAN024BK7; Start 23; Stop 47
attctaacacgaatcttgagtacaa

SEQ ID NO: 460167 - DNA, 25 bp, Artificial
  probe
  misc_feature (1)..(25): SEQ ID NO: 7159; WAN024BK7; Start 22; Stop 46
tattctaacacgaatcttgagtaca

SEQ ID NO: 460168 - DNA, 25 bp, Artificial
  probe
  misc_feature (1)..(25): SEQ ID NO: 7159; WAN024BK7; Start 27; Stop 51
taacacgaatcttgagtacaagcaa

SEQ ID NO: 460169 - DNA, 25 bp, Artificial
  probe
  misc_feature (1)..(25): SEQ ID NO: 7159; WAN024BK7; Start 25; Stop 49
tctaacacgaatcttgagtacaagc

SEQ ID NO: 460170 - DNA, 25 bp, Artificial
  probe
  misc_feature (1)..(25): SEQ ID NO: 7159; WAN024BK7; Start 26; Stop 50
ctaacacgaatcttgagtacaagca

SEQ ID NO: 460171 - DNA, 25 bp, Artificial
  probe
  misc_feature (1)..(25): SEQ ID NO: 7159; WAN024BK7; Start 24; Stop 48
ttctaacacgaatcttgagtacaag

SEQ ID NO: 460172 - DNA, 25 bp, Artificial
  probe
  misc_feature (1)..(25): SEQ ID NO: 7159; WAN024BK7; Start 21; Stop 45
ttattctaacacgaatcttgagtac

SEQ ID NO: 460173 - DNA, 25 bp, Artificial
  probe
  misc_feature (1)..(25): SEQ ID NO: 7159; WAN024BK7; Start 19; Stop 43
aattattctaacacgaatcttgagt

SEQ ID NO: 460174 - DNA, 25 bp, Artificial
  probe
  misc_feature (1)..(25): SEQ ID NO: 7159; WAN024BK7; Start 33; Stop 57
gaatcttgagtacaagcaaccgatt

SEQ ID NO: 460175 - DNA, 25 bp, Artificial
  probe
  misc_feature (1)..(25): SEQ ID NO: 7159; WAN024BK7; Start 28; Stop 52
aacacgaatcttgagtacaagcaac

SEQ ID NO: 460176 - DNA, 25 bp, Artificial
  probe
  misc_feature (1)..(25): SEQ ID NO: 7159; WAN024BK7; Start 20; Stop 44
attattctaacacgaatcttgagta

SEQ ID NO: 460177 - DNA, 25 bp, Artificial
  probe
  misc_feature (1)..(25): SEQ ID NO: 7159; WAN024BK7; Start 34; Stop 58
aatcttgagtacaagcaaccgattt

SEQ ID NO: 460178 - DNA, 25 bp, Artificial
  probe
  misc_feature (1)..(25): SEQ ID NO: 7159; WAN024BK7; Start 35; Stop 59
atcttgagtacaagcaaccgatttg

SEQ ID NO: 460179 - DNA, 25 bp, Artificial
  probe
  misc_feature (1)..(25): SEQ ID NO: 7159; WAN024BK7; Start 32; Stop 56
cgaatcttgagtacaagcaaccgat

SEQ ID NO: 460180 - DNA, 25 bp, Artificial
  probe
  misc_feature (1)..(25): SEQ ID NO: 7159; WAN024BK7; Start 29; Stop 53
acacgaatcttgagtacaagcaacc

SEQ ID NO: 460181 - DNA, 25 bp, Artificial
  probe
  misc_feature (1)..(25): SEQ ID NO: 7159; WAN024BK7; Start 18; Stop 42
aaattattctaacacgaatcttgag

SEQ ID NO: 460182 - DNA, 25 bp, Artificial
  probe
  misc_feature (1)..(25): SEQ ID NO: 7159; WAN024BK7; Start 30; Stop 54
cacgaatcttgagtacaagcaaccg

SEQ ID NO: 460183 - DNA, 25 bp, Artificial
  probe
  misc_feature (1)..(25): SEQ ID NO: 7159; WAN024BK7; Start 31; Stop 55
acgaatcttgagtacaagcaaccga

SEQ ID NO: 460184 - DNA, 25 bp, Artificial
  probe
  misc_feature (1)..(25): SEQ ID NO: 7159; WAN024BK7; Start 17; Stop 41
aaaattattctaacacgaatcttga

SEQ ID NO: 460185 - DNA, 25 bp, Artificial
  probe
  misc_feature (1)..(25): SEQ ID NO: 7159; WAN024BK7; Start 36; Stop 60
tcttgagtacaagcaaccgatttgc

SEQ ID NO: 460186 - DNA, 25 bp, Artificial
  probe
  misc_feature (1)..(25): SEQ ID NO: 7160; WAN024BJY; Start 4; Stop 28
tatagagcaaaatctccaccttcag

SEQ ID NO: 460187 - DNA, 25 bp, Artificial
  probe
  misc_feature (1)..(25): SEQ ID NO: 7160; WAN024BJY; Start 3; Stop 27
gtatagagcaaaatctccaccttca

SEQ ID NO: 460188 - DNA, 25 bp, Artificial
  probe
  misc_feature (1)..(25): SEQ ID NO: 7160; WAN024BJY; Start 2; Stop 26
tgtatagagcaaaatctccaccttc

SEQ ID NO: 460189 - DNA, 25 bp, Artificial
  probe
  misc_feature (1)..(25): SEQ ID NO: 7160; WAN024BJY; Start 1; Stop 25
ctgtatagagcaaaatctccacctt

SEQ ID NO: 460190 - DNA, 25 bp, Artificial
  probe
  misc_feature (1)..(25): SEQ ID NO: 7160; WAN024BJY; Start 26; Stop 50
caggtttggaaagcggagattgttt

SEQ ID NO: 460191 - DNA, 25 bp, Artificial
  probe
  misc_feature (1)..(25): SEQ ID NO: 7160; WAN024BJY; Start 23; Stop 47
cttcaggtttggaaagcggagattg

SEQ ID NO: 460192 - DNA, 25 bp, Artificial
  probe
  misc_feature (1)..(25): SEQ ID NO: 7160; WAN024BJY; Start 5; Stop 29
atagagcaaaatctccaccttcagg

SEQ ID NO: 460193 - DNA, 25 bp, Artificial
  probe
  misc_feature (1)..(25): SEQ ID NO: 7160; WAN024BJY; Start 25; Stop 49
tcaggtttggaaagcggagattgtt

SEQ ID NO: 460194 - DNA, 25 bp, Artificial
  probe
  misc_feature (1)..(25): SEQ ID NO: 7160; WAN024BJY; Start 24; Stop 48
ttcaggtttggaaagcggagattgt

SEQ ID NO: 460195 - DNA, 25 bp, Artificial
  probe
  misc_feature (1)..(25): SEQ ID NO: 7160; WAN024BJY; Start 66; Stop 90
gtttgtagtcgtgggactaactaat

SEQ ID NO: 460196 - DNA, 25 bp, Artificial
  probe
  misc_feature (1)..(25): SEQ ID NO: 7160; WAN024BJY; Start 13; Stop 37
aaatctccaccttcaggtttggaaa

SEQ ID NO: 460197 - DNA, 25 bp, Artificial
  probe
  misc_feature (1)..(25): SEQ ID NO: 7160; WAN024BJY; Start 8; Stop 32
gagcaaaatctccaccttcaggttt

SEQ ID NO: 460198 - DNA, 25 bp, Artificial
  probe
  misc_feature (1)..(25): SEQ ID NO: 7160; WAN024BJY; Start 6; Stop 30
tagagcaaaatctccaccttcaggt

SEQ ID NO: 460199 - DNA, 25 bp, Artificial
  probe
  misc_feature (1)..(25): SEQ ID NO: 7160; WAN024BJY; Start 14; Stop 38
aatctccaccttcaggtttggaaag

SEQ ID NO: 460200 - DNA, 25 bp, Artificial
  probe
  misc_feature (1)..(25): SEQ ID NO: 7160; WAN024BJY; Start 65; Stop 89
ggtttgtagtcgtgggactaactaa

SEQ ID NO: 460201 - DNA, 25 bp, Artificial
  probe
  misc_feature (1)..(25): SEQ ID NO: 7160; WAN024BJY; Start 9; Stop 33
agcaaaatctccaccttcaggtttg

SEQ ID NO: 460202 - DNA, 25 bp, Artificial
  probe
  misc_feature (1)..(25): SEQ ID NO: 7160; WAN024BJY; Start 7; Stop 31
agagcaaaatctccaccttcaggtt

SEQ ID NO: 460203 - DNA, 25 bp, Artificial
  probe
  misc_feature (1)..(25): SEQ ID NO: 7160; WAN024BJY; Start 12; Stop 36
aaaatctccaccttcaggtttggaa

SEQ ID NO: 460204 - DNA, 25 bp, Artificial
  probe
  misc_feature (1)..(25): SEQ ID NO: 7160; WAN024BJY; Start 64; Stop 88
gggtttgtagtcgtgggactaacta

SEQ ID NO: 460205 - DNA, 25 bp, Artificial
  probe
  misc_feature (1)..(25): SEQ ID NO: 7160; WAN024BJY; Start 10; Stop 34
gcaaaatctccaccttcaggtttgg

SEQ ID NO: 460206 - DNA, 25 bp, Artificial
  probe
  misc_feature (1)..(25): SEQ ID NO: 7160; WAN024BJY; Start 11; Stop 35
caaaatctccaccttcaggtttgga

SEQ ID NO: 460207 - DNA, 25 bp, Artificial
  probe
  misc_feature (1)..(25): SEQ ID NO: 7160; WAN024BJY; Start 15; Stop 39
atctccaccttcaggtttggaaagc

SEQ ID NO: 460208 - DNA, 25 bp, Artificial
  probe
  misc_feature (1)..(25): SEQ ID NO: 7160; WAN024BJY; Start 62; Stop 86
cagggtttgtagtcgtgggactaac

SEQ ID NO: 460209 - DNA, 25 bp, Artificial
  probe
  misc_feature (1)..(25): SEQ ID NO: 7160; WAN024BJY; Start 63; Stop 87
agggtttgtagtcgtgggactaact

SEQ ID NO: 460210 - DNA, 25 bp, Artificial
  probe
  misc_feature (1)..(25): SEQ ID NO: 7161; WAN024DIH; Start 43; Stop 67
tttgcagttgcctatcagtttcatc

SEQ ID NO: 460211 - DNA, 25 bp, Artificial
  probe
  misc_feature (1)..(25): SEQ ID NO: 7161; WAN024DIH; Start 10; Stop 34
ctcccaattgtaaatccaactgaaa

SEQ ID NO: 460212 - DNA, 25 bp, Artificial
  probe
  misc_feature (1)..(25): SEQ ID NO: 7161; WAN024DIH; Start 9; Stop 33
tctcccaattgtaaatccaactgaa

SEQ ID NO: 460213 - DNA, 25 bp, Artificial
  probe
  misc_feature (1)..(25): SEQ ID NO: 7161; WAN024DIH; Start 8; Stop 32
ttctcccaattgtaaatccaactga

SEQ ID NO: 460214 - DNA, 25 bp, Artificial
  probe
  misc_feature (1)..(25): SEQ ID NO: 7161; WAN024DIH; Start 7; Stop 31
attctcccaattgtaaatccaactg

SEQ ID NO: 460215 - DNA, 25 bp, Artificial
  probe
  misc_feature (1)..(25): SEQ ID NO: 7161; WAN024DIH; Start 6; Stop 30
aattctcccaattgtaaatccaact

SEQ ID NO: 460216 - DNA, 25 bp, Artificial
  probe
  misc_feature (1)..(25): SEQ ID NO: 7161; WAN024DIH; Start 42; Stop 66
ttttgcagttgcctatcagtttcat

SEQ ID NO: 460217 - DNA, 25 bp, Artificial
  probe
  misc_feature (1)..(25): SEQ ID NO: 7161; WAN024DIH; Start 11; Stop 35
tcccaattgtaaatccaactgaaaa

SEQ ID NO: 460218 - DNA, 25 bp, Artificial
  probe
  misc_feature (1)..(25): SEQ ID NO: 7161; WAN024DIH; Start 3; Stop 27
gtcaattctcccaattgtaaatcca

SEQ ID NO: 460219 - DNA, 25 bp, Artificial
  probe
  misc_feature (1)..(25): SEQ ID NO: 7161; WAN024DIH; Start 2; Stop 26
tgtcaattctcccaattgtaaatcc

SEQ ID NO: 460220 - DNA, 25 bp, Artificial
  probe
  misc_feature (1)..(25): SEQ ID NO: 7161; WAN024DIH; Start 5; Stop 29
caattctcccaattgtaaatccaac

SEQ ID NO: 460221 - DNA, 25 bp, Artificial
  probe
  misc_feature (1)..(25): SEQ ID NO: 7161; WAN024DIH; Start 4; Stop 28
tcaattctcccaattgtaaatccaa

SEQ ID NO: 460222 - DNA, 25 bp, Artificial
  probe
  misc_feature (1)..(25): SEQ ID NO: 7161; WAN024DIH; Start 1; Stop 25
ctgtcaattctcccaattgtaaatc

SEQ ID NO: 460223 - DNA, 25 bp, Artificial
  probe
  misc_feature (1)..(25): SEQ ID NO: 7162; WAN024BY5; Start 114; Stop 138
atcaaactcaattcacaccataatg

SEQ ID NO: 460224 - DNA, 25 bp, Artificial
  probe
  misc_feature (1)..(25): SEQ ID NO: 7162; WAN024BY5; Start 47; Stop 71
acaagcaagatacactatacaataa

SEQ ID NO: 460225 - DNA, 25 bp, Artificial
  probe
  misc_feature (1)..(25): SEQ ID NO: 7162; WAN024BY5; Start 46; Stop 70
aacaagcaagatacactatacaata

SEQ ID NO: 460226 - DNA, 25 bp, Artificial
  probe
  misc_feature (1)..(25): SEQ ID NO: 7162; WAN024BY5; Start 45; Stop 69
aaacaagcaagatacactatacaat

SEQ ID NO: 460227 - DNA, 25 bp, Artificial
  probe
  misc_feature (1)..(25): SEQ ID NO: 7162; WAN024BY5; Start 110; Stop 134
agatatcaaactcaattcacaccat

SEQ ID NO: 460228 - DNA, 25 bp, Artificial
  probe
  misc_feature (1)..(25): SEQ ID NO: 7162; WAN024BY5; Start 113; Stop 137
tatcaaactcaattcacaccataat

SEQ ID NO: 460229 - DNA, 25 bp, Artificial
  probe
  misc_feature (1)..(25): SEQ ID NO: 7162; WAN024BY5; Start 112; Stop 136
atatcaaactcaattcacaccataa

SEQ ID NO: 460230 - DNA, 25 bp, Artificial
  probe
  misc_feature (1)..(25): SEQ ID NO: 7162; WAN024BY5; Start 109; Stop 133
gagatatcaaactcaattcacacca

SEQ ID NO: 460231 - DNA, 25 bp, Artificial
  probe
  misc_feature (1)..(25): SEQ ID NO: 7162; WAN024BY5; Start 108; Stop 132
agagatatcaaactcaattcacacc

SEQ ID NO: 460232 - DNA, 25 bp, Artificial
  probe
  misc_feature (1)..(25): SEQ ID NO: 7162; WAN024BY5; Start 40; Stop 64
gttcaaaacaagcaagatacactat

SEQ ID NO: 460233 - DNA, 25 bp, Artificial
  probe
  misc_feature (1)..(25): SEQ ID NO: 7162; WAN024BY5; Start 91; Stop 115
aaggcaacttcctcaaaagagatat

SEQ ID NO: 460234 - DNA, 25 bp, Artificial
  probe
  misc_feature (1)..(25): SEQ ID NO: 7162; WAN024BY5; Start 86; Stop 110
aatctaaggcaacttcctcaaaaga

SEQ ID NO: 460235 - DNA, 25 bp, Artificial
  probe
  misc_feature (1)..(25): SEQ ID NO: 7162; WAN024BY5; Start 85; Stop 109
aaatctaaggcaacttcctcaaaag

SEQ ID NO: 460236 - DNA, 25 bp, Artificial
  probe
  misc_feature (1)..(25): SEQ ID NO: 7162; WAN024BY5; Start 90; Stop 114
taaggcaacttcctcaaaagagata

SEQ ID NO: 460237 - DNA, 25 bp, Artificial
  probe
  misc_feature (1)..(25): SEQ ID NO: 7162; WAN024BY5; Start 111; Stop 135
gatatcaaactcaattcacaccata

SEQ ID NO: 460238 - DNA, 25 bp, Artificial
  probe
  misc_feature (1)..(25): SEQ ID NO: 7162; WAN024BY5; Start 89; Stop 113
ctaaggcaacttcctcaaaagagat

SEQ ID NO: 460239 - DNA, 25 bp, Artificial
  probe
  misc_feature (1)..(25): SEQ ID NO: 7162; WAN024BY5; Start 87; Stop 111
atctaaggcaacttcctcaaaagag

SEQ ID NO: 460240 - DNA, 25 bp, Artificial
  probe
  misc_feature (1)..(25): SEQ ID NO: 7162; WAN024BY5; Start 84; Stop 108
aaaatctaaggcaacttcctcaaaa

SEQ ID NO: 460241 - DNA, 25 bp, Artificial
  probe
  misc_feature (1)..(25): SEQ ID NO: 7162; WAN024BY5; Start 43; Stop 67
caaaacaagcaagatacactataca

SEQ ID NO: 460242 - DNA, 25 bp, Artificial
  probe
  misc_feature (1)..(25): SEQ ID NO: 7162; WAN024BY5; Start 107; Stop 131
aagagatatcaaactcaattcacac

SEQ ID NO: 460243 - DNA, 25 bp, Artificial
  probe
  misc_feature (1)..(25): SEQ ID NO: 7162; WAN024BY5; Start 42; Stop 66
tcaaaacaagcaagatacactatac

SEQ ID NO: 460244 - DNA, 25 bp, Artificial
  probe
  misc_feature (1)..(25): SEQ ID NO: 7162; WAN024BY5; Start 88; Stop 112
tctaaggcaacttcctcaaaagaga

SEQ ID NO: 460245 - DNA, 25 bp, Artificial
  probe
  misc_feature (1)..(25): SEQ ID NO: 7162; WAN024BY5; Start 44; Stop 68
aaaacaagcaagatacactatacaa

SEQ ID NO: 460246 - DNA, 25 bp, Artificial
  probe
  misc_feature (1)..(25): SEQ ID NO: 7162; WAN024BY5; Start 106; Stop 130
aaagagatatcaaactcaattcaca

SEQ ID NO: 460247 - DNA, 25 bp, Artificial
  probe
  misc_feature (1)..(25): SEQ ID NO: 7162; WAN024BY5; Start 41; Stop 65
ttcaaaacaagcaagatacactata

SEQ ID NO: 460248 - DNA, 25 bp, Artificial
  probe
  misc_feature (1)..(25): SEQ ID NO: 7162; WAN024BY5; Start 94; Stop 118
gcaacttcctcaaaagagatatcaa

SEQ ID NO: 460249 - DNA, 25 bp, Artificial
  probe
  misc_feature (1)..(25): SEQ ID NO: 7162; WAN024BY5; Start 48; Stop 72
caagcaagatacactatacaataaa

SEQ ID NO: 460250 - DNA, 25 bp, Artificial
  probe
  misc_feature (1)..(25): SEQ ID NO: 7162; WAN024BY5; Start 93; Stop 117
ggcaacttcctcaaaagagatatca

SEQ ID NO: 460251 - DNA, 25 bp, Artificial
  probe
  misc_feature (1)..(25): SEQ ID NO: 7162; WAN024BY5; Start 92; Stop 116
aggcaacttcctcaaaagagatatc

SEQ ID NO: 460252 - DNA, 25 bp, Artificial
  probe
  misc_feature (1)..(25): SEQ ID NO: 7162; WAN024BY5; Start 100; Stop 124
tcctcaaaagagatatcaaactcaa

SEQ ID NO: 460253 - DNA, 25 bp, Artificial
  probe
  misc_feature (1)..(25): SEQ ID NO: 7162; WAN024BY5; Start 99; Stop 123
ttcctcaaaagagatatcaaactca

SEQ ID NO: 460254 - DNA, 25 bp, Artificial
  probe
  misc_feature (1)..(25): SEQ ID NO: 7162; WAN024BY5; Start 97; Stop 121
acttcctcaaaagagatatcaaact

SEQ ID NO: 460255 - DNA, 25 bp, Artificial
  probe
  misc_feature (1)..(25): SEQ ID NO: 7162; WAN024BY5; Start 38; Stop 62
ctgttcaaaacaagcaagatacact

SEQ ID NO: 460256 - DNA, 25 bp, Artificial
  probe
  misc_feature (1)..(25): SEQ ID NO: 7163; WAN024D5V; Start 105; Stop 129
ccttctctctatctgttatttcgca

SEQ ID NO: 460257 - DNA, 25 bp, Artificial
  probe
  misc_feature (1)..(25): SEQ ID NO: 7163; WAN024D5V; Start 97; Stop 121
cttcaatcccttctctctatctgtt

SEQ ID NO: 460258 - DNA, 25 bp, Artificial
  probe
  misc_feature (1)..(25): SEQ ID NO: 7163; WAN024D5V; Start 103; Stop 127
tcccttctctctatctgttatttcg

SEQ ID NO: 460259 - DNA, 25 bp, Artificial
  probe
  misc_feature (1)..(25): SEQ ID NO: 7163; WAN024D5V; Start 104; Stop 128
cccttctctctatctgttatttcgc

SEQ ID NO: 460260 - DNA, 25 bp, Artificial
  probe
  misc_feature (1)..(25): SEQ ID NO: 7163; WAN024D5V; Start 98; Stop 122
ttcaatcccttctctctatctgtta

SEQ ID NO: 460261 - DNA, 25 bp, Artificial
  probe
  misc_feature (1)..(25): SEQ ID NO: 7163; WAN024D5V; Start 96; Stop 120
gcttcaatcccttctctctatctgt

SEQ ID NO: 460262 - DNA, 25 bp, Artificial
  probe
  misc_feature (1)..(25): SEQ ID NO: 7163; WAN024D5V; Start 99; Stop 123
tcaatcccttctctctatctgttat

SEQ ID NO: 460263 - DNA, 25 bp, Artificial
  probe
  misc_feature (1)..(25): SEQ ID NO: 7163; WAN024D5V; Start 100; Stop 124
caatcccttctctctatctgttatt

SEQ ID NO: 460264 - DNA, 25 bp, Artificial
  probe
  misc_feature (1)..(25): SEQ ID NO: 7163; WAN024D5V; Start 102; Stop 126
atcccttctctctatctgttatttc

SEQ ID NO: 460265 - DNA, 25 bp, Artificial
  probe
  misc_feature (1)..(25): SEQ ID NO: 7163; WAN024D5V; Start 95; Stop 119
agcttcaatcccttctctctatctg

SEQ ID NO: 460266 - DNA, 25 bp, Artificial
  probe
  misc_feature (1)..(25): SEQ ID NO: 7163; WAN024D5V; Start 101; Stop 125
aatcccttctctctatctgttattt

SEQ ID NO: 460267 - DNA, 25 bp, Artificial
  probe
  misc_feature (1)..(25): SEQ ID NO: 7163; WAN024D5V; Start 52; Stop 76
tttgtcttgaatgccttaaatatca

SEQ ID NO: 460268 - DNA, 25 bp, Artificial
  probe
  misc_feature (1)..(25): SEQ ID NO: 7163; WAN024D5V; Start 53; Stop 77
ttgtcttgaatgccttaaatatcat

SEQ ID NO: 460269 - DNA, 25 bp, Artificial
  probe
  misc_feature (1)..(25): SEQ ID NO: 7163; WAN024D5V; Start 54; Stop 78
tgtcttgaatgccttaaatatcata

SEQ ID NO: 460270 - DNA, 25 bp, Artificial
  probe
  misc_feature (1)..(25): SEQ ID NO: 7163; WAN024D5V; Start 91; Stop 115
tctaagcttcaatcccttctctcta

SEQ ID NO: 460271 - DNA, 25 bp, Artificial
  probe
  misc_feature (1)..(25): SEQ ID NO: 7163; WAN024D5V; Start 89; Stop 113
tttctaagcttcaatcccttctctc

SEQ ID NO: 460272 - DNA, 25 bp, Artificial
  probe
  misc_feature (1)..(25): SEQ ID NO: 7163; WAN024D5V; Start 93; Stop 117
taagcttcaatcccttctctctatc

SEQ ID NO: 460273 - DNA, 25 bp, Artificial
  probe
  misc_feature (1)..(25): SEQ ID NO: 7163; WAN024D5V; Start 92; Stop 116
ctaagcttcaatcccttctctctat

SEQ ID NO: 460274 - DNA, 25 bp, Artificial
  probe
  misc_feature (1)..(25): SEQ ID NO: 7163; WAN024D5V; Start 94; Stop 118
aagcttcaatcccttctctctatct

SEQ ID NO: 460275 - DNA, 25 bp, Artificial
  probe
  misc_feature (1)..(25): SEQ ID NO: 7163; WAN024D5V; Start 90; Stop 114
ttctaagcttcaatcccttctctct

SEQ ID NO: 460276 - DNA, 25 bp, Artificial
  probe
  misc_feature (1)..(25): SEQ ID NO: 7163; WAN024D5V; Start 73; Stop 97
atcatattattccccttttctaagc

SEQ ID NO: 460277 - DNA, 25 bp, Artificial
  probe
  misc_feature (1)..(25): SEQ ID NO: 7163; WAN024D5V; Start 13; Stop 37
actgtcaaaagtagttcaacttgtc

SEQ ID NO: 460278 - DNA, 25 bp, Artificial
  probe
  misc_feature (1)..(25): SEQ ID NO: 7163; WAN024D5V; Start 14; Stop 38
ctgtcaaaagtagttcaacttgtct

SEQ ID NO: 460279 - DNA, 25 bp, Artificial
  probe
  misc_feature (1)..(25): SEQ ID NO: 7163; WAN024D5V; Start 12; Stop 36
aactgtcaaaagtagttcaacttgt

SEQ ID NO: 460280 - DNA, 25 bp, Artificial
  probe
  misc_feature (1)..(25): SEQ ID NO: 7163; WAN024D5V; Start 74; Stop 98
tcatattattccccttttctaagct

SEQ ID NO: 460281 - DNA, 25 bp, Artificial
  probe
  misc_feature (1)..(25): SEQ ID NO: 7163; WAN024D5V; Start 51; Stop 75
ttttgtcttgaatgccttaaatatc

SEQ ID NO: 460282 - DNA, 25 bp, Artificial
  probe
  misc_feature (1)..(25): SEQ ID NO: 7163; WAN024D5V; Start 55; Stop 79
gtcttgaatgccttaaatatcatat

SEQ ID NO: 460283 - DNA, 25 bp, Artificial
  probe
  misc_feature (1)..(25): SEQ ID NO: 7163; WAN024D5V; Start 15; Stop 39
tgtcaaaagtagttcaacttgtctt

SEQ ID NO: 460284 - DNA, 25 bp, Artificial
  probe
  misc_feature (1)..(25): SEQ ID NO: 7163; WAN024D5V; Start 11; Stop 35
aaactgtcaaaagtagttcaacttg

SEQ ID NO: 460285 - DNA, 25 bp, Artificial
  probe
  misc_feature (1)..(25): SEQ ID NO: 7163; WAN024D5V; Start 63; Stop 87
tgccttaaatatcatattattcccc

SEQ ID NO: 460286 - DNA, 25 bp, Artificial
  probe
  misc_feature (1)..(25): SEQ ID NO: 7163; WAN024D5V; Start 16; Stop 40
gtcaaaagtagttcaacttgtcttt

SEQ ID NO: 460287 - DNA, 25 bp, Artificial
  probe
  misc_feature (1)..(25): SEQ ID NO: 7163; WAN024D5V; Start 64; Stop 88
gccttaaatatcatattattcccct

SEQ ID NO: 460288 - DNA, 25 bp, Artificial
  probe
  misc_feature (1)..(25): SEQ ID NO: 7163; WAN024D5V; Start 10; Stop 34
aaaactgtcaaaagtagttcaactt

SEQ ID NO: 460289 - DNA, 25 bp, Artificial
  probe
  misc_feature (1)..(25): SEQ ID NO: 7164; WAN024E2N; Start 36; Stop 60
aagcaagtacggtcaaatgattcta

SEQ ID NO: 460290 - DNA, 25 bp, Artificial
  probe
  misc_feature (1)..(25): SEQ ID NO: 7164; WAN024E2N; Start 51; Stop 75
aatgattctactgcatgaactaact

SEQ ID NO: 460291 - DNA, 25 bp, Artificial
  probe
  misc_feature (1)..(25): SEQ ID NO: 7164; WAN024E2N; Start 37; Stop 61
agcaagtacggtcaaatgattctac

SEQ ID NO: 460292 - DNA, 25 bp, Artificial
  probe
  misc_feature (1)..(25): SEQ ID NO: 7164; WAN024E2N; Start 53; Stop 77
tgattctactgcatgaactaactaa

SEQ ID NO: 460293 - DNA, 25 bp, Artificial
  probe
  misc_feature (1)..(25): SEQ ID NO: 7164; WAN024E2N; Start 35; Stop 59
caagcaagtacggtcaaatgattct

SEQ ID NO: 460294 - DNA, 25 bp, Artificial
  probe
  misc_feature (1)..(25): SEQ ID NO: 7164; WAN024E2N; Start 52; Stop 76
atgattctactgcatgaactaacta

SEQ ID NO: 460295 - DNA, 25 bp, Artificial
  probe
  misc_feature (1)..(25): SEQ ID NO: 7164; WAN024E2N; Start 39; Stop 63
caagtacggtcaaatgattctactg

SEQ ID NO: 460296 - DNA, 25 bp, Artificial
  probe
  misc_feature (1)..(25): SEQ ID NO: 7164; WAN024E2N; Start 40; Stop 64
aagtacggtcaaatgattctactgc

SEQ ID NO: 460297 - DNA, 25 bp, Artificial
  probe
  misc_feature (1)..(25): SEQ ID NO: 7164; WAN024E2N; Start 38; Stop 62
gcaagtacggtcaaatgattctact

SEQ ID NO: 460298 - DNA, 25 bp, Artificial
  probe
  misc_feature (1)..(25): SEQ ID NO: 7164; WAN024E2N; Start 34; Stop 58
ccaagcaagtacggtcaaatgattc

SEQ ID NO: 460299 - DNA, 25 bp, Artificial
  probe
  misc_feature (1)..(25): SEQ ID NO: 7164; WAN024E2N; Start 47; Stop 71
gtcaaatgattctactgcatgaact

SEQ ID NO: 460300 - DNA, 25 bp, Artificial
  probe
  misc_feature (1)..(25): SEQ ID NO: 7164; WAN024E2N; Start 46; Stop 70
ggtcaaatgattctactgcatgaac

SEQ ID NO: 460301 - DNA, 25 bp, Artificial
  probe
  misc_feature (1)..(25): SEQ ID NO: 7164; WAN024E2N; Start 43; Stop 67
tacggtcaaatgattctactgcatg

SEQ ID NO: 460302 - DNA, 25 bp, Artificial
  probe
  misc_feature (1)..(25): SEQ ID NO: 7164; WAN024E2N; Start 42; Stop 66
gtacggtcaaatgattctactgcat

SEQ ID NO: 460303 - DNA, 25 bp, Artificial
  probe
  misc_feature (1)..(25): SEQ ID NO: 7164; WAN024E2N; Start 54; Stop 78
gattctactgcatgaactaactaat

SEQ ID NO: 460304 - DNA, 25 bp, Artificial
  probe
  misc_feature (1)..(25): SEQ ID NO: 7164; WAN024E2N; Start 48; Stop 72
tcaaatgattctactgcatgaacta

SEQ ID NO: 460305 - DNA, 25 bp, Artificial
  probe
  misc_feature (1)..(25): SEQ ID NO: 7164; WAN024E2N; Start 45; Stop 69
cggtcaaatgattctactgcatgaa

SEQ ID NO: 460306 - DNA, 25 bp, Artificial
  probe
  misc_feature (1)..(25): SEQ ID NO: 7164; WAN024E2N; Start 50; Stop 74
aaatgattctactgcatgaactaac

SEQ ID NO: 460307 - DNA, 25 bp, Artificial
  probe
  misc_feature (1)..(25): SEQ ID NO: 7164; WAN024E2N; Start 49; Stop 73
caaatgattctactgcatgaactaa

SEQ ID NO: 460308 - DNA, 25 bp, Artificial
  probe
  misc_feature (1)..(25): SEQ ID NO: 7164; WAN024E2N; Start 32; Stop 56
taccaagcaagtacggtcaaatgat

SEQ ID NO: 460309 - DNA, 25 bp, Artificial
  probe
  misc_feature (1)..(25): SEQ ID NO: 7164; WAN024E2N; Start 27; Stop 51
agagttaccaagcaagtacggtcaa

SEQ ID NO: 460310 - DNA, 25 bp, Artificial
  probe
  misc_feature (1)..(25): SEQ ID NO: 7164; WAN024E2N; Start 31; Stop 55
ttaccaagcaagtacggtcaaatga

SEQ ID NO: 460311 - DNA, 25 bp, Artificial
  probe
  misc_feature (1)..(25): SEQ ID NO: 7164; WAN024E2N; Start 30; Stop 54
gttaccaagcaagtacggtcaaatg

SEQ ID NO: 460312 - DNA, 25 bp, Artificial
  probe
  misc_feature (1)..(25): SEQ ID NO: 7164; WAN024E2N; Start 29; Stop 53
agttaccaagcaagtacggtcaaat

SEQ ID NO: 460313 - DNA, 25 bp, Artificial
  probe
  misc_feature (1)..(25): SEQ ID NO: 7164; WAN024E2N; Start 44; Stop 68
acggtcaaatgattctactgcatga

SEQ ID NO: 460314 - DNA, 25 bp, Artificial
  probe
  misc_feature (1)..(25): SEQ ID NO: 7164; WAN024E2N; Start 41; Stop 65
agtacggtcaaatgattctactgca

SEQ ID NO: 460315 - DNA, 25 bp, Artificial
  probe
  misc_feature (1)..(25): SEQ ID NO: 7164; WAN024E2N; Start 26; Stop 50
gagagttaccaagcaagtacggtca

SEQ ID NO: 460316 - DNA, 25 bp, Artificial
  probe
  misc_feature (1)..(25): SEQ ID NO: 7164; WAN024E2N; Start 33; Stop 57
accaagcaagtacggtcaaatgatt

SEQ ID NO: 460317 - DNA, 25 bp, Artificial
  probe
  misc_feature (1)..(25): SEQ ID NO: 7164; WAN024E2N; Start 28; Stop 52
gagttaccaagcaagtacggtcaaa

SEQ ID NO: 460318 - DNA, 25 bp, Artificial
  probe
  misc_feature (1)..(25): SEQ ID NO: 7164; WAN024E2N; Start 20; Stop 44
cactgggagagttaccaagcaagta

SEQ ID NO: 460319 - DNA, 25 bp, Artificial
  probe
  misc_feature (1)..(25): SEQ ID NO: 7164; WAN024E2N; Start 25; Stop 49
ggagagttaccaagcaagtacggtc

SEQ ID NO: 460320 - DNA, 25 bp, Artificial
  probe
  misc_feature (1)..(25): SEQ ID NO: 7164; WAN024E2N; Start 21; Stop 45
actgggagagttaccaagcaagtac

SEQ ID NO: 460321 - DNA, 25 bp, Artificial
  probe
  misc_feature (1)..(25): SEQ ID NO: 7164; WAN024E2N; Start 18; Stop 42
ttcactgggagagttaccaagcaag

SEQ ID NO: 460322 - DNA, 25 bp, Artificial
  probe
  misc_feature (1)..(25): SEQ ID NO: 7165; WAN024DFN; Start 115; Stop 139
ctcgatgcttacaccattgctataa

SEQ ID NO: 460323 - DNA, 25 bp, Artificial
  probe
  misc_feature (1)..(25): SEQ ID NO: 7165; WAN024DFN; Start 117; Stop 141
cgatgcttacaccattgctataaat

SEQ ID NO: 460324 - DNA, 25 bp, Artificial
  probe
  misc_feature (1)..(25): SEQ ID NO: 7165; WAN024DFN; Start 114; Stop 138
actcgatgcttacaccattgctata

SEQ ID NO: 460325 - DNA, 25 bp, Artificial
  probe
  misc_feature (1)..(25): SEQ ID NO: 7165; WAN024DFN; Start 113; Stop 137
tactcgatgcttacaccattgctat

SEQ ID NO: 460326 - DNA, 25 bp, Artificial
  probe
  misc_feature (1)..(25): SEQ ID NO: 7165; WAN024DFN; Start 112; Stop 136
ctactcgatgcttacaccattgcta

SEQ ID NO: 460327 - DNA, 25 bp, Artificial
  probe
  misc_feature (1)..(25): SEQ ID NO: 7165; WAN024DFN; Start 97; Stop 121
gtaaacaaatgtgctctactcgatg

SEQ ID NO: 460328 - DNA, 25 bp, Artificial
  probe
  misc_feature (1)..(25): SEQ ID NO: 7165; WAN024DFN; Start 116; Stop 140
tcgatgcttacaccattgctataaa

SEQ ID NO: 460329 - DNA, 25 bp, Artificial
  probe
  misc_feature (1)..(25): SEQ ID NO: 7165; WAN024DFN; Start 94; Stop 118
atagtaaacaaatgtgctctactcg

SEQ ID NO: 460330 - DNA, 25 bp, Artificial
  probe
  misc_feature (1)..(25): SEQ ID NO: 7165; WAN024DFN; Start 58; Stop 82
ttacatcttataaagcagggagaag

SEQ ID NO: 460331 - DNA, 25 bp, Artificial
  probe
  misc_feature (1)..(25): SEQ ID NO: 7165; WAN024DFN; Start 121; Stop 145
gcttacaccattgctataaatgaca

SEQ ID NO: 460332 - DNA, 25 bp, Artificial
  probe
  misc_feature (1)..(25): SEQ ID NO: 7165; WAN024DFN; Start 120; Stop 144
tgcttacaccattgctataaatgac

SEQ ID NO: 460333 - DNA, 25 bp, Artificial
  probe
  misc_feature (1)..(25): SEQ ID NO: 7165; WAN024DFN; Start 98; Stop 122
taaacaaatgtgctctactcgatgc

SEQ ID NO: 460334 - DNA, 25 bp, Artificial
  probe
  misc_feature (1)..(25): SEQ ID NO: 7165; WAN024DFN; Start 119; Stop 143
atgcttacaccattgctataaatga

SEQ ID NO: 460335 - DNA, 25 bp, Artificial
  probe
  misc_feature (1)..(25): SEQ ID NO: 7165; WAN024DFN; Start 102; Stop 126
caaatgtgctctactcgatgcttac

SEQ ID NO: 460336 - DNA, 25 bp, Artificial
  probe
  misc_feature (1)..(25): SEQ ID NO: 7165; WAN024DFN; Start 118; Stop 142
gatgcttacaccattgctataaatg

SEQ ID NO: 460337 - DNA, 25 bp, Artificial
  probe
  misc_feature (1)..(25): SEQ ID NO: 7165; WAN024DFN; Start 57; Stop 81
tttacatcttataaagcagggagaa

SEQ ID NO: 460338 - DNA, 25 bp, Artificial
  probe
  misc_feature (1)..(25): SEQ ID NO: 7165; WAN024DFN; Start 104; Stop 128
aatgtgctctactcgatgcttacac

SEQ ID NO: 460339 - DNA, 25 bp, Artificial
  probe
  misc_feature (1)..(25): SEQ ID NO: 7165; WAN024DFN; Start 110; Stop 134
ctctactcgatgcttacaccattgc

SEQ ID NO: 460340 - DNA, 25 bp, Artificial
  probe
  misc_feature (1)..(25): SEQ ID NO: 7165; WAN024DFN; Start 109; Stop 133
gctctactcgatgcttacaccattg

SEQ ID NO: 460341 - DNA, 25 bp, Artificial
  probe
  misc_feature (1)..(25): SEQ ID NO: 7165; WAN024DFN; Start 101; Stop 125
acaaatgtgctctactcgatgctta

SEQ ID NO: 460342 - DNA, 25 bp, Artificial
  probe
  misc_feature (1)..(25): SEQ ID NO: 7165; WAN024DFN; Start 95; Stop 119
tagtaaacaaatgtgctctactcga

SEQ ID NO: 460343 - DNA, 25 bp, Artificial
  probe
  misc_feature (1)..(25): SEQ ID NO: 7165; WAN024DFN; Start 96; Stop 120
agtaaacaaatgtgctctactcgat

SEQ ID NO: 460344 - DNA, 25 bp, Artificial
  probe
  misc_feature (1)..(25): SEQ ID NO: 7165; WAN024DFN; Start 111; Stop 135
tctactcgatgcttacaccattgct

SEQ ID NO: 460345 - DNA, 25 bp, Artificial
  probe
  misc_feature (1)..(25): SEQ ID NO: 7165; WAN024DFN; Start 108; Stop 132
tgctctactcgatgcttacaccatt

SEQ ID NO: 460346 - DNA, 25 bp, Artificial
  probe
  misc_feature (1)..(25): SEQ ID NO: 7165; WAN024DFN; Start 59; Stop 83
tacatcttataaagcagggagaaga

SEQ ID NO: 460347 - DNA, 25 bp, Artificial
  probe
  misc_feature (1)..(25): SEQ ID NO: 7165; WAN024DFN; Start 103; Stop 127
aaatgtgctctactcgatgcttaca

SEQ ID NO: 460348 - DNA, 25 bp, Artificial
  probe
  misc_feature (1)..(25): SEQ ID NO: 7165; WAN024DFN; Start 93; Stop 117
aatagtaaacaaatgtgctctactc

SEQ ID NO: 460349 - DNA, 25 bp, Artificial
  probe
  misc_feature (1)..(25): SEQ ID NO: 7165; WAN024DFN; Start 122; Stop 146
cttacaccattgctataaatgacat

SEQ ID NO: 460350 - DNA, 25 bp, Artificial
  probe
  misc_feature (1)..(25): SEQ ID NO: 7165; WAN024DFN; Start 100; Stop 124
aacaaatgtgctctactcgatgctt

SEQ ID NO: 460351 - DNA, 25 bp, Artificial
  probe
  misc_feature (1)..(25): SEQ ID NO: 7165; WAN024DFN; Start 99; Stop 123
aaacaaatgtgctctactcgatgct

SEQ ID NO: 460352 - DNA, 25 bp, Artificial
  probe
  misc_feature (1)..(25): SEQ ID NO: 7165; WAN024DFN; Start 123; Stop 147
ttacaccattgctataaatgacatg

SEQ ID NO: 460353 - DNA, 25 bp, Artificial
  probe
  misc_feature (1)..(25): SEQ ID NO: 7165; WAN024DFN; Start 92; Stop 116
aaatagtaaacaaatgtgctctact

SEQ ID NO: 460354 - DNA, 25 bp, Artificial
  probe
  misc_feature (1)..(25): SEQ ID NO: 7165; WAN024DFN; Start 56; Stop 80
ttttacatcttataaagcagggaga

SEQ ID NO: 460355 - DNA, 25 bp, Artificial
  probe
  misc_feature (1)..(25): SEQ ID NO: 7166; WAN024BYS; Start 55; Stop 79
tctgctctgaatattgtggttatga

SEQ ID NO: 460356 - DNA, 25 bp, Artificial
  probe
  misc_feature (1)..(25): SEQ ID NO: 7166; WAN024BYS; Start 56; Stop 80
ctgctctgaatattgtggttatgaa

SEQ ID NO: 460357 - DNA, 25 bp, Artificial
  probe
  misc_feature (1)..(25): SEQ ID NO: 7166; WAN024BYS; Start 54; Stop 78
ttctgctctgaatattgtggttatg

SEQ ID NO: 460358 - DNA, 25 bp, Artificial
  probe
  misc_feature (1)..(25): SEQ ID NO: 7166; WAN024BYS; Start 57; Stop 81
tgctctgaatattgtggttatgaat

SEQ ID NO: 460359 - DNA, 25 bp, Artificial
  probe
  misc_feature (1)..(25): SEQ ID NO: 7166; WAN024BYS; Start 52; Stop 76
gtttctgctctgaatattgtggtta

SEQ ID NO: 460360 - DNA, 25 bp, Artificial
  probe
  misc_feature (1)..(25): SEQ ID NO: 7166; WAN024BYS; Start 48; Stop 72
tacggtttctgctctgaatattgtg

SEQ ID NO: 460361 - DNA, 25 bp, Artificial
  probe
  misc_feature (1)..(25): SEQ ID NO: 7166; WAN024BYS; Start 47; Stop 71
gtacggtttctgctctgaatattgt

SEQ ID NO: 460362 - DNA, 25 bp, Artificial
  probe
  misc_feature (1)..(25): SEQ ID NO: 7166; WAN024BYS; Start 58; Stop 82
gctctgaatattgtggttatgaata

SEQ ID NO: 460363 - DNA, 25 bp, Artificial
  probe
  misc_feature (1)..(25): SEQ ID NO: 7166; WAN024BYS; Start 68; Stop 92
ttgtggttatgaatactatggaatt

SEQ ID NO: 460364 - DNA, 25 bp, Artificial
  probe
  misc_feature (1)..(25): SEQ ID NO: 7166; WAN024BYS; Start 53; Stop 77
tttctgctctgaatattgtggttat

SEQ ID NO: 460365 - DNA, 25 bp, Artificial
  probe
  misc_feature (1)..(25): SEQ ID NO: 7166; WAN024BYS; Start 51; Stop 75
ggtttctgctctgaatattgtggtt

SEQ ID NO: 460366 - DNA, 25 bp, Artificial
  probe
  misc_feature (1)..(25): SEQ ID NO: 7166; WAN024BYS; Start 67; Stop 91
attgtggttatgaatactatggaat

SEQ ID NO: 460367 - DNA, 25 bp, Artificial
  probe
  misc_feature (1)..(25): SEQ ID NO: 7166; WAN024BYS; Start 15; Stop 39
gaagctggtttattcgacagatatt

SEQ ID NO: 460368 - DNA, 25 bp, Artificial
  probe
  misc_feature (1)..(25): SEQ ID NO: 7166; WAN024BYS; Start 16; Stop 40
aagctggtttattcgacagatattt

SEQ ID NO: 460369 - DNA, 25 bp, Artificial
  probe
  misc_feature (1)..(25): SEQ ID NO: 7166; WAN024BYS; Start 66; Stop 90
tattgtggttatgaatactatggaa

SEQ ID NO: 460370 - DNA, 25 bp, Artificial
  probe
  misc_feature (1)..(25): SEQ ID NO: 7166; WAN024BYS; Start 69; Stop 93
tgtggttatgaatactatggaattt

SEQ ID NO: 460371 - DNA, 25 bp, Artificial
  probe
  misc_feature (1)..(25): SEQ ID NO: 7166; WAN024BYS; Start 65; Stop 89
atattgtggttatgaatactatgga

SEQ ID NO: 460372 - DNA, 25 bp, Artificial
  probe
  misc_feature (1)..(25): SEQ ID NO: 7166; WAN024BYS; Start 60; Stop 84
tctgaatattgtggttatgaatact

SEQ ID NO: 460373 - DNA, 25 bp, Artificial
  probe
  misc_feature (1)..(25): SEQ ID NO: 7166; WAN024BYS; Start 50; Stop 74
cggtttctgctctgaatattgtggt

SEQ ID NO: 460374 - DNA, 25 bp, Artificial
  probe
  misc_feature (1)..(25): SEQ ID NO: 7166; WAN024BYS; Start 49; Stop 73
acggtttctgctctgaatattgtgg

SEQ ID NO: 460375 - DNA, 25 bp, Artificial
  probe
  misc_feature (1)..(25): SEQ ID NO: 7166; WAN024BYS; Start 59; Stop 83
ctctgaatattgtggttatgaatac

SEQ ID NO: 460376 - DNA, 25 bp, Artificial
  probe
  misc_feature (1)..(25): SEQ ID NO: 7166; WAN024BYS; Start 70; Stop 94
gtggttatgaatactatggaatttc

SEQ ID NO: 460377 - DNA, 25 bp, Artificial
  probe
  misc_feature (1)..(25): SEQ ID NO: 7166; WAN024BYS; Start 17; Stop 41
agctggtttattcgacagatatttt

SEQ ID NO: 460378 - DNA, 25 bp, Artificial
  probe
  misc_feature (1)..(25): SEQ ID NO: 7166; WAN024BYS; Start 18; Stop 42
gctggtttattcgacagatatttta

SEQ ID NO: 460379 - DNA, 25 bp, Artificial
  probe
  misc_feature (1)..(25): SEQ ID NO: 7166; WAN024BYS; Start 71; Stop 95
tggttatgaatactatggaatttca

SEQ ID NO: 460380 - DNA, 25 bp, Artificial
  probe
  misc_feature (1)..(25): SEQ ID NO: 7166; WAN024BYS; Start 14; Stop 38
cgaagctggtttattcgacagatat

SEQ ID NO: 460381 - DNA, 25 bp, Artificial
  probe
  misc_feature (1)..(25): SEQ ID NO: 7166; WAN024BYS; Start 5; Stop 29
ctgcgatagcgaagctggtttattc

SEQ ID NO: 460382 - DNA, 25 bp, Artificial
  probe
  misc_feature (1)..(25): SEQ ID NO: 7166; WAN024BYS; Start 4; Stop 28
tctgcgatagcgaagctggtttatt

SEQ ID NO: 460383 - DNA, 25 bp, Artificial
  probe
  misc_feature (1)..(25): SEQ ID NO: 7166; WAN024BYS; Start 72; Stop 96
ggttatgaatactatggaatttcaa

SEQ ID NO: 460384 - DNA, 25 bp, Artificial
  probe
  misc_feature (1)..(25): SEQ ID NO: 7166; WAN024BYS; Start 13; Stop 37
gcgaagctggtttattcgacagata

SEQ ID NO: 460385 - DNA, 25 bp, Artificial
  probe
  misc_feature (1)..(25): SEQ ID NO: 7166; WAN024BYS; Start 10; Stop 34
atagcgaagctggtttattcgacag

SEQ ID NO: 460386 - DNA, 25 bp, Artificial
  probe
  misc_feature (1)..(25): SEQ ID NO: 7166; WAN024BYS; Start 9; Stop 33
gatagcgaagctggtttattcgaca

SEQ ID NO: 460387 - DNA, 25 bp, Artificial
  probe
  misc_feature (1)..(25): SEQ ID NO: 7166; WAN024BYS; Start 19; Stop 43
ctggtttattcgacagatattttaa

SEQ ID NO: 460388 - DNA, 25 bp, Artificial
  probe
  misc_feature (1)..(25): SEQ ID NO: 7167; WAN024BVF; Start 24; Stop 48
ccaagttcataagatagctagaggg

SEQ ID NO: 460389 - DNA, 25 bp, Artificial
  probe
  misc_feature (1)..(25): SEQ ID NO: 7167; WAN024BVF; Start 23; Stop 47
cccaagttcataagatagctagagg

SEQ ID NO: 460390 - DNA, 25 bp, Artificial
  probe
  misc_feature (1)..(25): SEQ ID NO: 7167; WAN024BVF; Start 25; Stop 49
caagttcataagatagctagaggga

SEQ ID NO: 460391 - DNA, 25 bp, Artificial
  probe
  misc_feature (1)..(25): SEQ ID NO: 7167; WAN024BVF; Start 28; Stop 52
gttcataagatagctagagggattg

SEQ ID NO: 460392 - DNA, 25 bp, Artificial
  probe
  misc_feature (1)..(25): SEQ ID NO: 7167; WAN024BVF; Start 27; Stop 51
agttcataagatagctagagggatt

SEQ ID NO: 460393 - DNA, 25 bp, Artificial
  probe
  misc_feature (1)..(25): SEQ ID NO: 7167; WAN024BVF; Start 26; Stop 50
aagttcataagatagctagagggat

SEQ ID NO: 460394 - DNA, 25 bp, Artificial
  probe
  misc_feature (1)..(25): SEQ ID NO: 7167; WAN024BVF; Start 31; Stop 55
cataagatagctagagggattgatc

SEQ ID NO: 460395 - DNA, 25 bp, Artificial
  probe
  misc_feature (1)..(25): SEQ ID NO: 7167; WAN024BVF; Start 29; Stop 53
ttcataagatagctagagggattga

SEQ ID NO: 460396 - DNA, 25 bp, Artificial
  probe
  misc_feature (1)..(25): SEQ ID NO: 7167; WAN024BVF; Start 33; Stop 57
taagatagctagagggattgatcca

SEQ ID NO: 460397 - DNA, 25 bp, Artificial
  probe
  misc_feature (1)..(25): SEQ ID NO: 7167; WAN024BVF; Start 30; Stop 54
tcataagatagctagagggattgat

SEQ ID NO: 460398 - DNA, 25 bp, Artificial
  probe
  misc_feature (1)..(25): SEQ ID NO: 7167; WAN024BVF; Start 34; Stop 58
aagatagctagagggattgatccag

SEQ ID NO: 460399 - DNA, 25 bp, Artificial
  probe
  misc_feature (1)..(25): SEQ ID NO: 7167; WAN024BVF; Start 32; Stop 56
ataagatagctagagggattgatcc

SEQ ID NO: 460400 - DNA, 25 bp, Artificial
  probe
  misc_feature (1)..(25): SEQ ID NO: 7167; WAN024BVF; Start 18; Stop 42
aacaccccaagttcataagatagct

SEQ ID NO: 460401 - DNA, 25 bp, Artificial
  probe
  misc_feature (1)..(25): SEQ ID NO: 7167; WAN024BVF; Start 35; Stop 59
agatagctagagggattgatccagg

SEQ ID NO: 460402 - DNA, 25 bp, Artificial
  probe
  misc_feature (1)..(25): SEQ ID NO: 7167; WAN024BVF; Start 22; Stop 46
ccccaagttcataagatagctagag

SEQ ID NO: 460403 - DNA, 25 bp, Artificial
  probe
  misc_feature (1)..(25): SEQ ID NO: 7167; WAN024BVF; Start 21; Stop 45
accccaagttcataagatagctaga

SEQ ID NO: 460404 - DNA, 25 bp, Artificial
  probe
  misc_feature (1)..(25): SEQ ID NO: 7167; WAN024BVF; Start 20; Stop 44
caccccaagttcataagatagctag

SEQ ID NO: 460405 - DNA, 25 bp, Artificial
  probe
  misc_feature (1)..(25): SEQ ID NO: 7167; WAN024BVF; Start 19; Stop 43
acaccccaagttcataagatagcta

SEQ ID NO: 460406 - DNA, 25 bp, Artificial
  probe
  misc_feature (1)..(25): SEQ ID NO: 7167; WAN024BVF; Start 37; Stop 61
atagctagagggattgatccaggtc

SEQ ID NO: 460407 - DNA, 25 bp, Artificial
  probe
  misc_feature (1)..(25): SEQ ID NO: 7167; WAN024BVF; Start 36; Stop 60
gatagctagagggattgatccaggt

SEQ ID NO: 460408 - DNA, 25 bp, Artificial
  probe
  misc_feature (1)..(25): SEQ ID NO: 7167; WAN024BVF; Start 16; Stop 40
agaacaccccaagttcataagatag

SEQ ID NO: 460409 - DNA, 25 bp, Artificial
  probe
  misc_feature (1)..(25): SEQ ID NO: 7167; WAN024BVF; Start 15; Stop 39
gagaacaccccaagttcataagata

SEQ ID NO: 460410 - DNA, 25 bp, Artificial
  probe
  misc_feature (1)..(25): SEQ ID NO: 7167; WAN024BVF; Start 17; Stop 41
gaacaccccaagttcataagatagc

SEQ ID NO: 460411 - DNA, 25 bp, Artificial
  probe
  misc_feature (1)..(25): SEQ ID NO: 7167; WAN024BVF; Start 14; Stop 38
cgagaacaccccaagttcataagat

SEQ ID NO: 460412 - DNA, 25 bp, Artificial
  probe
  misc_feature (1)..(25): SEQ ID NO: 7167; WAN024BVF; Start 38; Stop 62
tagctagagggattgatccaggtcc

SEQ ID NO: 460413 - DNA, 25 bp, Artificial
  probe
  misc_feature (1)..(25): SEQ ID NO: 7167; WAN024BVF; Start 10; Stop 34
attgcgagaacaccccaagttcata

SEQ ID NO: 460414 - DNA, 25 bp, Artificial
  probe
  misc_feature (1)..(25): SEQ ID NO: 7167; WAN024BVF; Start 11; Stop 35
ttgcgagaacaccccaagttcataa

SEQ ID NO: 460415 - DNA, 25 bp, Artificial
  probe
  misc_feature (1)..(25): SEQ ID NO: 7167; WAN024BVF; Start 13; Stop 37
gcgagaacaccccaagttcataaga

SEQ ID NO: 460416 - DNA, 25 bp, Artificial
  probe
  misc_feature (1)..(25): SEQ ID NO: 7167; WAN024BVF; Start 12; Stop 36
tgcgagaacaccccaagttcataag

SEQ ID NO: 460417 - DNA, 25 bp, Artificial
  probe
  misc_feature (1)..(25): SEQ ID NO: 7168; WAN024DKN; Start 15; Stop 39
aagtccaagtgctacaacagtttta

SEQ ID NO: 460418 - DNA, 25 bp, Artificial
  probe
  misc_feature (1)..(25): SEQ ID NO: 7168; WAN024DKN; Start 1; Stop 25
ctgttcaatttgccaagtccaagtg

SEQ ID NO: 460419 - DNA, 25 bp, Artificial
  probe
  misc_feature (1)..(25): SEQ ID NO: 7168; WAN024DKN; Start 4; Stop 28
ttcaatttgccaagtccaagtgcta

SEQ ID NO: 460420 - DNA, 25 bp, Artificial
  probe
  misc_feature (1)..(25): SEQ ID NO: 7168; WAN024DKN; Start 16; Stop 40
agtccaagtgctacaacagttttac

SEQ ID NO: 460421 - DNA, 25 bp, Artificial
  probe
  misc_feature (1)..(25): SEQ ID NO: 7168; WAN024DKN; Start 13; Stop 37
ccaagtccaagtgctacaacagttt

SEQ ID NO: 460422 - DNA, 25 bp, Artificial
  probe
  misc_feature (1)..(25): SEQ ID NO: 7168; WAN024DKN; Start 58; Stop 82
ccgattggagacttagtcaaagtaa

SEQ ID NO: 460423 - DNA, 25 bp, Artificial
  probe
  misc_feature (1)..(25): SEQ ID NO: 7168; WAN024DKN; Start 57; Stop 81
tccgattggagacttagtcaaagta

SEQ ID NO: 460424 - DNA, 25 bp, Artificial
  probe
  misc_feature (1)..(25): SEQ ID NO: 7168; WAN024DKN; Start 7; Stop 31
aatttgccaagtccaagtgctacaa

SEQ ID NO: 460425 - DNA, 25 bp, Artificial
  probe
  misc_feature (1)..(25): SEQ ID NO: 7168; WAN024DKN; Start 59; Stop 83
cgattggagacttagtcaaagtaat

SEQ ID NO: 460426 - DNA, 25 bp, Artificial
  probe
  misc_feature (1)..(25): SEQ ID NO: 7168; WAN024DKN; Start 14; Stop 38
caagtccaagtgctacaacagtttt

SEQ ID NO: 460427 - DNA, 25 bp, Artificial
  probe
  misc_feature (1)..(25): SEQ ID NO: 7168; WAN024DKN; Start 5; Stop 29
tcaatttgccaagtccaagtgctac

SEQ ID NO: 460428 - DNA, 25 bp, Artificial
  probe
  misc_feature (1)..(25): SEQ ID NO: 7168; WAN024DKN; Start 17; Stop 41
gtccaagtgctacaacagttttacg

SEQ ID NO: 460429 - DNA, 25 bp, Artificial
  probe
  misc_feature (1)..(25): SEQ ID NO: 7168; WAN024DKN; Start 8; Stop 32
atttgccaagtccaagtgctacaac

SEQ ID NO: 460430 - DNA, 25 bp, Artificial
  probe
  misc_feature (1)..(25): SEQ ID NO: 7168; WAN024DKN; Start 55; Stop 79
cgtccgattggagacttagtcaaag

SEQ ID NO: 460431 - DNA, 25 bp, Artificial
  probe
  misc_feature (1)..(25): SEQ ID NO: 7168; WAN024DKN; Start 6; Stop 30
caatttgccaagtccaagtgctaca

SEQ ID NO: 460432 - DNA, 25 bp, Artificial
  probe
  misc_feature (1)..(25): SEQ ID NO: 7168; WAN024DKN; Start 56; Stop 80
gtccgattggagacttagtcaaagt

SEQ ID NO: 460433 - DNA, 25 bp, Artificial
  probe
  misc_feature (1)..(25): SEQ ID NO: 7168; WAN024DKN; Start 50; Stop 74
gaatgcgtccgattggagacttagt

SEQ ID NO: 460434 - DNA, 25 bp, Artificial
  probe
  misc_feature (1)..(25): SEQ ID NO: 7168; WAN024DKN; Start 30; Stop 54
aacagttttacgttgtgatggaatg

SEQ ID NO: 460435 - DNA, 25 bp, Artificial
  probe
  misc_feature (1)..(25): SEQ ID NO: 7168; WAN024DKN; Start 51; Stop 75
aatgcgtccgattggagacttagtc

SEQ ID NO: 460436 - DNA, 25 bp, Artificial
  probe
  misc_feature (1)..(25): SEQ ID NO: 7168; WAN024DKN; Start 3; Stop 27
gttcaatttgccaagtccaagtgct

SEQ ID NO: 460437 - DNA, 25 bp, Artificial
  probe
  misc_feature (1)..(25): SEQ ID NO: 7168; WAN024DKN; Start 60; Stop 84
gattggagacttagtcaaagtaatt

SEQ ID NO: 460438 - DNA, 25 bp, Artificial
  probe
  misc_feature (1)..(25): SEQ ID NO: 7168; WAN024DKN; Start 19; Stop 43
ccaagtgctacaacagttttacgtt

SEQ ID NO: 460439 - DNA, 25 bp, Artificial
  probe
  misc_feature (1)..(25): SEQ ID NO: 7168; WAN024DKN; Start 2; Stop 26
tgttcaatttgccaagtccaagtgc

SEQ ID NO: 460440 - DNA, 25 bp, Artificial
  probe
  misc_feature (1)..(25): SEQ ID NO: 7168; WAN024DKN; Start 18; Stop 42
tccaagtgctacaacagttttacgt

SEQ ID NO: 460441 - DNA, 25 bp, Artificial
  probe
  misc_feature (1)..(25): SEQ ID NO: 7168; WAN024DKN; Start 61; Stop 85
attggagacttagtcaaagtaattt

SEQ ID NO: 460442 - DNA, 25 bp, Artificial
  probe
  misc_feature (1)..(25): SEQ ID NO: 7168; WAN024DKN; Start 31; Stop 55
acagttttacgttgtgatggaatgc

SEQ ID NO: 460443 - DNA, 25 bp, Artificial
  probe
  misc_feature (1)..(25): SEQ ID NO: 7168; WAN024DKN; Start 32; Stop 56
cagttttacgttgtgatggaatgcg

SEQ ID NO: 460444 - DNA, 25 bp, Artificial
  probe
  misc_feature (1)..(25): SEQ ID NO: 7168; WAN024DKN; Start 54; Stop 78
gcgtccgattggagacttagtcaaa

SEQ ID NO: 460445 - DNA, 25 bp, Artificial
  probe
  misc_feature (1)..(25): SEQ ID NO: 7168; WAN024DKN; Start 29; Stop 53
caacagttttacgttgtgatggaat

SEQ ID NO: 460446 - DNA, 25 bp, Artificial
  probe
  misc_feature (1)..(25): SEQ ID NO: 7168; WAN024DKN; Start 20; Stop 44
caagtgctacaacagttttacgttg

SEQ ID NO: 460447 - DNA, 25 bp, Artificial
  probe
  misc_feature (1)..(25): SEQ ID NO: 7168; WAN024DKN; Start 62; Stop 86
ttggagacttagtcaaagtaatttt

SEQ ID NO: 460448 - DNA, 25 bp, Artificial
  probe
  misc_feature (1)..(25): SEQ ID NO: 7168; WAN024DKN; Start 34; Stop 58
gttttacgttgtgatggaatgcgtc

SEQ ID NO: 460449 - DNA, 25 bp, Artificial
  probe
  misc_feature (1)..(25): SEQ ID NO: 7168; WAN024DKN; Start 33; Stop 57
agttttacgttgtgatggaatgcgt

SEQ ID NO: 460450 - DNA, 25 bp, Artificial
  probe
  misc_feature (1)..(25): SEQ ID NO: 7169; WAN024BS9; Start 103; Stop 127
ttgagtttgcagcaggatctctatt

SEQ ID NO: 460451 - DNA, 25 bp, Artificial
  probe
  misc_feature (1)..(25): SEQ ID NO: 7169; WAN024BS9; Start 104; Stop 128
tgagtttgcagcaggatctctattc

SEQ ID NO: 460452 - DNA, 25 bp, Artificial
  probe
  misc_feature (1)..(25): SEQ ID NO: 7169; WAN024BS9; Start 80; Stop 104
ttttcgtcaactggtacaaatggtt

SEQ ID NO: 460453 - DNA, 25 bp, Artificial
  probe
  misc_feature (1)..(25): SEQ ID NO: 7169; WAN024BS9; Start 102; Stop 126
gttgagtttgcagcaggatctctat

SEQ ID NO: 460454 - DNA, 25 bp, Artificial
  probe
  misc_feature (1)..(25): SEQ ID NO: 7169; WAN024BS9; Start 88; Stop 112
aactggtacaaatggttgagtttgc

SEQ ID NO: 460455 - DNA, 25 bp, Artificial
  probe
  misc_feature (1)..(25): SEQ ID NO: 7169; WAN024BS9; Start 87; Stop 111
caactggtacaaatggttgagtttg

SEQ ID NO: 460456 - DNA, 25 bp, Artificial
  probe
  misc_feature (1)..(25): SEQ ID NO: 7169; WAN024BS9; Start 31; Stop 55
aagatggatgtctctgacaaatacc

SEQ ID NO: 460457 - DNA, 25 bp, Artificial
  probe
  misc_feature (1)..(25): SEQ ID NO: 7169; WAN024BS9; Start 36; Stop 60
ggatgtctctgacaaataccagaaa

SEQ ID NO: 460458 - DNA, 25 bp, Artificial
  probe
  misc_feature (1)..(25): SEQ ID NO: 7169; WAN024BS9; Start 30; Stop 54
caagatggatgtctctgacaaatac

SEQ ID NO: 460459 - DNA, 25 bp, Artificial
  probe
  misc_feature (1)..(25): SEQ ID NO: 7169; WAN024BS9; Start 105; Stop 129
gagtttgcagcaggatctctattcc

SEQ ID NO: 460460 - DNA, 25 bp, Artificial
  probe
  misc_feature (1)..(25): SEQ ID NO: 7169; WAN024BS9; Start 33; Stop 57
gatggatgtctctgacaaataccag

SEQ ID NO: 460461 - DNA, 25 bp, Artificial
  probe
  misc_feature (1)..(25): SEQ ID NO: 7169; WAN024BS9; Start 29; Stop 53
gcaagatggatgtctctgacaaata

SEQ ID NO: 460462 - DNA, 25 bp, Artificial
  probe
  misc_feature (1)..(25): SEQ ID NO: 7169; WAN024BS9; Start 34; Stop 58
atggatgtctctgacaaataccaga

SEQ ID NO: 460463 - DNA, 25 bp, Artificial
  probe
  misc_feature (1)..(25): SEQ ID NO: 7169; WAN024BS9; Start 32; Stop 56
agatggatgtctctgacaaatacca

SEQ ID NO: 460464 - DNA, 25 bp, Artificial
  probe
  misc_feature (1)..(25): SEQ ID NO: 7169; WAN024BS9; Start 81; Stop 105
tttcgtcaactggtacaaatggttg

SEQ ID NO: 460465 - DNA, 25 bp, Artificial
  probe
  misc_feature (1)..(25): SEQ ID NO: 7169; WAN024BS9; Start 35; Stop 59
tggatgtctctgacaaataccagaa

SEQ ID NO: 460466 - DNA, 25 bp, Artificial
  probe
  misc_feature (1)..(25): SEQ ID NO: 7169; WAN024BS9; Start 90; Stop 114
ctggtacaaatggttgagtttgcag

SEQ ID NO: 460467 - DNA, 25 bp, Artificial
  probe
  misc_feature (1)..(25): SEQ ID NO: 7169; WAN024BS9; Start 97; Stop 121
aaatggttgagtttgcagcaggatc

SEQ ID NO: 460468 - DNA, 25 bp, Artificial
  probe
  misc_feature (1)..(25): SEQ ID NO: 7169; WAN024BS9; Start 28; Stop 52
agcaagatggatgtctctgacaaat

SEQ ID NO: 460469 - DNA, 25 bp, Artificial
  probe
  misc_feature (1)..(25): SEQ ID NO: 7169; WAN024BS9; Start 93; Stop 117
gtacaaatggttgagtttgcagcag

SEQ ID NO: 460470 - DNA, 25 bp, Artificial
  probe
  misc_feature (1)..(25): SEQ ID NO: 7169; WAN024BS9; Start 89; Stop 113
actggtacaaatggttgagtttgca

SEQ ID NO: 460471 - DNA, 25 bp, Artificial
  probe
  misc_feature (1)..(25): SEQ ID NO: 7169; WAN024BS9; Start 26; Stop 50
acagcaagatggatgtctctgacaa

SEQ ID NO: 460472 - DNA, 25 bp, Artificial
  probe
  misc_feature (1)..(25): SEQ ID NO: 7169; WAN024BS9; Start 101; Stop 125
ggttgagtttgcagcaggatctcta

SEQ ID NO: 460473 - DNA, 25 bp, Artificial
  probe
  misc_feature (1)..(25): SEQ ID NO: 7169; WAN024BS9; Start 27; Stop 51
cagcaagatggatgtctctgacaaa

SEQ ID NO: 460474 - DNA, 25 bp, Artificial
  probe
  misc_feature (1)..(25): SEQ ID NO: 7169; WAN024BS9; Start 98; Stop 122
aatggttgagtttgcagcaggatct

SEQ ID NO: 460475 - DNA, 25 bp, Artificial
  probe
  misc_feature (1)..(25): SEQ ID NO: 7169; WAN024BS9; Start 25; Stop 49
gacagcaagatggatgtctctgaca

SEQ ID NO: 460476 - DNA, 25 bp, Artificial
  probe
  misc_feature (1)..(25): SEQ ID NO: 7169; WAN024BS9; Start 106; Stop 130
agtttgcagcaggatctctattccg

SEQ ID NO: 460477 - DNA, 25 bp, Artificial
  probe
  misc_feature (1)..(25): SEQ ID NO: 7169; WAN024BS9; Start 94; Stop 118
tacaaatggttgagtttgcagcagg

SEQ ID NO: 460478 - DNA, 25 bp, Artificial
  probe
  misc_feature (1)..(25): SEQ ID NO: 7169; WAN024BS9; Start 37; Stop 61
gatgtctctgacaaataccagaaaa

SEQ ID NO: 460479 - DNA, 25 bp, Artificial
  probe
  misc_feature (1)..(25): SEQ ID NO: 7169; WAN024BS9; Start 108; Stop 132
tttgcagcaggatctctattccgtg

SEQ ID NO: 460480 - DNA, 25 bp, Artificial
  probe
  misc_feature (1)..(25): SEQ ID NO: 7169; WAN024BS9; Start 107; Stop 131
gtttgcagcaggatctctattccgt

SEQ ID NO: 460481 - DNA, 25 bp, Artificial
  probe
  misc_feature (1)..(25): SEQ ID NO: 7169; WAN024BS9; Start 96; Stop 120
caaatggttgagtttgcagcaggat

SEQ ID NO: 460482 - DNA, 25 bp, Artificial
  probe
  misc_feature (1)..(25): SEQ ID NO: 7169; WAN024BS9; Start 92; Stop 116
ggtacaaatggttgagtttgcagca

SEQ ID NO: 460483 - DNA, 25 bp, Artificial
  probe
  misc_feature (1)..(25): SEQ ID NO: 7170; WAN024BBI; Start 4; Stop 28
ttgcttcgtcagtttcatctacaac

SEQ ID NO: 460484 - DNA, 25 bp, Artificial
  probe
  misc_feature (1)..(25): SEQ ID NO: 7170; WAN024BBI; Start 3; Stop 27
gttgcttcgtcagtttcatctacaa

SEQ ID NO: 460485 - DNA, 25 bp, Artificial
  probe
  misc_feature (1)..(25): SEQ ID NO: 7170; WAN024BBI; Start 1; Stop 25
ctgttgcttcgtcagtttcatctac

SEQ ID NO: 460486 - DNA, 25 bp, Artificial
  probe
  misc_feature (1)..(25): SEQ ID NO: 7170; WAN024BBI; Start 6; Stop 30
gcttcgtcagtttcatctacaacct

SEQ ID NO: 460487 - DNA, 25 bp, Artificial
  probe
  misc_feature (1)..(25): SEQ ID NO: 7170; WAN024BBI; Start 2; Stop 26
tgttgcttcgtcagtttcatctaca

SEQ ID NO: 460488 - DNA, 25 bp, Artificial
  probe
  misc_feature (1)..(25): SEQ ID NO: 7170; WAN024BBI; Start 5; Stop 29
tgcttcgtcagtttcatctacaacc

SEQ ID NO: 460489 - DNA, 25 bp, Artificial
  probe
  misc_feature (1)..(25): SEQ ID NO: 7170; WAN024BBI; Start 60; Stop 84
tttcatctacaacctcaaaactgtg

SEQ ID NO: 460490 - DNA, 25 bp, Artificial
  probe
  misc_feature (1)..(25): SEQ ID NO: 7170; WAN024BBI; Start 62; Stop 86
tcatctacaacctcaaaactgtgtt

SEQ ID NO: 460491 - DNA, 25 bp, Artificial
  probe
  misc_feature (1)..(25): SEQ ID NO: 7170; WAN024BBI; Start 61; Stop 85
ttcatctacaacctcaaaactgtgt

SEQ ID NO: 460492 - DNA, 25 bp, Artificial
  probe
  misc_feature (1)..(25): SEQ ID NO: 7170; WAN024BBI; Start 63; Stop 87
catctacaacctcaaaactgtgttt

SEQ ID NO: 460493 - DNA, 25 bp, Artificial
  probe
  misc_feature (1)..(25): SEQ ID NO: 7170; WAN024BBI; Start 59; Stop 83
gtttcatctacaacctcaaaactgt

SEQ ID NO: 460494 - DNA, 25 bp, Artificial
  probe
  misc_feature (1)..(25): SEQ ID NO: 7170; WAN024BBI; Start 47; Stop 71
gtgacttcgtcagtttcatctacaa

SEQ ID NO: 460495 - DNA, 25 bp, Artificial
  probe
  misc_feature (1)..(25): SEQ ID NO: 7170; WAN024BBI; Start 45; Stop 69
gagtgacttcgtcagtttcatctac

SEQ ID NO: 460496 - DNA, 25 bp, Artificial
  probe
  misc_feature (1)..(25): SEQ ID NO: 7170; WAN024BBI; Start 44; Stop 68
tgagtgacttcgtcagtttcatcta

SEQ ID NO: 460497 - DNA, 25 bp, Artificial
  probe
  misc_feature (1)..(25): SEQ ID NO: 7170; WAN024BBI; Start 42; Stop 66
tttgagtgacttcgtcagtttcatc

SEQ ID NO: 460498 - DNA, 25 bp, Artificial
  probe
  misc_feature (1)..(25): SEQ ID NO: 7170; WAN024BBI; Start 46; Stop 70
agtgacttcgtcagtttcatctaca

SEQ ID NO: 460499 - DNA, 25 bp, Artificial
  probe
  misc_feature (1)..(25): SEQ ID NO: 7170; WAN024BBI; Start 43; Stop 67
ttgagtgacttcgtcagtttcatct

SEQ ID NO: 460500 - DNA, 25 bp, Artificial
  probe
  misc_feature (1)..(25): SEQ ID NO: 7170; WAN024BBI; Start 33; Stop 57
aaaccatgttttgagtgacttcgtc

SEQ ID NO: 460501 - DNA, 25 bp, Artificial
  probe
  misc_feature (1)..(25): SEQ ID NO: 7170; WAN024BBI; Start 41; Stop 65
ttttgagtgacttcgtcagtttcat

SEQ ID NO: 460502 - DNA, 25 bp, Artificial
  probe
  misc_feature (1)..(25): SEQ ID NO: 7170; WAN024BBI; Start 38; Stop 62
atgttttgagtgacttcgtcagttt

SEQ ID NO: 460503 - DNA, 25 bp, Artificial
  probe
  misc_feature (1)..(25): SEQ ID NO: 7170; WAN024BBI; Start 40; Stop 64
gttttgagtgacttcgtcagtttca

SEQ ID NO: 460504 - DNA, 25 bp, Artificial
  probe
  misc_feature (1)..(25): SEQ ID NO: 7170; WAN024BBI; Start 39; Stop 63
tgttttgagtgacttcgtcagtttc

SEQ ID NO: 460505 - DNA, 25 bp, Artificial
  probe
  misc_feature (1)..(25): SEQ ID NO: 7170; WAN024BBI; Start 37; Stop 61
catgttttgagtgacttcgtcagtt

SEQ ID NO: 460506 - DNA, 25 bp, Artificial
  probe
  misc_feature (1)..(25): SEQ ID NO: 7170; WAN024BBI; Start 34; Stop 58
aaccatgttttgagtgacttcgtca

SEQ ID NO: 460507 - DNA, 25 bp, Artificial
  probe
  misc_feature (1)..(25): SEQ ID NO: 7170; WAN024BBI; Start 58; Stop 82
agtttcatctacaacctcaaaactg

SEQ ID NO: 460508 - DNA, 25 bp, Artificial
  probe
  misc_feature (1)..(25): SEQ ID NO: 7170; WAN024BBI; Start 57; Stop 81
cagtttcatctacaacctcaaaact

SEQ ID NO: 460509 - DNA, 25 bp, Artificial
  probe
  misc_feature (1)..(25): SEQ ID NO: 7170; WAN024BBI; Start 32; Stop 56
aaaaccatgttttgagtgacttcgt

SEQ ID NO: 460510 - DNA, 25 bp, Artificial
  probe
  misc_feature (1)..(25): SEQ ID NO: 7170; WAN024BBI; Start 36; Stop 60
ccatgttttgagtgacttcgtcagt

SEQ ID NO: 460511 - DNA, 25 bp, Artificial
  probe
  misc_feature (1)..(25): SEQ ID NO: 7170; WAN024BBI; Start 35; Stop 59
accatgttttgagtgacttcgtcag

SEQ ID NO: 460512 - DNA, 25 bp, Artificial
  probe
  misc_feature (1)..(25): SEQ ID NO: 7171; WAN024D28; Start 4; Stop 28
ttggtttatggggtgattcaagaac

SEQ ID NO: 460513 - DNA, 25 bp, Artificial
  probe
  misc_feature (1)..(25): SEQ ID NO: 7171; WAN024D28; Start 3; Stop 27
gttggtttatggggtgattcaagaa

SEQ ID NO: 460514 - DNA, 25 bp, Artificial
  probe
  misc_feature (1)..(25): SEQ ID NO: 7171; WAN024D28; Start 6; Stop 30
ggtttatggggtgattcaagaacag

SEQ ID NO: 460515 - DNA, 25 bp, Artificial
  probe
  misc_feature (1)..(25): SEQ ID NO: 7171; WAN024D28; Start 1; Stop 25
ctgttggtttatggggtgattcaag

SEQ ID NO: 460516 - DNA, 25 bp, Artificial
  probe
  misc_feature (1)..(25): SEQ ID NO: 7171; WAN024D28; Start 7; Stop 31
gtttatggggtgattcaagaacagc

SEQ ID NO: 460517 - DNA, 25 bp, Artificial
  probe
  misc_feature (1)..(25): SEQ ID NO: 7171; WAN024D28; Start 5; Stop 29
tggtttatggggtgattcaagaaca

SEQ ID NO: 460518 - DNA, 25 bp, Artificial
  probe
  misc_feature (1)..(25): SEQ ID NO: 7171; WAN024D28; Start 2; Stop 26
tgttggtttatggggtgattcaaga

SEQ ID NO: 460519 - DNA, 25 bp, Artificial
  probe
  misc_feature (1)..(25): SEQ ID NO: 7171; WAN024D28; Start 16; Stop 40
gtgattcaagaacagcctgaaagtg

SEQ ID NO: 460520 - DNA, 25 bp, Artificial
  probe
  misc_feature (1)..(25): SEQ ID NO: 7171; WAN024D28; Start 8; Stop 32
tttatggggtgattcaagaacagcc

SEQ ID NO: 460521 - DNA, 25 bp, Artificial
  probe
  misc_feature (1)..(25): SEQ ID NO: 7171; WAN024D28; Start 15; Stop 39
ggtgattcaagaacagcctgaaagt

SEQ ID NO: 460522 - DNA, 25 bp, Artificial
  probe
  misc_feature (1)..(25): SEQ ID NO: 7171; WAN024D28; Start 18; Stop 42
gattcaagaacagcctgaaagtgct

SEQ ID NO: 460523 - DNA, 25 bp, Artificial
  probe
  misc_feature (1)..(25): SEQ ID NO: 7171; WAN024D28; Start 9; Stop 33
ttatggggtgattcaagaacagcct

SEQ ID NO: 460524 - DNA, 25 bp, Artificial
  probe
  misc_feature (1)..(25): SEQ ID NO: 7171; WAN024D28; Start 17; Stop 41
tgattcaagaacagcctgaaagtgc

SEQ ID NO: 460525 - DNA, 25 bp, Artificial
  probe
  misc_feature (1)..(25): SEQ ID NO: 7171; WAN024D28; Start 14; Stop 38
gggtgattcaagaacagcctgaaag

SEQ ID NO: 460526 - DNA, 25 bp, Artificial
  probe
  misc_feature (1)..(25): SEQ ID NO: 7171; WAN024D28; Start 10; Stop 34
tatggggtgattcaagaacagcctg

SEQ ID NO: 460527 - DNA, 25 bp, Artificial
  probe
  misc_feature (1)..(25): SEQ ID NO: 7172; WAN024BYV; Start 29; Stop 53
aagcgattggaggaaatgaactaat

SEQ ID NO: 460528 - DNA, 25 bp, Artificial
  probe
  misc_feature (1)..(25): SEQ ID NO: 7172; WAN024BYV; Start 28; Stop 52
caagcgattggaggaaatgaactaa

SEQ ID NO: 460529 - DNA, 25 bp, Artificial
  probe
  misc_feature (1)..(25): SEQ ID NO: 7172; WAN024BYV; Start 1; Stop 25
ctgttgttagaccctttcggaaatc

SEQ ID NO: 460530 - DNA, 25 bp, Artificial
  probe
  misc_feature (1)..(25): SEQ ID NO: 7172; WAN024BYV; Start 27; Stop 51
tcaagcgattggaggaaatgaacta

SEQ ID NO: 460531 - DNA, 25 bp, Artificial
  probe
  misc_feature (1)..(25): SEQ ID NO: 7172; WAN024BYV; Start 37; Stop 61
ggaggaaatgaactaatccacagtg

SEQ ID NO: 460532 - DNA, 25 bp, Artificial
  probe
  misc_feature (1)..(25): SEQ ID NO: 7172; WAN024BYV; Start 30; Stop 54
agcgattggaggaaatgaactaatc

SEQ ID NO: 460533 - DNA, 25 bp, Artificial
  probe
  misc_feature (1)..(25): SEQ ID NO: 7172; WAN024BYV; Start 31; Stop 55
gcgattggaggaaatgaactaatcc

SEQ ID NO: 460534 - DNA, 25 bp, Artificial
  probe
  misc_feature (1)..(25): SEQ ID NO: 7172; WAN024BYV; Start 3; Stop 27
gttgttagaccctttcggaaatcgt

SEQ ID NO: 460535 - DNA, 25 bp, Artificial
  probe
  misc_feature (1)..(25): SEQ ID NO: 7172; WAN024BYV; Start 2; Stop 26
tgttgttagaccctttcggaaatcg

SEQ ID NO: 460536 - DNA, 25 bp, Artificial
  probe
  misc_feature (1)..(25): SEQ ID NO: 7172; WAN024BYV; Start 7; Stop 31
ttagaccctttcggaaatcgtcaag

SEQ ID NO: 460537 - DNA, 25 bp, Artificial
  probe
  misc_feature (1)..(25): SEQ ID NO: 7172; WAN024BYV; Start 38; Stop 62
gaggaaatgaactaatccacagtgg

SEQ ID NO: 460538 - DNA, 25 bp, Artificial
  probe
  misc_feature (1)..(25): SEQ ID NO: 7172; WAN024BYV; Start 6; Stop 30
gttagaccctttcggaaatcgtcaa

SEQ ID NO: 460539 - DNA, 25 bp, Artificial
  probe
  misc_feature (1)..(25): SEQ ID NO: 7172; WAN024BYV; Start 4; Stop 28
ttgttagaccctttcggaaatcgtc

SEQ ID NO: 460540 - DNA, 25 bp, Artificial
  probe
  misc_feature (1)..(25): SEQ ID NO: 7172; WAN024BYV; Start 41; Stop 65
gaaatgaactaatccacagtggctt

SEQ ID NO: 460541 - DNA, 25 bp, Artificial
  probe
  misc_feature (1)..(25): SEQ ID NO: 7172; WAN024BYV; Start 26; Stop 50
gtcaagcgattggaggaaatgaact

SEQ ID NO: 460542 - DNA, 25 bp, Artificial
  probe
  misc_feature (1)..(25): SEQ ID NO: 7172; WAN024BYV; Start 5; Stop 29
tgttagaccctttcggaaatcgtca

SEQ ID NO: 460543 - DNA, 25 bp, Artificial
  probe
  misc_feature (1)..(25): SEQ ID NO: 7172; WAN024BYV; Start 40; Stop 64
ggaaatgaactaatccacagtggct

SEQ ID NO: 460544 - DNA, 25 bp, Artificial
  probe
  misc_feature (1)..(25): SEQ ID NO: 7172; WAN024BYV; Start 39; Stop 63
aggaaatgaactaatccacagtggc

SEQ ID NO: 460545 - DNA, 25 bp, Artificial
  probe
  misc_feature (1)..(25): SEQ ID NO: 7172; WAN024BYV; Start 25; Stop 49
cgtcaagcgattggaggaaatgaac

SEQ ID NO: 460546 - DNA, 25 bp, Artificial
  probe
  misc_feature (1)..(25): SEQ ID NO: 7172; WAN024BYV; Start 34; Stop 58
attggaggaaatgaactaatccaca

SEQ ID NO: 460547 - DNA, 25 bp, Artificial
  probe
  misc_feature (1)..(25): SEQ ID NO: 7172; WAN024BYV; Start 33; Stop 57
gattggaggaaatgaactaatccac

SEQ ID NO: 460548 - DNA, 25 bp, Artificial
  probe
  misc_feature (1)..(25): SEQ ID NO: 7172; WAN024BYV; Start 35; Stop 59
ttggaggaaatgaactaatccacag

SEQ ID NO: 460549 - DNA, 25 bp, Artificial
  probe
  misc_feature (1)..(25): SEQ ID NO: 7172; WAN024BYV; Start 32; Stop 56
cgattggaggaaatgaactaatcca

SEQ ID NO: 460550 - DNA, 25 bp, Artificial
  probe
  misc_feature (1)..(25): SEQ ID NO: 7172; WAN024BYV; Start 36; Stop 60
tggaggaaatgaactaatccacagt

SEQ ID NO: 460551 - DNA, 25 bp, Artificial
  probe
  misc_feature (1)..(25): SEQ ID NO: 7172; WAN024BYV; Start 8; Stop 32
tagaccctttcggaaatcgtcaagc

SEQ ID NO: 460552 - DNA, 25 bp, Artificial
  probe
  misc_feature (1)..(25): SEQ ID NO: 7172; WAN024BYV; Start 24; Stop 48
tcgtcaagcgattggaggaaatgaa

SEQ ID NO: 460553 - DNA, 25 bp, Artificial
  probe
  misc_feature (1)..(25): SEQ ID NO: 7172; WAN024BYV; Start 23; Stop 47
atcgtcaagcgattggaggaaatga

SEQ ID NO: 460554 - DNA, 25 bp, Artificial
  probe
  misc_feature (1)..(25): SEQ ID NO: 7173; WAN024BZI; Start 15; Stop 39
ttatgtaggaaccgacctctttcta

SEQ ID NO: 460555 - DNA, 25 bp, Artificial
  probe
  misc_feature (1)..(25): SEQ ID NO: 7173; WAN024BZI; Start 14; Stop 38
tttatgtaggaaccgacctctttct

SEQ ID NO: 460556 - DNA, 25 bp, Artificial
  probe
  misc_feature (1)..(25): SEQ ID NO: 7173; WAN024BZI; Start 37; Stop 61
ctaccagggaaagatgaatgcaatc

SEQ ID NO: 460557 - DNA, 25 bp, Artificial
  probe
  misc_feature (1)..(25): SEQ ID NO: 7173; WAN024BZI; Start 16; Stop 40
tatgtaggaaccgacctctttctac

SEQ ID NO: 460558 - DNA, 25 bp, Artificial
  probe
  misc_feature (1)..(25): SEQ ID NO: 7173; WAN024BZI; Start 36; Stop 60
tctaccagggaaagatgaatgcaat

SEQ ID NO: 460559 - DNA, 25 bp, Artificial
  probe
  misc_feature (1)..(25): SEQ ID NO: 7173; WAN024BZI; Start 35; Stop 59
ttctaccagggaaagatgaatgcaa

SEQ ID NO: 460560 - DNA, 25 bp, Artificial
  probe
  misc_feature (1)..(25): SEQ ID NO: 7173; WAN024BZI; Start 45; Stop 69
gaaagatgaatgcaatcgtgtccat

SEQ ID NO: 460561 - DNA, 25 bp, Artificial
  probe
  misc_feature (1)..(25): SEQ ID NO: 7173; WAN024BZI; Start 13; Stop 37
ttttatgtaggaaccgacctctttc

SEQ ID NO: 460562 - DNA, 25 bp, Artificial
  probe
  misc_feature (1)..(25): SEQ ID NO: 7173; WAN024BZI; Start 38; Stop 62
taccagggaaagatgaatgcaatcg

SEQ ID NO: 460563 - DNA, 25 bp, Artificial
  probe
  misc_feature (1)..(25): SEQ ID NO: 7173; WAN024BZI; Start 34; Stop 58
tttctaccagggaaagatgaatgca

SEQ ID NO: 460564 - DNA, 25 bp, Artificial
  probe
  misc_feature (1)..(25): SEQ ID NO: 7173; WAN024BZI; Start 42; Stop 66
agggaaagatgaatgcaatcgtgtc

SEQ ID NO: 460565 - DNA, 25 bp, Artificial
  probe
  misc_feature (1)..(25): SEQ ID NO: 7173; WAN024BZI; Start 17; Stop 41
atgtaggaaccgacctctttctacc

SEQ ID NO: 460566 - DNA, 25 bp, Artificial
  probe
  misc_feature (1)..(25): SEQ ID NO: 7173; WAN024BZI; Start 41; Stop 65
cagggaaagatgaatgcaatcgtgt

SEQ ID NO: 460567 - DNA, 25 bp, Artificial
  probe
  misc_feature (1)..(25): SEQ ID NO: 7173; WAN024BZI; Start 50; Stop 74
atgaatgcaatcgtgtccatctttt

SEQ ID NO: 460568 - DNA, 25 bp, Artificial
  probe
  misc_feature (1)..(25): SEQ ID NO: 7173; WAN024BZI; Start 49; Stop 73
gatgaatgcaatcgtgtccatcttt

SEQ ID NO: 460569 - DNA, 25 bp, Artificial
  probe
  misc_feature (1)..(25): SEQ ID NO: 7173; WAN024BZI; Start 46; Stop 70
aaagatgaatgcaatcgtgtccatc

SEQ ID NO: 460570 - DNA, 25 bp, Artificial
  probe
  misc_feature (1)..(25): SEQ ID NO: 7173; WAN024BZI; Start 19; Stop 43
gtaggaaccgacctctttctaccag

SEQ ID NO: 460571 - DNA, 25 bp, Artificial
  probe
  misc_feature (1)..(25): SEQ ID NO: 7173; WAN024BZI; Start 44; Stop 68
ggaaagatgaatgcaatcgtgtcca

SEQ ID NO: 460572 - DNA, 25 bp, Artificial
  probe
  misc_feature (1)..(25): SEQ ID NO: 7173; WAN024BZI; Start 20; Stop 44
taggaaccgacctctttctaccagg

SEQ ID NO: 460573 - DNA, 25 bp, Artificial
  probe
  misc_feature (1)..(25): SEQ ID NO: 7173; WAN024BZI; Start 40; Stop 64
ccagggaaagatgaatgcaatcgtg

SEQ ID NO: 460574 - DNA, 25 bp, Artificial
  probe
  misc_feature (1)..(25): SEQ ID NO: 7173; WAN024BZI; Start 18; Stop 42
tgtaggaaccgacctctttctacca

SEQ ID NO: 460575 - DNA, 25 bp, Artificial
  probe
  misc_feature (1)..(25): SEQ ID NO: 7173; WAN024BZI; Start 39; Stop 63
accagggaaagatgaatgcaatcgt

SEQ ID NO: 460576 - DNA, 25 bp, Artificial
  probe
  misc_feature (1)..(25): SEQ ID NO: 7173; WAN024BZI; Start 43; Stop 67
gggaaagatgaatgcaatcgtgtcc

SEQ ID NO: 460577 - DNA, 25 bp, Artificial
  probe
  misc_feature (1)..(25): SEQ ID NO: 7173; WAN024BZI; Start 24; Stop 48
aaccgacctctttctaccagggaaa

SEQ ID NO: 460578 - DNA, 25 bp, Artificial
  probe
  misc_feature (1)..(25): SEQ ID NO: 7174; WAN024DQZ; Start 23; Stop 47
tgtggaataagattaatgaaggact

SEQ ID NO: 460579 - DNA, 25 bp, Artificial
  probe
  misc_feature (1)..(25): SEQ ID NO: 7174; WAN024DQZ; Start 22; Stop 46
gtgtggaataagattaatgaaggac

SEQ ID NO: 460580 - DNA, 25 bp, Artificial
  probe
  misc_feature (1)..(25): SEQ ID NO: 7174; WAN024DQZ; Start 21; Stop 45
agtgtggaataagattaatgaagga

SEQ ID NO: 460581 - DNA, 25 bp, Artificial
  probe
  misc_feature (1)..(25): SEQ ID NO: 7174; WAN024DQZ; Start 24; Stop 48
gtggaataagattaatgaaggactg

SEQ ID NO: 460582 - DNA, 25 bp, Artificial
  probe
  misc_feature (1)..(25): SEQ ID NO: 7174; WAN024DQZ; Start 25; Stop 49
tggaataagattaatgaaggactga

SEQ ID NO: 460583 - DNA, 25 bp, Artificial
  probe
  misc_feature (1)..(25): SEQ ID NO: 7174; WAN024DQZ; Start 26; Stop 50
ggaataagattaatgaaggactgag

SEQ ID NO: 460584 - DNA, 25 bp, Artificial
  probe
  misc_feature (1)..(25): SEQ ID NO: 7174; WAN024DQZ; Start 20; Stop 44
tagtgtggaataagattaatgaagg

SEQ ID NO: 460585 - DNA, 25 bp, Artificial
  probe
  misc_feature (1)..(25): SEQ ID NO: 7174; WAN024DQZ; Start 27; Stop 51
gaataagattaatgaaggactgaga

SEQ ID NO: 460586 - DNA, 25 bp, Artificial
  probe
  misc_feature (1)..(25): SEQ ID NO: 7174; WAN024DQZ; Start 28; Stop 52
aataagattaatgaaggactgagaa

SEQ ID NO: 460587 - DNA, 25 bp, Artificial
  probe
  misc_feature (1)..(25): SEQ ID NO: 7174; WAN024DQZ; Start 32; Stop 56
agattaatgaaggactgagaaatca

SEQ ID NO: 460588 - DNA, 25 bp, Artificial
  probe
  misc_feature (1)..(25): SEQ ID NO: 7174; WAN024DQZ; Start 9; Stop 33
ccatacctatttagtgtggaataag

SEQ ID NO: 460589 - DNA, 25 bp, Artificial
  probe
  misc_feature (1)..(25): SEQ ID NO: 7174; WAN024DQZ; Start 10; Stop 34
catacctatttagtgtggaataaga

SEQ ID NO: 460590 - DNA, 25 bp, Artificial
  probe
  misc_feature (1)..(25): SEQ ID NO: 7174; WAN024DQZ; Start 31; Stop 55
aagattaatgaaggactgagaaatc

SEQ ID NO: 460591 - DNA, 25 bp, Artificial
  probe
  misc_feature (1)..(25): SEQ ID NO: 7174; WAN024DQZ; Start 30; Stop 54
taagattaatgaaggactgagaaat

SEQ ID NO: 460592 - DNA, 25 bp, Artificial
  probe
  misc_feature (1)..(25): SEQ ID NO: 7174; WAN024DQZ; Start 29; Stop 53
ataagattaatgaaggactgagaaa

SEQ ID NO: 460593 - DNA, 25 bp, Artificial
  probe
  misc_feature (1)..(25): SEQ ID NO: 7174; WAN024DQZ; Start 13; Stop 37
acctatttagtgtggaataagatta

SEQ ID NO: 460594 - DNA, 25 bp, Artificial
  probe
  misc_feature (1)..(25): SEQ ID NO: 7174; WAN024DQZ; Start 12; Stop 36
tacctatttagtgtggaataagatt

SEQ ID NO: 460595 - DNA, 25 bp, Artificial
  probe
  misc_feature (1)..(25): SEQ ID NO: 7174; WAN024DQZ; Start 33; Stop 57
gattaatgaaggactgagaaatcag

SEQ ID NO: 460596 - DNA, 25 bp, Artificial
  probe
  misc_feature (1)..(25): SEQ ID NO: 7174; WAN024DQZ; Start 11; Stop 35
atacctatttagtgtggaataagat

SEQ ID NO: 460597 - DNA, 25 bp, Artificial
  probe
  misc_feature (1)..(25): SEQ ID NO: 7175; WAN024F6P; Start 5; Stop 29
ttcaactgggaacatctccatcttt

SEQ ID NO: 460598 - DNA, 25 bp, Artificial
  probe
  misc_feature (1)..(25): SEQ ID NO: 7175; WAN024F6P; Start 4; Stop 28
tttcaactgggaacatctccatctt

SEQ ID NO: 460599 - DNA, 25 bp, Artificial
  probe
  misc_feature (1)..(25): SEQ ID NO: 7175; WAN024F6P; Start 75; Stop 99
gcaaacacttttctcagaggatttt

SEQ ID NO: 460600 - DNA, 25 bp, Artificial
  probe
  misc_feature (1)..(25): SEQ ID NO: 7175; WAN024F6P; Start 8; Stop 32
aactgggaacatctccatctttctc

SEQ ID NO: 460601 - DNA, 25 bp, Artificial
  probe
  misc_feature (1)..(25): SEQ ID NO: 7175; WAN024F6P; Start 12; Stop 36
gggaacatctccatctttctcagat

SEQ ID NO: 460602 - DNA, 25 bp, Artificial
  probe
  misc_feature (1)..(25): SEQ ID NO: 7175; WAN024F6P; Start 7; Stop 31
caactgggaacatctccatctttct

SEQ ID NO: 460603 - DNA, 25 bp, Artificial
  probe
  misc_feature (1)..(25): SEQ ID NO: 7175; WAN024F6P; Start 76; Stop 100
caaacacttttctcagaggattttc

SEQ ID NO: 460604 - DNA, 25 bp, Artificial
  probe
  misc_feature (1)..(25): SEQ ID NO: 7175; WAN024F6P; Start 6; Stop 30
tcaactgggaacatctccatctttc

SEQ ID NO: 460605 - DNA, 25 bp, Artificial
  probe
  misc_feature (1)..(25): SEQ ID NO: 7175; WAN024F6P; Start 10; Stop 34
ctgggaacatctccatctttctcag

SEQ ID NO: 460606 - DNA, 25 bp, Artificial
  probe
  misc_feature (1)..(25): SEQ ID NO: 7175; WAN024F6P; Start 3; Stop 27
gtttcaactgggaacatctccatct

SEQ ID NO: 460607 - DNA, 25 bp, Artificial
  probe
  misc_feature (1)..(25): SEQ ID NO: 7175; WAN024F6P; Start 28; Stop 52
ttctcagatggagactcttcctcaa

SEQ ID NO: 460608 - DNA, 25 bp, Artificial
  probe
  misc_feature (1)..(25): SEQ ID NO: 7175; WAN024F6P; Start 74; Stop 98
ggcaaacacttttctcagaggattt

SEQ ID NO: 460609 - DNA, 25 bp, Artificial
  probe
  misc_feature (1)..(25): SEQ ID NO: 7175; WAN024F6P; Start 11; Stop 35
tgggaacatctccatctttctcaga

SEQ ID NO: 460610 - DNA, 25 bp, Artificial
  probe
  misc_feature (1)..(25): SEQ ID NO: 7175; WAN024F6P; Start 9; Stop 33
actgggaacatctccatctttctca

SEQ ID NO: 460611 - DNA, 25 bp, Artificial
  probe
  misc_feature (1)..(25): SEQ ID NO: 7175; WAN024F6P; Start 77; Stop 101
aaacacttttctcagaggattttcc

SEQ ID NO: 460612 - DNA, 25 bp, Artificial
  probe
  misc_feature (1)..(25): SEQ ID NO: 7175; WAN024F6P; Start 78; Stop 102
aacacttttctcagaggattttcca

SEQ ID NO: 460613 - DNA, 25 bp, Artificial
  probe
  misc_feature (1)..(25): SEQ ID NO: 7175; WAN024F6P; Start 24; Stop 48
atctttctcagatggagactcttcc

SEQ ID NO: 460614 - DNA, 25 bp, Artificial
  probe
  misc_feature (1)..(25): SEQ ID NO: 7175; WAN024F6P; Start 30; Stop 54
ctcagatggagactcttcctcaaaa

SEQ ID NO: 460615 - DNA, 25 bp, Artificial
  probe
  misc_feature (1)..(25): SEQ ID NO: 7175; WAN024F6P; Start 26; Stop 50
ctttctcagatggagactcttcctc

SEQ ID NO: 460616 - DNA, 25 bp, Artificial
  probe
  misc_feature (1)..(25): SEQ ID NO: 7175; WAN024F6P; Start 25; Stop 49
tctttctcagatggagactcttcct

SEQ ID NO: 460617 - DNA, 25 bp, Artificial
  probe
  misc_feature (1)..(25): SEQ ID NO: 7175; WAN024F6P; Start 29; Stop 53
tctcagatggagactcttcctcaaa

SEQ ID NO: 460618 - DNA, 25 bp, Artificial
  probe
  misc_feature (1)..(25): SEQ ID NO: 7175; WAN024F6P; Start 27; Stop 51
tttctcagatggagactcttcctca

SEQ ID NO: 460619 - DNA, 25 bp, Artificial
  probe
  misc_feature (1)..(25): SEQ ID NO: 7175; WAN024F6P; Start 73; Stop 97
gggcaaacacttttctcagaggatt

SEQ ID NO: 460620 - DNA, 25 bp, Artificial
  probe
  misc_feature (1)..(25): SEQ ID NO: 7175; WAN024F6P; Start 2; Stop 26
tgtttcaactgggaacatctccatc

SEQ ID NO: 460621 - DNA, 25 bp, Artificial
  probe
  misc_feature (1)..(25): SEQ ID NO: 7175; WAN024F6P; Start 1; Stop 25
ctgtttcaactgggaacatctccat

SEQ ID NO: 460622 - DNA, 25 bp, Artificial
  probe
  misc_feature (1)..(25): SEQ ID NO: 7175; WAN024F6P; Start 70; Stop 94
gaagggcaaacacttttctcagagg

SEQ ID NO: 460623 - DNA, 25 bp, Artificial
  probe
  misc_feature (1)..(25): SEQ ID NO: 7175; WAN024F6P; Start 61; Stop 85
agttgtccagaagggcaaacacttt

SEQ ID NO: 460624 - DNA, 25 bp, Artificial
  probe
  misc_feature (1)..(25): SEQ ID NO: 7175; WAN024F6P; Start 72; Stop 96
agggcaaacacttttctcagaggat

SEQ ID NO: 460625 - DNA, 25 bp, Artificial
  probe
  misc_feature (1)..(25): SEQ ID NO: 7175; WAN024F6P; Start 71; Stop 95
aagggcaaacacttttctcagagga

SEQ ID NO: 460626 - DNA, 25 bp, Artificial
  probe
  misc_feature (1)..(25): SEQ ID NO: 7175; WAN024F6P; Start 63; Stop 87
ttgtccagaagggcaaacacttttc

SEQ ID NO: 460627 - DNA, 25 bp, Artificial
  probe
  misc_feature (1)..(25): SEQ ID NO: 7175; WAN024F6P; Start 69; Stop 93
agaagggcaaacacttttctcagag

SEQ ID NO: 460628 - DNA, 25 bp, Artificial
  probe
  misc_feature (1)..(25): SEQ ID NO: 7175; WAN024F6P; Start 68; Stop 92
cagaagggcaaacacttttctcaga

SEQ ID NO: 460629 - DNA, 25 bp, Artificial
  probe
  misc_feature (1)..(25): SEQ ID NO: 7175; WAN024F6P; Start 62; Stop 86
gttgtccagaagggcaaacactttt

SEQ ID NO: 460630 - DNA, 25 bp, Artificial
  probe
  misc_feature (1)..(25): SEQ ID NO: 7176; WAN024BTN; Start 27; Stop 51
tttgttcgctttctttatatttgga

SEQ ID NO: 460631 - DNA, 25 bp, Artificial
  probe
  misc_feature (1)..(25): SEQ ID NO: 7176; WAN024BTN; Start 28; Stop 52
ttgttcgctttctttatatttggaa

SEQ ID NO: 460632 - DNA, 25 bp, Artificial
  probe
  misc_feature (1)..(25): SEQ ID NO: 7176; WAN024BTN; Start 29; Stop 53
tgttcgctttctttatatttggaat

SEQ ID NO: 460633 - DNA, 25 bp, Artificial
  probe
  misc_feature (1)..(25): SEQ ID NO: 7176; WAN024BTN; Start 30; Stop 54
gttcgctttctttatatttggaatt

SEQ ID NO: 460634 - DNA, 25 bp, Artificial
  probe
  misc_feature (1)..(25): SEQ ID NO: 7176; WAN024BTN; Start 45; Stop 69
atttggaattatactcctatctccc

SEQ ID NO: 460635 - DNA, 25 bp, Artificial
  probe
  misc_feature (1)..(25): SEQ ID NO: 7176; WAN024BTN; Start 20; Stop 44
attctgttttgttcgctttctttat

SEQ ID NO: 460636 - DNA, 25 bp, Artificial
  probe
  misc_feature (1)..(25): SEQ ID NO: 7176; WAN024BTN; Start 19; Stop 43
aattctgttttgttcgctttcttta

SEQ ID NO: 460637 - DNA, 25 bp, Artificial
  probe
  misc_feature (1)..(25): SEQ ID NO: 7176; WAN024BTN; Start 21; Stop 45
ttctgttttgttcgctttctttata

SEQ ID NO: 460638 - DNA, 25 bp, Artificial
  probe
  misc_feature (1)..(25): SEQ ID NO: 7176; WAN024BTN; Start 48; Stop 72
tggaattatactcctatctcccctt

SEQ ID NO: 460639 - DNA, 25 bp, Artificial
  probe
  misc_feature (1)..(25): SEQ ID NO: 7176; WAN024BTN; Start 47; Stop 71
ttggaattatactcctatctcccct

SEQ ID NO: 460640 - DNA, 25 bp, Artificial
  probe
  misc_feature (1)..(25): SEQ ID NO: 7176; WAN024BTN; Start 22; Stop 46
tctgttttgttcgctttctttatat

SEQ ID NO: 460641 - DNA, 25 bp, Artificial
  probe
  misc_feature (1)..(25): SEQ ID NO: 7176; WAN024BTN; Start 46; Stop 70
tttggaattatactcctatctcccc

SEQ ID NO: 460642 - DNA, 25 bp, Artificial
  probe
  misc_feature (1)..(25): SEQ ID NO: 7176; WAN024BTN; Start 49; Stop 73
ggaattatactcctatctccccttt

SEQ ID NO: 460643 - DNA, 25 bp, Artificial
  probe
  misc_feature (1)..(25): SEQ ID NO: 7176; WAN024BTN; Start 26; Stop 50
ttttgttcgctttctttatatttgg

SEQ ID NO: 460644 - DNA, 25 bp, Artificial
  probe
  misc_feature (1)..(25): SEQ ID NO: 7176; WAN024BTN; Start 50; Stop 74
gaattatactcctatctcccctttt

SEQ ID NO: 460645 - DNA, 25 bp, Artificial
  probe
  misc_feature (1)..(25): SEQ ID NO: 7176; WAN024BTN; Start 23; Stop 47
ctgttttgttcgctttctttatatt

SEQ ID NO: 460646 - DNA, 25 bp, Artificial
  probe
  misc_feature (1)..(25): SEQ ID NO: 7176; WAN024BTN; Start 31; Stop 55
ttcgctttctttatatttggaatta

SEQ ID NO: 460647 - DNA, 25 bp, Artificial
  probe
  misc_feature (1)..(25): SEQ ID NO: 7176; WAN024BTN; Start 24; Stop 48
tgttttgttcgctttctttatattt

SEQ ID NO: 460648 - DNA, 25 bp, Artificial
  probe
  misc_feature (1)..(25): SEQ ID NO: 7176; WAN024BTN; Start 18; Stop 42
gaattctgttttgttcgctttcttt

SEQ ID NO: 460649 - DNA, 25 bp, Artificial
  probe
  misc_feature (1)..(25): SEQ ID NO: 7176; WAN024BTN; Start 25; Stop 49
gttttgttcgctttctttatatttg

SEQ ID NO: 460650 - DNA, 25 bp, Artificial
  probe
  misc_feature (1)..(25): SEQ ID NO: 7176; WAN024BTN; Start 32; Stop 56
tcgctttctttatatttggaattat

SEQ ID NO: 460651 - DNA, 25 bp, Artificial
  probe
  misc_feature (1)..(25): SEQ ID NO: 7176; WAN024BTN; Start 44; Stop 68
tatttggaattatactcctatctcc

SEQ ID NO: 460652 - DNA, 25 bp, Artificial
  probe
  misc_feature (1)..(25): SEQ ID NO: 7177; WAN024ASE; Start 165; Stop 189
tgaaggtggcagatagagctaataa

SEQ ID NO: 460653 - DNA, 25 bp, Artificial
  probe
  misc_feature (1)..(25): SEQ ID NO: 7177; WAN024ASE; Start 164; Stop 188
ttgaaggtggcagatagagctaata

SEQ ID NO: 460654 - DNA, 25 bp, Artificial
  probe
  misc_feature (1)..(25): SEQ ID NO: 7177; WAN024ASE; Start 162; Stop 186
tattgaaggtggcagatagagctaa

SEQ ID NO: 460655 - DNA, 25 bp, Artificial
  probe
  misc_feature (1)..(25): SEQ ID NO: 7177; WAN024ASE; Start 163; Stop 187
attgaaggtggcagatagagctaat

SEQ ID NO: 460656 - DNA, 25 bp, Artificial
  probe
  misc_feature (1)..(25): SEQ ID NO: 7177; WAN024ASE; Start 158; Stop 182
ggactattgaaggtggcagatagag

SEQ ID NO: 460657 - DNA, 25 bp, Artificial
  probe
  misc_feature (1)..(25): SEQ ID NO: 7177; WAN024ASE; Start 87; Stop 111
ttctactctgaaggactcctatctt

SEQ ID NO: 460658 - DNA, 25 bp, Artificial
  probe
  misc_feature (1)..(25): SEQ ID NO: 7177; WAN024ASE; Start 86; Stop 110
attctactctgaaggactcctatct

SEQ ID NO: 460659 - DNA, 25 bp, Artificial
  probe
  misc_feature (1)..(25): SEQ ID NO: 7177; WAN024ASE; Start 84; Stop 108
agattctactctgaaggactcctat

SEQ ID NO: 460660 - DNA, 25 bp, Artificial
  probe
  misc_feature (1)..(25): SEQ ID NO: 7177; WAN024ASE; Start 155; Stop 179
agtggactattgaaggtggcagata

SEQ ID NO: 460661 - DNA, 25 bp, Artificial
  probe
  misc_feature (1)..(25): SEQ ID NO: 7177; WAN024ASE; Start 85; Stop 109
gattctactctgaaggactcctatc

SEQ ID NO: 460662 - DNA, 25 bp, Artificial
  probe
  misc_feature (1)..(25): SEQ ID NO: 7177; WAN024ASE; Start 88; Stop 112
tctactctgaaggactcctatctta

SEQ ID NO: 460663 - DNA, 25 bp, Artificial
  probe
  misc_feature (1)..(25): SEQ ID NO: 7177; WAN024ASE; Start 161; Stop 185
ctattgaaggtggcagatagagcta

SEQ ID NO: 460664 - DNA, 25 bp, Artificial
  probe
  misc_feature (1)..(25): SEQ ID NO: 7177; WAN024ASE; Start 159; Stop 183
gactattgaaggtggcagatagagc

SEQ ID NO: 460665 - DNA, 25 bp, Artificial
  probe
  misc_feature (1)..(25): SEQ ID NO: 7177; WAN024ASE; Start 157; Stop 181
tggactattgaaggtggcagataga

SEQ ID NO: 460666 - DNA, 25 bp, Artificial
  probe
  misc_feature (1)..(25): SEQ ID NO: 7177; WAN024ASE; Start 156; Stop 180
gtggactattgaaggtggcagatag

SEQ ID NO: 460667 - DNA, 25 bp, Artificial
  probe
  misc_feature (1)..(25): SEQ ID NO: 7177; WAN024ASE; Start 99; Stop 123
ggactcctatcttatttcacaacaa

SEQ ID NO: 460668 - DNA, 25 bp, Artificial
  probe
  misc_feature (1)..(25): SEQ ID NO: 7177; WAN024ASE; Start 89; Stop 113
ctactctgaaggactcctatcttat

SEQ ID NO: 460669 - DNA, 25 bp, Artificial
  probe
  misc_feature (1)..(25): SEQ ID NO: 7177; WAN024ASE; Start 135; Stop 159
ttagttggcttcaatagtccagtgg

SEQ ID NO: 460670 - DNA, 25 bp, Artificial
  probe
  misc_feature (1)..(25): SEQ ID NO: 7177; WAN024ASE; Start 90; Stop 114
tactctgaaggactcctatcttatt

SEQ ID NO: 460671 - DNA, 25 bp, Artificial
  probe
  misc_feature (1)..(25): SEQ ID NO: 7177; WAN024ASE; Start 166; Stop 190
gaaggtggcagatagagctaataaa

SEQ ID NO: 460672 - DNA, 25 bp, Artificial
  probe
  misc_feature (1)..(25): SEQ ID NO: 7177; WAN024ASE; Start 167; Stop 191
aaggtggcagatagagctaataaac

SEQ ID NO: 460673 - DNA, 25 bp, Artificial
  probe
  misc_feature (1)..(25): SEQ ID NO: 7177; WAN024ASE; Start 168; Stop 192
aggtggcagatagagctaataaact

SEQ ID NO: 460674 - DNA, 25 bp, Artificial
  probe
  misc_feature (1)..(25): SEQ ID NO: 7177; WAN024ASE; Start 133; Stop 157
atttagttggcttcaatagtccagt

SEQ ID NO: 460675 - DNA, 25 bp, Artificial
  probe
  misc_feature (1)..(25): SEQ ID NO: 7177; WAN024ASE; Start 132; Stop 156
aatttagttggcttcaatagtccag

SEQ ID NO: 460676 - DNA, 25 bp, Artificial
  probe
  misc_feature (1)..(25): SEQ ID NO: 7177; WAN024ASE; Start 130; Stop 154
ctaatttagttggcttcaatagtcc

SEQ ID NO: 460677 - DNA, 25 bp, Artificial
  probe
  misc_feature (1)..(25): SEQ ID NO: 7177; WAN024ASE; Start 134; Stop 158
tttagttggcttcaatagtccagtg

SEQ ID NO: 460678 - DNA, 25 bp, Artificial
  probe
  misc_feature (1)..(25): SEQ ID NO: 7177; WAN024ASE; Start 101; Stop 125
actcctatcttatttcacaacaatg

SEQ ID NO: 460679 - DNA, 25 bp, Artificial
  probe
  misc_feature (1)..(25): SEQ ID NO: 7177; WAN024ASE; Start 169; Stop 193
ggtggcagatagagctaataaactc

SEQ ID NO: 460680 - DNA, 25 bp, Artificial
  probe
  misc_feature (1)..(25): SEQ ID NO: 7177; WAN024ASE; Start 98; Stop 122
aggactcctatcttatttcacaaca

SEQ ID NO: 460681 - DNA, 25 bp, Artificial
  probe
  misc_feature (1)..(25): SEQ ID NO: 7177; WAN024ASE; Start 170; Stop 194
gtggcagatagagctaataaactcg

SEQ ID NO: 460682 - DNA, 25 bp, Artificial
  probe
  misc_feature (1)..(25): SEQ ID NO: 7177; WAN024ASE; Start 100; Stop 124
gactcctatcttatttcacaacaat

SEQ ID NO: 460683 - DNA, 25 bp, Artificial
  probe
  misc_feature (1)..(25): SEQ ID NO: 7177; WAN024ASE; Start 160; Stop 184
actattgaaggtggcagatagagct

SEQ ID NO: 460684 - DNA, 25 bp, Artificial
  probe
  misc_feature (1)..(25): SEQ ID NO: 7177; WAN024ASE; Start 131; Stop 155
taatttagttggcttcaatagtcca

SEQ ID NO: 460685 - DNA, 25 bp, Artificial
  probe
  misc_feature (1)..(25): SEQ ID NO: 7178; WAN024BAW; Start 50; Stop 74
gtcagttctatccacaacctcaaag

SEQ ID NO: 460686 - DNA, 25 bp, Artificial
  probe
  misc_feature (1)..(25): SEQ ID NO: 7178; WAN024BAW; Start 95; Stop 119
ggctagttacctagtttgttctttg

SEQ ID NO: 460687 - DNA, 25 bp, Artificial
  probe
  misc_feature (1)..(25): SEQ ID NO: 7178; WAN024BAW; Start 94; Stop 118
cggctagttacctagtttgttcttt

SEQ ID NO: 460688 - DNA, 25 bp, Artificial
  probe
  misc_feature (1)..(25): SEQ ID NO: 7178; WAN024BAW; Start 53; Stop 77
agttctatccacaacctcaaagcag

SEQ ID NO: 460689 - DNA, 25 bp, Artificial
  probe
  misc_feature (1)..(25): SEQ ID NO: 7178; WAN024BAW; Start 51; Stop 75
tcagttctatccacaacctcaaagc

SEQ ID NO: 460690 - DNA, 25 bp, Artificial
  probe
  misc_feature (1)..(25): SEQ ID NO: 7178; WAN024BAW; Start 96; Stop 120
gctagttacctagtttgttctttga

SEQ ID NO: 460691 - DNA, 25 bp, Artificial
  probe
  misc_feature (1)..(25): SEQ ID NO: 7178; WAN024BAW; Start 54; Stop 78
gttctatccacaacctcaaagcagt

SEQ ID NO: 460692 - DNA, 25 bp, Artificial
  probe
  misc_feature (1)..(25): SEQ ID NO: 7178; WAN024BAW; Start 52; Stop 76
cagttctatccacaacctcaaagca

SEQ ID NO: 460693 - DNA, 25 bp, Artificial
  probe
  misc_feature (1)..(25): SEQ ID NO: 7178; WAN024BAW; Start 99; Stop 123
agttacctagtttgttctttgattt

SEQ ID NO: 460694 - DNA, 25 bp, Artificial
  probe
  misc_feature (1)..(25): SEQ ID NO: 7178; WAN024BAW; Start 55; Stop 79
ttctatccacaacctcaaagcagtg

SEQ ID NO: 460695 - DNA, 25 bp, Artificial
  probe
  misc_feature (1)..(25): SEQ ID NO: 7178; WAN024BAW; Start 93; Stop 117
gcggctagttacctagtttgttctt

SEQ ID NO: 460696 - DNA, 25 bp, Artificial
  probe
  misc_feature (1)..(25): SEQ ID NO: 7178; WAN024BAW; Start 98; Stop 122
tagttacctagtttgttctttgatt

SEQ ID NO: 460697 - DNA, 25 bp, Artificial
  probe
  misc_feature (1)..(25): SEQ ID NO: 7178; WAN024BAW; Start 97; Stop 121
ctagttacctagtttgttctttgat

SEQ ID NO: 460698 - DNA, 25 bp, Artificial
  probe
  misc_feature (1)..(25): SEQ ID NO: 7178; WAN024BAW; Start 103; Stop 127
acctagtttgttctttgattttcat

SEQ ID NO: 460699 - DNA, 25 bp, Artificial
  probe
  misc_feature (1)..(25): SEQ ID NO: 7178; WAN024BAW; Start 102; Stop 126
tacctagtttgttctttgattttca

SEQ ID NO: 460700 - DNA, 25 bp, Artificial
  probe
  misc_feature (1)..(25): SEQ ID NO: 7178; WAN024BAW; Start 100; Stop 124
gttacctagtttgttctttgatttt

SEQ ID NO: 460701 - DNA, 25 bp, Artificial
  probe
  misc_feature (1)..(25): SEQ ID NO: 7178; WAN024BAW; Start 101; Stop 125
ttacctagtttgttctttgattttc

SEQ ID NO: 460702 - DNA, 25 bp, Artificial
  probe
  misc_feature (1)..(25): SEQ ID NO: 7178; WAN024BAW; Start 56; Stop 80
tctatccacaacctcaaagcagtgc

SEQ ID NO: 460703 - DNA, 25 bp, Artificial
  probe
  misc_feature (1)..(25): SEQ ID NO: 7178; WAN024BAW; Start 57; Stop 81
ctatccacaacctcaaagcagtgct

SEQ ID NO: 460704 - DNA, 25 bp, Artificial
  probe
  misc_feature (1)..(25): SEQ ID NO: 7178; WAN024BAW; Start 92; Stop 116
cgcggctagttacctagtttgttct

SEQ ID NO: 460705 - DNA, 25 bp, Artificial
  probe
  misc_feature (1)..(25): SEQ ID NO: 7178; WAN024BAW; Start 58; Stop 82
tatccacaacctcaaagcagtgctt

SEQ ID NO: 460706 - DNA, 25 bp, Artificial
  probe
  misc_feature (1)..(25): SEQ ID NO: 7179; WAN024BA8; Start 155; Stop 179
ttgctctttgattttcattgagttt

SEQ ID NO: 460707 - DNA, 25 bp, Artificial
  probe
  misc_feature (1)..(25): SEQ ID NO: 7179; WAN024BA8; Start 154; Stop 178
tttgctctttgattttcattgagtt

SEQ ID NO: 460708 - DNA, 25 bp, Artificial
  probe
  misc_feature (1)..(25): SEQ ID NO: 7180; WAN024AZX; Start 22; Stop 46
gaacaagctcttcttcatgcagatg

SEQ ID NO: 460709 - DNA, 25 bp, Artificial
  probe
  misc_feature (1)..(25): SEQ ID NO: 7180; WAN024AZX; Start 17; Stop 41
tgttagaacaagctcttcttcatgc

SEQ ID NO: 460710 - DNA, 25 bp, Artificial
  probe
  misc_feature (1)..(25): SEQ ID NO: 7180; WAN024AZX; Start 19; Stop 43
ttagaacaagctcttcttcatgcag

SEQ ID NO: 460711 - DNA, 25 bp, Artificial
  probe
  misc_feature (1)..(25): SEQ ID NO: 7180; WAN024AZX; Start 18; Stop 42
gttagaacaagctcttcttcatgca

SEQ ID NO: 460712 - DNA, 25 bp, Artificial
  probe
  misc_feature (1)..(25): SEQ ID NO: 7180; WAN024AZX; Start 20; Stop 44
tagaacaagctcttcttcatgcaga

SEQ ID NO: 460713 - DNA, 25 bp, Artificial
  probe
  misc_feature (1)..(25): SEQ ID NO: 7180; WAN024AZX; Start 14; Stop 38
agttgttagaacaagctcttcttca

SEQ ID NO: 460714 - DNA, 25 bp, Artificial
  probe
  misc_feature (1)..(25): SEQ ID NO: 7180; WAN024AZX; Start 16; Stop 40
ttgttagaacaagctcttcttcatg

SEQ ID NO: 460715 - DNA, 25 bp, Artificial
  probe
  misc_feature (1)..(25): SEQ ID NO: 7180; WAN024AZX; Start 15; Stop 39
gttgttagaacaagctcttcttcat

SEQ ID NO: 460716 - DNA, 25 bp, Artificial
  probe
  misc_feature (1)..(25): SEQ ID NO: 7180; WAN024AZX; Start 13; Stop 37
aagttgttagaacaagctcttcttc

SEQ ID NO: 460717 - DNA, 25 bp, Artificial
  probe
  misc_feature (1)..(25): SEQ ID NO: 7180; WAN024AZX; Start 21; Stop 45
agaacaagctcttcttcatgcagat

SEQ ID NO: 460718 - DNA, 25 bp, Artificial
  probe
  misc_feature (1)..(25): SEQ ID NO: 7180; WAN024AZX; Start 23; Stop 47
aacaagctcttcttcatgcagatga

SEQ ID NO: 460719 - DNA, 25 bp, Artificial
  probe
  misc_feature (1)..(25): SEQ ID NO: 7180; WAN024AZX; Start 12; Stop 36
aaagttgttagaacaagctcttctt

SEQ ID NO: 460720 - DNA, 25 bp, Artificial
  probe
  misc_feature (1)..(25): SEQ ID NO: 7180; WAN024AZX; Start 37; Stop 61
catgcagatgaaacctcttatcggg

SEQ ID NO: 460721 - DNA, 25 bp, Artificial
  probe
  misc_feature (1)..(25): SEQ ID NO: 7180; WAN024AZX; Start 43; Stop 67
gatgaaacctcttatcgggttctag

SEQ ID NO: 460722 - DNA, 25 bp, Artificial
  probe
  misc_feature (1)..(25): SEQ ID NO: 7180; WAN024AZX; Start 42; Stop 66
agatgaaacctcttatcgggttcta

SEQ ID NO: 460723 - DNA, 25 bp, Artificial
  probe
  misc_feature (1)..(25): SEQ ID NO: 7180; WAN024AZX; Start 36; Stop 60
tcatgcagatgaaacctcttatcgg

SEQ ID NO: 460724 - DNA, 25 bp, Artificial
  probe
  misc_feature (1)..(25): SEQ ID NO: 7180; WAN024AZX; Start 51; Stop 75
ctcttatcgggttctagagagtcat

SEQ ID NO: 460725 - DNA, 25 bp, Artificial
  probe
  misc_feature (1)..(25): SEQ ID NO: 7180; WAN024AZX; Start 2; Stop 26
ttttacgagaaaagttgttagaaca

SEQ ID NO: 460726 - DNA, 25 bp, Artificial
  probe
  misc_feature (1)..(25): SEQ ID NO: 7180; WAN024AZX; Start 41; Stop 65
cagatgaaacctcttatcgggttct

SEQ ID NO: 460727 - DNA, 25 bp, Artificial
  probe
  misc_feature (1)..(25): SEQ ID NO: 7180; WAN024AZX; Start 38; Stop 62
atgcagatgaaacctcttatcgggt

SEQ ID NO: 460728 - DNA, 25 bp, Artificial
  probe
  misc_feature (1)..(25): SEQ ID NO: 7180; WAN024AZX; Start 50; Stop 74
cctcttatcgggttctagagagtca

SEQ ID NO: 460729 - DNA, 25 bp, Artificial
  probe
  misc_feature (1)..(25): SEQ ID NO: 7180; WAN024AZX; Start 49; Stop 73
acctcttatcgggttctagagagtc

SEQ ID NO: 460730 - DNA, 25 bp, Artificial
  probe
  misc_feature (1)..(25): SEQ ID NO: 7180; WAN024AZX; Start 44; Stop 68
atgaaacctcttatcgggttctaga

SEQ ID NO: 460731 - DNA, 25 bp, Artificial
  probe
  misc_feature (1)..(25): SEQ ID NO: 7180; WAN024AZX; Start 47; Stop 71
aaacctcttatcgggttctagagag

SEQ ID NO: 460732 - DNA, 25 bp, Artificial
  probe
  misc_feature (1)..(25): SEQ ID NO: 7180; WAN024AZX; Start 46; Stop 70
gaaacctcttatcgggttctagaga

SEQ ID NO: 460733 - DNA, 25 bp, Artificial
  probe
  misc_feature (1)..(25): SEQ ID NO: 7180; WAN024AZX; Start 24; Stop 48
acaagctcttcttcatgcagatgaa

SEQ ID NO: 460734 - DNA, 25 bp, Artificial
  probe
  misc_feature (1)..(25): SEQ ID NO: 7180; WAN024AZX; Start 5; Stop 29
tacgagaaaagttgttagaacaagc

SEQ ID NO: 460735 - DNA, 25 bp, Artificial
  probe
  misc_feature (1)..(25): SEQ ID NO: 7180; WAN024AZX; Start 8; Stop 32
gagaaaagttgttagaacaagctct

SEQ ID NO: 460736 - DNA, 25 bp, Artificial
  probe
  misc_feature (1)..(25): SEQ ID NO: 7180; WAN024AZX; Start 45; Stop 69
tgaaacctcttatcgggttctagag

SEQ ID NO: 460737 - DNA, 25 bp, Artificial
  probe
  misc_feature (1)..(25): SEQ ID NO: 7180; WAN024AZX; Start 7; Stop 31
cgagaaaagttgttagaacaagctc

SEQ ID NO: 460738 - DNA, 25 bp, Artificial
  probe
  misc_feature (1)..(25): SEQ ID NO: 7180; WAN024AZX; Start 34; Stop 58
cttcatgcagatgaaacctcttatc

SEQ ID NO: 460739 - DNA, 25 bp, Artificial
  probe
  misc_feature (1)..(25): SEQ ID NO: 7180; WAN024AZX; Start 33; Stop 57
tcttcatgcagatgaaacctcttat

SEQ ID NO: 460740 - DNA, 25 bp, Artificial
  probe
  misc_feature (1)..(25): SEQ ID NO: 7180; WAN024AZX; Start 32; Stop 56
ttcttcatgcagatgaaacctctta

SEQ ID NO: 460741 - DNA, 25 bp, Artificial
  probe
  misc_feature (1)..(25): SEQ ID NO: 7181; WAN024DDK; Start 3275; Stop 3299
aagcaatgtataatgagcgaatagc

SEQ ID NO: 460742 - DNA, 25 bp, Artificial
  probe
  misc_feature (1)..(25): SEQ ID NO: 7181; WAN024DDK; Start 2534; Stop 2558
gatatggaagaagaagcggattagg

SEQ ID NO: 460743 - DNA, 25 bp, Artificial
  probe
  misc_feature (1)..(25): SEQ ID NO: 7181; WAN024DDK; Start 2533; Stop 2557
ggatatggaagaagaagcggattag

SEQ ID NO: 460744 - DNA, 25 bp, Artificial
  probe
  misc_feature (1)..(25): SEQ ID NO: 7181; WAN024DDK; Start 2532; Stop 2556
aggatatggaagaagaagcggatta

SEQ ID NO: 460745 - DNA, 25 bp, Artificial
  probe
  misc_feature (1)..(25): SEQ ID NO: 7181; WAN024DDK; Start 3372; Stop 3396
aataactagcatagccaaccttcaa

SEQ ID NO: 460746 - DNA, 25 bp, Artificial
  probe
  misc_feature (1)..(25): SEQ ID NO: 7181; WAN024DDK; Start 3368; Stop 3392
taacaataactagcatagccaacct

SEQ ID NO: 460747 - DNA, 25 bp, Artificial
  probe
  misc_feature (1)..(25): SEQ ID NO: 7181; WAN024DDK; Start 3369; Stop 3393
aacaataactagcatagccaacctt

SEQ ID NO: 460748 - DNA, 25 bp, Artificial
  probe
  misc_feature (1)..(25): SEQ ID NO: 7181; WAN024DDK; Start 1871; Stop 1895
caacaacttctaacaatgagtggtt

SEQ ID NO: 460749 - DNA, 25 bp, Artificial
  probe
  misc_feature (1)..(25): SEQ ID NO: 7181; WAN024DDK; Start 3371; Stop 3395
caataactagcatagccaaccttca

SEQ ID NO: 460750 - DNA, 25 bp, Artificial
  probe
  misc_feature (1)..(25): SEQ ID NO: 7181; WAN024DDK; Start 3370; Stop 3394
acaataactagcatagccaaccttc

SEQ ID NO: 460751 - DNA, 25 bp, Artificial
  probe
  misc_feature (1)..(25): SEQ ID NO: 7181; WAN024DDK; Start 889; Stop 913
agaggtacggtattagatgctgata

SEQ ID NO: 460752 - DNA, 25 bp, Artificial
  probe
  misc_feature (1)..(25): SEQ ID NO: 7181; WAN024DDK; Start 838; Stop 862
aatgtagtccaagtagatgatgaac

SEQ ID NO: 460753 - DNA, 25 bp, Artificial
  probe
  misc_feature (1)..(25): SEQ ID NO: 7181; WAN024DDK; Start 3367; Stop 3391
ataacaataactagcatagccaacc

SEQ ID NO: 460754 - DNA, 25 bp, Artificial
  probe
  misc_feature (1)..(25): SEQ ID NO: 7181; WAN024DDK; Start 890; Stop 914
gaggtacggtattagatgctgataa

SEQ ID NO: 460755 - DNA, 25 bp, Artificial
  probe
  misc_feature (1)..(25): SEQ ID NO: 7181; WAN024DDK; Start 1868; Stop 1892
taccaacaacttctaacaatgagtg

SEQ ID NO: 460756 - DNA, 25 bp, Artificial
  probe
  misc_feature (1)..(25): SEQ ID NO: 7181; WAN024DDK; Start 1865; Stop 1889
tcttaccaacaacttctaacaatga

SEQ ID NO: 460757 - DNA, 25 bp, Artificial
  probe
  misc_feature (1)..(25): SEQ ID NO: 7181; WAN024DDK; Start 839; Stop 863
atgtagtccaagtagatgatgaact

SEQ ID NO: 460758 - DNA, 25 bp, Artificial
  probe
  misc_feature (1)..(25): SEQ ID NO: 7181; WAN024DDK; Start 888; Stop 912
aagaggtacggtattagatgctgat

SEQ ID NO: 460759 - DNA, 25 bp, Artificial
  probe
  misc_feature (1)..(25): SEQ ID NO: 7181; WAN024DDK; Start 2390; Stop 2414
ataatgttgttcataatggacacgg

SEQ ID NO: 460760 - DNA, 25 bp, Artificial
  probe
  misc_feature (1)..(25): SEQ ID NO: 7181; WAN024DDK; Start 1618; Stop 1642
ttaacatacttagagcgttggtaca

SEQ ID NO: 460761 - DNA, 25 bp, Artificial
  probe
  misc_feature (1)..(25): SEQ ID NO: 7181; WAN024DDK; Start 1866; Stop 1890
cttaccaacaacttctaacaatgag

SEQ ID NO: 460762 - DNA, 25 bp, Artificial
  probe
  misc_feature (1)..(25): SEQ ID NO: 7181; WAN024DDK; Start 2391; Stop 2415
taatgttgttcataatggacacgga

SEQ ID NO: 460763 - DNA, 25 bp, Artificial
  probe
  misc_feature (1)..(25): SEQ ID NO: 7181; WAN024DDK; Start 2838; Stop 2862
taagcaagatccagatggtaattct

SEQ ID NO: 460764 - DNA, 25 bp, Artificial
  probe
  misc_feature (1)..(25): SEQ ID NO: 7181; WAN024DDK; Start 1619; Stop 1643
taacatacttagagcgttggtacaa

SEQ ID NO: 460765 - DNA, 25 bp, Artificial
  probe
  misc_feature (1)..(25): SEQ ID NO: 7181; WAN024DDK; Start 1621; Stop 1645
acatacttagagcgttggtacaatt

SEQ ID NO: 460766 - DNA, 25 bp, Artificial
  probe
  misc_feature (1)..(25): SEQ ID NO: 7181; WAN024DDK; Start 1620; Stop 1644
aacatacttagagcgttggtacaat

SEQ ID NO: 460767 - DNA, 25 bp, Artificial
  probe
  misc_feature (1)..(25): SEQ ID NO: 7181; WAN024DDK; Start 1958; Stop 1982
aacaatcagaacaaggaactaagta

SEQ ID NO: 460768 - DNA, 25 bp, Artificial
  probe
  misc_feature (1)..(25): SEQ ID NO: 7181; WAN024DDK; Start 2837; Stop 2861
ataagcaagatccagatggtaattc

SEQ ID NO: 460769 - DNA, 25 bp, Artificial
  probe
  misc_feature (1)..(25): SEQ ID NO: 7181; WAN024DDK; Start 1867; Stop 1891
ttaccaacaacttctaacaatgagt

SEQ ID NO: 460770 - DNA, 25 bp, Artificial
  probe
  misc_feature (1)..(25): SEQ ID NO: 7181; WAN024DDK; Start 1959; Stop 1983
acaatcagaacaaggaactaagtat

SEQ ID NO: 460771 - DNA, 25 bp, Artificial
  probe
  misc_feature (1)..(25): SEQ ID NO: 7181; WAN024DDK; Start 2531; Stop 2555
gaggatatggaagaagaagcggatt

SEQ ID NO: 460772 - DNA, 25 bp, Artificial
  probe
  misc_feature (1)..(25): SEQ ID NO: 7181; WAN024DDK; Start 1450; Stop 1474
acggaattatacttagatgagcaat

SEQ ID NO: 460773 - DNA, 25 bp, Artificial
  probe
  misc_feature (1)..(25): SEQ ID NO: 7181; WAN024DDK; Start 1864; Stop 1888
ttcttaccaacaacttctaacaatg

SEQ ID NO: 460774 - DNA, 25 bp, Artificial
  probe
  misc_feature (1)..(25): SEQ ID NO: 7182; WAN024A3Q; Start 161; Stop 185
cctcgcaagagactattatgagtta

SEQ ID NO: 460775 - DNA, 25 bp, Artificial
  probe
  misc_feature (1)..(25): SEQ ID NO: 7182; WAN024A3Q; Start 160; Stop 184
tcctcgcaagagactattatgagtt

SEQ ID NO: 460776 - DNA, 25 bp, Artificial
  probe
  misc_feature (1)..(25): SEQ ID NO: 7182; WAN024A3Q; Start 154; Stop 178
tatctgtcctcgcaagagactatta

SEQ ID NO: 460777 - DNA, 25 bp, Artificial
  probe
  misc_feature (1)..(25): SEQ ID NO: 7182; WAN024A3Q; Start 155; Stop 179
atctgtcctcgcaagagactattat

SEQ ID NO: 460778 - DNA, 25 bp, Artificial
  probe
  misc_feature (1)..(25): SEQ ID NO: 7182; WAN024A3Q; Start 153; Stop 177
ttatctgtcctcgcaagagactatt

SEQ ID NO: 460779 - DNA, 25 bp, Artificial
  probe
  misc_feature (1)..(25): SEQ ID NO: 7182; WAN024A3Q; Start 152; Stop 176
cttatctgtcctcgcaagagactat

SEQ ID NO: 460780 - DNA, 25 bp, Artificial
  probe
  misc_feature (1)..(25): SEQ ID NO: 7182; WAN024A3Q; Start 162; Stop 186
ctcgcaagagactattatgagttat

SEQ ID NO: 460781 - DNA, 25 bp, Artificial
  probe
  misc_feature (1)..(25): SEQ ID NO: 7182; WAN024A3Q; Start 159; Stop 183
gtcctcgcaagagactattatgagt

SEQ ID NO: 460782 - DNA, 25 bp, Artificial
  probe
  misc_feature (1)..(25): SEQ ID NO: 7182; WAN024A3Q; Start 158; Stop 182
tgtcctcgcaagagactattatgag

SEQ ID NO: 460783 - DNA, 25 bp, Artificial
  probe
  misc_feature (1)..(25): SEQ ID NO: 7182; WAN024A3Q; Start 157; Stop 181
ctgtcctcgcaagagactattatga

SEQ ID NO: 460784 - DNA, 25 bp, Artificial
  probe
  misc_feature (1)..(25): SEQ ID NO: 7182; WAN024A3Q; Start 156; Stop 180
tctgtcctcgcaagagactattatg

SEQ ID NO: 460785 - DNA, 25 bp, Artificial
  probe
  misc_feature (1)..(25): SEQ ID NO: 7182; WAN024A3Q; Start 163; Stop 187
tcgcaagagactattatgagttatt

SEQ ID NO: 460786 - DNA, 25 bp, Artificial
  probe
  misc_feature (1)..(25): SEQ ID NO: 7182; WAN024A3Q; Start 138; Stop 162
ccatatttgttgctcttatctgtcc

SEQ ID NO: 460787 - DNA, 25 bp, Artificial
  probe
  misc_feature (1)..(25): SEQ ID NO: 7182; WAN024A3Q; Start 141; Stop 165
tatttgttgctcttatctgtcctcg

SEQ ID NO: 460788 - DNA, 25 bp, Artificial
  probe
  misc_feature (1)..(25): SEQ ID NO: 7182; WAN024A3Q; Start 136; Stop 160
caccatatttgttgctcttatctgt

SEQ ID NO: 460789 - DNA, 25 bp, Artificial
  probe
  misc_feature (1)..(25): SEQ ID NO: 7182; WAN024A3Q; Start 137; Stop 161
accatatttgttgctcttatctgtc

SEQ ID NO: 460790 - DNA, 25 bp, Artificial
  probe
  misc_feature (1)..(25): SEQ ID NO: 7182; WAN024A3Q; Start 139; Stop 163
catatttgttgctcttatctgtcct

SEQ ID NO: 460791 - DNA, 25 bp, Artificial
  probe
  misc_feature (1)..(25): SEQ ID NO: 7182; WAN024A3Q; Start 140; Stop 164
atatttgttgctcttatctgtcctc

SEQ ID NO: 460792 - DNA, 25 bp, Artificial
  probe
  misc_feature (1)..(25): SEQ ID NO: 7182; WAN024A3Q; Start 89; Stop 113
agaagacgcctagtacattgaaatt

SEQ ID NO: 460793 - DNA, 25 bp, Artificial
  probe
  misc_feature (1)..(25): SEQ ID NO: 7182; WAN024A3Q; Start 88; Stop 112
tagaagacgcctagtacattgaaat

SEQ ID NO: 460794 - DNA, 25 bp, Artificial
  probe
  misc_feature (1)..(25): SEQ ID NO: 7182; WAN024A3Q; Start 87; Stop 111
gtagaagacgcctagtacattgaaa

SEQ ID NO: 460795 - DNA, 25 bp, Artificial
  probe
  misc_feature (1)..(25): SEQ ID NO: 7182; WAN024A3Q; Start 90; Stop 114
gaagacgcctagtacattgaaatta

SEQ ID NO: 460796 - DNA, 25 bp, Artificial
  probe
  misc_feature (1)..(25): SEQ ID NO: 7182; WAN024A3Q; Start 86; Stop 110
tgtagaagacgcctagtacattgaa

SEQ ID NO: 460797 - DNA, 25 bp, Artificial
  probe
  misc_feature (1)..(25): SEQ ID NO: 7182; WAN024A3Q; Start 85; Stop 109
ctgtagaagacgcctagtacattga

SEQ ID NO: 460798 - DNA, 25 bp, Artificial
  probe
  misc_feature (1)..(25): SEQ ID NO: 7182; WAN024A3Q; Start 92; Stop 116
agacgcctagtacattgaaattaaa

SEQ ID NO: 460799 - DNA, 25 bp, Artificial
  probe
  misc_feature (1)..(25): SEQ ID NO: 7182; WAN024A3Q; Start 91; Stop 115
aagacgcctagtacattgaaattaa

SEQ ID NO: 460800 - DNA, 25 bp, Artificial
  probe
  misc_feature (1)..(25): SEQ ID NO: 7182; WAN024A3Q; Start 125; Stop 149
cacatgagtagcaccatatttgttg

SEQ ID NO: 460801 - DNA, 25 bp, Artificial
  probe
  misc_feature (1)..(25): SEQ ID NO: 7182; WAN024A3Q; Start 151; Stop 175
tcttatctgtcctcgcaagagacta

SEQ ID NO: 460802 - DNA, 25 bp, Artificial
  probe
  misc_feature (1)..(25): SEQ ID NO: 7182; WAN024A3Q; Start 82; Stop 106
tagctgtagaagacgcctagtacat

SEQ ID NO: 460803 - DNA, 25 bp, Artificial
  probe
  misc_feature (1)..(25): SEQ ID NO: 7182; WAN024A3Q; Start 164; Stop 188
cgcaagagactattatgagttattt

SEQ ID NO: 460804 - DNA, 25 bp, Artificial
  probe
  misc_feature (1)..(25): SEQ ID NO: 7182; WAN024A3Q; Start 84; Stop 108
gctgtagaagacgcctagtacattg

SEQ ID NO: 460805 - DNA, 25 bp, Artificial
  probe
  misc_feature (1)..(25): SEQ ID NO: 7182; WAN024A3Q; Start 142; Stop 166
atttgttgctcttatctgtcctcgc

SEQ ID NO: 460806 - DNA, 25 bp, Artificial
  probe
  misc_feature (1)..(25): SEQ ID NO: 7182; WAN024A3Q; Start 135; Stop 159
gcaccatatttgttgctcttatctg

SEQ ID NO: 460807 - DNA, 25 bp, Artificial
  probe
  misc_feature (1)..(25): SEQ ID NO: 7183; WAN024A3R; Start 257; Stop 281
tgttactcttatctgtcctctcaag

SEQ ID NO: 460808 - DNA, 25 bp, Artificial
  probe
  misc_feature (1)..(25): SEQ ID NO: 7183; WAN024A3R; Start 139; Stop 163
atattgccatagattgcgttgactc

SEQ ID NO: 460809 - DNA, 25 bp, Artificial
  probe
  misc_feature (1)..(25): SEQ ID NO: 7183; WAN024A3R; Start 256; Stop 280
ttgttactcttatctgtcctctcaa

SEQ ID NO: 460810 - DNA, 25 bp, Artificial
  probe
  misc_feature (1)..(25): SEQ ID NO: 7183; WAN024A3R; Start 138; Stop 162
aatattgccatagattgcgttgact

SEQ ID NO: 460811 - DNA, 25 bp, Artificial
  probe
  misc_feature (1)..(25): SEQ ID NO: 7183; WAN024A3R; Start 140; Stop 164
tattgccatagattgcgttgactct

SEQ ID NO: 460812 - DNA, 25 bp, Artificial
  probe
  misc_feature (1)..(25): SEQ ID NO: 7183; WAN024A3R; Start 195; Stop 219
cttcctatactttcttcgctgtttg

SEQ ID NO: 460813 - DNA, 25 bp, Artificial
  probe
  misc_feature (1)..(25): SEQ ID NO: 7183; WAN024A3R; Start 269; Stop 293
ctgtcctctcaagagactattatga

SEQ ID NO: 460814 - DNA, 25 bp, Artificial
  probe
  misc_feature (1)..(25): SEQ ID NO: 7183; WAN024A3R; Start 268; Stop 292
tctgtcctctcaagagactattatg

SEQ ID NO: 460815 - DNA, 25 bp, Artificial
  probe
  misc_feature (1)..(25): SEQ ID NO: 7183; WAN024A3R; Start 197; Stop 221
tcctatactttcttcgctgtttgta

SEQ ID NO: 460816 - DNA, 25 bp, Artificial
  probe
  misc_feature (1)..(25): SEQ ID NO: 7183; WAN024A3R; Start 196; Stop 220
ttcctatactttcttcgctgtttgt

SEQ ID NO: 460817 - DNA, 25 bp, Artificial
  probe
  misc_feature (1)..(25): SEQ ID NO: 7183; WAN024A3R; Start 202; Stop 226
tactttcttcgctgtttgtaaatca

SEQ ID NO: 460818 - DNA, 25 bp, Artificial
  probe
  misc_feature (1)..(25): SEQ ID NO: 7183; WAN024A3R; Start 264; Stop 288
cttatctgtcctctcaagagactat

SEQ ID NO: 460819 - DNA, 25 bp, Artificial
  probe
  misc_feature (1)..(25): SEQ ID NO: 7183; WAN024A3R; Start 198; Stop 222
cctatactttcttcgctgtttgtaa

SEQ ID NO: 460820 - DNA, 25 bp, Artificial
  probe
  misc_feature (1)..(25): SEQ ID NO: 7183; WAN024A3R; Start 255; Stop 279
tttgttactcttatctgtcctctca

SEQ ID NO: 460821 - DNA, 25 bp, Artificial
  probe
  misc_feature (1)..(25): SEQ ID NO: 7183; WAN024A3R; Start 203; Stop 227
actttcttcgctgtttgtaaatcaa

SEQ ID NO: 460822 - DNA, 25 bp, Artificial
  probe
  misc_feature (1)..(25): SEQ ID NO: 7183; WAN024A3R; Start 194; Stop 218
gcttcctatactttcttcgctgttt

SEQ ID NO: 460823 - DNA, 25 bp, Artificial
  probe
  misc_feature (1)..(25): SEQ ID NO: 7183; WAN024A3R; Start 265; Stop 289
ttatctgtcctctcaagagactatt

SEQ ID NO: 460824 - DNA, 25 bp, Artificial
  probe
  misc_feature (1)..(25): SEQ ID NO: 7183; WAN024A3R; Start 155; Stop 179
cgttgactctccaaattgattcatc

SEQ ID NO: 460825 - DNA, 25 bp, Artificial
  probe
  misc_feature (1)..(25): SEQ ID NO: 7183; WAN024A3R; Start 147; Stop 171
atagattgcgttgactctccaaatt

SEQ ID NO: 460826 - DNA, 25 bp, Artificial
  probe
  misc_feature (1)..(25): SEQ ID NO: 7183; WAN024A3R; Start 267; Stop 291
atctgtcctctcaagagactattat

SEQ ID NO: 460827 - DNA, 25 bp, Artificial
  probe
  misc_feature (1)..(25): SEQ ID NO: 7183; WAN024A3R; Start 156; Stop 180
gttgactctccaaattgattcatct

SEQ ID NO: 460828 - DNA, 25 bp, Artificial
  probe
  misc_feature (1)..(25): SEQ ID NO: 7183; WAN024A3R; Start 258; Stop 282
gttactcttatctgtcctctcaaga

SEQ ID NO: 460829 - DNA, 25 bp, Artificial
  probe
  misc_feature (1)..(25): SEQ ID NO: 7183; WAN024A3R; Start 201; Stop 225
atactttcttcgctgtttgtaaatc

SEQ ID NO: 460830 - DNA, 25 bp, Artificial
  probe
  misc_feature (1)..(25): SEQ ID NO: 7183; WAN024A3R; Start 146; Stop 170
catagattgcgttgactctccaaat

SEQ ID NO: 460831 - DNA, 25 bp, Artificial
  probe
  misc_feature (1)..(25): SEQ ID NO: 7183; WAN024A3R; Start 263; Stop 287
tcttatctgtcctctcaagagacta

SEQ ID NO: 460832 - DNA, 25 bp, Artificial
  probe
  misc_feature (1)..(25): SEQ ID NO: 7183; WAN024A3R; Start 148; Stop 172
tagattgcgttgactctccaaattg

SEQ ID NO: 460833 - DNA, 25 bp, Artificial
  probe
  misc_feature (1)..(25): SEQ ID NO: 7183; WAN024A3R; Start 254; Stop 278
atttgttactcttatctgtcctctc

SEQ ID NO: 460834 - DNA, 25 bp, Artificial
  probe
  misc_feature (1)..(25): SEQ ID NO: 7183; WAN024A3R; Start 247; Stop 271
gcaccatatttgttactcttatctg

SEQ ID NO: 460835 - DNA, 25 bp, Artificial
  probe
  misc_feature (1)..(25): SEQ ID NO: 7183; WAN024A3R; Start 246; Stop 270
agcaccatatttgttactcttatct

SEQ ID NO: 460836 - DNA, 25 bp, Artificial
  probe
  misc_feature (1)..(25): SEQ ID NO: 7183; WAN024A3R; Start 151; Stop 175
attgcgttgactctccaaattgatt

SEQ ID NO: 460837 - DNA, 25 bp, Artificial
  probe
  misc_feature (1)..(25): SEQ ID NO: 7183; WAN024A3R; Start 141; Stop 165
attgccatagattgcgttgactctc

SEQ ID NO: 460838 - DNA, 25 bp, Artificial
  probe
  misc_feature (1)..(25): SEQ ID NO: 7183; WAN024A3R; Start 137; Stop 161
aaatattgccatagattgcgttgac

SEQ ID NO: 460839 - DNA, 25 bp, Artificial
  probe
  misc_feature (1)..(25): SEQ ID NO: 7183; WAN024A3R; Start 266; Stop 290
tatctgtcctctcaagagactatta

SEQ ID NO: 460840 - DNA, 25 bp, Artificial
  probe
  misc_feature (1)..(25): SEQ ID NO: 7184; WAN024A7I; Start 283; Stop 307
cgttagttgtaggactaggtattgt

SEQ ID NO: 460841 - DNA, 25 bp, Artificial
  probe
  misc_feature (1)..(25): SEQ ID NO: 7184; WAN024A7I; Start 282; Stop 306
gcgttagttgtaggactaggtattg

SEQ ID NO: 460842 - DNA, 25 bp, Artificial
  probe
  misc_feature (1)..(25): SEQ ID NO: 7184; WAN024A7I; Start 281; Stop 305
agcgttagttgtaggactaggtatt

SEQ ID NO: 460843 - DNA, 25 bp, Artificial
  probe
  misc_feature (1)..(25): SEQ ID NO: 7184; WAN024A7I; Start 280; Stop 304
aagcgttagttgtaggactaggtat

SEQ ID NO: 460844 - DNA, 25 bp, Artificial
  probe
  misc_feature (1)..(25): SEQ ID NO: 7184; WAN024A7I; Start 245; Stop 269
aaggagaagataaacggctactaaa

SEQ ID NO: 460845 - DNA, 25 bp, Artificial
  probe
  misc_feature (1)..(25): SEQ ID NO: 7184; WAN024A7I; Start 244; Stop 268
aaaggagaagataaacggctactaa

SEQ ID NO: 460846 - DNA, 25 bp, Artificial
  probe
  misc_feature (1)..(25): SEQ ID NO: 7184; WAN024A7I; Start 308; Stop 332
ttcaatattcttatcagccttacct

SEQ ID NO: 460847 - DNA, 25 bp, Artificial
  probe
  misc_feature (1)..(25): SEQ ID NO: 7184; WAN024A7I; Start 284; Stop 308
gttagttgtaggactaggtattgtt

SEQ ID NO: 460848 - DNA, 25 bp, Artificial
  probe
  misc_feature (1)..(25): SEQ ID NO: 7184; WAN024A7I; Start 287; Stop 311
agttgtaggactaggtattgtttca

SEQ ID NO: 460849 - DNA, 25 bp, Artificial
  probe
  misc_feature (1)..(25): SEQ ID NO: 7184; WAN024A7I; Start 288; Stop 312
gttgtaggactaggtattgtttcaa

SEQ ID NO: 460850 - DNA, 25 bp, Artificial
  probe
  misc_feature (1)..(25): SEQ ID NO: 7184; WAN024A7I; Start 277; Stop 301
ttaaagcgttagttgtaggactagg

SEQ ID NO: 460851 - DNA, 25 bp, Artificial
  probe
  misc_feature (1)..(25): SEQ ID NO: 7184; WAN024A7I; Start 279; Stop 303
aaagcgttagttgtaggactaggta

SEQ ID NO: 460852 - DNA, 25 bp, Artificial
  probe
  misc_feature (1)..(25): SEQ ID NO: 7184; WAN024A7I; Start 278; Stop 302
taaagcgttagttgtaggactaggt

SEQ ID NO: 460853 - DNA, 25 bp, Artificial
  probe
  misc_feature (1)..(25): SEQ ID NO: 7184; WAN024A7I; Start 246; Stop 270
aggagaagataaacggctactaaaa

SEQ ID NO: 460854 - DNA, 25 bp, Artificial
  probe
  misc_feature (1)..(25): SEQ ID NO: 7184; WAN024A7I; Start 243; Stop 267
aaaaggagaagataaacggctacta

SEQ ID NO: 460855 - DNA, 25 bp, Artificial
  probe
  misc_feature (1)..(25): SEQ ID NO: 7184; WAN024A7I; Start 242; Stop 266
taaaaggagaagataaacggctact

SEQ ID NO: 460856 - DNA, 25 bp, Artificial
  probe
  misc_feature (1)..(25): SEQ ID NO: 7184; WAN024A7I; Start 241; Stop 265
ataaaaggagaagataaacggctac

SEQ ID NO: 460857 - DNA, 25 bp, Artificial
  probe
  misc_feature (1)..(25): SEQ ID NO: 7184; WAN024A7I; Start 286; Stop 310
tagttgtaggactaggtattgtttc

SEQ ID NO: 460858 - DNA, 25 bp, Artificial
  probe
  misc_feature (1)..(25): SEQ ID NO: 7184; WAN024A7I; Start 276; Stop 300
tttaaagcgttagttgtaggactag

SEQ ID NO: 460859 - DNA, 25 bp, Artificial
  probe
  misc_feature (1)..(25): SEQ ID NO: 7184; WAN024A7I; Start 307; Stop 331
tttcaatattcttatcagccttacc

SEQ ID NO: 460860 - DNA, 25 bp, Artificial
  probe
  misc_feature (1)..(25): SEQ ID NO: 7184; WAN024A7I; Start 215; Stop 239
tagatgcacatttcattcattgttt

SEQ ID NO: 460861 - DNA, 25 bp, Artificial
  probe
  misc_feature (1)..(25): SEQ ID NO: 7184; WAN024A7I; Start 214; Stop 238
ttagatgcacatttcattcattgtt

SEQ ID NO: 460862 - DNA, 25 bp, Artificial
  probe
  misc_feature (1)..(25): SEQ ID NO: 7184; WAN024A7I; Start 213; Stop 237
tttagatgcacatttcattcattgt

SEQ ID NO: 460863 - DNA, 25 bp, Artificial
  probe
  misc_feature (1)..(25): SEQ ID NO: 7184; WAN024A7I; Start 289; Stop 313
ttgtaggactaggtattgtttcaat

SEQ ID NO: 460864 - DNA, 25 bp, Artificial
  probe
  misc_feature (1)..(25): SEQ ID NO: 7184; WAN024A7I; Start 304; Stop 328
ttgtttcaatattcttatcagcctt

SEQ ID NO: 460865 - DNA, 25 bp, Artificial
  probe
  misc_feature (1)..(25): SEQ ID NO: 7184; WAN024A7I; Start 285; Stop 309
ttagttgtaggactaggtattgttt

SEQ ID NO: 460866 - DNA, 25 bp, Artificial
  probe
  misc_feature (1)..(25): SEQ ID NO: 7184; WAN024A7I; Start 74; Stop 98
acttacttgtgctatacttaaatca

SEQ ID NO: 460867 - DNA, 25 bp, Artificial
  probe
  misc_feature (1)..(25): SEQ ID NO: 7184; WAN024A7I; Start 273; Stop 297
agttttaaagcgttagttgtaggac

SEQ ID NO: 460868 - DNA, 25 bp, Artificial
  probe
  misc_feature (1)..(25): SEQ ID NO: 7184; WAN024A7I; Start 153; Stop 177
agtttattttacgagctaggaagga

SEQ ID NO: 460869 - DNA, 25 bp, Artificial
  probe
  misc_feature (1)..(25): SEQ ID NO: 7184; WAN024A7I; Start 272; Stop 296
gagttttaaagcgttagttgtagga

SEQ ID NO: 460870 - DNA, 25 bp, Artificial
  probe
  misc_feature (1)..(25): SEQ ID NO: 7184; WAN024A7I; Start 271; Stop 295
agagttttaaagcgttagttgtagg

SEQ ID NO: 460871 - DNA, 25 bp, Artificial
  probe
  misc_feature (1)..(25): SEQ ID NO: 7184; WAN024A7I; Start 212; Stop 236
atttagatgcacatttcattcattg

SEQ ID NO: 460872 - DNA, 25 bp, Artificial
  probe
  misc_feature (1)..(25): SEQ ID NO: 7184; WAN024A7I; Start 197; Stop 221
gccagaataaactatatttagatgc

SEQ ID NO: 460873 - DNA, 25 bp, Artificial
  probe
  misc_feature (1)..(25): SEQ ID NO: 7185; WAN024BYM; Start 573; Stop 597
tgaggaagcggatatagagaagtat

SEQ ID NO: 460874 - DNA, 25 bp, Artificial
  probe
  misc_feature (1)..(25): SEQ ID NO: 7185; WAN024BYM; Start 572; Stop 596
atgaggaagcggatatagagaagta

SEQ ID NO: 460875 - DNA, 25 bp, Artificial
  probe
  misc_feature (1)..(25): SEQ ID NO: 7185; WAN024BYM; Start 571; Stop 595
tatgaggaagcggatatagagaagt

SEQ ID NO: 460876 - DNA, 25 bp, Artificial
  probe
  misc_feature (1)..(25): SEQ ID NO: 7185; WAN024BYM; Start 172; Stop 196
gaccgtatgcgtgaatctatctatc

SEQ ID NO: 460877 - DNA, 25 bp, Artificial
  probe
  misc_feature (1)..(25): SEQ ID NO: 7185; WAN024BYM; Start 830; Stop 854
aagagtggtatagcgaatatgttgc

SEQ ID NO: 460878 - DNA, 25 bp, Artificial
  probe
  misc_feature (1)..(25): SEQ ID NO: 7185; WAN024BYM; Start 240; Stop 264
gaaggatagttactacaaggctacc

SEQ ID NO: 460879 - DNA, 25 bp, Artificial
  probe
  misc_feature (1)..(25): SEQ ID NO: 7185; WAN024BYM; Start 236; Stop 260
tgatgaaggatagttactacaaggc

SEQ ID NO: 460880 - DNA, 25 bp, Artificial
  probe
  misc_feature (1)..(25): SEQ ID NO: 7185; WAN024BYM; Start 237; Stop 261
gatgaaggatagttactacaaggct

SEQ ID NO: 460881 - DNA, 25 bp, Artificial
  probe
  misc_feature (1)..(25): SEQ ID NO: 7185; WAN024BYM; Start 239; Stop 263
tgaaggatagttactacaaggctac

SEQ ID NO: 460882 - DNA, 25 bp, Artificial
  probe
  misc_feature (1)..(25): SEQ ID NO: 7185; WAN024BYM; Start 574; Stop 598
gaggaagcggatatagagaagtata

SEQ ID NO: 460883 - DNA, 25 bp, Artificial
  probe
  misc_feature (1)..(25): SEQ ID NO: 7185; WAN024BYM; Start 174; Stop 198
ccgtatgcgtgaatctatctatcat

SEQ ID NO: 460884 - DNA, 25 bp, Artificial
  probe
  misc_feature (1)..(25): SEQ ID NO: 7185; WAN024BYM; Start 171; Stop 195
agaccgtatgcgtgaatctatctat

SEQ ID NO: 460885 - DNA, 25 bp, Artificial
  probe
  misc_feature (1)..(25): SEQ ID NO: 7185; WAN024BYM; Start 569; Stop 593
actatgaggaagcggatatagagaa

SEQ ID NO: 460886 - DNA, 25 bp, Artificial
  probe
  misc_feature (1)..(25): SEQ ID NO: 7185; WAN024BYM; Start 568; Stop 592
aactatgaggaagcggatatagaga

SEQ ID NO: 460887 - DNA, 25 bp, Artificial
  probe
  misc_feature (1)..(25): SEQ ID NO: 7185; WAN024BYM; Start 567; Stop 591
caactatgaggaagcggatatagag

SEQ ID NO: 460888 - DNA, 25 bp, Artificial
  probe
  misc_feature (1)..(25): SEQ ID NO: 7185; WAN024BYM; Start 570; Stop 594
ctatgaggaagcggatatagagaag

SEQ ID NO: 460889 - DNA, 25 bp, Artificial
  probe
  misc_feature (1)..(25): SEQ ID NO: 7185; WAN024BYM; Start 566; Stop 590
tcaactatgaggaagcggatataga

SEQ ID NO: 460890 - DNA, 25 bp, Artificial
  probe
  misc_feature (1)..(25): SEQ ID NO: 7185; WAN024BYM; Start 238; Stop 262
atgaaggatagttactacaaggcta

SEQ ID NO: 460891 - DNA, 25 bp, Artificial
  probe
  misc_feature (1)..(25): SEQ ID NO: 7185; WAN024BYM; Start 175; Stop 199
cgtatgcgtgaatctatctatcatt

SEQ ID NO: 460892 - DNA, 25 bp, Artificial
  probe
  misc_feature (1)..(25): SEQ ID NO: 7185; WAN024BYM; Start 173; Stop 197
accgtatgcgtgaatctatctatca

SEQ ID NO: 460893 - DNA, 25 bp, Artificial
  probe
  misc_feature (1)..(25): SEQ ID NO: 7185; WAN024BYM; Start 1335; Stop 1359
tgaactctatgagaagtatcgtgat

SEQ ID NO: 460894 - DNA, 25 bp, Artificial
  probe
  misc_feature (1)..(25): SEQ ID NO: 7185; WAN024BYM; Start 1334; Stop 1358
atgaactctatgagaagtatcgtga

SEQ ID NO: 460895 - DNA, 25 bp, Artificial
  probe
  misc_feature (1)..(25): SEQ ID NO: 7185; WAN024BYM; Start 235; Stop 259
ctgatgaaggatagttactacaagg

SEQ ID NO: 460896 - DNA, 25 bp, Artificial
  probe
  misc_feature (1)..(25): SEQ ID NO: 7185; WAN024BYM; Start 227; Stop 251
atagcgacctgatgaaggatagtta

SEQ ID NO: 460897 - DNA, 25 bp, Artificial
  probe
  misc_feature (1)..(25): SEQ ID NO: 7185; WAN024BYM; Start 226; Stop 250
tatagcgacctgatgaaggatagtt

SEQ ID NO: 460898 - DNA, 25 bp, Artificial
  probe
  misc_feature (1)..(25): SEQ ID NO: 7185; WAN024BYM; Start 225; Stop 249
ttatagcgacctgatgaaggatagt

SEQ ID NO: 460899 - DNA, 25 bp, Artificial
  probe
  misc_feature (1)..(25): SEQ ID NO: 7185; WAN024BYM; Start 241; Stop 265
aaggatagttactacaaggctacct

SEQ ID NO: 460900 - DNA, 25 bp, Artificial
  probe
  misc_feature (1)..(25): SEQ ID NO: 7185; WAN024BYM; Start 231; Stop 255
cgacctgatgaaggatagttactac

SEQ ID NO: 460901 - DNA, 25 bp, Artificial
  probe
  misc_feature (1)..(25): SEQ ID NO: 7185; WAN024BYM; Start 4; Stop 28
gctagacaagtcttgaagaacatga

SEQ ID NO: 460902 - DNA, 25 bp, Artificial
  probe
  misc_feature (1)..(25): SEQ ID NO: 7185; WAN024BYM; Start 833; Stop 857
agtggtatagcgaatatgttgcgaa

SEQ ID NO: 460903 - DNA, 25 bp, Artificial
  probe
  misc_feature (1)..(25): SEQ ID NO: 7185; WAN024BYM; Start 170; Stop 194
tagaccgtatgcgtgaatctatcta

SEQ ID NO: 460904 - DNA, 25 bp, Artificial
  probe
  misc_feature (1)..(25): SEQ ID NO: 7185; WAN024BYM; Start 232; Stop 256
gacctgatgaaggatagttactaca

SEQ ID NO: 460905 - DNA, 25 bp, Artificial
  probe
  misc_feature (1)..(25): SEQ ID NO: 7185; WAN024BYM; Start 1332; Stop 1356
acatgaactctatgagaagtatcgt

SEQ ID NO: 460906 - DNA, 25 bp, Artificial
  probe
  misc_feature (1)..(25): SEQ ID NO: 7187; WAN024DED; Start 3595; Stop 3619
ggagacaatagtaagtggttcaaga

SEQ ID NO: 460907 - DNA, 25 bp, Artificial
  probe
  misc_feature (1)..(25): SEQ ID NO: 7187; WAN024DED; Start 3594; Stop 3618
aggagacaatagtaagtggttcaag

SEQ ID NO: 460908 - DNA, 25 bp, Artificial
  probe
  misc_feature (1)..(25): SEQ ID NO: 7187; WAN024DED; Start 3593; Stop 3617
aaggagacaatagtaagtggttcaa

SEQ ID NO: 460909 - DNA, 25 bp, Artificial
  probe
  misc_feature (1)..(25): SEQ ID NO: 7187; WAN024DED; Start 1619; Stop 1643
tcagttcaggtaagcattcatacaa

SEQ ID NO: 460910 - DNA, 25 bp, Artificial
  probe
  misc_feature (1)..(25): SEQ ID NO: 7187; WAN024DED; Start 2067; Stop 2091
gcgtgaatatagtgtatctggtctt

SEQ ID NO: 460911 - DNA, 25 bp, Artificial
  probe
  misc_feature (1)..(25): SEQ ID NO: 7187; WAN024DED; Start 2062; Stop 2086
caagtgcgtgaatatagtgtatctg

SEQ ID NO: 460912 - DNA, 25 bp, Artificial
  probe
  misc_feature (1)..(25): SEQ ID NO: 7187; WAN024DED; Start 2063; Stop 2087
aagtgcgtgaatatagtgtatctgg

SEQ ID NO: 460913 - DNA, 25 bp, Artificial
  probe
  misc_feature (1)..(25): SEQ ID NO: 7187; WAN024DED; Start 667; Stop 691
gaagaagtgactgaagaaggtaaga

SEQ ID NO: 460914 - DNA, 25 bp, Artificial
  probe
  misc_feature (1)..(25): SEQ ID NO: 7187; WAN024DED; Start 666; Stop 690
tgaagaagtgactgaagaaggtaag

SEQ ID NO: 460915 - DNA, 25 bp, Artificial
  probe
  misc_feature (1)..(25): SEQ ID NO: 7187; WAN024DED; Start 665; Stop 689
ttgaagaagtgactgaagaaggtaa

SEQ ID NO: 460916 - DNA, 25 bp, Artificial
  probe
  misc_feature (1)..(25): SEQ ID NO: 7187; WAN024DED; Start 1616; Stop 1640
gtgtcagttcaggtaagcattcata

SEQ ID NO: 460917 - DNA, 25 bp, Artificial
  probe
  misc_feature (1)..(25): SEQ ID NO: 7187; WAN024DED; Start 664; Stop 688
attgaagaagtgactgaagaaggta

SEQ ID NO: 460918 - DNA, 25 bp, Artificial
  probe
  misc_feature (1)..(25): SEQ ID NO: 7187; WAN024DED; Start 2074; Stop 2098
tatagtgtatctggtcttggtgatg

SEQ ID NO: 460919 - DNA, 25 bp, Artificial
  probe
  misc_feature (1)..(25): SEQ ID NO: 7187; WAN024DED; Start 668; Stop 692
aagaagtgactgaagaaggtaagaa

SEQ ID NO: 460920 - DNA, 25 bp, Artificial
  probe
  misc_feature (1)..(25): SEQ ID NO: 7187; WAN024DED; Start 356; Stop 380
cagagcaattagataagcaggtaga

SEQ ID NO: 460921 - DNA, 25 bp, Artificial
  probe
  misc_feature (1)..(25): SEQ ID NO: 7187; WAN024DED; Start 355; Stop 379
tcagagcaattagataagcaggtag

SEQ ID NO: 460922 - DNA, 25 bp, Artificial
  probe
  misc_feature (1)..(25): SEQ ID NO: 7187; WAN024DED; Start 3003; Stop 3027
gcctaatgttcgtgatagacttctt

SEQ ID NO: 460923 - DNA, 25 bp, Artificial
  probe
  misc_feature (1)..(25): SEQ ID NO: 7187; WAN024DED; Start 1618; Stop 1642
gtcagttcaggtaagcattcataca

SEQ ID NO: 460924 - DNA, 25 bp, Artificial
  probe
  misc_feature (1)..(25): SEQ ID NO: 7187; WAN024DED; Start 1617; Stop 1641
tgtcagttcaggtaagcattcatac

SEQ ID NO: 460925 - DNA, 25 bp, Artificial
  probe
  misc_feature (1)..(25): SEQ ID NO: 7187; WAN024DED; Start 663; Stop 687
aattgaagaagtgactgaagaaggt

SEQ ID NO: 460926 - DNA, 25 bp, Artificial
  probe
  misc_feature (1)..(25): SEQ ID NO: 7187; WAN024DED; Start 354; Stop 378
ttcagagcaattagataagcaggta

SEQ ID NO: 460927 - DNA, 25 bp, Artificial
  probe
  misc_feature (1)..(25): SEQ ID NO: 7187; WAN024DED; Start 1201; Stop 1225
aatgtagccttcatcggtaatctta

SEQ ID NO: 460928 - DNA, 25 bp, Artificial
  probe
  misc_feature (1)..(25): SEQ ID NO: 7187; WAN024DED; Start 359; Stop 383
agcaattagataagcaggtagaaga

SEQ ID NO: 460929 - DNA, 25 bp, Artificial
  probe
  misc_feature (1)..(25): SEQ ID NO: 7187; WAN024DED; Start 357; Stop 381
agagcaattagataagcaggtagaa

SEQ ID NO: 460930 - DNA, 25 bp, Artificial
  probe
  misc_feature (1)..(25): SEQ ID NO: 7187; WAN024DED; Start 2075; Stop 2099
atagtgtatctggtcttggtgatgt

SEQ ID NO: 460931 - DNA, 25 bp, Artificial
  probe
  misc_feature (1)..(25): SEQ ID NO: 7187; WAN024DED; Start 2068; Stop 2092
cgtgaatatagtgtatctggtcttg

SEQ ID NO: 460932 - DNA, 25 bp, Artificial
  probe
  misc_feature (1)..(25): SEQ ID NO: 7187; WAN024DED; Start 2066; Stop 2090
tgcgtgaatatagtgtatctggtct

SEQ ID NO: 460933 - DNA, 25 bp, Artificial
  probe
  misc_feature (1)..(25): SEQ ID NO: 7187; WAN024DED; Start 2065; Stop 2089
gtgcgtgaatatagtgtatctggtc

SEQ ID NO: 460934 - DNA, 25 bp, Artificial
  probe
  misc_feature (1)..(25): SEQ ID NO: 7187; WAN024DED; Start 1357; Stop 1381
acagataatggtaacgactctatgg

SEQ ID NO: 460935 - DNA, 25 bp, Artificial
  probe
  misc_feature (1)..(25): SEQ ID NO: 7187; WAN024DED; Start 350; Stop 374
tgacttcagagcaattagataagca

SEQ ID NO: 460936 - DNA, 25 bp, Artificial
  probe
  misc_feature (1)..(25): SEQ ID NO: 7187; WAN024DED; Start 1216; Stop 1240
ggtaatcttacaggtgttggtgata

SEQ ID NO: 460937 - DNA, 25 bp, Artificial
  probe
  misc_feature (1)..(25): SEQ ID NO: 7187; WAN024DED; Start 358; Stop 382
gagcaattagataagcaggtagaag

SEQ ID NO: 460938 - DNA, 25 bp, Artificial
  probe
  misc_feature (1)..(25): SEQ ID NO: 7187; WAN024DED; Start 2076; Stop 2100
tagtgtatctggtcttggtgatgtt

SEQ ID NO: 460939 - DNA, 25 bp, Artificial
  probe
  misc_feature (1)..(25): SEQ ID NO: 7188; WAN024AMO; Start 92; Stop 116
tttgaatagtcatcgaaacgtcttg

SEQ ID NO: 460940 - DNA, 25 bp, Artificial
  probe
  misc_feature (1)..(25): SEQ ID NO: 7188; WAN024AMO; Start 97; Stop 121
atagtcatcgaaacgtcttgaattg

SEQ ID NO: 460941 - DNA, 25 bp, Artificial
  probe
  misc_feature (1)..(25): SEQ ID NO: 7188; WAN024AMO; Start 95; Stop 119
gaatagtcatcgaaacgtcttgaat

SEQ ID NO: 460942 - DNA, 25 bp, Artificial
  probe
  misc_feature (1)..(25): SEQ ID NO: 7188; WAN024AMO; Start 94; Stop 118
tgaatagtcatcgaaacgtcttgaa

SEQ ID NO: 460943 - DNA, 25 bp, Artificial
  probe
  misc_feature (1)..(25): SEQ ID NO: 7188; WAN024AMO; Start 93; Stop 117
ttgaatagtcatcgaaacgtcttga

SEQ ID NO: 460944 - DNA, 25 bp, Artificial
  probe
  misc_feature (1)..(25): SEQ ID NO: 7188; WAN024AMO; Start 96; Stop 120
aatagtcatcgaaacgtcttgaatt

SEQ ID NO: 460945 - DNA, 25 bp, Artificial
  probe
  misc_feature (1)..(25): SEQ ID NO: 7188; WAN024AMO; Start 98; Stop 122
tagtcatcgaaacgtcttgaattgc

SEQ ID NO: 460946 - DNA, 25 bp, Artificial
  probe
  misc_feature (1)..(25): SEQ ID NO: 7188; WAN024AMO; Start 82; Stop 106
tcatccagattttgaatagtcatcg

SEQ ID NO: 460947 - DNA, 25 bp, Artificial
  probe
  misc_feature (1)..(25): SEQ ID NO: 7188; WAN024AMO; Start 46; Stop 70
tgacaagtttagtatatcatcgttt

SEQ ID NO: 460948 - DNA, 25 bp, Artificial
  probe
  misc_feature (1)..(25): SEQ ID NO: 7188; WAN024AMO; Start 45; Stop 69
ttgacaagtttagtatatcatcgtt

SEQ ID NO: 460949 - DNA, 25 bp, Artificial
  probe
  misc_feature (1)..(25): SEQ ID NO: 7188; WAN024AMO; Start 44; Stop 68
tttgacaagtttagtatatcatcgt

SEQ ID NO: 460950 - DNA, 25 bp, Artificial
  probe
  misc_feature (1)..(25): SEQ ID NO: 7188; WAN024AMO; Start 43; Stop 67
ctttgacaagtttagtatatcatcg

SEQ ID NO: 460951 - DNA, 25 bp, Artificial
  probe
  misc_feature (1)..(25): SEQ ID NO: 7188; WAN024AMO; Start 83; Stop 107
catccagattttgaatagtcatcga

SEQ ID NO: 460952 - DNA, 25 bp, Artificial
  probe
  misc_feature (1)..(25): SEQ ID NO: 7188; WAN024AMO; Start 87; Stop 111
cagattttgaatagtcatcgaaacg

SEQ ID NO: 460953 - DNA, 25 bp, Artificial
  probe
  misc_feature (1)..(25): SEQ ID NO: 7188; WAN024AMO; Start 91; Stop 115
ttttgaatagtcatcgaaacgtctt

SEQ ID NO: 460954 - DNA, 25 bp, Artificial
  probe
  misc_feature (1)..(25): SEQ ID NO: 7188; WAN024AMO; Start 86; Stop 110
ccagattttgaatagtcatcgaaac

SEQ ID NO: 460955 - DNA, 25 bp, Artificial
  probe
  misc_feature (1)..(25): SEQ ID NO: 7188; WAN024AMO; Start 90; Stop 114
attttgaatagtcatcgaaacgtct

SEQ ID NO: 460956 - DNA, 25 bp, Artificial
  probe
  misc_feature (1)..(25): SEQ ID NO: 7188; WAN024AMO; Start 88; Stop 112
agattttgaatagtcatcgaaacgt

SEQ ID NO: 460957 - DNA, 25 bp, Artificial
  probe
  misc_feature (1)..(25): SEQ ID NO: 7188; WAN024AMO; Start 85; Stop 109
tccagattttgaatagtcatcgaaa

SEQ ID NO: 460958 - DNA, 25 bp, Artificial
  probe
  misc_feature (1)..(25): SEQ ID NO: 7188; WAN024AMO; Start 89; Stop 113
gattttgaatagtcatcgaaacgtc

SEQ ID NO: 460959 - DNA, 25 bp, Artificial
  probe
  misc_feature (1)..(25): SEQ ID NO: 7188; WAN024AMO; Start 99; Stop 123
agtcatcgaaacgtcttgaattgca

SEQ ID NO: 460960 - DNA, 25 bp, Artificial
  probe
  misc_feature (1)..(25): SEQ ID NO: 7188; WAN024AMO; Start 84; Stop 108
atccagattttgaatagtcatcgaa

SEQ ID NO: 460961 - DNA, 25 bp, Artificial
  probe
  misc_feature (1)..(25): SEQ ID NO: 7188; WAN024AMO; Start 125; Stop 149
aaattacattagacttcctgcaaaa

SEQ ID NO: 460962 - DNA, 25 bp, Artificial
  probe
  misc_feature (1)..(25): SEQ ID NO: 7188; WAN024AMO; Start 124; Stop 148
aaaattacattagacttcctgcaaa

SEQ ID NO: 460963 - DNA, 25 bp, Artificial
  probe
  misc_feature (1)..(25): SEQ ID NO: 7188; WAN024AMO; Start 101; Stop 125
tcatcgaaacgtcttgaattgcaaa

SEQ ID NO: 460964 - DNA, 25 bp, Artificial
  probe
  misc_feature (1)..(25): SEQ ID NO: 7188; WAN024AMO; Start 100; Stop 124
gtcatcgaaacgtcttgaattgcaa

SEQ ID NO: 460965 - DNA, 25 bp, Artificial
  probe
  misc_feature (1)..(25): SEQ ID NO: 7188; WAN024AMO; Start 81; Stop 105
ttcatccagattttgaatagtcatc

SEQ ID NO: 460966 - DNA, 25 bp, Artificial
  probe
  misc_feature (1)..(25): SEQ ID NO: 7188; WAN024AMO; Start 47; Stop 71
gacaagtttagtatatcatcgtttt

SEQ ID NO: 460967 - DNA, 25 bp, Artificial
  probe
  misc_feature (1)..(25): SEQ ID NO: 7188; WAN024AMO; Start 79; Stop 103
ttttcatccagattttgaatagtca

SEQ ID NO: 460968 - DNA, 25 bp, Artificial
  probe
  misc_feature (1)..(25): SEQ ID NO: 7188; WAN024AMO; Start 80; Stop 104
tttcatccagattttgaatagtcat

SEQ ID NO: 460969 - DNA, 25 bp, Artificial
  probe
  misc_feature (1)..(25): SEQ ID NO: 7188; WAN024AMO; Start 102; Stop 126
catcgaaacgtcttgaattgcaaaa

SEQ ID NO: 460970 - DNA, 25 bp, Artificial
  probe
  misc_feature (1)..(25): SEQ ID NO: 7188; WAN024AMO; Start 34; Stop 58
ttgttgtaactttgacaagtttagt

SEQ ID NO: 460971 - DNA, 25 bp, Artificial
  probe
  misc_feature (1)..(25): SEQ ID NO: 7188; WAN024AMO; Start 35; Stop 59
tgttgtaactttgacaagtttagta

SEQ ID NO: 460972 - DNA, 25 bp, Artificial
  probe
  misc_feature (1)..(25): SEQ ID NO: 7188; WAN024AMO; Start 36; Stop 60
gttgtaactttgacaagtttagtat

SEQ ID NO: 460973 - DNA, 25 bp, Artificial
  probe
  misc_feature (1)..(25): SEQ ID NO: 7189; WAN024BCN; Start 98; Stop 122
tcagtaacatatacatacggcaagg

SEQ ID NO: 460974 - DNA, 25 bp, Artificial
  probe
  misc_feature (1)..(25): SEQ ID NO: 7189; WAN024BCN; Start 97; Stop 121
atcagtaacatatacatacggcaag

SEQ ID NO: 460975 - DNA, 25 bp, Artificial
  probe
  misc_feature (1)..(25): SEQ ID NO: 7189; WAN024BCN; Start 99; Stop 123
cagtaacatatacatacggcaaggc

SEQ ID NO: 460976 - DNA, 25 bp, Artificial
  probe
  misc_feature (1)..(25): SEQ ID NO: 7189; WAN024BCN; Start 96; Stop 120
aatcagtaacatatacatacggcaa

SEQ ID NO: 460977 - DNA, 25 bp, Artificial
  probe
  misc_feature (1)..(25): SEQ ID NO: 7189; WAN024BCN; Start 102; Stop 126
taacatatacatacggcaaggcgac

SEQ ID NO: 460978 - DNA, 25 bp, Artificial
  probe
  misc_feature (1)..(25): SEQ ID NO: 7189; WAN024BCN; Start 101; Stop 125
gtaacatatacatacggcaaggcga

SEQ ID NO: 460979 - DNA, 25 bp, Artificial
  probe
  misc_feature (1)..(25): SEQ ID NO: 7189; WAN024BCN; Start 100; Stop 124
agtaacatatacatacggcaaggcg

SEQ ID NO: 460980 - DNA, 25 bp, Artificial
  probe
  misc_feature (1)..(25): SEQ ID NO: 7189; WAN024BCN; Start 95; Stop 119
aaatcagtaacatatacatacggca

SEQ ID NO: 460981 - DNA, 25 bp, Artificial
  probe
  misc_feature (1)..(25): SEQ ID NO: 7189; WAN024BCN; Start 94; Stop 118
gaaatcagtaacatatacatacggc

SEQ ID NO: 460982 - DNA, 25 bp, Artificial
  probe
  misc_feature (1)..(25): SEQ ID NO: 7189; WAN024BCN; Start 93; Stop 117
cgaaatcagtaacatatacatacgg

SEQ ID NO: 460983 - DNA, 25 bp, Artificial
  probe
  misc_feature (1)..(25): SEQ ID NO: 7189; WAN024BCN; Start 72; Stop 96
taaggttgcagatagaactgacgaa

SEQ ID NO: 460984 - DNA, 25 bp, Artificial
  probe
  misc_feature (1)..(25): SEQ ID NO: 7189; WAN024BCN; Start 71; Stop 95
ttaaggttgcagatagaactgacga

SEQ ID NO: 460985 - DNA, 25 bp, Artificial
  probe
  misc_feature (1)..(25): SEQ ID NO: 7189; WAN024BCN; Start 27; Stop 51
taaggttgtggatggaactgacgaa

SEQ ID NO: 460986 - DNA, 25 bp, Artificial
  probe
  misc_feature (1)..(25): SEQ ID NO: 7189; WAN024BCN; Start 26; Stop 50
ttaaggttgtggatggaactgacga

SEQ ID NO: 460987 - DNA, 25 bp, Artificial
  probe
  misc_feature (1)..(25): SEQ ID NO: 7189; WAN024BCN; Start 92; Stop 116
acgaaatcagtaacatatacatacg

SEQ ID NO: 460988 - DNA, 25 bp, Artificial
  probe
  misc_feature (1)..(25): SEQ ID NO: 7189; WAN024BCN; Start 25; Stop 49
tttaaggttgtggatggaactgacg

SEQ ID NO: 460989 - DNA, 25 bp, Artificial
  probe
  misc_feature (1)..(25): SEQ ID NO: 7189; WAN024BCN; Start 70; Stop 94
tttaaggttgcagatagaactgacg

SEQ ID NO: 460990 - DNA, 25 bp, Artificial
  probe
  misc_feature (1)..(25): SEQ ID NO: 7189; WAN024BCN; Start 76; Stop 100
gttgcagatagaactgacgaaatca

SEQ ID NO: 460991 - DNA, 25 bp, Artificial
  probe
  misc_feature (1)..(25): SEQ ID NO: 7189; WAN024BCN; Start 24; Stop 48
ttttaaggttgtggatggaactgac

SEQ ID NO: 460992 - DNA, 25 bp, Artificial
  probe
  misc_feature (1)..(25): SEQ ID NO: 7189; WAN024BCN; Start 23; Stop 47
gttttaaggttgtggatggaactga

SEQ ID NO: 460993 - DNA, 25 bp, Artificial
  probe
  misc_feature (1)..(25): SEQ ID NO: 7189; WAN024BCN; Start 21; Stop 45
ctgttttaaggttgtggatggaact

SEQ ID NO: 460994 - DNA, 25 bp, Artificial
  probe
  misc_feature (1)..(25): SEQ ID NO: 7189; WAN024BCN; Start 22; Stop 46
tgttttaaggttgtggatggaactg

SEQ ID NO: 460995 - DNA, 25 bp, Artificial
  probe
  misc_feature (1)..(25): SEQ ID NO: 7189; WAN024BCN; Start 20; Stop 44
actgttttaaggttgtggatggaac

SEQ ID NO: 460996 - DNA, 25 bp, Artificial
  probe
  misc_feature (1)..(25): SEQ ID NO: 7189; WAN024BCN; Start 75; Stop 99
ggttgcagatagaactgacgaaatc

SEQ ID NO: 460997 - DNA, 25 bp, Artificial
  probe
  misc_feature (1)..(25): SEQ ID NO: 7189; WAN024BCN; Start 74; Stop 98
aggttgcagatagaactgacgaaat

SEQ ID NO: 460998 - DNA, 25 bp, Artificial
  probe
  misc_feature (1)..(25): SEQ ID NO: 7189; WAN024BCN; Start 73; Stop 97
aaggttgcagatagaactgacgaaa

SEQ ID NO: 460999 - DNA, 25 bp, Artificial
  probe
  misc_feature (1)..(25): SEQ ID NO: 7189; WAN024BCN; Start 28; Stop 52
aaggttgtggatggaactgacgaag

SEQ ID NO: 461000 - DNA, 25 bp, Artificial
  probe
  misc_feature (1)..(25): SEQ ID NO: 7189; WAN024BCN; Start 19; Stop 43
cactgttttaaggttgtggatggaa

SEQ ID NO: 461001 - DNA, 25 bp, Artificial
  probe
  misc_feature (1)..(25): SEQ ID NO: 7189; WAN024BCN; Start 91; Stop 115
gacgaaatcagtaacatatacatac

SEQ ID NO: 461002 - DNA, 25 bp, Artificial
  probe
  misc_feature (1)..(25): SEQ ID NO: 7189; WAN024BCN; Start 90; Stop 114
tgacgaaatcagtaacatatacata

SEQ ID NO: 461003 - DNA, 25 bp, Artificial
  probe
  misc_feature (1)..(25): SEQ ID NO: 7189; WAN024BCN; Start 17; Stop 41
aacactgttttaaggttgtggatgg

SEQ ID NO: 461004 - DNA, 25 bp, Artificial
  probe
  misc_feature (1)..(25): SEQ ID NO: 7189; WAN024BCN; Start 63; Stop 87
acactgttttaaggttgcagataga

SEQ ID NO: 461005 - DNA, 25 bp, Artificial
  probe
  misc_feature (1)..(25): SEQ ID NO: 7189; WAN024BCN; Start 62; Stop 86
aacactgttttaaggttgcagatag

SEQ ID NO: 461006 - DNA, 25 bp, Artificial
  probe
  misc_feature (1)..(25): SEQ ID NO: 7190; WAN024DDM; Start 911; Stop 935
atgtaacgaatggtaatgctattgc

SEQ ID NO: 461007 - DNA, 25 bp, Artificial
  probe
  misc_feature (1)..(25): SEQ ID NO: 7190; WAN024DDM; Start 1444; Stop 1468
aatgtagcagagtatagaataggcg

SEQ ID NO: 461008 - DNA, 25 bp, Artificial
  probe
  misc_feature (1)..(25): SEQ ID NO: 7190; WAN024DDM; Start 3115; Stop 3139
agaagaggttatgtagatgaagcaa

SEQ ID NO: 461009 - DNA, 25 bp, Artificial
  probe
  misc_feature (1)..(25): SEQ ID NO: 7190; WAN024DDM; Start 3114; Stop 3138
aagaagaggttatgtagatgaagca

SEQ ID NO: 461010 - DNA, 25 bp, Artificial
  probe
  misc_feature (1)..(25): SEQ ID NO: 7190; WAN024DDM; Start 1393; Stop 1417
gcggataatacatcagagacactta

SEQ ID NO: 461011 - DNA, 25 bp, Artificial
  probe
  misc_feature (1)..(25): SEQ ID NO: 7190; WAN024DDM; Start 526; Stop 550
cgtagcataggaggattagtatcac

SEQ ID NO: 461012 - DNA, 25 bp, Artificial
  probe
  misc_feature (1)..(25): SEQ ID NO: 7190; WAN024DDM; Start 206; Stop 230
caatgaatagcaatcctaatggcac

SEQ ID NO: 461013 - DNA, 25 bp, Artificial
  probe
  misc_feature (1)..(25): SEQ ID NO: 7190; WAN024DDM; Start 530; Stop 554
gcataggaggattagtatcacaagt

SEQ ID NO: 461014 - DNA, 25 bp, Artificial
  probe
  misc_feature (1)..(25): SEQ ID NO: 7190; WAN024DDM; Start 3113; Stop 3137
caagaagaggttatgtagatgaagc

SEQ ID NO: 461015 - DNA, 25 bp, Artificial
  probe
  misc_feature (1)..(25): SEQ ID NO: 7190; WAN024DDM; Start 2804; Stop 2828
atcaatcagaagaatcaacaaggct

SEQ ID NO: 461016 - DNA, 25 bp, Artificial
  probe
  misc_feature (1)..(25): SEQ ID NO: 7190; WAN024DDM; Start 1447; Stop 1471
gtagcagagtatagaataggcggta

SEQ ID NO: 461017 - DNA, 25 bp, Artificial
  probe
  misc_feature (1)..(25): SEQ ID NO: 7190; WAN024DDM; Start 207; Stop 231
aatgaatagcaatcctaatggcaca

SEQ ID NO: 461018 - DNA, 25 bp, Artificial
  probe
  misc_feature (1)..(25): SEQ ID NO: 7190; WAN024DDM; Start 672; Stop 696
aatagataagtcgttcgcatcaatc

SEQ ID NO: 461019 - DNA, 25 bp, Artificial
  probe
  misc_feature (1)..(25): SEQ ID NO: 7190; WAN024DDM; Start 529; Stop 553
agcataggaggattagtatcacaag

SEQ ID NO: 461020 - DNA, 25 bp, Artificial
  probe
  misc_feature (1)..(25): SEQ ID NO: 7190; WAN024DDM; Start 208; Stop 232
atgaatagcaatcctaatggcacat

SEQ ID NO: 461021 - DNA, 25 bp, Artificial
  probe
  misc_feature (1)..(25): SEQ ID NO: 7190; WAN024DDM; Start 3118; Stop 3142
agaggttatgtagatgaagcaactt

SEQ ID NO: 461022 - DNA, 25 bp, Artificial
  probe
  misc_feature (1)..(25): SEQ ID NO: 7190; WAN024DDM; Start 3117; Stop 3141
aagaggttatgtagatgaagcaact

SEQ ID NO: 461023 - DNA, 25 bp, Artificial
  probe
  misc_feature (1)..(25): SEQ ID NO: 7190; WAN024DDM; Start 527; Stop 551
gtagcataggaggattagtatcaca

SEQ ID NO: 461024 - DNA, 25 bp, Artificial
  probe
  misc_feature (1)..(25): SEQ ID NO: 7190; WAN024DDM; Start 3116; Stop 3140
gaagaggttatgtagatgaagcaac

SEQ ID NO: 461025 - DNA, 25 bp, Artificial
  probe
  misc_feature (1)..(25): SEQ ID NO: 7190; WAN024DDM; Start 2805; Stop 2829
tcaatcagaagaatcaacaaggctt

SEQ ID NO: 461026 - DNA, 25 bp, Artificial
  probe
  misc_feature (1)..(25): SEQ ID NO: 7190; WAN024DDM; Start 1445; Stop 1469
atgtagcagagtatagaataggcgg

SEQ ID NO: 461027 - DNA, 25 bp, Artificial
  probe
  misc_feature (1)..(25): SEQ ID NO: 7190; WAN024DDM; Start 673; Stop 697
atagataagtcgttcgcatcaatcg

SEQ ID NO: 461028 - DNA, 25 bp, Artificial
  probe
  misc_feature (1)..(25): SEQ ID NO: 7190; WAN024DDM; Start 670; Stop 694
ttaatagataagtcgttcgcatcaa

SEQ ID NO: 461029 - DNA, 25 bp, Artificial
  probe
  misc_feature (1)..(25): SEQ ID NO: 7190; WAN024DDM; Start 2803; Stop 2827
gatcaatcagaagaatcaacaaggc

SEQ ID NO: 461030 - DNA, 25 bp, Artificial
  probe
  misc_feature (1)..(25): SEQ ID NO: 7190; WAN024DDM; Start 2553; Stop 2577
tgttgttcataattctaatggagca

SEQ ID NO: 461031 - DNA, 25 bp, Artificial
  probe
  misc_feature (1)..(25): SEQ ID NO: 7190; WAN024DDM; Start 671; Stop 695
taatagataagtcgttcgcatcaat

SEQ ID NO: 461032 - DNA, 25 bp, Artificial
  probe
  misc_feature (1)..(25): SEQ ID NO: 7190; WAN024DDM; Start 528; Stop 552
tagcataggaggattagtatcacaa

SEQ ID NO: 461033 - DNA, 25 bp, Artificial
  probe
  misc_feature (1)..(25): SEQ ID NO: 7190; WAN024DDM; Start 1448; Stop 1472
tagcagagtatagaataggcggtac

SEQ ID NO: 461034 - DNA, 25 bp, Artificial
  probe
  misc_feature (1)..(25): SEQ ID NO: 7190; WAN024DDM; Start 910; Stop 934
aatgtaacgaatggtaatgctattg

SEQ ID NO: 461035 - DNA, 25 bp, Artificial
  probe
  misc_feature (1)..(25): SEQ ID NO: 7190; WAN024DDM; Start 3119; Stop 3143
gaggttatgtagatgaagcaactta

SEQ ID NO: 461036 - DNA, 25 bp, Artificial
  probe
  misc_feature (1)..(25): SEQ ID NO: 7190; WAN024DDM; Start 2202; Stop 2226
gttgccgctattaacattacctgaa

SEQ ID NO: 461037 - DNA, 25 bp, Artificial
  probe
  misc_feature (1)..(25): SEQ ID NO: 7190; WAN024DDM; Start 205; Stop 229
gcaatgaatagcaatcctaatggca

SEQ ID NO: 461038 - DNA, 25 bp, Artificial
  probe
  misc_feature (1)..(25): SEQ ID NO: 7190; WAN024DDM; Start 11; Stop 35
aagatgtgatgctaccagttacaag

SEQ ID NO: 461039 - DNA, 25 bp, Artificial
  probe
  misc_feature (1)..(25): SEQ ID NO: 7191; WAN024BN6-3; Start 328; Stop 352
ggtagcattattcacgaagtcttag

SEQ ID NO: 461040 - DNA, 25 bp, Artificial
  probe
  misc_feature (1)..(25): SEQ ID NO: 7191; WAN024BN6-3; Start 791; Stop 815
ggcgtcaggctgtattctattatat

SEQ ID NO: 461041 - DNA, 25 bp, Artificial
  probe
  misc_feature (1)..(25): SEQ ID NO: 7191; WAN024BN6-3; Start 327; Stop 351
cggtagcattattcacgaagtctta

SEQ ID NO: 461042 - DNA, 25 bp, Artificial
  probe
  misc_feature (1)..(25): SEQ ID NO: 7191; WAN024BN6-3; Start 51; Stop 75
gctccatctctcttatgctaatgat

SEQ ID NO: 461043 - DNA, 25 bp, Artificial
  probe
  misc_feature (1)..(25): SEQ ID NO: 7191; WAN024BN6-3; Start 792; Stop 816
gcgtcaggctgtattctattatatc

SEQ ID NO: 461044 - DNA, 25 bp, Artificial
  probe
  misc_feature (1)..(25): SEQ ID NO: 7191; WAN024BN6-3; Start 1680; Stop 1704
gcgtcaagcagtcttctataatctt

SEQ ID NO: 461045 - DNA, 25 bp, Artificial
  probe
  misc_feature (1)..(25): SEQ ID NO: 7191; WAN024BN6-3; Start 319; Stop 343
atggtattcggtagcattattcacg

SEQ ID NO: 461046 - DNA, 25 bp, Artificial
  probe
  misc_feature (1)..(25): SEQ ID NO: 7191; WAN024BN6-3; Start 50; Stop 74
tgctccatctctcttatgctaatga

SEQ ID NO: 461047 - DNA, 25 bp, Artificial
  probe
  misc_feature (1)..(25): SEQ ID NO: 7191; WAN024BN6-3; Start 49; Stop 73
gtgctccatctctcttatgctaatg

SEQ ID NO: 461048 - DNA, 25 bp, Artificial
  probe
  misc_feature (1)..(25): SEQ ID NO: 7191; WAN024BN6-3; Start 1001; Stop 1025
ttaactgtggttgtggagtattgaa

SEQ ID NO: 461049 - DNA, 25 bp, Artificial
  probe
  misc_feature (1)..(25): SEQ ID NO: 7191; WAN024BN6-3; Start 790; Stop 814
tggcgtcaggctgtattctattata

SEQ ID NO: 461050 - DNA, 25 bp, Artificial
  probe
  misc_feature (1)..(25): SEQ ID NO: 7191; WAN024BN6-3; Start 329; Stop 353
gtagcattattcacgaagtcttaga

SEQ ID NO: 461051 - DNA, 25 bp, Artificial
  probe
  misc_feature (1)..(25): SEQ ID NO: 7191; WAN024BN6-3; Start 318; Stop 342
tatggtattcggtagcattattcac

SEQ ID NO: 461052 - DNA, 25 bp, Artificial
  probe
  misc_feature (1)..(25): SEQ ID NO: 7191; WAN024BN6-3; Start 1095; Stop 1119
taatactgaagccttagaagttgcg

SEQ ID NO: 461053 - DNA, 25 bp, Artificial
  probe
  misc_feature (1)..(25): SEQ ID NO: 7191; WAN024BN6-3; Start 793; Stop 817
cgtcaggctgtattctattatatcc

SEQ ID NO: 461054 - DNA, 25 bp, Artificial
  probe
  misc_feature (1)..(25): SEQ ID NO: 7191; WAN024BN6-3; Start 1657; Stop 1681
ctagaagttggacatgattattggc

SEQ ID NO: 461055 - DNA, 25 bp, Artificial
  probe
  misc_feature (1)..(25): SEQ ID NO: 7191; WAN024BN6-3; Start 1094; Stop 1118
ataatactgaagccttagaagttgc

SEQ ID NO: 461056 - DNA, 25 bp, Artificial
  probe
  misc_feature (1)..(25): SEQ ID NO: 7191; WAN024BN6-3; Start 1791; Stop 1815
tggctattcaattcacactatacaa

SEQ ID NO: 461057 - DNA, 25 bp, Artificial
  probe
  misc_feature (1)..(25): SEQ ID NO: 7191; WAN024BN6-3; Start 317; Stop 341
ctatggtattcggtagcattattca

SEQ ID NO: 461058 - DNA, 25 bp, Artificial
  probe
  misc_feature (1)..(25): SEQ ID NO: 7191; WAN024BN6-3; Start 1675; Stop 1699
tattggcgtcaagcagtcttctata

SEQ ID NO: 461059 - DNA, 25 bp, Artificial
  probe
  misc_feature (1)..(25): SEQ ID NO: 7191; WAN024BN6-3; Start 789; Stop 813
ttggcgtcaggctgtattctattat

SEQ ID NO: 461060 - DNA, 25 bp, Artificial
  probe
  misc_feature (1)..(25): SEQ ID NO: 7191; WAN024BN6-3; Start 788; Stop 812
attggcgtcaggctgtattctatta

SEQ ID NO: 461061 - DNA, 25 bp, Artificial
  probe
  misc_feature (1)..(25): SEQ ID NO: 7191; WAN024BN6-3; Start 787; Stop 811
tattggcgtcaggctgtattctatt

SEQ ID NO: 461062 - DNA, 25 bp, Artificial
  probe
  misc_feature (1)..(25): SEQ ID NO: 7191; WAN024BN6-3; Start 786; Stop 810
ttattggcgtcaggctgtattctat

SEQ ID NO: 461063 - DNA, 25 bp, Artificial
  probe
  misc_feature (1)..(25): SEQ ID NO: 7191; WAN024BN6-3; Start 785; Stop 809
attattggcgtcaggctgtattcta

SEQ ID NO: 461064 - DNA, 25 bp, Artificial
  probe
  misc_feature (1)..(25): SEQ ID NO: 7191; WAN024BN6-3; Start 48; Stop 72
ggtgctccatctctcttatgctaat

SEQ ID NO: 461065 - DNA, 25 bp, Artificial
  probe
  misc_feature (1)..(25): SEQ ID NO: 7191; WAN024BN6-3; Start 1658; Stop 1682
tagaagttggacatgattattggcg

SEQ ID NO: 461066 - DNA, 25 bp, Artificial
  probe
  misc_feature (1)..(25): SEQ ID NO: 7191; WAN024BN6-3; Start 54; Stop 78
ccatctctcttatgctaatgattct

SEQ ID NO: 461067 - DNA, 25 bp, Artificial
  probe
  misc_feature (1)..(25): SEQ ID NO: 7191; WAN024BN6-3; Start 53; Stop 77
tccatctctcttatgctaatgattc

SEQ ID NO: 461068 - DNA, 25 bp, Artificial
  probe
  misc_feature (1)..(25): SEQ ID NO: 7191; WAN024BN6-3; Start 52; Stop 76
ctccatctctcttatgctaatgatt

SEQ ID NO: 461069 - DNA, 25 bp, Artificial
  probe
  misc_feature (1)..(25): SEQ ID NO: 7191; WAN024BN6-3; Start 628; Stop 652
gacctatcggaagtatctaatatcg

SEQ ID NO: 461070 - DNA, 25 bp, Artificial
  probe
  misc_feature (1)..(25): SEQ ID NO: 7191; WAN024BN6-3; Start 330; Stop 354
tagcattattcacgaagtcttagaa

SEQ ID NO: 461071 - DNA, 25 bp, Artificial
  probe
  misc_feature (1)..(25): SEQ ID NO: 7191; WAN024BN6-3; Start 1792; Stop 1816
ggctattcaattcacactatacaag

SEQ ID NO: 461072 - DNA, 25 bp, Artificial
  probe
  misc_feature (1)..(25): SEQ ID NO: 7192; WAN024F69; Start 60; Stop 84
agtcagtaatcatatctacggcaag

SEQ ID NO: 461073 - DNA, 25 bp, Artificial
  probe
  misc_feature (1)..(25): SEQ ID NO: 7192; WAN024F69; Start 58; Stop 82
gaagtcagtaatcatatctacggca

SEQ ID NO: 461074 - DNA, 25 bp, Artificial
  probe
  misc_feature (1)..(25): SEQ ID NO: 7192; WAN024F69; Start 56; Stop 80
acgaagtcagtaatcatatctacgg

SEQ ID NO: 461075 - DNA, 25 bp, Artificial
  probe
  misc_feature (1)..(25): SEQ ID NO: 7192; WAN024F69; Start 59; Stop 83
aagtcagtaatcatatctacggcaa

SEQ ID NO: 461076 - DNA, 25 bp, Artificial
  probe
  misc_feature (1)..(25): SEQ ID NO: 7192; WAN024F69; Start 61; Stop 85
gtcagtaatcatatctacggcaagg

SEQ ID NO: 461077 - DNA, 25 bp, Artificial
  probe
  misc_feature (1)..(25): SEQ ID NO: 7192; WAN024F69; Start 57; Stop 81
cgaagtcagtaatcatatctacggc

SEQ ID NO: 461078 - DNA, 25 bp, Artificial
  probe
  misc_feature (1)..(25): SEQ ID NO: 7192; WAN024F69; Start 62; Stop 86
tcagtaatcatatctacggcaaggc

SEQ ID NO: 461079 - DNA, 25 bp, Artificial
  probe
  misc_feature (1)..(25): SEQ ID NO: 7192; WAN024F69; Start 55; Stop 79
gacgaagtcagtaatcatatctacg

SEQ ID NO: 461080 - DNA, 25 bp, Artificial
  probe
  misc_feature (1)..(25): SEQ ID NO: 7192; WAN024F69; Start 89; Stop 113
cactgacgaagtttgaattggattt

SEQ ID NO: 461081 - DNA, 25 bp, Artificial
  probe
  misc_feature (1)..(25): SEQ ID NO: 7192; WAN024F69; Start 65; Stop 89
gtaatcatatctacggcaaggcgac

SEQ ID NO: 461082 - DNA, 25 bp, Artificial
  probe
  misc_feature (1)..(25): SEQ ID NO: 7192; WAN024F69; Start 64; Stop 88
agtaatcatatctacggcaaggcga

SEQ ID NO: 461083 - DNA, 25 bp, Artificial
  probe
  misc_feature (1)..(25): SEQ ID NO: 7192; WAN024F69; Start 63; Stop 87
cagtaatcatatctacggcaaggcg

SEQ ID NO: 461084 - DNA, 25 bp, Artificial
  probe
  misc_feature (1)..(25): SEQ ID NO: 7192; WAN024F69; Start 88; Stop 112
acactgacgaagtttgaattggatt

SEQ ID NO: 461085 - DNA, 25 bp, Artificial
  probe
  misc_feature (1)..(25): SEQ ID NO: 7192; WAN024F69; Start 87; Stop 111
gacactgacgaagtttgaattggat

SEQ ID NO: 461086 - DNA, 25 bp, Artificial
  probe
  misc_feature (1)..(25): SEQ ID NO: 7192; WAN024F69; Start 66; Stop 90
taatcatatctacggcaaggcgaca

SEQ ID NO: 461087 - DNA, 25 bp, Artificial
  probe
  misc_feature (1)..(25): SEQ ID NO: 7192; WAN024F69; Start 91; Stop 115
ctgacgaagtttgaattggattttc

SEQ ID NO: 461088 - DNA, 25 bp, Artificial
  probe
  misc_feature (1)..(25): SEQ ID NO: 7192; WAN024F69; Start 97; Stop 121
aagtttgaattggattttcgcagag

SEQ ID NO: 461089 - DNA, 25 bp, Artificial
  probe
  misc_feature (1)..(25): SEQ ID NO: 7192; WAN024F69; Start 96; Stop 120
gaagtttgaattggattttcgcaga

SEQ ID NO: 461090 - DNA, 25 bp, Artificial
  probe
  misc_feature (1)..(25): SEQ ID NO: 7192; WAN024F69; Start 90; Stop 114
actgacgaagtttgaattggatttt

SEQ ID NO: 461091 - DNA, 25 bp, Artificial
  probe
  misc_feature (1)..(25): SEQ ID NO: 7192; WAN024F69; Start 99; Stop 123
gtttgaattggattttcgcagagtg

SEQ ID NO: 461092 - DNA, 25 bp, Artificial
  probe
  misc_feature (1)..(25): SEQ ID NO: 7192; WAN024F69; Start 98; Stop 122
agtttgaattggattttcgcagagt

SEQ ID NO: 461093 - DNA, 25 bp, Artificial
  probe
  misc_feature (1)..(25): SEQ ID NO: 7192; WAN024F69; Start 86; Stop 110
cgacactgacgaagtttgaattgga

SEQ ID NO: 461094 - DNA, 25 bp, Artificial
  probe
  misc_feature (1)..(25): SEQ ID NO: 7192; WAN024F69; Start 67; Stop 91
aatcatatctacggcaaggcgacac

SEQ ID NO: 461095 - DNA, 25 bp, Artificial
  probe
  misc_feature (1)..(25): SEQ ID NO: 7192; WAN024F69; Start 54; Stop 78
tgacgaagtcagtaatcatatctac

SEQ ID NO: 461096 - DNA, 25 bp, Artificial
  probe
  misc_feature (1)..(25): SEQ ID NO: 7192; WAN024F69; Start 85; Stop 109
gcgacactgacgaagtttgaattgg

SEQ ID NO: 461097 - DNA, 25 bp, Artificial
  probe
  misc_feature (1)..(25): SEQ ID NO: 7192; WAN024F69; Start 84; Stop 108
ggcgacactgacgaagtttgaattg

SEQ ID NO: 461098 - DNA, 25 bp, Artificial
  probe
  misc_feature (1)..(25): SEQ ID NO: 7192; WAN024F69; Start 92; Stop 116
tgacgaagtttgaattggattttcg

SEQ ID NO: 461099 - DNA, 25 bp, Artificial
  probe
  misc_feature (1)..(25): SEQ ID NO: 7192; WAN024F69; Start 95; Stop 119
cgaagtttgaattggattttcgcag

SEQ ID NO: 461100 - DNA, 25 bp, Artificial
  probe
  misc_feature (1)..(25): SEQ ID NO: 7192; WAN024F69; Start 93; Stop 117
gacgaagtttgaattggattttcgc

SEQ ID NO: 461101 - DNA, 25 bp, Artificial
  probe
  misc_feature (1)..(25): SEQ ID NO: 7192; WAN024F69; Start 94; Stop 118
acgaagtttgaattggattttcgca

SEQ ID NO: 461102 - DNA, 25 bp, Artificial
  probe
  misc_feature (1)..(25): SEQ ID NO: 7193; WAN024FWY; Start 365; Stop 389
gaatctgtcgtaagcaagtcatcta

SEQ ID NO: 461103 - DNA, 25 bp, Artificial
  probe
  misc_feature (1)..(25): SEQ ID NO: 7193; WAN024FWY; Start 366; Stop 390
aatctgtcgtaagcaagtcatctac

SEQ ID NO: 461104 - DNA, 25 bp, Artificial
  probe
  misc_feature (1)..(25): SEQ ID NO: 7193; WAN024FWY; Start 86; Stop 110
gagaacgaattatagagcaagaggt

SEQ ID NO: 461105 - DNA, 25 bp, Artificial
  probe
  misc_feature (1)..(25): SEQ ID NO: 7193; WAN024FWY; Start 85; Stop 109
ggagaacgaattatagagcaagagg

SEQ ID NO: 461106 - DNA, 25 bp, Artificial
  probe
  misc_feature (1)..(25): SEQ ID NO: 7193; WAN024FWY; Start 87; Stop 111
agaacgaattatagagcaagaggtt

SEQ ID NO: 461107 - DNA, 25 bp, Artificial
  probe
  misc_feature (1)..(25): SEQ ID NO: 7193; WAN024FWY; Start 84; Stop 108
cggagaacgaattatagagcaagag

SEQ ID NO: 461108 - DNA, 25 bp, Artificial
  probe
  misc_feature (1)..(25): SEQ ID NO: 7193; WAN024FWY; Start 91; Stop 115
cgaattatagagcaagaggttgttc

SEQ ID NO: 461109 - DNA, 25 bp, Artificial
  probe
  misc_feature (1)..(25): SEQ ID NO: 7193; WAN024FWY; Start 90; Stop 114
acgaattatagagcaagaggttgtt

SEQ ID NO: 461110 - DNA, 25 bp, Artificial
  probe
  misc_feature (1)..(25): SEQ ID NO: 7193; WAN024FWY; Start 89; Stop 113
aacgaattatagagcaagaggttgt

SEQ ID NO: 461111 - DNA, 25 bp, Artificial
  probe
  misc_feature (1)..(25): SEQ ID NO: 7193; WAN024FWY; Start 88; Stop 112
gaacgaattatagagcaagaggttg

SEQ ID NO: 461112 - DNA, 25 bp, Artificial
  probe
  misc_feature (1)..(25): SEQ ID NO: 7193; WAN024FWY; Start 473; Stop 497
ttgacatcggtaagaactacaagta

SEQ ID NO: 461113 - DNA, 25 bp, Artificial
  probe
  misc_feature (1)..(25): SEQ ID NO: 7193; WAN024FWY; Start 474; Stop 498
tgacatcggtaagaactacaagtat

SEQ ID NO: 461114 - DNA, 25 bp, Artificial
  probe
  misc_feature (1)..(25): SEQ ID NO: 7193; WAN024FWY; Start 472; Stop 496
gttgacatcggtaagaactacaagt

SEQ ID NO: 461115 - DNA, 25 bp, Artificial
  probe
  misc_feature (1)..(25): SEQ ID NO: 7193; WAN024FWY; Start 476; Stop 500
acatcggtaagaactacaagtatct

SEQ ID NO: 461116 - DNA, 25 bp, Artificial
  probe
  misc_feature (1)..(25): SEQ ID NO: 7193; WAN024FWY; Start 475; Stop 499
gacatcggtaagaactacaagtatc

SEQ ID NO: 461117 - DNA, 25 bp, Artificial
  probe
  misc_feature (1)..(25): SEQ ID NO: 7193; WAN024FWY; Start 92; Stop 116
gaattatagagcaagaggttgttct

SEQ ID NO: 461118 - DNA, 25 bp, Artificial
  probe
  misc_feature (1)..(25): SEQ ID NO: 7193; WAN024FWY; Start 477; Stop 501
catcggtaagaactacaagtatctc

SEQ ID NO: 461119 - DNA, 25 bp, Artificial
  probe
  misc_feature (1)..(25): SEQ ID NO: 7193; WAN024FWY; Start 478; Stop 502
atcggtaagaactacaagtatctct

SEQ ID NO: 461120 - DNA, 25 bp, Artificial
  probe
  misc_feature (1)..(25): SEQ ID NO: 7193; WAN024FWY; Start 362; Stop 386
aaggaatctgtcgtaagcaagtcat

SEQ ID NO: 461121 - DNA, 25 bp, Artificial
  probe
  misc_feature (1)..(25): SEQ ID NO: 7193; WAN024FWY; Start 364; Stop 388
ggaatctgtcgtaagcaagtcatct

SEQ ID NO: 461122 - DNA, 25 bp, Artificial
  probe
  misc_feature (1)..(25): SEQ ID NO: 7193; WAN024FWY; Start 363; Stop 387
aggaatctgtcgtaagcaagtcatc

SEQ ID NO: 461123 - DNA, 25 bp, Artificial
  probe
  misc_feature (1)..(25): SEQ ID NO: 7193; WAN024FWY; Start 21; Stop 45
cgtggtctatattgtggatgatttg

SEQ ID NO: 461124 - DNA, 25 bp, Artificial
  probe
  misc_feature (1)..(25): SEQ ID NO: 7193; WAN024FWY; Start 23; Stop 47
tggtctatattgtggatgatttgga

SEQ ID NO: 461125 - DNA, 25 bp, Artificial
  probe
  misc_feature (1)..(25): SEQ ID NO: 7193; WAN024FWY; Start 22; Stop 46
gtggtctatattgtggatgatttgg

SEQ ID NO: 461126 - DNA, 25 bp, Artificial
  probe
  misc_feature (1)..(25): SEQ ID NO: 7193; WAN024FWY; Start 358; Stop 382
gttaaaggaatctgtcgtaagcaag

SEQ ID NO: 461127 - DNA, 25 bp, Artificial
  probe
  misc_feature (1)..(25): SEQ ID NO: 7193; WAN024FWY; Start 359; Stop 383
ttaaaggaatctgtcgtaagcaagt

SEQ ID NO: 461128 - DNA, 25 bp, Artificial
  probe
  misc_feature (1)..(25): SEQ ID NO: 7193; WAN024FWY; Start 360; Stop 384
taaaggaatctgtcgtaagcaagtc

SEQ ID NO: 461129 - DNA, 25 bp, Artificial
  probe
  misc_feature (1)..(25): SEQ ID NO: 7193; WAN024FWY; Start 569; Stop 593
aaatcactcattctttgtttgccac

SEQ ID NO: 461130 - DNA, 25 bp, Artificial
  probe
  misc_feature (1)..(25): SEQ ID NO: 7193; WAN024FWY; Start 357; Stop 381
ggttaaaggaatctgtcgtaagcaa

SEQ ID NO: 461131 - DNA, 25 bp, Artificial
  probe
  misc_feature (1)..(25): SEQ ID NO: 7193; WAN024FWY; Start 41; Stop 65
atttggataatctgacgagtgacct

SEQ ID NO: 461132 - DNA, 25 bp, Artificial
  probe
  misc_feature (1)..(25): SEQ ID NO: 7193; WAN024FWY; Start 505; Stop 529
aactatttacctgctgagaaagaaa

SEQ ID NO: 461133 - DNA, 25 bp, Artificial
  probe
  misc_feature (1)..(25): SEQ ID NO: 7193; WAN024FWY; Start 24; Stop 48
ggtctatattgtggatgatttggat

SEQ ID NO: 461134 - DNA, 25 bp, Artificial
  probe
  misc_feature (1)..(25): SEQ ID NO: 7193; WAN024FWY; Start 43; Stop 67
ttggataatctgacgagtgaccttt

SEQ ID NO: 461135 - DNA, 25 bp, Artificial
  probe
  misc_feature (1)..(25): SEQ ID NO: 7194; WAN024CTP-3; Start 211; Stop 235
acttatgctgttcgtattcgtatga

SEQ ID NO: 461136 - DNA, 25 bp, Artificial
  probe
  misc_feature (1)..(25): SEQ ID NO: 7194; WAN024CTP-3; Start 1275; Stop 1299
tcgtaaggctactactaatggtcta

SEQ ID NO: 461137 - DNA, 25 bp, Artificial
  probe
  misc_feature (1)..(25): SEQ ID NO: 7194; WAN024CTP-3; Start 1270; Stop 1294
atgactcgtaaggctactactaatg

SEQ ID NO: 461138 - DNA, 25 bp, Artificial
  probe
  misc_feature (1)..(25): SEQ ID NO: 7194; WAN024CTP-3; Start 1762; Stop 1786
gtatcaggaactaccagaactcttg

SEQ ID NO: 461139 - DNA, 25 bp, Artificial
  probe
  misc_feature (1)..(25): SEQ ID NO: 7194; WAN024CTP-3; Start 1763; Stop 1787
tatcaggaactaccagaactcttgt

SEQ ID NO: 461140 - DNA, 25 bp, Artificial
  probe
  misc_feature (1)..(25): SEQ ID NO: 7194; WAN024CTP-3; Start 1267; Stop 1291
cgtatgactcgtaaggctactacta

SEQ ID NO: 461141 - DNA, 25 bp, Artificial
  probe
  misc_feature (1)..(25): SEQ ID NO: 7194; WAN024CTP-3; Start 214; Stop 238
tatgctgttcgtattcgtatgaaga

SEQ ID NO: 461142 - DNA, 25 bp, Artificial
  probe
  misc_feature (1)..(25): SEQ ID NO: 7194; WAN024CTP-3; Start 1274; Stop 1298
ctcgtaaggctactactaatggtct

SEQ ID NO: 461143 - DNA, 25 bp, Artificial
  probe
  misc_feature (1)..(25): SEQ ID NO: 7194; WAN024CTP-3; Start 1268; Stop 1292
gtatgactcgtaaggctactactaa

SEQ ID NO: 461144 - DNA, 25 bp, Artificial
  probe
  misc_feature (1)..(25): SEQ ID NO: 7194; WAN024CTP-3; Start 213; Stop 237
ttatgctgttcgtattcgtatgaag

SEQ ID NO: 461145 - DNA, 25 bp, Artificial
  probe
  misc_feature (1)..(25): SEQ ID NO: 7194; WAN024CTP-3; Start 212; Stop 236
cttatgctgttcgtattcgtatgaa

SEQ ID NO: 461146 - DNA, 25 bp, Artificial
  probe
  misc_feature (1)..(25): SEQ ID NO: 7194; WAN024CTP-3; Start 215; Stop 239
atgctgttcgtattcgtatgaagaa

SEQ ID NO: 461147 - DNA, 25 bp, Artificial
  probe
  misc_feature (1)..(25): SEQ ID NO: 7194; WAN024CTP-3; Start 210; Stop 234
aacttatgctgttcgtattcgtatg

SEQ ID NO: 461148 - DNA, 25 bp, Artificial
  probe
  misc_feature (1)..(25): SEQ ID NO: 7194; WAN024CTP-3; Start 594; Stop 618
agacaatcttcaacttccttcagag

SEQ ID NO: 461149 - DNA, 25 bp, Artificial
  probe
  misc_feature (1)..(25): SEQ ID NO: 7194; WAN024CTP-3; Start 593; Stop 617
gagacaatcttcaacttccttcaga

SEQ ID NO: 461150 - DNA, 25 bp, Artificial
  probe
  misc_feature (1)..(25): SEQ ID NO: 7194; WAN024CTP-3; Start 1273; Stop 1297
actcgtaaggctactactaatggtc

SEQ ID NO: 461151 - DNA, 25 bp, Artificial
  probe
  misc_feature (1)..(25): SEQ ID NO: 7194; WAN024CTP-3; Start 1272; Stop 1296
gactcgtaaggctactactaatggt

SEQ ID NO: 461152 - DNA, 25 bp, Artificial
  probe
  misc_feature (1)..(25): SEQ ID NO: 7194; WAN024CTP-3; Start 1271; Stop 1295
tgactcgtaaggctactactaatgg

SEQ ID NO: 461153 - DNA, 25 bp, Artificial
  probe
  misc_feature (1)..(25): SEQ ID NO: 7194; WAN024CTP-3; Start 635; Stop 659
caacttcaactacttggactacaga

SEQ ID NO: 461154 - DNA, 25 bp, Artificial
  probe
  misc_feature (1)..(25): SEQ ID NO: 7194; WAN024CTP-3; Start 1276; Stop 1300
cgtaaggctactactaatggtctag

SEQ ID NO: 461155 - DNA, 25 bp, Artificial
  probe
  misc_feature (1)..(25): SEQ ID NO: 7194; WAN024CTP-3; Start 1283; Stop 1307
ctactactaatggtctagcacttgt

SEQ ID NO: 461156 - DNA, 25 bp, Artificial
  probe
  misc_feature (1)..(25): SEQ ID NO: 7194; WAN024CTP-3; Start 636; Stop 660
aacttcaactacttggactacagaa

SEQ ID NO: 461157 - DNA, 25 bp, Artificial
  probe
  misc_feature (1)..(25): SEQ ID NO: 7194; WAN024CTP-3; Start 1757; Stop 1781
ttcaagtatcaggaactaccagaac

SEQ ID NO: 461158 - DNA, 25 bp, Artificial
  probe
  misc_feature (1)..(25): SEQ ID NO: 7194; WAN024CTP-3; Start 1761; Stop 1785
agtatcaggaactaccagaactctt

SEQ ID NO: 461159 - DNA, 25 bp, Artificial
  probe
  misc_feature (1)..(25): SEQ ID NO: 7194; WAN024CTP-3; Start 1760; Stop 1784
aagtatcaggaactaccagaactct

SEQ ID NO: 461160 - DNA, 25 bp, Artificial
  probe
  misc_feature (1)..(25): SEQ ID NO: 7194; WAN024CTP-3; Start 1759; Stop 1783
caagtatcaggaactaccagaactc

SEQ ID NO: 461161 - DNA, 25 bp, Artificial
  probe
  misc_feature (1)..(25): SEQ ID NO: 7194; WAN024CTP-3; Start 1758; Stop 1782
tcaagtatcaggaactaccagaact

SEQ ID NO: 461162 - DNA, 25 bp, Artificial
  probe
  misc_feature (1)..(25): SEQ ID NO: 7194; WAN024CTP-3; Start 1764; Stop 1788
atcaggaactaccagaactcttgtt

SEQ ID NO: 461163 - DNA, 25 bp, Artificial
  probe
  misc_feature (1)..(25): SEQ ID NO: 7194; WAN024CTP-3; Start 1756; Stop 1780
attcaagtatcaggaactaccagaa

SEQ ID NO: 461164 - DNA, 25 bp, Artificial
  probe
  misc_feature (1)..(25): SEQ ID NO: 7194; WAN024CTP-3; Start 1186; Stop 1210
tacaagtcttctggagaattagtgg

SEQ ID NO: 461165 - DNA, 25 bp, Artificial
  probe
  misc_feature (1)..(25): SEQ ID NO: 7194; WAN024CTP-3; Start 1598; Stop 1622
caacagaaggcgttaagaacttagt

SEQ ID NO: 461166 - DNA, 25 bp, Artificial
  probe
  misc_feature (1)..(25): SEQ ID NO: 7194; WAN024CTP-3; Start 1269; Stop 1293
tatgactcgtaaggctactactaat

SEQ ID NO: 461167 - DNA, 25 bp, Artificial
  probe
  misc_feature (1)..(25): SEQ ID NO: 7194; WAN024CTP-3; Start 1599; Stop 1623
aacagaaggcgttaagaacttagtt

SEQ ID NO: 461168 - DNA, 25 bp, Artificial
  probe
  misc_feature (1)..(25): SEQ ID NO: 7195; WAN024AU9; Start 29; Stop 53
ttgctcttacagatactggactaac

SEQ ID NO: 461169 - DNA, 25 bp, Artificial
  probe
  misc_feature (1)..(25): SEQ ID NO: 7195; WAN024AU9; Start 25; Stop 49
atgattgctcttacagatactggac

SEQ ID NO: 461170 - DNA, 25 bp, Artificial
  probe
  misc_feature (1)..(25): SEQ ID NO: 7195; WAN024AU9; Start 24; Stop 48
aatgattgctcttacagatactgga

SEQ ID NO: 461171 - DNA, 25 bp, Artificial
  probe
  misc_feature (1)..(25): SEQ ID NO: 7195; WAN024AU9; Start 27; Stop 51
gattgctcttacagatactggacta

SEQ ID NO: 461172 - DNA, 25 bp, Artificial
  probe
  misc_feature (1)..(25): SEQ ID NO: 7195; WAN024AU9; Start 23; Stop 47
gaatgattgctcttacagatactgg

SEQ ID NO: 461173 - DNA, 25 bp, Artificial
  probe
  misc_feature (1)..(25): SEQ ID NO: 7195; WAN024AU9; Start 32; Stop 56
ctcttacagatactggactaacctt

SEQ ID NO: 461174 - DNA, 25 bp, Artificial
  probe
  misc_feature (1)..(25): SEQ ID NO: 7195; WAN024AU9; Start 28; Stop 52
attgctcttacagatactggactaa

SEQ ID NO: 461175 - DNA, 25 bp, Artificial
  probe
  misc_feature (1)..(25): SEQ ID NO: 7195; WAN024AU9; Start 26; Stop 50
tgattgctcttacagatactggact

SEQ ID NO: 461176 - DNA, 25 bp, Artificial
  probe
  misc_feature (1)..(25): SEQ ID NO: 7195; WAN024AU9; Start 31; Stop 55
gctcttacagatactggactaacct

SEQ ID NO: 461177 - DNA, 25 bp, Artificial
  probe
  misc_feature (1)..(25): SEQ ID NO: 7195; WAN024AU9; Start 30; Stop 54
tgctcttacagatactggactaacc

SEQ ID NO: 461178 - DNA, 25 bp, Artificial
  probe
  misc_feature (1)..(25): SEQ ID NO: 7195; WAN024AU9; Start 22; Stop 46
agaatgattgctcttacagatactg

SEQ ID NO: 461179 - DNA, 25 bp, Artificial
  probe
  misc_feature (1)..(25): SEQ ID NO: 7195; WAN024AU9; Start 37; Stop 61
acagatactggactaacctttacag

SEQ ID NO: 461180 - DNA, 25 bp, Artificial
  probe
  misc_feature (1)..(25): SEQ ID NO: 7195; WAN024AU9; Start 38; Stop 62
cagatactggactaacctttacaga

SEQ ID NO: 461181 - DNA, 25 bp, Artificial
  probe
  misc_feature (1)..(25): SEQ ID NO: 7195; WAN024AU9; Start 42; Stop 66
tactggactaacctttacagaggat

SEQ ID NO: 461182 - DNA, 25 bp, Artificial
  probe
  misc_feature (1)..(25): SEQ ID NO: 7195; WAN024AU9; Start 41; Stop 65
atactggactaacctttacagagga

SEQ ID NO: 461183 - DNA, 25 bp, Artificial
  probe
  misc_feature (1)..(25): SEQ ID NO: 7195; WAN024AU9; Start 40; Stop 64
gatactggactaacctttacagagg

SEQ ID NO: 461184 - DNA, 25 bp, Artificial
  probe
  misc_feature (1)..(25): SEQ ID NO: 7195; WAN024AU9; Start 39; Stop 63
agatactggactaacctttacagag

SEQ ID NO: 461185 - DNA, 25 bp, Artificial
  probe
  misc_feature (1)..(25): SEQ ID NO: 7195; WAN024AU9; Start 33; Stop 57
tcttacagatactggactaaccttt

SEQ ID NO: 461186 - DNA, 25 bp, Artificial
  probe
  misc_feature (1)..(25): SEQ ID NO: 7195; WAN024AU9; Start 11; Stop 35
agtatcttcaaagaatgattgctct

SEQ ID NO: 461187 - DNA, 25 bp, Artificial
  probe
  misc_feature (1)..(25): SEQ ID NO: 7195; WAN024AU9; Start 36; Stop 60
tacagatactggactaacctttaca

SEQ ID NO: 461188 - DNA, 25 bp, Artificial
  probe
  misc_feature (1)..(25): SEQ ID NO: 7195; WAN024AU9; Start 21; Stop 45
aagaatgattgctcttacagatact

SEQ ID NO: 461189 - DNA, 25 bp, Artificial
  probe
  misc_feature (1)..(25): SEQ ID NO: 7195; WAN024AU9; Start 43; Stop 67
actggactaacctttacagaggatc

SEQ ID NO: 461190 - DNA, 25 bp, Artificial
  probe
  misc_feature (1)..(25): SEQ ID NO: 7195; WAN024AU9; Start 10; Stop 34
aagtatcttcaaagaatgattgctc

SEQ ID NO: 461191 - DNA, 25 bp, Artificial
  probe
  misc_feature (1)..(25): SEQ ID NO: 7195; WAN024AU9; Start 35; Stop 59
ttacagatactggactaacctttac

SEQ ID NO: 461192 - DNA, 25 bp, Artificial
  probe
  misc_feature (1)..(25): SEQ ID NO: 7195; WAN024AU9; Start 34; Stop 58
cttacagatactggactaaccttta

SEQ ID NO: 461193 - DNA, 25 bp, Artificial
  probe
  misc_feature (1)..(25): SEQ ID NO: 7195; WAN024AU9; Start 17; Stop 41
ttcaaagaatgattgctcttacaga

SEQ ID NO: 461194 - DNA, 25 bp, Artificial
  probe
  misc_feature (1)..(25): SEQ ID NO: 7195; WAN024AU9; Start 15; Stop 39
tcttcaaagaatgattgctcttaca

SEQ ID NO: 461195 - DNA, 25 bp, Artificial
  probe
  misc_feature (1)..(25): SEQ ID NO: 7195; WAN024AU9; Start 18; Stop 42
tcaaagaatgattgctcttacagat

SEQ ID NO: 461196 - DNA, 25 bp, Artificial
  probe
  misc_feature (1)..(25): SEQ ID NO: 7195; WAN024AU9; Start 16; Stop 40
cttcaaagaatgattgctcttacag

SEQ ID NO: 461197 - DNA, 25 bp, Artificial
  probe
  misc_feature (1)..(25): SEQ ID NO: 7195; WAN024AU9; Start 14; Stop 38
atcttcaaagaatgattgctcttac

SEQ ID NO: 461198 - DNA, 25 bp, Artificial
  probe
  misc_feature (1)..(25): SEQ ID NO: 7195; WAN024AU9; Start 12; Stop 36
gtatcttcaaagaatgattgctctt

SEQ ID NO: 461199 - DNA, 25 bp, Artificial
  probe
  misc_feature (1)..(25): SEQ ID NO: 7195; WAN024AU9; Start 9; Stop 33
taagtatcttcaaagaatgattgct

SEQ ID NO: 461200 - DNA, 25 bp, Artificial
  probe
  misc_feature (1)..(25): SEQ ID NO: 7195; WAN024AU9; Start 6; Stop 30
tgctaagtatcttcaaagaatgatt

SEQ ID NO: 461201 - DNA, 25 bp, Artificial
  probe
  misc_feature (1)..(25): SEQ ID NO: 7196; WAN024B33; Start 370; Stop 394
attggtggtttaggtctatctcgtt

SEQ ID NO: 461202 - DNA, 25 bp, Artificial
  probe
  misc_feature (1)..(25): SEQ ID NO: 7196; WAN024B33; Start 369; Stop 393
cattggtggtttaggtctatctcgt

SEQ ID NO: 461203 - DNA, 25 bp, Artificial
  probe
  misc_feature (1)..(25): SEQ ID NO: 7196; WAN024B33; Start 371; Stop 395
ttggtggtttaggtctatctcgttg

SEQ ID NO: 461204 - DNA, 25 bp, Artificial
  probe
  misc_feature (1)..(25): SEQ ID NO: 7196; WAN024B33; Start 121; Stop 145
aaacttgcctttcaatatgacagcc

SEQ ID NO: 461205 - DNA, 25 bp, Artificial
  probe
  misc_feature (1)..(25): SEQ ID NO: 7196; WAN024B33; Start 415; Stop 439
aagggagagatattcctaaacgagc

SEQ ID NO: 461206 - DNA, 25 bp, Artificial
  probe
  misc_feature (1)..(25): SEQ ID NO: 7196; WAN024B33; Start 413; Stop 437
ataagggagagatattcctaaacga

SEQ ID NO: 461207 - DNA, 25 bp, Artificial
  probe
  misc_feature (1)..(25): SEQ ID NO: 7196; WAN024B33; Start 412; Stop 436
gataagggagagatattcctaaacg

SEQ ID NO: 461208 - DNA, 25 bp, Artificial
  probe
  misc_feature (1)..(25): SEQ ID NO: 7196; WAN024B33; Start 120; Stop 144
gaaacttgcctttcaatatgacagc

SEQ ID NO: 461209 - DNA, 25 bp, Artificial
  probe
  misc_feature (1)..(25): SEQ ID NO: 7196; WAN024B33; Start 378; Stop 402
tttaggtctatctcgttgcgatttc

SEQ ID NO: 461210 - DNA, 25 bp, Artificial
  probe
  misc_feature (1)..(25): SEQ ID NO: 7196; WAN024B33; Start 202; Stop 226
aattacgatgtcaagagcacccttc

SEQ ID NO: 461211 - DNA, 25 bp, Artificial
  probe
  misc_feature (1)..(25): SEQ ID NO: 7196; WAN024B33; Start 201; Stop 225
gaattacgatgtcaagagcaccctt

SEQ ID NO: 461212 - DNA, 25 bp, Artificial
  probe
  misc_feature (1)..(25): SEQ ID NO: 7196; WAN024B33; Start 409; Stop 433
acagataagggagagatattcctaa

SEQ ID NO: 461213 - DNA, 25 bp, Artificial
  probe
  misc_feature (1)..(25): SEQ ID NO: 7196; WAN024B33; Start 377; Stop 401
gtttaggtctatctcgttgcgattt

SEQ ID NO: 461214 - DNA, 25 bp, Artificial
  probe
  misc_feature (1)..(25): SEQ ID NO: 7196; WAN024B33; Start 407; Stop 431
atacagataagggagagatattcct

SEQ ID NO: 461215 - DNA, 25 bp, Artificial
  probe
  misc_feature (1)..(25): SEQ ID NO: 7196; WAN024B33; Start 380; Stop 404
taggtctatctcgttgcgatttctt

SEQ ID NO: 461216 - DNA, 25 bp, Artificial
  probe
  misc_feature (1)..(25): SEQ ID NO: 7196; WAN024B33; Start 379; Stop 403
ttaggtctatctcgttgcgatttct

SEQ ID NO: 461217 - DNA, 25 bp, Artificial
  probe
  misc_feature (1)..(25): SEQ ID NO: 7196; WAN024B33; Start 417; Stop 441
gggagagatattcctaaacgagctt

SEQ ID NO: 461218 - DNA, 25 bp, Artificial
  probe
  misc_feature (1)..(25): SEQ ID NO: 7196; WAN024B33; Start 368; Stop 392
ccattggtggtttaggtctatctcg

SEQ ID NO: 461219 - DNA, 25 bp, Artificial
  probe
  misc_feature (1)..(25): SEQ ID NO: 7196; WAN024B33; Start 408; Stop 432
tacagataagggagagatattccta

SEQ ID NO: 461220 - DNA, 25 bp, Artificial
  probe
  misc_feature (1)..(25): SEQ ID NO: 7196; WAN024B33; Start 367; Stop 391
gccattggtggtttaggtctatctc

SEQ ID NO: 461221 - DNA, 25 bp, Artificial
  probe
  misc_feature (1)..(25): SEQ ID NO: 7196; WAN024B33; Start 416; Stop 440
agggagagatattcctaaacgagct

SEQ ID NO: 461222 - DNA, 25 bp, Artificial
  probe
  misc_feature (1)..(25): SEQ ID NO: 7196; WAN024B33; Start 411; Stop 435
agataagggagagatattcctaaac

SEQ ID NO: 461223 - DNA, 25 bp, Artificial
  probe
  misc_feature (1)..(25): SEQ ID NO: 7196; WAN024B33; Start 410; Stop 434
cagataagggagagatattcctaaa

SEQ ID NO: 461224 - DNA, 25 bp, Artificial
  probe
  misc_feature (1)..(25): SEQ ID NO: 7196; WAN024B33; Start 381; Stop 405
aggtctatctcgttgcgatttcttc

SEQ ID NO: 461225 - DNA, 25 bp, Artificial
  probe
  misc_feature (1)..(25): SEQ ID NO: 7196; WAN024B33; Start 376; Stop 400
ggtttaggtctatctcgttgcgatt

SEQ ID NO: 461226 - DNA, 25 bp, Artificial
  probe
  misc_feature (1)..(25): SEQ ID NO: 7196; WAN024B33; Start 365; Stop 389
gtgccattggtggtttaggtctatc

SEQ ID NO: 461227 - DNA, 25 bp, Artificial
  probe
  misc_feature (1)..(25): SEQ ID NO: 7196; WAN024B33; Start 402; Stop 426
cttctatacagataagggagagata

SEQ ID NO: 461228 - DNA, 25 bp, Artificial
  probe
  misc_feature (1)..(25): SEQ ID NO: 7196; WAN024B33; Start 366; Stop 390
tgccattggtggtttaggtctatct

SEQ ID NO: 461229 - DNA, 25 bp, Artificial
  probe
  misc_feature (1)..(25): SEQ ID NO: 7196; WAN024B33; Start 372; Stop 396
tggtggtttaggtctatctcgttgc

SEQ ID NO: 461230 - DNA, 25 bp, Artificial
  probe
  misc_feature (1)..(25): SEQ ID NO: 7196; WAN024B33; Start 312; Stop 336
aatcggtgatgatgtggtagctgtc

SEQ ID NO: 461231 - DNA, 25 bp, Artificial
  probe
  misc_feature (1)..(25): SEQ ID NO: 7196; WAN024B33; Start 406; Stop 430
tatacagataagggagagatattcc

SEQ ID NO: 461232 - DNA, 25 bp, Artificial
  probe
  misc_feature (1)..(25): SEQ ID NO: 7196; WAN024B33; Start 200; Stop 224
ggaattacgatgtcaagagcaccct

SEQ ID NO: 461233 - DNA, 25 bp, Artificial
  probe
  misc_feature (1)..(25): SEQ ID NO: 7196; WAN024B33; Start 203; Stop 227
attacgatgtcaagagcacccttcc

SEQ ID NO: 461234 - DNA, 25 bp, Artificial
  probe
  misc_feature (1)..(25): SEQ ID NO: 7197; WAN024B2U; Start 256; Stop 280
tatgactatgacgccaagtatatcg

SEQ ID NO: 461235 - DNA, 25 bp, Artificial
  probe
  misc_feature (1)..(25): SEQ ID NO: 7197; WAN024B2U; Start 255; Stop 279
ttatgactatgacgccaagtatatc

SEQ ID NO: 461236 - DNA, 25 bp, Artificial
  probe
  misc_feature (1)..(25): SEQ ID NO: 7197; WAN024B2U; Start 257; Stop 281
atgactatgacgccaagtatatcga

SEQ ID NO: 461237 - DNA, 25 bp, Artificial
  probe
  misc_feature (1)..(25): SEQ ID NO: 7197; WAN024B2U; Start 254; Stop 278
tttatgactatgacgccaagtatat

SEQ ID NO: 461238 - DNA, 25 bp, Artificial
  probe
  misc_feature (1)..(25): SEQ ID NO: 7197; WAN024B2U; Start 244; Stop 268
gatgttgccttttatgactatgacg

SEQ ID NO: 461239 - DNA, 25 bp, Artificial
  probe
  misc_feature (1)..(25): SEQ ID NO: 7197; WAN024B2U; Start 243; Stop 267
ggatgttgccttttatgactatgac

SEQ ID NO: 461240 - DNA, 25 bp, Artificial
  probe
  misc_feature (1)..(25): SEQ ID NO: 7197; WAN024B2U; Start 258; Stop 282
tgactatgacgccaagtatatcgat

SEQ ID NO: 461241 - DNA, 25 bp, Artificial
  probe
  misc_feature (1)..(25): SEQ ID NO: 7197; WAN024B2U; Start 148; Stop 172
gttttggtagagcaaggagtaaatg

SEQ ID NO: 461242 - DNA, 25 bp, Artificial
  probe
  misc_feature (1)..(25): SEQ ID NO: 7197; WAN024B2U; Start 147; Stop 171
agttttggtagagcaaggagtaaat

SEQ ID NO: 461243 - DNA, 25 bp, Artificial
  probe
  misc_feature (1)..(25): SEQ ID NO: 7197; WAN024B2U; Start 146; Stop 170
gagttttggtagagcaaggagtaaa

SEQ ID NO: 461244 - DNA, 25 bp, Artificial
  probe
  misc_feature (1)..(25): SEQ ID NO: 7197; WAN024B2U; Start 251; Stop 275
ccttttatgactatgacgccaagta

SEQ ID NO: 461245 - DNA, 25 bp, Artificial
  probe
  misc_feature (1)..(25): SEQ ID NO: 7197; WAN024B2U; Start 252; Stop 276
cttttatgactatgacgccaagtat

SEQ ID NO: 461246 - DNA, 25 bp, Artificial
  probe
  misc_feature (1)..(25): SEQ ID NO: 7197; WAN024B2U; Start 245; Stop 269
atgttgccttttatgactatgacgc

SEQ ID NO: 461247 - DNA, 25 bp, Artificial
  probe
  misc_feature (1)..(25): SEQ ID NO: 7197; WAN024B2U; Start 242; Stop 266
aggatgttgccttttatgactatga

SEQ ID NO: 461248 - DNA, 25 bp, Artificial
  probe
  misc_feature (1)..(25): SEQ ID NO: 7197; WAN024B2U; Start 135; Stop 159
atatgacagccgagttttggtagag

SEQ ID NO: 461249 - DNA, 25 bp, Artificial
  probe
  misc_feature (1)..(25): SEQ ID NO: 7197; WAN024B2U; Start 134; Stop 158
gatatgacagccgagttttggtaga

SEQ ID NO: 461250 - DNA, 25 bp, Artificial
  probe
  misc_feature (1)..(25): SEQ ID NO: 7197; WAN024B2U; Start 253; Stop 277
ttttatgactatgacgccaagtata

SEQ ID NO: 461251 - DNA, 25 bp, Artificial
  probe
  misc_feature (1)..(25): SEQ ID NO: 7197; WAN024B2U; Start 287; Stop 311
agattactatggatattccagccaa

SEQ ID NO: 461252 - DNA, 25 bp, Artificial
  probe
  misc_feature (1)..(25): SEQ ID NO: 7197; WAN024B2U; Start 286; Stop 310
aagattactatggatattccagcca

SEQ ID NO: 461253 - DNA, 25 bp, Artificial
  probe
  misc_feature (1)..(25): SEQ ID NO: 7197; WAN024B2U; Start 145; Stop 169
cgagttttggtagagcaaggagtaa

SEQ ID NO: 461254 - DNA, 25 bp, Artificial
  probe
  misc_feature (1)..(25): SEQ ID NO: 7197; WAN024B2U; Start 285; Stop 309
caagattactatggatattccagcc

SEQ ID NO: 461255 - DNA, 25 bp, Artificial
  probe
  misc_feature (1)..(25): SEQ ID NO: 7197; WAN024B2U; Start 160; Stop 184
caaggagtaaatgcccgtgaaatcg

SEQ ID NO: 461256 - DNA, 25 bp, Artificial
  probe
  misc_feature (1)..(25): SEQ ID NO: 7197; WAN024B2U; Start 194; Stop 218
tcttggggaactacgatgtcaaaag

SEQ ID NO: 461257 - DNA, 25 bp, Artificial
  probe
  misc_feature (1)..(25): SEQ ID NO: 7197; WAN024B2U; Start 193; Stop 217
ctcttggggaactacgatgtcaaaa

SEQ ID NO: 461258 - DNA, 25 bp, Artificial
  probe
  misc_feature (1)..(25): SEQ ID NO: 7197; WAN024B2U; Start 284; Stop 308
acaagattactatggatattccagc

SEQ ID NO: 461259 - DNA, 25 bp, Artificial
  probe
  misc_feature (1)..(25): SEQ ID NO: 7197; WAN024B2U; Start 150; Stop 174
tttggtagagcaaggagtaaatgcc

SEQ ID NO: 461260 - DNA, 25 bp, Artificial
  probe
  misc_feature (1)..(25): SEQ ID NO: 7197; WAN024B2U; Start 248; Stop 272
ttgccttttatgactatgacgccaa

SEQ ID NO: 461261 - DNA, 25 bp, Artificial
  probe
  misc_feature (1)..(25): SEQ ID NO: 7197; WAN024B2U; Start 249; Stop 273
tgccttttatgactatgacgccaag

SEQ ID NO: 461262 - DNA, 25 bp, Artificial
  probe
  misc_feature (1)..(25): SEQ ID NO: 7197; WAN024B2U; Start 133; Stop 157
cgatatgacagccgagttttggtag

SEQ ID NO: 461263 - DNA, 25 bp, Artificial
  probe
  misc_feature (1)..(25): SEQ ID NO: 7197; WAN024B2U; Start 278; Stop 302
tcgataacaagattactatggatat

SEQ ID NO: 461264 - DNA, 25 bp, Artificial
  probe
  misc_feature (1)..(25): SEQ ID NO: 7197; WAN024B2U; Start 247; Stop 271
gttgccttttatgactatgacgcca

SEQ ID NO: 461265 - DNA, 25 bp, Artificial
  probe
  misc_feature (1)..(25): SEQ ID NO: 7197; WAN024B2U; Start 246; Stop 270
tgttgccttttatgactatgacgcc

SEQ ID NO: 461266 - DNA, 25 bp, Artificial
  probe
  misc_feature (1)..(25): SEQ ID NO: 7197; WAN024B2U; Start 250; Stop 274
gccttttatgactatgacgccaagt

SEQ ID NO: 461267 - DNA, 25 bp, Artificial
  probe
  misc_feature (1)..(25): SEQ ID NO: 7198; WAN024B32; Start 26; Stop 50
aattggcttatccagtcttcactaa

SEQ ID NO: 461268 - DNA, 25 bp, Artificial
  probe
  misc_feature (1)..(25): SEQ ID NO: 7198; WAN024B32; Start 27; Stop 51
attggcttatccagtcttcactaag

SEQ ID NO: 461269 - DNA, 25 bp, Artificial
  probe
  misc_feature (1)..(25): SEQ ID NO: 7198; WAN024B32; Start 63; Stop 87
gggttctagtgtcggtatttctaaa

SEQ ID NO: 461270 - DNA, 25 bp, Artificial
  probe
  misc_feature (1)..(25): SEQ ID NO: 7198; WAN024B32; Start 64; Stop 88
ggttctagtgtcggtatttctaaat

SEQ ID NO: 461271 - DNA, 25 bp, Artificial
  probe
  misc_feature (1)..(25): SEQ ID NO: 7198; WAN024B32; Start 68; Stop 92
ctagtgtcggtatttctaaatctga

SEQ ID NO: 461272 - DNA, 25 bp, Artificial
  probe
  misc_feature (1)..(25): SEQ ID NO: 7198; WAN024B32; Start 67; Stop 91
tctagtgtcggtatttctaaatctg

SEQ ID NO: 461273 - DNA, 25 bp, Artificial
  probe
  misc_feature (1)..(25): SEQ ID NO: 7198; WAN024B32; Start 121; Stop 145
gaacttgccttccgatatgacagtc

SEQ ID NO: 461274 - DNA, 25 bp, Artificial
  probe
  misc_feature (1)..(25): SEQ ID NO: 7198; WAN024B32; Start 25; Stop 49
aaattggcttatccagtcttcacta

SEQ ID NO: 461275 - DNA, 25 bp, Artificial
  probe
  misc_feature (1)..(25): SEQ ID NO: 7198; WAN024B32; Start 69; Stop 93
tagtgtcggtatttctaaatctgaa

SEQ ID NO: 461276 - DNA, 25 bp, Artificial
  probe
  misc_feature (1)..(25): SEQ ID NO: 7198; WAN024B32; Start 65; Stop 89
gttctagtgtcggtatttctaaatc

SEQ ID NO: 461277 - DNA, 25 bp, Artificial
  probe
  misc_feature (1)..(25): SEQ ID NO: 7198; WAN024B32; Start 66; Stop 90
ttctagtgtcggtatttctaaatct

SEQ ID NO: 461278 - DNA, 25 bp, Artificial
  probe
  misc_feature (1)..(25): SEQ ID NO: 7198; WAN024B32; Start 70; Stop 94
agtgtcggtatttctaaatctgaaa

SEQ ID NO: 461279 - DNA, 25 bp, Artificial
  probe
  misc_feature (1)..(25): SEQ ID NO: 7198; WAN024B32; Start 134; Stop 158
gatatgacagtcgtgtcttggtaga

SEQ ID NO: 461280 - DNA, 25 bp, Artificial
  probe
  misc_feature (1)..(25): SEQ ID NO: 7198; WAN024B32; Start 24; Stop 48
aaaattggcttatccagtcttcact

SEQ ID NO: 461281 - DNA, 25 bp, Artificial
  probe
  misc_feature (1)..(25): SEQ ID NO: 7198; WAN024B32; Start 299; Stop 323
atatcccagccaaaatcagtgatga

SEQ ID NO: 461282 - DNA, 25 bp, Artificial
  probe
  misc_feature (1)..(25): SEQ ID NO: 7198; WAN024B32; Start 408; Stop 432
tacagataagggagagatcttcctc

SEQ ID NO: 461283 - DNA, 25 bp, Artificial
  probe
  misc_feature (1)..(25): SEQ ID NO: 7198; WAN024B32; Start 411; Stop 435
agataagggagagatcttcctcaac

SEQ ID NO: 461284 - DNA, 25 bp, Artificial
  probe
  misc_feature (1)..(25): SEQ ID NO: 7198; WAN024B32; Start 410; Stop 434
cagataagggagagatcttcctcaa

SEQ ID NO: 461285 - DNA, 25 bp, Artificial
  probe
  misc_feature (1)..(25): SEQ ID NO: 7198; WAN024B32; Start 202; Stop 226
aactacgatgtcaagagcacccttc

SEQ ID NO: 461286 - DNA, 25 bp, Artificial
  probe
  misc_feature (1)..(25): SEQ ID NO: 7198; WAN024B32; Start 412; Stop 436
gataagggagagatcttcctcaacg

SEQ ID NO: 461287 - DNA, 25 bp, Artificial
  probe
  misc_feature (1)..(25): SEQ ID NO: 7198; WAN024B32; Start 133; Stop 157
cgatatgacagtcgtgtcttggtag

SEQ ID NO: 461288 - DNA, 25 bp, Artificial
  probe
  misc_feature (1)..(25): SEQ ID NO: 7198; WAN024B32; Start 413; Stop 437
ataagggagagatcttcctcaacga

SEQ ID NO: 461289 - DNA, 25 bp, Artificial
  probe
  misc_feature (1)..(25): SEQ ID NO: 7198; WAN024B32; Start 298; Stop 322
gatatcccagccaaaatcagtgatg

SEQ ID NO: 461290 - DNA, 25 bp, Artificial
  probe
  misc_feature (1)..(25): SEQ ID NO: 7198; WAN024B32; Start 409; Stop 433
acagataagggagagatcttcctca

SEQ ID NO: 461291 - DNA, 25 bp, Artificial
  probe
  misc_feature (1)..(25): SEQ ID NO: 7198; WAN024B32; Start 201; Stop 225
caactacgatgtcaagagcaccctt

SEQ ID NO: 461292 - DNA, 25 bp, Artificial
  probe
  misc_feature (1)..(25): SEQ ID NO: 7198; WAN024B32; Start 129; Stop 153
cttccgatatgacagtcgtgtcttg

SEQ ID NO: 461293 - DNA, 25 bp, Artificial
  probe
  misc_feature (1)..(25): SEQ ID NO: 7198; WAN024B32; Start 381; Stop 405
cggtctatctcgttgcgatttcttc

SEQ ID NO: 461294 - DNA, 25 bp, Artificial
  probe
  misc_feature (1)..(25): SEQ ID NO: 7198; WAN024B32; Start 71; Stop 95
gtgtcggtatttctaaatctgaaaa

SEQ ID NO: 461295 - DNA, 25 bp, Artificial
  probe
  misc_feature (1)..(25): SEQ ID NO: 7198; WAN024B32; Start 122; Stop 146
aacttgccttccgatatgacagtcg

SEQ ID NO: 461296 - DNA, 25 bp, Artificial
  probe
  misc_feature (1)..(25): SEQ ID NO: 7198; WAN024B32; Start 414; Stop 438
taagggagagatcttcctcaacgag

SEQ ID NO: 461297 - DNA, 25 bp, Artificial
  probe
  misc_feature (1)..(25): SEQ ID NO: 7198; WAN024B32; Start 300; Stop 324
tatcccagccaaaatcagtgatgat

SEQ ID NO: 461298 - DNA, 25 bp, Artificial
  probe
  misc_feature (1)..(25): SEQ ID NO: 7198; WAN024B32; Start 380; Stop 404
tcggtctatctcgttgcgatttctt

SEQ ID NO: 461299 - DNA, 25 bp, Artificial
  probe
  misc_feature (1)..(25): SEQ ID NO: 7198; WAN024B32; Start 132; Stop 156
ccgatatgacagtcgtgtcttggta

SEQ ID NO: 461300 - DNA, 25 bp, Artificial
  probe
  misc_feature (1)..(25): SEQ ID NO: 7199; WAN024B2X; Start 243; Stop 267
ggatgttgccttctatgactatgac

SEQ ID NO: 461301 - DNA, 25 bp, Artificial
  probe
  misc_feature (1)..(25): SEQ ID NO: 7199; WAN024B2X; Start 244; Stop 268
gatgttgccttctatgactatgacg

SEQ ID NO: 461302 - DNA, 25 bp, Artificial
  probe
  misc_feature (1)..(25): SEQ ID NO: 7199; WAN024B2X; Start 252; Stop 276
cttctatgactatgacgccaagtat

SEQ ID NO: 461303 - DNA, 25 bp, Artificial
  probe
  misc_feature (1)..(25): SEQ ID NO: 7199; WAN024B2X; Start 258; Stop 282
tgactatgacgccaagtatattgat

SEQ ID NO: 461304 - DNA, 25 bp, Artificial
  probe
  misc_feature (1)..(25): SEQ ID NO: 7199; WAN024B2X; Start 257; Stop 281
atgactatgacgccaagtatattga

SEQ ID NO: 461305 - DNA, 25 bp, Artificial
  probe
  misc_feature (1)..(25): SEQ ID NO: 7199; WAN024B2X; Start 253; Stop 277
ttctatgactatgacgccaagtata

SEQ ID NO: 461306 - DNA, 25 bp, Artificial
  probe
  misc_feature (1)..(25): SEQ ID NO: 7199; WAN024B2X; Start 254; Stop 278
tctatgactatgacgccaagtatat

SEQ ID NO: 461307 - DNA, 25 bp, Artificial
  probe
  misc_feature (1)..(25): SEQ ID NO: 7199; WAN024B2X; Start 256; Stop 280
tatgactatgacgccaagtatattg

SEQ ID NO: 461308 - DNA, 25 bp, Artificial
  probe
  misc_feature (1)..(25): SEQ ID NO: 7199; WAN024B2X; Start 251; Stop 275
ccttctatgactatgacgccaagta

SEQ ID NO: 461309 - DNA, 25 bp, Artificial
  probe
  misc_feature (1)..(25): SEQ ID NO: 7199; WAN024B2X; Start 259; Stop 283
gactatgacgccaagtatattgata

SEQ ID NO: 461310 - DNA, 25 bp, Artificial
  probe
  misc_feature (1)..(25): SEQ ID NO: 7199; WAN024B2X; Start 255; Stop 279
ctatgactatgacgccaagtatatt

SEQ ID NO: 461311 - DNA, 25 bp, Artificial
  probe
  misc_feature (1)..(25): SEQ ID NO: 7199; WAN024B2X; Start 242; Stop 266
aggatgttgccttctatgactatga

SEQ ID NO: 461312 - DNA, 25 bp, Artificial
  probe
  misc_feature (1)..(25): SEQ ID NO: 7199; WAN024B2X; Start 260; Stop 284
actatgacgccaagtatattgataa

SEQ ID NO: 461313 - DNA, 25 bp, Artificial
  probe
  misc_feature (1)..(25): SEQ ID NO: 7199; WAN024B2X; Start 245; Stop 269
atgttgccttctatgactatgacgc

SEQ ID NO: 461314 - DNA, 25 bp, Artificial
  probe
  misc_feature (1)..(25): SEQ ID NO: 7199; WAN024B2X; Start 400; Stop 424
ttcttctatacagatacgggagaga

SEQ ID NO: 461315 - DNA, 25 bp, Artificial
  probe
  misc_feature (1)..(25): SEQ ID NO: 7199; WAN024B2X; Start 396; Stop 420
cgatttcttctatacagatacggga

SEQ ID NO: 461316 - DNA, 25 bp, Artificial
  probe
  misc_feature (1)..(25): SEQ ID NO: 7199; WAN024B2X; Start 394; Stop 418
tgcgatttcttctatacagatacgg

SEQ ID NO: 461317 - DNA, 25 bp, Artificial
  probe
  misc_feature (1)..(25): SEQ ID NO: 7199; WAN024B2X; Start 401; Stop 425
tcttctatacagatacgggagagat

SEQ ID NO: 461318 - DNA, 25 bp, Artificial
  probe
  misc_feature (1)..(25): SEQ ID NO: 7199; WAN024B2X; Start 395; Stop 419
gcgatttcttctatacagatacggg

SEQ ID NO: 461319 - DNA, 25 bp, Artificial
  probe
  misc_feature (1)..(25): SEQ ID NO: 7199; WAN024B2X; Start 399; Stop 423
tttcttctatacagatacgggagag

SEQ ID NO: 461320 - DNA, 25 bp, Artificial
  probe
  misc_feature (1)..(25): SEQ ID NO: 7199; WAN024B2X; Start 393; Stop 417
ttgcgatttcttctatacagatacg

SEQ ID NO: 461321 - DNA, 25 bp, Artificial
  probe
  misc_feature (1)..(25): SEQ ID NO: 7199; WAN024B2X; Start 297; Stop 321
ggatattccagctaacatcagtgat

SEQ ID NO: 461322 - DNA, 25 bp, Artificial
  probe
  misc_feature (1)..(25): SEQ ID NO: 7199; WAN024B2X; Start 402; Stop 426
cttctatacagatacgggagagatt

SEQ ID NO: 461323 - DNA, 25 bp, Artificial
  probe
  misc_feature (1)..(25): SEQ ID NO: 7199; WAN024B2X; Start 264; Stop 288
tgacgccaagtatattgataataag

SEQ ID NO: 461324 - DNA, 25 bp, Artificial
  probe
  misc_feature (1)..(25): SEQ ID NO: 7199; WAN024B2X; Start 403; Stop 427
ttctatacagatacgggagagattt

SEQ ID NO: 461325 - DNA, 25 bp, Artificial
  probe
  misc_feature (1)..(25): SEQ ID NO: 7199; WAN024B2X; Start 398; Stop 422
atttcttctatacagatacgggaga

SEQ ID NO: 461326 - DNA, 25 bp, Artificial
  probe
  misc_feature (1)..(25): SEQ ID NO: 7199; WAN024B2X; Start 397; Stop 421
gatttcttctatacagatacgggag

SEQ ID NO: 461327 - DNA, 25 bp, Artificial
  probe
  misc_feature (1)..(25): SEQ ID NO: 7199; WAN024B2X; Start 261; Stop 285
ctatgacgccaagtatattgataat

SEQ ID NO: 461328 - DNA, 25 bp, Artificial
  probe
  misc_feature (1)..(25): SEQ ID NO: 7199; WAN024B2X; Start 265; Stop 289
gacgccaagtatattgataataaga

SEQ ID NO: 461329 - DNA, 25 bp, Artificial
  probe
  misc_feature (1)..(25): SEQ ID NO: 7199; WAN024B2X; Start 392; Stop 416
gttgcgatttcttctatacagatac

SEQ ID NO: 461330 - DNA, 25 bp, Artificial
  probe
  misc_feature (1)..(25): SEQ ID NO: 7199; WAN024B2X; Start 192; Stop 216
tctattgggcaactacgatgtcaaa

SEQ ID NO: 461331 - DNA, 25 bp, Artificial
  probe
  misc_feature (1)..(25): SEQ ID NO: 7199; WAN024B2X; Start 69; Stop 93
tagtgtgggtatttccaaatctgaa

SEQ ID NO: 461332 - DNA, 25 bp, Artificial
  probe
  misc_feature (1)..(25): SEQ ID NO: 7199; WAN024B2X; Start 68; Stop 92
ctagtgtgggtatttccaaatctga

SEQ ID NO: 461333 - DNA, 25 bp, Artificial
  probe
  misc_feature (1)..(25): SEQ ID NO: 7200; WAN024DDL; Start 1951; Stop 1975
acagacaatgaagttatgacaggat

SEQ ID NO: 461334 - DNA, 25 bp, Artificial
  probe
  misc_feature (1)..(25): SEQ ID NO: 7200; WAN024DDL; Start 1695; Stop 1719
ggcagaatatagcattggagatagt

SEQ ID NO: 461335 - DNA, 25 bp, Artificial
  probe
  misc_feature (1)..(25): SEQ ID NO: 7200; WAN024DDL; Start 1694; Stop 1718
tggcagaatatagcattggagatag

SEQ ID NO: 461336 - DNA, 25 bp, Artificial
  probe
  misc_feature (1)..(25): SEQ ID NO: 7200; WAN024DDL; Start 1693; Stop 1717
ttggcagaatatagcattggagata

SEQ ID NO: 461337 - DNA, 25 bp, Artificial
  probe
  misc_feature (1)..(25): SEQ ID NO: 7200; WAN024DDL; Start 1761; Stop 1785
ttctattattaaccaagtgctgcct

SEQ ID NO: 461338 - DNA, 25 bp, Artificial
  probe
  misc_feature (1)..(25): SEQ ID NO: 7200; WAN024DDL; Start 1764; Stop 1788
tattattaaccaagtgctgcctgaa

SEQ ID NO: 461339 - DNA, 25 bp, Artificial
  probe
  misc_feature (1)..(25): SEQ ID NO: 7200; WAN024DDL; Start 1760; Stop 1784
attctattattaaccaagtgctgcc

SEQ ID NO: 461340 - DNA, 25 bp, Artificial
  probe
  misc_feature (1)..(25): SEQ ID NO: 7200; WAN024DDL; Start 1696; Stop 1720
gcagaatatagcattggagatagtg

SEQ ID NO: 461341 - DNA, 25 bp, Artificial
  probe
  misc_feature (1)..(25): SEQ ID NO: 7200; WAN024DDL; Start 1763; Stop 1787
ctattattaaccaagtgctgcctga

SEQ ID NO: 461342 - DNA, 25 bp, Artificial
  probe
  misc_feature (1)..(25): SEQ ID NO: 7200; WAN024DDL; Start 1762; Stop 1786
tctattattaaccaagtgctgcctg

SEQ ID NO: 461343 - DNA, 25 bp, Artificial
  probe
  misc_feature (1)..(25): SEQ ID NO: 7200; WAN024DDL; Start 3551; Stop 3575
ccaaccaatacgaagaagatgctaa

SEQ ID NO: 461344 - DNA, 25 bp, Artificial
  probe
  misc_feature (1)..(25): SEQ ID NO: 7200; WAN024DDL; Start 1950; Stop 1974
aacagacaatgaagttatgacagga

SEQ ID NO: 461345 - DNA, 25 bp, Artificial
  probe
  misc_feature (1)..(25): SEQ ID NO: 7200; WAN024DDL; Start 1765; Stop 1789
attattaaccaagtgctgcctgaat

SEQ ID NO: 461346 - DNA, 25 bp, Artificial
  probe
  misc_feature (1)..(25): SEQ ID NO: 7200; WAN024DDL; Start 3898; Stop 3922
gtccataagttgaagagagcaatct

SEQ ID NO: 461347 - DNA, 25 bp, Artificial
  probe
  misc_feature (1)..(25): SEQ ID NO: 7200; WAN024DDL; Start 1697; Stop 1721
cagaatatagcattggagatagtgg

SEQ ID NO: 461348 - DNA, 25 bp, Artificial
  probe
  misc_feature (1)..(25): SEQ ID NO: 7200; WAN024DDL; Start 1630; Stop 1654
cttcactacaaggaccattcatctg

SEQ ID NO: 461349 - DNA, 25 bp, Artificial
  probe
  misc_feature (1)..(25): SEQ ID NO: 7200; WAN024DDL; Start 1766; Stop 1790
ttattaaccaagtgctgcctgaatt

SEQ ID NO: 461350 - DNA, 25 bp, Artificial
  probe
  misc_feature (1)..(25): SEQ ID NO: 7200; WAN024DDL; Start 2006; Stop 2030
aagccttacttcttggaatgagtta

SEQ ID NO: 461351 - DNA, 25 bp, Artificial
  probe
  misc_feature (1)..(25): SEQ ID NO: 7200; WAN024DDL; Start 2373; Stop 2397
agttggcactaagtattctattggt

SEQ ID NO: 461352 - DNA, 25 bp, Artificial
  probe
  misc_feature (1)..(25): SEQ ID NO: 7200; WAN024DDL; Start 2007; Stop 2031
agccttacttcttggaatgagttat

SEQ ID NO: 461353 - DNA, 25 bp, Artificial
  probe
  misc_feature (1)..(25): SEQ ID NO: 7200; WAN024DDL; Start 1952; Stop 1976
cagacaatgaagttatgacaggata

SEQ ID NO: 461354 - DNA, 25 bp, Artificial
  probe
  misc_feature (1)..(25): SEQ ID NO: 7200; WAN024DDL; Start 1759; Stop 1783
gattctattattaaccaagtgctgc

SEQ ID NO: 461355 - DNA, 25 bp, Artificial
  probe
  misc_feature (1)..(25): SEQ ID NO: 7200; WAN024DDL; Start 1346; Stop 1370
tcaatcttatcactccaccaatagt

SEQ ID NO: 461356 - DNA, 25 bp, Artificial
  probe
  misc_feature (1)..(25): SEQ ID NO: 7200; WAN024DDL; Start 2512; Stop 2536
ggtgcttatgatcgctatcgtaata

SEQ ID NO: 461357 - DNA, 25 bp, Artificial
  probe
  misc_feature (1)..(25): SEQ ID NO: 7200; WAN024DDL; Start 2008; Stop 2032
gccttacttcttggaatgagttatt

SEQ ID NO: 461358 - DNA, 25 bp, Artificial
  probe
  misc_feature (1)..(25): SEQ ID NO: 7200; WAN024DDL; Start 2929; Stop 2953
cttggtggttatggaagaagaagtg

SEQ ID NO: 461359 - DNA, 25 bp, Artificial
  probe
  misc_feature (1)..(25): SEQ ID NO: 7200; WAN024DDL; Start 3550; Stop 3574
tccaaccaatacgaagaagatgcta

SEQ ID NO: 461360 - DNA, 25 bp, Artificial
  probe
  misc_feature (1)..(25): SEQ ID NO: 7200; WAN024DDL; Start 2303; Stop 2327
aatcacagactaaggcttacattgt

SEQ ID NO: 461361 - DNA, 25 bp, Artificial
  probe
  misc_feature (1)..(25): SEQ ID NO: 7200; WAN024DDL; Start 1345; Stop 1369
atcaatcttatcactccaccaatag

SEQ ID NO: 461362 - DNA, 25 bp, Artificial
  probe
  misc_feature (1)..(25): SEQ ID NO: 7200; WAN024DDL; Start 2444; Stop 2468
tactacctctacttaccttgccaga

SEQ ID NO: 461363 - DNA, 25 bp, Artificial
  probe
  misc_feature (1)..(25): SEQ ID NO: 7200; WAN024DDL; Start 1631; Stop 1655
ttcactacaaggaccattcatctga

SEQ ID NO: 461364 - DNA, 25 bp, Artificial
  probe
  misc_feature (1)..(25): SEQ ID NO: 7200; WAN024DDL; Start 2896; Stop 2920
gagatgacgcataattcagatcaag

SEQ ID NO: 461365 - DNA, 25 bp, Artificial
  probe
  misc_feature (1)..(25): SEQ ID NO: 7200; WAN024DDL; Start 2897; Stop 2921
agatgacgcataattcagatcaaga

SEQ ID NO: 461366 - DNA, 25 bp, Artificial
  probe
  misc_feature (1)..(25): SEQ ID NO: 7201; WAN024AJS; Start 20; Stop 44
aaggtagatcagctttgtctgtatc

SEQ ID NO: 461367 - DNA, 25 bp, Artificial
  probe
  misc_feature (1)..(25): SEQ ID NO: 7201; WAN024AJS; Start 19; Stop 43
aaaggtagatcagctttgtctgtat

SEQ ID NO: 461368 - DNA, 25 bp, Artificial
  probe
  misc_feature (1)..(25): SEQ ID NO: 7201; WAN024AJS; Start 22; Stop 46
ggtagatcagctttgtctgtatctg

SEQ ID NO: 461369 - DNA, 25 bp, Artificial
  probe
  misc_feature (1)..(25): SEQ ID NO: 7201; WAN024AJS; Start 21; Stop 45
aggtagatcagctttgtctgtatct

SEQ ID NO: 461370 - DNA, 25 bp, Artificial
  probe
  misc_feature (1)..(25): SEQ ID NO: 7201; WAN024AJS; Start 23; Stop 47
gtagatcagctttgtctgtatctgc

SEQ ID NO: 461371 - DNA, 25 bp, Artificial
  probe
  misc_feature (1)..(25): SEQ ID NO: 7201; WAN024AJS; Start 27; Stop 51
atcagctttgtctgtatctgccttt

SEQ ID NO: 461372 - DNA, 25 bp, Artificial
  probe
  misc_feature (1)..(25): SEQ ID NO: 7201; WAN024AJS; Start 26; Stop 50
gatcagctttgtctgtatctgcctt

SEQ ID NO: 461373 - DNA, 25 bp, Artificial
  probe
  misc_feature (1)..(25): SEQ ID NO: 7201; WAN024AJS; Start 24; Stop 48
tagatcagctttgtctgtatctgcc

SEQ ID NO: 461374 - DNA, 25 bp, Artificial
  probe
  misc_feature (1)..(25): SEQ ID NO: 7201; WAN024AJS; Start 18; Stop 42
aaaaggtagatcagctttgtctgta

SEQ ID NO: 461375 - DNA, 25 bp, Artificial
  probe
  misc_feature (1)..(25): SEQ ID NO: 7201; WAN024AJS; Start 25; Stop 49
agatcagctttgtctgtatctgcct

SEQ ID NO: 461376 - DNA, 25 bp, Artificial
  probe
  misc_feature (1)..(25): SEQ ID NO: 7201; WAN024AJS; Start 28; Stop 52
tcagctttgtctgtatctgcctttt

SEQ ID NO: 461377 - DNA, 25 bp, Artificial
  probe
  misc_feature (1)..(25): SEQ ID NO: 7202; WAN0249D9; Start 2; Stop 26
gggaagtcttctttgataaccttat

SEQ ID NO: 461378 - DNA, 25 bp, Artificial
  probe
  misc_feature (1)..(25): SEQ ID NO: 7202; WAN0249D9; Start 21; Stop 45
ccttatatagatgcttgttatctgc

SEQ ID NO: 461379 - DNA, 25 bp, Artificial
  probe
  misc_feature (1)..(25): SEQ ID NO: 7202; WAN0249D9; Start 14; Stop 38
ttgataaccttatatagatgcttgt

SEQ ID NO: 461380 - DNA, 25 bp, Artificial
  probe
  misc_feature (1)..(25): SEQ ID NO: 7202; WAN0249D9; Start 1; Stop 25
ggggaagtcttctttgataacctta

SEQ ID NO: 461381 - DNA, 25 bp, Artificial
  probe
  misc_feature (1)..(25): SEQ ID NO: 7202; WAN0249D9; Start 15; Stop 39
tgataaccttatatagatgcttgtt

SEQ ID NO: 461382 - DNA, 25 bp, Artificial
  probe
  misc_feature (1)..(25): SEQ ID NO: 7202; WAN0249D9; Start 20; Stop 44
accttatatagatgcttgttatctg

SEQ ID NO: 461383 - DNA, 25 bp, Artificial
  probe
  misc_feature (1)..(25): SEQ ID NO: 7202; WAN0249D9; Start 3; Stop 27
ggaagtcttctttgataaccttata

SEQ ID NO: 461384 - DNA, 25 bp, Artificial
  probe
  misc_feature (1)..(25): SEQ ID NO: 7202; WAN0249D9; Start 22; Stop 46
cttatatagatgcttgttatctgca

SEQ ID NO: 461385 - DNA, 25 bp, Artificial
  probe
  misc_feature (1)..(25): SEQ ID NO: 7202; WAN0249D9; Start 19; Stop 43
aaccttatatagatgcttgttatct

SEQ ID NO: 461386 - DNA, 25 bp, Artificial
  probe
  misc_feature (1)..(25): SEQ ID NO: 7202; WAN0249D9; Start 23; Stop 47
ttatatagatgcttgttatctgcaa

SEQ ID NO: 461387 - DNA, 25 bp, Artificial
  probe
  misc_feature (1)..(25): SEQ ID NO: 7202; WAN0249D9; Start 11; Stop 35
tctttgataaccttatatagatgct

SEQ ID NO: 461388 - DNA, 25 bp, Artificial
  probe
  misc_feature (1)..(25): SEQ ID NO: 7202; WAN0249D9; Start 25; Stop 49
atatagatgcttgttatctgcaaat

SEQ ID NO: 461389 - DNA, 25 bp, Artificial
  probe
  misc_feature (1)..(25): SEQ ID NO: 7202; WAN0249D9; Start 24; Stop 48
tatatagatgcttgttatctgcaaa

SEQ ID NO: 461390 - DNA, 25 bp, Artificial
  probe
  misc_feature (1)..(25): SEQ ID NO: 7203; WAN024DY2; Start 560; Stop 584
ccgacgctattgatacgcttaataa

SEQ ID NO: 461391 - DNA, 25 bp, Artificial
  probe
  misc_feature (1)..(25): SEQ ID NO: 7203; WAN024DY2; Start 558; Stop 582
taccgacgctattgatacgcttaat

SEQ ID NO: 461392 - DNA, 25 bp, Artificial
  probe
  misc_feature (1)..(25): SEQ ID NO: 7203; WAN024DY2; Start 557; Stop 581
ttaccgacgctattgatacgcttaa

SEQ ID NO: 461393 - DNA, 25 bp, Artificial
  probe
  misc_feature (1)..(25): SEQ ID NO: 7203; WAN024DY2; Start 559; Stop 583
accgacgctattgatacgcttaata

SEQ ID NO: 461394 - DNA, 25 bp, Artificial
  probe
  misc_feature (1)..(25): SEQ ID NO: 7203; WAN024DY2; Start 556; Stop 580
cttaccgacgctattgatacgctta

SEQ ID NO: 461395 - DNA, 25 bp, Artificial
  probe
  misc_feature (1)..(25): SEQ ID NO: 7203; WAN024DY2; Start 458; Stop 482
ctccaagtgatttagcaattatcgg

SEQ ID NO: 461396 - DNA, 25 bp, Artificial
  probe
  misc_feature (1)..(25): SEQ ID NO: 7203; WAN024DY2; Start 247; Stop 271
gacgacctaatggatatcacagatg

SEQ ID NO: 461397 - DNA, 25 bp, Artificial
  probe
  misc_feature (1)..(25): SEQ ID NO: 7203; WAN024DY2; Start 561; Stop 585
cgacgctattgatacgcttaataaa

SEQ ID NO: 461398 - DNA, 25 bp, Artificial
  probe
  misc_feature (1)..(25): SEQ ID NO: 7203; WAN024DY2; Start 41; Stop 65
gttctattgaagaccactttgactc

SEQ ID NO: 461399 - DNA, 25 bp, Artificial
  probe
  misc_feature (1)..(25): SEQ ID NO: 7203; WAN024DY2; Start 40; Stop 64
cgttctattgaagaccactttgact

SEQ ID NO: 461400 - DNA, 25 bp, Artificial
  probe
  misc_feature (1)..(25): SEQ ID NO: 7203; WAN024DY2; Start 42; Stop 66
ttctattgaagaccactttgactca

SEQ ID NO: 461401 - DNA, 25 bp, Artificial
  probe
  misc_feature (1)..(25): SEQ ID NO: 7203; WAN024DY2; Start 459; Stop 483
tccaagtgatttagcaattatcggg

SEQ ID NO: 461402 - DNA, 25 bp, Artificial
  probe
  misc_feature (1)..(25): SEQ ID NO: 7203; WAN024DY2; Start 250; Stop 274
gacctaatggatatcacagatgaca

SEQ ID NO: 461403 - DNA, 25 bp, Artificial
  probe
  misc_feature (1)..(25): SEQ ID NO: 7203; WAN024DY2; Start 253; Stop 277
ctaatggatatcacagatgacaacg

SEQ ID NO: 461404 - DNA, 25 bp, Artificial
  probe
  misc_feature (1)..(25): SEQ ID NO: 7203; WAN024DY2; Start 249; Stop 273
cgacctaatggatatcacagatgac

SEQ ID NO: 461405 - DNA, 25 bp, Artificial
  probe
  misc_feature (1)..(25): SEQ ID NO: 7203; WAN024DY2; Start 251; Stop 275
acctaatggatatcacagatgacaa

SEQ ID NO: 461406 - DNA, 25 bp, Artificial
  probe
  misc_feature (1)..(25): SEQ ID NO: 7203; WAN024DY2; Start 252; Stop 276
cctaatggatatcacagatgacaac

SEQ ID NO: 461407 - DNA, 25 bp, Artificial
  probe
  misc_feature (1)..(25): SEQ ID NO: 7203; WAN024DY2; Start 248; Stop 272
acgacctaatggatatcacagatga

SEQ ID NO: 461408 - DNA, 25 bp, Artificial
  probe
  misc_feature (1)..(25): SEQ ID NO: 7203; WAN024DY2; Start 246; Stop 270
tgacgacctaatggatatcacagat

SEQ ID NO: 461409 - DNA, 25 bp, Artificial
  probe
  misc_feature (1)..(25): SEQ ID NO: 7203; WAN024DY2; Start 254; Stop 278
taatggatatcacagatgacaacgc

SEQ ID NO: 461410 - DNA, 25 bp, Artificial
  probe
  misc_feature (1)..(25): SEQ ID NO: 7203; WAN024DY2; Start 294; Stop 318
acaattgatgaatgattacgagtcg

SEQ ID NO: 461411 - DNA, 25 bp, Artificial
  probe
  misc_feature (1)..(25): SEQ ID NO: 7203; WAN024DY2; Start 295; Stop 319
caattgatgaatgattacgagtcga

SEQ ID NO: 461412 - DNA, 25 bp, Artificial
  probe
  misc_feature (1)..(25): SEQ ID NO: 7203; WAN024DY2; Start 460; Stop 484
ccaagtgatttagcaattatcgggc

SEQ ID NO: 461413 - DNA, 25 bp, Artificial
  probe
  misc_feature (1)..(25): SEQ ID NO: 7203; WAN024DY2; Start 255; Stop 279
aatggatatcacagatgacaacgct

SEQ ID NO: 461414 - DNA, 25 bp, Artificial
  probe
  misc_feature (1)..(25): SEQ ID NO: 7203; WAN024DY2; Start 461; Stop 485
caagtgatttagcaattatcgggcg

SEQ ID NO: 461415 - DNA, 25 bp, Artificial
  probe
  misc_feature (1)..(25): SEQ ID NO: 7203; WAN024DY2; Start 142; Stop 166
attcgccttcactttatccgtcaaa

SEQ ID NO: 461416 - DNA, 25 bp, Artificial
  probe
  misc_feature (1)..(25): SEQ ID NO: 7203; WAN024DY2; Start 393; Stop 417
gggtgaagggattaatggtctctac

SEQ ID NO: 461417 - DNA, 25 bp, Artificial
  probe
  misc_feature (1)..(25): SEQ ID NO: 7203; WAN024DY2; Start 392; Stop 416
agggtgaagggattaatggtctcta

SEQ ID NO: 461418 - DNA, 25 bp, Artificial
  probe
  misc_feature (1)..(25): SEQ ID NO: 7203; WAN024DY2; Start 293; Stop 317
aacaattgatgaatgattacgagtc

SEQ ID NO: 461419 - DNA, 25 bp, Artificial
  probe
  misc_feature (1)..(25): SEQ ID NO: 7203; WAN024DY2; Start 241; Stop 265
cttggtgacgacctaatggatatca

SEQ ID NO: 461420 - DNA, 25 bp, Artificial
  probe
  misc_feature (1)..(25): SEQ ID NO: 7203; WAN024DY2; Start 361; Stop 385
gaagtttcagcatatggagttatcg

SEQ ID NO: 461421 - DNA, 25 bp, Artificial
  probe
  misc_feature (1)..(25): SEQ ID NO: 7203; WAN024DY2; Start 66; Stop 90
aaactttgagcttgagtacaacctc

SEQ ID NO: 461422 - DNA, 25 bp, Artificial
  probe
  misc_feature (1)..(25): SEQ ID NO: 7203; WAN024DY2; Start 65; Stop 89
caaactttgagcttgagtacaacct

SEQ ID NO: 461423 - DNA, 25 bp, Artificial
  probe
  misc_feature (1)..(25): SEQ ID NO: 7204; WAN024DY4; Start 250; Stop 274
gaccttatggacattactaacgaca

SEQ ID NO: 461424 - DNA, 25 bp, Artificial
  probe
  misc_feature (1)..(25): SEQ ID NO: 7204; WAN024DY4; Start 249; Stop 273
tgaccttatggacattactaacgac

SEQ ID NO: 461425 - DNA, 25 bp, Artificial
  probe
  misc_feature (1)..(25): SEQ ID NO: 7204; WAN024DY4; Start 251; Stop 275
accttatggacattactaacgacaa

SEQ ID NO: 461426 - DNA, 25 bp, Artificial
  probe
  misc_feature (1)..(25): SEQ ID NO: 7204; WAN024DY4; Start 473; Stop 497
ctattatcggtcgttatctgctcac

SEQ ID NO: 461427 - DNA, 25 bp, Artificial
  probe
  misc_feature (1)..(25): SEQ ID NO: 7204; WAN024DY4; Start 259; Stop 283
gacattactaacgacaaggctatcc

SEQ ID NO: 461428 - DNA, 25 bp, Artificial
  probe
  misc_feature (1)..(25): SEQ ID NO: 7204; WAN024DY4; Start 258; Stop 282
ggacattactaacgacaaggctatc

SEQ ID NO: 461429 - DNA, 25 bp, Artificial
  probe
  misc_feature (1)..(25): SEQ ID NO: 7204; WAN024DY4; Start 254; Stop 278
ttatggacattactaacgacaaggc

SEQ ID NO: 461430 - DNA, 25 bp, Artificial
  probe
  misc_feature (1)..(25): SEQ ID NO: 7204; WAN024DY4; Start 245; Stop 269
gcgatgaccttatggacattactaa

SEQ ID NO: 461431 - DNA, 25 bp, Artificial
  probe
  misc_feature (1)..(25): SEQ ID NO: 7204; WAN024DY4; Start 253; Stop 277
cttatggacattactaacgacaagg

SEQ ID NO: 461432 - DNA, 25 bp, Artificial
  probe
  misc_feature (1)..(25): SEQ ID NO: 7204; WAN024DY4; Start 252; Stop 276
ccttatggacattactaacgacaag

SEQ ID NO: 461433 - DNA, 25 bp, Artificial
  probe
  misc_feature (1)..(25): SEQ ID NO: 7204; WAN024DY4; Start 248; Stop 272
atgaccttatggacattactaacga

SEQ ID NO: 461434 - DNA, 25 bp, Artificial
  probe
  misc_feature (1)..(25): SEQ ID NO: 7204; WAN024DY4; Start 247; Stop 271
gatgaccttatggacattactaacg

SEQ ID NO: 461435 - DNA, 25 bp, Artificial
  probe
  misc_feature (1)..(25): SEQ ID NO: 7204; WAN024DY4; Start 246; Stop 270
cgatgaccttatggacattactaac

SEQ ID NO: 461436 - DNA, 25 bp, Artificial
  probe
  misc_feature (1)..(25): SEQ ID NO: 7204; WAN024DY4; Start 119; Stop 143
aattggtagatgaagcaactggtat

SEQ ID NO: 461437 - DNA, 25 bp, Artificial
  probe
  misc_feature (1)..(25): SEQ ID NO: 7204; WAN024DY4; Start 474; Stop 498
tattatcggtcgttatctgctcaca

SEQ ID NO: 461438 - DNA, 25 bp, Artificial
  probe
  misc_feature (1)..(25): SEQ ID NO: 7204; WAN024DY4; Start 257; Stop 281
tggacattactaacgacaaggctat

SEQ ID NO: 461439 - DNA, 25 bp, Artificial
  probe
  misc_feature (1)..(25): SEQ ID NO: 7204; WAN024DY4; Start 120; Stop 144
attggtagatgaagcaactggtatg

SEQ ID NO: 461440 - DNA, 25 bp, Artificial
  probe
  misc_feature (1)..(25): SEQ ID NO: 7204; WAN024DY4; Start 256; Stop 280
atggacattactaacgacaaggcta

SEQ ID NO: 461441 - DNA, 25 bp, Artificial
  probe
  misc_feature (1)..(25): SEQ ID NO: 7204; WAN024DY4; Start 255; Stop 279
tatggacattactaacgacaaggct

SEQ ID NO: 461442 - DNA, 25 bp, Artificial
  probe
  misc_feature (1)..(25): SEQ ID NO: 7204; WAN024DY4; Start 244; Stop 268
ggcgatgaccttatggacattacta

SEQ ID NO: 461443 - DNA, 25 bp, Artificial
  probe
  misc_feature (1)..(25): SEQ ID NO: 7204; WAN024DY4; Start 472; Stop 496
gctattatcggtcgttatctgctca

SEQ ID NO: 461444 - DNA, 25 bp, Artificial
  probe
  misc_feature (1)..(25): SEQ ID NO: 7204; WAN024DY4; Start 475; Stop 499
attatcggtcgttatctgctcacac

SEQ ID NO: 461445 - DNA, 25 bp, Artificial
  probe
  misc_feature (1)..(25): SEQ ID NO: 7204; WAN024DY4; Start 262; Stop 286
attactaacgacaaggctatcccat

SEQ ID NO: 461446 - DNA, 25 bp, Artificial
  probe
  misc_feature (1)..(25): SEQ ID NO: 7204; WAN024DY4; Start 263; Stop 287
ttactaacgacaaggctatcccatt

SEQ ID NO: 461447 - DNA, 25 bp, Artificial
  probe
  misc_feature (1)..(25): SEQ ID NO: 7204; WAN024DY4; Start 118; Stop 142
aaattggtagatgaagcaactggta

SEQ ID NO: 461448 - DNA, 25 bp, Artificial
  probe
  misc_feature (1)..(25): SEQ ID NO: 7204; WAN024DY4; Start 261; Stop 285
cattactaacgacaaggctatccca

SEQ ID NO: 461449 - DNA, 25 bp, Artificial
  probe
  misc_feature (1)..(25): SEQ ID NO: 7204; WAN024DY4; Start 260; Stop 284
acattactaacgacaaggctatccc

SEQ ID NO: 461450 - DNA, 25 bp, Artificial
  probe
  misc_feature (1)..(25): SEQ ID NO: 7204; WAN024DY4; Start 292; Stop 316
aaacaactgatgaatgattacgaaa

SEQ ID NO: 461451 - DNA, 25 bp, Artificial
  probe
  misc_feature (1)..(25): SEQ ID NO: 7204; WAN024DY4; Start 392; Stop 416
aaggtgaagggattaatggtctcta

SEQ ID NO: 461452 - DNA, 25 bp, Artificial
  probe
  misc_feature (1)..(25): SEQ ID NO: 7204; WAN024DY4; Start 40; Stop 64
cgttctattgaagatcactttgact

SEQ ID NO: 461453 - DNA, 25 bp, Artificial
  probe
  misc_feature (1)..(25): SEQ ID NO: 7204; WAN024DY4; Start 464; Stop 488
gtgatctagctattatcggtcgtta

SEQ ID NO: 461454 - DNA, 25 bp, Artificial
  probe
  misc_feature (1)..(25): SEQ ID NO: 7204; WAN024DY4; Start 458; Stop 482
ctccaagtgatctagctattatcgg

SEQ ID NO: 461455 - DNA, 25 bp, Artificial
  probe
  misc_feature (1)..(25): SEQ ID NO: 7204; WAN024DY4; Start 468; Stop 492
tctagctattatcggtcgttatctg

SEQ ID NO: 461456 - DNA, 25 bp, Artificial
  probe
  misc_feature (1)..(25): SEQ ID NO: 7205; WAN024FCL; Start 1; Stop 25
ggtgataacatcctcaaggtagatt

SEQ ID NO: 461457 - DNA, 25 bp, Artificial
  probe
  misc_feature (1)..(25): SEQ ID NO: 7205; WAN024FCL; Start 3; Stop 27
tgataacatcctcaaggtagattcc

SEQ ID NO: 461458 - DNA, 25 bp, Artificial
  probe
  misc_feature (1)..(25): SEQ ID NO: 7205; WAN024FCL; Start 2; Stop 26
gtgataacatcctcaaggtagattc

SEQ ID NO: 461459 - DNA, 25 bp, Artificial
  probe
  misc_feature (1)..(25): SEQ ID NO: 7205; WAN024FCL; Start 4; Stop 28
gataacatcctcaaggtagattcct

SEQ ID NO: 461460 - DNA, 25 bp, Artificial
  probe
  misc_feature (1)..(25): SEQ ID NO: 7205; WAN024FCL; Start 106; Stop 130
attaccaaggtcgtaaccattgaag

SEQ ID NO: 461461 - DNA, 25 bp, Artificial
  probe
  misc_feature (1)..(25): SEQ ID NO: 7205; WAN024FCL; Start 200; Stop 224
ctaagaacatcaccatgaacgaagg

SEQ ID NO: 461462 - DNA, 25 bp, Artificial
  probe
  misc_feature (1)..(25): SEQ ID NO: 7205; WAN024FCL; Start 105; Stop 129
cattaccaaggtcgtaaccattgaa

SEQ ID NO: 461463 - DNA, 25 bp, Artificial
  probe
  misc_feature (1)..(25): SEQ ID NO: 7205; WAN024FCL; Start 283; Stop 307
gctatcggtatcgtgattgagaaat

SEQ ID NO: 461464 - DNA, 25 bp, Artificial
  probe
  misc_feature (1)..(25): SEQ ID NO: 7205; WAN024FCL; Start 281; Stop 305
aagctatcggtatcgtgattgagaa

SEQ ID NO: 461465 - DNA, 25 bp, Artificial
  probe
  misc_feature (1)..(25): SEQ ID NO: 7205; WAN024FCL; Start 225; Stop 249
catcttaactgctaaaggcttgatt

SEQ ID NO: 461466 - DNA, 25 bp, Artificial
  probe
  misc_feature (1)..(25): SEQ ID NO: 7205; WAN024FCL; Start 227; Stop 251
tcttaactgctaaaggcttgattca

SEQ ID NO: 461467 - DNA, 25 bp, Artificial
  probe
  misc_feature (1)..(25): SEQ ID NO: 7205; WAN024FCL; Start 226; Stop 250
atcttaactgctaaaggcttgattc

SEQ ID NO: 461468 - DNA, 25 bp, Artificial
  probe
  misc_feature (1)..(25): SEQ ID NO: 7205; WAN024FCL; Start 199; Stop 223
gctaagaacatcaccatgaacgaag

SEQ ID NO: 461469 - DNA, 25 bp, Artificial
  probe
  misc_feature (1)..(25): SEQ ID NO: 7205; WAN024FCL; Start 208; Stop 232
atcaccatgaacgaaggcatcttaa

SEQ ID NO: 461470 - DNA, 25 bp, Artificial
  probe
  misc_feature (1)..(25): SEQ ID NO: 7205; WAN024FCL; Start 228; Stop 252
cttaactgctaaaggcttgattcaa

SEQ ID NO: 461471 - DNA, 25 bp, Artificial
  probe
  misc_feature (1)..(25): SEQ ID NO: 7205; WAN024FCL; Start 231; Stop 255
aactgctaaaggcttgattcaaatc

SEQ ID NO: 461472 - DNA, 25 bp, Artificial
  probe
  misc_feature (1)..(25): SEQ ID NO: 7205; WAN024FCL; Start 229; Stop 253
ttaactgctaaaggcttgattcaaa

SEQ ID NO: 461473 - DNA, 25 bp, Artificial
  probe
  misc_feature (1)..(25): SEQ ID NO: 7205; WAN024FCL; Start 230; Stop 254
taactgctaaaggcttgattcaaat

SEQ ID NO: 461474 - DNA, 25 bp, Artificial
  probe
  misc_feature (1)..(25): SEQ ID NO: 7205; WAN024FCL; Start 280; Stop 304
caagctatcggtatcgtgattgaga

SEQ ID NO: 461475 - DNA, 25 bp, Artificial
  probe
  misc_feature (1)..(25): SEQ ID NO: 7205; WAN024FCL; Start 198; Stop 222
agctaagaacatcaccatgaacgaa

SEQ ID NO: 461476 - DNA, 25 bp, Artificial
  probe
  misc_feature (1)..(25): SEQ ID NO: 7205; WAN024FCL; Start 197; Stop 221
aagctaagaacatcaccatgaacga

SEQ ID NO: 461477 - DNA, 25 bp, Artificial
  probe
  misc_feature (1)..(25): SEQ ID NO: 7205; WAN024FCL; Start 96; Stop 120
tactactggcattaccaaggtcgta

SEQ ID NO: 461478 - DNA, 25 bp, Artificial
  probe
  misc_feature (1)..(25): SEQ ID NO: 7205; WAN024FCL; Start 295; Stop 319
gtgattgagaaatccttccaagatg

SEQ ID NO: 461479 - DNA, 25 bp, Artificial
  probe
  misc_feature (1)..(25): SEQ ID NO: 7205; WAN024FCL; Start 291; Stop 315
tatcgtgattgagaaatccttccaa

SEQ ID NO: 461480 - DNA, 25 bp, Artificial
  probe
  misc_feature (1)..(25): SEQ ID NO: 7205; WAN024FCL; Start 285; Stop 309
tatcggtatcgtgattgagaaatcc

SEQ ID NO: 461481 - DNA, 25 bp, Artificial
  probe
  misc_feature (1)..(25): SEQ ID NO: 7205; WAN024FCL; Start 207; Stop 231
catcaccatgaacgaaggcatctta

SEQ ID NO: 461482 - DNA, 25 bp, Artificial
  probe
  misc_feature (1)..(25): SEQ ID NO: 7205; WAN024FCL; Start 290; Stop 314
gtatcgtgattgagaaatccttcca

SEQ ID NO: 461483 - DNA, 25 bp, Artificial
  probe
  misc_feature (1)..(25): SEQ ID NO: 7205; WAN024FCL; Start 211; Stop 235
accatgaacgaaggcatcttaactg

SEQ ID NO: 461484 - DNA, 25 bp, Artificial
  probe
  misc_feature (1)..(25): SEQ ID NO: 7205; WAN024FCL; Start 210; Stop 234
caccatgaacgaaggcatcttaact

SEQ ID NO: 461485 - DNA, 25 bp, Artificial
  probe
  misc_feature (1)..(25): SEQ ID NO: 7205; WAN024FCL; Start 284; Stop 308
ctatcggtatcgtgattgagaaatc

SEQ ID NO: 461486 - DNA, 25 bp, Artificial
  probe
  misc_feature (1)..(25): SEQ ID NO: 7205; WAN024FCL; Start 298; Stop 322
attgagaaatccttccaagatggtc

SEQ ID NO: 461487 - DNA, 25 bp, Artificial
  probe
  misc_feature (1)..(25): SEQ ID NO: 7205; WAN024FCL; Start 297; Stop 321
gattgagaaatccttccaagatggt

SEQ ID NO: 461488 - DNA, 25 bp, Artificial
  probe
  misc_feature (1)..(25): SEQ ID NO: 7205; WAN024FCL; Start 296; Stop 320
tgattgagaaatccttccaagatgg

SEQ ID NO: 461489 - DNA, 25 bp, Artificial
  probe
  misc_feature (1)..(25): SEQ ID NO: 7206; WAN024G3A; Start 414; Stop 438
cgatggtagtgccttacaatatgaa

SEQ ID NO: 461490 - DNA, 25 bp, Artificial
  probe
  misc_feature (1)..(25): SEQ ID NO: 7206; WAN024G3A; Start 400; Stop 424
attattgcttatgacgatggtagtg

SEQ ID NO: 461491 - DNA, 25 bp, Artificial
  probe
  misc_feature (1)..(25): SEQ ID NO: 7206; WAN024G3A; Start 349; Stop 373
actggtaagagaatagaggaatacg

SEQ ID NO: 461492 - DNA, 25 bp, Artificial
  probe
  misc_feature (1)..(25): SEQ ID NO: 7206; WAN024G3A; Start 350; Stop 374
ctggtaagagaatagaggaatacga

SEQ ID NO: 461493 - DNA, 25 bp, Artificial
  probe
  misc_feature (1)..(25): SEQ ID NO: 7206; WAN024G3A; Start 587; Stop 611
aagcgactaagtatgattcacattc

SEQ ID NO: 461494 - DNA, 25 bp, Artificial
  probe
  misc_feature (1)..(25): SEQ ID NO: 7206; WAN024G3A; Start 401; Stop 425
ttattgcttatgacgatggtagtgc

SEQ ID NO: 461495 - DNA, 25 bp, Artificial
  probe
  misc_feature (1)..(25): SEQ ID NO: 7206; WAN024G3A; Start 412; Stop 436
gacgatggtagtgccttacaatatg

SEQ ID NO: 461496 - DNA, 25 bp, Artificial
  probe
  misc_feature (1)..(25): SEQ ID NO: 7206; WAN024G3A; Start 588; Stop 612
agcgactaagtatgattcacattca

SEQ ID NO: 461497 - DNA, 25 bp, Artificial
  probe
  misc_feature (1)..(25): SEQ ID NO: 7206; WAN024G3A; Start 589; Stop 613
gcgactaagtatgattcacattcaa

SEQ ID NO: 461498 - DNA, 25 bp, Artificial
  probe
  misc_feature (1)..(25): SEQ ID NO: 7206; WAN024G3A; Start 410; Stop 434
atgacgatggtagtgccttacaata

SEQ ID NO: 461499 - DNA, 25 bp, Artificial
  probe
  misc_feature (1)..(25): SEQ ID NO: 7206; WAN024G3A; Start 409; Stop 433
tatgacgatggtagtgccttacaat

SEQ ID NO: 461500 - DNA, 25 bp, Artificial
  probe
  misc_feature (1)..(25): SEQ ID NO: 7206; WAN024G3A; Start 413; Stop 437
acgatggtagtgccttacaatatga

SEQ ID NO: 461501 - DNA, 25 bp, Artificial
  probe
  misc_feature (1)..(25): SEQ ID NO: 7206; WAN024G3A; Start 411; Stop 435
tgacgatggtagtgccttacaatat

SEQ ID NO: 461502 - DNA, 25 bp, Artificial
  probe
  misc_feature (1)..(25): SEQ ID NO: 7206; WAN024G3A; Start 351; Stop 375
tggtaagagaatagaggaatacgat

SEQ ID NO: 461503 - DNA, 25 bp, Artificial
  probe
  misc_feature (1)..(25): SEQ ID NO: 7206; WAN024G3A; Start 408; Stop 432
ttatgacgatggtagtgccttacaa

SEQ ID NO: 461504 - DNA, 25 bp, Artificial
  probe
  misc_feature (1)..(25): SEQ ID NO: 7206; WAN024G3A; Start 407; Stop 431
cttatgacgatggtagtgccttaca

SEQ ID NO: 461505 - DNA, 25 bp, Artificial
  probe
  misc_feature (1)..(25): SEQ ID NO: 7206; WAN024G3A; Start 399; Stop 423
tattattgcttatgacgatggtagt

SEQ ID NO: 461506 - DNA, 25 bp, Artificial
  probe
  misc_feature (1)..(25): SEQ ID NO: 7206; WAN024G3A; Start 352; Stop 376
ggtaagagaatagaggaatacgatt

SEQ ID NO: 461507 - DNA, 25 bp, Artificial
  probe
  misc_feature (1)..(25): SEQ ID NO: 7206; WAN024G3A; Start 402; Stop 426
tattgcttatgacgatggtagtgcc

SEQ ID NO: 461508 - DNA, 25 bp, Artificial
  probe
  misc_feature (1)..(25): SEQ ID NO: 7206; WAN024G3A; Start 348; Stop 372
aactggtaagagaatagaggaatac

SEQ ID NO: 461509 - DNA, 25 bp, Artificial
  probe
  misc_feature (1)..(25): SEQ ID NO: 7206; WAN024G3A; Start 344; Stop 368
gtgaaactggtaagagaatagagga

SEQ ID NO: 461510 - DNA, 25 bp, Artificial
  probe
  misc_feature (1)..(25): SEQ ID NO: 7206; WAN024G3A; Start 718; Stop 742
gctgaaactaagattagaatgcctg

SEQ ID NO: 461511 - DNA, 25 bp, Artificial
  probe
  misc_feature (1)..(25): SEQ ID NO: 7206; WAN024G3A; Start 416; Stop 440
atggtagtgccttacaatatgaaac

SEQ ID NO: 461512 - DNA, 25 bp, Artificial
  probe
  misc_feature (1)..(25): SEQ ID NO: 7206; WAN024G3A; Start 585; Stop 609
caaagcgactaagtatgattcacat

SEQ ID NO: 461513 - DNA, 25 bp, Artificial
  probe
  misc_feature (1)..(25): SEQ ID NO: 7206; WAN024G3A; Start 415; Stop 439
gatggtagtgccttacaatatgaaa

SEQ ID NO: 461514 - DNA, 25 bp, Artificial
  probe
  misc_feature (1)..(25): SEQ ID NO: 7206; WAN024G3A; Start 345; Stop 369
tgaaactggtaagagaatagaggaa

SEQ ID NO: 461515 - DNA, 25 bp, Artificial
  probe
  misc_feature (1)..(25): SEQ ID NO: 7206; WAN024G3A; Start 575; Stop 599
cgatagaaatcaaagcgactaagta

SEQ ID NO: 461516 - DNA, 25 bp, Artificial
  probe
  misc_feature (1)..(25): SEQ ID NO: 7206; WAN024G3A; Start 70; Stop 94
tcttattacctagtagatcctgaca

SEQ ID NO: 461517 - DNA, 25 bp, Artificial
  probe
  misc_feature (1)..(25): SEQ ID NO: 7206; WAN024G3A; Start 417; Stop 441
tggtagtgccttacaatatgaaact

SEQ ID NO: 461518 - DNA, 25 bp, Artificial
  probe
  misc_feature (1)..(25): SEQ ID NO: 7206; WAN024G3A; Start 584; Stop 608
tcaaagcgactaagtatgattcaca

SEQ ID NO: 461519 - DNA, 25 bp, Artificial
  probe
  misc_feature (1)..(25): SEQ ID NO: 7206; WAN024G3A; Start 418; Stop 442
ggtagtgccttacaatatgaaactg

SEQ ID NO: 461520 - DNA, 25 bp, Artificial
  probe
  misc_feature (1)..(25): SEQ ID NO: 7206; WAN024G3A; Start 586; Stop 610
aaagcgactaagtatgattcacatt

SEQ ID NO: 461521 - DNA, 25 bp, Artificial
  probe
  misc_feature (1)..(25): SEQ ID NO: 7206; WAN024G3A; Start 343; Stop 367
agtgaaactggtaagagaatagagg

SEQ ID NO: 461522 - DNA, 25 bp, Artificial
  probe
  misc_feature (1)..(25): SEQ ID NO: 7207; WAN024C5G; Start 907; Stop 931
aatggtggttatcttacaggttcaa

SEQ ID NO: 461523 - DNA, 25 bp, Artificial
  probe
  misc_feature (1)..(25): SEQ ID NO: 7207; WAN024C5G; Start 1014; Stop 1038
gcattattcaggtattcaacttgga

SEQ ID NO: 461524 - DNA, 25 bp, Artificial
  probe
  misc_feature (1)..(25): SEQ ID NO: 7207; WAN024C5G; Start 1013; Stop 1037
agcattattcaggtattcaacttgg

SEQ ID NO: 461525 - DNA, 25 bp, Artificial
  probe
  misc_feature (1)..(25): SEQ ID NO: 7207; WAN024C5G; Start 908; Stop 932
atggtggttatcttacaggttcaac

SEQ ID NO: 461526 - DNA, 25 bp, Artificial
  probe
  misc_feature (1)..(25): SEQ ID NO: 7207; WAN024C5G; Start 910; Stop 934
ggtggttatcttacaggttcaacaa

SEQ ID NO: 461527 - DNA, 25 bp, Artificial
  probe
  misc_feature (1)..(25): SEQ ID NO: 7207; WAN024C5G; Start 817; Stop 841
tataatcatagtacaggcaaggcaa

SEQ ID NO: 461528 - DNA, 25 bp, Artificial
  probe
  misc_feature (1)..(25): SEQ ID NO: 7207; WAN024C5G; Start 816; Stop 840
gtataatcatagtacaggcaaggca

SEQ ID NO: 461529 - DNA, 25 bp, Artificial
  probe
  misc_feature (1)..(25): SEQ ID NO: 7207; WAN024C5G; Start 1018; Stop 1042
tattcaggtattcaacttggagagt

SEQ ID NO: 461530 - DNA, 25 bp, Artificial
  probe
  misc_feature (1)..(25): SEQ ID NO: 7207; WAN024C5G; Start 1017; Stop 1041
ttattcaggtattcaacttggagag

SEQ ID NO: 461531 - DNA, 25 bp, Artificial
  probe
  misc_feature (1)..(25): SEQ ID NO: 7207; WAN024C5G; Start 1012; Stop 1036
gagcattattcaggtattcaacttg

SEQ ID NO: 461532 - DNA, 25 bp, Artificial
  probe
  misc_feature (1)..(25): SEQ ID NO: 7207; WAN024C5G; Start 818; Stop 842
ataatcatagtacaggcaaggcaac

SEQ ID NO: 461533 - DNA, 25 bp, Artificial
  probe
  misc_feature (1)..(25): SEQ ID NO: 7207; WAN024C5G; Start 984; Stop 1008
tattctctatgtgacggttcaacaa

SEQ ID NO: 461534 - DNA, 25 bp, Artificial
  probe
  misc_feature (1)..(25): SEQ ID NO: 7207; WAN024C5G; Start 642; Stop 666
caatgatggtgttatgttagagccg

SEQ ID NO: 461535 - DNA, 25 bp, Artificial
  probe
  misc_feature (1)..(25): SEQ ID NO: 7207; WAN024C5G; Start 644; Stop 668
atgatggtgttatgttagagccgaa

SEQ ID NO: 461536 - DNA, 25 bp, Artificial
  probe
  misc_feature (1)..(25): SEQ ID NO: 7207; WAN024C5G; Start 643; Stop 667
aatgatggtgttatgttagagccga

SEQ ID NO: 461537 - DNA, 25 bp, Artificial
  probe
  misc_feature (1)..(25): SEQ ID NO: 7207; WAN024C5G; Start 1011; Stop 1035
tgagcattattcaggtattcaactt

SEQ ID NO: 461538 - DNA, 25 bp, Artificial
  probe
  misc_feature (1)..(25): SEQ ID NO: 7207; WAN024C5G; Start 909; Stop 933
tggtggttatcttacaggttcaaca

SEQ ID NO: 461539 - DNA, 25 bp, Artificial
  probe
  misc_feature (1)..(25): SEQ ID NO: 7207; WAN024C5G; Start 985; Stop 1009
attctctatgtgacggttcaacaac

SEQ ID NO: 461540 - DNA, 25 bp, Artificial
  probe
  misc_feature (1)..(25): SEQ ID NO: 7207; WAN024C5G; Start 1016; Stop 1040
attattcaggtattcaacttggaga

SEQ ID NO: 461541 - DNA, 25 bp, Artificial
  probe
  misc_feature (1)..(25): SEQ ID NO: 7207; WAN024C5G; Start 1015; Stop 1039
cattattcaggtattcaacttggag

SEQ ID NO: 461542 - DNA, 25 bp, Artificial
  probe
  misc_feature (1)..(25): SEQ ID NO: 7207; WAN024C5G; Start 265; Stop 289
ttggcagcagctattgataataaga

SEQ ID NO: 461543 - DNA, 25 bp, Artificial
  probe
  misc_feature (1)..(25): SEQ ID NO: 7207; WAN024C5G; Start 264; Stop 288
gttggcagcagctattgataataag

SEQ ID NO: 461544 - DNA, 25 bp, Artificial
  probe
  misc_feature (1)..(25): SEQ ID NO: 7207; WAN024C5G; Start 819; Stop 843
taatcatagtacaggcaaggcaact

SEQ ID NO: 461545 - DNA, 25 bp, Artificial
  probe
  misc_feature (1)..(25): SEQ ID NO: 7207; WAN024C5G; Start 637; Stop 661
attgccaatgatggtgttatgttag

SEQ ID NO: 461546 - DNA, 25 bp, Artificial
  probe
  misc_feature (1)..(25): SEQ ID NO: 7207; WAN024C5G; Start 781; Stop 805
gttatggttggaacagatcctacat

SEQ ID NO: 461547 - DNA, 25 bp, Artificial
  probe
  misc_feature (1)..(25): SEQ ID NO: 7207; WAN024C5G; Start 638; Stop 662
ttgccaatgatggtgttatgttaga

SEQ ID NO: 461548 - DNA, 25 bp, Artificial
  probe
  misc_feature (1)..(25): SEQ ID NO: 7207; WAN024C5G; Start 268; Stop 292
gcagcagctattgataataagactt

SEQ ID NO: 461549 - DNA, 25 bp, Artificial
  probe
  misc_feature (1)..(25): SEQ ID NO: 7207; WAN024C5G; Start 262; Stop 286
atgttggcagcagctattgataata

SEQ ID NO: 461550 - DNA, 25 bp, Artificial
  probe
  misc_feature (1)..(25): SEQ ID NO: 7207; WAN024C5G; Start 267; Stop 291
ggcagcagctattgataataagact

SEQ ID NO: 461551 - DNA, 25 bp, Artificial
  probe
  misc_feature (1)..(25): SEQ ID NO: 7207; WAN024C5G; Start 263; Stop 287
tgttggcagcagctattgataataa

SEQ ID NO: 461552 - DNA, 25 bp, Artificial
  probe
  misc_feature (1)..(25): SEQ ID NO: 7207; WAN024C5G; Start 977; Stop 1001
ctgactttattctctatgtgacggt

SEQ ID NO: 461553 - DNA, 25 bp, Artificial
  probe
  misc_feature (1)..(25): SEQ ID NO: 7207; WAN024C5G; Start 975; Stop 999
tcctgactttattctctatgtgacg

SEQ ID NO: 461554 - DNA, 25 bp, Artificial
  probe
  misc_feature (1)..(25): SEQ ID NO: 7207; WAN024C5G; Start 906; Stop 930
aaatggtggttatcttacaggttca

SEQ ID NO: 461555 - DNA, 25 bp, Artificial
  probe
  misc_feature (1)..(25): SEQ ID NO: 7208; WAN024ATE; Start 32; Stop 56
atgtctatgcggttattgatgagaa

SEQ ID NO: 461556 - DNA, 25 bp, Artificial
  probe
  misc_feature (1)..(25): SEQ ID NO: 7208; WAN024ATE; Start 31; Stop 55
aatgtctatgcggttattgatgaga

SEQ ID NO: 461557 - DNA, 25 bp, Artificial
  probe
  misc_feature (1)..(25): SEQ ID NO: 7208; WAN024ATE; Start 23; Stop 47
cctcctataatgtctatgcggttat

SEQ ID NO: 461558 - DNA, 25 bp, Artificial
  probe
  misc_feature (1)..(25): SEQ ID NO: 7208; WAN024ATE; Start 30; Stop 54
taatgtctatgcggttattgatgag

SEQ ID NO: 461559 - DNA, 25 bp, Artificial
  probe
  misc_feature (1)..(25): SEQ ID NO: 7208; WAN024ATE; Start 35; Stop 59
tctatgcggttattgatgagaacta

SEQ ID NO: 461560 - DNA, 25 bp, Artificial
  probe
  misc_feature (1)..(25): SEQ ID NO: 7208; WAN024ATE; Start 1556; Stop 1580
ttactaatccaatccttgagagagc

SEQ ID NO: 461561 - DNA, 25 bp, Artificial
  probe
  misc_feature (1)..(25): SEQ ID NO: 7208; WAN024ATE; Start 34; Stop 58
gtctatgcggttattgatgagaact

SEQ ID NO: 461562 - DNA, 25 bp, Artificial
  probe
  misc_feature (1)..(25): SEQ ID NO: 7208; WAN024ATE; Start 33; Stop 57
tgtctatgcggttattgatgagaac

SEQ ID NO: 461563 - DNA, 25 bp, Artificial
  probe
  misc_feature (1)..(25): SEQ ID NO: 7208; WAN024ATE; Start 39; Stop 63
tgcggttattgatgagaactataag

SEQ ID NO: 461564 - DNA, 25 bp, Artificial
  probe
  misc_feature (1)..(25): SEQ ID NO: 7208; WAN024ATE; Start 1640; Stop 1664
cgacagaatcttcttatacaatgcc

SEQ ID NO: 461565 - DNA, 25 bp, Artificial
  probe
  misc_feature (1)..(25): SEQ ID NO: 7208; WAN024ATE; Start 36; Stop 60
ctatgcggttattgatgagaactat

SEQ ID NO: 461566 - DNA, 25 bp, Artificial
  probe
  misc_feature (1)..(25): SEQ ID NO: 7208; WAN024ATE; Start 1949; Stop 1973
ctaatacagccatcaaggacattaa

SEQ ID NO: 461567 - DNA, 25 bp, Artificial
  probe
  misc_feature (1)..(25): SEQ ID NO: 7208; WAN024ATE; Start 1632; Stop 1656
ccaagtgacgacagaatcttcttat

SEQ ID NO: 461568 - DNA, 25 bp, Artificial
  probe
  misc_feature (1)..(25): SEQ ID NO: 7208; WAN024ATE; Start 1639; Stop 1663
acgacagaatcttcttatacaatgc

SEQ ID NO: 461569 - DNA, 25 bp, Artificial
  probe
  misc_feature (1)..(25): SEQ ID NO: 7208; WAN024ATE; Start 1635; Stop 1659
agtgacgacagaatcttcttataca

SEQ ID NO: 461570 - DNA, 25 bp, Artificial
  probe
  misc_feature (1)..(25): SEQ ID NO: 7208; WAN024ATE; Start 1497; Stop 1521
tatcctctatgtaacggttcaacaa

SEQ ID NO: 461571 - DNA, 25 bp, Artificial
  probe
  misc_feature (1)..(25): SEQ ID NO: 7208; WAN024ATE; Start 1496; Stop 1520
ttatcctctatgtaacggttcaaca

SEQ ID NO: 461572 - DNA, 25 bp, Artificial
  probe
  misc_feature (1)..(25): SEQ ID NO: 7208; WAN024ATE; Start 40; Stop 64
gcggttattgatgagaactataagt

SEQ ID NO: 461573 - DNA, 25 bp, Artificial
  probe
  misc_feature (1)..(25): SEQ ID NO: 7208; WAN024ATE; Start 1627; Stop 1651
ttagaccaagtgacgacagaatctt

SEQ ID NO: 461574 - DNA, 25 bp, Artificial
  probe
  misc_feature (1)..(25): SEQ ID NO: 7208; WAN024ATE; Start 1498; Stop 1522
atcctctatgtaacggttcaacaac

SEQ ID NO: 461575 - DNA, 25 bp, Artificial
  probe
  misc_feature (1)..(25): SEQ ID NO: 7208; WAN024ATE; Start 26; Stop 50
cctataatgtctatgcggttattga

SEQ ID NO: 461576 - DNA, 25 bp, Artificial
  probe
  misc_feature (1)..(25): SEQ ID NO: 7208; WAN024ATE; Start 25; Stop 49
tcctataatgtctatgcggttattg

SEQ ID NO: 461577 - DNA, 25 bp, Artificial
  probe
  misc_feature (1)..(25): SEQ ID NO: 7208; WAN024ATE; Start 38; Stop 62
atgcggttattgatgagaactataa

SEQ ID NO: 461578 - DNA, 25 bp, Artificial
  probe
  misc_feature (1)..(25): SEQ ID NO: 7208; WAN024ATE; Start 29; Stop 53
ataatgtctatgcggttattgatga

SEQ ID NO: 461579 - DNA, 25 bp, Artificial
  probe
  misc_feature (1)..(25): SEQ ID NO: 7208; WAN024ATE; Start 1641; Stop 1665
gacagaatcttcttatacaatgcct

SEQ ID NO: 461580 - DNA, 25 bp, Artificial
  probe
  misc_feature (1)..(25): SEQ ID NO: 7208; WAN024ATE; Start 1636; Stop 1660
gtgacgacagaatcttcttatacaa

SEQ ID NO: 461581 - DNA, 25 bp, Artificial
  probe
  misc_feature (1)..(25): SEQ ID NO: 7208; WAN024ATE; Start 24; Stop 48
ctcctataatgtctatgcggttatt

SEQ ID NO: 461582 - DNA, 25 bp, Artificial
  probe
  misc_feature (1)..(25): SEQ ID NO: 7208; WAN024ATE; Start 1634; Stop 1658
aagtgacgacagaatcttcttatac

SEQ ID NO: 461583 - DNA, 25 bp, Artificial
  probe
  misc_feature (1)..(25): SEQ ID NO: 7208; WAN024ATE; Start 1633; Stop 1657
caagtgacgacagaatcttcttata

SEQ ID NO: 461584 - DNA, 25 bp, Artificial
  probe
  misc_feature (1)..(25): SEQ ID NO: 7208; WAN024ATE; Start 1628; Stop 1652
tagaccaagtgacgacagaatcttc

SEQ ID NO: 461585 - DNA, 25 bp, Artificial
  probe
  misc_feature (1)..(25): SEQ ID NO: 7208; WAN024ATE; Start 1631; Stop 1655
accaagtgacgacagaatcttctta

SEQ ID NO: 461586 - DNA, 25 bp, Artificial
  probe
  misc_feature (1)..(25): SEQ ID NO: 7208; WAN024ATE; Start 1598; Stop 1622
ctctcaatcttcaatctccagctaa

SEQ ID NO: 461587 - DNA, 25 bp, Artificial
  probe
  misc_feature (1)..(25): SEQ ID NO: 7208; WAN024ATE; Start 1657; Stop 1681
acaatgcctagtatcaaggacatat

SEQ ID NO: 461588 - DNA, 25 bp, Artificial
  probe
  misc_feature (1)..(25): SEQ ID NO: 7209; WAN024ATG; Start 815; Stop 839
gagaatacttcaatagcagcgaatt

SEQ ID NO: 461589 - DNA, 25 bp, Artificial
  probe
  misc_feature (1)..(25): SEQ ID NO: 7209; WAN024ATG; Start 1274; Stop 1298
gcttgactcggactaacatgatatt

SEQ ID NO: 461590 - DNA, 25 bp, Artificial
  probe
  misc_feature (1)..(25): SEQ ID NO: 7209; WAN024ATG; Start 816; Stop 840
agaatacttcaatagcagcgaatta

SEQ ID NO: 461591 - DNA, 25 bp, Artificial
  probe
  misc_feature (1)..(25): SEQ ID NO: 7209; WAN024ATG; Start 128; Stop 152
acaagtatctggacatggaagaatc

SEQ ID NO: 461592 - DNA, 25 bp, Artificial
  probe
  misc_feature (1)..(25): SEQ ID NO: 7209; WAN024ATG; Start 127; Stop 151
cacaagtatctggacatggaagaat

SEQ ID NO: 461593 - DNA, 25 bp, Artificial
  probe
  misc_feature (1)..(25): SEQ ID NO: 7209; WAN024ATG; Start 1348; Stop 1372
aagccaattataacagttccaggtc

SEQ ID NO: 461594 - DNA, 25 bp, Artificial
  probe
  misc_feature (1)..(25): SEQ ID NO: 7209; WAN024ATG; Start 1633; Stop 1657
caagtgacgacagagtcttcttatg

SEQ ID NO: 461595 - DNA, 25 bp, Artificial
  probe
  misc_feature (1)..(25): SEQ ID NO: 7209; WAN024ATG; Start 1632; Stop 1656
tcaagtgacgacagagtcttcttat

SEQ ID NO: 461596 - DNA, 25 bp, Artificial
  probe
  misc_feature (1)..(25): SEQ ID NO: 7209; WAN024ATG; Start 1631; Stop 1655
atcaagtgacgacagagtcttctta

SEQ ID NO: 461597 - DNA, 25 bp, Artificial
  probe
  misc_feature (1)..(25): SEQ ID NO: 7209; WAN024ATG; Start 1350; Stop 1374
gccaattataacagttccaggtcaa

SEQ ID NO: 461598 - DNA, 25 bp, Artificial
  probe
  misc_feature (1)..(25): SEQ ID NO: 7209; WAN024ATG; Start 817; Stop 841
gaatacttcaatagcagcgaattaa

SEQ ID NO: 461599 - DNA, 25 bp, Artificial
  probe
  misc_feature (1)..(25): SEQ ID NO: 7209; WAN024ATG; Start 126; Stop 150
tcacaagtatctggacatggaagaa

SEQ ID NO: 461600 - DNA, 25 bp, Artificial
  probe
  misc_feature (1)..(25): SEQ ID NO: 7209; WAN024ATG; Start 125; Stop 149
ttcacaagtatctggacatggaaga

SEQ ID NO: 461601 - DNA, 25 bp, Artificial
  probe
  misc_feature (1)..(25): SEQ ID NO: 7209; WAN024ATG; Start 970; Stop 994
ggagatactacttggttggattatc

SEQ ID NO: 461602 - DNA, 25 bp, Artificial
  probe
  misc_feature (1)..(25): SEQ ID NO: 7209; WAN024ATG; Start 1627; Stop 1651
ttagatcaagtgacgacagagtctt

SEQ ID NO: 461603 - DNA, 25 bp, Artificial
  probe
  misc_feature (1)..(25): SEQ ID NO: 7209; WAN024ATG; Start 1275; Stop 1299
cttgactcggactaacatgatatta

SEQ ID NO: 461604 - DNA, 25 bp, Artificial
  probe
  misc_feature (1)..(25): SEQ ID NO: 7209; WAN024ATG; Start 1349; Stop 1373
agccaattataacagttccaggtca

SEQ ID NO: 461605 - DNA, 25 bp, Artificial
  probe
  misc_feature (1)..(25): SEQ ID NO: 7209; WAN024ATG; Start 1273; Stop 1297
agcttgactcggactaacatgatat

SEQ ID NO: 461606 - DNA, 25 bp, Artificial
  probe
  misc_feature (1)..(25): SEQ ID NO: 7209; WAN024ATG; Start 968; Stop 992
tgggagatactacttggttggatta

SEQ ID NO: 461607 - DNA, 25 bp, Artificial
  probe
  misc_feature (1)..(25): SEQ ID NO: 7209; WAN024ATG; Start 969; Stop 993
gggagatactacttggttggattat

SEQ ID NO: 461608 - DNA, 25 bp, Artificial
  probe
  misc_feature (1)..(25): SEQ ID NO: 7209; WAN024ATG; Start 1628; Stop 1652
tagatcaagtgacgacagagtcttc

SEQ ID NO: 461609 - DNA, 25 bp, Artificial
  probe
  misc_feature (1)..(25): SEQ ID NO: 7209; WAN024ATG; Start 967; Stop 991
atgggagatactacttggttggatt

SEQ ID NO: 461610 - DNA, 25 bp, Artificial
  probe
  misc_feature (1)..(25): SEQ ID NO: 7209; WAN024ATG; Start 966; Stop 990
aatgggagatactacttggttggat

SEQ ID NO: 461611 - DNA, 25 bp, Artificial
  probe
  misc_feature (1)..(25): SEQ ID NO: 7209; WAN024ATG; Start 129; Stop 153
caagtatctggacatggaagaatcc

SEQ ID NO: 461612 - DNA, 25 bp, Artificial
  probe
  misc_feature (1)..(25): SEQ ID NO: 7209; WAN024ATG; Start 965; Stop 989
aaatgggagatactacttggttgga

SEQ ID NO: 461613 - DNA, 25 bp, Artificial
  probe
  misc_feature (1)..(25): SEQ ID NO: 7209; WAN024ATG; Start 1761; Stop 1785
atcatctgtagaagaagggaccaat

SEQ ID NO: 461614 - DNA, 25 bp, Artificial
  probe
  misc_feature (1)..(25): SEQ ID NO: 7209; WAN024ATG; Start 530; Stop 554
tttatacaacattatctagcccgct

SEQ ID NO: 461615 - DNA, 25 bp, Artificial
  probe
  misc_feature (1)..(25): SEQ ID NO: 7209; WAN024ATG; Start 531; Stop 555
ttatacaacattatctagcccgctc

SEQ ID NO: 461616 - DNA, 25 bp, Artificial
  probe
  misc_feature (1)..(25): SEQ ID NO: 7209; WAN024ATG; Start 1760; Stop 1784
aatcatctgtagaagaagggaccaa

SEQ ID NO: 461617 - DNA, 25 bp, Artificial
  probe
  misc_feature (1)..(25): SEQ ID NO: 7209; WAN024ATG; Start 1624; Stop 1648
aatttagatcaagtgacgacagagt

SEQ ID NO: 461618 - DNA, 25 bp, Artificial
  probe
  misc_feature (1)..(25): SEQ ID NO: 7209; WAN024ATG; Start 529; Stop 553
gtttatacaacattatctagcccgc

SEQ ID NO: 461619 - DNA, 25 bp, Artificial
  probe
  misc_feature (1)..(25): SEQ ID NO: 7209; WAN024ATG; Start 1623; Stop 1647
gaatttagatcaagtgacgacagag

SEQ ID NO: 461620 - DNA, 25 bp, Artificial
  probe
  misc_feature (1)..(25): SEQ ID NO: 7209; WAN024ATG; Start 1276; Stop 1300
ttgactcggactaacatgatattag

SEQ ID NO: 461621 - DNA, 25 bp, Artificial
  probe
  misc_feature (1)..(25): SEQ ID NO: 7210; WAN024AXV; Start 2; Stop 26
tcttgttgggaatagcggtaaacac

SEQ ID NO: 461622 - DNA, 25 bp, Artificial
  probe
  misc_feature (1)..(25): SEQ ID NO: 7210; WAN024AXV; Start 1; Stop 25
gtcttgttgggaatagcggtaaaca

SEQ ID NO: 461623 - DNA, 25 bp, Artificial
  probe
  misc_feature (1)..(25): SEQ ID NO: 7210; WAN024AXV; Start 4; Stop 28
ttgttgggaatagcggtaaacacag

SEQ ID NO: 461624 - DNA, 25 bp, Artificial
  probe
  misc_feature (1)..(25): SEQ ID NO: 7210; WAN024AXV; Start 3; Stop 27
cttgttgggaatagcggtaaacaca

SEQ ID NO: 461625 - DNA, 25 bp, Artificial
  probe
  misc_feature (1)..(25): SEQ ID NO: 7211; WAN024FN2; Start 780; Stop 804
tcaagatataccagatgatgcttct

SEQ ID NO: 461626 - DNA, 25 bp, Artificial
  probe
  misc_feature (1)..(25): SEQ ID NO: 7211; WAN024FN2; Start 783; Stop 807
agatataccagatgatgcttctact

SEQ ID NO: 461627 - DNA, 25 bp, Artificial
  probe
  misc_feature (1)..(25): SEQ ID NO: 7211; WAN024FN2; Start 779; Stop 803
ttcaagatataccagatgatgcttc

SEQ ID NO: 461628 - DNA, 25 bp, Artificial
  probe
  misc_feature (1)..(25): SEQ ID NO: 7211; WAN024FN2; Start 776; Stop 800
tgattcaagatataccagatgatgc

SEQ ID NO: 461629 - DNA, 25 bp, Artificial
  probe
  misc_feature (1)..(25): SEQ ID NO: 7211; WAN024FN2; Start 777; Stop 801
gattcaagatataccagatgatgct

SEQ ID NO: 461630 - DNA, 25 bp, Artificial
  probe
  misc_feature (1)..(25): SEQ ID NO: 7211; WAN024FN2; Start 838; Stop 862
atgcctgaagagataacggttgatt

SEQ ID NO: 461631 - DNA, 25 bp, Artificial
  probe
  misc_feature (1)..(25): SEQ ID NO: 7211; WAN024FN2; Start 520; Stop 544
gcaggaagtattactcgtatctatc

SEQ ID NO: 461632 - DNA, 25 bp, Artificial
  probe
  misc_feature (1)..(25): SEQ ID NO: 7211; WAN024FN2; Start 784; Stop 808
gatataccagatgatgcttctactt

SEQ ID NO: 461633 - DNA, 25 bp, Artificial
  probe
  misc_feature (1)..(25): SEQ ID NO: 7211; WAN024FN2; Start 782; Stop 806
aagatataccagatgatgcttctac

SEQ ID NO: 461634 - DNA, 25 bp, Artificial
  probe
  misc_feature (1)..(25): SEQ ID NO: 7211; WAN024FN2; Start 781; Stop 805
caagatataccagatgatgcttcta

SEQ ID NO: 461635 - DNA, 25 bp, Artificial
  probe
  misc_feature (1)..(25): SEQ ID NO: 7211; WAN024FN2; Start 778; Stop 802
attcaagatataccagatgatgctt

SEQ ID NO: 461636 - DNA, 25 bp, Artificial
  probe
  misc_feature (1)..(25): SEQ ID NO: 7211; WAN024FN2; Start 709; Stop 733
tattcggttaagaatcatcaagtgc

SEQ ID NO: 461637 - DNA, 25 bp, Artificial
  probe
  misc_feature (1)..(25): SEQ ID NO: 7211; WAN024FN2; Start 837; Stop 861
gatgcctgaagagataacggttgat

SEQ ID NO: 461638 - DNA, 25 bp, Artificial
  probe
  misc_feature (1)..(25): SEQ ID NO: 7211; WAN024FN2; Start 845; Stop 869
aagagataacggttgatttgattcg

SEQ ID NO: 461639 - DNA, 25 bp, Artificial
  probe
  misc_feature (1)..(25): SEQ ID NO: 7211; WAN024FN2; Start 798; Stop 822
tgcttctacttatttaatcgtccca

SEQ ID NO: 461640 - DNA, 25 bp, Artificial
  probe
  misc_feature (1)..(25): SEQ ID NO: 7211; WAN024FN2; Start 746; Stop 770
ttatgtatgttcactttaagcgtcg

SEQ ID NO: 461641 - DNA, 25 bp, Artificial
  probe
  misc_feature (1)..(25): SEQ ID NO: 7211; WAN024FN2; Start 787; Stop 811
ataccagatgatgcttctacttatt

SEQ ID NO: 461642 - DNA, 25 bp, Artificial
  probe
  misc_feature (1)..(25): SEQ ID NO: 7211; WAN024FN2; Start 53; Stop 77
cgcagttatggctaaattcttgtaa

SEQ ID NO: 461643 - DNA, 25 bp, Artificial
  probe
  misc_feature (1)..(25): SEQ ID NO: 7211; WAN024FN2; Start 50; Stop 74
atacgcagttatggctaaattcttg

SEQ ID NO: 461644 - DNA, 25 bp, Artificial
  probe
  misc_feature (1)..(25): SEQ ID NO: 7211; WAN024FN2; Start 842; Stop 866
ctgaagagataacggttgatttgat

SEQ ID NO: 461645 - DNA, 25 bp, Artificial
  probe
  misc_feature (1)..(25): SEQ ID NO: 7211; WAN024FN2; Start 841; Stop 865
cctgaagagataacggttgatttga

SEQ ID NO: 461646 - DNA, 25 bp, Artificial
  probe
  misc_feature (1)..(25): SEQ ID NO: 7211; WAN024FN2; Start 834; Stop 858
cttgatgcctgaagagataacggtt

SEQ ID NO: 461647 - DNA, 25 bp, Artificial
  probe
  misc_feature (1)..(25): SEQ ID NO: 7211; WAN024FN2; Start 52; Stop 76
acgcagttatggctaaattcttgta

SEQ ID NO: 461648 - DNA, 25 bp, Artificial
  probe
  misc_feature (1)..(25): SEQ ID NO: 7211; WAN024FN2; Start 51; Stop 75
tacgcagttatggctaaattcttgt

SEQ ID NO: 461649 - DNA, 25 bp, Artificial
  probe
  misc_feature (1)..(25): SEQ ID NO: 7211; WAN024FN2; Start 799; Stop 823
gcttctacttatttaatcgtcccaa

SEQ ID NO: 461650 - DNA, 25 bp, Artificial
  probe
  misc_feature (1)..(25): SEQ ID NO: 7211; WAN024FN2; Start 517; Stop 541
gttgcaggaagtattactcgtatct

SEQ ID NO: 461651 - DNA, 25 bp, Artificial
  probe
  misc_feature (1)..(25): SEQ ID NO: 7211; WAN024FN2; Start 515; Stop 539
atgttgcaggaagtattactcgtat

SEQ ID NO: 461652 - DNA, 25 bp, Artificial
  probe
  misc_feature (1)..(25): SEQ ID NO: 7211; WAN024FN2; Start 513; Stop 537
atatgttgcaggaagtattactcgt

SEQ ID NO: 461653 - DNA, 25 bp, Artificial
  probe
  misc_feature (1)..(25): SEQ ID NO: 7211; WAN024FN2; Start 843; Stop 867
tgaagagataacggttgatttgatt

SEQ ID NO: 461654 - DNA, 25 bp, Artificial
  probe
  misc_feature (1)..(25): SEQ ID NO: 7211; WAN024FN2; Start 516; Stop 540
tgttgcaggaagtattactcgtatc

SEQ ID NO: 461655 - DNA, 25 bp, Artificial
  probe
  misc_feature (1)..(25): SEQ ID NO: 7211; WAN024FN2; Start 442; Stop 466
gaattgtcgtctgatttgaatcgta

SEQ ID NO: 461656 - DNA, 25 bp, Artificial
  probe
  misc_feature (1)..(25): SEQ ID NO: 7211; WAN024FN2; Start 433; Stop 457
cgtagatttgaattgtcgtctgatt

SEQ ID NO: 461657 - DNA, 25 bp, Artificial
  probe
  misc_feature (1)..(25): SEQ ID NO: 7211; WAN024FN2; Start 711; Stop 735
ttcggttaagaatcatcaagtgcaa

SEQ ID NO: 461658 - DNA, 25 bp, Artificial
  probe
  misc_feature (1)..(25): SEQ ID NO: 7212; WAN024C3E; Start 310; Stop 334
ccaataagcaagagaaggttgagta

SEQ ID NO: 461659 - DNA, 25 bp, Artificial
  probe
  misc_feature (1)..(25): SEQ ID NO: 7212; WAN024C3E; Start 226; Stop 250
tggaatgatacaacagttctaggaa

SEQ ID NO: 461660 - DNA, 25 bp, Artificial
  probe
  misc_feature (1)..(25): SEQ ID NO: 7212; WAN024C3E; Start 311; Stop 335
caataagcaagagaaggttgagtaa

SEQ ID NO: 461661 - DNA, 25 bp, Artificial
  probe
  misc_feature (1)..(25): SEQ ID NO: 7212; WAN024C3E; Start 225; Stop 249
ttggaatgatacaacagttctagga

SEQ ID NO: 461662 - DNA, 25 bp, Artificial
  probe
  misc_feature (1)..(25): SEQ ID NO: 7212; WAN024C3E; Start 177; Stop 201
aagagaacttgatgaacttggttat

SEQ ID NO: 461663 - DNA, 25 bp, Artificial
  probe
  misc_feature (1)..(25): SEQ ID NO: 7212; WAN024C3E; Start 221; Stop 245
aacattggaatgatacaacagttct

SEQ ID NO: 461664 - DNA, 25 bp, Artificial
  probe
  misc_feature (1)..(25): SEQ ID NO: 7212; WAN024C3E; Start 219; Stop 243
agaacattggaatgatacaacagtt

SEQ ID NO: 461665 - DNA, 25 bp, Artificial
  probe
  misc_feature (1)..(25): SEQ ID NO: 7212; WAN024C3E; Start 209; Stop 233
caagaggattagaacattggaatga

SEQ ID NO: 461666 - DNA, 25 bp, Artificial
  probe
  misc_feature (1)..(25): SEQ ID NO: 7212; WAN024C3E; Start 224; Stop 248
attggaatgatacaacagttctagg

SEQ ID NO: 461667 - DNA, 25 bp, Artificial
  probe
  misc_feature (1)..(25): SEQ ID NO: 7212; WAN024C3E; Start 312; Stop 336
aataagcaagagaaggttgagtaat

SEQ ID NO: 461668 - DNA, 25 bp, Artificial
  probe
  misc_feature (1)..(25): SEQ ID NO: 7212; WAN024C3E; Start 227; Stop 251
ggaatgatacaacagttctaggaat

SEQ ID NO: 461669 - DNA, 25 bp, Artificial
  probe
  misc_feature (1)..(25): SEQ ID NO: 7212; WAN024C3E; Start 313; Stop 337
ataagcaagagaaggttgagtaatt

SEQ ID NO: 461670 - DNA, 25 bp, Artificial
  probe
  misc_feature (1)..(25): SEQ ID NO: 7212; WAN024C3E; Start 222; Stop 246
acattggaatgatacaacagttcta

SEQ ID NO: 461671 - DNA, 25 bp, Artificial
  probe
  misc_feature (1)..(25): SEQ ID NO: 7212; WAN024C3E; Start 218; Stop 242
tagaacattggaatgatacaacagt

SEQ ID NO: 461672 - DNA, 25 bp, Artificial
  probe
  misc_feature (1)..(25): SEQ ID NO: 7212; WAN024C3E; Start 210; Stop 234
aagaggattagaacattggaatgat

SEQ ID NO: 461673 - DNA, 25 bp, Artificial
  probe
  misc_feature (1)..(25): SEQ ID NO: 7212; WAN024C3E; Start 178; Stop 202
agagaacttgatgaacttggttata

SEQ ID NO: 461674 - DNA, 25 bp, Artificial
  probe
  misc_feature (1)..(25): SEQ ID NO: 7212; WAN024C3E; Start 213; Stop 237
aggattagaacattggaatgataca

SEQ ID NO: 461675 - DNA, 25 bp, Artificial
  probe
  misc_feature (1)..(25): SEQ ID NO: 7212; WAN024C3E; Start 223; Stop 247
cattggaatgatacaacagttctag

SEQ ID NO: 461676 - DNA, 25 bp, Artificial
  probe
  misc_feature (1)..(25): SEQ ID NO: 7212; WAN024C3E; Start 69; Stop 93
tgattatgatgtagaaaccaagcag

SEQ ID NO: 461677 - DNA, 25 bp, Artificial
  probe
  misc_feature (1)..(25): SEQ ID NO: 7212; WAN024C3E; Start 203; Stop 227
aatcgccaagaggattagaacattg

SEQ ID NO: 461678 - DNA, 25 bp, Artificial
  probe
  misc_feature (1)..(25): SEQ ID NO: 7212; WAN024C3E; Start 70; Stop 94
gattatgatgtagaaaccaagcaga

SEQ ID NO: 461679 - DNA, 25 bp, Artificial
  probe
  misc_feature (1)..(25): SEQ ID NO: 7212; WAN024C3E; Start 228; Stop 252
gaatgatacaacagttctaggaatc

SEQ ID NO: 461680 - DNA, 25 bp, Artificial
  probe
  misc_feature (1)..(25): SEQ ID NO: 7212; WAN024C3E; Start 212; Stop 236
gaggattagaacattggaatgatac

SEQ ID NO: 461681 - DNA, 25 bp, Artificial
  probe
  misc_feature (1)..(25): SEQ ID NO: 7212; WAN024C3E; Start 298; Stop 322
tttacagttgacccaataagcaaga

SEQ ID NO: 461682 - DNA, 25 bp, Artificial
  probe
  misc_feature (1)..(25): SEQ ID NO: 7212; WAN024C3E; Start 217; Stop 241
ttagaacattggaatgatacaacag

SEQ ID NO: 461683 - DNA, 25 bp, Artificial
  probe
  misc_feature (1)..(25): SEQ ID NO: 7212; WAN024C3E; Start 72; Stop 96
ttatgatgtagaaaccaagcagatt

SEQ ID NO: 461684 - DNA, 25 bp, Artificial
  probe
  misc_feature (1)..(25): SEQ ID NO: 7212; WAN024C3E; Start 68; Stop 92
atgattatgatgtagaaaccaagca

SEQ ID NO: 461685 - DNA, 25 bp, Artificial
  probe
  misc_feature (1)..(25): SEQ ID NO: 7212; WAN024C3E; Start 73; Stop 97
tatgatgtagaaaccaagcagattt

SEQ ID NO: 461686 - DNA, 25 bp, Artificial
  probe
  misc_feature (1)..(25): SEQ ID NO: 7212; WAN024C3E; Start 211; Stop 235
agaggattagaacattggaatgata

SEQ ID NO: 461687 - DNA, 25 bp, Artificial
  probe
  misc_feature (1)..(25): SEQ ID NO: 7212; WAN024C3E; Start 299; Stop 323
ttacagttgacccaataagcaagag

SEQ ID NO: 461688 - DNA, 25 bp, Artificial
  probe
  misc_feature (1)..(25): SEQ ID NO: 7212; WAN024C3E; Start 71; Stop 95
attatgatgtagaaaccaagcagat

SEQ ID NO: 461689 - DNA, 25 bp, Artificial
  probe
  misc_feature (1)..(25): SEQ ID NO: 7212; WAN024C3E; Start 214; Stop 238
ggattagaacattggaatgatacaa

SEQ ID NO: 461690 - DNA, 25 bp, Artificial
  probe
  misc_feature (1)..(25): SEQ ID NO: 7212; WAN024C3E; Start 18; Stop 42
aatgaagatggaacgtggtgaattg

SEQ ID NO: 461691 - DNA, 25 bp, Artificial
  probe
  misc_feature (1)..(25): SEQ ID NO: 7213; WAN024BPV; Start 26; Stop 50
tgatgacaacatacaatggagaaga

SEQ ID NO: 461692 - DNA, 25 bp, Artificial
  probe
  misc_feature (1)..(25): SEQ ID NO: 7213; WAN024BPV; Start 27; Stop 51
gatgacaacatacaatggagaagaa

SEQ ID NO: 461693 - DNA, 25 bp, Artificial
  probe
  misc_feature (1)..(25): SEQ ID NO: 7213; WAN024BPV; Start 25; Stop 49
atgatgacaacatacaatggagaag

SEQ ID NO: 461694 - DNA, 25 bp, Artificial
  probe
  misc_feature (1)..(25): SEQ ID NO: 7213; WAN024BPV; Start 29; Stop 53
tgacaacatacaatggagaagaatt

SEQ ID NO: 461695 - DNA, 25 bp, Artificial
  probe
  misc_feature (1)..(25): SEQ ID NO: 7213; WAN024BPV; Start 28; Stop 52
atgacaacatacaatggagaagaat

SEQ ID NO: 461696 - DNA, 25 bp, Artificial
  probe
  misc_feature (1)..(25): SEQ ID NO: 7213; WAN024BPV; Start 24; Stop 48
tatgatgacaacatacaatggagaa

SEQ ID NO: 461697 - DNA, 25 bp, Artificial
  probe
  misc_feature (1)..(25): SEQ ID NO: 7213; WAN024BPV; Start 23; Stop 47
ttatgatgacaacatacaatggaga

SEQ ID NO: 461698 - DNA, 25 bp, Artificial
  probe
  misc_feature (1)..(25): SEQ ID NO: 7213; WAN024BPV; Start 54; Stop 78
tatacgtgaacagttggagagtatc

SEQ ID NO: 461699 - DNA, 25 bp, Artificial
  probe
  misc_feature (1)..(25): SEQ ID NO: 7213; WAN024BPV; Start 53; Stop 77
ttatacgtgaacagttggagagtat

SEQ ID NO: 461700 - DNA, 25 bp, Artificial
  probe
  misc_feature (1)..(25): SEQ ID NO: 7213; WAN024BPV; Start 22; Stop 46
attatgatgacaacatacaatggag

SEQ ID NO: 461701 - DNA, 25 bp, Artificial
  probe
  misc_feature (1)..(25): SEQ ID NO: 7213; WAN024BPV; Start 30; Stop 54
gacaacatacaatggagaagaattt

SEQ ID NO: 461702 - DNA, 25 bp, Artificial
  probe
  misc_feature (1)..(25): SEQ ID NO: 7213; WAN024BPV; Start 21; Stop 45
aattatgatgacaacatacaatgga

SEQ ID NO: 461703 - DNA, 25 bp, Artificial
  probe
  misc_feature (1)..(25): SEQ ID NO: 7213; WAN024BPV; Start 51; Stop 75
atttatacgtgaacagttggagagt

SEQ ID NO: 461704 - DNA, 25 bp, Artificial
  probe
  misc_feature (1)..(25): SEQ ID NO: 7213; WAN024BPV; Start 52; Stop 76
tttatacgtgaacagttggagagta

SEQ ID NO: 461705 - DNA, 25 bp, Artificial
  probe
  misc_feature (1)..(25): SEQ ID NO: 7213; WAN024BPV; Start 55; Stop 79
atacgtgaacagttggagagtatcc

SEQ ID NO: 461706 - DNA, 25 bp, Artificial
  probe
  misc_feature (1)..(25): SEQ ID NO: 7213; WAN024BPV; Start 50; Stop 74
aatttatacgtgaacagttggagag

SEQ ID NO: 461707 - DNA, 25 bp, Artificial
  probe
  misc_feature (1)..(25): SEQ ID NO: 7213; WAN024BPV; Start 49; Stop 73
gaatttatacgtgaacagttggaga

SEQ ID NO: 461708 - DNA, 25 bp, Artificial
  probe
  misc_feature (1)..(25): SEQ ID NO: 7213; WAN024BPV; Start 48; Stop 72
agaatttatacgtgaacagttggag

SEQ ID NO: 461709 - DNA, 25 bp, Artificial
  probe
  misc_feature (1)..(25): SEQ ID NO: 7213; WAN024BPV; Start 43; Stop 67
ggagaagaatttatacgtgaacagt

SEQ ID NO: 461710 - DNA, 25 bp, Artificial
  probe
  misc_feature (1)..(25): SEQ ID NO: 7213; WAN024BPV; Start 42; Stop 66
tggagaagaatttatacgtgaacag

SEQ ID NO: 461711 - DNA, 25 bp, Artificial
  probe
  misc_feature (1)..(25): SEQ ID NO: 7213; WAN024BPV; Start 47; Stop 71
aagaatttatacgtgaacagttgga

SEQ ID NO: 461712 - DNA, 25 bp, Artificial
  probe
  misc_feature (1)..(25): SEQ ID NO: 7213; WAN024BPV; Start 46; Stop 70
gaagaatttatacgtgaacagttgg

SEQ ID NO: 461713 - DNA, 25 bp, Artificial
  probe
  misc_feature (1)..(25): SEQ ID NO: 7213; WAN024BPV; Start 41; Stop 65
atggagaagaatttatacgtgaaca

SEQ ID NO: 461714 - DNA, 25 bp, Artificial
  probe
  misc_feature (1)..(25): SEQ ID NO: 7213; WAN024BPV; Start 38; Stop 62
acaatggagaagaatttatacgtga

SEQ ID NO: 461715 - DNA, 25 bp, Artificial
  probe
  misc_feature (1)..(25): SEQ ID NO: 7213; WAN024BPV; Start 56; Stop 80
tacgtgaacagttggagagtatcct

SEQ ID NO: 461716 - DNA, 25 bp, Artificial
  probe
  misc_feature (1)..(25): SEQ ID NO: 7213; WAN024BPV; Start 58; Stop 82
cgtgaacagttggagagtatccttt

SEQ ID NO: 461717 - DNA, 25 bp, Artificial
  probe
  misc_feature (1)..(25): SEQ ID NO: 7213; WAN024BPV; Start 31; Stop 55
acaacatacaatggagaagaattta

SEQ ID NO: 461718 - DNA, 25 bp, Artificial
  probe
  misc_feature (1)..(25): SEQ ID NO: 7213; WAN024BPV; Start 45; Stop 69
agaagaatttatacgtgaacagttg

SEQ ID NO: 461719 - DNA, 25 bp, Artificial
  probe
  misc_feature (1)..(25): SEQ ID NO: 7213; WAN024BPV; Start 40; Stop 64
aatggagaagaatttatacgtgaac

SEQ ID NO: 461720 - DNA, 25 bp, Artificial
  probe
  misc_feature (1)..(25): SEQ ID NO: 7213; WAN024BPV; Start 39; Stop 63
caatggagaagaatttatacgtgaa

SEQ ID NO: 461721 - DNA, 25 bp, Artificial
  probe
  misc_feature (1)..(25): SEQ ID NO: 7213; WAN024BPV; Start 44; Stop 68
gagaagaatttatacgtgaacagtt

SEQ ID NO: 461722 - DNA, 25 bp, Artificial
  probe
  misc_feature (1)..(25): SEQ ID NO: 7213; WAN024BPV; Start 57; Stop 81
acgtgaacagttggagagtatcctt

SEQ ID NO: 461723 - DNA, 25 bp, Artificial
  probe
  misc_feature (1)..(25): SEQ ID NO: 7213; WAN024BPV; Start 37; Stop 61
tacaatggagaagaatttatacgtg

SEQ ID NO: 461724 - DNA, 25 bp, Artificial
  probe
  misc_feature (1)..(25): SEQ ID NO: 7214; WAN024BQK; Start 385; Stop 409
gctgatatgcggattatagatgcta

SEQ ID NO: 461725 - DNA, 25 bp, Artificial
  probe
  misc_feature (1)..(25): SEQ ID NO: 7214; WAN024BQK; Start 919; Stop 943
aatcgtgttaagactataagcaggt

SEQ ID NO: 461726 - DNA, 25 bp, Artificial
  probe
  misc_feature (1)..(25): SEQ ID NO: 7214; WAN024BQK; Start 389; Stop 413
atatgcggattatagatgctaacgg

SEQ ID NO: 461727 - DNA, 25 bp, Artificial
  probe
  misc_feature (1)..(25): SEQ ID NO: 7214; WAN024BQK; Start 388; Stop 412
gatatgcggattatagatgctaacg

SEQ ID NO: 461728 - DNA, 25 bp, Artificial
  probe
  misc_feature (1)..(25): SEQ ID NO: 7214; WAN024BQK; Start 54; Stop 78
tcttcgtgaacagttggatagtatc

SEQ ID NO: 461729 - DNA, 25 bp, Artificial
  probe
  misc_feature (1)..(25): SEQ ID NO: 7214; WAN024BQK; Start 53; Stop 77
ttcttcgtgaacagttggatagtat

SEQ ID NO: 461730 - DNA, 25 bp, Artificial
  probe
  misc_feature (1)..(25): SEQ ID NO: 7214; WAN024BQK; Start 391; Stop 415
atgcggattatagatgctaacggta

SEQ ID NO: 461731 - DNA, 25 bp, Artificial
  probe
  misc_feature (1)..(25): SEQ ID NO: 7214; WAN024BQK; Start 390; Stop 414
tatgcggattatagatgctaacggt

SEQ ID NO: 461732 - DNA, 25 bp, Artificial
  probe
  misc_feature (1)..(25): SEQ ID NO: 7214; WAN024BQK; Start 387; Stop 411
tgatatgcggattatagatgctaac

SEQ ID NO: 461733 - DNA, 25 bp, Artificial
  probe
  misc_feature (1)..(25): SEQ ID NO: 7214; WAN024BQK; Start 810; Stop 834
aacaagtattgacactgaactccta

SEQ ID NO: 461734 - DNA, 25 bp, Artificial
  probe
  misc_feature (1)..(25): SEQ ID NO: 7214; WAN024BQK; Start 561; Stop 585
tccagaattagccttcctatcacat

SEQ ID NO: 461735 - DNA, 25 bp, Artificial
  probe
  misc_feature (1)..(25): SEQ ID NO: 7214; WAN024BQK; Start 811; Stop 835
acaagtattgacactgaactcctat

SEQ ID NO: 461736 - DNA, 25 bp, Artificial
  probe
  misc_feature (1)..(25): SEQ ID NO: 7214; WAN024BQK; Start 110; Stop 134
tgattcgtgatgataattccaatga

SEQ ID NO: 461737 - DNA, 25 bp, Artificial
  probe
  misc_feature (1)..(25): SEQ ID NO: 7214; WAN024BQK; Start 108; Stop 132
actgattcgtgatgataattccaat

SEQ ID NO: 461738 - DNA, 25 bp, Artificial
  probe
  misc_feature (1)..(25): SEQ ID NO: 7214; WAN024BQK; Start 392; Stop 416
tgcggattatagatgctaacggtaa

SEQ ID NO: 461739 - DNA, 25 bp, Artificial
  probe
  misc_feature (1)..(25): SEQ ID NO: 7214; WAN024BQK; Start 106; Stop 130
ctactgattcgtgatgataattcca

SEQ ID NO: 461740 - DNA, 25 bp, Artificial
  probe
  misc_feature (1)..(25): SEQ ID NO: 7214; WAN024BQK; Start 105; Stop 129
actactgattcgtgatgataattcc

SEQ ID NO: 461741 - DNA, 25 bp, Artificial
  probe
  misc_feature (1)..(25): SEQ ID NO: 7214; WAN024BQK; Start 102; Stop 126
ggaactactgattcgtgatgataat

SEQ ID NO: 461742 - DNA, 25 bp, Artificial
  probe
  misc_feature (1)..(25): SEQ ID NO: 7214; WAN024BQK; Start 109; Stop 133
ctgattcgtgatgataattccaatg

SEQ ID NO: 461743 - DNA, 25 bp, Artificial
  probe
  misc_feature (1)..(25): SEQ ID NO: 7214; WAN024BQK; Start 386; Stop 410
ctgatatgcggattatagatgctaa

SEQ ID NO: 461744 - DNA, 25 bp, Artificial
  probe
  misc_feature (1)..(25): SEQ ID NO: 7214; WAN024BQK; Start 639; Stop 663
tgagcctactatgagttatagacga

SEQ ID NO: 461745 - DNA, 25 bp, Artificial
  probe
  misc_feature (1)..(25): SEQ ID NO: 7214; WAN024BQK; Start 560; Stop 584
ctccagaattagccttcctatcaca

SEQ ID NO: 461746 - DNA, 25 bp, Artificial
  probe
  misc_feature (1)..(25): SEQ ID NO: 7214; WAN024BQK; Start 563; Stop 587
cagaattagccttcctatcacatga

SEQ ID NO: 461747 - DNA, 25 bp, Artificial
  probe
  misc_feature (1)..(25): SEQ ID NO: 7214; WAN024BQK; Start 198; Stop 222
catatcggaatatcatggagcctat

SEQ ID NO: 461748 - DNA, 25 bp, Artificial
  probe
  misc_feature (1)..(25): SEQ ID NO: 7214; WAN024BQK; Start 812; Stop 836
caagtattgacactgaactcctatt

SEQ ID NO: 461749 - DNA, 25 bp, Artificial
  probe
  misc_feature (1)..(25): SEQ ID NO: 7214; WAN024BQK; Start 920; Stop 944
atcgtgttaagactataagcaggtc

SEQ ID NO: 461750 - DNA, 25 bp, Artificial
  probe
  misc_feature (1)..(25): SEQ ID NO: 7214; WAN024BQK; Start 638; Stop 662
atgagcctactatgagttatagacg

SEQ ID NO: 461751 - DNA, 25 bp, Artificial
  probe
  misc_feature (1)..(25): SEQ ID NO: 7214; WAN024BQK; Start 547; Stop 571
cttccatgttatgctccagaattag

SEQ ID NO: 461752 - DNA, 25 bp, Artificial
  probe
  misc_feature (1)..(25): SEQ ID NO: 7214; WAN024BQK; Start 107; Stop 131
tactgattcgtgatgataattccaa

SEQ ID NO: 461753 - DNA, 25 bp, Artificial
  probe
  misc_feature (1)..(25): SEQ ID NO: 7214; WAN024BQK; Start 546; Stop 570
ccttccatgttatgctccagaatta

SEQ ID NO: 461754 - DNA, 25 bp, Artificial
  probe
  misc_feature (1)..(25): SEQ ID NO: 7214; WAN024BQK; Start 564; Stop 588
agaattagccttcctatcacatgat

SEQ ID NO: 461755 - DNA, 25 bp, Artificial
  probe
  misc_feature (1)..(25): SEQ ID NO: 7214; WAN024BQK; Start 197; Stop 221
acatatcggaatatcatggagccta

SEQ ID NO: 461756 - DNA, 25 bp, Artificial
  probe
  misc_feature (1)..(25): SEQ ID NO: 7214; WAN024BQK; Start 640; Stop 664
gagcctactatgagttatagacgat

SEQ ID NO: 461757 - DNA, 25 bp, Artificial
  probe
  misc_feature (1)..(25): SEQ ID NO: 7215; WAN024DJD; Start 30; Stop 54
cgttggattgtctatctcagttcta

SEQ ID NO: 461758 - DNA, 25 bp, Artificial
  probe
  misc_feature (1)..(25): SEQ ID NO: 7215; WAN024DJD; Start 473; Stop 497
taattgttggacttgatatggacga

SEQ ID NO: 461759 - DNA, 25 bp, Artificial
  probe
  misc_feature (1)..(25): SEQ ID NO: 7215; WAN024DJD; Start 466; Stop 490
agccgtataattgttggacttgata

SEQ ID NO: 461760 - DNA, 25 bp, Artificial
  probe
  misc_feature (1)..(25): SEQ ID NO: 7215; WAN024DJD; Start 465; Stop 489
tagccgtataattgttggacttgat

SEQ ID NO: 461761 - DNA, 25 bp, Artificial
  probe
  misc_feature (1)..(25): SEQ ID NO: 7215; WAN024DJD; Start 474; Stop 498
aattgttggacttgatatggacgat

SEQ ID NO: 461762 - DNA, 25 bp, Artificial
  probe
  misc_feature (1)..(25): SEQ ID NO: 7215; WAN024DJD; Start 467; Stop 491
gccgtataattgttggacttgatat

SEQ ID NO: 461763 - DNA, 25 bp, Artificial
  probe
  misc_feature (1)..(25): SEQ ID NO: 7215; WAN024DJD; Start 472; Stop 496
ataattgttggacttgatatggacg

SEQ ID NO: 461764 - DNA, 25 bp, Artificial
  probe
  misc_feature (1)..(25): SEQ ID NO: 7215; WAN024DJD; Start 44; Stop 68
tctcagttctattatctcagcatca

SEQ ID NO: 461765 - DNA, 25 bp, Artificial
  probe
  misc_feature (1)..(25): SEQ ID NO: 7215; WAN024DJD; Start 475; Stop 499
attgttggacttgatatggacgatg

SEQ ID NO: 461766 - DNA, 25 bp, Artificial
  probe
  misc_feature (1)..(25): SEQ ID NO: 7215; WAN024DJD; Start 464; Stop 488
ctagccgtataattgttggacttga

SEQ ID NO: 461767 - DNA, 25 bp, Artificial
  probe
  misc_feature (1)..(25): SEQ ID NO: 7215; WAN024DJD; Start 463; Stop 487
cctagccgtataattgttggacttg

SEQ ID NO: 461768 - DNA, 25 bp, Artificial
  probe
  misc_feature (1)..(25): SEQ ID NO: 7215; WAN024DJD; Start 45; Stop 69
ctcagttctattatctcagcatcat

SEQ ID NO: 461769 - DNA, 25 bp, Artificial
  probe
  misc_feature (1)..(25): SEQ ID NO: 7215; WAN024DJD; Start 31; Stop 55
gttggattgtctatctcagttctat

SEQ ID NO: 461770 - DNA, 25 bp, Artificial
  probe
  misc_feature (1)..(25): SEQ ID NO: 7215; WAN024DJD; Start 43; Stop 67
atctcagttctattatctcagcatc

SEQ ID NO: 461771 - DNA, 25 bp, Artificial
  probe
  misc_feature (1)..(25): SEQ ID NO: 7215; WAN024DJD; Start 469; Stop 493
cgtataattgttggacttgatatgg

SEQ ID NO: 461772 - DNA, 25 bp, Artificial
  probe
  misc_feature (1)..(25): SEQ ID NO: 7215; WAN024DJD; Start 468; Stop 492
ccgtataattgttggacttgatatg

SEQ ID NO: 461773 - DNA, 25 bp, Artificial
  probe
  misc_feature (1)..(25): SEQ ID NO: 7215; WAN024DJD; Start 460; Stop 484
tatcctagccgtataattgttggac

SEQ ID NO: 461774 - DNA, 25 bp, Artificial
  probe
  misc_feature (1)..(25): SEQ ID NO: 7215; WAN024DJD; Start 46; Stop 70
tcagttctattatctcagcatcatg

SEQ ID NO: 461775 - DNA, 25 bp, Artificial
  probe
  misc_feature (1)..(25): SEQ ID NO: 7215; WAN024DJD; Start 839; Stop 863
cagctattgttgagagtaatcgtac

SEQ ID NO: 461776 - DNA, 25 bp, Artificial
  probe
  misc_feature (1)..(25): SEQ ID NO: 7215; WAN024DJD; Start 459; Stop 483
atatcctagccgtataattgttgga

SEQ ID NO: 461777 - DNA, 25 bp, Artificial
  probe
  misc_feature (1)..(25): SEQ ID NO: 7215; WAN024DJD; Start 41; Stop 65
ctatctcagttctattatctcagca

SEQ ID NO: 461778 - DNA, 25 bp, Artificial
  probe
  misc_feature (1)..(25): SEQ ID NO: 7215; WAN024DJD; Start 28; Stop 52
tacgttggattgtctatctcagttc

SEQ ID NO: 461779 - DNA, 25 bp, Artificial
  probe
  misc_feature (1)..(25): SEQ ID NO: 7215; WAN024DJD; Start 461; Stop 485
atcctagccgtataattgttggact

SEQ ID NO: 461780 - DNA, 25 bp, Artificial
  probe
  misc_feature (1)..(25): SEQ ID NO: 7215; WAN024DJD; Start 1028; Stop 1052
aggcagaaggtgtaaatgtcataat

SEQ ID NO: 461781 - DNA, 25 bp, Artificial
  probe
  misc_feature (1)..(25): SEQ ID NO: 7215; WAN024DJD; Start 27; Stop 51
atacgttggattgtctatctcagtt

SEQ ID NO: 461782 - DNA, 25 bp, Artificial
  probe
  misc_feature (1)..(25): SEQ ID NO: 7215; WAN024DJD; Start 1027; Stop 1051
aaggcagaaggtgtaaatgtcataa

SEQ ID NO: 461783 - DNA, 25 bp, Artificial
  probe
  misc_feature (1)..(25): SEQ ID NO: 7215; WAN024DJD; Start 1026; Stop 1050
aaaggcagaaggtgtaaatgtcata

SEQ ID NO: 461784 - DNA, 25 bp, Artificial
  probe
  misc_feature (1)..(25): SEQ ID NO: 7215; WAN024DJD; Start 1025; Stop 1049
taaaggcagaaggtgtaaatgtcat

SEQ ID NO: 461785 - DNA, 25 bp, Artificial
  probe
  misc_feature (1)..(25): SEQ ID NO: 7215; WAN024DJD; Start 359; Stop 383
ctgtaggatatactcaatgggttcg

SEQ ID NO: 461786 - DNA, 25 bp, Artificial
  probe
  misc_feature (1)..(25): SEQ ID NO: 7215; WAN024DJD; Start 32; Stop 56
ttggattgtctatctcagttctatt

SEQ ID NO: 461787 - DNA, 25 bp, Artificial
  probe
  misc_feature (1)..(25): SEQ ID NO: 7215; WAN024DJD; Start 1013; Stop 1037
ttatgaaacgattaaaggcagaagg

SEQ ID NO: 461788 - DNA, 25 bp, Artificial
  probe
  misc_feature (1)..(25): SEQ ID NO: 7215; WAN024DJD; Start 1023; Stop 1047
attaaaggcagaaggtgtaaatgtc

SEQ ID NO: 461789 - DNA, 25 bp, Artificial
  probe
  misc_feature (1)..(25): SEQ ID NO: 7215; WAN024DJD; Start 1022; Stop 1046
gattaaaggcagaaggtgtaaatgt

SEQ ID NO: 461790 - DNA, 25 bp, Artificial
  probe
  misc_feature (1)..(25): SEQ ID NO: 7216; WAN024F8J; Start 16; Stop 40
gaggtgaaagatgctagaagtaaga

SEQ ID NO: 461791 - DNA, 25 bp, Artificial
  probe
  misc_feature (1)..(25): SEQ ID NO: 7216; WAN024F8J; Start 17; Stop 41
aggtgaaagatgctagaagtaagaa

SEQ ID NO: 461792 - DNA, 25 bp, Artificial
  probe
  misc_feature (1)..(25): SEQ ID NO: 7216; WAN024F8J; Start 15; Stop 39
ggaggtgaaagatgctagaagtaag

SEQ ID NO: 461793 - DNA, 25 bp, Artificial
  probe
  misc_feature (1)..(25): SEQ ID NO: 7216; WAN024F8J; Start 18; Stop 42
ggtgaaagatgctagaagtaagaag

SEQ ID NO: 461794 - DNA, 25 bp, Artificial
  probe
  misc_feature (1)..(25): SEQ ID NO: 7216; WAN024F8J; Start 19; Stop 43
gtgaaagatgctagaagtaagaagt

SEQ ID NO: 461795 - DNA, 25 bp, Artificial
  probe
  misc_feature (1)..(25): SEQ ID NO: 7216; WAN024F8J; Start 20; Stop 44
tgaaagatgctagaagtaagaagtc

SEQ ID NO: 461796 - DNA, 25 bp, Artificial
  probe
  misc_feature (1)..(25): SEQ ID NO: 7216; WAN024F8J; Start 14; Stop 38
cggaggtgaaagatgctagaagtaa

SEQ ID NO: 461797 - DNA, 25 bp, Artificial
  probe
  misc_feature (1)..(25): SEQ ID NO: 7216; WAN024F8J; Start 21; Stop 45
gaaagatgctagaagtaagaagtct

SEQ ID NO: 461798 - DNA, 25 bp, Artificial
  probe
  misc_feature (1)..(25): SEQ ID NO: 7216; WAN024F8J; Start 13; Stop 37
tcggaggtgaaagatgctagaagta

SEQ ID NO: 461799 - DNA, 25 bp, Artificial
  probe
  misc_feature (1)..(25): SEQ ID NO: 7216; WAN024F8J; Start 10; Stop 34
atttcggaggtgaaagatgctagaa

SEQ ID NO: 461800 - DNA, 25 bp, Artificial
  probe
  misc_feature (1)..(25): SEQ ID NO: 7216; WAN024F8J; Start 9; Stop 33
aatttcggaggtgaaagatgctaga

SEQ ID NO: 461801 - DNA, 25 bp, Artificial
  probe
  misc_feature (1)..(25): SEQ ID NO: 7216; WAN024F8J; Start 12; Stop 36
ttcggaggtgaaagatgctagaagt

SEQ ID NO: 461802 - DNA, 25 bp, Artificial
  probe
  misc_feature (1)..(25): SEQ ID NO: 7216; WAN024F8J; Start 11; Stop 35
tttcggaggtgaaagatgctagaag

SEQ ID NO: 461803 - DNA, 25 bp, Artificial
  probe
  misc_feature (1)..(25): SEQ ID NO: 7216; WAN024F8J; Start 22; Stop 46
aaagatgctagaagtaagaagtcta

SEQ ID NO: 461804 - DNA, 25 bp, Artificial
  probe
  misc_feature (1)..(25): SEQ ID NO: 7216; WAN024F8J; Start 8; Stop 32
aaatttcggaggtgaaagatgctag

SEQ ID NO: 461805 - DNA, 25 bp, Artificial
  probe
  misc_feature (1)..(25): SEQ ID NO: 7216; WAN024F8J; Start 23; Stop 47
aagatgctagaagtaagaagtctag

SEQ ID NO: 461806 - DNA, 25 bp, Artificial
  probe
  misc_feature (1)..(25): SEQ ID NO: 7216; WAN024F8J; Start 37; Stop 61
aagaagtctagagaaaagttttgga

SEQ ID NO: 461807 - DNA, 25 bp, Artificial
  probe
  misc_feature (1)..(25): SEQ ID NO: 7216; WAN024F8J; Start 38; Stop 62
agaagtctagagaaaagttttggat

SEQ ID NO: 461808 - DNA, 25 bp, Artificial
  probe
  misc_feature (1)..(25): SEQ ID NO: 7216; WAN024F8J; Start 39; Stop 63
gaagtctagagaaaagttttggatc

SEQ ID NO: 461809 - DNA, 25 bp, Artificial
  probe
  misc_feature (1)..(25): SEQ ID NO: 7216; WAN024F8J; Start 24; Stop 48
agatgctagaagtaagaagtctaga

SEQ ID NO: 461810 - DNA, 25 bp, Artificial
  probe
  misc_feature (1)..(25): SEQ ID NO: 7216; WAN024F8J; Start 25; Stop 49
gatgctagaagtaagaagtctagag

SEQ ID NO: 461811 - DNA, 25 bp, Artificial
  probe
  misc_feature (1)..(25): SEQ ID NO: 7216; WAN024F8J; Start 60; Stop 84
gatccaagcaagttttgtttggtat

SEQ ID NO: 461812 - DNA, 25 bp, Artificial
  probe
  misc_feature (1)..(25): SEQ ID NO: 7216; WAN024F8J; Start 40; Stop 64
aagtctagagaaaagttttggatcc

SEQ ID NO: 461813 - DNA, 25 bp, Artificial
  probe
  misc_feature (1)..(25): SEQ ID NO: 7216; WAN024F8J; Start 59; Stop 83
ggatccaagcaagttttgtttggta

SEQ ID NO: 461814 - DNA, 25 bp, Artificial
  probe
  misc_feature (1)..(25): SEQ ID NO: 7217; WAN024CVI; Start 69; Stop 93
ctcaaaaggaaaacgaaaggctata

SEQ ID NO: 461815 - DNA, 25 bp, Artificial
  probe
  misc_feature (1)..(25): SEQ ID NO: 7217; WAN024CVI; Start 70; Stop 94
tcaaaaggaaaacgaaaggctatat

SEQ ID NO: 461816 - DNA, 25 bp, Artificial
  probe
  misc_feature (1)..(25): SEQ ID NO: 7217; WAN024CVI; Start 24; Stop 48
caccagtaaaatagcaaccatcgta

SEQ ID NO: 461817 - DNA, 25 bp, Artificial
  probe
  misc_feature (1)..(25): SEQ ID NO: 7217; WAN024CVI; Start 71; Stop 95
caaaaggaaaacgaaaggctatatt

SEQ ID NO: 461818 - DNA, 25 bp, Artificial
  probe
  misc_feature (1)..(25): SEQ ID NO: 7217; WAN024CVI; Start 25; Stop 49
accagtaaaatagcaaccatcgtac

SEQ ID NO: 461819 - DNA, 25 bp, Artificial
  probe
  misc_feature (1)..(25): SEQ ID NO: 7217; WAN024CVI; Start 101; Stop 125
acatgaaaagcatcaagagactaga

SEQ ID NO: 461820 - DNA, 25 bp, Artificial
  probe
  misc_feature (1)..(25): SEQ ID NO: 7217; WAN024CVI; Start 104; Stop 128
tgaaaagcatcaagagactagaaaa

SEQ ID NO: 461821 - DNA, 25 bp, Artificial
  probe
  misc_feature (1)..(25): SEQ ID NO: 7217; WAN024CVI; Start 72; Stop 96
aaaaggaaaacgaaaggctatattt

SEQ ID NO: 461822 - DNA, 25 bp, Artificial
  probe
  misc_feature (1)..(25): SEQ ID NO: 7217; WAN024CVI; Start 103; Stop 127
atgaaaagcatcaagagactagaaa

SEQ ID NO: 461823 - DNA, 25 bp, Artificial
  probe
  misc_feature (1)..(25): SEQ ID NO: 7217; WAN024CVI; Start 100; Stop 124
aacatgaaaagcatcaagagactag

SEQ ID NO: 461824 - DNA, 25 bp, Artificial
  probe
  misc_feature (1)..(25): SEQ ID NO: 7217; WAN024CVI; Start 21; Stop 45
cagcaccagtaaaatagcaaccatc

SEQ ID NO: 461825 - DNA, 25 bp, Artificial
  probe
  misc_feature (1)..(25): SEQ ID NO: 7217; WAN024CVI; Start 102; Stop 126
catgaaaagcatcaagagactagaa

SEQ ID NO: 461826 - DNA, 25 bp, Artificial
  probe
  misc_feature (1)..(25): SEQ ID NO: 7217; WAN024CVI; Start 99; Stop 123
aaacatgaaaagcatcaagagacta

SEQ ID NO: 461827 - DNA, 25 bp, Artificial
  probe
  misc_feature (1)..(25): SEQ ID NO: 7217; WAN024CVI; Start 98; Stop 122
taaacatgaaaagcatcaagagact

SEQ ID NO: 461828 - DNA, 25 bp, Artificial
  probe
  misc_feature (1)..(25): SEQ ID NO: 7217; WAN024CVI; Start 68; Stop 92
cctcaaaaggaaaacgaaaggctat

SEQ ID NO: 461829 - DNA, 25 bp, Artificial
  probe
  misc_feature (1)..(25): SEQ ID NO: 7217; WAN024CVI; Start 97; Stop 121
ataaacatgaaaagcatcaagagac

SEQ ID NO: 461830 - DNA, 25 bp, Artificial
  probe
  misc_feature (1)..(25): SEQ ID NO: 7217; WAN024CVI; Start 26; Stop 50
ccagtaaaatagcaaccatcgtact

SEQ ID NO: 461831 - DNA, 25 bp, Artificial
  probe
  misc_feature (1)..(25): SEQ ID NO: 7217; WAN024CVI; Start 29; Stop 53
gtaaaatagcaaccatcgtactaaa

SEQ ID NO: 461832 - DNA, 25 bp, Artificial
  probe
  misc_feature (1)..(25): SEQ ID NO: 7217; WAN024CVI; Start 73; Stop 97
aaaggaaaacgaaaggctatattta

SEQ ID NO: 461833 - DNA, 25 bp, Artificial
  probe
  misc_feature (1)..(25): SEQ ID NO: 7217; WAN024CVI; Start 27; Stop 51
cagtaaaatagcaaccatcgtacta

SEQ ID NO: 461834 - DNA, 25 bp, Artificial
  probe
  misc_feature (1)..(25): SEQ ID NO: 7217; WAN024CVI; Start 74; Stop 98
aaggaaaacgaaaggctatatttat

SEQ ID NO: 461835 - DNA, 25 bp, Artificial
  probe
  misc_feature (1)..(25): SEQ ID NO: 7217; WAN024CVI; Start 28; Stop 52
agtaaaatagcaaccatcgtactaa

SEQ ID NO: 461836 - DNA, 25 bp, Artificial
  probe
  misc_feature (1)..(25): SEQ ID NO: 7217; WAN024CVI; Start 20; Stop 44
ccagcaccagtaaaatagcaaccat

SEQ ID NO: 461837 - DNA, 25 bp, Artificial
  probe
  misc_feature (1)..(25): SEQ ID NO: 7217; WAN024CVI; Start 30; Stop 54
taaaatagcaaccatcgtactaaaa

SEQ ID NO: 461838 - DNA, 25 bp, Artificial
  probe
  misc_feature (1)..(25): SEQ ID NO: 7217; WAN024CVI; Start 22; Stop 46
agcaccagtaaaatagcaaccatcg

SEQ ID NO: 461839 - DNA, 25 bp, Artificial
  probe
  misc_feature (1)..(25): SEQ ID NO: 7217; WAN024CVI; Start 23; Stop 47
gcaccagtaaaatagcaaccatcgt

SEQ ID NO: 461840 - DNA, 25 bp, Artificial
  probe
  misc_feature (1)..(25): SEQ ID NO: 7217; WAN024CVI; Start 96; Stop 120
tataaacatgaaaagcatcaagaga

SEQ ID NO: 461841 - DNA, 25 bp, Artificial
  probe
  misc_feature (1)..(25): SEQ ID NO: 7217; WAN024CVI; Start 75; Stop 99
aggaaaacgaaaggctatatttata

SEQ ID NO: 461842 - DNA, 25 bp, Artificial
  probe
  misc_feature (1)..(25): SEQ ID NO: 7217; WAN024CVI; Start 13; Stop 37
gaaaaggccagcaccagtaaaatag

SEQ ID NO: 461843 - DNA, 25 bp, Artificial
  probe
  misc_feature (1)..(25): SEQ ID NO: 7217; WAN024CVI; Start 95; Stop 119
ttataaacatgaaaagcatcaagag

SEQ ID NO: 461844 - DNA, 25 bp, Artificial
  probe
  misc_feature (1)..(25): SEQ ID NO: 7217; WAN024CVI; Start 12; Stop 36
tgaaaaggccagcaccagtaaaata

SEQ ID NO: 461845 - DNA, 25 bp, Artificial
  probe
  misc_feature (1)..(25): SEQ ID NO: 7217; WAN024CVI; Start 81; Stop 105
acgaaaggctatatttataaacatg

SEQ ID NO: 461846 - DNA, 25 bp, Artificial
  probe
  misc_feature (1)..(25): SEQ ID NO: 7217; WAN024CVI; Start 76; Stop 100
ggaaaacgaaaggctatatttataa

SEQ ID NO: 461847 - DNA, 25 bp, Artificial
  probe
  misc_feature (1)..(25): SEQ ID NO: 7218; WAN024BLG; Start 4; Stop 28
aaagtcaagcgatttgatgaagttt

SEQ ID NO: 461848 - DNA, 25 bp, Artificial
  probe
  misc_feature (1)..(25): SEQ ID NO: 7218; WAN024BLG; Start 3; Stop 27
gaaagtcaagcgatttgatgaagtt

SEQ ID NO: 461849 - DNA, 25 bp, Artificial
  probe
  misc_feature (1)..(25): SEQ ID NO: 7218; WAN024BLG; Start 1; Stop 25
gtgaaagtcaagcgatttgatgaag

SEQ ID NO: 461850 - DNA, 25 bp, Artificial
  probe
  misc_feature (1)..(25): SEQ ID NO: 7218; WAN024BLG; Start 2; Stop 26
tgaaagtcaagcgatttgatgaagt

SEQ ID NO: 461851 - DNA, 25 bp, Artificial
  probe
  misc_feature (1)..(25): SEQ ID NO: 7218; WAN024BLG; Start 5; Stop 29
aagtcaagcgatttgatgaagtttt

SEQ ID NO: 461852 - DNA, 25 bp, Artificial
  probe
  misc_feature (1)..(25): SEQ ID NO: 7218; WAN024BLG; Start 50; Stop 74
aaaaggggcaaaagtgtcgtaaacc

SEQ ID NO: 461853 - DNA, 25 bp, Artificial
  probe
  misc_feature (1)..(25): SEQ ID NO: 7218; WAN024BLG; Start 51; Stop 75
aaaggggcaaaagtgtcgtaaacct

SEQ ID NO: 461854 - DNA, 25 bp, Artificial
  probe
  misc_feature (1)..(25): SEQ ID NO: 7219; WAN024BOT; Start 967; Stop 991
ttgaaggaagcaatcttgattagca

SEQ ID NO: 461855 - DNA, 25 bp, Artificial
  probe
  misc_feature (1)..(25): SEQ ID NO: 7219; WAN024BOT; Start 969; Stop 993
gaaggaagcaatcttgattagcagt

SEQ ID NO: 461856 - DNA, 25 bp, Artificial
  probe
  misc_feature (1)..(25): SEQ ID NO: 7219; WAN024BOT; Start 968; Stop 992
tgaaggaagcaatcttgattagcag

SEQ ID NO: 461857 - DNA, 25 bp, Artificial
  probe
  misc_feature (1)..(25): SEQ ID NO: 7219; WAN024BOT; Start 439; Stop 463
aattcactaggtctcatggcttatg

SEQ ID NO: 461858 - DNA, 25 bp, Artificial
  probe
  misc_feature (1)..(25): SEQ ID NO: 7219; WAN024BOT; Start 970; Stop 994
aaggaagcaatcttgattagcagtg

SEQ ID NO: 461859 - DNA, 25 bp, Artificial
  probe
  misc_feature (1)..(25): SEQ ID NO: 7219; WAN024BOT; Start 449; Stop 473
gtctcatggcttatgcaattacatt

SEQ ID NO: 461860 - DNA, 25 bp, Artificial
  probe
  misc_feature (1)..(25): SEQ ID NO: 7219; WAN024BOT; Start 445; Stop 469
ctaggtctcatggcttatgcaatta

SEQ ID NO: 461861 - DNA, 25 bp, Artificial
  probe
  misc_feature (1)..(25): SEQ ID NO: 7219; WAN024BOT; Start 874; Stop 898
ggttatgtgggtttaattcttcgtt

SEQ ID NO: 461862 - DNA, 25 bp, Artificial
  probe
  misc_feature (1)..(25): SEQ ID NO: 7219; WAN024BOT; Start 880; Stop 904
gtgggtttaattcttcgtttaggtg

SEQ ID NO: 461863 - DNA, 25 bp, Artificial
  probe
  misc_feature (1)..(25): SEQ ID NO: 7219; WAN024BOT; Start 872; Stop 896
gtggttatgtgggtttaattcttcg

SEQ ID NO: 461864 - DNA, 25 bp, Artificial
  probe
  misc_feature (1)..(25): SEQ ID NO: 7219; WAN024BOT; Start 878; Stop 902
atgtgggtttaattcttcgtttagg

SEQ ID NO: 461865 - DNA, 25 bp, Artificial
  probe
  misc_feature (1)..(25): SEQ ID NO: 7219; WAN024BOT; Start 446; Stop 470
taggtctcatggcttatgcaattac

SEQ ID NO: 461866 - DNA, 25 bp, Artificial
  probe
  misc_feature (1)..(25): SEQ ID NO: 7219; WAN024BOT; Start 881; Stop 905
tgggtttaattcttcgtttaggtgt

SEQ ID NO: 461867 - DNA, 25 bp, Artificial
  probe
  misc_feature (1)..(25): SEQ ID NO: 7219; WAN024BOT; Start 879; Stop 903
tgtgggtttaattcttcgtttaggt

SEQ ID NO: 461868 - DNA, 25 bp, Artificial
  probe
  misc_feature (1)..(25): SEQ ID NO: 7219; WAN024BOT; Start 966; Stop 990
attgaaggaagcaatcttgattagc

SEQ ID NO: 461869 - DNA, 25 bp, Artificial
  probe
  misc_feature (1)..(25): SEQ ID NO: 7219; WAN024BOT; Start 918; Stop 942
aggctacttgttgtttatgttgtta

SEQ ID NO: 461870 - DNA, 25 bp, Artificial
  probe
  misc_feature (1)..(25): SEQ ID NO: 7219; WAN024BOT; Start 917; Stop 941
taggctacttgttgtttatgttgtt

SEQ ID NO: 461871 - DNA, 25 bp, Artificial
  probe
  misc_feature (1)..(25): SEQ ID NO: 7219; WAN024BOT; Start 873; Stop 897
tggttatgtgggtttaattcttcgt

SEQ ID NO: 461872 - DNA, 25 bp, Artificial
  probe
  misc_feature (1)..(25): SEQ ID NO: 7219; WAN024BOT; Start 871; Stop 895
agtggttatgtgggtttaattcttc

SEQ ID NO: 461873 - DNA, 25 bp, Artificial
  probe
  misc_feature (1)..(25): SEQ ID NO: 7219; WAN024BOT; Start 916; Stop 940
ataggctacttgttgtttatgttgt

SEQ ID NO: 461874 - DNA, 25 bp, Artificial
  probe
  misc_feature (1)..(25): SEQ ID NO: 7219; WAN024BOT; Start 882; Stop 906
gggtttaattcttcgtttaggtgta

SEQ ID NO: 461875 - DNA, 25 bp, Artificial
  probe
  misc_feature (1)..(25): SEQ ID NO: 7219; WAN024BOT; Start 440; Stop 464
attcactaggtctcatggcttatgc

SEQ ID NO: 461876 - DNA, 25 bp, Artificial
  probe
  misc_feature (1)..(25): SEQ ID NO: 7219; WAN024BOT; Start 149; Stop 173
acacagtgatttacggctttaataa

SEQ ID NO: 461877 - DNA, 25 bp, Artificial
  probe
  misc_feature (1)..(25): SEQ ID NO: 7219; WAN024BOT; Start 450; Stop 474
tctcatggcttatgcaattacatta

SEQ ID NO: 461878 - DNA, 25 bp, Artificial
  probe
  misc_feature (1)..(25): SEQ ID NO: 7219; WAN024BOT; Start 448; Stop 472
ggtctcatggcttatgcaattacat

SEQ ID NO: 461879 - DNA, 25 bp, Artificial
  probe
  misc_feature (1)..(25): SEQ ID NO: 7219; WAN024BOT; Start 408; Stop 432
agtaagaggatcattagggtttgtc

SEQ ID NO: 461880 - DNA, 25 bp, Artificial
  probe
  misc_feature (1)..(25): SEQ ID NO: 7219; WAN024BOT; Start 399; Stop 423
tggagggttagtaagaggatcatta

SEQ ID NO: 461881 - DNA, 25 bp, Artificial
  probe
  misc_feature (1)..(25): SEQ ID NO: 7219; WAN024BOT; Start 977; Stop 1001
caatcttgattagcagtgcctttat

SEQ ID NO: 461882 - DNA, 25 bp, Artificial
  probe
  misc_feature (1)..(25): SEQ ID NO: 7219; WAN024BOT; Start 980; Stop 1004
tcttgattagcagtgcctttatttc

SEQ ID NO: 461883 - DNA, 25 bp, Artificial
  probe
  misc_feature (1)..(25): SEQ ID NO: 7219; WAN024BOT; Start 402; Stop 426
agggttagtaagaggatcattaggg

SEQ ID NO: 461884 - DNA, 25 bp, Artificial
  probe
  misc_feature (1)..(25): SEQ ID NO: 7219; WAN024BOT; Start 401; Stop 425
gagggttagtaagaggatcattagg

SEQ ID NO: 461885 - DNA, 25 bp, Artificial
  probe
  misc_feature (1)..(25): SEQ ID NO: 7219; WAN024BOT; Start 400; Stop 424
ggagggttagtaagaggatcattag

SEQ ID NO: 461886 - DNA, 25 bp, Artificial
  probe
  misc_feature (1)..(25): SEQ ID NO: 7219; WAN024BOT; Start 850; Stop 874
gcaggagatgtaattattgatagtg

SEQ ID NO: 461887 - DNA, 25 bp, Artificial
  probe
  misc_feature (1)..(25): SEQ ID NO: 7220; WAN024BQC; Start 374; Stop 398
acgataaggttactccatacagatt

SEQ ID NO: 461888 - DNA, 25 bp, Artificial
  probe
  misc_feature (1)..(25): SEQ ID NO: 7220; WAN024BQC; Start 1303; Stop 1327
aagaagcagtatcaggaatatcaga

SEQ ID NO: 461889 - DNA, 25 bp, Artificial
  probe
  misc_feature (1)..(25): SEQ ID NO: 7220; WAN024BQC; Start 1302; Stop 1326
gaagaagcagtatcaggaatatcag

SEQ ID NO: 461890 - DNA, 25 bp, Artificial
  probe
  misc_feature (1)..(25): SEQ ID NO: 7220; WAN024BQC; Start 1304; Stop 1328
agaagcagtatcaggaatatcagat

SEQ ID NO: 461891 - DNA, 25 bp, Artificial
  probe
  misc_feature (1)..(25): SEQ ID NO: 7220; WAN024BQC; Start 373; Stop 397
aacgataaggttactccatacagat

SEQ ID NO: 461892 - DNA, 25 bp, Artificial
  probe
  misc_feature (1)..(25): SEQ ID NO: 7220; WAN024BQC; Start 962; Stop 986
taagactctatacgacttgttcaca

SEQ ID NO: 461893 - DNA, 25 bp, Artificial
  probe
  misc_feature (1)..(25): SEQ ID NO: 7220; WAN024BQC; Start 1301; Stop 1325
tgaagaagcagtatcaggaatatca

SEQ ID NO: 461894 - DNA, 25 bp, Artificial
  probe
  misc_feature (1)..(25): SEQ ID NO: 7220; WAN024BQC; Start 1305; Stop 1329
gaagcagtatcaggaatatcagatt

SEQ ID NO: 461895 - DNA, 25 bp, Artificial
  probe
  misc_feature (1)..(25): SEQ ID NO: 7220; WAN024BQC; Start 961; Stop 985
ttaagactctatacgacttgttcac

SEQ ID NO: 461896 - DNA, 25 bp, Artificial
  probe
  misc_feature (1)..(25): SEQ ID NO: 7220; WAN024BQC; Start 963; Stop 987
aagactctatacgacttgttcacaa

SEQ ID NO: 461897 - DNA, 25 bp, Artificial
  probe
  misc_feature (1)..(25): SEQ ID NO: 7220; WAN024BQC; Start 964; Stop 988
agactctatacgacttgttcacaat

SEQ ID NO: 461898 - DNA, 25 bp, Artificial
  probe
  misc_feature (1)..(25): SEQ ID NO: 7220; WAN024BQC; Start 1300; Stop 1324
ttgaagaagcagtatcaggaatatc

SEQ ID NO: 461899 - DNA, 25 bp, Artificial
  probe
  misc_feature (1)..(25): SEQ ID NO: 7220; WAN024BQC; Start 566; Stop 590
agaatgtaactctcggagaagatac

SEQ ID NO: 461900 - DNA, 25 bp, Artificial
  probe
  misc_feature (1)..(25): SEQ ID NO: 7220; WAN024BQC; Start 558; Stop 582
gtcatataagaatgtaactctcgga

SEQ ID NO: 461901 - DNA, 25 bp, Artificial
  probe
  misc_feature (1)..(25): SEQ ID NO: 7220; WAN024BQC; Start 1206; Stop 1230
taatgaagaagaaggcatagaagaa

SEQ ID NO: 461902 - DNA, 25 bp, Artificial
  probe
  misc_feature (1)..(25): SEQ ID NO: 7220; WAN024BQC; Start 375; Stop 399
cgataaggttactccatacagatta

SEQ ID NO: 461903 - DNA, 25 bp, Artificial
  probe
  misc_feature (1)..(25): SEQ ID NO: 7220; WAN024BQC; Start 1205; Stop 1229
ttaatgaagaagaaggcatagaaga

SEQ ID NO: 461904 - DNA, 25 bp, Artificial
  probe
  misc_feature (1)..(25): SEQ ID NO: 7220; WAN024BQC; Start 315; Stop 339
tgtatcttacctcgaccatgactat

SEQ ID NO: 461905 - DNA, 25 bp, Artificial
  probe
  misc_feature (1)..(25): SEQ ID NO: 7220; WAN024BQC; Start 314; Stop 338
ttgtatcttacctcgaccatgacta

SEQ ID NO: 461906 - DNA, 25 bp, Artificial
  probe
  misc_feature (1)..(25): SEQ ID NO: 7220; WAN024BQC; Start 366; Stop 390
tgatgataacgataaggttactcca

SEQ ID NO: 461907 - DNA, 25 bp, Artificial
  probe
  misc_feature (1)..(25): SEQ ID NO: 7220; WAN024BQC; Start 317; Stop 341
tatcttacctcgaccatgactatga

SEQ ID NO: 461908 - DNA, 25 bp, Artificial
  probe
  misc_feature (1)..(25): SEQ ID NO: 7220; WAN024BQC; Start 316; Stop 340
gtatcttacctcgaccatgactatg

SEQ ID NO: 461909 - DNA, 25 bp, Artificial
  probe
  misc_feature (1)..(25): SEQ ID NO: 7220; WAN024BQC; Start 565; Stop 589
aagaatgtaactctcggagaagata

SEQ ID NO: 461910 - DNA, 25 bp, Artificial
  probe
  misc_feature (1)..(25): SEQ ID NO: 7220; WAN024BQC; Start 564; Stop 588
taagaatgtaactctcggagaagat

SEQ ID NO: 461911 - DNA, 25 bp, Artificial
  probe
  misc_feature (1)..(25): SEQ ID NO: 7220; WAN024BQC; Start 563; Stop 587
ataagaatgtaactctcggagaaga

SEQ ID NO: 461912 - DNA, 25 bp, Artificial
  probe
  misc_feature (1)..(25): SEQ ID NO: 7220; WAN024BQC; Start 557; Stop 581
agtcatataagaatgtaactctcgg

SEQ ID NO: 461913 - DNA, 25 bp, Artificial
  probe
  misc_feature (1)..(25): SEQ ID NO: 7220; WAN024BQC; Start 318; Stop 342
atcttacctcgaccatgactatgat

SEQ ID NO: 461914 - DNA, 25 bp, Artificial
  probe
  misc_feature (1)..(25): SEQ ID NO: 7220; WAN024BQC; Start 319; Stop 343
tcttacctcgaccatgactatgatt

SEQ ID NO: 461915 - DNA, 25 bp, Artificial
  probe
  misc_feature (1)..(25): SEQ ID NO: 7220; WAN024BQC; Start 965; Stop 989
gactctatacgacttgttcacaata

SEQ ID NO: 461916 - DNA, 25 bp, Artificial
  probe
  misc_feature (1)..(25): SEQ ID NO: 7220; WAN024BQC; Start 1456; Stop 1480
aataatggtggtatgtgggtagatg

SEQ ID NO: 461917 - DNA, 25 bp, Artificial
  probe
  misc_feature (1)..(25): SEQ ID NO: 7220; WAN024BQC; Start 1455; Stop 1479
aaataatggtggtatgtgggtagat

SEQ ID NO: 461918 - DNA, 25 bp, Artificial
  probe
  misc_feature (1)..(25): SEQ ID NO: 7220; WAN024BQC; Start 372; Stop 396
taacgataaggttactccatacaga

SEQ ID NO: 461919 - DNA, 25 bp, Artificial
  probe
  misc_feature (1)..(25): SEQ ID NO: 7220; WAN024BQC; Start 505; Stop 529
tggaataaactttaccgctgtgata

SEQ ID NO: 461920 - DNA, 25 bp, Artificial
  probe
  misc_feature (1)..(25): SEQ ID NO: 7221; WAN024GIN; Start 65; Stop 89
agatattggattggctctttaaact

SEQ ID NO: 461921 - DNA, 25 bp, Artificial
  probe
  misc_feature (1)..(25): SEQ ID NO: 7221; WAN024GIN; Start 66; Stop 90
gatattggattggctctttaaactt

SEQ ID NO: 461922 - DNA, 25 bp, Artificial
  probe
  misc_feature (1)..(25): SEQ ID NO: 7221; WAN024GIN; Start 69; Stop 93
attggattggctctttaaacttatc

SEQ ID NO: 461923 - DNA, 25 bp, Artificial
  probe
  misc_feature (1)..(25): SEQ ID NO: 7221; WAN024GIN; Start 18; Stop 42
gatcatttcctttgcagttcaattg

SEQ ID NO: 461924 - DNA, 25 bp, Artificial
  probe
  misc_feature (1)..(25): SEQ ID NO: 7221; WAN024GIN; Start 17; Stop 41
tgatcatttcctttgcagttcaatt

SEQ ID NO: 461925 - DNA, 25 bp, Artificial
  probe
  misc_feature (1)..(25): SEQ ID NO: 7221; WAN024GIN; Start 58; Stop 82
ttatttaagatattggattggctct

SEQ ID NO: 461926 - DNA, 25 bp, Artificial
  probe
  misc_feature (1)..(25): SEQ ID NO: 7221; WAN024GIN; Start 68; Stop 92
tattggattggctctttaaacttat

SEQ ID NO: 461927 - DNA, 25 bp, Artificial
  probe
  misc_feature (1)..(25): SEQ ID NO: 7221; WAN024GIN; Start 67; Stop 91
atattggattggctctttaaactta

SEQ ID NO: 461928 - DNA, 25 bp, Artificial
  probe
  misc_feature (1)..(25): SEQ ID NO: 7221; WAN024GIN; Start 64; Stop 88
aagatattggattggctctttaaac

SEQ ID NO: 461929 - DNA, 25 bp, Artificial
  probe
  misc_feature (1)..(25): SEQ ID NO: 7221; WAN024GIN; Start 60; Stop 84
atttaagatattggattggctcttt

SEQ ID NO: 461930 - DNA, 25 bp, Artificial
  probe
  misc_feature (1)..(25): SEQ ID NO: 7221; WAN024GIN; Start 57; Stop 81
attatttaagatattggattggctc

SEQ ID NO: 461931 - DNA, 25 bp, Artificial
  probe
  misc_feature (1)..(25): SEQ ID NO: 7221; WAN024GIN; Start 62; Stop 86
ttaagatattggattggctctttaa

SEQ ID NO: 461932 - DNA, 25 bp, Artificial
  probe
  misc_feature (1)..(25): SEQ ID NO: 7221; WAN024GIN; Start 61; Stop 85
tttaagatattggattggctcttta

SEQ ID NO: 461933 - DNA, 25 bp, Artificial
  probe
  misc_feature (1)..(25): SEQ ID NO: 7221; WAN024GIN; Start 19; Stop 43
atcatttcctttgcagttcaattgc

SEQ ID NO: 461934 - DNA, 25 bp, Artificial
  probe
  misc_feature (1)..(25): SEQ ID NO: 7221; WAN024GIN; Start 59; Stop 83
tatttaagatattggattggctctt

SEQ ID NO: 461935 - DNA, 25 bp, Artificial
  probe
  misc_feature (1)..(25): SEQ ID NO: 7221; WAN024GIN; Start 21; Stop 45
catttcctttgcagttcaattgctg

SEQ ID NO: 461936 - DNA, 25 bp, Artificial
  probe
  misc_feature (1)..(25): SEQ ID NO: 7221; WAN024GIN; Start 20; Stop 44
tcatttcctttgcagttcaattgct

SEQ ID NO: 461937 - DNA, 25 bp, Artificial
  probe
  misc_feature (1)..(25): SEQ ID NO: 7221; WAN024GIN; Start 63; Stop 87
taagatattggattggctctttaaa

SEQ ID NO: 461938 - DNA, 25 bp, Artificial
  probe
  misc_feature (1)..(25): SEQ ID NO: 7221; WAN024GIN; Start 32; Stop 56
cagttcaattgctgttttacaagat

SEQ ID NO: 461939 - DNA, 25 bp, Artificial
  probe
  misc_feature (1)..(25): SEQ ID NO: 7221; WAN024GIN; Start 22; Stop 46
atttcctttgcagttcaattgctgt

SEQ ID NO: 461940 - DNA, 25 bp, Artificial
  probe
  misc_feature (1)..(25): SEQ ID NO: 7221; WAN024GIN; Start 24; Stop 48
ttcctttgcagttcaattgctgttt

SEQ ID NO: 461941 - DNA, 25 bp, Artificial
  probe
  misc_feature (1)..(25): SEQ ID NO: 7221; WAN024GIN; Start 23; Stop 47
tttcctttgcagttcaattgctgtt

SEQ ID NO: 461942 - DNA, 25 bp, Artificial
  probe
  misc_feature (1)..(25): SEQ ID NO: 7221; WAN024GIN; Start 33; Stop 57
agttcaattgctgttttacaagata

SEQ ID NO: 461943 - DNA, 25 bp, Artificial
  probe
  misc_feature (1)..(25): SEQ ID NO: 7221; WAN024GIN; Start 27; Stop 51
ctttgcagttcaattgctgttttac

SEQ ID NO: 461944 - DNA, 25 bp, Artificial
  probe
  misc_feature (1)..(25): SEQ ID NO: 7221; WAN024GIN; Start 29; Stop 53
ttgcagttcaattgctgttttacaa

SEQ ID NO: 461945 - DNA, 25 bp, Artificial
  probe
  misc_feature (1)..(25): SEQ ID NO: 7221; WAN024GIN; Start 28; Stop 52
tttgcagttcaattgctgttttaca

SEQ ID NO: 461946 - DNA, 25 bp, Artificial
  probe
  misc_feature (1)..(25): SEQ ID NO: 7221; WAN024GIN; Start 31; Stop 55
gcagttcaattgctgttttacaaga

SEQ ID NO: 461947 - DNA, 25 bp, Artificial
  probe
  misc_feature (1)..(25): SEQ ID NO: 7221; WAN024GIN; Start 30; Stop 54
tgcagttcaattgctgttttacaag

SEQ ID NO: 461948 - DNA, 25 bp, Artificial
  probe
  misc_feature (1)..(25): SEQ ID NO: 7221; WAN024GIN; Start 26; Stop 50
cctttgcagttcaattgctgtttta

SEQ ID NO: 461949 - DNA, 25 bp, Artificial
  probe
  misc_feature (1)..(25): SEQ ID NO: 7221; WAN024GIN; Start 34; Stop 58
gttcaattgctgttttacaagatat

SEQ ID NO: 461950 - DNA, 25 bp, Artificial
  probe
  misc_feature (1)..(25): SEQ ID NO: 7221; WAN024GIN; Start 25; Stop 49
tcctttgcagttcaattgctgtttt

SEQ ID NO: 461951 - DNA, 25 bp, Artificial
  probe
  misc_feature (1)..(25): SEQ ID NO: 7221; WAN024GIN; Start 35; Stop 59
ttcaattgctgttttacaagatatt

SEQ ID NO: 461952 - DNA, 25 bp, Artificial
  probe
  misc_feature (1)..(25): SEQ ID NO: 7221; WAN024GIN; Start 36; Stop 60
tcaattgctgttttacaagatatta

SEQ ID NO: 461953 - DNA, 25 bp, Artificial
  probe
  misc_feature (1)..(25): SEQ ID NO: 7222; WAN024BYE; Start 90; Stop 114
ctatgttgagctggctgacaatatt

SEQ ID NO: 461954 - DNA, 25 bp, Artificial
  probe
  misc_feature (1)..(25): SEQ ID NO: 7222; WAN024BYE; Start 32; Stop 56
attgggaatcaaatgtgaaacgact

SEQ ID NO: 461955 - DNA, 25 bp, Artificial
  probe
  misc_feature (1)..(25): SEQ ID NO: 7222; WAN024BYE; Start 14; Stop 38
tcaaacaagatttctatgattggga

SEQ ID NO: 461956 - DNA, 25 bp, Artificial
  probe
  misc_feature (1)..(25): SEQ ID NO: 7222; WAN024BYE; Start 125; Stop 149
gcgttgctatctcagatgttcttga

SEQ ID NO: 461957 - DNA, 25 bp, Artificial
  probe
  misc_feature (1)..(25): SEQ ID NO: 7222; WAN024BYE; Start 15; Stop 39
caaacaagatttctatgattgggaa

SEQ ID NO: 461958 - DNA, 25 bp, Artificial
  probe
  misc_feature (1)..(25): SEQ ID NO: 7222; WAN024BYE; Start 33; Stop 57
ttgggaatcaaatgtgaaacgactg

SEQ ID NO: 461959 - DNA, 25 bp, Artificial
  probe
  misc_feature (1)..(25): SEQ ID NO: 7222; WAN024BYE; Start 31; Stop 55
gattgggaatcaaatgtgaaacgac

SEQ ID NO: 461960 - DNA, 25 bp, Artificial
  probe
  misc_feature (1)..(25): SEQ ID NO: 7222; WAN024BYE; Start 162; Stop 186
tgaacctgagttcttagaagaggat

SEQ ID NO: 461961 - DNA, 25 bp, Artificial
  probe
  misc_feature (1)..(25): SEQ ID NO: 7222; WAN024BYE; Start 124; Stop 148
ggcgttgctatctcagatgttcttg

SEQ ID NO: 461962 - DNA, 25 bp, Artificial
  probe
  misc_feature (1)..(25): SEQ ID NO: 7222; WAN024BYE; Start 161; Stop 185
ctgaacctgagttcttagaagagga

SEQ ID NO: 461963 - DNA, 25 bp, Artificial
  probe
  misc_feature (1)..(25): SEQ ID NO: 7222; WAN024BYE; Start 16; Stop 40
aaacaagatttctatgattgggaat

SEQ ID NO: 461964 - DNA, 25 bp, Artificial
  probe
  misc_feature (1)..(25): SEQ ID NO: 7222; WAN024BYE; Start 37; Stop 61
gaatcaaatgtgaaacgactggcag

SEQ ID NO: 461965 - DNA, 25 bp, Artificial
  probe
  misc_feature (1)..(25): SEQ ID NO: 7222; WAN024BYE; Start 126; Stop 150
cgttgctatctcagatgttcttgag

SEQ ID NO: 461966 - DNA, 25 bp, Artificial
  probe
  misc_feature (1)..(25): SEQ ID NO: 7222; WAN024BYE; Start 160; Stop 184
cctgaacctgagttcttagaagagg

SEQ ID NO: 461967 - DNA, 25 bp, Artificial
  probe
  misc_feature (1)..(25): SEQ ID NO: 7222; WAN024BYE; Start 17; Stop 41
aacaagatttctatgattgggaatc

SEQ ID NO: 461968 - DNA, 25 bp, Artificial
  probe
  misc_feature (1)..(25): SEQ ID NO: 7222; WAN024BYE; Start 136; Stop 160
tcagatgttcttgagaaaatcctcc

SEQ ID NO: 461969 - DNA, 25 bp, Artificial
  probe
  misc_feature (1)..(25): SEQ ID NO: 7222; WAN024BYE; Start 34; Stop 58
tgggaatcaaatgtgaaacgactgg

SEQ ID NO: 461970 - DNA, 25 bp, Artificial
  probe
  misc_feature (1)..(25): SEQ ID NO: 7222; WAN024BYE; Start 89; Stop 113
gctatgttgagctggctgacaatat

SEQ ID NO: 461971 - DNA, 25 bp, Artificial
  probe
  misc_feature (1)..(25): SEQ ID NO: 7222; WAN024BYE; Start 139; Stop 163
gatgttcttgagaaaatcctccctg

SEQ ID NO: 461972 - DNA, 25 bp, Artificial
  probe
  misc_feature (1)..(25): SEQ ID NO: 7222; WAN024BYE; Start 138; Stop 162
agatgttcttgagaaaatcctccct

SEQ ID NO: 461973 - DNA, 25 bp, Artificial
  probe
  misc_feature (1)..(25): SEQ ID NO: 7222; WAN024BYE; Start 137; Stop 161
cagatgttcttgagaaaatcctccc

SEQ ID NO: 461974 - DNA, 25 bp, Artificial
  probe
  misc_feature (1)..(25): SEQ ID NO: 7222; WAN024BYE; Start 13; Stop 37
atcaaacaagatttctatgattggg

SEQ ID NO: 461975 - DNA, 25 bp, Artificial
  probe
  misc_feature (1)..(25): SEQ ID NO: 7222; WAN024BYE; Start 140; Stop 164
atgttcttgagaaaatcctccctga

SEQ ID NO: 461976 - DNA, 25 bp, Artificial
  probe
  misc_feature (1)..(25): SEQ ID NO: 7222; WAN024BYE; Start 141; Stop 165
tgttcttgagaaaatcctccctgaa

SEQ ID NO: 461977 - DNA, 25 bp, Artificial
  probe
  misc_feature (1)..(25): SEQ ID NO: 7222; WAN024BYE; Start 63; Stop 87
aggggaacttgagattactgaggag

SEQ ID NO: 461978 - DNA, 25 bp, Artificial
  probe
  misc_feature (1)..(25): SEQ ID NO: 7222; WAN024BYE; Start 60; Stop 84
aggaggggaacttgagattactgag

SEQ ID NO: 461979 - DNA, 25 bp, Artificial
  probe
  misc_feature (1)..(25): SEQ ID NO: 7222; WAN024BYE; Start 36; Stop 60
ggaatcaaatgtgaaacgactggca

SEQ ID NO: 461980 - DNA, 25 bp, Artificial
  probe
  misc_feature (1)..(25): SEQ ID NO: 7222; WAN024BYE; Start 62; Stop 86
gaggggaacttgagattactgagga

SEQ ID NO: 461981 - DNA, 25 bp, Artificial
  probe
  misc_feature (1)..(25): SEQ ID NO: 7222; WAN024BYE; Start 38; Stop 62
aatcaaatgtgaaacgactggcagg

SEQ ID NO: 461982 - DNA, 25 bp, Artificial
  probe
  misc_feature (1)..(25): SEQ ID NO: 7222; WAN024BYE; Start 159; Stop 183
ccctgaacctgagttcttagaagag

SEQ ID NO: 461983 - DNA, 25 bp, Artificial
  probe
  misc_feature (1)..(25): SEQ ID NO: 7222; WAN024BYE; Start 157; Stop 181
ctccctgaacctgagttcttagaag

SEQ ID NO: 461984 - DNA, 25 bp, Artificial
  probe
  misc_feature (1)..(25): SEQ ID NO: 7222; WAN024BYE; Start 143; Stop 167
ttcttgagaaaatcctccctgaacc

SEQ ID NO: 461985 - DNA, 25 bp, Artificial
  probe
  misc_feature (1)..(25): SEQ ID NO: 7222; WAN024BYE; Start 65; Stop 89
gggaacttgagattactgaggagcg

SEQ ID NO: 461986 - DNA, 25 bp, Artificial
  probe
  misc_feature (1)..(25): SEQ ID NO: 7223; WAN024DAN; Start 368; Stop 392
ggaatatggctatctctgaactgaa

SEQ ID NO: 461987 - DNA, 25 bp, Artificial
  probe
  misc_feature (1)..(25): SEQ ID NO: 7223; WAN024DAN; Start 371; Stop 395
atatggctatctctgaactgaatga

SEQ ID NO: 461988 - DNA, 25 bp, Artificial
  probe
  misc_feature (1)..(25): SEQ ID NO: 7223; WAN024DAN; Start 370; Stop 394
aatatggctatctctgaactgaatg

SEQ ID NO: 461989 - DNA, 25 bp, Artificial
  probe
  misc_feature (1)..(25): SEQ ID NO: 7223; WAN024DAN; Start 372; Stop 396
tatggctatctctgaactgaatgag

SEQ ID NO: 461990 - DNA, 25 bp, Artificial
  probe
  misc_feature (1)..(25): SEQ ID NO: 7223; WAN024DAN; Start 367; Stop 391
cggaatatggctatctctgaactga

SEQ ID NO: 461991 - DNA, 25 bp, Artificial
  probe
  misc_feature (1)..(25): SEQ ID NO: 7223; WAN024DAN; Start 369; Stop 393
gaatatggctatctctgaactgaat

SEQ ID NO: 461992 - DNA, 25 bp, Artificial
  probe
  misc_feature (1)..(25): SEQ ID NO: 7223; WAN024DAN; Start 373; Stop 397
atggctatctctgaactgaatgagg

SEQ ID NO: 461993 - DNA, 25 bp, Artificial
  probe
  misc_feature (1)..(25): SEQ ID NO: 7223; WAN024DAN; Start 375; Stop 399
ggctatctctgaactgaatgaggtt

SEQ ID NO: 461994 - DNA, 25 bp, Artificial
  probe
  misc_feature (1)..(25): SEQ ID NO: 7223; WAN024DAN; Start 236; Stop 260
ttggtaggttgattaacaagctgaa

SEQ ID NO: 461995 - DNA, 25 bp, Artificial
  probe
  misc_feature (1)..(25): SEQ ID NO: 7223; WAN024DAN; Start 230; Stop 254
ttgagcttggtaggttgattaacaa

SEQ ID NO: 461996 - DNA, 25 bp, Artificial
  probe
  misc_feature (1)..(25): SEQ ID NO: 7223; WAN024DAN; Start 153; Stop 177
tgatgatgtctatactcagcttgtc

SEQ ID NO: 461997 - DNA, 25 bp, Artificial
  probe
  misc_feature (1)..(25): SEQ ID NO: 7223; WAN024DAN; Start 332; Stop 356
aaatggaaatcagcagaacaacttt

SEQ ID NO: 461998 - DNA, 25 bp, Artificial
  probe
  misc_feature (1)..(25): SEQ ID NO: 7223; WAN024DAN; Start 229; Stop 253
cttgagcttggtaggttgattaaca

SEQ ID NO: 461999 - DNA, 25 bp, Artificial
  probe
  misc_feature (1)..(25): SEQ ID NO: 7223; WAN024DAN; Start 190; Stop 214
gccatagaacaggatactaaagagg

SEQ ID NO: 462000 - DNA, 25 bp, Artificial
  probe
  misc_feature (1)..(25): SEQ ID NO: 7223; WAN024DAN; Start 152; Stop 176
ttgatgatgtctatactcagcttgt

SEQ ID NO: 462001 - DNA, 25 bp, Artificial
  probe
  misc_feature (1)..(25): SEQ ID NO: 7223; WAN024DAN; Start 151; Stop 175
gttgatgatgtctatactcagcttg

SEQ ID NO: 462002 - DNA, 25 bp, Artificial
  probe
  misc_feature (1)..(25): SEQ ID NO: 7223; WAN024DAN; Start 150; Stop 174
agttgatgatgtctatactcagctt

SEQ ID NO: 462003 - DNA, 25 bp, Artificial
  probe
  misc_feature (1)..(25): SEQ ID NO: 7223; WAN024DAN; Start 149; Stop 173
aagttgatgatgtctatactcagct

SEQ ID NO: 462004 - DNA, 25 bp, Artificial
  probe
  misc_feature (1)..(25): SEQ ID NO: 7223; WAN024DAN; Start 154; Stop 178
gatgatgtctatactcagcttgtcg

SEQ ID NO: 462005 - DNA, 25 bp, Artificial
  probe
  misc_feature (1)..(25): SEQ ID NO: 7223; WAN024DAN; Start 191; Stop 215
ccatagaacaggatactaaagaggt

SEQ ID NO: 462006 - DNA, 25 bp, Artificial
  probe
  misc_feature (1)..(25): SEQ ID NO: 7223; WAN024DAN; Start 161; Stop 185
tctatactcagcttgtcgtgatgaa

SEQ ID NO: 462007 - DNA, 25 bp, Artificial
  probe
  misc_feature (1)..(25): SEQ ID NO: 7223; WAN024DAN; Start 158; Stop 182
atgtctatactcagcttgtcgtgat

SEQ ID NO: 462008 - DNA, 25 bp, Artificial
  probe
  misc_feature (1)..(25): SEQ ID NO: 7223; WAN024DAN; Start 155; Stop 179
atgatgtctatactcagcttgtcgt

SEQ ID NO: 462009 - DNA, 25 bp, Artificial
  probe
  misc_feature (1)..(25): SEQ ID NO: 7223; WAN024DAN; Start 366; Stop 390
gcggaatatggctatctctgaactg

SEQ ID NO: 462010 - DNA, 25 bp, Artificial
  probe
  misc_feature (1)..(25): SEQ ID NO: 7223; WAN024DAN; Start 357; Stop 381
ctacacttggcggaatatggctatc

SEQ ID NO: 462011 - DNA, 25 bp, Artificial
  probe
  misc_feature (1)..(25): SEQ ID NO: 7223; WAN024DAN; Start 46; Stop 70
atggacattcaaagccgtatagatg

SEQ ID NO: 462012 - DNA, 25 bp, Artificial
  probe
  misc_feature (1)..(25): SEQ ID NO: 7223; WAN024DAN; Start 205; Stop 229
actaaagaggttatcaacagaaagc

SEQ ID NO: 462013 - DNA, 25 bp, Artificial
  probe
  misc_feature (1)..(25): SEQ ID NO: 7223; WAN024DAN; Start 1; Stop 25
gtgaacaaggctaaagaactattga

SEQ ID NO: 462014 - DNA, 25 bp, Artificial
  probe
  misc_feature (1)..(25): SEQ ID NO: 7223; WAN024DAN; Start 351; Stop 375
aactttctacacttggcggaatatg

SEQ ID NO: 462015 - DNA, 25 bp, Artificial
  probe
  misc_feature (1)..(25): SEQ ID NO: 7223; WAN024DAN; Start 261; Stop 285
aaatccaaagagcaggtctattctc

SEQ ID NO: 462016 - DNA, 25 bp, Artificial
  probe
  misc_feature (1)..(25): SEQ ID NO: 7223; WAN024DAN; Start 376; Stop 400
gctatctctgaactgaatgaggttt

SEQ ID NO: 462017 - DNA, 25 bp, Artificial
  probe
  misc_feature (1)..(25): SEQ ID NO: 7223; WAN024DAN; Start 350; Stop 374
caactttctacacttggcggaatat

SEQ ID NO: 462018 - DNA, 25 bp, Artificial
  probe
  misc_feature (1)..(25): SEQ ID NO: 7223; WAN024DAN; Start 281; Stop 305
ttctcagggtgacttacattactaa

SEQ ID NO: 462019 - DNA, 25 bp, Artificial
  probe
  misc_feature (1)..(25): SEQ ID NO: 7224; WAN024GM3; Start 198; Stop 222
cttcgtagtgtgctttagtttcttc

SEQ ID NO: 462020 - DNA, 25 bp, Artificial
  probe
  misc_feature (1)..(25): SEQ ID NO: 7224; WAN024GM3; Start 195; Stop 219
tttcttcgtagtgtgctttagtttc

SEQ ID NO: 462021 - DNA, 25 bp, Artificial
  probe
  misc_feature (1)..(25): SEQ ID NO: 7224; WAN024GM3; Start 194; Stop 218
gtttcttcgtagtgtgctttagttt

SEQ ID NO: 462022 - DNA, 25 bp, Artificial
  probe
  misc_feature (1)..(25): SEQ ID NO: 7224; WAN024GM3; Start 200; Stop 224
tcgtagtgtgctttagtttcttcta

SEQ ID NO: 462023 - DNA, 25 bp, Artificial
  probe
  misc_feature (1)..(25): SEQ ID NO: 7224; WAN024GM3; Start 152; Stop 176
atatcagcgatagatgttggacgag

SEQ ID NO: 462024 - DNA, 25 bp, Artificial
  probe
  misc_feature (1)..(25): SEQ ID NO: 7224; WAN024GM3; Start 199; Stop 223
ttcgtagtgtgctttagtttcttct

SEQ ID NO: 462025 - DNA, 25 bp, Artificial
  probe
  misc_feature (1)..(25): SEQ ID NO: 7224; WAN024GM3; Start 197; Stop 221
tcttcgtagtgtgctttagtttctt

SEQ ID NO: 462026 - DNA, 25 bp, Artificial
  probe
  misc_feature (1)..(25): SEQ ID NO: 7224; WAN024GM3; Start 196; Stop 220
ttcttcgtagtgtgctttagtttct

SEQ ID NO: 462027 - DNA, 25 bp, Artificial
  probe
  misc_feature (1)..(25): SEQ ID NO: 7224; WAN024GM3; Start 193; Stop 217
agtttcttcgtagtgtgctttagtt

SEQ ID NO: 462028 - DNA, 25 bp, Artificial
  probe
  misc_feature (1)..(25): SEQ ID NO: 7224; WAN024GM3; Start 38; Stop 62
aaagtagtttcagccatacggatac

SEQ ID NO: 462029 - DNA, 25 bp, Artificial
  probe
  misc_feature (1)..(25): SEQ ID NO: 7224; WAN024GM3; Start 37; Stop 61
caaagtagtttcagccatacggata

SEQ ID NO: 462030 - DNA, 25 bp, Artificial
  probe
  misc_feature (1)..(25): SEQ ID NO: 7224; WAN024GM3; Start 192; Stop 216
gagtttcttcgtagtgtgctttagt

SEQ ID NO: 462031 - DNA, 25 bp, Artificial
  probe
  misc_feature (1)..(25): SEQ ID NO: 7224; WAN024GM3; Start 34; Stop 58
tttcaaagtagtttcagccatacgg

SEQ ID NO: 462032 - DNA, 25 bp, Artificial
  probe
  misc_feature (1)..(25): SEQ ID NO: 7224; WAN024GM3; Start 33; Stop 57
ctttcaaagtagtttcagccatacg

SEQ ID NO: 462033 - DNA, 25 bp, Artificial
  probe
  misc_feature (1)..(25): SEQ ID NO: 7224; WAN024GM3; Start 32; Stop 56
tctttcaaagtagtttcagccatac

SEQ ID NO: 462034 - DNA, 25 bp, Artificial
  probe
  misc_feature (1)..(25): SEQ ID NO: 7224; WAN024GM3; Start 30; Stop 54
tttctttcaaagtagtttcagccat

SEQ ID NO: 462035 - DNA, 25 bp, Artificial
  probe
  misc_feature (1)..(25): SEQ ID NO: 7224; WAN024GM3; Start 36; Stop 60
tcaaagtagtttcagccatacggat

SEQ ID NO: 462036 - DNA, 25 bp, Artificial
  probe
  misc_feature (1)..(25): SEQ ID NO: 7224; WAN024GM3; Start 31; Stop 55
ttctttcaaagtagtttcagccata

SEQ ID NO: 462037 - DNA, 25 bp, Artificial
  probe
  misc_feature (1)..(25): SEQ ID NO: 7224; WAN024GM3; Start 39; Stop 63
aagtagtttcagccatacggatacc

SEQ ID NO: 462038 - DNA, 25 bp, Artificial
  probe
  misc_feature (1)..(25): SEQ ID NO: 7224; WAN024GM3; Start 35; Stop 59
ttcaaagtagtttcagccatacgga

SEQ ID NO: 462039 - DNA, 25 bp, Artificial
  probe
  misc_feature (1)..(25): SEQ ID NO: 7224; WAN024GM3; Start 204; Stop 228
agtgtgctttagtttcttctacaat

SEQ ID NO: 462040 - DNA, 25 bp, Artificial
  probe
  misc_feature (1)..(25): SEQ ID NO: 7224; WAN024GM3; Start 153; Stop 177
tatcagcgatagatgttggacgagt

SEQ ID NO: 462041 - DNA, 25 bp, Artificial
  probe
  misc_feature (1)..(25): SEQ ID NO: 7224; WAN024GM3; Start 203; Stop 227
tagtgtgctttagtttcttctacaa

SEQ ID NO: 462042 - DNA, 25 bp, Artificial
  probe
  misc_feature (1)..(25): SEQ ID NO: 7224; WAN024GM3; Start 205; Stop 229
gtgtgctttagtttcttctacaatt

SEQ ID NO: 462043 - DNA, 25 bp, Artificial
  probe
  misc_feature (1)..(25): SEQ ID NO: 7224; WAN024GM3; Start 151; Stop 175
gatatcagcgatagatgttggacga

SEQ ID NO: 462044 - DNA, 25 bp, Artificial
  probe
  misc_feature (1)..(25): SEQ ID NO: 7224; WAN024GM3; Start 126; Stop 150
tttctttgtcgataaatccagcagg

SEQ ID NO: 462045 - DNA, 25 bp, Artificial
  probe
  misc_feature (1)..(25): SEQ ID NO: 7224; WAN024GM3; Start 41; Stop 65
gtagtttcagccatacggataccac

SEQ ID NO: 462046 - DNA, 25 bp, Artificial
  probe
  misc_feature (1)..(25): SEQ ID NO: 7224; WAN024GM3; Start 40; Stop 64
agtagtttcagccatacggatacca

SEQ ID NO: 462047 - DNA, 25 bp, Artificial
  probe
  misc_feature (1)..(25): SEQ ID NO: 7224; WAN024GM3; Start 201; Stop 225
cgtagtgtgctttagtttcttctac

SEQ ID NO: 462048 - DNA, 25 bp, Artificial
  probe
  misc_feature (1)..(25): SEQ ID NO: 7224; WAN024GM3; Start 206; Stop 230
tgtgctttagtttcttctacaattt

SEQ ID NO: 462049 - DNA, 25 bp, Artificial
  probe
  misc_feature (1)..(25): SEQ ID NO: 7224; WAN024GM3; Start 202; Stop 226
gtagtgtgctttagtttcttctaca

SEQ ID NO: 462050 - DNA, 25 bp, Artificial
  probe
  misc_feature (1)..(25): SEQ ID NO: 7224; WAN024GM3; Start 154; Stop 178
atcagcgatagatgttggacgagtg

SEQ ID NO: 462051 - DNA, 25 bp, Artificial
  probe
  misc_feature (1)..(25): SEQ ID NO: 7224; WAN024GM3; Start 150; Stop 174
ggatatcagcgatagatgttggacg

SEQ ID NO: 462052 - DNA, 25 bp, Artificial
  probe
  misc_feature (1)..(25): SEQ ID NO: 7225; WAN024BRU; Start 251; Stop 275
atgaatatgcttccttactgactgt

SEQ ID NO: 462053 - DNA, 25 bp, Artificial
  probe
  misc_feature (1)..(25): SEQ ID NO: 7225; WAN024BRU; Start 249; Stop 273
tgatgaatatgcttccttactgact

SEQ ID NO: 462054 - DNA, 25 bp, Artificial
  probe
  misc_feature (1)..(25): SEQ ID NO: 7225; WAN024BRU; Start 250; Stop 274
gatgaatatgcttccttactgactg

SEQ ID NO: 462055 - DNA, 25 bp, Artificial
  probe
  misc_feature (1)..(25): SEQ ID NO: 7225; WAN024BRU; Start 252; Stop 276
tgaatatgcttccttactgactgtc

SEQ ID NO: 462056 - DNA, 25 bp, Artificial
  probe
  misc_feature (1)..(25): SEQ ID NO: 7225; WAN024BRU; Start 231; Stop 255
tgatgagatagcagtcaatgatgaa

SEQ ID NO: 462057 - DNA, 25 bp, Artificial
  probe
  misc_feature (1)..(25): SEQ ID NO: 7225; WAN024BRU; Start 230; Stop 254
atgatgagatagcagtcaatgatga

SEQ ID NO: 462058 - DNA, 25 bp, Artificial
  probe
  misc_feature (1)..(25): SEQ ID NO: 7225; WAN024BRU; Start 253; Stop 277
gaatatgcttccttactgactgtcc

SEQ ID NO: 462059 - DNA, 25 bp, Artificial
  probe
  misc_feature (1)..(25): SEQ ID NO: 7225; WAN024BRU; Start 248; Stop 272
atgatgaatatgcttccttactgac

SEQ ID NO: 462060 - DNA, 25 bp, Artificial
  probe
  misc_feature (1)..(25): SEQ ID NO: 7225; WAN024BRU; Start 242; Stop 266
cagtcaatgatgaatatgcttcctt

SEQ ID NO: 462061 - DNA, 25 bp, Artificial
  probe
  misc_feature (1)..(25): SEQ ID NO: 7225; WAN024BRU; Start 254; Stop 278
aatatgcttccttactgactgtcca

SEQ ID NO: 462062 - DNA, 25 bp, Artificial
  probe
  misc_feature (1)..(25): SEQ ID NO: 7225; WAN024BRU; Start 232; Stop 256
gatgagatagcagtcaatgatgaat

SEQ ID NO: 462063 - DNA, 25 bp, Artificial
  probe
  misc_feature (1)..(25): SEQ ID NO: 7225; WAN024BRU; Start 247; Stop 271
aatgatgaatatgcttccttactga

SEQ ID NO: 462064 - DNA, 25 bp, Artificial
  probe
  misc_feature (1)..(25): SEQ ID NO: 7225; WAN024BRU; Start 246; Stop 270
caatgatgaatatgcttccttactg

SEQ ID NO: 462065 - DNA, 25 bp, Artificial
  probe
  misc_feature (1)..(25): SEQ ID NO: 7225; WAN024BRU; Start 228; Stop 252
acatgatgagatagcagtcaatgat

SEQ ID NO: 462066 - DNA, 25 bp, Artificial
  probe
  misc_feature (1)..(25): SEQ ID NO: 7225; WAN024BRU; Start 229; Stop 253
catgatgagatagcagtcaatgatg

SEQ ID NO: 462067 - DNA, 25 bp, Artificial
  probe
  misc_feature (1)..(25): SEQ ID NO: 7225; WAN024BRU; Start 143; Stop 167
ataccaatacagttgcttcttactt

SEQ ID NO: 462068 - DNA, 25 bp, Artificial
  probe
  misc_feature (1)..(25): SEQ ID NO: 7225; WAN024BRU; Start 139; Stop 163
acttataccaatacagttgcttctt

SEQ ID NO: 462069 - DNA, 25 bp, Artificial
  probe
  misc_feature (1)..(25): SEQ ID NO: 7225; WAN024BRU; Start 245; Stop 269
tcaatgatgaatatgcttccttact

SEQ ID NO: 462070 - DNA, 25 bp, Artificial
  probe
  misc_feature (1)..(25): SEQ ID NO: 7225; WAN024BRU; Start 244; Stop 268
gtcaatgatgaatatgcttccttac

SEQ ID NO: 462071 - DNA, 25 bp, Artificial
  probe
  misc_feature (1)..(25): SEQ ID NO: 7225; WAN024BRU; Start 243; Stop 267
agtcaatgatgaatatgcttcctta

SEQ ID NO: 462072 - DNA, 25 bp, Artificial
  probe
  misc_feature (1)..(25): SEQ ID NO: 7225; WAN024BRU; Start 225; Stop 249
aagacatgatgagatagcagtcaat

SEQ ID NO: 462073 - DNA, 25 bp, Artificial
  probe
  misc_feature (1)..(25): SEQ ID NO: 7225; WAN024BRU; Start 227; Stop 251
gacatgatgagatagcagtcaatga

SEQ ID NO: 462074 - DNA, 25 bp, Artificial
  probe
  misc_feature (1)..(25): SEQ ID NO: 7225; WAN024BRU; Start 226; Stop 250
agacatgatgagatagcagtcaatg

SEQ ID NO: 462075 - DNA, 25 bp, Artificial
  probe
  misc_feature (1)..(25): SEQ ID NO: 7225; WAN024BRU; Start 255; Stop 279
atatgcttccttactgactgtccag

SEQ ID NO: 462076 - DNA, 25 bp, Artificial
  probe
  misc_feature (1)..(25): SEQ ID NO: 7225; WAN024BRU; Start 234; Stop 258
tgagatagcagtcaatgatgaatat

SEQ ID NO: 462077 - DNA, 25 bp, Artificial
  probe
  misc_feature (1)..(25): SEQ ID NO: 7225; WAN024BRU; Start 233; Stop 257
atgagatagcagtcaatgatgaata

SEQ ID NO: 462078 - DNA, 25 bp, Artificial
  probe
  misc_feature (1)..(25): SEQ ID NO: 7225; WAN024BRU; Start 366; Stop 390
gatgttgtatgtgatttctgctgtt

SEQ ID NO: 462079 - DNA, 25 bp, Artificial
  probe
  misc_feature (1)..(25): SEQ ID NO: 7225; WAN024BRU; Start 83; Stop 107
ttattgttactccctatgtcactcg

SEQ ID NO: 462080 - DNA, 25 bp, Artificial
  probe
  misc_feature (1)..(25): SEQ ID NO: 7225; WAN024BRU; Start 79; Stop 103
ccacttattgttactccctatgtca

SEQ ID NO: 462081 - DNA, 25 bp, Artificial
  probe
  misc_feature (1)..(25): SEQ ID NO: 7225; WAN024BRU; Start 367; Stop 391
atgttgtatgtgatttctgctgttt

SEQ ID NO: 462082 - DNA, 25 bp, Artificial
  probe
  misc_feature (1)..(25): SEQ ID NO: 7225; WAN024BRU; Start 78; Stop 102
tccacttattgttactccctatgtc

SEQ ID NO: 462083 - DNA, 25 bp, Artificial
  probe
  misc_feature (1)..(25): SEQ ID NO: 7225; WAN024BRU; Start 235; Stop 259
gagatagcagtcaatgatgaatatg

SEQ ID NO: 462084 - DNA, 25 bp, Artificial
  probe
  misc_feature (1)..(25): SEQ ID NO: 7225; WAN024BRU; Start 142; Stop 166
tataccaatacagttgcttcttact

SEQ ID NO: 462085 - DNA, 25 bp, Artificial
  probe
  misc_feature (1)..(25): SEQ ID NO: 7226; WAN024DG8; Start 153; Stop 177
tcttgacttagagcatgatttctca

SEQ ID NO: 462086 - DNA, 25 bp, Artificial
  probe
  misc_feature (1)..(25): SEQ ID NO: 7226; WAN024DG8; Start 187; Stop 211
cgtaagcgttatctattaggatttc

SEQ ID NO: 462087 - DNA, 25 bp, Artificial
  probe
  misc_feature (1)..(25): SEQ ID NO: 7226; WAN024DG8; Start 113; Stop 137
tttacaaattggacattctccgttt

SEQ ID NO: 462088 - DNA, 25 bp, Artificial
  probe
  misc_feature (1)..(25): SEQ ID NO: 7226; WAN024DG8; Start 151; Stop 175
tttcttgacttagagcatgatttct

SEQ ID NO: 462089 - DNA, 25 bp, Artificial
  probe
  misc_feature (1)..(25): SEQ ID NO: 7226; WAN024DG8; Start 27; Stop 51
agctactcctcctgataataagcaa

SEQ ID NO: 462090 - DNA, 25 bp, Artificial
  probe
  misc_feature (1)..(25): SEQ ID NO: 7226; WAN024DG8; Start 26; Stop 50
aagctactcctcctgataataagca

SEQ ID NO: 462091 - DNA, 25 bp, Artificial
  probe
  misc_feature (1)..(25): SEQ ID NO: 7226; WAN024DG8; Start 152; Stop 176
ttcttgacttagagcatgatttctc

SEQ ID NO: 462092 - DNA, 25 bp, Artificial
  probe
  misc_feature (1)..(25): SEQ ID NO: 7226; WAN024DG8; Start 28; Stop 52
gctactcctcctgataataagcaaa

SEQ ID NO: 462093 - DNA, 25 bp, Artificial
  probe
  misc_feature (1)..(25): SEQ ID NO: 7226; WAN024DG8; Start 188; Stop 212
gtaagcgttatctattaggatttca

SEQ ID NO: 462094 - DNA, 25 bp, Artificial
  probe
  misc_feature (1)..(25): SEQ ID NO: 7226; WAN024DG8; Start 78; Stop 102
cgctctaatattgttatctttcact

SEQ ID NO: 462095 - DNA, 25 bp, Artificial
  probe
  misc_feature (1)..(25): SEQ ID NO: 7226; WAN024DG8; Start 77; Stop 101
tcgctctaatattgttatctttcac

SEQ ID NO: 462096 - DNA, 25 bp, Artificial
  probe
  misc_feature (1)..(25): SEQ ID NO: 7226; WAN024DG8; Start 190; Stop 214
aagcgttatctattaggatttcatt

SEQ ID NO: 462097 - DNA, 25 bp, Artificial
  probe
  misc_feature (1)..(25): SEQ ID NO: 7226; WAN024DG8; Start 154; Stop 178
cttgacttagagcatgatttctcat

SEQ ID NO: 462098 - DNA, 25 bp, Artificial
  probe
  misc_feature (1)..(25): SEQ ID NO: 7226; WAN024DG8; Start 25; Stop 49
aaagctactcctcctgataataagc

SEQ ID NO: 462099 - DNA, 25 bp, Artificial
  probe
  misc_feature (1)..(25): SEQ ID NO: 7226; WAN024DG8; Start 29; Stop 53
ctactcctcctgataataagcaaaa

SEQ ID NO: 462100 - DNA, 25 bp, Artificial
  probe
  misc_feature (1)..(25): SEQ ID NO: 7226; WAN024DG8; Start 115; Stop 139
tacaaattggacattctccgttttc

SEQ ID NO: 462101 - DNA, 25 bp, Artificial
  probe
  misc_feature (1)..(25): SEQ ID NO: 7226; WAN024DG8; Start 114; Stop 138
ttacaaattggacattctccgtttt

SEQ ID NO: 462102 - DNA, 25 bp, Artificial
  probe
  misc_feature (1)..(25): SEQ ID NO: 7226; WAN024DG8; Start 112; Stop 136
ttttacaaattggacattctccgtt

SEQ ID NO: 462103 - DNA, 25 bp, Artificial
  probe
  misc_feature (1)..(25): SEQ ID NO: 7226; WAN024DG8; Start 155; Stop 179
ttgacttagagcatgatttctcata

SEQ ID NO: 462104 - DNA, 25 bp, Artificial
  probe
  misc_feature (1)..(25): SEQ ID NO: 7226; WAN024DG8; Start 76; Stop 100
ttcgctctaatattgttatctttca

SEQ ID NO: 462105 - DNA, 25 bp, Artificial
  probe
  misc_feature (1)..(25): SEQ ID NO: 7226; WAN024DG8; Start 156; Stop 180
tgacttagagcatgatttctcatat

SEQ ID NO: 462106 - DNA, 25 bp, Artificial
  probe
  misc_feature (1)..(25): SEQ ID NO: 7226; WAN024DG8; Start 191; Stop 215
agcgttatctattaggatttcatta

SEQ ID NO: 462107 - DNA, 25 bp, Artificial
  probe
  misc_feature (1)..(25): SEQ ID NO: 7226; WAN024DG8; Start 189; Stop 213
taagcgttatctattaggatttcat

SEQ ID NO: 462108 - DNA, 25 bp, Artificial
  probe
  misc_feature (1)..(25): SEQ ID NO: 7226; WAN024DG8; Start 150; Stop 174
ttttcttgacttagagcatgatttc

SEQ ID NO: 462109 - DNA, 25 bp, Artificial
  probe
  misc_feature (1)..(25): SEQ ID NO: 7226; WAN024DG8; Start 126; Stop 150
cattctccgttttccagaacatatt

SEQ ID NO: 462110 - DNA, 25 bp, Artificial
  probe
  misc_feature (1)..(25): SEQ ID NO: 7226; WAN024DG8; Start 125; Stop 149
acattctccgttttccagaacatat

SEQ ID NO: 462111 - DNA, 25 bp, Artificial
  probe
  misc_feature (1)..(25): SEQ ID NO: 7226; WAN024DG8; Start 24; Stop 48
aaaagctactcctcctgataataag

SEQ ID NO: 462112 - DNA, 25 bp, Artificial
  probe
  misc_feature (1)..(25): SEQ ID NO: 7226; WAN024DG8; Start 186; Stop 210
acgtaagcgttatctattaggattt

SEQ ID NO: 462113 - DNA, 25 bp, Artificial
  probe
  misc_feature (1)..(25): SEQ ID NO: 7226; WAN024DG8; Start 128; Stop 152
ttctccgttttccagaacatatttt

SEQ ID NO: 462114 - DNA, 25 bp, Artificial
  probe
  misc_feature (1)..(25): SEQ ID NO: 7226; WAN024DG8; Start 116; Stop 140
acaaattggacattctccgttttcc

SEQ ID NO: 462115 - DNA, 25 bp, Artificial
  probe
  misc_feature (1)..(25): SEQ ID NO: 7226; WAN024DG8; Start 127; Stop 151
attctccgttttccagaacatattt

SEQ ID NO: 462116 - DNA, 25 bp, Artificial
  probe
  misc_feature (1)..(25): SEQ ID NO: 7226; WAN024DG8; Start 124; Stop 148
gacattctccgttttccagaacata

SEQ ID NO: 462117 - DNA, 25 bp, Artificial
  probe
  misc_feature (1)..(25): SEQ ID NO: 7226; WAN024DG8; Start 157; Stop 181
gacttagagcatgatttctcatatt

SEQ ID NO: 462118 - DNA, 25 bp, Artificial
  probe
  misc_feature (1)..(25): SEQ ID NO: 7227; WAN024CN6; Start 221; Stop 245
aattatctccgattgtgataggctt

SEQ ID NO: 462119 - DNA, 25 bp, Artificial
  probe
  misc_feature (1)..(25): SEQ ID NO: 7227; WAN024CN6; Start 215; Stop 239
tccagaaattatctccgattgtgat

SEQ ID NO: 462120 - DNA, 25 bp, Artificial
  probe
  misc_feature (1)..(25): SEQ ID NO: 7227; WAN024CN6; Start 214; Stop 238
gtccagaaattatctccgattgtga

SEQ ID NO: 462121 - DNA, 25 bp, Artificial
  probe
  misc_feature (1)..(25): SEQ ID NO: 7227; WAN024CN6; Start 213; Stop 237
agtccagaaattatctccgattgtg

SEQ ID NO: 462122 - DNA, 25 bp, Artificial
  probe
  misc_feature (1)..(25): SEQ ID NO: 7227; WAN024CN6; Start 212; Stop 236
cagtccagaaattatctccgattgt

SEQ ID NO: 462123 - DNA, 25 bp, Artificial
  probe
  misc_feature (1)..(25): SEQ ID NO: 7227; WAN024CN6; Start 211; Stop 235
ccagtccagaaattatctccgattg

SEQ ID NO: 462124 - DNA, 25 bp, Artificial
  probe
  misc_feature (1)..(25): SEQ ID NO: 7227; WAN024CN6; Start 222; Stop 246
attatctccgattgtgataggcttt

SEQ ID NO: 462125 - DNA, 25 bp, Artificial
  probe
  misc_feature (1)..(25): SEQ ID NO: 7227; WAN024CN6; Start 220; Stop 244
aaattatctccgattgtgataggct

SEQ ID NO: 462126 - DNA, 25 bp, Artificial
  probe
  misc_feature (1)..(25): SEQ ID NO: 7227; WAN024CN6; Start 219; Stop 243
gaaattatctccgattgtgataggc

SEQ ID NO: 462127 - DNA, 25 bp, Artificial
  probe
  misc_feature (1)..(25): SEQ ID NO: 7227; WAN024CN6; Start 223; Stop 247
ttatctccgattgtgataggctttc

SEQ ID NO: 462128 - DNA, 25 bp, Artificial
  probe
  misc_feature (1)..(25): SEQ ID NO: 7227; WAN024CN6; Start 210; Stop 234
accagtccagaaattatctccgatt

SEQ ID NO: 462129 - DNA, 25 bp, Artificial
  probe
  misc_feature (1)..(25): SEQ ID NO: 7227; WAN024CN6; Start 70; Stop 94
ttaacaggtatttccttaatcacgc

SEQ ID NO: 462130 - DNA, 25 bp, Artificial
  probe
  misc_feature (1)..(25): SEQ ID NO: 7227; WAN024CN6; Start 216; Stop 240
ccagaaattatctccgattgtgata

SEQ ID NO: 462131 - DNA, 25 bp, Artificial
  probe
  misc_feature (1)..(25): SEQ ID NO: 7227; WAN024CN6; Start 209; Stop 233
caccagtccagaaattatctccgat

SEQ ID NO: 462132 - DNA, 25 bp, Artificial
  probe
  misc_feature (1)..(25): SEQ ID NO: 7227; WAN024CN6; Start 218; Stop 242
agaaattatctccgattgtgatagg

SEQ ID NO: 462133 - DNA, 25 bp, Artificial
  probe
  misc_feature (1)..(25): SEQ ID NO: 7227; WAN024CN6; Start 224; Stop 248
tatctccgattgtgataggctttcc

SEQ ID NO: 462134 - DNA, 25 bp, Artificial
  probe
  misc_feature (1)..(25): SEQ ID NO: 7227; WAN024CN6; Start 243; Stop 267
ctttccgtactcgatacctgaattg

SEQ ID NO: 462135 - DNA, 25 bp, Artificial
  probe
  misc_feature (1)..(25): SEQ ID NO: 7227; WAN024CN6; Start 206; Stop 230
caccaccagtccagaaattatctcc

SEQ ID NO: 462136 - DNA, 25 bp, Artificial
  probe
  misc_feature (1)..(25): SEQ ID NO: 7227; WAN024CN6; Start 205; Stop 229
ccaccaccagtccagaaattatctc

SEQ ID NO: 462137 - DNA, 25 bp, Artificial
  probe
  misc_feature (1)..(25): SEQ ID NO: 7227; WAN024CN6; Start 217; Stop 241
cagaaattatctccgattgtgatag

SEQ ID NO: 462138 - DNA, 25 bp, Artificial
  probe
  misc_feature (1)..(25): SEQ ID NO: 7227; WAN024CN6; Start 260; Stop 284
ctgaattgcgttcctgtggatctag

SEQ ID NO: 462139 - DNA, 25 bp, Artificial
  probe
  misc_feature (1)..(25): SEQ ID NO: 7227; WAN024CN6; Start 249; Stop 273
gtactcgatacctgaattgcgttcc

SEQ ID NO: 462140 - DNA, 25 bp, Artificial
  probe
  misc_feature (1)..(25): SEQ ID NO: 7227; WAN024CN6; Start 69; Stop 93
tttaacaggtatttccttaatcacg

SEQ ID NO: 462141 - DNA, 25 bp, Artificial
  probe
  misc_feature (1)..(25): SEQ ID NO: 7227; WAN024CN6; Start 250; Stop 274
tactcgatacctgaattgcgttcct

SEQ ID NO: 462142 - DNA, 25 bp, Artificial
  probe
  misc_feature (1)..(25): SEQ ID NO: 7227; WAN024CN6; Start 262; Stop 286
gaattgcgttcctgtggatctagtg

SEQ ID NO: 462143 - DNA, 25 bp, Artificial
  probe
  misc_feature (1)..(25): SEQ ID NO: 7227; WAN024CN6; Start 235; Stop 259
gtgataggctttccgtactcgatac

SEQ ID NO: 462144 - DNA, 25 bp, Artificial
  probe
  misc_feature (1)..(25): SEQ ID NO: 7227; WAN024CN6; Start 231; Stop 255
gattgtgataggctttccgtactcg

SEQ ID NO: 462145 - DNA, 25 bp, Artificial
  probe
  misc_feature (1)..(25): SEQ ID NO: 7227; WAN024CN6; Start 230; Stop 254
cgattgtgataggctttccgtactc

SEQ ID NO: 462146 - DNA, 25 bp, Artificial
  probe
  misc_feature (1)..(25): SEQ ID NO: 7227; WAN024CN6; Start 166; Stop 190
acattatttcccagtgtcactccag

SEQ ID NO: 462147 - DNA, 25 bp, Artificial
  probe
  misc_feature (1)..(25): SEQ ID NO: 7227; WAN024CN6; Start 248; Stop 272
cgtactcgatacctgaattgcgttc

SEQ ID NO: 462148 - DNA, 25 bp, Artificial
  probe
  misc_feature (1)..(25): SEQ ID NO: 7227; WAN024CN6; Start 269; Stop 293
gttcctgtggatctagtggatggag

SEQ ID NO: 462149 - DNA, 25 bp, Artificial
  probe
  misc_feature (1)..(25): SEQ ID NO: 7227; WAN024CN6; Start 242; Stop 266
gctttccgtactcgatacctgaatt

SEQ ID NO: 462150 - DNA, 25 bp, Artificial
  probe
  misc_feature (1)..(25): SEQ ID NO: 7227; WAN024CN6; Start 234; Stop 258
tgtgataggctttccgtactcgata

SEQ ID NO: 462151 - DNA, 25 bp, Artificial
  probe
  misc_feature (1)..(25): SEQ ID NO: 7228; WAN024BQP; Start 485; Stop 509
ctccgtatcaagaagatgagtatgg

SEQ ID NO: 462152 - DNA, 25 bp, Artificial
  probe
  misc_feature (1)..(25): SEQ ID NO: 7228; WAN024BQP; Start 725; Stop 749
aaggagaacaactacgatcatattg

SEQ ID NO: 462153 - DNA, 25 bp, Artificial
  probe
  misc_feature (1)..(25): SEQ ID NO: 7228; WAN024BQP; Start 309; Stop 333
tataattcacggagctagtaatgcc

SEQ ID NO: 462154 - DNA, 25 bp, Artificial
  probe
  misc_feature (1)..(25): SEQ ID NO: 7228; WAN024BQP; Start 528; Stop 552
tgttagagcttcctattcaagttca

SEQ ID NO: 462155 - DNA, 25 bp, Artificial
  probe
  misc_feature (1)..(25): SEQ ID NO: 7228; WAN024BQP; Start 525; Stop 549
agatgttagagcttcctattcaagt

SEQ ID NO: 462156 - DNA, 25 bp, Artificial
  probe
  misc_feature (1)..(25): SEQ ID NO: 7228; WAN024BQP; Start 308; Stop 332
atataattcacggagctagtaatgc

SEQ ID NO: 462157 - DNA, 25 bp, Artificial
  probe
  misc_feature (1)..(25): SEQ ID NO: 7228; WAN024BQP; Start 978; Stop 1002
gttaggatgggtaggtatgtttgaa

SEQ ID NO: 462158 - DNA, 25 bp, Artificial
  probe
  misc_feature (1)..(25): SEQ ID NO: 7228; WAN024BQP; Start 979; Stop 1003
ttaggatgggtaggtatgtttgaag

SEQ ID NO: 462159 - DNA, 25 bp, Artificial
  probe
  misc_feature (1)..(25): SEQ ID NO: 7228; WAN024BQP; Start 478; Stop 502
aatcatactccgtatcaagaagatg

SEQ ID NO: 462160 - DNA, 25 bp, Artificial
  probe
  misc_feature (1)..(25): SEQ ID NO: 7228; WAN024BQP; Start 976; Stop 1000
gagttaggatgggtaggtatgtttg

SEQ ID NO: 462161 - DNA, 25 bp, Artificial
  probe
  misc_feature (1)..(25): SEQ ID NO: 7228; WAN024BQP; Start 975; Stop 999
agagttaggatgggtaggtatgttt

SEQ ID NO: 462162 - DNA, 25 bp, Artificial
  probe
  misc_feature (1)..(25): SEQ ID NO: 7228; WAN024BQP; Start 974; Stop 998
aagagttaggatgggtaggtatgtt

SEQ ID NO: 462163 - DNA, 25 bp, Artificial
  probe
  misc_feature (1)..(25): SEQ ID NO: 7228; WAN024BQP; Start 529; Stop 553
gttagagcttcctattcaagttcaa

SEQ ID NO: 462164 - DNA, 25 bp, Artificial
  probe
  misc_feature (1)..(25): SEQ ID NO: 7228; WAN024BQP; Start 330; Stop 354
tgccagtccagatttatacattagt

SEQ ID NO: 462165 - DNA, 25 bp, Artificial
  probe
  misc_feature (1)..(25): SEQ ID NO: 7228; WAN024BQP; Start 977; Stop 1001
agttaggatgggtaggtatgtttga

SEQ ID NO: 462166 - DNA, 25 bp, Artificial
  probe
  misc_feature (1)..(25): SEQ ID NO: 7228; WAN024BQP; Start 325; Stop 349
agtaatgccagtccagatttataca

SEQ ID NO: 462167 - DNA, 25 bp, Artificial
  probe
  misc_feature (1)..(25): SEQ ID NO: 7228; WAN024BQP; Start 973; Stop 997
gaagagttaggatgggtaggtatgt

SEQ ID NO: 462168 - DNA, 25 bp, Artificial
  probe
  misc_feature (1)..(25): SEQ ID NO: 7228; WAN024BQP; Start 967; Stop 991
aaattggaagagttaggatgggtag

SEQ ID NO: 462169 - DNA, 25 bp, Artificial
  probe
  misc_feature (1)..(25): SEQ ID NO: 7228; WAN024BQP; Start 527; Stop 551
atgttagagcttcctattcaagttc

SEQ ID NO: 462170 - DNA, 25 bp, Artificial
  probe
  misc_feature (1)..(25): SEQ ID NO: 7228; WAN024BQP; Start 526; Stop 550
gatgttagagcttcctattcaagtt

SEQ ID NO: 462171 - DNA, 25 bp, Artificial
  probe
  misc_feature (1)..(25): SEQ ID NO: 7228; WAN024BQP; Start 438; Stop 462
agtttatgtttcgtccagtgaagta

SEQ ID NO: 462172 - DNA, 25 bp, Artificial
  probe
  misc_feature (1)..(25): SEQ ID NO: 7228; WAN024BQP; Start 437; Stop 461
tagtttatgtttcgtccagtgaagt

SEQ ID NO: 462173 - DNA, 25 bp, Artificial
  probe
  misc_feature (1)..(25): SEQ ID NO: 7228; WAN024BQP; Start 439; Stop 463
gtttatgtttcgtccagtgaagtat

SEQ ID NO: 462174 - DNA, 25 bp, Artificial
  probe
  misc_feature (1)..(25): SEQ ID NO: 7228; WAN024BQP; Start 436; Stop 460
atagtttatgtttcgtccagtgaag

SEQ ID NO: 462175 - DNA, 25 bp, Artificial
  probe
  misc_feature (1)..(25): SEQ ID NO: 7228; WAN024BQP; Start 310; Stop 334
ataattcacggagctagtaatgcca

SEQ ID NO: 462176 - DNA, 25 bp, Artificial
  probe
  misc_feature (1)..(25): SEQ ID NO: 7228; WAN024BQP; Start 322; Stop 346
gctagtaatgccagtccagatttat

SEQ ID NO: 462177 - DNA, 25 bp, Artificial
  probe
  misc_feature (1)..(25): SEQ ID NO: 7228; WAN024BQP; Start 152; Stop 176
tgaataagaatcatcaattcggagt

SEQ ID NO: 462178 - DNA, 25 bp, Artificial
  probe
  misc_feature (1)..(25): SEQ ID NO: 7228; WAN024BQP; Start 150; Stop 174
actgaataagaatcatcaattcgga

SEQ ID NO: 462179 - DNA, 25 bp, Artificial
  probe
  misc_feature (1)..(25): SEQ ID NO: 7228; WAN024BQP; Start 972; Stop 996
ggaagagttaggatgggtaggtatg

SEQ ID NO: 462180 - DNA, 25 bp, Artificial
  probe
  misc_feature (1)..(25): SEQ ID NO: 7228; WAN024BQP; Start 613; Stop 637
attgttcgtccaggtcatatttatg

SEQ ID NO: 462181 - DNA, 25 bp, Artificial
  probe
  misc_feature (1)..(25): SEQ ID NO: 7228; WAN024BQP; Start 488; Stop 512
cgtatcaagaagatgagtatgggta

SEQ ID NO: 462182 - DNA, 25 bp, Artificial
  probe
  misc_feature (1)..(25): SEQ ID NO: 7228; WAN024BQP; Start 326; Stop 350
gtaatgccagtccagatttatacat

SEQ ID NO: 462183 - DNA, 25 bp, Artificial
  probe
  misc_feature (1)..(25): SEQ ID NO: 7228; WAN024BQP; Start 612; Stop 636
aattgttcgtccaggtcatatttat

SEQ ID NO: 462184 - DNA, 25 bp, Artificial
  probe
  misc_feature (1)..(25): SEQ ID NO: 7229; WAN024BKK; Start 10; Stop 34
ataggaacaattagtacaacacttg

SEQ ID NO: 462185 - DNA, 25 bp, Artificial
  probe
  misc_feature (1)..(25): SEQ ID NO: 7229; WAN024BKK; Start 31; Stop 55
cttgtagtagttgcgggagtaagtg

SEQ ID NO: 462186 - DNA, 25 bp, Artificial
  probe
  misc_feature (1)..(25): SEQ ID NO: 7229; WAN024BKK; Start 9; Stop 33
aataggaacaattagtacaacactt

SEQ ID NO: 462187 - DNA, 25 bp, Artificial
  probe
  misc_feature (1)..(25): SEQ ID NO: 7229; WAN024BKK; Start 29; Stop 53
cacttgtagtagttgcgggagtaag

SEQ ID NO: 462188 - DNA, 25 bp, Artificial
  probe
  misc_feature (1)..(25): SEQ ID NO: 7229; WAN024BKK; Start 11; Stop 35
taggaacaattagtacaacacttgt

SEQ ID NO: 462189 - DNA, 25 bp, Artificial
  probe
  misc_feature (1)..(25): SEQ ID NO: 7229; WAN024BKK; Start 28; Stop 52
acacttgtagtagttgcgggagtaa

SEQ ID NO: 462190 - DNA, 25 bp, Artificial
  probe
  misc_feature (1)..(25): SEQ ID NO: 7229; WAN024BKK; Start 27; Stop 51
aacacttgtagtagttgcgggagta

SEQ ID NO: 462191 - DNA, 25 bp, Artificial
  probe
  misc_feature (1)..(25): SEQ ID NO: 7229; WAN024BKK; Start 8; Stop 32
aaataggaacaattagtacaacact

SEQ ID NO: 462192 - DNA, 25 bp, Artificial
  probe
  misc_feature (1)..(25): SEQ ID NO: 7229; WAN024BKK; Start 21; Stop 45
tagtacaacacttgtagtagttgcg

SEQ ID NO: 462193 - DNA, 25 bp, Artificial
  probe
  misc_feature (1)..(25): SEQ ID NO: 7229; WAN024BKK; Start 61; Stop 85
gtgcttggaggaaaatttgacttta

SEQ ID NO: 462194 - DNA, 25 bp, Artificial
  probe
  misc_feature (1)..(25): SEQ ID NO: 7229; WAN024BKK; Start 62; Stop 86
tgcttggaggaaaatttgactttaa

SEQ ID NO: 462195 - DNA, 25 bp, Artificial
  probe
  misc_feature (1)..(25): SEQ ID NO: 7229; WAN024BKK; Start 20; Stop 44
ttagtacaacacttgtagtagttgc

SEQ ID NO: 462196 - DNA, 25 bp, Artificial
  probe
  misc_feature (1)..(25): SEQ ID NO: 7229; WAN024BKK; Start 63; Stop 87
gcttggaggaaaatttgactttaaa

SEQ ID NO: 462197 - DNA, 25 bp, Artificial
  probe
  misc_feature (1)..(25): SEQ ID NO: 7229; WAN024BKK; Start 32; Stop 56
ttgtagtagttgcgggagtaagtgc

SEQ ID NO: 462198 - DNA, 25 bp, Artificial
  probe
  misc_feature (1)..(25): SEQ ID NO: 7229; WAN024BKK; Start 12; Stop 36
aggaacaattagtacaacacttgta

SEQ ID NO: 462199 - DNA, 25 bp, Artificial
  probe
  misc_feature (1)..(25): SEQ ID NO: 7229; WAN024BKK; Start 60; Stop 84
tgtgcttggaggaaaatttgacttt

SEQ ID NO: 462200 - DNA, 25 bp, Artificial
  probe
  misc_feature (1)..(25): SEQ ID NO: 7229; WAN024BKK; Start 13; Stop 37
ggaacaattagtacaacacttgtag

SEQ ID NO: 462201 - DNA, 25 bp, Artificial
  probe
  misc_feature (1)..(25): SEQ ID NO: 7229; WAN024BKK; Start 30; Stop 54
acttgtagtagttgcgggagtaagt

SEQ ID NO: 462202 - DNA, 25 bp, Artificial
  probe
  misc_feature (1)..(25): SEQ ID NO: 7229; WAN024BKK; Start 59; Stop 83
gtgtgcttggaggaaaatttgactt

SEQ ID NO: 462203 - DNA, 25 bp, Artificial
  probe
  misc_feature (1)..(25): SEQ ID NO: 7229; WAN024BKK; Start 22; Stop 46
agtacaacacttgtagtagttgcgg

SEQ ID NO: 462204 - DNA, 25 bp, Artificial
  probe
  misc_feature (1)..(25): SEQ ID NO: 7229; WAN024BKK; Start 14; Stop 38
gaacaattagtacaacacttgtagt

SEQ ID NO: 462205 - DNA, 25 bp, Artificial
  probe
  misc_feature (1)..(25): SEQ ID NO: 7229; WAN024BKK; Start 19; Stop 43
attagtacaacacttgtagtagttg

SEQ ID NO: 462206 - DNA, 25 bp, Artificial
  probe
  misc_feature (1)..(25): SEQ ID NO: 7229; WAN024BKK; Start 17; Stop 41
caattagtacaacacttgtagtagt

SEQ ID NO: 462207 - DNA, 25 bp, Artificial
  probe
  misc_feature (1)..(25): SEQ ID NO: 7229; WAN024BKK; Start 16; Stop 40
acaattagtacaacacttgtagtag

SEQ ID NO: 462208 - DNA, 25 bp, Artificial
  probe
  misc_feature (1)..(25): SEQ ID NO: 7229; WAN024BKK; Start 7; Stop 31
aaaataggaacaattagtacaacac

SEQ ID NO: 462209 - DNA, 25 bp, Artificial
  probe
  misc_feature (1)..(25): SEQ ID NO: 7229; WAN024BKK; Start 15; Stop 39
aacaattagtacaacacttgtagta

SEQ ID NO: 462210 - DNA, 25 bp, Artificial
  probe
  misc_feature (1)..(25): SEQ ID NO: 7229; WAN024BKK; Start 58; Stop 82
ggtgtgcttggaggaaaatttgact

SEQ ID NO: 462211 - DNA, 25 bp, Artificial
  probe
  misc_feature (1)..(25): SEQ ID NO: 7229; WAN024BKK; Start 6; Stop 30
gaaaataggaacaattagtacaaca

SEQ ID NO: 462212 - DNA, 25 bp, Artificial
  probe
  misc_feature (1)..(25): SEQ ID NO: 7229; WAN024BKK; Start 64; Stop 88
cttggaggaaaatttgactttaaat

SEQ ID NO: 462213 - DNA, 25 bp, Artificial
  probe
  misc_feature (1)..(25): SEQ ID NO: 7229; WAN024BKK; Start 18; Stop 42
aattagtacaacacttgtagtagtt

SEQ ID NO: 462214 - DNA, 25 bp, Artificial
  probe
  misc_feature (1)..(25): SEQ ID NO: 7229; WAN024BKK; Start 5; Stop 29
agaaaataggaacaattagtacaac

SEQ ID NO: 462215 - DNA, 25 bp, Artificial
  probe
  misc_feature (1)..(25): SEQ ID NO: 7229; WAN024BKK; Start 1; Stop 25
gtgaagaaaataggaacaattagta

SEQ ID NO: 462216 - DNA, 25 bp, Artificial
  probe
  misc_feature (1)..(25): SEQ ID NO: 7229; WAN024BKK; Start 3; Stop 27
gaagaaaataggaacaattagtaca

SEQ ID NO: 462217 - DNA, 25 bp, Artificial
  probe
  misc_feature (1)..(25): SEQ ID NO: 7230; WAN024BPP; Start 40; Stop 64
attattccgactctgggtgtttata

SEQ ID NO: 462218 - DNA, 25 bp, Artificial
  probe
  misc_feature (1)..(25): SEQ ID NO: 7230; WAN024BPP; Start 39; Stop 63
tattattccgactctgggtgtttat

SEQ ID NO: 462219 - DNA, 25 bp, Artificial
  probe
  misc_feature (1)..(25): SEQ ID NO: 7230; WAN024BPP; Start 38; Stop 62
atattattccgactctgggtgttta

SEQ ID NO: 462220 - DNA, 25 bp, Artificial
  probe
  misc_feature (1)..(25): SEQ ID NO: 7230; WAN024BPP; Start 43; Stop 67
attccgactctgggtgtttataatc

SEQ ID NO: 462221 - DNA, 25 bp, Artificial
  probe
  misc_feature (1)..(25): SEQ ID NO: 7230; WAN024BPP; Start 42; Stop 66
tattccgactctgggtgtttataat

SEQ ID NO: 462222 - DNA, 25 bp, Artificial
  probe
  misc_feature (1)..(25): SEQ ID NO: 7230; WAN024BPP; Start 37; Stop 61
aatattattccgactctgggtgttt

SEQ ID NO: 462223 - DNA, 25 bp, Artificial
  probe
  misc_feature (1)..(25): SEQ ID NO: 7230; WAN024BPP; Start 36; Stop 60
aaatattattccgactctgggtgtt

SEQ ID NO: 462224 - DNA, 25 bp, Artificial
  probe
  misc_feature (1)..(25): SEQ ID NO: 7230; WAN024BPP; Start 41; Stop 65
ttattccgactctgggtgtttataa

SEQ ID NO: 462225 - DNA, 25 bp, Artificial
  probe
  misc_feature (1)..(25): SEQ ID NO: 7230; WAN024BPP; Start 5; Stop 29
agaactatattgcccatatacttgg

SEQ ID NO: 462226 - DNA, 25 bp, Artificial
  probe
  misc_feature (1)..(25): SEQ ID NO: 7230; WAN024BPP; Start 1; Stop 25
gtgaagaactatattgcccatatac

SEQ ID NO: 462227 - DNA, 25 bp, Artificial
  probe
  misc_feature (1)..(25): SEQ ID NO: 7230; WAN024BPP; Start 2; Stop 26
tgaagaactatattgcccatatact

SEQ ID NO: 462228 - DNA, 25 bp, Artificial
  probe
  misc_feature (1)..(25): SEQ ID NO: 7230; WAN024BPP; Start 81; Stop 105
tcattttgtttcgcaggaagtctat

SEQ ID NO: 462229 - DNA, 25 bp, Artificial
  probe
  misc_feature (1)..(25): SEQ ID NO: 7230; WAN024BPP; Start 80; Stop 104
ttcattttgtttcgcaggaagtcta

SEQ ID NO: 462230 - DNA, 25 bp, Artificial
  probe
  misc_feature (1)..(25): SEQ ID NO: 7230; WAN024BPP; Start 76; Stop 100
gagattcattttgtttcgcaggaag

SEQ ID NO: 462231 - DNA, 25 bp, Artificial
  probe
  misc_feature (1)..(25): SEQ ID NO: 7230; WAN024BPP; Start 47; Stop 71
cgactctgggtgtttataatcgttt

SEQ ID NO: 462232 - DNA, 25 bp, Artificial
  probe
  misc_feature (1)..(25): SEQ ID NO: 7230; WAN024BPP; Start 78; Stop 102
gattcattttgtttcgcaggaagtc

SEQ ID NO: 462233 - DNA, 25 bp, Artificial
  probe
  misc_feature (1)..(25): SEQ ID NO: 7230; WAN024BPP; Start 79; Stop 103
attcattttgtttcgcaggaagtct

SEQ ID NO: 462234 - DNA, 25 bp, Artificial
  probe
  misc_feature (1)..(25): SEQ ID NO: 7230; WAN024BPP; Start 77; Stop 101
agattcattttgtttcgcaggaagt

SEQ ID NO: 462235 - DNA, 25 bp, Artificial
  probe
  misc_feature (1)..(25): SEQ ID NO: 7230; WAN024BPP; Start 49; Stop 73
actctgggtgtttataatcgttttg

SEQ ID NO: 462236 - DNA, 25 bp, Artificial
  probe
  misc_feature (1)..(25): SEQ ID NO: 7230; WAN024BPP; Start 50; Stop 74
ctctgggtgtttataatcgttttga

SEQ ID NO: 462237 - DNA, 25 bp, Artificial
  probe
  misc_feature (1)..(25): SEQ ID NO: 7230; WAN024BPP; Start 48; Stop 72
gactctgggtgtttataatcgtttt

SEQ ID NO: 462238 - DNA, 25 bp, Artificial
  probe
  misc_feature (1)..(25): SEQ ID NO: 7230; WAN024BPP; Start 35; Stop 59
aaaatattattccgactctgggtgt

SEQ ID NO: 462239 - DNA, 25 bp, Artificial
  probe
  misc_feature (1)..(25): SEQ ID NO: 7230; WAN024BPP; Start 75; Stop 99
tgagattcattttgtttcgcaggaa

SEQ ID NO: 462240 - DNA, 25 bp, Artificial
  probe
  misc_feature (1)..(25): SEQ ID NO: 7230; WAN024BPP; Start 53; Stop 77
tgggtgtttataatcgttttgatga

SEQ ID NO: 462241 - DNA, 25 bp, Artificial
  probe
  misc_feature (1)..(25): SEQ ID NO: 7230; WAN024BPP; Start 4; Stop 28
aagaactatattgcccatatacttg

SEQ ID NO: 462242 - DNA, 25 bp, Artificial
  probe
  misc_feature (1)..(25): SEQ ID NO: 7230; WAN024BPP; Start 52; Stop 76
ctgggtgtttataatcgttttgatg

SEQ ID NO: 462243 - DNA, 25 bp, Artificial
  probe
  misc_feature (1)..(25): SEQ ID NO: 7230; WAN024BPP; Start 34; Stop 58
gaaaatattattccgactctgggtg

SEQ ID NO: 462244 - DNA, 25 bp, Artificial
  probe
  misc_feature (1)..(25): SEQ ID NO: 7230; WAN024BPP; Start 51; Stop 75
tctgggtgtttataatcgttttgat

SEQ ID NO: 462245 - DNA, 25 bp, Artificial
  probe
  misc_feature (1)..(25): SEQ ID NO: 7230; WAN024BPP; Start 33; Stop 57
agaaaatattattccgactctgggt

SEQ ID NO: 462246 - DNA, 25 bp, Artificial
  probe
  misc_feature (1)..(25): SEQ ID NO: 7230; WAN024BPP; Start 54; Stop 78
gggtgtttataatcgttttgatgag

SEQ ID NO: 462247 - DNA, 25 bp, Artificial
  probe
  misc_feature (1)..(25): SEQ ID NO: 7230; WAN024BPP; Start 44; Stop 68
ttccgactctgggtgtttataatcg

SEQ ID NO: 462248 - DNA, 25 bp, Artificial
  probe
  misc_feature (1)..(25): SEQ ID NO: 7230; WAN024BPP; Start 32; Stop 56
aagaaaatattattccgactctggg

SEQ ID NO: 462249 - DNA, 25 bp, Artificial
  probe
  misc_feature (1)..(25): SEQ ID NO: 7230; WAN024BPP; Start 3; Stop 27
gaagaactatattgcccatatactt

SEQ ID NO: 462250 - DNA, 25 bp, Artificial
  probe
  misc_feature (1)..(25): SEQ ID NO: 7231; WAN024F5H; Start 52; Stop 76
aattaccttatcgtcttcattgtcg

SEQ ID NO: 462251 - DNA, 25 bp, Artificial
  probe
  misc_feature (1)..(25): SEQ ID NO: 7231; WAN024F5H; Start 58; Stop 82
cttatcgtcttcattgtcgctgtaa

SEQ ID NO: 462252 - DNA, 25 bp, Artificial
  probe
  misc_feature (1)..(25): SEQ ID NO: 7231; WAN024F5H; Start 53; Stop 77
attaccttatcgtcttcattgtcgc

SEQ ID NO: 462253 - DNA, 25 bp, Artificial
  probe
  misc_feature (1)..(25): SEQ ID NO: 7231; WAN024F5H; Start 84; Stop 108
gaacttccttggtcaactcaacata

SEQ ID NO: 462254 - DNA, 25 bp, Artificial
  probe
  misc_feature (1)..(25): SEQ ID NO: 7231; WAN024F5H; Start 85; Stop 109
aacttccttggtcaactcaacatac

SEQ ID NO: 462255 - DNA, 25 bp, Artificial
  probe
  misc_feature (1)..(25): SEQ ID NO: 7231; WAN024F5H; Start 54; Stop 78
ttaccttatcgtcttcattgtcgct

SEQ ID NO: 462256 - DNA, 25 bp, Artificial
  probe
  misc_feature (1)..(25): SEQ ID NO: 7231; WAN024F5H; Start 28; Stop 52
cgtatagaggagaacagatcgagta

SEQ ID NO: 462257 - DNA, 25 bp, Artificial
  probe
  misc_feature (1)..(25): SEQ ID NO: 7231; WAN024F5H; Start 83; Stop 107
agaacttccttggtcaactcaacat

SEQ ID NO: 462258 - DNA, 25 bp, Artificial
  probe
  misc_feature (1)..(25): SEQ ID NO: 7231; WAN024F5H; Start 57; Stop 81
ccttatcgtcttcattgtcgctgta

SEQ ID NO: 462259 - DNA, 25 bp, Artificial
  probe
  misc_feature (1)..(25): SEQ ID NO: 7231; WAN024F5H; Start 55; Stop 79
taccttatcgtcttcattgtcgctg

SEQ ID NO: 462260 - DNA, 25 bp, Artificial
  probe
  misc_feature (1)..(25): SEQ ID NO: 7231; WAN024F5H; Start 20; Stop 44
ttatccagcgtatagaggagaacag

SEQ ID NO: 462261 - DNA, 25 bp, Artificial
  probe
  misc_feature (1)..(25): SEQ ID NO: 7231; WAN024F5H; Start 82; Stop 106
aagaacttccttggtcaactcaaca

SEQ ID NO: 462262 - DNA, 25 bp, Artificial
  probe
  misc_feature (1)..(25): SEQ ID NO: 7231; WAN024F5H; Start 29; Stop 53
gtatagaggagaacagatcgagtaa

SEQ ID NO: 462263 - DNA, 25 bp, Artificial
  probe
  misc_feature (1)..(25): SEQ ID NO: 7231; WAN024F5H; Start 31; Stop 55
atagaggagaacagatcgagtaatt

SEQ ID NO: 462264 - DNA, 25 bp, Artificial
  probe
  misc_feature (1)..(25): SEQ ID NO: 7231; WAN024F5H; Start 132; Stop 156
tgaagttgtaaaggatatgaccagc

SEQ ID NO: 462265 - DNA, 25 bp, Artificial
  probe
  misc_feature (1)..(25): SEQ ID NO: 7231; WAN024F5H; Start 59; Stop 83
ttatcgtcttcattgtcgctgtaaa

SEQ ID NO: 462266 - DNA, 25 bp, Artificial
  probe
  misc_feature (1)..(25): SEQ ID NO: 7231; WAN024F5H; Start 66; Stop 90
cttcattgtcgctgtaaagaacttc

SEQ ID NO: 462267 - DNA, 25 bp, Artificial
  probe
  misc_feature (1)..(25): SEQ ID NO: 7231; WAN024F5H; Start 21; Stop 45
tatccagcgtatagaggagaacaga

SEQ ID NO: 462268 - DNA, 25 bp, Artificial
  probe
  misc_feature (1)..(25): SEQ ID NO: 7231; WAN024F5H; Start 322; Stop 346
atagcgagaaatgttccaaatcttg

SEQ ID NO: 462269 - DNA, 25 bp, Artificial
  probe
  misc_feature (1)..(25): SEQ ID NO: 7231; WAN024F5H; Start 80; Stop 104
taaagaacttccttggtcaactcaa

SEQ ID NO: 462270 - DNA, 25 bp, Artificial
  probe
  misc_feature (1)..(25): SEQ ID NO: 7231; WAN024F5H; Start 79; Stop 103
gtaaagaacttccttggtcaactca

SEQ ID NO: 462271 - DNA, 25 bp, Artificial
  probe
  misc_feature (1)..(25): SEQ ID NO: 7231; WAN024F5H; Start 78; Stop 102
tgtaaagaacttccttggtcaactc

SEQ ID NO: 462272 - DNA, 25 bp, Artificial
  probe
  misc_feature (1)..(25): SEQ ID NO: 7231; WAN024F5H; Start 77; Stop 101
ctgtaaagaacttccttggtcaact

SEQ ID NO: 462273 - DNA, 25 bp, Artificial
  probe
  misc_feature (1)..(25): SEQ ID NO: 7231; WAN024F5H; Start 325; Stop 349
gcgagaaatgttccaaatcttgtta

SEQ ID NO: 462274 - DNA, 25 bp, Artificial
  probe
  misc_feature (1)..(25): SEQ ID NO: 7231; WAN024F5H; Start 133; Stop 157
gaagttgtaaaggatatgaccagcc

SEQ ID NO: 462275 - DNA, 25 bp, Artificial
  probe
  misc_feature (1)..(25): SEQ ID NO: 7231; WAN024F5H; Start 131; Stop 155
atgaagttgtaaaggatatgaccag

SEQ ID NO: 462276 - DNA, 25 bp, Artificial
  probe
  misc_feature (1)..(25): SEQ ID NO: 7231; WAN024F5H; Start 32; Stop 56
tagaggagaacagatcgagtaatta

SEQ ID NO: 462277 - DNA, 25 bp, Artificial
  probe
  misc_feature (1)..(25): SEQ ID NO: 7231; WAN024F5H; Start 60; Stop 84
tatcgtcttcattgtcgctgtaaag

SEQ ID NO: 462278 - DNA, 25 bp, Artificial
  probe
  misc_feature (1)..(25): SEQ ID NO: 7231; WAN024F5H; Start 323; Stop 347
tagcgagaaatgttccaaatcttgt

SEQ ID NO: 462279 - DNA, 25 bp, Artificial
  probe
  misc_feature (1)..(25): SEQ ID NO: 7231; WAN024F5H; Start 30; Stop 54
tatagaggagaacagatcgagtaat

SEQ ID NO: 462280 - DNA, 25 bp, Artificial
  probe
  misc_feature (1)..(25): SEQ ID NO: 7231; WAN024F5H; Start 321; Stop 345
tatagcgagaaatgttccaaatctt

SEQ ID NO: 462281 - DNA, 25 bp, Artificial
  probe
  misc_feature (1)..(25): SEQ ID NO: 7231; WAN024F5H; Start 130; Stop 154
aatgaagttgtaaaggatatgacca

SEQ ID NO: 462282 - DNA, 25 bp, Artificial
  probe
  misc_feature (1)..(25): SEQ ID NO: 7231; WAN024F5H; Start 134; Stop 158
aagttgtaaaggatatgaccagcca

SEQ ID NO: 462283 - DNA, 25 bp, Artificial
  probe
  misc_feature (1)..(25): SEQ ID NO: 7232; WAN024CQ6; Start 75; Stop 99
aataatagcctggtctctcaacatc

SEQ ID NO: 462284 - DNA, 25 bp, Artificial
  probe
  misc_feature (1)..(25): SEQ ID NO: 7232; WAN024CQ6; Start 74; Stop 98
taataatagcctggtctctcaacat

SEQ ID NO: 462285 - DNA, 25 bp, Artificial
  probe
  misc_feature (1)..(25): SEQ ID NO: 7232; WAN024CQ6; Start 73; Stop 97
ataataatagcctggtctctcaaca

SEQ ID NO: 462286 - DNA, 25 bp, Artificial
  probe
  misc_feature (1)..(25): SEQ ID NO: 7232; WAN024CQ6; Start 72; Stop 96
gataataatagcctggtctctcaac

SEQ ID NO: 462287 - DNA, 25 bp, Artificial
  probe
  misc_feature (1)..(25): SEQ ID NO: 7232; WAN024CQ6; Start 71; Stop 95
tgataataatagcctggtctctcaa

SEQ ID NO: 462288 - DNA, 25 bp, Artificial
  probe
  misc_feature (1)..(25): SEQ ID NO: 7232; WAN024CQ6; Start 70; Stop 94
ttgataataatagcctggtctctca

SEQ ID NO: 462289 - DNA, 25 bp, Artificial
  probe
  misc_feature (1)..(25): SEQ ID NO: 7232; WAN024CQ6; Start 76; Stop 100
ataatagcctggtctctcaacatcg

SEQ ID NO: 462290 - DNA, 25 bp, Artificial
  probe
  misc_feature (1)..(25): SEQ ID NO: 7232; WAN024CQ6; Start 68; Stop 92
cattgataataatagcctggtctct

SEQ ID NO: 462291 - DNA, 25 bp, Artificial
  probe
  misc_feature (1)..(25): SEQ ID NO: 7232; WAN024CQ6; Start 69; Stop 93
attgataataatagcctggtctctc

SEQ ID NO: 462292 - DNA, 25 bp, Artificial
  probe
  misc_feature (1)..(25): SEQ ID NO: 7232; WAN024CQ6; Start 142; Stop 166
agtaaacctcatcacagacaacaaa

SEQ ID NO: 462293 - DNA, 25 bp, Artificial
  probe
  misc_feature (1)..(25): SEQ ID NO: 7232; WAN024CQ6; Start 91; Stop 115
ctcaacatcgttcctagagacacat

SEQ ID NO: 462294 - DNA, 25 bp, Artificial
  probe
  misc_feature (1)..(25): SEQ ID NO: 7232; WAN024CQ6; Start 67; Stop 91
ccattgataataatagcctggtctc

SEQ ID NO: 462295 - DNA, 25 bp, Artificial
  probe
  misc_feature (1)..(25): SEQ ID NO: 7232; WAN024CQ6; Start 77; Stop 101
taatagcctggtctctcaacatcgt

SEQ ID NO: 462296 - DNA, 25 bp, Artificial
  probe
  misc_feature (1)..(25): SEQ ID NO: 7232; WAN024CQ6; Start 92; Stop 116
tcaacatcgttcctagagacacatg

SEQ ID NO: 462297 - DNA, 25 bp, Artificial
  probe
  misc_feature (1)..(25): SEQ ID NO: 7232; WAN024CQ6; Start 122; Stop 146
gcctgtgtaggtcaattctgagtaa

SEQ ID NO: 462298 - DNA, 25 bp, Artificial
  probe
  misc_feature (1)..(25): SEQ ID NO: 7232; WAN024CQ6; Start 52; Stop 76
tgcgatttagacaaaccattgataa

SEQ ID NO: 462299 - DNA, 25 bp, Artificial
  probe
  misc_feature (1)..(25): SEQ ID NO: 7232; WAN024CQ6; Start 51; Stop 75
atgcgatttagacaaaccattgata

SEQ ID NO: 462300 - DNA, 25 bp, Artificial
  probe
  misc_feature (1)..(25): SEQ ID NO: 7232; WAN024CQ6; Start 124; Stop 148
ctgtgtaggtcaattctgagtaaac

SEQ ID NO: 462301 - DNA, 25 bp, Artificial
  probe
  misc_feature (1)..(25): SEQ ID NO: 7232; WAN024CQ6; Start 201; Stop 225
tctaactgctctcgactgtaggtaa

SEQ ID NO: 462302 - DNA, 25 bp, Artificial
  probe
  misc_feature (1)..(25): SEQ ID NO: 7232; WAN024CQ6; Start 141; Stop 165
gagtaaacctcatcacagacaacaa

SEQ ID NO: 462303 - DNA, 25 bp, Artificial
  probe
  misc_feature (1)..(25): SEQ ID NO: 7232; WAN024CQ6; Start 53; Stop 77
gcgatttagacaaaccattgataat

SEQ ID NO: 462304 - DNA, 25 bp, Artificial
  probe
  misc_feature (1)..(25): SEQ ID NO: 7232; WAN024CQ6; Start 50; Stop 74
catgcgatttagacaaaccattgat

SEQ ID NO: 462305 - DNA, 25 bp, Artificial
  probe
  misc_feature (1)..(25): SEQ ID NO: 7232; WAN024CQ6; Start 123; Stop 147
cctgtgtaggtcaattctgagtaaa

SEQ ID NO: 462306 - DNA, 25 bp, Artificial
  probe
  misc_feature (1)..(25): SEQ ID NO: 7232; WAN024CQ6; Start 200; Stop 224
ctctaactgctctcgactgtaggta

SEQ ID NO: 462307 - DNA, 25 bp, Artificial
  probe
  misc_feature (1)..(25): SEQ ID NO: 7232; WAN024CQ6; Start 84; Stop 108
ctggtctctcaacatcgttcctaga

SEQ ID NO: 462308 - DNA, 25 bp, Artificial
  probe
  misc_feature (1)..(25): SEQ ID NO: 7232; WAN024CQ6; Start 93; Stop 117
caacatcgttcctagagacacatgg

SEQ ID NO: 462309 - DNA, 25 bp, Artificial
  probe
  misc_feature (1)..(25): SEQ ID NO: 7232; WAN024CQ6; Start 125; Stop 149
tgtgtaggtcaattctgagtaaacc

SEQ ID NO: 462310 - DNA, 25 bp, Artificial
  probe
  misc_feature (1)..(25): SEQ ID NO: 7232; WAN024CQ6; Start 78; Stop 102
aatagcctggtctctcaacatcgtt

SEQ ID NO: 462311 - DNA, 25 bp, Artificial
  probe
  misc_feature (1)..(25): SEQ ID NO: 7232; WAN024CQ6; Start 62; Stop 86
acaaaccattgataataatagcctg

SEQ ID NO: 462312 - DNA, 25 bp, Artificial
  probe
  misc_feature (1)..(25): SEQ ID NO: 7232; WAN024CQ6; Start 61; Stop 85
gacaaaccattgataataatagcct

SEQ ID NO: 462313 - DNA, 25 bp, Artificial
  probe
  misc_feature (1)..(25): SEQ ID NO: 7232; WAN024CQ6; Start 60; Stop 84
agacaaaccattgataataatagcc

SEQ ID NO: 462314 - DNA, 25 bp, Artificial
  probe
  misc_feature (1)..(25): SEQ ID NO: 7232; WAN024CQ6; Start 79; Stop 103
atagcctggtctctcaacatcgttc

SEQ ID NO: 462315 - DNA, 25 bp, Artificial
  probe
  misc_feature (1)..(25): SEQ ID NO: 7232; WAN024CQ6; Start 63; Stop 87
caaaccattgataataatagcctgg

SEQ ID NO: 462316 - DNA, 25 bp, Artificial
  probe
  misc_feature (1)..(25): SEQ ID NO: 7233; WAN024DW6; Start 51; Stop 75
ccatagtgaagacagtatccaagtg

SEQ ID NO: 462317 - DNA, 25 bp, Artificial
  probe
  misc_feature (1)..(25): SEQ ID NO: 7233; WAN024DW6; Start 49; Stop 73
taccatagtgaagacagtatccaag

SEQ ID NO: 462318 - DNA, 25 bp, Artificial
  probe
  misc_feature (1)..(25): SEQ ID NO: 7233; WAN024DW6; Start 48; Stop 72
ctaccatagtgaagacagtatccaa

SEQ ID NO: 462319 - DNA, 25 bp, Artificial
  probe
  misc_feature (1)..(25): SEQ ID NO: 7233; WAN024DW6; Start 50; Stop 74
accatagtgaagacagtatccaagt

SEQ ID NO: 462320 - DNA, 25 bp, Artificial
  probe
  misc_feature (1)..(25): SEQ ID NO: 7233; WAN024DW6; Start 47; Stop 71
tctaccatagtgaagacagtatcca

SEQ ID NO: 462321 - DNA, 25 bp, Artificial
  probe
  misc_feature (1)..(25): SEQ ID NO: 7233; WAN024DW6; Start 52; Stop 76
catagtgaagacagtatccaagtgc

SEQ ID NO: 462322 - DNA, 25 bp, Artificial
  probe
  misc_feature (1)..(25): SEQ ID NO: 7233; WAN024DW6; Start 24; Stop 48
ggtgaatagtgaacttgtcatagtc

SEQ ID NO: 462323 - DNA, 25 bp, Artificial
  probe
  misc_feature (1)..(25): SEQ ID NO: 7233; WAN024DW6; Start 36; Stop 60
acttgtcatagtctaccatagtgaa

SEQ ID NO: 462324 - DNA, 25 bp, Artificial
  probe
  misc_feature (1)..(25): SEQ ID NO: 7233; WAN024DW6; Start 35; Stop 59
aacttgtcatagtctaccatagtga

SEQ ID NO: 462325 - DNA, 25 bp, Artificial
  probe
  misc_feature (1)..(25): SEQ ID NO: 7233; WAN024DW6; Start 33; Stop 57
tgaacttgtcatagtctaccatagt

SEQ ID NO: 462326 - DNA, 25 bp, Artificial
  probe
  misc_feature (1)..(25): SEQ ID NO: 7233; WAN024DW6; Start 31; Stop 55
agtgaacttgtcatagtctaccata

SEQ ID NO: 462327 - DNA, 25 bp, Artificial
  probe
  misc_feature (1)..(25): SEQ ID NO: 7233; WAN024DW6; Start 30; Stop 54
tagtgaacttgtcatagtctaccat

SEQ ID NO: 462328 - DNA, 25 bp, Artificial
  probe
  misc_feature (1)..(25): SEQ ID NO: 7233; WAN024DW6; Start 29; Stop 53
atagtgaacttgtcatagtctacca

SEQ ID NO: 462329 - DNA, 25 bp, Artificial
  probe
  misc_feature (1)..(25): SEQ ID NO: 7233; WAN024DW6; Start 38; Stop 62
ttgtcatagtctaccatagtgaaga

SEQ ID NO: 462330 - DNA, 25 bp, Artificial
  probe
  misc_feature (1)..(25): SEQ ID NO: 7233; WAN024DW6; Start 34; Stop 58
gaacttgtcatagtctaccatagtg

SEQ ID NO: 462331 - DNA, 25 bp, Artificial
  probe
  misc_feature (1)..(25): SEQ ID NO: 7233; WAN024DW6; Start 32; Stop 56
gtgaacttgtcatagtctaccatag

SEQ ID NO: 462332 - DNA, 25 bp, Artificial
  probe
  misc_feature (1)..(25): SEQ ID NO: 7233; WAN024DW6; Start 25; Stop 49
gtgaatagtgaacttgtcatagtct

SEQ ID NO: 462333 - DNA, 25 bp, Artificial
  probe
  misc_feature (1)..(25): SEQ ID NO: 7233; WAN024DW6; Start 37; Stop 61
cttgtcatagtctaccatagtgaag

SEQ ID NO: 462334 - DNA, 25 bp, Artificial
  probe
  misc_feature (1)..(25): SEQ ID NO: 7233; WAN024DW6; Start 28; Stop 52
aatagtgaacttgtcatagtctacc

SEQ ID NO: 462335 - DNA, 25 bp, Artificial
  probe
  misc_feature (1)..(25): SEQ ID NO: 7233; WAN024DW6; Start 59; Stop 83
aagacagtatccaagtgcatgaatt

SEQ ID NO: 462336 - DNA, 25 bp, Artificial
  probe
  misc_feature (1)..(25): SEQ ID NO: 7233; WAN024DW6; Start 58; Stop 82
gaagacagtatccaagtgcatgaat

SEQ ID NO: 462337 - DNA, 25 bp, Artificial
  probe
  misc_feature (1)..(25): SEQ ID NO: 7233; WAN024DW6; Start 16; Stop 40
gatttctgggtgaatagtgaacttg

SEQ ID NO: 462338 - DNA, 25 bp, Artificial
  probe
  misc_feature (1)..(25): SEQ ID NO: 7233; WAN024DW6; Start 17; Stop 41
atttctgggtgaatagtgaacttgt

SEQ ID NO: 462339 - DNA, 25 bp, Artificial
  probe
  misc_feature (1)..(25): SEQ ID NO: 7233; WAN024DW6; Start 176; Stop 200
tctgtacgttgagagatacctactg

SEQ ID NO: 462340 - DNA, 25 bp, Artificial
  probe
  misc_feature (1)..(25): SEQ ID NO: 7233; WAN024DW6; Start 175; Stop 199
gtctgtacgttgagagatacctact

SEQ ID NO: 462341 - DNA, 25 bp, Artificial
  probe
  misc_feature (1)..(25): SEQ ID NO: 7233; WAN024DW6; Start 54; Stop 78
tagtgaagacagtatccaagtgcat

SEQ ID NO: 462342 - DNA, 25 bp, Artificial
  probe
  misc_feature (1)..(25): SEQ ID NO: 7233; WAN024DW6; Start 53; Stop 77
atagtgaagacagtatccaagtgca

SEQ ID NO: 462343 - DNA, 25 bp, Artificial
  probe
  misc_feature (1)..(25): SEQ ID NO: 7233; WAN024DW6; Start 18; Stop 42
tttctgggtgaatagtgaacttgtc

SEQ ID NO: 462344 - DNA, 25 bp, Artificial
  probe
  misc_feature (1)..(25): SEQ ID NO: 7233; WAN024DW6; Start 83; Stop 107
ttacggttgttagcaaattcaaagg

SEQ ID NO: 462345 - DNA, 25 bp, Artificial
  probe
  misc_feature (1)..(25): SEQ ID NO: 7233; WAN024DW6; Start 23; Stop 47
gggtgaatagtgaacttgtcatagt

SEQ ID NO: 462346 - DNA, 25 bp, Artificial
  probe
  misc_feature (1)..(25): SEQ ID NO: 7233; WAN024DW6; Start 22; Stop 46
tgggtgaatagtgaacttgtcatag

SEQ ID NO: 462347 - DNA, 25 bp, Artificial
  probe
  misc_feature (1)..(25): SEQ ID NO: 7233; WAN024DW6; Start 21; Stop 45
ctgggtgaatagtgaacttgtcata

SEQ ID NO: 462348 - DNA, 25 bp, Artificial
  probe
  misc_feature (1)..(25): SEQ ID NO: 7233; WAN024DW6; Start 15; Stop 39
cgatttctgggtgaatagtgaactt

SEQ ID NO: 462349 - DNA, 25 bp, Artificial
  probe
  misc_feature (1)..(25): SEQ ID NO: 7234; WAN024B78; Start 14; Stop 38
tccaatgacttacgaagagatgatg

SEQ ID NO: 462350 - DNA, 25 bp, Artificial
  probe
  misc_feature (1)..(25): SEQ ID NO: 7234; WAN024B78; Start 13; Stop 37
ctccaatgacttacgaagagatgat

SEQ ID NO: 462351 - DNA, 25 bp, Artificial
  probe
  misc_feature (1)..(25): SEQ ID NO: 7234; WAN024B78; Start 12; Stop 36
gctccaatgacttacgaagagatga

SEQ ID NO: 462352 - DNA, 25 bp, Artificial
  probe
  misc_feature (1)..(25): SEQ ID NO: 7234; WAN024B78; Start 71; Stop 95
gtttctcttaccaacattaaccaca

SEQ ID NO: 462353 - DNA, 25 bp, Artificial
  probe
  misc_feature (1)..(25): SEQ ID NO: 7234; WAN024B78; Start 70; Stop 94
agtttctcttaccaacattaaccac

SEQ ID NO: 462354 - DNA, 25 bp, Artificial
  probe
  misc_feature (1)..(25): SEQ ID NO: 7234; WAN024B78; Start 62; Stop 86
gtttcagaagtttctcttaccaaca

SEQ ID NO: 462355 - DNA, 25 bp, Artificial
  probe
  misc_feature (1)..(25): SEQ ID NO: 7234; WAN024B78; Start 69; Stop 93
aagtttctcttaccaacattaacca

SEQ ID NO: 462356 - DNA, 25 bp, Artificial
  probe
  misc_feature (1)..(25): SEQ ID NO: 7234; WAN024B78; Start 54; Stop 78
gaagtatggtttcagaagtttctct

SEQ ID NO: 462357 - DNA, 25 bp, Artificial
  probe
  misc_feature (1)..(25): SEQ ID NO: 7234; WAN024B78; Start 68; Stop 92
gaagtttctcttaccaacattaacc

SEQ ID NO: 462358 - DNA, 25 bp, Artificial
  probe
  misc_feature (1)..(25): SEQ ID NO: 7234; WAN024B78; Start 64; Stop 88
ttcagaagtttctcttaccaacatt

SEQ ID NO: 462359 - DNA, 25 bp, Artificial
  probe
  misc_feature (1)..(25): SEQ ID NO: 7234; WAN024B78; Start 63; Stop 87
tttcagaagtttctcttaccaacat

SEQ ID NO: 462360 - DNA, 25 bp, Artificial
  probe
  misc_feature (1)..(25): SEQ ID NO: 7234; WAN024B78; Start 55; Stop 79
aagtatggtttcagaagtttctctt

SEQ ID NO: 462361 - DNA, 25 bp, Artificial
  probe
  misc_feature (1)..(25): SEQ ID NO: 7234; WAN024B78; Start 11; Stop 35
cgctccaatgacttacgaagagatg

SEQ ID NO: 462362 - DNA, 25 bp, Artificial
  probe
  misc_feature (1)..(25): SEQ ID NO: 7234; WAN024B78; Start 61; Stop 85
ggtttcagaagtttctcttaccaac

SEQ ID NO: 462363 - DNA, 25 bp, Artificial
  probe
  misc_feature (1)..(25): SEQ ID NO: 7234; WAN024B78; Start 65; Stop 89
tcagaagtttctcttaccaacatta

SEQ ID NO: 462364 - DNA, 25 bp, Artificial
  probe
  misc_feature (1)..(25): SEQ ID NO: 7234; WAN024B78; Start 57; Stop 81
gtatggtttcagaagtttctcttac

SEQ ID NO: 462365 - DNA, 25 bp, Artificial
  probe
  misc_feature (1)..(25): SEQ ID NO: 7234; WAN024B78; Start 56; Stop 80
agtatggtttcagaagtttctctta

SEQ ID NO: 462366 - DNA, 25 bp, Artificial
  probe
  misc_feature (1)..(25): SEQ ID NO: 7234; WAN024B78; Start 58; Stop 82
tatggtttcagaagtttctcttacc

SEQ ID NO: 462367 - DNA, 25 bp, Artificial
  probe
  misc_feature (1)..(25): SEQ ID NO: 7234; WAN024B78; Start 67; Stop 91
agaagtttctcttaccaacattaac

SEQ ID NO: 462368 - DNA, 25 bp, Artificial
  probe
  misc_feature (1)..(25): SEQ ID NO: 7234; WAN024B78; Start 66; Stop 90
cagaagtttctcttaccaacattaa

SEQ ID NO: 462369 - DNA, 25 bp, Artificial
  probe
  misc_feature (1)..(25): SEQ ID NO: 7234; WAN024B78; Start 53; Stop 77
tgaagtatggtttcagaagtttctc

SEQ ID NO: 462370 - DNA, 25 bp, Artificial
  probe
  misc_feature (1)..(25): SEQ ID NO: 7234; WAN024B78; Start 52; Stop 76
ttgaagtatggtttcagaagtttct

SEQ ID NO: 462371 - DNA, 25 bp, Artificial
  probe
  misc_feature (1)..(25): SEQ ID NO: 7234; WAN024B78; Start 10; Stop 34
tcgctccaatgacttacgaagagat

SEQ ID NO: 462372 - DNA, 25 bp, Artificial
  probe
  misc_feature (1)..(25): SEQ ID NO: 7234; WAN024B78; Start 51; Stop 75
tttgaagtatggtttcagaagtttc

SEQ ID NO: 462373 - DNA, 25 bp, Artificial
  probe
  misc_feature (1)..(25): SEQ ID NO: 7234; WAN024B78; Start 129; Stop 153
aggacaaatcgatcaggacagtaaa

SEQ ID NO: 462374 - DNA, 25 bp, Artificial
  probe
  misc_feature (1)..(25): SEQ ID NO: 7234; WAN024B78; Start 128; Stop 152
caggacaaatcgatcaggacagtaa

SEQ ID NO: 462375 - DNA, 25 bp, Artificial
  probe
  misc_feature (1)..(25): SEQ ID NO: 7234; WAN024B78; Start 139; Stop 163
gatcaggacagtaaaatcgaattct

SEQ ID NO: 462376 - DNA, 25 bp, Artificial
  probe
  misc_feature (1)..(25): SEQ ID NO: 7234; WAN024B78; Start 143; Stop 167
aggacagtaaaatcgaattctaaca

SEQ ID NO: 462377 - DNA, 25 bp, Artificial
  probe
  misc_feature (1)..(25): SEQ ID NO: 7234; WAN024B78; Start 142; Stop 166
caggacagtaaaatcgaattctaac

SEQ ID NO: 462378 - DNA, 25 bp, Artificial
  probe
  misc_feature (1)..(25): SEQ ID NO: 7234; WAN024B78; Start 141; Stop 165
tcaggacagtaaaatcgaattctaa

SEQ ID NO: 462379 - DNA, 25 bp, Artificial
  probe
  misc_feature (1)..(25): SEQ ID NO: 7234; WAN024B78; Start 127; Stop 151
acaggacaaatcgatcaggacagta

SEQ ID NO: 462380 - DNA, 25 bp, Artificial
  probe
  misc_feature (1)..(25): SEQ ID NO: 7234; WAN024B78; Start 60; Stop 84
tggtttcagaagtttctcttaccaa

SEQ ID NO: 462381 - DNA, 25 bp, Artificial
  probe
  misc_feature (1)..(25): SEQ ID NO: 7234; WAN024B78; Start 59; Stop 83
atggtttcagaagtttctcttacca

SEQ ID NO: 462382 - DNA, 25 bp, Artificial
  probe
  misc_feature (1)..(25): SEQ ID NO: 7235; WAN024C2T; Start 37; Stop 61
ctactatttggagttgtcagcctaa

SEQ ID NO: 462383 - DNA, 25 bp, Artificial
  probe
  misc_feature (1)..(25): SEQ ID NO: 7235; WAN024C2T; Start 38; Stop 62
tactatttggagttgtcagcctaaa

SEQ ID NO: 462384 - DNA, 25 bp, Artificial
  probe
  misc_feature (1)..(25): SEQ ID NO: 7235; WAN024C2T; Start 43; Stop 67
tttggagttgtcagcctaaattcag

SEQ ID NO: 462385 - DNA, 25 bp, Artificial
  probe
  misc_feature (1)..(25): SEQ ID NO: 7235; WAN024C2T; Start 33; Stop 57
aaacctactatttggagttgtcagc

SEQ ID NO: 462386 - DNA, 25 bp, Artificial
  probe
  misc_feature (1)..(25): SEQ ID NO: 7235; WAN024C2T; Start 39; Stop 63
actatttggagttgtcagcctaaat

SEQ ID NO: 462387 - DNA, 25 bp, Artificial
  probe
  misc_feature (1)..(25): SEQ ID NO: 7235; WAN024C2T; Start 41; Stop 65
tatttggagttgtcagcctaaattc

SEQ ID NO: 462388 - DNA, 25 bp, Artificial
  probe
  misc_feature (1)..(25): SEQ ID NO: 7235; WAN024C2T; Start 40; Stop 64
ctatttggagttgtcagcctaaatt

SEQ ID NO: 462389 - DNA, 25 bp, Artificial
  probe
  misc_feature (1)..(25): SEQ ID NO: 7235; WAN024C2T; Start 42; Stop 66
atttggagttgtcagcctaaattca

SEQ ID NO: 462390 - DNA, 25 bp, Artificial
  probe
  misc_feature (1)..(25): SEQ ID NO: 7235; WAN024C2T; Start 36; Stop 60
cctactatttggagttgtcagccta

SEQ ID NO: 462391 - DNA, 25 bp, Artificial
  probe
  misc_feature (1)..(25): SEQ ID NO: 7235; WAN024C2T; Start 20; Stop 44
gcaatgtattctcaaacctactatt

SEQ ID NO: 462392 - DNA, 25 bp, Artificial
  probe
  misc_feature (1)..(25): SEQ ID NO: 7235; WAN024C2T; Start 34; Stop 58
aacctactatttggagttgtcagcc

SEQ ID NO: 462393 - DNA, 25 bp, Artificial
  probe
  misc_feature (1)..(25): SEQ ID NO: 7235; WAN024C2T; Start 17; Stop 41
catgcaatgtattctcaaacctact

SEQ ID NO: 462394 - DNA, 25 bp, Artificial
  probe
  misc_feature (1)..(25): SEQ ID NO: 7235; WAN024C2T; Start 16; Stop 40
tcatgcaatgtattctcaaacctac

SEQ ID NO: 462395 - DNA, 25 bp, Artificial
  probe
  misc_feature (1)..(25): SEQ ID NO: 7235; WAN024C2T; Start 14; Stop 38
tttcatgcaatgtattctcaaacct

SEQ ID NO: 462396 - DNA, 25 bp, Artificial
  probe
  misc_feature (1)..(25): SEQ ID NO: 7235; WAN024C2T; Start 10; Stop 34
tggatttcatgcaatgtattctcaa

SEQ ID NO: 462397 - DNA, 25 bp, Artificial
  probe
  misc_feature (1)..(25): SEQ ID NO: 7235; WAN024C2T; Start 7; Stop 31
tgttggatttcatgcaatgtattct

SEQ ID NO: 462398 - DNA, 25 bp, Artificial
  probe
  misc_feature (1)..(25): SEQ ID NO: 7235; WAN024C2T; Start 9; Stop 33
ttggatttcatgcaatgtattctca

SEQ ID NO: 462399 - DNA, 25 bp, Artificial
  probe
  misc_feature (1)..(25): SEQ ID NO: 7235; WAN024C2T; Start 87; Stop 111
cgaaccagtatcatactttaaggct

SEQ ID NO: 462400 - DNA, 25 bp, Artificial
  probe
  misc_feature (1)..(25): SEQ ID NO: 7235; WAN024C2T; Start 8; Stop 32
gttggatttcatgcaatgtattctc

SEQ ID NO: 462401 - DNA, 25 bp, Artificial
  probe
  misc_feature (1)..(25): SEQ ID NO: 7235; WAN024C2T; Start 86; Stop 110
acgaaccagtatcatactttaaggc

SEQ ID NO: 462402 - DNA, 25 bp, Artificial
  probe
  misc_feature (1)..(25): SEQ ID NO: 7235; WAN024C2T; Start 15; Stop 39
ttcatgcaatgtattctcaaaccta

SEQ ID NO: 462403 - DNA, 25 bp, Artificial
  probe
  misc_feature (1)..(25): SEQ ID NO: 7235; WAN024C2T; Start 6; Stop 30
ttgttggatttcatgcaatgtattc

SEQ ID NO: 462404 - DNA, 25 bp, Artificial
  probe
  misc_feature (1)..(25): SEQ ID NO: 7235; WAN024C2T; Start 13; Stop 37
atttcatgcaatgtattctcaaacc

SEQ ID NO: 462405 - DNA, 25 bp, Artificial
  probe
  misc_feature (1)..(25): SEQ ID NO: 7235; WAN024C2T; Start 11; Stop 35
ggatttcatgcaatgtattctcaaa

SEQ ID NO: 462406 - DNA, 25 bp, Artificial
  probe
  misc_feature (1)..(25): SEQ ID NO: 7235; WAN024C2T; Start 71; Stop 95
cacctaaaatacaaaacgaaccagt

SEQ ID NO: 462407 - DNA, 25 bp, Artificial
  probe
  misc_feature (1)..(25): SEQ ID NO: 7235; WAN024C2T; Start 31; Stop 55
tcaaacctactatttggagttgtca

SEQ ID NO: 462408 - DNA, 25 bp, Artificial
  probe
  misc_feature (1)..(25): SEQ ID NO: 7235; WAN024C2T; Start 88; Stop 112
gaaccagtatcatactttaaggctt

SEQ ID NO: 462409 - DNA, 25 bp, Artificial
  probe
  misc_feature (1)..(25): SEQ ID NO: 7235; WAN024C2T; Start 85; Stop 109
aacgaaccagtatcatactttaagg

SEQ ID NO: 462410 - DNA, 25 bp, Artificial
  probe
  misc_feature (1)..(25): SEQ ID NO: 7235; WAN024C2T; Start 32; Stop 56
caaacctactatttggagttgtcag

SEQ ID NO: 462411 - DNA, 25 bp, Artificial
  probe
  misc_feature (1)..(25): SEQ ID NO: 7235; WAN024C2T; Start 29; Stop 53
tctcaaacctactatttggagttgt

SEQ ID NO: 462412 - DNA, 25 bp, Artificial
  probe
  misc_feature (1)..(25): SEQ ID NO: 7235; WAN024C2T; Start 30; Stop 54
ctcaaacctactatttggagttgtc

SEQ ID NO: 462413 - DNA, 25 bp, Artificial
  probe
  misc_feature (1)..(25): SEQ ID NO: 7235; WAN024C2T; Start 19; Stop 43
tgcaatgtattctcaaacctactat

SEQ ID NO: 462414 - DNA, 25 bp, Artificial
  probe
  misc_feature (1)..(25): SEQ ID NO: 7235; WAN024C2T; Start 18; Stop 42
atgcaatgtattctcaaacctacta

SEQ ID NO: 462415 - DNA, 25 bp, Artificial
  probe
  misc_feature (1)..(25): SEQ ID NO: 7236; WAN024EY7; Start 10; Stop 34
aggaagctaccaattctaatctctt

SEQ ID NO: 462416 - DNA, 25 bp, Artificial
  probe
  misc_feature (1)..(25): SEQ ID NO: 7236; WAN024EY7; Start 9; Stop 33
aaggaagctaccaattctaatctct

SEQ ID NO: 462417 - DNA, 25 bp, Artificial
  probe
  misc_feature (1)..(25): SEQ ID NO: 7236; WAN024EY7; Start 72; Stop 96
ctcttattataccacatttcggctg

SEQ ID NO: 462418 - DNA, 25 bp, Artificial
  probe
  misc_feature (1)..(25): SEQ ID NO: 7236; WAN024EY7; Start 71; Stop 95
cctcttattataccacatttcggct

SEQ ID NO: 462419 - DNA, 25 bp, Artificial
  probe
  misc_feature (1)..(25): SEQ ID NO: 7236; WAN024EY7; Start 70; Stop 94
acctcttattataccacatttcggc

SEQ ID NO: 462420 - DNA, 25 bp, Artificial
  probe
  misc_feature (1)..(25): SEQ ID NO: 7236; WAN024EY7; Start 37; Stop 61
aaatcatcttctctcactttccaaa

SEQ ID NO: 462421 - DNA, 25 bp, Artificial
  probe
  misc_feature (1)..(25): SEQ ID NO: 7236; WAN024EY7; Start 69; Stop 93
tacctcttattataccacatttcgg

SEQ ID NO: 462422 - DNA, 25 bp, Artificial
  probe
  misc_feature (1)..(25): SEQ ID NO: 7236; WAN024EY7; Start 30; Stop 54
ctctttgaaatcatcttctctcact

SEQ ID NO: 462423 - DNA, 25 bp, Artificial
  probe
  misc_feature (1)..(25): SEQ ID NO: 7236; WAN024EY7; Start 29; Stop 53
tctctttgaaatcatcttctctcac

SEQ ID NO: 462424 - DNA, 25 bp, Artificial
  probe
  misc_feature (1)..(25): SEQ ID NO: 7236; WAN024EY7; Start 180; Stop 204
aaatcactgtaaagaccaacatcat

SEQ ID NO: 462425 - DNA, 25 bp, Artificial
  probe
  misc_feature (1)..(25): SEQ ID NO: 7236; WAN024EY7; Start 31; Stop 55
tctttgaaatcatcttctctcactt

SEQ ID NO: 462426 - DNA, 25 bp, Artificial
  probe
  misc_feature (1)..(25): SEQ ID NO: 7236; WAN024EY7; Start 181; Stop 205
aatcactgtaaagaccaacatcatg

SEQ ID NO: 462427 - DNA, 25 bp, Artificial
  probe
  misc_feature (1)..(25): SEQ ID NO: 7236; WAN024EY7; Start 4; Stop 28
acacaaaggaagctaccaattctaa

SEQ ID NO: 462428 - DNA, 25 bp, Artificial
  probe
  misc_feature (1)..(25): SEQ ID NO: 7236; WAN024EY7; Start 5; Stop 29
cacaaaggaagctaccaattctaat

SEQ ID NO: 462429 - DNA, 25 bp, Artificial
  probe
  misc_feature (1)..(25): SEQ ID NO: 7236; WAN024EY7; Start 3; Stop 27
gacacaaaggaagctaccaattcta

SEQ ID NO: 462430 - DNA, 25 bp, Artificial
  probe
  misc_feature (1)..(25): SEQ ID NO: 7236; WAN024EY7; Start 73; Stop 97
tcttattataccacatttcggctgg

SEQ ID NO: 462431 - DNA, 25 bp, Artificial
  probe
  misc_feature (1)..(25): SEQ ID NO: 7236; WAN024EY7; Start 6; Stop 30
acaaaggaagctaccaattctaatc

SEQ ID NO: 462432 - DNA, 25 bp, Artificial
  probe
  misc_feature (1)..(25): SEQ ID NO: 7236; WAN024EY7; Start 28; Stop 52
atctctttgaaatcatcttctctca

SEQ ID NO: 462433 - DNA, 25 bp, Artificial
  probe
  misc_feature (1)..(25): SEQ ID NO: 7236; WAN024EY7; Start 7; Stop 31
caaaggaagctaccaattctaatct

SEQ ID NO: 462434 - DNA, 25 bp, Artificial
  probe
  misc_feature (1)..(25): SEQ ID NO: 7236; WAN024EY7; Start 32; Stop 56
ctttgaaatcatcttctctcacttt

SEQ ID NO: 462435 - DNA, 25 bp, Artificial
  probe
  misc_feature (1)..(25): SEQ ID NO: 7236; WAN024EY7; Start 11; Stop 35
ggaagctaccaattctaatctcttt

SEQ ID NO: 462436 - DNA, 25 bp, Artificial
  probe
  misc_feature (1)..(25): SEQ ID NO: 7236; WAN024EY7; Start 8; Stop 32
aaaggaagctaccaattctaatctc

SEQ ID NO: 462437 - DNA, 25 bp, Artificial
  probe
  misc_feature (1)..(25): SEQ ID NO: 7236; WAN024EY7; Start 125; Stop 149
ccacagattgcagtctttctttatt

SEQ ID NO: 462438 - DNA, 25 bp, Artificial
  probe
  misc_feature (1)..(25): SEQ ID NO: 7236; WAN024EY7; Start 124; Stop 148
tccacagattgcagtctttctttat

SEQ ID NO: 462439 - DNA, 25 bp, Artificial
  probe
  misc_feature (1)..(25): SEQ ID NO: 7236; WAN024EY7; Start 123; Stop 147
atccacagattgcagtctttcttta

SEQ ID NO: 462440 - DNA, 25 bp, Artificial
  probe
  misc_feature (1)..(25): SEQ ID NO: 7236; WAN024EY7; Start 15; Stop 39
gctaccaattctaatctctttgaaa

SEQ ID NO: 462441 - DNA, 25 bp, Artificial
  probe
  misc_feature (1)..(25): SEQ ID NO: 7236; WAN024EY7; Start 35; Stop 59
tgaaatcatcttctctcactttcca

SEQ ID NO: 462442 - DNA, 25 bp, Artificial
  probe
  misc_feature (1)..(25): SEQ ID NO: 7236; WAN024EY7; Start 36; Stop 60
gaaatcatcttctctcactttccaa

SEQ ID NO: 462443 - DNA, 25 bp, Artificial
  probe
  misc_feature (1)..(25): SEQ ID NO: 7236; WAN024EY7; Start 34; Stop 58
ttgaaatcatcttctctcactttcc

SEQ ID NO: 462444 - DNA, 25 bp, Artificial
  probe
  misc_feature (1)..(25): SEQ ID NO: 7236; WAN024EY7; Start 27; Stop 51
aatctctttgaaatcatcttctctc

SEQ ID NO: 462445 - DNA, 25 bp, Artificial
  probe
  misc_feature (1)..(25): SEQ ID NO: 7236; WAN024EY7; Start 42; Stop 66
atcttctctcactttccaaaactct

SEQ ID NO: 462446 - DNA, 25 bp, Artificial
  probe
  misc_feature (1)..(25): SEQ ID NO: 7236; WAN024EY7; Start 41; Stop 65
catcttctctcactttccaaaactc

SEQ ID NO: 462447 - DNA, 25 bp, Artificial
  probe
  misc_feature (1)..(25): SEQ ID NO: 7236; WAN024EY7; Start 40; Stop 64
tcatcttctctcactttccaaaact

SEQ ID NO: 462448 - DNA, 25 bp, Artificial
  probe
  misc_feature (1)..(25): SEQ ID NO: 7237; WAN024BVQ; Start 65; Stop 89
ggcaagaaatccaaacctattacag

SEQ ID NO: 462449 - DNA, 25 bp, Artificial
  probe
  misc_feature (1)..(25): SEQ ID NO: 7237; WAN024BVQ; Start 66; Stop 90
gcaagaaatccaaacctattacagt

SEQ ID NO: 462450 - DNA, 25 bp, Artificial
  probe
  misc_feature (1)..(25): SEQ ID NO: 7237; WAN024BVQ; Start 33; Stop 57
agaatttgatgaagtaatggctgga

SEQ ID NO: 462451 - DNA, 25 bp, Artificial
  probe
  misc_feature (1)..(25): SEQ ID NO: 7237; WAN024BVQ; Start 29; Stop 53
aagcagaatttgatgaagtaatggc

SEQ ID NO: 462452 - DNA, 25 bp, Artificial
  probe
  misc_feature (1)..(25): SEQ ID NO: 7237; WAN024BVQ; Start 34; Stop 58
gaatttgatgaagtaatggctggac

SEQ ID NO: 462453 - DNA, 25 bp, Artificial
  probe
  misc_feature (1)..(25): SEQ ID NO: 7237; WAN024BVQ; Start 36; Stop 60
atttgatgaagtaatggctggacat

SEQ ID NO: 462454 - DNA, 25 bp, Artificial
  probe
  misc_feature (1)..(25): SEQ ID NO: 7237; WAN024BVQ; Start 35; Stop 59
aatttgatgaagtaatggctggaca

SEQ ID NO: 462455 - DNA, 25 bp, Artificial
  probe
  misc_feature (1)..(25): SEQ ID NO: 7237; WAN024BVQ; Start 21; Stop 45
aatgacacaagcagaatttgatgaa

SEQ ID NO: 462456 - DNA, 25 bp, Artificial
  probe
  misc_feature (1)..(25): SEQ ID NO: 7237; WAN024BVQ; Start 24; Stop 48
gacacaagcagaatttgatgaagta

SEQ ID NO: 462457 - DNA, 25 bp, Artificial
  probe
  misc_feature (1)..(25): SEQ ID NO: 7237; WAN024BVQ; Start 22; Stop 46
atgacacaagcagaatttgatgaag

SEQ ID NO: 462458 - DNA, 25 bp, Artificial
  probe
  misc_feature (1)..(25): SEQ ID NO: 7237; WAN024BVQ; Start 74; Stop 98
tccaaacctattacagttcatcact

SEQ ID NO: 462459 - DNA, 25 bp, Artificial
  probe
  misc_feature (1)..(25): SEQ ID NO: 7237; WAN024BVQ; Start 25; Stop 49
acacaagcagaatttgatgaagtaa

SEQ ID NO: 462460 - DNA, 25 bp, Artificial
  probe
  misc_feature (1)..(25): SEQ ID NO: 7237; WAN024BVQ; Start 73; Stop 97
atccaaacctattacagttcatcac

SEQ ID NO: 462461 - DNA, 25 bp, Artificial
  probe
  misc_feature (1)..(25): SEQ ID NO: 7237; WAN024BVQ; Start 28; Stop 52
caagcagaatttgatgaagtaatgg

SEQ ID NO: 462462 - DNA, 25 bp, Artificial
  probe
  misc_feature (1)..(25): SEQ ID NO: 7237; WAN024BVQ; Start 20; Stop 44
aaatgacacaagcagaatttgatga

SEQ ID NO: 462463 - DNA, 25 bp, Artificial
  probe
  misc_feature (1)..(25): SEQ ID NO: 7237; WAN024BVQ; Start 23; Stop 47
tgacacaagcagaatttgatgaagt

SEQ ID NO: 462464 - DNA, 25 bp, Artificial
  probe
  misc_feature (1)..(25): SEQ ID NO: 7237; WAN024BVQ; Start 32; Stop 56
cagaatttgatgaagtaatggctgg

SEQ ID NO: 462465 - DNA, 25 bp, Artificial
  probe
  misc_feature (1)..(25): SEQ ID NO: 7237; WAN024BVQ; Start 72; Stop 96
aatccaaacctattacagttcatca

SEQ ID NO: 462466 - DNA, 25 bp, Artificial
  probe
  misc_feature (1)..(25): SEQ ID NO: 7237; WAN024BVQ; Start 27; Stop 51
acaagcagaatttgatgaagtaatg

SEQ ID NO: 462467 - DNA, 25 bp, Artificial
  probe
  misc_feature (1)..(25): SEQ ID NO: 7237; WAN024BVQ; Start 26; Stop 50
cacaagcagaatttgatgaagtaat

SEQ ID NO: 462468 - DNA, 25 bp, Artificial
  probe
  misc_feature (1)..(25): SEQ ID NO: 7237; WAN024BVQ; Start 69; Stop 93
agaaatccaaacctattacagttca

SEQ ID NO: 462469 - DNA, 25 bp, Artificial
  probe
  misc_feature (1)..(25): SEQ ID NO: 7237; WAN024BVQ; Start 64; Stop 88
aggcaagaaatccaaacctattaca

SEQ ID NO: 462470 - DNA, 25 bp, Artificial
  probe
  misc_feature (1)..(25): SEQ ID NO: 7237; WAN024BVQ; Start 31; Stop 55
gcagaatttgatgaagtaatggctg

SEQ ID NO: 462471 - DNA, 25 bp, Artificial
  probe
  misc_feature (1)..(25): SEQ ID NO: 7237; WAN024BVQ; Start 63; Stop 87
aaggcaagaaatccaaacctattac

SEQ ID NO: 462472 - DNA, 25 bp, Artificial
  probe
  misc_feature (1)..(25): SEQ ID NO: 7237; WAN024BVQ; Start 62; Stop 86
caaggcaagaaatccaaacctatta

SEQ ID NO: 462473 - DNA, 25 bp, Artificial
  probe
  misc_feature (1)..(25): SEQ ID NO: 7237; WAN024BVQ; Start 67; Stop 91
caagaaatccaaacctattacagtt

SEQ ID NO: 462474 - DNA, 25 bp, Artificial
  probe
  misc_feature (1)..(25): SEQ ID NO: 7237; WAN024BVQ; Start 61; Stop 85
ccaaggcaagaaatccaaacctatt

SEQ ID NO: 462475 - DNA, 25 bp, Artificial
  probe
  misc_feature (1)..(25): SEQ ID NO: 7237; WAN024BVQ; Start 56; Stop 80
gacatccaaggcaagaaatccaaac

SEQ ID NO: 462476 - DNA, 25 bp, Artificial
  probe
  misc_feature (1)..(25): SEQ ID NO: 7237; WAN024BVQ; Start 71; Stop 95
aaatccaaacctattacagttcatc

SEQ ID NO: 462477 - DNA, 25 bp, Artificial
  probe
  misc_feature (1)..(25): SEQ ID NO: 7237; WAN024BVQ; Start 70; Stop 94
gaaatccaaacctattacagttcat

SEQ ID NO: 462478 - DNA, 25 bp, Artificial
  probe
  misc_feature (1)..(25): SEQ ID NO: 7237; WAN024BVQ; Start 68; Stop 92
aagaaatccaaacctattacagttc

SEQ ID NO: 462479 - DNA, 25 bp, Artificial
  probe
  misc_feature (1)..(25): SEQ ID NO: 7237; WAN024BVQ; Start 41; Stop 65
atgaagtaatggctggacatccaag

SEQ ID NO: 462480 - DNA, 25 bp, Artificial
  probe
  misc_feature (1)..(25): SEQ ID NO: 7237; WAN024BVQ; Start 60; Stop 84
tccaaggcaagaaatccaaacctat

SEQ ID NO: 462481 - DNA, 25 bp, Artificial
  probe
  misc_feature (1)..(25): SEQ ID NO: 7238; WAN024C2R; Start 158; Stop 182
tctctagcaatgaattaagttgtga

SEQ ID NO: 462482 - DNA, 25 bp, Artificial
  probe
  misc_feature (1)..(25): SEQ ID NO: 7238; WAN024C2R; Start 46; Stop 70
gcagcaattagaaatgagaatccat

SEQ ID NO: 462483 - DNA, 25 bp, Artificial
  probe
  misc_feature (1)..(25): SEQ ID NO: 7238; WAN024C2R; Start 49; Stop 73
gcaattagaaatgagaatccatcca

SEQ ID NO: 462484 - DNA, 25 bp, Artificial
  probe
  misc_feature (1)..(25): SEQ ID NO: 7238; WAN024C2R; Start 159; Stop 183
ctctagcaatgaattaagttgtgat

SEQ ID NO: 462485 - DNA, 25 bp, Artificial
  probe
  misc_feature (1)..(25): SEQ ID NO: 7238; WAN024C2R; Start 157; Stop 181
atctctagcaatgaattaagttgtg

SEQ ID NO: 462486 - DNA, 25 bp, Artificial
  probe
  misc_feature (1)..(25): SEQ ID NO: 7238; WAN024C2R; Start 48; Stop 72
agcaattagaaatgagaatccatcc

SEQ ID NO: 462487 - DNA, 25 bp, Artificial
  probe
  misc_feature (1)..(25): SEQ ID NO: 7238; WAN024C2R; Start 18; Stop 42
aacgggtacaataaaggaaatcagt

SEQ ID NO: 462488 - DNA, 25 bp, Artificial
  probe
  misc_feature (1)..(25): SEQ ID NO: 7238; WAN024C2R; Start 20; Stop 44
cgggtacaataaaggaaatcagtga

SEQ ID NO: 462489 - DNA, 25 bp, Artificial
  probe
  misc_feature (1)..(25): SEQ ID NO: 7238; WAN024C2R; Start 12; Stop 36
gtcattaacgggtacaataaaggaa

SEQ ID NO: 462490 - DNA, 25 bp, Artificial
  probe
  misc_feature (1)..(25): SEQ ID NO: 7238; WAN024C2R; Start 19; Stop 43
acgggtacaataaaggaaatcagtg

SEQ ID NO: 462491 - DNA, 25 bp, Artificial
  probe
  misc_feature (1)..(25): SEQ ID NO: 7238; WAN024C2R; Start 17; Stop 41
taacgggtacaataaaggaaatcag

SEQ ID NO: 462492 - DNA, 25 bp, Artificial
  probe
  misc_feature (1)..(25): SEQ ID NO: 7238; WAN024C2R; Start 21; Stop 45
gggtacaataaaggaaatcagtgat

SEQ ID NO: 462493 - DNA, 25 bp, Artificial
  probe
  misc_feature (1)..(25): SEQ ID NO: 7238; WAN024C2R; Start 47; Stop 71
cagcaattagaaatgagaatccatc

SEQ ID NO: 462494 - DNA, 25 bp, Artificial
  probe
  misc_feature (1)..(25): SEQ ID NO: 7238; WAN024C2R; Start 23; Stop 47
gtacaataaaggaaatcagtgatgc

SEQ ID NO: 462495 - DNA, 25 bp, Artificial
  probe
  misc_feature (1)..(25): SEQ ID NO: 7238; WAN024C2R; Start 16; Stop 40
ttaacgggtacaataaaggaaatca

SEQ ID NO: 462496 - DNA, 25 bp, Artificial
  probe
  misc_feature (1)..(25): SEQ ID NO: 7238; WAN024C2R; Start 13; Stop 37
tcattaacgggtacaataaaggaaa

SEQ ID NO: 462497 - DNA, 25 bp, Artificial
  probe
  misc_feature (1)..(25): SEQ ID NO: 7238; WAN024C2R; Start 83; Stop 107
caccatgtatcccaagtagcttata

SEQ ID NO: 462498 - DNA, 25 bp, Artificial
  probe
  misc_feature (1)..(25): SEQ ID NO: 7238; WAN024C2R; Start 22; Stop 46
ggtacaataaaggaaatcagtgatg

SEQ ID NO: 462499 - DNA, 25 bp, Artificial
  probe
  misc_feature (1)..(25): SEQ ID NO: 7238; WAN024C2R; Start 148; Stop 172
gtacttgttatctctagcaatgaat

SEQ ID NO: 462500 - DNA, 25 bp, Artificial
  probe
  misc_feature (1)..(25): SEQ ID NO: 7238; WAN024C2R; Start 44; Stop 68
atgcagcaattagaaatgagaatcc

SEQ ID NO: 462501 - DNA, 25 bp, Artificial
  probe
  misc_feature (1)..(25): SEQ ID NO: 7238; WAN024C2R; Start 41; Stop 65
gtgatgcagcaattagaaatgagaa

SEQ ID NO: 462502 - DNA, 25 bp, Artificial
  probe
  misc_feature (1)..(25): SEQ ID NO: 7238; WAN024C2R; Start 37; Stop 61
atcagtgatgcagcaattagaaatg

SEQ ID NO: 462503 - DNA, 25 bp, Artificial
  probe
  misc_feature (1)..(25): SEQ ID NO: 7238; WAN024C2R; Start 35; Stop 59
aaatcagtgatgcagcaattagaaa

SEQ ID NO: 462504 - DNA, 25 bp, Artificial
  probe
  misc_feature (1)..(25): SEQ ID NO: 7238; WAN024C2R; Start 34; Stop 58
gaaatcagtgatgcagcaattagaa

SEQ ID NO: 462505 - DNA, 25 bp, Artificial
  probe
  misc_feature (1)..(25): SEQ ID NO: 7238; WAN024C2R; Start 25; Stop 49
acaataaaggaaatcagtgatgcag

SEQ ID NO: 462506 - DNA, 25 bp, Artificial
  probe
  misc_feature (1)..(25): SEQ ID NO: 7238; WAN024C2R; Start 84; Stop 108
accatgtatcccaagtagcttatat

SEQ ID NO: 462507 - DNA, 25 bp, Artificial
  probe
  misc_feature (1)..(25): SEQ ID NO: 7238; WAN024C2R; Start 36; Stop 60
aatcagtgatgcagcaattagaaat

SEQ ID NO: 462508 - DNA, 25 bp, Artificial
  probe
  misc_feature (1)..(25): SEQ ID NO: 7238; WAN024C2R; Start 42; Stop 66
tgatgcagcaattagaaatgagaat

SEQ ID NO: 462509 - DNA, 25 bp, Artificial
  probe
  misc_feature (1)..(25): SEQ ID NO: 7238; WAN024C2R; Start 50; Stop 74
caattagaaatgagaatccatccaa

SEQ ID NO: 462510 - DNA, 25 bp, Artificial
  probe
  misc_feature (1)..(25): SEQ ID NO: 7238; WAN024C2R; Start 40; Stop 64
agtgatgcagcaattagaaatgaga

SEQ ID NO: 462511 - DNA, 25 bp, Artificial
  probe
  misc_feature (1)..(25): SEQ ID NO: 7238; WAN024C2R; Start 39; Stop 63
cagtgatgcagcaattagaaatgag

SEQ ID NO: 462512 - DNA, 25 bp, Artificial
  probe
  misc_feature (1)..(25): SEQ ID NO: 7238; WAN024C2R; Start 14; Stop 38
cattaacgggtacaataaaggaaat

SEQ ID NO: 462513 - DNA, 25 bp, Artificial
  probe
  misc_feature (1)..(25): SEQ ID NO: 7238; WAN024C2R; Start 45; Stop 69
tgcagcaattagaaatgagaatcca

SEQ ID NO: 462514 - DNA, 25 bp, Artificial
  probe
  misc_feature (1)..(25): SEQ ID NO: 7239; WAN024ERZ; Start 62; Stop 86
caattaaggcaacacattcaccatc

SEQ ID NO: 462515 - DNA, 25 bp, Artificial
  probe
  misc_feature (1)..(25): SEQ ID NO: 7239; WAN024ERZ; Start 61; Stop 85
ccaattaaggcaacacattcaccat

SEQ ID NO: 462516 - DNA, 25 bp, Artificial
  probe
  misc_feature (1)..(25): SEQ ID NO: 7239; WAN024ERZ; Start 63; Stop 87
aattaaggcaacacattcaccatcg

SEQ ID NO: 462517 - DNA, 25 bp, Artificial
  probe
  misc_feature (1)..(25): SEQ ID NO: 7239; WAN024ERZ; Start 270; Stop 294
caaaccaatcagtaaacatttccac

SEQ ID NO: 462518 - DNA, 25 bp, Artificial
  probe
  misc_feature (1)..(25): SEQ ID NO: 7239; WAN024ERZ; Start 269; Stop 293
tcaaaccaatcagtaaacatttcca

SEQ ID NO: 462519 - DNA, 25 bp, Artificial
  probe
  misc_feature (1)..(25): SEQ ID NO: 7239; WAN024ERZ; Start 59; Stop 83
gaccaattaaggcaacacattcacc

SEQ ID NO: 462520 - DNA, 25 bp, Artificial
  probe
  misc_feature (1)..(25): SEQ ID NO: 7239; WAN024ERZ; Start 58; Stop 82
ggaccaattaaggcaacacattcac

SEQ ID NO: 462521 - DNA, 25 bp, Artificial
  probe
  misc_feature (1)..(25): SEQ ID NO: 7239; WAN024ERZ; Start 271; Stop 295
aaaccaatcagtaaacatttccact

SEQ ID NO: 462522 - DNA, 25 bp, Artificial
  probe
  misc_feature (1)..(25): SEQ ID NO: 7239; WAN024ERZ; Start 56; Stop 80
ttggaccaattaaggcaacacattc

SEQ ID NO: 462523 - DNA, 25 bp, Artificial
  probe
  misc_feature (1)..(25): SEQ ID NO: 7239; WAN024ERZ; Start 64; Stop 88
attaaggcaacacattcaccatcgt

SEQ ID NO: 462524 - DNA, 25 bp, Artificial
  probe
  misc_feature (1)..(25): SEQ ID NO: 7239; WAN024ERZ; Start 12; Stop 36
atctccaagcaaacaatctaagagt

SEQ ID NO: 462525 - DNA, 25 bp, Artificial
  probe
  misc_feature (1)..(25): SEQ ID NO: 7239; WAN024ERZ; Start 268; Stop 292
atcaaaccaatcagtaaacatttcc

SEQ ID NO: 462526 - DNA, 25 bp, Artificial
  probe
  misc_feature (1)..(25): SEQ ID NO: 7239; WAN024ERZ; Start 57; Stop 81
tggaccaattaaggcaacacattca

SEQ ID NO: 462527 - DNA, 25 bp, Artificial
  probe
  misc_feature (1)..(25): SEQ ID NO: 7239; WAN024ERZ; Start 60; Stop 84
accaattaaggcaacacattcacca

SEQ ID NO: 462528 - DNA, 25 bp, Artificial
  probe
  misc_feature (1)..(25): SEQ ID NO: 7239; WAN024ERZ; Start 13; Stop 37
tctccaagcaaacaatctaagagtg

SEQ ID NO: 462529 - DNA, 25 bp, Artificial
  probe
  misc_feature (1)..(25): SEQ ID NO: 7239; WAN024ERZ; Start 84; Stop 108
atcgttgatttcaaaggagatgttc

SEQ ID NO: 462530 - DNA, 25 bp, Artificial
  probe
  misc_feature (1)..(25): SEQ ID NO: 7239; WAN024ERZ; Start 273; Stop 297
accaatcagtaaacatttccactaa

SEQ ID NO: 462531 - DNA, 25 bp, Artificial
  probe
  misc_feature (1)..(25): SEQ ID NO: 7239; WAN024ERZ; Start 272; Stop 296
aaccaatcagtaaacatttccacta

SEQ ID NO: 462532 - DNA, 25 bp, Artificial
  probe
  misc_feature (1)..(25): SEQ ID NO: 7239; WAN024ERZ; Start 10; Stop 34
ttatctccaagcaaacaatctaaga

SEQ ID NO: 462533 - DNA, 25 bp, Artificial
  probe
  misc_feature (1)..(25): SEQ ID NO: 7239; WAN024ERZ; Start 75; Stop 99
acattcaccatcgttgatttcaaag

SEQ ID NO: 462534 - DNA, 25 bp, Artificial
  probe
  misc_feature (1)..(25): SEQ ID NO: 7239; WAN024ERZ; Start 11; Stop 35
tatctccaagcaaacaatctaagag

SEQ ID NO: 462535 - DNA, 25 bp, Artificial
  probe
  misc_feature (1)..(25): SEQ ID NO: 7239; WAN024ERZ; Start 74; Stop 98
cacattcaccatcgttgatttcaaa

SEQ ID NO: 462536 - DNA, 25 bp, Artificial
  probe
  misc_feature (1)..(25): SEQ ID NO: 7239; WAN024ERZ; Start 14; Stop 38
ctccaagcaaacaatctaagagtgt

SEQ ID NO: 462537 - DNA, 25 bp, Artificial
  probe
  misc_feature (1)..(25): SEQ ID NO: 7239; WAN024ERZ; Start 72; Stop 96
aacacattcaccatcgttgatttca

SEQ ID NO: 462538 - DNA, 25 bp, Artificial
  probe
  misc_feature (1)..(25): SEQ ID NO: 7239; WAN024ERZ; Start 65; Stop 89
ttaaggcaacacattcaccatcgtt

SEQ ID NO: 462539 - DNA, 25 bp, Artificial
  probe
  misc_feature (1)..(25): SEQ ID NO: 7239; WAN024ERZ; Start 77; Stop 101
attcaccatcgttgatttcaaagga

SEQ ID NO: 462540 - DNA, 25 bp, Artificial
  probe
  misc_feature (1)..(25): SEQ ID NO: 7239; WAN024ERZ; Start 76; Stop 100
cattcaccatcgttgatttcaaagg

SEQ ID NO: 462541 - DNA, 25 bp, Artificial
  probe
  misc_feature (1)..(25): SEQ ID NO: 7239; WAN024ERZ; Start 9; Stop 33
tttatctccaagcaaacaatctaag

SEQ ID NO: 462542 - DNA, 25 bp, Artificial
  probe
  misc_feature (1)..(25): SEQ ID NO: 7239; WAN024ERZ; Start 80; Stop 104
caccatcgttgatttcaaaggagat

SEQ ID NO: 462543 - DNA, 25 bp, Artificial
  probe
  misc_feature (1)..(25): SEQ ID NO: 7239; WAN024ERZ; Start 73; Stop 97
acacattcaccatcgttgatttcaa

SEQ ID NO: 462544 - DNA, 25 bp, Artificial
  probe
  misc_feature (1)..(25): SEQ ID NO: 7239; WAN024ERZ; Start 78; Stop 102
ttcaccatcgttgatttcaaaggag

SEQ ID NO: 462545 - DNA, 25 bp, Artificial
  probe
  misc_feature (1)..(25): SEQ ID NO: 7239; WAN024ERZ; Start 54; Stop 78
atttggaccaattaaggcaacacat

SEQ ID NO: 462546 - DNA, 25 bp, Artificial
  probe
  misc_feature (1)..(25): SEQ ID NO: 7239; WAN024ERZ; Start 55; Stop 79
tttggaccaattaaggcaacacatt

SEQ ID NO: 462547 - DNA, 25 bp, Artificial
  probe
  misc_feature (1)..(25): SEQ ID NO: 7240; WAN024CQP; Start 106; Stop 130
ctccatcagctagataagtcataca

SEQ ID NO: 462548 - DNA, 25 bp, Artificial
  probe
  misc_feature (1)..(25): SEQ ID NO: 7240; WAN024CQP; Start 107; Stop 131
tccatcagctagataagtcatacaa

SEQ ID NO: 462549 - DNA, 25 bp, Artificial
  probe
  misc_feature (1)..(25): SEQ ID NO: 7240; WAN024CQP; Start 103; Stop 127
gaactccatcagctagataagtcat

SEQ ID NO: 462550 - DNA, 25 bp, Artificial
  probe
  misc_feature (1)..(25): SEQ ID NO: 7240; WAN024CQP; Start 105; Stop 129
actccatcagctagataagtcatac

SEQ ID NO: 462551 - DNA, 25 bp, Artificial
  probe
  misc_feature (1)..(25): SEQ ID NO: 7240; WAN024CQP; Start 104; Stop 128
aactccatcagctagataagtcata

SEQ ID NO: 462552 - DNA, 25 bp, Artificial
  probe
  misc_feature (1)..(25): SEQ ID NO: 7240; WAN024CQP; Start 102; Stop 126
ggaactccatcagctagataagtca

SEQ ID NO: 462553 - DNA, 25 bp, Artificial
  probe
  misc_feature (1)..(25): SEQ ID NO: 7240; WAN024CQP; Start 108; Stop 132
ccatcagctagataagtcatacaat

SEQ ID NO: 462554 - DNA, 25 bp, Artificial
  probe
  misc_feature (1)..(25): SEQ ID NO: 7240; WAN024CQP; Start 100; Stop 124
ctggaactccatcagctagataagt

SEQ ID NO: 462555 - DNA, 25 bp, Artificial
  probe
  misc_feature (1)..(25): SEQ ID NO: 7240; WAN024CQP; Start 101; Stop 125
tggaactccatcagctagataagtc

SEQ ID NO: 462556 - DNA, 25 bp, Artificial
  probe
  misc_feature (1)..(25): SEQ ID NO: 7240; WAN024CQP; Start 99; Stop 123
cctggaactccatcagctagataag

SEQ ID NO: 462557 - DNA, 25 bp, Artificial
  probe
  misc_feature (1)..(25): SEQ ID NO: 7240; WAN024CQP; Start 93; Stop 117
atatctcctggaactccatcagcta

SEQ ID NO: 462558 - DNA, 25 bp, Artificial
  probe
  misc_feature (1)..(25): SEQ ID NO: 7240; WAN024CQP; Start 165; Stop 189
tttccatcaactaaatctgtcaaat

SEQ ID NO: 462559 - DNA, 25 bp, Artificial
  probe
  misc_feature (1)..(25): SEQ ID NO: 7240; WAN024CQP; Start 98; Stop 122
tcctggaactccatcagctagataa

SEQ ID NO: 462560 - DNA, 25 bp, Artificial
  probe
  misc_feature (1)..(25): SEQ ID NO: 7240; WAN024CQP; Start 166; Stop 190
ttccatcaactaaatctgtcaaatt

SEQ ID NO: 462561 - DNA, 25 bp, Artificial
  probe
  misc_feature (1)..(25): SEQ ID NO: 7240; WAN024CQP; Start 112; Stop 136
cagctagataagtcatacaatttgc

SEQ ID NO: 462562 - DNA, 25 bp, Artificial
  probe
  misc_feature (1)..(25): SEQ ID NO: 7240; WAN024CQP; Start 97; Stop 121
ctcctggaactccatcagctagata

SEQ ID NO: 462563 - DNA, 25 bp, Artificial
  probe
  misc_feature (1)..(25): SEQ ID NO: 7240; WAN024CQP; Start 94; Stop 118
tatctcctggaactccatcagctag

SEQ ID NO: 462564 - DNA, 25 bp, Artificial
  probe
  misc_feature (1)..(25): SEQ ID NO: 7240; WAN024CQP; Start 113; Stop 137
agctagataagtcatacaatttgca

SEQ ID NO: 462565 - DNA, 25 bp, Artificial
  probe
  misc_feature (1)..(25): SEQ ID NO: 7240; WAN024CQP; Start 109; Stop 133
catcagctagataagtcatacaatt

SEQ ID NO: 462566 - DNA, 25 bp, Artificial
  probe
  misc_feature (1)..(25): SEQ ID NO: 7240; WAN024CQP; Start 139; Stop 163
aaacattttccccgtcaatatcaat

SEQ ID NO: 462567 - DNA, 25 bp, Artificial
  probe
  misc_feature (1)..(25): SEQ ID NO: 7240; WAN024CQP; Start 92; Stop 116
aatatctcctggaactccatcagct

SEQ ID NO: 462568 - DNA, 25 bp, Artificial
  probe
  misc_feature (1)..(25): SEQ ID NO: 7240; WAN024CQP; Start 141; Stop 165
acattttccccgtcaatatcaattt

SEQ ID NO: 462569 - DNA, 25 bp, Artificial
  probe
  misc_feature (1)..(25): SEQ ID NO: 7240; WAN024CQP; Start 140; Stop 164
aacattttccccgtcaatatcaatt

SEQ ID NO: 462570 - DNA, 25 bp, Artificial
  probe
  misc_feature (1)..(25): SEQ ID NO: 7240; WAN024CQP; Start 138; Stop 162
aaaacattttccccgtcaatatcaa

SEQ ID NO: 462571 - DNA, 25 bp, Artificial
  probe
  misc_feature (1)..(25): SEQ ID NO: 7240; WAN024CQP; Start 142; Stop 166
cattttccccgtcaatatcaatttt

SEQ ID NO: 462572 - DNA, 25 bp, Artificial
  probe
  misc_feature (1)..(25): SEQ ID NO: 7240; WAN024CQP; Start 91; Stop 115
aaatatctcctggaactccatcagc

SEQ ID NO: 462573 - DNA, 25 bp, Artificial
  probe
  misc_feature (1)..(25): SEQ ID NO: 7240; WAN024CQP; Start 111; Stop 135
tcagctagataagtcatacaatttg

SEQ ID NO: 462574 - DNA, 25 bp, Artificial
  probe
  misc_feature (1)..(25): SEQ ID NO: 7240; WAN024CQP; Start 167; Stop 191
tccatcaactaaatctgtcaaattt

SEQ ID NO: 462575 - DNA, 25 bp, Artificial
  probe
  misc_feature (1)..(25): SEQ ID NO: 7240; WAN024CQP; Start 164; Stop 188
ttttccatcaactaaatctgtcaaa

SEQ ID NO: 462576 - DNA, 25 bp, Artificial
  probe
  misc_feature (1)..(25): SEQ ID NO: 7240; WAN024CQP; Start 96; Stop 120
tctcctggaactccatcagctagat

SEQ ID NO: 462577 - DNA, 25 bp, Artificial
  probe
  misc_feature (1)..(25): SEQ ID NO: 7240; WAN024CQP; Start 95; Stop 119
atctcctggaactccatcagctaga

SEQ ID NO: 462578 - DNA, 25 bp, Artificial
  probe
  misc_feature (1)..(25): SEQ ID NO: 7240; WAN024CQP; Start 90; Stop 114
aaaatatctcctggaactccatcag

SEQ ID NO: 462579 - DNA, 25 bp, Artificial
  probe
  misc_feature (1)..(25): SEQ ID NO: 7240; WAN024CQP; Start 110; Stop 134
atcagctagataagtcatacaattt

SEQ ID NO: 462580 - DNA, 25 bp, Artificial
  probe
  misc_feature (1)..(25): SEQ ID NO: 7241; WAN024FEN; Start 128; Stop 152
ggattgtaggactgtatcaagactt

SEQ ID NO: 462581 - DNA, 25 bp, Artificial
  probe
  misc_feature (1)..(25): SEQ ID NO: 7241; WAN024FEN; Start 27; Stop 51
aatagtaaggtggatagccgagttg

SEQ ID NO: 462582 - DNA, 25 bp, Artificial
  probe
  misc_feature (1)..(25): SEQ ID NO: 7241; WAN024FEN; Start 127; Stop 151
cggattgtaggactgtatcaagact

SEQ ID NO: 462583 - DNA, 25 bp, Artificial
  probe
  misc_feature (1)..(25): SEQ ID NO: 7241; WAN024FEN; Start 129; Stop 153
gattgtaggactgtatcaagacttg

SEQ ID NO: 462584 - DNA, 25 bp, Artificial
  probe
  misc_feature (1)..(25): SEQ ID NO: 7241; WAN024FEN; Start 28; Stop 52
atagtaaggtggatagccgagttgt

SEQ ID NO: 462585 - DNA, 25 bp, Artificial
  probe
  misc_feature (1)..(25): SEQ ID NO: 7241; WAN024FEN; Start 20; Stop 44
atcgtgaaatagtaaggtggatagc

SEQ ID NO: 462586 - DNA, 25 bp, Artificial
  probe
  misc_feature (1)..(25): SEQ ID NO: 7241; WAN024FEN; Start 26; Stop 50
aaatagtaaggtggatagccgagtt

SEQ ID NO: 462587 - DNA, 25 bp, Artificial
  probe
  misc_feature (1)..(25): SEQ ID NO: 7241; WAN024FEN; Start 55; Stop 79
tctgattcccatttcataggcataa

SEQ ID NO: 462588 - DNA, 25 bp, Artificial
  probe
  misc_feature (1)..(25): SEQ ID NO: 7241; WAN024FEN; Start 54; Stop 78
gtctgattcccatttcataggcata

SEQ ID NO: 462589 - DNA, 25 bp, Artificial
  probe
  misc_feature (1)..(25): SEQ ID NO: 7241; WAN024FEN; Start 18; Stop 42
caatcgtgaaatagtaaggtggata

SEQ ID NO: 462590 - DNA, 25 bp, Artificial
  probe
  misc_feature (1)..(25): SEQ ID NO: 7241; WAN024FEN; Start 126; Stop 150
gcggattgtaggactgtatcaagac

SEQ ID NO: 462591 - DNA, 25 bp, Artificial
  probe
  misc_feature (1)..(25): SEQ ID NO: 7241; WAN024FEN; Start 124; Stop 148
ctgcggattgtaggactgtatcaag

SEQ ID NO: 462592 - DNA, 25 bp, Artificial
  probe
  misc_feature (1)..(25): SEQ ID NO: 7241; WAN024FEN; Start 25; Stop 49
gaaatagtaaggtggatagccgagt

SEQ ID NO: 462593 - DNA, 25 bp, Artificial
  probe
  misc_feature (1)..(25): SEQ ID NO: 7241; WAN024FEN; Start 24; Stop 48
tgaaatagtaaggtggatagccgag

SEQ ID NO: 462594 - DNA, 25 bp, Artificial
  probe
  misc_feature (1)..(25): SEQ ID NO: 7241; WAN024FEN; Start 56; Stop 80
ctgattcccatttcataggcataaa

SEQ ID NO: 462595 - DNA, 25 bp, Artificial
  probe
  misc_feature (1)..(25): SEQ ID NO: 7241; WAN024FEN; Start 49; Stop 73
ttgtcgtctgattcccatttcatag

SEQ ID NO: 462596 - DNA, 25 bp, Artificial
  probe
  misc_feature (1)..(25): SEQ ID NO: 7241; WAN024FEN; Start 29; Stop 53
tagtaaggtggatagccgagttgtc

SEQ ID NO: 462597 - DNA, 25 bp, Artificial
  probe
  misc_feature (1)..(25): SEQ ID NO: 7241; WAN024FEN; Start 80; Stop 104
aagccttcgtaatcttgatccttgg

SEQ ID NO: 462598 - DNA, 25 bp, Artificial
  probe
  misc_feature (1)..(25): SEQ ID NO: 7241; WAN024FEN; Start 48; Stop 72
gttgtcgtctgattcccatttcata

SEQ ID NO: 462599 - DNA, 25 bp, Artificial
  probe
  misc_feature (1)..(25): SEQ ID NO: 7241; WAN024FEN; Start 19; Stop 43
aatcgtgaaatagtaaggtggatag

SEQ ID NO: 462600 - DNA, 25 bp, Artificial
  probe
  misc_feature (1)..(25): SEQ ID NO: 7241; WAN024FEN; Start 23; Stop 47
gtgaaatagtaaggtggatagccga

SEQ ID NO: 462601 - DNA, 25 bp, Artificial
  probe
  misc_feature (1)..(25): SEQ ID NO: 7241; WAN024FEN; Start 21; Stop 45
tcgtgaaatagtaaggtggatagcc

SEQ ID NO: 462602 - DNA, 25 bp, Artificial
  probe
  misc_feature (1)..(25): SEQ ID NO: 7241; WAN024FEN; Start 125; Stop 149
tgcggattgtaggactgtatcaaga

SEQ ID NO: 462603 - DNA, 25 bp, Artificial
  probe
  misc_feature (1)..(25): SEQ ID NO: 7241; WAN024FEN; Start 85; Stop 109
ttcgtaatcttgatccttggcaaat

SEQ ID NO: 462604 - DNA, 25 bp, Artificial
  probe
  misc_feature (1)..(25): SEQ ID NO: 7241; WAN024FEN; Start 79; Stop 103
aaagccttcgtaatcttgatccttg

SEQ ID NO: 462605 - DNA, 25 bp, Artificial
  probe
  misc_feature (1)..(25): SEQ ID NO: 7241; WAN024FEN; Start 83; Stop 107
ccttcgtaatcttgatccttggcaa

SEQ ID NO: 462606 - DNA, 25 bp, Artificial
  probe
  misc_feature (1)..(25): SEQ ID NO: 7241; WAN024FEN; Start 86; Stop 110
tcgtaatcttgatccttggcaaatc

SEQ ID NO: 462607 - DNA, 25 bp, Artificial
  probe
  misc_feature (1)..(25): SEQ ID NO: 7241; WAN024FEN; Start 84; Stop 108
cttcgtaatcttgatccttggcaaa

SEQ ID NO: 462608 - DNA, 25 bp, Artificial
  probe
  misc_feature (1)..(25): SEQ ID NO: 7241; WAN024FEN; Start 15; Stop 39
taccaatcgtgaaatagtaaggtgg

SEQ ID NO: 462609 - DNA, 25 bp, Artificial
  probe
  misc_feature (1)..(25): SEQ ID NO: 7241; WAN024FEN; Start 17; Stop 41
ccaatcgtgaaatagtaaggtggat

SEQ ID NO: 462610 - DNA, 25 bp, Artificial
  probe
  misc_feature (1)..(25): SEQ ID NO: 7241; WAN024FEN; Start 97; Stop 121
atccttggcaaatcgaatagcatag

SEQ ID NO: 462611 - DNA, 25 bp, Artificial
  probe
  misc_feature (1)..(25): SEQ ID NO: 7241; WAN024FEN; Start 91; Stop 115
atcttgatccttggcaaatcgaata

SEQ ID NO: 462612 - DNA, 25 bp, Artificial
  probe
  misc_feature (1)..(25): SEQ ID NO: 7241; WAN024FEN; Start 50; Stop 74
tgtcgtctgattcccatttcatagg

SEQ ID NO: 462613 - DNA, 25 bp, Artificial
  probe
  misc_feature (1)..(25): SEQ ID NO: 7242; WAN024BYQ; Start 74; Stop 98
ggacagtggtagataagtacattga

SEQ ID NO: 462614 - DNA, 25 bp, Artificial
  probe
  misc_feature (1)..(25): SEQ ID NO: 7242; WAN024BYQ; Start 198; Stop 222
tacaggtaataagcaagttgaagaa

SEQ ID NO: 462615 - DNA, 25 bp, Artificial
  probe
  misc_feature (1)..(25): SEQ ID NO: 7242; WAN024BYQ; Start 31; Stop 55
ttattcgcatccttactcgtagcat

SEQ ID NO: 462616 - DNA, 25 bp, Artificial
  probe
  misc_feature (1)..(25): SEQ ID NO: 7242; WAN024BYQ; Start 87; Stop 111
taagtacattgatgaacctcacaca

SEQ ID NO: 462617 - DNA, 25 bp, Artificial
  probe
  misc_feature (1)..(25): SEQ ID NO: 7242; WAN024BYQ; Start 197; Stop 221
ttacaggtaataagcaagttgaaga

SEQ ID NO: 462618 - DNA, 25 bp, Artificial
  probe
  misc_feature (1)..(25): SEQ ID NO: 7242; WAN024BYQ; Start 88; Stop 112
aagtacattgatgaacctcacacaa

SEQ ID NO: 462619 - DNA, 25 bp, Artificial
  probe
  misc_feature (1)..(25): SEQ ID NO: 7242; WAN024BYQ; Start 86; Stop 110
ataagtacattgatgaacctcacac

SEQ ID NO: 462620 - DNA, 25 bp, Artificial
  probe
  misc_feature (1)..(25): SEQ ID NO: 7242; WAN024BYQ; Start 89; Stop 113
agtacattgatgaacctcacacaac

SEQ ID NO: 462621 - DNA, 25 bp, Artificial
  probe
  misc_feature (1)..(25): SEQ ID NO: 7242; WAN024BYQ; Start 85; Stop 109
gataagtacattgatgaacctcaca

SEQ ID NO: 462622 - DNA, 25 bp, Artificial
  probe
  misc_feature (1)..(25): SEQ ID NO: 7242; WAN024BYQ; Start 76; Stop 100
acagtggtagataagtacattgatg

SEQ ID NO: 462623 - DNA, 25 bp, Artificial
  probe
  misc_feature (1)..(25): SEQ ID NO: 7242; WAN024BYQ; Start 84; Stop 108
agataagtacattgatgaacctcac

SEQ ID NO: 462624 - DNA, 25 bp, Artificial
  probe
  misc_feature (1)..(25): SEQ ID NO: 7242; WAN024BYQ; Start 77; Stop 101
cagtggtagataagtacattgatga

SEQ ID NO: 462625 - DNA, 25 bp, Artificial
  probe
  misc_feature (1)..(25): SEQ ID NO: 7242; WAN024BYQ; Start 75; Stop 99
gacagtggtagataagtacattgat

SEQ ID NO: 462626 - DNA, 25 bp, Artificial
  probe
  misc_feature (1)..(25): SEQ ID NO: 7242; WAN024BYQ; Start 236; Stop 260
cagcaaatgaatacaagcactatga

SEQ ID NO: 462627 - DNA, 25 bp, Artificial
  probe
  misc_feature (1)..(25): SEQ ID NO: 7242; WAN024BYQ; Start 235; Stop 259
acagcaaatgaatacaagcactatg

SEQ ID NO: 462628 - DNA, 25 bp, Artificial
  probe
  misc_feature (1)..(25): SEQ ID NO: 7242; WAN024BYQ; Start 234; Stop 258
gacagcaaatgaatacaagcactat

SEQ ID NO: 462629 - DNA, 25 bp, Artificial
  probe
  misc_feature (1)..(25): SEQ ID NO: 7242; WAN024BYQ; Start 228; Stop 252
tgaagtgacagcaaatgaatacaag

SEQ ID NO: 462630 - DNA, 25 bp, Artificial
  probe
  misc_feature (1)..(25): SEQ ID NO: 7242; WAN024BYQ; Start 212; Stop 236
aagttgaagaaaggtttgaagtgac

SEQ ID NO: 462631 - DNA, 25 bp, Artificial
  probe
  misc_feature (1)..(25): SEQ ID NO: 7242; WAN024BYQ; Start 237; Stop 261
agcaaatgaatacaagcactatgaa

SEQ ID NO: 462632 - DNA, 25 bp, Artificial
  probe
  misc_feature (1)..(25): SEQ ID NO: 7242; WAN024BYQ; Start 214; Stop 238
gttgaagaaaggtttgaagtgacag

SEQ ID NO: 462633 - DNA, 25 bp, Artificial
  probe
  misc_feature (1)..(25): SEQ ID NO: 7242; WAN024BYQ; Start 202; Stop 226
ggtaataagcaagttgaagaaaggt

SEQ ID NO: 462634 - DNA, 25 bp, Artificial
  probe
  misc_feature (1)..(25): SEQ ID NO: 7242; WAN024BYQ; Start 201; Stop 225
aggtaataagcaagttgaagaaagg

SEQ ID NO: 462635 - DNA, 25 bp, Artificial
  probe
  misc_feature (1)..(25): SEQ ID NO: 7242; WAN024BYQ; Start 233; Stop 257
tgacagcaaatgaatacaagcacta

SEQ ID NO: 462636 - DNA, 25 bp, Artificial
  probe
  misc_feature (1)..(25): SEQ ID NO: 7242; WAN024BYQ; Start 213; Stop 237
agttgaagaaaggtttgaagtgaca

SEQ ID NO: 462637 - DNA, 25 bp, Artificial
  probe
  misc_feature (1)..(25): SEQ ID NO: 7242; WAN024BYQ; Start 42; Stop 66
cttactcgtagcatgtcaccagatt

SEQ ID NO: 462638 - DNA, 25 bp, Artificial
  probe
  misc_feature (1)..(25): SEQ ID NO: 7242; WAN024BYQ; Start 229; Stop 253
gaagtgacagcaaatgaatacaagc

SEQ ID NO: 462639 - DNA, 25 bp, Artificial
  probe
  misc_feature (1)..(25): SEQ ID NO: 7242; WAN024BYQ; Start 199; Stop 223
acaggtaataagcaagttgaagaaa

SEQ ID NO: 462640 - DNA, 25 bp, Artificial
  probe
  misc_feature (1)..(25): SEQ ID NO: 7242; WAN024BYQ; Start 238; Stop 262
gcaaatgaatacaagcactatgaaa

SEQ ID NO: 462641 - DNA, 25 bp, Artificial
  probe
  misc_feature (1)..(25): SEQ ID NO: 7242; WAN024BYQ; Start 211; Stop 235
caagttgaagaaaggtttgaagtga

SEQ ID NO: 462642 - DNA, 25 bp, Artificial
  probe
  misc_feature (1)..(25): SEQ ID NO: 7242; WAN024BYQ; Start 227; Stop 251
ttgaagtgacagcaaatgaatacaa

SEQ ID NO: 462643 - DNA, 25 bp, Artificial
  probe
  misc_feature (1)..(25): SEQ ID NO: 7242; WAN024BYQ; Start 183; Stop 207
ggtcgtttcaggatttacaggtaat

SEQ ID NO: 462644 - DNA, 25 bp, Artificial
  probe
  misc_feature (1)..(25): SEQ ID NO: 7242; WAN024BYQ; Start 207; Stop 231
taagcaagttgaagaaaggtttgaa

SEQ ID NO: 462645 - DNA, 25 bp, Artificial
  probe
  misc_feature (1)..(25): SEQ ID NO: 7242; WAN024BYQ; Start 251; Stop 275
agcactatgaaattggcaatacttt

SEQ ID NO: 462646 - DNA, 25 bp, Artificial
  probe
  misc_feature (1)..(25): SEQ ID NO: 7243; WAN024FTL; Start 117; Stop 141
caatgatggttcaactgataactca

SEQ ID NO: 462647 - DNA, 25 bp, Artificial
  probe
  misc_feature (1)..(25): SEQ ID NO: 7243; WAN024FTL; Start 161; Stop 185
acgctcaagaatatgattggattag

SEQ ID NO: 462648 - DNA, 25 bp, Artificial
  probe
  misc_feature (1)..(25): SEQ ID NO: 7243; WAN024FTL; Start 116; Stop 140
tcaatgatggttcaactgataactc

SEQ ID NO: 462649 - DNA, 25 bp, Artificial
  probe
  misc_feature (1)..(25): SEQ ID NO: 7243; WAN024FTL; Start 162; Stop 186
cgctcaagaatatgattggattaga

SEQ ID NO: 462650 - DNA, 25 bp, Artificial
  probe
  misc_feature (1)..(25): SEQ ID NO: 7243; WAN024FTL; Start 159; Stop 183
atacgctcaagaatatgattggatt

SEQ ID NO: 462651 - DNA, 25 bp, Artificial
  probe
  misc_feature (1)..(25): SEQ ID NO: 7243; WAN024FTL; Start 158; Stop 182
aatacgctcaagaatatgattggat

SEQ ID NO: 462652 - DNA, 25 bp, Artificial
  probe
  misc_feature (1)..(25): SEQ ID NO: 7243; WAN024FTL; Start 102; Stop 126
tgaggtcttactaatcaatgatggt

SEQ ID NO: 462653 - DNA, 25 bp, Artificial
  probe
  misc_feature (1)..(25): SEQ ID NO: 7243; WAN024FTL; Start 33; Stop 57
tgtgtataatgttgaggcttacctt

SEQ ID NO: 462654 - DNA, 25 bp, Artificial
  probe
  misc_feature (1)..(25): SEQ ID NO: 7243; WAN024FTL; Start 44; Stop 68
ttgaggcttaccttcattatgctat

SEQ ID NO: 462655 - DNA, 25 bp, Artificial
  probe
  misc_feature (1)..(25): SEQ ID NO: 7243; WAN024FTL; Start 35; Stop 59
tgtataatgttgaggcttaccttca

SEQ ID NO: 462656 - DNA, 25 bp, Artificial
  probe
  misc_feature (1)..(25): SEQ ID NO: 7243; WAN024FTL; Start 32; Stop 56
ctgtgtataatgttgaggcttacct

SEQ ID NO: 462657 - DNA, 25 bp, Artificial
  probe
  misc_feature (1)..(25): SEQ ID NO: 7243; WAN024FTL; Start 30; Stop 54
tcctgtgtataatgttgaggcttac

SEQ ID NO: 462658 - DNA, 25 bp, Artificial
  probe
  misc_feature (1)..(25): SEQ ID NO: 7243; WAN024FTL; Start 29; Stop 53
ttcctgtgtataatgttgaggctta

SEQ ID NO: 462659 - DNA, 25 bp, Artificial
  probe
  misc_feature (1)..(25): SEQ ID NO: 7243; WAN024FTL; Start 28; Stop 52
attcctgtgtataatgttgaggctt

SEQ ID NO: 462660 - DNA, 25 bp, Artificial
  probe
  misc_feature (1)..(25): SEQ ID NO: 7243; WAN024FTL; Start 34; Stop 58
gtgtataatgttgaggcttaccttc

SEQ ID NO: 462661 - DNA, 25 bp, Artificial
  probe
  misc_feature (1)..(25): SEQ ID NO: 7243; WAN024FTL; Start 27; Stop 51
tattcctgtgtataatgttgaggct

SEQ ID NO: 462662 - DNA, 25 bp, Artificial
  probe
  misc_feature (1)..(25): SEQ ID NO: 7243; WAN024FTL; Start 43; Stop 67
gttgaggcttaccttcattatgcta

SEQ ID NO: 462663 - DNA, 25 bp, Artificial
  probe
  misc_feature (1)..(25): SEQ ID NO: 7243; WAN024FTL; Start 104; Stop 128
aggtcttactaatcaatgatggttc

SEQ ID NO: 462664 - DNA, 25 bp, Artificial
  probe
  misc_feature (1)..(25): SEQ ID NO: 7243; WAN024FTL; Start 103; Stop 127
gaggtcttactaatcaatgatggtt

SEQ ID NO: 462665 - DNA, 25 bp, Artificial
  probe
  misc_feature (1)..(25): SEQ ID NO: 7243; WAN024FTL; Start 242; Stop 266
aagcaactaatgagtggatattctt

SEQ ID NO: 462666 - DNA, 25 bp, Artificial
  probe
  misc_feature (1)..(25): SEQ ID NO: 7243; WAN024FTL; Start 45; Stop 69
tgaggcttaccttcattatgctata

SEQ ID NO: 462667 - DNA, 25 bp, Artificial
  probe
  misc_feature (1)..(25): SEQ ID NO: 7243; WAN024FTL; Start 105; Stop 129
ggtcttactaatcaatgatggttca

SEQ ID NO: 462668 - DNA, 25 bp, Artificial
  probe
  misc_feature (1)..(25): SEQ ID NO: 7243; WAN024FTL; Start 26; Stop 50
ttattcctgtgtataatgttgaggc

SEQ ID NO: 462669 - DNA, 25 bp, Artificial
  probe
  misc_feature (1)..(25): SEQ ID NO: 7243; WAN024FTL; Start 31; Stop 55
cctgtgtataatgttgaggcttacc

SEQ ID NO: 462670 - DNA, 25 bp, Artificial
  probe
  misc_feature (1)..(25): SEQ ID NO: 7243; WAN024FTL; Start 160; Stop 184
tacgctcaagaatatgattggatta

SEQ ID NO: 462671 - DNA, 25 bp, Artificial
  probe
  misc_feature (1)..(25): SEQ ID NO: 7243; WAN024FTL; Start 634; Stop 658
ccaggaagtattgttcgatctaagt

SEQ ID NO: 462672 - DNA, 25 bp, Artificial
  probe
  misc_feature (1)..(25): SEQ ID NO: 7243; WAN024FTL; Start 633; Stop 657
accaggaagtattgttcgatctaag

SEQ ID NO: 462673 - DNA, 25 bp, Artificial
  probe
  misc_feature (1)..(25): SEQ ID NO: 7243; WAN024FTL; Start 632; Stop 656
gaccaggaagtattgttcgatctaa

SEQ ID NO: 462674 - DNA, 25 bp, Artificial
  probe
  misc_feature (1)..(25): SEQ ID NO: 7243; WAN024FTL; Start 41; Stop 65
atgttgaggcttaccttcattatgc

SEQ ID NO: 462675 - DNA, 25 bp, Artificial
  probe
  misc_feature (1)..(25): SEQ ID NO: 7243; WAN024FTL; Start 36; Stop 60
gtataatgttgaggcttaccttcat

SEQ ID NO: 462676 - DNA, 25 bp, Artificial
  probe
  misc_feature (1)..(25): SEQ ID NO: 7243; WAN024FTL; Start 110; Stop 134
tactaatcaatgatggttcaactga

SEQ ID NO: 462677 - DNA, 25 bp, Artificial
  probe
  misc_feature (1)..(25): SEQ ID NO: 7243; WAN024FTL; Start 635; Stop 659
caggaagtattgttcgatctaagtt

SEQ ID NO: 462678 - DNA, 25 bp, Artificial
  probe
  misc_feature (1)..(25): SEQ ID NO: 7243; WAN024FTL; Start 800; Stop 824
ctgaatcagatgtggagtccttact

SEQ ID NO: 462679 - DNA, 25 bp, Artificial
  probe
  misc_feature (1)..(25): SEQ ID NO: 7244; WAN024BMP; Start 588; Stop 612
tatcagtccagtaacaagtgctaac

SEQ ID NO: 462680 - DNA, 25 bp, Artificial
  probe
  misc_feature (1)..(25): SEQ ID NO: 7244; WAN024BMP; Start 587; Stop 611
atatcagtccagtaacaagtgctaa

SEQ ID NO: 462681 - DNA, 25 bp, Artificial
  probe
  misc_feature (1)..(25): SEQ ID NO: 7244; WAN024BMP; Start 586; Stop 610
aatatcagtccagtaacaagtgcta

SEQ ID NO: 462682 - DNA, 25 bp, Artificial
  probe
  misc_feature (1)..(25): SEQ ID NO: 7244; WAN024BMP; Start 589; Stop 613
atcagtccagtaacaagtgctaaca

SEQ ID NO: 462683 - DNA, 25 bp, Artificial
  probe
  misc_feature (1)..(25): SEQ ID NO: 7244; WAN024BMP; Start 327; Stop 351
caacgctctgtgtatcatgttattc

SEQ ID NO: 462684 - DNA, 25 bp, Artificial
  probe
  misc_feature (1)..(25): SEQ ID NO: 7244; WAN024BMP; Start 325; Stop 349
atcaacgctctgtgtatcatgttat

SEQ ID NO: 462685 - DNA, 25 bp, Artificial
  probe
  misc_feature (1)..(25): SEQ ID NO: 7244; WAN024BMP; Start 328; Stop 352
aacgctctgtgtatcatgttattca

SEQ ID NO: 462686 - DNA, 25 bp, Artificial
  probe
  misc_feature (1)..(25): SEQ ID NO: 7244; WAN024BMP; Start 326; Stop 350
tcaacgctctgtgtatcatgttatt

SEQ ID NO: 462687 - DNA, 25 bp, Artificial
  probe
  misc_feature (1)..(25): SEQ ID NO: 7244; WAN024BMP; Start 324; Stop 348
aatcaacgctctgtgtatcatgtta

SEQ ID NO: 462688 - DNA, 25 bp, Artificial
  probe
  misc_feature (1)..(25): SEQ ID NO: 7244; WAN024BMP; Start 592; Stop 616
agtccagtaacaagtgctaacagtt

SEQ ID NO: 462689 - DNA, 25 bp, Artificial
  probe
  misc_feature (1)..(25): SEQ ID NO: 7244; WAN024BMP; Start 590; Stop 614
tcagtccagtaacaagtgctaacag

SEQ ID NO: 462690 - DNA, 25 bp, Artificial
  probe
  misc_feature (1)..(25): SEQ ID NO: 7244; WAN024BMP; Start 87; Stop 111
cctctacctagctctcatctgttat

SEQ ID NO: 462691 - DNA, 25 bp, Artificial
  probe
  misc_feature (1)..(25): SEQ ID NO: 7244; WAN024BMP; Start 88; Stop 112
ctctacctagctctcatctgttatt

SEQ ID NO: 462692 - DNA, 25 bp, Artificial
  probe
  misc_feature (1)..(25): SEQ ID NO: 7244; WAN024BMP; Start 591; Stop 615
cagtccagtaacaagtgctaacagt

SEQ ID NO: 462693 - DNA, 25 bp, Artificial
  probe
  misc_feature (1)..(25): SEQ ID NO: 7244; WAN024BMP; Start 331; Stop 355
gctctgtgtatcatgttattcacct

SEQ ID NO: 462694 - DNA, 25 bp, Artificial
  probe
  misc_feature (1)..(25): SEQ ID NO: 7244; WAN024BMP; Start 191; Stop 215
ttctccctttgtattgtgtttccta

SEQ ID NO: 462695 - DNA, 25 bp, Artificial
  probe
  misc_feature (1)..(25): SEQ ID NO: 7244; WAN024BMP; Start 189; Stop 213
gattctccctttgtattgtgtttcc

SEQ ID NO: 462696 - DNA, 25 bp, Artificial
  probe
  misc_feature (1)..(25): SEQ ID NO: 7244; WAN024BMP; Start 109; Stop 133
tattatgtaaatgatgcgagaggct

SEQ ID NO: 462697 - DNA, 25 bp, Artificial
  probe
  misc_feature (1)..(25): SEQ ID NO: 7244; WAN024BMP; Start 579; Stop 603
gagtccaaatatcagtccagtaaca

SEQ ID NO: 462698 - DNA, 25 bp, Artificial
  probe
  misc_feature (1)..(25): SEQ ID NO: 7244; WAN024BMP; Start 472; Stop 496
gtatttcctttagttgctttggtca

SEQ ID NO: 462699 - DNA, 25 bp, Artificial
  probe
  misc_feature (1)..(25): SEQ ID NO: 7244; WAN024BMP; Start 353; Stop 377
cctatatttcggtttccttattcgc

SEQ ID NO: 462700 - DNA, 25 bp, Artificial
  probe
  misc_feature (1)..(25): SEQ ID NO: 7244; WAN024BMP; Start 190; Stop 214
attctccctttgtattgtgtttcct

SEQ ID NO: 462701 - DNA, 25 bp, Artificial
  probe
  misc_feature (1)..(25): SEQ ID NO: 7244; WAN024BMP; Start 585; Stop 609
aaatatcagtccagtaacaagtgct

SEQ ID NO: 462702 - DNA, 25 bp, Artificial
  probe
  misc_feature (1)..(25): SEQ ID NO: 7244; WAN024BMP; Start 584; Stop 608
caaatatcagtccagtaacaagtgc

SEQ ID NO: 462703 - DNA, 25 bp, Artificial
  probe
  misc_feature (1)..(25): SEQ ID NO: 7244; WAN024BMP; Start 357; Stop 381
tatttcggtttccttattcgcacta

SEQ ID NO: 462704 - DNA, 25 bp, Artificial
  probe
  misc_feature (1)..(25): SEQ ID NO: 7244; WAN024BMP; Start 228; Stop 252
atttggtttagaatatcgctatcgc

SEQ ID NO: 462705 - DNA, 25 bp, Artificial
  probe
  misc_feature (1)..(25): SEQ ID NO: 7244; WAN024BMP; Start 192; Stop 216
tctccctttgtattgtgtttcctat

SEQ ID NO: 462706 - DNA, 25 bp, Artificial
  probe
  misc_feature (1)..(25): SEQ ID NO: 7244; WAN024BMP; Start 92; Stop 116
acctagctctcatctgttattatgt

SEQ ID NO: 462707 - DNA, 25 bp, Artificial
  probe
  misc_feature (1)..(25): SEQ ID NO: 7244; WAN024BMP; Start 583; Stop 607
ccaaatatcagtccagtaacaagtg

SEQ ID NO: 462708 - DNA, 25 bp, Artificial
  probe
  misc_feature (1)..(25): SEQ ID NO: 7244; WAN024BMP; Start 582; Stop 606
tccaaatatcagtccagtaacaagt

SEQ ID NO: 462709 - DNA, 25 bp, Artificial
  probe
  misc_feature (1)..(25): SEQ ID NO: 7244; WAN024BMP; Start 580; Stop 604
agtccaaatatcagtccagtaacaa

SEQ ID NO: 462710 - DNA, 25 bp, Artificial
  probe
  misc_feature (1)..(25): SEQ ID NO: 7244; WAN024BMP; Start 471; Stop 495
agtatttcctttagttgctttggtc

SEQ ID NO: 462711 - DNA, 25 bp, Artificial
  probe
  misc_feature (1)..(25): SEQ ID NO: 7244; WAN024BMP; Start 470; Stop 494
gagtatttcctttagttgctttggt

SEQ ID NO: 462712 - DNA, 25 bp, Artificial
  probe
  misc_feature (1)..(25): SEQ ID NO: 7245; WAN024BVZ; Start 147; Stop 171
aaccttactacaagaattagaagcg

SEQ ID NO: 462713 - DNA, 25 bp, Artificial
  probe
  misc_feature (1)..(25): SEQ ID NO: 7245; WAN024BVZ; Start 113; Stop 137
ttgaaatagatgttgaccttgatga

SEQ ID NO: 462714 - DNA, 25 bp, Artificial
  probe
  misc_feature (1)..(25): SEQ ID NO: 7245; WAN024BVZ; Start 114; Stop 138
tgaaatagatgttgaccttgatgat

SEQ ID NO: 462715 - DNA, 25 bp, Artificial
  probe
  misc_feature (1)..(25): SEQ ID NO: 7245; WAN024BVZ; Start 120; Stop 144
agatgttgaccttgatgatttagat

SEQ ID NO: 462716 - DNA, 25 bp, Artificial
  probe
  misc_feature (1)..(25): SEQ ID NO: 7245; WAN024BVZ; Start 112; Stop 136
tttgaaatagatgttgaccttgatg

SEQ ID NO: 462717 - DNA, 25 bp, Artificial
  probe
  misc_feature (1)..(25): SEQ ID NO: 7245; WAN024BVZ; Start 119; Stop 143
tagatgttgaccttgatgatttaga

SEQ ID NO: 462718 - DNA, 25 bp, Artificial
  probe
  misc_feature (1)..(25): SEQ ID NO: 7245; WAN024BVZ; Start 146; Stop 170
taaccttactacaagaattagaagc

SEQ ID NO: 462719 - DNA, 25 bp, Artificial
  probe
  misc_feature (1)..(25): SEQ ID NO: 7245; WAN024BVZ; Start 121; Stop 145
gatgttgaccttgatgatttagatt

SEQ ID NO: 462720 - DNA, 25 bp, Artificial
  probe
  misc_feature (1)..(25): SEQ ID NO: 7245; WAN024BVZ; Start 115; Stop 139
gaaatagatgttgaccttgatgatt

SEQ ID NO: 462721 - DNA, 25 bp, Artificial
  probe
  misc_feature (1)..(25): SEQ ID NO: 7245; WAN024BVZ; Start 126; Stop 150
tgaccttgatgatttagatttaacc

SEQ ID NO: 462722 - DNA, 25 bp, Artificial
  probe
  misc_feature (1)..(25): SEQ ID NO: 7245; WAN024BVZ; Start 122; Stop 146
atgttgaccttgatgatttagattt

SEQ ID NO: 462723 - DNA, 25 bp, Artificial
  probe
  misc_feature (1)..(25): SEQ ID NO: 7245; WAN024BVZ; Start 51; Stop 75
ccaattagaggatatggagatagat

SEQ ID NO: 462724 - DNA, 25 bp, Artificial
  probe
  misc_feature (1)..(25): SEQ ID NO: 7245; WAN024BVZ; Start 127; Stop 151
gaccttgatgatttagatttaacct

SEQ ID NO: 462725 - DNA, 25 bp, Artificial
  probe
  misc_feature (1)..(25): SEQ ID NO: 7245; WAN024BVZ; Start 118; Stop 142
atagatgttgaccttgatgatttag

SEQ ID NO: 462726 - DNA, 25 bp, Artificial
  probe
  misc_feature (1)..(25): SEQ ID NO: 7245; WAN024BVZ; Start 116; Stop 140
aaatagatgttgaccttgatgattt

SEQ ID NO: 462727 - DNA, 25 bp, Artificial
  probe
  misc_feature (1)..(25): SEQ ID NO: 7245; WAN024BVZ; Start 123; Stop 147
tgttgaccttgatgatttagattta

SEQ ID NO: 462728 - DNA, 25 bp, Artificial
  probe
  misc_feature (1)..(25): SEQ ID NO: 7245; WAN024BVZ; Start 128; Stop 152
accttgatgatttagatttaacctt

SEQ ID NO: 462729 - DNA, 25 bp, Artificial
  probe
  misc_feature (1)..(25): SEQ ID NO: 7245; WAN024BVZ; Start 117; Stop 141
aatagatgttgaccttgatgattta

SEQ ID NO: 462730 - DNA, 25 bp, Artificial
  probe
  misc_feature (1)..(25): SEQ ID NO: 7245; WAN024BVZ; Start 52; Stop 76
caattagaggatatggagatagatt

SEQ ID NO: 462731 - DNA, 25 bp, Artificial
  probe
  misc_feature (1)..(25): SEQ ID NO: 7245; WAN024BVZ; Start 111; Stop 135
ttttgaaatagatgttgaccttgat

SEQ ID NO: 462732 - DNA, 25 bp, Artificial
  probe
  misc_feature (1)..(25): SEQ ID NO: 7245; WAN024BVZ; Start 110; Stop 134
attttgaaatagatgttgaccttga

SEQ ID NO: 462733 - DNA, 25 bp, Artificial
  probe
  misc_feature (1)..(25): SEQ ID NO: 7245; WAN024BVZ; Start 125; Stop 149
ttgaccttgatgatttagatttaac

SEQ ID NO: 462734 - DNA, 25 bp, Artificial
  probe
  misc_feature (1)..(25): SEQ ID NO: 7245; WAN024BVZ; Start 124; Stop 148
gttgaccttgatgatttagatttaa

SEQ ID NO: 462735 - DNA, 25 bp, Artificial
  probe
  misc_feature (1)..(25): SEQ ID NO: 7245; WAN024BVZ; Start 109; Stop 133
gattttgaaatagatgttgaccttg

SEQ ID NO: 462736 - DNA, 25 bp, Artificial
  probe
  misc_feature (1)..(25): SEQ ID NO: 7245; WAN024BVZ; Start 108; Stop 132
agattttgaaatagatgttgacctt

SEQ ID NO: 462737 - DNA, 25 bp, Artificial
  probe
  misc_feature (1)..(25): SEQ ID NO: 7245; WAN024BVZ; Start 50; Stop 74
tccaattagaggatatggagataga

SEQ ID NO: 462738 - DNA, 25 bp, Artificial
  probe
  misc_feature (1)..(25): SEQ ID NO: 7245; WAN024BVZ; Start 107; Stop 131
tagattttgaaatagatgttgacct

SEQ ID NO: 462739 - DNA, 25 bp, Artificial
  probe
  misc_feature (1)..(25): SEQ ID NO: 7245; WAN024BVZ; Start 49; Stop 73
atccaattagaggatatggagatag

SEQ ID NO: 462740 - DNA, 25 bp, Artificial
  probe
  misc_feature (1)..(25): SEQ ID NO: 7245; WAN024BVZ; Start 58; Stop 82
gaggatatggagatagattttaaca

SEQ ID NO: 462741 - DNA, 25 bp, Artificial
  probe
  misc_feature (1)..(25): SEQ ID NO: 7245; WAN024BVZ; Start 57; Stop 81
agaggatatggagatagattttaac

SEQ ID NO: 462742 - DNA, 25 bp, Artificial
  probe
  misc_feature (1)..(25): SEQ ID NO: 7245; WAN024BVZ; Start 73; Stop 97
gattttaacatggatatagacatcg

SEQ ID NO: 462743 - DNA, 25 bp, Artificial
  probe
  misc_feature (1)..(25): SEQ ID NO: 7245; WAN024BVZ; Start 106; Stop 130
atagattttgaaatagatgttgacc

SEQ ID NO: 462744 - DNA, 25 bp, Artificial
  probe
  misc_feature (1)..(25): SEQ ID NO: 7245; WAN024BVZ; Start 83; Stop 107
tggatatagacatcgatttaaacat

SEQ ID NO: 462745 - DNA, 25 bp, Artificial
  probe
  misc_feature (1)..(25): SEQ ID NO: 7246; WAN024BZE; Start 33; Stop 57
aatctttggaaaattagttccgacc

SEQ ID NO: 462746 - DNA, 25 bp, Artificial
  probe
  misc_feature (1)..(25): SEQ ID NO: 7246; WAN024BZE; Start 41; Stop 65
gaaaattagttccgaccgtccctca

SEQ ID NO: 462747 - DNA, 25 bp, Artificial
  probe
  misc_feature (1)..(25): SEQ ID NO: 7246; WAN024BZE; Start 34; Stop 58
atctttggaaaattagttccgaccg

SEQ ID NO: 462748 - DNA, 25 bp, Artificial
  probe
  misc_feature (1)..(25): SEQ ID NO: 7246; WAN024BZE; Start 32; Stop 56
aaatctttggaaaattagttccgac

SEQ ID NO: 462749 - DNA, 25 bp, Artificial
  probe
  misc_feature (1)..(25): SEQ ID NO: 7246; WAN024BZE; Start 30; Stop 54
tgaaatctttggaaaattagttccg

SEQ ID NO: 462750 - DNA, 25 bp, Artificial
  probe
  misc_feature (1)..(25): SEQ ID NO: 7246; WAN024BZE; Start 42; Stop 66
aaaattagttccgaccgtccctcac

SEQ ID NO: 462751 - DNA, 25 bp, Artificial
  probe
  misc_feature (1)..(25): SEQ ID NO: 7246; WAN024BZE; Start 28; Stop 52
gatgaaatctttggaaaattagttc

SEQ ID NO: 462752 - DNA, 25 bp, Artificial
  probe
  misc_feature (1)..(25): SEQ ID NO: 7246; WAN024BZE; Start 31; Stop 55
gaaatctttggaaaattagttccga

SEQ ID NO: 462753 - DNA, 25 bp, Artificial
  probe
  misc_feature (1)..(25): SEQ ID NO: 7246; WAN024BZE; Start 36; Stop 60
ctttggaaaattagttccgaccgtc

SEQ ID NO: 462754 - DNA, 25 bp, Artificial
  probe
  misc_feature (1)..(25): SEQ ID NO: 7246; WAN024BZE; Start 35; Stop 59
tctttggaaaattagttccgaccgt

SEQ ID NO: 462755 - DNA, 25 bp, Artificial
  probe
  misc_feature (1)..(25): SEQ ID NO: 7246; WAN024BZE; Start 27; Stop 51
agatgaaatctttggaaaattagtt

SEQ ID NO: 462756 - DNA, 25 bp, Artificial
  probe
  misc_feature (1)..(25): SEQ ID NO: 7246; WAN024BZE; Start 37; Stop 61
tttggaaaattagttccgaccgtcc

SEQ ID NO: 462757 - DNA, 25 bp, Artificial
  probe
  misc_feature (1)..(25): SEQ ID NO: 7246; WAN024BZE; Start 29; Stop 53
atgaaatctttggaaaattagttcc

SEQ ID NO: 462758 - DNA, 25 bp, Artificial
  probe
  misc_feature (1)..(25): SEQ ID NO: 7246; WAN024BZE; Start 38; Stop 62
ttggaaaattagttccgaccgtccc

SEQ ID NO: 462759 - DNA, 25 bp, Artificial
  probe
  misc_feature (1)..(25): SEQ ID NO: 7246; WAN024BZE; Start 26; Stop 50
aagatgaaatctttggaaaattagt

SEQ ID NO: 462760 - DNA, 25 bp, Artificial
  probe
  misc_feature (1)..(25): SEQ ID NO: 7247; WAN024BQM; Start 344; Stop 368
ttcgcaaggagagattactgatatt

SEQ ID NO: 462761 - DNA, 25 bp, Artificial
  probe
  misc_feature (1)..(25): SEQ ID NO: 7247; WAN024BQM; Start 1117; Stop 1141
ggtgctatatgctgcttagttctta

SEQ ID NO: 462762 - DNA, 25 bp, Artificial
  probe
  misc_feature (1)..(25): SEQ ID NO: 7247; WAN024BQM; Start 67; Stop 91
gttgttactccgactcataccttaa

SEQ ID NO: 462763 - DNA, 25 bp, Artificial
  probe
  misc_feature (1)..(25): SEQ ID NO: 7247; WAN024BQM; Start 972; Stop 996
aattgttctgtcactctatcactca

SEQ ID NO: 462764 - DNA, 25 bp, Artificial
  probe
  misc_feature (1)..(25): SEQ ID NO: 7247; WAN024BQM; Start 68; Stop 92
ttgttactccgactcataccttaat

SEQ ID NO: 462765 - DNA, 25 bp, Artificial
  probe
  misc_feature (1)..(25): SEQ ID NO: 7247; WAN024BQM; Start 66; Stop 90
tgttgttactccgactcatacctta

SEQ ID NO: 462766 - DNA, 25 bp, Artificial
  probe
  misc_feature (1)..(25): SEQ ID NO: 7247; WAN024BQM; Start 350; Stop 374
aggagagattactgatattgaagca

SEQ ID NO: 462767 - DNA, 25 bp, Artificial
  probe
  misc_feature (1)..(25): SEQ ID NO: 7247; WAN024BQM; Start 69; Stop 93
tgttactccgactcataccttaatt

SEQ ID NO: 462768 - DNA, 25 bp, Artificial
  probe
  misc_feature (1)..(25): SEQ ID NO: 7247; WAN024BQM; Start 1118; Stop 1142
gtgctatatgctgcttagttcttat

SEQ ID NO: 462769 - DNA, 25 bp, Artificial
  probe
  misc_feature (1)..(25): SEQ ID NO: 7247; WAN024BQM; Start 354; Stop 378
gagattactgatattgaagcaagcg

SEQ ID NO: 462770 - DNA, 25 bp, Artificial
  probe
  misc_feature (1)..(25): SEQ ID NO: 7247; WAN024BQM; Start 346; Stop 370
cgcaaggagagattactgatattga

SEQ ID NO: 462771 - DNA, 25 bp, Artificial
  probe
  misc_feature (1)..(25): SEQ ID NO: 7247; WAN024BQM; Start 345; Stop 369
tcgcaaggagagattactgatattg

SEQ ID NO: 462772 - DNA, 25 bp, Artificial
  probe
  misc_feature (1)..(25): SEQ ID NO: 7247; WAN024BQM; Start 62; Stop 86
tagttgttgttactccgactcatac

SEQ ID NO: 462773 - DNA, 25 bp, Artificial
  probe
  misc_feature (1)..(25): SEQ ID NO: 7247; WAN024BQM; Start 61; Stop 85
ttagttgttgttactccgactcata

SEQ ID NO: 462774 - DNA, 25 bp, Artificial
  probe
  misc_feature (1)..(25): SEQ ID NO: 7247; WAN024BQM; Start 65; Stop 89
ttgttgttactccgactcatacctt

SEQ ID NO: 462775 - DNA, 25 bp, Artificial
  probe
  misc_feature (1)..(25): SEQ ID NO: 7247; WAN024BQM; Start 353; Stop 377
agagattactgatattgaagcaagc

SEQ ID NO: 462776 - DNA, 25 bp, Artificial
  probe
  misc_feature (1)..(25): SEQ ID NO: 7247; WAN024BQM; Start 751; Stop 775
aatgttatgaccttggtaatcttcc

SEQ ID NO: 462777 - DNA, 25 bp, Artificial
  probe
  misc_feature (1)..(25): SEQ ID NO: 7247; WAN024BQM; Start 349; Stop 373
aaggagagattactgatattgaagc

SEQ ID NO: 462778 - DNA, 25 bp, Artificial
  probe
  misc_feature (1)..(25): SEQ ID NO: 7247; WAN024BQM; Start 973; Stop 997
attgttctgtcactctatcactcag

SEQ ID NO: 462779 - DNA, 25 bp, Artificial
  probe
  misc_feature (1)..(25): SEQ ID NO: 7247; WAN024BQM; Start 351; Stop 375
ggagagattactgatattgaagcaa

SEQ ID NO: 462780 - DNA, 25 bp, Artificial
  probe
  misc_feature (1)..(25): SEQ ID NO: 7247; WAN024BQM; Start 347; Stop 371
gcaaggagagattactgatattgaa

SEQ ID NO: 462781 - DNA, 25 bp, Artificial
  probe
  misc_feature (1)..(25): SEQ ID NO: 7247; WAN024BQM; Start 739; Stop 763
acgacgaagattaatgttatgacct

SEQ ID NO: 462782 - DNA, 25 bp, Artificial
  probe
  misc_feature (1)..(25): SEQ ID NO: 7247; WAN024BQM; Start 64; Stop 88
gttgttgttactccgactcatacct

SEQ ID NO: 462783 - DNA, 25 bp, Artificial
  probe
  misc_feature (1)..(25): SEQ ID NO: 7247; WAN024BQM; Start 1208; Stop 1232
ggatggatgaactagcactatatac

SEQ ID NO: 462784 - DNA, 25 bp, Artificial
  probe
  misc_feature (1)..(25): SEQ ID NO: 7247; WAN024BQM; Start 740; Stop 764
cgacgaagattaatgttatgacctt

SEQ ID NO: 462785 - DNA, 25 bp, Artificial
  probe
  misc_feature (1)..(25): SEQ ID NO: 7247; WAN024BQM; Start 738; Stop 762
aacgacgaagattaatgttatgacc

SEQ ID NO: 462786 - DNA, 25 bp, Artificial
  probe
  misc_feature (1)..(25): SEQ ID NO: 7247; WAN024BQM; Start 743; Stop 767
cgaagattaatgttatgaccttggt

SEQ ID NO: 462787 - DNA, 25 bp, Artificial
  probe
  misc_feature (1)..(25): SEQ ID NO: 7247; WAN024BQM; Start 742; Stop 766
acgaagattaatgttatgaccttgg

SEQ ID NO: 462788 - DNA, 25 bp, Artificial
  probe
  misc_feature (1)..(25): SEQ ID NO: 7247; WAN024BQM; Start 1119; Stop 1143
tgctatatgctgcttagttcttata

SEQ ID NO: 462789 - DNA, 25 bp, Artificial
  probe
  misc_feature (1)..(25): SEQ ID NO: 7247; WAN024BQM; Start 737; Stop 761
caacgacgaagattaatgttatgac

SEQ ID NO: 462790 - DNA, 25 bp, Artificial
  probe
  misc_feature (1)..(25): SEQ ID NO: 7247; WAN024BQM; Start 63; Stop 87
agttgttgttactccgactcatacc

SEQ ID NO: 462791 - DNA, 25 bp, Artificial
  probe
  misc_feature (1)..(25): SEQ ID NO: 7247; WAN024BQM; Start 343; Stop 367
tttcgcaaggagagattactgatat

SEQ ID NO: 462792 - DNA, 25 bp, Artificial
  probe
  misc_feature (1)..(25): SEQ ID NO: 7247; WAN024BQM; Start 736; Stop 760
tcaacgacgaagattaatgttatga

SEQ ID NO: 462793 - DNA, 25 bp, Artificial
  probe
  misc_feature (1)..(25): SEQ ID NO: 7248; WAN024BT9; Start 554; Stop 578
tagaactaacaacctggaacgatac

SEQ ID NO: 462794 - DNA, 25 bp, Artificial
  probe
  misc_feature (1)..(25): SEQ ID NO: 7248; WAN024BT9; Start 553; Stop 577
gtagaactaacaacctggaacgata

SEQ ID NO: 462795 - DNA, 25 bp, Artificial
  probe
  misc_feature (1)..(25): SEQ ID NO: 7248; WAN024BT9; Start 424; Stop 448
catataatgaccataatgcgaccaa

SEQ ID NO: 462796 - DNA, 25 bp, Artificial
  probe
  misc_feature (1)..(25): SEQ ID NO: 7248; WAN024BT9; Start 256; Stop 280
gcacaactagcaagacaattcataa

SEQ ID NO: 462797 - DNA, 25 bp, Artificial
  probe
  misc_feature (1)..(25): SEQ ID NO: 7248; WAN024BT9; Start 427; Stop 451
ataatgaccataatgcgaccaataa

SEQ ID NO: 462798 - DNA, 25 bp, Artificial
  probe
  misc_feature (1)..(25): SEQ ID NO: 7248; WAN024BT9; Start 425; Stop 449
atataatgaccataatgcgaccaat

SEQ ID NO: 462799 - DNA, 25 bp, Artificial
  probe
  misc_feature (1)..(25): SEQ ID NO: 7248; WAN024BT9; Start 555; Stop 579
agaactaacaacctggaacgataca

SEQ ID NO: 462800 - DNA, 25 bp, Artificial
  probe
  misc_feature (1)..(25): SEQ ID NO: 7248; WAN024BT9; Start 552; Stop 576
agtagaactaacaacctggaacgat

SEQ ID NO: 462801 - DNA, 25 bp, Artificial
  probe
  misc_feature (1)..(25): SEQ ID NO: 7248; WAN024BT9; Start 426; Stop 450
tataatgaccataatgcgaccaata

SEQ ID NO: 462802 - DNA, 25 bp, Artificial
  probe
  misc_feature (1)..(25): SEQ ID NO: 7248; WAN024BT9; Start 551; Stop 575
aagtagaactaacaacctggaacga

SEQ ID NO: 462803 - DNA, 25 bp, Artificial
  probe
  misc_feature (1)..(25): SEQ ID NO: 7248; WAN024BT9; Start 257; Stop 281
cacaactagcaagacaattcataat

SEQ ID NO: 462804 - DNA, 25 bp, Artificial
  probe
  misc_feature (1)..(25): SEQ ID NO: 7248; WAN024BT9; Start 556; Stop 580
gaactaacaacctggaacgatacag

SEQ ID NO: 462805 - DNA, 25 bp, Artificial
  probe
  misc_feature (1)..(25): SEQ ID NO: 7248; WAN024BT9; Start 265; Stop 289
gcaagacaattcataataggactac

SEQ ID NO: 462806 - DNA, 25 bp, Artificial
  probe
  misc_feature (1)..(25): SEQ ID NO: 7248; WAN024BT9; Start 356; Stop 380
cacaaggaatgatagtagattatgc

SEQ ID NO: 462807 - DNA, 25 bp, Artificial
  probe
  misc_feature (1)..(25): SEQ ID NO: 7248; WAN024BT9; Start 264; Stop 288
agcaagacaattcataataggacta

SEQ ID NO: 462808 - DNA, 25 bp, Artificial
  probe
  misc_feature (1)..(25): SEQ ID NO: 7248; WAN024BT9; Start 263; Stop 287
tagcaagacaattcataataggact

SEQ ID NO: 462809 - DNA, 25 bp, Artificial
  probe
  misc_feature (1)..(25): SEQ ID NO: 7248; WAN024BT9; Start 1547; Stop 1571
aaccaagtgtaatagcacagattaa

SEQ ID NO: 462810 - DNA, 25 bp, Artificial
  probe
  misc_feature (1)..(25): SEQ ID NO: 7248; WAN024BT9; Start 70; Stop 94
gtagcaagtgcagcatatataagtg

SEQ ID NO: 462811 - DNA, 25 bp, Artificial
  probe
  misc_feature (1)..(25): SEQ ID NO: 7248; WAN024BT9; Start 69; Stop 93
agtagcaagtgcagcatatataagt

SEQ ID NO: 462812 - DNA, 25 bp, Artificial
  probe
  misc_feature (1)..(25): SEQ ID NO: 7248; WAN024BT9; Start 688; Stop 712
tcagattatctaccgacaatccatt

SEQ ID NO: 462813 - DNA, 25 bp, Artificial
  probe
  misc_feature (1)..(25): SEQ ID NO: 7248; WAN024BT9; Start 687; Stop 711
ttcagattatctaccgacaatccat

SEQ ID NO: 462814 - DNA, 25 bp, Artificial
  probe
  misc_feature (1)..(25): SEQ ID NO: 7248; WAN024BT9; Start 686; Stop 710
attcagattatctaccgacaatcca

SEQ ID NO: 462815 - DNA, 25 bp, Artificial
  probe
  misc_feature (1)..(25): SEQ ID NO: 7248; WAN024BT9; Start 75; Stop 99
aagtgcagcatatataagtggagaa

SEQ ID NO: 462816 - DNA, 25 bp, Artificial
  probe
  misc_feature (1)..(25): SEQ ID NO: 7248; WAN024BT9; Start 68; Stop 92
cagtagcaagtgcagcatatataag

SEQ ID NO: 462817 - DNA, 25 bp, Artificial
  probe
  misc_feature (1)..(25): SEQ ID NO: 7248; WAN024BT9; Start 734; Stop 758
tggaaagaaagggaatagaaactga

SEQ ID NO: 462818 - DNA, 25 bp, Artificial
  probe
  misc_feature (1)..(25): SEQ ID NO: 7248; WAN024BT9; Start 628; Stop 652
tatttagaaagagcaggagcagaaa

SEQ ID NO: 462819 - DNA, 25 bp, Artificial
  probe
  misc_feature (1)..(25): SEQ ID NO: 7248; WAN024BT9; Start 261; Stop 285
actagcaagacaattcataatagga

SEQ ID NO: 462820 - DNA, 25 bp, Artificial
  probe
  misc_feature (1)..(25): SEQ ID NO: 7248; WAN024BT9; Start 74; Stop 98
caagtgcagcatatataagtggaga

SEQ ID NO: 462821 - DNA, 25 bp, Artificial
  probe
  misc_feature (1)..(25): SEQ ID NO: 7248; WAN024BT9; Start 730; Stop 754
gcaatggaaagaaagggaatagaaa

SEQ ID NO: 462822 - DNA, 25 bp, Artificial
  probe
  misc_feature (1)..(25): SEQ ID NO: 7248; WAN024BT9; Start 739; Stop 763
agaaagggaatagaaactgacaagg

SEQ ID NO: 462823 - DNA, 25 bp, Artificial
  probe
  misc_feature (1)..(25): SEQ ID NO: 7248; WAN024BT9; Start 735; Stop 759
ggaaagaaagggaatagaaactgac

SEQ ID NO: 462824 - DNA, 25 bp, Artificial
  probe
  misc_feature (1)..(25): SEQ ID NO: 7248; WAN024BT9; Start 627; Stop 651
atatttagaaagagcaggagcagaa

SEQ ID NO: 462825 - DNA, 25 bp, Artificial
  probe
  misc_feature (1)..(25): SEQ ID NO: 7248; WAN024BT9; Start 429; Stop 453
aatgaccataatgcgaccaataaac

SEQ ID NO: 462826 - DNA, 25 bp, Artificial
  probe
  misc_feature (1)..(25): SEQ ID NO: 7249; WAN024DN2; Start 94; Stop 118
agttctataatgaagttagccacct

SEQ ID NO: 462827 - DNA, 25 bp, Artificial
  probe
  misc_feature (1)..(25): SEQ ID NO: 7249; WAN024DN2; Start 99; Stop 123
tataatgaagttagccaccttacct

SEQ ID NO: 462828 - DNA, 25 bp, Artificial
  probe
  misc_feature (1)..(25): SEQ ID NO: 7249; WAN024DN2; Start 98; Stop 122
ctataatgaagttagccaccttacc

SEQ ID NO: 462829 - DNA, 25 bp, Artificial
  probe
  misc_feature (1)..(25): SEQ ID NO: 7249; WAN024DN2; Start 95; Stop 119
gttctataatgaagttagccacctt

SEQ ID NO: 462830 - DNA, 25 bp, Artificial
  probe
  misc_feature (1)..(25): SEQ ID NO: 7249; WAN024DN2; Start 97; Stop 121
tctataatgaagttagccaccttac

SEQ ID NO: 462831 - DNA, 25 bp, Artificial
  probe
  misc_feature (1)..(25): SEQ ID NO: 7249; WAN024DN2; Start 96; Stop 120
ttctataatgaagttagccacctta

SEQ ID NO: 462832 - DNA, 25 bp, Artificial
  probe
  misc_feature (1)..(25): SEQ ID NO: 7249; WAN024DN2; Start 89; Stop 113
ttgaaagttctataatgaagttagc

SEQ ID NO: 462833 - DNA, 25 bp, Artificial
  probe
  misc_feature (1)..(25): SEQ ID NO: 7250; WAN024C3B; Start 36; Stop 60
aattgaagaggtgactgaggaaggt

SEQ ID NO: 462834 - DNA, 25 bp, Artificial
  probe
  misc_feature (1)..(25): SEQ ID NO: 7250; WAN024C3B; Start 35; Stop 59
aaattgaagaggtgactgaggaagg

SEQ ID NO: 462835 - DNA, 25 bp, Artificial
  probe
  misc_feature (1)..(25): SEQ ID NO: 7250; WAN024C3B; Start 37; Stop 61
attgaagaggtgactgaggaaggtc

SEQ ID NO: 462836 - DNA, 25 bp, Artificial
  probe
  misc_feature (1)..(25): SEQ ID NO: 7250; WAN024C3B; Start 4; Stop 28
ataataaagttgtttcccctcccag

SEQ ID NO: 462837 - DNA, 25 bp, Artificial
  probe
  misc_feature (1)..(25): SEQ ID NO: 7250; WAN024C3B; Start 3; Stop 27
gataataaagttgtttcccctccca

SEQ ID NO: 462838 - DNA, 25 bp, Artificial
  probe
  misc_feature (1)..(25): SEQ ID NO: 7250; WAN024C3B; Start 2; Stop 26
tgataataaagttgtttcccctccc

SEQ ID NO: 462839 - DNA, 25 bp, Artificial
  probe
  misc_feature (1)..(25): SEQ ID NO: 7250; WAN024C3B; Start 1; Stop 25
gtgataataaagttgtttcccctcc

SEQ ID NO: 462840 - DNA, 25 bp, Artificial
  probe
  misc_feature (1)..(25): SEQ ID NO: 7250; WAN024C3B; Start 34; Stop 58
aaaattgaagaggtgactgaggaag

SEQ ID NO: 462841 - DNA, 25 bp, Artificial
  probe
  misc_feature (1)..(25): SEQ ID NO: 7250; WAN024C3B; Start 5; Stop 29
taataaagttgtttcccctcccagt

SEQ ID NO: 462842 - DNA, 25 bp, Artificial
  probe
  misc_feature (1)..(25): SEQ ID NO: 7250; WAN024C3B; Start 6; Stop 30
aataaagttgtttcccctcccagtt

SEQ ID NO: 462843 - DNA, 25 bp, Artificial
  probe
  misc_feature (1)..(25): SEQ ID NO: 7250; WAN024C3B; Start 52; Stop 76
gaggaaggtccaccactttacaaag

SEQ ID NO: 462844 - DNA, 25 bp, Artificial
  probe
  misc_feature (1)..(25): SEQ ID NO: 7250; WAN024C3B; Start 7; Stop 31
ataaagttgtttcccctcccagttg

SEQ ID NO: 462845 - DNA, 25 bp, Artificial
  probe
  misc_feature (1)..(25): SEQ ID NO: 7250; WAN024C3B; Start 51; Stop 75
tgaggaaggtccaccactttacaaa

SEQ ID NO: 462846 - DNA, 25 bp, Artificial
  probe
  misc_feature (1)..(25): SEQ ID NO: 7250; WAN024C3B; Start 50; Stop 74
ctgaggaaggtccaccactttacaa

SEQ ID NO: 462847 - DNA, 25 bp, Artificial
  probe
  misc_feature (1)..(25): SEQ ID NO: 7250; WAN024C3B; Start 63; Stop 87
accactttacaaagtccctgctaag

SEQ ID NO: 462848 - DNA, 25 bp, Artificial
  probe
  misc_feature (1)..(25): SEQ ID NO: 7250; WAN024C3B; Start 62; Stop 86
caccactttacaaagtccctgctaa

SEQ ID NO: 462849 - DNA, 25 bp, Artificial
  probe
  misc_feature (1)..(25): SEQ ID NO: 7250; WAN024C3B; Start 8; Stop 32
taaagttgtttcccctcccagttga

SEQ ID NO: 462850 - DNA, 25 bp, Artificial
  probe
  misc_feature (1)..(25): SEQ ID NO: 7250; WAN024C3B; Start 48; Stop 72
gactgaggaaggtccaccactttac

SEQ ID NO: 462851 - DNA, 25 bp, Artificial
  probe
  misc_feature (1)..(25): SEQ ID NO: 7250; WAN024C3B; Start 64; Stop 88
ccactttacaaagtccctgctaagg

SEQ ID NO: 462852 - DNA, 25 bp, Artificial
  probe
  misc_feature (1)..(25): SEQ ID NO: 7250; WAN024C3B; Start 55; Stop 79
gaaggtccaccactttacaaagtcc

SEQ ID NO: 462853 - DNA, 25 bp, Artificial
  probe
  misc_feature (1)..(25): SEQ ID NO: 7250; WAN024C3B; Start 54; Stop 78
ggaaggtccaccactttacaaagtc

SEQ ID NO: 462854 - DNA, 25 bp, Artificial
  probe
  misc_feature (1)..(25): SEQ ID NO: 7250; WAN024C3B; Start 47; Stop 71
tgactgaggaaggtccaccacttta

SEQ ID NO: 462855 - DNA, 25 bp, Artificial
  probe
  misc_feature (1)..(25): SEQ ID NO: 7250; WAN024C3B; Start 65; Stop 89
cactttacaaagtccctgctaaggc

SEQ ID NO: 462856 - DNA, 25 bp, Artificial
  probe
  misc_feature (1)..(25): SEQ ID NO: 7250; WAN024C3B; Start 53; Stop 77
aggaaggtccaccactttacaaagt

SEQ ID NO: 462857 - DNA, 25 bp, Artificial
  probe
  misc_feature (1)..(25): SEQ ID NO: 7250; WAN024C3B; Start 49; Stop 73
actgaggaaggtccaccactttaca

SEQ ID NO: 462858 - DNA, 25 bp, Artificial
  probe
  misc_feature (1)..(25): SEQ ID NO: 7250; WAN024C3B; Start 9; Stop 33
aaagttgtttcccctcccagttgaa

SEQ ID NO: 462859 - DNA, 25 bp, Artificial
  probe
  misc_feature (1)..(25): SEQ ID NO: 7250; WAN024C3B; Start 61; Stop 85
ccaccactttacaaagtccctgcta

SEQ ID NO: 462860 - DNA, 25 bp, Artificial
  probe
  misc_feature (1)..(25): SEQ ID NO: 7250; WAN024C3B; Start 56; Stop 80
aaggtccaccactttacaaagtccc

SEQ ID NO: 462861 - DNA, 25 bp, Artificial
  probe
  misc_feature (1)..(25): SEQ ID NO: 7250; WAN024C3B; Start 72; Stop 96
caaagtccctgctaaggccctaatt

SEQ ID NO: 462862 - DNA, 25 bp, Artificial
  probe
  misc_feature (1)..(25): SEQ ID NO: 7250; WAN024C3B; Start 11; Stop 35
agttgtttcccctcccagttgaaaa

SEQ ID NO: 462863 - DNA, 25 bp, Artificial
  probe
  misc_feature (1)..(25): SEQ ID NO: 7250; WAN024C3B; Start 10; Stop 34
aagttgtttcccctcccagttgaaa

SEQ ID NO: 462864 - DNA, 25 bp, Artificial
  probe
  misc_feature (1)..(25): SEQ ID NO: 7250; WAN024C3B; Start 70; Stop 94
tacaaagtccctgctaaggccctaa

SEQ ID NO: 462865 - DNA, 25 bp, Artificial
  probe
  misc_feature (1)..(25): SEQ ID NO: 7250; WAN024C3B; Start 69; Stop 93
ttacaaagtccctgctaaggcccta

SEQ ID NO: 462866 - DNA, 25 bp, Artificial
  probe
  misc_feature (1)..(25): SEQ ID NO: 7250; WAN024C3B; Start 66; Stop 90
actttacaaagtccctgctaaggcc

SEQ ID NO: 462867 - DNA, 25 bp, Artificial
  probe
  misc_feature (1)..(25): SEQ ID NO: 7251; WAN024G7U; Start 3; Stop 27
gatacttgcgactctgaagattgac

SEQ ID NO: 462868 - DNA, 25 bp, Artificial
  probe
  misc_feature (1)..(25): SEQ ID NO: 7251; WAN024G7U; Start 2; Stop 26
tgatacttgcgactctgaagattga

SEQ ID NO: 462869 - DNA, 25 bp, Artificial
  probe
  misc_feature (1)..(25): SEQ ID NO: 7251; WAN024G7U; Start 1; Stop 25
gtgatacttgcgactctgaagattg

SEQ ID NO: 462870 - DNA, 25 bp, Artificial
  probe
  misc_feature (1)..(25): SEQ ID NO: 7251; WAN024G7U; Start 85; Stop 109
gattggattatcaacttctcctccg

SEQ ID NO: 462871 - DNA, 25 bp, Artificial
  probe
  misc_feature (1)..(25): SEQ ID NO: 7251; WAN024G7U; Start 86; Stop 110
attggattatcaacttctcctccga

SEQ ID NO: 462872 - DNA, 25 bp, Artificial
  probe
  misc_feature (1)..(25): SEQ ID NO: 7251; WAN024G7U; Start 4; Stop 28
atacttgcgactctgaagattgacc

SEQ ID NO: 462873 - DNA, 25 bp, Artificial
  probe
  misc_feature (1)..(25): SEQ ID NO: 7251; WAN024G7U; Start 87; Stop 111
ttggattatcaacttctcctccgag

SEQ ID NO: 462874 - DNA, 25 bp, Artificial
  probe
  misc_feature (1)..(25): SEQ ID NO: 7251; WAN024G7U; Start 71; Stop 95
ttctgagtcagcttgattggattat

SEQ ID NO: 462875 - DNA, 25 bp, Artificial
  probe
  misc_feature (1)..(25): SEQ ID NO: 7251; WAN024G7U; Start 70; Stop 94
attctgagtcagcttgattggatta

SEQ ID NO: 462876 - DNA, 25 bp, Artificial
  probe
  misc_feature (1)..(25): SEQ ID NO: 7251; WAN024G7U; Start 69; Stop 93
tattctgagtcagcttgattggatt

SEQ ID NO: 462877 - DNA, 25 bp, Artificial
  probe
  misc_feature (1)..(25): SEQ ID NO: 7251; WAN024G7U; Start 68; Stop 92
ttattctgagtcagcttgattggat

SEQ ID NO: 462878 - DNA, 25 bp, Artificial
  probe
  misc_feature (1)..(25): SEQ ID NO: 7251; WAN024G7U; Start 72; Stop 96
tctgagtcagcttgattggattatc

SEQ ID NO: 462879 - DNA, 25 bp, Artificial
  probe
  misc_feature (1)..(25): SEQ ID NO: 7251; WAN024G7U; Start 67; Stop 91
gttattctgagtcagcttgattgga

SEQ ID NO: 462880 - DNA, 25 bp, Artificial
  probe
  misc_feature (1)..(25): SEQ ID NO: 7251; WAN024G7U; Start 65; Stop 89
aggttattctgagtcagcttgattg

SEQ ID NO: 462881 - DNA, 25 bp, Artificial
  probe
  misc_feature (1)..(25): SEQ ID NO: 7251; WAN024G7U; Start 64; Stop 88
caggttattctgagtcagcttgatt

SEQ ID NO: 462882 - DNA, 25 bp, Artificial
  probe
  misc_feature (1)..(25): SEQ ID NO: 7251; WAN024G7U; Start 84; Stop 108
tgattggattatcaacttctcctcc

SEQ ID NO: 462883 - DNA, 25 bp, Artificial
  probe
  misc_feature (1)..(25): SEQ ID NO: 7251; WAN024G7U; Start 149; Stop 173
gcgaaatgttctacaccttctttag

SEQ ID NO: 462884 - DNA, 25 bp, Artificial
  probe
  misc_feature (1)..(25): SEQ ID NO: 7251; WAN024G7U; Start 148; Stop 172
agcgaaatgttctacaccttcttta

SEQ ID NO: 462885 - DNA, 25 bp, Artificial
  probe
  misc_feature (1)..(25): SEQ ID NO: 7251; WAN024G7U; Start 66; Stop 90
ggttattctgagtcagcttgattgg

SEQ ID NO: 462886 - DNA, 25 bp, Artificial
  probe
  misc_feature (1)..(25): SEQ ID NO: 7251; WAN024G7U; Start 210; Stop 234
tttcagaaatgctaaactcctcttt

SEQ ID NO: 462887 - DNA, 25 bp, Artificial
  probe
  misc_feature (1)..(25): SEQ ID NO: 7251; WAN024G7U; Start 147; Stop 171
aagcgaaatgttctacaccttcttt

SEQ ID NO: 462888 - DNA, 25 bp, Artificial
  probe
  misc_feature (1)..(25): SEQ ID NO: 7251; WAN024G7U; Start 146; Stop 170
aaagcgaaatgttctacaccttctt

SEQ ID NO: 462889 - DNA, 25 bp, Artificial
  probe
  misc_feature (1)..(25): SEQ ID NO: 7251; WAN024G7U; Start 145; Stop 169
gaaagcgaaatgttctacaccttct

SEQ ID NO: 462890 - DNA, 25 bp, Artificial
  probe
  misc_feature (1)..(25): SEQ ID NO: 7251; WAN024G7U; Start 5; Stop 29
tacttgcgactctgaagattgacca

SEQ ID NO: 462891 - DNA, 25 bp, Artificial
  probe
  misc_feature (1)..(25): SEQ ID NO: 7251; WAN024G7U; Start 150; Stop 174
cgaaatgttctacaccttctttaga

SEQ ID NO: 462892 - DNA, 25 bp, Artificial
  probe
  misc_feature (1)..(25): SEQ ID NO: 7251; WAN024G7U; Start 90; Stop 114
gattatcaacttctcctccgaggtg

SEQ ID NO: 462893 - DNA, 25 bp, Artificial
  probe
  misc_feature (1)..(25): SEQ ID NO: 7251; WAN024G7U; Start 73; Stop 97
ctgagtcagcttgattggattatca

SEQ ID NO: 462894 - DNA, 25 bp, Artificial
  probe
  misc_feature (1)..(25): SEQ ID NO: 7251; WAN024G7U; Start 56; Stop 80
aatccaggcaggttattctgagtca

SEQ ID NO: 462895 - DNA, 25 bp, Artificial
  probe
  misc_feature (1)..(25): SEQ ID NO: 7251; WAN024G7U; Start 50; Stop 74
gttccaaatccaggcaggttattct

SEQ ID NO: 462896 - DNA, 25 bp, Artificial
  probe
  misc_feature (1)..(25): SEQ ID NO: 7251; WAN024G7U; Start 63; Stop 87
gcaggttattctgagtcagcttgat

SEQ ID NO: 462897 - DNA, 25 bp, Artificial
  probe
  misc_feature (1)..(25): SEQ ID NO: 7251; WAN024G7U; Start 215; Stop 239
gaaatgctaaactcctctttccaga

SEQ ID NO: 462898 - DNA, 25 bp, Artificial
  probe
  misc_feature (1)..(25): SEQ ID NO: 7251; WAN024G7U; Start 214; Stop 238
agaaatgctaaactcctctttccag

SEQ ID NO: 462899 - DNA, 25 bp, Artificial
  probe
  misc_feature (1)..(25): SEQ ID NO: 7251; WAN024G7U; Start 212; Stop 236
tcagaaatgctaaactcctctttcc

SEQ ID NO: 462900 - DNA, 25 bp, Artificial
  probe
  misc_feature (1)..(25): SEQ ID NO: 7252; WAN024FMJ; Start 542; Stop 566
agattgaagatggagtggttatagc

SEQ ID NO: 462901 - DNA, 25 bp, Artificial
  probe
  misc_feature (1)..(25): SEQ ID NO: 7252; WAN024FMJ; Start 543; Stop 567
gattgaagatggagtggttatagcg

SEQ ID NO: 462902 - DNA, 25 bp, Artificial
  probe
  misc_feature (1)..(25): SEQ ID NO: 7252; WAN024FMJ; Start 186; Stop 210
taattggataagtctgttgtggaga

SEQ ID NO: 462903 - DNA, 25 bp, Artificial
  probe
  misc_feature (1)..(25): SEQ ID NO: 7252; WAN024FMJ; Start 349; Stop 373
ggaatccaaggagtcattgaagata

SEQ ID NO: 462904 - DNA, 25 bp, Artificial
  probe
  misc_feature (1)..(25): SEQ ID NO: 7252; WAN024FMJ; Start 185; Stop 209
ataattggataagtctgttgtggag

SEQ ID NO: 462905 - DNA, 25 bp, Artificial
  probe
  misc_feature (1)..(25): SEQ ID NO: 7252; WAN024FMJ; Start 541; Stop 565
aagattgaagatggagtggttatag

SEQ ID NO: 462906 - DNA, 25 bp, Artificial
  probe
  misc_feature (1)..(25): SEQ ID NO: 7252; WAN024FMJ; Start 350; Stop 374
gaatccaaggagtcattgaagataa

SEQ ID NO: 462907 - DNA, 25 bp, Artificial
  probe
  misc_feature (1)..(25): SEQ ID NO: 7252; WAN024FMJ; Start 348; Stop 372
aggaatccaaggagtcattgaagat

SEQ ID NO: 462908 - DNA, 25 bp, Artificial
  probe
  misc_feature (1)..(25): SEQ ID NO: 7252; WAN024FMJ; Start 347; Stop 371
aaggaatccaaggagtcattgaaga

SEQ ID NO: 462909 - DNA, 25 bp, Artificial
  probe
  misc_feature (1)..(25): SEQ ID NO: 7252; WAN024FMJ; Start 823; Stop 847
acctcattatatcttgcttcaggaa

SEQ ID NO: 462910 - DNA, 25 bp, Artificial
  probe
  misc_feature (1)..(25): SEQ ID NO: 7252; WAN024FMJ; Start 822; Stop 846
aacctcattatatcttgcttcagga

SEQ ID NO: 462911 - DNA, 25 bp, Artificial
  probe
  misc_feature (1)..(25): SEQ ID NO: 7252; WAN024FMJ; Start 544; Stop 568
attgaagatggagtggttatagcgg

SEQ ID NO: 462912 - DNA, 25 bp, Artificial
  probe
  misc_feature (1)..(25): SEQ ID NO: 7252; WAN024FMJ; Start 506; Stop 530
tattcgactacctagatccatcaga

SEQ ID NO: 462913 - DNA, 25 bp, Artificial
  probe
  misc_feature (1)..(25): SEQ ID NO: 7252; WAN024FMJ; Start 827; Stop 851
cattatatcttgcttcaggaatacc

SEQ ID NO: 462914 - DNA, 25 bp, Artificial
  probe
  misc_feature (1)..(25): SEQ ID NO: 7252; WAN024FMJ; Start 351; Stop 375
aatccaaggagtcattgaagataat

SEQ ID NO: 462915 - DNA, 25 bp, Artificial
  probe
  misc_feature (1)..(25): SEQ ID NO: 7252; WAN024FMJ; Start 507; Stop 531
attcgactacctagatccatcagaa

SEQ ID NO: 462916 - DNA, 25 bp, Artificial
  probe
  misc_feature (1)..(25): SEQ ID NO: 7252; WAN024FMJ; Start 184; Stop 208
tataattggataagtctgttgtgga

SEQ ID NO: 462917 - DNA, 25 bp, Artificial
  probe
  misc_feature (1)..(25): SEQ ID NO: 7252; WAN024FMJ; Start 824; Stop 848
cctcattatatcttgcttcaggaat

SEQ ID NO: 462918 - DNA, 25 bp, Artificial
  probe
  misc_feature (1)..(25): SEQ ID NO: 7252; WAN024FMJ; Start 505; Stop 529
atattcgactacctagatccatcag

SEQ ID NO: 462919 - DNA, 25 bp, Artificial
  probe
  misc_feature (1)..(25): SEQ ID NO: 7252; WAN024FMJ; Start 874; Stop 898
gcgttagcacagtttattgaagaaa

SEQ ID NO: 462920 - DNA, 25 bp, Artificial
  probe
  misc_feature (1)..(25): SEQ ID NO: 7252; WAN024FMJ; Start 94; Stop 118
gaattgggaatgaaagaaatacgct

SEQ ID NO: 462921 - DNA, 25 bp, Artificial
  probe
  misc_feature (1)..(25): SEQ ID NO: 7252; WAN024FMJ; Start 93; Stop 117
agaattgggaatgaaagaaatacgc

SEQ ID NO: 462922 - DNA, 25 bp, Artificial
  probe
  misc_feature (1)..(25): SEQ ID NO: 7252; WAN024FMJ; Start 728; Stop 752
tagtaggtaagtttggtttggtttg

SEQ ID NO: 462923 - DNA, 25 bp, Artificial
  probe
  misc_feature (1)..(25): SEQ ID NO: 7252; WAN024FMJ; Start 504; Stop 528
aatattcgactacctagatccatca

SEQ ID NO: 462924 - DNA, 25 bp, Artificial
  probe
  misc_feature (1)..(25): SEQ ID NO: 7252; WAN024FMJ; Start 95; Stop 119
aattgggaatgaaagaaatacgctt

SEQ ID NO: 462925 - DNA, 25 bp, Artificial
  probe
  misc_feature (1)..(25): SEQ ID NO: 7252; WAN024FMJ; Start 729; Stop 753
agtaggtaagtttggtttggtttgg

SEQ ID NO: 462926 - DNA, 25 bp, Artificial
  probe
  misc_feature (1)..(25): SEQ ID NO: 7252; WAN024FMJ; Start 698; Stop 722
gtttacctccaaataaattgcctca

SEQ ID NO: 462927 - DNA, 25 bp, Artificial
  probe
  misc_feature (1)..(25): SEQ ID NO: 7252; WAN024FMJ; Start 768; Stop 792
agaaacttgtagtggaaatactggt

SEQ ID NO: 462928 - DNA, 25 bp, Artificial
  probe
  misc_feature (1)..(25): SEQ ID NO: 7252; WAN024FMJ; Start 697; Stop 721
agtttacctccaaataaattgcctc

SEQ ID NO: 462929 - DNA, 25 bp, Artificial
  probe
  misc_feature (1)..(25): SEQ ID NO: 7252; WAN024FMJ; Start 726; Stop 750
gctagtaggtaagtttggtttggtt

SEQ ID NO: 462930 - DNA, 25 bp, Artificial
  probe
  misc_feature (1)..(25): SEQ ID NO: 7252; WAN024FMJ; Start 772; Stop 796
acttgtagtggaaatactggtaact

SEQ ID NO: 462931 - DNA, 25 bp, Artificial
  probe
  misc_feature (1)..(25): SEQ ID NO: 7252; WAN024FMJ; Start 727; Stop 751
ctagtaggtaagtttggtttggttt

SEQ ID NO: 462932 - DNA, 25 bp, Artificial
  probe
  misc_feature (1)..(25): SEQ ID NO: 7252; WAN024FMJ; Start 700; Stop 724
ttacctccaaataaattgcctcaaa

SEQ ID NO: 462933 - DNA, 25 bp, Artificial
  probe
  misc_feature (1)..(25): SEQ ID NO: 7253; WAN024AWJ; Start 298; Stop 322
gacttgatggagactttctttgaac

SEQ ID NO: 462934 - DNA, 25 bp, Artificial
  probe
  misc_feature (1)..(25): SEQ ID NO: 7253; WAN024AWJ; Start 297; Stop 321
agacttgatggagactttctttgaa

SEQ ID NO: 462935 - DNA, 25 bp, Artificial
  probe
  misc_feature (1)..(25): SEQ ID NO: 7253; WAN024AWJ; Start 437; Stop 461
ataaactccatcagaagggctatcc

SEQ ID NO: 462936 - DNA, 25 bp, Artificial
  probe
  misc_feature (1)..(25): SEQ ID NO: 7253; WAN024AWJ; Start 301; Stop 325
ttgatggagactttctttgaacgag

SEQ ID NO: 462937 - DNA, 25 bp, Artificial
  probe
  misc_feature (1)..(25): SEQ ID NO: 7253; WAN024AWJ; Start 300; Stop 324
cttgatggagactttctttgaacga

SEQ ID NO: 462938 - DNA, 25 bp, Artificial
  probe
  misc_feature (1)..(25): SEQ ID NO: 7253; WAN024AWJ; Start 299; Stop 323
acttgatggagactttctttgaacg

SEQ ID NO: 462939 - DNA, 25 bp, Artificial
  probe
  misc_feature (1)..(25): SEQ ID NO: 7253; WAN024AWJ; Start 164; Stop 188
cgaaagtggtcatcatgtttaatcc

SEQ ID NO: 462940 - DNA, 25 bp, Artificial
  probe
  misc_feature (1)..(25): SEQ ID NO: 7253; WAN024AWJ; Start 436; Stop 460
gataaactccatcagaagggctatc

SEQ ID NO: 462941 - DNA, 25 bp, Artificial
  probe
  misc_feature (1)..(25): SEQ ID NO: 7253; WAN024AWJ; Start 163; Stop 187
gcgaaagtggtcatcatgtttaatc

SEQ ID NO: 462942 - DNA, 25 bp, Artificial
  probe
  misc_feature (1)..(25): SEQ ID NO: 7253; WAN024AWJ; Start 162; Stop 186
agcgaaagtggtcatcatgtttaat

SEQ ID NO: 462943 - DNA, 25 bp, Artificial
  probe
  misc_feature (1)..(25): SEQ ID NO: 7253; WAN024AWJ; Start 307; Stop 331
gagactttctttgaacgagcactag

SEQ ID NO: 462944 - DNA, 25 bp, Artificial
  probe
  misc_feature (1)..(25): SEQ ID NO: 7253; WAN024AWJ; Start 484; Stop 508
aagcggtttgtcatcaatattcttg

SEQ ID NO: 462945 - DNA, 25 bp, Artificial
  probe
  misc_feature (1)..(25): SEQ ID NO: 7253; WAN024AWJ; Start 483; Stop 507
caagcggtttgtcatcaatattctt

SEQ ID NO: 462946 - DNA, 25 bp, Artificial
  probe
  misc_feature (1)..(25): SEQ ID NO: 7253; WAN024AWJ; Start 444; Stop 468
ccatcagaagggctatccaatcttt

SEQ ID NO: 462947 - DNA, 25 bp, Artificial
  probe
  misc_feature (1)..(25): SEQ ID NO: 7253; WAN024AWJ; Start 212; Stop 236
ctagctcgctcatatttcctcattt

SEQ ID NO: 462948 - DNA, 25 bp, Artificial
  probe
  misc_feature (1)..(25): SEQ ID NO: 7253; WAN024AWJ; Start 161; Stop 185
gagcgaaagtggtcatcatgtttaa

SEQ ID NO: 462949 - DNA, 25 bp, Artificial
  probe
  misc_feature (1)..(25): SEQ ID NO: 7253; WAN024AWJ; Start 438; Stop 462
taaactccatcagaagggctatcca

SEQ ID NO: 462950 - DNA, 25 bp, Artificial
  probe
  misc_feature (1)..(25): SEQ ID NO: 7253; WAN024AWJ; Start 384; Stop 408
aatcggctttggtctgactaagaaa

SEQ ID NO: 462951 - DNA, 25 bp, Artificial
  probe
  misc_feature (1)..(25): SEQ ID NO: 7253; WAN024AWJ; Start 291; Stop 315
aatcgaagacttgatggagactttc

SEQ ID NO: 462952 - DNA, 25 bp, Artificial
  probe
  misc_feature (1)..(25): SEQ ID NO: 7253; WAN024AWJ; Start 263; Stop 287
aagagttagctgactttgaaacaag

SEQ ID NO: 462953 - DNA, 25 bp, Artificial
  probe
  misc_feature (1)..(25): SEQ ID NO: 7253; WAN024AWJ; Start 262; Stop 286
gaagagttagctgactttgaaacaa

SEQ ID NO: 462954 - DNA, 25 bp, Artificial
  probe
  misc_feature (1)..(25): SEQ ID NO: 7253; WAN024AWJ; Start 435; Stop 459
ggataaactccatcagaagggctat

SEQ ID NO: 462955 - DNA, 25 bp, Artificial
  probe
  misc_feature (1)..(25): SEQ ID NO: 7253; WAN024AWJ; Start 306; Stop 330
ggagactttctttgaacgagcacta

SEQ ID NO: 462956 - DNA, 25 bp, Artificial
  probe
  misc_feature (1)..(25): SEQ ID NO: 7253; WAN024AWJ; Start 290; Stop 314
caatcgaagacttgatggagacttt

SEQ ID NO: 462957 - DNA, 25 bp, Artificial
  probe
  misc_feature (1)..(25): SEQ ID NO: 7253; WAN024AWJ; Start 170; Stop 194
tggtcatcatgtttaatccagtcat

SEQ ID NO: 462958 - DNA, 25 bp, Artificial
  probe
  misc_feature (1)..(25): SEQ ID NO: 7253; WAN024AWJ; Start 167; Stop 191
aagtggtcatcatgtttaatccagt

SEQ ID NO: 462959 - DNA, 25 bp, Artificial
  probe
  misc_feature (1)..(25): SEQ ID NO: 7253; WAN024AWJ; Start 264; Stop 288
agagttagctgactttgaaacaagg

SEQ ID NO: 462960 - DNA, 25 bp, Artificial
  probe
  misc_feature (1)..(25): SEQ ID NO: 7253; WAN024AWJ; Start 166; Stop 190
aaagtggtcatcatgtttaatccag

SEQ ID NO: 462961 - DNA, 25 bp, Artificial
  probe
  misc_feature (1)..(25): SEQ ID NO: 7253; WAN024AWJ; Start 165; Stop 189
gaaagtggtcatcatgtttaatcca

SEQ ID NO: 462962 - DNA, 25 bp, Artificial
  probe
  misc_feature (1)..(25): SEQ ID NO: 7253; WAN024AWJ; Start 168; Stop 192
agtggtcatcatgtttaatccagtc

SEQ ID NO: 462963 - DNA, 25 bp, Artificial
  probe
  misc_feature (1)..(25): SEQ ID NO: 7253; WAN024AWJ; Start 292; Stop 316
atcgaagacttgatggagactttct

SEQ ID NO: 462964 - DNA, 25 bp, Artificial
  probe
  misc_feature (1)..(25): SEQ ID NO: 7253; WAN024AWJ; Start 265; Stop 289
gagttagctgactttgaaacaaggt

SEQ ID NO: 462965 - DNA, 25 bp, Artificial
  probe
  misc_feature (1)..(25): SEQ ID NO: 7253; WAN024AWJ; Start 383; Stop 407
gaatcggctttggtctgactaagaa

SEQ ID NO: 462966 - DNA, 25 bp, Artificial
  probe
  misc_feature (1)..(25): SEQ ID NO: 7254; WAN024BWN; Start 625; Stop 649
ctctatcctgttgattctatcctgg

SEQ ID NO: 462967 - DNA, 25 bp, Artificial
  probe
  misc_feature (1)..(25): SEQ ID NO: 7254; WAN024BWN; Start 624; Stop 648
actctatcctgttgattctatcctg

SEQ ID NO: 462968 - DNA, 25 bp, Artificial
  probe
  misc_feature (1)..(25): SEQ ID NO: 7254; WAN024BWN; Start 623; Stop 647
cactctatcctgttgattctatcct

SEQ ID NO: 462969 - DNA, 25 bp, Artificial
  probe
  misc_feature (1)..(25): SEQ ID NO: 7254; WAN024BWN; Start 619; Stop 643
ggttcactctatcctgttgattcta

SEQ ID NO: 462970 - DNA, 25 bp, Artificial
  probe
  misc_feature (1)..(25): SEQ ID NO: 7254; WAN024BWN; Start 622; Stop 646
tcactctatcctgttgattctatcc

SEQ ID NO: 462971 - DNA, 25 bp, Artificial
  probe
  misc_feature (1)..(25): SEQ ID NO: 7254; WAN024BWN; Start 2; Stop 26
tgatctacgacatgagcggtatata

SEQ ID NO: 462972 - DNA, 25 bp, Artificial
  probe
  misc_feature (1)..(25): SEQ ID NO: 7254; WAN024BWN; Start 486; Stop 510
tgttgaagatggcagttacacttac

SEQ ID NO: 462973 - DNA, 25 bp, Artificial
  probe
  misc_feature (1)..(25): SEQ ID NO: 7254; WAN024BWN; Start 487; Stop 511
gttgaagatggcagttacacttacc

SEQ ID NO: 462974 - DNA, 25 bp, Artificial
  probe
  misc_feature (1)..(25): SEQ ID NO: 7254; WAN024BWN; Start 616; Stop 640
aacggttcactctatcctgttgatt

SEQ ID NO: 462975 - DNA, 25 bp, Artificial
  probe
  misc_feature (1)..(25): SEQ ID NO: 7254; WAN024BWN; Start 628; Stop 652
tatcctgttgattctatcctggaga

SEQ ID NO: 462976 - DNA, 25 bp, Artificial
  probe
  misc_feature (1)..(25): SEQ ID NO: 7254; WAN024BWN; Start 626; Stop 650
tctatcctgttgattctatcctgga

SEQ ID NO: 462977 - DNA, 25 bp, Artificial
  probe
  misc_feature (1)..(25): SEQ ID NO: 7254; WAN024BWN; Start 627; Stop 651
ctatcctgttgattctatcctggag

SEQ ID NO: 462978 - DNA, 25 bp, Artificial
  probe
  misc_feature (1)..(25): SEQ ID NO: 7254; WAN024BWN; Start 629; Stop 653
atcctgttgattctatcctggagat

SEQ ID NO: 462979 - DNA, 25 bp, Artificial
  probe
  misc_feature (1)..(25): SEQ ID NO: 7254; WAN024BWN; Start 630; Stop 654
tcctgttgattctatcctggagatt

SEQ ID NO: 462980 - DNA, 25 bp, Artificial
  probe
  misc_feature (1)..(25): SEQ ID NO: 7254; WAN024BWN; Start 620; Stop 644
gttcactctatcctgttgattctat

SEQ ID NO: 462981 - DNA, 25 bp, Artificial
  probe
  misc_feature (1)..(25): SEQ ID NO: 7254; WAN024BWN; Start 618; Stop 642
cggttcactctatcctgttgattct

SEQ ID NO: 462982 - DNA, 25 bp, Artificial
  probe
  misc_feature (1)..(25): SEQ ID NO: 7254; WAN024BWN; Start 1; Stop 25
gtgatctacgacatgagcggtatat

SEQ ID NO: 462983 - DNA, 25 bp, Artificial
  probe
  misc_feature (1)..(25): SEQ ID NO: 7254; WAN024BWN; Start 621; Stop 645
ttcactctatcctgttgattctatc

SEQ ID NO: 462984 - DNA, 25 bp, Artificial
  probe
  misc_feature (1)..(25): SEQ ID NO: 7254; WAN024BWN; Start 617; Stop 641
acggttcactctatcctgttgattc

SEQ ID NO: 462985 - DNA, 25 bp, Artificial
  probe
  misc_feature (1)..(25): SEQ ID NO: 7254; WAN024BWN; Start 405; Stop 429
ggtgagaacagaagatttaggaact

SEQ ID NO: 462986 - DNA, 25 bp, Artificial
  probe
  misc_feature (1)..(25): SEQ ID NO: 7254; WAN024BWN; Start 403; Stop 427
ttggtgagaacagaagatttaggaa

SEQ ID NO: 462987 - DNA, 25 bp, Artificial
  probe
  misc_feature (1)..(25): SEQ ID NO: 7254; WAN024BWN; Start 480; Stop 504
gatcagtgttgaagatggcagttac

SEQ ID NO: 462988 - DNA, 25 bp, Artificial
  probe
  misc_feature (1)..(25): SEQ ID NO: 7254; WAN024BWN; Start 404; Stop 428
tggtgagaacagaagatttaggaac

SEQ ID NO: 462989 - DNA, 25 bp, Artificial
  probe
  misc_feature (1)..(25): SEQ ID NO: 7254; WAN024BWN; Start 402; Stop 426
attggtgagaacagaagatttagga

SEQ ID NO: 462990 - DNA, 25 bp, Artificial
  probe
  misc_feature (1)..(25): SEQ ID NO: 7254; WAN024BWN; Start 582; Stop 606
tcagataaaggatggaaagggattc

SEQ ID NO: 462991 - DNA, 25 bp, Artificial
  probe
  misc_feature (1)..(25): SEQ ID NO: 7254; WAN024BWN; Start 580; Stop 604
gttcagataaaggatggaaagggat

SEQ ID NO: 462992 - DNA, 25 bp, Artificial
  probe
  misc_feature (1)..(25): SEQ ID NO: 7254; WAN024BWN; Start 581; Stop 605
ttcagataaaggatggaaagggatt

SEQ ID NO: 462993 - DNA, 25 bp, Artificial
  probe
  misc_feature (1)..(25): SEQ ID NO: 7254; WAN024BWN; Start 57; Stop 81
ttccagctcttcgagtaattctcta

SEQ ID NO: 462994 - DNA, 25 bp, Artificial
  probe
  misc_feature (1)..(25): SEQ ID NO: 7254; WAN024BWN; Start 481; Stop 505
atcagtgttgaagatggcagttaca

SEQ ID NO: 462995 - DNA, 25 bp, Artificial
  probe
  misc_feature (1)..(25): SEQ ID NO: 7254; WAN024BWN; Start 327; Stop 351
tcagtcggacagcatcatattcaac

SEQ ID NO: 462996 - DNA, 25 bp, Artificial
  probe
  misc_feature (1)..(25): SEQ ID NO: 7254; WAN024BWN; Start 54; Stop 78
taattccagctcttcgagtaattct

SEQ ID NO: 462997 - DNA, 25 bp, Artificial
  probe
  misc_feature (1)..(25): SEQ ID NO: 7254; WAN024BWN; Start 586; Stop 610
ataaaggatggaaagggattcgttc

SEQ ID NO: 462998 - DNA, 25 bp, Artificial
  probe
  misc_feature (1)..(25): SEQ ID NO: 7254; WAN024BWN; Start 585; Stop 609
gataaaggatggaaagggattcgtt

SEQ ID NO: 462999 - DNA, 25 bp, Artificial
  probe
  misc_feature (1)..(25): SEQ ID NO: 7255; WAN024BUJ; Start 18; Stop 42
agaagattggctcaggttacttgaa

SEQ ID NO: 463000 - DNA, 25 bp, Artificial
  probe
  misc_feature (1)..(25): SEQ ID NO: 7255; WAN024BUJ; Start 17; Stop 41
aagaagattggctcaggttacttga

SEQ ID NO: 463001 - DNA, 25 bp, Artificial
  probe
  misc_feature (1)..(25): SEQ ID NO: 7255; WAN024BUJ; Start 56; Stop 80
atattcctgaaacggtaactgctat

SEQ ID NO: 463002 - DNA, 25 bp, Artificial
  probe
  misc_feature (1)..(25): SEQ ID NO: 7255; WAN024BUJ; Start 57; Stop 81
tattcctgaaacggtaactgctatc

SEQ ID NO: 463003 - DNA, 25 bp, Artificial
  probe
  misc_feature (1)..(25): SEQ ID NO: 7255; WAN024BUJ; Start 4; Stop 28
atgaagttgaacaaagaagattggc

SEQ ID NO: 463004 - DNA, 25 bp, Artificial
  probe
  misc_feature (1)..(25): SEQ ID NO: 7255; WAN024BUJ; Start 16; Stop 40
aaagaagattggctcaggttacttg

SEQ ID NO: 463005 - DNA, 25 bp, Artificial
  probe
  misc_feature (1)..(25): SEQ ID NO: 7255; WAN024BUJ; Start 6; Stop 30
gaagttgaacaaagaagattggctc

SEQ ID NO: 463006 - DNA, 25 bp, Artificial
  probe
  misc_feature (1)..(25): SEQ ID NO: 7255; WAN024BUJ; Start 3; Stop 27
gatgaagttgaacaaagaagattgg

SEQ ID NO: 463007 - DNA, 25 bp, Artificial
  probe
  misc_feature (1)..(25): SEQ ID NO: 7255; WAN024BUJ; Start 15; Stop 39
caaagaagattggctcaggttactt

SEQ ID NO: 463008 - DNA, 25 bp, Artificial
  probe
  misc_feature (1)..(25): SEQ ID NO: 7255; WAN024BUJ; Start 12; Stop 36
gaacaaagaagattggctcaggtta

SEQ ID NO: 463009 - DNA, 25 bp, Artificial
  probe
  misc_feature (1)..(25): SEQ ID NO: 7255; WAN024BUJ; Start 1; Stop 25
gtgatgaagttgaacaaagaagatt

SEQ ID NO: 463010 - DNA, 25 bp, Artificial
  probe
  misc_feature (1)..(25): SEQ ID NO: 7255; WAN024BUJ; Start 5; Stop 29
tgaagttgaacaaagaagattggct

SEQ ID NO: 463011 - DNA, 25 bp, Artificial
  probe
  misc_feature (1)..(25): SEQ ID NO: 7255; WAN024BUJ; Start 19; Stop 43
gaagattggctcaggttacttgaaa

SEQ ID NO: 463012 - DNA, 25 bp, Artificial
  probe
  misc_feature (1)..(25): SEQ ID NO: 7255; WAN024BUJ; Start 13; Stop 37
aacaaagaagattggctcaggttac

SEQ ID NO: 463013 - DNA, 25 bp, Artificial
  probe
  misc_feature (1)..(25): SEQ ID NO: 7255; WAN024BUJ; Start 7; Stop 31
aagttgaacaaagaagattggctca

SEQ ID NO: 463014 - DNA, 25 bp, Artificial
  probe
  misc_feature (1)..(25): SEQ ID NO: 7255; WAN024BUJ; Start 2; Stop 26
tgatgaagttgaacaaagaagattg

SEQ ID NO: 463015 - DNA, 25 bp, Artificial
  probe
  misc_feature (1)..(25): SEQ ID NO: 7255; WAN024BUJ; Start 55; Stop 79
aatattcctgaaacggtaactgcta

SEQ ID NO: 463016 - DNA, 25 bp, Artificial
  probe
  misc_feature (1)..(25): SEQ ID NO: 7255; WAN024BUJ; Start 52; Stop 76
gacaatattcctgaaacggtaactg

SEQ ID NO: 463017 - DNA, 25 bp, Artificial
  probe
  misc_feature (1)..(25): SEQ ID NO: 7255; WAN024BUJ; Start 51; Stop 75
agacaatattcctgaaacggtaact

SEQ ID NO: 463018 - DNA, 25 bp, Artificial
  probe
  misc_feature (1)..(25): SEQ ID NO: 7255; WAN024BUJ; Start 8; Stop 32
agttgaacaaagaagattggctcag

SEQ ID NO: 463019 - DNA, 25 bp, Artificial
  probe
  misc_feature (1)..(25): SEQ ID NO: 7255; WAN024BUJ; Start 46; Stop 70
gcaatagacaatattcctgaaacgg

SEQ ID NO: 463020 - DNA, 25 bp, Artificial
  probe
  misc_feature (1)..(25): SEQ ID NO: 7255; WAN024BUJ; Start 45; Stop 69
ggcaatagacaatattcctgaaacg

SEQ ID NO: 463021 - DNA, 25 bp, Artificial
  probe
  misc_feature (1)..(25): SEQ ID NO: 7255; WAN024BUJ; Start 14; Stop 38
acaaagaagattggctcaggttact

SEQ ID NO: 463022 - DNA, 25 bp, Artificial
  probe
  misc_feature (1)..(25): SEQ ID NO: 7255; WAN024BUJ; Start 47; Stop 71
caatagacaatattcctgaaacggt

SEQ ID NO: 463023 - DNA, 25 bp, Artificial
  probe
  misc_feature (1)..(25): SEQ ID NO: 7255; WAN024BUJ; Start 54; Stop 78
caatattcctgaaacggtaactgct

SEQ ID NO: 463024 - DNA, 25 bp, Artificial
  probe
  misc_feature (1)..(25): SEQ ID NO: 7255; WAN024BUJ; Start 50; Stop 74
tagacaatattcctgaaacggtaac

SEQ ID NO: 463025 - DNA, 25 bp, Artificial
  probe
  misc_feature (1)..(25): SEQ ID NO: 7255; WAN024BUJ; Start 53; Stop 77
acaatattcctgaaacggtaactgc

SEQ ID NO: 463026 - DNA, 25 bp, Artificial
  probe
  misc_feature (1)..(25): SEQ ID NO: 7255; WAN024BUJ; Start 9; Stop 33
gttgaacaaagaagattggctcagg

SEQ ID NO: 463027 - DNA, 25 bp, Artificial
  probe
  misc_feature (1)..(25): SEQ ID NO: 7255; WAN024BUJ; Start 58; Stop 82
attcctgaaacggtaactgctatcg

SEQ ID NO: 463028 - DNA, 25 bp, Artificial
  probe
  misc_feature (1)..(25): SEQ ID NO: 7255; WAN024BUJ; Start 49; Stop 73
atagacaatattcctgaaacggtaa

SEQ ID NO: 463029 - DNA, 25 bp, Artificial
  probe
  misc_feature (1)..(25): SEQ ID NO: 7255; WAN024BUJ; Start 44; Stop 68
aggcaatagacaatattcctgaaac

SEQ ID NO: 463030 - DNA, 25 bp, Artificial
  probe
  misc_feature (1)..(25): SEQ ID NO: 7255; WAN024BUJ; Start 71; Stop 95
taactgctatcgcaagtctagtgac

SEQ ID NO: 463031 - DNA, 25 bp, Artificial
  probe
  misc_feature (1)..(25): SEQ ID NO: 7255; WAN024BUJ; Start 70; Stop 94
gtaactgctatcgcaagtctagtga

SEQ ID NO: 463032 - DNA, 25 bp, Artificial
  probe
  misc_feature (1)..(25): SEQ ID NO: 7256; WAN024BTU; Start 635; Stop 659
aacagagacttgatgcttatgagaa

SEQ ID NO: 463033 - DNA, 25 bp, Artificial
  probe
  misc_feature (1)..(25): SEQ ID NO: 7256; WAN024BTU; Start 590; Stop 614
actatgttggatgcgagattgataa

SEQ ID NO: 463034 - DNA, 25 bp, Artificial
  probe
  misc_feature (1)..(25): SEQ ID NO: 7256; WAN024BTU; Start 589; Stop 613
gactatgttggatgcgagattgata

SEQ ID NO: 463035 - DNA, 25 bp, Artificial
  probe
  misc_feature (1)..(25): SEQ ID NO: 7256; WAN024BTU; Start 636; Stop 660
acagagacttgatgcttatgagaag

SEQ ID NO: 463036 - DNA, 25 bp, Artificial
  probe
  misc_feature (1)..(25): SEQ ID NO: 7256; WAN024BTU; Start 441; Stop 465
attgaatgaggttagaatccatccg

SEQ ID NO: 463037 - DNA, 25 bp, Artificial
  probe
  misc_feature (1)..(25): SEQ ID NO: 7256; WAN024BTU; Start 132; Stop 156
aatcagtccaataggtgtaagcaga

SEQ ID NO: 463038 - DNA, 25 bp, Artificial
  probe
  misc_feature (1)..(25): SEQ ID NO: 7256; WAN024BTU; Start 634; Stop 658
caacagagacttgatgcttatgaga

SEQ ID NO: 463039 - DNA, 25 bp, Artificial
  probe
  misc_feature (1)..(25): SEQ ID NO: 7256; WAN024BTU; Start 408; Stop 432
ctctgaaggtcatatacaacaagga

SEQ ID NO: 463040 - DNA, 25 bp, Artificial
  probe
  misc_feature (1)..(25): SEQ ID NO: 7256; WAN024BTU; Start 407; Stop 431
tctctgaaggtcatatacaacaagg

SEQ ID NO: 463041 - DNA, 25 bp, Artificial
  probe
  misc_feature (1)..(25): SEQ ID NO: 7256; WAN024BTU; Start 439; Stop 463
gcattgaatgaggttagaatccatc

SEQ ID NO: 463042 - DNA, 25 bp, Artificial
  probe
  misc_feature (1)..(25): SEQ ID NO: 7256; WAN024BTU; Start 409; Stop 433
tctgaaggtcatatacaacaaggaa

SEQ ID NO: 463043 - DNA, 25 bp, Artificial
  probe
  misc_feature (1)..(25): SEQ ID NO: 7256; WAN024BTU; Start 440; Stop 464
cattgaatgaggttagaatccatcc

SEQ ID NO: 463044 - DNA, 25 bp, Artificial
  probe
  misc_feature (1)..(25): SEQ ID NO: 7256; WAN024BTU; Start 442; Stop 466
ttgaatgaggttagaatccatccga

SEQ ID NO: 463045 - DNA, 25 bp, Artificial
  probe
  misc_feature (1)..(25): SEQ ID NO: 7256; WAN024BTU; Start 438; Stop 462
ggcattgaatgaggttagaatccat

SEQ ID NO: 463046 - DNA, 25 bp, Artificial
  probe
  misc_feature (1)..(25): SEQ ID NO: 7256; WAN024BTU; Start 436; Stop 460
aaggcattgaatgaggttagaatcc

SEQ ID NO: 463047 - DNA, 25 bp, Artificial
  probe
  misc_feature (1)..(25): SEQ ID NO: 7256; WAN024BTU; Start 435; Stop 459
taaggcattgaatgaggttagaatc

SEQ ID NO: 463048 - DNA, 25 bp, Artificial
  probe
  misc_feature (1)..(25): SEQ ID NO: 7256; WAN024BTU; Start 140; Stop 164
caataggtgtaagcagactctatgg

SEQ ID NO: 463049 - DNA, 25 bp, Artificial
  probe
  misc_feature (1)..(25): SEQ ID NO: 7256; WAN024BTU; Start 139; Stop 163
ccaataggtgtaagcagactctatg

SEQ ID NO: 463050 - DNA, 25 bp, Artificial
  probe
  misc_feature (1)..(25): SEQ ID NO: 7256; WAN024BTU; Start 138; Stop 162
tccaataggtgtaagcagactctat

SEQ ID NO: 463051 - DNA, 25 bp, Artificial
  probe
  misc_feature (1)..(25): SEQ ID NO: 7256; WAN024BTU; Start 588; Stop 612
tgactatgttggatgcgagattgat

SEQ ID NO: 463052 - DNA, 25 bp, Artificial
  probe
  misc_feature (1)..(25): SEQ ID NO: 7256; WAN024BTU; Start 433; Stop 457
aataaggcattgaatgaggttagaa

SEQ ID NO: 463053 - DNA, 25 bp, Artificial
  probe
  misc_feature (1)..(25): SEQ ID NO: 7256; WAN024BTU; Start 404; Stop 428
caatctctgaaggtcatatacaaca

SEQ ID NO: 463054 - DNA, 25 bp, Artificial
  probe
  misc_feature (1)..(25): SEQ ID NO: 7256; WAN024BTU; Start 587; Stop 611
ttgactatgttggatgcgagattga

SEQ ID NO: 463055 - DNA, 25 bp, Artificial
  probe
  misc_feature (1)..(25): SEQ ID NO: 7256; WAN024BTU; Start 444; Stop 468
gaatgaggttagaatccatccgaca

SEQ ID NO: 463056 - DNA, 25 bp, Artificial
  probe
  misc_feature (1)..(25): SEQ ID NO: 7256; WAN024BTU; Start 443; Stop 467
tgaatgaggttagaatccatccgac

SEQ ID NO: 463057 - DNA, 25 bp, Artificial
  probe
  misc_feature (1)..(25): SEQ ID NO: 7256; WAN024BTU; Start 434; Stop 458
ataaggcattgaatgaggttagaat

SEQ ID NO: 463058 - DNA, 25 bp, Artificial
  probe
  misc_feature (1)..(25): SEQ ID NO: 7256; WAN024BTU; Start 406; Stop 430
atctctgaaggtcatatacaacaag

SEQ ID NO: 463059 - DNA, 25 bp, Artificial
  probe
  misc_feature (1)..(25): SEQ ID NO: 7256; WAN024BTU; Start 403; Stop 427
tcaatctctgaaggtcatatacaac

SEQ ID NO: 463060 - DNA, 25 bp, Artificial
  probe
  misc_feature (1)..(25): SEQ ID NO: 7256; WAN024BTU; Start 137; Stop 161
gtccaataggtgtaagcagactcta

SEQ ID NO: 463061 - DNA, 25 bp, Artificial
  probe
  misc_feature (1)..(25): SEQ ID NO: 7256; WAN024BTU; Start 437; Stop 461
aggcattgaatgaggttagaatcca

SEQ ID NO: 463062 - DNA, 25 bp, Artificial
  probe
  misc_feature (1)..(25): SEQ ID NO: 7256; WAN024BTU; Start 445; Stop 469
aatgaggttagaatccatccgacac

SEQ ID NO: 463063 - DNA, 25 bp, Artificial
  probe
  misc_feature (1)..(25): SEQ ID NO: 7256; WAN024BTU; Start 244; Stop 268
ggtgtgaactacttcgactattctt

SEQ ID NO: 463064 - DNA, 25 bp, Artificial
  probe
  misc_feature (1)..(25): SEQ ID NO: 7256; WAN024BTU; Start 141; Stop 165
aataggtgtaagcagactctatggc

SEQ ID NO: 463065 - DNA, 25 bp, Artificial
  probe
  misc_feature (1)..(25): SEQ ID NO: 7257; WAN024FVV; Start 54; Stop 78
acaatattcaactgttctccaaaat

SEQ ID NO: 463066 - DNA, 25 bp, Artificial
  probe
  misc_feature (1)..(25): SEQ ID NO: 7257; WAN024FVV; Start 55; Stop 79
caatattcaactgttctccaaaata

SEQ ID NO: 463067 - DNA, 25 bp, Artificial
  probe
  misc_feature (1)..(25): SEQ ID NO: 7257; WAN024FVV; Start 53; Stop 77
aacaatattcaactgttctccaaaa

SEQ ID NO: 463068 - DNA, 25 bp, Artificial
  probe
  misc_feature (1)..(25): SEQ ID NO: 7257; WAN024FVV; Start 45; Stop 69
aaaaggagaacaatattcaactgtt

SEQ ID NO: 463069 - DNA, 25 bp, Artificial
  probe
  misc_feature (1)..(25): SEQ ID NO: 7257; WAN024FVV; Start 1; Stop 25
gtgatgattgtaattcttttgtcat

SEQ ID NO: 463070 - DNA, 25 bp, Artificial
  probe
  misc_feature (1)..(25): SEQ ID NO: 7257; WAN024FVV; Start 2; Stop 26
tgatgattgtaattcttttgtcatt

SEQ ID NO: 463071 - DNA, 25 bp, Artificial
  probe
  misc_feature (1)..(25): SEQ ID NO: 7257; WAN024FVV; Start 58; Stop 82
tattcaactgttctccaaaatattt

SEQ ID NO: 463072 - DNA, 25 bp, Artificial
  probe
  misc_feature (1)..(25): SEQ ID NO: 7258; WAN024F6V; Start 1; Stop 25
gtgatgctctttatactcttcgaaa

SEQ ID NO: 463073 - DNA, 25 bp, Artificial
  probe
  misc_feature (1)..(25): SEQ ID NO: 7258; WAN024F6V; Start 58; Stop 82
gtacgtatgattactgacttcgtca

SEQ ID NO: 463074 - DNA, 25 bp, Artificial
  probe
  misc_feature (1)..(25): SEQ ID NO: 7258; WAN024F6V; Start 2; Stop 26
tgatgctctttatactcttcgaaaa

SEQ ID NO: 463075 - DNA, 25 bp, Artificial
  probe
  misc_feature (1)..(25): SEQ ID NO: 7258; WAN024F6V; Start 5; Stop 29
tgctctttatactcttcgaaaatct

SEQ ID NO: 463076 - DNA, 25 bp, Artificial
  probe
  misc_feature (1)..(25): SEQ ID NO: 7258; WAN024F6V; Start 6; Stop 30
gctctttatactcttcgaaaatctc

SEQ ID NO: 463077 - DNA, 25 bp, Artificial
  probe
  misc_feature (1)..(25): SEQ ID NO: 7258; WAN024F6V; Start 4; Stop 28
atgctctttatactcttcgaaaatc

SEQ ID NO: 463078 - DNA, 25 bp, Artificial
  probe
  misc_feature (1)..(25): SEQ ID NO: 7258; WAN024F6V; Start 3; Stop 27
gatgctctttatactcttcgaaaat

SEQ ID NO: 463079 - DNA, 25 bp, Artificial
  probe
  misc_feature (1)..(25): SEQ ID NO: 7258; WAN024F6V; Start 7; Stop 31
ctctttatactcttcgaaaatctct

SEQ ID NO: 463080 - DNA, 25 bp, Artificial
  probe
  misc_feature (1)..(25): SEQ ID NO: 7258; WAN024F6V; Start 8; Stop 32
tctttatactcttcgaaaatctctt

SEQ ID NO: 463081 - DNA, 25 bp, Artificial
  probe
  misc_feature (1)..(25): SEQ ID NO: 7258; WAN024F6V; Start 9; Stop 33
ctttatactcttcgaaaatctcttc

SEQ ID NO: 463082 - DNA, 25 bp, Artificial
  probe
  misc_feature (1)..(25): SEQ ID NO: 7259; WAN024BVC; Start 96; Stop 120
gagcagtctatcattaagcaacatc

SEQ ID NO: 463083 - DNA, 25 bp, Artificial
  probe
  misc_feature (1)..(25): SEQ ID NO: 7259; WAN024BVC; Start 98; Stop 122
gcagtctatcattaagcaacatcaa

SEQ ID NO: 463084 - DNA, 25 bp, Artificial
  probe
  misc_feature (1)..(25): SEQ ID NO: 7259; WAN024BVC; Start 97; Stop 121
agcagtctatcattaagcaacatca

SEQ ID NO: 463085 - DNA, 25 bp, Artificial
  probe
  misc_feature (1)..(25): SEQ ID NO: 7259; WAN024BVC; Start 165; Stop 189
gtataatgcggaggaatcaggtaga

SEQ ID NO: 463086 - DNA, 25 bp, Artificial
  probe
  misc_feature (1)..(25): SEQ ID NO: 7259; WAN024BVC; Start 164; Stop 188
agtataatgcggaggaatcaggtag

SEQ ID NO: 463087 - DNA, 25 bp, Artificial
  probe
  misc_feature (1)..(25): SEQ ID NO: 7259; WAN024BVC; Start 95; Stop 119
tgagcagtctatcattaagcaacat

SEQ ID NO: 463088 - DNA, 25 bp, Artificial
  probe
  misc_feature (1)..(25): SEQ ID NO: 7259; WAN024BVC; Start 94; Stop 118
ttgagcagtctatcattaagcaaca

SEQ ID NO: 463089 - DNA, 25 bp, Artificial
  probe
  misc_feature (1)..(25): SEQ ID NO: 7259; WAN024BVC; Start 93; Stop 117
attgagcagtctatcattaagcaac

SEQ ID NO: 463090 - DNA, 25 bp, Artificial
  probe
  misc_feature (1)..(25): SEQ ID NO: 7259; WAN024BVC; Start 163; Stop 187
cagtataatgcggaggaatcaggta

SEQ ID NO: 463091 - DNA, 25 bp, Artificial
  probe
  misc_feature (1)..(25): SEQ ID NO: 7259; WAN024BVC; Start 92; Stop 116
aattgagcagtctatcattaagcaa

SEQ ID NO: 463092 - DNA, 25 bp, Artificial
  probe
  misc_feature (1)..(25): SEQ ID NO: 7259; WAN024BVC; Start 139; Stop 163
ctatatgaatgcttagtatggttgc

SEQ ID NO: 463093 - DNA, 25 bp, Artificial
  probe
  misc_feature (1)..(25): SEQ ID NO: 7259; WAN024BVC; Start 91; Stop 115
aaattgagcagtctatcattaagca

SEQ ID NO: 463094 - DNA, 25 bp, Artificial
  probe
  misc_feature (1)..(25): SEQ ID NO: 7259; WAN024BVC; Start 125; Stop 149
ggcaagcaagggatctatatgaatg

SEQ ID NO: 463095 - DNA, 25 bp, Artificial
  probe
  misc_feature (1)..(25): SEQ ID NO: 7259; WAN024BVC; Start 124; Stop 148
aggcaagcaagggatctatatgaat

SEQ ID NO: 463096 - DNA, 25 bp, Artificial
  probe
  misc_feature (1)..(25): SEQ ID NO: 7259; WAN024BVC; Start 99; Stop 123
cagtctatcattaagcaacatcaaa

SEQ ID NO: 463097 - DNA, 25 bp, Artificial
  probe
  misc_feature (1)..(25): SEQ ID NO: 7259; WAN024BVC; Start 123; Stop 147
aaggcaagcaagggatctatatgaa

SEQ ID NO: 463098 - DNA, 25 bp, Artificial
  probe
  misc_feature (1)..(25): SEQ ID NO: 7259; WAN024BVC; Start 122; Stop 146
aaaggcaagcaagggatctatatga

SEQ ID NO: 463099 - DNA, 25 bp, Artificial
  probe
  misc_feature (1)..(25): SEQ ID NO: 7259; WAN024BVC; Start 138; Stop 162
tctatatgaatgcttagtatggttg

SEQ ID NO: 463100 - DNA, 25 bp, Artificial
  probe
  misc_feature (1)..(25): SEQ ID NO: 7259; WAN024BVC; Start 135; Stop 159
ggatctatatgaatgcttagtatgg

SEQ ID NO: 463101 - DNA, 25 bp, Artificial
  probe
  misc_feature (1)..(25): SEQ ID NO: 7259; WAN024BVC; Start 131; Stop 155
caagggatctatatgaatgcttagt

SEQ ID NO: 463102 - DNA, 25 bp, Artificial
  probe
  misc_feature (1)..(25): SEQ ID NO: 7259; WAN024BVC; Start 43; Stop 67
actgctgctatttcaaatttcaaga

SEQ ID NO: 463103 - DNA, 25 bp, Artificial
  probe
  misc_feature (1)..(25): SEQ ID NO: 7259; WAN024BVC; Start 42; Stop 66
gactgctgctatttcaaatttcaag

SEQ ID NO: 463104 - DNA, 25 bp, Artificial
  probe
  misc_feature (1)..(25): SEQ ID NO: 7259; WAN024BVC; Start 44; Stop 68
ctgctgctatttcaaatttcaagat

SEQ ID NO: 463105 - DNA, 25 bp, Artificial
  probe
  misc_feature (1)..(25): SEQ ID NO: 7259; WAN024BVC; Start 41; Stop 65
tgactgctgctatttcaaatttcaa

SEQ ID NO: 463106 - DNA, 25 bp, Artificial
  probe
  misc_feature (1)..(25): SEQ ID NO: 7259; WAN024BVC; Start 150; Stop 174
cttagtatggttgcagtataatgcg

SEQ ID NO: 463107 - DNA, 25 bp, Artificial
  probe
  misc_feature (1)..(25): SEQ ID NO: 7259; WAN024BVC; Start 149; Stop 173
gcttagtatggttgcagtataatgc

SEQ ID NO: 463108 - DNA, 25 bp, Artificial
  probe
  misc_feature (1)..(25): SEQ ID NO: 7259; WAN024BVC; Start 90; Stop 114
taaattgagcagtctatcattaagc

SEQ ID NO: 463109 - DNA, 25 bp, Artificial
  probe
  misc_feature (1)..(25): SEQ ID NO: 7259; WAN024BVC; Start 144; Stop 168
tgaatgcttagtatggttgcagtat

SEQ ID NO: 463110 - DNA, 25 bp, Artificial
  probe
  misc_feature (1)..(25): SEQ ID NO: 7259; WAN024BVC; Start 143; Stop 167
atgaatgcttagtatggttgcagta

SEQ ID NO: 463111 - DNA, 25 bp, Artificial
  probe
  misc_feature (1)..(25): SEQ ID NO: 7259; WAN024BVC; Start 142; Stop 166
tatgaatgcttagtatggttgcagt

SEQ ID NO: 463112 - DNA, 25 bp, Artificial
  probe
  misc_feature (1)..(25): SEQ ID NO: 7259; WAN024BVC; Start 141; Stop 165
atatgaatgcttagtatggttgcag

SEQ ID NO: 463113 - DNA, 25 bp, Artificial
  probe
  misc_feature (1)..(25): SEQ ID NO: 7259; WAN024BVC; Start 151; Stop 175
ttagtatggttgcagtataatgcgg

SEQ ID NO: 463114 - DNA, 25 bp, Artificial
  probe
  misc_feature (1)..(25): SEQ ID NO: 7259; WAN024BVC; Start 148; Stop 172
tgcttagtatggttgcagtataatg

SEQ ID NO: 463115 - DNA, 25 bp, Artificial
  probe
  misc_feature (1)..(25): SEQ ID NO: 7260; WAN024BU3; Start 161; Stop 185
acgaatcaggtctctactctcttat

SEQ ID NO: 463116 - DNA, 25 bp, Artificial
  probe
  misc_feature (1)..(25): SEQ ID NO: 7260; WAN024BU3; Start 458; Stop 482
gtattgatagtcctgcttatgctga

SEQ ID NO: 463117 - DNA, 25 bp, Artificial
  probe
  misc_feature (1)..(25): SEQ ID NO: 7260; WAN024BU3; Start 160; Stop 184
aacgaatcaggtctctactctctta

SEQ ID NO: 463118 - DNA, 25 bp, Artificial
  probe
  misc_feature (1)..(25): SEQ ID NO: 7260; WAN024BU3; Start 162; Stop 186
cgaatcaggtctctactctcttatc

SEQ ID NO: 463119 - DNA, 25 bp, Artificial
  probe
  misc_feature (1)..(25): SEQ ID NO: 7260; WAN024BU3; Start 460; Stop 484
attgatagtcctgcttatgctgata

SEQ ID NO: 463120 - DNA, 25 bp, Artificial
  probe
  misc_feature (1)..(25): SEQ ID NO: 7260; WAN024BU3; Start 459; Stop 483
tattgatagtcctgcttatgctgat

SEQ ID NO: 463121 - DNA, 25 bp, Artificial
  probe
  misc_feature (1)..(25): SEQ ID NO: 7260; WAN024BU3; Start 446; Stop 470
cttgcttaggtggtattgatagtcc

SEQ ID NO: 463122 - DNA, 25 bp, Artificial
  probe
  misc_feature (1)..(25): SEQ ID NO: 7260; WAN024BU3; Start 454; Stop 478
ggtggtattgatagtcctgcttatg

SEQ ID NO: 463123 - DNA, 25 bp, Artificial
  probe
  misc_feature (1)..(25): SEQ ID NO: 7260; WAN024BU3; Start 457; Stop 481
ggtattgatagtcctgcttatgctg

SEQ ID NO: 463124 - DNA, 25 bp, Artificial
  probe
  misc_feature (1)..(25): SEQ ID NO: 7260; WAN024BU3; Start 461; Stop 485
ttgatagtcctgcttatgctgataa

SEQ ID NO: 463125 - DNA, 25 bp, Artificial
  probe
  misc_feature (1)..(25): SEQ ID NO: 7260; WAN024BU3; Start 445; Stop 469
gcttgcttaggtggtattgatagtc

SEQ ID NO: 463126 - DNA, 25 bp, Artificial
  probe
  misc_feature (1)..(25): SEQ ID NO: 7260; WAN024BU3; Start 456; Stop 480
tggtattgatagtcctgcttatgct

SEQ ID NO: 463127 - DNA, 25 bp, Artificial
  probe
  misc_feature (1)..(25): SEQ ID NO: 7260; WAN024BU3; Start 455; Stop 479
gtggtattgatagtcctgcttatgc

SEQ ID NO: 463128 - DNA, 25 bp, Artificial
  probe
  misc_feature (1)..(25): SEQ ID NO: 7260; WAN024BU3; Start 157; Stop 181
atcaacgaatcaggtctctactctc

SEQ ID NO: 463129 - DNA, 25 bp, Artificial
  probe
  misc_feature (1)..(25): SEQ ID NO: 7260; WAN024BU3; Start 145; Stop 169
aatcagacagtcatcaacgaatcag

SEQ ID NO: 463130 - DNA, 25 bp, Artificial
  probe
  misc_feature (1)..(25): SEQ ID NO: 7260; WAN024BU3; Start 163; Stop 187
gaatcaggtctctactctcttatct

SEQ ID NO: 463131 - DNA, 25 bp, Artificial
  probe
  misc_feature (1)..(25): SEQ ID NO: 7260; WAN024BU3; Start 159; Stop 183
caacgaatcaggtctctactctctt

SEQ ID NO: 463132 - DNA, 25 bp, Artificial
  probe
  misc_feature (1)..(25): SEQ ID NO: 7260; WAN024BU3; Start 156; Stop 180
catcaacgaatcaggtctctactct

SEQ ID NO: 463133 - DNA, 25 bp, Artificial
  probe
  misc_feature (1)..(25): SEQ ID NO: 7260; WAN024BU3; Start 155; Stop 179
tcatcaacgaatcaggtctctactc

SEQ ID NO: 463134 - DNA, 25 bp, Artificial
  probe
  misc_feature (1)..(25): SEQ ID NO: 7260; WAN024BU3; Start 154; Stop 178
gtcatcaacgaatcaggtctctact

SEQ ID NO: 463135 - DNA, 25 bp, Artificial
  probe
  misc_feature (1)..(25): SEQ ID NO: 7260; WAN024BU3; Start 153; Stop 177
agtcatcaacgaatcaggtctctac

SEQ ID NO: 463136 - DNA, 25 bp, Artificial
  probe
  misc_feature (1)..(25): SEQ ID NO: 7260; WAN024BU3; Start 152; Stop 176
cagtcatcaacgaatcaggtctcta

SEQ ID NO: 463137 - DNA, 25 bp, Artificial
  probe
  misc_feature (1)..(25): SEQ ID NO: 7260; WAN024BU3; Start 164; Stop 188
aatcaggtctctactctcttatctt

SEQ ID NO: 463138 - DNA, 25 bp, Artificial
  probe
  misc_feature (1)..(25): SEQ ID NO: 7260; WAN024BU3; Start 611; Stop 635
agccaagcactaataccaagatgaa

SEQ ID NO: 463139 - DNA, 25 bp, Artificial
  probe
  misc_feature (1)..(25): SEQ ID NO: 7260; WAN024BU3; Start 158; Stop 182
tcaacgaatcaggtctctactctct

SEQ ID NO: 463140 - DNA, 25 bp, Artificial
  probe
  misc_feature (1)..(25): SEQ ID NO: 7260; WAN024BU3; Start 452; Stop 476
taggtggtattgatagtcctgctta

SEQ ID NO: 463141 - DNA, 25 bp, Artificial
  probe
  misc_feature (1)..(25): SEQ ID NO: 7260; WAN024BU3; Start 444; Stop 468
ggcttgcttaggtggtattgatagt

SEQ ID NO: 463142 - DNA, 25 bp, Artificial
  probe
  misc_feature (1)..(25): SEQ ID NO: 7260; WAN024BU3; Start 443; Stop 467
tggcttgcttaggtggtattgatag

SEQ ID NO: 463143 - DNA, 25 bp, Artificial
  probe
  misc_feature (1)..(25): SEQ ID NO: 7260; WAN024BU3; Start 453; Stop 477
aggtggtattgatagtcctgcttat

SEQ ID NO: 463144 - DNA, 25 bp, Artificial
  probe
  misc_feature (1)..(25): SEQ ID NO: 7260; WAN024BU3; Start 451; Stop 475
ttaggtggtattgatagtcctgctt

SEQ ID NO: 463145 - DNA, 25 bp, Artificial
  probe
  misc_feature (1)..(25): SEQ ID NO: 7260; WAN024BU3; Start 447; Stop 471
ttgcttaggtggtattgatagtcct

SEQ ID NO: 463146 - DNA, 25 bp, Artificial
  probe
  misc_feature (1)..(25): SEQ ID NO: 7260; WAN024BU3; Start 450; Stop 474
cttaggtggtattgatagtcctgct

SEQ ID NO: 463147 - DNA, 25 bp, Artificial
  probe
  misc_feature (1)..(25): SEQ ID NO: 7260; WAN024BU3; Start 610; Stop 634
gagccaagcactaataccaagatga

SEQ ID NO: 463148 - DNA, 25 bp, Artificial
  probe
  misc_feature (1)..(25): SEQ ID NO: 7261; WAN024BOD; Start 70; Stop 94
ttcttgttgttcttgattggagtga

SEQ ID NO: 463149 - DNA, 25 bp, Artificial
  probe
  misc_feature (1)..(25): SEQ ID NO: 7261; WAN024BOD; Start 73; Stop 97
ttgttgttcttgattggagtgactt

SEQ ID NO: 463150 - DNA, 25 bp, Artificial
  probe
  misc_feature (1)..(25): SEQ ID NO: 7261; WAN024BOD; Start 71; Stop 95
tcttgttgttcttgattggagtgac

SEQ ID NO: 463151 - DNA, 25 bp, Artificial
  probe
  misc_feature (1)..(25): SEQ ID NO: 7261; WAN024BOD; Start 72; Stop 96
cttgttgttcttgattggagtgact

SEQ ID NO: 463152 - DNA, 25 bp, Artificial
  probe
  misc_feature (1)..(25): SEQ ID NO: 7261; WAN024BOD; Start 69; Stop 93
tttcttgttgttcttgattggagtg

SEQ ID NO: 463153 - DNA, 25 bp, Artificial
  probe
  misc_feature (1)..(25): SEQ ID NO: 7261; WAN024BOD; Start 68; Stop 92
gtttcttgttgttcttgattggagt

SEQ ID NO: 463154 - DNA, 25 bp, Artificial
  probe
  misc_feature (1)..(25): SEQ ID NO: 7261; WAN024BOD; Start 67; Stop 91
tgtttcttgttgttcttgattggag

SEQ ID NO: 463155 - DNA, 25 bp, Artificial
  probe
  misc_feature (1)..(25): SEQ ID NO: 7261; WAN024BOD; Start 66; Stop 90
ttgtttcttgttgttcttgattgga

SEQ ID NO: 463156 - DNA, 25 bp, Artificial
  probe
  misc_feature (1)..(25): SEQ ID NO: 7261; WAN024BOD; Start 65; Stop 89
tttgtttcttgttgttcttgattgg

SEQ ID NO: 463157 - DNA, 25 bp, Artificial
  probe
  misc_feature (1)..(25): SEQ ID NO: 7261; WAN024BOD; Start 74; Stop 98
tgttgttcttgattggagtgacttt

SEQ ID NO: 463158 - DNA, 25 bp, Artificial
  probe
  misc_feature (1)..(25): SEQ ID NO: 7261; WAN024BOD; Start 7; Stop 31
aaggcatcatttaatttcatagaca

SEQ ID NO: 463159 - DNA, 25 bp, Artificial
  probe
  misc_feature (1)..(25): SEQ ID NO: 7261; WAN024BOD; Start 8; Stop 32
aggcatcatttaatttcatagacat

SEQ ID NO: 463160 - DNA, 25 bp, Artificial
  probe
  misc_feature (1)..(25): SEQ ID NO: 7261; WAN024BOD; Start 76; Stop 100
ttgttcttgattggagtgacttttc

SEQ ID NO: 463161 - DNA, 25 bp, Artificial
  probe
  misc_feature (1)..(25): SEQ ID NO: 7261; WAN024BOD; Start 75; Stop 99
gttgttcttgattggagtgactttt

SEQ ID NO: 463162 - DNA, 25 bp, Artificial
  probe
  misc_feature (1)..(25): SEQ ID NO: 7261; WAN024BOD; Start 64; Stop 88
ttttgtttcttgttgttcttgattg

SEQ ID NO: 463163 - DNA, 25 bp, Artificial
  probe
  misc_feature (1)..(25): SEQ ID NO: 7261; WAN024BOD; Start 85; Stop 109
attggagtgacttttcccttgttta

SEQ ID NO: 463164 - DNA, 25 bp, Artificial
  probe
  misc_feature (1)..(25): SEQ ID NO: 7261; WAN024BOD; Start 86; Stop 110
ttggagtgacttttcccttgtttaa

SEQ ID NO: 463165 - DNA, 25 bp, Artificial
  probe
  misc_feature (1)..(25): SEQ ID NO: 7261; WAN024BOD; Start 77; Stop 101
tgttcttgattggagtgacttttcc

SEQ ID NO: 463166 - DNA, 25 bp, Artificial
  probe
  misc_feature (1)..(25): SEQ ID NO: 7261; WAN024BOD; Start 84; Stop 108
gattggagtgacttttcccttgttt

SEQ ID NO: 463167 - DNA, 25 bp, Artificial
  probe
  misc_feature (1)..(25): SEQ ID NO: 7261; WAN024BOD; Start 81; Stop 105
cttgattggagtgacttttcccttg

SEQ ID NO: 463168 - DNA, 25 bp, Artificial
  probe
  misc_feature (1)..(25): SEQ ID NO: 7261; WAN024BOD; Start 80; Stop 104
tcttgattggagtgacttttccctt

SEQ ID NO: 463169 - DNA, 25 bp, Artificial
  probe
  misc_feature (1)..(25): SEQ ID NO: 7261; WAN024BOD; Start 79; Stop 103
ttcttgattggagtgacttttccct

SEQ ID NO: 463170 - DNA, 25 bp, Artificial
  probe
  misc_feature (1)..(25): SEQ ID NO: 7261; WAN024BOD; Start 78; Stop 102
gttcttgattggagtgacttttccc

SEQ ID NO: 463171 - DNA, 25 bp, Artificial
  probe
  misc_feature (1)..(25): SEQ ID NO: 7261; WAN024BOD; Start 9; Stop 33
ggcatcatttaatttcatagacata

SEQ ID NO: 463172 - DNA, 25 bp, Artificial
  probe
  misc_feature (1)..(25): SEQ ID NO: 7261; WAN024BOD; Start 6; Stop 30
taaggcatcatttaatttcatagac

SEQ ID NO: 463173 - DNA, 25 bp, Artificial
  probe
  misc_feature (1)..(25): SEQ ID NO: 7261; WAN024BOD; Start 87; Stop 111
tggagtgacttttcccttgtttaaa

SEQ ID NO: 463174 - DNA, 25 bp, Artificial
  probe
  misc_feature (1)..(25): SEQ ID NO: 7261; WAN024BOD; Start 83; Stop 107
tgattggagtgacttttcccttgtt

SEQ ID NO: 463175 - DNA, 25 bp, Artificial
  probe
  misc_feature (1)..(25): SEQ ID NO: 7261; WAN024BOD; Start 82; Stop 106
ttgattggagtgacttttcccttgt

SEQ ID NO: 463176 - DNA, 25 bp, Artificial
  probe
  misc_feature (1)..(25): SEQ ID NO: 7261; WAN024BOD; Start 1; Stop 25
gtgattaaggcatcatttaatttca

SEQ ID NO: 463177 - DNA, 25 bp, Artificial
  probe
  misc_feature (1)..(25): SEQ ID NO: 7261; WAN024BOD; Start 2; Stop 26
tgattaaggcatcatttaatttcat

SEQ ID NO: 463178 - DNA, 25 bp, Artificial
  probe
  misc_feature (1)..(25): SEQ ID NO: 7262; WAN024BNE; Start 51; Stop 75
tatcatgcaacatacggataacctc

SEQ ID NO: 463179 - DNA, 25 bp, Artificial
  probe
  misc_feature (1)..(25): SEQ ID NO: 7262; WAN024BNE; Start 50; Stop 74
gtatcatgcaacatacggataacct

SEQ ID NO: 463180 - DNA, 25 bp, Artificial
  probe
  misc_feature (1)..(25): SEQ ID NO: 7262; WAN024BNE; Start 59; Stop 83
aacatacggataacctccaaagaat

SEQ ID NO: 463181 - DNA, 25 bp, Artificial
  probe
  misc_feature (1)..(25): SEQ ID NO: 7262; WAN024BNE; Start 60; Stop 84
acatacggataacctccaaagaata

SEQ ID NO: 463182 - DNA, 25 bp, Artificial
  probe
  misc_feature (1)..(25): SEQ ID NO: 7262; WAN024BNE; Start 58; Stop 82
caacatacggataacctccaaagaa

SEQ ID NO: 463183 - DNA, 25 bp, Artificial
  probe
  misc_feature (1)..(25): SEQ ID NO: 7262; WAN024BNE; Start 61; Stop 85
catacggataacctccaaagaatat

SEQ ID NO: 463184 - DNA, 25 bp, Artificial
  probe
  misc_feature (1)..(25): SEQ ID NO: 7262; WAN024BNE; Start 52; Stop 76
atcatgcaacatacggataacctcc

SEQ ID NO: 463185 - DNA, 25 bp, Artificial
  probe
  misc_feature (1)..(25): SEQ ID NO: 7262; WAN024BNE; Start 57; Stop 81
gcaacatacggataacctccaaaga

SEQ ID NO: 463186 - DNA, 25 bp, Artificial
  probe
  misc_feature (1)..(25): SEQ ID NO: 7262; WAN024BNE; Start 54; Stop 78
catgcaacatacggataacctccaa

SEQ ID NO: 463187 - DNA, 25 bp, Artificial
  probe
  misc_feature (1)..(25): SEQ ID NO: 7262; WAN024BNE; Start 63; Stop 87
tacggataacctccaaagaatattt

SEQ ID NO: 463188 - DNA, 25 bp, Artificial
  probe
  misc_feature (1)..(25): SEQ ID NO: 7262; WAN024BNE; Start 62; Stop 86
atacggataacctccaaagaatatt

SEQ ID NO: 463189 - DNA, 25 bp, Artificial
  probe
  misc_feature (1)..(25): SEQ ID NO: 7262; WAN024BNE; Start 41; Stop 65
aaattatccgtatcatgcaacatac

SEQ ID NO: 463190 - DNA, 25 bp, Artificial
  probe
  misc_feature (1)..(25): SEQ ID NO: 7262; WAN024BNE; Start 55; Stop 79
atgcaacatacggataacctccaaa

SEQ ID NO: 463191 - DNA, 25 bp, Artificial
  probe
  misc_feature (1)..(25): SEQ ID NO: 7262; WAN024BNE; Start 53; Stop 77
tcatgcaacatacggataacctcca

SEQ ID NO: 463192 - DNA, 25 bp, Artificial
  probe
  misc_feature (1)..(25): SEQ ID NO: 7262; WAN024BNE; Start 38; Stop 62
tgaaaattatccgtatcatgcaaca

SEQ ID NO: 463193 - DNA, 25 bp, Artificial
  probe
  misc_feature (1)..(25): SEQ ID NO: 7262; WAN024BNE; Start 56; Stop 80
tgcaacatacggataacctccaaag

SEQ ID NO: 463194 - DNA, 25 bp, Artificial
  probe
  misc_feature (1)..(25): SEQ ID NO: 7262; WAN024BNE; Start 39; Stop 63
gaaaattatccgtatcatgcaacat

SEQ ID NO: 463195 - DNA, 25 bp, Artificial
  probe
  misc_feature (1)..(25): SEQ ID NO: 7262; WAN024BNE; Start 64; Stop 88
acggataacctccaaagaatatttt

SEQ ID NO: 463196 - DNA, 25 bp, Artificial
  probe
  misc_feature (1)..(25): SEQ ID NO: 7262; WAN024BNE; Start 40; Stop 64
aaaattatccgtatcatgcaacata

SEQ ID NO: 463197 - DNA, 25 bp, Artificial
  probe
  misc_feature (1)..(25): SEQ ID NO: 7262; WAN024BNE; Start 37; Stop 61
atgaaaattatccgtatcatgcaac

SEQ ID NO: 463198 - DNA, 25 bp, Artificial
  probe
  misc_feature (1)..(25): SEQ ID NO: 7262; WAN024BNE; Start 36; Stop 60
tatgaaaattatccgtatcatgcaa

SEQ ID NO: 463199 - DNA, 25 bp, Artificial
  probe
  misc_feature (1)..(25): SEQ ID NO: 7262; WAN024BNE; Start 35; Stop 59
atatgaaaattatccgtatcatgca

SEQ ID NO: 463200 - DNA, 25 bp, Artificial
  probe
  misc_feature (1)..(25): SEQ ID NO: 7262; WAN024BNE; Start 7; Stop 31
attgaatcacacattctattttact

SEQ ID NO: 463201 - DNA, 25 bp, Artificial
  probe
  misc_feature (1)..(25): SEQ ID NO: 7262; WAN024BNE; Start 34; Stop 58
tatatgaaaattatccgtatcatgc

SEQ ID NO: 463202 - DNA, 25 bp, Artificial
  probe
  misc_feature (1)..(25): SEQ ID NO: 7263; WAN024BS4; Start 35; Stop 59
tatcggttcctacaaatactccaag

SEQ ID NO: 463203 - DNA, 25 bp, Artificial
  probe
  misc_feature (1)..(25): SEQ ID NO: 7263; WAN024BS4; Start 34; Stop 58
ctatcggttcctacaaatactccaa

SEQ ID NO: 463204 - DNA, 25 bp, Artificial
  probe
  misc_feature (1)..(25): SEQ ID NO: 7263; WAN024BS4; Start 32; Stop 56
ttctatcggttcctacaaatactcc

SEQ ID NO: 463205 - DNA, 25 bp, Artificial
  probe
  misc_feature (1)..(25): SEQ ID NO: 7263; WAN024BS4; Start 33; Stop 57
tctatcggttcctacaaatactcca

SEQ ID NO: 463206 - DNA, 25 bp, Artificial
  probe
  misc_feature (1)..(25): SEQ ID NO: 7263; WAN024BS4; Start 38; Stop 62
cggttcctacaaatactccaagatt

SEQ ID NO: 463207 - DNA, 25 bp, Artificial
  probe
  misc_feature (1)..(25): SEQ ID NO: 7263; WAN024BS4; Start 24; Stop 48
gctaaagattctatcggttcctaca

SEQ ID NO: 463208 - DNA, 25 bp, Artificial
  probe
  misc_feature (1)..(25): SEQ ID NO: 7263; WAN024BS4; Start 23; Stop 47
tgctaaagattctatcggttcctac

SEQ ID NO: 463209 - DNA, 25 bp, Artificial
  probe
  misc_feature (1)..(25): SEQ ID NO: 7263; WAN024BS4; Start 22; Stop 46
atgctaaagattctatcggttccta

SEQ ID NO: 463210 - DNA, 25 bp, Artificial
  probe
  misc_feature (1)..(25): SEQ ID NO: 7263; WAN024BS4; Start 21; Stop 45
tatgctaaagattctatcggttcct

SEQ ID NO: 463211 - DNA, 25 bp, Artificial
  probe
  misc_feature (1)..(25): SEQ ID NO: 7263; WAN024BS4; Start 37; Stop 61
tcggttcctacaaatactccaagat

SEQ ID NO: 463212 - DNA, 25 bp, Artificial
  probe
  misc_feature (1)..(25): SEQ ID NO: 7263; WAN024BS4; Start 36; Stop 60
atcggttcctacaaatactccaaga

SEQ ID NO: 463213 - DNA, 25 bp, Artificial
  probe
  misc_feature (1)..(25): SEQ ID NO: 7263; WAN024BS4; Start 20; Stop 44
ctatgctaaagattctatcggttcc

SEQ ID NO: 463214 - DNA, 25 bp, Artificial
  probe
  misc_feature (1)..(25): SEQ ID NO: 7263; WAN024BS4; Start 19; Stop 43
actatgctaaagattctatcggttc

SEQ ID NO: 463215 - DNA, 25 bp, Artificial
  probe
  misc_feature (1)..(25): SEQ ID NO: 7263; WAN024BS4; Start 31; Stop 55
attctatcggttcctacaaatactc

SEQ ID NO: 463216 - DNA, 25 bp, Artificial
  probe
  misc_feature (1)..(25): SEQ ID NO: 7263; WAN024BS4; Start 30; Stop 54
gattctatcggttcctacaaatact

SEQ ID NO: 463217 - DNA, 25 bp, Artificial
  probe
  misc_feature (1)..(25): SEQ ID NO: 7263; WAN024BS4; Start 29; Stop 53
agattctatcggttcctacaaatac

SEQ ID NO: 463218 - DNA, 25 bp, Artificial
  probe
  misc_feature (1)..(25): SEQ ID NO: 7263; WAN024BS4; Start 27; Stop 51
aaagattctatcggttcctacaaat

SEQ ID NO: 463219 - DNA, 25 bp, Artificial
  probe
  misc_feature (1)..(25): SEQ ID NO: 7263; WAN024BS4; Start 25; Stop 49
ctaaagattctatcggttcctacaa

SEQ ID NO: 463220 - DNA, 25 bp, Artificial
  probe
  misc_feature (1)..(25): SEQ ID NO: 7263; WAN024BS4; Start 39; Stop 63
ggttcctacaaatactccaagattt

SEQ ID NO: 463221 - DNA, 25 bp, Artificial
  probe
  misc_feature (1)..(25): SEQ ID NO: 7263; WAN024BS4; Start 26; Stop 50
taaagattctatcggttcctacaaa

SEQ ID NO: 463222 - DNA, 25 bp, Artificial
  probe
  misc_feature (1)..(25): SEQ ID NO: 7263; WAN024BS4; Start 28; Stop 52
aagattctatcggttcctacaaata

SEQ ID NO: 463223 - DNA, 25 bp, Artificial
  probe
  misc_feature (1)..(25): SEQ ID NO: 7263; WAN024BS4; Start 18; Stop 42
tactatgctaaagattctatcggtt

SEQ ID NO: 463224 - DNA, 25 bp, Artificial
  probe
  misc_feature (1)..(25): SEQ ID NO: 7263; WAN024BS4; Start 17; Stop 41
atactatgctaaagattctatcggt

SEQ ID NO: 463225 - DNA, 25 bp, Artificial
  probe
  misc_feature (1)..(25): SEQ ID NO: 7263; WAN024BS4; Start 16; Stop 40
aatactatgctaaagattctatcgg

SEQ ID NO: 463226 - DNA, 25 bp, Artificial
  probe
  misc_feature (1)..(25): SEQ ID NO: 7263; WAN024BS4; Start 46; Stop 70
acaaatactccaagattttactccc

SEQ ID NO: 463227 - DNA, 25 bp, Artificial
  probe
  misc_feature (1)..(25): SEQ ID NO: 7263; WAN024BS4; Start 47; Stop 71
caaatactccaagattttactccct

SEQ ID NO: 463228 - DNA, 25 bp, Artificial
  probe
  misc_feature (1)..(25): SEQ ID NO: 7263; WAN024BS4; Start 48; Stop 72
aaatactccaagattttactccctt

SEQ ID NO: 463229 - DNA, 25 bp, Artificial
  probe
  misc_feature (1)..(25): SEQ ID NO: 7263; WAN024BS4; Start 40; Stop 64
gttcctacaaatactccaagatttt

SEQ ID NO: 463230 - DNA, 25 bp, Artificial
  probe
  misc_feature (1)..(25): SEQ ID NO: 7263; WAN024BS4; Start 45; Stop 69
tacaaatactccaagattttactcc

SEQ ID NO: 463231 - DNA, 25 bp, Artificial
  probe
  misc_feature (1)..(25): SEQ ID NO: 7263; WAN024BS4; Start 42; Stop 66
tcctacaaatactccaagattttac

SEQ ID NO: 463232 - DNA, 25 bp, Artificial
  probe
  misc_feature (1)..(25): SEQ ID NO: 7263; WAN024BS4; Start 57; Stop 81
aagattttactcccttggtctaaaa

SEQ ID NO: 463233 - DNA, 25 bp, Artificial
  probe
  misc_feature (1)..(25): SEQ ID NO: 7263; WAN024BS4; Start 43; Stop 67
cctacaaatactccaagattttact

SEQ ID NO: 463234 - DNA, 25 bp, Artificial
  probe
  misc_feature (1)..(25): SEQ ID NO: 7263; WAN024BS4; Start 91; Stop 115
aaagagttcttccctataaagtttt

SEQ ID NO: 463235 - DNA, 25 bp, Artificial
  probe
  misc_feature (1)..(25): SEQ ID NO: 7264; WAN024BNV; Start 93; Stop 117
atctcaaatgaataatgggcatgtg

SEQ ID NO: 463236 - DNA, 25 bp, Artificial
  probe
  misc_feature (1)..(25): SEQ ID NO: 7264; WAN024BNV; Start 96; Stop 120
tcaaatgaataatgggcatgtggtt

SEQ ID NO: 463237 - DNA, 25 bp, Artificial
  probe
  misc_feature (1)..(25): SEQ ID NO: 7264; WAN024BNV; Start 92; Stop 116
tatctcaaatgaataatgggcatgt

SEQ ID NO: 463238 - DNA, 25 bp, Artificial
  probe
  misc_feature (1)..(25): SEQ ID NO: 7264; WAN024BNV; Start 94; Stop 118
tctcaaatgaataatgggcatgtgg

SEQ ID NO: 463239 - DNA, 25 bp, Artificial
  probe
  misc_feature (1)..(25): SEQ ID NO: 7264; WAN024BNV; Start 97; Stop 121
caaatgaataatgggcatgtggttg

SEQ ID NO: 463240 - DNA, 25 bp, Artificial
  probe
  misc_feature (1)..(25): SEQ ID NO: 7264; WAN024BNV; Start 100; Stop 124
atgaataatgggcatgtggttgttt

SEQ ID NO: 463241 - DNA, 25 bp, Artificial
  probe
  misc_feature (1)..(25): SEQ ID NO: 7264; WAN024BNV; Start 99; Stop 123
aatgaataatgggcatgtggttgtt

SEQ ID NO: 463242 - DNA, 25 bp, Artificial
  probe
  misc_feature (1)..(25): SEQ ID NO: 7264; WAN024BNV; Start 98; Stop 122
aaatgaataatgggcatgtggttgt

SEQ ID NO: 463243 - DNA, 25 bp, Artificial
  probe
  misc_feature (1)..(25): SEQ ID NO: 7264; WAN024BNV; Start 95; Stop 119
ctcaaatgaataatgggcatgtggt

SEQ ID NO: 463244 - DNA, 25 bp, Artificial
  probe
  misc_feature (1)..(25): SEQ ID NO: 7264; WAN024BNV; Start 90; Stop 114
catatctcaaatgaataatgggcat

SEQ ID NO: 463245 - DNA, 25 bp, Artificial
  probe
  misc_feature (1)..(25): SEQ ID NO: 7264; WAN024BNV; Start 50; Stop 74
accaagatgatactaaactaggaaa

SEQ ID NO: 463246 - DNA, 25 bp, Artificial
  probe
  misc_feature (1)..(25): SEQ ID NO: 7264; WAN024BNV; Start 91; Stop 115
atatctcaaatgaataatgggcatg

SEQ ID NO: 463247 - DNA, 25 bp, Artificial
  probe
  misc_feature (1)..(25): SEQ ID NO: 7264; WAN024BNV; Start 118; Stop 142
gttgttttaggggaagatagaggta

SEQ ID NO: 463248 - DNA, 25 bp, Artificial
  probe
  misc_feature (1)..(25): SEQ ID NO: 7264; WAN024BNV; Start 113; Stop 137
atgtggttgttttaggggaagatag

SEQ ID NO: 463249 - DNA, 25 bp, Artificial
  probe
  misc_feature (1)..(25): SEQ ID NO: 7264; WAN024BNV; Start 115; Stop 139
gtggttgttttaggggaagatagag

SEQ ID NO: 463250 - DNA, 25 bp, Artificial
  probe
  misc_feature (1)..(25): SEQ ID NO: 7264; WAN024BNV; Start 114; Stop 138
tgtggttgttttaggggaagataga

SEQ ID NO: 463251 - DNA, 25 bp, Artificial
  probe
  misc_feature (1)..(25): SEQ ID NO: 7264; WAN024BNV; Start 120; Stop 144
tgttttaggggaagatagaggtatt

SEQ ID NO: 463252 - DNA, 25 bp, Artificial
  probe
  misc_feature (1)..(25): SEQ ID NO: 7264; WAN024BNV; Start 119; Stop 143
ttgttttaggggaagatagaggtat

SEQ ID NO: 463253 - DNA, 25 bp, Artificial
  probe
  misc_feature (1)..(25): SEQ ID NO: 7264; WAN024BNV; Start 117; Stop 141
ggttgttttaggggaagatagaggt

SEQ ID NO: 463254 - DNA, 25 bp, Artificial
  probe
  misc_feature (1)..(25): SEQ ID NO: 7264; WAN024BNV; Start 116; Stop 140
tggttgttttaggggaagatagagg

SEQ ID NO: 463255 - DNA, 25 bp, Artificial
  probe
  misc_feature (1)..(25): SEQ ID NO: 7264; WAN024BNV; Start 89; Stop 113
tcatatctcaaatgaataatgggca

SEQ ID NO: 463256 - DNA, 25 bp, Artificial
  probe
  misc_feature (1)..(25): SEQ ID NO: 7264; WAN024BNV; Start 103; Stop 127
aataatgggcatgtggttgttttag

SEQ ID NO: 463257 - DNA, 25 bp, Artificial
  probe
  misc_feature (1)..(25): SEQ ID NO: 7264; WAN024BNV; Start 102; Stop 126
gaataatgggcatgtggttgtttta

SEQ ID NO: 463258 - DNA, 25 bp, Artificial
  probe
  misc_feature (1)..(25): SEQ ID NO: 7264; WAN024BNV; Start 49; Stop 73
taccaagatgatactaaactaggaa

SEQ ID NO: 463259 - DNA, 25 bp, Artificial
  probe
  misc_feature (1)..(25): SEQ ID NO: 7264; WAN024BNV; Start 48; Stop 72
ttaccaagatgatactaaactagga

SEQ ID NO: 463260 - DNA, 25 bp, Artificial
  probe
  misc_feature (1)..(25): SEQ ID NO: 7264; WAN024BNV; Start 112; Stop 136
catgtggttgttttaggggaagata

SEQ ID NO: 463261 - DNA, 25 bp, Artificial
  probe
  misc_feature (1)..(25): SEQ ID NO: 7264; WAN024BNV; Start 121; Stop 145
gttttaggggaagatagaggtattc

SEQ ID NO: 463262 - DNA, 25 bp, Artificial
  probe
  misc_feature (1)..(25): SEQ ID NO: 7264; WAN024BNV; Start 122; Stop 146
ttttaggggaagatagaggtattct

SEQ ID NO: 463263 - DNA, 25 bp, Artificial
  probe
  misc_feature (1)..(25): SEQ ID NO: 7264; WAN024BNV; Start 43; Stop 67
ggcttttaccaagatgatactaaac

SEQ ID NO: 463264 - DNA, 25 bp, Artificial
  probe
  misc_feature (1)..(25): SEQ ID NO: 7264; WAN024BNV; Start 104; Stop 128
ataatgggcatgtggttgttttagg

SEQ ID NO: 463265 - DNA, 25 bp, Artificial
  probe
  misc_feature (1)..(25): SEQ ID NO: 7264; WAN024BNV; Start 101; Stop 125
tgaataatgggcatgtggttgtttt

SEQ ID NO: 463266 - DNA, 25 bp, Artificial
  probe
  misc_feature (1)..(25): SEQ ID NO: 7264; WAN024BNV; Start 88; Stop 112
atcatatctcaaatgaataatgggc

SEQ ID NO: 463267 - DNA, 25 bp, Artificial
  probe
  misc_feature (1)..(25): SEQ ID NO: 7264; WAN024BNV; Start 180; Stop 204
taaggttgtagaagataaccagatc

SEQ ID NO: 463268 - DNA, 25 bp, Artificial
  probe
  misc_feature (1)..(25): SEQ ID NO: 7265; WAN024EXN; Start 117; Stop 141
aatttctccacctttaatgatgtca

SEQ ID NO: 463269 - DNA, 25 bp, Artificial
  probe
  misc_feature (1)..(25): SEQ ID NO: 7265; WAN024EXN; Start 107; Stop 131
attcttctgtaatttctccaccttt

SEQ ID NO: 463270 - DNA, 25 bp, Artificial
  probe
  misc_feature (1)..(25): SEQ ID NO: 7265; WAN024EXN; Start 120; Stop 144
ttctccacctttaatgatgtcatgt

SEQ ID NO: 463271 - DNA, 25 bp, Artificial
  probe
  misc_feature (1)..(25): SEQ ID NO: 7265; WAN024EXN; Start 123; Stop 147
tccacctttaatgatgtcatgtaga

SEQ ID NO: 463272 - DNA, 25 bp, Artificial
  probe
  misc_feature (1)..(25): SEQ ID NO: 7265; WAN024EXN; Start 121; Stop 145
tctccacctttaatgatgtcatgta

SEQ ID NO: 463273 - DNA, 25 bp, Artificial
  probe
  misc_feature (1)..(25): SEQ ID NO: 7265; WAN024EXN; Start 119; Stop 143
tttctccacctttaatgatgtcatg

SEQ ID NO: 463274 - DNA, 25 bp, Artificial
  probe
  misc_feature (1)..(25): SEQ ID NO: 7265; WAN024EXN; Start 122; Stop 146
ctccacctttaatgatgtcatgtag

SEQ ID NO: 463275 - DNA, 25 bp, Artificial
  probe
  misc_feature (1)..(25): SEQ ID NO: 7265; WAN024EXN; Start 112; Stop 136
tctgtaatttctccacctttaatga

SEQ ID NO: 463276 - DNA, 25 bp, Artificial
  probe
  misc_feature (1)..(25): SEQ ID NO: 7265; WAN024EXN; Start 118; Stop 142
atttctccacctttaatgatgtcat

SEQ ID NO: 463277 - DNA, 25 bp, Artificial
  probe
  misc_feature (1)..(25): SEQ ID NO: 7265; WAN024EXN; Start 109; Stop 133
tcttctgtaatttctccacctttaa

SEQ ID NO: 463278 - DNA, 25 bp, Artificial
  probe
  misc_feature (1)..(25): SEQ ID NO: 7265; WAN024EXN; Start 108; Stop 132
ttcttctgtaatttctccaccttta

SEQ ID NO: 463279 - DNA, 25 bp, Artificial
  probe
  misc_feature (1)..(25): SEQ ID NO: 7265; WAN024EXN; Start 124; Stop 148
ccacctttaatgatgtcatgtagat

SEQ ID NO: 463280 - DNA, 25 bp, Artificial
  probe
  misc_feature (1)..(25): SEQ ID NO: 7265; WAN024EXN; Start 67; Stop 91
attgattctaaagcagctacaccat

SEQ ID NO: 463281 - DNA, 25 bp, Artificial
  probe
  misc_feature (1)..(25): SEQ ID NO: 7265; WAN024EXN; Start 106; Stop 130
aattcttctgtaatttctccacctt

SEQ ID NO: 463282 - DNA, 25 bp, Artificial
  probe
  misc_feature (1)..(25): SEQ ID NO: 7265; WAN024EXN; Start 68; Stop 92
ttgattctaaagcagctacaccatt

SEQ ID NO: 463283 - DNA, 25 bp, Artificial
  probe
  misc_feature (1)..(25): SEQ ID NO: 7265; WAN024EXN; Start 71; Stop 95
attctaaagcagctacaccattgag

SEQ ID NO: 463284 - DNA, 25 bp, Artificial
  probe
  misc_feature (1)..(25): SEQ ID NO: 7265; WAN024EXN; Start 70; Stop 94
gattctaaagcagctacaccattga

SEQ ID NO: 463285 - DNA, 25 bp, Artificial
  probe
  misc_feature (1)..(25): SEQ ID NO: 7265; WAN024EXN; Start 66; Stop 90
gattgattctaaagcagctacacca

SEQ ID NO: 463286 - DNA, 25 bp, Artificial
  probe
  misc_feature (1)..(25): SEQ ID NO: 7265; WAN024EXN; Start 69; Stop 93
tgattctaaagcagctacaccattg

SEQ ID NO: 463287 - DNA, 25 bp, Artificial
  probe
  misc_feature (1)..(25): SEQ ID NO: 7265; WAN024EXN; Start 115; Stop 139
gtaatttctccacctttaatgatgt

SEQ ID NO: 463288 - DNA, 25 bp, Artificial
  probe
  misc_feature (1)..(25): SEQ ID NO: 7265; WAN024EXN; Start 114; Stop 138
tgtaatttctccacctttaatgatg

SEQ ID NO: 463289 - DNA, 25 bp, Artificial
  probe
  misc_feature (1)..(25): SEQ ID NO: 7265; WAN024EXN; Start 111; Stop 135
ttctgtaatttctccacctttaatg

SEQ ID NO: 463290 - DNA, 25 bp, Artificial
  probe
  misc_feature (1)..(25): SEQ ID NO: 7265; WAN024EXN; Start 74; Stop 98
ctaaagcagctacaccattgagaag

SEQ ID NO: 463291 - DNA, 25 bp, Artificial
  probe
  misc_feature (1)..(25): SEQ ID NO: 7265; WAN024EXN; Start 116; Stop 140
taatttctccacctttaatgatgtc

SEQ ID NO: 463292 - DNA, 25 bp, Artificial
  probe
  misc_feature (1)..(25): SEQ ID NO: 7265; WAN024EXN; Start 113; Stop 137
ctgtaatttctccacctttaatgat

SEQ ID NO: 463293 - DNA, 25 bp, Artificial
  probe
  misc_feature (1)..(25): SEQ ID NO: 7265; WAN024EXN; Start 110; Stop 134
cttctgtaatttctccacctttaat

SEQ ID NO: 463294 - DNA, 25 bp, Artificial
  probe
  misc_feature (1)..(25): SEQ ID NO: 7265; WAN024EXN; Start 65; Stop 89
cgattgattctaaagcagctacacc

SEQ ID NO: 463295 - DNA, 25 bp, Artificial
  probe
  misc_feature (1)..(25): SEQ ID NO: 7265; WAN024EXN; Start 73; Stop 97
tctaaagcagctacaccattgagaa

SEQ ID NO: 463296 - DNA, 25 bp, Artificial
  probe
  misc_feature (1)..(25): SEQ ID NO: 7265; WAN024EXN; Start 72; Stop 96
ttctaaagcagctacaccattgaga

SEQ ID NO: 463297 - DNA, 25 bp, Artificial
  probe
  misc_feature (1)..(25): SEQ ID NO: 7265; WAN024EXN; Start 75; Stop 99
taaagcagctacaccattgagaagt

SEQ ID NO: 463298 - DNA, 25 bp, Artificial
  probe
  misc_feature (1)..(25): SEQ ID NO: 7265; WAN024EXN; Start 55; Stop 79
tcagcggtagcgattgattctaaag

SEQ ID NO: 463299 - DNA, 25 bp, Artificial
  probe
  misc_feature (1)..(25): SEQ ID NO: 7265; WAN024EXN; Start 53; Stop 77
catcagcggtagcgattgattctaa

SEQ ID NO: 463300 - DNA, 25 bp, Artificial
  probe
  misc_feature (1)..(25): SEQ ID NO: 7265; WAN024EXN; Start 64; Stop 88
gcgattgattctaaagcagctacac

SEQ ID NO: 463301 - DNA, 25 bp, Artificial
  probe
  misc_feature (1)..(25): SEQ ID NO: 7266; WAN024BV5; Start 26; Stop 50
aaatctgggaaaatcttgggagaat

SEQ ID NO: 463302 - DNA, 25 bp, Artificial
  probe
  misc_feature (1)..(25): SEQ ID NO: 7266; WAN024BV5; Start 25; Stop 49
aaaatctgggaaaatcttgggagaa

SEQ ID NO: 463303 - DNA, 25 bp, Artificial
  probe
  misc_feature (1)..(25): SEQ ID NO: 7266; WAN024BV5; Start 27; Stop 51
aatctgggaaaatcttgggagaatt

SEQ ID NO: 463304 - DNA, 25 bp, Artificial
  probe
  misc_feature (1)..(25): SEQ ID NO: 7266; WAN024BV5; Start 28; Stop 52
atctgggaaaatcttgggagaattg

SEQ ID NO: 463305 - DNA, 25 bp, Artificial
  probe
  misc_feature (1)..(25): SEQ ID NO: 7266; WAN024BV5; Start 31; Stop 55
tgggaaaatcttgggagaattggag

SEQ ID NO: 463306 - DNA, 25 bp, Artificial
  probe
  misc_feature (1)..(25): SEQ ID NO: 7266; WAN024BV5; Start 30; Stop 54
ctgggaaaatcttgggagaattgga

SEQ ID NO: 463307 - DNA, 25 bp, Artificial
  probe
  misc_feature (1)..(25): SEQ ID NO: 7266; WAN024BV5; Start 29; Stop 53
tctgggaaaatcttgggagaattgg

SEQ ID NO: 463308 - DNA, 25 bp, Artificial
  probe
  misc_feature (1)..(25): SEQ ID NO: 7266; WAN024BV5; Start 37; Stop 61
aatcttgggagaattggagcggaaa

SEQ ID NO: 463309 - DNA, 25 bp, Artificial
  probe
  misc_feature (1)..(25): SEQ ID NO: 7266; WAN024BV5; Start 36; Stop 60
aaatcttgggagaattggagcggaa

SEQ ID NO: 463310 - DNA, 25 bp, Artificial
  probe
  misc_feature (1)..(25): SEQ ID NO: 7266; WAN024BV5; Start 77; Stop 101
tattatccaatgattgggcaacgta

SEQ ID NO: 463311 - DNA, 25 bp, Artificial
  probe
  misc_feature (1)..(25): SEQ ID NO: 7266; WAN024BV5; Start 74; Stop 98
tagtattatccaatgattgggcaac

SEQ ID NO: 463312 - DNA, 25 bp, Artificial
  probe
  misc_feature (1)..(25): SEQ ID NO: 7266; WAN024BV5; Start 32; Stop 56
gggaaaatcttgggagaattggagc

SEQ ID NO: 463313 - DNA, 25 bp, Artificial
  probe
  misc_feature (1)..(25): SEQ ID NO: 7266; WAN024BV5; Start 62; Stop 86
aaggtgctaaaatagtattatccaa

SEQ ID NO: 463314 - DNA, 25 bp, Artificial
  probe
  misc_feature (1)..(25): SEQ ID NO: 7266; WAN024BV5; Start 61; Stop 85
aaaggtgctaaaatagtattatcca

SEQ ID NO: 463315 - DNA, 25 bp, Artificial
  probe
  misc_feature (1)..(25): SEQ ID NO: 7266; WAN024BV5; Start 75; Stop 99
agtattatccaatgattgggcaacg

SEQ ID NO: 463316 - DNA, 25 bp, Artificial
  probe
  misc_feature (1)..(25): SEQ ID NO: 7266; WAN024BV5; Start 64; Stop 88
ggtgctaaaatagtattatccaatg

SEQ ID NO: 463317 - DNA, 25 bp, Artificial
  probe
  misc_feature (1)..(25): SEQ ID NO: 7266; WAN024BV5; Start 78; Stop 102
attatccaatgattgggcaacgtac

SEQ ID NO: 463318 - DNA, 25 bp, Artificial
  probe
  misc_feature (1)..(25): SEQ ID NO: 7266; WAN024BV5; Start 76; Stop 100
gtattatccaatgattgggcaacgt

SEQ ID NO: 463319 - DNA, 25 bp, Artificial
  probe
  misc_feature (1)..(25): SEQ ID NO: 7266; WAN024BV5; Start 63; Stop 87
aggtgctaaaatagtattatccaat

SEQ ID NO: 463320 - DNA, 25 bp, Artificial
  probe
  misc_feature (1)..(25): SEQ ID NO: 7266; WAN024BV5; Start 73; Stop 97
atagtattatccaatgattgggcaa

SEQ ID NO: 463321 - DNA, 25 bp, Artificial
  probe
  misc_feature (1)..(25): SEQ ID NO: 7266; WAN024BV5; Start 72; Stop 96
aatagtattatccaatgattgggca

SEQ ID NO: 463322 - DNA, 25 bp, Artificial
  probe
  misc_feature (1)..(25): SEQ ID NO: 7266; WAN024BV5; Start 34; Stop 58
gaaaatcttgggagaattggagcgg

SEQ ID NO: 463323 - DNA, 25 bp, Artificial
  probe
  misc_feature (1)..(25): SEQ ID NO: 7266; WAN024BV5; Start 33; Stop 57
ggaaaatcttgggagaattggagcg

SEQ ID NO: 463324 - DNA, 25 bp, Artificial
  probe
  misc_feature (1)..(25): SEQ ID NO: 7266; WAN024BV5; Start 85; Stop 109
aatgattgggcaacgtacagtcatg

SEQ ID NO: 463325 - DNA, 25 bp, Artificial
  probe
  misc_feature (1)..(25): SEQ ID NO: 7266; WAN024BV5; Start 84; Stop 108
caatgattgggcaacgtacagtcat

SEQ ID NO: 463326 - DNA, 25 bp, Artificial
  probe
  misc_feature (1)..(25): SEQ ID NO: 7266; WAN024BV5; Start 38; Stop 62
atcttgggagaattggagcggaaaa

SEQ ID NO: 463327 - DNA, 25 bp, Artificial
  probe
  misc_feature (1)..(25): SEQ ID NO: 7266; WAN024BV5; Start 35; Stop 59
aaaatcttgggagaattggagcgga

SEQ ID NO: 463328 - DNA, 25 bp, Artificial
  probe
  misc_feature (1)..(25): SEQ ID NO: 7266; WAN024BV5; Start 79; Stop 103
ttatccaatgattgggcaacgtaca

SEQ ID NO: 463329 - DNA, 25 bp, Artificial
  probe
  misc_feature (1)..(25): SEQ ID NO: 7266; WAN024BV5; Start 71; Stop 95
aaatagtattatccaatgattgggc

SEQ ID NO: 463330 - DNA, 25 bp, Artificial
  probe
  misc_feature (1)..(25): SEQ ID NO: 7266; WAN024BV5; Start 3; Stop 27
gatttctgggaaaatcttgggaaaa

SEQ ID NO: 463331 - DNA, 25 bp, Artificial
  probe
  misc_feature (1)..(25): SEQ ID NO: 7266; WAN024BV5; Start 2; Stop 26
tgatttctgggaaaatcttgggaaa

SEQ ID NO: 463332 - DNA, 25 bp, Artificial
  probe
  misc_feature (1)..(25): SEQ ID NO: 7266; WAN024BV5; Start 60; Stop 84
aaaaggtgctaaaatagtattatcc

SEQ ID NO: 463333 - DNA, 25 bp, Artificial
  probe
  misc_feature (1)..(25): SEQ ID NO: 7266; WAN024BV5; Start 80; Stop 104
tatccaatgattgggcaacgtacag

SEQ ID NO: 463334 - DNA, 25 bp, Artificial
  probe
  misc_feature (1)..(25): SEQ ID NO: 7267; WAN024BN2; Start 476; Stop 500
ttggcgagagaactgatgatattaa

SEQ ID NO: 463335 - DNA, 25 bp, Artificial
  probe
  misc_feature (1)..(25): SEQ ID NO: 7267; WAN024BN2; Start 477; Stop 501
tggcgagagaactgatgatattaag

SEQ ID NO: 463336 - DNA, 25 bp, Artificial
  probe
  misc_feature (1)..(25): SEQ ID NO: 7267; WAN024BN2; Start 479; Stop 503
gcgagagaactgatgatattaagca

SEQ ID NO: 463337 - DNA, 25 bp, Artificial
  probe
  misc_feature (1)..(25): SEQ ID NO: 7267; WAN024BN2; Start 952; Stop 976
tcagtcagcctcttaatgtatatca

SEQ ID NO: 463338 - DNA, 25 bp, Artificial
  probe
  misc_feature (1)..(25): SEQ ID NO: 7267; WAN024BN2; Start 1091; Stop 1115
ccgaagatagcgatgatatagaatc

SEQ ID NO: 463339 - DNA, 25 bp, Artificial
  probe
  misc_feature (1)..(25): SEQ ID NO: 7267; WAN024BN2; Start 478; Stop 502
ggcgagagaactgatgatattaagc

SEQ ID NO: 463340 - DNA, 25 bp, Artificial
  probe
  misc_feature (1)..(25): SEQ ID NO: 7267; WAN024BN2; Start 480; Stop 504
cgagagaactgatgatattaagcat

SEQ ID NO: 463341 - DNA, 25 bp, Artificial
  probe
  misc_feature (1)..(25): SEQ ID NO: 7267; WAN024BN2; Start 1174; Stop 1198
aattcattagtatcgcttcttggaa

SEQ ID NO: 463342 - DNA, 25 bp, Artificial
  probe
  misc_feature (1)..(25): SEQ ID NO: 7267; WAN024BN2; Start 953; Stop 977
cagtcagcctcttaatgtatatcaa

SEQ ID NO: 463343 - DNA, 25 bp, Artificial
  probe
  misc_feature (1)..(25): SEQ ID NO: 7267; WAN024BN2; Start 951; Stop 975
ttcagtcagcctcttaatgtatatc

SEQ ID NO: 463344 - DNA, 25 bp, Artificial
  probe
  misc_feature (1)..(25): SEQ ID NO: 7267; WAN024BN2; Start 1173; Stop 1197
taattcattagtatcgcttcttgga

SEQ ID NO: 463345 - DNA, 25 bp, Artificial
  probe
  misc_feature (1)..(25): SEQ ID NO: 7267; WAN024BN2; Start 1357; Stop 1381
acagatacaattacagcagataaga

SEQ ID NO: 463346 - DNA, 25 bp, Artificial
  probe
  misc_feature (1)..(25): SEQ ID NO: 7267; WAN024BN2; Start 1042; Stop 1066
agattcgaggaagcatacaactatt

SEQ ID NO: 463347 - DNA, 25 bp, Artificial
  probe
  misc_feature (1)..(25): SEQ ID NO: 7267; WAN024BN2; Start 1041; Stop 1065
aagattcgaggaagcatacaactat

SEQ ID NO: 463348 - DNA, 25 bp, Artificial
  probe
  misc_feature (1)..(25): SEQ ID NO: 7267; WAN024BN2; Start 1039; Stop 1063
ttaagattcgaggaagcatacaact

SEQ ID NO: 463349 - DNA, 25 bp, Artificial
  probe
  misc_feature (1)..(25): SEQ ID NO: 7267; WAN024BN2; Start 1035; Stop 1059
ccaattaagattcgaggaagcatac

SEQ ID NO: 463350 - DNA, 25 bp, Artificial
  probe
  misc_feature (1)..(25): SEQ ID NO: 7267; WAN024BN2; Start 949; Stop 973
aattcagtcagcctcttaatgtata

SEQ ID NO: 463351 - DNA, 25 bp, Artificial
  probe
  misc_feature (1)..(25): SEQ ID NO: 7267; WAN024BN2; Start 948; Stop 972
taattcagtcagcctcttaatgtat

SEQ ID NO: 463352 - DNA, 25 bp, Artificial
  probe
  misc_feature (1)..(25): SEQ ID NO: 7267; WAN024BN2; Start 180; Stop 204
aaccagtattatgtaccaagttgaa

SEQ ID NO: 463353 - DNA, 25 bp, Artificial
  probe
  misc_feature (1)..(25): SEQ ID NO: 7267; WAN024BN2; Start 947; Stop 971
ttaattcagtcagcctcttaatgta

SEQ ID NO: 463354 - DNA, 25 bp, Artificial
  probe
  misc_feature (1)..(25): SEQ ID NO: 7267; WAN024BN2; Start 1040; Stop 1064
taagattcgaggaagcatacaacta

SEQ ID NO: 463355 - DNA, 25 bp, Artificial
  probe
  misc_feature (1)..(25): SEQ ID NO: 7267; WAN024BN2; Start 1038; Stop 1062
attaagattcgaggaagcatacaac

SEQ ID NO: 463356 - DNA, 25 bp, Artificial
  probe
  misc_feature (1)..(25): SEQ ID NO: 7267; WAN024BN2; Start 1036; Stop 1060
caattaagattcgaggaagcataca

SEQ ID NO: 463357 - DNA, 25 bp, Artificial
  probe
  misc_feature (1)..(25): SEQ ID NO: 7267; WAN024BN2; Start 954; Stop 978
agtcagcctcttaatgtatatcaat

SEQ ID NO: 463358 - DNA, 25 bp, Artificial
  probe
  misc_feature (1)..(25): SEQ ID NO: 7267; WAN024BN2; Start 950; Stop 974
attcagtcagcctcttaatgtatat

SEQ ID NO: 463359 - DNA, 25 bp, Artificial
  probe
  misc_feature (1)..(25): SEQ ID NO: 7267; WAN024BN2; Start 1081; Stop 1105
aataatagtcccgaagatagcgatg

SEQ ID NO: 463360 - DNA, 25 bp, Artificial
  probe
  misc_feature (1)..(25): SEQ ID NO: 7267; WAN024BN2; Start 1086; Stop 1110
tagtcccgaagatagcgatgatata

SEQ ID NO: 463361 - DNA, 25 bp, Artificial
  probe
  misc_feature (1)..(25): SEQ ID NO: 7267; WAN024BN2; Start 475; Stop 499
tttggcgagagaactgatgatatta

SEQ ID NO: 463362 - DNA, 25 bp, Artificial
  probe
  misc_feature (1)..(25): SEQ ID NO: 7267; WAN024BN2; Start 1090; Stop 1114
cccgaagatagcgatgatatagaat

SEQ ID NO: 463363 - DNA, 25 bp, Artificial
  probe
  misc_feature (1)..(25): SEQ ID NO: 7267; WAN024BN2; Start 1089; Stop 1113
tcccgaagatagcgatgatatagaa

SEQ ID NO: 463364 - DNA, 25 bp, Artificial
  probe
  misc_feature (1)..(25): SEQ ID NO: 7267; WAN024BN2; Start 1085; Stop 1109
atagtcccgaagatagcgatgatat

SEQ ID NO: 463365 - DNA, 25 bp, Artificial
  probe
  misc_feature (1)..(25): SEQ ID NO: 7267; WAN024BN2; Start 1099; Stop 1123
agcgatgatatagaatcttacttga

SEQ ID NO: 463366 - DNA, 25 bp, Artificial
  probe
  misc_feature (1)..(25): SEQ ID NO: 7267; WAN024BN2; Start 1084; Stop 1108
aatagtcccgaagatagcgatgata

SEQ ID NO: 463367 - DNA, 25 bp, Artificial
  probe
  misc_feature (1)..(25): SEQ ID NO: 7268; WAN024C2H; Start 45; Stop 69
agcctctatggactgtttcttattt

SEQ ID NO: 463368 - DNA, 25 bp, Artificial
  probe
  misc_feature (1)..(25): SEQ ID NO: 7268; WAN024C2H; Start 46; Stop 70
gcctctatggactgtttcttattta

SEQ ID NO: 463369 - DNA, 25 bp, Artificial
  probe
  misc_feature (1)..(25): SEQ ID NO: 7268; WAN024C2H; Start 53; Stop 77
tggactgtttcttatttagcaagtt

SEQ ID NO: 463370 - DNA, 25 bp, Artificial
  probe
  misc_feature (1)..(25): SEQ ID NO: 7268; WAN024C2H; Start 52; Stop 76
atggactgtttcttatttagcaagt

SEQ ID NO: 463371 - DNA, 25 bp, Artificial
  probe
  misc_feature (1)..(25): SEQ ID NO: 7268; WAN024C2H; Start 44; Stop 68
cagcctctatggactgtttcttatt

SEQ ID NO: 463372 - DNA, 25 bp, Artificial
  probe
  misc_feature (1)..(25): SEQ ID NO: 7268; WAN024C2H; Start 49; Stop 73
tctatggactgtttcttatttagca

SEQ ID NO: 463373 - DNA, 25 bp, Artificial
  probe
  misc_feature (1)..(25): SEQ ID NO: 7268; WAN024C2H; Start 54; Stop 78
ggactgtttcttatttagcaagttt

SEQ ID NO: 463374 - DNA, 25 bp, Artificial
  probe
  misc_feature (1)..(25): SEQ ID NO: 7268; WAN024C2H; Start 48; Stop 72
ctctatggactgtttcttatttagc

SEQ ID NO: 463375 - DNA, 25 bp, Artificial
  probe
  misc_feature (1)..(25): SEQ ID NO: 7268; WAN024C2H; Start 50; Stop 74
ctatggactgtttcttatttagcaa

SEQ ID NO: 463376 - DNA, 25 bp, Artificial
  probe
  misc_feature (1)..(25): SEQ ID NO: 7268; WAN024C2H; Start 57; Stop 81
ctgtttcttatttagcaagtttagc

SEQ ID NO: 463377 - DNA, 25 bp, Artificial
  probe
  misc_feature (1)..(25): SEQ ID NO: 7268; WAN024C2H; Start 51; Stop 75
tatggactgtttcttatttagcaag

SEQ ID NO: 463378 - DNA, 25 bp, Artificial
  probe
  misc_feature (1)..(25): SEQ ID NO: 7268; WAN024C2H; Start 47; Stop 71
cctctatggactgtttcttatttag

SEQ ID NO: 463379 - DNA, 25 bp, Artificial
  probe
  misc_feature (1)..(25): SEQ ID NO: 7268; WAN024C2H; Start 14; Stop 38
tctaccttttcctatttggagacaa

SEQ ID NO: 463380 - DNA, 25 bp, Artificial
  probe
  misc_feature (1)..(25): SEQ ID NO: 7268; WAN024C2H; Start 13; Stop 37
ttctaccttttcctatttggagaca

SEQ ID NO: 463381 - DNA, 25 bp, Artificial
  probe
  misc_feature (1)..(25): SEQ ID NO: 7268; WAN024C2H; Start 8; Stop 32
tcattttctaccttttcctatttgg

SEQ ID NO: 463382 - DNA, 25 bp, Artificial
  probe
  misc_feature (1)..(25): SEQ ID NO: 7268; WAN024C2H; Start 55; Stop 79
gactgtttcttatttagcaagttta

SEQ ID NO: 463383 - DNA, 25 bp, Artificial
  probe
  misc_feature (1)..(25): SEQ ID NO: 7268; WAN024C2H; Start 12; Stop 36
tttctaccttttcctatttggagac

SEQ ID NO: 463384 - DNA, 25 bp, Artificial
  probe
  misc_feature (1)..(25): SEQ ID NO: 7268; WAN024C2H; Start 56; Stop 80
actgtttcttatttagcaagtttag

SEQ ID NO: 463385 - DNA, 25 bp, Artificial
  probe
  misc_feature (1)..(25): SEQ ID NO: 7268; WAN024C2H; Start 2; Stop 26
tgattttcattttctaccttttcct

SEQ ID NO: 463386 - DNA, 25 bp, Artificial
  probe
  misc_feature (1)..(25): SEQ ID NO: 7268; WAN024C2H; Start 1; Stop 25
gtgattttcattttctaccttttcc

SEQ ID NO: 463387 - DNA, 25 bp, Artificial
  probe
  misc_feature (1)..(25): SEQ ID NO: 7268; WAN024C2H; Start 11; Stop 35
ttttctaccttttcctatttggaga

SEQ ID NO: 463388 - DNA, 25 bp, Artificial
  probe
  misc_feature (1)..(25): SEQ ID NO: 7268; WAN024C2H; Start 43; Stop 67
acagcctctatggactgtttcttat

SEQ ID NO: 463389 - DNA, 25 bp, Artificial
  probe
  misc_feature (1)..(25): SEQ ID NO: 7268; WAN024C2H; Start 15; Stop 39
ctaccttttcctatttggagacaaa

SEQ ID NO: 463390 - DNA, 25 bp, Artificial
  probe
  misc_feature (1)..(25): SEQ ID NO: 7268; WAN024C2H; Start 9; Stop 33
cattttctaccttttcctatttgga

SEQ ID NO: 463391 - DNA, 25 bp, Artificial
  probe
  misc_feature (1)..(25): SEQ ID NO: 7268; WAN024C2H; Start 16; Stop 40
taccttttcctatttggagacaaaa

SEQ ID NO: 463392 - DNA, 25 bp, Artificial
  probe
  misc_feature (1)..(25): SEQ ID NO: 7268; WAN024C2H; Start 10; Stop 34
attttctaccttttcctatttggag

SEQ ID NO: 463393 - DNA, 25 bp, Artificial
  probe
  misc_feature (1)..(25): SEQ ID NO: 7268; WAN024C2H; Start 7; Stop 31
ttcattttctaccttttcctatttg

SEQ ID NO: 463394 - DNA, 25 bp, Artificial
  probe
  misc_feature (1)..(25): SEQ ID NO: 7268; WAN024C2H; Start 3; Stop 27
gattttcattttctaccttttccta

SEQ ID NO: 463395 - DNA, 25 bp, Artificial
  probe
  misc_feature (1)..(25): SEQ ID NO: 7268; WAN024C2H; Start 6; Stop 30
tttcattttctaccttttcctattt

SEQ ID NO: 463396 - DNA, 25 bp, Artificial
  probe
  misc_feature (1)..(25): SEQ ID NO: 7268; WAN024C2H; Start 5; Stop 29
ttttcattttctaccttttcctatt

SEQ ID NO: 463397 - DNA, 25 bp, Artificial
  probe
  misc_feature (1)..(25): SEQ ID NO: 7269; WAN024FVE; Start 201; Stop 225
tacaccgaggatagaacgatttaag

SEQ ID NO: 463398 - DNA, 25 bp, Artificial
  probe
  misc_feature (1)..(25): SEQ ID NO: 7269; WAN024FVE; Start 200; Stop 224
ctacaccgaggatagaacgatttaa

SEQ ID NO: 463399 - DNA, 25 bp, Artificial
  probe
  misc_feature (1)..(25): SEQ ID NO: 7269; WAN024FVE; Start 148; Stop 172
ttagccgactttgaagaccttatac

SEQ ID NO: 463400 - DNA, 25 bp, Artificial
  probe
  misc_feature (1)..(25): SEQ ID NO: 7269; WAN024FVE; Start 147; Stop 171
cttagccgactttgaagaccttata

SEQ ID NO: 463401 - DNA, 25 bp, Artificial
  probe
  misc_feature (1)..(25): SEQ ID NO: 7269; WAN024FVE; Start 204; Stop 228
accgaggatagaacgatttaagttt

SEQ ID NO: 463402 - DNA, 25 bp, Artificial
  probe
  misc_feature (1)..(25): SEQ ID NO: 7269; WAN024FVE; Start 205; Stop 229
ccgaggatagaacgatttaagtttc

SEQ ID NO: 463403 - DNA, 25 bp, Artificial
  probe
  misc_feature (1)..(25): SEQ ID NO: 7269; WAN024FVE; Start 149; Stop 173
tagccgactttgaagaccttataca

SEQ ID NO: 463404 - DNA, 25 bp, Artificial
  probe
  misc_feature (1)..(25): SEQ ID NO: 7269; WAN024FVE; Start 203; Stop 227
caccgaggatagaacgatttaagtt

SEQ ID NO: 463405 - DNA, 25 bp, Artificial
  probe
  misc_feature (1)..(25): SEQ ID NO: 7269; WAN024FVE; Start 152; Stop 176
ccgactttgaagaccttatacatca

SEQ ID NO: 463406 - DNA, 25 bp, Artificial
  probe
  misc_feature (1)..(25): SEQ ID NO: 7269; WAN024FVE; Start 151; Stop 175
gccgactttgaagaccttatacatc

SEQ ID NO: 463407 - DNA, 25 bp, Artificial
  probe
  misc_feature (1)..(25): SEQ ID NO: 7269; WAN024FVE; Start 202; Stop 226
acaccgaggatagaacgatttaagt

SEQ ID NO: 463408 - DNA, 25 bp, Artificial
  probe
  misc_feature (1)..(25): SEQ ID NO: 7269; WAN024FVE; Start 153; Stop 177
cgactttgaagaccttatacatcag

SEQ ID NO: 463409 - DNA, 25 bp, Artificial
  probe
  misc_feature (1)..(25): SEQ ID NO: 7269; WAN024FVE; Start 150; Stop 174
agccgactttgaagaccttatacat

SEQ ID NO: 463410 - DNA, 25 bp, Artificial
  probe
  misc_feature (1)..(25): SEQ ID NO: 7269; WAN024FVE; Start 199; Stop 223
gctacaccgaggatagaacgattta

SEQ ID NO: 463411 - DNA, 25 bp, Artificial
  probe
  misc_feature (1)..(25): SEQ ID NO: 7269; WAN024FVE; Start 197; Stop 221
ttgctacaccgaggatagaacgatt

SEQ ID NO: 463412 - DNA, 25 bp, Artificial
  probe
  misc_feature (1)..(25): SEQ ID NO: 7269; WAN024FVE; Start 159; Stop 183
tgaagaccttatacatcagaatact

SEQ ID NO: 463413 - DNA, 25 bp, Artificial
  probe
  misc_feature (1)..(25): SEQ ID NO: 7269; WAN024FVE; Start 154; Stop 178
gactttgaagaccttatacatcaga

SEQ ID NO: 463414 - DNA, 25 bp, Artificial
  probe
  misc_feature (1)..(25): SEQ ID NO: 7269; WAN024FVE; Start 42; Stop 66
tgctagtaacctcatactttcagtt

SEQ ID NO: 463415 - DNA, 25 bp, Artificial
  probe
  misc_feature (1)..(25): SEQ ID NO: 7269; WAN024FVE; Start 41; Stop 65
ttgctagtaacctcatactttcagt

SEQ ID NO: 463416 - DNA, 25 bp, Artificial
  probe
  misc_feature (1)..(25): SEQ ID NO: 7269; WAN024FVE; Start 155; Stop 179
actttgaagaccttatacatcagaa

SEQ ID NO: 463417 - DNA, 25 bp, Artificial
  probe
  misc_feature (1)..(25): SEQ ID NO: 7269; WAN024FVE; Start 43; Stop 67
gctagtaacctcatactttcagttc

SEQ ID NO: 463418 - DNA, 25 bp, Artificial
  probe
  misc_feature (1)..(25): SEQ ID NO: 7269; WAN024FVE; Start 158; Stop 182
ttgaagaccttatacatcagaatac

SEQ ID NO: 463419 - DNA, 25 bp, Artificial
  probe
  misc_feature (1)..(25): SEQ ID NO: 7269; WAN024FVE; Start 39; Stop 63
cattgctagtaacctcatactttca

SEQ ID NO: 463420 - DNA, 25 bp, Artificial
  probe
  misc_feature (1)..(25): SEQ ID NO: 7269; WAN024FVE; Start 40; Stop 64
attgctagtaacctcatactttcag

SEQ ID NO: 463421 - DNA, 25 bp, Artificial
  probe
  misc_feature (1)..(25): SEQ ID NO: 7269; WAN024FVE; Start 38; Stop 62
tcattgctagtaacctcatactttc

SEQ ID NO: 463422 - DNA, 25 bp, Artificial
  probe
  misc_feature (1)..(25): SEQ ID NO: 7269; WAN024FVE; Start 160; Stop 184
gaagaccttatacatcagaatactt

SEQ ID NO: 463423 - DNA, 25 bp, Artificial
  probe
  misc_feature (1)..(25): SEQ ID NO: 7269; WAN024FVE; Start 196; Stop 220
gttgctacaccgaggatagaacgat

SEQ ID NO: 463424 - DNA, 25 bp, Artificial
  probe
  misc_feature (1)..(25): SEQ ID NO: 7269; WAN024FVE; Start 216; Stop 240
acgatttaagtttctgagaatttga

SEQ ID NO: 463425 - DNA, 25 bp, Artificial
  probe
  misc_feature (1)..(25): SEQ ID NO: 7269; WAN024FVE; Start 37; Stop 61
ttcattgctagtaacctcatacttt

SEQ ID NO: 463426 - DNA, 25 bp, Artificial
  probe
  misc_feature (1)..(25): SEQ ID NO: 7269; WAN024FVE; Start 36; Stop 60
tttcattgctagtaacctcatactt

SEQ ID NO: 463427 - DNA, 25 bp, Artificial
  probe
  misc_feature (1)..(25): SEQ ID NO: 7269; WAN024FVE; Start 190; Stop 214
ttaaaggttgctacaccgaggatag

SEQ ID NO: 463428 - DNA, 25 bp, Artificial
  probe
  misc_feature (1)..(25): SEQ ID NO: 7269; WAN024FVE; Start 206; Stop 230
cgaggatagaacgatttaagtttct

SEQ ID NO: 463429 - DNA, 25 bp, Artificial
  probe
  misc_feature (1)..(25): SEQ ID NO: 7269; WAN024FVE; Start 185; Stop 209
ataatttaaaggttgctacaccgag

SEQ ID NO: 463430 - DNA, 25 bp, Artificial
  probe
  misc_feature (1)..(25): SEQ ID NO: 7270; WAN024BV6; Start 121; Stop 145
acaatatcctactcacttgaaccaa

SEQ ID NO: 463431 - DNA, 25 bp, Artificial
  probe
  misc_feature (1)..(25): SEQ ID NO: 7270; WAN024BV6; Start 120; Stop 144
aacaatatcctactcacttgaacca

SEQ ID NO: 463432 - DNA, 25 bp, Artificial
  probe
  misc_feature (1)..(25): SEQ ID NO: 7270; WAN024BV6; Start 156; Stop 180
tggtcagacaagtaagcaagtagaa

SEQ ID NO: 463433 - DNA, 25 bp, Artificial
  probe
  misc_feature (1)..(25): SEQ ID NO: 7270; WAN024BV6; Start 153; Stop 177
aagtggtcagacaagtaagcaagta

SEQ ID NO: 463434 - DNA, 25 bp, Artificial
  probe
  misc_feature (1)..(25): SEQ ID NO: 7270; WAN024BV6; Start 321; Stop 345
ttattcagaactaggctactcatct

SEQ ID NO: 463435 - DNA, 25 bp, Artificial
  probe
  misc_feature (1)..(25): SEQ ID NO: 7270; WAN024BV6; Start 119; Stop 143
taacaatatcctactcacttgaacc

SEQ ID NO: 463436 - DNA, 25 bp, Artificial
  probe
  misc_feature (1)..(25): SEQ ID NO: 7270; WAN024BV6; Start 155; Stop 179
gtggtcagacaagtaagcaagtaga

SEQ ID NO: 463437 - DNA, 25 bp, Artificial
  probe
  misc_feature (1)..(25): SEQ ID NO: 7270; WAN024BV6; Start 154; Stop 178
agtggtcagacaagtaagcaagtag

SEQ ID NO: 463438 - DNA, 25 bp, Artificial
  probe
  misc_feature (1)..(25): SEQ ID NO: 7270; WAN024BV6; Start 147; Stop 171
gtcatcaagtggtcagacaagtaag

SEQ ID NO: 463439 - DNA, 25 bp, Artificial
  probe
  misc_feature (1)..(25): SEQ ID NO: 7270; WAN024BV6; Start 150; Stop 174
atcaagtggtcagacaagtaagcaa

SEQ ID NO: 463440 - DNA, 25 bp, Artificial
  probe
  misc_feature (1)..(25): SEQ ID NO: 7270; WAN024BV6; Start 322; Stop 346
tattcagaactaggctactcatcta

SEQ ID NO: 463441 - DNA, 25 bp, Artificial
  probe
  misc_feature (1)..(25): SEQ ID NO: 7270; WAN024BV6; Start 346; Stop 370
agtgagtattatcggatattgaaca

SEQ ID NO: 463442 - DNA, 25 bp, Artificial
  probe
  misc_feature (1)..(25): SEQ ID NO: 7270; WAN024BV6; Start 275; Stop 299
taatcgaacgatattgcaggaagaa

SEQ ID NO: 463443 - DNA, 25 bp, Artificial
  probe
  misc_feature (1)..(25): SEQ ID NO: 7270; WAN024BV6; Start 161; Stop 185
agacaagtaagcaagtagaaagcat

SEQ ID NO: 463444 - DNA, 25 bp, Artificial
  probe
  misc_feature (1)..(25): SEQ ID NO: 7270; WAN024BV6; Start 148; Stop 172
tcatcaagtggtcagacaagtaagc

SEQ ID NO: 463445 - DNA, 25 bp, Artificial
  probe
  misc_feature (1)..(25): SEQ ID NO: 7270; WAN024BV6; Start 245; Stop 269
atctttctgatatgggatacacacg

SEQ ID NO: 463446 - DNA, 25 bp, Artificial
  probe
  misc_feature (1)..(25): SEQ ID NO: 7270; WAN024BV6; Start 274; Stop 298
ctaatcgaacgatattgcaggaaga

SEQ ID NO: 463447 - DNA, 25 bp, Artificial
  probe
  misc_feature (1)..(25): SEQ ID NO: 7270; WAN024BV6; Start 305; Stop 329
gggaagactacagcatttattcaga

SEQ ID NO: 463448 - DNA, 25 bp, Artificial
  probe
  misc_feature (1)..(25): SEQ ID NO: 7270; WAN024BV6; Start 304; Stop 328
agggaagactacagcatttattcag

SEQ ID NO: 463449 - DNA, 25 bp, Artificial
  probe
  misc_feature (1)..(25): SEQ ID NO: 7270; WAN024BV6; Start 303; Stop 327
gagggaagactacagcatttattca

SEQ ID NO: 463450 - DNA, 25 bp, Artificial
  probe
  misc_feature (1)..(25): SEQ ID NO: 7270; WAN024BV6; Start 159; Stop 183
tcagacaagtaagcaagtagaaagc

SEQ ID NO: 463451 - DNA, 25 bp, Artificial
  probe
  misc_feature (1)..(25): SEQ ID NO: 7270; WAN024BV6; Start 158; Stop 182
gtcagacaagtaagcaagtagaaag

SEQ ID NO: 463452 - DNA, 25 bp, Artificial
  probe
  misc_feature (1)..(25): SEQ ID NO: 7270; WAN024BV6; Start 323; Stop 347
attcagaactaggctactcatctag

SEQ ID NO: 463453 - DNA, 25 bp, Artificial
  probe
  misc_feature (1)..(25): SEQ ID NO: 7270; WAN024BV6; Start 157; Stop 181
ggtcagacaagtaagcaagtagaaa

SEQ ID NO: 463454 - DNA, 25 bp, Artificial
  probe
  misc_feature (1)..(25): SEQ ID NO: 7270; WAN024BV6; Start 301; Stop 325
aggagggaagactacagcatttatt

SEQ ID NO: 463455 - DNA, 25 bp, Artificial
  probe
  misc_feature (1)..(25): SEQ ID NO: 7270; WAN024BV6; Start 300; Stop 324
aaggagggaagactacagcatttat

SEQ ID NO: 463456 - DNA, 25 bp, Artificial
  probe
  misc_feature (1)..(25): SEQ ID NO: 7270; WAN024BV6; Start 151; Stop 175
tcaagtggtcagacaagtaagcaag

SEQ ID NO: 463457 - DNA, 25 bp, Artificial
  probe
  misc_feature (1)..(25): SEQ ID NO: 7270; WAN024BV6; Start 149; Stop 173
catcaagtggtcagacaagtaagca

SEQ ID NO: 463458 - DNA, 25 bp, Artificial
  probe
  misc_feature (1)..(25): SEQ ID NO: 7270; WAN024BV6; Start 302; Stop 326
ggagggaagactacagcatttattc

SEQ ID NO: 463459 - DNA, 25 bp, Artificial
  probe
  misc_feature (1)..(25): SEQ ID NO: 7270; WAN024BV6; Start 160; Stop 184
cagacaagtaagcaagtagaaagca

SEQ ID NO: 463460 - DNA, 25 bp, Artificial
  probe
  misc_feature (1)..(25): SEQ ID NO: 7270; WAN024BV6; Start 312; Stop 336
ctacagcatttattcagaactaggc

SEQ ID NO: 463461 - DNA, 25 bp, Artificial
  probe
  misc_feature (1)..(25): SEQ ID NO: 7270; WAN024BV6; Start 299; Stop 323
aaaggagggaagactacagcattta

SEQ ID NO: 463462 - DNA, 25 bp, Artificial
  probe
  misc_feature (1)..(25): SEQ ID NO: 7270; WAN024BV6; Start 219; Stop 243
agaactaatcgctaaagcaatcaac

SEQ ID NO: 463463 - DNA, 25 bp, Artificial
  probe
  misc_feature (1)..(25): SEQ ID NO: 7271; WAN024C3C; Start 156; Stop 180
tatagaggagactgtcattcaacct

SEQ ID NO: 463464 - DNA, 25 bp, Artificial
  probe
  misc_feature (1)..(25): SEQ ID NO: 7271; WAN024C3C; Start 155; Stop 179
ctatagaggagactgtcattcaacc

SEQ ID NO: 463465 - DNA, 25 bp, Artificial
  probe
  misc_feature (1)..(25): SEQ ID NO: 7271; WAN024C3C; Start 157; Stop 181
atagaggagactgtcattcaacctg

SEQ ID NO: 463466 - DNA, 25 bp, Artificial
  probe
  misc_feature (1)..(25): SEQ ID NO: 7271; WAN024C3C; Start 82; Stop 106
gaagagactccgaaacaagaagatg

SEQ ID NO: 463467 - DNA, 25 bp, Artificial
  probe
  misc_feature (1)..(25): SEQ ID NO: 7271; WAN024C3C; Start 85; Stop 109
gagactccgaaacaagaagatgaac

SEQ ID NO: 463468 - DNA, 25 bp, Artificial
  probe
  misc_feature (1)..(25): SEQ ID NO: 7271; WAN024C3C; Start 84; Stop 108
agagactccgaaacaagaagatgaa

SEQ ID NO: 463469 - DNA, 25 bp, Artificial
  probe
  misc_feature (1)..(25): SEQ ID NO: 7271; WAN024C3C; Start 83; Stop 107
aagagactccgaaacaagaagatga

SEQ ID NO: 463470 - DNA, 25 bp, Artificial
  probe
  misc_feature (1)..(25): SEQ ID NO: 7271; WAN024C3C; Start 87; Stop 111
gactccgaaacaagaagatgaacag

SEQ ID NO: 463471 - DNA, 25 bp, Artificial
  probe
  misc_feature (1)..(25): SEQ ID NO: 7271; WAN024C3C; Start 158; Stop 182
tagaggagactgtcattcaacctgt

SEQ ID NO: 463472 - DNA, 25 bp, Artificial
  probe
  misc_feature (1)..(25): SEQ ID NO: 7271; WAN024C3C; Start 86; Stop 110
agactccgaaacaagaagatgaaca

SEQ ID NO: 463473 - DNA, 25 bp, Artificial
  probe
  misc_feature (1)..(25): SEQ ID NO: 7271; WAN024C3C; Start 159; Stop 183
agaggagactgtcattcaacctgtt

SEQ ID NO: 463474 - DNA, 25 bp, Artificial
  probe
  misc_feature (1)..(25): SEQ ID NO: 7271; WAN024C3C; Start 97; Stop 121
caagaagatgaacagccagcagaag

SEQ ID NO: 463475 - DNA, 25 bp, Artificial
  probe
  misc_feature (1)..(25): SEQ ID NO: 7271; WAN024C3C; Start 160; Stop 184
gaggagactgtcattcaacctgttg

SEQ ID NO: 463476 - DNA, 25 bp, Artificial
  probe
  misc_feature (1)..(25): SEQ ID NO: 7271; WAN024C3C; Start 118; Stop 142
gaagcccaagaaatcaaggttgaag

SEQ ID NO: 463477 - DNA, 25 bp, Artificial
  probe
  misc_feature (1)..(25): SEQ ID NO: 7271; WAN024C3C; Start 81; Stop 105
ggaagagactccgaaacaagaagat

SEQ ID NO: 463478 - DNA, 25 bp, Artificial
  probe
  misc_feature (1)..(25): SEQ ID NO: 7271; WAN024C3C; Start 32; Stop 56
caccaaaagaatcatcacaacaaga

SEQ ID NO: 463479 - DNA, 25 bp, Artificial
  probe
  misc_feature (1)..(25): SEQ ID NO: 7271; WAN024C3C; Start 33; Stop 57
accaaaagaatcatcacaacaagaa

SEQ ID NO: 463480 - DNA, 25 bp, Artificial
  probe
  misc_feature (1)..(25): SEQ ID NO: 7271; WAN024C3C; Start 31; Stop 55
acaccaaaagaatcatcacaacaag

SEQ ID NO: 463481 - DNA, 25 bp, Artificial
  probe
  misc_feature (1)..(25): SEQ ID NO: 7271; WAN024C3C; Start 30; Stop 54
tacaccaaaagaatcatcacaacaa

SEQ ID NO: 463482 - DNA, 25 bp, Artificial
  probe
  misc_feature (1)..(25): SEQ ID NO: 7271; WAN024C3C; Start 121; Stop 145
gcccaagaaatcaaggttgaagaac

SEQ ID NO: 463483 - DNA, 25 bp, Artificial
  probe
  misc_feature (1)..(25): SEQ ID NO: 7271; WAN024C3C; Start 120; Stop 144
agcccaagaaatcaaggttgaagaa

SEQ ID NO: 463484 - DNA, 25 bp, Artificial
  probe
  misc_feature (1)..(25): SEQ ID NO: 7271; WAN024C3C; Start 119; Stop 143
aagcccaagaaatcaaggttgaaga

SEQ ID NO: 463485 - DNA, 25 bp, Artificial
  probe
  misc_feature (1)..(25): SEQ ID NO: 7271; WAN024C3C; Start 117; Stop 141
agaagcccaagaaatcaaggttgaa

SEQ ID NO: 463486 - DNA, 25 bp, Artificial
  probe
  misc_feature (1)..(25): SEQ ID NO: 7271; WAN024C3C; Start 39; Stop 63
agaatcatcacaacaagaaaatcct

SEQ ID NO: 463487 - DNA, 25 bp, Artificial
  probe
  misc_feature (1)..(25): SEQ ID NO: 7271; WAN024C3C; Start 88; Stop 112
actccgaaacaagaagatgaacagc

SEQ ID NO: 463488 - DNA, 25 bp, Artificial
  probe
  misc_feature (1)..(25): SEQ ID NO: 7271; WAN024C3C; Start 136; Stop 160
gttgaagaaccagtagaatctatag

SEQ ID NO: 463489 - DNA, 25 bp, Artificial
  probe
  misc_feature (1)..(25): SEQ ID NO: 7271; WAN024C3C; Start 34; Stop 58
ccaaaagaatcatcacaacaagaaa

SEQ ID NO: 463490 - DNA, 25 bp, Artificial
  probe
  misc_feature (1)..(25): SEQ ID NO: 7271; WAN024C3C; Start 8; Stop 32
ctacacaagctgagcaaccaagtac

SEQ ID NO: 463491 - DNA, 25 bp, Artificial
  probe
  misc_feature (1)..(25): SEQ ID NO: 7271; WAN024C3C; Start 96; Stop 120
acaagaagatgaacagccagcagaa

SEQ ID NO: 463492 - DNA, 25 bp, Artificial
  probe
  misc_feature (1)..(25): SEQ ID NO: 7271; WAN024C3C; Start 95; Stop 119
aacaagaagatgaacagccagcaga

SEQ ID NO: 463493 - DNA, 25 bp, Artificial
  probe
  misc_feature (1)..(25): SEQ ID NO: 7271; WAN024C3C; Start 29; Stop 53
gtacaccaaaagaatcatcacaaca

SEQ ID NO: 463494 - DNA, 25 bp, Artificial
  probe
  misc_feature (1)..(25): SEQ ID NO: 7271; WAN024C3C; Start 22; Stop 46
caaccaagtacaccaaaagaatcat

SEQ ID NO: 463495 - DNA, 25 bp, Artificial
  probe
  misc_feature (1)..(25): SEQ ID NO: 7271; WAN024C3C; Start 28; Stop 52
agtacaccaaaagaatcatcacaac

SEQ ID NO: 463496 - DNA, 25 bp, Artificial
  probe
  misc_feature (1)..(25): SEQ ID NO: 7272; WAN024ERV; Start 95; Stop 119
tttcctttacccatccacttacatt

SEQ ID NO: 463497 - DNA, 25 bp, Artificial
  probe
  misc_feature (1)..(25): SEQ ID NO: 7272; WAN024ERV; Start 98; Stop 122
cctttacccatccacttacattaga

SEQ ID NO: 463498 - DNA, 25 bp, Artificial
  probe
  misc_feature (1)..(25): SEQ ID NO: 7272; WAN024ERV; Start 97; Stop 121
tcctttacccatccacttacattag

SEQ ID NO: 463499 - DNA, 25 bp, Artificial
  probe
  misc_feature (1)..(25): SEQ ID NO: 7272; WAN024ERV; Start 94; Stop 118
ctttcctttacccatccacttacat

SEQ ID NO: 463500 - DNA, 25 bp, Artificial
  probe
  misc_feature (1)..(25): SEQ ID NO: 7272; WAN024ERV; Start 127; Stop 151
ttaaacttcactgccctctcaaata

SEQ ID NO: 463501 - DNA, 25 bp, Artificial
  probe
  misc_feature (1)..(25): SEQ ID NO: 7272; WAN024ERV; Start 7; Stop 31
ctttcgcatcataacttccctattt

SEQ ID NO: 463502 - DNA, 25 bp, Artificial
  probe
  misc_feature (1)..(25): SEQ ID NO: 7272; WAN024ERV; Start 128; Stop 152
taaacttcactgccctctcaaatac

SEQ ID NO: 463503 - DNA, 25 bp, Artificial
  probe
  misc_feature (1)..(25): SEQ ID NO: 7272; WAN024ERV; Start 96; Stop 120
ttcctttacccatccacttacatta

SEQ ID NO: 463504 - DNA, 25 bp, Artificial
  probe
  misc_feature (1)..(25): SEQ ID NO: 7272; WAN024ERV; Start 126; Stop 150
attaaacttcactgccctctcaaat

SEQ ID NO: 463505 - DNA, 25 bp, Artificial
  probe
  misc_feature (1)..(25): SEQ ID NO: 7272; WAN024ERV; Start 38; Stop 62
accctctctataacagcaattcaaa

SEQ ID NO: 463506 - DNA, 25 bp, Artificial
  probe
  misc_feature (1)..(25): SEQ ID NO: 7272; WAN024ERV; Start 37; Stop 61
gaccctctctataacagcaattcaa

SEQ ID NO: 463507 - DNA, 25 bp, Artificial
  probe
  misc_feature (1)..(25): SEQ ID NO: 7272; WAN024ERV; Start 6; Stop 30
cctttcgcatcataacttccctatt

SEQ ID NO: 463508 - DNA, 25 bp, Artificial
  probe
  misc_feature (1)..(25): SEQ ID NO: 7272; WAN024ERV; Start 39; Stop 63
ccctctctataacagcaattcaaag

SEQ ID NO: 463509 - DNA, 25 bp, Artificial
  probe
  misc_feature (1)..(25): SEQ ID NO: 7272; WAN024ERV; Start 92; Stop 116
gactttcctttacccatccacttac

SEQ ID NO: 463510 - DNA, 25 bp, Artificial
  probe
  misc_feature (1)..(25): SEQ ID NO: 7272; WAN024ERV; Start 47; Stop 71
ataacagcaattcaaagacaagtcg

SEQ ID NO: 463511 - DNA, 25 bp, Artificial
  probe
  misc_feature (1)..(25): SEQ ID NO: 7272; WAN024ERV; Start 125; Stop 149
aattaaacttcactgccctctcaaa

SEQ ID NO: 463512 - DNA, 25 bp, Artificial
  probe
  misc_feature (1)..(25): SEQ ID NO: 7272; WAN024ERV; Start 124; Stop 148
aaattaaacttcactgccctctcaa

SEQ ID NO: 463513 - DNA, 25 bp, Artificial
  probe
  misc_feature (1)..(25): SEQ ID NO: 7272; WAN024ERV; Start 93; Stop 117
actttcctttacccatccacttaca

SEQ ID NO: 463514 - DNA, 25 bp, Artificial
  probe
  misc_feature (1)..(25): SEQ ID NO: 7272; WAN024ERV; Start 54; Stop 78
caattcaaagacaagtcggcttatg

SEQ ID NO: 463515 - DNA, 25 bp, Artificial
  probe
  misc_feature (1)..(25): SEQ ID NO: 7272; WAN024ERV; Start 99; Stop 123
ctttacccatccacttacattagaa

SEQ ID NO: 463516 - DNA, 25 bp, Artificial
  probe
  misc_feature (1)..(25): SEQ ID NO: 7272; WAN024ERV; Start 5; Stop 29
acctttcgcatcataacttccctat

SEQ ID NO: 463517 - DNA, 25 bp, Artificial
  probe
  misc_feature (1)..(25): SEQ ID NO: 7272; WAN024ERV; Start 40; Stop 64
cctctctataacagcaattcaaaga

SEQ ID NO: 463518 - DNA, 25 bp, Artificial
  probe
  misc_feature (1)..(25): SEQ ID NO: 7272; WAN024ERV; Start 130; Stop 154
aacttcactgccctctcaaatactt

SEQ ID NO: 463519 - DNA, 25 bp, Artificial
  probe
  misc_feature (1)..(25): SEQ ID NO: 7272; WAN024ERV; Start 129; Stop 153
aaacttcactgccctctcaaatact

SEQ ID NO: 463520 - DNA, 25 bp, Artificial
  probe
  misc_feature (1)..(25): SEQ ID NO: 7272; WAN024ERV; Start 131; Stop 155
acttcactgccctctcaaatacttt

SEQ ID NO: 463521 - DNA, 25 bp, Artificial
  probe
  misc_feature (1)..(25): SEQ ID NO: 7272; WAN024ERV; Start 91; Stop 115
cgactttcctttacccatccactta

SEQ ID NO: 463522 - DNA, 25 bp, Artificial
  probe
  misc_feature (1)..(25): SEQ ID NO: 7272; WAN024ERV; Start 48; Stop 72
taacagcaattcaaagacaagtcgg

SEQ ID NO: 463523 - DNA, 25 bp, Artificial
  probe
  misc_feature (1)..(25): SEQ ID NO: 7272; WAN024ERV; Start 100; Stop 124
tttacccatccacttacattagaaa

SEQ ID NO: 463524 - DNA, 25 bp, Artificial
  probe
  misc_feature (1)..(25): SEQ ID NO: 7272; WAN024ERV; Start 42; Stop 66
tctctataacagcaattcaaagaca

SEQ ID NO: 463525 - DNA, 25 bp, Artificial
  probe
  misc_feature (1)..(25): SEQ ID NO: 7272; WAN024ERV; Start 45; Stop 69
ctataacagcaattcaaagacaagt

SEQ ID NO: 463526 - DNA, 25 bp, Artificial
  probe
  misc_feature (1)..(25): SEQ ID NO: 7272; WAN024ERV; Start 36; Stop 60
cgaccctctctataacagcaattca

SEQ ID NO: 463527 - DNA, 25 bp, Artificial
  probe
  misc_feature (1)..(25): SEQ ID NO: 7272; WAN024ERV; Start 46; Stop 70
tataacagcaattcaaagacaagtc

SEQ ID NO: 463528 - DNA, 25 bp, Artificial
  probe
  misc_feature (1)..(25): SEQ ID NO: 7272; WAN024ERV; Start 41; Stop 65
ctctctataacagcaattcaaagac

SEQ ID NO: 463529 - DNA, 25 bp, Artificial
  probe
  misc_feature (1)..(25): SEQ ID NO: 7273; WAN024B8Z; Start 3; Stop 27
gcagttcatcatttcaacatcctat

SEQ ID NO: 463530 - DNA, 25 bp, Artificial
  probe
  misc_feature (1)..(25): SEQ ID NO: 7273; WAN024B8Z; Start 12; Stop 36
catttcaacatcctatattatgcgt

SEQ ID NO: 463531 - DNA, 25 bp, Artificial
  probe
  misc_feature (1)..(25): SEQ ID NO: 7273; WAN024B8Z; Start 11; Stop 35
tcatttcaacatcctatattatgcg

SEQ ID NO: 463532 - DNA, 25 bp, Artificial
  probe
  misc_feature (1)..(25): SEQ ID NO: 7273; WAN024B8Z; Start 2; Stop 26
tgcagttcatcatttcaacatccta

SEQ ID NO: 463533 - DNA, 25 bp, Artificial
  probe
  misc_feature (1)..(25): SEQ ID NO: 7273; WAN024B8Z; Start 14; Stop 38
tttcaacatcctatattatgcgttt

SEQ ID NO: 463534 - DNA, 25 bp, Artificial
  probe
  misc_feature (1)..(25): SEQ ID NO: 7273; WAN024B8Z; Start 13; Stop 37
atttcaacatcctatattatgcgtt

SEQ ID NO: 463535 - DNA, 25 bp, Artificial
  probe
  misc_feature (1)..(25): SEQ ID NO: 7273; WAN024B8Z; Start 4; Stop 28
cagttcatcatttcaacatcctata

SEQ ID NO: 463536 - DNA, 25 bp, Artificial
  probe
  misc_feature (1)..(25): SEQ ID NO: 7273; WAN024B8Z; Start 1; Stop 25
gtgcagttcatcatttcaacatcct

SEQ ID NO: 463537 - DNA, 25 bp, Artificial
  probe
  misc_feature (1)..(25): SEQ ID NO: 7273; WAN024B8Z; Start 5; Stop 29
agttcatcatttcaacatcctatat

SEQ ID NO: 463538 - DNA, 25 bp, Artificial
  probe
  misc_feature (1)..(25): SEQ ID NO: 7273; WAN024B8Z; Start 15; Stop 39
ttcaacatcctatattatgcgtttt

SEQ ID NO: 463539 - DNA, 25 bp, Artificial
  probe
  misc_feature (1)..(25): SEQ ID NO: 7273; WAN024B8Z; Start 6; Stop 30
gttcatcatttcaacatcctatatt

SEQ ID NO: 463540 - DNA, 25 bp, Artificial
  probe
  misc_feature (1)..(25): SEQ ID NO: 7273; WAN024B8Z; Start 10; Stop 34
atcatttcaacatcctatattatgc

SEQ ID NO: 463541 - DNA, 25 bp, Artificial
  probe
  misc_feature (1)..(25): SEQ ID NO: 7274; WAN024CGP; Start 173; Stop 197
ttgaagtcacggataatacgaatgg

SEQ ID NO: 463542 - DNA, 25 bp, Artificial
  probe
  misc_feature (1)..(25): SEQ ID NO: 7274; WAN024CGP; Start 74; Stop 98
tcagactcataagcataatcccaag

SEQ ID NO: 463543 - DNA, 25 bp, Artificial
  probe
  misc_feature (1)..(25): SEQ ID NO: 7274; WAN024CGP; Start 170; Stop 194
tctttgaagtcacggataatacgaa

SEQ ID NO: 463544 - DNA, 25 bp, Artificial
  probe
  misc_feature (1)..(25): SEQ ID NO: 7274; WAN024CGP; Start 172; Stop 196
tttgaagtcacggataatacgaatg

SEQ ID NO: 463545 - DNA, 25 bp, Artificial
  probe
  misc_feature (1)..(25): SEQ ID NO: 7274; WAN024CGP; Start 171; Stop 195
ctttgaagtcacggataatacgaat

SEQ ID NO: 463546 - DNA, 25 bp, Artificial
  probe
  misc_feature (1)..(25): SEQ ID NO: 7274; WAN024CGP; Start 169; Stop 193
gtctttgaagtcacggataatacga

SEQ ID NO: 463547 - DNA, 25 bp, Artificial
  probe
  misc_feature (1)..(25): SEQ ID NO: 7274; WAN024CGP; Start 73; Stop 97
gtcagactcataagcataatcccaa

SEQ ID NO: 463548 - DNA, 25 bp, Artificial
  probe
  misc_feature (1)..(25): SEQ ID NO: 7274; WAN024CGP; Start 176; Stop 200
aagtcacggataatacgaatggcag

SEQ ID NO: 463549 - DNA, 25 bp, Artificial
  probe
  misc_feature (1)..(25): SEQ ID NO: 7274; WAN024CGP; Start 175; Stop 199
gaagtcacggataatacgaatggca

SEQ ID NO: 463550 - DNA, 25 bp, Artificial
  probe
  misc_feature (1)..(25): SEQ ID NO: 7274; WAN024CGP; Start 174; Stop 198
tgaagtcacggataatacgaatggc

SEQ ID NO: 463551 - DNA, 25 bp, Artificial
  probe
  misc_feature (1)..(25): SEQ ID NO: 7274; WAN024CGP; Start 75; Stop 99
cagactcataagcataatcccaagc

SEQ ID NO: 463552 - DNA, 25 bp, Artificial
  probe
  misc_feature (1)..(25): SEQ ID NO: 7274; WAN024CGP; Start 168; Stop 192
ggtctttgaagtcacggataatacg

SEQ ID NO: 463553 - DNA, 25 bp, Artificial
  probe
  misc_feature (1)..(25): SEQ ID NO: 7274; WAN024CGP; Start 167; Stop 191
cggtctttgaagtcacggataatac

SEQ ID NO: 463554 - DNA, 25 bp, Artificial
  probe
  misc_feature (1)..(25): SEQ ID NO: 7274; WAN024CGP; Start 124; Stop 148
gataccacatggattcatatgcttg

SEQ ID NO: 463555 - DNA, 25 bp, Artificial
  probe
  misc_feature (1)..(25): SEQ ID NO: 7274; WAN024CGP; Start 166; Stop 190
acggtctttgaagtcacggataata

SEQ ID NO: 463556 - DNA, 25 bp, Artificial
  probe
  misc_feature (1)..(25): SEQ ID NO: 7274; WAN024CGP; Start 123; Stop 147
cgataccacatggattcatatgctt

SEQ ID NO: 463557 - DNA, 25 bp, Artificial
  probe
  misc_feature (1)..(25): SEQ ID NO: 7274; WAN024CGP; Start 125; Stop 149
ataccacatggattcatatgcttga

SEQ ID NO: 463558 - DNA, 25 bp, Artificial
  probe
  misc_feature (1)..(25): SEQ ID NO: 7274; WAN024CGP; Start 40; Stop 64
aagaacagcgataccaccaaagata

SEQ ID NO: 463559 - DNA, 25 bp, Artificial
  probe
  misc_feature (1)..(25): SEQ ID NO: 7274; WAN024CGP; Start 39; Stop 63
taagaacagcgataccaccaaagat

SEQ ID NO: 463560 - DNA, 25 bp, Artificial
  probe
  misc_feature (1)..(25): SEQ ID NO: 7274; WAN024CGP; Start 126; Stop 150
taccacatggattcatatgcttgag

SEQ ID NO: 463561 - DNA, 25 bp, Artificial
  probe
  misc_feature (1)..(25): SEQ ID NO: 7274; WAN024CGP; Start 72; Stop 96
ggtcagactcataagcataatccca

SEQ ID NO: 463562 - DNA, 25 bp, Artificial
  probe
  misc_feature (1)..(25): SEQ ID NO: 7274; WAN024CGP; Start 70; Stop 94
tgggtcagactcataagcataatcc

SEQ ID NO: 463563 - DNA, 25 bp, Artificial
  probe
  misc_feature (1)..(25): SEQ ID NO: 7274; WAN024CGP; Start 69; Stop 93
ctgggtcagactcataagcataatc

SEQ ID NO: 463564 - DNA, 25 bp, Artificial
  probe
  misc_feature (1)..(25): SEQ ID NO: 7274; WAN024CGP; Start 38; Stop 62
ttaagaacagcgataccaccaaaga

SEQ ID NO: 463565 - DNA, 25 bp, Artificial
  probe
  misc_feature (1)..(25): SEQ ID NO: 7274; WAN024CGP; Start 76; Stop 100
agactcataagcataatcccaagcc

SEQ ID NO: 463566 - DNA, 25 bp, Artificial
  probe
  misc_feature (1)..(25): SEQ ID NO: 7274; WAN024CGP; Start 42; Stop 66
gaacagcgataccaccaaagataga

SEQ ID NO: 463567 - DNA, 25 bp, Artificial
  probe
  misc_feature (1)..(25): SEQ ID NO: 7274; WAN024CGP; Start 41; Stop 65
agaacagcgataccaccaaagatag

SEQ ID NO: 463568 - DNA, 25 bp, Artificial
  probe
  misc_feature (1)..(25): SEQ ID NO: 7274; WAN024CGP; Start 37; Stop 61
gttaagaacagcgataccaccaaag

SEQ ID NO: 463569 - DNA, 25 bp, Artificial
  probe
  misc_feature (1)..(25): SEQ ID NO: 7274; WAN024CGP; Start 68; Stop 92
actgggtcagactcataagcataat

SEQ ID NO: 463570 - DNA, 25 bp, Artificial
  probe
  misc_feature (1)..(25): SEQ ID NO: 7274; WAN024CGP; Start 128; Stop 152
ccacatggattcatatgcttgagag

SEQ ID NO: 463571 - DNA, 25 bp, Artificial
  probe
  misc_feature (1)..(25): SEQ ID NO: 7274; WAN024CGP; Start 43; Stop 67
aacagcgataccaccaaagatagac

SEQ ID NO: 463572 - DNA, 25 bp, Artificial
  probe
  misc_feature (1)..(25): SEQ ID NO: 7274; WAN024CGP; Start 127; Stop 151
accacatggattcatatgcttgaga

SEQ ID NO: 463573 - DNA, 25 bp, Artificial
  probe
  misc_feature (1)..(25): SEQ ID NO: 7274; WAN024CGP; Start 67; Stop 91
cactgggtcagactcataagcataa

SEQ ID NO: 463574 - DNA, 25 bp, Artificial
  probe
  misc_feature (1)..(25): SEQ ID NO: 7275; WAN024CGO; Start 173; Stop 197
ttgaagtcacggatgatacggatag

SEQ ID NO: 463575 - DNA, 25 bp, Artificial
  probe
  misc_feature (1)..(25): SEQ ID NO: 7275; WAN024CGO; Start 199; Stop 223
agcatctgcatcacggatattatta

SEQ ID NO: 463576 - DNA, 25 bp, Artificial
  probe
  misc_feature (1)..(25): SEQ ID NO: 7275; WAN024CGO; Start 200; Stop 224
gcatctgcatcacggatattattaa

SEQ ID NO: 463577 - DNA, 25 bp, Artificial
  probe
  misc_feature (1)..(25): SEQ ID NO: 7275; WAN024CGO; Start 168; Stop 192
tatctttgaagtcacggatgatacg

SEQ ID NO: 463578 - DNA, 25 bp, Artificial
  probe
  misc_feature (1)..(25): SEQ ID NO: 7275; WAN024CGO; Start 166; Stop 190
actatctttgaagtcacggatgata

SEQ ID NO: 463579 - DNA, 25 bp, Artificial
  probe
  misc_feature (1)..(25): SEQ ID NO: 7275; WAN024CGO; Start 167; Stop 191
ctatctttgaagtcacggatgatac

SEQ ID NO: 463580 - DNA, 25 bp, Artificial
  probe
  misc_feature (1)..(25): SEQ ID NO: 7275; WAN024CGO; Start 172; Stop 196
tttgaagtcacggatgatacggata

SEQ ID NO: 463581 - DNA, 25 bp, Artificial
  probe
  misc_feature (1)..(25): SEQ ID NO: 7275; WAN024CGO; Start 117; Stop 141
cttgaccaattccacatggattcat

SEQ ID NO: 463582 - DNA, 25 bp, Artificial
  probe
  misc_feature (1)..(25): SEQ ID NO: 7275; WAN024CGO; Start 198; Stop 222
cagcatctgcatcacggatattatt

SEQ ID NO: 463583 - DNA, 25 bp, Artificial
  probe
  misc_feature (1)..(25): SEQ ID NO: 7275; WAN024CGO; Start 46; Stop 70
gacaatcccaccaaagatagacact

SEQ ID NO: 463584 - DNA, 25 bp, Artificial
  probe
  misc_feature (1)..(25): SEQ ID NO: 7275; WAN024CGO; Start 47; Stop 71
acaatcccaccaaagatagacactg

SEQ ID NO: 463585 - DNA, 25 bp, Artificial
  probe
  misc_feature (1)..(25): SEQ ID NO: 7275; WAN024CGO; Start 154; Stop 178
cacaacggttggactatctttgaag

SEQ ID NO: 463586 - DNA, 25 bp, Artificial
  probe
  misc_feature (1)..(25): SEQ ID NO: 7275; WAN024CGO; Start 171; Stop 195
ctttgaagtcacggatgatacggat

SEQ ID NO: 463587 - DNA, 25 bp, Artificial
  probe
  misc_feature (1)..(25): SEQ ID NO: 7275; WAN024CGO; Start 169; Stop 193
atctttgaagtcacggatgatacgg

SEQ ID NO: 463588 - DNA, 25 bp, Artificial
  probe
  misc_feature (1)..(25): SEQ ID NO: 7275; WAN024CGO; Start 43; Stop 67
gacgacaatcccaccaaagatagac

SEQ ID NO: 463589 - DNA, 25 bp, Artificial
  probe
  misc_feature (1)..(25): SEQ ID NO: 7275; WAN024CGO; Start 176; Stop 200
aagtcacggatgatacggatagcag

SEQ ID NO: 463590 - DNA, 25 bp, Artificial
  probe
  misc_feature (1)..(25): SEQ ID NO: 7275; WAN024CGO; Start 175; Stop 199
gaagtcacggatgatacggatagca

SEQ ID NO: 463591 - DNA, 25 bp, Artificial
  probe
  misc_feature (1)..(25): SEQ ID NO: 7275; WAN024CGO; Start 174; Stop 198
tgaagtcacggatgatacggatagc

SEQ ID NO: 463592 - DNA, 25 bp, Artificial
  probe
  misc_feature (1)..(25): SEQ ID NO: 7275; WAN024CGO; Start 155; Stop 179
acaacggttggactatctttgaagt

SEQ ID NO: 463593 - DNA, 25 bp, Artificial
  probe
  misc_feature (1)..(25): SEQ ID NO: 7275; WAN024CGO; Start 45; Stop 69
cgacaatcccaccaaagatagacac

SEQ ID NO: 463594 - DNA, 25 bp, Artificial
  probe
  misc_feature (1)..(25): SEQ ID NO: 7275; WAN024CGO; Start 110; Stop 134
tcatcagcttgaccaattccacatg

SEQ ID NO: 463595 - DNA, 25 bp, Artificial
  probe
  misc_feature (1)..(25): SEQ ID NO: 7275; WAN024CGO; Start 118; Stop 142
ttgaccaattccacatggattcatg

SEQ ID NO: 463596 - DNA, 25 bp, Artificial
  probe
  misc_feature (1)..(25): SEQ ID NO: 7275; WAN024CGO; Start 44; Stop 68
acgacaatcccaccaaagatagaca

SEQ ID NO: 463597 - DNA, 25 bp, Artificial
  probe
  misc_feature (1)..(25): SEQ ID NO: 7275; WAN024CGO; Start 170; Stop 194
tctttgaagtcacggatgatacgga

SEQ ID NO: 463598 - DNA, 25 bp, Artificial
  probe
  misc_feature (1)..(25): SEQ ID NO: 7275; WAN024CGO; Start 201; Stop 225
catctgcatcacggatattattaaa

SEQ ID NO: 463599 - DNA, 25 bp, Artificial
  probe
  misc_feature (1)..(25): SEQ ID NO: 7275; WAN024CGO; Start 203; Stop 227
tctgcatcacggatattattaaatg

SEQ ID NO: 463600 - DNA, 25 bp, Artificial
  probe
  misc_feature (1)..(25): SEQ ID NO: 7275; WAN024CGO; Start 115; Stop 139
agcttgaccaattccacatggattc

SEQ ID NO: 463601 - DNA, 25 bp, Artificial
  probe
  misc_feature (1)..(25): SEQ ID NO: 7275; WAN024CGO; Start 48; Stop 72
caatcccaccaaagatagacactgg

SEQ ID NO: 463602 - DNA, 25 bp, Artificial
  probe
  misc_feature (1)..(25): SEQ ID NO: 7275; WAN024CGO; Start 204; Stop 228
ctgcatcacggatattattaaatga

SEQ ID NO: 463603 - DNA, 25 bp, Artificial
  probe
  misc_feature (1)..(25): SEQ ID NO: 7275; WAN024CGO; Start 116; Stop 140
gcttgaccaattccacatggattca

SEQ ID NO: 463604 - DNA, 25 bp, Artificial
  probe
  misc_feature (1)..(25): SEQ ID NO: 7275; WAN024CGO; Start 114; Stop 138
cagcttgaccaattccacatggatt

SEQ ID NO: 463605 - DNA, 25 bp, Artificial
  probe
  misc_feature (1)..(25): SEQ ID NO: 7275; WAN024CGO; Start 165; Stop 189
gactatctttgaagtcacggatgat

SEQ ID NO: 463606 - DNA, 25 bp, Artificial
  probe
  misc_feature (1)..(25): SEQ ID NO: 7275; WAN024CGO; Start 153; Stop 177
ccacaacggttggactatctttgaa

SEQ ID NO: 463607 - DNA, 25 bp, Artificial
  probe
  misc_feature (1)..(25): SEQ ID NO: 7276; WAN024BW2; Start 44; Stop 68
attgtatcacaaacttgggcaatag

SEQ ID NO: 463608 - DNA, 25 bp, Artificial
  probe
  misc_feature (1)..(25): SEQ ID NO: 7276; WAN024BW2; Start 42; Stop 66
ctattgtatcacaaacttgggcaat

SEQ ID NO: 463609 - DNA, 25 bp, Artificial
  probe
  misc_feature (1)..(25): SEQ ID NO: 7276; WAN024BW2; Start 39; Stop 63
tacctattgtatcacaaacttgggc

SEQ ID NO: 463610 - DNA, 25 bp, Artificial
  probe
  misc_feature (1)..(25): SEQ ID NO: 7276; WAN024BW2; Start 38; Stop 62
ctacctattgtatcacaaacttggg

SEQ ID NO: 463611 - DNA, 25 bp, Artificial
  probe
  misc_feature (1)..(25): SEQ ID NO: 7276; WAN024BW2; Start 41; Stop 65
cctattgtatcacaaacttgggcaa

SEQ ID NO: 463612 - DNA, 25 bp, Artificial
  probe
  misc_feature (1)..(25): SEQ ID NO: 7276; WAN024BW2; Start 37; Stop 61
tctacctattgtatcacaaacttgg

SEQ ID NO: 463613 - DNA, 25 bp, Artificial
  probe
  misc_feature (1)..(25): SEQ ID NO: 7276; WAN024BW2; Start 45; Stop 69
ttgtatcacaaacttgggcaatagc

SEQ ID NO: 463614 - DNA, 25 bp, Artificial
  probe
  misc_feature (1)..(25): SEQ ID NO: 7276; WAN024BW2; Start 43; Stop 67
tattgtatcacaaacttgggcaata

SEQ ID NO: 463615 - DNA, 25 bp, Artificial
  probe
  misc_feature (1)..(25): SEQ ID NO: 7276; WAN024BW2; Start 40; Stop 64
acctattgtatcacaaacttgggca

SEQ ID NO: 463616 - DNA, 25 bp, Artificial
  probe
  misc_feature (1)..(25): SEQ ID NO: 7276; WAN024BW2; Start 33; Stop 57
tgtttctacctattgtatcacaaac

SEQ ID NO: 463617 - DNA, 25 bp, Artificial
  probe
  misc_feature (1)..(25): SEQ ID NO: 7276; WAN024BW2; Start 30; Stop 54
tattgtttctacctattgtatcaca

SEQ ID NO: 463618 - DNA, 25 bp, Artificial
  probe
  misc_feature (1)..(25): SEQ ID NO: 7276; WAN024BW2; Start 48; Stop 72
tatcacaaacttgggcaatagccta

SEQ ID NO: 463619 - DNA, 25 bp, Artificial
  probe
  misc_feature (1)..(25): SEQ ID NO: 7276; WAN024BW2; Start 36; Stop 60
ttctacctattgtatcacaaacttg

SEQ ID NO: 463620 - DNA, 25 bp, Artificial
  probe
  misc_feature (1)..(25): SEQ ID NO: 7276; WAN024BW2; Start 34; Stop 58
gtttctacctattgtatcacaaact

SEQ ID NO: 463621 - DNA, 25 bp, Artificial
  probe
  misc_feature (1)..(25): SEQ ID NO: 7276; WAN024BW2; Start 32; Stop 56
ttgtttctacctattgtatcacaaa

SEQ ID NO: 463622 - DNA, 25 bp, Artificial
  probe
  misc_feature (1)..(25): SEQ ID NO: 7276; WAN024BW2; Start 49; Stop 73
atcacaaacttgggcaatagcctag

SEQ ID NO: 463623 - DNA, 25 bp, Artificial
  probe
  misc_feature (1)..(25): SEQ ID NO: 7276; WAN024BW2; Start 31; Stop 55
attgtttctacctattgtatcacaa

SEQ ID NO: 463624 - DNA, 25 bp, Artificial
  probe
  misc_feature (1)..(25): SEQ ID NO: 7276; WAN024BW2; Start 35; Stop 59
tttctacctattgtatcacaaactt

SEQ ID NO: 463625 - DNA, 25 bp, Artificial
  probe
  misc_feature (1)..(25): SEQ ID NO: 7276; WAN024BW2; Start 47; Stop 71
gtatcacaaacttgggcaatagcct

SEQ ID NO: 463626 - DNA, 25 bp, Artificial
  probe
  misc_feature (1)..(25): SEQ ID NO: 7276; WAN024BW2; Start 46; Stop 70
tgtatcacaaacttgggcaatagcc

SEQ ID NO: 463627 - DNA, 25 bp, Artificial
  probe
  misc_feature (1)..(25): SEQ ID NO: 7276; WAN024BW2; Start 54; Stop 78
aaacttgggcaatagcctagcagaa

SEQ ID NO: 463628 - DNA, 25 bp, Artificial
  probe
  misc_feature (1)..(25): SEQ ID NO: 7276; WAN024BW2; Start 53; Stop 77
caaacttgggcaatagcctagcaga

SEQ ID NO: 463629 - DNA, 25 bp, Artificial
  probe
  misc_feature (1)..(25): SEQ ID NO: 7277; WAN024D9C; Start 45; Stop 69
aattcttctctacaagctctttgga

SEQ ID NO: 463630 - DNA, 25 bp, Artificial
  probe
  misc_feature (1)..(25): SEQ ID NO: 7277; WAN024D9C; Start 46; Stop 70
attcttctctacaagctctttggag

SEQ ID NO: 463631 - DNA, 25 bp, Artificial
  probe
  misc_feature (1)..(25): SEQ ID NO: 7277; WAN024D9C; Start 44; Stop 68
taattcttctctacaagctctttgg

SEQ ID NO: 463632 - DNA, 25 bp, Artificial
  probe
  misc_feature (1)..(25): SEQ ID NO: 7277; WAN024D9C; Start 37; Stop 61
tatgagctaattcttctctacaagc

SEQ ID NO: 463633 - DNA, 25 bp, Artificial
  probe
  misc_feature (1)..(25): SEQ ID NO: 7277; WAN024D9C; Start 31; Stop 55
ctcctttatgagctaattcttctct

SEQ ID NO: 463634 - DNA, 25 bp, Artificial
  probe
  misc_feature (1)..(25): SEQ ID NO: 7277; WAN024D9C; Start 30; Stop 54
tctcctttatgagctaattcttctc

SEQ ID NO: 463635 - DNA, 25 bp, Artificial
  probe
  misc_feature (1)..(25): SEQ ID NO: 7277; WAN024D9C; Start 43; Stop 67
ctaattcttctctacaagctctttg

SEQ ID NO: 463636 - DNA, 25 bp, Artificial
  probe
  misc_feature (1)..(25): SEQ ID NO: 7277; WAN024D9C; Start 26; Stop 50
tcaatctcctttatgagctaattct

SEQ ID NO: 463637 - DNA, 25 bp, Artificial
  probe
  misc_feature (1)..(25): SEQ ID NO: 7277; WAN024D9C; Start 36; Stop 60
ttatgagctaattcttctctacaag

SEQ ID NO: 463638 - DNA, 25 bp, Artificial
  probe
  misc_feature (1)..(25): SEQ ID NO: 7277; WAN024D9C; Start 42; Stop 66
gctaattcttctctacaagctcttt

SEQ ID NO: 463639 - DNA, 25 bp, Artificial
  probe
  misc_feature (1)..(25): SEQ ID NO: 7277; WAN024D9C; Start 29; Stop 53
atctcctttatgagctaattcttct

SEQ ID NO: 463640 - DNA, 25 bp, Artificial
  probe
  misc_feature (1)..(25): SEQ ID NO: 7277; WAN024D9C; Start 27; Stop 51
caatctcctttatgagctaattctt

SEQ ID NO: 463641 - DNA, 25 bp, Artificial
  probe
  misc_feature (1)..(25): SEQ ID NO: 7277; WAN024D9C; Start 33; Stop 57
cctttatgagctaattcttctctac

SEQ ID NO: 463642 - DNA, 25 bp, Artificial
  probe
  misc_feature (1)..(25): SEQ ID NO: 7277; WAN024D9C; Start 32; Stop 56
tcctttatgagctaattcttctcta

SEQ ID NO: 463643 - DNA, 25 bp, Artificial
  probe
  misc_feature (1)..(25): SEQ ID NO: 7277; WAN024D9C; Start 28; Stop 52
aatctcctttatgagctaattcttc

SEQ ID NO: 463644 - DNA, 25 bp, Artificial
  probe
  misc_feature (1)..(25): SEQ ID NO: 7277; WAN024D9C; Start 25; Stop 49
atcaatctcctttatgagctaattc

SEQ ID NO: 463645 - DNA, 25 bp, Artificial
  probe
  misc_feature (1)..(25): SEQ ID NO: 7277; WAN024D9C; Start 41; Stop 65
agctaattcttctctacaagctctt

SEQ ID NO: 463646 - DNA, 25 bp, Artificial
  probe
  misc_feature (1)..(25): SEQ ID NO: 7277; WAN024D9C; Start 38; Stop 62
atgagctaattcttctctacaagct

SEQ ID NO: 463647 - DNA, 25 bp, Artificial
  probe
  misc_feature (1)..(25): SEQ ID NO: 7277; WAN024D9C; Start 24; Stop 48
aatcaatctcctttatgagctaatt

SEQ ID NO: 463648 - DNA, 25 bp, Artificial
  probe
  misc_feature (1)..(25): SEQ ID NO: 7277; WAN024D9C; Start 20; Stop 44
aaataatcaatctcctttatgagct

SEQ ID NO: 463649 - DNA, 25 bp, Artificial
  probe
  misc_feature (1)..(25): SEQ ID NO: 7277; WAN024D9C; Start 34; Stop 58
ctttatgagctaattcttctctaca

SEQ ID NO: 463650 - DNA, 25 bp, Artificial
  probe
  misc_feature (1)..(25): SEQ ID NO: 7277; WAN024D9C; Start 35; Stop 59
tttatgagctaattcttctctacaa

SEQ ID NO: 463651 - DNA, 25 bp, Artificial
  probe
  misc_feature (1)..(25): SEQ ID NO: 7277; WAN024D9C; Start 23; Stop 47
taatcaatctcctttatgagctaat

SEQ ID NO: 463652 - DNA, 25 bp, Artificial
  probe
  misc_feature (1)..(25): SEQ ID NO: 7277; WAN024D9C; Start 22; Stop 46
ataatcaatctcctttatgagctaa

SEQ ID NO: 463653 - DNA, 25 bp, Artificial
  probe
  misc_feature (1)..(25): SEQ ID NO: 7277; WAN024D9C; Start 21; Stop 45
aataatcaatctcctttatgagcta

SEQ ID NO: 463654 - DNA, 25 bp, Artificial
  probe
  misc_feature (1)..(25): SEQ ID NO: 7277; WAN024D9C; Start 19; Stop 43
aaaataatcaatctcctttatgagc

SEQ ID NO: 463655 - DNA, 25 bp, Artificial
  probe
  misc_feature (1)..(25): SEQ ID NO: 7278; WAN024BWX; Start 260; Stop 284
atgtatccattctcttaacctgtgt

SEQ ID NO: 463656 - DNA, 25 bp, Artificial
  probe
  misc_feature (1)..(25): SEQ ID NO: 7278; WAN024BWX; Start 261; Stop 285
tgtatccattctcttaacctgtgtt

SEQ ID NO: 463657 - DNA, 25 bp, Artificial
  probe
  misc_feature (1)..(25): SEQ ID NO: 7278; WAN024BWX; Start 263; Stop 287
tatccattctcttaacctgtgttca

SEQ ID NO: 463658 - DNA, 25 bp, Artificial
  probe
  misc_feature (1)..(25): SEQ ID NO: 7278; WAN024BWX; Start 262; Stop 286
gtatccattctcttaacctgtgttc

SEQ ID NO: 463659 - DNA, 25 bp, Artificial
  probe
  misc_feature (1)..(25): SEQ ID NO: 7278; WAN024BWX; Start 119; Stop 143
acaagttactggagaatgagttaga

SEQ ID NO: 463660 - DNA, 25 bp, Artificial
  probe
  misc_feature (1)..(25): SEQ ID NO: 7278; WAN024BWX; Start 5; Stop 29
cagaacaatacagagacattcgcaa

SEQ ID NO: 463661 - DNA, 25 bp, Artificial
  probe
  misc_feature (1)..(25): SEQ ID NO: 7278; WAN024BWX; Start 264; Stop 288
atccattctcttaacctgtgttcag

SEQ ID NO: 463662 - DNA, 25 bp, Artificial
  probe
  misc_feature (1)..(25): SEQ ID NO: 7278; WAN024BWX; Start 118; Stop 142
aacaagttactggagaatgagttag

SEQ ID NO: 463663 - DNA, 25 bp, Artificial
  probe
  misc_feature (1)..(25): SEQ ID NO: 7278; WAN024BWX; Start 1; Stop 25
gtgccagaacaatacagagacattc

SEQ ID NO: 463664 - DNA, 25 bp, Artificial
  probe
  misc_feature (1)..(25): SEQ ID NO: 7278; WAN024BWX; Start 259; Stop 283
catgtatccattctcttaacctgtg

SEQ ID NO: 463665 - DNA, 25 bp, Artificial
  probe
  misc_feature (1)..(25): SEQ ID NO: 7278; WAN024BWX; Start 120; Stop 144
caagttactggagaatgagttagaa

SEQ ID NO: 463666 - DNA, 25 bp, Artificial
  probe
  misc_feature (1)..(25): SEQ ID NO: 7278; WAN024BWX; Start 279; Stop 303
ctgtgttcaggaattgattcaagaa

SEQ ID NO: 463667 - DNA, 25 bp, Artificial
  probe
  misc_feature (1)..(25): SEQ ID NO: 7278; WAN024BWX; Start 17; Stop 41
gagacattcgcaaagaggttaattt

SEQ ID NO: 463668 - DNA, 25 bp, Artificial
  probe
  misc_feature (1)..(25): SEQ ID NO: 7278; WAN024BWX; Start 8; Stop 32
aacaatacagagacattcgcaaaga

SEQ ID NO: 463669 - DNA, 25 bp, Artificial
  probe
  misc_feature (1)..(25): SEQ ID NO: 7278; WAN024BWX; Start 16; Stop 40
agagacattcgcaaagaggttaatt

SEQ ID NO: 463670 - DNA, 25 bp, Artificial
  probe
  misc_feature (1)..(25): SEQ ID NO: 7278; WAN024BWX; Start 221; Stop 245
taatcttatcaagggcagaacatca

SEQ ID NO: 463671 - DNA, 25 bp, Artificial
  probe
  misc_feature (1)..(25): SEQ ID NO: 7278; WAN024BWX; Start 222; Stop 246
aatcttatcaagggcagaacatcaa

SEQ ID NO: 463672 - DNA, 25 bp, Artificial
  probe
  misc_feature (1)..(25): SEQ ID NO: 7278; WAN024BWX; Start 7; Stop 31
gaacaatacagagacattcgcaaag

SEQ ID NO: 463673 - DNA, 25 bp, Artificial
  probe
  misc_feature (1)..(25): SEQ ID NO: 7278; WAN024BWX; Start 103; Stop 127
tcttcatttgccagaaacaagttac

SEQ ID NO: 463674 - DNA, 25 bp, Artificial
  probe
  misc_feature (1)..(25): SEQ ID NO: 7278; WAN024BWX; Start 104; Stop 128
cttcatttgccagaaacaagttact

SEQ ID NO: 463675 - DNA, 25 bp, Artificial
  probe
  misc_feature (1)..(25): SEQ ID NO: 7278; WAN024BWX; Start 223; Stop 247
atcttatcaagggcagaacatcaag

SEQ ID NO: 463676 - DNA, 25 bp, Artificial
  probe
  misc_feature (1)..(25): SEQ ID NO: 7278; WAN024BWX; Start 6; Stop 30
agaacaatacagagacattcgcaaa

SEQ ID NO: 463677 - DNA, 25 bp, Artificial
  probe
  misc_feature (1)..(25): SEQ ID NO: 7278; WAN024BWX; Start 9; Stop 33
acaatacagagacattcgcaaagag

SEQ ID NO: 463678 - DNA, 25 bp, Artificial
  probe
  misc_feature (1)..(25): SEQ ID NO: 7278; WAN024BWX; Start 293; Stop 317
tgattcaagaaatagggaactccat

SEQ ID NO: 463679 - DNA, 25 bp, Artificial
  probe
  misc_feature (1)..(25): SEQ ID NO: 7278; WAN024BWX; Start 131; Stop 155
agaatgagttagaaatgactgctga

SEQ ID NO: 463680 - DNA, 25 bp, Artificial
  probe
  misc_feature (1)..(25): SEQ ID NO: 7278; WAN024BWX; Start 130; Stop 154
gagaatgagttagaaatgactgctg

SEQ ID NO: 463681 - DNA, 25 bp, Artificial
  probe
  misc_feature (1)..(25): SEQ ID NO: 7278; WAN024BWX; Start 115; Stop 139
agaaacaagttactggagaatgagt

SEQ ID NO: 463682 - DNA, 25 bp, Artificial
  probe
  misc_feature (1)..(25): SEQ ID NO: 7278; WAN024BWX; Start 15; Stop 39
cagagacattcgcaaagaggttaat

SEQ ID NO: 463683 - DNA, 25 bp, Artificial
  probe
  misc_feature (1)..(25): SEQ ID NO: 7278; WAN024BWX; Start 220; Stop 244
ttaatcttatcaagggcagaacatc

SEQ ID NO: 463684 - DNA, 25 bp, Artificial
  probe
  misc_feature (1)..(25): SEQ ID NO: 7278; WAN024BWX; Start 309; Stop 333
gaactccattcctcttagtcaagac

SEQ ID NO: 463685 - DNA, 25 bp, Artificial
  probe
  misc_feature (1)..(25): SEQ ID NO: 7278; WAN024BWX; Start 132; Stop 156
gaatgagttagaaatgactgctgaa

SEQ ID NO: 463686 - DNA, 25 bp, Artificial
  probe
  misc_feature (1)..(25): SEQ ID NO: 7278; WAN024BWX; Start 129; Stop 153
ggagaatgagttagaaatgactgct

SEQ ID NO: 463687 - DNA, 25 bp, Artificial
  probe
  misc_feature (1)..(25): SEQ ID NO: 7278; WAN024BWX; Start 126; Stop 150
actggagaatgagttagaaatgact

SEQ ID NO: 463688 - DNA, 25 bp, Artificial
  probe
  misc_feature (1)..(25): SEQ ID NO: 7279; WAN024BM7; Start 67; Stop 91
cattcactactagatcaaagtttgg

SEQ ID NO: 463689 - DNA, 25 bp, Artificial
  probe
  misc_feature (1)..(25): SEQ ID NO: 7279; WAN024BM7; Start 69; Stop 93
ttcactactagatcaaagtttggat

SEQ ID NO: 463690 - DNA, 25 bp, Artificial
  probe
  misc_feature (1)..(25): SEQ ID NO: 7279; WAN024BM7; Start 68; Stop 92
attcactactagatcaaagtttgga

SEQ ID NO: 463691 - DNA, 25 bp, Artificial
  probe
  misc_feature (1)..(25): SEQ ID NO: 7279; WAN024BM7; Start 66; Stop 90
acattcactactagatcaaagtttg

SEQ ID NO: 463692 - DNA, 25 bp, Artificial
  probe
  misc_feature (1)..(25): SEQ ID NO: 7279; WAN024BM7; Start 70; Stop 94
tcactactagatcaaagtttggata

SEQ ID NO: 463693 - DNA, 25 bp, Artificial
  probe
  misc_feature (1)..(25): SEQ ID NO: 7279; WAN024BM7; Start 4; Stop 28
ccctctgagattttagaacacgatg

SEQ ID NO: 463694 - DNA, 25 bp, Artificial
  probe
  misc_feature (1)..(25): SEQ ID NO: 7279; WAN024BM7; Start 50; Stop 74
tcctccttttacaaatacattcact

SEQ ID NO: 463695 - DNA, 25 bp, Artificial
  probe
  misc_feature (1)..(25): SEQ ID NO: 7279; WAN024BM7; Start 5; Stop 29
cctctgagattttagaacacgatgt

SEQ ID NO: 463696 - DNA, 25 bp, Artificial
  probe
  misc_feature (1)..(25): SEQ ID NO: 7279; WAN024BM7; Start 49; Stop 73
ctcctccttttacaaatacattcac

SEQ ID NO: 463697 - DNA, 25 bp, Artificial
  probe
  misc_feature (1)..(25): SEQ ID NO: 7279; WAN024BM7; Start 48; Stop 72
tctcctccttttacaaatacattca

SEQ ID NO: 463698 - DNA, 25 bp, Artificial
  probe
  misc_feature (1)..(25): SEQ ID NO: 7279; WAN024BM7; Start 6; Stop 30
ctctgagattttagaacacgatgta

SEQ ID NO: 463699 - DNA, 25 bp, Artificial
  probe
  misc_feature (1)..(25): SEQ ID NO: 7279; WAN024BM7; Start 39; Stop 63
agggaaaattctcctccttttacaa

SEQ ID NO: 463700 - DNA, 25 bp, Artificial
  probe
  misc_feature (1)..(25): SEQ ID NO: 7279; WAN024BM7; Start 40; Stop 64
gggaaaattctcctccttttacaaa

SEQ ID NO: 463701 - DNA, 25 bp, Artificial
  probe
  misc_feature (1)..(25): SEQ ID NO: 7279; WAN024BM7; Start 71; Stop 95
cactactagatcaaagtttggataa

SEQ ID NO: 463702 - DNA, 25 bp, Artificial
  probe
  misc_feature (1)..(25): SEQ ID NO: 7279; WAN024BM7; Start 7; Stop 31
tctgagattttagaacacgatgtac

SEQ ID NO: 463703 - DNA, 25 bp, Artificial
  probe
  misc_feature (1)..(25): SEQ ID NO: 7279; WAN024BM7; Start 3; Stop 27
gccctctgagattttagaacacgat

SEQ ID NO: 463704 - DNA, 25 bp, Artificial
  probe
  misc_feature (1)..(25): SEQ ID NO: 7279; WAN024BM7; Start 47; Stop 71
ttctcctccttttacaaatacattc

SEQ ID NO: 463705 - DNA, 25 bp, Artificial
  probe
  misc_feature (1)..(25): SEQ ID NO: 7279; WAN024BM7; Start 60; Stop 84
acaaatacattcactactagatcaa

SEQ ID NO: 463706 - DNA, 25 bp, Artificial
  probe
  misc_feature (1)..(25): SEQ ID NO: 7279; WAN024BM7; Start 16; Stop 40
ttagaacacgatgtacagcatcaag

SEQ ID NO: 463707 - DNA, 25 bp, Artificial
  probe
  misc_feature (1)..(25): SEQ ID NO: 7279; WAN024BM7; Start 29; Stop 53
tacagcatcaagggaaaattctcct

SEQ ID NO: 463708 - DNA, 25 bp, Artificial
  probe
  misc_feature (1)..(25): SEQ ID NO: 7279; WAN024BM7; Start 51; Stop 75
cctccttttacaaatacattcacta

SEQ ID NO: 463709 - DNA, 25 bp, Artificial
  probe
  misc_feature (1)..(25): SEQ ID NO: 7279; WAN024BM7; Start 28; Stop 52
gtacagcatcaagggaaaattctcc

SEQ ID NO: 463710 - DNA, 25 bp, Artificial
  probe
  misc_feature (1)..(25): SEQ ID NO: 7279; WAN024BM7; Start 41; Stop 65
ggaaaattctcctccttttacaaat

SEQ ID NO: 463711 - DNA, 25 bp, Artificial
  probe
  misc_feature (1)..(25): SEQ ID NO: 7279; WAN024BM7; Start 65; Stop 89
tacattcactactagatcaaagttt

SEQ ID NO: 463712 - DNA, 25 bp, Artificial
  probe
  misc_feature (1)..(25): SEQ ID NO: 7279; WAN024BM7; Start 44; Stop 68
aaattctcctccttttacaaataca

SEQ ID NO: 463713 - DNA, 25 bp, Artificial
  probe
  misc_feature (1)..(25): SEQ ID NO: 7279; WAN024BM7; Start 72; Stop 96
actactagatcaaagtttggataaa

SEQ ID NO: 463714 - DNA, 25 bp, Artificial
  probe
  misc_feature (1)..(25): SEQ ID NO: 7279; WAN024BM7; Start 46; Stop 70
attctcctccttttacaaatacatt

SEQ ID NO: 463715 - DNA, 25 bp, Artificial
  probe
  misc_feature (1)..(25): SEQ ID NO: 7279; WAN024BM7; Start 64; Stop 88
atacattcactactagatcaaagtt

SEQ ID NO: 463716 - DNA, 25 bp, Artificial
  probe
  misc_feature (1)..(25): SEQ ID NO: 7279; WAN024BM7; Start 63; Stop 87
aatacattcactactagatcaaagt

SEQ ID NO: 463717 - DNA, 25 bp, Artificial
  probe
  misc_feature (1)..(25): SEQ ID NO: 7279; WAN024BM7; Start 45; Stop 69
aattctcctccttttacaaatacat

SEQ ID NO: 463718 - DNA, 25 bp, Artificial
  probe
  misc_feature (1)..(25): SEQ ID NO: 7279; WAN024BM7; Start 17; Stop 41
tagaacacgatgtacagcatcaagg

SEQ ID NO: 463719 - DNA, 25 bp, Artificial
  probe
  misc_feature (1)..(25): SEQ ID NO: 7279; WAN024BM7; Start 30; Stop 54
acagcatcaagggaaaattctcctc

SEQ ID NO: 463720 - DNA, 25 bp, Artificial
  probe
  misc_feature (1)..(25): SEQ ID NO: 7279; WAN024BM7; Start 53; Stop 77
tccttttacaaatacattcactact

SEQ ID NO: 463721 - DNA, 25 bp, Artificial
  probe
  misc_feature (1)..(25): SEQ ID NO: 7280; WAN024C2N; Start 88; Stop 112
cgaccttctactggtgtaattgtta

SEQ ID NO: 463722 - DNA, 25 bp, Artificial
  probe
  misc_feature (1)..(25): SEQ ID NO: 7280; WAN024C2N; Start 90; Stop 114
accttctactggtgtaattgttact

SEQ ID NO: 463723 - DNA, 25 bp, Artificial
  probe
  misc_feature (1)..(25): SEQ ID NO: 7280; WAN024C2N; Start 89; Stop 113
gaccttctactggtgtaattgttac

SEQ ID NO: 463724 - DNA, 25 bp, Artificial
  probe
  misc_feature (1)..(25): SEQ ID NO: 7280; WAN024C2N; Start 154; Stop 178
ttacctggagttcctggattacctt

SEQ ID NO: 463725 - DNA, 25 bp, Artificial
  probe
  misc_feature (1)..(25): SEQ ID NO: 7280; WAN024C2N; Start 158; Stop 182
ctggagttcctggattaccttgttc

SEQ ID NO: 463726 - DNA, 25 bp, Artificial
  probe
  misc_feature (1)..(25): SEQ ID NO: 7280; WAN024C2N; Start 150; Stop 174
atctttacctggagttcctggatta

SEQ ID NO: 463727 - DNA, 25 bp, Artificial
  probe
  misc_feature (1)..(25): SEQ ID NO: 7280; WAN024C2N; Start 160; Stop 184
ggagttcctggattaccttgttctc

SEQ ID NO: 463728 - DNA, 25 bp, Artificial
  probe
  misc_feature (1)..(25): SEQ ID NO: 7280; WAN024C2N; Start 163; Stop 187
gttcctggattaccttgttctcctt

SEQ ID NO: 463729 - DNA, 25 bp, Artificial
  probe
  misc_feature (1)..(25): SEQ ID NO: 7280; WAN024C2N; Start 87; Stop 111
acgaccttctactggtgtaattgtt

SEQ ID NO: 463730 - DNA, 25 bp, Artificial
  probe
  misc_feature (1)..(25): SEQ ID NO: 7280; WAN024C2N; Start 91; Stop 115
ccttctactggtgtaattgttacta

SEQ ID NO: 463731 - DNA, 25 bp, Artificial
  probe
  misc_feature (1)..(25): SEQ ID NO: 7280; WAN024C2N; Start 159; Stop 183
tggagttcctggattaccttgttct

SEQ ID NO: 463732 - DNA, 25 bp, Artificial
  probe
  misc_feature (1)..(25): SEQ ID NO: 7280; WAN024C2N; Start 151; Stop 175
tctttacctggagttcctggattac

SEQ ID NO: 463733 - DNA, 25 bp, Artificial
  probe
  misc_feature (1)..(25): SEQ ID NO: 7280; WAN024C2N; Start 155; Stop 179
tacctggagttcctggattaccttg

SEQ ID NO: 463734 - DNA, 25 bp, Artificial
  probe
  misc_feature (1)..(25): SEQ ID NO: 7280; WAN024C2N; Start 161; Stop 185
gagttcctggattaccttgttctcc

SEQ ID NO: 463735 - DNA, 25 bp, Artificial
  probe
  misc_feature (1)..(25): SEQ ID NO: 7280; WAN024C2N; Start 86; Stop 110
gacgaccttctactggtgtaattgt

SEQ ID NO: 463736 - DNA, 25 bp, Artificial
  probe
  misc_feature (1)..(25): SEQ ID NO: 7280; WAN024C2N; Start 149; Stop 173
catctttacctggagttcctggatt

SEQ ID NO: 463737 - DNA, 25 bp, Artificial
  probe
  misc_feature (1)..(25): SEQ ID NO: 7280; WAN024C2N; Start 162; Stop 186
agttcctggattaccttgttctcct

SEQ ID NO: 463738 - DNA, 25 bp, Artificial
  probe
  misc_feature (1)..(25): SEQ ID NO: 7280; WAN024C2N; Start 152; Stop 176
ctttacctggagttcctggattacc

SEQ ID NO: 463739 - DNA, 25 bp, Artificial
  probe
  misc_feature (1)..(25): SEQ ID NO: 7280; WAN024C2N; Start 73; Stop 97
aatgttgtttgtggacgaccttcta

SEQ ID NO: 463740 - DNA, 25 bp, Artificial
  probe
  misc_feature (1)..(25): SEQ ID NO: 7280; WAN024C2N; Start 85; Stop 109
ggacgaccttctactggtgtaattg

SEQ ID NO: 463741 - DNA, 25 bp, Artificial
  probe
  misc_feature (1)..(25): SEQ ID NO: 7280; WAN024C2N; Start 153; Stop 177
tttacctggagttcctggattacct

SEQ ID NO: 463742 - DNA, 25 bp, Artificial
  probe
  misc_feature (1)..(25): SEQ ID NO: 7280; WAN024C2N; Start 164; Stop 188
ttcctggattaccttgttctccttt

SEQ ID NO: 463743 - DNA, 25 bp, Artificial
  probe
  misc_feature (1)..(25): SEQ ID NO: 7280; WAN024C2N; Start 157; Stop 181
cctggagttcctggattaccttgtt

SEQ ID NO: 463744 - DNA, 25 bp, Artificial
  probe
  misc_feature (1)..(25): SEQ ID NO: 7280; WAN024C2N; Start 84; Stop 108
tggacgaccttctactggtgtaatt

SEQ ID NO: 463745 - DNA, 25 bp, Artificial
  probe
  misc_feature (1)..(25): SEQ ID NO: 7280; WAN024C2N; Start 74; Stop 98
atgttgtttgtggacgaccttctac

SEQ ID NO: 463746 - DNA, 25 bp, Artificial
  probe
  misc_feature (1)..(25): SEQ ID NO: 7280; WAN024C2N; Start 72; Stop 96
aaatgttgtttgtggacgaccttct

SEQ ID NO: 463747 - DNA, 25 bp, Artificial
  probe
  misc_feature (1)..(25): SEQ ID NO: 7280; WAN024C2N; Start 92; Stop 116
cttctactggtgtaattgttactaa

SEQ ID NO: 463748 - DNA, 25 bp, Artificial
  probe
  misc_feature (1)..(25): SEQ ID NO: 7280; WAN024C2N; Start 83; Stop 107
gtggacgaccttctactggtgtaat

SEQ ID NO: 463749 - DNA, 25 bp, Artificial
  probe
  misc_feature (1)..(25): SEQ ID NO: 7280; WAN024C2N; Start 76; Stop 100
gttgtttgtggacgaccttctactg

SEQ ID NO: 463750 - DNA, 25 bp, Artificial
  probe
  misc_feature (1)..(25): SEQ ID NO: 7280; WAN024C2N; Start 14; Stop 38
cctcagttattgttactgttggagt

SEQ ID NO: 463751 - DNA, 25 bp, Artificial
  probe
  misc_feature (1)..(25): SEQ ID NO: 7280; WAN024C2N; Start 15; Stop 39
ctcagttattgttactgttggagtt

SEQ ID NO: 463752 - DNA, 25 bp, Artificial
  probe
  misc_feature (1)..(25): SEQ ID NO: 7280; WAN024C2N; Start 6; Stop 30
gttttgcccctcagttattgttact

SEQ ID NO: 463753 - DNA, 25 bp, Artificial
  probe
  misc_feature (1)..(25): SEQ ID NO: 7280; WAN024C2N; Start 59; Stop 83
gtccatcctctacaaatgttgtttg

SEQ ID NO: 463754 - DNA, 25 bp, Artificial
  probe
  misc_feature (1)..(25): SEQ ID NO: 7281; WAN024BGC; Start 5; Stop 29
gagaataccgcacttatgaacaaat

SEQ ID NO: 463755 - DNA, 25 bp, Artificial
  probe
  misc_feature (1)..(25): SEQ ID NO: 7281; WAN024BGC; Start 7; Stop 31
gaataccgcacttatgaacaaattg

SEQ ID NO: 463756 - DNA, 25 bp, Artificial
  probe
  misc_feature (1)..(25): SEQ ID NO: 7281; WAN024BGC; Start 6; Stop 30
agaataccgcacttatgaacaaatt

SEQ ID NO: 463757 - DNA, 25 bp, Artificial
  probe
  misc_feature (1)..(25): SEQ ID NO: 7281; WAN024BGC; Start 4; Stop 28
cgagaataccgcacttatgaacaaa

SEQ ID NO: 463758 - DNA, 25 bp, Artificial
  probe
  misc_feature (1)..(25): SEQ ID NO: 7281; WAN024BGC; Start 8; Stop 32
aataccgcacttatgaacaaattgc

SEQ ID NO: 463759 - DNA, 25 bp, Artificial
  probe
  misc_feature (1)..(25): SEQ ID NO: 7281; WAN024BGC; Start 3; Stop 27
gcgagaataccgcacttatgaacaa

SEQ ID NO: 463760 - DNA, 25 bp, Artificial
  probe
  misc_feature (1)..(25): SEQ ID NO: 7282; WAN024BGD; Start 130; Stop 154
cttagtgctgagaatacggtgattg

SEQ ID NO: 463761 - DNA, 25 bp, Artificial
  probe
  misc_feature (1)..(25): SEQ ID NO: 7282; WAN024BGD; Start 128; Stop 152
atcttagtgctgagaatacggtgat

SEQ ID NO: 463762 - DNA, 25 bp, Artificial
  probe
  misc_feature (1)..(25): SEQ ID NO: 7282; WAN024BGD; Start 129; Stop 153
tcttagtgctgagaatacggtgatt

SEQ ID NO: 463763 - DNA, 25 bp, Artificial
  probe
  misc_feature (1)..(25): SEQ ID NO: 7282; WAN024BGD; Start 131; Stop 155
ttagtgctgagaatacggtgattgt

SEQ ID NO: 463764 - DNA, 25 bp, Artificial
  probe
  misc_feature (1)..(25): SEQ ID NO: 7282; WAN024BGD; Start 127; Stop 151
catcttagtgctgagaatacggtga

SEQ ID NO: 463765 - DNA, 25 bp, Artificial
  probe
  misc_feature (1)..(25): SEQ ID NO: 7282; WAN024BGD; Start 132; Stop 156
tagtgctgagaatacggtgattgtg

SEQ ID NO: 463766 - DNA, 25 bp, Artificial
  probe
  misc_feature (1)..(25): SEQ ID NO: 7282; WAN024BGD; Start 126; Stop 150
tcatcttagtgctgagaatacggtg

SEQ ID NO: 463767 - DNA, 25 bp, Artificial
  probe
  misc_feature (1)..(25): SEQ ID NO: 7282; WAN024BGD; Start 98; Stop 122
ttcaaagtggtgttacgatttcaaa

SEQ ID NO: 463768 - DNA, 25 bp, Artificial
  probe
  misc_feature (1)..(25): SEQ ID NO: 7282; WAN024BGD; Start 5; Stop 29
gagaataccgcacttatgaagaaat

SEQ ID NO: 463769 - DNA, 25 bp, Artificial
  probe
  misc_feature (1)..(25): SEQ ID NO: 7282; WAN024BGD; Start 9; Stop 33
ataccgcacttatgaagaaattacg

SEQ ID NO: 463770 - DNA, 25 bp, Artificial
  probe
  misc_feature (1)..(25): SEQ ID NO: 7282; WAN024BGD; Start 15; Stop 39
cacttatgaagaaattacggctgat

SEQ ID NO: 463771 - DNA, 25 bp, Artificial
  probe
  misc_feature (1)..(25): SEQ ID NO: 7282; WAN024BGD; Start 4; Stop 28
cgagaataccgcacttatgaagaaa

SEQ ID NO: 463772 - DNA, 25 bp, Artificial
  probe
  misc_feature (1)..(25): SEQ ID NO: 7282; WAN024BGD; Start 16; Stop 40
acttatgaagaaattacggctgatt

SEQ ID NO: 463773 - DNA, 25 bp, Artificial
  probe
  misc_feature (1)..(25): SEQ ID NO: 7282; WAN024BGD; Start 14; Stop 38
gcacttatgaagaaattacggctga

SEQ ID NO: 463774 - DNA, 25 bp, Artificial
  probe
  misc_feature (1)..(25): SEQ ID NO: 7282; WAN024BGD; Start 43; Stop 67
ggtatccacgaaagcaacttaatcc

SEQ ID NO: 463775 - DNA, 25 bp, Artificial
  probe
  misc_feature (1)..(25): SEQ ID NO: 7282; WAN024BGD; Start 137; Stop 161
ctgagaatacggtgattgtggatgc

SEQ ID NO: 463776 - DNA, 25 bp, Artificial
  probe
  misc_feature (1)..(25): SEQ ID NO: 7282; WAN024BGD; Start 136; Stop 160
gctgagaatacggtgattgtggatg

SEQ ID NO: 463777 - DNA, 25 bp, Artificial
  probe
  misc_feature (1)..(25): SEQ ID NO: 7282; WAN024BGD; Start 8; Stop 32
aataccgcacttatgaagaaattac

SEQ ID NO: 463778 - DNA, 25 bp, Artificial
  probe
  misc_feature (1)..(25): SEQ ID NO: 7282; WAN024BGD; Start 44; Stop 68
gtatccacgaaagcaacttaatccg

SEQ ID NO: 463779 - DNA, 25 bp, Artificial
  probe
  misc_feature (1)..(25): SEQ ID NO: 7282; WAN024BGD; Start 17; Stop 41
cttatgaagaaattacggctgattt

SEQ ID NO: 463780 - DNA, 25 bp, Artificial
  probe
  misc_feature (1)..(25): SEQ ID NO: 7282; WAN024BGD; Start 7; Stop 31
gaataccgcacttatgaagaaatta

SEQ ID NO: 463781 - DNA, 25 bp, Artificial
  probe
  misc_feature (1)..(25): SEQ ID NO: 7282; WAN024BGD; Start 41; Stop 65
ttggtatccacgaaagcaacttaat

SEQ ID NO: 463782 - DNA, 25 bp, Artificial
  probe
  misc_feature (1)..(25): SEQ ID NO: 7282; WAN024BGD; Start 135; Stop 159
tgctgagaatacggtgattgtggat

SEQ ID NO: 463783 - DNA, 25 bp, Artificial
  probe
  misc_feature (1)..(25): SEQ ID NO: 7282; WAN024BGD; Start 40; Stop 64
tttggtatccacgaaagcaacttaa

SEQ ID NO: 463784 - DNA, 25 bp, Artificial
  probe
  misc_feature (1)..(25): SEQ ID NO: 7282; WAN024BGD; Start 42; Stop 66
tggtatccacgaaagcaacttaatc

SEQ ID NO: 463785 - DNA, 25 bp, Artificial
  probe
  misc_feature (1)..(25): SEQ ID NO: 7282; WAN024BGD; Start 13; Stop 37
cgcacttatgaagaaattacggctg

SEQ ID NO: 463786 - DNA, 25 bp, Artificial
  probe
  misc_feature (1)..(25): SEQ ID NO: 7282; WAN024BGD; Start 123; Stop 147
aactcatcttagtgctgagaatacg

SEQ ID NO: 463787 - DNA, 25 bp, Artificial
  probe
  misc_feature (1)..(25): SEQ ID NO: 7282; WAN024BGD; Start 99; Stop 123
tcaaagtggtgttacgatttcaaaa

SEQ ID NO: 463788 - DNA, 25 bp, Artificial
  probe
  misc_feature (1)..(25): SEQ ID NO: 7282; WAN024BGD; Start 139; Stop 163
gagaatacggtgattgtggatgcaa

SEQ ID NO: 463789 - DNA, 25 bp, Artificial
  probe
  misc_feature (1)..(25): SEQ ID NO: 7282; WAN024BGD; Start 140; Stop 164
agaatacggtgattgtggatgcaac

SEQ ID NO: 463790 - DNA, 25 bp, Artificial
  probe
  misc_feature (1)..(25): SEQ ID NO: 7282; WAN024BGD; Start 125; Stop 149
ctcatcttagtgctgagaatacggt

SEQ ID NO: 463791 - DNA, 25 bp, Artificial
  probe
  misc_feature (1)..(25): SEQ ID NO: 7282; WAN024BGD; Start 124; Stop 148
actcatcttagtgctgagaatacgg

SEQ ID NO: 463792 - DNA, 25 bp, Artificial
  probe
  misc_feature (1)..(25): SEQ ID NO: 7282; WAN024BGD; Start 22; Stop 46
gaagaaattacggctgattttggta

SEQ ID NO: 463793 - DNA, 25 bp, Artificial
  probe
  misc_feature (1)..(25): SEQ ID NO: 7283; WAN024BXE; Start 76; Stop 100
actgtaaggatacctatcgttgttg

SEQ ID NO: 463794 - DNA, 25 bp, Artificial
  probe
  misc_feature (1)..(25): SEQ ID NO: 7283; WAN024BXE; Start 75; Stop 99
tactgtaaggatacctatcgttgtt

SEQ ID NO: 463795 - DNA, 25 bp, Artificial
  probe
  misc_feature (1)..(25): SEQ ID NO: 7283; WAN024BXE; Start 74; Stop 98
ttactgtaaggatacctatcgttgt

SEQ ID NO: 463796 - DNA, 25 bp, Artificial
  probe
  misc_feature (1)..(25): SEQ ID NO: 7283; WAN024BXE; Start 77; Stop 101
ctgtaaggatacctatcgttgttgc

SEQ ID NO: 463797 - DNA, 25 bp, Artificial
  probe
  misc_feature (1)..(25): SEQ ID NO: 7283; WAN024BXE; Start 65; Stop 89
tcatcaagattactgtaaggatacc

SEQ ID NO: 463798 - DNA, 25 bp, Artificial
  probe
  misc_feature (1)..(25): SEQ ID NO: 7283; WAN024BXE; Start 46; Stop 70
acaacccaatcagacttattcatca

SEQ ID NO: 463799 - DNA, 25 bp, Artificial
  probe
  misc_feature (1)..(25): SEQ ID NO: 7283; WAN024BXE; Start 45; Stop 69
cacaacccaatcagacttattcatc

SEQ ID NO: 463800 - DNA, 25 bp, Artificial
  probe
  misc_feature (1)..(25): SEQ ID NO: 7283; WAN024BXE; Start 43; Stop 67
tacacaacccaatcagacttattca

SEQ ID NO: 463801 - DNA, 25 bp, Artificial
  probe
  misc_feature (1)..(25): SEQ ID NO: 7283; WAN024BXE; Start 44; Stop 68
acacaacccaatcagacttattcat

SEQ ID NO: 463802 - DNA, 25 bp, Artificial
  probe
  misc_feature (1)..(25): SEQ ID NO: 7283; WAN024BXE; Start 40; Stop 64
ggatacacaacccaatcagacttat

SEQ ID NO: 463803 - DNA, 25 bp, Artificial
  probe
  misc_feature (1)..(25): SEQ ID NO: 7283; WAN024BXE; Start 47; Stop 71
caacccaatcagacttattcatcaa

SEQ ID NO: 463804 - DNA, 25 bp, Artificial
  probe
  misc_feature (1)..(25): SEQ ID NO: 7283; WAN024BXE; Start 71; Stop 95
agattactgtaaggatacctatcgt

SEQ ID NO: 463805 - DNA, 25 bp, Artificial
  probe
  misc_feature (1)..(25): SEQ ID NO: 7283; WAN024BXE; Start 49; Stop 73
acccaatcagacttattcatcaaga

SEQ ID NO: 463806 - DNA, 25 bp, Artificial
  probe
  misc_feature (1)..(25): SEQ ID NO: 7283; WAN024BXE; Start 42; Stop 66
atacacaacccaatcagacttattc

SEQ ID NO: 463807 - DNA, 25 bp, Artificial
  probe
  misc_feature (1)..(25): SEQ ID NO: 7283; WAN024BXE; Start 39; Stop 63
aggatacacaacccaatcagactta

SEQ ID NO: 463808 - DNA, 25 bp, Artificial
  probe
  misc_feature (1)..(25): SEQ ID NO: 7283; WAN024BXE; Start 79; Stop 103
gtaaggatacctatcgttgttgcct

SEQ ID NO: 463809 - DNA, 25 bp, Artificial
  probe
  misc_feature (1)..(25): SEQ ID NO: 7283; WAN024BXE; Start 83; Stop 107
ggatacctatcgttgttgcctttaa

SEQ ID NO: 463810 - DNA, 25 bp, Artificial
  probe
  misc_feature (1)..(25): SEQ ID NO: 7283; WAN024BXE; Start 41; Stop 65
gatacacaacccaatcagacttatt

SEQ ID NO: 463811 - DNA, 25 bp, Artificial
  probe
  misc_feature (1)..(25): SEQ ID NO: 7283; WAN024BXE; Start 48; Stop 72
aacccaatcagacttattcatcaag

SEQ ID NO: 463812 - DNA, 25 bp, Artificial
  probe
  misc_feature (1)..(25): SEQ ID NO: 7283; WAN024BXE; Start 73; Stop 97
attactgtaaggatacctatcgttg

SEQ ID NO: 463813 - DNA, 25 bp, Artificial
  probe
  misc_feature (1)..(25): SEQ ID NO: 7283; WAN024BXE; Start 50; Stop 74
cccaatcagacttattcatcaagat

SEQ ID NO: 463814 - DNA, 25 bp, Artificial
  probe
  misc_feature (1)..(25): SEQ ID NO: 7283; WAN024BXE; Start 78; Stop 102
tgtaaggatacctatcgttgttgcc

SEQ ID NO: 463815 - DNA, 25 bp, Artificial
  probe
  misc_feature (1)..(25): SEQ ID NO: 7283; WAN024BXE; Start 66; Stop 90
catcaagattactgtaaggatacct

SEQ ID NO: 463816 - DNA, 25 bp, Artificial
  probe
  misc_feature (1)..(25): SEQ ID NO: 7283; WAN024BXE; Start 72; Stop 96
gattactgtaaggatacctatcgtt

SEQ ID NO: 463817 - DNA, 25 bp, Artificial
  probe
  misc_feature (1)..(25): SEQ ID NO: 7283; WAN024BXE; Start 70; Stop 94
aagattactgtaaggatacctatcg

SEQ ID NO: 463818 - DNA, 25 bp, Artificial
  probe
  misc_feature (1)..(25): SEQ ID NO: 7283; WAN024BXE; Start 84; Stop 108
gatacctatcgttgttgcctttaaa

SEQ ID NO: 463819 - DNA, 25 bp, Artificial
  probe
  misc_feature (1)..(25): SEQ ID NO: 7283; WAN024BXE; Start 38; Stop 62
caggatacacaacccaatcagactt

SEQ ID NO: 463820 - DNA, 25 bp, Artificial
  probe
  misc_feature (1)..(25): SEQ ID NO: 7283; WAN024BXE; Start 85; Stop 109
atacctatcgttgttgcctttaaac

SEQ ID NO: 463821 - DNA, 25 bp, Artificial
  probe
  misc_feature (1)..(25): SEQ ID NO: 7283; WAN024BXE; Start 82; Stop 106
aggatacctatcgttgttgccttta

SEQ ID NO: 463822 - DNA, 25 bp, Artificial
  probe
  misc_feature (1)..(25): SEQ ID NO: 7283; WAN024BXE; Start 56; Stop 80
cagacttattcatcaagattactgt

SEQ ID NO: 463823 - DNA, 25 bp, Artificial
  probe
  misc_feature (1)..(25): SEQ ID NO: 7283; WAN024BXE; Start 51; Stop 75
ccaatcagacttattcatcaagatt

SEQ ID NO: 463824 - DNA, 25 bp, Artificial
  probe
  misc_feature (1)..(25): SEQ ID NO: 7283; WAN024BXE; Start 64; Stop 88
ttcatcaagattactgtaaggatac

SEQ ID NO: 463825 - DNA, 25 bp, Artificial
  probe
  misc_feature (1)..(25): SEQ ID NO: 7283; WAN024BXE; Start 55; Stop 79
tcagacttattcatcaagattactg

SEQ ID NO: 463826 - DNA, 25 bp, Artificial
  probe
  misc_feature (1)..(25): SEQ ID NO: 7284; WAN024DUM; Start 40; Stop 64
aaggctccgctttctgatatagttt

SEQ ID NO: 463827 - DNA, 25 bp, Artificial
  probe
  misc_feature (1)..(25): SEQ ID NO: 7284; WAN024DUM; Start 10; Stop 34
gtttcagtgctatcaaggacaaaag

SEQ ID NO: 463828 - DNA, 25 bp, Artificial
  probe
  misc_feature (1)..(25): SEQ ID NO: 7284; WAN024DUM; Start 42; Stop 66
ggctccgctttctgatatagtttta

SEQ ID NO: 463829 - DNA, 25 bp, Artificial
  probe
  misc_feature (1)..(25): SEQ ID NO: 7284; WAN024DUM; Start 43; Stop 67
gctccgctttctgatatagttttaa

SEQ ID NO: 463830 - DNA, 25 bp, Artificial
  probe
  misc_feature (1)..(25): SEQ ID NO: 7284; WAN024DUM; Start 8; Stop 32
cggtttcagtgctatcaaggacaaa

SEQ ID NO: 463831 - DNA, 25 bp, Artificial
  probe
  misc_feature (1)..(25): SEQ ID NO: 7284; WAN024DUM; Start 39; Stop 63
aaaggctccgctttctgatatagtt

SEQ ID NO: 463832 - DNA, 25 bp, Artificial
  probe
  misc_feature (1)..(25): SEQ ID NO: 7284; WAN024DUM; Start 9; Stop 33
ggtttcagtgctatcaaggacaaaa

SEQ ID NO: 463833 - DNA, 25 bp, Artificial
  probe
  misc_feature (1)..(25): SEQ ID NO: 7284; WAN024DUM; Start 41; Stop 65
aggctccgctttctgatatagtttt

SEQ ID NO: 463834 - DNA, 25 bp, Artificial
  probe
  misc_feature (1)..(25): SEQ ID NO: 7284; WAN024DUM; Start 19; Stop 43
ctatcaaggacaaaagcacgaaagg

SEQ ID NO: 463835 - DNA, 25 bp, Artificial
  probe
  misc_feature (1)..(25): SEQ ID NO: 7284; WAN024DUM; Start 7; Stop 31
acggtttcagtgctatcaaggacaa

SEQ ID NO: 463836 - DNA, 25 bp, Artificial
  probe
  misc_feature (1)..(25): SEQ ID NO: 7284; WAN024DUM; Start 44; Stop 68
ctccgctttctgatatagttttaat

SEQ ID NO: 463837 - DNA, 25 bp, Artificial
  probe
  misc_feature (1)..(25): SEQ ID NO: 7284; WAN024DUM; Start 6; Stop 30
gacggtttcagtgctatcaaggaca

SEQ ID NO: 463838 - DNA, 25 bp, Artificial
  probe
  misc_feature (1)..(25): SEQ ID NO: 7284; WAN024DUM; Start 11; Stop 35
tttcagtgctatcaaggacaaaagc

SEQ ID NO: 463839 - DNA, 25 bp, Artificial
  probe
  misc_feature (1)..(25): SEQ ID NO: 7284; WAN024DUM; Start 20; Stop 44
tatcaaggacaaaagcacgaaaggc

SEQ ID NO: 463840 - DNA, 25 bp, Artificial
  probe
  misc_feature (1)..(25): SEQ ID NO: 7284; WAN024DUM; Start 45; Stop 69
tccgctttctgatatagttttaata

SEQ ID NO: 463841 - DNA, 25 bp, Artificial
  probe
  misc_feature (1)..(25): SEQ ID NO: 7284; WAN024DUM; Start 18; Stop 42
gctatcaaggacaaaagcacgaaag

SEQ ID NO: 463842 - DNA, 25 bp, Artificial
  probe
  misc_feature (1)..(25): SEQ ID NO: 7284; WAN024DUM; Start 46; Stop 70
ccgctttctgatatagttttaataa

SEQ ID NO: 463843 - DNA, 25 bp, Artificial
  probe
  misc_feature (1)..(25): SEQ ID NO: 7284; WAN024DUM; Start 72; Stop 96
tttatccatagctactattttagca

SEQ ID NO: 463844 - DNA, 25 bp, Artificial
  probe
  misc_feature (1)..(25): SEQ ID NO: 7285; WAN024GIC; Start 256; Stop 280
gtcttcctcaacaatcctatctacc

SEQ ID NO: 463845 - DNA, 25 bp, Artificial
  probe
  misc_feature (1)..(25): SEQ ID NO: 7285; WAN024GIC; Start 255; Stop 279
cgtcttcctcaacaatcctatctac

SEQ ID NO: 463846 - DNA, 25 bp, Artificial
  probe
  misc_feature (1)..(25): SEQ ID NO: 7285; WAN024GIC; Start 251; Stop 275
ataccgtcttcctcaacaatcctat

SEQ ID NO: 463847 - DNA, 25 bp, Artificial
  probe
  misc_feature (1)..(25): SEQ ID NO: 7285; WAN024GIC; Start 250; Stop 274
aataccgtcttcctcaacaatccta

SEQ ID NO: 463848 - DNA, 25 bp, Artificial
  probe
  misc_feature (1)..(25): SEQ ID NO: 7285; WAN024GIC; Start 254; Stop 278
ccgtcttcctcaacaatcctatcta

SEQ ID NO: 463849 - DNA, 25 bp, Artificial
  probe
  misc_feature (1)..(25): SEQ ID NO: 7285; WAN024GIC; Start 252; Stop 276
taccgtcttcctcaacaatcctatc

SEQ ID NO: 463850 - DNA, 25 bp, Artificial
  probe
  misc_feature (1)..(25): SEQ ID NO: 7285; WAN024GIC; Start 266; Stop 290
acaatcctatctacccgacaatcta

SEQ ID NO: 463851 - DNA, 25 bp, Artificial
  probe
  misc_feature (1)..(25): SEQ ID NO: 7285; WAN024GIC; Start 267; Stop 291
caatcctatctacccgacaatctaa

SEQ ID NO: 463852 - DNA, 25 bp, Artificial
  probe
  misc_feature (1)..(25): SEQ ID NO: 7285; WAN024GIC; Start 94; Stop 118
cttcatatctacacgcttgtccaga

SEQ ID NO: 463853 - DNA, 25 bp, Artificial
  probe
  misc_feature (1)..(25): SEQ ID NO: 7285; WAN024GIC; Start 265; Stop 289
aacaatcctatctacccgacaatct

SEQ ID NO: 463854 - DNA, 25 bp, Artificial
  probe
  misc_feature (1)..(25): SEQ ID NO: 7285; WAN024GIC; Start 264; Stop 288
caacaatcctatctacccgacaatc

SEQ ID NO: 463855 - DNA, 25 bp, Artificial
  probe
  misc_feature (1)..(25): SEQ ID NO: 7285; WAN024GIC; Start 257; Stop 281
tcttcctcaacaatcctatctaccc

SEQ ID NO: 463856 - DNA, 25 bp, Artificial
  probe
  misc_feature (1)..(25): SEQ ID NO: 7285; WAN024GIC; Start 253; Stop 277
accgtcttcctcaacaatcctatct

SEQ ID NO: 463857 - DNA, 25 bp, Artificial
  probe
  misc_feature (1)..(25): SEQ ID NO: 7285; WAN024GIC; Start 263; Stop 287
tcaacaatcctatctacccgacaat

SEQ ID NO: 463858 - DNA, 25 bp, Artificial
  probe
  misc_feature (1)..(25): SEQ ID NO: 7285; WAN024GIC; Start 262; Stop 286
ctcaacaatcctatctacccgacaa

SEQ ID NO: 463859 - DNA, 25 bp, Artificial
  probe
  misc_feature (1)..(25): SEQ ID NO: 7285; WAN024GIC; Start 249; Stop 273
aaataccgtcttcctcaacaatcct

SEQ ID NO: 463860 - DNA, 25 bp, Artificial
  probe
  misc_feature (1)..(25): SEQ ID NO: 7285; WAN024GIC; Start 248; Stop 272
caaataccgtcttcctcaacaatcc

SEQ ID NO: 463861 - DNA, 25 bp, Artificial
  probe
  misc_feature (1)..(25): SEQ ID NO: 7285; WAN024GIC; Start 95; Stop 119
ttcatatctacacgcttgtccagat

SEQ ID NO: 463862 - DNA, 25 bp, Artificial
  probe
  misc_feature (1)..(25): SEQ ID NO: 7285; WAN024GIC; Start 137; Stop 161
tatccatctcccatgaaataggttg

SEQ ID NO: 463863 - DNA, 25 bp, Artificial
  probe
  misc_feature (1)..(25): SEQ ID NO: 7285; WAN024GIC; Start 93; Stop 117
ccttcatatctacacgcttgtccag

SEQ ID NO: 463864 - DNA, 25 bp, Artificial
  probe
  misc_feature (1)..(25): SEQ ID NO: 7285; WAN024GIC; Start 258; Stop 282
cttcctcaacaatcctatctacccg

SEQ ID NO: 463865 - DNA, 25 bp, Artificial
  probe
  misc_feature (1)..(25): SEQ ID NO: 7285; WAN024GIC; Start 136; Stop 160
atatccatctcccatgaaataggtt

SEQ ID NO: 463866 - DNA, 25 bp, Artificial
  probe
  misc_feature (1)..(25): SEQ ID NO: 7285; WAN024GIC; Start 247; Stop 271
gcaaataccgtcttcctcaacaatc

SEQ ID NO: 463867 - DNA, 25 bp, Artificial
  probe
  misc_feature (1)..(25): SEQ ID NO: 7285; WAN024GIC; Start 259; Stop 283
ttcctcaacaatcctatctacccga

SEQ ID NO: 463868 - DNA, 25 bp, Artificial
  probe
  misc_feature (1)..(25): SEQ ID NO: 7285; WAN024GIC; Start 132; Stop 156
gctgatatccatctcccatgaaata

SEQ ID NO: 463869 - DNA, 25 bp, Artificial
  probe
  misc_feature (1)..(25): SEQ ID NO: 7285; WAN024GIC; Start 97; Stop 121
catatctacacgcttgtccagatag

SEQ ID NO: 463870 - DNA, 25 bp, Artificial
  probe
  misc_feature (1)..(25): SEQ ID NO: 7285; WAN024GIC; Start 260; Stop 284
tcctcaacaatcctatctacccgac

SEQ ID NO: 463871 - DNA, 25 bp, Artificial
  probe
  misc_feature (1)..(25): SEQ ID NO: 7285; WAN024GIC; Start 135; Stop 159
gatatccatctcccatgaaataggt

SEQ ID NO: 463872 - DNA, 25 bp, Artificial
  probe
  misc_feature (1)..(25): SEQ ID NO: 7285; WAN024GIC; Start 134; Stop 158
tgatatccatctcccatgaaatagg

SEQ ID NO: 463873 - DNA, 25 bp, Artificial
  probe
  misc_feature (1)..(25): SEQ ID NO: 7285; WAN024GIC; Start 96; Stop 120
tcatatctacacgcttgtccagata

SEQ ID NO: 463874 - DNA, 25 bp, Artificial
  probe
  misc_feature (1)..(25): SEQ ID NO: 7285; WAN024GIC; Start 49; Stop 73
tcagttcttgccatccttcttcctc

SEQ ID NO: 463875 - DNA, 25 bp, Artificial
  probe
  misc_feature (1)..(25): SEQ ID NO: 7285; WAN024GIC; Start 48; Stop 72
ctcagttcttgccatccttcttcct

SEQ ID NO: 463876 - DNA, 25 bp, Artificial
  probe
  misc_feature (1)..(25): SEQ ID NO: 7285; WAN024GIC; Start 261; Stop 285
cctcaacaatcctatctacccgaca

SEQ ID NO: 463877 - DNA, 25 bp, Artificial
  probe
  misc_feature (1)..(25): SEQ ID NO: 7286; WAN024BZO; Start 18; Stop 42
atctacaagcctaatcgtgactaag

SEQ ID NO: 463878 - DNA, 25 bp, Artificial
  probe
  misc_feature (1)..(25): SEQ ID NO: 7286; WAN024BZO; Start 14; Stop 38
ttctatctacaagcctaatcgtgac

SEQ ID NO: 463879 - DNA, 25 bp, Artificial
  probe
  misc_feature (1)..(25): SEQ ID NO: 7286; WAN024BZO; Start 13; Stop 37
gttctatctacaagcctaatcgtga

SEQ ID NO: 463880 - DNA, 25 bp, Artificial
  probe
  misc_feature (1)..(25): SEQ ID NO: 7286; WAN024BZO; Start 12; Stop 36
agttctatctacaagcctaatcgtg

SEQ ID NO: 463881 - DNA, 25 bp, Artificial
  probe
  misc_feature (1)..(25): SEQ ID NO: 7286; WAN024BZO; Start 20; Stop 44
ctacaagcctaatcgtgactaagat

SEQ ID NO: 463882 - DNA, 25 bp, Artificial
  probe
  misc_feature (1)..(25): SEQ ID NO: 7286; WAN024BZO; Start 15; Stop 39
tctatctacaagcctaatcgtgact

SEQ ID NO: 463883 - DNA, 25 bp, Artificial
  probe
  misc_feature (1)..(25): SEQ ID NO: 7286; WAN024BZO; Start 16; Stop 40
ctatctacaagcctaatcgtgacta

SEQ ID NO: 463884 - DNA, 25 bp, Artificial
  probe
  misc_feature (1)..(25): SEQ ID NO: 7286; WAN024BZO; Start 11; Stop 35
aagttctatctacaagcctaatcgt

SEQ ID NO: 463885 - DNA, 25 bp, Artificial
  probe
  misc_feature (1)..(25): SEQ ID NO: 7286; WAN024BZO; Start 17; Stop 41
tatctacaagcctaatcgtgactaa

SEQ ID NO: 463886 - DNA, 25 bp, Artificial
  probe
  misc_feature (1)..(25): SEQ ID NO: 7286; WAN024BZO; Start 10; Stop 34
gaagttctatctacaagcctaatcg

SEQ ID NO: 463887 - DNA, 25 bp, Artificial
  probe
  misc_feature (1)..(25): SEQ ID NO: 7286; WAN024BZO; Start 19; Stop 43
tctacaagcctaatcgtgactaaga

SEQ ID NO: 463888 - DNA, 25 bp, Artificial
  probe
  misc_feature (1)..(25): SEQ ID NO: 7286; WAN024BZO; Start 9; Stop 33
tgaagttctatctacaagcctaatc

SEQ ID NO: 463889 - DNA, 25 bp, Artificial
  probe
  misc_feature (1)..(25): SEQ ID NO: 7286; WAN024BZO; Start 21; Stop 45
tacaagcctaatcgtgactaagatt

SEQ ID NO: 463890 - DNA, 25 bp, Artificial
  probe
  misc_feature (1)..(25): SEQ ID NO: 7286; WAN024BZO; Start 24; Stop 48
aagcctaatcgtgactaagattgtc

SEQ ID NO: 463891 - DNA, 25 bp, Artificial
  probe
  misc_feature (1)..(25): SEQ ID NO: 7286; WAN024BZO; Start 23; Stop 47
caagcctaatcgtgactaagattgt

SEQ ID NO: 463892 - DNA, 25 bp, Artificial
  probe
  misc_feature (1)..(25): SEQ ID NO: 7286; WAN024BZO; Start 22; Stop 46
acaagcctaatcgtgactaagattg

SEQ ID NO: 463893 - DNA, 25 bp, Artificial
  probe
  misc_feature (1)..(25): SEQ ID NO: 7286; WAN024BZO; Start 8; Stop 32
ttgaagttctatctacaagcctaat

SEQ ID NO: 463894 - DNA, 25 bp, Artificial
  probe
  misc_feature (1)..(25): SEQ ID NO: 7286; WAN024BZO; Start 25; Stop 49
agcctaatcgtgactaagattgtct

SEQ ID NO: 463895 - DNA, 25 bp, Artificial
  probe
  misc_feature (1)..(25): SEQ ID NO: 7286; WAN024BZO; Start 26; Stop 50
gcctaatcgtgactaagattgtctt

SEQ ID NO: 463896 - DNA, 25 bp, Artificial
  probe
  misc_feature (1)..(25): SEQ ID NO: 7286; WAN024BZO; Start 27; Stop 51
cctaatcgtgactaagattgtcttc

SEQ ID NO: 463897 - DNA, 25 bp, Artificial
  probe
  misc_feature (1)..(25): SEQ ID NO: 7286; WAN024BZO; Start 28; Stop 52
ctaatcgtgactaagattgtcttct

SEQ ID NO: 463898 - DNA, 25 bp, Artificial
  probe
  misc_feature (1)..(25): SEQ ID NO: 7286; WAN024BZO; Start 7; Stop 31
tttgaagttctatctacaagcctaa

SEQ ID NO: 463899 - DNA, 25 bp, Artificial
  probe
  misc_feature (1)..(25): SEQ ID NO: 7286; WAN024BZO; Start 29; Stop 53
taatcgtgactaagattgtcttctt

SEQ ID NO: 463900 - DNA, 25 bp, Artificial
  probe
  misc_feature (1)..(25): SEQ ID NO: 7286; WAN024BZO; Start 32; Stop 56
tcgtgactaagattgtcttctttgt

SEQ ID NO: 463901 - DNA, 25 bp, Artificial
  probe
  misc_feature (1)..(25): SEQ ID NO: 7286; WAN024BZO; Start 31; Stop 55
atcgtgactaagattgtcttctttg

SEQ ID NO: 463902 - DNA, 25 bp, Artificial
  probe
  misc_feature (1)..(25): SEQ ID NO: 7286; WAN024BZO; Start 33; Stop 57
cgtgactaagattgtcttctttgta

SEQ ID NO: 463903 - DNA, 25 bp, Artificial
  probe
  misc_feature (1)..(25): SEQ ID NO: 7286; WAN024BZO; Start 30; Stop 54
aatcgtgactaagattgtcttcttt

SEQ ID NO: 463904 - DNA, 25 bp, Artificial
  probe
  misc_feature (1)..(25): SEQ ID NO: 7286; WAN024BZO; Start 1; Stop 25
gtgcgttttgaagttctatctacaa

SEQ ID NO: 463905 - DNA, 25 bp, Artificial
  probe
  misc_feature (1)..(25): SEQ ID NO: 7286; WAN024BZO; Start 4; Stop 28
cgttttgaagttctatctacaagcc

SEQ ID NO: 463906 - DNA, 25 bp, Artificial
  probe
  misc_feature (1)..(25): SEQ ID NO: 7286; WAN024BZO; Start 2; Stop 26
tgcgttttgaagttctatctacaag

SEQ ID NO: 463907 - DNA, 25 bp, Artificial
  probe
  misc_feature (1)..(25): SEQ ID NO: 7286; WAN024BZO; Start 3; Stop 27
gcgttttgaagttctatctacaagc

SEQ ID NO: 463908 - DNA, 25 bp, Artificial
  probe
  misc_feature (1)..(25): SEQ ID NO: 7286; WAN024BZO; Start 5; Stop 29
gttttgaagttctatctacaagcct

SEQ ID NO: 463909 - DNA, 25 bp, Artificial
  probe
  misc_feature (1)..(25): SEQ ID NO: 7286; WAN024BZO; Start 37; Stop 61
actaagattgtcttctttgtaaggt

SEQ ID NO: 463910 - DNA, 25 bp, Artificial
  probe
  misc_feature (1)..(25): SEQ ID NO: 7287; WAN024DDV; Start 307; Stop 331
tataacactatcggcatcttccaag

SEQ ID NO: 463911 - DNA, 25 bp, Artificial
  probe
  misc_feature (1)..(25): SEQ ID NO: 7287; WAN024DDV; Start 64; Stop 88
gaagtatcggagaacatcatcagac

SEQ ID NO: 463912 - DNA, 25 bp, Artificial
  probe
  misc_feature (1)..(25): SEQ ID NO: 7287; WAN024DDV; Start 94; Stop 118
gactacagacagactacttaccgac

SEQ ID NO: 463913 - DNA, 25 bp, Artificial
  probe
  misc_feature (1)..(25): SEQ ID NO: 7287; WAN024DDV; Start 91; Stop 115
gacgactacagacagactacttacc

SEQ ID NO: 463914 - DNA, 25 bp, Artificial
  probe
  misc_feature (1)..(25): SEQ ID NO: 7287; WAN024DDV; Start 65; Stop 89
aagtatcggagaacatcatcagact

SEQ ID NO: 463915 - DNA, 25 bp, Artificial
  probe
  misc_feature (1)..(25): SEQ ID NO: 7287; WAN024DDV; Start 309; Stop 333
taacactatcggcatcttccaagta

SEQ ID NO: 463916 - DNA, 25 bp, Artificial
  probe
  misc_feature (1)..(25): SEQ ID NO: 7287; WAN024DDV; Start 306; Stop 330
ttataacactatcggcatcttccaa

SEQ ID NO: 463917 - DNA, 25 bp, Artificial
  probe
  misc_feature (1)..(25): SEQ ID NO: 7287; WAN024DDV; Start 305; Stop 329
attataacactatcggcatcttcca

SEQ ID NO: 463918 - DNA, 25 bp, Artificial
  probe
  misc_feature (1)..(25): SEQ ID NO: 7287; WAN024DDV; Start 304; Stop 328
gattataacactatcggcatcttcc

SEQ ID NO: 463919 - DNA, 25 bp, Artificial
  probe
  misc_feature (1)..(25): SEQ ID NO: 7287; WAN024DDV; Start 299; Stop 323
aggttgattataacactatcggcat

SEQ ID NO: 463920 - DNA, 25 bp, Artificial
  probe
  misc_feature (1)..(25): SEQ ID NO: 7287; WAN024DDV; Start 300; Stop 324
ggttgattataacactatcggcatc

SEQ ID NO: 463921 - DNA, 25 bp, Artificial
  probe
  misc_feature (1)..(25): SEQ ID NO: 7287; WAN024DDV; Start 308; Stop 332
ataacactatcggcatcttccaagt

SEQ ID NO: 463922 - DNA, 25 bp, Artificial
  probe
  misc_feature (1)..(25): SEQ ID NO: 7287; WAN024DDV; Start 298; Stop 322
caggttgattataacactatcggca

SEQ ID NO: 463923 - DNA, 25 bp, Artificial
  probe
  misc_feature (1)..(25): SEQ ID NO: 7287; WAN024DDV; Start 297; Stop 321
acaggttgattataacactatcggc

SEQ ID NO: 463924 - DNA, 25 bp, Artificial
  probe
  misc_feature (1)..(25): SEQ ID NO: 7287; WAN024DDV; Start 66; Stop 90
agtatcggagaacatcatcagactg

SEQ ID NO: 463925 - DNA, 25 bp, Artificial
  probe
  misc_feature (1)..(25): SEQ ID NO: 7287; WAN024DDV; Start 303; Stop 327
tgattataacactatcggcatcttc

SEQ ID NO: 463926 - DNA, 25 bp, Artificial
  probe
  misc_feature (1)..(25): SEQ ID NO: 7287; WAN024DDV; Start 301; Stop 325
gttgattataacactatcggcatct

SEQ ID NO: 463927 - DNA, 25 bp, Artificial
  probe
  misc_feature (1)..(25): SEQ ID NO: 7287; WAN024DDV; Start 296; Stop 320
aacaggttgattataacactatcgg

SEQ ID NO: 463928 - DNA, 25 bp, Artificial
  probe
  misc_feature (1)..(25): SEQ ID NO: 7287; WAN024DDV; Start 67; Stop 91
gtatcggagaacatcatcagactgg

SEQ ID NO: 463929 - DNA, 25 bp, Artificial
  probe
  misc_feature (1)..(25): SEQ ID NO: 7287; WAN024DDV; Start 302; Stop 326
ttgattataacactatcggcatctt

SEQ ID NO: 463930 - DNA, 25 bp, Artificial
  probe
  misc_feature (1)..(25): SEQ ID NO: 7287; WAN024DDV; Start 68; Stop 92
tatcggagaacatcatcagactgga

SEQ ID NO: 463931 - DNA, 25 bp, Artificial
  probe
  misc_feature (1)..(25): SEQ ID NO: 7287; WAN024DDV; Start 42; Stop 66
cgaagaagaaacgaagataaacgaa

SEQ ID NO: 463932 - DNA, 25 bp, Artificial
  probe
  misc_feature (1)..(25): SEQ ID NO: 7287; WAN024DDV; Start 40; Stop 64
aacgaagaagaaacgaagataaacg

SEQ ID NO: 463933 - DNA, 25 bp, Artificial
  probe
  misc_feature (1)..(25): SEQ ID NO: 7287; WAN024DDV; Start 154; Stop 178
atacaggacgacgatttagatatgg

SEQ ID NO: 463934 - DNA, 25 bp, Artificial
  probe
  misc_feature (1)..(25): SEQ ID NO: 7287; WAN024DDV; Start 152; Stop 176
cgatacaggacgacgatttagatat

SEQ ID NO: 463935 - DNA, 25 bp, Artificial
  probe
  misc_feature (1)..(25): SEQ ID NO: 7287; WAN024DDV; Start 310; Stop 334
aacactatcggcatcttccaagtag

SEQ ID NO: 463936 - DNA, 25 bp, Artificial
  probe
  misc_feature (1)..(25): SEQ ID NO: 7287; WAN024DDV; Start 161; Stop 185
acgacgatttagatatggaggtttc

SEQ ID NO: 463937 - DNA, 25 bp, Artificial
  probe
  misc_feature (1)..(25): SEQ ID NO: 7287; WAN024DDV; Start 160; Stop 184
gacgacgatttagatatggaggttt

SEQ ID NO: 463938 - DNA, 25 bp, Artificial
  probe
  misc_feature (1)..(25): SEQ ID NO: 7287; WAN024DDV; Start 75; Stop 99
gaacatcatcagactggacgactac

SEQ ID NO: 463939 - DNA, 25 bp, Artificial
  probe
  misc_feature (1)..(25): SEQ ID NO: 7287; WAN024DDV; Start 74; Stop 98
agaacatcatcagactggacgacta

SEQ ID NO: 463940 - DNA, 25 bp, Artificial
  probe
  misc_feature (1)..(25): SEQ ID NO: 7287; WAN024DDV; Start 172; Stop 196
gatatggaggtttcgttctatgagg

SEQ ID NO: 463941 - DNA, 25 bp, Artificial
  probe
  misc_feature (1)..(25): SEQ ID NO: 7287; WAN024DDV; Start 174; Stop 198
tatggaggtttcgttctatgaggat

SEQ ID NO: 463942 - DNA, 25 bp, Artificial
  probe
  misc_feature (1)..(25): SEQ ID NO: 7287; WAN024DDV; Start 155; Stop 179
tacaggacgacgatttagatatgga

SEQ ID NO: 463943 - DNA, 25 bp, Artificial
  probe
  misc_feature (1)..(25): SEQ ID NO: 7288; WAN024ASU; Start 43; Stop 67
attcaattactcaagatgctaagcc

SEQ ID NO: 463944 - DNA, 25 bp, Artificial
  probe
  misc_feature (1)..(25): SEQ ID NO: 7288; WAN024ASU; Start 44; Stop 68
ttcaattactcaagatgctaagccg

SEQ ID NO: 463945 - DNA, 25 bp, Artificial
  probe
  misc_feature (1)..(25): SEQ ID NO: 7288; WAN024ASU; Start 46; Stop 70
caattactcaagatgctaagccgtc

SEQ ID NO: 463946 - DNA, 25 bp, Artificial
  probe
  misc_feature (1)..(25): SEQ ID NO: 7288; WAN024ASU; Start 42; Stop 66
aattcaattactcaagatgctaagc

SEQ ID NO: 463947 - DNA, 25 bp, Artificial
  probe
  misc_feature (1)..(25): SEQ ID NO: 7288; WAN024ASU; Start 48; Stop 72
attactcaagatgctaagccgtcaa

SEQ ID NO: 463948 - DNA, 25 bp, Artificial
  probe
  misc_feature (1)..(25): SEQ ID NO: 7288; WAN024ASU; Start 47; Stop 71
aattactcaagatgctaagccgtca

SEQ ID NO: 463949 - DNA, 25 bp, Artificial
  probe
  misc_feature (1)..(25): SEQ ID NO: 7288; WAN024ASU; Start 45; Stop 69
tcaattactcaagatgctaagccgt

SEQ ID NO: 463950 - DNA, 25 bp, Artificial
  probe
  misc_feature (1)..(25): SEQ ID NO: 7288; WAN024ASU; Start 243; Stop 267
atgctttactaactctttcgtcaaa

SEQ ID NO: 463951 - DNA, 25 bp, Artificial
  probe
  misc_feature (1)..(25): SEQ ID NO: 7288; WAN024ASU; Start 242; Stop 266
aatgctttactaactctttcgtcaa

SEQ ID NO: 463952 - DNA, 25 bp, Artificial
  probe
  misc_feature (1)..(25): SEQ ID NO: 7288; WAN024ASU; Start 241; Stop 265
aaatgctttactaactctttcgtca

SEQ ID NO: 463953 - DNA, 25 bp, Artificial
  probe
  misc_feature (1)..(25): SEQ ID NO: 7288; WAN024ASU; Start 198; Stop 222
agtatctaaacctttcacgccaatc

SEQ ID NO: 463954 - DNA, 25 bp, Artificial
  probe
  misc_feature (1)..(25): SEQ ID NO: 7288; WAN024ASU; Start 197; Stop 221
aagtatctaaacctttcacgccaat

SEQ ID NO: 463955 - DNA, 25 bp, Artificial
  probe
  misc_feature (1)..(25): SEQ ID NO: 7288; WAN024ASU; Start 49; Stop 73
ttactcaagatgctaagccgtcaag

SEQ ID NO: 463956 - DNA, 25 bp, Artificial
  probe
  misc_feature (1)..(25): SEQ ID NO: 7288; WAN024ASU; Start 238; Stop 262
gctaaatgctttactaactctttcg

SEQ ID NO: 463957 - DNA, 25 bp, Artificial
  probe
  misc_feature (1)..(25): SEQ ID NO: 7288; WAN024ASU; Start 199; Stop 223
gtatctaaacctttcacgccaatcg

SEQ ID NO: 463958 - DNA, 25 bp, Artificial
  probe
  misc_feature (1)..(25): SEQ ID NO: 7288; WAN024ASU; Start 240; Stop 264
taaatgctttactaactctttcgtc

SEQ ID NO: 463959 - DNA, 25 bp, Artificial
  probe
  misc_feature (1)..(25): SEQ ID NO: 7288; WAN024ASU; Start 239; Stop 263
ctaaatgctttactaactctttcgt

SEQ ID NO: 463960 - DNA, 25 bp, Artificial
  probe
  misc_feature (1)..(25): SEQ ID NO: 7288; WAN024ASU; Start 195; Stop 219
taaagtatctaaacctttcacgcca

SEQ ID NO: 463961 - DNA, 25 bp, Artificial
  probe
  misc_feature (1)..(25): SEQ ID NO: 7288; WAN024ASU; Start 194; Stop 218
ttaaagtatctaaacctttcacgcc

SEQ ID NO: 463962 - DNA, 25 bp, Artificial
  probe
  misc_feature (1)..(25): SEQ ID NO: 7288; WAN024ASU; Start 196; Stop 220
aaagtatctaaacctttcacgccaa

SEQ ID NO: 463963 - DNA, 25 bp, Artificial
  probe
  misc_feature (1)..(25): SEQ ID NO: 7288; WAN024ASU; Start 70; Stop 94
caagcaactcaaaggaaaataggaa

SEQ ID NO: 463964 - DNA, 25 bp, Artificial
  probe
  misc_feature (1)..(25): SEQ ID NO: 7288; WAN024ASU; Start 69; Stop 93
tcaagcaactcaaaggaaaatagga

SEQ ID NO: 463965 - DNA, 25 bp, Artificial
  probe
  misc_feature (1)..(25): SEQ ID NO: 7288; WAN024ASU; Start 68; Stop 92
gtcaagcaactcaaaggaaaatagg

SEQ ID NO: 463966 - DNA, 25 bp, Artificial
  probe
  misc_feature (1)..(25): SEQ ID NO: 7288; WAN024ASU; Start 71; Stop 95
aagcaactcaaaggaaaataggaaa

SEQ ID NO: 463967 - DNA, 25 bp, Artificial
  probe
  misc_feature (1)..(25): SEQ ID NO: 7288; WAN024ASU; Start 72; Stop 96
agcaactcaaaggaaaataggaaat

SEQ ID NO: 463968 - DNA, 25 bp, Artificial
  probe
  misc_feature (1)..(25): SEQ ID NO: 7288; WAN024ASU; Start 67; Stop 91
cgtcaagcaactcaaaggaaaatag

SEQ ID NO: 463969 - DNA, 25 bp, Artificial
  probe
  misc_feature (1)..(25): SEQ ID NO: 7288; WAN024ASU; Start 73; Stop 97
gcaactcaaaggaaaataggaaatc

SEQ ID NO: 463970 - DNA, 25 bp, Artificial
  probe
  misc_feature (1)..(25): SEQ ID NO: 7288; WAN024ASU; Start 149; Stop 173
taggcgtgttcagttttcaagatac

SEQ ID NO: 463971 - DNA, 25 bp, Artificial
  probe
  misc_feature (1)..(25): SEQ ID NO: 7288; WAN024ASU; Start 148; Stop 172
gtaggcgtgttcagttttcaagata

SEQ ID NO: 463972 - DNA, 25 bp, Artificial
  probe
  misc_feature (1)..(25): SEQ ID NO: 7288; WAN024ASU; Start 74; Stop 98
caactcaaaggaaaataggaaatcg

SEQ ID NO: 463973 - DNA, 25 bp, Artificial
  probe
  misc_feature (1)..(25): SEQ ID NO: 7288; WAN024ASU; Start 204; Stop 228
taaacctttcacgccaatcgctatc

SEQ ID NO: 463974 - DNA, 25 bp, Artificial
  probe
  misc_feature (1)..(25): SEQ ID NO: 7288; WAN024ASU; Start 203; Stop 227
ctaaacctttcacgccaatcgctat

SEQ ID NO: 463975 - DNA, 25 bp, Artificial
  probe
  misc_feature (1)..(25): SEQ ID NO: 7288; WAN024ASU; Start 200; Stop 224
tatctaaacctttcacgccaatcgc

SEQ ID NO: 463976 - DNA, 25 bp, Artificial
  probe
  misc_feature (1)..(25): SEQ ID NO: 7289; WAN024EWN; Start 72; Stop 96
agtagataatctgcctgagaattgg

SEQ ID NO: 463977 - DNA, 25 bp, Artificial
  probe
  misc_feature (1)..(25): SEQ ID NO: 7289; WAN024EWN; Start 71; Stop 95
gagtagataatctgcctgagaattg

SEQ ID NO: 463978 - DNA, 25 bp, Artificial
  probe
  misc_feature (1)..(25): SEQ ID NO: 7289; WAN024EWN; Start 70; Stop 94
agagtagataatctgcctgagaatt

SEQ ID NO: 463979 - DNA, 25 bp, Artificial
  probe
  misc_feature (1)..(25): SEQ ID NO: 7289; WAN024EWN; Start 69; Stop 93
aagagtagataatctgcctgagaat

SEQ ID NO: 463980 - DNA, 25 bp, Artificial
  probe
  misc_feature (1)..(25): SEQ ID NO: 7289; WAN024EWN; Start 150; Stop 174
ttctcaaataaatcatctgccacct

SEQ ID NO: 463981 - DNA, 25 bp, Artificial
  probe
  misc_feature (1)..(25): SEQ ID NO: 7289; WAN024EWN; Start 149; Stop 173
attctcaaataaatcatctgccacc

SEQ ID NO: 463982 - DNA, 25 bp, Artificial
  probe
  misc_feature (1)..(25): SEQ ID NO: 7289; WAN024EWN; Start 138; Stop 162
gcacaaggcaaattctcaaataaat

SEQ ID NO: 463983 - DNA, 25 bp, Artificial
  probe
  misc_feature (1)..(25): SEQ ID NO: 7289; WAN024EWN; Start 151; Stop 175
tctcaaataaatcatctgccacctg

SEQ ID NO: 463984 - DNA, 25 bp, Artificial
  probe
  misc_feature (1)..(25): SEQ ID NO: 7289; WAN024EWN; Start 137; Stop 161
ggcacaaggcaaattctcaaataaa

SEQ ID NO: 463985 - DNA, 25 bp, Artificial
  probe
  misc_feature (1)..(25): SEQ ID NO: 7289; WAN024EWN; Start 67; Stop 91
caaagagtagataatctgcctgaga

SEQ ID NO: 463986 - DNA, 25 bp, Artificial
  probe
  misc_feature (1)..(25): SEQ ID NO: 7289; WAN024EWN; Start 152; Stop 176
ctcaaataaatcatctgccacctga

SEQ ID NO: 463987 - DNA, 25 bp, Artificial
  probe
  misc_feature (1)..(25): SEQ ID NO: 7289; WAN024EWN; Start 73; Stop 97
gtagataatctgcctgagaattggg

SEQ ID NO: 463988 - DNA, 25 bp, Artificial
  probe
  misc_feature (1)..(25): SEQ ID NO: 7289; WAN024EWN; Start 64; Stop 88
catcaaagagtagataatctgcctg

SEQ ID NO: 463989 - DNA, 25 bp, Artificial
  probe
  misc_feature (1)..(25): SEQ ID NO: 7289; WAN024EWN; Start 66; Stop 90
tcaaagagtagataatctgcctgag

SEQ ID NO: 463990 - DNA, 25 bp, Artificial
  probe
  misc_feature (1)..(25): SEQ ID NO: 7289; WAN024EWN; Start 68; Stop 92
aaagagtagataatctgcctgagaa

SEQ ID NO: 463991 - DNA, 25 bp, Artificial
  probe
  misc_feature (1)..(25): SEQ ID NO: 7289; WAN024EWN; Start 153; Stop 177
tcaaataaatcatctgccacctgac

SEQ ID NO: 463992 - DNA, 25 bp, Artificial
  probe
  misc_feature (1)..(25): SEQ ID NO: 7289; WAN024EWN; Start 148; Stop 172
aattctcaaataaatcatctgccac

SEQ ID NO: 463993 - DNA, 25 bp, Artificial
  probe
  misc_feature (1)..(25): SEQ ID NO: 7289; WAN024EWN; Start 136; Stop 160
tggcacaaggcaaattctcaaataa

SEQ ID NO: 463994 - DNA, 25 bp, Artificial
  probe
  misc_feature (1)..(25): SEQ ID NO: 7289; WAN024EWN; Start 65; Stop 89
atcaaagagtagataatctgcctga

SEQ ID NO: 463995 - DNA, 25 bp, Artificial
  probe
  misc_feature (1)..(25): SEQ ID NO: 7289; WAN024EWN; Start 140; Stop 164
acaaggcaaattctcaaataaatca

SEQ ID NO: 463996 - DNA, 25 bp, Artificial
  probe
  misc_feature (1)..(25): SEQ ID NO: 7289; WAN024EWN; Start 139; Stop 163
cacaaggcaaattctcaaataaatc

SEQ ID NO: 463997 - DNA, 25 bp, Artificial
  probe
  misc_feature (1)..(25): SEQ ID NO: 7289; WAN024EWN; Start 135; Stop 159
ctggcacaaggcaaattctcaaata

SEQ ID NO: 463998 - DNA, 25 bp, Artificial
  probe
  misc_feature (1)..(25): SEQ ID NO: 7289; WAN024EWN; Start 154; Stop 178
caaataaatcatctgccacctgacc

SEQ ID NO: 463999 - DNA, 25 bp, Artificial
  probe
  misc_feature (1)..(25): SEQ ID NO: 7289; WAN024EWN; Start 147; Stop 171
aaattctcaaataaatcatctgcca

SEQ ID NO: 464000 - DNA, 25 bp, Artificial
  probe
  misc_feature (1)..(25): SEQ ID NO: 7289; WAN024EWN; Start 239; Stop 263
tggtgaaacaaatactccaaccttt

SEQ ID NO: 464001 - DNA, 25 bp, Artificial
  probe
  misc_feature (1)..(25): SEQ ID NO: 7289; WAN024EWN; Start 146; Stop 170
caaattctcaaataaatcatctgcc

SEQ ID NO: 464002 - DNA, 25 bp, Artificial
  probe
  misc_feature (1)..(25): SEQ ID NO: 7289; WAN024EWN; Start 144; Stop 168
ggcaaattctcaaataaatcatctg

SEQ ID NO: 464003 - DNA, 25 bp, Artificial
  probe
  misc_feature (1)..(25): SEQ ID NO: 7289; WAN024EWN; Start 143; Stop 167
aggcaaattctcaaataaatcatct

SEQ ID NO: 464004 - DNA, 25 bp, Artificial
  probe
  misc_feature (1)..(25): SEQ ID NO: 7289; WAN024EWN; Start 229; Stop 253
ctacccgacttggtgaaacaaatac

SEQ ID NO: 464005 - DNA, 25 bp, Artificial
  probe
  misc_feature (1)..(25): SEQ ID NO: 7289; WAN024EWN; Start 141; Stop 165
caaggcaaattctcaaataaatcat

SEQ ID NO: 464006 - DNA, 25 bp, Artificial
  probe
  misc_feature (1)..(25): SEQ ID NO: 7289; WAN024EWN; Start 132; Stop 156
atactggcacaaggcaaattctcaa

SEQ ID NO: 464007 - DNA, 25 bp, Artificial
  probe
  misc_feature (1)..(25): SEQ ID NO: 7289; WAN024EWN; Start 131; Stop 155
aatactggcacaaggcaaattctca

SEQ ID NO: 464008 - DNA, 25 bp, Artificial
  probe
  misc_feature (1)..(25): SEQ ID NO: 7289; WAN024EWN; Start 228; Stop 252
tctacccgacttggtgaaacaaata

SEQ ID NO: 464009 - DNA, 25 bp, Artificial
  probe
  misc_feature (1)..(25): SEQ ID NO: 7290; WAN024BTY; Start 228; Stop 252
tacagtaagaatggctattggagtt

SEQ ID NO: 464010 - DNA, 25 bp, Artificial
  probe
  misc_feature (1)..(25): SEQ ID NO: 7290; WAN024BTY; Start 227; Stop 251
atacagtaagaatggctattggagt

SEQ ID NO: 464011 - DNA, 25 bp, Artificial
  probe
  misc_feature (1)..(25): SEQ ID NO: 7290; WAN024BTY; Start 157; Stop 181
ttgttgatgatgactgataaggttc

SEQ ID NO: 464012 - DNA, 25 bp, Artificial
  probe
  misc_feature (1)..(25): SEQ ID NO: 7290; WAN024BTY; Start 213; Stop 237
tcgtagaccattgaatacagtaaga

SEQ ID NO: 464013 - DNA, 25 bp, Artificial
  probe
  misc_feature (1)..(25): SEQ ID NO: 7290; WAN024BTY; Start 158; Stop 182
tgttgatgatgactgataaggttca

SEQ ID NO: 464014 - DNA, 25 bp, Artificial
  probe
  misc_feature (1)..(25): SEQ ID NO: 7290; WAN024BTY; Start 160; Stop 184
ttgatgatgactgataaggttcact

SEQ ID NO: 464015 - DNA, 25 bp, Artificial
  probe
  misc_feature (1)..(25): SEQ ID NO: 7290; WAN024BTY; Start 159; Stop 183
gttgatgatgactgataaggttcac

SEQ ID NO: 464016 - DNA, 25 bp, Artificial
  probe
  misc_feature (1)..(25): SEQ ID NO: 7290; WAN024BTY; Start 214; Stop 238
cgtagaccattgaatacagtaagaa

SEQ ID NO: 464017 - DNA, 25 bp, Artificial
  probe
  misc_feature (1)..(25): SEQ ID NO: 7290; WAN024BTY; Start 88; Stop 112
gatcctgatgccatcttagtgatat

SEQ ID NO: 464018 - DNA, 25 bp, Artificial
  probe
  misc_feature (1)..(25): SEQ ID NO: 7290; WAN024BTY; Start 224; Stop 248
tgaatacagtaagaatggctattgg

SEQ ID NO: 464019 - DNA, 25 bp, Artificial
  probe
  misc_feature (1)..(25): SEQ ID NO: 7290; WAN024BTY; Start 161; Stop 185
tgatgatgactgataaggttcacta

SEQ ID NO: 464020 - DNA, 25 bp, Artificial
  probe
  misc_feature (1)..(25): SEQ ID NO: 7290; WAN024BTY; Start 212; Stop 236
ttcgtagaccattgaatacagtaag

SEQ ID NO: 464021 - DNA, 25 bp, Artificial
  probe
  misc_feature (1)..(25): SEQ ID NO: 7290; WAN024BTY; Start 89; Stop 113
atcctgatgccatcttagtgatatg

SEQ ID NO: 464022 - DNA, 25 bp, Artificial
  probe
  misc_feature (1)..(25): SEQ ID NO: 7290; WAN024BTY; Start 87; Stop 111
tgatcctgatgccatcttagtgata

SEQ ID NO: 464023 - DNA, 25 bp, Artificial
  probe
  misc_feature (1)..(25): SEQ ID NO: 7290; WAN024BTY; Start 226; Stop 250
aatacagtaagaatggctattggag

SEQ ID NO: 464024 - DNA, 25 bp, Artificial
  probe
  misc_feature (1)..(25): SEQ ID NO: 7290; WAN024BTY; Start 225; Stop 249
gaatacagtaagaatggctattgga

SEQ ID NO: 464025 - DNA, 25 bp, Artificial
  probe
  misc_feature (1)..(25): SEQ ID NO: 7290; WAN024BTY; Start 437; Stop 461
acggtaacgcactagaagaagataa

SEQ ID NO: 464026 - DNA, 25 bp, Artificial
  probe
  misc_feature (1)..(25): SEQ ID NO: 7290; WAN024BTY; Start 649; Stop 673
ttgaagactgctattaactcaggaa

SEQ ID NO: 464027 - DNA, 25 bp, Artificial
  probe
  misc_feature (1)..(25): SEQ ID NO: 7290; WAN024BTY; Start 648; Stop 672
attgaagactgctattaactcagga

SEQ ID NO: 464028 - DNA, 25 bp, Artificial
  probe
  misc_feature (1)..(25): SEQ ID NO: 7290; WAN024BTY; Start 647; Stop 671
cattgaagactgctattaactcagg

SEQ ID NO: 464029 - DNA, 25 bp, Artificial
  probe
  misc_feature (1)..(25): SEQ ID NO: 7290; WAN024BTY; Start 436; Stop 460
gacggtaacgcactagaagaagata

SEQ ID NO: 464030 - DNA, 25 bp, Artificial
  probe
  misc_feature (1)..(25): SEQ ID NO: 7290; WAN024BTY; Start 167; Stop 191
tgactgataaggttcactatacaga

SEQ ID NO: 464031 - DNA, 25 bp, Artificial
  probe
  misc_feature (1)..(25): SEQ ID NO: 7290; WAN024BTY; Start 162; Stop 186
gatgatgactgataaggttcactat

SEQ ID NO: 464032 - DNA, 25 bp, Artificial
  probe
  misc_feature (1)..(25): SEQ ID NO: 7290; WAN024BTY; Start 86; Stop 110
ctgatcctgatgccatcttagtgat

SEQ ID NO: 464033 - DNA, 25 bp, Artificial
  probe
  misc_feature (1)..(25): SEQ ID NO: 7290; WAN024BTY; Start 165; Stop 189
gatgactgataaggttcactataca

SEQ ID NO: 464034 - DNA, 25 bp, Artificial
  probe
  misc_feature (1)..(25): SEQ ID NO: 7290; WAN024BTY; Start 164; Stop 188
tgatgactgataaggttcactatac

SEQ ID NO: 464035 - DNA, 25 bp, Artificial
  probe
  misc_feature (1)..(25): SEQ ID NO: 7290; WAN024BTY; Start 769; Stop 793
aaggataagaaagaagaacaggagg

SEQ ID NO: 464036 - DNA, 25 bp, Artificial
  probe
  misc_feature (1)..(25): SEQ ID NO: 7290; WAN024BTY; Start 623; Stop 647
ataatgtggatttggtgaaagaagc

SEQ ID NO: 464037 - DNA, 25 bp, Artificial
  probe
  misc_feature (1)..(25): SEQ ID NO: 7290; WAN024BTY; Start 229; Stop 253
acagtaagaatggctattggagttt

SEQ ID NO: 464038 - DNA, 25 bp, Artificial
  probe
  misc_feature (1)..(25): SEQ ID NO: 7290; WAN024BTY; Start 154; Stop 178
ggtttgttgatgatgactgataagg

SEQ ID NO: 464039 - DNA, 25 bp, Artificial
  probe
  misc_feature (1)..(25): SEQ ID NO: 7290; WAN024BTY; Start 631; Stop 655
gatttggtgaaagaagcattgaaga

SEQ ID NO: 464040 - DNA, 25 bp, Artificial
  probe
  misc_feature (1)..(25): SEQ ID NO: 7290; WAN024BTY; Start 767; Stop 791
acaaggataagaaagaagaacagga

SEQ ID NO: 464041 - DNA, 25 bp, Artificial
  probe
  misc_feature (1)..(25): SEQ ID NO: 7290; WAN024BTY; Start 667; Stop 691
tcaggaaagccgaacatcaaatata

SEQ ID NO: 464042 - DNA, 25 bp, Artificial
  probe
  misc_feature (1)..(25): SEQ ID NO: 7291; WAN024CJZ; Start 18; Stop 42
aaaccattctggcaaatccttcaaa

SEQ ID NO: 464043 - DNA, 25 bp, Artificial
  probe
  misc_feature (1)..(25): SEQ ID NO: 7291; WAN024CJZ; Start 4; Stop 28
ctttctgggattccaaaccattctg

SEQ ID NO: 464044 - DNA, 25 bp, Artificial
  probe
  misc_feature (1)..(25): SEQ ID NO: 7291; WAN024CJZ; Start 17; Stop 41
caaaccattctggcaaatccttcaa

SEQ ID NO: 464045 - DNA, 25 bp, Artificial
  probe
  misc_feature (1)..(25): SEQ ID NO: 7291; WAN024CJZ; Start 31; Stop 55
aaatccttcaaaacctcaacgacaa

SEQ ID NO: 464046 - DNA, 25 bp, Artificial
  probe
  misc_feature (1)..(25): SEQ ID NO: 7291; WAN024CJZ; Start 23; Stop 47
attctggcaaatccttcaaaacctc

SEQ ID NO: 464047 - DNA, 25 bp, Artificial
  probe
  misc_feature (1)..(25): SEQ ID NO: 7291; WAN024CJZ; Start 12; Stop 36
gattccaaaccattctggcaaatcc

SEQ ID NO: 464048 - DNA, 25 bp, Artificial
  probe
  misc_feature (1)..(25): SEQ ID NO: 7291; WAN024CJZ; Start 11; Stop 35
ggattccaaaccattctggcaaatc

SEQ ID NO: 464049 - DNA, 25 bp, Artificial
  probe
  misc_feature (1)..(25): SEQ ID NO: 7291; WAN024CJZ; Start 32; Stop 56
aatccttcaaaacctcaacgacaac

SEQ ID NO: 464050 - DNA, 25 bp, Artificial
  probe
  misc_feature (1)..(25): SEQ ID NO: 7291; WAN024CJZ; Start 30; Stop 54
caaatccttcaaaacctcaacgaca

SEQ ID NO: 464051 - DNA, 25 bp, Artificial
  probe
  misc_feature (1)..(25): SEQ ID NO: 7291; WAN024CJZ; Start 22; Stop 46
cattctggcaaatccttcaaaacct

SEQ ID NO: 464052 - DNA, 25 bp, Artificial
  probe
  misc_feature (1)..(25): SEQ ID NO: 7291; WAN024CJZ; Start 13; Stop 37
attccaaaccattctggcaaatcct

SEQ ID NO: 464053 - DNA, 25 bp, Artificial
  probe
  misc_feature (1)..(25): SEQ ID NO: 7291; WAN024CJZ; Start 5; Stop 29
tttctgggattccaaaccattctgg

SEQ ID NO: 464054 - DNA, 25 bp, Artificial
  probe
  misc_feature (1)..(25): SEQ ID NO: 7291; WAN024CJZ; Start 14; Stop 38
ttccaaaccattctggcaaatcctt

SEQ ID NO: 464055 - DNA, 25 bp, Artificial
  probe
  misc_feature (1)..(25): SEQ ID NO: 7291; WAN024CJZ; Start 3; Stop 27
gctttctgggattccaaaccattct

SEQ ID NO: 464056 - DNA, 25 bp, Artificial
  probe
  misc_feature (1)..(25): SEQ ID NO: 7291; WAN024CJZ; Start 33; Stop 57
atccttcaaaacctcaacgacaact

SEQ ID NO: 464057 - DNA, 25 bp, Artificial
  probe
  misc_feature (1)..(25): SEQ ID NO: 7291; WAN024CJZ; Start 26; Stop 50
ctggcaaatccttcaaaacctcaac

SEQ ID NO: 464058 - DNA, 25 bp, Artificial
  probe
  misc_feature (1)..(25): SEQ ID NO: 7291; WAN024CJZ; Start 25; Stop 49
tctggcaaatccttcaaaacctcaa

SEQ ID NO: 464059 - DNA, 25 bp, Artificial
  probe
  misc_feature (1)..(25): SEQ ID NO: 7291; WAN024CJZ; Start 24; Stop 48
ttctggcaaatccttcaaaacctca

SEQ ID NO: 464060 - DNA, 25 bp, Artificial
  probe
  misc_feature (1)..(25): SEQ ID NO: 7291; WAN024CJZ; Start 15; Stop 39
tccaaaccattctggcaaatccttc

SEQ ID NO: 464061 - DNA, 25 bp, Artificial
  probe
  misc_feature (1)..(25): SEQ ID NO: 7291; WAN024CJZ; Start 2; Stop 26
tgctttctgggattccaaaccattc

SEQ ID NO: 464062 - DNA, 25 bp, Artificial
  probe
  misc_feature (1)..(25): SEQ ID NO: 7291; WAN024CJZ; Start 19; Stop 43
aaccattctggcaaatccttcaaaa

SEQ ID NO: 464063 - DNA, 25 bp, Artificial
  probe
  misc_feature (1)..(25): SEQ ID NO: 7291; WAN024CJZ; Start 29; Stop 53
gcaaatccttcaaaacctcaacgac

SEQ ID NO: 464064 - DNA, 25 bp, Artificial
  probe
  misc_feature (1)..(25): SEQ ID NO: 7291; WAN024CJZ; Start 16; Stop 40
ccaaaccattctggcaaatccttca

SEQ ID NO: 464065 - DNA, 25 bp, Artificial
  probe
  misc_feature (1)..(25): SEQ ID NO: 7291; WAN024CJZ; Start 10; Stop 34
gggattccaaaccattctggcaaat

SEQ ID NO: 464066 - DNA, 25 bp, Artificial
  probe
  misc_feature (1)..(25): SEQ ID NO: 7291; WAN024CJZ; Start 1; Stop 25
gtgctttctgggattccaaaccatt

SEQ ID NO: 464067 - DNA, 25 bp, Artificial
  probe
  misc_feature (1)..(25): SEQ ID NO: 7291; WAN024CJZ; Start 20; Stop 44
accattctggcaaatccttcaaaac

SEQ ID NO: 464068 - DNA, 25 bp, Artificial
  probe
  misc_feature (1)..(25): SEQ ID NO: 7291; WAN024CJZ; Start 34; Stop 58
tccttcaaaacctcaacgacaactg

SEQ ID NO: 464069 - DNA, 25 bp, Artificial
  probe
  misc_feature (1)..(25): SEQ ID NO: 7291; WAN024CJZ; Start 21; Stop 45
ccattctggcaaatccttcaaaacc

SEQ ID NO: 464070 - DNA, 25 bp, Artificial
  probe
  misc_feature (1)..(25): SEQ ID NO: 7291; WAN024CJZ; Start 28; Stop 52
ggcaaatccttcaaaacctcaacga

SEQ ID NO: 464071 - DNA, 25 bp, Artificial
  probe
  misc_feature (1)..(25): SEQ ID NO: 7291; WAN024CJZ; Start 27; Stop 51
tggcaaatccttcaaaacctcaacg

SEQ ID NO: 464072 - DNA, 25 bp, Artificial
  probe
  misc_feature (1)..(25): SEQ ID NO: 7291; WAN024CJZ; Start 39; Stop 63
caaaacctcaacgacaactgccttt

SEQ ID NO: 464073 - DNA, 25 bp, Artificial
  probe
  misc_feature (1)..(25): SEQ ID NO: 7291; WAN024CJZ; Start 9; Stop 33
tgggattccaaaccattctggcaaa

SEQ ID NO: 464074 - DNA, 25 bp, Artificial
  probe
  misc_feature (1)..(25): SEQ ID NO: 7291; WAN024CJZ; Start 40; Stop 64
aaaacctcaacgacaactgcctttt

SEQ ID NO: 464075 - DNA, 25 bp, Artificial
  probe
  misc_feature (1)..(25): SEQ ID NO: 7292; WAN024BLI; Start 59; Stop 83
tcgaccaatctgaaatcttaagttt

SEQ ID NO: 464076 - DNA, 25 bp, Artificial
  probe
  misc_feature (1)..(25): SEQ ID NO: 7292; WAN024BLI; Start 58; Stop 82
ttcgaccaatctgaaatcttaagtt

SEQ ID NO: 464077 - DNA, 25 bp, Artificial
  probe
  misc_feature (1)..(25): SEQ ID NO: 7292; WAN024BLI; Start 60; Stop 84
cgaccaatctgaaatcttaagttta

SEQ ID NO: 464078 - DNA, 25 bp, Artificial
  probe
  misc_feature (1)..(25): SEQ ID NO: 7292; WAN024BLI; Start 57; Stop 81
tttcgaccaatctgaaatcttaagt

SEQ ID NO: 464079 - DNA, 25 bp, Artificial
  probe
  misc_feature (1)..(25): SEQ ID NO: 7292; WAN024BLI; Start 61; Stop 85
gaccaatctgaaatcttaagtttaa

SEQ ID NO: 464080 - DNA, 25 bp, Artificial
  probe
  misc_feature (1)..(25): SEQ ID NO: 7292; WAN024BLI; Start 117; Stop 141
tttgtcatctcctcttgactctcgt

SEQ ID NO: 464081 - DNA, 25 bp, Artificial
  probe
  misc_feature (1)..(25): SEQ ID NO: 7292; WAN024BLI; Start 56; Stop 80
ttttcgaccaatctgaaatcttaag

SEQ ID NO: 464082 - DNA, 25 bp, Artificial
  probe
  misc_feature (1)..(25): SEQ ID NO: 7292; WAN024BLI; Start 62; Stop 86
accaatctgaaatcttaagtttaaa

SEQ ID NO: 464083 - DNA, 25 bp, Artificial
  probe
  misc_feature (1)..(25): SEQ ID NO: 7292; WAN024BLI; Start 116; Stop 140
ttttgtcatctcctcttgactctcg

SEQ ID NO: 464084 - DNA, 25 bp, Artificial
  probe
  misc_feature (1)..(25): SEQ ID NO: 7293; WAN024BZL; Start 53; Stop 77
agatagtaatgagtattggtggagt

SEQ ID NO: 464085 - DNA, 25 bp, Artificial
  probe
  misc_feature (1)..(25): SEQ ID NO: 7293; WAN024BZL; Start 54; Stop 78
gatagtaatgagtattggtggagtt

SEQ ID NO: 464086 - DNA, 25 bp, Artificial
  probe
  misc_feature (1)..(25): SEQ ID NO: 7293; WAN024BZL; Start 52; Stop 76
aagatagtaatgagtattggtggag

SEQ ID NO: 464087 - DNA, 25 bp, Artificial
  probe
  misc_feature (1)..(25): SEQ ID NO: 7293; WAN024BZL; Start 237; Stop 261
tgtcattgccaggttgagaagatag

SEQ ID NO: 464088 - DNA, 25 bp, Artificial
  probe
  misc_feature (1)..(25): SEQ ID NO: 7293; WAN024BZL; Start 227; Stop 251
tatacaagtgtgtcattgccaggtt

SEQ ID NO: 464089 - DNA, 25 bp, Artificial
  probe
  misc_feature (1)..(25): SEQ ID NO: 7293; WAN024BZL; Start 236; Stop 260
gtgtcattgccaggttgagaagata

SEQ ID NO: 464090 - DNA, 25 bp, Artificial
  probe
  misc_feature (1)..(25): SEQ ID NO: 7293; WAN024BZL; Start 153; Stop 177
aatatctattgtgatggaagttgtt

SEQ ID NO: 464091 - DNA, 25 bp, Artificial
  probe
  misc_feature (1)..(25): SEQ ID NO: 7293; WAN024BZL; Start 55; Stop 79
atagtaatgagtattggtggagttt

SEQ ID NO: 464092 - DNA, 25 bp, Artificial
  probe
  misc_feature (1)..(25): SEQ ID NO: 7293; WAN024BZL; Start 51; Stop 75
aaagatagtaatgagtattggtgga

SEQ ID NO: 464093 - DNA, 25 bp, Artificial
  probe
  misc_feature (1)..(25): SEQ ID NO: 7293; WAN024BZL; Start 228; Stop 252
atacaagtgtgtcattgccaggttg

SEQ ID NO: 464094 - DNA, 25 bp, Artificial
  probe
  misc_feature (1)..(25): SEQ ID NO: 7293; WAN024BZL; Start 64; Stop 88
agtattggtggagttttatggctta

SEQ ID NO: 464095 - DNA, 25 bp, Artificial
  probe
  misc_feature (1)..(25): SEQ ID NO: 7293; WAN024BZL; Start 68; Stop 92
ttggtggagttttatggcttatttt

SEQ ID NO: 464096 - DNA, 25 bp, Artificial
  probe
  misc_feature (1)..(25): SEQ ID NO: 7293; WAN024BZL; Start 67; Stop 91
attggtggagttttatggcttattt

SEQ ID NO: 464097 - DNA, 25 bp, Artificial
  probe
  misc_feature (1)..(25): SEQ ID NO: 7293; WAN024BZL; Start 65; Stop 89
gtattggtggagttttatggcttat

SEQ ID NO: 464098 - DNA, 25 bp, Artificial
  probe
  misc_feature (1)..(25): SEQ ID NO: 7293; WAN024BZL; Start 63; Stop 87
gagtattggtggagttttatggctt

SEQ ID NO: 464099 - DNA, 25 bp, Artificial
  probe
  misc_feature (1)..(25): SEQ ID NO: 7293; WAN024BZL; Start 60; Stop 84
aatgagtattggtggagttttatgg

SEQ ID NO: 464100 - DNA, 25 bp, Artificial
  probe
  misc_feature (1)..(25): SEQ ID NO: 7293; WAN024BZL; Start 61; Stop 85
atgagtattggtggagttttatggc

SEQ ID NO: 464101 - DNA, 25 bp, Artificial
  probe
  misc_feature (1)..(25): SEQ ID NO: 7293; WAN024BZL; Start 226; Stop 250
gtatacaagtgtgtcattgccaggt

SEQ ID NO: 464102 - DNA, 25 bp, Artificial
  probe
  misc_feature (1)..(25): SEQ ID NO: 7293; WAN024BZL; Start 154; Stop 178
atatctattgtgatggaagttgttt

SEQ ID NO: 464103 - DNA, 25 bp, Artificial
  probe
  misc_feature (1)..(25): SEQ ID NO: 7293; WAN024BZL; Start 152; Stop 176
aaatatctattgtgatggaagttgt

SEQ ID NO: 464104 - DNA, 25 bp, Artificial
  probe
  misc_feature (1)..(25): SEQ ID NO: 7293; WAN024BZL; Start 66; Stop 90
tattggtggagttttatggcttatt

SEQ ID NO: 464105 - DNA, 25 bp, Artificial
  probe
  misc_feature (1)..(25): SEQ ID NO: 7293; WAN024BZL; Start 235; Stop 259
tgtgtcattgccaggttgagaagat

SEQ ID NO: 464106 - DNA, 25 bp, Artificial
  probe
  misc_feature (1)..(25): SEQ ID NO: 7293; WAN024BZL; Start 1; Stop 25
gtggaatttccgactttattgataa

SEQ ID NO: 464107 - DNA, 25 bp, Artificial
  probe
  misc_feature (1)..(25): SEQ ID NO: 7293; WAN024BZL; Start 62; Stop 86
tgagtattggtggagttttatggct

SEQ ID NO: 464108 - DNA, 25 bp, Artificial
  probe
  misc_feature (1)..(25): SEQ ID NO: 7293; WAN024BZL; Start 8; Stop 32
ttccgactttattgataaaacagca

SEQ ID NO: 464109 - DNA, 25 bp, Artificial
  probe
  misc_feature (1)..(25): SEQ ID NO: 7293; WAN024BZL; Start 9; Stop 33
tccgactttattgataaaacagcat

SEQ ID NO: 464110 - DNA, 25 bp, Artificial
  probe
  misc_feature (1)..(25): SEQ ID NO: 7293; WAN024BZL; Start 229; Stop 253
tacaagtgtgtcattgccaggttga

SEQ ID NO: 464111 - DNA, 25 bp, Artificial
  probe
  misc_feature (1)..(25): SEQ ID NO: 7293; WAN024BZL; Start 10; Stop 34
ccgactttattgataaaacagcatg

SEQ ID NO: 464112 - DNA, 25 bp, Artificial
  probe
  misc_feature (1)..(25): SEQ ID NO: 7293; WAN024BZL; Start 57; Stop 81
agtaatgagtattggtggagtttta

SEQ ID NO: 464113 - DNA, 25 bp, Artificial
  probe
  misc_feature (1)..(25): SEQ ID NO: 7293; WAN024BZL; Start 56; Stop 80
tagtaatgagtattggtggagtttt

SEQ ID NO: 464114 - DNA, 25 bp, Artificial
  probe
  misc_feature (1)..(25): SEQ ID NO: 7293; WAN024BZL; Start 50; Stop 74
taaagatagtaatgagtattggtgg

SEQ ID NO: 464115 - DNA, 25 bp, Artificial
  probe
  misc_feature (1)..(25): SEQ ID NO: 7293; WAN024BZL; Start 7; Stop 31
tttccgactttattgataaaacagc

SEQ ID NO: 464116 - DNA, 25 bp, Artificial
  probe
  misc_feature (1)..(25): SEQ ID NO: 7293; WAN024BZL; Start 232; Stop 256
aagtgtgtcattgccaggttgagaa

SEQ ID NO: 464117 - DNA, 25 bp, Artificial
  probe
  misc_feature (1)..(25): SEQ ID NO: 7294; WAN024DHL; Start 46; Stop 70
aacacctctaatggctctattgtag

SEQ ID NO: 464118 - DNA, 25 bp, Artificial
  probe
  misc_feature (1)..(25): SEQ ID NO: 7294; WAN024DHL; Start 52; Stop 76
tctaatggctctattgtagcaagtt

SEQ ID NO: 464119 - DNA, 25 bp, Artificial
  probe
  misc_feature (1)..(25): SEQ ID NO: 7294; WAN024DHL; Start 51; Stop 75
ctctaatggctctattgtagcaagt

SEQ ID NO: 464120 - DNA, 25 bp, Artificial
  probe
  misc_feature (1)..(25): SEQ ID NO: 7294; WAN024DHL; Start 50; Stop 74
cctctaatggctctattgtagcaag

SEQ ID NO: 464121 - DNA, 25 bp, Artificial
  probe
  misc_feature (1)..(25): SEQ ID NO: 7294; WAN024DHL; Start 45; Stop 69
aaacacctctaatggctctattgta

SEQ ID NO: 464122 - DNA, 25 bp, Artificial
  probe
  misc_feature (1)..(25): SEQ ID NO: 7294; WAN024DHL; Start 49; Stop 73
acctctaatggctctattgtagcaa

SEQ ID NO: 464123 - DNA, 25 bp, Artificial
  probe
  misc_feature (1)..(25): SEQ ID NO: 7294; WAN024DHL; Start 48; Stop 72
cacctctaatggctctattgtagca

SEQ ID NO: 464124 - DNA, 25 bp, Artificial
  probe
  misc_feature (1)..(25): SEQ ID NO: 7294; WAN024DHL; Start 47; Stop 71
acacctctaatggctctattgtagc

SEQ ID NO: 464125 - DNA, 25 bp, Artificial
  probe
  misc_feature (1)..(25): SEQ ID NO: 7294; WAN024DHL; Start 103; Stop 127
aaattacttgaacttgatgccattt

SEQ ID NO: 464126 - DNA, 25 bp, Artificial
  probe
  misc_feature (1)..(25): SEQ ID NO: 7294; WAN024DHL; Start 53; Stop 77
ctaatggctctattgtagcaagttt

SEQ ID NO: 464127 - DNA, 25 bp, Artificial
  probe
  misc_feature (1)..(25): SEQ ID NO: 7294; WAN024DHL; Start 42; Stop 66
tcaaaacacctctaatggctctatt

SEQ ID NO: 464128 - DNA, 25 bp, Artificial
  probe
  misc_feature (1)..(25): SEQ ID NO: 7294; WAN024DHL; Start 41; Stop 65
ttcaaaacacctctaatggctctat

SEQ ID NO: 464129 - DNA, 25 bp, Artificial
  probe
  misc_feature (1)..(25): SEQ ID NO: 7294; WAN024DHL; Start 40; Stop 64
attcaaaacacctctaatggctcta

SEQ ID NO: 464130 - DNA, 25 bp, Artificial
  probe
  misc_feature (1)..(25): SEQ ID NO: 7294; WAN024DHL; Start 108; Stop 132
acttgaacttgatgccattttcttt

SEQ ID NO: 464131 - DNA, 25 bp, Artificial
  probe
  misc_feature (1)..(25): SEQ ID NO: 7294; WAN024DHL; Start 21; Stop 45
actttctgtaaaatgtgggattcaa

SEQ ID NO: 464132 - DNA, 25 bp, Artificial
  probe
  misc_feature (1)..(25): SEQ ID NO: 7294; WAN024DHL; Start 39; Stop 63
gattcaaaacacctctaatggctct

SEQ ID NO: 464133 - DNA, 25 bp, Artificial
  probe
  misc_feature (1)..(25): SEQ ID NO: 7294; WAN024DHL; Start 109; Stop 133
cttgaacttgatgccattttctttc

SEQ ID NO: 464134 - DNA, 25 bp, Artificial
  probe
  misc_feature (1)..(25): SEQ ID NO: 7294; WAN024DHL; Start 107; Stop 131
tacttgaacttgatgccattttctt

SEQ ID NO: 464135 - DNA, 25 bp, Artificial
  probe
  misc_feature (1)..(25): SEQ ID NO: 7294; WAN024DHL; Start 106; Stop 130
ttacttgaacttgatgccattttct

SEQ ID NO: 464136 - DNA, 25 bp, Artificial
  probe
  misc_feature (1)..(25): SEQ ID NO: 7294; WAN024DHL; Start 43; Stop 67
caaaacacctctaatggctctattg

SEQ ID NO: 464137 - DNA, 25 bp, Artificial
  probe
  misc_feature (1)..(25): SEQ ID NO: 7294; WAN024DHL; Start 24; Stop 48
ttctgtaaaatgtgggattcaaaac

SEQ ID NO: 464138 - DNA, 25 bp, Artificial
  probe
  misc_feature (1)..(25): SEQ ID NO: 7294; WAN024DHL; Start 105; Stop 129
attacttgaacttgatgccattttc

SEQ ID NO: 464139 - DNA, 25 bp, Artificial
  probe
  misc_feature (1)..(25): SEQ ID NO: 7294; WAN024DHL; Start 22; Stop 46
ctttctgtaaaatgtgggattcaaa

SEQ ID NO: 464140 - DNA, 25 bp, Artificial
  probe
  misc_feature (1)..(25): SEQ ID NO: 7294; WAN024DHL; Start 44; Stop 68
aaaacacctctaatggctctattgt

SEQ ID NO: 464141 - DNA, 25 bp, Artificial
  probe
  misc_feature (1)..(25): SEQ ID NO: 7294; WAN024DHL; Start 38; Stop 62
ggattcaaaacacctctaatggctc

SEQ ID NO: 464142 - DNA, 25 bp, Artificial
  probe
  misc_feature (1)..(25): SEQ ID NO: 7294; WAN024DHL; Start 104; Stop 128
aattacttgaacttgatgccatttt

SEQ ID NO: 464143 - DNA, 25 bp, Artificial
  probe
  misc_feature (1)..(25): SEQ ID NO: 7294; WAN024DHL; Start 102; Stop 126
aaaattacttgaacttgatgccatt

SEQ ID NO: 464144 - DNA, 25 bp, Artificial
  probe
  misc_feature (1)..(25): SEQ ID NO: 7294; WAN024DHL; Start 25; Stop 49
tctgtaaaatgtgggattcaaaaca

SEQ ID NO: 464145 - DNA, 25 bp, Artificial
  probe
  misc_feature (1)..(25): SEQ ID NO: 7294; WAN024DHL; Start 126; Stop 150
tttctttcaatttcttgatggtagc

SEQ ID NO: 464146 - DNA, 25 bp, Artificial
  probe
  misc_feature (1)..(25): SEQ ID NO: 7294; WAN024DHL; Start 23; Stop 47
tttctgtaaaatgtgggattcaaaa

SEQ ID NO: 464147 - DNA, 25 bp, Artificial
  probe
  misc_feature (1)..(25): SEQ ID NO: 7294; WAN024DHL; Start 117; Stop 141
tgatgccattttctttcaatttctt

SEQ ID NO: 464148 - DNA, 25 bp, Artificial
  probe
  misc_feature (1)..(25): SEQ ID NO: 7294; WAN024DHL; Start 29; Stop 53
taaaatgtgggattcaaaacacctc

SEQ ID NO: 464149 - DNA, 25 bp, Artificial
  probe
  misc_feature (1)..(25): SEQ ID NO: 7294; WAN024DHL; Start 129; Stop 153
ctttcaatttcttgatggtagctgg

SEQ ID NO: 464150 - DNA, 25 bp, Artificial
  probe
  misc_feature (1)..(25): SEQ ID NO: 7295; WAN024CSD; Start 332; Stop 356
atatcacttgtcttagtccagagaa

SEQ ID NO: 464151 - DNA, 25 bp, Artificial
  probe
  misc_feature (1)..(25): SEQ ID NO: 7295; WAN024CSD; Start 331; Stop 355
aatatcacttgtcttagtccagaga

SEQ ID NO: 464152 - DNA, 25 bp, Artificial
  probe
  misc_feature (1)..(25): SEQ ID NO: 7295; WAN024CSD; Start 382; Stop 406
ctaggaagtcatgctactcaatcat

SEQ ID NO: 464153 - DNA, 25 bp, Artificial
  probe
  misc_feature (1)..(25): SEQ ID NO: 7295; WAN024CSD; Start 384; Stop 408
aggaagtcatgctactcaatcatac

SEQ ID NO: 464154 - DNA, 25 bp, Artificial
  probe
  misc_feature (1)..(25): SEQ ID NO: 7295; WAN024CSD; Start 385; Stop 409
ggaagtcatgctactcaatcataca

SEQ ID NO: 464155 - DNA, 25 bp, Artificial
  probe
  misc_feature (1)..(25): SEQ ID NO: 7295; WAN024CSD; Start 386; Stop 410
gaagtcatgctactcaatcatacaa

SEQ ID NO: 464156 - DNA, 25 bp, Artificial
  probe
  misc_feature (1)..(25): SEQ ID NO: 7295; WAN024CSD; Start 383; Stop 407
taggaagtcatgctactcaatcata

SEQ ID NO: 464157 - DNA, 25 bp, Artificial
  probe
  misc_feature (1)..(25): SEQ ID NO: 7295; WAN024CSD; Start 388; Stop 412
agtcatgctactcaatcatacaatt

SEQ ID NO: 464158 - DNA, 25 bp, Artificial
  probe
  misc_feature (1)..(25): SEQ ID NO: 7295; WAN024CSD; Start 387; Stop 411
aagtcatgctactcaatcatacaat

SEQ ID NO: 464159 - DNA, 25 bp, Artificial
  probe
  misc_feature (1)..(25): SEQ ID NO: 7295; WAN024CSD; Start 322; Stop 346
tttggcggaaatatcacttgtctta

SEQ ID NO: 464160 - DNA, 25 bp, Artificial
  probe
  misc_feature (1)..(25): SEQ ID NO: 7295; WAN024CSD; Start 93; Stop 117
gaagcagcctatctttcttatggaa

SEQ ID NO: 464161 - DNA, 25 bp, Artificial
  probe
  misc_feature (1)..(25): SEQ ID NO: 7295; WAN024CSD; Start 323; Stop 347
ttggcggaaatatcacttgtcttag

SEQ ID NO: 464162 - DNA, 25 bp, Artificial
  probe
  misc_feature (1)..(25): SEQ ID NO: 7295; WAN024CSD; Start 381; Stop 405
gctaggaagtcatgctactcaatca

SEQ ID NO: 464163 - DNA, 25 bp, Artificial
  probe
  misc_feature (1)..(25): SEQ ID NO: 7295; WAN024CSD; Start 335; Stop 359
tcacttgtcttagtccagagaaatg

SEQ ID NO: 464164 - DNA, 25 bp, Artificial
  probe
  misc_feature (1)..(25): SEQ ID NO: 7295; WAN024CSD; Start 334; Stop 358
atcacttgtcttagtccagagaaat

SEQ ID NO: 464165 - DNA, 25 bp, Artificial
  probe
  misc_feature (1)..(25): SEQ ID NO: 7295; WAN024CSD; Start 333; Stop 357
tatcacttgtcttagtccagagaaa

SEQ ID NO: 464166 - DNA, 25 bp, Artificial
  probe
  misc_feature (1)..(25): SEQ ID NO: 7295; WAN024CSD; Start 245; Stop 269
ttcactttgctagtccaccatatac

SEQ ID NO: 464167 - DNA, 25 bp, Artificial
  probe
  misc_feature (1)..(25): SEQ ID NO: 7295; WAN024CSD; Start 244; Stop 268
gttcactttgctagtccaccatata

SEQ ID NO: 464168 - DNA, 25 bp, Artificial
  probe
  misc_feature (1)..(25): SEQ ID NO: 7295; WAN024CSD; Start 321; Stop 345
gtttggcggaaatatcacttgtctt

SEQ ID NO: 464169 - DNA, 25 bp, Artificial
  probe
  misc_feature (1)..(25): SEQ ID NO: 7295; WAN024CSD; Start 246; Stop 270
tcactttgctagtccaccatatact

SEQ ID NO: 464170 - DNA, 25 bp, Artificial
  probe
  misc_feature (1)..(25): SEQ ID NO: 7295; WAN024CSD; Start 325; Stop 349
ggcggaaatatcacttgtcttagtc

SEQ ID NO: 464171 - DNA, 25 bp, Artificial
  probe
  misc_feature (1)..(25): SEQ ID NO: 7295; WAN024CSD; Start 330; Stop 354
aaatatcacttgtcttagtccagag

SEQ ID NO: 464172 - DNA, 25 bp, Artificial
  probe
  misc_feature (1)..(25): SEQ ID NO: 7295; WAN024CSD; Start 329; Stop 353
gaaatatcacttgtcttagtccaga

SEQ ID NO: 464173 - DNA, 25 bp, Artificial
  probe
  misc_feature (1)..(25): SEQ ID NO: 7295; WAN024CSD; Start 327; Stop 351
cggaaatatcacttgtcttagtcca

SEQ ID NO: 464174 - DNA, 25 bp, Artificial
  probe
  misc_feature (1)..(25): SEQ ID NO: 7295; WAN024CSD; Start 324; Stop 348
tggcggaaatatcacttgtcttagt

SEQ ID NO: 464175 - DNA, 25 bp, Artificial
  probe
  misc_feature (1)..(25): SEQ ID NO: 7295; WAN024CSD; Start 243; Stop 267
agttcactttgctagtccaccatat

SEQ ID NO: 464176 - DNA, 25 bp, Artificial
  probe
  misc_feature (1)..(25): SEQ ID NO: 7295; WAN024CSD; Start 375; Stop 399
atctaagctaggaagtcatgctact

SEQ ID NO: 464177 - DNA, 25 bp, Artificial
  probe
  misc_feature (1)..(25): SEQ ID NO: 7295; WAN024CSD; Start 374; Stop 398
catctaagctaggaagtcatgctac

SEQ ID NO: 464178 - DNA, 25 bp, Artificial
  probe
  misc_feature (1)..(25): SEQ ID NO: 7295; WAN024CSD; Start 301; Stop 325
ttgacccgtaaattgaccaagtttg

SEQ ID NO: 464179 - DNA, 25 bp, Artificial
  probe
  misc_feature (1)..(25): SEQ ID NO: 7295; WAN024CSD; Start 378; Stop 402
taagctaggaagtcatgctactcaa

SEQ ID NO: 464180 - DNA, 25 bp, Artificial
  probe
  misc_feature (1)..(25): SEQ ID NO: 7295; WAN024CSD; Start 328; Stop 352
ggaaatatcacttgtcttagtccag

SEQ ID NO: 464181 - DNA, 25 bp, Artificial
  probe
  misc_feature (1)..(25): SEQ ID NO: 7295; WAN024CSD; Start 247; Stop 271
cactttgctagtccaccatatacta

SEQ ID NO: 464182 - DNA, 25 bp, Artificial
  probe
  misc_feature (1)..(25): SEQ ID NO: 7295; WAN024CSD; Start 149; Stop 173
gaacttcaggtaaagggatgctcat

SEQ ID NO: 464183 - DNA, 25 bp, Artificial
  probe
  misc_feature (1)..(25): SEQ ID NO: 7296; WAN024ETU; Start 64; Stop 88
aagcagctaactgatctcgataatt

SEQ ID NO: 464184 - DNA, 25 bp, Artificial
  probe
  misc_feature (1)..(25): SEQ ID NO: 7296; WAN024ETU; Start 143; Stop 167
caagtgccagccttcaatcaaatag

SEQ ID NO: 464185 - DNA, 25 bp, Artificial
  probe
  misc_feature (1)..(25): SEQ ID NO: 7296; WAN024ETU; Start 65; Stop 89
agcagctaactgatctcgataattt

SEQ ID NO: 464186 - DNA, 25 bp, Artificial
  probe
  misc_feature (1)..(25): SEQ ID NO: 7296; WAN024ETU; Start 63; Stop 87
aaagcagctaactgatctcgataat

SEQ ID NO: 464187 - DNA, 25 bp, Artificial
  probe
  misc_feature (1)..(25): SEQ ID NO: 7296; WAN024ETU; Start 4; Stop 28
gagtctgagaatccgccaaatctag

SEQ ID NO: 464188 - DNA, 25 bp, Artificial
  probe
  misc_feature (1)..(25): SEQ ID NO: 7296; WAN024ETU; Start 142; Stop 166
acaagtgccagccttcaatcaaata

SEQ ID NO: 464189 - DNA, 25 bp, Artificial
  probe
  misc_feature (1)..(25): SEQ ID NO: 7296; WAN024ETU; Start 215; Stop 239
cacagaattggcttttgaggttata

SEQ ID NO: 464190 - DNA, 25 bp, Artificial
  probe
  misc_feature (1)..(25): SEQ ID NO: 7296; WAN024ETU; Start 18; Stop 42
gccaaatctagcaaaatatcctctg

SEQ ID NO: 464191 - DNA, 25 bp, Artificial
  probe
  misc_feature (1)..(25): SEQ ID NO: 7296; WAN024ETU; Start 13; Stop 37
aatccgccaaatctagcaaaatatc

SEQ ID NO: 464192 - DNA, 25 bp, Artificial
  probe
  misc_feature (1)..(25): SEQ ID NO: 7296; WAN024ETU; Start 12; Stop 36
gaatccgccaaatctagcaaaatat

SEQ ID NO: 464193 - DNA, 25 bp, Artificial
  probe
  misc_feature (1)..(25): SEQ ID NO: 7296; WAN024ETU; Start 186; Stop 210
ttttggtgtaatttcttggcatttt

SEQ ID NO: 464194 - DNA, 25 bp, Artificial
  probe
  misc_feature (1)..(25): SEQ ID NO: 7296; WAN024ETU; Start 8; Stop 32
ctgagaatccgccaaatctagcaaa

SEQ ID NO: 464195 - DNA, 25 bp, Artificial
  probe
  misc_feature (1)..(25): SEQ ID NO: 7296; WAN024ETU; Start 17; Stop 41
cgccaaatctagcaaaatatcctct

SEQ ID NO: 464196 - DNA, 25 bp, Artificial
  probe
  misc_feature (1)..(25): SEQ ID NO: 7296; WAN024ETU; Start 11; Stop 35
agaatccgccaaatctagcaaaata

SEQ ID NO: 464197 - DNA, 25 bp, Artificial
  probe
  misc_feature (1)..(25): SEQ ID NO: 7296; WAN024ETU; Start 87; Stop 111
ttttctagggcaaagattttctcaa

SEQ ID NO: 464198 - DNA, 25 bp, Artificial
  probe
  misc_feature (1)..(25): SEQ ID NO: 7296; WAN024ETU; Start 25; Stop 49
ctagcaaaatatcctctgaaatcca

SEQ ID NO: 464199 - DNA, 25 bp, Artificial
  probe
  misc_feature (1)..(25): SEQ ID NO: 7296; WAN024ETU; Start 19; Stop 43
ccaaatctagcaaaatatcctctga

SEQ ID NO: 464200 - DNA, 25 bp, Artificial
  probe
  misc_feature (1)..(25): SEQ ID NO: 7296; WAN024ETU; Start 88; Stop 112
tttctagggcaaagattttctcaat

SEQ ID NO: 464201 - DNA, 25 bp, Artificial
  probe
  misc_feature (1)..(25): SEQ ID NO: 7296; WAN024ETU; Start 86; Stop 110
attttctagggcaaagattttctca

SEQ ID NO: 464202 - DNA, 25 bp, Artificial
  probe
  misc_feature (1)..(25): SEQ ID NO: 7296; WAN024ETU; Start 14; Stop 38
atccgccaaatctagcaaaatatcc

SEQ ID NO: 464203 - DNA, 25 bp, Artificial
  probe
  misc_feature (1)..(25): SEQ ID NO: 7296; WAN024ETU; Start 24; Stop 48
tctagcaaaatatcctctgaaatcc

SEQ ID NO: 464204 - DNA, 25 bp, Artificial
  probe
  misc_feature (1)..(25): SEQ ID NO: 7296; WAN024ETU; Start 141; Stop 165
aacaagtgccagccttcaatcaaat

SEQ ID NO: 464205 - DNA, 25 bp, Artificial
  probe
  misc_feature (1)..(25): SEQ ID NO: 7296; WAN024ETU; Start 216; Stop 240
acagaattggcttttgaggttataa

SEQ ID NO: 464206 - DNA, 25 bp, Artificial
  probe
  misc_feature (1)..(25): SEQ ID NO: 7296; WAN024ETU; Start 140; Stop 164
aaacaagtgccagccttcaatcaaa

SEQ ID NO: 464207 - DNA, 25 bp, Artificial
  probe
  misc_feature (1)..(25): SEQ ID NO: 7296; WAN024ETU; Start 16; Stop 40
ccgccaaatctagcaaaatatcctc

SEQ ID NO: 464208 - DNA, 25 bp, Artificial
  probe
  misc_feature (1)..(25): SEQ ID NO: 7296; WAN024ETU; Start 26; Stop 50
tagcaaaatatcctctgaaatccag

SEQ ID NO: 464209 - DNA, 25 bp, Artificial
  probe
  misc_feature (1)..(25): SEQ ID NO: 7296; WAN024ETU; Start 10; Stop 34
gagaatccgccaaatctagcaaaat

SEQ ID NO: 464210 - DNA, 25 bp, Artificial
  probe
  misc_feature (1)..(25): SEQ ID NO: 7296; WAN024ETU; Start 144; Stop 168
aagtgccagccttcaatcaaatagg

SEQ ID NO: 464211 - DNA, 25 bp, Artificial
  probe
  misc_feature (1)..(25): SEQ ID NO: 7296; WAN024ETU; Start 75; Stop 99
tgatctcgataattttctagggcaa

SEQ ID NO: 464212 - DNA, 25 bp, Artificial
  probe
  misc_feature (1)..(25): SEQ ID NO: 7296; WAN024ETU; Start 74; Stop 98
ctgatctcgataattttctagggca

SEQ ID NO: 464213 - DNA, 25 bp, Artificial
  probe
  misc_feature (1)..(25): SEQ ID NO: 7296; WAN024ETU; Start 73; Stop 97
actgatctcgataattttctagggc

SEQ ID NO: 464214 - DNA, 25 bp, Artificial
  probe
  misc_feature (1)..(25): SEQ ID NO: 7296; WAN024ETU; Start 85; Stop 109
aattttctagggcaaagattttctc

SEQ ID NO: 464215 - DNA, 25 bp, Artificial
  probe
  misc_feature (1)..(25): SEQ ID NO: 7296; WAN024ETU; Start 15; Stop 39
tccgccaaatctagcaaaatatcct

SEQ ID NO: 464216 - DNA, 25 bp, Artificial
  probe
  misc_feature (1)..(25): SEQ ID NO: 7297; WAN024BBW; Start 96; Stop 120
taaaacgcatattaccaaggttgtg

SEQ ID NO: 464217 - DNA, 25 bp, Artificial
  probe
  misc_feature (1)..(25): SEQ ID NO: 7297; WAN024BBW; Start 95; Stop 119
ataaaacgcatattaccaaggttgt

SEQ ID NO: 464218 - DNA, 25 bp, Artificial
  probe
  misc_feature (1)..(25): SEQ ID NO: 7297; WAN024BBW; Start 94; Stop 118
aataaaacgcatattaccaaggttg

SEQ ID NO: 464219 - DNA, 25 bp, Artificial
  probe
  misc_feature (1)..(25): SEQ ID NO: 7297; WAN024BBW; Start 93; Stop 117
taataaaacgcatattaccaaggtt

SEQ ID NO: 464220 - DNA, 25 bp, Artificial
  probe
  misc_feature (1)..(25): SEQ ID NO: 7297; WAN024BBW; Start 82; Stop 106
aagtctctacataataaaacgcata

SEQ ID NO: 464221 - DNA, 25 bp, Artificial
  probe
  misc_feature (1)..(25): SEQ ID NO: 7297; WAN024BBW; Start 81; Stop 105
taagtctctacataataaaacgcat

SEQ ID NO: 464222 - DNA, 25 bp, Artificial
  probe
  misc_feature (1)..(25): SEQ ID NO: 7297; WAN024BBW; Start 80; Stop 104
ataagtctctacataataaaacgca

SEQ ID NO: 464223 - DNA, 25 bp, Artificial
  probe
  misc_feature (1)..(25): SEQ ID NO: 7297; WAN024BBW; Start 92; Stop 116
ataataaaacgcatattaccaaggt

SEQ ID NO: 464224 - DNA, 25 bp, Artificial
  probe
  misc_feature (1)..(25): SEQ ID NO: 7297; WAN024BBW; Start 71; Stop 95
tcgaagagtataagtctctacataa

SEQ ID NO: 464225 - DNA, 25 bp, Artificial
  probe
  misc_feature (1)..(25): SEQ ID NO: 7297; WAN024BBW; Start 91; Stop 115
cataataaaacgcatattaccaagg

SEQ ID NO: 464226 - DNA, 25 bp, Artificial
  probe
  misc_feature (1)..(25): SEQ ID NO: 7297; WAN024BBW; Start 83; Stop 107
agtctctacataataaaacgcatat

SEQ ID NO: 464227 - DNA, 25 bp, Artificial
  probe
  misc_feature (1)..(25): SEQ ID NO: 7297; WAN024BBW; Start 72; Stop 96
cgaagagtataagtctctacataat

SEQ ID NO: 464228 - DNA, 25 bp, Artificial
  probe
  misc_feature (1)..(25): SEQ ID NO: 7297; WAN024BBW; Start 90; Stop 114
acataataaaacgcatattaccaag

SEQ ID NO: 464229 - DNA, 25 bp, Artificial
  probe
  misc_feature (1)..(25): SEQ ID NO: 7297; WAN024BBW; Start 84; Stop 108
gtctctacataataaaacgcatatt

SEQ ID NO: 464230 - DNA, 25 bp, Artificial
  probe
  misc_feature (1)..(25): SEQ ID NO: 7297; WAN024BBW; Start 88; Stop 112
ctacataataaaacgcatattacca

SEQ ID NO: 464231 - DNA, 25 bp, Artificial
  probe
  misc_feature (1)..(25): SEQ ID NO: 7297; WAN024BBW; Start 70; Stop 94
ttcgaagagtataagtctctacata

SEQ ID NO: 464232 - DNA, 25 bp, Artificial
  probe
  misc_feature (1)..(25): SEQ ID NO: 7297; WAN024BBW; Start 87; Stop 111
tctacataataaaacgcatattacc

SEQ ID NO: 464233 - DNA, 25 bp, Artificial
  probe
  misc_feature (1)..(25): SEQ ID NO: 7297; WAN024BBW; Start 63; Stop 87
agagattttcgaagagtataagtct

SEQ ID NO: 464234 - DNA, 25 bp, Artificial
  probe
  misc_feature (1)..(25): SEQ ID NO: 7297; WAN024BBW; Start 89; Stop 113
tacataataaaacgcatattaccaa

SEQ ID NO: 464235 - DNA, 25 bp, Artificial
  probe
  misc_feature (1)..(25): SEQ ID NO: 7297; WAN024BBW; Start 69; Stop 93
tttcgaagagtataagtctctacat

SEQ ID NO: 464236 - DNA, 25 bp, Artificial
  probe
  misc_feature (1)..(25): SEQ ID NO: 7297; WAN024BBW; Start 62; Stop 86
aagagattttcgaagagtataagtc

SEQ ID NO: 464237 - DNA, 25 bp, Artificial
  probe
  misc_feature (1)..(25): SEQ ID NO: 7297; WAN024BBW; Start 61; Stop 85
gaagagattttcgaagagtataagt

SEQ ID NO: 464238 - DNA, 25 bp, Artificial
  probe
  misc_feature (1)..(25): SEQ ID NO: 7297; WAN024BBW; Start 65; Stop 89
agattttcgaagagtataagtctct

SEQ ID NO: 464239 - DNA, 25 bp, Artificial
  probe
  misc_feature (1)..(25): SEQ ID NO: 7297; WAN024BBW; Start 68; Stop 92
ttttcgaagagtataagtctctaca

SEQ ID NO: 464240 - DNA, 25 bp, Artificial
  probe
  misc_feature (1)..(25): SEQ ID NO: 7297; WAN024BBW; Start 64; Stop 88
gagattttcgaagagtataagtctc

SEQ ID NO: 464241 - DNA, 25 bp, Artificial
  probe
  misc_feature (1)..(25): SEQ ID NO: 7297; WAN024BBW; Start 67; Stop 91
attttcgaagagtataagtctctac

SEQ ID NO: 464242 - DNA, 25 bp, Artificial
  probe
  misc_feature (1)..(25): SEQ ID NO: 7297; WAN024BBW; Start 66; Stop 90
gattttcgaagagtataagtctcta

SEQ ID NO: 464243 - DNA, 25 bp, Artificial
  probe
  misc_feature (1)..(25): SEQ ID NO: 7298; WAN024BYX; Start 93; Stop 117
cgtagagtatgatggtggtctgaac

SEQ ID NO: 464244 - DNA, 25 bp, Artificial
  probe
  misc_feature (1)..(25): SEQ ID NO: 7298; WAN024BYX; Start 309; Stop 333
cttctctggtttcattgatttctgg

SEQ ID NO: 464245 - DNA, 25 bp, Artificial
  probe
  misc_feature (1)..(25): SEQ ID NO: 7298; WAN024BYX; Start 308; Stop 332
ccttctctggtttcattgatttctg

SEQ ID NO: 464246 - DNA, 25 bp, Artificial
  probe
  misc_feature (1)..(25): SEQ ID NO: 7298; WAN024BYX; Start 176; Stop 200
ctgacttctcaaagacctattctgt

SEQ ID NO: 464247 - DNA, 25 bp, Artificial
  probe
  misc_feature (1)..(25): SEQ ID NO: 7298; WAN024BYX; Start 172; Stop 196
aatgctgacttctcaaagacctatt

SEQ ID NO: 464248 - DNA, 25 bp, Artificial
  probe
  misc_feature (1)..(25): SEQ ID NO: 7298; WAN024BYX; Start 171; Stop 195
taatgctgacttctcaaagacctat

SEQ ID NO: 464249 - DNA, 25 bp, Artificial
  probe
  misc_feature (1)..(25): SEQ ID NO: 7298; WAN024BYX; Start 170; Stop 194
ataatgctgacttctcaaagaccta

SEQ ID NO: 464250 - DNA, 25 bp, Artificial
  probe
  misc_feature (1)..(25): SEQ ID NO: 7298; WAN024BYX; Start 173; Stop 197
atgctgacttctcaaagacctattc

SEQ ID NO: 464251 - DNA, 25 bp, Artificial
  probe
  misc_feature (1)..(25): SEQ ID NO: 7298; WAN024BYX; Start 169; Stop 193
cataatgctgacttctcaaagacct

SEQ ID NO: 464252 - DNA, 25 bp, Artificial
  probe
  misc_feature (1)..(25): SEQ ID NO: 7298; WAN024BYX; Start 168; Stop 192
tcataatgctgacttctcaaagacc

SEQ ID NO: 464253 - DNA, 25 bp, Artificial
  probe
  misc_feature (1)..(25): SEQ ID NO: 7298; WAN024BYX; Start 42; Stop 66
tggtgaaatctctcgtgagtttaat

SEQ ID NO: 464254 - DNA, 25 bp, Artificial
  probe
  misc_feature (1)..(25): SEQ ID NO: 7298; WAN024BYX; Start 41; Stop 65
atggtgaaatctctcgtgagtttaa

SEQ ID NO: 464255 - DNA, 25 bp, Artificial
  probe
  misc_feature (1)..(25): SEQ ID NO: 7298; WAN024BYX; Start 39; Stop 63
ttatggtgaaatctctcgtgagttt

SEQ ID NO: 464256 - DNA, 25 bp, Artificial
  probe
  misc_feature (1)..(25): SEQ ID NO: 7298; WAN024BYX; Start 431; Stop 455
ttgaggttagcaacaacttcattta

SEQ ID NO: 464257 - DNA, 25 bp, Artificial
  probe
  misc_feature (1)..(25): SEQ ID NO: 7298; WAN024BYX; Start 40; Stop 64
tatggtgaaatctctcgtgagttta

SEQ ID NO: 464258 - DNA, 25 bp, Artificial
  probe
  misc_feature (1)..(25): SEQ ID NO: 7298; WAN024BYX; Start 38; Stop 62
cttatggtgaaatctctcgtgagtt

SEQ ID NO: 464259 - DNA, 25 bp, Artificial
  probe
  misc_feature (1)..(25): SEQ ID NO: 7298; WAN024BYX; Start 310; Stop 334
ttctctggtttcattgatttctggc

SEQ ID NO: 464260 - DNA, 25 bp, Artificial
  probe
  misc_feature (1)..(25): SEQ ID NO: 7298; WAN024BYX; Start 432; Stop 456
tgaggttagcaacaacttcatttat

SEQ ID NO: 464261 - DNA, 25 bp, Artificial
  probe
  misc_feature (1)..(25): SEQ ID NO: 7298; WAN024BYX; Start 177; Stop 201
tgacttctcaaagacctattctgta

SEQ ID NO: 464262 - DNA, 25 bp, Artificial
  probe
  misc_feature (1)..(25): SEQ ID NO: 7298; WAN024BYX; Start 175; Stop 199
gctgacttctcaaagacctattctg

SEQ ID NO: 464263 - DNA, 25 bp, Artificial
  probe
  misc_feature (1)..(25): SEQ ID NO: 7298; WAN024BYX; Start 94; Stop 118
gtagagtatgatggtggtctgaacc

SEQ ID NO: 464264 - DNA, 25 bp, Artificial
  probe
  misc_feature (1)..(25): SEQ ID NO: 7298; WAN024BYX; Start 174; Stop 198
tgctgacttctcaaagacctattct

SEQ ID NO: 464265 - DNA, 25 bp, Artificial
  probe
  misc_feature (1)..(25): SEQ ID NO: 7298; WAN024BYX; Start 43; Stop 67
ggtgaaatctctcgtgagtttaata

SEQ ID NO: 464266 - DNA, 25 bp, Artificial
  probe
  misc_feature (1)..(25): SEQ ID NO: 7298; WAN024BYX; Start 439; Stop 463
agcaacaacttcatttataacacct

SEQ ID NO: 464267 - DNA, 25 bp, Artificial
  probe
  misc_feature (1)..(25): SEQ ID NO: 7298; WAN024BYX; Start 249; Stop 273
ctataattcggtacagctcactggt

SEQ ID NO: 464268 - DNA, 25 bp, Artificial
  probe
  misc_feature (1)..(25): SEQ ID NO: 7298; WAN024BYX; Start 178; Stop 202
gacttctcaaagacctattctgtac

SEQ ID NO: 464269 - DNA, 25 bp, Artificial
  probe
  misc_feature (1)..(25): SEQ ID NO: 7298; WAN024BYX; Start 250; Stop 274
tataattcggtacagctcactggtg

SEQ ID NO: 464270 - DNA, 25 bp, Artificial
  probe
  misc_feature (1)..(25): SEQ ID NO: 7298; WAN024BYX; Start 307; Stop 331
accttctctggtttcattgatttct

SEQ ID NO: 464271 - DNA, 25 bp, Artificial
  probe
  misc_feature (1)..(25): SEQ ID NO: 7298; WAN024BYX; Start 221; Stop 245
tctttaagagctacgacaataccag

SEQ ID NO: 464272 - DNA, 25 bp, Artificial
  probe
  misc_feature (1)..(25): SEQ ID NO: 7298; WAN024BYX; Start 220; Stop 244
ttctttaagagctacgacaatacca

SEQ ID NO: 464273 - DNA, 25 bp, Artificial
  probe
  misc_feature (1)..(25): SEQ ID NO: 7298; WAN024BYX; Start 219; Stop 243
cttctttaagagctacgacaatacc

SEQ ID NO: 464274 - DNA, 25 bp, Artificial
  probe
  misc_feature (1)..(25): SEQ ID NO: 7298; WAN024BYX; Start 248; Stop 272
cctataattcggtacagctcactgg

SEQ ID NO: 464275 - DNA, 25 bp, Artificial
  probe
  misc_feature (1)..(25): SEQ ID NO: 7298; WAN024BYX; Start 306; Stop 330
taccttctctggtttcattgatttc

SEQ ID NO: 464276 - DNA, 25 bp, Artificial
  probe
  misc_feature (1)..(25): SEQ ID NO: 7299; WAN024BME; Start 339; Stop 363
aacgattggaatcctctatactcag

SEQ ID NO: 464277 - DNA, 25 bp, Artificial
  probe
  misc_feature (1)..(25): SEQ ID NO: 7299; WAN024BME; Start 340; Stop 364
acgattggaatcctctatactcaga

SEQ ID NO: 464278 - DNA, 25 bp, Artificial
  probe
  misc_feature (1)..(25): SEQ ID NO: 7299; WAN024BME; Start 223; Stop 247
aagttggttgagtcaagagaacatc

SEQ ID NO: 464279 - DNA, 25 bp, Artificial
  probe
  misc_feature (1)..(25): SEQ ID NO: 7299; WAN024BME; Start 222; Stop 246
caagttggttgagtcaagagaacat

SEQ ID NO: 464280 - DNA, 25 bp, Artificial
  probe
  misc_feature (1)..(25): SEQ ID NO: 7299; WAN024BME; Start 312; Stop 336
gataaagaaagtgttgctaaaggct

SEQ ID NO: 464281 - DNA, 25 bp, Artificial
  probe
  misc_feature (1)..(25): SEQ ID NO: 7299; WAN024BME; Start 311; Stop 335
tgataaagaaagtgttgctaaaggc

SEQ ID NO: 464282 - DNA, 25 bp, Artificial
  probe
  misc_feature (1)..(25): SEQ ID NO: 7299; WAN024BME; Start 315; Stop 339
aaagaaagtgttgctaaaggctaaa

SEQ ID NO: 464283 - DNA, 25 bp, Artificial
  probe
  misc_feature (1)..(25): SEQ ID NO: 7299; WAN024BME; Start 314; Stop 338
taaagaaagtgttgctaaaggctaa

SEQ ID NO: 464284 - DNA, 25 bp, Artificial
  probe
  misc_feature (1)..(25): SEQ ID NO: 7299; WAN024BME; Start 313; Stop 337
ataaagaaagtgttgctaaaggcta

SEQ ID NO: 464285 - DNA, 25 bp, Artificial
  probe
  misc_feature (1)..(25): SEQ ID NO: 7299; WAN024BME; Start 65; Stop 89
cacagggagaacaaagaaatctaaa

SEQ ID NO: 464286 - DNA, 25 bp, Artificial
  probe
  misc_feature (1)..(25): SEQ ID NO: 7299; WAN024BME; Start 338; Stop 362
aaacgattggaatcctctatactca

SEQ ID NO: 464287 - DNA, 25 bp, Artificial
  probe
  misc_feature (1)..(25): SEQ ID NO: 7299; WAN024BME; Start 64; Stop 88
gcacagggagaacaaagaaatctaa

SEQ ID NO: 464288 - DNA, 25 bp, Artificial
  probe
  misc_feature (1)..(25): SEQ ID NO: 7299; WAN024BME; Start 226; Stop 250
ttggttgagtcaagagaacatcctg

SEQ ID NO: 464289 - DNA, 25 bp, Artificial
  probe
  misc_feature (1)..(25): SEQ ID NO: 7299; WAN024BME; Start 225; Stop 249
gttggttgagtcaagagaacatcct

SEQ ID NO: 464290 - DNA, 25 bp, Artificial
  probe
  misc_feature (1)..(25): SEQ ID NO: 7299; WAN024BME; Start 224; Stop 248
agttggttgagtcaagagaacatcc

SEQ ID NO: 464291 - DNA, 25 bp, Artificial
  probe
  misc_feature (1)..(25): SEQ ID NO: 7299; WAN024BME; Start 287; Stop 311
atgccatttcaacccaaatcaattt

SEQ ID NO: 464292 - DNA, 25 bp, Artificial
  probe
  misc_feature (1)..(25): SEQ ID NO: 7299; WAN024BME; Start 310; Stop 334
ttgataaagaaagtgttgctaaagg

SEQ ID NO: 464293 - DNA, 25 bp, Artificial
  probe
  misc_feature (1)..(25): SEQ ID NO: 7299; WAN024BME; Start 286; Stop 310
gatgccatttcaacccaaatcaatt

SEQ ID NO: 464294 - DNA, 25 bp, Artificial
  probe
  misc_feature (1)..(25): SEQ ID NO: 7299; WAN024BME; Start 274; Stop 298
gatcagtcatcagatgccatttcaa

SEQ ID NO: 464295 - DNA, 25 bp, Artificial
  probe
  misc_feature (1)..(25): SEQ ID NO: 7299; WAN024BME; Start 275; Stop 299
atcagtcatcagatgccatttcaac

SEQ ID NO: 464296 - DNA, 25 bp, Artificial
  probe
  misc_feature (1)..(25): SEQ ID NO: 7299; WAN024BME; Start 285; Stop 309
agatgccatttcaacccaaatcaat

SEQ ID NO: 464297 - DNA, 25 bp, Artificial
  probe
  misc_feature (1)..(25): SEQ ID NO: 7299; WAN024BME; Start 342; Stop 366
gattggaatcctctatactcagagc

SEQ ID NO: 464298 - DNA, 25 bp, Artificial
  probe
  misc_feature (1)..(25): SEQ ID NO: 7299; WAN024BME; Start 341; Stop 365
cgattggaatcctctatactcagag

SEQ ID NO: 464299 - DNA, 25 bp, Artificial
  probe
  misc_feature (1)..(25): SEQ ID NO: 7299; WAN024BME; Start 282; Stop 306
atcagatgccatttcaacccaaatc

SEQ ID NO: 464300 - DNA, 25 bp, Artificial
  probe
  misc_feature (1)..(25): SEQ ID NO: 7299; WAN024BME; Start 305; Stop 329
tcaatttgataaagaaagtgttgct

SEQ ID NO: 464301 - DNA, 25 bp, Artificial
  probe
  misc_feature (1)..(25): SEQ ID NO: 7299; WAN024BME; Start 343; Stop 367
attggaatcctctatactcagagcg

SEQ ID NO: 464302 - DNA, 25 bp, Artificial
  probe
  misc_feature (1)..(25): SEQ ID NO: 7299; WAN024BME; Start 284; Stop 308
cagatgccatttcaacccaaatcaa

SEQ ID NO: 464303 - DNA, 25 bp, Artificial
  probe
  misc_feature (1)..(25): SEQ ID NO: 7299; WAN024BME; Start 60; Stop 84
aaatgcacagggagaacaaagaaat

SEQ ID NO: 464304 - DNA, 25 bp, Artificial
  probe
  misc_feature (1)..(25): SEQ ID NO: 7299; WAN024BME; Start 281; Stop 305
catcagatgccatttcaacccaaat

SEQ ID NO: 464305 - DNA, 25 bp, Artificial
  probe
  misc_feature (1)..(25): SEQ ID NO: 7299; WAN024BME; Start 316; Stop 340
aagaaagtgttgctaaaggctaaaa

SEQ ID NO: 464306 - DNA, 25 bp, Artificial
  probe
  misc_feature (1)..(25): SEQ ID NO: 7299; WAN024BME; Start 309; Stop 333
tttgataaagaaagtgttgctaaag

SEQ ID NO: 464307 - DNA, 25 bp, Artificial
  probe
  misc_feature (1)..(25): SEQ ID NO: 7299; WAN024BME; Start 221; Stop 245
ccaagttggttgagtcaagagaaca

SEQ ID NO: 464308 - DNA, 25 bp, Artificial
  probe
  misc_feature (1)..(25): SEQ ID NO: 7299; WAN024BME; Start 61; Stop 85
aatgcacagggagaacaaagaaatc

SEQ ID NO: 464309 - DNA, 25 bp, Artificial
  probe
  misc_feature (1)..(25): SEQ ID NO: 7300; WAN024ATF; Start 551; Stop 575
cggataatattgtcaacattgctca

SEQ ID NO: 464310 - DNA, 25 bp, Artificial
  probe
  misc_feature (1)..(25): SEQ ID NO: 7300; WAN024ATF; Start 170; Stop 194
cagatactaaggaaggacttaccaa

SEQ ID NO: 464311 - DNA, 25 bp, Artificial
  probe
  misc_feature (1)..(25): SEQ ID NO: 7300; WAN024ATF; Start 171; Stop 195
agatactaaggaaggacttaccaag

SEQ ID NO: 464312 - DNA, 25 bp, Artificial
  probe
  misc_feature (1)..(25): SEQ ID NO: 7300; WAN024ATF; Start 550; Stop 574
gcggataatattgtcaacattgctc

SEQ ID NO: 464313 - DNA, 25 bp, Artificial
  probe
  misc_feature (1)..(25): SEQ ID NO: 7300; WAN024ATF; Start 169; Stop 193
gcagatactaaggaaggacttacca

SEQ ID NO: 464314 - DNA, 25 bp, Artificial
  probe
  misc_feature (1)..(25): SEQ ID NO: 7300; WAN024ATF; Start 549; Stop 573
tgcggataatattgtcaacattgct

SEQ ID NO: 464315 - DNA, 25 bp, Artificial
  probe
  misc_feature (1)..(25): SEQ ID NO: 7300; WAN024ATF; Start 302; Stop 326
gagaagtcttcgatagtagtgagtt

SEQ ID NO: 464316 - DNA, 25 bp, Artificial
  probe
  misc_feature (1)..(25): SEQ ID NO: 7300; WAN024ATF; Start 300; Stop 324
aggagaagtcttcgatagtagtgag

SEQ ID NO: 464317 - DNA, 25 bp, Artificial
  probe
  misc_feature (1)..(25): SEQ ID NO: 7300; WAN024ATF; Start 299; Stop 323
gaggagaagtcttcgatagtagtga

SEQ ID NO: 464318 - DNA, 25 bp, Artificial
  probe
  misc_feature (1)..(25): SEQ ID NO: 7300; WAN024ATF; Start 301; Stop 325
ggagaagtcttcgatagtagtgagt

SEQ ID NO: 464319 - DNA, 25 bp, Artificial
  probe
  misc_feature (1)..(25): SEQ ID NO: 7300; WAN024ATF; Start 296; Stop 320
caggaggagaagtcttcgatagtag

SEQ ID NO: 464320 - DNA, 25 bp, Artificial
  probe
  misc_feature (1)..(25): SEQ ID NO: 7300; WAN024ATF; Start 164; Stop 188
ttaatgcagatactaaggaaggact

SEQ ID NO: 464321 - DNA, 25 bp, Artificial
  probe
  misc_feature (1)..(25): SEQ ID NO: 7300; WAN024ATF; Start 298; Stop 322
ggaggagaagtcttcgatagtagtg

SEQ ID NO: 464322 - DNA, 25 bp, Artificial
  probe
  misc_feature (1)..(25): SEQ ID NO: 7300; WAN024ATF; Start 297; Stop 321
aggaggagaagtcttcgatagtagt

SEQ ID NO: 464323 - DNA, 25 bp, Artificial
  probe
  misc_feature (1)..(25): SEQ ID NO: 7300; WAN024ATF; Start 165; Stop 189
taatgcagatactaaggaaggactt

SEQ ID NO: 464324 - DNA, 25 bp, Artificial
  probe
  misc_feature (1)..(25): SEQ ID NO: 7300; WAN024ATF; Start 542; Stop 566
aacttcctgcggataatattgtcaa

SEQ ID NO: 464325 - DNA, 25 bp, Artificial
  probe
  misc_feature (1)..(25): SEQ ID NO: 7300; WAN024ATF; Start 303; Stop 327
agaagtcttcgatagtagtgagtta

SEQ ID NO: 464326 - DNA, 25 bp, Artificial
  probe
  misc_feature (1)..(25): SEQ ID NO: 7300; WAN024ATF; Start 552; Stop 576
ggataatattgtcaacattgctcaa

SEQ ID NO: 464327 - DNA, 25 bp, Artificial
  probe
  misc_feature (1)..(25): SEQ ID NO: 7300; WAN024ATF; Start 543; Stop 567
acttcctgcggataatattgtcaac

SEQ ID NO: 464328 - DNA, 25 bp, Artificial
  probe
  misc_feature (1)..(25): SEQ ID NO: 7300; WAN024ATF; Start 541; Stop 565
caacttcctgcggataatattgtca

SEQ ID NO: 464329 - DNA, 25 bp, Artificial
  probe
  misc_feature (1)..(25): SEQ ID NO: 7300; WAN024ATF; Start 167; Stop 191
atgcagatactaaggaaggacttac

SEQ ID NO: 464330 - DNA, 25 bp, Artificial
  probe
  misc_feature (1)..(25): SEQ ID NO: 7300; WAN024ATF; Start 166; Stop 190
aatgcagatactaaggaaggactta

SEQ ID NO: 464331 - DNA, 25 bp, Artificial
  probe
  misc_feature (1)..(25): SEQ ID NO: 7300; WAN024ATF; Start 304; Stop 328
gaagtcttcgatagtagtgagttaa

SEQ ID NO: 464332 - DNA, 25 bp, Artificial
  probe
  misc_feature (1)..(25): SEQ ID NO: 7300; WAN024ATF; Start 295; Stop 319
ccaggaggagaagtcttcgatagta

SEQ ID NO: 464333 - DNA, 25 bp, Artificial
  probe
  misc_feature (1)..(25): SEQ ID NO: 7300; WAN024ATF; Start 168; Stop 192
tgcagatactaaggaaggacttacc

SEQ ID NO: 464334 - DNA, 25 bp, Artificial
  probe
  misc_feature (1)..(25): SEQ ID NO: 7300; WAN024ATF; Start 122; Stop 146
caaagactggtgaaatccttgctac

SEQ ID NO: 464335 - DNA, 25 bp, Artificial
  probe
  misc_feature (1)..(25): SEQ ID NO: 7300; WAN024ATF; Start 483; Stop 507
taatcgctttaaatttggtgttccg

SEQ ID NO: 464336 - DNA, 25 bp, Artificial
  probe
  misc_feature (1)..(25): SEQ ID NO: 7300; WAN024ATF; Start 465; Stop 489
tacctggcttgattatcttaatcgc

SEQ ID NO: 464337 - DNA, 25 bp, Artificial
  probe
  misc_feature (1)..(25): SEQ ID NO: 7300; WAN024ATF; Start 467; Stop 491
cctggcttgattatcttaatcgctt

SEQ ID NO: 464338 - DNA, 25 bp, Artificial
  probe
  misc_feature (1)..(25): SEQ ID NO: 7300; WAN024ATF; Start 482; Stop 506
ttaatcgctttaaatttggtgttcc

SEQ ID NO: 464339 - DNA, 25 bp, Artificial
  probe
  misc_feature (1)..(25): SEQ ID NO: 7300; WAN024ATF; Start 163; Stop 187
tttaatgcagatactaaggaaggac

SEQ ID NO: 464340 - DNA, 25 bp, Artificial
  probe
  misc_feature (1)..(25): SEQ ID NO: 7300; WAN024ATF; Start 293; Stop 317
ttccaggaggagaagtcttcgatag

SEQ ID NO: 464341 - DNA, 25 bp, Artificial
  probe
  misc_feature (1)..(25): SEQ ID NO: 7300; WAN024ATF; Start 466; Stop 490
acctggcttgattatcttaatcgct

SEQ ID NO: 464342 - DNA, 25 bp, Artificial
  probe
  misc_feature (1)..(25): SEQ ID NO: 7302; WAN024BNZ; Start 483; Stop 507
tacagcaatacataaccatccgaat

SEQ ID NO: 464343 - DNA, 25 bp, Artificial
  probe
  misc_feature (1)..(25): SEQ ID NO: 7302; WAN024BNZ; Start 482; Stop 506
ttacagcaatacataaccatccgaa

SEQ ID NO: 464344 - DNA, 25 bp, Artificial
  probe
  misc_feature (1)..(25): SEQ ID NO: 7302; WAN024BNZ; Start 380; Stop 404
ctagaacagaatacagtacagcagt

SEQ ID NO: 464345 - DNA, 25 bp, Artificial
  probe
  misc_feature (1)..(25): SEQ ID NO: 7302; WAN024BNZ; Start 484; Stop 508
acagcaatacataaccatccgaatg

SEQ ID NO: 464346 - DNA, 25 bp, Artificial
  probe
  misc_feature (1)..(25): SEQ ID NO: 7302; WAN024BNZ; Start 381; Stop 405
tagaacagaatacagtacagcagtt

SEQ ID NO: 464347 - DNA, 25 bp, Artificial
  probe
  misc_feature (1)..(25): SEQ ID NO: 7302; WAN024BNZ; Start 383; Stop 407
gaacagaatacagtacagcagttga

SEQ ID NO: 464348 - DNA, 25 bp, Artificial
  probe
  misc_feature (1)..(25): SEQ ID NO: 7302; WAN024BNZ; Start 382; Stop 406
agaacagaatacagtacagcagttg

SEQ ID NO: 464349 - DNA, 25 bp, Artificial
  probe
  misc_feature (1)..(25): SEQ ID NO: 7302; WAN024BNZ; Start 384; Stop 408
aacagaatacagtacagcagttgac

SEQ ID NO: 464350 - DNA, 25 bp, Artificial
  probe
  misc_feature (1)..(25): SEQ ID NO: 7302; WAN024BNZ; Start 388; Stop 412
gaatacagtacagcagttgactctc

SEQ ID NO: 464351 - DNA, 25 bp, Artificial
  probe
  misc_feature (1)..(25): SEQ ID NO: 7302; WAN024BNZ; Start 387; Stop 411
agaatacagtacagcagttgactct

SEQ ID NO: 464352 - DNA, 25 bp, Artificial
  probe
  misc_feature (1)..(25): SEQ ID NO: 7302; WAN024BNZ; Start 386; Stop 410
cagaatacagtacagcagttgactc

SEQ ID NO: 464353 - DNA, 25 bp, Artificial
  probe
  misc_feature (1)..(25): SEQ ID NO: 7302; WAN024BNZ; Start 389; Stop 413
aatacagtacagcagttgactctca

SEQ ID NO: 464354 - DNA, 25 bp, Artificial
  probe
  misc_feature (1)..(25): SEQ ID NO: 7302; WAN024BNZ; Start 385; Stop 409
acagaatacagtacagcagttgact

SEQ ID NO: 464355 - DNA, 25 bp, Artificial
  probe
  misc_feature (1)..(25): SEQ ID NO: 7302; WAN024BNZ; Start 112; Stop 136
acaagcaaacaataccaatctatcg

SEQ ID NO: 464356 - DNA, 25 bp, Artificial
  probe
  misc_feature (1)..(25): SEQ ID NO: 7302; WAN024BNZ; Start 106; Stop 130
acagaaacaagcaaacaataccaat

SEQ ID NO: 464357 - DNA, 25 bp, Artificial
  probe
  misc_feature (1)..(25): SEQ ID NO: 7302; WAN024BNZ; Start 103; Stop 127
gaaacagaaacaagcaaacaatacc

SEQ ID NO: 464358 - DNA, 25 bp, Artificial
  probe
  misc_feature (1)..(25): SEQ ID NO: 7302; WAN024BNZ; Start 481; Stop 505
tttacagcaatacataaccatccga

SEQ ID NO: 464359 - DNA, 25 bp, Artificial
  probe
  misc_feature (1)..(25): SEQ ID NO: 7302; WAN024BNZ; Start 107; Stop 131
cagaaacaagcaaacaataccaatc

SEQ ID NO: 464360 - DNA, 25 bp, Artificial
  probe
  misc_feature (1)..(25): SEQ ID NO: 7302; WAN024BNZ; Start 105; Stop 129
aacagaaacaagcaaacaataccaa

SEQ ID NO: 464361 - DNA, 25 bp, Artificial
  probe
  misc_feature (1)..(25): SEQ ID NO: 7302; WAN024BNZ; Start 104; Stop 128
aaacagaaacaagcaaacaatacca

SEQ ID NO: 464362 - DNA, 25 bp, Artificial
  probe
  misc_feature (1)..(25): SEQ ID NO: 7302; WAN024BNZ; Start 480; Stop 504
atttacagcaatacataaccatccg

SEQ ID NO: 464363 - DNA, 25 bp, Artificial
  probe
  misc_feature (1)..(25): SEQ ID NO: 7302; WAN024BNZ; Start 474; Stop 498
tggtggatttacagcaatacataac

SEQ ID NO: 464364 - DNA, 25 bp, Artificial
  probe
  misc_feature (1)..(25): SEQ ID NO: 7302; WAN024BNZ; Start 220; Stop 244
gagaaagggaaagacggtaagtatc

SEQ ID NO: 464365 - DNA, 25 bp, Artificial
  probe
  misc_feature (1)..(25): SEQ ID NO: 7302; WAN024BNZ; Start 102; Stop 126
agaaacagaaacaagcaaacaatac

SEQ ID NO: 464366 - DNA, 25 bp, Artificial
  probe
  misc_feature (1)..(25): SEQ ID NO: 7302; WAN024BNZ; Start 100; Stop 124
aaagaaacagaaacaagcaaacaat

SEQ ID NO: 464367 - DNA, 25 bp, Artificial
  probe
  misc_feature (1)..(25): SEQ ID NO: 7302; WAN024BNZ; Start 219; Stop 243
tgagaaagggaaagacggtaagtat

SEQ ID NO: 464368 - DNA, 25 bp, Artificial
  probe
  misc_feature (1)..(25): SEQ ID NO: 7302; WAN024BNZ; Start 108; Stop 132
agaaacaagcaaacaataccaatct

SEQ ID NO: 464369 - DNA, 25 bp, Artificial
  probe
  misc_feature (1)..(25): SEQ ID NO: 7302; WAN024BNZ; Start 218; Stop 242
ttgagaaagggaaagacggtaagta

SEQ ID NO: 464370 - DNA, 25 bp, Artificial
  probe
  misc_feature (1)..(25): SEQ ID NO: 7302; WAN024BNZ; Start 99; Stop 123
taaagaaacagaaacaagcaaacaa

SEQ ID NO: 464371 - DNA, 25 bp, Artificial
  probe
  misc_feature (1)..(25): SEQ ID NO: 7302; WAN024BNZ; Start 718; Stop 742
aaatacgggtacacttactcatacg

SEQ ID NO: 464372 - DNA, 25 bp, Artificial
  probe
  misc_feature (1)..(25): SEQ ID NO: 7302; WAN024BNZ; Start 109; Stop 133
gaaacaagcaaacaataccaatcta

SEQ ID NO: 464373 - DNA, 25 bp, Artificial
  probe
  misc_feature (1)..(25): SEQ ID NO: 7302; WAN024BNZ; Start 101; Stop 125
aagaaacagaaacaagcaaacaata

SEQ ID NO: 464374 - DNA, 25 bp, Artificial
  probe
  misc_feature (1)..(25): SEQ ID NO: 7302; WAN024BNZ; Start 98; Stop 122
ataaagaaacagaaacaagcaaaca

SEQ ID NO: 464375 - DNA, 25 bp, Artificial
  probe
  misc_feature (1)..(25): SEQ ID NO: 7303; WAN024BR6; Start 86; Stop 110
ccctatcattggaagagaaagttct

SEQ ID NO: 464376 - DNA, 25 bp, Artificial
  probe
  misc_feature (1)..(25): SEQ ID NO: 7303; WAN024BR6; Start 96; Stop 120
ggaagagaaagttctatttgttcgt

SEQ ID NO: 464377 - DNA, 25 bp, Artificial
  probe
  misc_feature (1)..(25): SEQ ID NO: 7303; WAN024BR6; Start 95; Stop 119
tggaagagaaagttctatttgttcg

SEQ ID NO: 464378 - DNA, 25 bp, Artificial
  probe
  misc_feature (1)..(25): SEQ ID NO: 7303; WAN024BR6; Start 187; Stop 211
tcaggtattgttaaagagattggaa

SEQ ID NO: 464379 - DNA, 25 bp, Artificial
  probe
  misc_feature (1)..(25): SEQ ID NO: 7303; WAN024BR6; Start 98; Stop 122
aagagaaagttctatttgttcgtca

SEQ ID NO: 464380 - DNA, 25 bp, Artificial
  probe
  misc_feature (1)..(25): SEQ ID NO: 7303; WAN024BR6; Start 100; Stop 124
gagaaagttctatttgttcgtcaac

SEQ ID NO: 464381 - DNA, 25 bp, Artificial
  probe
  misc_feature (1)..(25): SEQ ID NO: 7303; WAN024BR6; Start 99; Stop 123
agagaaagttctatttgttcgtcaa

SEQ ID NO: 464382 - DNA, 25 bp, Artificial
  probe
  misc_feature (1)..(25): SEQ ID NO: 7303; WAN024BR6; Start 186; Stop 210
atcaggtattgttaaagagattgga

SEQ ID NO: 464383 - DNA, 25 bp, Artificial
  probe
  misc_feature (1)..(25): SEQ ID NO: 7303; WAN024BR6; Start 97; Stop 121
gaagagaaagttctatttgttcgtc

SEQ ID NO: 464384 - DNA, 25 bp, Artificial
  probe
  misc_feature (1)..(25): SEQ ID NO: 7303; WAN024BR6; Start 85; Stop 109
tccctatcattggaagagaaagttc

SEQ ID NO: 464385 - DNA, 25 bp, Artificial
  probe
  misc_feature (1)..(25): SEQ ID NO: 7303; WAN024BR6; Start 122; Stop 146
aactttatacgaatgtattccctgc

SEQ ID NO: 464386 - DNA, 25 bp, Artificial
  probe
  misc_feature (1)..(25): SEQ ID NO: 7303; WAN024BR6; Start 188; Stop 212
caggtattgttaaagagattggaaa

SEQ ID NO: 464387 - DNA, 25 bp, Artificial
  probe
  misc_feature (1)..(25): SEQ ID NO: 7303; WAN024BR6; Start 87; Stop 111
cctatcattggaagagaaagttcta

SEQ ID NO: 464388 - DNA, 25 bp, Artificial
  probe
  misc_feature (1)..(25): SEQ ID NO: 7303; WAN024BR6; Start 94; Stop 118
ttggaagagaaagttctatttgttc

SEQ ID NO: 464389 - DNA, 25 bp, Artificial
  probe
  misc_feature (1)..(25): SEQ ID NO: 7303; WAN024BR6; Start 92; Stop 116
cattggaagagaaagttctatttgt

SEQ ID NO: 464390 - DNA, 25 bp, Artificial
  probe
  misc_feature (1)..(25): SEQ ID NO: 7303; WAN024BR6; Start 121; Stop 145
caactttatacgaatgtattccctg

SEQ ID NO: 464391 - DNA, 25 bp, Artificial
  probe
  misc_feature (1)..(25): SEQ ID NO: 7303; WAN024BR6; Start 119; Stop 143
gtcaactttatacgaatgtattccc

SEQ ID NO: 464392 - DNA, 25 bp, Artificial
  probe
  misc_feature (1)..(25): SEQ ID NO: 7303; WAN024BR6; Start 120; Stop 144
tcaactttatacgaatgtattccct

SEQ ID NO: 464393 - DNA, 25 bp, Artificial
  probe
  misc_feature (1)..(25): SEQ ID NO: 7303; WAN024BR6; Start 91; Stop 115
tcattggaagagaaagttctatttg

SEQ ID NO: 464394 - DNA, 25 bp, Artificial
  probe
  misc_feature (1)..(25): SEQ ID NO: 7303; WAN024BR6; Start 273; Stop 297
cgatatacagatagaaggggaggaa

SEQ ID NO: 464395 - DNA, 25 bp, Artificial
  probe
  misc_feature (1)..(25): SEQ ID NO: 7303; WAN024BR6; Start 278; Stop 302
tacagatagaaggggaggaattaca

SEQ ID NO: 464396 - DNA, 25 bp, Artificial
  probe
  misc_feature (1)..(25): SEQ ID NO: 7303; WAN024BR6; Start 127; Stop 151
tatacgaatgtattccctgcaactt

SEQ ID NO: 464397 - DNA, 25 bp, Artificial
  probe
  misc_feature (1)..(25): SEQ ID NO: 7303; WAN024BR6; Start 126; Stop 150
ttatacgaatgtattccctgcaact

SEQ ID NO: 464398 - DNA, 25 bp, Artificial
  probe
  misc_feature (1)..(25): SEQ ID NO: 7303; WAN024BR6; Start 123; Stop 147
actttatacgaatgtattccctgca

SEQ ID NO: 464399 - DNA, 25 bp, Artificial
  probe
  misc_feature (1)..(25): SEQ ID NO: 7303; WAN024BR6; Start 279; Stop 303
acagatagaaggggaggaattacat

SEQ ID NO: 464400 - DNA, 25 bp, Artificial
  probe
  misc_feature (1)..(25): SEQ ID NO: 7303; WAN024BR6; Start 125; Stop 149
tttatacgaatgtattccctgcaac

SEQ ID NO: 464401 - DNA, 25 bp, Artificial
  probe
  misc_feature (1)..(25): SEQ ID NO: 7303; WAN024BR6; Start 259; Stop 283
tgggaagatatactcgatatacaga

SEQ ID NO: 464402 - DNA, 25 bp, Artificial
  probe
  misc_feature (1)..(25): SEQ ID NO: 7303; WAN024BR6; Start 128; Stop 152
atacgaatgtattccctgcaacttt

SEQ ID NO: 464403 - DNA, 25 bp, Artificial
  probe
  misc_feature (1)..(25): SEQ ID NO: 7303; WAN024BR6; Start 124; Stop 148
ctttatacgaatgtattccctgcaa

SEQ ID NO: 464404 - DNA, 25 bp, Artificial
  probe
  misc_feature (1)..(25): SEQ ID NO: 7303; WAN024BR6; Start 277; Stop 301
atacagatagaaggggaggaattac

SEQ ID NO: 464405 - DNA, 25 bp, Artificial
  probe
  misc_feature (1)..(25): SEQ ID NO: 7303; WAN024BR6; Start 93; Stop 117
attggaagagaaagttctatttgtt

SEQ ID NO: 464406 - DNA, 25 bp, Artificial
  probe
  misc_feature (1)..(25): SEQ ID NO: 7303; WAN024BR6; Start 185; Stop 209
tatcaggtattgttaaagagattgg

SEQ ID NO: 464407 - DNA, 25 bp, Artificial
  probe
  misc_feature (1)..(25): SEQ ID NO: 7303; WAN024BR6; Start 274; Stop 298
gatatacagatagaaggggaggaat

SEQ ID NO: 464408 - DNA, 25 bp, Artificial
  probe
  misc_feature (1)..(25): SEQ ID NO: 7304; WAN024BUL; Start 1512; Stop 1536
tgctattctcatcatcatcaacctt

SEQ ID NO: 464409 - DNA, 25 bp, Artificial
  probe
  misc_feature (1)..(25): SEQ ID NO: 7304; WAN024BUL; Start 1653; Stop 1677
tgttatcgtaggttatggtattgct

SEQ ID NO: 464410 - DNA, 25 bp, Artificial
  probe
  misc_feature (1)..(25): SEQ ID NO: 7304; WAN024BUL; Start 415; Stop 439
atgattgatatgtcggataatgcca

SEQ ID NO: 464411 - DNA, 25 bp, Artificial
  probe
  misc_feature (1)..(25): SEQ ID NO: 7304; WAN024BUL; Start 1513; Stop 1537
gctattctcatcatcatcaaccttg

SEQ ID NO: 464412 - DNA, 25 bp, Artificial
  probe
  misc_feature (1)..(25): SEQ ID NO: 7304; WAN024BUL; Start 1004; Stop 1028
tatctggaatacctgctgtcttaac

SEQ ID NO: 464413 - DNA, 25 bp, Artificial
  probe
  misc_feature (1)..(25): SEQ ID NO: 7304; WAN024BUL; Start 1648; Stop 1672
gtggatgttatcgtaggttatggta

SEQ ID NO: 464414 - DNA, 25 bp, Artificial
  probe
  misc_feature (1)..(25): SEQ ID NO: 7304; WAN024BUL; Start 1511; Stop 1535
gtgctattctcatcatcatcaacct

SEQ ID NO: 464415 - DNA, 25 bp, Artificial
  probe
  misc_feature (1)..(25): SEQ ID NO: 7304; WAN024BUL; Start 1899; Stop 1923
tgttcgtgaccttgtaagtaatgtt

SEQ ID NO: 464416 - DNA, 25 bp, Artificial
  probe
  misc_feature (1)..(25): SEQ ID NO: 7304; WAN024BUL; Start 1003; Stop 1027
ctatctggaatacctgctgtcttaa

SEQ ID NO: 464417 - DNA, 25 bp, Artificial
  probe
  misc_feature (1)..(25): SEQ ID NO: 7304; WAN024BUL; Start 1900; Stop 1924
gttcgtgaccttgtaagtaatgtta

SEQ ID NO: 464418 - DNA, 25 bp, Artificial
  probe
  misc_feature (1)..(25): SEQ ID NO: 7304; WAN024BUL; Start 423; Stop 447
tatgtcggataatgccaataagatg

SEQ ID NO: 464419 - DNA, 25 bp, Artificial
  probe
  misc_feature (1)..(25): SEQ ID NO: 7304; WAN024BUL; Start 420; Stop 444
tgatatgtcggataatgccaataag

SEQ ID NO: 464420 - DNA, 25 bp, Artificial
  probe
  misc_feature (1)..(25): SEQ ID NO: 7304; WAN024BUL; Start 1652; Stop 1676
atgttatcgtaggttatggtattgc

SEQ ID NO: 464421 - DNA, 25 bp, Artificial
  probe
  misc_feature (1)..(25): SEQ ID NO: 7304; WAN024BUL; Start 1649; Stop 1673
tggatgttatcgtaggttatggtat

SEQ ID NO: 464422 - DNA, 25 bp, Artificial
  probe
  misc_feature (1)..(25): SEQ ID NO: 7304; WAN024BUL; Start 1645; Stop 1669
gtcgtggatgttatcgtaggttatg

SEQ ID NO: 464423 - DNA, 25 bp, Artificial
  probe
  misc_feature (1)..(25): SEQ ID NO: 7304; WAN024BUL; Start 1644; Stop 1668
agtcgtggatgttatcgtaggttat

SEQ ID NO: 464424 - DNA, 25 bp, Artificial
  probe
  misc_feature (1)..(25): SEQ ID NO: 7304; WAN024BUL; Start 1515; Stop 1539
tattctcatcatcatcaaccttgtg

SEQ ID NO: 464425 - DNA, 25 bp, Artificial
  probe
  misc_feature (1)..(25): SEQ ID NO: 7304; WAN024BUL; Start 2325; Stop 2349
gatagcgattctgagagcaagtatg

SEQ ID NO: 464426 - DNA, 25 bp, Artificial
  probe
  misc_feature (1)..(25): SEQ ID NO: 7304; WAN024BUL; Start 1898; Stop 1922
gtgttcgtgaccttgtaagtaatgt

SEQ ID NO: 464427 - DNA, 25 bp, Artificial
  probe
  misc_feature (1)..(25): SEQ ID NO: 7304; WAN024BUL; Start 416; Stop 440
tgattgatatgtcggataatgccaa

SEQ ID NO: 464428 - DNA, 25 bp, Artificial
  probe
  misc_feature (1)..(25): SEQ ID NO: 7304; WAN024BUL; Start 1514; Stop 1538
ctattctcatcatcatcaaccttgt

SEQ ID NO: 464429 - DNA, 25 bp, Artificial
  probe
  misc_feature (1)..(25): SEQ ID NO: 7304; WAN024BUL; Start 421; Stop 445
gatatgtcggataatgccaataaga

SEQ ID NO: 464430 - DNA, 25 bp, Artificial
  probe
  misc_feature (1)..(25): SEQ ID NO: 7304; WAN024BUL; Start 1516; Stop 1540
attctcatcatcatcaaccttgtga

SEQ ID NO: 464431 - DNA, 25 bp, Artificial
  probe
  misc_feature (1)..(25): SEQ ID NO: 7304; WAN024BUL; Start 1059; Stop 1083
tactgtaatgagtgccaatcctatt

SEQ ID NO: 464432 - DNA, 25 bp, Artificial
  probe
  misc_feature (1)..(25): SEQ ID NO: 7304; WAN024BUL; Start 2324; Stop 2348
agatagcgattctgagagcaagtat

SEQ ID NO: 464433 - DNA, 25 bp, Artificial
  probe
  misc_feature (1)..(25): SEQ ID NO: 7304; WAN024BUL; Start 1002; Stop 1026
gctatctggaatacctgctgtctta

SEQ ID NO: 464434 - DNA, 25 bp, Artificial
  probe
  misc_feature (1)..(25): SEQ ID NO: 7304; WAN024BUL; Start 1643; Stop 1667
gagtcgtggatgttatcgtaggtta

SEQ ID NO: 464435 - DNA, 25 bp, Artificial
  probe
  misc_feature (1)..(25): SEQ ID NO: 7304; WAN024BUL; Start 1517; Stop 1541
ttctcatcatcatcaaccttgtgac

SEQ ID NO: 464436 - DNA, 25 bp, Artificial
  probe
  misc_feature (1)..(25): SEQ ID NO: 7304; WAN024BUL; Start 1058; Stop 1082
ttactgtaatgagtgccaatcctat

SEQ ID NO: 464437 - DNA, 25 bp, Artificial
  probe
  misc_feature (1)..(25): SEQ ID NO: 7304; WAN024BUL; Start 1654; Stop 1678
gttatcgtaggttatggtattgcta

SEQ ID NO: 464438 - DNA, 25 bp, Artificial
  probe
  misc_feature (1)..(25): SEQ ID NO: 7304; WAN024BUL; Start 908; Stop 932
ttggtgaaggtctaggaagtatcat

SEQ ID NO: 464439 - DNA, 25 bp, Artificial
  probe
  misc_feature (1)..(25): SEQ ID NO: 7304; WAN024BUL; Start 414; Stop 438
catgattgatatgtcggataatgcc

SEQ ID NO: 464440 - DNA, 25 bp, Artificial
  probe
  misc_feature (1)..(25): SEQ ID NO: 7304; WAN024BUL; Start 413; Stop 437
ccatgattgatatgtcggataatgc

SEQ ID NO: 464441 - DNA, 25 bp, Artificial
  probe
  misc_feature (1)..(25): SEQ ID NO: 7305; WAN024C2G; Start 82; Stop 106
ggaagttatcacaaatcaagtaagg

SEQ ID NO: 464442 - DNA, 25 bp, Artificial
  probe
  misc_feature (1)..(25): SEQ ID NO: 7305; WAN024C2G; Start 81; Stop 105
gggaagttatcacaaatcaagtaag

SEQ ID NO: 464443 - DNA, 25 bp, Artificial
  probe
  misc_feature (1)..(25): SEQ ID NO: 7305; WAN024C2G; Start 84; Stop 108
aagttatcacaaatcaagtaaggac

SEQ ID NO: 464444 - DNA, 25 bp, Artificial
  probe
  misc_feature (1)..(25): SEQ ID NO: 7305; WAN024C2G; Start 83; Stop 107
gaagttatcacaaatcaagtaagga

SEQ ID NO: 464445 - DNA, 25 bp, Artificial
  probe
  misc_feature (1)..(25): SEQ ID NO: 7305; WAN024C2G; Start 79; Stop 103
tggggaagttatcacaaatcaagta

SEQ ID NO: 464446 - DNA, 25 bp, Artificial
  probe
  misc_feature (1)..(25): SEQ ID NO: 7305; WAN024C2G; Start 80; Stop 104
ggggaagttatcacaaatcaagtaa

SEQ ID NO: 464447 - DNA, 25 bp, Artificial
  probe
  misc_feature (1)..(25): SEQ ID NO: 7305; WAN024C2G; Start 78; Stop 102
ttggggaagttatcacaaatcaagt

SEQ ID NO: 464448 - DNA, 25 bp, Artificial
  probe
  misc_feature (1)..(25): SEQ ID NO: 7305; WAN024C2G; Start 51; Stop 75
agttgagaaaagtatagcagaagaa

SEQ ID NO: 464449 - DNA, 25 bp, Artificial
  probe
  misc_feature (1)..(25): SEQ ID NO: 7305; WAN024C2G; Start 50; Stop 74
aagttgagaaaagtatagcagaaga

SEQ ID NO: 464450 - DNA, 25 bp, Artificial
  probe
  misc_feature (1)..(25): SEQ ID NO: 7305; WAN024C2G; Start 13; Stop 37
ccaaaccccaaggtaaaattcttag

SEQ ID NO: 464451 - DNA, 25 bp, Artificial
  probe
  misc_feature (1)..(25): SEQ ID NO: 7305; WAN024C2G; Start 65; Stop 89
tagcagaagaaatttggggaagtta

SEQ ID NO: 464452 - DNA, 25 bp, Artificial
  probe
  misc_feature (1)..(25): SEQ ID NO: 7305; WAN024C2G; Start 63; Stop 87
tatagcagaagaaatttggggaagt

SEQ ID NO: 464453 - DNA, 25 bp, Artificial
  probe
  misc_feature (1)..(25): SEQ ID NO: 7305; WAN024C2G; Start 61; Stop 85
agtatagcagaagaaatttggggaa

SEQ ID NO: 464454 - DNA, 25 bp, Artificial
  probe
  misc_feature (1)..(25): SEQ ID NO: 7305; WAN024C2G; Start 60; Stop 84
aagtatagcagaagaaatttgggga

SEQ ID NO: 464455 - DNA, 25 bp, Artificial
  probe
  misc_feature (1)..(25): SEQ ID NO: 7305; WAN024C2G; Start 62; Stop 86
gtatagcagaagaaatttggggaag

SEQ ID NO: 464456 - DNA, 25 bp, Artificial
  probe
  misc_feature (1)..(25): SEQ ID NO: 7305; WAN024C2G; Start 16; Stop 40
aaccccaaggtaaaattcttagttg

SEQ ID NO: 464457 - DNA, 25 bp, Artificial
  probe
  misc_feature (1)..(25): SEQ ID NO: 7305; WAN024C2G; Start 14; Stop 38
caaaccccaaggtaaaattcttagt

SEQ ID NO: 464458 - DNA, 25 bp, Artificial
  probe
  misc_feature (1)..(25): SEQ ID NO: 7305; WAN024C2G; Start 70; Stop 94
gaagaaatttggggaagttatcaca

SEQ ID NO: 464459 - DNA, 25 bp, Artificial
  probe
  misc_feature (1)..(25): SEQ ID NO: 7305; WAN024C2G; Start 67; Stop 91
gcagaagaaatttggggaagttatc

SEQ ID NO: 464460 - DNA, 25 bp, Artificial
  probe
  misc_feature (1)..(25): SEQ ID NO: 7305; WAN024C2G; Start 52; Stop 76
gttgagaaaagtatagcagaagaaa

SEQ ID NO: 464461 - DNA, 25 bp, Artificial
  probe
  misc_feature (1)..(25): SEQ ID NO: 7305; WAN024C2G; Start 49; Stop 73
aaagttgagaaaagtatagcagaag

SEQ ID NO: 464462 - DNA, 25 bp, Artificial
  probe
  misc_feature (1)..(25): SEQ ID NO: 7305; WAN024C2G; Start 66; Stop 90
agcagaagaaatttggggaagttat

SEQ ID NO: 464463 - DNA, 25 bp, Artificial
  probe
  misc_feature (1)..(25): SEQ ID NO: 7305; WAN024C2G; Start 64; Stop 88
atagcagaagaaatttggggaagtt

SEQ ID NO: 464464 - DNA, 25 bp, Artificial
  probe
  misc_feature (1)..(25): SEQ ID NO: 7305; WAN024C2G; Start 59; Stop 83
aaagtatagcagaagaaatttgggg

SEQ ID NO: 464465 - DNA, 25 bp, Artificial
  probe
  misc_feature (1)..(25): SEQ ID NO: 7305; WAN024C2G; Start 69; Stop 93
agaagaaatttggggaagttatcac

SEQ ID NO: 464466 - DNA, 25 bp, Artificial
  probe
  misc_feature (1)..(25): SEQ ID NO: 7305; WAN024C2G; Start 68; Stop 92
cagaagaaatttggggaagttatca

SEQ ID NO: 464467 - DNA, 25 bp, Artificial
  probe
  misc_feature (1)..(25): SEQ ID NO: 7305; WAN024C2G; Start 12; Stop 36
cccaaaccccaaggtaaaattctta

SEQ ID NO: 464468 - DNA, 25 bp, Artificial
  probe
  misc_feature (1)..(25): SEQ ID NO: 7305; WAN024C2G; Start 15; Stop 39
aaaccccaaggtaaaattcttagtt

SEQ ID NO: 464469 - DNA, 25 bp, Artificial
  probe
  misc_feature (1)..(25): SEQ ID NO: 7305; WAN024C2G; Start 71; Stop 95
aagaaatttggggaagttatcacaa

SEQ ID NO: 464470 - DNA, 25 bp, Artificial
  probe
  misc_feature (1)..(25): SEQ ID NO: 7305; WAN024C2G; Start 48; Stop 72
aaaagttgagaaaagtatagcagaa

SEQ ID NO: 464471 - DNA, 25 bp, Artificial
  probe
  misc_feature (1)..(25): SEQ ID NO: 7305; WAN024C2G; Start 77; Stop 101
tttggggaagttatcacaaatcaag

SEQ ID NO: 464472 - DNA, 25 bp, Artificial
  probe
  misc_feature (1)..(25): SEQ ID NO: 7305; WAN024C2G; Start 58; Stop 82
aaaagtatagcagaagaaatttggg

SEQ ID NO: 464473 - DNA, 25 bp, Artificial
  probe
  misc_feature (1)..(25): SEQ ID NO: 7305; WAN024C2G; Start 53; Stop 77
ttgagaaaagtatagcagaagaaat

SEQ ID NO: 464474 - DNA, 25 bp, Artificial
  probe
  misc_feature (1)..(25): SEQ ID NO: 7306; WAN024FEM; Start 51; Stop 75
aataatggcagttcatagtcttggt

SEQ ID NO: 464475 - DNA, 25 bp, Artificial
  probe
  misc_feature (1)..(25): SEQ ID NO: 7306; WAN024FEM; Start 53; Stop 77
taatggcagttcatagtcttggtat

SEQ ID NO: 464476 - DNA, 25 bp, Artificial
  probe
  misc_feature (1)..(25): SEQ ID NO: 7306; WAN024FEM; Start 52; Stop 76
ataatggcagttcatagtcttggta

SEQ ID NO: 464477 - DNA, 25 bp, Artificial
  probe
  misc_feature (1)..(25): SEQ ID NO: 7306; WAN024FEM; Start 54; Stop 78
aatggcagttcatagtcttggtatc

SEQ ID NO: 464478 - DNA, 25 bp, Artificial
  probe
  misc_feature (1)..(25): SEQ ID NO: 7306; WAN024FEM; Start 48; Stop 72
cacaataatggcagttcatagtctt

SEQ ID NO: 464479 - DNA, 25 bp, Artificial
  probe
  misc_feature (1)..(25): SEQ ID NO: 7306; WAN024FEM; Start 50; Stop 74
caataatggcagttcatagtcttgg

SEQ ID NO: 464480 - DNA, 25 bp, Artificial
  probe
  misc_feature (1)..(25): SEQ ID NO: 7306; WAN024FEM; Start 49; Stop 73
acaataatggcagttcatagtcttg

SEQ ID NO: 464481 - DNA, 25 bp, Artificial
  probe
  misc_feature (1)..(25): SEQ ID NO: 7306; WAN024FEM; Start 55; Stop 79
atggcagttcatagtcttggtatcc

SEQ ID NO: 464482 - DNA, 25 bp, Artificial
  probe
  misc_feature (1)..(25): SEQ ID NO: 7306; WAN024FEM; Start 12; Stop 36
agttaggacagacctgaggaatatc

SEQ ID NO: 464483 - DNA, 25 bp, Artificial
  probe
  misc_feature (1)..(25): SEQ ID NO: 7306; WAN024FEM; Start 11; Stop 35
cagttaggacagacctgaggaatat

SEQ ID NO: 464484 - DNA, 25 bp, Artificial
  probe
  misc_feature (1)..(25): SEQ ID NO: 7306; WAN024FEM; Start 58; Stop 82
gcagttcatagtcttggtatccata

SEQ ID NO: 464485 - DNA, 25 bp, Artificial
  probe
  misc_feature (1)..(25): SEQ ID NO: 7306; WAN024FEM; Start 45; Stop 69
aaccacaataatggcagttcatagt

SEQ ID NO: 464486 - DNA, 25 bp, Artificial
  probe
  misc_feature (1)..(25): SEQ ID NO: 7306; WAN024FEM; Start 47; Stop 71
ccacaataatggcagttcatagtct

SEQ ID NO: 464487 - DNA, 25 bp, Artificial
  probe
  misc_feature (1)..(25): SEQ ID NO: 7306; WAN024FEM; Start 5; Stop 29
ctcttacagttaggacagacctgag

SEQ ID NO: 464488 - DNA, 25 bp, Artificial
  probe
  misc_feature (1)..(25): SEQ ID NO: 7306; WAN024FEM; Start 46; Stop 70
accacaataatggcagttcatagtc

SEQ ID NO: 464489 - DNA, 25 bp, Artificial
  probe
  misc_feature (1)..(25): SEQ ID NO: 7306; WAN024FEM; Start 86; Stop 110
aaggtcagagaaatatcacagttgg

SEQ ID NO: 464490 - DNA, 25 bp, Artificial
  probe
  misc_feature (1)..(25): SEQ ID NO: 7306; WAN024FEM; Start 13; Stop 37
gttaggacagacctgaggaatatcc

SEQ ID NO: 464491 - DNA, 25 bp, Artificial
  probe
  misc_feature (1)..(25): SEQ ID NO: 7306; WAN024FEM; Start 84; Stop 108
gcaaggtcagagaaatatcacagtt

SEQ ID NO: 464492 - DNA, 25 bp, Artificial
  probe
  misc_feature (1)..(25): SEQ ID NO: 7306; WAN024FEM; Start 10; Stop 34
acagttaggacagacctgaggaata

SEQ ID NO: 464493 - DNA, 25 bp, Artificial
  probe
  misc_feature (1)..(25): SEQ ID NO: 7306; WAN024FEM; Start 9; Stop 33
tacagttaggacagacctgaggaat

SEQ ID NO: 464494 - DNA, 25 bp, Artificial
  probe
  misc_feature (1)..(25): SEQ ID NO: 7306; WAN024FEM; Start 85; Stop 109
caaggtcagagaaatatcacagttg

SEQ ID NO: 464495 - DNA, 25 bp, Artificial
  probe
  misc_feature (1)..(25): SEQ ID NO: 7306; WAN024FEM; Start 94; Stop 118
agaaatatcacagttgggacaagta

SEQ ID NO: 464496 - DNA, 25 bp, Artificial
  probe
  misc_feature (1)..(25): SEQ ID NO: 7306; WAN024FEM; Start 92; Stop 116
agagaaatatcacagttgggacaag

SEQ ID NO: 464497 - DNA, 25 bp, Artificial
  probe
  misc_feature (1)..(25): SEQ ID NO: 7306; WAN024FEM; Start 90; Stop 114
tcagagaaatatcacagttgggaca

SEQ ID NO: 464498 - DNA, 25 bp, Artificial
  probe
  misc_feature (1)..(25): SEQ ID NO: 7306; WAN024FEM; Start 93; Stop 117
gagaaatatcacagttgggacaagt

SEQ ID NO: 464499 - DNA, 25 bp, Artificial
  probe
  misc_feature (1)..(25): SEQ ID NO: 7306; WAN024FEM; Start 91; Stop 115
cagagaaatatcacagttgggacaa

SEQ ID NO: 464500 - DNA, 25 bp, Artificial
  probe
  misc_feature (1)..(25): SEQ ID NO: 7306; WAN024FEM; Start 8; Stop 32
ttacagttaggacagacctgaggaa

SEQ ID NO: 464501 - DNA, 25 bp, Artificial
  probe
  misc_feature (1)..(25): SEQ ID NO: 7306; WAN024FEM; Start 96; Stop 120
aaatatcacagttgggacaagtatc

SEQ ID NO: 464502 - DNA, 25 bp, Artificial
  probe
  misc_feature (1)..(25): SEQ ID NO: 7306; WAN024FEM; Start 95; Stop 119
gaaatatcacagttgggacaagtat

SEQ ID NO: 464503 - DNA, 25 bp, Artificial
  probe
  misc_feature (1)..(25): SEQ ID NO: 7306; WAN024FEM; Start 57; Stop 81
ggcagttcatagtcttggtatccat

SEQ ID NO: 464504 - DNA, 25 bp, Artificial
  probe
  misc_feature (1)..(25): SEQ ID NO: 7306; WAN024FEM; Start 88; Stop 112
ggtcagagaaatatcacagttggga

SEQ ID NO: 464505 - DNA, 25 bp, Artificial
  probe
  misc_feature (1)..(25): SEQ ID NO: 7306; WAN024FEM; Start 87; Stop 111
aggtcagagaaatatcacagttggg

SEQ ID NO: 464506 - DNA, 25 bp, Artificial
  probe
  misc_feature (1)..(25): SEQ ID NO: 7306; WAN024FEM; Start 59; Stop 83
cagttcatagtcttggtatccatat

SEQ ID NO: 464507 - DNA, 25 bp, Artificial
  probe
  misc_feature (1)..(25): SEQ ID NO: 7307; WAN024BLV; Start 96; Stop 120
acaaccagaacttcatacacatctc

SEQ ID NO: 464508 - DNA, 25 bp, Artificial
  probe
  misc_feature (1)..(25): SEQ ID NO: 7307; WAN024BLV; Start 95; Stop 119
gacaaccagaacttcatacacatct

SEQ ID NO: 464509 - DNA, 25 bp, Artificial
  probe
  misc_feature (1)..(25): SEQ ID NO: 7307; WAN024BLV; Start 94; Stop 118
cgacaaccagaacttcatacacatc

SEQ ID NO: 464510 - DNA, 25 bp, Artificial
  probe
  misc_feature (1)..(25): SEQ ID NO: 7307; WAN024BLV; Start 97; Stop 121
caaccagaacttcatacacatctcg

SEQ ID NO: 464511 - DNA, 25 bp, Artificial
  probe
  misc_feature (1)..(25): SEQ ID NO: 7307; WAN024BLV; Start 98; Stop 122
aaccagaacttcatacacatctcga

SEQ ID NO: 464512 - DNA, 25 bp, Artificial
  probe
  misc_feature (1)..(25): SEQ ID NO: 7307; WAN024BLV; Start 88; Stop 112
ctcttgcgacaaccagaacttcata

SEQ ID NO: 464513 - DNA, 25 bp, Artificial
  probe
  misc_feature (1)..(25): SEQ ID NO: 7307; WAN024BLV; Start 89; Stop 113
tcttgcgacaaccagaacttcatac

SEQ ID NO: 464514 - DNA, 25 bp, Artificial
  probe
  misc_feature (1)..(25): SEQ ID NO: 7307; WAN024BLV; Start 4; Stop 28
gctgtacttgattcacttctgcaat

SEQ ID NO: 464515 - DNA, 25 bp, Artificial
  probe
  misc_feature (1)..(25): SEQ ID NO: 7307; WAN024BLV; Start 93; Stop 117
gcgacaaccagaacttcatacacat

SEQ ID NO: 464516 - DNA, 25 bp, Artificial
  probe
  misc_feature (1)..(25): SEQ ID NO: 7307; WAN024BLV; Start 99; Stop 123
accagaacttcatacacatctcgac

SEQ ID NO: 464517 - DNA, 25 bp, Artificial
  probe
  misc_feature (1)..(25): SEQ ID NO: 7307; WAN024BLV; Start 5; Stop 29
ctgtacttgattcacttctgcaatc

SEQ ID NO: 464518 - DNA, 25 bp, Artificial
  probe
  misc_feature (1)..(25): SEQ ID NO: 7307; WAN024BLV; Start 13; Stop 37
gattcacttctgcaatcaattcttg

SEQ ID NO: 464519 - DNA, 25 bp, Artificial
  probe
  misc_feature (1)..(25): SEQ ID NO: 7307; WAN024BLV; Start 90; Stop 114
cttgcgacaaccagaacttcataca

SEQ ID NO: 464520 - DNA, 25 bp, Artificial
  probe
  misc_feature (1)..(25): SEQ ID NO: 7307; WAN024BLV; Start 62; Stop 86
gtgctcttgagtcacttgatgattt

SEQ ID NO: 464521 - DNA, 25 bp, Artificial
  probe
  misc_feature (1)..(25): SEQ ID NO: 7307; WAN024BLV; Start 91; Stop 115
ttgcgacaaccagaacttcatacac

SEQ ID NO: 464522 - DNA, 25 bp, Artificial
  probe
  misc_feature (1)..(25): SEQ ID NO: 7307; WAN024BLV; Start 61; Stop 85
cgtgctcttgagtcacttgatgatt

SEQ ID NO: 464523 - DNA, 25 bp, Artificial
  probe
  misc_feature (1)..(25): SEQ ID NO: 7307; WAN024BLV; Start 48; Stop 72
aataagattgagacgtgctcttgag

SEQ ID NO: 464524 - DNA, 25 bp, Artificial
  probe
  misc_feature (1)..(25): SEQ ID NO: 7307; WAN024BLV; Start 33; Stop 57
tcttgaacgcaagtcaataagattg

SEQ ID NO: 464525 - DNA, 25 bp, Artificial
  probe
  misc_feature (1)..(25): SEQ ID NO: 7307; WAN024BLV; Start 28; Stop 52
tcaattcttgaacgcaagtcaataa

SEQ ID NO: 464526 - DNA, 25 bp, Artificial
  probe
  misc_feature (1)..(25): SEQ ID NO: 7307; WAN024BLV; Start 27; Stop 51
atcaattcttgaacgcaagtcaata

SEQ ID NO: 464527 - DNA, 25 bp, Artificial
  probe
  misc_feature (1)..(25): SEQ ID NO: 7307; WAN024BLV; Start 26; Stop 50
aatcaattcttgaacgcaagtcaat

SEQ ID NO: 464528 - DNA, 25 bp, Artificial
  probe
  misc_feature (1)..(25): SEQ ID NO: 7307; WAN024BLV; Start 47; Stop 71
caataagattgagacgtgctcttga

SEQ ID NO: 464529 - DNA, 25 bp, Artificial
  probe
  misc_feature (1)..(25): SEQ ID NO: 7307; WAN024BLV; Start 32; Stop 56
ttcttgaacgcaagtcaataagatt

SEQ ID NO: 464530 - DNA, 25 bp, Artificial
  probe
  misc_feature (1)..(25): SEQ ID NO: 7307; WAN024BLV; Start 30; Stop 54
aattcttgaacgcaagtcaataaga

SEQ ID NO: 464531 - DNA, 25 bp, Artificial
  probe
  misc_feature (1)..(25): SEQ ID NO: 7307; WAN024BLV; Start 29; Stop 53
caattcttgaacgcaagtcaataag

SEQ ID NO: 464532 - DNA, 25 bp, Artificial
  probe
  misc_feature (1)..(25): SEQ ID NO: 7307; WAN024BLV; Start 31; Stop 55
attcttgaacgcaagtcaataagat

SEQ ID NO: 464533 - DNA, 25 bp, Artificial
  probe
  misc_feature (1)..(25): SEQ ID NO: 7307; WAN024BLV; Start 16; Stop 40
tcacttctgcaatcaattcttgaac

SEQ ID NO: 464534 - DNA, 25 bp, Artificial
  probe
  misc_feature (1)..(25): SEQ ID NO: 7307; WAN024BLV; Start 15; Stop 39
ttcacttctgcaatcaattcttgaa

SEQ ID NO: 464535 - DNA, 25 bp, Artificial
  probe
  misc_feature (1)..(25): SEQ ID NO: 7307; WAN024BLV; Start 14; Stop 38
attcacttctgcaatcaattcttga

SEQ ID NO: 464536 - DNA, 25 bp, Artificial
  probe
  misc_feature (1)..(25): SEQ ID NO: 7307; WAN024BLV; Start 25; Stop 49
caatcaattcttgaacgcaagtcaa

SEQ ID NO: 464537 - DNA, 25 bp, Artificial
  probe
  misc_feature (1)..(25): SEQ ID NO: 7307; WAN024BLV; Start 49; Stop 73
ataagattgagacgtgctcttgagt

SEQ ID NO: 464538 - DNA, 25 bp, Artificial
  probe
  misc_feature (1)..(25): SEQ ID NO: 7307; WAN024BLV; Start 17; Stop 41
cacttctgcaatcaattcttgaacg

SEQ ID NO: 464539 - DNA, 25 bp, Artificial
  probe
  misc_feature (1)..(25): SEQ ID NO: 7307; WAN024BLV; Start 50; Stop 74
taagattgagacgtgctcttgagtc

SEQ ID NO: 464540 - DNA, 25 bp, Artificial
  probe
  misc_feature (1)..(25): SEQ ID NO: 7308; WAN024BLM; Start 28; Stop 52
ttcagacaaacatcagccatccaaa

SEQ ID NO: 464541 - DNA, 25 bp, Artificial
  probe
  misc_feature (1)..(25): SEQ ID NO: 7308; WAN024BLM; Start 27; Stop 51
tttcagacaaacatcagccatccaa

SEQ ID NO: 464542 - DNA, 25 bp, Artificial
  probe
  misc_feature (1)..(25): SEQ ID NO: 7308; WAN024BLM; Start 20; Stop 44
tcaagattttcagacaaacatcagc

SEQ ID NO: 464543 - DNA, 25 bp, Artificial
  probe
  misc_feature (1)..(25): SEQ ID NO: 7308; WAN024BLM; Start 80; Stop 104
ttttagcagtcttttccatcatagg

SEQ ID NO: 464544 - DNA, 25 bp, Artificial
  probe
  misc_feature (1)..(25): SEQ ID NO: 7308; WAN024BLM; Start 24; Stop 48
gattttcagacaaacatcagccatc

SEQ ID NO: 464545 - DNA, 25 bp, Artificial
  probe
  misc_feature (1)..(25): SEQ ID NO: 7308; WAN024BLM; Start 21; Stop 45
caagattttcagacaaacatcagcc

SEQ ID NO: 464546 - DNA, 25 bp, Artificial
  probe
  misc_feature (1)..(25): SEQ ID NO: 7308; WAN024BLM; Start 23; Stop 47
agattttcagacaaacatcagccat

SEQ ID NO: 464547 - DNA, 25 bp, Artificial
  probe
  misc_feature (1)..(25): SEQ ID NO: 7308; WAN024BLM; Start 22; Stop 46
aagattttcagacaaacatcagcca

SEQ ID NO: 464548 - DNA, 25 bp, Artificial
  probe
  misc_feature (1)..(25): SEQ ID NO: 7308; WAN024BLM; Start 19; Stop 43
atcaagattttcagacaaacatcag

SEQ ID NO: 464549 - DNA, 25 bp, Artificial
  probe
  misc_feature (1)..(25): SEQ ID NO: 7308; WAN024BLM; Start 25; Stop 49
attttcagacaaacatcagccatcc

SEQ ID NO: 464550 - DNA, 25 bp, Artificial
  probe
  misc_feature (1)..(25): SEQ ID NO: 7308; WAN024BLM; Start 15; Stop 39
ctcaatcaagattttcagacaaaca

SEQ ID NO: 464551 - DNA, 25 bp, Artificial
  probe
  misc_feature (1)..(25): SEQ ID NO: 7308; WAN024BLM; Start 81; Stop 105
tttagcagtcttttccatcatagga

SEQ ID NO: 464552 - DNA, 25 bp, Artificial
  probe
  misc_feature (1)..(25): SEQ ID NO: 7308; WAN024BLM; Start 14; Stop 38
tctcaatcaagattttcagacaaac

SEQ ID NO: 464553 - DNA, 25 bp, Artificial
  probe
  misc_feature (1)..(25): SEQ ID NO: 7308; WAN024BLM; Start 16; Stop 40
tcaatcaagattttcagacaaacat

SEQ ID NO: 464554 - DNA, 25 bp, Artificial
  probe
  misc_feature (1)..(25): SEQ ID NO: 7308; WAN024BLM; Start 18; Stop 42
aatcaagattttcagacaaacatca

SEQ ID NO: 464555 - DNA, 25 bp, Artificial
  probe
  misc_feature (1)..(25): SEQ ID NO: 7308; WAN024BLM; Start 17; Stop 41
caatcaagattttcagacaaacatc

SEQ ID NO: 464556 - DNA, 25 bp, Artificial
  probe
  misc_feature (1)..(25): SEQ ID NO: 7308; WAN024BLM; Start 13; Stop 37
ttctcaatcaagattttcagacaaa

SEQ ID NO: 464557 - DNA, 25 bp, Artificial
  probe
  misc_feature (1)..(25): SEQ ID NO: 7308; WAN024BLM; Start 12; Stop 36
tttctcaatcaagattttcagacaa

SEQ ID NO: 464558 - DNA, 25 bp, Artificial
  probe
  misc_feature (1)..(25): SEQ ID NO: 7308; WAN024BLM; Start 29; Stop 53
tcagacaaacatcagccatccaaaa

SEQ ID NO: 464559 - DNA, 25 bp, Artificial
  probe
  misc_feature (1)..(25): SEQ ID NO: 7308; WAN024BLM; Start 26; Stop 50
ttttcagacaaacatcagccatcca

SEQ ID NO: 464560 - DNA, 25 bp, Artificial
  probe
  misc_feature (1)..(25): SEQ ID NO: 7308; WAN024BLM; Start 11; Stop 35
atttctcaatcaagattttcagaca

SEQ ID NO: 464561 - DNA, 25 bp, Artificial
  probe
  misc_feature (1)..(25): SEQ ID NO: 7308; WAN024BLM; Start 82; Stop 106
ttagcagtcttttccatcataggaa

SEQ ID NO: 464562 - DNA, 25 bp, Artificial
  probe
  misc_feature (1)..(25): SEQ ID NO: 7308; WAN024BLM; Start 10; Stop 34
tatttctcaatcaagattttcagac

SEQ ID NO: 464563 - DNA, 25 bp, Artificial
  probe
  misc_feature (1)..(25): SEQ ID NO: 7309; WAN024BYP; Start 154; Stop 178
ggcgttgaaggacataagttactaa

SEQ ID NO: 464564 - DNA, 25 bp, Artificial
  probe
  misc_feature (1)..(25): SEQ ID NO: 7309; WAN024BYP; Start 246; Stop 270
ccagcaagaagtccttagttatcta

SEQ ID NO: 464565 - DNA, 25 bp, Artificial
  probe
  misc_feature (1)..(25): SEQ ID NO: 7309; WAN024BYP; Start 245; Stop 269
accagcaagaagtccttagttatct

SEQ ID NO: 464566 - DNA, 25 bp, Artificial
  probe
  misc_feature (1)..(25): SEQ ID NO: 7309; WAN024BYP; Start 153; Stop 177
aggcgttgaaggacataagttacta

SEQ ID NO: 464567 - DNA, 25 bp, Artificial
  probe
  misc_feature (1)..(25): SEQ ID NO: 7309; WAN024BYP; Start 253; Stop 277
gaagtccttagttatctaacctcgg

SEQ ID NO: 464568 - DNA, 25 bp, Artificial
  probe
  misc_feature (1)..(25): SEQ ID NO: 7309; WAN024BYP; Start 260; Stop 284
ttagttatctaacctcggtaatgcg

SEQ ID NO: 464569 - DNA, 25 bp, Artificial
  probe
  misc_feature (1)..(25): SEQ ID NO: 7309; WAN024BYP; Start 255; Stop 279
agtccttagttatctaacctcggta

SEQ ID NO: 464570 - DNA, 25 bp, Artificial
  probe
  misc_feature (1)..(25): SEQ ID NO: 7309; WAN024BYP; Start 254; Stop 278
aagtccttagttatctaacctcggt

SEQ ID NO: 464571 - DNA, 25 bp, Artificial
  probe
  misc_feature (1)..(25): SEQ ID NO: 7309; WAN024BYP; Start 244; Stop 268
gaccagcaagaagtccttagttatc

SEQ ID NO: 464572 - DNA, 25 bp, Artificial
  probe
  misc_feature (1)..(25): SEQ ID NO: 7309; WAN024BYP; Start 252; Stop 276
agaagtccttagttatctaacctcg

SEQ ID NO: 464573 - DNA, 25 bp, Artificial
  probe
  misc_feature (1)..(25): SEQ ID NO: 7309; WAN024BYP; Start 243; Stop 267
agaccagcaagaagtccttagttat

SEQ ID NO: 464574 - DNA, 25 bp, Artificial
  probe
  misc_feature (1)..(25): SEQ ID NO: 7309; WAN024BYP; Start 256; Stop 280
gtccttagttatctaacctcggtaa

SEQ ID NO: 464575 - DNA, 25 bp, Artificial
  probe
  misc_feature (1)..(25): SEQ ID NO: 7309; WAN024BYP; Start 335; Stop 359
cgattacggatattaatgttggagc

SEQ ID NO: 464576 - DNA, 25 bp, Artificial
  probe
  misc_feature (1)..(25): SEQ ID NO: 7309; WAN024BYP; Start 249; Stop 273
gcaagaagtccttagttatctaacc

SEQ ID NO: 464577 - DNA, 25 bp, Artificial
  probe
  misc_feature (1)..(25): SEQ ID NO: 7309; WAN024BYP; Start 259; Stop 283
cttagttatctaacctcggtaatgc

SEQ ID NO: 464578 - DNA, 25 bp, Artificial
  probe
  misc_feature (1)..(25): SEQ ID NO: 7309; WAN024BYP; Start 336; Stop 360
gattacggatattaatgttggagca

SEQ ID NO: 464579 - DNA, 25 bp, Artificial
  probe
  misc_feature (1)..(25): SEQ ID NO: 7309; WAN024BYP; Start 334; Stop 358
acgattacggatattaatgttggag

SEQ ID NO: 464580 - DNA, 25 bp, Artificial
  probe
  misc_feature (1)..(25): SEQ ID NO: 7309; WAN024BYP; Start 95; Stop 119
gtaatgcgacggaagcctataagaa

SEQ ID NO: 464581 - DNA, 25 bp, Artificial
  probe
  misc_feature (1)..(25): SEQ ID NO: 7309; WAN024BYP; Start 258; Stop 282
ccttagttatctaacctcggtaatg

SEQ ID NO: 464582 - DNA, 25 bp, Artificial
  probe
  misc_feature (1)..(25): SEQ ID NO: 7309; WAN024BYP; Start 257; Stop 281
tccttagttatctaacctcggtaat

SEQ ID NO: 464583 - DNA, 25 bp, Artificial
  probe
  misc_feature (1)..(25): SEQ ID NO: 7309; WAN024BYP; Start 247; Stop 271
cagcaagaagtccttagttatctaa

SEQ ID NO: 464584 - DNA, 25 bp, Artificial
  probe
  misc_feature (1)..(25): SEQ ID NO: 7309; WAN024BYP; Start 242; Stop 266
cagaccagcaagaagtccttagtta

SEQ ID NO: 464585 - DNA, 25 bp, Artificial
  probe
  misc_feature (1)..(25): SEQ ID NO: 7309; WAN024BYP; Start 337; Stop 361
attacggatattaatgttggagcaa

SEQ ID NO: 464586 - DNA, 25 bp, Artificial
  probe
  misc_feature (1)..(25): SEQ ID NO: 7309; WAN024BYP; Start 80; Stop 104
agtacatcatctcaggtaatgcgac

SEQ ID NO: 464587 - DNA, 25 bp, Artificial
  probe
  misc_feature (1)..(25): SEQ ID NO: 7309; WAN024BYP; Start 326; Stop 350
tgggtcaaacgattacggatattaa

SEQ ID NO: 464588 - DNA, 25 bp, Artificial
  probe
  misc_feature (1)..(25): SEQ ID NO: 7309; WAN024BYP; Start 248; Stop 272
agcaagaagtccttagttatctaac

SEQ ID NO: 464589 - DNA, 25 bp, Artificial
  probe
  misc_feature (1)..(25): SEQ ID NO: 7309; WAN024BYP; Start 333; Stop 357
aacgattacggatattaatgttgga

SEQ ID NO: 464590 - DNA, 25 bp, Artificial
  probe
  misc_feature (1)..(25): SEQ ID NO: 7309; WAN024BYP; Start 152; Stop 176
caggcgttgaaggacataagttact

SEQ ID NO: 464591 - DNA, 25 bp, Artificial
  probe
  misc_feature (1)..(25): SEQ ID NO: 7309; WAN024BYP; Start 155; Stop 179
gcgttgaaggacataagttactaaa

SEQ ID NO: 464592 - DNA, 25 bp, Artificial
  probe
  misc_feature (1)..(25): SEQ ID NO: 7309; WAN024BYP; Start 79; Stop 103
gagtacatcatctcaggtaatgcga

SEQ ID NO: 464593 - DNA, 25 bp, Artificial
  probe
  misc_feature (1)..(25): SEQ ID NO: 7309; WAN024BYP; Start 303; Stop 327
gactttgataagcatcggagaattg

SEQ ID NO: 464594 - DNA, 25 bp, Artificial
  probe
  misc_feature (1)..(25): SEQ ID NO: 7309; WAN024BYP; Start 302; Stop 326
agactttgataagcatcggagaatt

SEQ ID NO: 464595 - DNA, 25 bp, Artificial
  probe
  misc_feature (1)..(25): SEQ ID NO: 7309; WAN024BYP; Start 301; Stop 325
cagactttgataagcatcggagaat

SEQ ID NO: 464596 - DNA, 25 bp, Artificial
  probe
  misc_feature (1)..(25): SEQ ID NO: 7310; WAN024BXP; Start 51; Stop 75
aaatgacttatactttggaatggct

SEQ ID NO: 464597 - DNA, 25 bp, Artificial
  probe
  misc_feature (1)..(25): SEQ ID NO: 7310; WAN024BXP; Start 52; Stop 76
aatgacttatactttggaatggcta

SEQ ID NO: 464598 - DNA, 25 bp, Artificial
  probe
  misc_feature (1)..(25): SEQ ID NO: 7310; WAN024BXP; Start 50; Stop 74
caaatgacttatactttggaatggc

SEQ ID NO: 464599 - DNA, 25 bp, Artificial
  probe
  misc_feature (1)..(25): SEQ ID NO: 7310; WAN024BXP; Start 49; Stop 73
tcaaatgacttatactttggaatgg

SEQ ID NO: 464600 - DNA, 25 bp, Artificial
  probe
  misc_feature (1)..(25): SEQ ID NO: 7310; WAN024BXP; Start 48; Stop 72
ttcaaatgacttatactttggaatg

SEQ ID NO: 464601 - DNA, 25 bp, Artificial
  probe
  misc_feature (1)..(25): SEQ ID NO: 7310; WAN024BXP; Start 40; Stop 64
ggagaaaattcaaatgacttatact

SEQ ID NO: 464602 - DNA, 25 bp, Artificial
  probe
  misc_feature (1)..(25): SEQ ID NO: 7310; WAN024BXP; Start 39; Stop 63
aggagaaaattcaaatgacttatac

SEQ ID NO: 464603 - DNA, 25 bp, Artificial
  probe
  misc_feature (1)..(25): SEQ ID NO: 7310; WAN024BXP; Start 46; Stop 70
aattcaaatgacttatactttggaa

SEQ ID NO: 464604 - DNA, 25 bp, Artificial
  probe
  misc_feature (1)..(25): SEQ ID NO: 7310; WAN024BXP; Start 45; Stop 69
aaattcaaatgacttatactttgga

SEQ ID NO: 464605 - DNA, 25 bp, Artificial
  probe
  misc_feature (1)..(25): SEQ ID NO: 7310; WAN024BXP; Start 35; Stop 59
ttttaggagaaaattcaaatgactt

SEQ ID NO: 464606 - DNA, 25 bp, Artificial
  probe
  misc_feature (1)..(25): SEQ ID NO: 7311; WAN024BVO; Start 50; Stop 74
atgtagtcaatggcttcatcggaat

SEQ ID NO: 464607 - DNA, 25 bp, Artificial
  probe
  misc_feature (1)..(25): SEQ ID NO: 7311; WAN024BVO; Start 49; Stop 73
aatgtagtcaatggcttcatcggaa

SEQ ID NO: 464608 - DNA, 25 bp, Artificial
  probe
  misc_feature (1)..(25): SEQ ID NO: 7311; WAN024BVO; Start 51; Stop 75
tgtagtcaatggcttcatcggaatg

SEQ ID NO: 464609 - DNA, 25 bp, Artificial
  probe
  misc_feature (1)..(25): SEQ ID NO: 7311; WAN024BVO; Start 178; Stop 202
gatagttccaacaatcgccatgatt

SEQ ID NO: 464610 - DNA, 25 bp, Artificial
  probe
  misc_feature (1)..(25): SEQ ID NO: 7311; WAN024BVO; Start 56; Stop 80
tcaatggcttcatcggaatgattaa

SEQ ID NO: 464611 - DNA, 25 bp, Artificial
  probe
  misc_feature (1)..(25): SEQ ID NO: 7311; WAN024BVO; Start 169; Stop 193
ggtatcgtcgatagttccaacaatc

SEQ ID NO: 464612 - DNA, 25 bp, Artificial
  probe
  misc_feature (1)..(25): SEQ ID NO: 7311; WAN024BVO; Start 113; Stop 137
gtctaggatgggttggtagtgtaag

SEQ ID NO: 464613 - DNA, 25 bp, Artificial
  probe
  misc_feature (1)..(25): SEQ ID NO: 7311; WAN024BVO; Start 94; Stop 118
gttgtcagaaacttacctggtctag

SEQ ID NO: 464614 - DNA, 25 bp, Artificial
  probe
  misc_feature (1)..(25): SEQ ID NO: 7311; WAN024BVO; Start 55; Stop 79
gtcaatggcttcatcggaatgatta

SEQ ID NO: 464615 - DNA, 25 bp, Artificial
  probe
  misc_feature (1)..(25): SEQ ID NO: 7311; WAN024BVO; Start 58; Stop 82
aatggcttcatcggaatgattaatg

SEQ ID NO: 464616 - DNA, 25 bp, Artificial
  probe
  misc_feature (1)..(25): SEQ ID NO: 7311; WAN024BVO; Start 57; Stop 81
caatggcttcatcggaatgattaat

SEQ ID NO: 464617 - DNA, 25 bp, Artificial
  probe
  misc_feature (1)..(25): SEQ ID NO: 7311; WAN024BVO; Start 63; Stop 87
cttcatcggaatgattaatggagtt

SEQ ID NO: 464618 - DNA, 25 bp, Artificial
  probe
  misc_feature (1)..(25): SEQ ID NO: 7311; WAN024BVO; Start 98; Stop 122
tcagaaacttacctggtctaggatg

SEQ ID NO: 464619 - DNA, 25 bp, Artificial
  probe
  misc_feature (1)..(25): SEQ ID NO: 7311; WAN024BVO; Start 97; Stop 121
gtcagaaacttacctggtctaggat

SEQ ID NO: 464620 - DNA, 25 bp, Artificial
  probe
  misc_feature (1)..(25): SEQ ID NO: 7311; WAN024BVO; Start 48; Stop 72
aaatgtagtcaatggcttcatcgga

SEQ ID NO: 464621 - DNA, 25 bp, Artificial
  probe
  misc_feature (1)..(25): SEQ ID NO: 7311; WAN024BVO; Start 62; Stop 86
gcttcatcggaatgattaatggagt

SEQ ID NO: 464622 - DNA, 25 bp, Artificial
  probe
  misc_feature (1)..(25): SEQ ID NO: 7311; WAN024BVO; Start 53; Stop 77
tagtcaatggcttcatcggaatgat

SEQ ID NO: 464623 - DNA, 25 bp, Artificial
  probe
  misc_feature (1)..(25): SEQ ID NO: 7311; WAN024BVO; Start 95; Stop 119
ttgtcagaaacttacctggtctagg

SEQ ID NO: 464624 - DNA, 25 bp, Artificial
  probe
  misc_feature (1)..(25): SEQ ID NO: 7311; WAN024BVO; Start 59; Stop 83
atggcttcatcggaatgattaatgg

SEQ ID NO: 464625 - DNA, 25 bp, Artificial
  probe
  misc_feature (1)..(25): SEQ ID NO: 7311; WAN024BVO; Start 168; Stop 192
tggtatcgtcgatagttccaacaat

SEQ ID NO: 464626 - DNA, 25 bp, Artificial
  probe
  misc_feature (1)..(25): SEQ ID NO: 7311; WAN024BVO; Start 61; Stop 85
ggcttcatcggaatgattaatggag

SEQ ID NO: 464627 - DNA, 25 bp, Artificial
  probe
  misc_feature (1)..(25): SEQ ID NO: 7311; WAN024BVO; Start 124; Stop 148
gttggtagtgtaagcacagttagcc

SEQ ID NO: 464628 - DNA, 25 bp, Artificial
  probe
  misc_feature (1)..(25): SEQ ID NO: 7311; WAN024BVO; Start 123; Stop 147
ggttggtagtgtaagcacagttagc

SEQ ID NO: 464629 - DNA, 25 bp, Artificial
  probe
  misc_feature (1)..(25): SEQ ID NO: 7311; WAN024BVO; Start 93; Stop 117
cgttgtcagaaacttacctggtcta

SEQ ID NO: 464630 - DNA, 25 bp, Artificial
  probe
  misc_feature (1)..(25): SEQ ID NO: 7311; WAN024BVO; Start 99; Stop 123
cagaaacttacctggtctaggatgg

SEQ ID NO: 464631 - DNA, 25 bp, Artificial
  probe
  misc_feature (1)..(25): SEQ ID NO: 7311; WAN024BVO; Start 125; Stop 149
ttggtagtgtaagcacagttagcct

SEQ ID NO: 464632 - DNA, 25 bp, Artificial
  probe
  misc_feature (1)..(25): SEQ ID NO: 7311; WAN024BVO; Start 112; Stop 136
ggtctaggatgggttggtagtgtaa

SEQ ID NO: 464633 - DNA, 25 bp, Artificial
  probe
  misc_feature (1)..(25): SEQ ID NO: 7311; WAN024BVO; Start 87; Stop 111
tttaggcgttgtcagaaacttacct

SEQ ID NO: 464634 - DNA, 25 bp, Artificial
  probe
  misc_feature (1)..(25): SEQ ID NO: 7311; WAN024BVO; Start 96; Stop 120
tgtcagaaacttacctggtctagga

SEQ ID NO: 464635 - DNA, 25 bp, Artificial
  probe
  misc_feature (1)..(25): SEQ ID NO: 7311; WAN024BVO; Start 33; Stop 57
tcttggaacgattgaaaatgtagtc

SEQ ID NO: 464636 - DNA, 25 bp, Artificial
  probe
  misc_feature (1)..(25): SEQ ID NO: 7311; WAN024BVO; Start 60; Stop 84
tggcttcatcggaatgattaatgga

SEQ ID NO: 464637 - DNA, 25 bp, Artificial
  probe
  misc_feature (1)..(25): SEQ ID NO: 7311; WAN024BVO; Start 54; Stop 78
agtcaatggcttcatcggaatgatt

SEQ ID NO: 464638 - DNA, 25 bp, Artificial
  probe
  misc_feature (1)..(25): SEQ ID NO: 7311; WAN024BVO; Start 52; Stop 76
gtagtcaatggcttcatcggaatga

SEQ ID NO: 464639 - DNA, 25 bp, Artificial
  probe
  misc_feature (1)..(25): SEQ ID NO: 7312; WAN024DR5; Start 23; Stop 47
atgactgtaaatggacggaactctg

SEQ ID NO: 464640 - DNA, 25 bp, Artificial
  probe
  misc_feature (1)..(25): SEQ ID NO: 7312; WAN024DR5; Start 22; Stop 46
catgactgtaaatggacggaactct

SEQ ID NO: 464641 - DNA, 25 bp, Artificial
  probe
  misc_feature (1)..(25): SEQ ID NO: 7312; WAN024DR5; Start 88; Stop 112
ctcaaactctcaggtaaaaggacag

SEQ ID NO: 464642 - DNA, 25 bp, Artificial
  probe
  misc_feature (1)..(25): SEQ ID NO: 7312; WAN024DR5; Start 89; Stop 113
tcaaactctcaggtaaaaggacaga

SEQ ID NO: 464643 - DNA, 25 bp, Artificial
  probe
  misc_feature (1)..(25): SEQ ID NO: 7312; WAN024DR5; Start 27; Stop 51
ctgtaaatggacggaactctggaga

SEQ ID NO: 464644 - DNA, 25 bp, Artificial
  probe
  misc_feature (1)..(25): SEQ ID NO: 7312; WAN024DR5; Start 9; Stop 33
tcgtttgattttccatgactgtaaa

SEQ ID NO: 464645 - DNA, 25 bp, Artificial
  probe
  misc_feature (1)..(25): SEQ ID NO: 7312; WAN024DR5; Start 8; Stop 32
atcgtttgattttccatgactgtaa

SEQ ID NO: 464646 - DNA, 25 bp, Artificial
  probe
  misc_feature (1)..(25): SEQ ID NO: 7312; WAN024DR5; Start 25; Stop 49
gactgtaaatggacggaactctgga

SEQ ID NO: 464647 - DNA, 25 bp, Artificial
  probe
  misc_feature (1)..(25): SEQ ID NO: 7312; WAN024DR5; Start 83; Stop 107
aactgctcaaactctcaggtaaaag

SEQ ID NO: 464648 - DNA, 25 bp, Artificial
  probe
  misc_feature (1)..(25): SEQ ID NO: 7312; WAN024DR5; Start 26; Stop 50
actgtaaatggacggaactctggag

SEQ ID NO: 464649 - DNA, 25 bp, Artificial
  probe
  misc_feature (1)..(25): SEQ ID NO: 7312; WAN024DR5; Start 82; Stop 106
caactgctcaaactctcaggtaaaa

SEQ ID NO: 464650 - DNA, 25 bp, Artificial
  probe
  misc_feature (1)..(25): SEQ ID NO: 7312; WAN024DR5; Start 81; Stop 105
gcaactgctcaaactctcaggtaaa

SEQ ID NO: 464651 - DNA, 25 bp, Artificial
  probe
  misc_feature (1)..(25): SEQ ID NO: 7312; WAN024DR5; Start 30; Stop 54
taaatggacggaactctggagagac

SEQ ID NO: 464652 - DNA, 25 bp, Artificial
  probe
  misc_feature (1)..(25): SEQ ID NO: 7312; WAN024DR5; Start 29; Stop 53
gtaaatggacggaactctggagaga

SEQ ID NO: 464653 - DNA, 25 bp, Artificial
  probe
  misc_feature (1)..(25): SEQ ID NO: 7312; WAN024DR5; Start 24; Stop 48
tgactgtaaatggacggaactctgg

SEQ ID NO: 464654 - DNA, 25 bp, Artificial
  probe
  misc_feature (1)..(25): SEQ ID NO: 7312; WAN024DR5; Start 87; Stop 111
gctcaaactctcaggtaaaaggaca

SEQ ID NO: 464655 - DNA, 25 bp, Artificial
  probe
  misc_feature (1)..(25): SEQ ID NO: 7312; WAN024DR5; Start 86; Stop 110
tgctcaaactctcaggtaaaaggac

SEQ ID NO: 464656 - DNA, 25 bp, Artificial
  probe
  misc_feature (1)..(25): SEQ ID NO: 7312; WAN024DR5; Start 28; Stop 52
tgtaaatggacggaactctggagag

SEQ ID NO: 464657 - DNA, 25 bp, Artificial
  probe
  misc_feature (1)..(25): SEQ ID NO: 7312; WAN024DR5; Start 10; Stop 34
cgtttgattttccatgactgtaaat

SEQ ID NO: 464658 - DNA, 25 bp, Artificial
  probe
  misc_feature (1)..(25): SEQ ID NO: 7312; WAN024DR5; Start 6; Stop 30
gaatcgtttgattttccatgactgt

SEQ ID NO: 464659 - DNA, 25 bp, Artificial
  probe
  misc_feature (1)..(25): SEQ ID NO: 7312; WAN024DR5; Start 7; Stop 31
aatcgtttgattttccatgactgta

SEQ ID NO: 464660 - DNA, 25 bp, Artificial
  probe
  misc_feature (1)..(25): SEQ ID NO: 7312; WAN024DR5; Start 85; Stop 109
ctgctcaaactctcaggtaaaagga

SEQ ID NO: 464661 - DNA, 25 bp, Artificial
  probe
  misc_feature (1)..(25): SEQ ID NO: 7312; WAN024DR5; Start 84; Stop 108
actgctcaaactctcaggtaaaagg

SEQ ID NO: 464662 - DNA, 25 bp, Artificial
  probe
  misc_feature (1)..(25): SEQ ID NO: 7312; WAN024DR5; Start 11; Stop 35
gtttgattttccatgactgtaaatg

SEQ ID NO: 464663 - DNA, 25 bp, Artificial
  probe
  misc_feature (1)..(25): SEQ ID NO: 7312; WAN024DR5; Start 90; Stop 114
caaactctcaggtaaaaggacagag

SEQ ID NO: 464664 - DNA, 25 bp, Artificial
  probe
  misc_feature (1)..(25): SEQ ID NO: 7312; WAN024DR5; Start 96; Stop 120
ctcaggtaaaaggacagagctagga

SEQ ID NO: 464665 - DNA, 25 bp, Artificial
  probe
  misc_feature (1)..(25): SEQ ID NO: 7312; WAN024DR5; Start 95; Stop 119
tctcaggtaaaaggacagagctagg

SEQ ID NO: 464666 - DNA, 25 bp, Artificial
  probe
  misc_feature (1)..(25): SEQ ID NO: 7312; WAN024DR5; Start 80; Stop 104
ggcaactgctcaaactctcaggtaa

SEQ ID NO: 464667 - DNA, 25 bp, Artificial
  probe
  misc_feature (1)..(25): SEQ ID NO: 7312; WAN024DR5; Start 21; Stop 45
ccatgactgtaaatggacggaactc

SEQ ID NO: 464668 - DNA, 25 bp, Artificial
  probe
  misc_feature (1)..(25): SEQ ID NO: 7312; WAN024DR5; Start 5; Stop 29
ggaatcgtttgattttccatgactg

SEQ ID NO: 464669 - DNA, 25 bp, Artificial
  probe
  misc_feature (1)..(25): SEQ ID NO: 7312; WAN024DR5; Start 91; Stop 115
aaactctcaggtaaaaggacagagc

SEQ ID NO: 464670 - DNA, 25 bp, Artificial
  probe
  misc_feature (1)..(25): SEQ ID NO: 7312; WAN024DR5; Start 94; Stop 118
ctctcaggtaaaaggacagagctag

SEQ ID NO: 464671 - DNA, 25 bp, Artificial
  probe
  misc_feature (1)..(25): SEQ ID NO: 7312; WAN024DR5; Start 12; Stop 36
tttgattttccatgactgtaaatgg

SEQ ID NO: 464672 - DNA, 25 bp, Artificial
  probe
  misc_feature (1)..(25): SEQ ID NO: 7313; WAN024BXO; Start 43; Stop 67
cttcaaactcacatggataattggg

SEQ ID NO: 464673 - DNA, 25 bp, Artificial
  probe
  misc_feature (1)..(25): SEQ ID NO: 7313; WAN024BXO; Start 42; Stop 66
acttcaaactcacatggataattgg

SEQ ID NO: 464674 - DNA, 25 bp, Artificial
  probe
  misc_feature (1)..(25): SEQ ID NO: 7313; WAN024BXO; Start 47; Stop 71
aaactcacatggataattgggcatc

SEQ ID NO: 464675 - DNA, 25 bp, Artificial
  probe
  misc_feature (1)..(25): SEQ ID NO: 7313; WAN024BXO; Start 50; Stop 74
ctcacatggataattgggcatcaaa

SEQ ID NO: 464676 - DNA, 25 bp, Artificial
  probe
  misc_feature (1)..(25): SEQ ID NO: 7313; WAN024BXO; Start 46; Stop 70
caaactcacatggataattgggcat

SEQ ID NO: 464677 - DNA, 25 bp, Artificial
  probe
  misc_feature (1)..(25): SEQ ID NO: 7313; WAN024BXO; Start 44; Stop 68
ttcaaactcacatggataattgggc

SEQ ID NO: 464678 - DNA, 25 bp, Artificial
  probe
  misc_feature (1)..(25): SEQ ID NO: 7313; WAN024BXO; Start 48; Stop 72
aactcacatggataattgggcatca

SEQ ID NO: 464679 - DNA, 25 bp, Artificial
  probe
  misc_feature (1)..(25): SEQ ID NO: 7313; WAN024BXO; Start 49; Stop 73
actcacatggataattgggcatcaa

SEQ ID NO: 464680 - DNA, 25 bp, Artificial
  probe
  misc_feature (1)..(25): SEQ ID NO: 7313; WAN024BXO; Start 41; Stop 65
tacttcaaactcacatggataattg

SEQ ID NO: 464681 - DNA, 25 bp, Artificial
  probe
  misc_feature (1)..(25): SEQ ID NO: 7313; WAN024BXO; Start 45; Stop 69
tcaaactcacatggataattgggca

SEQ ID NO: 464682 - DNA, 25 bp, Artificial
  probe
  misc_feature (1)..(25): SEQ ID NO: 7313; WAN024BXO; Start 40; Stop 64
ttacttcaaactcacatggataatt

SEQ ID NO: 464683 - DNA, 25 bp, Artificial
  probe
  misc_feature (1)..(25): SEQ ID NO: 7313; WAN024BXO; Start 39; Stop 63
tttacttcaaactcacatggataat

SEQ ID NO: 464684 - DNA, 25 bp, Artificial
  probe
  misc_feature (1)..(25): SEQ ID NO: 7313; WAN024BXO; Start 51; Stop 75
tcacatggataattgggcatcaaaa

SEQ ID NO: 464685 - DNA, 25 bp, Artificial
  probe
  misc_feature (1)..(25): SEQ ID NO: 7313; WAN024BXO; Start 36; Stop 60
aattttacttcaaactcacatggat

SEQ ID NO: 464686 - DNA, 25 bp, Artificial
  probe
  misc_feature (1)..(25): SEQ ID NO: 7313; WAN024BXO; Start 35; Stop 59
aaattttacttcaaactcacatgga

SEQ ID NO: 464687 - DNA, 25 bp, Artificial
  probe
  misc_feature (1)..(25): SEQ ID NO: 7313; WAN024BXO; Start 38; Stop 62
ttttacttcaaactcacatggataa

SEQ ID NO: 464688 - DNA, 25 bp, Artificial
  probe
  misc_feature (1)..(25): SEQ ID NO: 7313; WAN024BXO; Start 37; Stop 61
attttacttcaaactcacatggata

SEQ ID NO: 464689 - DNA, 25 bp, Artificial
  probe
  misc_feature (1)..(25): SEQ ID NO: 7313; WAN024BXO; Start 34; Stop 58
aaaattttacttcaaactcacatgg

SEQ ID NO: 464690 - DNA, 25 bp, Artificial
  probe
  misc_feature (1)..(25): SEQ ID NO: 7314; WAN024DOF; Start 176; Stop 200
agagtatcgccacaaatcccttatt

SEQ ID NO: 464691 - DNA, 25 bp, Artificial
  probe
  misc_feature (1)..(25): SEQ ID NO: 7314; WAN024DOF; Start 175; Stop 199
aagagtatcgccacaaatcccttat

SEQ ID NO: 464692 - DNA, 25 bp, Artificial
  probe
  misc_feature (1)..(25): SEQ ID NO: 7314; WAN024DOF; Start 177; Stop 201
gagtatcgccacaaatcccttattg

SEQ ID NO: 464693 - DNA, 25 bp, Artificial
  probe
  misc_feature (1)..(25): SEQ ID NO: 7314; WAN024DOF; Start 139; Stop 163
aacaagaccaagcccattgataaac

SEQ ID NO: 464694 - DNA, 25 bp, Artificial
  probe
  misc_feature (1)..(25): SEQ ID NO: 7314; WAN024DOF; Start 138; Stop 162
caacaagaccaagcccattgataaa

SEQ ID NO: 464695 - DNA, 25 bp, Artificial
  probe
  misc_feature (1)..(25): SEQ ID NO: 7314; WAN024DOF; Start 186; Stop 210
cacaaatcccttattgctccacttg

SEQ ID NO: 464696 - DNA, 25 bp, Artificial
  probe
  misc_feature (1)..(25): SEQ ID NO: 7314; WAN024DOF; Start 43; Stop 67
ttcctcttcctactcctgagacttt

SEQ ID NO: 464697 - DNA, 25 bp, Artificial
  probe
  misc_feature (1)..(25): SEQ ID NO: 7314; WAN024DOF; Start 42; Stop 66
tttcctcttcctactcctgagactt

SEQ ID NO: 464698 - DNA, 25 bp, Artificial
  probe
  misc_feature (1)..(25): SEQ ID NO: 7314; WAN024DOF; Start 174; Stop 198
caagagtatcgccacaaatccctta

SEQ ID NO: 464699 - DNA, 25 bp, Artificial
  probe
  misc_feature (1)..(25): SEQ ID NO: 7314; WAN024DOF; Start 142; Stop 166
aagaccaagcccattgataaaccaa

SEQ ID NO: 464700 - DNA, 25 bp, Artificial
  probe
  misc_feature (1)..(25): SEQ ID NO: 7314; WAN024DOF; Start 137; Stop 161
acaacaagaccaagcccattgataa

SEQ ID NO: 464701 - DNA, 25 bp, Artificial
  probe
  misc_feature (1)..(25): SEQ ID NO: 7314; WAN024DOF; Start 136; Stop 160
aacaacaagaccaagcccattgata

SEQ ID NO: 464702 - DNA, 25 bp, Artificial
  probe
  misc_feature (1)..(25): SEQ ID NO: 7314; WAN024DOF; Start 185; Stop 209
ccacaaatcccttattgctccactt

SEQ ID NO: 464703 - DNA, 25 bp, Artificial
  probe
  misc_feature (1)..(25): SEQ ID NO: 7314; WAN024DOF; Start 180; Stop 204
tatcgccacaaatcccttattgctc

SEQ ID NO: 464704 - DNA, 25 bp, Artificial
  probe
  misc_feature (1)..(25): SEQ ID NO: 7314; WAN024DOF; Start 73; Stop 97
agtcccctcttgagaaatagtatct

SEQ ID NO: 464705 - DNA, 25 bp, Artificial
  probe
  misc_feature (1)..(25): SEQ ID NO: 7314; WAN024DOF; Start 67; Stop 91
ttgcttagtcccctcttgagaaata

SEQ ID NO: 464706 - DNA, 25 bp, Artificial
  probe
  misc_feature (1)..(25): SEQ ID NO: 7314; WAN024DOF; Start 49; Stop 73
ttcctactcctgagacttttgctta

SEQ ID NO: 464707 - DNA, 25 bp, Artificial
  probe
  misc_feature (1)..(25): SEQ ID NO: 7314; WAN024DOF; Start 70; Stop 94
cttagtcccctcttgagaaatagta

SEQ ID NO: 464708 - DNA, 25 bp, Artificial
  probe
  misc_feature (1)..(25): SEQ ID NO: 7314; WAN024DOF; Start 179; Stop 203
gtatcgccacaaatcccttattgct

SEQ ID NO: 464709 - DNA, 25 bp, Artificial
  probe
  misc_feature (1)..(25): SEQ ID NO: 7314; WAN024DOF; Start 178; Stop 202
agtatcgccacaaatcccttattgc

SEQ ID NO: 464710 - DNA, 25 bp, Artificial
  probe
  misc_feature (1)..(25): SEQ ID NO: 7314; WAN024DOF; Start 144; Stop 168
gaccaagcccattgataaaccaact

SEQ ID NO: 464711 - DNA, 25 bp, Artificial
  probe
  misc_feature (1)..(25): SEQ ID NO: 7314; WAN024DOF; Start 143; Stop 167
agaccaagcccattgataaaccaac

SEQ ID NO: 464712 - DNA, 25 bp, Artificial
  probe
  misc_feature (1)..(25): SEQ ID NO: 7314; WAN024DOF; Start 141; Stop 165
caagaccaagcccattgataaacca

SEQ ID NO: 464713 - DNA, 25 bp, Artificial
  probe
  misc_feature (1)..(25): SEQ ID NO: 7314; WAN024DOF; Start 140; Stop 164
acaagaccaagcccattgataaacc

SEQ ID NO: 464714 - DNA, 25 bp, Artificial
  probe
  misc_feature (1)..(25): SEQ ID NO: 7314; WAN024DOF; Start 72; Stop 96
tagtcccctcttgagaaatagtatc

SEQ ID NO: 464715 - DNA, 25 bp, Artificial
  probe
  misc_feature (1)..(25): SEQ ID NO: 7314; WAN024DOF; Start 132; Stop 156
ttcaaacaacaagaccaagcccatt

SEQ ID NO: 464716 - DNA, 25 bp, Artificial
  probe
  misc_feature (1)..(25): SEQ ID NO: 7314; WAN024DOF; Start 131; Stop 155
tttcaaacaacaagaccaagcccat

SEQ ID NO: 464717 - DNA, 25 bp, Artificial
  probe
  misc_feature (1)..(25): SEQ ID NO: 7314; WAN024DOF; Start 170; Stop 194
ctagcaagagtatcgccacaaatcc

SEQ ID NO: 464718 - DNA, 25 bp, Artificial
  probe
  misc_feature (1)..(25): SEQ ID NO: 7314; WAN024DOF; Start 69; Stop 93
gcttagtcccctcttgagaaatagt

SEQ ID NO: 464719 - DNA, 25 bp, Artificial
  probe
  misc_feature (1)..(25): SEQ ID NO: 7314; WAN024DOF; Start 68; Stop 92
tgcttagtcccctcttgagaaatag

SEQ ID NO: 464720 - DNA, 25 bp, Artificial
  probe
  misc_feature (1)..(25): SEQ ID NO: 7314; WAN024DOF; Start 50; Stop 74
tcctactcctgagacttttgcttag

SEQ ID NO: 464721 - DNA, 25 bp, Artificial
  probe
  misc_feature (1)..(25): SEQ ID NO: 7314; WAN024DOF; Start 135; Stop 159
aaacaacaagaccaagcccattgat

SEQ ID NO: 464722 - DNA, 25 bp, Artificial
  probe
  misc_feature (1)..(25): SEQ ID NO: 7314; WAN024DOF; Start 191; Stop 215
atcccttattgctccacttgcgata

SEQ ID NO: 464723 - DNA, 25 bp, Artificial
  probe
  misc_feature (1)..(25): SEQ ID NO: 7315; WAN024C26; Start 1910; Stop 1934
atacagaggaggttacttatggcta

SEQ ID NO: 464724 - DNA, 25 bp, Artificial
  probe
  misc_feature (1)..(25): SEQ ID NO: 7315; WAN024C26; Start 1911; Stop 1935
tacagaggaggttacttatggctaa

SEQ ID NO: 464725 - DNA, 25 bp, Artificial
  probe
  misc_feature (1)..(25): SEQ ID NO: 7315; WAN024C26; Start 886; Stop 910
acaatatcttcaatgacctcaacca

SEQ ID NO: 464726 - DNA, 25 bp, Artificial
  probe
  misc_feature (1)..(25): SEQ ID NO: 7315; WAN024C26; Start 1107; Stop 1131
tgaagacattgccttggattatagt

SEQ ID NO: 464727 - DNA, 25 bp, Artificial
  probe
  misc_feature (1)..(25): SEQ ID NO: 7315; WAN024C26; Start 1106; Stop 1130
gtgaagacattgccttggattatag

SEQ ID NO: 464728 - DNA, 25 bp, Artificial
  probe
  misc_feature (1)..(25): SEQ ID NO: 7315; WAN024C26; Start 1392; Stop 1416
ctacattccacagaccatagaactc

SEQ ID NO: 464729 - DNA, 25 bp, Artificial
  probe
  misc_feature (1)..(25): SEQ ID NO: 7315; WAN024C26; Start 1909; Stop 1933
gatacagaggaggttacttatggct

SEQ ID NO: 464730 - DNA, 25 bp, Artificial
  probe
  misc_feature (1)..(25): SEQ ID NO: 7315; WAN024C26; Start 1908; Stop 1932
agatacagaggaggttacttatggc

SEQ ID NO: 464731 - DNA, 25 bp, Artificial
  probe
  misc_feature (1)..(25): SEQ ID NO: 7315; WAN024C26; Start 1389; Stop 1413
ttcctacattccacagaccatagaa

SEQ ID NO: 464732 - DNA, 25 bp, Artificial
  probe
  misc_feature (1)..(25): SEQ ID NO: 7315; WAN024C26; Start 1393; Stop 1417
tacattccacagaccatagaactct

SEQ ID NO: 464733 - DNA, 25 bp, Artificial
  probe
  misc_feature (1)..(25): SEQ ID NO: 7315; WAN024C26; Start 887; Stop 911
caatatcttcaatgacctcaaccat

SEQ ID NO: 464734 - DNA, 25 bp, Artificial
  probe
  misc_feature (1)..(25): SEQ ID NO: 7315; WAN024C26; Start 767; Stop 791
acattgataccattaagtctcagca

SEQ ID NO: 464735 - DNA, 25 bp, Artificial
  probe
  misc_feature (1)..(25): SEQ ID NO: 7315; WAN024C26; Start 1105; Stop 1129
cgtgaagacattgccttggattata

SEQ ID NO: 464736 - DNA, 25 bp, Artificial
  probe
  misc_feature (1)..(25): SEQ ID NO: 7315; WAN024C26; Start 885; Stop 909
tacaatatcttcaatgacctcaacc

SEQ ID NO: 464737 - DNA, 25 bp, Artificial
  probe
  misc_feature (1)..(25): SEQ ID NO: 7315; WAN024C26; Start 1088; Stop 1112
aattgatggaagtagatcgtgaaga

SEQ ID NO: 464738 - DNA, 25 bp, Artificial
  probe
  misc_feature (1)..(25): SEQ ID NO: 7315; WAN024C26; Start 1086; Stop 1110
agaattgatggaagtagatcgtgaa

SEQ ID NO: 464739 - DNA, 25 bp, Artificial
  probe
  misc_feature (1)..(25): SEQ ID NO: 7315; WAN024C26; Start 1085; Stop 1109
aagaattgatggaagtagatcgtga

SEQ ID NO: 464740 - DNA, 25 bp, Artificial
  probe
  misc_feature (1)..(25): SEQ ID NO: 7315; WAN024C26; Start 1907; Stop 1931
tagatacagaggaggttacttatgg

SEQ ID NO: 464741 - DNA, 25 bp, Artificial
  probe
  misc_feature (1)..(25): SEQ ID NO: 7315; WAN024C26; Start 1089; Stop 1113
attgatggaagtagatcgtgaagac

SEQ ID NO: 464742 - DNA, 25 bp, Artificial
  probe
  misc_feature (1)..(25): SEQ ID NO: 7315; WAN024C26; Start 1087; Stop 1111
gaattgatggaagtagatcgtgaag

SEQ ID NO: 464743 - DNA, 25 bp, Artificial
  probe
  misc_feature (1)..(25): SEQ ID NO: 7315; WAN024C26; Start 766; Stop 790
aacattgataccattaagtctcagc

SEQ ID NO: 464744 - DNA, 25 bp, Artificial
  probe
  misc_feature (1)..(25): SEQ ID NO: 7315; WAN024C26; Start 1391; Stop 1415
cctacattccacagaccatagaact

SEQ ID NO: 464745 - DNA, 25 bp, Artificial
  probe
  misc_feature (1)..(25): SEQ ID NO: 7315; WAN024C26; Start 1390; Stop 1414
tcctacattccacagaccatagaac

SEQ ID NO: 464746 - DNA, 25 bp, Artificial
  probe
  misc_feature (1)..(25): SEQ ID NO: 7315; WAN024C26; Start 1394; Stop 1418
acattccacagaccatagaactctt

SEQ ID NO: 464747 - DNA, 25 bp, Artificial
  probe
  misc_feature (1)..(25): SEQ ID NO: 7315; WAN024C26; Start 768; Stop 792
cattgataccattaagtctcagcat

SEQ ID NO: 464748 - DNA, 25 bp, Artificial
  probe
  misc_feature (1)..(25): SEQ ID NO: 7315; WAN024C26; Start 1092; Stop 1116
gatggaagtagatcgtgaagacatt

SEQ ID NO: 464749 - DNA, 25 bp, Artificial
  probe
  misc_feature (1)..(25): SEQ ID NO: 7315; WAN024C26; Start 1108; Stop 1132
gaagacattgccttggattatagta

SEQ ID NO: 464750 - DNA, 25 bp, Artificial
  probe
  misc_feature (1)..(25): SEQ ID NO: 7315; WAN024C26; Start 1902; Stop 1926
tgtgttagatacagaggaggttact

SEQ ID NO: 464751 - DNA, 25 bp, Artificial
  probe
  misc_feature (1)..(25): SEQ ID NO: 7315; WAN024C26; Start 1093; Stop 1117
atggaagtagatcgtgaagacattg

SEQ ID NO: 464752 - DNA, 25 bp, Artificial
  probe
  misc_feature (1)..(25): SEQ ID NO: 7315; WAN024C26; Start 1084; Stop 1108
caagaattgatggaagtagatcgtg

SEQ ID NO: 464753 - DNA, 25 bp, Artificial
  probe
  misc_feature (1)..(25): SEQ ID NO: 7315; WAN024C26; Start 1903; Stop 1927
gtgttagatacagaggaggttactt

SEQ ID NO: 464754 - DNA, 25 bp, Artificial
  probe
  misc_feature (1)..(25): SEQ ID NO: 7315; WAN024C26; Start 352; Stop 376
gtgtcgttcttacagactcttctat

SEQ ID NO: 464755 - DNA, 25 bp, Artificial
  probe
  misc_feature (1)..(25): SEQ ID NO: 7315; WAN024C26; Start 349; Stop 373
atagtgtcgttcttacagactcttc

SEQ ID NO: 464756 - DNA, 25 bp, Artificial
  probe
  misc_feature (1)..(25): SEQ ID NO: 7316; WAN024F4G; Start 159; Stop 183
tctcacgatctgtatagttcactac

SEQ ID NO: 464757 - DNA, 25 bp, Artificial
  probe
  misc_feature (1)..(25): SEQ ID NO: 7316; WAN024F4G; Start 155; Stop 179
ggaatctcacgatctgtatagttca

SEQ ID NO: 464758 - DNA, 25 bp, Artificial
  probe
  misc_feature (1)..(25): SEQ ID NO: 7316; WAN024F4G; Start 141; Stop 165
tgatacgagtataaggaatctcacg

SEQ ID NO: 464759 - DNA, 25 bp, Artificial
  probe
  misc_feature (1)..(25): SEQ ID NO: 7316; WAN024F4G; Start 154; Stop 178
aggaatctcacgatctgtatagttc

SEQ ID NO: 464760 - DNA, 25 bp, Artificial
  probe
  misc_feature (1)..(25): SEQ ID NO: 7316; WAN024F4G; Start 157; Stop 181
aatctcacgatctgtatagttcact

SEQ ID NO: 464761 - DNA, 25 bp, Artificial
  probe
  misc_feature (1)..(25): SEQ ID NO: 7316; WAN024F4G; Start 153; Stop 177
aaggaatctcacgatctgtatagtt

SEQ ID NO: 464762 - DNA, 25 bp, Artificial
  probe
  misc_feature (1)..(25): SEQ ID NO: 7316; WAN024F4G; Start 142; Stop 166
gatacgagtataaggaatctcacga

SEQ ID NO: 464763 - DNA, 25 bp, Artificial
  probe
  misc_feature (1)..(25): SEQ ID NO: 7316; WAN024F4G; Start 134; Stop 158
tgctcaatgatacgagtataaggaa

SEQ ID NO: 464764 - DNA, 25 bp, Artificial
  probe
  misc_feature (1)..(25): SEQ ID NO: 7316; WAN024F4G; Start 133; Stop 157
atgctcaatgatacgagtataagga

SEQ ID NO: 464765 - DNA, 25 bp, Artificial
  probe
  misc_feature (1)..(25): SEQ ID NO: 7316; WAN024F4G; Start 156; Stop 180
gaatctcacgatctgtatagttcac

SEQ ID NO: 464766 - DNA, 25 bp, Artificial
  probe
  misc_feature (1)..(25): SEQ ID NO: 7316; WAN024F4G; Start 143; Stop 167
atacgagtataaggaatctcacgat

SEQ ID NO: 464767 - DNA, 25 bp, Artificial
  probe
  misc_feature (1)..(25): SEQ ID NO: 7316; WAN024F4G; Start 146; Stop 170
cgagtataaggaatctcacgatctg

SEQ ID NO: 464768 - DNA, 25 bp, Artificial
  probe
  misc_feature (1)..(25): SEQ ID NO: 7316; WAN024F4G; Start 147; Stop 171
gagtataaggaatctcacgatctgt

SEQ ID NO: 464769 - DNA, 25 bp, Artificial
  probe
  misc_feature (1)..(25): SEQ ID NO: 7316; WAN024F4G; Start 144; Stop 168
tacgagtataaggaatctcacgatc

SEQ ID NO: 464770 - DNA, 25 bp, Artificial
  probe
  misc_feature (1)..(25): SEQ ID NO: 7316; WAN024F4G; Start 145; Stop 169
acgagtataaggaatctcacgatct

SEQ ID NO: 464771 - DNA, 25 bp, Artificial
  probe
  misc_feature (1)..(25): SEQ ID NO: 7316; WAN024F4G; Start 158; Stop 182
atctcacgatctgtatagttcacta

SEQ ID NO: 464772 - DNA, 25 bp, Artificial
  probe
  misc_feature (1)..(25): SEQ ID NO: 7316; WAN024F4G; Start 152; Stop 176
taaggaatctcacgatctgtatagt

SEQ ID NO: 464773 - DNA, 25 bp, Artificial
  probe
  misc_feature (1)..(25): SEQ ID NO: 7316; WAN024F4G; Start 148; Stop 172
agtataaggaatctcacgatctgta

SEQ ID NO: 464774 - DNA, 25 bp, Artificial
  probe
  misc_feature (1)..(25): SEQ ID NO: 7316; WAN024F4G; Start 135; Stop 159
gctcaatgatacgagtataaggaat

SEQ ID NO: 464775 - DNA, 25 bp, Artificial
  probe
  misc_feature (1)..(25): SEQ ID NO: 7316; WAN024F4G; Start 132; Stop 156
tatgctcaatgatacgagtataagg

SEQ ID NO: 464776 - DNA, 25 bp, Artificial
  probe
  misc_feature (1)..(25): SEQ ID NO: 7316; WAN024F4G; Start 149; Stop 173
gtataaggaatctcacgatctgtat

SEQ ID NO: 464777 - DNA, 25 bp, Artificial
  probe
  misc_feature (1)..(25): SEQ ID NO: 7316; WAN024F4G; Start 140; Stop 164
atgatacgagtataaggaatctcac

SEQ ID NO: 464778 - DNA, 25 bp, Artificial
  probe
  misc_feature (1)..(25): SEQ ID NO: 7316; WAN024F4G; Start 172; Stop 196
atagttcactacagcatttccttgg

SEQ ID NO: 464779 - DNA, 25 bp, Artificial
  probe
  misc_feature (1)..(25): SEQ ID NO: 7316; WAN024F4G; Start 160; Stop 184
ctcacgatctgtatagttcactaca

SEQ ID NO: 464780 - DNA, 25 bp, Artificial
  probe
  misc_feature (1)..(25): SEQ ID NO: 7316; WAN024F4G; Start 151; Stop 175
ataaggaatctcacgatctgtatag

SEQ ID NO: 464781 - DNA, 25 bp, Artificial
  probe
  misc_feature (1)..(25): SEQ ID NO: 7316; WAN024F4G; Start 137; Stop 161
tcaatgatacgagtataaggaatct

SEQ ID NO: 464782 - DNA, 25 bp, Artificial
  probe
  misc_feature (1)..(25): SEQ ID NO: 7316; WAN024F4G; Start 171; Stop 195
tatagttcactacagcatttccttg

SEQ ID NO: 464783 - DNA, 25 bp, Artificial
  probe
  misc_feature (1)..(25): SEQ ID NO: 7316; WAN024F4G; Start 170; Stop 194
gtatagttcactacagcatttcctt

SEQ ID NO: 464784 - DNA, 25 bp, Artificial
  probe
  misc_feature (1)..(25): SEQ ID NO: 7316; WAN024F4G; Start 173; Stop 197
tagttcactacagcatttccttggt

SEQ ID NO: 464785 - DNA, 25 bp, Artificial
  probe
  misc_feature (1)..(25): SEQ ID NO: 7316; WAN024F4G; Start 139; Stop 163
aatgatacgagtataaggaatctca

SEQ ID NO: 464786 - DNA, 25 bp, Artificial
  probe
  misc_feature (1)..(25): SEQ ID NO: 7316; WAN024F4G; Start 81; Stop 105
gatattcatgcgttatgactgtctt

SEQ ID NO: 464787 - DNA, 25 bp, Artificial
  probe
  misc_feature (1)..(25): SEQ ID NO: 7316; WAN024F4G; Start 80; Stop 104
ggatattcatgcgttatgactgtct

SEQ ID NO: 464788 - DNA, 25 bp, Artificial
  probe
  misc_feature (1)..(25): SEQ ID NO: 7316; WAN024F4G; Start 44; Stop 68
ggataatatggttcatctccacgtt

SEQ ID NO: 464789 - DNA, 25 bp, Artificial
  probe
  misc_feature (1)..(25): SEQ ID NO: 7317; WAN024F6T; Start 101; Stop 125
tcatcagttctatctacaacctcaa

SEQ ID NO: 464790 - DNA, 25 bp, Artificial
  probe
  misc_feature (1)..(25): SEQ ID NO: 7317; WAN024F6T; Start 100; Stop 124
ttcatcagttctatctacaacctca

SEQ ID NO: 464791 - DNA, 25 bp, Artificial
  probe
  misc_feature (1)..(25): SEQ ID NO: 7317; WAN024F6T; Start 98; Stop 122
acttcatcagttctatctacaacct

SEQ ID NO: 464792 - DNA, 25 bp, Artificial
  probe
  misc_feature (1)..(25): SEQ ID NO: 7317; WAN024F6T; Start 99; Stop 123
cttcatcagttctatctacaacctc

SEQ ID NO: 464793 - DNA, 25 bp, Artificial
  probe
  misc_feature (1)..(25): SEQ ID NO: 7317; WAN024F6T; Start 97; Stop 121
gacttcatcagttctatctacaacc

SEQ ID NO: 464794 - DNA, 25 bp, Artificial
  probe
  misc_feature (1)..(25): SEQ ID NO: 7317; WAN024F6T; Start 79; Stop 103
ttccgtatatatgtgactgacttca

SEQ ID NO: 464795 - DNA, 25 bp, Artificial
  probe
  misc_feature (1)..(25): SEQ ID NO: 7317; WAN024F6T; Start 80; Stop 104
tccgtatatatgtgactgacttcat

SEQ ID NO: 464796 - DNA, 25 bp, Artificial
  probe
  misc_feature (1)..(25): SEQ ID NO: 7317; WAN024F6T; Start 96; Stop 120
tgacttcatcagttctatctacaac

SEQ ID NO: 464797 - DNA, 25 bp, Artificial
  probe
  misc_feature (1)..(25): SEQ ID NO: 7317; WAN024F6T; Start 81; Stop 105
ccgtatatatgtgactgacttcatc

SEQ ID NO: 464798 - DNA, 25 bp, Artificial
  probe
  misc_feature (1)..(25): SEQ ID NO: 7317; WAN024F6T; Start 82; Stop 106
cgtatatatgtgactgacttcatca

SEQ ID NO: 464799 - DNA, 25 bp, Artificial
  probe
  misc_feature (1)..(25): SEQ ID NO: 7317; WAN024F6T; Start 218; Stop 242
aacccattctccatcaaataattcg

SEQ ID NO: 464800 - DNA, 25 bp, Artificial
  probe
  misc_feature (1)..(25): SEQ ID NO: 7317; WAN024F6T; Start 50; Stop 74
aatctcttcacatcatgtcagcttc

SEQ ID NO: 464801 - DNA, 25 bp, Artificial
  probe
  misc_feature (1)..(25): SEQ ID NO: 7317; WAN024F6T; Start 70; Stop 94
gcttcgtctttccgtatatatgtga

SEQ ID NO: 464802 - DNA, 25 bp, Artificial
  probe
  misc_feature (1)..(25): SEQ ID NO: 7317; WAN024F6T; Start 17; Stop 41
aatcagtcagcagacagaacgatac

SEQ ID NO: 464803 - DNA, 25 bp, Artificial
  probe
  misc_feature (1)..(25): SEQ ID NO: 7317; WAN024F6T; Start 76; Stop 100
tctttccgtatatatgtgactgact

SEQ ID NO: 464804 - DNA, 25 bp, Artificial
  probe
  misc_feature (1)..(25): SEQ ID NO: 7317; WAN024F6T; Start 102; Stop 126
catcagttctatctacaacctcaaa

SEQ ID NO: 464805 - DNA, 25 bp, Artificial
  probe
  misc_feature (1)..(25): SEQ ID NO: 7317; WAN024F6T; Start 10; Stop 34
atttgtaaatcagtcagcagacaga

SEQ ID NO: 464806 - DNA, 25 bp, Artificial
  probe
  misc_feature (1)..(25): SEQ ID NO: 7317; WAN024F6T; Start 11; Stop 35
tttgtaaatcagtcagcagacagaa

SEQ ID NO: 464807 - DNA, 25 bp, Artificial
  probe
  misc_feature (1)..(25): SEQ ID NO: 7317; WAN024F6T; Start 22; Stop 46
gtcagcagacagaacgatactcttc

SEQ ID NO: 464808 - DNA, 25 bp, Artificial
  probe
  misc_feature (1)..(25): SEQ ID NO: 7317; WAN024F6T; Start 9; Stop 33
tatttgtaaatcagtcagcagacag

SEQ ID NO: 464809 - DNA, 25 bp, Artificial
  probe
  misc_feature (1)..(25): SEQ ID NO: 7317; WAN024F6T; Start 217; Stop 241
aaacccattctccatcaaataattc

SEQ ID NO: 464810 - DNA, 25 bp, Artificial
  probe
  misc_feature (1)..(25): SEQ ID NO: 7317; WAN024F6T; Start 78; Stop 102
tttccgtatatatgtgactgacttc

SEQ ID NO: 464811 - DNA, 25 bp, Artificial
  probe
  misc_feature (1)..(25): SEQ ID NO: 7317; WAN024F6T; Start 12; Stop 36
ttgtaaatcagtcagcagacagaac

SEQ ID NO: 464812 - DNA, 25 bp, Artificial
  probe
  misc_feature (1)..(25): SEQ ID NO: 7317; WAN024F6T; Start 67; Stop 91
tcagcttcgtctttccgtatatatg

SEQ ID NO: 464813 - DNA, 25 bp, Artificial
  probe
  misc_feature (1)..(25): SEQ ID NO: 7317; WAN024F6T; Start 66; Stop 90
gtcagcttcgtctttccgtatatat

SEQ ID NO: 464814 - DNA, 25 bp, Artificial
  probe
  misc_feature (1)..(25): SEQ ID NO: 7317; WAN024F6T; Start 77; Stop 101
ctttccgtatatatgtgactgactt

SEQ ID NO: 464815 - DNA, 25 bp, Artificial
  probe
  misc_feature (1)..(25): SEQ ID NO: 7317; WAN024F6T; Start 74; Stop 98
cgtctttccgtatatatgtgactga

SEQ ID NO: 464816 - DNA, 25 bp, Artificial
  probe
  misc_feature (1)..(25): SEQ ID NO: 7317; WAN024F6T; Start 73; Stop 97
tcgtctttccgtatatatgtgactg

SEQ ID NO: 464817 - DNA, 25 bp, Artificial
  probe
  misc_feature (1)..(25): SEQ ID NO: 7317; WAN024F6T; Start 220; Stop 244
cccattctccatcaaataattcgac

SEQ ID NO: 464818 - DNA, 25 bp, Artificial
  probe
  misc_feature (1)..(25): SEQ ID NO: 7317; WAN024F6T; Start 216; Stop 240
gaaacccattctccatcaaataatt

SEQ ID NO: 464819 - DNA, 25 bp, Artificial
  probe
  misc_feature (1)..(25): SEQ ID NO: 7317; WAN024F6T; Start 69; Stop 93
agcttcgtctttccgtatatatgtg

SEQ ID NO: 464820 - DNA, 25 bp, Artificial
  probe
  misc_feature (1)..(25): SEQ ID NO: 7317; WAN024F6T; Start 68; Stop 92
cagcttcgtctttccgtatatatgt

SEQ ID NO: 464821 - DNA, 25 bp, Artificial
  probe
  misc_feature (1)..(25): SEQ ID NO: 7317; WAN024F6T; Start 223; Stop 247
attctccatcaaataattcgactgc

SEQ ID NO: 464822 - DNA, 25 bp, Artificial
  probe
  misc_feature (1)..(25): SEQ ID NO: 7318; WAN024BSJ; Start 6; Stop 30
gcatgtccagacctactattcaata

SEQ ID NO: 464823 - DNA, 25 bp, Artificial
  probe
  misc_feature (1)..(25): SEQ ID NO: 7318; WAN024BSJ; Start 9; Stop 33
tgtccagacctactattcaataatc

SEQ ID NO: 464824 - DNA, 25 bp, Artificial
  probe
  misc_feature (1)..(25): SEQ ID NO: 7318; WAN024BSJ; Start 7; Stop 31
catgtccagacctactattcaataa

SEQ ID NO: 464825 - DNA, 25 bp, Artificial
  probe
  misc_feature (1)..(25): SEQ ID NO: 7318; WAN024BSJ; Start 10; Stop 34
gtccagacctactattcaataatct

SEQ ID NO: 464826 - DNA, 25 bp, Artificial
  probe
  misc_feature (1)..(25): SEQ ID NO: 7318; WAN024BSJ; Start 5; Stop 29
tgcatgtccagacctactattcaat

SEQ ID NO: 464827 - DNA, 25 bp, Artificial
  probe
  misc_feature (1)..(25): SEQ ID NO: 7318; WAN024BSJ; Start 8; Stop 32
atgtccagacctactattcaataat

SEQ ID NO: 464828 - DNA, 25 bp, Artificial
  probe
  misc_feature (1)..(25): SEQ ID NO: 7318; WAN024BSJ; Start 4; Stop 28
gtgcatgtccagacctactattcaa

SEQ ID NO: 464829 - DNA, 25 bp, Artificial
  probe
  misc_feature (1)..(25): SEQ ID NO: 7318; WAN024BSJ; Start 72; Stop 96
taaagaacattacaaagctggaacc

SEQ ID NO: 464830 - DNA, 25 bp, Artificial
  probe
  misc_feature (1)..(25): SEQ ID NO: 7318; WAN024BSJ; Start 71; Stop 95
ataaagaacattacaaagctggaac

SEQ ID NO: 464831 - DNA, 25 bp, Artificial
  probe
  misc_feature (1)..(25): SEQ ID NO: 7318; WAN024BSJ; Start 11; Stop 35
tccagacctactattcaataatcta

SEQ ID NO: 464832 - DNA, 25 bp, Artificial
  probe
  misc_feature (1)..(25): SEQ ID NO: 7318; WAN024BSJ; Start 73; Stop 97
aaagaacattacaaagctggaaccg

SEQ ID NO: 464833 - DNA, 25 bp, Artificial
  probe
  misc_feature (1)..(25): SEQ ID NO: 7318; WAN024BSJ; Start 74; Stop 98
aagaacattacaaagctggaaccga

SEQ ID NO: 464834 - DNA, 25 bp, Artificial
  probe
  misc_feature (1)..(25): SEQ ID NO: 7318; WAN024BSJ; Start 75; Stop 99
agaacattacaaagctggaaccgag

SEQ ID NO: 464835 - DNA, 25 bp, Artificial
  probe
  misc_feature (1)..(25): SEQ ID NO: 7318; WAN024BSJ; Start 12; Stop 36
ccagacctactattcaataatctat

SEQ ID NO: 464836 - DNA, 25 bp, Artificial
  probe
  misc_feature (1)..(25): SEQ ID NO: 7318; WAN024BSJ; Start 70; Stop 94
tataaagaacattacaaagctggaa

SEQ ID NO: 464837 - DNA, 25 bp, Artificial
  probe
  misc_feature (1)..(25): SEQ ID NO: 7318; WAN024BSJ; Start 69; Stop 93
atataaagaacattacaaagctgga

SEQ ID NO: 464838 - DNA, 25 bp, Artificial
  probe
  misc_feature (1)..(25): SEQ ID NO: 7318; WAN024BSJ; Start 34; Stop 58
tatgataagaatgaatacatggtct

SEQ ID NO: 464839 - DNA, 25 bp, Artificial
  probe
  misc_feature (1)..(25): SEQ ID NO: 7318; WAN024BSJ; Start 32; Stop 56
tctatgataagaatgaatacatggt

SEQ ID NO: 464840 - DNA, 25 bp, Artificial
  probe
  misc_feature (1)..(25): SEQ ID NO: 7318; WAN024BSJ; Start 33; Stop 57
ctatgataagaatgaatacatggtc

SEQ ID NO: 464841 - DNA, 25 bp, Artificial
  probe
  misc_feature (1)..(25): SEQ ID NO: 7318; WAN024BSJ; Start 35; Stop 59
atgataagaatgaatacatggtctt

SEQ ID NO: 464842 - DNA, 25 bp, Artificial
  probe
  misc_feature (1)..(25): SEQ ID NO: 7318; WAN024BSJ; Start 3; Stop 27
ggtgcatgtccagacctactattca

SEQ ID NO: 464843 - DNA, 25 bp, Artificial
  probe
  misc_feature (1)..(25): SEQ ID NO: 7318; WAN024BSJ; Start 2; Stop 26
tggtgcatgtccagacctactattc

SEQ ID NO: 464844 - DNA, 25 bp, Artificial
  probe
  misc_feature (1)..(25): SEQ ID NO: 7318; WAN024BSJ; Start 1; Stop 25
gtggtgcatgtccagacctactatt

SEQ ID NO: 464845 - DNA, 25 bp, Artificial
  probe
  misc_feature (1)..(25): SEQ ID NO: 7318; WAN024BSJ; Start 65; Stop 89
ccaaatataaagaacattacaaagc

SEQ ID NO: 464846 - DNA, 25 bp, Artificial
  probe
  misc_feature (1)..(25): SEQ ID NO: 7318; WAN024BSJ; Start 68; Stop 92
aatataaagaacattacaaagctgg

SEQ ID NO: 464847 - DNA, 25 bp, Artificial
  probe
  misc_feature (1)..(25): SEQ ID NO: 7318; WAN024BSJ; Start 36; Stop 60
tgataagaatgaatacatggtcttt

SEQ ID NO: 464848 - DNA, 25 bp, Artificial
  probe
  misc_feature (1)..(25): SEQ ID NO: 7318; WAN024BSJ; Start 76; Stop 100
gaacattacaaagctggaaccgagc

SEQ ID NO: 464849 - DNA, 25 bp, Artificial
  probe
  misc_feature (1)..(25): SEQ ID NO: 7318; WAN024BSJ; Start 37; Stop 61
gataagaatgaatacatggtctttt

SEQ ID NO: 464850 - DNA, 25 bp, Artificial
  probe
  misc_feature (1)..(25): SEQ ID NO: 7319; WAN024BMN; Start 120; Stop 144
ggaatcgagaattatacaacaagct

SEQ ID NO: 464851 - DNA, 25 bp, Artificial
  probe
  misc_feature (1)..(25): SEQ ID NO: 7319; WAN024BMN; Start 102; Stop 126
tcaatcacaatatacctgggaatcg

SEQ ID NO: 464852 - DNA, 25 bp, Artificial
  probe
  misc_feature (1)..(25): SEQ ID NO: 7319; WAN024BMN; Start 121; Stop 145
gaatcgagaattatacaacaagctg

SEQ ID NO: 464853 - DNA, 25 bp, Artificial
  probe
  misc_feature (1)..(25): SEQ ID NO: 7319; WAN024BMN; Start 135; Stop 159
acaacaagctgtaacaactaatgaa

SEQ ID NO: 464854 - DNA, 25 bp, Artificial
  probe
  misc_feature (1)..(25): SEQ ID NO: 7319; WAN024BMN; Start 137; Stop 161
aacaagctgtaacaactaatgaagt

SEQ ID NO: 464855 - DNA, 25 bp, Artificial
  probe
  misc_feature (1)..(25): SEQ ID NO: 7319; WAN024BMN; Start 85; Stop 109
ttcaaggaacctgtaaatcaatcac

SEQ ID NO: 464856 - DNA, 25 bp, Artificial
  probe
  misc_feature (1)..(25): SEQ ID NO: 7319; WAN024BMN; Start 136; Stop 160
caacaagctgtaacaactaatgaag

SEQ ID NO: 464857 - DNA, 25 bp, Artificial
  probe
  misc_feature (1)..(25): SEQ ID NO: 7319; WAN024BMN; Start 122; Stop 146
aatcgagaattatacaacaagctgt

SEQ ID NO: 464858 - DNA, 25 bp, Artificial
  probe
  misc_feature (1)..(25): SEQ ID NO: 7319; WAN024BMN; Start 101; Stop 125
atcaatcacaatatacctgggaatc

SEQ ID NO: 464859 - DNA, 25 bp, Artificial
  probe
  misc_feature (1)..(25): SEQ ID NO: 7319; WAN024BMN; Start 84; Stop 108
tttcaaggaacctgtaaatcaatca

SEQ ID NO: 464860 - DNA, 25 bp, Artificial
  probe
  misc_feature (1)..(25): SEQ ID NO: 7319; WAN024BMN; Start 99; Stop 123
aaatcaatcacaatatacctgggaa

SEQ ID NO: 464861 - DNA, 25 bp, Artificial
  probe
  misc_feature (1)..(25): SEQ ID NO: 7319; WAN024BMN; Start 87; Stop 111
caaggaacctgtaaatcaatcacaa

SEQ ID NO: 464862 - DNA, 25 bp, Artificial
  probe
  misc_feature (1)..(25): SEQ ID NO: 7319; WAN024BMN; Start 86; Stop 110
tcaaggaacctgtaaatcaatcaca

SEQ ID NO: 464863 - DNA, 25 bp, Artificial
  probe
  misc_feature (1)..(25): SEQ ID NO: 7319; WAN024BMN; Start 100; Stop 124
aatcaatcacaatatacctgggaat

SEQ ID NO: 464864 - DNA, 25 bp, Artificial
  probe
  misc_feature (1)..(25): SEQ ID NO: 7319; WAN024BMN; Start 88; Stop 112
aaggaacctgtaaatcaatcacaat

SEQ ID NO: 464865 - DNA, 25 bp, Artificial
  probe
  misc_feature (1)..(25): SEQ ID NO: 7319; WAN024BMN; Start 57; Stop 81
tttaggattgtttggaagcggtttc

SEQ ID NO: 464866 - DNA, 25 bp, Artificial
  probe
  misc_feature (1)..(25): SEQ ID NO: 7319; WAN024BMN; Start 119; Stop 143
gggaatcgagaattatacaacaagc

SEQ ID NO: 464867 - DNA, 25 bp, Artificial
  probe
  misc_feature (1)..(25): SEQ ID NO: 7319; WAN024BMN; Start 107; Stop 131
cacaatatacctgggaatcgagaat

SEQ ID NO: 464868 - DNA, 25 bp, Artificial
  probe
  misc_feature (1)..(25): SEQ ID NO: 7319; WAN024BMN; Start 104; Stop 128
aatcacaatatacctgggaatcgag

SEQ ID NO: 464869 - DNA, 25 bp, Artificial
  probe
  misc_feature (1)..(25): SEQ ID NO: 7319; WAN024BMN; Start 98; Stop 122
taaatcaatcacaatatacctggga

SEQ ID NO: 464870 - DNA, 25 bp, Artificial
  probe
  misc_feature (1)..(25): SEQ ID NO: 7319; WAN024BMN; Start 116; Stop 140
cctgggaatcgagaattatacaaca

SEQ ID NO: 464871 - DNA, 25 bp, Artificial
  probe
  misc_feature (1)..(25): SEQ ID NO: 7319; WAN024BMN; Start 115; Stop 139
acctgggaatcgagaattatacaac

SEQ ID NO: 464872 - DNA, 25 bp, Artificial
  probe
  misc_feature (1)..(25): SEQ ID NO: 7319; WAN024BMN; Start 108; Stop 132
acaatatacctgggaatcgagaatt

SEQ ID NO: 464873 - DNA, 25 bp, Artificial
  probe
  misc_feature (1)..(25): SEQ ID NO: 7319; WAN024BMN; Start 103; Stop 127
caatcacaatatacctgggaatcga

SEQ ID NO: 464874 - DNA, 25 bp, Artificial
  probe
  misc_feature (1)..(25): SEQ ID NO: 7319; WAN024BMN; Start 97; Stop 121
gtaaatcaatcacaatatacctggg

SEQ ID NO: 464875 - DNA, 25 bp, Artificial
  probe
  misc_feature (1)..(25): SEQ ID NO: 7319; WAN024BMN; Start 134; Stop 158
tacaacaagctgtaacaactaatga

SEQ ID NO: 464876 - DNA, 25 bp, Artificial
  probe
  misc_feature (1)..(25): SEQ ID NO: 7319; WAN024BMN; Start 105; Stop 129
atcacaatatacctgggaatcgaga

SEQ ID NO: 464877 - DNA, 25 bp, Artificial
  probe
  misc_feature (1)..(25): SEQ ID NO: 7319; WAN024BMN; Start 89; Stop 113
aggaacctgtaaatcaatcacaata

SEQ ID NO: 464878 - DNA, 25 bp, Artificial
  probe
  misc_feature (1)..(25): SEQ ID NO: 7319; WAN024BMN; Start 114; Stop 138
tacctgggaatcgagaattatacaa

SEQ ID NO: 464879 - DNA, 25 bp, Artificial
  probe
  misc_feature (1)..(25): SEQ ID NO: 7319; WAN024BMN; Start 106; Stop 130
tcacaatatacctgggaatcgagaa

SEQ ID NO: 464880 - DNA, 25 bp, Artificial
  probe
  misc_feature (1)..(25): SEQ ID NO: 7319; WAN024BMN; Start 118; Stop 142
tgggaatcgagaattatacaacaag

SEQ ID NO: 464881 - DNA, 25 bp, Artificial
  probe
  misc_feature (1)..(25): SEQ ID NO: 7319; WAN024BMN; Start 117; Stop 141
ctgggaatcgagaattatacaacaa

SEQ ID NO: 464882 - DNA, 25 bp, Artificial
  probe
  misc_feature (1)..(25): SEQ ID NO: 7319; WAN024BMN; Start 125; Stop 149
cgagaattatacaacaagctgtaac

SEQ ID NO: 464883 - DNA, 25 bp, Artificial
  probe
  misc_feature (1)..(25): SEQ ID NO: 7320; WAN024BS6; Start 21; Stop 45
ccaagatgagaaagaagtcggtatt

SEQ ID NO: 464884 - DNA, 25 bp, Artificial
  probe
  misc_feature (1)..(25): SEQ ID NO: 7320; WAN024BS6; Start 27; Stop 51
tgagaaagaagtcggtattatagga

SEQ ID NO: 464885 - DNA, 25 bp, Artificial
  probe
  misc_feature (1)..(25): SEQ ID NO: 7320; WAN024BS6; Start 22; Stop 46
caagatgagaaagaagtcggtatta

SEQ ID NO: 464886 - DNA, 25 bp, Artificial
  probe
  misc_feature (1)..(25): SEQ ID NO: 7320; WAN024BS6; Start 28; Stop 52
gagaaagaagtcggtattataggaa

SEQ ID NO: 464887 - DNA, 25 bp, Artificial
  probe
  misc_feature (1)..(25): SEQ ID NO: 7320; WAN024BS6; Start 26; Stop 50
atgagaaagaagtcggtattatagg

SEQ ID NO: 464888 - DNA, 25 bp, Artificial
  probe
  misc_feature (1)..(25): SEQ ID NO: 7320; WAN024BS6; Start 23; Stop 47
aagatgagaaagaagtcggtattat

SEQ ID NO: 464889 - DNA, 25 bp, Artificial
  probe
  misc_feature (1)..(25): SEQ ID NO: 7320; WAN024BS6; Start 38; Stop 62
tcggtattataggaaagaaagaagt

SEQ ID NO: 464890 - DNA, 25 bp, Artificial
  probe
  misc_feature (1)..(25): SEQ ID NO: 7320; WAN024BS6; Start 36; Stop 60
agtcggtattataggaaagaaagaa

SEQ ID NO: 464891 - DNA, 25 bp, Artificial
  probe
  misc_feature (1)..(25): SEQ ID NO: 7320; WAN024BS6; Start 35; Stop 59
aagtcggtattataggaaagaaaga

SEQ ID NO: 464892 - DNA, 25 bp, Artificial
  probe
  misc_feature (1)..(25): SEQ ID NO: 7320; WAN024BS6; Start 33; Stop 57
agaagtcggtattataggaaagaaa

SEQ ID NO: 464893 - DNA, 25 bp, Artificial
  probe
  misc_feature (1)..(25): SEQ ID NO: 7320; WAN024BS6; Start 32; Stop 56
aagaagtcggtattataggaaagaa

SEQ ID NO: 464894 - DNA, 25 bp, Artificial
  probe
  misc_feature (1)..(25): SEQ ID NO: 7320; WAN024BS6; Start 31; Stop 55
aaagaagtcggtattataggaaaga

SEQ ID NO: 464895 - DNA, 25 bp, Artificial
  probe
  misc_feature (1)..(25): SEQ ID NO: 7320; WAN024BS6; Start 29; Stop 53
agaaagaagtcggtattataggaaa

SEQ ID NO: 464896 - DNA, 25 bp, Artificial
  probe
  misc_feature (1)..(25): SEQ ID NO: 7320; WAN024BS6; Start 37; Stop 61
gtcggtattataggaaagaaagaag

SEQ ID NO: 464897 - DNA, 25 bp, Artificial
  probe
  misc_feature (1)..(25): SEQ ID NO: 7320; WAN024BS6; Start 34; Stop 58
gaagtcggtattataggaaagaaag

SEQ ID NO: 464898 - DNA, 25 bp, Artificial
  probe
  misc_feature (1)..(25): SEQ ID NO: 7320; WAN024BS6; Start 30; Stop 54
gaaagaagtcggtattataggaaag

SEQ ID NO: 464899 - DNA, 25 bp, Artificial
  probe
  misc_feature (1)..(25): SEQ ID NO: 7320; WAN024BS6; Start 20; Stop 44
accaagatgagaaagaagtcggtat

SEQ ID NO: 464900 - DNA, 25 bp, Artificial
  probe
  misc_feature (1)..(25): SEQ ID NO: 7320; WAN024BS6; Start 19; Stop 43
aaccaagatgagaaagaagtcggta

SEQ ID NO: 464901 - DNA, 25 bp, Artificial
  probe
  misc_feature (1)..(25): SEQ ID NO: 7320; WAN024BS6; Start 24; Stop 48
agatgagaaagaagtcggtattata

SEQ ID NO: 464902 - DNA, 25 bp, Artificial
  probe
  misc_feature (1)..(25): SEQ ID NO: 7320; WAN024BS6; Start 25; Stop 49
gatgagaaagaagtcggtattatag

SEQ ID NO: 464903 - DNA, 25 bp, Artificial
  probe
  misc_feature (1)..(25): SEQ ID NO: 7320; WAN024BS6; Start 15; Stop 39
ccaaaaccaagatgagaaagaagtc

SEQ ID NO: 464904 - DNA, 25 bp, Artificial
  probe
  misc_feature (1)..(25): SEQ ID NO: 7320; WAN024BS6; Start 13; Stop 37
aaccaaaaccaagatgagaaagaag

SEQ ID NO: 464905 - DNA, 25 bp, Artificial
  probe
  misc_feature (1)..(25): SEQ ID NO: 7320; WAN024BS6; Start 16; Stop 40
caaaaccaagatgagaaagaagtcg

SEQ ID NO: 464906 - DNA, 25 bp, Artificial
  probe
  misc_feature (1)..(25): SEQ ID NO: 7320; WAN024BS6; Start 14; Stop 38
accaaaaccaagatgagaaagaagt

SEQ ID NO: 464907 - DNA, 25 bp, Artificial
  probe
  misc_feature (1)..(25): SEQ ID NO: 7320; WAN024BS6; Start 18; Stop 42
aaaccaagatgagaaagaagtcggt

SEQ ID NO: 464908 - DNA, 25 bp, Artificial
  probe
  misc_feature (1)..(25): SEQ ID NO: 7320; WAN024BS6; Start 12; Stop 36
taaccaaaaccaagatgagaaagaa

SEQ ID NO: 464909 - DNA, 25 bp, Artificial
  probe
  misc_feature (1)..(25): SEQ ID NO: 7320; WAN024BS6; Start 11; Stop 35
ttaaccaaaaccaagatgagaaaga

SEQ ID NO: 464910 - DNA, 25 bp, Artificial
  probe
  misc_feature (1)..(25): SEQ ID NO: 7320; WAN024BS6; Start 17; Stop 41
aaaaccaagatgagaaagaagtcgg

SEQ ID NO: 464911 - DNA, 25 bp, Artificial
  probe
  misc_feature (1)..(25): SEQ ID NO: 7320; WAN024BS6; Start 39; Stop 63
cggtattataggaaagaaagaagta

SEQ ID NO: 464912 - DNA, 25 bp, Artificial
  probe
  misc_feature (1)..(25): SEQ ID NO: 7320; WAN024BS6; Start 8; Stop 32
cagttaaccaaaaccaagatgagaa

SEQ ID NO: 464913 - DNA, 25 bp, Artificial
  probe
  misc_feature (1)..(25): SEQ ID NO: 7320; WAN024BS6; Start 5; Stop 29
ttccagttaaccaaaaccaagatga

SEQ ID NO: 464914 - DNA, 25 bp, Artificial
  probe
  misc_feature (1)..(25): SEQ ID NO: 7320; WAN024BS6; Start 4; Stop 28
gttccagttaaccaaaaccaagatg

SEQ ID NO: 464915 - DNA, 25 bp, Artificial
  probe
  misc_feature (1)..(25): SEQ ID NO: 7320; WAN024BS6; Start 9; Stop 33
agttaaccaaaaccaagatgagaaa

SEQ ID NO: 464916 - DNA, 25 bp, Artificial
  probe
  misc_feature (1)..(25): SEQ ID NO: 7321; WAN024EZM; Start 17; Stop 41
ttctaatcacaccatctctcagttc

SEQ ID NO: 464917 - DNA, 25 bp, Artificial
  probe
  misc_feature (1)..(25): SEQ ID NO: 7321; WAN024EZM; Start 19; Stop 43
ctaatcacaccatctctcagttcaa

SEQ ID NO: 464918 - DNA, 25 bp, Artificial
  probe
  misc_feature (1)..(25): SEQ ID NO: 7321; WAN024EZM; Start 16; Stop 40
gttctaatcacaccatctctcagtt

SEQ ID NO: 464919 - DNA, 25 bp, Artificial
  probe
  misc_feature (1)..(25): SEQ ID NO: 7321; WAN024EZM; Start 20; Stop 44
taatcacaccatctctcagttcaac

SEQ ID NO: 464920 - DNA, 25 bp, Artificial
  probe
  misc_feature (1)..(25): SEQ ID NO: 7321; WAN024EZM; Start 18; Stop 42
tctaatcacaccatctctcagttca

SEQ ID NO: 464921 - DNA, 25 bp, Artificial
  probe
  misc_feature (1)..(25): SEQ ID NO: 7321; WAN024EZM; Start 14; Stop 38
atgttctaatcacaccatctctcag

SEQ ID NO: 464922 - DNA, 25 bp, Artificial
  probe
  misc_feature (1)..(25): SEQ ID NO: 7321; WAN024EZM; Start 13; Stop 37
aatgttctaatcacaccatctctca

SEQ ID NO: 464923 - DNA, 25 bp, Artificial
  probe
  misc_feature (1)..(25): SEQ ID NO: 7321; WAN024EZM; Start 12; Stop 36
gaatgttctaatcacaccatctctc

SEQ ID NO: 464924 - DNA, 25 bp, Artificial
  probe
  misc_feature (1)..(25): SEQ ID NO: 7321; WAN024EZM; Start 15; Stop 39
tgttctaatcacaccatctctcagt

SEQ ID NO: 464925 - DNA, 25 bp, Artificial
  probe
  misc_feature (1)..(25): SEQ ID NO: 7321; WAN024EZM; Start 11; Stop 35
agaatgttctaatcacaccatctct

SEQ ID NO: 464926 - DNA, 25 bp, Artificial
  probe
  misc_feature (1)..(25): SEQ ID NO: 7321; WAN024EZM; Start 10; Stop 34
aagaatgttctaatcacaccatctc

SEQ ID NO: 464927 - DNA, 25 bp, Artificial
  probe
  misc_feature (1)..(25): SEQ ID NO: 7321; WAN024EZM; Start 21; Stop 45
aatcacaccatctctcagttcaacc

SEQ ID NO: 464928 - DNA, 25 bp, Artificial
  probe
  misc_feature (1)..(25): SEQ ID NO: 7321; WAN024EZM; Start 24; Stop 48
cacaccatctctcagttcaaccatt

SEQ ID NO: 464929 - DNA, 25 bp, Artificial
  probe
  misc_feature (1)..(25): SEQ ID NO: 7321; WAN024EZM; Start 23; Stop 47
tcacaccatctctcagttcaaccat

SEQ ID NO: 464930 - DNA, 25 bp, Artificial
  probe
  misc_feature (1)..(25): SEQ ID NO: 7321; WAN024EZM; Start 22; Stop 46
atcacaccatctctcagttcaacca

SEQ ID NO: 464931 - DNA, 25 bp, Artificial
  probe
  misc_feature (1)..(25): SEQ ID NO: 7321; WAN024EZM; Start 25; Stop 49
acaccatctctcagttcaaccattt

SEQ ID NO: 464932 - DNA, 25 bp, Artificial
  probe
  misc_feature (1)..(25): SEQ ID NO: 7321; WAN024EZM; Start 28; Stop 52
ccatctctcagttcaaccatttgtg

SEQ ID NO: 464933 - DNA, 25 bp, Artificial
  probe
  misc_feature (1)..(25): SEQ ID NO: 7321; WAN024EZM; Start 26; Stop 50
caccatctctcagttcaaccatttg

SEQ ID NO: 464934 - DNA, 25 bp, Artificial
  probe
  misc_feature (1)..(25): SEQ ID NO: 7321; WAN024EZM; Start 71; Stop 95
taaacggaattgaagctgaggattt

SEQ ID NO: 464935 - DNA, 25 bp, Artificial
  probe
  misc_feature (1)..(25): SEQ ID NO: 7321; WAN024EZM; Start 70; Stop 94
ttaaacggaattgaagctgaggatt

SEQ ID NO: 464936 - DNA, 25 bp, Artificial
  probe
  misc_feature (1)..(25): SEQ ID NO: 7321; WAN024EZM; Start 69; Stop 93
tttaaacggaattgaagctgaggat

SEQ ID NO: 464937 - DNA, 25 bp, Artificial
  probe
  misc_feature (1)..(25): SEQ ID NO: 7321; WAN024EZM; Start 27; Stop 51
accatctctcagttcaaccatttgt

SEQ ID NO: 464938 - DNA, 25 bp, Artificial
  probe
  misc_feature (1)..(25): SEQ ID NO: 7321; WAN024EZM; Start 9; Stop 33
aaagaatgttctaatcacaccatct

SEQ ID NO: 464939 - DNA, 25 bp, Artificial
  probe
  misc_feature (1)..(25): SEQ ID NO: 7321; WAN024EZM; Start 32; Stop 56
ctctcagttcaaccatttgtgcttc

SEQ ID NO: 464940 - DNA, 25 bp, Artificial
  probe
  misc_feature (1)..(25): SEQ ID NO: 7321; WAN024EZM; Start 30; Stop 54
atctctcagttcaaccatttgtgct

SEQ ID NO: 464941 - DNA, 25 bp, Artificial
  probe
  misc_feature (1)..(25): SEQ ID NO: 7321; WAN024EZM; Start 29; Stop 53
catctctcagttcaaccatttgtgc

SEQ ID NO: 464942 - DNA, 25 bp, Artificial
  probe
  misc_feature (1)..(25): SEQ ID NO: 7321; WAN024EZM; Start 6; Stop 30
tctaaagaatgttctaatcacacca

SEQ ID NO: 464943 - DNA, 25 bp, Artificial
  probe
  misc_feature (1)..(25): SEQ ID NO: 7321; WAN024EZM; Start 33; Stop 57
tctcagttcaaccatttgtgcttct

SEQ ID NO: 464944 - DNA, 25 bp, Artificial
  probe
  misc_feature (1)..(25): SEQ ID NO: 7321; WAN024EZM; Start 31; Stop 55
tctctcagttcaaccatttgtgctt

SEQ ID NO: 464945 - DNA, 25 bp, Artificial
  probe
  misc_feature (1)..(25): SEQ ID NO: 7321; WAN024EZM; Start 72; Stop 96
aaacggaattgaagctgaggatttc

SEQ ID NO: 464946 - DNA, 25 bp, Artificial
  probe
  misc_feature (1)..(25): SEQ ID NO: 7321; WAN024EZM; Start 2; Stop 26
tggttctaaagaatgttctaatcac

SEQ ID NO: 464947 - DNA, 25 bp, Artificial
  probe
  misc_feature (1)..(25): SEQ ID NO: 7321; WAN024EZM; Start 1; Stop 25
gtggttctaaagaatgttctaatca

SEQ ID NO: 464948 - DNA, 25 bp, Artificial
  probe
  misc_feature (1)..(25): SEQ ID NO: 7321; WAN024EZM; Start 34; Stop 58
ctcagttcaaccatttgtgcttctg

SEQ ID NO: 464949 - DNA, 25 bp, Artificial
  probe
  misc_feature (1)..(25): SEQ ID NO: 7322; WAN024BSD; Start 48; Stop 72
ctatcaaagaagactgactgtagca

SEQ ID NO: 464950 - DNA, 25 bp, Artificial
  probe
  misc_feature (1)..(25): SEQ ID NO: 7322; WAN024BSD; Start 36; Stop 60
aggtctgagagtctatcaaagaaga

SEQ ID NO: 464951 - DNA, 25 bp, Artificial
  probe
  misc_feature (1)..(25): SEQ ID NO: 7322; WAN024BSD; Start 49; Stop 73
tatcaaagaagactgactgtagcac

SEQ ID NO: 464952 - DNA, 25 bp, Artificial
  probe
  misc_feature (1)..(25): SEQ ID NO: 7322; WAN024BSD; Start 47; Stop 71
tctatcaaagaagactgactgtagc

SEQ ID NO: 464953 - DNA, 25 bp, Artificial
  probe
  misc_feature (1)..(25): SEQ ID NO: 7322; WAN024BSD; Start 35; Stop 59
caggtctgagagtctatcaaagaag

SEQ ID NO: 464954 - DNA, 25 bp, Artificial
  probe
  misc_feature (1)..(25): SEQ ID NO: 7322; WAN024BSD; Start 31; Stop 55
gtttcaggtctgagagtctatcaaa

SEQ ID NO: 464955 - DNA, 25 bp, Artificial
  probe
  misc_feature (1)..(25): SEQ ID NO: 7322; WAN024BSD; Start 32; Stop 56
tttcaggtctgagagtctatcaaag

SEQ ID NO: 464956 - DNA, 25 bp, Artificial
  probe
  misc_feature (1)..(25): SEQ ID NO: 7322; WAN024BSD; Start 34; Stop 58
tcaggtctgagagtctatcaaagaa

SEQ ID NO: 464957 - DNA, 25 bp, Artificial
  probe
  misc_feature (1)..(25): SEQ ID NO: 7322; WAN024BSD; Start 33; Stop 57
ttcaggtctgagagtctatcaaaga

SEQ ID NO: 464958 - DNA, 25 bp, Artificial
  probe
  misc_feature (1)..(25): SEQ ID NO: 7322; WAN024BSD; Start 28; Stop 52
gttgtttcaggtctgagagtctatc

SEQ ID NO: 464959 - DNA, 25 bp, Artificial
  probe
  misc_feature (1)..(25): SEQ ID NO: 7322; WAN024BSD; Start 30; Stop 54
tgtttcaggtctgagagtctatcaa

SEQ ID NO: 464960 - DNA, 25 bp, Artificial
  probe
  misc_feature (1)..(25): SEQ ID NO: 7322; WAN024BSD; Start 29; Stop 53
ttgtttcaggtctgagagtctatca

SEQ ID NO: 464961 - DNA, 25 bp, Artificial
  probe
  misc_feature (1)..(25): SEQ ID NO: 7322; WAN024BSD; Start 27; Stop 51
tgttgtttcaggtctgagagtctat

SEQ ID NO: 464962 - DNA, 25 bp, Artificial
  probe
  misc_feature (1)..(25): SEQ ID NO: 7322; WAN024BSD; Start 50; Stop 74
atcaaagaagactgactgtagcaca

SEQ ID NO: 464963 - DNA, 25 bp, Artificial
  probe
  misc_feature (1)..(25): SEQ ID NO: 7322; WAN024BSD; Start 52; Stop 76
caaagaagactgactgtagcacaac

SEQ ID NO: 464964 - DNA, 25 bp, Artificial
  probe
  misc_feature (1)..(25): SEQ ID NO: 7322; WAN024BSD; Start 51; Stop 75
tcaaagaagactgactgtagcacaa

SEQ ID NO: 464965 - DNA, 25 bp, Artificial
  probe
  misc_feature (1)..(25): SEQ ID NO: 7322; WAN024BSD; Start 26; Stop 50
ctgttgtttcaggtctgagagtcta

SEQ ID NO: 464966 - DNA, 25 bp, Artificial
  probe
  misc_feature (1)..(25): SEQ ID NO: 7322; WAN024BSD; Start 54; Stop 78
aagaagactgactgtagcacaacca

SEQ ID NO: 464967 - DNA, 25 bp, Artificial
  probe
  misc_feature (1)..(25): SEQ ID NO: 7322; WAN024BSD; Start 12; Stop 36
aattggtgacatagctgttgtttca

SEQ ID NO: 464968 - DNA, 25 bp, Artificial
  probe
  misc_feature (1)..(25): SEQ ID NO: 7322; WAN024BSD; Start 53; Stop 77
aaagaagactgactgtagcacaacc

SEQ ID NO: 464969 - DNA, 25 bp, Artificial
  probe
  misc_feature (1)..(25): SEQ ID NO: 7322; WAN024BSD; Start 13; Stop 37
attggtgacatagctgttgtttcag

SEQ ID NO: 464970 - DNA, 25 bp, Artificial
  probe
  misc_feature (1)..(25): SEQ ID NO: 7322; WAN024BSD; Start 22; Stop 46
atagctgttgtttcaggtctgagag

SEQ ID NO: 464971 - DNA, 25 bp, Artificial
  probe
  misc_feature (1)..(25): SEQ ID NO: 7322; WAN024BSD; Start 21; Stop 45
catagctgttgtttcaggtctgaga

SEQ ID NO: 464972 - DNA, 25 bp, Artificial
  probe
  misc_feature (1)..(25): SEQ ID NO: 7322; WAN024BSD; Start 20; Stop 44
acatagctgttgtttcaggtctgag

SEQ ID NO: 464973 - DNA, 25 bp, Artificial
  probe
  misc_feature (1)..(25): SEQ ID NO: 7322; WAN024BSD; Start 19; Stop 43
gacatagctgttgtttcaggtctga

SEQ ID NO: 464974 - DNA, 25 bp, Artificial
  probe
  misc_feature (1)..(25): SEQ ID NO: 7322; WAN024BSD; Start 11; Stop 35
caattggtgacatagctgttgtttc

SEQ ID NO: 464975 - DNA, 25 bp, Artificial
  probe
  misc_feature (1)..(25): SEQ ID NO: 7322; WAN024BSD; Start 18; Stop 42
tgacatagctgttgtttcaggtctg

SEQ ID NO: 464976 - DNA, 25 bp, Artificial
  probe
  misc_feature (1)..(25): SEQ ID NO: 7322; WAN024BSD; Start 17; Stop 41
gtgacatagctgttgtttcaggtct

SEQ ID NO: 464977 - DNA, 25 bp, Artificial
  probe
  misc_feature (1)..(25): SEQ ID NO: 7322; WAN024BSD; Start 37; Stop 61
ggtctgagagtctatcaaagaagac

SEQ ID NO: 464978 - DNA, 25 bp, Artificial
  probe
  misc_feature (1)..(25): SEQ ID NO: 7322; WAN024BSD; Start 23; Stop 47
tagctgttgtttcaggtctgagagt

SEQ ID NO: 464979 - DNA, 25 bp, Artificial
  probe
  misc_feature (1)..(25): SEQ ID NO: 7322; WAN024BSD; Start 46; Stop 70
gtctatcaaagaagactgactgtag

SEQ ID NO: 464980 - DNA, 25 bp, Artificial
  probe
  misc_feature (1)..(25): SEQ ID NO: 7322; WAN024BSD; Start 14; Stop 38
ttggtgacatagctgttgtttcagg

SEQ ID NO: 464981 - DNA, 25 bp, Artificial
  probe
  misc_feature (1)..(25): SEQ ID NO: 7322; WAN024BSD; Start 16; Stop 40
ggtgacatagctgttgtttcaggtc

SEQ ID NO: 464982 - DNA, 25 bp, Artificial
  probe
  misc_feature (1)..(25): SEQ ID NO: 7323; WAN024FTC; Start 263; Stop 287
aagaaagagtcaatatgcttaacgg

SEQ ID NO: 464983 - DNA, 25 bp, Artificial
  probe
  misc_feature (1)..(25): SEQ ID NO: 7323; WAN024FTC; Start 264; Stop 288
agaaagagtcaatatgcttaacggc

SEQ ID NO: 464984 - DNA, 25 bp, Artificial
  probe
  misc_feature (1)..(25): SEQ ID NO: 7323; WAN024FTC; Start 207; Stop 231
aaacatagaaatcgtcaccgtattt

SEQ ID NO: 464985 - DNA, 25 bp, Artificial
  probe
  misc_feature (1)..(25): SEQ ID NO: 7323; WAN024FTC; Start 104; Stop 128
aagagattctggtggagacgaacat

SEQ ID NO: 464986 - DNA, 25 bp, Artificial
  probe
  misc_feature (1)..(25): SEQ ID NO: 7323; WAN024FTC; Start 262; Stop 286
aaagaaagagtcaatatgcttaacg

SEQ ID NO: 464987 - DNA, 25 bp, Artificial
  probe
  misc_feature (1)..(25): SEQ ID NO: 7323; WAN024FTC; Start 160; Stop 184
gagatagtccagattggcttccttg

SEQ ID NO: 464988 - DNA, 25 bp, Artificial
  probe
  misc_feature (1)..(25): SEQ ID NO: 7323; WAN024FTC; Start 352; Stop 376
ttggatgacttcaggatgtttaaag

SEQ ID NO: 464989 - DNA, 25 bp, Artificial
  probe
  misc_feature (1)..(25): SEQ ID NO: 7323; WAN024FTC; Start 351; Stop 375
tttggatgacttcaggatgtttaaa

SEQ ID NO: 464990 - DNA, 25 bp, Artificial
  probe
  misc_feature (1)..(25): SEQ ID NO: 7323; WAN024FTC; Start 162; Stop 186
gatagtccagattggcttccttgtc

SEQ ID NO: 464991 - DNA, 25 bp, Artificial
  probe
  misc_feature (1)..(25): SEQ ID NO: 7323; WAN024FTC; Start 105; Stop 129
agagattctggtggagacgaacatc

SEQ ID NO: 464992 - DNA, 25 bp, Artificial
  probe
  misc_feature (1)..(25): SEQ ID NO: 7323; WAN024FTC; Start 328; Stop 352
ccaatcagcccagtcatagatgttt

SEQ ID NO: 464993 - DNA, 25 bp, Artificial
  probe
  misc_feature (1)..(25): SEQ ID NO: 7323; WAN024FTC; Start 34; Stop 58
cttgagttcaaccaggctatctgtg

SEQ ID NO: 464994 - DNA, 25 bp, Artificial
  probe
  misc_feature (1)..(25): SEQ ID NO: 7323; WAN024FTC; Start 163; Stop 187
atagtccagattggcttccttgtct

SEQ ID NO: 464995 - DNA, 25 bp, Artificial
  probe
  misc_feature (1)..(25): SEQ ID NO: 7323; WAN024FTC; Start 161; Stop 185
agatagtccagattggcttccttgt

SEQ ID NO: 464996 - DNA, 25 bp, Artificial
  probe
  misc_feature (1)..(25): SEQ ID NO: 7323; WAN024FTC; Start 325; Stop 349
gaaccaatcagcccagtcatagatg

SEQ ID NO: 464997 - DNA, 25 bp, Artificial
  probe
  misc_feature (1)..(25): SEQ ID NO: 7323; WAN024FTC; Start 99; Stop 123
cttcaaagagattctggtggagacg

SEQ ID NO: 464998 - DNA, 25 bp, Artificial
  probe
  misc_feature (1)..(25): SEQ ID NO: 7323; WAN024FTC; Start 35; Stop 59
ttgagttcaaccaggctatctgtga

SEQ ID NO: 464999 - DNA, 25 bp, Artificial
  probe
  misc_feature (1)..(25): SEQ ID NO: 7323; WAN024FTC; Start 344; Stop 368
tagatgttttggatgacttcaggat

SEQ ID NO: 465000 - DNA, 25 bp, Artificial
  probe
  misc_feature (1)..(25): SEQ ID NO: 7323; WAN024FTC; Start 343; Stop 367
atagatgttttggatgacttcagga

SEQ ID NO: 465001 - DNA, 25 bp, Artificial
  probe
  misc_feature (1)..(25): SEQ ID NO: 7323; WAN024FTC; Start 349; Stop 373
gttttggatgacttcaggatgttta

SEQ ID NO: 465002 - DNA, 25 bp, Artificial
  probe
  misc_feature (1)..(25): SEQ ID NO: 7323; WAN024FTC; Start 206; Stop 230
aaaacatagaaatcgtcaccgtatt

SEQ ID NO: 465003 - DNA, 25 bp, Artificial
  probe
  misc_feature (1)..(25): SEQ ID NO: 7323; WAN024FTC; Start 102; Stop 126
caaagagattctggtggagacgaac

SEQ ID NO: 465004 - DNA, 25 bp, Artificial
  probe
  misc_feature (1)..(25): SEQ ID NO: 7323; WAN024FTC; Start 98; Stop 122
gcttcaaagagattctggtggagac

SEQ ID NO: 465005 - DNA, 25 bp, Artificial
  probe
  misc_feature (1)..(25): SEQ ID NO: 7323; WAN024FTC; Start 347; Stop 371
atgttttggatgacttcaggatgtt

SEQ ID NO: 465006 - DNA, 25 bp, Artificial
  probe
  misc_feature (1)..(25): SEQ ID NO: 7323; WAN024FTC; Start 342; Stop 366
catagatgttttggatgacttcagg

SEQ ID NO: 465007 - DNA, 25 bp, Artificial
  probe
  misc_feature (1)..(25): SEQ ID NO: 7323; WAN024FTC; Start 348; Stop 372
tgttttggatgacttcaggatgttt

SEQ ID NO: 465008 - DNA, 25 bp, Artificial
  probe
  misc_feature (1)..(25): SEQ ID NO: 7323; WAN024FTC; Start 345; Stop 369
agatgttttggatgacttcaggatg

SEQ ID NO: 465009 - DNA, 25 bp, Artificial
  probe
  misc_feature (1)..(25): SEQ ID NO: 7323; WAN024FTC; Start 350; Stop 374
ttttggatgacttcaggatgtttaa

SEQ ID NO: 465010 - DNA, 25 bp, Artificial
  probe
  misc_feature (1)..(25): SEQ ID NO: 7323; WAN024FTC; Start 101; Stop 125
tcaaagagattctggtggagacgaa

SEQ ID NO: 465011 - DNA, 25 bp, Artificial
  probe
  misc_feature (1)..(25): SEQ ID NO: 7323; WAN024FTC; Start 100; Stop 124
ttcaaagagattctggtggagacga

SEQ ID NO: 465012 - DNA, 25 bp, Artificial
  probe
  misc_feature (1)..(25): SEQ ID NO: 7323; WAN024FTC; Start 346; Stop 370
gatgttttggatgacttcaggatgt

SEQ ID NO: 465013 - DNA, 25 bp, Artificial
  probe
  misc_feature (1)..(25): SEQ ID NO: 7323; WAN024FTC; Start 330; Stop 354
aatcagcccagtcatagatgttttg

SEQ ID NO: 465014 - DNA, 25 bp, Artificial
  probe
  misc_feature (1)..(25): SEQ ID NO: 7323; WAN024FTC; Start 329; Stop 353
caatcagcccagtcatagatgtttt

SEQ ID NO: 465015 - DNA, 25 bp, Artificial
  probe
  misc_feature (1)..(25): SEQ ID NO: 7324; WAN024C3F; Start 46; Stop 70
gttcagattatcgcaaggttgtgtg

SEQ ID NO: 465016 - DNA, 25 bp, Artificial
  probe
  misc_feature (1)..(25): SEQ ID NO: 7324; WAN024C3F; Start 32; Stop 56
aagttgtcactgccgttcagattat

SEQ ID NO: 465017 - DNA, 25 bp, Artificial
  probe
  misc_feature (1)..(25): SEQ ID NO: 7324; WAN024C3F; Start 47; Stop 71
ttcagattatcgcaaggttgtgtgg

SEQ ID NO: 465018 - DNA, 25 bp, Artificial
  probe
  misc_feature (1)..(25): SEQ ID NO: 7324; WAN024C3F; Start 21; Stop 45
ttatctagaagaagttgtcactgcc

SEQ ID NO: 465019 - DNA, 25 bp, Artificial
  probe
  misc_feature (1)..(25): SEQ ID NO: 7324; WAN024C3F; Start 33; Stop 57
agttgtcactgccgttcagattatc

SEQ ID NO: 465020 - DNA, 25 bp, Artificial
  probe
  misc_feature (1)..(25): SEQ ID NO: 7324; WAN024C3F; Start 31; Stop 55
gaagttgtcactgccgttcagatta

SEQ ID NO: 465021 - DNA, 25 bp, Artificial
  probe
  misc_feature (1)..(25): SEQ ID NO: 7324; WAN024C3F; Start 45; Stop 69
cgttcagattatcgcaaggttgtgt

SEQ ID NO: 465022 - DNA, 25 bp, Artificial
  probe
  misc_feature (1)..(25): SEQ ID NO: 7324; WAN024C3F; Start 20; Stop 44
attatctagaagaagttgtcactgc

SEQ ID NO: 465023 - DNA, 25 bp, Artificial
  probe
  misc_feature (1)..(25): SEQ ID NO: 7324; WAN024C3F; Start 25; Stop 49
ctagaagaagttgtcactgccgttc

SEQ ID NO: 465024 - DNA, 25 bp, Artificial
  probe
  misc_feature (1)..(25): SEQ ID NO: 7324; WAN024C3F; Start 22; Stop 46
tatctagaagaagttgtcactgccg

SEQ ID NO: 465025 - DNA, 25 bp, Artificial
  probe
  misc_feature (1)..(25): SEQ ID NO: 7324; WAN024C3F; Start 26; Stop 50
tagaagaagttgtcactgccgttca

SEQ ID NO: 465026 - DNA, 25 bp, Artificial
  probe
  misc_feature (1)..(25): SEQ ID NO: 7324; WAN024C3F; Start 44; Stop 68
ccgttcagattatcgcaaggttgtg

SEQ ID NO: 465027 - DNA, 25 bp, Artificial
  probe
  misc_feature (1)..(25): SEQ ID NO: 7324; WAN024C3F; Start 34; Stop 58
gttgtcactgccgttcagattatcg

SEQ ID NO: 465028 - DNA, 25 bp, Artificial
  probe
  misc_feature (1)..(25): SEQ ID NO: 7324; WAN024C3F; Start 30; Stop 54
agaagttgtcactgccgttcagatt

SEQ ID NO: 465029 - DNA, 25 bp, Artificial
  probe
  misc_feature (1)..(25): SEQ ID NO: 7324; WAN024C3F; Start 29; Stop 53
aagaagttgtcactgccgttcagat

SEQ ID NO: 465030 - DNA, 25 bp, Artificial
  probe
  misc_feature (1)..(25): SEQ ID NO: 7324; WAN024C3F; Start 23; Stop 47
atctagaagaagttgtcactgccgt

SEQ ID NO: 465031 - DNA, 25 bp, Artificial
  probe
  misc_feature (1)..(25): SEQ ID NO: 7324; WAN024C3F; Start 24; Stop 48
tctagaagaagttgtcactgccgtt

SEQ ID NO: 465032 - DNA, 25 bp, Artificial
  probe
  misc_feature (1)..(25): SEQ ID NO: 7324; WAN024C3F; Start 60; Stop 84
aaggttgtgtggcactgtgttacat

SEQ ID NO: 465033 - DNA, 25 bp, Artificial
  probe
  misc_feature (1)..(25): SEQ ID NO: 7324; WAN024C3F; Start 19; Stop 43
tattatctagaagaagttgtcactg

SEQ ID NO: 465034 - DNA, 25 bp, Artificial
  probe
  misc_feature (1)..(25): SEQ ID NO: 7324; WAN024C3F; Start 9; Stop 33
tgtggttcaatattatctagaagaa

SEQ ID NO: 465035 - DNA, 25 bp, Artificial
  probe
  misc_feature (1)..(25): SEQ ID NO: 7324; WAN024C3F; Start 8; Stop 32
ttgtggttcaatattatctagaaga

SEQ ID NO: 465036 - DNA, 25 bp, Artificial
  probe
  misc_feature (1)..(25): SEQ ID NO: 7324; WAN024C3F; Start 11; Stop 35
tggttcaatattatctagaagaagt

SEQ ID NO: 465037 - DNA, 25 bp, Artificial
  probe
  misc_feature (1)..(25): SEQ ID NO: 7324; WAN024C3F; Start 10; Stop 34
gtggttcaatattatctagaagaag

SEQ ID NO: 465038 - DNA, 25 bp, Artificial
  probe
  misc_feature (1)..(25): SEQ ID NO: 7324; WAN024C3F; Start 18; Stop 42
atattatctagaagaagttgtcact

SEQ ID NO: 465039 - DNA, 25 bp, Artificial
  probe
  misc_feature (1)..(25): SEQ ID NO: 7325; WAN024BQU; Start 1; Stop 25
gtgtactattctagagggctatttt

SEQ ID NO: 465040 - DNA, 25 bp, Artificial
  probe
  misc_feature (1)..(25): SEQ ID NO: 7326; WAN024D8M; Start 17; Stop 41
ttatccattcatttgcctttgcttt

SEQ ID NO: 465041 - DNA, 25 bp, Artificial
  probe
  misc_feature (1)..(25): SEQ ID NO: 7326; WAN024D8M; Start 14; Stop 38
tacttatccattcatttgcctttgc

SEQ ID NO: 465042 - DNA, 25 bp, Artificial
  probe
  misc_feature (1)..(25): SEQ ID NO: 7326; WAN024D8M; Start 18; Stop 42
tatccattcatttgcctttgcttta

SEQ ID NO: 465043 - DNA, 25 bp, Artificial
  probe
  misc_feature (1)..(25): SEQ ID NO: 7326; WAN024D8M; Start 16; Stop 40
cttatccattcatttgcctttgctt

SEQ ID NO: 465044 - DNA, 25 bp, Artificial
  probe
  misc_feature (1)..(25): SEQ ID NO: 7326; WAN024D8M; Start 19; Stop 43
atccattcatttgcctttgctttaa

SEQ ID NO: 465045 - DNA, 25 bp, Artificial
  probe
  misc_feature (1)..(25): SEQ ID NO: 7326; WAN024D8M; Start 84; Stop 108
tatttccattgccactctttctaag

SEQ ID NO: 465046 - DNA, 25 bp, Artificial
  probe
  misc_feature (1)..(25): SEQ ID NO: 7326; WAN024D8M; Start 15; Stop 39
acttatccattcatttgcctttgct

SEQ ID NO: 465047 - DNA, 25 bp, Artificial
  probe
  misc_feature (1)..(25): SEQ ID NO: 7326; WAN024D8M; Start 85; Stop 109
atttccattgccactctttctaagg

SEQ ID NO: 465048 - DNA, 25 bp, Artificial
  probe
  misc_feature (1)..(25): SEQ ID NO: 7326; WAN024D8M; Start 83; Stop 107
atatttccattgccactctttctaa

SEQ ID NO: 465049 - DNA, 25 bp, Artificial
  probe
  misc_feature (1)..(25): SEQ ID NO: 7326; WAN024D8M; Start 13; Stop 37
atacttatccattcatttgcctttg

SEQ ID NO: 465050 - DNA, 25 bp, Artificial
  probe
  misc_feature (1)..(25): SEQ ID NO: 7326; WAN024D8M; Start 10; Stop 34
actatacttatccattcatttgcct

SEQ ID NO: 465051 - DNA, 25 bp, Artificial
  probe
  misc_feature (1)..(25): SEQ ID NO: 7326; WAN024D8M; Start 60; Stop 84
aggagcgtccatcttacaatttaat

SEQ ID NO: 465052 - DNA, 25 bp, Artificial
  probe
  misc_feature (1)..(25): SEQ ID NO: 7326; WAN024D8M; Start 20; Stop 44
tccattcatttgcctttgctttaaa

SEQ ID NO: 465053 - DNA, 25 bp, Artificial
  probe
  misc_feature (1)..(25): SEQ ID NO: 7326; WAN024D8M; Start 61; Stop 85
ggagcgtccatcttacaatttaata

SEQ ID NO: 465054 - DNA, 25 bp, Artificial
  probe
  misc_feature (1)..(25): SEQ ID NO: 7326; WAN024D8M; Start 82; Stop 106
aatatttccattgccactctttcta

SEQ ID NO: 465055 - DNA, 25 bp, Artificial
  probe
  misc_feature (1)..(25): SEQ ID NO: 7326; WAN024D8M; Start 81; Stop 105
taatatttccattgccactctttct

SEQ ID NO: 465056 - DNA, 25 bp, Artificial
  probe
  misc_feature (1)..(25): SEQ ID NO: 7326; WAN024D8M; Start 59; Stop 83
caggagcgtccatcttacaatttaa

SEQ ID NO: 465057 - DNA, 25 bp, Artificial
  probe
  misc_feature (1)..(25): SEQ ID NO: 7326; WAN024D8M; Start 62; Stop 86
gagcgtccatcttacaatttaatat

SEQ ID NO: 465058 - DNA, 25 bp, Artificial
  probe
  misc_feature (1)..(25): SEQ ID NO: 7326; WAN024D8M; Start 80; Stop 104
ttaatatttccattgccactctttc

SEQ ID NO: 465059 - DNA, 25 bp, Artificial
  probe
  misc_feature (1)..(25): SEQ ID NO: 7326; WAN024D8M; Start 11; Stop 35
ctatacttatccattcatttgcctt

SEQ ID NO: 465060 - DNA, 25 bp, Artificial
  probe
  misc_feature (1)..(25): SEQ ID NO: 7326; WAN024D8M; Start 79; Stop 103
tttaatatttccattgccactcttt

SEQ ID NO: 465061 - DNA, 25 bp, Artificial
  probe
  misc_feature (1)..(25): SEQ ID NO: 7326; WAN024D8M; Start 12; Stop 36
tatacttatccattcatttgccttt

SEQ ID NO: 465062 - DNA, 25 bp, Artificial
  probe
  misc_feature (1)..(25): SEQ ID NO: 7326; WAN024D8M; Start 9; Stop 33
tactatacttatccattcatttgcc

SEQ ID NO: 465063 - DNA, 25 bp, Artificial
  probe
  misc_feature (1)..(25): SEQ ID NO: 7326; WAN024D8M; Start 78; Stop 102
atttaatatttccattgccactctt

SEQ ID NO: 465064 - DNA, 25 bp, Artificial
  probe
  misc_feature (1)..(25): SEQ ID NO: 7326; WAN024D8M; Start 77; Stop 101
aatttaatatttccattgccactct

SEQ ID NO: 465065 - DNA, 25 bp, Artificial
  probe
  misc_feature (1)..(25): SEQ ID NO: 7326; WAN024D8M; Start 63; Stop 87
agcgtccatcttacaatttaatatt

SEQ ID NO: 465066 - DNA, 25 bp, Artificial
  probe
  misc_feature (1)..(25): SEQ ID NO: 7326; WAN024D8M; Start 58; Stop 82
gcaggagcgtccatcttacaattta

SEQ ID NO: 465067 - DNA, 25 bp, Artificial
  probe
  misc_feature (1)..(25): SEQ ID NO: 7326; WAN024D8M; Start 75; Stop 99
acaatttaatatttccattgccact

SEQ ID NO: 465068 - DNA, 25 bp, Artificial
  probe
  misc_feature (1)..(25): SEQ ID NO: 7326; WAN024D8M; Start 64; Stop 88
gcgtccatcttacaatttaatattt

SEQ ID NO: 465069 - DNA, 25 bp, Artificial
  probe
  misc_feature (1)..(25): SEQ ID NO: 7326; WAN024D8M; Start 76; Stop 100
caatttaatatttccattgccactc

SEQ ID NO: 465070 - DNA, 25 bp, Artificial
  probe
  misc_feature (1)..(25): SEQ ID NO: 7326; WAN024D8M; Start 74; Stop 98
tacaatttaatatttccattgccac

SEQ ID NO: 465071 - DNA, 25 bp, Artificial
  probe
  misc_feature (1)..(25): SEQ ID NO: 7326; WAN024D8M; Start 8; Stop 32
ttactatacttatccattcatttgc

SEQ ID NO: 465072 - DNA, 25 bp, Artificial
  probe
  misc_feature (1)..(25): SEQ ID NO: 7326; WAN024D8M; Start 73; Stop 97
ttacaatttaatatttccattgcca

SEQ ID NO: 465073 - DNA, 25 bp, Artificial
  probe
  misc_feature (1)..(25): SEQ ID NO: 7327; WAN024BYB; Start 449; Stop 473
atcaagagcgtgtgtctaagaatat

SEQ ID NO: 465074 - DNA, 25 bp, Artificial
  probe
  misc_feature (1)..(25): SEQ ID NO: 7327; WAN024BYB; Start 448; Stop 472
aatcaagagcgtgtgtctaagaata

SEQ ID NO: 465075 - DNA, 25 bp, Artificial
  probe
  misc_feature (1)..(25): SEQ ID NO: 7327; WAN024BYB; Start 447; Stop 471
caatcaagagcgtgtgtctaagaat

SEQ ID NO: 465076 - DNA, 25 bp, Artificial
  probe
  misc_feature (1)..(25): SEQ ID NO: 7327; WAN024BYB; Start 316; Stop 340
tataagtctagtccgtggtatgtgc

SEQ ID NO: 465077 - DNA, 25 bp, Artificial
  probe
  misc_feature (1)..(25): SEQ ID NO: 7327; WAN024BYB; Start 315; Stop 339
ttataagtctagtccgtggtatgtg

SEQ ID NO: 465078 - DNA, 25 bp, Artificial
  probe
  misc_feature (1)..(25): SEQ ID NO: 7327; WAN024BYB; Start 450; Stop 474
tcaagagcgtgtgtctaagaatatt

SEQ ID NO: 465079 - DNA, 25 bp, Artificial
  probe
  misc_feature (1)..(25): SEQ ID NO: 7327; WAN024BYB; Start 146; Stop 170
cgagagatggagagcttataactag

SEQ ID NO: 465080 - DNA, 25 bp, Artificial
  probe
  misc_feature (1)..(25): SEQ ID NO: 7327; WAN024BYB; Start 145; Stop 169
gcgagagatggagagcttataacta

SEQ ID NO: 465081 - DNA, 25 bp, Artificial
  probe
  misc_feature (1)..(25): SEQ ID NO: 7327; WAN024BYB; Start 221; Stop 245
acaccaatcttaaatacgctcctta

SEQ ID NO: 465082 - DNA, 25 bp, Artificial
  probe
  misc_feature (1)..(25): SEQ ID NO: 7327; WAN024BYB; Start 220; Stop 244
tacaccaatcttaaatacgctcctt

SEQ ID NO: 465083 - DNA, 25 bp, Artificial
  probe
  misc_feature (1)..(25): SEQ ID NO: 7327; WAN024BYB; Start 219; Stop 243
ttacaccaatcttaaatacgctcct

SEQ ID NO: 465084 - DNA, 25 bp, Artificial
  probe
  misc_feature (1)..(25): SEQ ID NO: 7327; WAN024BYB; Start 101; Stop 125
ctactataaaggttgtccaagcaga

SEQ ID NO: 465085 - DNA, 25 bp, Artificial
  probe
  misc_feature (1)..(25): SEQ ID NO: 7327; WAN024BYB; Start 222; Stop 246
caccaatcttaaatacgctccttac

SEQ ID NO: 465086 - DNA, 25 bp, Artificial
  probe
  misc_feature (1)..(25): SEQ ID NO: 7327; WAN024BYB; Start 102; Stop 126
tactataaaggttgtccaagcagat

SEQ ID NO: 465087 - DNA, 25 bp, Artificial
  probe
  misc_feature (1)..(25): SEQ ID NO: 7327; WAN024BYB; Start 103; Stop 127
actataaaggttgtccaagcagatg

SEQ ID NO: 465088 - DNA, 25 bp, Artificial
  probe
  misc_feature (1)..(25): SEQ ID NO: 7327; WAN024BYB; Start 387; Stop 411
ggagttctacaagatgtatggtcaa

SEQ ID NO: 465089 - DNA, 25 bp, Artificial
  probe
  misc_feature (1)..(25): SEQ ID NO: 7327; WAN024BYB; Start 391; Stop 415
ttctacaagatgtatggtcaacctg

SEQ ID NO: 465090 - DNA, 25 bp, Artificial
  probe
  misc_feature (1)..(25): SEQ ID NO: 7327; WAN024BYB; Start 390; Stop 414
gttctacaagatgtatggtcaacct

SEQ ID NO: 465091 - DNA, 25 bp, Artificial
  probe
  misc_feature (1)..(25): SEQ ID NO: 7327; WAN024BYB; Start 389; Stop 413
agttctacaagatgtatggtcaacc

SEQ ID NO: 465092 - DNA, 25 bp, Artificial
  probe
  misc_feature (1)..(25): SEQ ID NO: 7327; WAN024BYB; Start 345; Stop 369
agaccaaatcaatgtaggaccttac

SEQ ID NO: 465093 - DNA, 25 bp, Artificial
  probe
  misc_feature (1)..(25): SEQ ID NO: 7327; WAN024BYB; Start 223; Stop 247
accaatcttaaatacgctccttacg

SEQ ID NO: 465094 - DNA, 25 bp, Artificial
  probe
  misc_feature (1)..(25): SEQ ID NO: 7327; WAN024BYB; Start 446; Stop 470
acaatcaagagcgtgtgtctaagaa

SEQ ID NO: 465095 - DNA, 25 bp, Artificial
  probe
  misc_feature (1)..(25): SEQ ID NO: 7327; WAN024BYB; Start 34; Stop 58
gctaaatgtagacgattggctagta

SEQ ID NO: 465096 - DNA, 25 bp, Artificial
  probe
  misc_feature (1)..(25): SEQ ID NO: 7327; WAN024BYB; Start 388; Stop 412
gagttctacaagatgtatggtcaac

SEQ ID NO: 465097 - DNA, 25 bp, Artificial
  probe
  misc_feature (1)..(25): SEQ ID NO: 7327; WAN024BYB; Start 97; Stop 121
aatgctactataaaggttgtccaag

SEQ ID NO: 465098 - DNA, 25 bp, Artificial
  probe
  misc_feature (1)..(25): SEQ ID NO: 7327; WAN024BYB; Start 344; Stop 368
aagaccaaatcaatgtaggacctta

SEQ ID NO: 465099 - DNA, 25 bp, Artificial
  probe
  misc_feature (1)..(25): SEQ ID NO: 7327; WAN024BYB; Start 484; Stop 508
gtccgtagaaagataagagaacaaa

SEQ ID NO: 465100 - DNA, 25 bp, Artificial
  probe
  misc_feature (1)..(25): SEQ ID NO: 7327; WAN024BYB; Start 348; Stop 372
ccaaatcaatgtaggaccttaccat

SEQ ID NO: 465101 - DNA, 25 bp, Artificial
  probe
  misc_feature (1)..(25): SEQ ID NO: 7327; WAN024BYB; Start 218; Stop 242
tttacaccaatcttaaatacgctcc

SEQ ID NO: 465102 - DNA, 25 bp, Artificial
  probe
  misc_feature (1)..(25): SEQ ID NO: 7327; WAN024BYB; Start 343; Stop 367
gaagaccaaatcaatgtaggacctt

SEQ ID NO: 465103 - DNA, 25 bp, Artificial
  probe
  misc_feature (1)..(25): SEQ ID NO: 7327; WAN024BYB; Start 346; Stop 370
gaccaaatcaatgtaggaccttacc

SEQ ID NO: 465104 - DNA, 25 bp, Artificial
  probe
  misc_feature (1)..(25): SEQ ID NO: 7327; WAN024BYB; Start 96; Stop 120
caatgctactataaaggttgtccaa

SEQ ID NO: 465105 - DNA, 25 bp, Artificial
  probe
  misc_feature (1)..(25): SEQ ID NO: 7327; WAN024BYB; Start 89; Stop 113
cggtacacaatgctactataaaggt

SEQ ID NO: 465106 - DNA, 25 bp, Artificial
  probe
  misc_feature (1)..(25): SEQ ID NO: 7328; WAN024BG3; Start 48; Stop 72
gaacaagagttacttcaacccattg

SEQ ID NO: 465107 - DNA, 25 bp, Artificial
  probe
  misc_feature (1)..(25): SEQ ID NO: 7328; WAN024BG3; Start 49; Stop 73
aacaagagttacttcaacccattgg

SEQ ID NO: 465108 - DNA, 25 bp, Artificial
  probe
  misc_feature (1)..(25): SEQ ID NO: 7328; WAN024BG3; Start 52; Stop 76
aagagttacttcaacccattggctc

SEQ ID NO: 465109 - DNA, 25 bp, Artificial
  probe
  misc_feature (1)..(25): SEQ ID NO: 7328; WAN024BG3; Start 51; Stop 75
caagagttacttcaacccattggct

SEQ ID NO: 465110 - DNA, 25 bp, Artificial
  probe
  misc_feature (1)..(25): SEQ ID NO: 7328; WAN024BG3; Start 50; Stop 74
acaagagttacttcaacccattggc

SEQ ID NO: 465111 - DNA, 25 bp, Artificial
  probe
  misc_feature (1)..(25): SEQ ID NO: 7328; WAN024BG3; Start 53; Stop 77
agagttacttcaacccattggctcc

SEQ ID NO: 465112 - DNA, 25 bp, Artificial
  probe
  misc_feature (1)..(25): SEQ ID NO: 7329; WAN024BXG; Start 132; Stop 156
gaaagcatatcaaatcgctagtgtt

SEQ ID NO: 465113 - DNA, 25 bp, Artificial
  probe
  misc_feature (1)..(25): SEQ ID NO: 7329; WAN024BXG; Start 133; Stop 157
aaagcatatcaaatcgctagtgttt

SEQ ID NO: 465114 - DNA, 25 bp, Artificial
  probe
  misc_feature (1)..(25): SEQ ID NO: 7329; WAN024BXG; Start 131; Stop 155
cgaaagcatatcaaatcgctagtgt

SEQ ID NO: 465115 - DNA, 25 bp, Artificial
  probe
  misc_feature (1)..(25): SEQ ID NO: 7329; WAN024BXG; Start 136; Stop 160
gcatatcaaatcgctagtgttttcg

SEQ ID NO: 465116 - DNA, 25 bp, Artificial
  probe
  misc_feature (1)..(25): SEQ ID NO: 7329; WAN024BXG; Start 130; Stop 154
tcgaaagcatatcaaatcgctagtg

SEQ ID NO: 465117 - DNA, 25 bp, Artificial
  probe
  misc_feature (1)..(25): SEQ ID NO: 7329; WAN024BXG; Start 148; Stop 172
gctagtgttttcgatgtatcagtag

SEQ ID NO: 465118 - DNA, 25 bp, Artificial
  probe
  misc_feature (1)..(25): SEQ ID NO: 7329; WAN024BXG; Start 147; Stop 171
cgctagtgttttcgatgtatcagta

SEQ ID NO: 465119 - DNA, 25 bp, Artificial
  probe
  misc_feature (1)..(25): SEQ ID NO: 7329; WAN024BXG; Start 151; Stop 175
agtgttttcgatgtatcagtagatg

SEQ ID NO: 465120 - DNA, 25 bp, Artificial
  probe
  misc_feature (1)..(25): SEQ ID NO: 7329; WAN024BXG; Start 152; Stop 176
gtgttttcgatgtatcagtagatga

SEQ ID NO: 465121 - DNA, 25 bp, Artificial
  probe
  misc_feature (1)..(25): SEQ ID NO: 7329; WAN024BXG; Start 135; Stop 159
agcatatcaaatcgctagtgttttc

SEQ ID NO: 465122 - DNA, 25 bp, Artificial
  probe
  misc_feature (1)..(25): SEQ ID NO: 7329; WAN024BXG; Start 149; Stop 173
ctagtgttttcgatgtatcagtaga

SEQ ID NO: 465123 - DNA, 25 bp, Artificial
  probe
  misc_feature (1)..(25): SEQ ID NO: 7329; WAN024BXG; Start 134; Stop 158
aagcatatcaaatcgctagtgtttt

SEQ ID NO: 465124 - DNA, 25 bp, Artificial
  probe
  misc_feature (1)..(25): SEQ ID NO: 7329; WAN024BXG; Start 107; Stop 131
gtgggataacagagcctagtgtttc

SEQ ID NO: 465125 - DNA, 25 bp, Artificial
  probe
  misc_feature (1)..(25): SEQ ID NO: 7329; WAN024BXG; Start 150; Stop 174
tagtgttttcgatgtatcagtagat

SEQ ID NO: 465126 - DNA, 25 bp, Artificial
  probe
  misc_feature (1)..(25): SEQ ID NO: 7329; WAN024BXG; Start 137; Stop 161
catatcaaatcgctagtgttttcga

SEQ ID NO: 465127 - DNA, 25 bp, Artificial
  probe
  misc_feature (1)..(25): SEQ ID NO: 7329; WAN024BXG; Start 129; Stop 153
ttcgaaagcatatcaaatcgctagt

SEQ ID NO: 465128 - DNA, 25 bp, Artificial
  probe
  misc_feature (1)..(25): SEQ ID NO: 7329; WAN024BXG; Start 103; Stop 127
gaacgtgggataacagagcctagtg

SEQ ID NO: 465129 - DNA, 25 bp, Artificial
  probe
  misc_feature (1)..(25): SEQ ID NO: 7329; WAN024BXG; Start 146; Stop 170
tcgctagtgttttcgatgtatcagt

SEQ ID NO: 465130 - DNA, 25 bp, Artificial
  probe
  misc_feature (1)..(25): SEQ ID NO: 7329; WAN024BXG; Start 153; Stop 177
tgttttcgatgtatcagtagatgat

SEQ ID NO: 465131 - DNA, 25 bp, Artificial
  probe
  misc_feature (1)..(25): SEQ ID NO: 7329; WAN024BXG; Start 108; Stop 132
tgggataacagagcctagtgtttcg

SEQ ID NO: 465132 - DNA, 25 bp, Artificial
  probe
  misc_feature (1)..(25): SEQ ID NO: 7329; WAN024BXG; Start 109; Stop 133
gggataacagagcctagtgtttcga

SEQ ID NO: 465133 - DNA, 25 bp, Artificial
  probe
  misc_feature (1)..(25): SEQ ID NO: 7329; WAN024BXG; Start 106; Stop 130
cgtgggataacagagcctagtgttt

SEQ ID NO: 465134 - DNA, 25 bp, Artificial
  probe
  misc_feature (1)..(25): SEQ ID NO: 7329; WAN024BXG; Start 110; Stop 134
ggataacagagcctagtgtttcgaa

SEQ ID NO: 465135 - DNA, 25 bp, Artificial
  probe
  misc_feature (1)..(25): SEQ ID NO: 7329; WAN024BXG; Start 143; Stop 167
aaatcgctagtgttttcgatgtatc

SEQ ID NO: 465136 - DNA, 25 bp, Artificial
  probe
  misc_feature (1)..(25): SEQ ID NO: 7329; WAN024BXG; Start 142; Stop 166
caaatcgctagtgttttcgatgtat

SEQ ID NO: 465137 - DNA, 25 bp, Artificial
  probe
  misc_feature (1)..(25): SEQ ID NO: 7329; WAN024BXG; Start 139; Stop 163
tatcaaatcgctagtgttttcgatg

SEQ ID NO: 465138 - DNA, 25 bp, Artificial
  probe
  misc_feature (1)..(25): SEQ ID NO: 7329; WAN024BXG; Start 144; Stop 168
aatcgctagtgttttcgatgtatca

SEQ ID NO: 465139 - DNA, 25 bp, Artificial
  probe
  misc_feature (1)..(25): SEQ ID NO: 7329; WAN024BXG; Start 141; Stop 165
tcaaatcgctagtgttttcgatgta

SEQ ID NO: 465140 - DNA, 25 bp, Artificial
  probe
  misc_feature (1)..(25): SEQ ID NO: 7329; WAN024BXG; Start 138; Stop 162
atatcaaatcgctagtgttttcgat

SEQ ID NO: 465141 - DNA, 25 bp, Artificial
  probe
  misc_feature (1)..(25): SEQ ID NO: 7329; WAN024BXG; Start 145; Stop 169
atcgctagtgttttcgatgtatcag

SEQ ID NO: 465142 - DNA, 25 bp, Artificial
  probe
  misc_feature (1)..(25): SEQ ID NO: 7329; WAN024BXG; Start 140; Stop 164
atcaaatcgctagtgttttcgatgt

SEQ ID NO: 465143 - DNA, 25 bp, Artificial
  probe
  misc_feature (1)..(25): SEQ ID NO: 7329; WAN024BXG; Start 156; Stop 180
tttcgatgtatcagtagatgatatt

SEQ ID NO: 465144 - DNA, 25 bp, Artificial
  probe
  misc_feature (1)..(25): SEQ ID NO: 7329; WAN024BXG; Start 154; Stop 178
gttttcgatgtatcagtagatgata

SEQ ID NO: 465145 - DNA, 25 bp, Artificial
  probe
  misc_feature (1)..(25): SEQ ID NO: 7329; WAN024BXG; Start 155; Stop 179
ttttcgatgtatcagtagatgatat

SEQ ID NO: 465146 - DNA, 25 bp, Artificial
  probe
  misc_feature (1)..(25): SEQ ID NO: 7330; WAN024BQD; Start 593; Stop 617
aacaactagattggatagacgactt

SEQ ID NO: 465147 - DNA, 25 bp, Artificial
  probe
  misc_feature (1)..(25): SEQ ID NO: 7330; WAN024BQD; Start 594; Stop 618
acaactagattggatagacgactta

SEQ ID NO: 465148 - DNA, 25 bp, Artificial
  probe
  misc_feature (1)..(25): SEQ ID NO: 7330; WAN024BQD; Start 378; Stop 402
aacgattggacaaggagctataatt

SEQ ID NO: 465149 - DNA, 25 bp, Artificial
  probe
  misc_feature (1)..(25): SEQ ID NO: 7330; WAN024BQD; Start 377; Stop 401
taacgattggacaaggagctataat

SEQ ID NO: 465150 - DNA, 25 bp, Artificial
  probe
  misc_feature (1)..(25): SEQ ID NO: 7330; WAN024BQD; Start 376; Stop 400
gtaacgattggacaaggagctataa

SEQ ID NO: 465151 - DNA, 25 bp, Artificial
  probe
  misc_feature (1)..(25): SEQ ID NO: 7330; WAN024BQD; Start 595; Stop 619
caactagattggatagacgacttat

SEQ ID NO: 465152 - DNA, 25 bp, Artificial
  probe
  misc_feature (1)..(25): SEQ ID NO: 7330; WAN024BQD; Start 455; Stop 479
gcaatccagcacgaataataaagta

SEQ ID NO: 465153 - DNA, 25 bp, Artificial
  probe
  misc_feature (1)..(25): SEQ ID NO: 7330; WAN024BQD; Start 379; Stop 403
acgattggacaaggagctataattg

SEQ ID NO: 465154 - DNA, 25 bp, Artificial
  probe
  misc_feature (1)..(25): SEQ ID NO: 7330; WAN024BQD; Start 360; Stop 384
agtcattctttcaggtgtaacgatt

SEQ ID NO: 465155 - DNA, 25 bp, Artificial
  probe
  misc_feature (1)..(25): SEQ ID NO: 7330; WAN024BQD; Start 361; Stop 385
gtcattctttcaggtgtaacgattg

SEQ ID NO: 465156 - DNA, 25 bp, Artificial
  probe
  misc_feature (1)..(25): SEQ ID NO: 7330; WAN024BQD; Start 321; Stop 345
tattatcgtgggtgatgatgtatgg

SEQ ID NO: 465157 - DNA, 25 bp, Artificial
  probe
  misc_feature (1)..(25): SEQ ID NO: 7330; WAN024BQD; Start 600; Stop 624
agattggatagacgacttattacat

SEQ ID NO: 465158 - DNA, 25 bp, Artificial
  probe
  misc_feature (1)..(25): SEQ ID NO: 7330; WAN024BQD; Start 244; Stop 268
accaattacttcactacctttccat

SEQ ID NO: 465159 - DNA, 25 bp, Artificial
  probe
  misc_feature (1)..(25): SEQ ID NO: 7330; WAN024BQD; Start 427; Stop 451
aatgttccaccttatgctatcgtcg

SEQ ID NO: 465160 - DNA, 25 bp, Artificial
  probe
  misc_feature (1)..(25): SEQ ID NO: 7330; WAN024BQD; Start 359; Stop 383
cagtcattctttcaggtgtaacgat

SEQ ID NO: 465161 - DNA, 25 bp, Artificial
  probe
  misc_feature (1)..(25): SEQ ID NO: 7330; WAN024BQD; Start 317; Stop 341
gtgatattatcgtgggtgatgatgt

SEQ ID NO: 465162 - DNA, 25 bp, Artificial
  probe
  misc_feature (1)..(25): SEQ ID NO: 7330; WAN024BQD; Start 243; Stop 267
caccaattacttcactacctttcca

SEQ ID NO: 465163 - DNA, 25 bp, Artificial
  probe
  misc_feature (1)..(25): SEQ ID NO: 7330; WAN024BQD; Start 426; Stop 450
aaatgttccaccttatgctatcgtc

SEQ ID NO: 465164 - DNA, 25 bp, Artificial
  probe
  misc_feature (1)..(25): SEQ ID NO: 7330; WAN024BQD; Start 218; Stop 242
aatttattctgaatgctgaccactg

SEQ ID NO: 465165 - DNA, 25 bp, Artificial
  probe
  misc_feature (1)..(25): SEQ ID NO: 7330; WAN024BQD; Start 318; Stop 342
tgatattatcgtgggtgatgatgta

SEQ ID NO: 465166 - DNA, 25 bp, Artificial
  probe
  misc_feature (1)..(25): SEQ ID NO: 7330; WAN024BQD; Start 364; Stop 388
attctttcaggtgtaacgattggac

SEQ ID NO: 465167 - DNA, 25 bp, Artificial
  probe
  misc_feature (1)..(25): SEQ ID NO: 7330; WAN024BQD; Start 363; Stop 387
cattctttcaggtgtaacgattgga

SEQ ID NO: 465168 - DNA, 25 bp, Artificial
  probe
  misc_feature (1)..(25): SEQ ID NO: 7330; WAN024BQD; Start 362; Stop 386
tcattctttcaggtgtaacgattgg

SEQ ID NO: 465169 - DNA, 25 bp, Artificial
  probe
  misc_feature (1)..(25): SEQ ID NO: 7330; WAN024BQD; Start 245; Stop 269
ccaattacttcactacctttccatt

SEQ ID NO: 465170 - DNA, 25 bp, Artificial
  probe
  misc_feature (1)..(25): SEQ ID NO: 7330; WAN024BQD; Start 16; Stop 40
ctgaaacaaaggctgaagattgaaa

SEQ ID NO: 465171 - DNA, 25 bp, Artificial
  probe
  misc_feature (1)..(25): SEQ ID NO: 7330; WAN024BQD; Start 596; Stop 620
aactagattggatagacgacttatt

SEQ ID NO: 465172 - DNA, 25 bp, Artificial
  probe
  misc_feature (1)..(25): SEQ ID NO: 7330; WAN024BQD; Start 316; Stop 340
ggtgatattatcgtgggtgatgatg

SEQ ID NO: 465173 - DNA, 25 bp, Artificial
  probe
  misc_feature (1)..(25): SEQ ID NO: 7330; WAN024BQD; Start 375; Stop 399
tgtaacgattggacaaggagctata

SEQ ID NO: 465174 - DNA, 25 bp, Artificial
  probe
  misc_feature (1)..(25): SEQ ID NO: 7330; WAN024BQD; Start 3; Stop 27
gttaattggtcgtctgaaacaaagg

SEQ ID NO: 465175 - DNA, 25 bp, Artificial
  probe
  misc_feature (1)..(25): SEQ ID NO: 7330; WAN024BQD; Start 322; Stop 346
attatcgtgggtgatgatgtatggt

SEQ ID NO: 465176 - DNA, 25 bp, Artificial
  probe
  misc_feature (1)..(25): SEQ ID NO: 7330; WAN024BQD; Start 320; Stop 344
atattatcgtgggtgatgatgtatg

SEQ ID NO: 465177 - DNA, 25 bp, Artificial
  probe
  misc_feature (1)..(25): SEQ ID NO: 7330; WAN024BQD; Start 15; Stop 39
tctgaaacaaaggctgaagattgaa

SEQ ID NO: 465178 - DNA, 25 bp, Artificial
  probe
  misc_feature (1)..(25): SEQ ID NO: 7330; WAN024BQD; Start 308; Stop 332
tttcaaagggtgatattatcgtggg

SEQ ID NO: 465179 - DNA, 25 bp, Artificial
  probe
  misc_feature (1)..(25): SEQ ID NO: 7331; WAN024BL2; Start 34; Stop 58
tatgataaagataatgacagcggtg

SEQ ID NO: 465180 - DNA, 25 bp, Artificial
  probe
  misc_feature (1)..(25): SEQ ID NO: 7331; WAN024BL2; Start 35; Stop 59
atgataaagataatgacagcggtgt

SEQ ID NO: 465181 - DNA, 25 bp, Artificial
  probe
  misc_feature (1)..(25): SEQ ID NO: 7331; WAN024BL2; Start 33; Stop 57
atatgataaagataatgacagcggt

SEQ ID NO: 465182 - DNA, 25 bp, Artificial
  probe
  misc_feature (1)..(25): SEQ ID NO: 7331; WAN024BL2; Start 51; Stop 75
cagcggtgtcattctatctatttta

SEQ ID NO: 465183 - DNA, 25 bp, Artificial
  probe
  misc_feature (1)..(25): SEQ ID NO: 7331; WAN024BL2; Start 32; Stop 56
tatatgataaagataatgacagcgg

SEQ ID NO: 465184 - DNA, 25 bp, Artificial
  probe
  misc_feature (1)..(25): SEQ ID NO: 7331; WAN024BL2; Start 50; Stop 74
acagcggtgtcattctatctatttt

SEQ ID NO: 465185 - DNA, 25 bp, Artificial
  probe
  misc_feature (1)..(25): SEQ ID NO: 7331; WAN024BL2; Start 52; Stop 76
agcggtgtcattctatctattttaa

SEQ ID NO: 465186 - DNA, 25 bp, Artificial
  probe
  misc_feature (1)..(25): SEQ ID NO: 7331; WAN024BL2; Start 53; Stop 77
gcggtgtcattctatctattttaag

SEQ ID NO: 465187 - DNA, 25 bp, Artificial
  probe
  misc_feature (1)..(25): SEQ ID NO: 7331; WAN024BL2; Start 4; Stop 28
ttattccttgacaattcaatttgga

SEQ ID NO: 465188 - DNA, 25 bp, Artificial
  probe
  misc_feature (1)..(25): SEQ ID NO: 7331; WAN024BL2; Start 3; Stop 27
gttattccttgacaattcaatttgg

SEQ ID NO: 465189 - DNA, 25 bp, Artificial
  probe
  misc_feature (1)..(25): SEQ ID NO: 7331; WAN024BL2; Start 49; Stop 73
gacagcggtgtcattctatctattt

SEQ ID NO: 465190 - DNA, 25 bp, Artificial
  probe
  misc_feature (1)..(25): SEQ ID NO: 7331; WAN024BL2; Start 36; Stop 60
tgataaagataatgacagcggtgtc

SEQ ID NO: 465191 - DNA, 25 bp, Artificial
  probe
  misc_feature (1)..(25): SEQ ID NO: 7331; WAN024BL2; Start 2; Stop 26
tgttattccttgacaattcaatttg

SEQ ID NO: 465192 - DNA, 25 bp, Artificial
  probe
  misc_feature (1)..(25): SEQ ID NO: 7331; WAN024BL2; Start 1; Stop 25
gtgttattccttgacaattcaattt

SEQ ID NO: 465193 - DNA, 25 bp, Artificial
  probe
  misc_feature (1)..(25): SEQ ID NO: 7331; WAN024BL2; Start 6; Stop 30
attccttgacaattcaatttggaaa

SEQ ID NO: 465194 - DNA, 25 bp, Artificial
  probe
  misc_feature (1)..(25): SEQ ID NO: 7331; WAN024BL2; Start 54; Stop 78
cggtgtcattctatctattttaaga

SEQ ID NO: 465195 - DNA, 25 bp, Artificial
  probe
  misc_feature (1)..(25): SEQ ID NO: 7331; WAN024BL2; Start 5; Stop 29
tattccttgacaattcaatttggaa

SEQ ID NO: 465196 - DNA, 25 bp, Artificial
  probe
  misc_feature (1)..(25): SEQ ID NO: 7331; WAN024BL2; Start 8; Stop 32
tccttgacaattcaatttggaaaat

SEQ ID NO: 465197 - DNA, 25 bp, Artificial
  probe
  misc_feature (1)..(25): SEQ ID NO: 7331; WAN024BL2; Start 9; Stop 33
ccttgacaattcaatttggaaaata

SEQ ID NO: 465198 - DNA, 25 bp, Artificial
  probe
  misc_feature (1)..(25): SEQ ID NO: 7331; WAN024BL2; Start 7; Stop 31
ttccttgacaattcaatttggaaaa

SEQ ID NO: 465199 - DNA, 25 bp, Artificial
  probe
  misc_feature (1)..(25): SEQ ID NO: 7331; WAN024BL2; Start 10; Stop 34
cttgacaattcaatttggaaaatat

SEQ ID NO: 465200 - DNA, 25 bp, Artificial
  probe
  misc_feature (1)..(25): SEQ ID NO: 7332; WAN024BSK; Start 2; Stop 26
tgttattcgcagttagtttaccaga

SEQ ID NO: 465201 - DNA, 25 bp, Artificial
  probe
  misc_feature (1)..(25): SEQ ID NO: 7332; WAN024BSK; Start 1; Stop 25
gtgttattcgcagttagtttaccag

SEQ ID NO: 465202 - DNA, 25 bp, Artificial
  probe
  misc_feature (1)..(25): SEQ ID NO: 7332; WAN024BSK; Start 8; Stop 32
tcgcagttagtttaccagaagaaat

SEQ ID NO: 465203 - DNA, 25 bp, Artificial
  probe
  misc_feature (1)..(25): SEQ ID NO: 7332; WAN024BSK; Start 9; Stop 33
cgcagttagtttaccagaagaaata

SEQ ID NO: 465204 - DNA, 25 bp, Artificial
  probe
  misc_feature (1)..(25): SEQ ID NO: 7332; WAN024BSK; Start 5; Stop 29
tattcgcagttagtttaccagaaga

SEQ ID NO: 465205 - DNA, 25 bp, Artificial
  probe
  misc_feature (1)..(25): SEQ ID NO: 7332; WAN024BSK; Start 6; Stop 30
attcgcagttagtttaccagaagaa

SEQ ID NO: 465206 - DNA, 25 bp, Artificial
  probe
  misc_feature (1)..(25): SEQ ID NO: 7332; WAN024BSK; Start 7; Stop 31
ttcgcagttagtttaccagaagaaa

SEQ ID NO: 465207 - DNA, 25 bp, Artificial
  probe
  misc_feature (1)..(25): SEQ ID NO: 7332; WAN024BSK; Start 3; Stop 27
gttattcgcagttagtttaccagaa

SEQ ID NO: 465208 - DNA, 25 bp, Artificial
  probe
  misc_feature (1)..(25): SEQ ID NO: 7332; WAN024BSK; Start 4; Stop 28
ttattcgcagttagtttaccagaag

SEQ ID NO: 465209 - DNA, 25 bp, Artificial
  probe
  misc_feature (1)..(25): SEQ ID NO: 7332; WAN024BSK; Start 70; Stop 94
gaagacaaacgagtcctaaatcaac

SEQ ID NO: 465210 - DNA, 25 bp, Artificial
  probe
  misc_feature (1)..(25): SEQ ID NO: 7332; WAN024BSK; Start 72; Stop 96
agacaaacgagtcctaaatcaacta

SEQ ID NO: 465211 - DNA, 25 bp, Artificial
  probe
  misc_feature (1)..(25): SEQ ID NO: 7332; WAN024BSK; Start 71; Stop 95
aagacaaacgagtcctaaatcaact

SEQ ID NO: 465212 - DNA, 25 bp, Artificial
  probe
  misc_feature (1)..(25): SEQ ID NO: 7332; WAN024BSK; Start 69; Stop 93
tgaagacaaacgagtcctaaatcaa

SEQ ID NO: 465213 - DNA, 25 bp, Artificial
  probe
  misc_feature (1)..(25): SEQ ID NO: 7332; WAN024BSK; Start 74; Stop 98
acaaacgagtcctaaatcaactatt

SEQ ID NO: 465214 - DNA, 25 bp, Artificial
  probe
  misc_feature (1)..(25): SEQ ID NO: 7332; WAN024BSK; Start 68; Stop 92
ctgaagacaaacgagtcctaaatca

SEQ ID NO: 465215 - DNA, 25 bp, Artificial
  probe
  misc_feature (1)..(25): SEQ ID NO: 7332; WAN024BSK; Start 10; Stop 34
gcagttagtttaccagaagaaatag

SEQ ID NO: 465216 - DNA, 25 bp, Artificial
  probe
  misc_feature (1)..(25): SEQ ID NO: 7332; WAN024BSK; Start 73; Stop 97
gacaaacgagtcctaaatcaactat

SEQ ID NO: 465217 - DNA, 25 bp, Artificial
  probe
  misc_feature (1)..(25): SEQ ID NO: 7332; WAN024BSK; Start 67; Stop 91
cctgaagacaaacgagtcctaaatc

SEQ ID NO: 465218 - DNA, 25 bp, Artificial
  probe
  misc_feature (1)..(25): SEQ ID NO: 7332; WAN024BSK; Start 66; Stop 90
tcctgaagacaaacgagtcctaaat

SEQ ID NO: 465219 - DNA, 25 bp, Artificial
  probe
  misc_feature (1)..(25): SEQ ID NO: 7332; WAN024BSK; Start 20; Stop 44
taccagaagaaatagttgtaggtcg

SEQ ID NO: 465220 - DNA, 25 bp, Artificial
  probe
  misc_feature (1)..(25): SEQ ID NO: 7332; WAN024BSK; Start 17; Stop 41
gtttaccagaagaaatagttgtagg

SEQ ID NO: 465221 - DNA, 25 bp, Artificial
  probe
  misc_feature (1)..(25): SEQ ID NO: 7332; WAN024BSK; Start 49; Stop 73
aatgacgaagcgatatctcctgaag

SEQ ID NO: 465222 - DNA, 25 bp, Artificial
  probe
  misc_feature (1)..(25): SEQ ID NO: 7332; WAN024BSK; Start 61; Stop 85
atatctcctgaagacaaacgagtcc

SEQ ID NO: 465223 - DNA, 25 bp, Artificial
  probe
  misc_feature (1)..(25): SEQ ID NO: 7332; WAN024BSK; Start 65; Stop 89
ctcctgaagacaaacgagtcctaaa

SEQ ID NO: 465224 - DNA, 25 bp, Artificial
  probe
  misc_feature (1)..(25): SEQ ID NO: 7332; WAN024BSK; Start 75; Stop 99
caaacgagtcctaaatcaactattt

SEQ ID NO: 465225 - DNA, 25 bp, Artificial
  probe
  misc_feature (1)..(25): SEQ ID NO: 7332; WAN024BSK; Start 19; Stop 43
ttaccagaagaaatagttgtaggtc

SEQ ID NO: 465226 - DNA, 25 bp, Artificial
  probe
  misc_feature (1)..(25): SEQ ID NO: 7332; WAN024BSK; Start 63; Stop 87
atctcctgaagacaaacgagtccta

SEQ ID NO: 465227 - DNA, 25 bp, Artificial
  probe
  misc_feature (1)..(25): SEQ ID NO: 7332; WAN024BSK; Start 62; Stop 86
tatctcctgaagacaaacgagtcct

SEQ ID NO: 465228 - DNA, 25 bp, Artificial
  probe
  misc_feature (1)..(25): SEQ ID NO: 7332; WAN024BSK; Start 55; Stop 79
gaagcgatatctcctgaagacaaac

SEQ ID NO: 465229 - DNA, 25 bp, Artificial
  probe
  misc_feature (1)..(25): SEQ ID NO: 7332; WAN024BSK; Start 50; Stop 74
atgacgaagcgatatctcctgaaga

SEQ ID NO: 465230 - DNA, 25 bp, Artificial
  probe
  misc_feature (1)..(25): SEQ ID NO: 7332; WAN024BSK; Start 11; Stop 35
cagttagtttaccagaagaaatagt

SEQ ID NO: 465231 - DNA, 25 bp, Artificial
  probe
  misc_feature (1)..(25): SEQ ID NO: 7332; WAN024BSK; Start 16; Stop 40
agtttaccagaagaaatagttgtag

SEQ ID NO: 465232 - DNA, 25 bp, Artificial
  probe
  misc_feature (1)..(25): SEQ ID NO: 7332; WAN024BSK; Start 60; Stop 84
gatatctcctgaagacaaacgagtc

SEQ ID NO: 465233 - DNA, 25 bp, Artificial
  probe
  misc_feature (1)..(25): SEQ ID NO: 7333; WAN024F6S; Start 74; Stop 98
cgccttggattatatatgtgactga

SEQ ID NO: 465234 - DNA, 25 bp, Artificial
  probe
  misc_feature (1)..(25): SEQ ID NO: 7333; WAN024F6S; Start 73; Stop 97
tcgccttggattatatatgtgactg

SEQ ID NO: 465235 - DNA, 25 bp, Artificial
  probe
  misc_feature (1)..(25): SEQ ID NO: 7333; WAN024F6S; Start 75; Stop 99
gccttggattatatatgtgactgac

SEQ ID NO: 465236 - DNA, 25 bp, Artificial
  probe
  misc_feature (1)..(25): SEQ ID NO: 7333; WAN024F6S; Start 72; Stop 96
gtcgccttggattatatatgtgact

SEQ ID NO: 465237 - DNA, 25 bp, Artificial
  probe
  misc_feature (1)..(25): SEQ ID NO: 7333; WAN024F6S; Start 80; Stop 104
ggattatatatgtgactgacttcgt

SEQ ID NO: 465238 - DNA, 25 bp, Artificial
  probe
  misc_feature (1)..(25): SEQ ID NO: 7333; WAN024F6S; Start 79; Stop 103
tggattatatatgtgactgacttcg

SEQ ID NO: 465239 - DNA, 25 bp, Artificial
  probe
  misc_feature (1)..(25): SEQ ID NO: 7333; WAN024F6S; Start 20; Stop 44
cgctctacctttctgtttatactct

SEQ ID NO: 465240 - DNA, 25 bp, Artificial
  probe
  misc_feature (1)..(25): SEQ ID NO: 7333; WAN024F6S; Start 76; Stop 100
ccttggattatatatgtgactgact

SEQ ID NO: 465241 - DNA, 25 bp, Artificial
  probe
  misc_feature (1)..(25): SEQ ID NO: 7333; WAN024F6S; Start 71; Stop 95
cgtcgccttggattatatatgtgac

SEQ ID NO: 465242 - DNA, 25 bp, Artificial
  probe
  misc_feature (1)..(25): SEQ ID NO: 7333; WAN024F6S; Start 69; Stop 93
aacgtcgccttggattatatatgtg

SEQ ID NO: 465243 - DNA, 25 bp, Artificial
  probe
  misc_feature (1)..(25): SEQ ID NO: 7333; WAN024F6S; Start 67; Stop 91
tcaacgtcgccttggattatatatg

SEQ ID NO: 465244 - DNA, 25 bp, Artificial
  probe
  misc_feature (1)..(25): SEQ ID NO: 7333; WAN024F6S; Start 66; Stop 90
gtcaacgtcgccttggattatatat

SEQ ID NO: 465245 - DNA, 25 bp, Artificial
  probe
  misc_feature (1)..(25): SEQ ID NO: 7333; WAN024F6S; Start 68; Stop 92
caacgtcgccttggattatatatgt

SEQ ID NO: 465246 - DNA, 25 bp, Artificial
  probe
  misc_feature (1)..(25): SEQ ID NO: 7333; WAN024F6S; Start 70; Stop 94
acgtcgccttggattatatatgtga

SEQ ID NO: 465247 - DNA, 25 bp, Artificial
  probe
  misc_feature (1)..(25): SEQ ID NO: 7333; WAN024F6S; Start 21; Stop 45
gctctacctttctgtttatactctt

SEQ ID NO: 465248 - DNA, 25 bp, Artificial
  probe
  misc_feature (1)..(25): SEQ ID NO: 7333; WAN024F6S; Start 23; Stop 47
tctacctttctgtttatactcttcg

SEQ ID NO: 465249 - DNA, 25 bp, Artificial
  probe
  misc_feature (1)..(25): SEQ ID NO: 7333; WAN024F6S; Start 81; Stop 105
gattatatatgtgactgacttcgtc

SEQ ID NO: 465250 - DNA, 25 bp, Artificial
  probe
  misc_feature (1)..(25): SEQ ID NO: 7333; WAN024F6S; Start 65; Stop 89
cgtcaacgtcgccttggattatata

SEQ ID NO: 465251 - DNA, 25 bp, Artificial
  probe
  misc_feature (1)..(25): SEQ ID NO: 7333; WAN024F6S; Start 78; Stop 102
ttggattatatatgtgactgacttc

SEQ ID NO: 465252 - DNA, 25 bp, Artificial
  probe
  misc_feature (1)..(25): SEQ ID NO: 7333; WAN024F6S; Start 77; Stop 101
cttggattatatatgtgactgactt

SEQ ID NO: 465253 - DNA, 25 bp, Artificial
  probe
  misc_feature (1)..(25): SEQ ID NO: 7333; WAN024F6S; Start 24; Stop 48
ctacctttctgtttatactcttcga

SEQ ID NO: 465254 - DNA, 25 bp, Artificial
  probe
  misc_feature (1)..(25): SEQ ID NO: 7333; WAN024F6S; Start 22; Stop 46
ctctacctttctgtttatactcttc

SEQ ID NO: 465255 - DNA, 25 bp, Artificial
  probe
  misc_feature (1)..(25): SEQ ID NO: 7333; WAN024F6S; Start 19; Stop 43
gcgctctacctttctgtttatactc

SEQ ID NO: 465256 - DNA, 25 bp, Artificial
  probe
  misc_feature (1)..(25): SEQ ID NO: 7333; WAN024F6S; Start 82; Stop 106
attatatatgtgactgacttcgtca

SEQ ID NO: 465257 - DNA, 25 bp, Artificial
  probe
  misc_feature (1)..(25): SEQ ID NO: 7333; WAN024F6S; Start 18; Stop 42
cgcgctctacctttctgtttatact

SEQ ID NO: 465258 - DNA, 25 bp, Artificial
  probe
  misc_feature (1)..(25): SEQ ID NO: 7333; WAN024F6S; Start 25; Stop 49
tacctttctgtttatactcttcgaa

SEQ ID NO: 465259 - DNA, 25 bp, Artificial
  probe
  misc_feature (1)..(25): SEQ ID NO: 7333; WAN024F6S; Start 17; Stop 41
acgcgctctacctttctgtttatac

SEQ ID NO: 465260 - DNA, 25 bp, Artificial
  probe
  misc_feature (1)..(25): SEQ ID NO: 7333; WAN024F6S; Start 16; Stop 40
cacgcgctctacctttctgtttata

SEQ ID NO: 465261 - DNA, 25 bp, Artificial
  probe
  misc_feature (1)..(25): SEQ ID NO: 7333; WAN024F6S; Start 64; Stop 88
acgtcaacgtcgccttggattatat

SEQ ID NO: 465262 - DNA, 25 bp, Artificial
  probe
  misc_feature (1)..(25): SEQ ID NO: 7333; WAN024F6S; Start 26; Stop 50
acctttctgtttatactcttcgaaa

SEQ ID NO: 465263 - DNA, 25 bp, Artificial
  probe
  misc_feature (1)..(25): SEQ ID NO: 7333; WAN024F6S; Start 7; Stop 31
aaattagaacacgcgctctaccttt

SEQ ID NO: 465264 - DNA, 25 bp, Artificial
  probe
  misc_feature (1)..(25): SEQ ID NO: 7333; WAN024F6S; Start 8; Stop 32
aattagaacacgcgctctacctttc

SEQ ID NO: 465265 - DNA, 25 bp, Artificial
  probe
  misc_feature (1)..(25): SEQ ID NO: 7333; WAN024F6S; Start 6; Stop 30
caaattagaacacgcgctctacctt

SEQ ID NO: 465266 - DNA, 25 bp, Artificial
  probe
  misc_feature (1)..(25): SEQ ID NO: 7334; WAN024FVN; Start 59; Stop 83
aacctagacacgaaagtacaatacg

SEQ ID NO: 465267 - DNA, 25 bp, Artificial
  probe
  misc_feature (1)..(25): SEQ ID NO: 7334; WAN024FVN; Start 56; Stop 80
ccaaacctagacacgaaagtacaat

SEQ ID NO: 465268 - DNA, 25 bp, Artificial
  probe
  misc_feature (1)..(25): SEQ ID NO: 7334; WAN024FVN; Start 57; Stop 81
caaacctagacacgaaagtacaata

SEQ ID NO: 465269 - DNA, 25 bp, Artificial
  probe
  misc_feature (1)..(25): SEQ ID NO: 7334; WAN024FVN; Start 58; Stop 82
aaacctagacacgaaagtacaatac

SEQ ID NO: 465270 - DNA, 25 bp, Artificial
  probe
  misc_feature (1)..(25): SEQ ID NO: 7334; WAN024FVN; Start 63; Stop 87
tagacacgaaagtacaatacgcttc

SEQ ID NO: 465271 - DNA, 25 bp, Artificial
  probe
  misc_feature (1)..(25): SEQ ID NO: 7334; WAN024FVN; Start 62; Stop 86
ctagacacgaaagtacaatacgctt

SEQ ID NO: 465272 - DNA, 25 bp, Artificial
  probe
  misc_feature (1)..(25): SEQ ID NO: 7334; WAN024FVN; Start 65; Stop 89
gacacgaaagtacaatacgcttctt

SEQ ID NO: 465273 - DNA, 25 bp, Artificial
  probe
  misc_feature (1)..(25): SEQ ID NO: 7334; WAN024FVN; Start 61; Stop 85
cctagacacgaaagtacaatacgct

SEQ ID NO: 465274 - DNA, 25 bp, Artificial
  probe
  misc_feature (1)..(25): SEQ ID NO: 7334; WAN024FVN; Start 64; Stop 88
agacacgaaagtacaatacgcttct

SEQ ID NO: 465275 - DNA, 25 bp, Artificial
  probe
  misc_feature (1)..(25): SEQ ID NO: 7334; WAN024FVN; Start 60; Stop 84
acctagacacgaaagtacaatacgc

SEQ ID NO: 465276 - DNA, 25 bp, Artificial
  probe
  misc_feature (1)..(25): SEQ ID NO: 7334; WAN024FVN; Start 55; Stop 79
cccaaacctagacacgaaagtacaa

SEQ ID NO: 465277 - DNA, 25 bp, Artificial
  probe
  misc_feature (1)..(25): SEQ ID NO: 7334; WAN024FVN; Start 66; Stop 90
acacgaaagtacaatacgcttcttt

SEQ ID NO: 465278 - DNA, 25 bp, Artificial
  probe
  misc_feature (1)..(25): SEQ ID NO: 7334; WAN024FVN; Start 4; Stop 28
ttcacctccgtaattattttgcttg

SEQ ID NO: 465279 - DNA, 25 bp, Artificial
  probe
  misc_feature (1)..(25): SEQ ID NO: 7334; WAN024FVN; Start 3; Stop 27
gttcacctccgtaattattttgctt

SEQ ID NO: 465280 - DNA, 25 bp, Artificial
  probe
  misc_feature (1)..(25): SEQ ID NO: 7334; WAN024FVN; Start 2; Stop 26
tgttcacctccgtaattattttgct

SEQ ID NO: 465281 - DNA, 25 bp, Artificial
  probe
  misc_feature (1)..(25): SEQ ID NO: 7334; WAN024FVN; Start 1; Stop 25
gtgttcacctccgtaattattttgc

SEQ ID NO: 465282 - DNA, 25 bp, Artificial
  probe
  misc_feature (1)..(25): SEQ ID NO: 7334; WAN024FVN; Start 90; Stop 114
tttacatgatacgtcttgtcctcgg

SEQ ID NO: 465283 - DNA, 25 bp, Artificial
  probe
  misc_feature (1)..(25): SEQ ID NO: 7334; WAN024FVN; Start 5; Stop 29
tcacctccgtaattattttgcttgg

SEQ ID NO: 465284 - DNA, 25 bp, Artificial
  probe
  misc_feature (1)..(25): SEQ ID NO: 7334; WAN024FVN; Start 11; Stop 35
ccgtaattattttgcttggggaatt

SEQ ID NO: 465285 - DNA, 25 bp, Artificial
  probe
  misc_feature (1)..(25): SEQ ID NO: 7334; WAN024FVN; Start 12; Stop 36
cgtaattattttgcttggggaattt

SEQ ID NO: 465286 - DNA, 25 bp, Artificial
  probe
  misc_feature (1)..(25): SEQ ID NO: 7334; WAN024FVN; Start 10; Stop 34
tccgtaattattttgcttggggaat

SEQ ID NO: 465287 - DNA, 25 bp, Artificial
  probe
  misc_feature (1)..(25): SEQ ID NO: 7334; WAN024FVN; Start 67; Stop 91
cacgaaagtacaatacgcttctttt

SEQ ID NO: 465288 - DNA, 25 bp, Artificial
  probe
  misc_feature (1)..(25): SEQ ID NO: 7334; WAN024FVN; Start 6; Stop 30
cacctccgtaattattttgcttggg

SEQ ID NO: 465289 - DNA, 25 bp, Artificial
  probe
  misc_feature (1)..(25): SEQ ID NO: 7334; WAN024FVN; Start 91; Stop 115
ttacatgatacgtcttgtcctcggc

SEQ ID NO: 465290 - DNA, 25 bp, Artificial
  probe
  misc_feature (1)..(25): SEQ ID NO: 7334; WAN024FVN; Start 9; Stop 33
ctccgtaattattttgcttggggaa

SEQ ID NO: 465291 - DNA, 25 bp, Artificial
  probe
  misc_feature (1)..(25): SEQ ID NO: 7334; WAN024FVN; Start 89; Stop 113
ttttacatgatacgtcttgtcctcg

SEQ ID NO: 465292 - DNA, 25 bp, Artificial
  probe
  misc_feature (1)..(25): SEQ ID NO: 7334; WAN024FVN; Start 54; Stop 78
gcccaaacctagacacgaaagtaca

SEQ ID NO: 465293 - DNA, 25 bp, Artificial
  probe
  misc_feature (1)..(25): SEQ ID NO: 7334; WAN024FVN; Start 112; Stop 136
cggcaggatatttatgagtcgagct

SEQ ID NO: 465294 - DNA, 25 bp, Artificial
  probe
  misc_feature (1)..(25): SEQ ID NO: 7334; WAN024FVN; Start 7; Stop 31
acctccgtaattattttgcttgggg

SEQ ID NO: 465295 - DNA, 25 bp, Artificial
  probe
  misc_feature (1)..(25): SEQ ID NO: 7334; WAN024FVN; Start 105; Stop 129
ttgtcctcggcaggatatttatgag

SEQ ID NO: 465296 - DNA, 25 bp, Artificial
  probe
  misc_feature (1)..(25): SEQ ID NO: 7334; WAN024FVN; Start 104; Stop 128
cttgtcctcggcaggatatttatga

SEQ ID NO: 465297 - DNA, 25 bp, Artificial
  probe
  misc_feature (1)..(25): SEQ ID NO: 7334; WAN024FVN; Start 103; Stop 127
tcttgtcctcggcaggatatttatg

SEQ ID NO: 465298 - DNA, 25 bp, Artificial
  probe
  misc_feature (1)..(25): SEQ ID NO: 7334; WAN024FVN; Start 102; Stop 126
gtcttgtcctcggcaggatatttat

SEQ ID NO: 465299 - DNA, 25 bp, Artificial
  probe
  misc_feature (1)..(25): SEQ ID NO: 7335; WAN024CQU; Start 117; Stop 141
cttaatccaaccgccaatacaattc

SEQ ID NO: 465300 - DNA, 25 bp, Artificial
  probe
  misc_feature (1)..(25): SEQ ID NO: 7335; WAN024CQU; Start 118; Stop 142
ttaatccaaccgccaatacaattcc

SEQ ID NO: 465301 - DNA, 25 bp, Artificial
  probe
  misc_feature (1)..(25): SEQ ID NO: 7335; WAN024CQU; Start 116; Stop 140
gcttaatccaaccgccaatacaatt

SEQ ID NO: 465302 - DNA, 25 bp, Artificial
  probe
  misc_feature (1)..(25): SEQ ID NO: 7335; WAN024CQU; Start 115; Stop 139
cgcttaatccaaccgccaatacaat

SEQ ID NO: 465303 - DNA, 25 bp, Artificial
  probe
  misc_feature (1)..(25): SEQ ID NO: 7335; WAN024CQU; Start 119; Stop 143
taatccaaccgccaatacaattccc

SEQ ID NO: 465304 - DNA, 25 bp, Artificial
  probe
  misc_feature (1)..(25): SEQ ID NO: 7335; WAN024CQU; Start 111; Stop 135
ataccgcttaatccaaccgccaata

SEQ ID NO: 465305 - DNA, 25 bp, Artificial
  probe
  misc_feature (1)..(25): SEQ ID NO: 7335; WAN024CQU; Start 153; Stop 177
aagaaagctcctccataggttgaaa

SEQ ID NO: 465306 - DNA, 25 bp, Artificial
  probe
  misc_feature (1)..(25): SEQ ID NO: 7335; WAN024CQU; Start 20; Stop 44
caatatcaaagctgaggcaaacttt

SEQ ID NO: 465307 - DNA, 25 bp, Artificial
  probe
  misc_feature (1)..(25): SEQ ID NO: 7335; WAN024CQU; Start 43; Stop 67
tttcaggctgttctttcagtaaagc

SEQ ID NO: 465308 - DNA, 25 bp, Artificial
  probe
  misc_feature (1)..(25): SEQ ID NO: 7335; WAN024CQU; Start 83; Stop 107
agccttaccaactccataagcagac

SEQ ID NO: 465309 - DNA, 25 bp, Artificial
  probe
  misc_feature (1)..(25): SEQ ID NO: 7335; WAN024CQU; Start 82; Stop 106
cagccttaccaactccataagcaga

SEQ ID NO: 465310 - DNA, 25 bp, Artificial
  probe
  misc_feature (1)..(25): SEQ ID NO: 7335; WAN024CQU; Start 19; Stop 43
gcaatatcaaagctgaggcaaactt

SEQ ID NO: 465311 - DNA, 25 bp, Artificial
  probe
  misc_feature (1)..(25): SEQ ID NO: 7335; WAN024CQU; Start 152; Stop 176
gaagaaagctcctccataggttgaa

SEQ ID NO: 465312 - DNA, 25 bp, Artificial
  probe
  misc_feature (1)..(25): SEQ ID NO: 7335; WAN024CQU; Start 41; Stop 65
cttttcaggctgttctttcagtaaa

SEQ ID NO: 465313 - DNA, 25 bp, Artificial
  probe
  misc_feature (1)..(25): SEQ ID NO: 7335; WAN024CQU; Start 40; Stop 64
acttttcaggctgttctttcagtaa

SEQ ID NO: 465314 - DNA, 25 bp, Artificial
  probe
  misc_feature (1)..(25): SEQ ID NO: 7335; WAN024CQU; Start 39; Stop 63
aacttttcaggctgttctttcagta

SEQ ID NO: 465315 - DNA, 25 bp, Artificial
  probe
  misc_feature (1)..(25): SEQ ID NO: 7335; WAN024CQU; Start 37; Stop 61
caaacttttcaggctgttctttcag

SEQ ID NO: 465316 - DNA, 25 bp, Artificial
  probe
  misc_feature (1)..(25): SEQ ID NO: 7335; WAN024CQU; Start 38; Stop 62
aaacttttcaggctgttctttcagt

SEQ ID NO: 465317 - DNA, 25 bp, Artificial
  probe
  misc_feature (1)..(25): SEQ ID NO: 7335; WAN024CQU; Start 131; Stop 155
caatacaattcccaatgcagcgaag

SEQ ID NO: 465318 - DNA, 25 bp, Artificial
  probe
  misc_feature (1)..(25): SEQ ID NO: 7335; WAN024CQU; Start 133; Stop 157
atacaattcccaatgcagcgaagaa

SEQ ID NO: 465319 - DNA, 25 bp, Artificial
  probe
  misc_feature (1)..(25): SEQ ID NO: 7335; WAN024CQU; Start 132; Stop 156
aatacaattcccaatgcagcgaaga

SEQ ID NO: 465320 - DNA, 25 bp, Artificial
  probe
  misc_feature (1)..(25): SEQ ID NO: 7335; WAN024CQU; Start 134; Stop 158
tacaattcccaatgcagcgaagaaa

SEQ ID NO: 465321 - DNA, 25 bp, Artificial
  probe
  misc_feature (1)..(25): SEQ ID NO: 7335; WAN024CQU; Start 42; Stop 66
ttttcaggctgttctttcagtaaag

SEQ ID NO: 465322 - DNA, 25 bp, Artificial
  probe
  misc_feature (1)..(25): SEQ ID NO: 7335; WAN024CQU; Start 44; Stop 68
ttcaggctgttctttcagtaaagct

SEQ ID NO: 465323 - DNA, 25 bp, Artificial
  probe
  misc_feature (1)..(25): SEQ ID NO: 7335; WAN024CQU; Start 36; Stop 60
gcaaacttttcaggctgttctttca

SEQ ID NO: 465324 - DNA, 25 bp, Artificial
  probe
  misc_feature (1)..(25): SEQ ID NO: 7335; WAN024CQU; Start 123; Stop 147
ccaaccgccaatacaattcccaatg

SEQ ID NO: 465325 - DNA, 25 bp, Artificial
  probe
  misc_feature (1)..(25): SEQ ID NO: 7335; WAN024CQU; Start 154; Stop 178
agaaagctcctccataggttgaaaa

SEQ ID NO: 465326 - DNA, 25 bp, Artificial
  probe
  misc_feature (1)..(25): SEQ ID NO: 7335; WAN024CQU; Start 22; Stop 46
atatcaaagctgaggcaaacttttc

SEQ ID NO: 465327 - DNA, 25 bp, Artificial
  probe
  misc_feature (1)..(25): SEQ ID NO: 7335; WAN024CQU; Start 21; Stop 45
aatatcaaagctgaggcaaactttt

SEQ ID NO: 465328 - DNA, 25 bp, Artificial
  probe
  misc_feature (1)..(25): SEQ ID NO: 7335; WAN024CQU; Start 45; Stop 69
tcaggctgttctttcagtaaagctg

SEQ ID NO: 465329 - DNA, 25 bp, Artificial
  probe
  misc_feature (1)..(25): SEQ ID NO: 7335; WAN024CQU; Start 35; Stop 59
ggcaaacttttcaggctgttctttc

SEQ ID NO: 465330 - DNA, 25 bp, Artificial
  probe
  misc_feature (1)..(25): SEQ ID NO: 7335; WAN024CQU; Start 85; Stop 109
ccttaccaactccataagcagaccc

SEQ ID NO: 465331 - DNA, 25 bp, Artificial
  probe
  misc_feature (1)..(25): SEQ ID NO: 7335; WAN024CQU; Start 122; Stop 146
tccaaccgccaatacaattcccaat

SEQ ID NO: 465332 - DNA, 25 bp, Artificial
  probe
  misc_feature (1)..(25): SEQ ID NO: 7336; WAN024F5F; Start 74; Stop 98
gtcttaacaaggatggtgataggtt

SEQ ID NO: 465333 - DNA, 25 bp, Artificial
  probe
  misc_feature (1)..(25): SEQ ID NO: 7336; WAN024F5F; Start 72; Stop 96
tagtcttaacaaggatggtgatagg

SEQ ID NO: 465334 - DNA, 25 bp, Artificial
  probe
  misc_feature (1)..(25): SEQ ID NO: 7336; WAN024F5F; Start 73; Stop 97
agtcttaacaaggatggtgataggt

SEQ ID NO: 465335 - DNA, 25 bp, Artificial
  probe
  misc_feature (1)..(25): SEQ ID NO: 7336; WAN024F5F; Start 70; Stop 94
gctagtcttaacaaggatggtgata

SEQ ID NO: 465336 - DNA, 25 bp, Artificial
  probe
  misc_feature (1)..(25): SEQ ID NO: 7336; WAN024F5F; Start 65; Stop 89
ctatcgctagtcttaacaaggatgg

SEQ ID NO: 465337 - DNA, 25 bp, Artificial
  probe
  misc_feature (1)..(25): SEQ ID NO: 7336; WAN024F5F; Start 66; Stop 90
tatcgctagtcttaacaaggatggt

SEQ ID NO: 465338 - DNA, 25 bp, Artificial
  probe
  misc_feature (1)..(25): SEQ ID NO: 7336; WAN024F5F; Start 71; Stop 95
ctagtcttaacaaggatggtgatag

SEQ ID NO: 465339 - DNA, 25 bp, Artificial
  probe
  misc_feature (1)..(25): SEQ ID NO: 7336; WAN024F5F; Start 64; Stop 88
actatcgctagtcttaacaaggatg

SEQ ID NO: 465340 - DNA, 25 bp, Artificial
  probe
  misc_feature (1)..(25): SEQ ID NO: 7336; WAN024F5F; Start 63; Stop 87
cactatcgctagtcttaacaaggat

SEQ ID NO: 465341 - DNA, 25 bp, Artificial
  probe
  misc_feature (1)..(25): SEQ ID NO: 7336; WAN024F5F; Start 60; Stop 84
agtcactatcgctagtcttaacaag

SEQ ID NO: 465342 - DNA, 25 bp, Artificial
  probe
  misc_feature (1)..(25): SEQ ID NO: 7336; WAN024F5F; Start 58; Stop 82
caagtcactatcgctagtcttaaca

SEQ ID NO: 465343 - DNA, 25 bp, Artificial
  probe
  misc_feature (1)..(25): SEQ ID NO: 7336; WAN024F5F; Start 59; Stop 83
aagtcactatcgctagtcttaacaa

SEQ ID NO: 465344 - DNA, 25 bp, Artificial
  probe
  misc_feature (1)..(25): SEQ ID NO: 7336; WAN024F5F; Start 62; Stop 86
tcactatcgctagtcttaacaagga

SEQ ID NO: 465345 - DNA, 25 bp, Artificial
  probe
  misc_feature (1)..(25): SEQ ID NO: 7336; WAN024F5F; Start 61; Stop 85
gtcactatcgctagtcttaacaagg

SEQ ID NO: 465346 - DNA, 25 bp, Artificial
  probe
  misc_feature (1)..(25): SEQ ID NO: 7336; WAN024F5F; Start 57; Stop 81
ccaagtcactatcgctagtcttaac

SEQ ID NO: 465347 - DNA, 25 bp, Artificial
  probe
  misc_feature (1)..(25): SEQ ID NO: 7336; WAN024F5F; Start 56; Stop 80
tccaagtcactatcgctagtcttaa

SEQ ID NO: 465348 - DNA, 25 bp, Artificial
  probe
  misc_feature (1)..(25): SEQ ID NO: 7336; WAN024F5F; Start 55; Stop 79
ttccaagtcactatcgctagtctta

SEQ ID NO: 465349 - DNA, 25 bp, Artificial
  probe
  misc_feature (1)..(25): SEQ ID NO: 7336; WAN024F5F; Start 8; Stop 32
ggatttgtaaagcgtttgatgtagt

SEQ ID NO: 465350 - DNA, 25 bp, Artificial
  probe
  misc_feature (1)..(25): SEQ ID NO: 7336; WAN024F5F; Start 12; Stop 36
ttgtaaagcgtttgatgtagttgac

SEQ ID NO: 465351 - DNA, 25 bp, Artificial
  probe
  misc_feature (1)..(25): SEQ ID NO: 7336; WAN024F5F; Start 11; Stop 35
tttgtaaagcgtttgatgtagttga

SEQ ID NO: 465352 - DNA, 25 bp, Artificial
  probe
  misc_feature (1)..(25): SEQ ID NO: 7336; WAN024F5F; Start 69; Stop 93
cgctagtcttaacaaggatggtgat

SEQ ID NO: 465353 - DNA, 25 bp, Artificial
  probe
  misc_feature (1)..(25): SEQ ID NO: 7336; WAN024F5F; Start 67; Stop 91
atcgctagtcttaacaaggatggtg

SEQ ID NO: 465354 - DNA, 25 bp, Artificial
  probe
  misc_feature (1)..(25): SEQ ID NO: 7336; WAN024F5F; Start 92; Stop 116
ataggtttgcttggtgctacattta

SEQ ID NO: 465355 - DNA, 25 bp, Artificial
  probe
  misc_feature (1)..(25): SEQ ID NO: 7336; WAN024F5F; Start 96; Stop 120
gtttgcttggtgctacatttacttc

SEQ ID NO: 465356 - DNA, 25 bp, Artificial
  probe
  misc_feature (1)..(25): SEQ ID NO: 7336; WAN024F5F; Start 10; Stop 34
atttgtaaagcgtttgatgtagttg

SEQ ID NO: 465357 - DNA, 25 bp, Artificial
  probe
  misc_feature (1)..(25): SEQ ID NO: 7336; WAN024F5F; Start 75; Stop 99
tcttaacaaggatggtgataggttt

SEQ ID NO: 465358 - DNA, 25 bp, Artificial
  probe
  misc_feature (1)..(25): SEQ ID NO: 7336; WAN024F5F; Start 9; Stop 33
gatttgtaaagcgtttgatgtagtt

SEQ ID NO: 465359 - DNA, 25 bp, Artificial
  probe
  misc_feature (1)..(25): SEQ ID NO: 7336; WAN024F5F; Start 76; Stop 100
cttaacaaggatggtgataggtttg

SEQ ID NO: 465360 - DNA, 25 bp, Artificial
  probe
  misc_feature (1)..(25): SEQ ID NO: 7336; WAN024F5F; Start 259; Stop 283
ttcttctgtcacgaacggcattatt

SEQ ID NO: 465361 - DNA, 25 bp, Artificial
  probe
  misc_feature (1)..(25): SEQ ID NO: 7336; WAN024F5F; Start 93; Stop 117
taggtttgcttggtgctacatttac

SEQ ID NO: 465362 - DNA, 25 bp, Artificial
  probe
  misc_feature (1)..(25): SEQ ID NO: 7336; WAN024F5F; Start 54; Stop 78
cttccaagtcactatcgctagtctt

SEQ ID NO: 465363 - DNA, 25 bp, Artificial
  probe
  misc_feature (1)..(25): SEQ ID NO: 7336; WAN024F5F; Start 91; Stop 115
gataggtttgcttggtgctacattt

SEQ ID NO: 465364 - DNA, 25 bp, Artificial
  probe
  misc_feature (1)..(25): SEQ ID NO: 7336; WAN024F5F; Start 77; Stop 101
ttaacaaggatggtgataggtttgc

SEQ ID NO: 465365 - DNA, 25 bp, Artificial
  probe
  misc_feature (1)..(25): SEQ ID NO: 7337; WAN024DYN; Start 48; Stop 72
tattatctgtgaccacttgttgacc

SEQ ID NO: 465366 - DNA, 25 bp, Artificial
  probe
  misc_feature (1)..(25): SEQ ID NO: 7337; WAN024DYN; Start 47; Stop 71
ttattatctgtgaccacttgttgac

SEQ ID NO: 465367 - DNA, 25 bp, Artificial
  probe
  misc_feature (1)..(25): SEQ ID NO: 7337; WAN024DYN; Start 49; Stop 73
attatctgtgaccacttgttgacct

SEQ ID NO: 465368 - DNA, 25 bp, Artificial
  probe
  misc_feature (1)..(25): SEQ ID NO: 7337; WAN024DYN; Start 50; Stop 74
ttatctgtgaccacttgttgacctt

SEQ ID NO: 465369 - DNA, 25 bp, Artificial
  probe
  misc_feature (1)..(25): SEQ ID NO: 7337; WAN024DYN; Start 51; Stop 75
tatctgtgaccacttgttgaccttg

SEQ ID NO: 465370 - DNA, 25 bp, Artificial
  probe
  misc_feature (1)..(25): SEQ ID NO: 7337; WAN024DYN; Start 66; Stop 90
gttgaccttgtttggagtggataaa

SEQ ID NO: 465371 - DNA, 25 bp, Artificial
  probe
  misc_feature (1)..(25): SEQ ID NO: 7337; WAN024DYN; Start 67; Stop 91
ttgaccttgtttggagtggataaag

SEQ ID NO: 465372 - DNA, 25 bp, Artificial
  probe
  misc_feature (1)..(25): SEQ ID NO: 7337; WAN024DYN; Start 46; Stop 70
tttattatctgtgaccacttgttga

SEQ ID NO: 465373 - DNA, 25 bp, Artificial
  probe
  misc_feature (1)..(25): SEQ ID NO: 7337; WAN024DYN; Start 1; Stop 25
gtgttggcttgtatattccgtggtt

SEQ ID NO: 465374 - DNA, 25 bp, Artificial
  probe
  misc_feature (1)..(25): SEQ ID NO: 7337; WAN024DYN; Start 65; Stop 89
tgttgaccttgtttggagtggataa

SEQ ID NO: 465375 - DNA, 25 bp, Artificial
  probe
  misc_feature (1)..(25): SEQ ID NO: 7337; WAN024DYN; Start 64; Stop 88
ttgttgaccttgtttggagtggata

SEQ ID NO: 465376 - DNA, 25 bp, Artificial
  probe
  misc_feature (1)..(25): SEQ ID NO: 7337; WAN024DYN; Start 74; Stop 98
tgtttggagtggataaagctgataa

SEQ ID NO: 465377 - DNA, 25 bp, Artificial
  probe
  misc_feature (1)..(25): SEQ ID NO: 7337; WAN024DYN; Start 73; Stop 97
ttgtttggagtggataaagctgata

SEQ ID NO: 465378 - DNA, 25 bp, Artificial
  probe
  misc_feature (1)..(25): SEQ ID NO: 7337; WAN024DYN; Start 3; Stop 27
gttggcttgtatattccgtggtttc

SEQ ID NO: 465379 - DNA, 25 bp, Artificial
  probe
  misc_feature (1)..(25): SEQ ID NO: 7337; WAN024DYN; Start 75; Stop 99
gtttggagtggataaagctgataaa

SEQ ID NO: 465380 - DNA, 25 bp, Artificial
  probe
  misc_feature (1)..(25): SEQ ID NO: 7337; WAN024DYN; Start 45; Stop 69
atttattatctgtgaccacttgttg

SEQ ID NO: 465381 - DNA, 25 bp, Artificial
  probe
  misc_feature (1)..(25): SEQ ID NO: 7337; WAN024DYN; Start 72; Stop 96
cttgtttggagtggataaagctgat

SEQ ID NO: 465382 - DNA, 25 bp, Artificial
  probe
  misc_feature (1)..(25): SEQ ID NO: 7337; WAN024DYN; Start 2; Stop 26
tgttggcttgtatattccgtggttt

SEQ ID NO: 465383 - DNA, 25 bp, Artificial
  probe
  misc_feature (1)..(25): SEQ ID NO: 7337; WAN024DYN; Start 44; Stop 68
aatttattatctgtgaccacttgtt

SEQ ID NO: 465384 - DNA, 25 bp, Artificial
  probe
  misc_feature (1)..(25): SEQ ID NO: 7337; WAN024DYN; Start 52; Stop 76
atctgtgaccacttgttgaccttgt

SEQ ID NO: 465385 - DNA, 25 bp, Artificial
  probe
  misc_feature (1)..(25): SEQ ID NO: 7337; WAN024DYN; Start 63; Stop 87
cttgttgaccttgtttggagtggat

SEQ ID NO: 465386 - DNA, 25 bp, Artificial
  probe
  misc_feature (1)..(25): SEQ ID NO: 7337; WAN024DYN; Start 68; Stop 92
tgaccttgtttggagtggataaagc

SEQ ID NO: 465387 - DNA, 25 bp, Artificial
  probe
  misc_feature (1)..(25): SEQ ID NO: 7337; WAN024DYN; Start 53; Stop 77
tctgtgaccacttgttgaccttgtt

SEQ ID NO: 465388 - DNA, 25 bp, Artificial
  probe
  misc_feature (1)..(25): SEQ ID NO: 7337; WAN024DYN; Start 4; Stop 28
ttggcttgtatattccgtggtttcg

SEQ ID NO: 465389 - DNA, 25 bp, Artificial
  probe
  misc_feature (1)..(25): SEQ ID NO: 7337; WAN024DYN; Start 91; Stop 115
gctgataaaatcttgaccctaacta

SEQ ID NO: 465390 - DNA, 25 bp, Artificial
  probe
  misc_feature (1)..(25): SEQ ID NO: 7337; WAN024DYN; Start 54; Stop 78
ctgtgaccacttgttgaccttgttt

SEQ ID NO: 465391 - DNA, 25 bp, Artificial
  probe
  misc_feature (1)..(25): SEQ ID NO: 7337; WAN024DYN; Start 71; Stop 95
ccttgtttggagtggataaagctga

SEQ ID NO: 465392 - DNA, 25 bp, Artificial
  probe
  misc_feature (1)..(25): SEQ ID NO: 7337; WAN024DYN; Start 69; Stop 93
gaccttgtttggagtggataaagct

SEQ ID NO: 465393 - DNA, 25 bp, Artificial
  probe
  misc_feature (1)..(25): SEQ ID NO: 7337; WAN024DYN; Start 43; Stop 67
aaatttattatctgtgaccacttgt

SEQ ID NO: 465394 - DNA, 25 bp, Artificial
  probe
  misc_feature (1)..(25): SEQ ID NO: 7337; WAN024DYN; Start 70; Stop 94
accttgtttggagtggataaagctg

SEQ ID NO: 465395 - DNA, 25 bp, Artificial
  probe
  misc_feature (1)..(25): SEQ ID NO: 7337; WAN024DYN; Start 20; Stop 44
gtggtttcggttttagcttcaataa

SEQ ID NO: 465396 - DNA, 25 bp, Artificial
  probe
  misc_feature (1)..(25): SEQ ID NO: 7337; WAN024DYN; Start 55; Stop 79
tgtgaccacttgttgaccttgtttg

SEQ ID NO: 465397 - DNA, 25 bp, Artificial
  probe
  misc_feature (1)..(25): SEQ ID NO: 7337; WAN024DYN; Start 90; Stop 114
agctgataaaatcttgaccctaact

SEQ ID NO: 465398 - DNA, 25 bp, Artificial
  probe
  misc_feature (1)..(25): SEQ ID NO: 7338; WAN024CUU; Start 26; Stop 50
tctttcagatacctcaatatgtcgt

SEQ ID NO: 465399 - DNA, 25 bp, Artificial
  probe
  misc_feature (1)..(25): SEQ ID NO: 7338; WAN024CUU; Start 27; Stop 51
ctttcagatacctcaatatgtcgtt

SEQ ID NO: 465400 - DNA, 25 bp, Artificial
  probe
  misc_feature (1)..(25): SEQ ID NO: 7338; WAN024CUU; Start 25; Stop 49
ctctttcagatacctcaatatgtcg

SEQ ID NO: 465401 - DNA, 25 bp, Artificial
  probe
  misc_feature (1)..(25): SEQ ID NO: 7338; WAN024CUU; Start 126; Stop 150
acaaacagaatctcttgatgaaagt

SEQ ID NO: 465402 - DNA, 25 bp, Artificial
  probe
  misc_feature (1)..(25): SEQ ID NO: 7338; WAN024CUU; Start 28; Stop 52
tttcagatacctcaatatgtcgttt

SEQ ID NO: 465403 - DNA, 25 bp, Artificial
  probe
  misc_feature (1)..(25): SEQ ID NO: 7338; WAN024CUU; Start 124; Stop 148
caacaaacagaatctcttgatgaaa

SEQ ID NO: 465404 - DNA, 25 bp, Artificial
  probe
  misc_feature (1)..(25): SEQ ID NO: 7338; WAN024CUU; Start 99; Stop 123
cactcttcaagacttgtttccaatt

SEQ ID NO: 465405 - DNA, 25 bp, Artificial
  probe
  misc_feature (1)..(25): SEQ ID NO: 7338; WAN024CUU; Start 101; Stop 125
ctcttcaagacttgtttccaattca

SEQ ID NO: 465406 - DNA, 25 bp, Artificial
  probe
  misc_feature (1)..(25): SEQ ID NO: 7338; WAN024CUU; Start 100; Stop 124
actcttcaagacttgtttccaattc

SEQ ID NO: 465407 - DNA, 25 bp, Artificial
  probe
  misc_feature (1)..(25): SEQ ID NO: 7338; WAN024CUU; Start 103; Stop 127
cttcaagacttgtttccaattcaac

SEQ ID NO: 465408 - DNA, 25 bp, Artificial
  probe
  misc_feature (1)..(25): SEQ ID NO: 7338; WAN024CUU; Start 102; Stop 126
tcttcaagacttgtttccaattcaa

SEQ ID NO: 465409 - DNA, 25 bp, Artificial
  probe
  misc_feature (1)..(25): SEQ ID NO: 7338; WAN024CUU; Start 223; Stop 247
aaattactgatcgctgatttcttgc

SEQ ID NO: 465410 - DNA, 25 bp, Artificial
  probe
  misc_feature (1)..(25): SEQ ID NO: 7338; WAN024CUU; Start 127; Stop 151
caaacagaatctcttgatgaaagtt

SEQ ID NO: 465411 - DNA, 25 bp, Artificial
  probe
  misc_feature (1)..(25): SEQ ID NO: 7338; WAN024CUU; Start 125; Stop 149
aacaaacagaatctcttgatgaaag

SEQ ID NO: 465412 - DNA, 25 bp, Artificial
  probe
  misc_feature (1)..(25): SEQ ID NO: 7338; WAN024CUU; Start 132; Stop 156
agaatctcttgatgaaagttatcca

SEQ ID NO: 465413 - DNA, 25 bp, Artificial
  probe
  misc_feature (1)..(25): SEQ ID NO: 7338; WAN024CUU; Start 24; Stop 48
tctctttcagatacctcaatatgtc

SEQ ID NO: 465414 - DNA, 25 bp, Artificial
  probe
  misc_feature (1)..(25): SEQ ID NO: 7338; WAN024CUU; Start 131; Stop 155
cagaatctcttgatgaaagttatcc

SEQ ID NO: 465415 - DNA, 25 bp, Artificial
  probe
  misc_feature (1)..(25): SEQ ID NO: 7338; WAN024CUU; Start 118; Stop 142
ccaattcaacaaacagaatctcttg

SEQ ID NO: 465416 - DNA, 25 bp, Artificial
  probe
  misc_feature (1)..(25): SEQ ID NO: 7338; WAN024CUU; Start 117; Stop 141
tccaattcaacaaacagaatctctt

SEQ ID NO: 465417 - DNA, 25 bp, Artificial
  probe
  misc_feature (1)..(25): SEQ ID NO: 7338; WAN024CUU; Start 116; Stop 140
ttccaattcaacaaacagaatctct

SEQ ID NO: 465418 - DNA, 25 bp, Artificial
  probe
  misc_feature (1)..(25): SEQ ID NO: 7338; WAN024CUU; Start 98; Stop 122
gcactcttcaagacttgtttccaat

SEQ ID NO: 465419 - DNA, 25 bp, Artificial
  probe
  misc_feature (1)..(25): SEQ ID NO: 7338; WAN024CUU; Start 92; Stop 116
acgtatgcactcttcaagacttgtt

SEQ ID NO: 465420 - DNA, 25 bp, Artificial
  probe
  misc_feature (1)..(25): SEQ ID NO: 7338; WAN024CUU; Start 152; Stop 176
atccaataaatcctgaatttgcttt

SEQ ID NO: 465421 - DNA, 25 bp, Artificial
  probe
  misc_feature (1)..(25): SEQ ID NO: 7338; WAN024CUU; Start 115; Stop 139
tttccaattcaacaaacagaatctc

SEQ ID NO: 465422 - DNA, 25 bp, Artificial
  probe
  misc_feature (1)..(25): SEQ ID NO: 7338; WAN024CUU; Start 94; Stop 118
gtatgcactcttcaagacttgtttc

SEQ ID NO: 465423 - DNA, 25 bp, Artificial
  probe
  misc_feature (1)..(25): SEQ ID NO: 7338; WAN024CUU; Start 23; Stop 47
ttctctttcagatacctcaatatgt

SEQ ID NO: 465424 - DNA, 25 bp, Artificial
  probe
  misc_feature (1)..(25): SEQ ID NO: 7338; WAN024CUU; Start 224; Stop 248
aattactgatcgctgatttcttgca

SEQ ID NO: 465425 - DNA, 25 bp, Artificial
  probe
  misc_feature (1)..(25): SEQ ID NO: 7338; WAN024CUU; Start 133; Stop 157
gaatctcttgatgaaagttatccaa

SEQ ID NO: 465426 - DNA, 25 bp, Artificial
  probe
  misc_feature (1)..(25): SEQ ID NO: 7338; WAN024CUU; Start 91; Stop 115
gacgtatgcactcttcaagacttgt

SEQ ID NO: 465427 - DNA, 25 bp, Artificial
  probe
  misc_feature (1)..(25): SEQ ID NO: 7338; WAN024CUU; Start 95; Stop 119
tatgcactcttcaagacttgtttcc

SEQ ID NO: 465428 - DNA, 25 bp, Artificial
  probe
  misc_feature (1)..(25): SEQ ID NO: 7338; WAN024CUU; Start 130; Stop 154
acagaatctcttgatgaaagttatc

SEQ ID NO: 465429 - DNA, 25 bp, Artificial
  probe
  misc_feature (1)..(25): SEQ ID NO: 7338; WAN024CUU; Start 153; Stop 177
tccaataaatcctgaatttgcttta

SEQ ID NO: 465430 - DNA, 25 bp, Artificial
  probe
  misc_feature (1)..(25): SEQ ID NO: 7338; WAN024CUU; Start 41; Stop 65
aatatgtcgttttaagggtttgtgc

SEQ ID NO: 465431 - DNA, 25 bp, Artificial
  probe
  misc_feature (1)..(25): SEQ ID NO: 7339; WAN024EVN; Start 25; Stop 49
tttctttgcctcccactatctaaaa

SEQ ID NO: 465432 - DNA, 25 bp, Artificial
  probe
  misc_feature (1)..(25): SEQ ID NO: 7339; WAN024EVN; Start 24; Stop 48
ttttctttgcctcccactatctaaa

SEQ ID NO: 465433 - DNA, 25 bp, Artificial
  probe
  misc_feature (1)..(25): SEQ ID NO: 7339; WAN024EVN; Start 83; Stop 107
cagataggttttgcatgattgagaa

SEQ ID NO: 465434 - DNA, 25 bp, Artificial
  probe
  misc_feature (1)..(25): SEQ ID NO: 7339; WAN024EVN; Start 88; Stop 112
aggttttgcatgattgagaaagtta

SEQ ID NO: 465435 - DNA, 25 bp, Artificial
  probe
  misc_feature (1)..(25): SEQ ID NO: 7339; WAN024EVN; Start 87; Stop 111
taggttttgcatgattgagaaagtt

SEQ ID NO: 465436 - DNA, 25 bp, Artificial
  probe
  misc_feature (1)..(25): SEQ ID NO: 7339; WAN024EVN; Start 80; Stop 104
atccagataggttttgcatgattga

SEQ ID NO: 465437 - DNA, 25 bp, Artificial
  probe
  misc_feature (1)..(25): SEQ ID NO: 7339; WAN024EVN; Start 86; Stop 110
ataggttttgcatgattgagaaagt

SEQ ID NO: 465438 - DNA, 25 bp, Artificial
  probe
  misc_feature (1)..(25): SEQ ID NO: 7339; WAN024EVN; Start 84; Stop 108
agataggttttgcatgattgagaaa

SEQ ID NO: 465439 - DNA, 25 bp, Artificial
  probe
  misc_feature (1)..(25): SEQ ID NO: 7339; WAN024EVN; Start 82; Stop 106
ccagataggttttgcatgattgaga

SEQ ID NO: 465440 - DNA, 25 bp, Artificial
  probe
  misc_feature (1)..(25): SEQ ID NO: 7339; WAN024EVN; Start 81; Stop 105
tccagataggttttgcatgattgag

SEQ ID NO: 465441 - DNA, 25 bp, Artificial
  probe
  misc_feature (1)..(25): SEQ ID NO: 7339; WAN024EVN; Start 89; Stop 113
ggttttgcatgattgagaaagttaa

SEQ ID NO: 465442 - DNA, 25 bp, Artificial
  probe
  misc_feature (1)..(25): SEQ ID NO: 7339; WAN024EVN; Start 85; Stop 109
gataggttttgcatgattgagaaag

SEQ ID NO: 465443 - DNA, 25 bp, Artificial
  probe
  misc_feature (1)..(25): SEQ ID NO: 7339; WAN024EVN; Start 77; Stop 101
aaaatccagataggttttgcatgat

SEQ ID NO: 465444 - DNA, 25 bp, Artificial
  probe
  misc_feature (1)..(25): SEQ ID NO: 7339; WAN024EVN; Start 79; Stop 103
aatccagataggttttgcatgattg

SEQ ID NO: 465445 - DNA, 25 bp, Artificial
  probe
  misc_feature (1)..(25): SEQ ID NO: 7339; WAN024EVN; Start 78; Stop 102
aaatccagataggttttgcatgatt

SEQ ID NO: 465446 - DNA, 25 bp, Artificial
  probe
  misc_feature (1)..(25): SEQ ID NO: 7339; WAN024EVN; Start 90; Stop 114
gttttgcatgattgagaaagttaaa

SEQ ID NO: 465447 - DNA, 25 bp, Artificial
  probe
  misc_feature (1)..(25): SEQ ID NO: 7339; WAN024EVN; Start 91; Stop 115
ttttgcatgattgagaaagttaaaa

SEQ ID NO: 465448 - DNA, 25 bp, Artificial
  probe
  misc_feature (1)..(25): SEQ ID NO: 7340; WAN024CFN; Start 227; Stop 251
tttcgctacgctcaaatcctttaaa

SEQ ID NO: 465449 - DNA, 25 bp, Artificial
  probe
  misc_feature (1)..(25): SEQ ID NO: 7340; WAN024CFN; Start 226; Stop 250
ttttcgctacgctcaaatcctttaa

SEQ ID NO: 465450 - DNA, 25 bp, Artificial
  probe
  misc_feature (1)..(25): SEQ ID NO: 7340; WAN024CFN; Start 228; Stop 252
ttcgctacgctcaaatcctttaaaa

SEQ ID NO: 465451 - DNA, 25 bp, Artificial
  probe
  misc_feature (1)..(25): SEQ ID NO: 7340; WAN024CFN; Start 194; Stop 218
acccctattatcaagataagaaaga

SEQ ID NO: 465452 - DNA, 25 bp, Artificial
  probe
  misc_feature (1)..(25): SEQ ID NO: 7340; WAN024CFN; Start 190; Stop 214
agttacccctattatcaagataaga

SEQ ID NO: 465453 - DNA, 25 bp, Artificial
  probe
  misc_feature (1)..(25): SEQ ID NO: 7340; WAN024CFN; Start 185; Stop 209
gcaatagttacccctattatcaaga

SEQ ID NO: 465454 - DNA, 25 bp, Artificial
  probe
  misc_feature (1)..(25): SEQ ID NO: 7340; WAN024CFN; Start 195; Stop 219
cccctattatcaagataagaaagaa

SEQ ID NO: 465455 - DNA, 25 bp, Artificial
  probe
  misc_feature (1)..(25): SEQ ID NO: 7340; WAN024CFN; Start 191; Stop 215
gttacccctattatcaagataagaa

SEQ ID NO: 465456 - DNA, 25 bp, Artificial
  probe
  misc_feature (1)..(25): SEQ ID NO: 7340; WAN024CFN; Start 193; Stop 217
tacccctattatcaagataagaaag

SEQ ID NO: 465457 - DNA, 25 bp, Artificial
  probe
  misc_feature (1)..(25): SEQ ID NO: 7340; WAN024CFN; Start 204; Stop 228
tcaagataagaaagaaaaggatttt

SEQ ID NO: 465458 - DNA, 25 bp, Artificial
  probe
  misc_feature (1)..(25): SEQ ID NO: 7340; WAN024CFN; Start 186; Stop 210
caatagttacccctattatcaagat

SEQ ID NO: 465459 - DNA, 25 bp, Artificial
  probe
  misc_feature (1)..(25): SEQ ID NO: 7341; WAN024DEG; Start 2700; Stop 2724
taagaatacagaagaagagcggaac

SEQ ID NO: 465460 - DNA, 25 bp, Artificial
  probe
  misc_feature (1)..(25): SEQ ID NO: 7341; WAN024DEG; Start 3103; Stop 3127
aatgatagaatggcttactacggtg

SEQ ID NO: 465461 - DNA, 25 bp, Artificial
  probe
  misc_feature (1)..(25): SEQ ID NO: 7341; WAN024DEG; Start 3102; Stop 3126
caatgatagaatggcttactacggt

SEQ ID NO: 465462 - DNA, 25 bp, Artificial
  probe
  misc_feature (1)..(25): SEQ ID NO: 7341; WAN024DEG; Start 3529; Stop 3553
gacagtattgacaagttggtagaga

SEQ ID NO: 465463 - DNA, 25 bp, Artificial
  probe
  misc_feature (1)..(25): SEQ ID NO: 7341; WAN024DEG; Start 2699; Stop 2723
gtaagaatacagaagaagagcggaa

SEQ ID NO: 465464 - DNA, 25 bp, Artificial
  probe
  misc_feature (1)..(25): SEQ ID NO: 7341; WAN024DEG; Start 2696; Stop 2720
atggtaagaatacagaagaagagcg

SEQ ID NO: 465465 - DNA, 25 bp, Artificial
  probe
  misc_feature (1)..(25): SEQ ID NO: 7341; WAN024DEG; Start 3528; Stop 3552
tgacagtattgacaagttggtagag

SEQ ID NO: 465466 - DNA, 25 bp, Artificial
  probe
  misc_feature (1)..(25): SEQ ID NO: 7341; WAN024DEG; Start 1015; Stop 1039
ggtgctgttaataagttagacgaag

SEQ ID NO: 465467 - DNA, 25 bp, Artificial
  probe
  misc_feature (1)..(25): SEQ ID NO: 7341; WAN024DEG; Start 3101; Stop 3125
tcaatgatagaatggcttactacgg

SEQ ID NO: 465468 - DNA, 25 bp, Artificial
  probe
  misc_feature (1)..(25): SEQ ID NO: 7341; WAN024DEG; Start 3530; Stop 3554
acagtattgacaagttggtagagaa

SEQ ID NO: 465469 - DNA, 25 bp, Artificial
  probe
  misc_feature (1)..(25): SEQ ID NO: 7341; WAN024DEG; Start 3100; Stop 3124
gtcaatgatagaatggcttactacg

SEQ ID NO: 465470 - DNA, 25 bp, Artificial
  probe
  misc_feature (1)..(25): SEQ ID NO: 7341; WAN024DEG; Start 3099; Stop 3123
cgtcaatgatagaatggcttactac

SEQ ID NO: 465471 - DNA, 25 bp, Artificial
  probe
  misc_feature (1)..(25): SEQ ID NO: 7341; WAN024DEG; Start 3950; Stop 3974
cgtatgctcagttacaatccttatt

SEQ ID NO: 465472 - DNA, 25 bp, Artificial
  probe
  misc_feature (1)..(25): SEQ ID NO: 7341; WAN024DEG; Start 3510; Stop 3534
agagaagaagttacctattgacagt

SEQ ID NO: 465473 - DNA, 25 bp, Artificial
  probe
  misc_feature (1)..(25): SEQ ID NO: 7341; WAN024DEG; Start 3220; Stop 3244
gctctcggtatcaatatggcttatg

SEQ ID NO: 465474 - DNA, 25 bp, Artificial
  probe
  misc_feature (1)..(25): SEQ ID NO: 7341; WAN024DEG; Start 2389; Stop 2413
gcttatcgtgaagttattggtggta

SEQ ID NO: 465475 - DNA, 25 bp, Artificial
  probe
  misc_feature (1)..(25): SEQ ID NO: 7341; WAN024DEG; Start 3527; Stop 3551
ttgacagtattgacaagttggtaga

SEQ ID NO: 465476 - DNA, 25 bp, Artificial
  probe
  misc_feature (1)..(25): SEQ ID NO: 7341; WAN024DEG; Start 3501; Stop 3525
aacagaagaagagaagaagttacct

SEQ ID NO: 465477 - DNA, 25 bp, Artificial
  probe
  misc_feature (1)..(25): SEQ ID NO: 7341; WAN024DEG; Start 3332; Stop 3356
acaatgagtctatgatgatgcttga

SEQ ID NO: 465478 - DNA, 25 bp, Artificial
  probe
  misc_feature (1)..(25): SEQ ID NO: 7341; WAN024DEG; Start 1014; Stop 1038
cggtgctgttaataagttagacgaa

SEQ ID NO: 465479 - DNA, 25 bp, Artificial
  probe
  misc_feature (1)..(25): SEQ ID NO: 7341; WAN024DEG; Start 3523; Stop 3547
cctattgacagtattgacaagttgg

SEQ ID NO: 465480 - DNA, 25 bp, Artificial
  probe
  misc_feature (1)..(25): SEQ ID NO: 7341; WAN024DEG; Start 3859; Stop 3883
gaagagtggaagaagcattggtatc

SEQ ID NO: 465481 - DNA, 25 bp, Artificial
  probe
  misc_feature (1)..(25): SEQ ID NO: 7341; WAN024DEG; Start 3502; Stop 3526
acagaagaagagaagaagttaccta

SEQ ID NO: 465482 - DNA, 25 bp, Artificial
  probe
  misc_feature (1)..(25): SEQ ID NO: 7341; WAN024DEG; Start 3330; Stop 3354
ctacaatgagtctatgatgatgctt

SEQ ID NO: 465483 - DNA, 25 bp, Artificial
  probe
  misc_feature (1)..(25): SEQ ID NO: 7341; WAN024DEG; Start 3221; Stop 3245
ctctcggtatcaatatggcttatga

SEQ ID NO: 465484 - DNA, 25 bp, Artificial
  probe
  misc_feature (1)..(25): SEQ ID NO: 7341; WAN024DEG; Start 3531; Stop 3555
cagtattgacaagttggtagagaat

SEQ ID NO: 465485 - DNA, 25 bp, Artificial
  probe
  misc_feature (1)..(25): SEQ ID NO: 7341; WAN024DEG; Start 3219; Stop 3243
tgctctcggtatcaatatggcttat

SEQ ID NO: 465486 - DNA, 25 bp, Artificial
  probe
  misc_feature (1)..(25): SEQ ID NO: 7341; WAN024DEG; Start 3403; Stop 3427
tctaagtggttcaagaagatggata

SEQ ID NO: 465487 - DNA, 25 bp, Artificial
  probe
  misc_feature (1)..(25): SEQ ID NO: 7341; WAN024DEG; Start 3329; Stop 3353
actacaatgagtctatgatgatgct

SEQ ID NO: 465488 - DNA, 25 bp, Artificial
  probe
  misc_feature (1)..(25): SEQ ID NO: 7341; WAN024DEG; Start 1387; Stop 1411
atgtatggttcaggttctattgacg

SEQ ID NO: 465489 - DNA, 25 bp, Artificial
  probe
  misc_feature (1)..(25): SEQ ID NO: 7341; WAN024DEG; Start 3526; Stop 3550
attgacagtattgacaagttggtag

SEQ ID NO: 465490 - DNA, 25 bp, Artificial
  probe
  misc_feature (1)..(25): SEQ ID NO: 7341; WAN024DEG; Start 3524; Stop 3548
ctattgacagtattgacaagttggt

SEQ ID NO: 465491 - DNA, 25 bp, Artificial
  probe
  misc_feature (1)..(25): SEQ ID NO: 7341; WAN024DEG; Start 3522; Stop 3546
acctattgacagtattgacaagttg

SEQ ID NO: 465492 - DNA, 25 bp, Artificial
  probe
  misc_feature (1)..(25): SEQ ID NO: 7342; WAN0249OZ; Start 66; Stop 90
aaagcatagtatcaggtgtttcaac

SEQ ID NO: 465493 - DNA, 25 bp, Artificial
  probe
  misc_feature (1)..(25): SEQ ID NO: 7342; WAN0249OZ; Start 83; Stop 107
gtttcaacacctgatactatgcttt

SEQ ID NO: 465494 - DNA, 25 bp, Artificial
  probe
  misc_feature (1)..(25): SEQ ID NO: 7342; WAN0249OZ; Start 82; Stop 106
tgtttcaacacctgatactatgctt

SEQ ID NO: 465495 - DNA, 25 bp, Artificial
  probe
  misc_feature (1)..(25): SEQ ID NO: 7342; WAN0249OZ; Start 67; Stop 91
aagcatagtatcaggtgtttcaaca

SEQ ID NO: 465496 - DNA, 25 bp, Artificial
  probe
  misc_feature (1)..(25): SEQ ID NO: 7342; WAN0249OZ; Start 65; Stop 89
aaaagcatagtatcaggtgtttcaa

SEQ ID NO: 465497 - DNA, 25 bp, Artificial
  probe
  misc_feature (1)..(25): SEQ ID NO: 7342; WAN0249OZ; Start 84; Stop 108
tttcaacacctgatactatgctttt

SEQ ID NO: 465498 - DNA, 25 bp, Artificial
  probe
  misc_feature (1)..(25): SEQ ID NO: 7342; WAN0249OZ; Start 81; Stop 105
gtgtttcaacacctgatactatgct

SEQ ID NO: 465499 - DNA, 25 bp, Artificial
  probe
  misc_feature (1)..(25): SEQ ID NO: 7342; WAN0249OZ; Start 68; Stop 92
agcatagtatcaggtgtttcaacac

SEQ ID NO: 465500 - DNA, 25 bp, Artificial
  probe
  misc_feature (1)..(25): SEQ ID NO: 7342; WAN0249OZ; Start 113; Stop 137
atgattttcattgagtataagcaac

SEQ ID NO: 465501 - DNA, 25 bp, Artificial
  probe
  misc_feature (1)..(25): SEQ ID NO: 7342; WAN0249OZ; Start 111; Stop 135
ctatgattttcattgagtataagca

SEQ ID NO: 465502 - DNA, 25 bp, Artificial
  probe
  misc_feature (1)..(25): SEQ ID NO: 7342; WAN0249OZ; Start 110; Stop 134
tctatgattttcattgagtataagc

SEQ ID NO: 465503 - DNA, 25 bp, Artificial
  probe
  misc_feature (1)..(25): SEQ ID NO: 7343; WAN0249OV; Start 65; Stop 89
aaacgcatagtatcaggtgttgaaa

SEQ ID NO: 465504 - DNA, 25 bp, Artificial
  probe
  misc_feature (1)..(25): SEQ ID NO: 7343; WAN0249OV; Start 83; Stop 107
gttgaaacacctgatactatgcgtt

SEQ ID NO: 465505 - DNA, 25 bp, Artificial
  probe
  misc_feature (1)..(25): SEQ ID NO: 7343; WAN0249OV; Start 66; Stop 90
aacgcatagtatcaggtgttgaaac

SEQ ID NO: 465506 - DNA, 25 bp, Artificial
  probe
  misc_feature (1)..(25): SEQ ID NO: 7343; WAN0249OV; Start 169; Stop 193
cgcttcctagtttaaagttgctctt

SEQ ID NO: 465507 - DNA, 25 bp, Artificial
  probe
  misc_feature (1)..(25): SEQ ID NO: 7343; WAN0249OV; Start 167; Stop 191
ctcgcttcctagtttaaagttgctc

SEQ ID NO: 465508 - DNA, 25 bp, Artificial
  probe
  misc_feature (1)..(25): SEQ ID NO: 7343; WAN0249OV; Start 84; Stop 108
ttgaaacacctgatactatgcgttt

SEQ ID NO: 465509 - DNA, 25 bp, Artificial
  probe
  misc_feature (1)..(25): SEQ ID NO: 7343; WAN0249OV; Start 55; Stop 79
tcccacaataaaacgcatagtatca

SEQ ID NO: 465510 - DNA, 25 bp, Artificial
  probe
  misc_feature (1)..(25): SEQ ID NO: 7343; WAN0249OV; Start 52; Stop 76
tcttcccacaataaaacgcatagta

SEQ ID NO: 465511 - DNA, 25 bp, Artificial
  probe
  misc_feature (1)..(25): SEQ ID NO: 7343; WAN0249OV; Start 50; Stop 74
aatcttcccacaataaaacgcatag

SEQ ID NO: 465512 - DNA, 25 bp, Artificial
  probe
  misc_feature (1)..(25): SEQ ID NO: 7343; WAN0249OV; Start 47; Stop 71
gtaaatcttcccacaataaaacgca

SEQ ID NO: 465513 - DNA, 25 bp, Artificial
  probe
  misc_feature (1)..(25): SEQ ID NO: 7343; WAN0249OV; Start 46; Stop 70
agtaaatcttcccacaataaaacgc

SEQ ID NO: 465514 - DNA, 25 bp, Artificial
  probe
  misc_feature (1)..(25): SEQ ID NO: 7343; WAN0249OV; Start 164; Stop 188
cgactcgcttcctagtttaaagttg

SEQ ID NO: 465515 - DNA, 25 bp, Artificial
  probe
  misc_feature (1)..(25): SEQ ID NO: 7343; WAN0249OV; Start 60; Stop 84
caataaaacgcatagtatcaggtgt

SEQ ID NO: 465516 - DNA, 25 bp, Artificial
  probe
  misc_feature (1)..(25): SEQ ID NO: 7343; WAN0249OV; Start 59; Stop 83
acaataaaacgcatagtatcaggtg

SEQ ID NO: 465517 - DNA, 25 bp, Artificial
  probe
  misc_feature (1)..(25): SEQ ID NO: 7343; WAN0249OV; Start 54; Stop 78
ttcccacaataaaacgcatagtatc

SEQ ID NO: 465518 - DNA, 25 bp, Artificial
  probe
  misc_feature (1)..(25): SEQ ID NO: 7343; WAN0249OV; Start 53; Stop 77
cttcccacaataaaacgcatagtat

SEQ ID NO: 465519 - DNA, 25 bp, Artificial
  probe
  misc_feature (1)..(25): SEQ ID NO: 7343; WAN0249OV; Start 49; Stop 73
aaatcttcccacaataaaacgcata

SEQ ID NO: 465520 - DNA, 25 bp, Artificial
  probe
  misc_feature (1)..(25): SEQ ID NO: 7343; WAN0249OV; Start 48; Stop 72
taaatcttcccacaataaaacgcat

SEQ ID NO: 465521 - DNA, 25 bp, Artificial
  probe
  misc_feature (1)..(25): SEQ ID NO: 7343; WAN0249OV; Start 168; Stop 192
tcgcttcctagtttaaagttgctct

SEQ ID NO: 465522 - DNA, 25 bp, Artificial
  probe
  misc_feature (1)..(25): SEQ ID NO: 7343; WAN0249OV; Start 51; Stop 75
atcttcccacaataaaacgcatagt

SEQ ID NO: 465523 - DNA, 25 bp, Artificial
  probe
  misc_feature (1)..(25): SEQ ID NO: 7343; WAN0249OV; Start 165; Stop 189
gactcgcttcctagtttaaagttgc

SEQ ID NO: 465524 - DNA, 25 bp, Artificial
  probe
  misc_feature (1)..(25): SEQ ID NO: 7343; WAN0249OV; Start 82; Stop 106
tgttgaaacacctgatactatgcgt

SEQ ID NO: 465525 - DNA, 25 bp, Artificial
  probe
  misc_feature (1)..(25): SEQ ID NO: 7343; WAN0249OV; Start 67; Stop 91
acgcatagtatcaggtgttgaaaca

SEQ ID NO: 465526 - DNA, 25 bp, Artificial
  probe
  misc_feature (1)..(25): SEQ ID NO: 7343; WAN0249OV; Start 62; Stop 86
ataaaacgcatagtatcaggtgttg

SEQ ID NO: 465527 - DNA, 25 bp, Artificial
  probe
  misc_feature (1)..(25): SEQ ID NO: 7343; WAN0249OV; Start 170; Stop 194
gcttcctagtttaaagttgctcttt

SEQ ID NO: 465528 - DNA, 25 bp, Artificial
  probe
  misc_feature (1)..(25): SEQ ID NO: 7343; WAN0249OV; Start 63; Stop 87
taaaacgcatagtatcaggtgttga

SEQ ID NO: 465529 - DNA, 25 bp, Artificial
  probe
  misc_feature (1)..(25): SEQ ID NO: 7343; WAN0249OV; Start 166; Stop 190
actcgcttcctagtttaaagttgct

SEQ ID NO: 465530 - DNA, 25 bp, Artificial
  probe
  misc_feature (1)..(25): SEQ ID NO: 7343; WAN0249OV; Start 61; Stop 85
aataaaacgcatagtatcaggtgtt

SEQ ID NO: 465531 - DNA, 25 bp, Artificial
  probe
  misc_feature (1)..(25): SEQ ID NO: 7343; WAN0249OV; Start 184; Stop 208
agttgctctttgattttcattgagt

SEQ ID NO: 465532 - DNA, 25 bp, Artificial
  probe
  misc_feature (1)..(25): SEQ ID NO: 7343; WAN0249OV; Start 64; Stop 88
aaaacgcatagtatcaggtgttgaa

SEQ ID NO: 465533 - DNA, 25 bp, Artificial
  probe
  misc_feature (1)..(25): SEQ ID NO: 7343; WAN0249OV; Start 172; Stop 196
ttcctagtttaaagttgctctttga

SEQ ID NO: 465534 - DNA, 25 bp, Artificial
  probe
  misc_feature (1)..(25): SEQ ID NO: 7343; WAN0249OV; Start 183; Stop 207
aagttgctctttgattttcattgag

SEQ ID NO: 465535 - DNA, 25 bp, Artificial
  probe
  misc_feature (1)..(25): SEQ ID NO: 7343; WAN0249OV; Start 45; Stop 69
aagtaaatcttcccacaataaaacg

SEQ ID NO: 465536 - DNA, 25 bp, Artificial
  probe
  misc_feature (1)..(25): SEQ ID NO: 7344; WAN024CTP-M; Start 484; Stop 508
aatagttggtgtggataatggagaa

SEQ ID NO: 465537 - DNA, 25 bp, Artificial
  probe
  misc_feature (1)..(25): SEQ ID NO: 7344; WAN024CTP-M; Start 385; Stop 409
agacctatcctacatccattacgaa

SEQ ID NO: 465538 - DNA, 25 bp, Artificial
  probe
  misc_feature (1)..(25): SEQ ID NO: 7344; WAN024CTP-M; Start 384; Stop 408
aagacctatcctacatccattacga

SEQ ID NO: 465539 - DNA, 25 bp, Artificial
  probe
  misc_feature (1)..(25): SEQ ID NO: 7344; WAN024CTP-M; Start 1743; Stop 1767
ttaatcagcaaccgaatctacctaa

SEQ ID NO: 465540 - DNA, 25 bp, Artificial
  probe
  misc_feature (1)..(25): SEQ ID NO: 7344; WAN024CTP-M; Start 221; Stop 245
gaattgtatcttgaatggcttgtga

SEQ ID NO: 465541 - DNA, 25 bp, Artificial
  probe
  misc_feature (1)..(25): SEQ ID NO: 7344; WAN024CTP-M; Start 220; Stop 244
tgaattgtatcttgaatggcttgtg

SEQ ID NO: 465542 - DNA, 25 bp, Artificial
  probe
  misc_feature (1)..(25): SEQ ID NO: 7344; WAN024CTP-M; Start 219; Stop 243
gtgaattgtatcttgaatggcttgt

SEQ ID NO: 465543 - DNA, 25 bp, Artificial
  probe
  misc_feature (1)..(25): SEQ ID NO: 7344; WAN024CTP-M; Start 218; Stop 242
agtgaattgtatcttgaatggcttg

SEQ ID NO: 465544 - DNA, 25 bp, Artificial
  probe
  misc_feature (1)..(25): SEQ ID NO: 7344; WAN024CTP-M; Start 1521; Stop 1545
cagcatcagatattcacttagaagc

SEQ ID NO: 465545 - DNA, 25 bp, Artificial
  probe
  misc_feature (1)..(25): SEQ ID NO: 7344; WAN024CTP-M; Start 222; Stop 246
aattgtatcttgaatggcttgtgaa

SEQ ID NO: 465546 - DNA, 25 bp, Artificial
  probe
  misc_feature (1)..(25): SEQ ID NO: 7344; WAN024CTP-M; Start 485; Stop 509
atagttggtgtggataatggagaac

SEQ ID NO: 465547 - DNA, 25 bp, Artificial
  probe
  misc_feature (1)..(25): SEQ ID NO: 7344; WAN024CTP-M; Start 2007; Stop 2031
attctaacggaacaactgtctacaa

SEQ ID NO: 465548 - DNA, 25 bp, Artificial
  probe
  misc_feature (1)..(25): SEQ ID NO: 7344; WAN024CTP-M; Start 2006; Stop 2030
cattctaacggaacaactgtctaca

SEQ ID NO: 465549 - DNA, 25 bp, Artificial
  probe
  misc_feature (1)..(25): SEQ ID NO: 7344; WAN024CTP-M; Start 1466; Stop 1490
gtcttaacttatcgtgtcattggta

SEQ ID NO: 465550 - DNA, 25 bp, Artificial
  probe
  misc_feature (1)..(25): SEQ ID NO: 7344; WAN024CTP-M; Start 1215; Stop 1239
ctggcaagacttattaccgtgtatc

SEQ ID NO: 465551 - DNA, 25 bp, Artificial
  probe
  misc_feature (1)..(25): SEQ ID NO: 7344; WAN024CTP-M; Start 217; Stop 241
aagtgaattgtatcttgaatggctt

SEQ ID NO: 465552 - DNA, 25 bp, Artificial
  probe
  misc_feature (1)..(25): SEQ ID NO: 7344; WAN024CTP-M; Start 1655; Stop 1679
gaatctgtaactactgaagtggtga

SEQ ID NO: 465553 - DNA, 25 bp, Artificial
  probe
  misc_feature (1)..(25): SEQ ID NO: 7344; WAN024CTP-M; Start 1654; Stop 1678
agaatctgtaactactgaagtggtg

SEQ ID NO: 465554 - DNA, 25 bp, Artificial
  probe
  misc_feature (1)..(25): SEQ ID NO: 7344; WAN024CTP-M; Start 1465; Stop 1489
agtcttaacttatcgtgtcattggt

SEQ ID NO: 465555 - DNA, 25 bp, Artificial
  probe
  misc_feature (1)..(25): SEQ ID NO: 7344; WAN024CTP-M; Start 1484; Stop 1508
attggtagttatgaggatggttcac

SEQ ID NO: 465556 - DNA, 25 bp, Artificial
  probe
  misc_feature (1)..(25): SEQ ID NO: 7344; WAN024CTP-M; Start 1483; Stop 1507
cattggtagttatgaggatggttca

SEQ ID NO: 465557 - DNA, 25 bp, Artificial
  probe
  misc_feature (1)..(25): SEQ ID NO: 7344; WAN024CTP-M; Start 2002; Stop 2026
ttaccattctaacggaacaactgtc

SEQ ID NO: 465558 - DNA, 25 bp, Artificial
  probe
  misc_feature (1)..(25): SEQ ID NO: 7344; WAN024CTP-M; Start 2001; Stop 2025
cttaccattctaacggaacaactgt

SEQ ID NO: 465559 - DNA, 25 bp, Artificial
  probe
  misc_feature (1)..(25): SEQ ID NO: 7344; WAN024CTP-M; Start 2291; Stop 2315
aatagatggactacttggagaacaa

SEQ ID NO: 465560 - DNA, 25 bp, Artificial
  probe
  misc_feature (1)..(25): SEQ ID NO: 7344; WAN024CTP-M; Start 1657; Stop 1681
atctgtaactactgaagtggtgatt

SEQ ID NO: 465561 - DNA, 25 bp, Artificial
  probe
  misc_feature (1)..(25): SEQ ID NO: 7344; WAN024CTP-M; Start 1656; Stop 1680
aatctgtaactactgaagtggtgat

SEQ ID NO: 465562 - DNA, 25 bp, Artificial
  probe
  misc_feature (1)..(25): SEQ ID NO: 7344; WAN024CTP-M; Start 1518; Stop 1542
tctcagcatcagatattcacttaga

SEQ ID NO: 465563 - DNA, 25 bp, Artificial
  probe
  misc_feature (1)..(25): SEQ ID NO: 7344; WAN024CTP-M; Start 1467; Stop 1491
tcttaacttatcgtgtcattggtag

SEQ ID NO: 465564 - DNA, 25 bp, Artificial
  probe
  misc_feature (1)..(25): SEQ ID NO: 7344; WAN024CTP-M; Start 2005; Stop 2029
ccattctaacggaacaactgtctac

SEQ ID NO: 465565 - DNA, 25 bp, Artificial
  probe
  misc_feature (1)..(25): SEQ ID NO: 7344; WAN024CTP-M; Start 1658; Stop 1682
tctgtaactactgaagtggtgatta

SEQ ID NO: 465566 - DNA, 25 bp, Artificial
  probe
  misc_feature (1)..(25): SEQ ID NO: 7344; WAN024CTP-M; Start 1214; Stop 1238
tctggcaagacttattaccgtgtat

SEQ ID NO: 465567 - DNA, 25 bp, Artificial
  probe
  misc_feature (1)..(25): SEQ ID NO: 7344; WAN024CTP-M; Start 1472; Stop 1496
acttatcgtgtcattggtagttatg

SEQ ID NO: 465568 - DNA, 25 bp, Artificial
  probe
  misc_feature (1)..(25): SEQ ID NO: 7344; WAN024CTP-M; Start 1468; Stop 1492
cttaacttatcgtgtcattggtagt

SEQ ID NO: 465569 - DNA, 25 bp, Artificial
  probe
  misc_feature (1)..(25): SEQ ID NO: 7345; WAN024A6U; Start 99; Stop 123
ttgacttacagaattgctctattgt

SEQ ID NO: 465570 - DNA, 25 bp, Artificial
  probe
  misc_feature (1)..(25): SEQ ID NO: 7345; WAN024A6U; Start 107; Stop 131
cagaattgctctattgtactgatgt

SEQ ID NO: 465571 - DNA, 25 bp, Artificial
  probe
  misc_feature (1)..(25): SEQ ID NO: 7345; WAN024A6U; Start 106; Stop 130
acagaattgctctattgtactgatg

SEQ ID NO: 465572 - DNA, 25 bp, Artificial
  probe
  misc_feature (1)..(25): SEQ ID NO: 7345; WAN024A6U; Start 113; Stop 137
tgctctattgtactgatgtattctt

SEQ ID NO: 465573 - DNA, 25 bp, Artificial
  probe
  misc_feature (1)..(25): SEQ ID NO: 7345; WAN024A6U; Start 112; Stop 136
ttgctctattgtactgatgtattct

SEQ ID NO: 465574 - DNA, 25 bp, Artificial
  probe
  misc_feature (1)..(25): SEQ ID NO: 7345; WAN024A6U; Start 98; Stop 122
attgacttacagaattgctctattg

SEQ ID NO: 465575 - DNA, 25 bp, Artificial
  probe
  misc_feature (1)..(25): SEQ ID NO: 7345; WAN024A6U; Start 108; Stop 132
agaattgctctattgtactgatgta

SEQ ID NO: 465576 - DNA, 25 bp, Artificial
  probe
  misc_feature (1)..(25): SEQ ID NO: 7345; WAN024A6U; Start 10; Stop 34
tatcaataatttgggctccttgtca

SEQ ID NO: 465577 - DNA, 25 bp, Artificial
  probe
  misc_feature (1)..(25): SEQ ID NO: 7345; WAN024A6U; Start 9; Stop 33
ttatcaataatttgggctccttgtc

SEQ ID NO: 465578 - DNA, 25 bp, Artificial
  probe
  misc_feature (1)..(25): SEQ ID NO: 7345; WAN024A6U; Start 11; Stop 35
atcaataatttgggctccttgtcaa

SEQ ID NO: 465579 - DNA, 25 bp, Artificial
  probe
  misc_feature (1)..(25): SEQ ID NO: 7345; WAN024A6U; Start 8; Stop 32
tttatcaataatttgggctccttgt

SEQ ID NO: 465580 - DNA, 25 bp, Artificial
  probe
  misc_feature (1)..(25): SEQ ID NO: 7345; WAN024A6U; Start 14; Stop 38
aataatttgggctccttgtcaactg

SEQ ID NO: 465581 - DNA, 25 bp, Artificial
  probe
  misc_feature (1)..(25): SEQ ID NO: 7345; WAN024A6U; Start 13; Stop 37
caataatttgggctccttgtcaact

SEQ ID NO: 465582 - DNA, 25 bp, Artificial
  probe
  misc_feature (1)..(25): SEQ ID NO: 7345; WAN024A6U; Start 12; Stop 36
tcaataatttgggctccttgtcaac

SEQ ID NO: 465583 - DNA, 25 bp, Artificial
  probe
  misc_feature (1)..(25): SEQ ID NO: 7345; WAN024A6U; Start 111; Stop 135
attgctctattgtactgatgtattc

SEQ ID NO: 465584 - DNA, 25 bp, Artificial
  probe
  misc_feature (1)..(25): SEQ ID NO: 7345; WAN024A6U; Start 109; Stop 133
gaattgctctattgtactgatgtat

SEQ ID NO: 465585 - DNA, 25 bp, Artificial
  probe
  misc_feature (1)..(25): SEQ ID NO: 7345; WAN024A6U; Start 100; Stop 124
tgacttacagaattgctctattgta

SEQ ID NO: 465586 - DNA, 25 bp, Artificial
  probe
  misc_feature (1)..(25): SEQ ID NO: 7345; WAN024A6U; Start 16; Stop 40
taatttgggctccttgtcaactgta

SEQ ID NO: 465587 - DNA, 25 bp, Artificial
  probe
  misc_feature (1)..(25): SEQ ID NO: 7345; WAN024A6U; Start 104; Stop 128
ttacagaattgctctattgtactga

SEQ ID NO: 465588 - DNA, 25 bp, Artificial
  probe
  misc_feature (1)..(25): SEQ ID NO: 7345; WAN024A6U; Start 102; Stop 126
acttacagaattgctctattgtact

SEQ ID NO: 465589 - DNA, 25 bp, Artificial
  probe
  misc_feature (1)..(25): SEQ ID NO: 7345; WAN024A6U; Start 105; Stop 129
tacagaattgctctattgtactgat

SEQ ID NO: 465590 - DNA, 25 bp, Artificial
  probe
  misc_feature (1)..(25): SEQ ID NO: 7345; WAN024A6U; Start 103; Stop 127
cttacagaattgctctattgtactg

SEQ ID NO: 465591 - DNA, 25 bp, Artificial
  probe
  misc_feature (1)..(25): SEQ ID NO: 7345; WAN024A6U; Start 101; Stop 125
gacttacagaattgctctattgtac

SEQ ID NO: 465592 - DNA, 25 bp, Artificial
  probe
  misc_feature (1)..(25): SEQ ID NO: 7345; WAN024A6U; Start 110; Stop 134
aattgctctattgtactgatgtatt

SEQ ID NO: 465593 - DNA, 25 bp, Artificial
  probe
  misc_feature (1)..(25): SEQ ID NO: 7345; WAN024A6U; Start 15; Stop 39
ataatttgggctccttgtcaactgt

SEQ ID NO: 465594 - DNA, 25 bp, Artificial
  probe
  misc_feature (1)..(25): SEQ ID NO: 7345; WAN024A6U; Start 97; Stop 121
tattgacttacagaattgctctatt

SEQ ID NO: 465595 - DNA, 25 bp, Artificial
  probe
  misc_feature (1)..(25): SEQ ID NO: 7345; WAN024A6U; Start 114; Stop 138
gctctattgtactgatgtattctta

SEQ ID NO: 465596 - DNA, 25 bp, Artificial
  probe
  misc_feature (1)..(25): SEQ ID NO: 7345; WAN024A6U; Start 96; Stop 120
atattgacttacagaattgctctat

SEQ ID NO: 465597 - DNA, 25 bp, Artificial
  probe
  misc_feature (1)..(25): SEQ ID NO: 7345; WAN024A6U; Start 17; Stop 41
aatttgggctccttgtcaactgtag

SEQ ID NO: 465598 - DNA, 25 bp, Artificial
  probe
  misc_feature (1)..(25): SEQ ID NO: 7345; WAN024A6U; Start 95; Stop 119
aatattgacttacagaattgctcta

SEQ ID NO: 465599 - DNA, 25 bp, Artificial
  probe
  misc_feature (1)..(25): SEQ ID NO: 7345; WAN024A6U; Start 93; Stop 117
caaatattgacttacagaattgctc

SEQ ID NO: 465600 - DNA, 25 bp, Artificial
  probe
  misc_feature (1)..(25): SEQ ID NO: 7345; WAN024A6U; Start 94; Stop 118
aaatattgacttacagaattgctct

SEQ ID NO: 465601 - DNA, 25 bp, Artificial
  probe
  misc_feature (1)..(25): SEQ ID NO: 7345; WAN024A6U; Start 7; Stop 31
ttttatcaataatttgggctccttg

SEQ ID NO: 465602 - DNA, 25 bp, Artificial
  probe
  misc_feature (1)..(25): SEQ ID NO: 7346; WAN024FP2-3; Start 2010; Stop 2034
caagcctattgtaccgtagtaagaa

SEQ ID NO: 465603 - DNA, 25 bp, Artificial
  probe
  misc_feature (1)..(25): SEQ ID NO: 7346; WAN024FP2-3; Start 1977; Stop 2001
tgtcaatacttggtatgattactgc

SEQ ID NO: 465604 - DNA, 25 bp, Artificial
  probe
  misc_feature (1)..(25): SEQ ID NO: 7346; WAN024FP2-3; Start 1239; Stop 1263
aagctcagactgtagttgtatctaa

SEQ ID NO: 465605 - DNA, 25 bp, Artificial
  probe
  misc_feature (1)..(25): SEQ ID NO: 7346; WAN024FP2-3; Start 1952; Stop 1976
acaggagaaacaacaggaacttatt

SEQ ID NO: 465606 - DNA, 25 bp, Artificial
  probe
  misc_feature (1)..(25): SEQ ID NO: 7346; WAN024FP2-3; Start 1949; Stop 1973
aatacaggagaaacaacaggaactt

SEQ ID NO: 465607 - DNA, 25 bp, Artificial
  probe
  misc_feature (1)..(25): SEQ ID NO: 7346; WAN024FP2-3; Start 1948; Stop 1972
aaatacaggagaaacaacaggaact

SEQ ID NO: 465608 - DNA, 25 bp, Artificial
  probe
  misc_feature (1)..(25): SEQ ID NO: 7346; WAN024FP2-3; Start 1947; Stop 1971
caaatacaggagaaacaacaggaac

SEQ ID NO: 465609 - DNA, 25 bp, Artificial
  probe
  misc_feature (1)..(25): SEQ ID NO: 7346; WAN024FP2-3; Start 1951; Stop 1975
tacaggagaaacaacaggaacttat

SEQ ID NO: 465610 - DNA, 25 bp, Artificial
  probe
  misc_feature (1)..(25): SEQ ID NO: 7346; WAN024FP2-3; Start 1950; Stop 1974
atacaggagaaacaacaggaactta

SEQ ID NO: 465611 - DNA, 25 bp, Artificial
  probe
  misc_feature (1)..(25): SEQ ID NO: 7346; WAN024FP2-3; Start 1936; Stop 1960
agataagttgccaaatacaggagaa

SEQ ID NO: 465612 - DNA, 25 bp, Artificial
  probe
  misc_feature (1)..(25): SEQ ID NO: 7346; WAN024FP2-3; Start 1935; Stop 1959
aagataagttgccaaatacaggaga

SEQ ID NO: 465613 - DNA, 25 bp, Artificial
  probe
  misc_feature (1)..(25): SEQ ID NO: 7346; WAN024FP2-3; Start 1953; Stop 1977
caggagaaacaacaggaacttattt

SEQ ID NO: 465614 - DNA, 25 bp, Artificial
  probe
  misc_feature (1)..(25): SEQ ID NO: 7346; WAN024FP2-3; Start 2009; Stop 2033
gcaagcctattgtaccgtagtaaga

SEQ ID NO: 465615 - DNA, 25 bp, Artificial
  probe
  misc_feature (1)..(25): SEQ ID NO: 7346; WAN024FP2-3; Start 1937; Stop 1961
gataagttgccaaatacaggagaaa

SEQ ID NO: 465616 - DNA, 25 bp, Artificial
  probe
  misc_feature (1)..(25): SEQ ID NO: 7346; WAN024FP2-3; Start 1946; Stop 1970
ccaaatacaggagaaacaacaggaa

SEQ ID NO: 465617 - DNA, 25 bp, Artificial
  probe
  misc_feature (1)..(25): SEQ ID NO: 7346; WAN024FP2-3; Start 1909; Stop 1933
agaccaaagtgctgataaagataag

SEQ ID NO: 465618 - DNA, 25 bp, Artificial
  probe
  misc_feature (1)..(25): SEQ ID NO: 7346; WAN024FP2-3; Start 1938; Stop 1962
ataagttgccaaatacaggagaaac

SEQ ID NO: 465619 - DNA, 25 bp, Artificial
  probe
  misc_feature (1)..(25): SEQ ID NO: 7346; WAN024FP2-3; Start 1939; Stop 1963
taagttgccaaatacaggagaaaca

SEQ ID NO: 465620 - DNA, 25 bp, Artificial
  probe
  misc_feature (1)..(25): SEQ ID NO: 7346; WAN024FP2-3; Start 1934; Stop 1958
caagataagttgccaaatacaggag

SEQ ID NO: 465621 - DNA, 25 bp, Artificial
  probe
  misc_feature (1)..(25): SEQ ID NO: 7346; WAN024FP2-3; Start 1954; Stop 1978
aggagaaacaacaggaacttatttg

SEQ ID NO: 465622 - DNA, 25 bp, Artificial
  probe
  misc_feature (1)..(25): SEQ ID NO: 7346; WAN024FP2-3; Start 2011; Stop 2035
aagcctattgtaccgtagtaagaaa

SEQ ID NO: 465623 - DNA, 25 bp, Artificial
  probe
  misc_feature (1)..(25): SEQ ID NO: 7346; WAN024FP2-3; Start 1940; Stop 1964
aagttgccaaatacaggagaaacaa

SEQ ID NO: 465624 - DNA, 25 bp, Artificial
  probe
  misc_feature (1)..(25): SEQ ID NO: 7346; WAN024FP2-3; Start 1907; Stop 1931
acagaccaaagtgctgataaagata

SEQ ID NO: 465625 - DNA, 25 bp, Artificial
  probe
  misc_feature (1)..(25): SEQ ID NO: 7346; WAN024FP2-3; Start 1906; Stop 1930
tacagaccaaagtgctgataaagat

SEQ ID NO: 465626 - DNA, 25 bp, Artificial
  probe
  misc_feature (1)..(25): SEQ ID NO: 7346; WAN024FP2-3; Start 1905; Stop 1929
ttacagaccaaagtgctgataaaga

SEQ ID NO: 465627 - DNA, 25 bp, Artificial
  probe
  misc_feature (1)..(25): SEQ ID NO: 7346; WAN024FP2-3; Start 1904; Stop 1928
gttacagaccaaagtgctgataaag

SEQ ID NO: 465628 - DNA, 25 bp, Artificial
  probe
  misc_feature (1)..(25): SEQ ID NO: 7346; WAN024FP2-3; Start 1966; Stop 1990
aggaacttatttgtcaatacttggt

SEQ ID NO: 465629 - DNA, 25 bp, Artificial
  probe
  misc_feature (1)..(25): SEQ ID NO: 7346; WAN024FP2-3; Start 1965; Stop 1989
caggaacttatttgtcaatacttgg

SEQ ID NO: 465630 - DNA, 25 bp, Artificial
  probe
  misc_feature (1)..(25): SEQ ID NO: 7346; WAN024FP2-3; Start 1978; Stop 2002
gtcaatacttggtatgattactgca

SEQ ID NO: 465631 - DNA, 25 bp, Artificial
  probe
  misc_feature (1)..(25): SEQ ID NO: 7346; WAN024FP2-3; Start 1908; Stop 1932
cagaccaaagtgctgataaagataa

SEQ ID NO: 465632 - DNA, 25 bp, Artificial
  probe
  misc_feature (1)..(25): SEQ ID NO: 7346; WAN024FP2-3; Start 1943; Stop 1967
ttgccaaatacaggagaaacaacag

SEQ ID NO: 465633 - DNA, 25 bp, Artificial
  probe
  misc_feature (1)..(25): SEQ ID NO: 7346; WAN024FP2-3; Start 1976; Stop 2000
ttgtcaatacttggtatgattactg

SEQ ID NO: 465634 - DNA, 25 bp, Artificial
  probe
  misc_feature (1)..(25): SEQ ID NO: 7346; WAN024FP2-3; Start 2008; Stop 2032
tgcaagcctattgtaccgtagtaag

SEQ ID NO: 465635 - DNA, 25 bp, Artificial
  probe
  misc_feature (1)..(25): SEQ ID NO: 7347; WAN024AA6; Start 152; Stop 176
aagtcatctctccaattcattcaag

SEQ ID NO: 465636 - DNA, 25 bp, Artificial
  probe
  misc_feature (1)..(25): SEQ ID NO: 7347; WAN024AA6; Start 153; Stop 177
agtcatctctccaattcattcaaga

SEQ ID NO: 465637 - DNA, 25 bp, Artificial
  probe
  misc_feature (1)..(25): SEQ ID NO: 7347; WAN024AA6; Start 154; Stop 178
gtcatctctccaattcattcaagaa

SEQ ID NO: 465638 - DNA, 25 bp, Artificial
  probe
  misc_feature (1)..(25): SEQ ID NO: 7347; WAN024AA6; Start 328; Stop 352
cttcaatagaatctaatgaccgagc

SEQ ID NO: 465639 - DNA, 25 bp, Artificial
  probe
  misc_feature (1)..(25): SEQ ID NO: 7347; WAN024AA6; Start 336; Stop 360
gaatctaatgaccgagctactgtat

SEQ ID NO: 465640 - DNA, 25 bp, Artificial
  probe
  misc_feature (1)..(25): SEQ ID NO: 7347; WAN024AA6; Start 333; Stop 357
atagaatctaatgaccgagctactg

SEQ ID NO: 465641 - DNA, 25 bp, Artificial
  probe
  misc_feature (1)..(25): SEQ ID NO: 7347; WAN024AA6; Start 337; Stop 361
aatctaatgaccgagctactgtatt

SEQ ID NO: 465642 - DNA, 25 bp, Artificial
  probe
  misc_feature (1)..(25): SEQ ID NO: 7347; WAN024AA6; Start 335; Stop 359
agaatctaatgaccgagctactgta

SEQ ID NO: 465643 - DNA, 25 bp, Artificial
  probe
  misc_feature (1)..(25): SEQ ID NO: 7347; WAN024AA6; Start 334; Stop 358
tagaatctaatgaccgagctactgt

SEQ ID NO: 465644 - DNA, 25 bp, Artificial
  probe
  misc_feature (1)..(25): SEQ ID NO: 7347; WAN024AA6; Start 327; Stop 351
tcttcaatagaatctaatgaccgag

SEQ ID NO: 465645 - DNA, 25 bp, Artificial
  probe
  misc_feature (1)..(25): SEQ ID NO: 7347; WAN024AA6; Start 332; Stop 356
aatagaatctaatgaccgagctact

SEQ ID NO: 465646 - DNA, 25 bp, Artificial
  probe
  misc_feature (1)..(25): SEQ ID NO: 7347; WAN024AA6; Start 331; Stop 355
caatagaatctaatgaccgagctac

SEQ ID NO: 465647 - DNA, 25 bp, Artificial
  probe
  misc_feature (1)..(25): SEQ ID NO: 7347; WAN024AA6; Start 339; Stop 363
tctaatgaccgagctactgtattac

SEQ ID NO: 465648 - DNA, 25 bp, Artificial
  probe
  misc_feature (1)..(25): SEQ ID NO: 7347; WAN024AA6; Start 329; Stop 353
ttcaatagaatctaatgaccgagct

SEQ ID NO: 465649 - DNA, 25 bp, Artificial
  probe
  misc_feature (1)..(25): SEQ ID NO: 7347; WAN024AA6; Start 19; Stop 43
atcttgttatagcacttagttacct

SEQ ID NO: 465650 - DNA, 25 bp, Artificial
  probe
  misc_feature (1)..(25): SEQ ID NO: 7347; WAN024AA6; Start 338; Stop 362
atctaatgaccgagctactgtatta

SEQ ID NO: 465651 - DNA, 25 bp, Artificial
  probe
  misc_feature (1)..(25): SEQ ID NO: 7347; WAN024AA6; Start 341; Stop 365
taatgaccgagctactgtattacac

SEQ ID NO: 465652 - DNA, 25 bp, Artificial
  probe
  misc_feature (1)..(25): SEQ ID NO: 7347; WAN024AA6; Start 141; Stop 165
acacctaaataaagtcatctctcca

SEQ ID NO: 465653 - DNA, 25 bp, Artificial
  probe
  misc_feature (1)..(25): SEQ ID NO: 7347; WAN024AA6; Start 340; Stop 364
ctaatgaccgagctactgtattaca

SEQ ID NO: 465654 - DNA, 25 bp, Artificial
  probe
  misc_feature (1)..(25): SEQ ID NO: 7347; WAN024AA6; Start 330; Stop 354
tcaatagaatctaatgaccgagcta

SEQ ID NO: 465655 - DNA, 25 bp, Artificial
  probe
  misc_feature (1)..(25): SEQ ID NO: 7347; WAN024AA6; Start 326; Stop 350
atcttcaatagaatctaatgaccga

SEQ ID NO: 465656 - DNA, 25 bp, Artificial
  probe
  misc_feature (1)..(25): SEQ ID NO: 7347; WAN024AA6; Start 151; Stop 175
aaagtcatctctccaattcattcaa

SEQ ID NO: 465657 - DNA, 25 bp, Artificial
  probe
  misc_feature (1)..(25): SEQ ID NO: 7347; WAN024AA6; Start 142; Stop 166
cacctaaataaagtcatctctccaa

SEQ ID NO: 465658 - DNA, 25 bp, Artificial
  probe
  misc_feature (1)..(25): SEQ ID NO: 7347; WAN024AA6; Start 140; Stop 164
aacacctaaataaagtcatctctcc

SEQ ID NO: 465659 - DNA, 25 bp, Artificial
  probe
  misc_feature (1)..(25): SEQ ID NO: 7347; WAN024AA6; Start 342; Stop 366
aatgaccgagctactgtattacaca

SEQ ID NO: 465660 - DNA, 25 bp, Artificial
  probe
  misc_feature (1)..(25): SEQ ID NO: 7347; WAN024AA6; Start 9; Stop 33
ccaccaatatatcttgttatagcac

SEQ ID NO: 465661 - DNA, 25 bp, Artificial
  probe
  misc_feature (1)..(25): SEQ ID NO: 7347; WAN024AA6; Start 2; Stop 26
actaactccaccaatatatcttgtt

SEQ ID NO: 465662 - DNA, 25 bp, Artificial
  probe
  misc_feature (1)..(25): SEQ ID NO: 7347; WAN024AA6; Start 20; Stop 44
tcttgttatagcacttagttaccta

SEQ ID NO: 465663 - DNA, 25 bp, Artificial
  probe
  misc_feature (1)..(25): SEQ ID NO: 7347; WAN024AA6; Start 8; Stop 32
tccaccaatatatcttgttatagca

SEQ ID NO: 465664 - DNA, 25 bp, Artificial
  probe
  misc_feature (1)..(25): SEQ ID NO: 7347; WAN024AA6; Start 155; Stop 179
tcatctctccaattcattcaagaaa

SEQ ID NO: 465665 - DNA, 25 bp, Artificial
  probe
  misc_feature (1)..(25): SEQ ID NO: 7347; WAN024AA6; Start 22; Stop 46
ttgttatagcacttagttacctaga

SEQ ID NO: 465666 - DNA, 25 bp, Artificial
  probe
  misc_feature (1)..(25): SEQ ID NO: 7347; WAN024AA6; Start 150; Stop 174
taaagtcatctctccaattcattca

SEQ ID NO: 465667 - DNA, 25 bp, Artificial
  probe
  misc_feature (1)..(25): SEQ ID NO: 7347; WAN024AA6; Start 21; Stop 45
cttgttatagcacttagttacctag

SEQ ID NO: 465668 - DNA, 25 bp, Artificial
  probe
  misc_feature (1)..(25): SEQ ID NO: 7348; WAN024BC9; Start 28; Stop 52
gttagtttccatctgcaacctcaaa

SEQ ID NO: 465669 - DNA, 25 bp, Artificial
  probe
  misc_feature (1)..(25): SEQ ID NO: 7348; WAN024BC9; Start 12; Stop 36
aatctcttcaaaccacgttagtttc

SEQ ID NO: 465670 - DNA, 25 bp, Artificial
  probe
  misc_feature (1)..(25): SEQ ID NO: 7348; WAN024BC9; Start 11; Stop 35
aaatctcttcaaaccacgttagttt

SEQ ID NO: 465671 - DNA, 25 bp, Artificial
  probe
  misc_feature (1)..(25): SEQ ID NO: 7348; WAN024BC9; Start 13; Stop 37
atctcttcaaaccacgttagtttcc

SEQ ID NO: 465672 - DNA, 25 bp, Artificial
  probe
  misc_feature (1)..(25): SEQ ID NO: 7348; WAN024BC9; Start 17; Stop 41
cttcaaaccacgttagtttccatct

SEQ ID NO: 465673 - DNA, 25 bp, Artificial
  probe
  misc_feature (1)..(25): SEQ ID NO: 7348; WAN024BC9; Start 16; Stop 40
tcttcaaaccacgttagtttccatc

SEQ ID NO: 465674 - DNA, 25 bp, Artificial
  probe
  misc_feature (1)..(25): SEQ ID NO: 7348; WAN024BC9; Start 15; Stop 39
ctcttcaaaccacgttagtttccat

SEQ ID NO: 465675 - DNA, 25 bp, Artificial
  probe
  misc_feature (1)..(25): SEQ ID NO: 7348; WAN024BC9; Start 18; Stop 42
ttcaaaccacgttagtttccatctg

SEQ ID NO: 465676 - DNA, 25 bp, Artificial
  probe
  misc_feature (1)..(25): SEQ ID NO: 7348; WAN024BC9; Start 9; Stop 33
gaaaatctcttcaaaccacgttagt

SEQ ID NO: 465677 - DNA, 25 bp, Artificial
  probe
  misc_feature (1)..(25): SEQ ID NO: 7348; WAN024BC9; Start 10; Stop 34
aaaatctcttcaaaccacgttagtt

SEQ ID NO: 465678 - DNA, 25 bp, Artificial
  probe
  misc_feature (1)..(25): SEQ ID NO: 7348; WAN024BC9; Start 29; Stop 53
ttagtttccatctgcaacctcaaaa

SEQ ID NO: 465679 - DNA, 25 bp, Artificial
  probe
  misc_feature (1)..(25): SEQ ID NO: 7348; WAN024BC9; Start 27; Stop 51
cgttagtttccatctgcaacctcaa

SEQ ID NO: 465680 - DNA, 25 bp, Artificial
  probe
  misc_feature (1)..(25): SEQ ID NO: 7348; WAN024BC9; Start 14; Stop 38
tctcttcaaaccacgttagtttcca

SEQ ID NO: 465681 - DNA, 25 bp, Artificial
  probe
  misc_feature (1)..(25): SEQ ID NO: 7348; WAN024BC9; Start 22; Stop 46
aaccacgttagtttccatctgcaac

SEQ ID NO: 465682 - DNA, 25 bp, Artificial
  probe
  misc_feature (1)..(25): SEQ ID NO: 7348; WAN024BC9; Start 25; Stop 49
cacgttagtttccatctgcaacctc

SEQ ID NO: 465683 - DNA, 25 bp, Artificial
  probe
  misc_feature (1)..(25): SEQ ID NO: 7348; WAN024BC9; Start 21; Stop 45
aaaccacgttagtttccatctgcaa

SEQ ID NO: 465684 - DNA, 25 bp, Artificial
  probe
  misc_feature (1)..(25): SEQ ID NO: 7348; WAN024BC9; Start 26; Stop 50
acgttagtttccatctgcaacctca

SEQ ID NO: 465685 - DNA, 25 bp, Artificial
  probe
  misc_feature (1)..(25): SEQ ID NO: 7348; WAN024BC9; Start 19; Stop 43
tcaaaccacgttagtttccatctgc

SEQ ID NO: 465686 - DNA, 25 bp, Artificial
  probe
  misc_feature (1)..(25): SEQ ID NO: 7348; WAN024BC9; Start 33; Stop 57
tttccatctgcaacctcaaaacact

SEQ ID NO: 465687 - DNA, 25 bp, Artificial
  probe
  misc_feature (1)..(25): SEQ ID NO: 7348; WAN024BC9; Start 30; Stop 54
tagtttccatctgcaacctcaaaac

SEQ ID NO: 465688 - DNA, 25 bp, Artificial
  probe
  misc_feature (1)..(25): SEQ ID NO: 7348; WAN024BC9; Start 20; Stop 44
caaaccacgttagtttccatctgca

SEQ ID NO: 465689 - DNA, 25 bp, Artificial
  probe
  misc_feature (1)..(25): SEQ ID NO: 7348; WAN024BC9; Start 32; Stop 56
gtttccatctgcaacctcaaaacac

SEQ ID NO: 465690 - DNA, 25 bp, Artificial
  probe
  misc_feature (1)..(25): SEQ ID NO: 7348; WAN024BC9; Start 31; Stop 55
agtttccatctgcaacctcaaaaca

SEQ ID NO: 465691 - DNA, 25 bp, Artificial
  probe
  misc_feature (1)..(25): SEQ ID NO: 7349; WAN024AA4; Start 93; Stop 117
cgaggatcacttgttaggattacat

SEQ ID NO: 465692 - DNA, 25 bp, Artificial
  probe
  misc_feature (1)..(25): SEQ ID NO: 7349; WAN024AA4; Start 91; Stop 115
gtcgaggatcacttgttaggattac

SEQ ID NO: 465693 - DNA, 25 bp, Artificial
  probe
  misc_feature (1)..(25): SEQ ID NO: 7349; WAN024AA4; Start 94; Stop 118
gaggatcacttgttaggattacatt

SEQ ID NO: 465694 - DNA, 25 bp, Artificial
  probe
  misc_feature (1)..(25): SEQ ID NO: 7349; WAN024AA4; Start 57; Stop 81
agtcttatctaggtaactaagtgct

SEQ ID NO: 465695 - DNA, 25 bp, Artificial
  probe
  misc_feature (1)..(25): SEQ ID NO: 7349; WAN024AA4; Start 90; Stop 114
agtcgaggatcacttgttaggatta

SEQ ID NO: 465696 - DNA, 25 bp, Artificial
  probe
  misc_feature (1)..(25): SEQ ID NO: 7349; WAN024AA4; Start 6; Stop 30
acataggttaaatcttagaacggct

SEQ ID NO: 465697 - DNA, 25 bp, Artificial
  probe
  misc_feature (1)..(25): SEQ ID NO: 7349; WAN024AA4; Start 5; Stop 29
aacataggttaaatcttagaacggc

SEQ ID NO: 465698 - DNA, 25 bp, Artificial
  probe
  misc_feature (1)..(25): SEQ ID NO: 7349; WAN024AA4; Start 92; Stop 116
tcgaggatcacttgttaggattaca

SEQ ID NO: 465699 - DNA, 25 bp, Artificial
  probe
  misc_feature (1)..(25): SEQ ID NO: 7349; WAN024AA4; Start 64; Stop 88
tctaggtaactaagtgctacaaaca

SEQ ID NO: 465700 - DNA, 25 bp, Artificial
  probe
  misc_feature (1)..(25): SEQ ID NO: 7349; WAN024AA4; Start 7; Stop 31
cataggttaaatcttagaacggctt

SEQ ID NO: 465701 - DNA, 25 bp, Artificial
  probe
  misc_feature (1)..(25): SEQ ID NO: 7349; WAN024AA4; Start 10; Stop 34
aggttaaatcttagaacggcttaaa

SEQ ID NO: 465702 - DNA, 25 bp, Artificial
  probe
  misc_feature (1)..(25): SEQ ID NO: 7349; WAN024AA4; Start 89; Stop 113
cagtcgaggatcacttgttaggatt

SEQ ID NO: 465703 - DNA, 25 bp, Artificial
  probe
  misc_feature (1)..(25): SEQ ID NO: 7349; WAN024AA4; Start 61; Stop 85
ttatctaggtaactaagtgctacaa

SEQ ID NO: 465704 - DNA, 25 bp, Artificial
  probe
  misc_feature (1)..(25): SEQ ID NO: 7349; WAN024AA4; Start 69; Stop 93
gtaactaagtgctacaaacacagtc

SEQ ID NO: 465705 - DNA, 25 bp, Artificial
  probe
  misc_feature (1)..(25): SEQ ID NO: 7349; WAN024AA4; Start 66; Stop 90
taggtaactaagtgctacaaacaca

SEQ ID NO: 465706 - DNA, 25 bp, Artificial
  probe
  misc_feature (1)..(25): SEQ ID NO: 7349; WAN024AA4; Start 63; Stop 87
atctaggtaactaagtgctacaaac

SEQ ID NO: 465707 - DNA, 25 bp, Artificial
  probe
  misc_feature (1)..(25): SEQ ID NO: 7349; WAN024AA4; Start 67; Stop 91
aggtaactaagtgctacaaacacag

SEQ ID NO: 465708 - DNA, 25 bp, Artificial
  probe
  misc_feature (1)..(25): SEQ ID NO: 7349; WAN024AA4; Start 60; Stop 84
cttatctaggtaactaagtgctaca

SEQ ID NO: 465709 - DNA, 25 bp, Artificial
  probe
  misc_feature (1)..(25): SEQ ID NO: 7349; WAN024AA4; Start 68; Stop 92
ggtaactaagtgctacaaacacagt

SEQ ID NO: 465710 - DNA, 25 bp, Artificial
  probe
  misc_feature (1)..(25): SEQ ID NO: 7349; WAN024AA4; Start 70; Stop 94
taactaagtgctacaaacacagtcg

SEQ ID NO: 465711 - DNA, 25 bp, Artificial
  probe
  misc_feature (1)..(25): SEQ ID NO: 7349; WAN024AA4; Start 65; Stop 89
ctaggtaactaagtgctacaaacac

SEQ ID NO: 465712 - DNA, 25 bp, Artificial
  probe
  misc_feature (1)..(25): SEQ ID NO: 7349; WAN024AA4; Start 59; Stop 83
tcttatctaggtaactaagtgctac

SEQ ID NO: 465713 - DNA, 25 bp, Artificial
  probe
  misc_feature (1)..(25): SEQ ID NO: 7349; WAN024AA4; Start 58; Stop 82
gtcttatctaggtaactaagtgcta

SEQ ID NO: 465714 - DNA, 25 bp, Artificial
  probe
  misc_feature (1)..(25): SEQ ID NO: 7349; WAN024AA4; Start 9; Stop 33
taggttaaatcttagaacggcttaa

SEQ ID NO: 465715 - DNA, 25 bp, Artificial
  probe
  misc_feature (1)..(25): SEQ ID NO: 7349; WAN024AA4; Start 8; Stop 32
ataggttaaatcttagaacggctta

SEQ ID NO: 465716 - DNA, 25 bp, Artificial
  probe
  misc_feature (1)..(25): SEQ ID NO: 7349; WAN024AA4; Start 56; Stop 80
tagtcttatctaggtaactaagtgc

SEQ ID NO: 465717 - DNA, 25 bp, Artificial
  probe
  misc_feature (1)..(25): SEQ ID NO: 7349; WAN024AA4; Start 95; Stop 119
aggatcacttgttaggattacattt

SEQ ID NO: 465718 - DNA, 25 bp, Artificial
  probe
  misc_feature (1)..(25): SEQ ID NO: 7349; WAN024AA4; Start 4; Stop 28
aaacataggttaaatcttagaacgg

SEQ ID NO: 465719 - DNA, 25 bp, Artificial
  probe
  misc_feature (1)..(25): SEQ ID NO: 7349; WAN024AA4; Start 88; Stop 112
acagtcgaggatcacttgttaggat

SEQ ID NO: 465720 - DNA, 25 bp, Artificial
  probe
  misc_feature (1)..(25): SEQ ID NO: 7349; WAN024AA4; Start 49; Stop 73
agggaaatagtcttatctaggtaac

SEQ ID NO: 465721 - DNA, 25 bp, Artificial
  probe
  misc_feature (1)..(25): SEQ ID NO: 7349; WAN024AA4; Start 62; Stop 86
tatctaggtaactaagtgctacaaa

SEQ ID NO: 465722 - DNA, 25 bp, Artificial
  probe
  misc_feature (1)..(25): SEQ ID NO: 7349; WAN024AA4; Start 50; Stop 74
gggaaatagtcttatctaggtaact

SEQ ID NO: 465723 - DNA, 25 bp, Artificial
  probe
  misc_feature (1)..(25): SEQ ID NO: 7349; WAN024AA4; Start 80; Stop 104
ctacaaacacagtcgaggatcactt

SEQ ID NO: 465724 - DNA, 25 bp, Artificial
  probe
  misc_feature (1)..(25): SEQ ID NO: 7350; WAN024ALT; Start 647; Stop 671
tcttcattagacttccacaatcagg

SEQ ID NO: 465725 - DNA, 25 bp, Artificial
  probe
  misc_feature (1)..(25): SEQ ID NO: 7350; WAN024ALT; Start 646; Stop 670
ttcttcattagacttccacaatcag

SEQ ID NO: 465726 - DNA, 25 bp, Artificial
  probe
  misc_feature (1)..(25): SEQ ID NO: 7350; WAN024ALT; Start 683; Stop 707
cctcataatccagcttagcgataat

SEQ ID NO: 465727 - DNA, 25 bp, Artificial
  probe
  misc_feature (1)..(25): SEQ ID NO: 7350; WAN024ALT; Start 684; Stop 708
ctcataatccagcttagcgataatt

SEQ ID NO: 465728 - DNA, 25 bp, Artificial
  probe
  misc_feature (1)..(25): SEQ ID NO: 7350; WAN024ALT; Start 648; Stop 672
cttcattagacttccacaatcaggg

SEQ ID NO: 465729 - DNA, 25 bp, Artificial
  probe
  misc_feature (1)..(25): SEQ ID NO: 7350; WAN024ALT; Start 696; Stop 720
cttagcgataatttctttgtgggta

SEQ ID NO: 465730 - DNA, 25 bp, Artificial
  probe
  misc_feature (1)..(25): SEQ ID NO: 7350; WAN024ALT; Start 697; Stop 721
ttagcgataatttctttgtgggtat

SEQ ID NO: 465731 - DNA, 25 bp, Artificial
  probe
  misc_feature (1)..(25): SEQ ID NO: 7350; WAN024ALT; Start 739; Stop 763
agaatcttgatgtttgggtctttaa

SEQ ID NO: 465732 - DNA, 25 bp, Artificial
  probe
  misc_feature (1)..(25): SEQ ID NO: 7350; WAN024ALT; Start 744; Stop 768
cttgatgtttgggtctttaatatcg

SEQ ID NO: 465733 - DNA, 25 bp, Artificial
  probe
  misc_feature (1)..(25): SEQ ID NO: 7350; WAN024ALT; Start 737; Stop 761
ctagaatcttgatgtttgggtcttt

SEQ ID NO: 465734 - DNA, 25 bp, Artificial
  probe
  misc_feature (1)..(25): SEQ ID NO: 7350; WAN024ALT; Start 645; Stop 669
tttcttcattagacttccacaatca

SEQ ID NO: 465735 - DNA, 25 bp, Artificial
  probe
  misc_feature (1)..(25): SEQ ID NO: 7350; WAN024ALT; Start 698; Stop 722
tagcgataatttctttgtgggtatc

SEQ ID NO: 465736 - DNA, 25 bp, Artificial
  probe
  misc_feature (1)..(25): SEQ ID NO: 7350; WAN024ALT; Start 682; Stop 706
gcctcataatccagcttagcgataa

SEQ ID NO: 465737 - DNA, 25 bp, Artificial
  probe
  misc_feature (1)..(25): SEQ ID NO: 7350; WAN024ALT; Start 900; Stop 924
acccactacaaatattatagagccg

SEQ ID NO: 465738 - DNA, 25 bp, Artificial
  probe
  misc_feature (1)..(25): SEQ ID NO: 7350; WAN024ALT; Start 901; Stop 925
cccactacaaatattatagagccga

SEQ ID NO: 465739 - DNA, 25 bp, Artificial
  probe
  misc_feature (1)..(25): SEQ ID NO: 7350; WAN024ALT; Start 699; Stop 723
agcgataatttctttgtgggtatcc

SEQ ID NO: 465740 - DNA, 25 bp, Artificial
  probe
  misc_feature (1)..(25): SEQ ID NO: 7350; WAN024ALT; Start 740; Stop 764
gaatcttgatgtttgggtctttaat

SEQ ID NO: 465741 - DNA, 25 bp, Artificial
  probe
  misc_feature (1)..(25): SEQ ID NO: 7350; WAN024ALT; Start 19; Stop 43
gtacaatgtgaaagcgatcaagaac

SEQ ID NO: 465742 - DNA, 25 bp, Artificial
  probe
  misc_feature (1)..(25): SEQ ID NO: 7350; WAN024ALT; Start 695; Stop 719
gcttagcgataatttctttgtgggt

SEQ ID NO: 465743 - DNA, 25 bp, Artificial
  probe
  misc_feature (1)..(25): SEQ ID NO: 7350; WAN024ALT; Start 738; Stop 762
tagaatcttgatgtttgggtcttta

SEQ ID NO: 465744 - DNA, 25 bp, Artificial
  probe
  misc_feature (1)..(25): SEQ ID NO: 7350; WAN024ALT; Start 716; Stop 740
gggtatccatattgatgatgtctag

SEQ ID NO: 465745 - DNA, 25 bp, Artificial
  probe
  misc_feature (1)..(25): SEQ ID NO: 7350; WAN024ALT; Start 690; Stop 714
atccagcttagcgataatttctttg

SEQ ID NO: 465746 - DNA, 25 bp, Artificial
  probe
  misc_feature (1)..(25): SEQ ID NO: 7350; WAN024ALT; Start 752; Stop 776
ttgggtctttaatatcgagcagttt

SEQ ID NO: 465747 - DNA, 25 bp, Artificial
  probe
  misc_feature (1)..(25): SEQ ID NO: 7350; WAN024ALT; Start 751; Stop 775
tttgggtctttaatatcgagcagtt

SEQ ID NO: 465748 - DNA, 25 bp, Artificial
  probe
  misc_feature (1)..(25): SEQ ID NO: 7350; WAN024ALT; Start 748; Stop 772
atgtttgggtctttaatatcgagca

SEQ ID NO: 465749 - DNA, 25 bp, Artificial
  probe
  misc_feature (1)..(25): SEQ ID NO: 7350; WAN024ALT; Start 747; Stop 771
gatgtttgggtctttaatatcgagc

SEQ ID NO: 465750 - DNA, 25 bp, Artificial
  probe
  misc_feature (1)..(25): SEQ ID NO: 7350; WAN024ALT; Start 693; Stop 717
cagcttagcgataatttctttgtgg

SEQ ID NO: 465751 - DNA, 25 bp, Artificial
  probe
  misc_feature (1)..(25): SEQ ID NO: 7350; WAN024ALT; Start 692; Stop 716
ccagcttagcgataatttctttgtg

SEQ ID NO: 465752 - DNA, 25 bp, Artificial
  probe
  misc_feature (1)..(25): SEQ ID NO: 7350; WAN024ALT; Start 691; Stop 715
tccagcttagcgataatttctttgt

SEQ ID NO: 465753 - DNA, 25 bp, Artificial
  probe
  misc_feature (1)..(25): SEQ ID NO: 7350; WAN024ALT; Start 714; Stop 738
gtgggtatccatattgatgatgtct

SEQ ID NO: 465754 - DNA, 25 bp, Artificial
  probe
  misc_feature (1)..(25): SEQ ID NO: 7350; WAN024ALT; Start 713; Stop 737
tgtgggtatccatattgatgatgtc

SEQ ID NO: 465755 - DNA, 25 bp, Artificial
  probe
  misc_feature (1)..(25): SEQ ID NO: 7350; WAN024ALT; Start 712; Stop 736
ttgtgggtatccatattgatgatgt

SEQ ID NO: 465756 - DNA, 25 bp, Artificial
  probe
  misc_feature (1)..(25): SEQ ID NO: 7350; WAN024ALT; Start 689; Stop 713
aatccagcttagcgataatttcttt

SEQ ID NO: 465757 - DNA, 25 bp, Artificial
  probe
  misc_feature (1)..(25): SEQ ID NO: 7351; WAN024F6Z; Start 101; Stop 125
tttgtctgtaacatcgaagttgtgt

SEQ ID NO: 465758 - DNA, 25 bp, Artificial
  probe
  misc_feature (1)..(25): SEQ ID NO: 7351; WAN024F6Z; Start 102; Stop 126
ttgtctgtaacatcgaagttgtgtt

SEQ ID NO: 465759 - DNA, 25 bp, Artificial
  probe
  misc_feature (1)..(25): SEQ ID NO: 7351; WAN024F6Z; Start 90; Stop 114
attttgccagttttgtctgtaacat

SEQ ID NO: 465760 - DNA, 25 bp, Artificial
  probe
  misc_feature (1)..(25): SEQ ID NO: 7351; WAN024F6Z; Start 89; Stop 113
aattttgccagttttgtctgtaaca

SEQ ID NO: 465761 - DNA, 25 bp, Artificial
  probe
  misc_feature (1)..(25): SEQ ID NO: 7351; WAN024F6Z; Start 86; Stop 110
gctaattttgccagttttgtctgta

SEQ ID NO: 465762 - DNA, 25 bp, Artificial
  probe
  misc_feature (1)..(25): SEQ ID NO: 7351; WAN024F6Z; Start 91; Stop 115
ttttgccagttttgtctgtaacatc

SEQ ID NO: 465763 - DNA, 25 bp, Artificial
  probe
  misc_feature (1)..(25): SEQ ID NO: 7351; WAN024F6Z; Start 88; Stop 112
taattttgccagttttgtctgtaac

SEQ ID NO: 465764 - DNA, 25 bp, Artificial
  probe
  misc_feature (1)..(25): SEQ ID NO: 7351; WAN024F6Z; Start 80; Stop 104
ttttgagctaattttgccagttttg

SEQ ID NO: 465765 - DNA, 25 bp, Artificial
  probe
  misc_feature (1)..(25): SEQ ID NO: 7351; WAN024F6Z; Start 79; Stop 103
gttttgagctaattttgccagtttt

SEQ ID NO: 465766 - DNA, 25 bp, Artificial
  probe
  misc_feature (1)..(25): SEQ ID NO: 7351; WAN024F6Z; Start 81; Stop 105
tttgagctaattttgccagttttgt

SEQ ID NO: 465767 - DNA, 25 bp, Artificial
  probe
  misc_feature (1)..(25): SEQ ID NO: 7351; WAN024F6Z; Start 78; Stop 102
tgttttgagctaattttgccagttt

SEQ ID NO: 465768 - DNA, 25 bp, Artificial
  probe
  misc_feature (1)..(25): SEQ ID NO: 7351; WAN024F6Z; Start 87; Stop 111
ctaattttgccagttttgtctgtaa

SEQ ID NO: 465769 - DNA, 25 bp, Artificial
  probe
  misc_feature (1)..(25): SEQ ID NO: 7351; WAN024F6Z; Start 49; Stop 73
cgtcagttttatcagtaatctcaaa

SEQ ID NO: 465770 - DNA, 25 bp, Artificial
  probe
  misc_feature (1)..(25): SEQ ID NO: 7351; WAN024F6Z; Start 82; Stop 106
ttgagctaattttgccagttttgtc

SEQ ID NO: 465771 - DNA, 25 bp, Artificial
  probe
  misc_feature (1)..(25): SEQ ID NO: 7351; WAN024F6Z; Start 77; Stop 101
gtgttttgagctaattttgccagtt

SEQ ID NO: 465772 - DNA, 25 bp, Artificial
  probe
  misc_feature (1)..(25): SEQ ID NO: 7351; WAN024F6Z; Start 45; Stop 69
accacgtcagttttatcagtaatct

SEQ ID NO: 465773 - DNA, 25 bp, Artificial
  probe
  misc_feature (1)..(25): SEQ ID NO: 7351; WAN024F6Z; Start 46; Stop 70
ccacgtcagttttatcagtaatctc

SEQ ID NO: 465774 - DNA, 25 bp, Artificial
  probe
  misc_feature (1)..(25): SEQ ID NO: 7351; WAN024F6Z; Start 73; Stop 97
aacagtgttttgagctaattttgcc

SEQ ID NO: 465775 - DNA, 25 bp, Artificial
  probe
  misc_feature (1)..(25): SEQ ID NO: 7351; WAN024F6Z; Start 83; Stop 107
tgagctaattttgccagttttgtct

SEQ ID NO: 465776 - DNA, 25 bp, Artificial
  probe
  misc_feature (1)..(25): SEQ ID NO: 7351; WAN024F6Z; Start 75; Stop 99
cagtgttttgagctaattttgccag

SEQ ID NO: 465777 - DNA, 25 bp, Artificial
  probe
  misc_feature (1)..(25): SEQ ID NO: 7351; WAN024F6Z; Start 103; Stop 127
tgtctgtaacatcgaagttgtgttt

SEQ ID NO: 465778 - DNA, 25 bp, Artificial
  probe
  misc_feature (1)..(25): SEQ ID NO: 7351; WAN024F6Z; Start 47; Stop 71
cacgtcagttttatcagtaatctca

SEQ ID NO: 465779 - DNA, 25 bp, Artificial
  probe
  misc_feature (1)..(25): SEQ ID NO: 7351; WAN024F6Z; Start 44; Stop 68
aaccacgtcagttttatcagtaatc

SEQ ID NO: 465780 - DNA, 25 bp, Artificial
  probe
  misc_feature (1)..(25): SEQ ID NO: 7351; WAN024F6Z; Start 98; Stop 122
agttttgtctgtaacatcgaagttg

SEQ ID NO: 465781 - DNA, 25 bp, Artificial
  probe
  misc_feature (1)..(25): SEQ ID NO: 7351; WAN024F6Z; Start 76; Stop 100
agtgttttgagctaattttgccagt

SEQ ID NO: 465782 - DNA, 25 bp, Artificial
  probe
  misc_feature (1)..(25): SEQ ID NO: 7351; WAN024F6Z; Start 100; Stop 124
ttttgtctgtaacatcgaagttgtg

SEQ ID NO: 465783 - DNA, 25 bp, Artificial
  probe
  misc_feature (1)..(25): SEQ ID NO: 7351; WAN024F6Z; Start 99; Stop 123
gttttgtctgtaacatcgaagttgt

SEQ ID NO: 465784 - DNA, 25 bp, Artificial
  probe
  misc_feature (1)..(25): SEQ ID NO: 7351; WAN024F6Z; Start 97; Stop 121
cagttttgtctgtaacatcgaagtt

SEQ ID NO: 465785 - DNA, 25 bp, Artificial
  probe
  misc_feature (1)..(25): SEQ ID NO: 7351; WAN024F6Z; Start 74; Stop 98
acagtgttttgagctaattttgcca

SEQ ID NO: 465786 - DNA, 25 bp, Artificial
  probe
  misc_feature (1)..(25): SEQ ID NO: 7351; WAN024F6Z; Start 92; Stop 116
tttgccagttttgtctgtaacatcg

SEQ ID NO: 465787 - DNA, 25 bp, Artificial
  probe
  misc_feature (1)..(25): SEQ ID NO: 7351; WAN024F6Z; Start 48; Stop 72
acgtcagttttatcagtaatctcaa

SEQ ID NO: 465788 - DNA, 25 bp, Artificial
  probe
  misc_feature (1)..(25): SEQ ID NO: 7351; WAN024F6Z; Start 7; Stop 31
cttcatgttttcctaattcttttcg

SEQ ID NO: 465789 - DNA, 25 bp, Artificial
  probe
  misc_feature (1)..(25): SEQ ID NO: 7351; WAN024F6Z; Start 84; Stop 108
gagctaattttgccagttttgtctg

SEQ ID NO: 465790 - DNA, 25 bp, Artificial
  probe
  misc_feature (1)..(25): SEQ ID NO: 7352; WAN0249O3; Start 11; Stop 35
acaggaaaagccttataatataggg

SEQ ID NO: 465791 - DNA, 25 bp, Artificial
  probe
  misc_feature (1)..(25): SEQ ID NO: 7352; WAN0249O3; Start 2; Stop 26
ataaatacaacaggaaaagccttat

SEQ ID NO: 465792 - DNA, 25 bp, Artificial
  probe
  misc_feature (1)..(25): SEQ ID NO: 7352; WAN0249O3; Start 4; Stop 28
aaatacaacaggaaaagccttataa

SEQ ID NO: 465793 - DNA, 25 bp, Artificial
  probe
  misc_feature (1)..(25): SEQ ID NO: 7352; WAN0249O3; Start 5; Stop 29
aatacaacaggaaaagccttataat

SEQ ID NO: 465794 - DNA, 25 bp, Artificial
  probe
  misc_feature (1)..(25): SEQ ID NO: 7352; WAN0249O3; Start 3; Stop 27
taaatacaacaggaaaagccttata

SEQ ID NO: 465795 - DNA, 25 bp, Artificial
  probe
  misc_feature (1)..(25): SEQ ID NO: 7352; WAN0249O3; Start 1; Stop 25
tataaatacaacaggaaaagcctta

SEQ ID NO: 465796 - DNA, 25 bp, Artificial
  probe
  misc_feature (1)..(25): SEQ ID NO: 7352; WAN0249O3; Start 12; Stop 36
caggaaaagccttataatatagggc

SEQ ID NO: 465797 - DNA, 25 bp, Artificial
  probe
  misc_feature (1)..(25): SEQ ID NO: 7352; WAN0249O3; Start 10; Stop 34
aacaggaaaagccttataatatagg

SEQ ID NO: 465798 - DNA, 25 bp, Artificial
  probe
  misc_feature (1)..(25): SEQ ID NO: 7352; WAN0249O3; Start 8; Stop 32
acaacaggaaaagccttataatata

SEQ ID NO: 465799 - DNA, 25 bp, Artificial
  probe
  misc_feature (1)..(25): SEQ ID NO: 7352; WAN0249O3; Start 7; Stop 31
tacaacaggaaaagccttataatat

SEQ ID NO: 465800 - DNA, 25 bp, Artificial
  probe
  misc_feature (1)..(25): SEQ ID NO: 7352; WAN0249O3; Start 6; Stop 30
atacaacaggaaaagccttataata

SEQ ID NO: 465801 - DNA, 25 bp, Artificial
  probe
  misc_feature (1)..(25): SEQ ID NO: 7352; WAN0249O3; Start 9; Stop 33
caacaggaaaagccttataatatag

SEQ ID NO: 465802 - DNA, 25 bp, Artificial
  probe
  misc_feature (1)..(25): SEQ ID NO: 7353; WAN024DJB; Start 36; Stop 60
tgatgaggagataagatacgaggat

SEQ ID NO: 465803 - DNA, 25 bp, Artificial
  probe
  misc_feature (1)..(25): SEQ ID NO: 7353; WAN024DJB; Start 35; Stop 59
ttgatgaggagataagatacgagga

SEQ ID NO: 465804 - DNA, 25 bp, Artificial
  probe
  misc_feature (1)..(25): SEQ ID NO: 7353; WAN024DJB; Start 34; Stop 58
attgatgaggagataagatacgagg

SEQ ID NO: 465805 - DNA, 25 bp, Artificial
  probe
  misc_feature (1)..(25): SEQ ID NO: 7353; WAN024DJB; Start 37; Stop 61
gatgaggagataagatacgaggata

SEQ ID NO: 465806 - DNA, 25 bp, Artificial
  probe
  misc_feature (1)..(25): SEQ ID NO: 7353; WAN024DJB; Start 38; Stop 62
atgaggagataagatacgaggataa

SEQ ID NO: 465807 - DNA, 25 bp, Artificial
  probe
  misc_feature (1)..(25): SEQ ID NO: 7353; WAN024DJB; Start 317; Stop 341
attccatacaagtcttgatagcagc

SEQ ID NO: 465808 - DNA, 25 bp, Artificial
  probe
  misc_feature (1)..(25): SEQ ID NO: 7353; WAN024DJB; Start 222; Stop 246
tgaggaatacagtaatagagcttgg

SEQ ID NO: 465809 - DNA, 25 bp, Artificial
  probe
  misc_feature (1)..(25): SEQ ID NO: 7353; WAN024DJB; Start 316; Stop 340
tattccatacaagtcttgatagcag

SEQ ID NO: 465810 - DNA, 25 bp, Artificial
  probe
  misc_feature (1)..(25): SEQ ID NO: 7353; WAN024DJB; Start 321; Stop 345
catacaagtcttgatagcagcttca

SEQ ID NO: 465811 - DNA, 25 bp, Artificial
  probe
  misc_feature (1)..(25): SEQ ID NO: 7353; WAN024DJB; Start 33; Stop 57
tattgatgaggagataagatacgag

SEQ ID NO: 465812 - DNA, 25 bp, Artificial
  probe
  misc_feature (1)..(25): SEQ ID NO: 7353; WAN024DJB; Start 71; Stop 95
tgagtgaaagtaagatagagtctgc

SEQ ID NO: 465813 - DNA, 25 bp, Artificial
  probe
  misc_feature (1)..(25): SEQ ID NO: 7353; WAN024DJB; Start 27; Stop 51
acttgttattgatgaggagataaga

SEQ ID NO: 465814 - DNA, 25 bp, Artificial
  probe
  misc_feature (1)..(25): SEQ ID NO: 7353; WAN024DJB; Start 72; Stop 96
gagtgaaagtaagatagagtctgct

SEQ ID NO: 465815 - DNA, 25 bp, Artificial
  probe
  misc_feature (1)..(25): SEQ ID NO: 7353; WAN024DJB; Start 320; Stop 344
ccatacaagtcttgatagcagcttc

SEQ ID NO: 465816 - DNA, 25 bp, Artificial
  probe
  misc_feature (1)..(25): SEQ ID NO: 7353; WAN024DJB; Start 319; Stop 343
tccatacaagtcttgatagcagctt

SEQ ID NO: 465817 - DNA, 25 bp, Artificial
  probe
  misc_feature (1)..(25): SEQ ID NO: 7353; WAN024DJB; Start 318; Stop 342
ttccatacaagtcttgatagcagct

SEQ ID NO: 465818 - DNA, 25 bp, Artificial
  probe
  misc_feature (1)..(25): SEQ ID NO: 7353; WAN024DJB; Start 221; Stop 245
atgaggaatacagtaatagagcttg

SEQ ID NO: 465819 - DNA, 25 bp, Artificial
  probe
  misc_feature (1)..(25): SEQ ID NO: 7353; WAN024DJB; Start 315; Stop 339
atattccatacaagtcttgatagca

SEQ ID NO: 465820 - DNA, 25 bp, Artificial
  probe
  misc_feature (1)..(25): SEQ ID NO: 7353; WAN024DJB; Start 73; Stop 97
agtgaaagtaagatagagtctgctc

SEQ ID NO: 465821 - DNA, 25 bp, Artificial
  probe
  misc_feature (1)..(25): SEQ ID NO: 7353; WAN024DJB; Start 39; Stop 63
tgaggagataagatacgaggataaa

SEQ ID NO: 465822 - DNA, 25 bp, Artificial
  probe
  misc_feature (1)..(25): SEQ ID NO: 7353; WAN024DJB; Start 31; Stop 55
gttattgatgaggagataagatacg

SEQ ID NO: 465823 - DNA, 25 bp, Artificial
  probe
  misc_feature (1)..(25): SEQ ID NO: 7353; WAN024DJB; Start 88; Stop 112
gagtctgctcttgaaagttacagta

SEQ ID NO: 465824 - DNA, 25 bp, Artificial
  probe
  misc_feature (1)..(25): SEQ ID NO: 7353; WAN024DJB; Start 32; Stop 56
ttattgatgaggagataagatacga

SEQ ID NO: 465825 - DNA, 25 bp, Artificial
  probe
  misc_feature (1)..(25): SEQ ID NO: 7353; WAN024DJB; Start 89; Stop 113
agtctgctcttgaaagttacagtaa

SEQ ID NO: 465826 - DNA, 25 bp, Artificial
  probe
  misc_feature (1)..(25): SEQ ID NO: 7353; WAN024DJB; Start 26; Stop 50
aacttgttattgatgaggagataag

SEQ ID NO: 465827 - DNA, 25 bp, Artificial
  probe
  misc_feature (1)..(25): SEQ ID NO: 7353; WAN024DJB; Start 92; Stop 116
ctgctcttgaaagttacagtaatca

SEQ ID NO: 465828 - DNA, 25 bp, Artificial
  probe
  misc_feature (1)..(25): SEQ ID NO: 7353; WAN024DJB; Start 90; Stop 114
gtctgctcttgaaagttacagtaat

SEQ ID NO: 465829 - DNA, 25 bp, Artificial
  probe
  misc_feature (1)..(25): SEQ ID NO: 7353; WAN024DJB; Start 225; Stop 249
ggaatacagtaatagagcttgggaa

SEQ ID NO: 465830 - DNA, 25 bp, Artificial
  probe
  misc_feature (1)..(25): SEQ ID NO: 7353; WAN024DJB; Start 223; Stop 247
gaggaatacagtaatagagcttggg

SEQ ID NO: 465831 - DNA, 25 bp, Artificial
  probe
  misc_feature (1)..(25): SEQ ID NO: 7353; WAN024DJB; Start 91; Stop 115
tctgctcttgaaagttacagtaatc

SEQ ID NO: 465832 - DNA, 25 bp, Artificial
  probe
  misc_feature (1)..(25): SEQ ID NO: 7353; WAN024DJB; Start 224; Stop 248
aggaatacagtaatagagcttggga

SEQ ID NO: 465833 - DNA, 25 bp, Artificial
  probe
  misc_feature (1)..(25): SEQ ID NO: 7353; WAN024DJB; Start 70; Stop 94
ttgagtgaaagtaagatagagtctg

SEQ ID NO: 465834 - DNA, 25 bp, Artificial
  probe
  misc_feature (1)..(25): SEQ ID NO: 7353; WAN024DJB; Start 342; Stop 366
ttcaactgaagatgtatcaaactga

SEQ ID NO: 465835 - DNA, 25 bp, Artificial
  probe
  misc_feature (1)..(25): SEQ ID NO: 7354; WAN024CPZ; Start 1075; Stop 1099
cagcatctgaatcagcatcaacgag

SEQ ID NO: 465836 - DNA, 25 bp, Artificial
  probe
  misc_feature (1)..(25): SEQ ID NO: 7354; WAN024CPZ; Start 18; Stop 42
gcatctgaatccgcatcaacaagtg

SEQ ID NO: 465837 - DNA, 25 bp, Artificial
  probe
  misc_feature (1)..(25): SEQ ID NO: 7354; WAN024CPZ; Start 16; Stop 40
cagcatctgaatccgcatcaacaag

SEQ ID NO: 465838 - DNA, 25 bp, Artificial
  probe
  misc_feature (1)..(25): SEQ ID NO: 7354; WAN024CPZ; Start 1077; Stop 1101
gcatctgaatcagcatcaacgagtg

SEQ ID NO: 465839 - DNA, 25 bp, Artificial
  probe
  misc_feature (1)..(25): SEQ ID NO: 7354; WAN024CPZ; Start 17; Stop 41
agcatctgaatccgcatcaacaagt

SEQ ID NO: 465840 - DNA, 25 bp, Artificial
  probe
  misc_feature (1)..(25): SEQ ID NO: 7354; WAN024CPZ; Start 1076; Stop 1100
agcatctgaatcagcatcaacgagt

SEQ ID NO: 465841 - DNA, 25 bp, Artificial
  probe
  misc_feature (1)..(25): SEQ ID NO: 7354; WAN024CPZ; Start 1111; Stop 1135
cagcaagtacctcagcttctgaatc

SEQ ID NO: 465842 - DNA, 25 bp, Artificial
  probe
  misc_feature (1)..(25): SEQ ID NO: 7354; WAN024CPZ; Start 1078; Stop 1102
catctgaatcagcatcaacgagtgc

SEQ ID NO: 465843 - DNA, 25 bp, Artificial
  probe
  misc_feature (1)..(25): SEQ ID NO: 7354; WAN024CPZ; Start 1072; Stop 1096
cctcagcatctgaatcagcatcaac

SEQ ID NO: 465844 - DNA, 25 bp, Artificial
  probe
  misc_feature (1)..(25): SEQ ID NO: 7354; WAN024CPZ; Start 1110; Stop 1134
tcagcaagtacctcagcttctgaat

SEQ ID NO: 465845 - DNA, 25 bp, Artificial
  probe
  misc_feature (1)..(25): SEQ ID NO: 7354; WAN024CPZ; Start 1073; Stop 1097
ctcagcatctgaatcagcatcaacg

SEQ ID NO: 465846 - DNA, 25 bp, Artificial
  probe
  misc_feature (1)..(25): SEQ ID NO: 7354; WAN024CPZ; Start 1071; Stop 1095
acctcagcatctgaatcagcatcaa

SEQ ID NO: 465847 - DNA, 25 bp, Artificial
  probe
  misc_feature (1)..(25): SEQ ID NO: 7354; WAN024CPZ; Start 19; Stop 43
catctgaatccgcatcaacaagtgc

SEQ ID NO: 465848 - DNA, 25 bp, Artificial
  probe
  misc_feature (1)..(25): SEQ ID NO: 7354; WAN024CPZ; Start 1108; Stop 1132
cttcagcaagtacctcagcttctga

SEQ ID NO: 465849 - DNA, 25 bp, Artificial
  probe
  misc_feature (1)..(25): SEQ ID NO: 7354; WAN024CPZ; Start 1074; Stop 1098
tcagcatctgaatcagcatcaacga

SEQ ID NO: 465850 - DNA, 25 bp, Artificial
  probe
  misc_feature (1)..(25): SEQ ID NO: 7354; WAN024CPZ; Start 13; Stop 37
catcagcatctgaatccgcatcaac

SEQ ID NO: 465851 - DNA, 25 bp, Artificial
  probe
  misc_feature (1)..(25): SEQ ID NO: 7354; WAN024CPZ; Start 1112; Stop 1136
agcaagtacctcagcttctgaatcg

SEQ ID NO: 465852 - DNA, 25 bp, Artificial
  probe
  misc_feature (1)..(25): SEQ ID NO: 7354; WAN024CPZ; Start 1; Stop 25
tatctgcaagcacatcagcatctga

SEQ ID NO: 465853 - DNA, 25 bp, Artificial
  probe
  misc_feature (1)..(25): SEQ ID NO: 7354; WAN024CPZ; Start 1070; Stop 1094
cacctcagcatctgaatcagcatca

SEQ ID NO: 465854 - DNA, 25 bp, Artificial
  probe
  misc_feature (1)..(25): SEQ ID NO: 7354; WAN024CPZ; Start 14; Stop 38
atcagcatctgaatccgcatcaaca

SEQ ID NO: 465855 - DNA, 25 bp, Artificial
  probe
  misc_feature (1)..(25): SEQ ID NO: 7354; WAN024CPZ; Start 12; Stop 36
acatcagcatctgaatccgcatcaa

SEQ ID NO: 465856 - DNA, 25 bp, Artificial
  probe
  misc_feature (1)..(25): SEQ ID NO: 7354; WAN024CPZ; Start 15; Stop 39
tcagcatctgaatccgcatcaacaa

SEQ ID NO: 465857 - DNA, 25 bp, Artificial
  probe
  misc_feature (1)..(25): SEQ ID NO: 7354; WAN024CPZ; Start 4; Stop 28
ctgcaagcacatcagcatctgaatc

SEQ ID NO: 465858 - DNA, 25 bp, Artificial
  probe
  misc_feature (1)..(25): SEQ ID NO: 7354; WAN024CPZ; Start 3; Stop 27
tctgcaagcacatcagcatctgaat

SEQ ID NO: 465859 - DNA, 25 bp, Artificial
  probe
  misc_feature (1)..(25): SEQ ID NO: 7354; WAN024CPZ; Start 2; Stop 26
atctgcaagcacatcagcatctgaa

SEQ ID NO: 465860 - DNA, 25 bp, Artificial
  probe
  misc_feature (1)..(25): SEQ ID NO: 7355; WAN024AA5; Start 199; Stop 223
cttgaatgaattggagagatgactt

SEQ ID NO: 465861 - DNA, 25 bp, Artificial
  probe
  misc_feature (1)..(25): SEQ ID NO: 7355; WAN024AA5; Start 198; Stop 222
tcttgaatgaattggagagatgact

SEQ ID NO: 465862 - DNA, 25 bp, Artificial
  probe
  misc_feature (1)..(25): SEQ ID NO: 7355; WAN024AA5; Start 197; Stop 221
ttcttgaatgaattggagagatgac

SEQ ID NO: 465863 - DNA, 25 bp, Artificial
  probe
  misc_feature (1)..(25): SEQ ID NO: 7355; WAN024AA5; Start 23; Stop 47
gctcggtcattagattctattgaag

SEQ ID NO: 465864 - DNA, 25 bp, Artificial
  probe
  misc_feature (1)..(25): SEQ ID NO: 7355; WAN024AA5; Start 15; Stop 39
atacagtagctcggtcattagattc

SEQ ID NO: 465865 - DNA, 25 bp, Artificial
  probe
  misc_feature (1)..(25): SEQ ID NO: 7355; WAN024AA5; Start 18; Stop 42
cagtagctcggtcattagattctat

SEQ ID NO: 465866 - DNA, 25 bp, Artificial
  probe
  misc_feature (1)..(25): SEQ ID NO: 7355; WAN024AA5; Start 17; Stop 41
acagtagctcggtcattagattcta

SEQ ID NO: 465867 - DNA, 25 bp, Artificial
  probe
  misc_feature (1)..(25): SEQ ID NO: 7355; WAN024AA5; Start 16; Stop 40
tacagtagctcggtcattagattct

SEQ ID NO: 465868 - DNA, 25 bp, Artificial
  probe
  misc_feature (1)..(25): SEQ ID NO: 7355; WAN024AA5; Start 14; Stop 38
aatacagtagctcggtcattagatt

SEQ ID NO: 465869 - DNA, 25 bp, Artificial
  probe
  misc_feature (1)..(25): SEQ ID NO: 7355; WAN024AA5; Start 24; Stop 48
ctcggtcattagattctattgaaga

SEQ ID NO: 465870 - DNA, 25 bp, Artificial
  probe
  misc_feature (1)..(25): SEQ ID NO: 7355; WAN024AA5; Start 20; Stop 44
gtagctcggtcattagattctattg

SEQ ID NO: 465871 - DNA, 25 bp, Artificial
  probe
  misc_feature (1)..(25): SEQ ID NO: 7355; WAN024AA5; Start 19; Stop 43
agtagctcggtcattagattctatt

SEQ ID NO: 465872 - DNA, 25 bp, Artificial
  probe
  misc_feature (1)..(25): SEQ ID NO: 7355; WAN024AA5; Start 12; Stop 36
gtaatacagtagctcggtcattaga

SEQ ID NO: 465873 - DNA, 25 bp, Artificial
  probe
  misc_feature (1)..(25): SEQ ID NO: 7355; WAN024AA5; Start 22; Stop 46
agctcggtcattagattctattgaa

SEQ ID NO: 465874 - DNA, 25 bp, Artificial
  probe
  misc_feature (1)..(25): SEQ ID NO: 7355; WAN024AA5; Start 332; Stop 356
aggtaactaagtgctataacaagat

SEQ ID NO: 465875 - DNA, 25 bp, Artificial
  probe
  misc_feature (1)..(25): SEQ ID NO: 7355; WAN024AA5; Start 13; Stop 37
taatacagtagctcggtcattagat

SEQ ID NO: 465876 - DNA, 25 bp, Artificial
  probe
  misc_feature (1)..(25): SEQ ID NO: 7355; WAN024AA5; Start 210; Stop 234
tggagagatgactttatttaggtgt

SEQ ID NO: 465877 - DNA, 25 bp, Artificial
  probe
  misc_feature (1)..(25): SEQ ID NO: 7355; WAN024AA5; Start 10; Stop 34
gtgtaatacagtagctcggtcatta

SEQ ID NO: 465878 - DNA, 25 bp, Artificial
  probe
  misc_feature (1)..(25): SEQ ID NO: 7355; WAN024AA5; Start 11; Stop 35
tgtaatacagtagctcggtcattag

SEQ ID NO: 465879 - DNA, 25 bp, Artificial
  probe
  misc_feature (1)..(25): SEQ ID NO: 7355; WAN024AA5; Start 21; Stop 45
tagctcggtcattagattctattga

SEQ ID NO: 465880 - DNA, 25 bp, Artificial
  probe
  misc_feature (1)..(25): SEQ ID NO: 7355; WAN024AA5; Start 25; Stop 49
tcggtcattagattctattgaagat

SEQ ID NO: 465881 - DNA, 25 bp, Artificial
  probe
  misc_feature (1)..(25): SEQ ID NO: 7355; WAN024AA5; Start 200; Stop 224
ttgaatgaattggagagatgacttt

SEQ ID NO: 465882 - DNA, 25 bp, Artificial
  probe
  misc_feature (1)..(25): SEQ ID NO: 7355; WAN024AA5; Start 211; Stop 235
ggagagatgactttatttaggtgtt

SEQ ID NO: 465883 - DNA, 25 bp, Artificial
  probe
  misc_feature (1)..(25): SEQ ID NO: 7355; WAN024AA5; Start 209; Stop 233
ttggagagatgactttatttaggtg

SEQ ID NO: 465884 - DNA, 25 bp, Artificial
  probe
  misc_feature (1)..(25): SEQ ID NO: 7355; WAN024AA5; Start 9; Stop 33
tgtgtaatacagtagctcggtcatt

SEQ ID NO: 465885 - DNA, 25 bp, Artificial
  probe
  misc_feature (1)..(25): SEQ ID NO: 7355; WAN024AA5; Start 349; Stop 373
aacaagatatattggtggagttagt

SEQ ID NO: 465886 - DNA, 25 bp, Artificial
  probe
  misc_feature (1)..(25): SEQ ID NO: 7355; WAN024AA5; Start 342; Stop 366
gtgctataacaagatatattggtgg

SEQ ID NO: 465887 - DNA, 25 bp, Artificial
  probe
  misc_feature (1)..(25): SEQ ID NO: 7355; WAN024AA5; Start 331; Stop 355
taggtaactaagtgctataacaaga

SEQ ID NO: 465888 - DNA, 25 bp, Artificial
  probe
  misc_feature (1)..(25): SEQ ID NO: 7355; WAN024AA5; Start 343; Stop 367
tgctataacaagatatattggtgga

SEQ ID NO: 465889 - DNA, 25 bp, Artificial
  probe
  misc_feature (1)..(25): SEQ ID NO: 7355; WAN024AA5; Start 196; Stop 220
tttcttgaatgaattggagagatga

SEQ ID NO: 465890 - DNA, 25 bp, Artificial
  probe
  misc_feature (1)..(25): SEQ ID NO: 7355; WAN024AA5; Start 329; Stop 353
tctaggtaactaagtgctataacaa

SEQ ID NO: 465891 - DNA, 25 bp, Artificial
  probe
  misc_feature (1)..(25): SEQ ID NO: 7355; WAN024AA5; Start 201; Stop 225
tgaatgaattggagagatgacttta

SEQ ID NO: 465892 - DNA, 25 bp, Artificial
  probe
  misc_feature (1)..(25): SEQ ID NO: 7355; WAN024AA5; Start 330; Stop 354
ctaggtaactaagtgctataacaag

SEQ ID NO: 465893 - DNA, 25 bp, Artificial
  probe
  misc_feature (1)..(25): SEQ ID NO: 7356; WAN024AZ6; Start 24; Stop 48
ccttatctttgggcttagtcatttg

SEQ ID NO: 465894 - DNA, 25 bp, Artificial
  probe
  misc_feature (1)..(25): SEQ ID NO: 7356; WAN024AZ6; Start 25; Stop 49
cttatctttgggcttagtcatttga

SEQ ID NO: 465895 - DNA, 25 bp, Artificial
  probe
  misc_feature (1)..(25): SEQ ID NO: 7356; WAN024AZ6; Start 28; Stop 52
atctttgggcttagtcatttgatac

SEQ ID NO: 465896 - DNA, 25 bp, Artificial
  probe
  misc_feature (1)..(25): SEQ ID NO: 7356; WAN024AZ6; Start 29; Stop 53
tctttgggcttagtcatttgatact

SEQ ID NO: 465897 - DNA, 25 bp, Artificial
  probe
  misc_feature (1)..(25): SEQ ID NO: 7356; WAN024AZ6; Start 26; Stop 50
ttatctttgggcttagtcatttgat

SEQ ID NO: 465898 - DNA, 25 bp, Artificial
  probe
  misc_feature (1)..(25): SEQ ID NO: 7356; WAN024AZ6; Start 33; Stop 57
tgggcttagtcatttgatactatct

SEQ ID NO: 465899 - DNA, 25 bp, Artificial
  probe
  misc_feature (1)..(25): SEQ ID NO: 7356; WAN024AZ6; Start 40; Stop 64
agtcatttgatactatctcacagag

SEQ ID NO: 465900 - DNA, 25 bp, Artificial
  probe
  misc_feature (1)..(25): SEQ ID NO: 7356; WAN024AZ6; Start 34; Stop 58
gggcttagtcatttgatactatctc

SEQ ID NO: 465901 - DNA, 25 bp, Artificial
  probe
  misc_feature (1)..(25): SEQ ID NO: 7356; WAN024AZ6; Start 30; Stop 54
ctttgggcttagtcatttgatacta

SEQ ID NO: 465902 - DNA, 25 bp, Artificial
  probe
  misc_feature (1)..(25): SEQ ID NO: 7356; WAN024AZ6; Start 27; Stop 51
tatctttgggcttagtcatttgata

SEQ ID NO: 465903 - DNA, 25 bp, Artificial
  probe
  misc_feature (1)..(25): SEQ ID NO: 7356; WAN024AZ6; Start 32; Stop 56
ttgggcttagtcatttgatactatc

SEQ ID NO: 465904 - DNA, 25 bp, Artificial
  probe
  misc_feature (1)..(25): SEQ ID NO: 7356; WAN024AZ6; Start 35; Stop 59
ggcttagtcatttgatactatctca

SEQ ID NO: 465905 - DNA, 25 bp, Artificial
  probe
  misc_feature (1)..(25): SEQ ID NO: 7356; WAN024AZ6; Start 31; Stop 55
tttgggcttagtcatttgatactat

SEQ ID NO: 465906 - DNA, 25 bp, Artificial
  probe
  misc_feature (1)..(25): SEQ ID NO: 7356; WAN024AZ6; Start 36; Stop 60
gcttagtcatttgatactatctcac

SEQ ID NO: 465907 - DNA, 25 bp, Artificial
  probe
  misc_feature (1)..(25): SEQ ID NO: 7356; WAN024AZ6; Start 39; Stop 63
tagtcatttgatactatctcacaga

SEQ ID NO: 465908 - DNA, 25 bp, Artificial
  probe
  misc_feature (1)..(25): SEQ ID NO: 7356; WAN024AZ6; Start 23; Stop 47
gccttatctttgggcttagtcattt

SEQ ID NO: 465909 - DNA, 25 bp, Artificial
  probe
  misc_feature (1)..(25): SEQ ID NO: 7356; WAN024AZ6; Start 41; Stop 65
gtcatttgatactatctcacagaga

SEQ ID NO: 465910 - DNA, 25 bp, Artificial
  probe
  misc_feature (1)..(25): SEQ ID NO: 7356; WAN024AZ6; Start 38; Stop 62
ttagtcatttgatactatctcacag

SEQ ID NO: 465911 - DNA, 25 bp, Artificial
  probe
  misc_feature (1)..(25): SEQ ID NO: 7356; WAN024AZ6; Start 37; Stop 61
cttagtcatttgatactatctcaca

SEQ ID NO: 465912 - DNA, 25 bp, Artificial
  probe
  misc_feature (1)..(25): SEQ ID NO: 7356; WAN024AZ6; Start 1; Stop 25
tatttagatgtcatcttatcaggcc

SEQ ID NO: 465913 - DNA, 25 bp, Artificial
  probe
  misc_feature (1)..(25): SEQ ID NO: 7356; WAN024AZ6; Start 22; Stop 46
ggccttatctttgggcttagtcatt

SEQ ID NO: 465914 - DNA, 25 bp, Artificial
  probe
  misc_feature (1)..(25): SEQ ID NO: 7357; WAN024A6V; Start 37; Stop 61
acaatagagcaattctgtaagtcaa

SEQ ID NO: 465915 - DNA, 25 bp, Artificial
  probe
  misc_feature (1)..(25): SEQ ID NO: 7357; WAN024A6V; Start 30; Stop 54
catcagtacaatagagcaattctgt

SEQ ID NO: 465916 - DNA, 25 bp, Artificial
  probe
  misc_feature (1)..(25): SEQ ID NO: 7357; WAN024A6V; Start 29; Stop 53
acatcagtacaatagagcaattctg

SEQ ID NO: 465917 - DNA, 25 bp, Artificial
  probe
  misc_feature (1)..(25): SEQ ID NO: 7357; WAN024A6V; Start 24; Stop 48
agaatacatcagtacaatagagcaa

SEQ ID NO: 465918 - DNA, 25 bp, Artificial
  probe
  misc_feature (1)..(25): SEQ ID NO: 7357; WAN024A6V; Start 23; Stop 47
aagaatacatcagtacaatagagca

SEQ ID NO: 465919 - DNA, 25 bp, Artificial
  probe
  misc_feature (1)..(25): SEQ ID NO: 7357; WAN024A6V; Start 38; Stop 62
caatagagcaattctgtaagtcaat

SEQ ID NO: 465920 - DNA, 25 bp, Artificial
  probe
  misc_feature (1)..(25): SEQ ID NO: 7357; WAN024A6V; Start 28; Stop 52
tacatcagtacaatagagcaattct

SEQ ID NO: 465921 - DNA, 25 bp, Artificial
  probe
  misc_feature (1)..(25): SEQ ID NO: 7357; WAN024A6V; Start 126; Stop 150
tgacaaggagcccaaattattgata

SEQ ID NO: 465922 - DNA, 25 bp, Artificial
  probe
  misc_feature (1)..(25): SEQ ID NO: 7357; WAN024A6V; Start 127; Stop 151
gacaaggagcccaaattattgataa

SEQ ID NO: 465923 - DNA, 25 bp, Artificial
  probe
  misc_feature (1)..(25): SEQ ID NO: 7357; WAN024A6V; Start 125; Stop 149
ttgacaaggagcccaaattattgat

SEQ ID NO: 465924 - DNA, 25 bp, Artificial
  probe
  misc_feature (1)..(25): SEQ ID NO: 7357; WAN024A6V; Start 128; Stop 152
acaaggagcccaaattattgataaa

SEQ ID NO: 465925 - DNA, 25 bp, Artificial
  probe
  misc_feature (1)..(25): SEQ ID NO: 7357; WAN024A6V; Start 124; Stop 148
gttgacaaggagcccaaattattga

SEQ ID NO: 465926 - DNA, 25 bp, Artificial
  probe
  misc_feature (1)..(25): SEQ ID NO: 7357; WAN024A6V; Start 123; Stop 147
agttgacaaggagcccaaattattg

SEQ ID NO: 465927 - DNA, 25 bp, Artificial
  probe
  misc_feature (1)..(25): SEQ ID NO: 7357; WAN024A6V; Start 122; Stop 146
cagttgacaaggagcccaaattatt

SEQ ID NO: 465928 - DNA, 25 bp, Artificial
  probe
  misc_feature (1)..(25): SEQ ID NO: 7357; WAN024A6V; Start 27; Stop 51
atacatcagtacaatagagcaattc

SEQ ID NO: 465929 - DNA, 25 bp, Artificial
  probe
  misc_feature (1)..(25): SEQ ID NO: 7357; WAN024A6V; Start 25; Stop 49
gaatacatcagtacaatagagcaat

SEQ ID NO: 465930 - DNA, 25 bp, Artificial
  probe
  misc_feature (1)..(25): SEQ ID NO: 7357; WAN024A6V; Start 36; Stop 60
tacaatagagcaattctgtaagtca

SEQ ID NO: 465931 - DNA, 25 bp, Artificial
  probe
  misc_feature (1)..(25): SEQ ID NO: 7357; WAN024A6V; Start 120; Stop 144
tacagttgacaaggagcccaaatta

SEQ ID NO: 465932 - DNA, 25 bp, Artificial
  probe
  misc_feature (1)..(25): SEQ ID NO: 7357; WAN024A6V; Start 32; Stop 56
tcagtacaatagagcaattctgtaa

SEQ ID NO: 465933 - DNA, 25 bp, Artificial
  probe
  misc_feature (1)..(25): SEQ ID NO: 7357; WAN024A6V; Start 34; Stop 58
agtacaatagagcaattctgtaagt

SEQ ID NO: 465934 - DNA, 25 bp, Artificial
  probe
  misc_feature (1)..(25): SEQ ID NO: 7357; WAN024A6V; Start 35; Stop 59
gtacaatagagcaattctgtaagtc

SEQ ID NO: 465935 - DNA, 25 bp, Artificial
  probe
  misc_feature (1)..(25): SEQ ID NO: 7357; WAN024A6V; Start 33; Stop 57
cagtacaatagagcaattctgtaag

SEQ ID NO: 465936 - DNA, 25 bp, Artificial
  probe
  misc_feature (1)..(25): SEQ ID NO: 7357; WAN024A6V; Start 31; Stop 55
atcagtacaatagagcaattctgta

SEQ ID NO: 465937 - DNA, 25 bp, Artificial
  probe
  misc_feature (1)..(25): SEQ ID NO: 7357; WAN024A6V; Start 26; Stop 50
aatacatcagtacaatagagcaatt

SEQ ID NO: 465938 - DNA, 25 bp, Artificial
  probe
  misc_feature (1)..(25): SEQ ID NO: 7357; WAN024A6V; Start 121; Stop 145
acagttgacaaggagcccaaattat

SEQ ID NO: 465939 - DNA, 25 bp, Artificial
  probe
  misc_feature (1)..(25): SEQ ID NO: 7357; WAN024A6V; Start 39; Stop 63
aatagagcaattctgtaagtcaata

SEQ ID NO: 465940 - DNA, 25 bp, Artificial
  probe
  misc_feature (1)..(25): SEQ ID NO: 7357; WAN024A6V; Start 22; Stop 46
taagaatacatcagtacaatagagc

SEQ ID NO: 465941 - DNA, 25 bp, Artificial
  probe
  misc_feature (1)..(25): SEQ ID NO: 7357; WAN024A6V; Start 40; Stop 64
atagagcaattctgtaagtcaatat

SEQ ID NO: 465942 - DNA, 25 bp, Artificial
  probe
  misc_feature (1)..(25): SEQ ID NO: 7357; WAN024A6V; Start 119; Stop 143
ctacagttgacaaggagcccaaatt

SEQ ID NO: 465943 - DNA, 25 bp, Artificial
  probe
  misc_feature (1)..(25): SEQ ID NO: 7357; WAN024A6V; Start 41; Stop 65
tagagcaattctgtaagtcaatatt

SEQ ID NO: 465944 - DNA, 25 bp, Artificial
  probe
  misc_feature (1)..(25): SEQ ID NO: 7357; WAN024A6V; Start 43; Stop 67
gagcaattctgtaagtcaatatttg

SEQ ID NO: 465945 - DNA, 25 bp, Artificial
  probe
  misc_feature (1)..(25): SEQ ID NO: 7357; WAN024A6V; Start 42; Stop 66
agagcaattctgtaagtcaatattt

SEQ ID NO: 465946 - DNA, 25 bp, Artificial
  probe
  misc_feature (1)..(25): SEQ ID NO: 7357; WAN024A6V; Start 129; Stop 153
caaggagcccaaattattgataaaa

SEQ ID NO: 465947 - DNA, 25 bp, Artificial
  probe
  misc_feature (1)..(25): SEQ ID NO: 7359; WAN024B2Z; Start 202; Stop 226
aactatgatgtcaagagtacgcttc

SEQ ID NO: 465948 - DNA, 25 bp, Artificial
  probe
  misc_feature (1)..(25): SEQ ID NO: 7359; WAN024B2Z; Start 201; Stop 225
caactatgatgtcaagagtacgctt

SEQ ID NO: 465949 - DNA, 25 bp, Artificial
  probe
  misc_feature (1)..(25): SEQ ID NO: 7359; WAN024B2Z; Start 205; Stop 229
tatgatgtcaagagtacgcttccag

SEQ ID NO: 465950 - DNA, 25 bp, Artificial
  probe
  misc_feature (1)..(25): SEQ ID NO: 7359; WAN024B2Z; Start 204; Stop 228
ctatgatgtcaagagtacgcttcca

SEQ ID NO: 465951 - DNA, 25 bp, Artificial
  probe
  misc_feature (1)..(25): SEQ ID NO: 7359; WAN024B2Z; Start 203; Stop 227
actatgatgtcaagagtacgcttcc

SEQ ID NO: 465952 - DNA, 25 bp, Artificial
  probe
  misc_feature (1)..(25): SEQ ID NO: 7359; WAN024B2Z; Start 200; Stop 224
gcaactatgatgtcaagagtacgct

SEQ ID NO: 465953 - DNA, 25 bp, Artificial
  probe
  misc_feature (1)..(25): SEQ ID NO: 7359; WAN024B2Z; Start 194; Stop 218
tactgggcaactatgatgtcaagag

SEQ ID NO: 465954 - DNA, 25 bp, Artificial
  probe
  misc_feature (1)..(25): SEQ ID NO: 7359; WAN024B2Z; Start 193; Stop 217
ctactgggcaactatgatgtcaaga

SEQ ID NO: 465955 - DNA, 25 bp, Artificial
  probe
  misc_feature (1)..(25): SEQ ID NO: 7359; WAN024B2Z; Start 192; Stop 216
tctactgggcaactatgatgtcaag

SEQ ID NO: 465956 - DNA, 25 bp, Artificial
  probe
  misc_feature (1)..(25): SEQ ID NO: 7359; WAN024B2Z; Start 191; Stop 215
gtctactgggcaactatgatgtcaa

SEQ ID NO: 465957 - DNA, 25 bp, Artificial
  probe
  misc_feature (1)..(25): SEQ ID NO: 7359; WAN024B2Z; Start 196; Stop 220
ctgggcaactatgatgtcaagagta

SEQ ID NO: 465958 - DNA, 25 bp, Artificial
  probe
  misc_feature (1)..(25): SEQ ID NO: 7359; WAN024B2Z; Start 59; Stop 83
acatgggttcaagtgttggtatttc

SEQ ID NO: 465959 - DNA, 25 bp, Artificial
  probe
  misc_feature (1)..(25): SEQ ID NO: 7359; WAN024B2Z; Start 114; Stop 138
agctttggaacttgcctttcaatat

SEQ ID NO: 465960 - DNA, 25 bp, Artificial
  probe
  misc_feature (1)..(25): SEQ ID NO: 7359; WAN024B2Z; Start 60; Stop 84
catgggttcaagtgttggtatttcc

SEQ ID NO: 465961 - DNA, 25 bp, Artificial
  probe
  misc_feature (1)..(25): SEQ ID NO: 7359; WAN024B2Z; Start 199; Stop 223
ggcaactatgatgtcaagagtacgc

SEQ ID NO: 465962 - DNA, 25 bp, Artificial
  probe
  misc_feature (1)..(25): SEQ ID NO: 7359; WAN024B2Z; Start 3; Stop 27
taaaatcgctgaagtggaaggaaaa

SEQ ID NO: 465963 - DNA, 25 bp, Artificial
  probe
  misc_feature (1)..(25): SEQ ID NO: 7359; WAN024B2Z; Start 61; Stop 85
atgggttcaagtgttggtatttcca

SEQ ID NO: 465964 - DNA, 25 bp, Artificial
  probe
  misc_feature (1)..(25): SEQ ID NO: 7359; WAN024B2Z; Start 2; Stop 26
ctaaaatcgctgaagtggaaggaaa

SEQ ID NO: 465965 - DNA, 25 bp, Artificial
  probe
  misc_feature (1)..(25): SEQ ID NO: 7359; WAN024B2Z; Start 188; Stop 212
ttggtctactgggcaactatgatgt

SEQ ID NO: 465966 - DNA, 25 bp, Artificial
  probe
  misc_feature (1)..(25): SEQ ID NO: 7359; WAN024B2Z; Start 206; Stop 230
atgatgtcaagagtacgcttccagg

SEQ ID NO: 465967 - DNA, 25 bp, Artificial
  probe
  misc_feature (1)..(25): SEQ ID NO: 7359; WAN024B2Z; Start 4; Stop 28
aaaatcgctgaagtggaaggaaaat

SEQ ID NO: 465968 - DNA, 25 bp, Artificial
  probe
  misc_feature (1)..(25): SEQ ID NO: 7359; WAN024B2Z; Start 32; Stop 56
cttatccagtcttcacaaaaccgtc

SEQ ID NO: 465969 - DNA, 25 bp, Artificial
  probe
  misc_feature (1)..(25): SEQ ID NO: 7359; WAN024B2Z; Start 189; Stop 213
tggtctactgggcaactatgatgtc

SEQ ID NO: 465970 - DNA, 25 bp, Artificial
  probe
  misc_feature (1)..(25): SEQ ID NO: 7359; WAN024B2Z; Start 198; Stop 222
gggcaactatgatgtcaagagtacg

SEQ ID NO: 465971 - DNA, 25 bp, Artificial
  probe
  misc_feature (1)..(25): SEQ ID NO: 7359; WAN024B2Z; Start 5; Stop 29
aaatcgctgaagtggaaggaaaatt

SEQ ID NO: 465972 - DNA, 25 bp, Artificial
  probe
  misc_feature (1)..(25): SEQ ID NO: 7359; WAN024B2Z; Start 190; Stop 214
ggtctactgggcaactatgatgtca

SEQ ID NO: 465973 - DNA, 25 bp, Artificial
  probe
  misc_feature (1)..(25): SEQ ID NO: 7359; WAN024B2Z; Start 1; Stop 25
tctaaaatcgctgaagtggaaggaa

SEQ ID NO: 465974 - DNA, 25 bp, Artificial
  probe
  misc_feature (1)..(25): SEQ ID NO: 7359; WAN024B2Z; Start 195; Stop 219
actgggcaactatgatgtcaagagt

SEQ ID NO: 465975 - DNA, 25 bp, Artificial
  probe
  misc_feature (1)..(25): SEQ ID NO: 7359; WAN024B2Z; Start 208; Stop 232
gatgtcaagagtacgcttccaggag

SEQ ID NO: 465976 - DNA, 25 bp, Artificial
  probe
  misc_feature (1)..(25): SEQ ID NO: 7359; WAN024B2Z; Start 38; Stop 62
cagtcttcacaaaaccgtcaaacat

SEQ ID NO: 465977 - DNA, 25 bp, Artificial
  probe
  misc_feature (1)..(25): SEQ ID NO: 7359; WAN024B2Z; Start 34; Stop 58
tatccagtcttcacaaaaccgtcaa

SEQ ID NO: 465978 - DNA, 25 bp, Artificial
  probe
  misc_feature (1)..(25): SEQ ID NO: 7359; WAN024B2Z; Start 33; Stop 57
ttatccagtcttcacaaaaccgtca

SEQ ID NO: 465979 - DNA, 25 bp, Artificial
  probe
  misc_feature (1)..(25): SEQ ID NO: 7359; WAN024B2Z; Start 214; Stop 238
aagagtacgcttccaggagaagtag

SEQ ID NO: 465980 - DNA, 25 bp, Artificial
  probe
  misc_feature (1)..(25): SEQ ID NO: 7361; WAN0249PB; Start 7; Stop 31
cccatagactttcctccttatttcc

SEQ ID NO: 465981 - DNA, 25 bp, Artificial
  probe
  misc_feature (1)..(25): SEQ ID NO: 7361; WAN0249PB; Start 8; Stop 32
ccatagactttcctccttatttcct

SEQ ID NO: 465982 - DNA, 25 bp, Artificial
  probe
  misc_feature (1)..(25): SEQ ID NO: 7361; WAN0249PB; Start 6; Stop 30
tcccatagactttcctccttatttc

SEQ ID NO: 465983 - DNA, 25 bp, Artificial
  probe
  misc_feature (1)..(25): SEQ ID NO: 7361; WAN0249PB; Start 5; Stop 29
ctcccatagactttcctccttattt

SEQ ID NO: 465984 - DNA, 25 bp, Artificial
  probe
  misc_feature (1)..(25): SEQ ID NO: 7361; WAN0249PB; Start 4; Stop 28
tctcccatagactttcctccttatt

SEQ ID NO: 465985 - DNA, 25 bp, Artificial
  probe
  misc_feature (1)..(25): SEQ ID NO: 7361; WAN0249PB; Start 3; Stop 27
ttctcccatagactttcctccttat

SEQ ID NO: 465986 - DNA, 25 bp, Artificial
  probe
  misc_feature (1)..(25): SEQ ID NO: 7361; WAN0249PB; Start 12; Stop 36
agactttcctccttatttcctaact

SEQ ID NO: 465987 - DNA, 25 bp, Artificial
  probe
  misc_feature (1)..(25): SEQ ID NO: 7361; WAN0249PB; Start 2; Stop 26
cttctcccatagactttcctcctta

SEQ ID NO: 465988 - DNA, 25 bp, Artificial
  probe
  misc_feature (1)..(25): SEQ ID NO: 7361; WAN0249PB; Start 13; Stop 37
gactttcctccttatttcctaactt

SEQ ID NO: 465989 - DNA, 25 bp, Artificial
  probe
  misc_feature (1)..(25): SEQ ID NO: 7361; WAN0249PB; Start 14; Stop 38
actttcctccttatttcctaacttt

SEQ ID NO: 465990 - DNA, 25 bp, Artificial
  probe
  misc_feature (1)..(25): SEQ ID NO: 7361; WAN0249PB; Start 1; Stop 25
tcttctcccatagactttcctcctt

SEQ ID NO: 465991 - DNA, 25 bp, Artificial
  probe
  misc_feature (1)..(25): SEQ ID NO: 7361; WAN0249PB; Start 11; Stop 35
tagactttcctccttatttcctaac

SEQ ID NO: 465992 - DNA, 25 bp, Artificial
  probe
  misc_feature (1)..(25): SEQ ID NO: 7361; WAN0249PB; Start 9; Stop 33
catagactttcctccttatttccta

SEQ ID NO: 465993 - DNA, 25 bp, Artificial
  probe
  misc_feature (1)..(25): SEQ ID NO: 7361; WAN0249PB; Start 49; Stop 73
gtattgaatctataacagtacacct

SEQ ID NO: 465994 - DNA, 25 bp, Artificial
  probe
  misc_feature (1)..(25): SEQ ID NO: 7361; WAN0249PB; Start 10; Stop 34
atagactttcctccttatttcctaa

SEQ ID NO: 465995 - DNA, 25 bp, Artificial
  probe
  misc_feature (1)..(25): SEQ ID NO: 7361; WAN0249PB; Start 15; Stop 39
ctttcctccttatttcctaacttta

SEQ ID NO: 465996 - DNA, 25 bp, Artificial
  probe
  misc_feature (1)..(25): SEQ ID NO: 7361; WAN0249PB; Start 48; Stop 72
tgtattgaatctataacagtacacc

SEQ ID NO: 465997 - DNA, 25 bp, Artificial
  probe
  misc_feature (1)..(25): SEQ ID NO: 7361; WAN0249PB; Start 17; Stop 41
ttcctccttatttcctaactttatt

SEQ ID NO: 465998 - DNA, 25 bp, Artificial
  probe
  misc_feature (1)..(25): SEQ ID NO: 7361; WAN0249PB; Start 16; Stop 40
tttcctccttatttcctaactttat

SEQ ID NO: 465999 - DNA, 25 bp, Artificial
  probe
  misc_feature (1)..(25): SEQ ID NO: 7361; WAN0249PB; Start 65; Stop 89
agtacaccttgactgctaaaatatt

SEQ ID NO: 466000 - DNA, 25 bp, Artificial
  probe
  misc_feature (1)..(25): SEQ ID NO: 7361; WAN0249PB; Start 68; Stop 92
acaccttgactgctaaaatatttct

SEQ ID NO: 466001 - DNA, 25 bp, Artificial
  probe
  misc_feature (1)..(25): SEQ ID NO: 7361; WAN0249PB; Start 66; Stop 90
gtacaccttgactgctaaaatattt

SEQ ID NO: 466002 - DNA, 25 bp, Artificial
  probe
  misc_feature (1)..(25): SEQ ID NO: 7361; WAN0249PB; Start 63; Stop 87
acagtacaccttgactgctaaaata

SEQ ID NO: 466003 - DNA, 25 bp, Artificial
  probe
  misc_feature (1)..(25): SEQ ID NO: 7361; WAN0249PB; Start 67; Stop 91
tacaccttgactgctaaaatatttc

SEQ ID NO: 466004 - DNA, 25 bp, Artificial
  probe
  misc_feature (1)..(25): SEQ ID NO: 7361; WAN0249PB; Start 64; Stop 88
cagtacaccttgactgctaaaatat

SEQ ID NO: 466005 - DNA, 25 bp, Artificial
  probe
  misc_feature (1)..(25): SEQ ID NO: 7361; WAN0249PB; Start 69; Stop 93
caccttgactgctaaaatatttcta

SEQ ID NO: 466006 - DNA, 25 bp, Artificial
  probe
  misc_feature (1)..(25): SEQ ID NO: 7361; WAN0249PB; Start 70; Stop 94
accttgactgctaaaatatttctat

SEQ ID NO: 466007 - DNA, 25 bp, Artificial
  probe
  misc_feature (1)..(25): SEQ ID NO: 7362; WAN024AA3; Start 9; Stop 33
atgtaatcctaacaagtgatcctcg

SEQ ID NO: 466008 - DNA, 25 bp, Artificial
  probe
  misc_feature (1)..(25): SEQ ID NO: 7362; WAN024AA3; Start 11; Stop 35
gtaatcctaacaagtgatcctcgac

SEQ ID NO: 466009 - DNA, 25 bp, Artificial
  probe
  misc_feature (1)..(25): SEQ ID NO: 7362; WAN024AA3; Start 45; Stop 69
agcacttagttacctagataagact

SEQ ID NO: 466010 - DNA, 25 bp, Artificial
  probe
  misc_feature (1)..(25): SEQ ID NO: 7362; WAN024AA3; Start 8; Stop 32
aatgtaatcctaacaagtgatcctc

SEQ ID NO: 466011 - DNA, 25 bp, Artificial
  probe
  misc_feature (1)..(25): SEQ ID NO: 7362; WAN024AA3; Start 12; Stop 36
taatcctaacaagtgatcctcgact

SEQ ID NO: 466012 - DNA, 25 bp, Artificial
  probe
  misc_feature (1)..(25): SEQ ID NO: 7362; WAN024AA3; Start 96; Stop 120
agccgttctaagatttaacctatgt

SEQ ID NO: 466013 - DNA, 25 bp, Artificial
  probe
  misc_feature (1)..(25): SEQ ID NO: 7362; WAN024AA3; Start 97; Stop 121
gccgttctaagatttaacctatgtt

SEQ ID NO: 466014 - DNA, 25 bp, Artificial
  probe
  misc_feature (1)..(25): SEQ ID NO: 7362; WAN024AA3; Start 10; Stop 34
tgtaatcctaacaagtgatcctcga

SEQ ID NO: 466015 - DNA, 25 bp, Artificial
  probe
  misc_feature (1)..(25): SEQ ID NO: 7362; WAN024AA3; Start 38; Stop 62
tgtttgtagcacttagttacctaga

SEQ ID NO: 466016 - DNA, 25 bp, Artificial
  probe
  misc_feature (1)..(25): SEQ ID NO: 7362; WAN024AA3; Start 95; Stop 119
aagccgttctaagatttaacctatg

SEQ ID NO: 466017 - DNA, 25 bp, Artificial
  probe
  misc_feature (1)..(25): SEQ ID NO: 7362; WAN024AA3; Start 92; Stop 116
tttaagccgttctaagatttaacct

SEQ ID NO: 466018 - DNA, 25 bp, Artificial
  probe
  misc_feature (1)..(25): SEQ ID NO: 7362; WAN024AA3; Start 13; Stop 37
aatcctaacaagtgatcctcgactg

SEQ ID NO: 466019 - DNA, 25 bp, Artificial
  probe
  misc_feature (1)..(25): SEQ ID NO: 7362; WAN024AA3; Start 41; Stop 65
ttgtagcacttagttacctagataa

SEQ ID NO: 466020 - DNA, 25 bp, Artificial
  probe
  misc_feature (1)..(25): SEQ ID NO: 7362; WAN024AA3; Start 33; Stop 57
gactgtgtttgtagcacttagttac

SEQ ID NO: 466021 - DNA, 25 bp, Artificial
  probe
  misc_feature (1)..(25): SEQ ID NO: 7362; WAN024AA3; Start 36; Stop 60
tgtgtttgtagcacttagttaccta

SEQ ID NO: 466022 - DNA, 25 bp, Artificial
  probe
  misc_feature (1)..(25): SEQ ID NO: 7362; WAN024AA3; Start 39; Stop 63
gtttgtagcacttagttacctagat

SEQ ID NO: 466023 - DNA, 25 bp, Artificial
  probe
  misc_feature (1)..(25): SEQ ID NO: 7362; WAN024AA3; Start 42; Stop 66
tgtagcacttagttacctagataag

SEQ ID NO: 466024 - DNA, 25 bp, Artificial
  probe
  misc_feature (1)..(25): SEQ ID NO: 7362; WAN024AA3; Start 35; Stop 59
ctgtgtttgtagcacttagttacct

SEQ ID NO: 466025 - DNA, 25 bp, Artificial
  probe
  misc_feature (1)..(25): SEQ ID NO: 7362; WAN024AA3; Start 34; Stop 58
actgtgtttgtagcacttagttacc

SEQ ID NO: 466026 - DNA, 25 bp, Artificial
  probe
  misc_feature (1)..(25): SEQ ID NO: 7362; WAN024AA3; Start 37; Stop 61
gtgtttgtagcacttagttacctag

SEQ ID NO: 466027 - DNA, 25 bp, Artificial
  probe
  misc_feature (1)..(25): SEQ ID NO: 7362; WAN024AA3; Start 32; Stop 56
cgactgtgtttgtagcacttagtta

SEQ ID NO: 466028 - DNA, 25 bp, Artificial
  probe
  misc_feature (1)..(25): SEQ ID NO: 7362; WAN024AA3; Start 44; Stop 68
tagcacttagttacctagataagac

SEQ ID NO: 466029 - DNA, 25 bp, Artificial
  probe
  misc_feature (1)..(25): SEQ ID NO: 7362; WAN024AA3; Start 43; Stop 67
gtagcacttagttacctagataaga

SEQ ID NO: 466030 - DNA, 25 bp, Artificial
  probe
  misc_feature (1)..(25): SEQ ID NO: 7362; WAN024AA3; Start 93; Stop 117
ttaagccgttctaagatttaaccta

SEQ ID NO: 466031 - DNA, 25 bp, Artificial
  probe
  misc_feature (1)..(25): SEQ ID NO: 7362; WAN024AA3; Start 94; Stop 118
taagccgttctaagatttaacctat

SEQ ID NO: 466032 - DNA, 25 bp, Artificial
  probe
  misc_feature (1)..(25): SEQ ID NO: 7362; WAN024AA3; Start 46; Stop 70
gcacttagttacctagataagacta

SEQ ID NO: 466033 - DNA, 25 bp, Artificial
  probe
  misc_feature (1)..(25): SEQ ID NO: 7362; WAN024AA3; Start 98; Stop 122
ccgttctaagatttaacctatgttt

SEQ ID NO: 466034 - DNA, 25 bp, Artificial
  probe
  misc_feature (1)..(25): SEQ ID NO: 7362; WAN024AA3; Start 7; Stop 31
aaatgtaatcctaacaagtgatcct

SEQ ID NO: 466035 - DNA, 25 bp, Artificial
  probe
  misc_feature (1)..(25): SEQ ID NO: 7362; WAN024AA3; Start 14; Stop 38
atcctaacaagtgatcctcgactgt

SEQ ID NO: 466036 - DNA, 25 bp, Artificial
  probe
  misc_feature (1)..(25): SEQ ID NO: 7362; WAN024AA3; Start 53; Stop 77
gttacctagataagactatttccct

SEQ ID NO: 466037 - DNA, 25 bp, Artificial
  probe
  misc_feature (1)..(25): SEQ ID NO: 7362; WAN024AA3; Start 40; Stop 64
tttgtagcacttagttacctagata

SEQ ID NO: 466038 - DNA, 25 bp, Artificial
  probe
  misc_feature (1)..(25): SEQ ID NO: 7362; WAN024AA3; Start 52; Stop 76
agttacctagataagactatttccc

SEQ ID NO: 466039 - DNA, 25 bp, Artificial
  probe
  misc_feature (1)..(25): SEQ ID NO: 7362; WAN024AA3; Start 22; Stop 46
aagtgatcctcgactgtgtttgtag

SEQ ID NO: 466040 - DNA, 25 bp, Artificial
  probe
  misc_feature (1)..(25): SEQ ID NO: 7363; WAN024BCH; Start 74; Stop 98
tagcttcctagtttgcactttgatt

SEQ ID NO: 466041 - DNA, 25 bp, Artificial
  probe
  misc_feature (1)..(25): SEQ ID NO: 7363; WAN024BCH; Start 6; Stop 30
taggtataggtaacgacttcgtcag

SEQ ID NO: 466042 - DNA, 25 bp, Artificial
  probe
  misc_feature (1)..(25): SEQ ID NO: 7363; WAN024BCH; Start 5; Stop 29
gtaggtataggtaacgacttcgtca

SEQ ID NO: 466043 - DNA, 25 bp, Artificial
  probe
  misc_feature (1)..(25): SEQ ID NO: 7363; WAN024BCH; Start 75; Stop 99
agcttcctagtttgcactttgattt

SEQ ID NO: 466044 - DNA, 25 bp, Artificial
  probe
  misc_feature (1)..(25): SEQ ID NO: 7363; WAN024BCH; Start 19; Stop 43
cgacttcgtcagtcttatctacaac

SEQ ID NO: 466045 - DNA, 25 bp, Artificial
  probe
  misc_feature (1)..(25): SEQ ID NO: 7363; WAN024BCH; Start 4; Stop 28
cgtaggtataggtaacgacttcgtc

SEQ ID NO: 466046 - DNA, 25 bp, Artificial
  probe
  misc_feature (1)..(25): SEQ ID NO: 7363; WAN024BCH; Start 16; Stop 40
taacgacttcgtcagtcttatctac

SEQ ID NO: 466047 - DNA, 25 bp, Artificial
  probe
  misc_feature (1)..(25): SEQ ID NO: 7363; WAN024BCH; Start 15; Stop 39
gtaacgacttcgtcagtcttatcta

SEQ ID NO: 466048 - DNA, 25 bp, Artificial
  probe
  misc_feature (1)..(25): SEQ ID NO: 7363; WAN024BCH; Start 12; Stop 36
taggtaacgacttcgtcagtcttat

SEQ ID NO: 466049 - DNA, 25 bp, Artificial
  probe
  misc_feature (1)..(25): SEQ ID NO: 7363; WAN024BCH; Start 11; Stop 35
ataggtaacgacttcgtcagtctta

SEQ ID NO: 466050 - DNA, 25 bp, Artificial
  probe
  misc_feature (1)..(25): SEQ ID NO: 7363; WAN024BCH; Start 10; Stop 34
tataggtaacgacttcgtcagtctt

SEQ ID NO: 466051 - DNA, 25 bp, Artificial
  probe
  misc_feature (1)..(25): SEQ ID NO: 7363; WAN024BCH; Start 73; Stop 97
ctagcttcctagtttgcactttgat

SEQ ID NO: 466052 - DNA, 25 bp, Artificial
  probe
  misc_feature (1)..(25): SEQ ID NO: 7363; WAN024BCH; Start 7; Stop 31
aggtataggtaacgacttcgtcagt

SEQ ID NO: 466053 - DNA, 25 bp, Artificial
  probe
  misc_feature (1)..(25): SEQ ID NO: 7363; WAN024BCH; Start 18; Stop 42
acgacttcgtcagtcttatctacaa

SEQ ID NO: 466054 - DNA, 25 bp, Artificial
  probe
  misc_feature (1)..(25): SEQ ID NO: 7363; WAN024BCH; Start 17; Stop 41
aacgacttcgtcagtcttatctaca

SEQ ID NO: 466055 - DNA, 25 bp, Artificial
  probe
  misc_feature (1)..(25): SEQ ID NO: 7363; WAN024BCH; Start 9; Stop 33
gtataggtaacgacttcgtcagtct

SEQ ID NO: 466056 - DNA, 25 bp, Artificial
  probe
  misc_feature (1)..(25): SEQ ID NO: 7363; WAN024BCH; Start 1; Stop 25
tgccgtaggtataggtaacgacttc

SEQ ID NO: 466057 - DNA, 25 bp, Artificial
  probe
  misc_feature (1)..(25): SEQ ID NO: 7363; WAN024BCH; Start 14; Stop 38
ggtaacgacttcgtcagtcttatct

SEQ ID NO: 466058 - DNA, 25 bp, Artificial
  probe
  misc_feature (1)..(25): SEQ ID NO: 7363; WAN024BCH; Start 13; Stop 37
aggtaacgacttcgtcagtcttatc

SEQ ID NO: 466059 - DNA, 25 bp, Artificial
  probe
  misc_feature (1)..(25): SEQ ID NO: 7363; WAN024BCH; Start 8; Stop 32
ggtataggtaacgacttcgtcagtc

SEQ ID NO: 466060 - DNA, 25 bp, Artificial
  probe
  misc_feature (1)..(25): SEQ ID NO: 7363; WAN024BCH; Start 3; Stop 27
ccgtaggtataggtaacgacttcgt

SEQ ID NO: 466061 - DNA, 25 bp, Artificial
  probe
  misc_feature (1)..(25): SEQ ID NO: 7363; WAN024BCH; Start 84; Stop 108
gtttgcactttgattttcattgagt

SEQ ID NO: 466062 - DNA, 25 bp, Artificial
  probe
  misc_feature (1)..(25): SEQ ID NO: 7363; WAN024BCH; Start 79; Stop 103
tcctagtttgcactttgattttcat

SEQ ID NO: 466063 - DNA, 25 bp, Artificial
  probe
  misc_feature (1)..(25): SEQ ID NO: 7363; WAN024BCH; Start 83; Stop 107
agtttgcactttgattttcattgag

SEQ ID NO: 466064 - DNA, 25 bp, Artificial
  probe
  misc_feature (1)..(25): SEQ ID NO: 7363; WAN024BCH; Start 77; Stop 101
cttcctagtttgcactttgattttc

SEQ ID NO: 466065 - DNA, 25 bp, Artificial
  probe
  misc_feature (1)..(25): SEQ ID NO: 7363; WAN024BCH; Start 80; Stop 104
cctagtttgcactttgattttcatt

SEQ ID NO: 466066 - DNA, 25 bp, Artificial
  probe
  misc_feature (1)..(25): SEQ ID NO: 7363; WAN024BCH; Start 2; Stop 26
gccgtaggtataggtaacgacttcg

SEQ ID NO: 466067 - DNA, 25 bp, Artificial
  probe
  misc_feature (1)..(25): SEQ ID NO: 7363; WAN024BCH; Start 85; Stop 109
tttgcactttgattttcattgagta

SEQ ID NO: 466068 - DNA, 25 bp, Artificial
  probe
  misc_feature (1)..(25): SEQ ID NO: 7363; WAN024BCH; Start 82; Stop 106
tagtttgcactttgattttcattga

SEQ ID NO: 466069 - DNA, 25 bp, Artificial
  probe
  misc_feature (1)..(25): SEQ ID NO: 7363; WAN024BCH; Start 86; Stop 110
ttgcactttgattttcattgagtat

SEQ ID NO: 466070 - DNA, 25 bp, Artificial
  probe
  misc_feature (1)..(25): SEQ ID NO: 7363; WAN024BCH; Start 81; Stop 105
ctagtttgcactttgattttcattg

SEQ ID NO: 466071 - DNA, 25 bp, Artificial
  probe
  misc_feature (1)..(25): SEQ ID NO: 7364; WAN024DMK; Start 51; Stop 75
taagcgatttgaattgtgtgctctt

SEQ ID NO: 466072 - DNA, 25 bp, Artificial
  probe
  misc_feature (1)..(25): SEQ ID NO: 7364; WAN024DMK; Start 50; Stop 74
ctaagcgatttgaattgtgtgctct

SEQ ID NO: 466073 - DNA, 25 bp, Artificial
  probe
  misc_feature (1)..(25): SEQ ID NO: 7364; WAN024DMK; Start 52; Stop 76
aagcgatttgaattgtgtgctcttt

SEQ ID NO: 466074 - DNA, 25 bp, Artificial
  probe
  misc_feature (1)..(25): SEQ ID NO: 7364; WAN024DMK; Start 46; Stop 70
agccctaagcgatttgaattgtgtg

SEQ ID NO: 466075 - DNA, 25 bp, Artificial
  probe
  misc_feature (1)..(25): SEQ ID NO: 7364; WAN024DMK; Start 45; Stop 69
cagccctaagcgatttgaattgtgt

SEQ ID NO: 466076 - DNA, 25 bp, Artificial
  probe
  misc_feature (1)..(25): SEQ ID NO: 7364; WAN024DMK; Start 49; Stop 73
cctaagcgatttgaattgtgtgctc

SEQ ID NO: 466077 - DNA, 25 bp, Artificial
  probe
  misc_feature (1)..(25): SEQ ID NO: 7364; WAN024DMK; Start 136; Stop 160
agagaaaattatgaaaattcgtggt

SEQ ID NO: 466078 - DNA, 25 bp, Artificial
  probe
  misc_feature (1)..(25): SEQ ID NO: 7364; WAN024DMK; Start 137; Stop 161
gagaaaattatgaaaattcgtggtt

SEQ ID NO: 466079 - DNA, 25 bp, Artificial
  probe
  misc_feature (1)..(25): SEQ ID NO: 7364; WAN024DMK; Start 42; Stop 66
cagcagccctaagcgatttgaattg

SEQ ID NO: 466080 - DNA, 25 bp, Artificial
  probe
  misc_feature (1)..(25): SEQ ID NO: 7364; WAN024DMK; Start 135; Stop 159
aagagaaaattatgaaaattcgtgg

SEQ ID NO: 466081 - DNA, 25 bp, Artificial
  probe
  misc_feature (1)..(25): SEQ ID NO: 7364; WAN024DMK; Start 48; Stop 72
ccctaagcgatttgaattgtgtgct

SEQ ID NO: 466082 - DNA, 25 bp, Artificial
  probe
  misc_feature (1)..(25): SEQ ID NO: 7364; WAN024DMK; Start 138; Stop 162
agaaaattatgaaaattcgtggttt

SEQ ID NO: 466083 - DNA, 25 bp, Artificial
  probe
  misc_feature (1)..(25): SEQ ID NO: 7364; WAN024DMK; Start 53; Stop 77
agcgatttgaattgtgtgctctttt

SEQ ID NO: 466084 - DNA, 25 bp, Artificial
  probe
  misc_feature (1)..(25): SEQ ID NO: 7364; WAN024DMK; Start 142; Stop 166
aattatgaaaattcgtggttttgaa

SEQ ID NO: 466085 - DNA, 25 bp, Artificial
  probe
  misc_feature (1)..(25): SEQ ID NO: 7364; WAN024DMK; Start 141; Stop 165
aaattatgaaaattcgtggttttga

SEQ ID NO: 466086 - DNA, 25 bp, Artificial
  probe
  misc_feature (1)..(25): SEQ ID NO: 7364; WAN024DMK; Start 143; Stop 167
attatgaaaattcgtggttttgaat

SEQ ID NO: 466087 - DNA, 25 bp, Artificial
  probe
  misc_feature (1)..(25): SEQ ID NO: 7364; WAN024DMK; Start 140; Stop 164
aaaattatgaaaattcgtggttttg

SEQ ID NO: 466088 - DNA, 25 bp, Artificial
  probe
  misc_feature (1)..(25): SEQ ID NO: 7364; WAN024DMK; Start 139; Stop 163
gaaaattatgaaaattcgtggtttt

SEQ ID NO: 466089 - DNA, 25 bp, Artificial
  probe
  misc_feature (1)..(25): SEQ ID NO: 7364; WAN024DMK; Start 134; Stop 158
aaagagaaaattatgaaaattcgtg

SEQ ID NO: 466090 - DNA, 25 bp, Artificial
  probe
  misc_feature (1)..(25): SEQ ID NO: 7364; WAN024DMK; Start 145; Stop 169
tatgaaaattcgtggttttgaattg

SEQ ID NO: 466091 - DNA, 25 bp, Artificial
  probe
  misc_feature (1)..(25): SEQ ID NO: 7364; WAN024DMK; Start 144; Stop 168
ttatgaaaattcgtggttttgaatt

SEQ ID NO: 466092 - DNA, 25 bp, Artificial
  probe
  misc_feature (1)..(25): SEQ ID NO: 7365; WAN0249LA; Start 203; Stop 227
tcataactgctgtctctctatgtaa

SEQ ID NO: 466093 - DNA, 25 bp, Artificial
  probe
  misc_feature (1)..(25): SEQ ID NO: 7365; WAN0249LA; Start 202; Stop 226
atcataactgctgtctctctatgta

SEQ ID NO: 466094 - DNA, 25 bp, Artificial
  probe
  misc_feature (1)..(25): SEQ ID NO: 7365; WAN0249LA; Start 201; Stop 225
tatcataactgctgtctctctatgt

SEQ ID NO: 466095 - DNA, 25 bp, Artificial
  probe
  misc_feature (1)..(25): SEQ ID NO: 7365; WAN0249LA; Start 200; Stop 224
atatcataactgctgtctctctatg

SEQ ID NO: 466096 - DNA, 25 bp, Artificial
  probe
  misc_feature (1)..(25): SEQ ID NO: 7365; WAN0249LA; Start 68; Stop 92
gttgatctagttgataggaagggaa

SEQ ID NO: 466097 - DNA, 25 bp, Artificial
  probe
  misc_feature (1)..(25): SEQ ID NO: 7365; WAN0249LA; Start 70; Stop 94
tgatctagttgataggaagggaatt

SEQ ID NO: 466098 - DNA, 25 bp, Artificial
  probe
  misc_feature (1)..(25): SEQ ID NO: 7365; WAN0249LA; Start 69; Stop 93
ttgatctagttgataggaagggaat

SEQ ID NO: 466099 - DNA, 25 bp, Artificial
  probe
  misc_feature (1)..(25): SEQ ID NO: 7365; WAN0249LA; Start 197; Stop 221
aatatatcataactgctgtctctct

SEQ ID NO: 466100 - DNA, 25 bp, Artificial
  probe
  misc_feature (1)..(25): SEQ ID NO: 7365; WAN0249LA; Start 199; Stop 223
tatatcataactgctgtctctctat

SEQ ID NO: 466101 - DNA, 25 bp, Artificial
  probe
  misc_feature (1)..(25): SEQ ID NO: 7365; WAN0249LA; Start 73; Stop 97
tctagttgataggaagggaattact

SEQ ID NO: 466102 - DNA, 25 bp, Artificial
  probe
  misc_feature (1)..(25): SEQ ID NO: 7365; WAN0249LA; Start 204; Stop 228
cataactgctgtctctctatgtaaa

SEQ ID NO: 466103 - DNA, 25 bp, Artificial
  probe
  misc_feature (1)..(25): SEQ ID NO: 7365; WAN0249LA; Start 72; Stop 96
atctagttgataggaagggaattac

SEQ ID NO: 466104 - DNA, 25 bp, Artificial
  probe
  misc_feature (1)..(25): SEQ ID NO: 7365; WAN0249LA; Start 198; Stop 222
atatatcataactgctgtctctcta

SEQ ID NO: 466105 - DNA, 25 bp, Artificial
  probe
  misc_feature (1)..(25): SEQ ID NO: 7365; WAN0249LA; Start 71; Stop 95
gatctagttgataggaagggaatta

SEQ ID NO: 466106 - DNA, 25 bp, Artificial
  probe
  misc_feature (1)..(25): SEQ ID NO: 7365; WAN0249LA; Start 16; Stop 40
gatcatagtcctttgctgaggctag

SEQ ID NO: 466107 - DNA, 25 bp, Artificial
  probe
  misc_feature (1)..(25): SEQ ID NO: 7365; WAN0249LA; Start 196; Stop 220
aaatatatcataactgctgtctctc

SEQ ID NO: 466108 - DNA, 25 bp, Artificial
  probe
  misc_feature (1)..(25): SEQ ID NO: 7365; WAN0249LA; Start 205; Stop 229
ataactgctgtctctctatgtaaaa

SEQ ID NO: 466109 - DNA, 25 bp, Artificial
  probe
  misc_feature (1)..(25): SEQ ID NO: 7365; WAN0249LA; Start 74; Stop 98
ctagttgataggaagggaattacta

SEQ ID NO: 466110 - DNA, 25 bp, Artificial
  probe
  misc_feature (1)..(25): SEQ ID NO: 7365; WAN0249LA; Start 76; Stop 100
agttgataggaagggaattactata

SEQ ID NO: 466111 - DNA, 25 bp, Artificial
  probe
  misc_feature (1)..(25): SEQ ID NO: 7365; WAN0249LA; Start 8; Stop 32
gaaatgctgatcatagtcctttgct

SEQ ID NO: 466112 - DNA, 25 bp, Artificial
  probe
  misc_feature (1)..(25): SEQ ID NO: 7365; WAN0249LA; Start 17; Stop 41
atcatagtcctttgctgaggctagg

SEQ ID NO: 466113 - DNA, 25 bp, Artificial
  probe
  misc_feature (1)..(25): SEQ ID NO: 7365; WAN0249LA; Start 9; Stop 33
aaatgctgatcatagtcctttgctg

SEQ ID NO: 466114 - DNA, 25 bp, Artificial
  probe
  misc_feature (1)..(25): SEQ ID NO: 7365; WAN0249LA; Start 1; Stop 25
tggctaggaaatgctgatcatagtc

SEQ ID NO: 466115 - DNA, 25 bp, Artificial
  probe
  misc_feature (1)..(25): SEQ ID NO: 7365; WAN0249LA; Start 75; Stop 99
tagttgataggaagggaattactat

SEQ ID NO: 466116 - DNA, 25 bp, Artificial
  probe
  misc_feature (1)..(25): SEQ ID NO: 7365; WAN0249LA; Start 10; Stop 34
aatgctgatcatagtcctttgctga

SEQ ID NO: 466117 - DNA, 25 bp, Artificial
  probe
  misc_feature (1)..(25): SEQ ID NO: 7365; WAN0249LA; Start 77; Stop 101
gttgataggaagggaattactataa

SEQ ID NO: 466118 - DNA, 25 bp, Artificial
  probe
  misc_feature (1)..(25): SEQ ID NO: 7365; WAN0249LA; Start 11; Stop 35
atgctgatcatagtcctttgctgag

SEQ ID NO: 466119 - DNA, 25 bp, Artificial
  probe
  misc_feature (1)..(25): SEQ ID NO: 7365; WAN0249LA; Start 158; Stop 182
ttattgtagtattggtacagaagat

SEQ ID NO: 466120 - DNA, 25 bp, Artificial
  probe
  misc_feature (1)..(25): SEQ ID NO: 7365; WAN0249LA; Start 157; Stop 181
attattgtagtattggtacagaaga

SEQ ID NO: 466121 - DNA, 25 bp, Artificial
  probe
  misc_feature (1)..(25): SEQ ID NO: 7365; WAN0249LA; Start 7; Stop 31
ggaaatgctgatcatagtcctttgc

SEQ ID NO: 466122 - DNA, 25 bp, Artificial
  probe
  misc_feature (1)..(25): SEQ ID NO: 7365; WAN0249LA; Start 191; Stop 215
tggataaatatatcataactgctgt

SEQ ID NO: 466123 - DNA, 25 bp, Artificial
  probe
  misc_feature (1)..(25): SEQ ID NO: 7365; WAN0249LA; Start 101; Stop 125
aaatactcagtcttccatcatattt

SEQ ID NO: 466124 - DNA, 25 bp, Artificial
  probe
  misc_feature (1)..(25): SEQ ID NO: 7365; WAN0249LA; Start 195; Stop 219
taaatatatcataactgctgtctct

SEQ ID NO: 466125 - DNA, 25 bp, Artificial
  probe
  misc_feature (1)..(25): SEQ ID NO: 7366; WAN024B6T; Start 381; Stop 405
agagtctaagaaggattatgtaagc

SEQ ID NO: 466126 - DNA, 25 bp, Artificial
  probe
  misc_feature (1)..(25): SEQ ID NO: 7366; WAN024B6T; Start 253; Stop 277
ctttgtttctttcttggcagtgtat

SEQ ID NO: 466127 - DNA, 25 bp, Artificial
  probe
  misc_feature (1)..(25): SEQ ID NO: 7366; WAN024B6T; Start 257; Stop 281
gtttctttcttggcagtgtattgag

SEQ ID NO: 466128 - DNA, 25 bp, Artificial
  probe
  misc_feature (1)..(25): SEQ ID NO: 7366; WAN024B6T; Start 258; Stop 282
tttctttcttggcagtgtattgagt

SEQ ID NO: 466129 - DNA, 25 bp, Artificial
  probe
  misc_feature (1)..(25): SEQ ID NO: 7366; WAN024B6T; Start 265; Stop 289
cttggcagtgtattgagtgaaattc

SEQ ID NO: 466130 - DNA, 25 bp, Artificial
  probe
  misc_feature (1)..(25): SEQ ID NO: 7366; WAN024B6T; Start 185; Stop 209
tcgcttattgtttaaccctatttgt

SEQ ID NO: 466131 - DNA, 25 bp, Artificial
  probe
  misc_feature (1)..(25): SEQ ID NO: 7366; WAN024B6T; Start 539; Stop 563
ggatctatattcttcatgcaccaat

SEQ ID NO: 466132 - DNA, 25 bp, Artificial
  probe
  misc_feature (1)..(25): SEQ ID NO: 7366; WAN024B6T; Start 264; Stop 288
tcttggcagtgtattgagtgaaatt

SEQ ID NO: 466133 - DNA, 25 bp, Artificial
  probe
  misc_feature (1)..(25): SEQ ID NO: 7366; WAN024B6T; Start 263; Stop 287
ttcttggcagtgtattgagtgaaat

SEQ ID NO: 466134 - DNA, 25 bp, Artificial
  probe
  misc_feature (1)..(25): SEQ ID NO: 7366; WAN024B6T; Start 259; Stop 283
ttctttcttggcagtgtattgagtg

SEQ ID NO: 466135 - DNA, 25 bp, Artificial
  probe
  misc_feature (1)..(25): SEQ ID NO: 7366; WAN024B6T; Start 519; Stop 543
atacgggaaagatagtttagggatc

SEQ ID NO: 466136 - DNA, 25 bp, Artificial
  probe
  misc_feature (1)..(25): SEQ ID NO: 7366; WAN024B6T; Start 261; Stop 285
ctttcttggcagtgtattgagtgaa

SEQ ID NO: 466137 - DNA, 25 bp, Artificial
  probe
  misc_feature (1)..(25): SEQ ID NO: 7366; WAN024B6T; Start 382; Stop 406
gagtctaagaaggattatgtaagct

SEQ ID NO: 466138 - DNA, 25 bp, Artificial
  probe
  misc_feature (1)..(25): SEQ ID NO: 7366; WAN024B6T; Start 184; Stop 208
ttcgcttattgtttaaccctatttg

SEQ ID NO: 466139 - DNA, 25 bp, Artificial
  probe
  misc_feature (1)..(25): SEQ ID NO: 7366; WAN024B6T; Start 36; Stop 60
acccactacgatatttaacctattg

SEQ ID NO: 466140 - DNA, 25 bp, Artificial
  probe
  misc_feature (1)..(25): SEQ ID NO: 7366; WAN024B6T; Start 186; Stop 210
cgcttattgtttaaccctatttgtt

SEQ ID NO: 466141 - DNA, 25 bp, Artificial
  probe
  misc_feature (1)..(25): SEQ ID NO: 7366; WAN024B6T; Start 260; Stop 284
tctttcttggcagtgtattgagtga

SEQ ID NO: 466142 - DNA, 25 bp, Artificial
  probe
  misc_feature (1)..(25): SEQ ID NO: 7366; WAN024B6T; Start 37; Stop 61
cccactacgatatttaacctattga

SEQ ID NO: 466143 - DNA, 25 bp, Artificial
  probe
  misc_feature (1)..(25): SEQ ID NO: 7366; WAN024B6T; Start 32; Stop 56
gagtacccactacgatatttaacct

SEQ ID NO: 466144 - DNA, 25 bp, Artificial
  probe
  misc_feature (1)..(25): SEQ ID NO: 7366; WAN024B6T; Start 31; Stop 55
cgagtacccactacgatatttaacc

SEQ ID NO: 466145 - DNA, 25 bp, Artificial
  probe
  misc_feature (1)..(25): SEQ ID NO: 7366; WAN024B6T; Start 30; Stop 54
ccgagtacccactacgatatttaac

SEQ ID NO: 466146 - DNA, 25 bp, Artificial
  probe
  misc_feature (1)..(25): SEQ ID NO: 7366; WAN024B6T; Start 29; Stop 53
tccgagtacccactacgatatttaa

SEQ ID NO: 466147 - DNA, 25 bp, Artificial
  probe
  misc_feature (1)..(25): SEQ ID NO: 7366; WAN024B6T; Start 123; Stop 147
agtttatggtttactatctgctgtt

SEQ ID NO: 466148 - DNA, 25 bp, Artificial
  probe
  misc_feature (1)..(25): SEQ ID NO: 7366; WAN024B6T; Start 266; Stop 290
ttggcagtgtattgagtgaaattca

SEQ ID NO: 466149 - DNA, 25 bp, Artificial
  probe
  misc_feature (1)..(25): SEQ ID NO: 7366; WAN024B6T; Start 28; Stop 52
gtccgagtacccactacgatattta

SEQ ID NO: 466150 - DNA, 25 bp, Artificial
  probe
  misc_feature (1)..(25): SEQ ID NO: 7366; WAN024B6T; Start 252; Stop 276
gctttgtttctttcttggcagtgta

SEQ ID NO: 466151 - DNA, 25 bp, Artificial
  probe
  misc_feature (1)..(25): SEQ ID NO: 7366; WAN024B6T; Start 124; Stop 148
gtttatggtttactatctgctgttt

SEQ ID NO: 466152 - DNA, 25 bp, Artificial
  probe
  misc_feature (1)..(25): SEQ ID NO: 7366; WAN024B6T; Start 102; Stop 126
tacgttatggtcgatattgatagtt

SEQ ID NO: 466153 - DNA, 25 bp, Artificial
  probe
  misc_feature (1)..(25): SEQ ID NO: 7366; WAN024B6T; Start 78; Stop 102
tctgggagtttcatggtatctatat

SEQ ID NO: 466154 - DNA, 25 bp, Artificial
  probe
  misc_feature (1)..(25): SEQ ID NO: 7366; WAN024B6T; Start 377; Stop 401
aagtagagtctaagaaggattatgt

SEQ ID NO: 466155 - DNA, 25 bp, Artificial
  probe
  misc_feature (1)..(25): SEQ ID NO: 7366; WAN024B6T; Start 183; Stop 207
tttcgcttattgtttaaccctattt

SEQ ID NO: 466156 - DNA, 25 bp, Artificial
  probe
  misc_feature (1)..(25): SEQ ID NO: 7366; WAN024B6T; Start 91; Stop 115
tggtatctatatacgttatggtcga

SEQ ID NO: 466157 - DNA, 25 bp, Artificial
  probe
  misc_feature (1)..(25): SEQ ID NO: 7366; WAN024B6T; Start 77; Stop 101
ctctgggagtttcatggtatctata

SEQ ID NO: 466158 - DNA, 25 bp, Artificial
  probe
  misc_feature (1)..(25): SEQ ID NO: 7367; WAN024AJY; Start 63; Stop 87
gcaagtgagaattgacatgggattg

SEQ ID NO: 466159 - DNA, 25 bp, Artificial
  probe
  misc_feature (1)..(25): SEQ ID NO: 7367; WAN024AJY; Start 179; Stop 203
ttgtgattgagaactattttgtcct

SEQ ID NO: 466160 - DNA, 25 bp, Artificial
  probe
  misc_feature (1)..(25): SEQ ID NO: 7367; WAN024AJY; Start 112; Stop 136
aaatacaataagagaacgactcaaa

SEQ ID NO: 466161 - DNA, 25 bp, Artificial
  probe
  misc_feature (1)..(25): SEQ ID NO: 7367; WAN024AJY; Start 178; Stop 202
tttgtgattgagaactattttgtcc

SEQ ID NO: 466162 - DNA, 25 bp, Artificial
  probe
  misc_feature (1)..(25): SEQ ID NO: 7367; WAN024AJY; Start 180; Stop 204
tgtgattgagaactattttgtccta

SEQ ID NO: 466163 - DNA, 25 bp, Artificial
  probe
  misc_feature (1)..(25): SEQ ID NO: 7367; WAN024AJY; Start 62; Stop 86
ggcaagtgagaattgacatgggatt

SEQ ID NO: 466164 - DNA, 25 bp, Artificial
  probe
  misc_feature (1)..(25): SEQ ID NO: 7367; WAN024AJY; Start 186; Stop 210
tgagaactattttgtcctagactct

SEQ ID NO: 466165 - DNA, 25 bp, Artificial
  probe
  misc_feature (1)..(25): SEQ ID NO: 7367; WAN024AJY; Start 181; Stop 205
gtgattgagaactattttgtcctag

SEQ ID NO: 466166 - DNA, 25 bp, Artificial
  probe
  misc_feature (1)..(25): SEQ ID NO: 7367; WAN024AJY; Start 51; Stop 75
gtaatctgaggggcaagtgagaatt

SEQ ID NO: 466167 - DNA, 25 bp, Artificial
  probe
  misc_feature (1)..(25): SEQ ID NO: 7367; WAN024AJY; Start 182; Stop 206
tgattgagaactattttgtcctaga

SEQ ID NO: 466168 - DNA, 25 bp, Artificial
  probe
  misc_feature (1)..(25): SEQ ID NO: 7367; WAN024AJY; Start 52; Stop 76
taatctgaggggcaagtgagaattg

SEQ ID NO: 466169 - DNA, 25 bp, Artificial
  probe
  misc_feature (1)..(25): SEQ ID NO: 7367; WAN024AJY; Start 185; Stop 209
ttgagaactattttgtcctagactc

SEQ ID NO: 466170 - DNA, 25 bp, Artificial
  probe
  misc_feature (1)..(25): SEQ ID NO: 7367; WAN024AJY; Start 97; Stop 121
gccaataacctcctaaaatacaata

SEQ ID NO: 466171 - DNA, 25 bp, Artificial
  probe
  misc_feature (1)..(25): SEQ ID NO: 7367; WAN024AJY; Start 187; Stop 211
gagaactattttgtcctagactctt

SEQ ID NO: 466172 - DNA, 25 bp, Artificial
  probe
  misc_feature (1)..(25): SEQ ID NO: 7367; WAN024AJY; Start 105; Stop 129
cctcctaaaatacaataagagaacg

SEQ ID NO: 466173 - DNA, 25 bp, Artificial
  probe
  misc_feature (1)..(25): SEQ ID NO: 7367; WAN024AJY; Start 191; Stop 215
actattttgtcctagactcttttga

SEQ ID NO: 466174 - DNA, 25 bp, Artificial
  probe
  misc_feature (1)..(25): SEQ ID NO: 7367; WAN024AJY; Start 108; Stop 132
cctaaaatacaataagagaacgact

SEQ ID NO: 466175 - DNA, 25 bp, Artificial
  probe
  misc_feature (1)..(25): SEQ ID NO: 7367; WAN024AJY; Start 107; Stop 131
tcctaaaatacaataagagaacgac

SEQ ID NO: 466176 - DNA, 25 bp, Artificial
  probe
  misc_feature (1)..(25): SEQ ID NO: 7367; WAN024AJY; Start 177; Stop 201
ttttgtgattgagaactattttgtc

SEQ ID NO: 466177 - DNA, 25 bp, Artificial
  probe
  misc_feature (1)..(25): SEQ ID NO: 7367; WAN024AJY; Start 184; Stop 208
attgagaactattttgtcctagact

SEQ ID NO: 466178 - DNA, 25 bp, Artificial
  probe
  misc_feature (1)..(25): SEQ ID NO: 7367; WAN024AJY; Start 188; Stop 212
agaactattttgtcctagactcttt

SEQ ID NO: 466179 - DNA, 25 bp, Artificial
  probe
  misc_feature (1)..(25): SEQ ID NO: 7367; WAN024AJY; Start 183; Stop 207
gattgagaactattttgtcctagac

SEQ ID NO: 466180 - DNA, 25 bp, Artificial
  probe
  misc_feature (1)..(25): SEQ ID NO: 7367; WAN024AJY; Start 50; Stop 74
tgtaatctgaggggcaagtgagaat

SEQ ID NO: 466181 - DNA, 25 bp, Artificial
  probe
  misc_feature (1)..(25): SEQ ID NO: 7367; WAN024AJY; Start 49; Stop 73
atgtaatctgaggggcaagtgagaa

SEQ ID NO: 466182 - DNA, 25 bp, Artificial
  probe
  misc_feature (1)..(25): SEQ ID NO: 7367; WAN024AJY; Start 113; Stop 137
aatacaataagagaacgactcaaaa

SEQ ID NO: 466183 - DNA, 25 bp, Artificial
  probe
  misc_feature (1)..(25): SEQ ID NO: 7367; WAN024AJY; Start 111; Stop 135
aaaatacaataagagaacgactcaa

SEQ ID NO: 466184 - DNA, 25 bp, Artificial
  probe
  misc_feature (1)..(25): SEQ ID NO: 7367; WAN024AJY; Start 116; Stop 140
acaataagagaacgactcaaaatta

SEQ ID NO: 466185 - DNA, 25 bp, Artificial
  probe
  misc_feature (1)..(25): SEQ ID NO: 7367; WAN024AJY; Start 115; Stop 139
tacaataagagaacgactcaaaatt

SEQ ID NO: 466186 - DNA, 25 bp, Artificial
  probe
  misc_feature (1)..(25): SEQ ID NO: 7367; WAN024AJY; Start 96; Stop 120
ggccaataacctcctaaaatacaat

SEQ ID NO: 466187 - DNA, 25 bp, Artificial
  probe
  misc_feature (1)..(25): SEQ ID NO: 7367; WAN024AJY; Start 195; Stop 219
ttttgtcctagactcttttgatttt

SEQ ID NO: 466188 - DNA, 25 bp, Artificial
  probe
  misc_feature (1)..(25): SEQ ID NO: 7367; WAN024AJY; Start 190; Stop 214
aactattttgtcctagactcttttg

SEQ ID NO: 466189 - DNA, 25 bp, Artificial
  probe
  misc_feature (1)..(25): SEQ ID NO: 7367; WAN024AJY; Start 106; Stop 130
ctcctaaaatacaataagagaacga

SEQ ID NO: 466190 - DNA, 25 bp, Artificial
  probe
  misc_feature (1)..(25): SEQ ID NO: 7367; WAN024AJY; Start 194; Stop 218
attttgtcctagactcttttgattt

SEQ ID NO: 466191 - DNA, 25 bp, Artificial
  probe
  misc_feature (1)..(25): SEQ ID NO: 7369; WAN0249P4; Start 67; Stop 91
acaaatcaatcaggacagtcaaatc

SEQ ID NO: 466192 - DNA, 25 bp, Artificial
  probe
  misc_feature (1)..(25): SEQ ID NO: 7369; WAN0249P4; Start 68; Stop 92
caaatcaatcaggacagtcaaatcg

SEQ ID NO: 466193 - DNA, 25 bp, Artificial
  probe
  misc_feature (1)..(25): SEQ ID NO: 7369; WAN0249P4; Start 66; Stop 90
tacaaatcaatcaggacagtcaaat

SEQ ID NO: 466194 - DNA, 25 bp, Artificial
  probe
  misc_feature (1)..(25): SEQ ID NO: 7369; WAN0249P4; Start 64; Stop 88
agtacaaatcaatcaggacagtcaa

SEQ ID NO: 466195 - DNA, 25 bp, Artificial
  probe
  misc_feature (1)..(25): SEQ ID NO: 7369; WAN0249P4; Start 60; Stop 84
gaacagtacaaatcaatcaggacag

SEQ ID NO: 466196 - DNA, 25 bp, Artificial
  probe
  misc_feature (1)..(25): SEQ ID NO: 7369; WAN0249P4; Start 59; Stop 83
agaacagtacaaatcaatcaggaca

SEQ ID NO: 466197 - DNA, 25 bp, Artificial
  probe
  misc_feature (1)..(25): SEQ ID NO: 7369; WAN0249P4; Start 61; Stop 85
aacagtacaaatcaatcaggacagt

SEQ ID NO: 466198 - DNA, 25 bp, Artificial
  probe
  misc_feature (1)..(25): SEQ ID NO: 7369; WAN0249P4; Start 65; Stop 89
gtacaaatcaatcaggacagtcaaa

SEQ ID NO: 466199 - DNA, 25 bp, Artificial
  probe
  misc_feature (1)..(25): SEQ ID NO: 7369; WAN0249P4; Start 58; Stop 82
aagaacagtacaaatcaatcaggac

SEQ ID NO: 466200 - DNA, 25 bp, Artificial
  probe
  misc_feature (1)..(25): SEQ ID NO: 7369; WAN0249P4; Start 63; Stop 87
cagtacaaatcaatcaggacagtca

SEQ ID NO: 466201 - DNA, 25 bp, Artificial
  probe
  misc_feature (1)..(25): SEQ ID NO: 7369; WAN0249P4; Start 62; Stop 86
acagtacaaatcaatcaggacagtc

SEQ ID NO: 466202 - DNA, 25 bp, Artificial
  probe
  misc_feature (1)..(25): SEQ ID NO: 7369; WAN0249P4; Start 69; Stop 93
aaatcaatcaggacagtcaaatcga

SEQ ID NO: 466203 - DNA, 25 bp, Artificial
  probe
  misc_feature (1)..(25): SEQ ID NO: 7369; WAN0249P4; Start 57; Stop 81
taagaacagtacaaatcaatcagga

SEQ ID NO: 466204 - DNA, 25 bp, Artificial
  probe
  misc_feature (1)..(25): SEQ ID NO: 7369; WAN0249P4; Start 111; Stop 135
gaagtagagatgcactattctagtt

SEQ ID NO: 466205 - DNA, 25 bp, Artificial
  probe
  misc_feature (1)..(25): SEQ ID NO: 7369; WAN0249P4; Start 110; Stop 134
agaagtagagatgcactattctagt

SEQ ID NO: 466206 - DNA, 25 bp, Artificial
  probe
  misc_feature (1)..(25): SEQ ID NO: 7369; WAN0249P4; Start 56; Stop 80
ataagaacagtacaaatcaatcagg

SEQ ID NO: 466207 - DNA, 25 bp, Artificial
  probe
  misc_feature (1)..(25): SEQ ID NO: 7369; WAN0249P4; Start 70; Stop 94
aatcaatcaggacagtcaaatcgat

SEQ ID NO: 466208 - DNA, 25 bp, Artificial
  probe
  misc_feature (1)..(25): SEQ ID NO: 7369; WAN0249P4; Start 171; Stop 195
ataatccctcattttatgcggaaaa

SEQ ID NO: 466209 - DNA, 25 bp, Artificial
  probe
  misc_feature (1)..(25): SEQ ID NO: 7369; WAN0249P4; Start 170; Stop 194
tataatccctcattttatgcggaaa

SEQ ID NO: 466210 - DNA, 25 bp, Artificial
  probe
  misc_feature (1)..(25): SEQ ID NO: 7369; WAN0249P4; Start 169; Stop 193
atataatccctcattttatgcggaa

SEQ ID NO: 466211 - DNA, 25 bp, Artificial
  probe
  misc_feature (1)..(25): SEQ ID NO: 7369; WAN0249P4; Start 112; Stop 136
aagtagagatgcactattctagttt

SEQ ID NO: 466212 - DNA, 25 bp, Artificial
  probe
  misc_feature (1)..(25): SEQ ID NO: 7369; WAN0249P4; Start 100; Stop 124
acaatgttttagaagtagagatgca

SEQ ID NO: 466213 - DNA, 25 bp, Artificial
  probe
  misc_feature (1)..(25): SEQ ID NO: 7369; WAN0249P4; Start 99; Stop 123
aacaatgttttagaagtagagatgc

SEQ ID NO: 466214 - DNA, 25 bp, Artificial
  probe
  misc_feature (1)..(25): SEQ ID NO: 7369; WAN0249P4; Start 101; Stop 125
caatgttttagaagtagagatgcac

SEQ ID NO: 466215 - DNA, 25 bp, Artificial
  probe
  misc_feature (1)..(25): SEQ ID NO: 7369; WAN0249P4; Start 55; Stop 79
aataagaacagtacaaatcaatcag

SEQ ID NO: 466216 - DNA, 25 bp, Artificial
  probe
  misc_feature (1)..(25): SEQ ID NO: 7369; WAN0249P4; Start 102; Stop 126
aatgttttagaagtagagatgcact

SEQ ID NO: 466217 - DNA, 25 bp, Artificial
  probe
  misc_feature (1)..(25): SEQ ID NO: 7369; WAN0249P4; Start 223; Stop 247
tccaatttgaatgacaataatctag

SEQ ID NO: 466218 - DNA, 25 bp, Artificial
  probe
  misc_feature (1)..(25): SEQ ID NO: 7369; WAN0249P4; Start 107; Stop 131
tttagaagtagagatgcactattct

SEQ ID NO: 466219 - DNA, 25 bp, Artificial
  probe
  misc_feature (1)..(25): SEQ ID NO: 7369; WAN0249P4; Start 168; Stop 192
tatataatccctcattttatgcgga

SEQ ID NO: 466220 - DNA, 25 bp, Artificial
  probe
  misc_feature (1)..(25): SEQ ID NO: 7369; WAN0249P4; Start 54; Stop 78
aaataagaacagtacaaatcaatca

SEQ ID NO: 466221 - DNA, 25 bp, Artificial
  probe
  misc_feature (1)..(25): SEQ ID NO: 7369; WAN0249P4; Start 167; Stop 191
atatataatccctcattttatgcgg

SEQ ID NO: 466222 - DNA, 25 bp, Artificial
  probe
  misc_feature (1)..(25): SEQ ID NO: 7369; WAN0249P4; Start 104; Stop 128
tgttttagaagtagagatgcactat

SEQ ID NO: 466223 - DNA, 25 bp, Artificial
  probe
  misc_feature (1)..(25): SEQ ID NO: 7369; WAN0249P4; Start 103; Stop 127
atgttttagaagtagagatgcacta

SEQ ID NO: 466224 - DNA, 25 bp, Artificial
  probe
  misc_feature (1)..(25): SEQ ID NO: 7370; WAN024G2O; Start 137; Stop 161
cagatgtggtcaggaatttcttaac

SEQ ID NO: 466225 - DNA, 25 bp, Artificial
  probe
  misc_feature (1)..(25): SEQ ID NO: 7370; WAN024G2O; Start 136; Stop 160
tcagatgtggtcaggaatttcttaa

SEQ ID NO: 466226 - DNA, 25 bp, Artificial
  probe
  misc_feature (1)..(25): SEQ ID NO: 7370; WAN024G2O; Start 135; Stop 159
ttcagatgtggtcaggaatttctta

SEQ ID NO: 466227 - DNA, 25 bp, Artificial
  probe
  misc_feature (1)..(25): SEQ ID NO: 7370; WAN024G2O; Start 134; Stop 158
tttcagatgtggtcaggaatttctt

SEQ ID NO: 466228 - DNA, 25 bp, Artificial
  probe
  misc_feature (1)..(25): SEQ ID NO: 7370; WAN024G2O; Start 48; Stop 72
gaacttcgctttcattgttggattt

SEQ ID NO: 466229 - DNA, 25 bp, Artificial
  probe
  misc_feature (1)..(25): SEQ ID NO: 7370; WAN024G2O; Start 95; Stop 119
agacatcttccaatttgttgttagc

SEQ ID NO: 466230 - DNA, 25 bp, Artificial
  probe
  misc_feature (1)..(25): SEQ ID NO: 7370; WAN024G2O; Start 92; Stop 116
cagagacatcttccaatttgttgtt

SEQ ID NO: 466231 - DNA, 25 bp, Artificial
  probe
  misc_feature (1)..(25): SEQ ID NO: 7370; WAN024G2O; Start 91; Stop 115
acagagacatcttccaatttgttgt

SEQ ID NO: 466232 - DNA, 25 bp, Artificial
  probe
  misc_feature (1)..(25): SEQ ID NO: 7370; WAN024G2O; Start 93; Stop 117
agagacatcttccaatttgttgtta

SEQ ID NO: 466233 - DNA, 25 bp, Artificial
  probe
  misc_feature (1)..(25): SEQ ID NO: 7370; WAN024G2O; Start 88; Stop 112
ttaacagagacatcttccaatttgt

SEQ ID NO: 466234 - DNA, 25 bp, Artificial
  probe
  misc_feature (1)..(25): SEQ ID NO: 7370; WAN024G2O; Start 152; Stop 176
atttcttaacctcttccatgcgttt

SEQ ID NO: 466235 - DNA, 25 bp, Artificial
  probe
  misc_feature (1)..(25): SEQ ID NO: 7370; WAN024G2O; Start 151; Stop 175
aatttcttaacctcttccatgcgtt

SEQ ID NO: 466236 - DNA, 25 bp, Artificial
  probe
  misc_feature (1)..(25): SEQ ID NO: 7370; WAN024G2O; Start 94; Stop 118
gagacatcttccaatttgttgttag

SEQ ID NO: 466237 - DNA, 25 bp, Artificial
  probe
  misc_feature (1)..(25): SEQ ID NO: 7370; WAN024G2O; Start 207; Stop 231
tccaaagttagtcgaagctgaatta

SEQ ID NO: 466238 - DNA, 25 bp, Artificial
  probe
  misc_feature (1)..(25): SEQ ID NO: 7370; WAN024G2O; Start 87; Stop 111
tttaacagagacatcttccaatttg

SEQ ID NO: 466239 - DNA, 25 bp, Artificial
  probe
  misc_feature (1)..(25): SEQ ID NO: 7370; WAN024G2O; Start 208; Stop 232
ccaaagttagtcgaagctgaattat

SEQ ID NO: 466240 - DNA, 25 bp, Artificial
  probe
  misc_feature (1)..(25): SEQ ID NO: 7370; WAN024G2O; Start 150; Stop 174
gaatttcttaacctcttccatgcgt

SEQ ID NO: 466241 - DNA, 25 bp, Artificial
  probe
  misc_feature (1)..(25): SEQ ID NO: 7370; WAN024G2O; Start 143; Stop 167
tggtcaggaatttcttaacctcttc

SEQ ID NO: 466242 - DNA, 25 bp, Artificial
  probe
  misc_feature (1)..(25): SEQ ID NO: 7370; WAN024G2O; Start 142; Stop 166
gtggtcaggaatttcttaacctctt

SEQ ID NO: 466243 - DNA, 25 bp, Artificial
  probe
  misc_feature (1)..(25): SEQ ID NO: 7370; WAN024G2O; Start 140; Stop 164
atgtggtcaggaatttcttaacctc

SEQ ID NO: 466244 - DNA, 25 bp, Artificial
  probe
  misc_feature (1)..(25): SEQ ID NO: 7370; WAN024G2O; Start 139; Stop 163
gatgtggtcaggaatttcttaacct

SEQ ID NO: 466245 - DNA, 25 bp, Artificial
  probe
  misc_feature (1)..(25): SEQ ID NO: 7370; WAN024G2O; Start 138; Stop 162
agatgtggtcaggaatttcttaacc

SEQ ID NO: 466246 - DNA, 25 bp, Artificial
  probe
  misc_feature (1)..(25): SEQ ID NO: 7370; WAN024G2O; Start 182; Stop 206
ccttgtcgatttcatcaatagcttt

SEQ ID NO: 466247 - DNA, 25 bp, Artificial
  probe
  misc_feature (1)..(25): SEQ ID NO: 7370; WAN024G2O; Start 206; Stop 230
ttccaaagttagtcgaagctgaatt

SEQ ID NO: 466248 - DNA, 25 bp, Artificial
  probe
  misc_feature (1)..(25): SEQ ID NO: 7370; WAN024G2O; Start 205; Stop 229
tttccaaagttagtcgaagctgaat

SEQ ID NO: 466249 - DNA, 25 bp, Artificial
  probe
  misc_feature (1)..(25): SEQ ID NO: 7370; WAN024G2O; Start 153; Stop 177
tttcttaacctcttccatgcgtttg

SEQ ID NO: 466250 - DNA, 25 bp, Artificial
  probe
  misc_feature (1)..(25): SEQ ID NO: 7370; WAN024G2O; Start 96; Stop 120
gacatcttccaatttgttgttagct

SEQ ID NO: 466251 - DNA, 25 bp, Artificial
  probe
  misc_feature (1)..(25): SEQ ID NO: 7370; WAN024G2O; Start 141; Stop 165
tgtggtcaggaatttcttaacctct

SEQ ID NO: 466252 - DNA, 25 bp, Artificial
  probe
  misc_feature (1)..(25): SEQ ID NO: 7370; WAN024G2O; Start 156; Stop 180
cttaacctcttccatgcgtttgatg

SEQ ID NO: 466253 - DNA, 25 bp, Artificial
  probe
  misc_feature (1)..(25): SEQ ID NO: 7370; WAN024G2O; Start 155; Stop 179
tcttaacctcttccatgcgtttgat

SEQ ID NO: 466254 - DNA, 25 bp, Artificial
  probe
  misc_feature (1)..(25): SEQ ID NO: 7370; WAN024G2O; Start 154; Stop 178
ttcttaacctcttccatgcgtttga

SEQ ID NO: 466255 - DNA, 25 bp, Artificial
  probe
  misc_feature (1)..(25): SEQ ID NO: 7370; WAN024G2O; Start 181; Stop 205
gccttgtcgatttcatcaatagctt

SEQ ID NO: 466256 - DNA, 25 bp, Artificial
  probe
  misc_feature (1)..(25): SEQ ID NO: 7370; WAN024G2O; Start 132; Stop 156
gttttcagatgtggtcaggaatttc

SEQ ID NO: 466257 - DNA, 25 bp, Artificial
  probe
  misc_feature (1)..(25): SEQ ID NO: 7371; WAN024FEB-3; Start 84; Stop 108
aggaactaagtaacggtggctataa

SEQ ID NO: 466258 - DNA, 25 bp, Artificial
  probe
  misc_feature (1)..(25): SEQ ID NO: 7371; WAN024FEB-3; Start 83; Stop 107
caggaactaagtaacggtggctata

SEQ ID NO: 466259 - DNA, 25 bp, Artificial
  probe
  misc_feature (1)..(25): SEQ ID NO: 7371; WAN024FEB-3; Start 423; Stop 447
atcctatcatgtatgtgaacagtcc

SEQ ID NO: 466260 - DNA, 25 bp, Artificial
  probe
  misc_feature (1)..(25): SEQ ID NO: 7371; WAN024FEB-3; Start 426; Stop 450
ctatcatgtatgtgaacagtccagg

SEQ ID NO: 466261 - DNA, 25 bp, Artificial
  probe
  misc_feature (1)..(25): SEQ ID NO: 7371; WAN024FEB-3; Start 425; Stop 449
cctatcatgtatgtgaacagtccag

SEQ ID NO: 466262 - DNA, 25 bp, Artificial
  probe
  misc_feature (1)..(25): SEQ ID NO: 7371; WAN024FEB-3; Start 424; Stop 448
tcctatcatgtatgtgaacagtcca

SEQ ID NO: 466263 - DNA, 25 bp, Artificial
  probe
  misc_feature (1)..(25): SEQ ID NO: 7371; WAN024FEB-3; Start 428; Stop 452
atcatgtatgtgaacagtccaggta

SEQ ID NO: 466264 - DNA, 25 bp, Artificial
  probe
  misc_feature (1)..(25): SEQ ID NO: 7371; WAN024FEB-3; Start 427; Stop 451
tatcatgtatgtgaacagtccaggt

SEQ ID NO: 466265 - DNA, 25 bp, Artificial
  probe
  misc_feature (1)..(25): SEQ ID NO: 7371; WAN024FEB-3; Start 85; Stop 109
ggaactaagtaacggtggctataaa

SEQ ID NO: 466266 - DNA, 25 bp, Artificial
  probe
  misc_feature (1)..(25): SEQ ID NO: 7371; WAN024FEB-3; Start 422; Stop 446
aatcctatcatgtatgtgaacagtc

SEQ ID NO: 466267 - DNA, 25 bp, Artificial
  probe
  misc_feature (1)..(25): SEQ ID NO: 7371; WAN024FEB-3; Start 1; Stop 25
ttacttagttcgacaggacaatgtt

SEQ ID NO: 466268 - DNA, 25 bp, Artificial
  probe
  misc_feature (1)..(25): SEQ ID NO: 7371; WAN024FEB-3; Start 379; Stop 403
cgctagtatcttgtcaaattatccg

SEQ ID NO: 466269 - DNA, 25 bp, Artificial
  probe
  misc_feature (1)..(25): SEQ ID NO: 7371; WAN024FEB-3; Start 429; Stop 453
tcatgtatgtgaacagtccaggtac

SEQ ID NO: 466270 - DNA, 25 bp, Artificial
  probe
  misc_feature (1)..(25): SEQ ID NO: 7371; WAN024FEB-3; Start 380; Stop 404
gctagtatcttgtcaaattatccga

SEQ ID NO: 466271 - DNA, 25 bp, Artificial
  probe
  misc_feature (1)..(25): SEQ ID NO: 7371; WAN024FEB-3; Start 472; Stop 496
agaagccttgaactattcatggaat

SEQ ID NO: 466272 - DNA, 25 bp, Artificial
  probe
  misc_feature (1)..(25): SEQ ID NO: 7371; WAN024FEB-3; Start 431; Stop 455
atgtatgtgaacagtccaggtacag

SEQ ID NO: 466273 - DNA, 25 bp, Artificial
  probe
  misc_feature (1)..(25): SEQ ID NO: 7371; WAN024FEB-3; Start 471; Stop 495
gagaagccttgaactattcatggaa

SEQ ID NO: 466274 - DNA, 25 bp, Artificial
  probe
  misc_feature (1)..(25): SEQ ID NO: 7371; WAN024FEB-3; Start 349; Stop 373
tattgccattgaccaaggtttgatg

SEQ ID NO: 466275 - DNA, 25 bp, Artificial
  probe
  misc_feature (1)..(25): SEQ ID NO: 7371; WAN024FEB-3; Start 348; Stop 372
gtattgccattgaccaaggtttgat

SEQ ID NO: 466276 - DNA, 25 bp, Artificial
  probe
  misc_feature (1)..(25): SEQ ID NO: 7371; WAN024FEB-3; Start 418; Stop 442
tggaaatcctatcatgtatgtgaac

SEQ ID NO: 466277 - DNA, 25 bp, Artificial
  probe
  misc_feature (1)..(25): SEQ ID NO: 7371; WAN024FEB-3; Start 430; Stop 454
catgtatgtgaacagtccaggtaca

SEQ ID NO: 466278 - DNA, 25 bp, Artificial
  probe
  misc_feature (1)..(25): SEQ ID NO: 7371; WAN024FEB-3; Start 476; Stop 500
gccttgaactattcatggaatatcc

SEQ ID NO: 466279 - DNA, 25 bp, Artificial
  probe
  misc_feature (1)..(25): SEQ ID NO: 7371; WAN024FEB-3; Start 419; Stop 443
ggaaatcctatcatgtatgtgaaca

SEQ ID NO: 466280 - DNA, 25 bp, Artificial
  probe
  misc_feature (1)..(25): SEQ ID NO: 7371; WAN024FEB-3; Start 246; Stop 270
taggctttgttggtggtcgtaatta

SEQ ID NO: 466281 - DNA, 25 bp, Artificial
  probe
  misc_feature (1)..(25): SEQ ID NO: 7371; WAN024FEB-3; Start 473; Stop 497
gaagccttgaactattcatggaata

SEQ ID NO: 466282 - DNA, 25 bp, Artificial
  probe
  misc_feature (1)..(25): SEQ ID NO: 7371; WAN024FEB-3; Start 2; Stop 26
tacttagttcgacaggacaatgttt

SEQ ID NO: 466283 - DNA, 25 bp, Artificial
  probe
  misc_feature (1)..(25): SEQ ID NO: 7371; WAN024FEB-3; Start 475; Stop 499
agccttgaactattcatggaatatc

SEQ ID NO: 466284 - DNA, 25 bp, Artificial
  probe
  misc_feature (1)..(25): SEQ ID NO: 7371; WAN024FEB-3; Start 465; Stop 489
ccttgggagaagccttgaactattc

SEQ ID NO: 466285 - DNA, 25 bp, Artificial
  probe
  misc_feature (1)..(25): SEQ ID NO: 7371; WAN024FEB-3; Start 417; Stop 441
atggaaatcctatcatgtatgtgaa

SEQ ID NO: 466286 - DNA, 25 bp, Artificial
  probe
  misc_feature (1)..(25): SEQ ID NO: 7371; WAN024FEB-3; Start 416; Stop 440
aatggaaatcctatcatgtatgtga

SEQ ID NO: 466287 - DNA, 25 bp, Artificial
  probe
  misc_feature (1)..(25): SEQ ID NO: 7371; WAN024FEB-3; Start 421; Stop 445
aaatcctatcatgtatgtgaacagt

SEQ ID NO: 466288 - DNA, 25 bp, Artificial
  probe
  misc_feature (1)..(25): SEQ ID NO: 7371; WAN024FEB-3; Start 283; Stop 307
aaacaatcatgccttcgacactaag

SEQ ID NO: 466289 - DNA, 25 bp, Artificial
  probe
  misc_feature (1)..(25): SEQ ID NO: 7371; WAN024FEB-3; Start 474; Stop 498
aagccttgaactattcatggaatat

SEQ ID NO: 466290 - DNA, 25 bp, Artificial
  probe
  misc_feature (1)..(25): SEQ ID NO: 7372; WAN0249OU; Start 79; Stop 103
gttgaaacacctgatactatgcttt

SEQ ID NO: 466291 - DNA, 25 bp, Artificial
  probe
  misc_feature (1)..(25): SEQ ID NO: 7372; WAN0249OU; Start 62; Stop 86
aaagcatagtatcaggtgttgaaac

SEQ ID NO: 466292 - DNA, 25 bp, Artificial
  probe
  misc_feature (1)..(25): SEQ ID NO: 7372; WAN0249OU; Start 78; Stop 102
tgttgaaacacctgatactatgctt

SEQ ID NO: 466293 - DNA, 25 bp, Artificial
  probe
  misc_feature (1)..(25): SEQ ID NO: 7372; WAN0249OU; Start 63; Stop 87
aagcatagtatcaggtgttgaaaca

SEQ ID NO: 466294 - DNA, 25 bp, Artificial
  probe
  misc_feature (1)..(25): SEQ ID NO: 7372; WAN0249OU; Start 80; Stop 104
ttgaaacacctgatactatgctttt

SEQ ID NO: 466295 - DNA, 25 bp, Artificial
  probe
  misc_feature (1)..(25): SEQ ID NO: 7372; WAN0249OU; Start 61; Stop 85
aaaagcatagtatcaggtgttgaaa

SEQ ID NO: 466296 - DNA, 25 bp, Artificial
  probe
  misc_feature (1)..(25): SEQ ID NO: 7372; WAN0249OU; Start 77; Stop 101
gtgttgaaacacctgatactatgct

SEQ ID NO: 466297 - DNA, 25 bp, Artificial
  probe
  misc_feature (1)..(25): SEQ ID NO: 7372; WAN0249OU; Start 64; Stop 88
agcatagtatcaggtgttgaaacac

SEQ ID NO: 466298 - DNA, 25 bp, Artificial
  probe
  misc_feature (1)..(25): SEQ ID NO: 7372; WAN0249OU; Start 32; Stop 56
gttgcttatactcaatgaaaatcat

SEQ ID NO: 466299 - DNA, 25 bp, Artificial
  probe
  misc_feature (1)..(25): SEQ ID NO: 7372; WAN0249OU; Start 34; Stop 58
tgcttatactcaatgaaaatcatag

SEQ ID NO: 466300 - DNA, 25 bp, Artificial
  probe
  misc_feature (1)..(25): SEQ ID NO: 7372; WAN0249OU; Start 35; Stop 59
gcttatactcaatgaaaatcataga

SEQ ID NO: 466301 - DNA, 25 bp, Artificial
  probe
  misc_feature (1)..(25): SEQ ID NO: 7373; WAN0249P5; Start 76; Stop 100
ggtgtaagtcctcagcctgactatc

SEQ ID NO: 466302 - DNA, 25 bp, Artificial
  probe
  misc_feature (1)..(25): SEQ ID NO: 7373; WAN0249P5; Start 80; Stop 104
taagtcctcagcctgactatcgtga

SEQ ID NO: 466303 - DNA, 25 bp, Artificial
  probe
  misc_feature (1)..(25): SEQ ID NO: 7373; WAN0249P5; Start 79; Stop 103
gtaagtcctcagcctgactatcgtg

SEQ ID NO: 466304 - DNA, 25 bp, Artificial
  probe
  misc_feature (1)..(25): SEQ ID NO: 7373; WAN0249P5; Start 77; Stop 101
gtgtaagtcctcagcctgactatcg

SEQ ID NO: 466305 - DNA, 25 bp, Artificial
  probe
  misc_feature (1)..(25): SEQ ID NO: 7373; WAN0249P5; Start 75; Stop 99
aggtgtaagtcctcagcctgactat

SEQ ID NO: 466306 - DNA, 25 bp, Artificial
  probe
  misc_feature (1)..(25): SEQ ID NO: 7373; WAN0249P5; Start 78; Stop 102
tgtaagtcctcagcctgactatcgt

SEQ ID NO: 466307 - DNA, 25 bp, Artificial
  probe
  misc_feature (1)..(25): SEQ ID NO: 7373; WAN0249P5; Start 74; Stop 98
gaggtgtaagtcctcagcctgacta

SEQ ID NO: 466308 - DNA, 25 bp, Artificial
  probe
  misc_feature (1)..(25): SEQ ID NO: 7374; WAN024BRL; Start 12; Stop 36
gaacccattgttaagacactaccta

SEQ ID NO: 466309 - DNA, 25 bp, Artificial
  probe
  misc_feature (1)..(25): SEQ ID NO: 7374; WAN024BRL; Start 23; Stop 47
taagacactacctaaacctgttacg

SEQ ID NO: 466310 - DNA, 25 bp, Artificial
  probe
  misc_feature (1)..(25): SEQ ID NO: 7374; WAN024BRL; Start 9; Stop 33
caagaacccattgttaagacactac

SEQ ID NO: 466311 - DNA, 25 bp, Artificial
  probe
  misc_feature (1)..(25): SEQ ID NO: 7374; WAN024BRL; Start 14; Stop 38
acccattgttaagacactacctaaa

SEQ ID NO: 466312 - DNA, 25 bp, Artificial
  probe
  misc_feature (1)..(25): SEQ ID NO: 7374; WAN024BRL; Start 13; Stop 37
aacccattgttaagacactacctaa

SEQ ID NO: 466313 - DNA, 25 bp, Artificial
  probe
  misc_feature (1)..(25): SEQ ID NO: 7374; WAN024BRL; Start 20; Stop 44
tgttaagacactacctaaacctgtt

SEQ ID NO: 466314 - DNA, 25 bp, Artificial
  probe
  misc_feature (1)..(25): SEQ ID NO: 7374; WAN024BRL; Start 19; Stop 43
ttgttaagacactacctaaacctgt

SEQ ID NO: 466315 - DNA, 25 bp, Artificial
  probe
  misc_feature (1)..(25): SEQ ID NO: 7374; WAN024BRL; Start 16; Stop 40
ccattgttaagacactacctaaacc

SEQ ID NO: 466316 - DNA, 25 bp, Artificial
  probe
  misc_feature (1)..(25): SEQ ID NO: 7374; WAN024BRL; Start 15; Stop 39
cccattgttaagacactacctaaac

SEQ ID NO: 466317 - DNA, 25 bp, Artificial
  probe
  misc_feature (1)..(25): SEQ ID NO: 7374; WAN024BRL; Start 10; Stop 34
aagaacccattgttaagacactacc

SEQ ID NO: 466318 - DNA, 25 bp, Artificial
  probe
  misc_feature (1)..(25): SEQ ID NO: 7374; WAN024BRL; Start 11; Stop 35
agaacccattgttaagacactacct

SEQ ID NO: 466319 - DNA, 25 bp, Artificial
  probe
  misc_feature (1)..(25): SEQ ID NO: 7374; WAN024BRL; Start 18; Stop 42
attgttaagacactacctaaacctg

SEQ ID NO: 466320 - DNA, 25 bp, Artificial
  probe
  misc_feature (1)..(25): SEQ ID NO: 7374; WAN024BRL; Start 17; Stop 41
cattgttaagacactacctaaacct

SEQ ID NO: 466321 - DNA, 25 bp, Artificial
  probe
  misc_feature (1)..(25): SEQ ID NO: 7374; WAN024BRL; Start 22; Stop 46
ttaagacactacctaaacctgttac

SEQ ID NO: 466322 - DNA, 25 bp, Artificial
  probe
  misc_feature (1)..(25): SEQ ID NO: 7374; WAN024BRL; Start 21; Stop 45
gttaagacactacctaaacctgtta

SEQ ID NO: 466323 - DNA, 25 bp, Artificial
  probe
  misc_feature (1)..(25): SEQ ID NO: 7374; WAN024BRL; Start 26; Stop 50
gacactacctaaacctgttacgtta

SEQ ID NO: 466324 - DNA, 25 bp, Artificial
  probe
  misc_feature (1)..(25): SEQ ID NO: 7374; WAN024BRL; Start 28; Stop 52
cactacctaaacctgttacgttatt

SEQ ID NO: 466325 - DNA, 25 bp, Artificial
  probe
  misc_feature (1)..(25): SEQ ID NO: 7374; WAN024BRL; Start 27; Stop 51
acactacctaaacctgttacgttat

SEQ ID NO: 466326 - DNA, 25 bp, Artificial
  probe
  misc_feature (1)..(25): SEQ ID NO: 7374; WAN024BRL; Start 25; Stop 49
agacactacctaaacctgttacgtt

SEQ ID NO: 466327 - DNA, 25 bp, Artificial
  probe
  misc_feature (1)..(25): SEQ ID NO: 7374; WAN024BRL; Start 24; Stop 48
aagacactacctaaacctgttacgt

SEQ ID NO: 466328 - DNA, 25 bp, Artificial
  probe
  misc_feature (1)..(25): SEQ ID NO: 7374; WAN024BRL; Start 29; Stop 53
actacctaaacctgttacgttattt

SEQ ID NO: 466329 - DNA, 25 bp, Artificial
  probe
  misc_feature (1)..(25): SEQ ID NO: 7374; WAN024BRL; Start 8; Stop 32
acaagaacccattgttaagacacta

SEQ ID NO: 466330 - DNA, 25 bp, Artificial
  probe
  misc_feature (1)..(25): SEQ ID NO: 7374; WAN024BRL; Start 5; Stop 29
tacacaagaacccattgttaagaca

SEQ ID NO: 466331 - DNA, 25 bp, Artificial
  probe
  misc_feature (1)..(25): SEQ ID NO: 7374; WAN024BRL; Start 4; Stop 28
ttacacaagaacccattgttaagac

SEQ ID NO: 466332 - DNA, 25 bp, Artificial
  probe
  misc_feature (1)..(25): SEQ ID NO: 7374; WAN024BRL; Start 3; Stop 27
cttacacaagaacccattgttaaga

SEQ ID NO: 466333 - DNA, 25 bp, Artificial
  probe
  misc_feature (1)..(25): SEQ ID NO: 7374; WAN024BRL; Start 2; Stop 26
tcttacacaagaacccattgttaag

SEQ ID NO: 466334 - DNA, 25 bp, Artificial
  probe
  misc_feature (1)..(25): SEQ ID NO: 7374; WAN024BRL; Start 7; Stop 31
cacaagaacccattgttaagacact

SEQ ID NO: 466335 - DNA, 25 bp, Artificial
  probe
  misc_feature (1)..(25): SEQ ID NO: 7374; WAN024BRL; Start 6; Stop 30
acacaagaacccattgttaagacac

SEQ ID NO: 466336 - DNA, 25 bp, Artificial
  probe
  misc_feature (1)..(25): SEQ ID NO: 7374; WAN024BRL; Start 30; Stop 54
ctacctaaacctgttacgttattta

SEQ ID NO: 466337 - DNA, 25 bp, Artificial
  probe
  misc_feature (1)..(25): SEQ ID NO: 7374; WAN024BRL; Start 32; Stop 56
acctaaacctgttacgttatttata

SEQ ID NO: 466338 - DNA, 25 bp, Artificial
  probe
  misc_feature (1)..(25): SEQ ID NO: 7374; WAN024BRL; Start 31; Stop 55
tacctaaacctgttacgttatttat

SEQ ID NO: 466339 - DNA, 25 bp, Artificial
  probe
  misc_feature (1)..(25): SEQ ID NO: 7374; WAN024BRL; Start 1; Stop 25
ttcttacacaagaacccattgttaa

SEQ ID NO: 466340 - DNA, 25 bp, Artificial
  probe
  misc_feature (1)..(25): SEQ ID NO: 7375; WAN0249PF; Start 77; Stop 101
atgttgcttaactcattacaagatg

SEQ ID NO: 466341 - DNA, 25 bp, Artificial
  probe
  misc_feature (1)..(25): SEQ ID NO: 7375; WAN0249PF; Start 72; Stop 96
caagaatgttgcttaactcattaca

SEQ ID NO: 466342 - DNA, 25 bp, Artificial
  probe
  misc_feature (1)..(25): SEQ ID NO: 7375; WAN0249PF; Start 78; Stop 102
tgttgcttaactcattacaagatga

SEQ ID NO: 466343 - DNA, 25 bp, Artificial
  probe
  misc_feature (1)..(25): SEQ ID NO: 7375; WAN0249PF; Start 75; Stop 99
gaatgttgcttaactcattacaaga

SEQ ID NO: 466344 - DNA, 25 bp, Artificial
  probe
  misc_feature (1)..(25): SEQ ID NO: 7375; WAN0249PF; Start 74; Stop 98
agaatgttgcttaactcattacaag

SEQ ID NO: 466345 - DNA, 25 bp, Artificial
  probe
  misc_feature (1)..(25): SEQ ID NO: 7375; WAN0249PF; Start 73; Stop 97
aagaatgttgcttaactcattacaa

SEQ ID NO: 466346 - DNA, 25 bp, Artificial
  probe
  misc_feature (1)..(25): SEQ ID NO: 7375; WAN0249PF; Start 183; Stop 207
gcacagctttgaagtttcagataaa

SEQ ID NO: 466347 - DNA, 25 bp, Artificial
  probe
  misc_feature (1)..(25): SEQ ID NO: 7375; WAN0249PF; Start 79; Stop 103
gttgcttaactcattacaagatgat

SEQ ID NO: 466348 - DNA, 25 bp, Artificial
  probe
  misc_feature (1)..(25): SEQ ID NO: 7375; WAN0249PF; Start 76; Stop 100
aatgttgcttaactcattacaagat

SEQ ID NO: 466349 - DNA, 25 bp, Artificial
  probe
  misc_feature (1)..(25): SEQ ID NO: 7375; WAN0249PF; Start 182; Stop 206
agcacagctttgaagtttcagataa

SEQ ID NO: 466350 - DNA, 25 bp, Artificial
  probe
  misc_feature (1)..(25): SEQ ID NO: 7375; WAN0249PF; Start 95; Stop 119
caagatgataactttccattttcca

SEQ ID NO: 466351 - DNA, 25 bp, Artificial
  probe
  misc_feature (1)..(25): SEQ ID NO: 7375; WAN0249PF; Start 94; Stop 118
acaagatgataactttccattttcc

SEQ ID NO: 466352 - DNA, 25 bp, Artificial
  probe
  misc_feature (1)..(25): SEQ ID NO: 7375; WAN0249PF; Start 81; Stop 105
tgcttaactcattacaagatgataa

SEQ ID NO: 466353 - DNA, 25 bp, Artificial
  probe
  misc_feature (1)..(25): SEQ ID NO: 7375; WAN0249PF; Start 80; Stop 104
ttgcttaactcattacaagatgata

SEQ ID NO: 466354 - DNA, 25 bp, Artificial
  probe
  misc_feature (1)..(25): SEQ ID NO: 7375; WAN0249PF; Start 82; Stop 106
gcttaactcattacaagatgataac

SEQ ID NO: 466355 - DNA, 25 bp, Artificial
  probe
  misc_feature (1)..(25): SEQ ID NO: 7375; WAN0249PF; Start 90; Stop 114
cattacaagatgataactttccatt

SEQ ID NO: 466356 - DNA, 25 bp, Artificial
  probe
  misc_feature (1)..(25): SEQ ID NO: 7375; WAN0249PF; Start 105; Stop 129
actttccattttccattcaaattga

SEQ ID NO: 466357 - DNA, 25 bp, Artificial
  probe
  misc_feature (1)..(25): SEQ ID NO: 7375; WAN0249PF; Start 100; Stop 124
tgataactttccattttccattcaa

SEQ ID NO: 466358 - DNA, 25 bp, Artificial
  probe
  misc_feature (1)..(25): SEQ ID NO: 7375; WAN0249PF; Start 104; Stop 128
aactttccattttccattcaaattg

SEQ ID NO: 466359 - DNA, 25 bp, Artificial
  probe
  misc_feature (1)..(25): SEQ ID NO: 7375; WAN0249PF; Start 184; Stop 208
cacagctttgaagtttcagataaaa

SEQ ID NO: 466360 - DNA, 25 bp, Artificial
  probe
  misc_feature (1)..(25): SEQ ID NO: 7375; WAN0249PF; Start 88; Stop 112
ctcattacaagatgataactttcca

SEQ ID NO: 466361 - DNA, 25 bp, Artificial
  probe
  misc_feature (1)..(25): SEQ ID NO: 7375; WAN0249PF; Start 87; Stop 111
actcattacaagatgataactttcc

SEQ ID NO: 466362 - DNA, 25 bp, Artificial
  probe
  misc_feature (1)..(25): SEQ ID NO: 7375; WAN0249PF; Start 99; Stop 123
atgataactttccattttccattca

SEQ ID NO: 466363 - DNA, 25 bp, Artificial
  probe
  misc_feature (1)..(25): SEQ ID NO: 7375; WAN0249PF; Start 97; Stop 121
agatgataactttccattttccatt

SEQ ID NO: 466364 - DNA, 25 bp, Artificial
  probe
  misc_feature (1)..(25): SEQ ID NO: 7375; WAN0249PF; Start 96; Stop 120
aagatgataactttccattttccat

SEQ ID NO: 466365 - DNA, 25 bp, Artificial
  probe
  misc_feature (1)..(25): SEQ ID NO: 7375; WAN0249PF; Start 98; Stop 122
gatgataactttccattttccattc

SEQ ID NO: 466366 - DNA, 25 bp, Artificial
  probe
  misc_feature (1)..(25): SEQ ID NO: 7375; WAN0249PF; Start 101; Stop 125
gataactttccattttccattcaaa

SEQ ID NO: 466367 - DNA, 25 bp, Artificial
  probe
  misc_feature (1)..(25): SEQ ID NO: 7375; WAN0249PF; Start 71; Stop 95
gcaagaatgttgcttaactcattac

SEQ ID NO: 466368 - DNA, 25 bp, Artificial
  probe
  misc_feature (1)..(25): SEQ ID NO: 7375; WAN0249PF; Start 109; Stop 133
tccattttccattcaaattgatact

SEQ ID NO: 466369 - DNA, 25 bp, Artificial
  probe
  misc_feature (1)..(25): SEQ ID NO: 7375; WAN0249PF; Start 70; Stop 94
tgcaagaatgttgcttaactcatta

SEQ ID NO: 466370 - DNA, 25 bp, Artificial
  probe
  misc_feature (1)..(25): SEQ ID NO: 7375; WAN0249PF; Start 110; Stop 134
ccattttccattcaaattgatactc

SEQ ID NO: 466371 - DNA, 25 bp, Artificial
  probe
  misc_feature (1)..(25): SEQ ID NO: 7375; WAN0249PF; Start 106; Stop 130
ctttccattttccattcaaattgat

SEQ ID NO: 466372 - DNA, 25 bp, Artificial
  probe
  misc_feature (1)..(25): SEQ ID NO: 7375; WAN0249PF; Start 89; Stop 113
tcattacaagatgataactttccat

SEQ ID NO: 466373 - DNA, 25 bp, Artificial
  probe
  misc_feature (1)..(25): SEQ ID NO: 7376; WAN024FMZ; Start 81; Stop 105
gaatccgtctgtaacatggtatcta

SEQ ID NO: 466374 - DNA, 25 bp, Artificial
  probe
  misc_feature (1)..(25): SEQ ID NO: 7376; WAN024FMZ; Start 78; Stop 102
aatgaatccgtctgtaacatggtat

SEQ ID NO: 466375 - DNA, 25 bp, Artificial
  probe
  misc_feature (1)..(25): SEQ ID NO: 7376; WAN024FMZ; Start 83; Stop 107
atccgtctgtaacatggtatctatt

SEQ ID NO: 466376 - DNA, 25 bp, Artificial
  probe
  misc_feature (1)..(25): SEQ ID NO: 7376; WAN024FMZ; Start 82; Stop 106
aatccgtctgtaacatggtatctat

SEQ ID NO: 466377 - DNA, 25 bp, Artificial
  probe
  misc_feature (1)..(25): SEQ ID NO: 7376; WAN024FMZ; Start 415; Stop 439
aattctcctgaagttaatcgcagat

SEQ ID NO: 466378 - DNA, 25 bp, Artificial
  probe
  misc_feature (1)..(25): SEQ ID NO: 7376; WAN024FMZ; Start 79; Stop 103
atgaatccgtctgtaacatggtatc

SEQ ID NO: 466379 - DNA, 25 bp, Artificial
  probe
  misc_feature (1)..(25): SEQ ID NO: 7376; WAN024FMZ; Start 80; Stop 104
tgaatccgtctgtaacatggtatct

SEQ ID NO: 466380 - DNA, 25 bp, Artificial
  probe
  misc_feature (1)..(25): SEQ ID NO: 7376; WAN024FMZ; Start 416; Stop 440
attctcctgaagttaatcgcagatt

SEQ ID NO: 466381 - DNA, 25 bp, Artificial
  probe
  misc_feature (1)..(25): SEQ ID NO: 7376; WAN024FMZ; Start 833; Stop 857
ttgagatgcctaaagagataactgt

SEQ ID NO: 466382 - DNA, 25 bp, Artificial
  probe
  misc_feature (1)..(25): SEQ ID NO: 7376; WAN024FMZ; Start 205; Stop 229
tttgagatttctttagagggtgctt

SEQ ID NO: 466383 - DNA, 25 bp, Artificial
  probe
  misc_feature (1)..(25): SEQ ID NO: 7376; WAN024FMZ; Start 596; Stop 620
ctggtttaagttatcatttccgacg

SEQ ID NO: 466384 - DNA, 25 bp, Artificial
  probe
  misc_feature (1)..(25): SEQ ID NO: 7376; WAN024FMZ; Start 206; Stop 230
ttgagatttctttagagggtgctta

SEQ ID NO: 466385 - DNA, 25 bp, Artificial
  probe
  misc_feature (1)..(25): SEQ ID NO: 7376; WAN024FMZ; Start 201; Stop 225
tgactttgagatttctttagagggt

SEQ ID NO: 466386 - DNA, 25 bp, Artificial
  probe
  misc_feature (1)..(25): SEQ ID NO: 7376; WAN024FMZ; Start 836; Stop 860
agatgcctaaagagataactgttga

SEQ ID NO: 466387 - DNA, 25 bp, Artificial
  probe
  misc_feature (1)..(25): SEQ ID NO: 7376; WAN024FMZ; Start 834; Stop 858
tgagatgcctaaagagataactgtt

SEQ ID NO: 466388 - DNA, 25 bp, Artificial
  probe
  misc_feature (1)..(25): SEQ ID NO: 7376; WAN024FMZ; Start 257; Stop 281
tcggctatctttatgaggaaatgat

SEQ ID NO: 466389 - DNA, 25 bp, Artificial
  probe
  misc_feature (1)..(25): SEQ ID NO: 7376; WAN024FMZ; Start 509; Stop 533
aagaatatgttgcaggaagtatcac

SEQ ID NO: 466390 - DNA, 25 bp, Artificial
  probe
  misc_feature (1)..(25): SEQ ID NO: 7376; WAN024FMZ; Start 207; Stop 231
tgagatttctttagagggtgcttat

SEQ ID NO: 466391 - DNA, 25 bp, Artificial
  probe
  misc_feature (1)..(25): SEQ ID NO: 7376; WAN024FMZ; Start 835; Stop 859
gagatgcctaaagagataactgttg

SEQ ID NO: 466392 - DNA, 25 bp, Artificial
  probe
  misc_feature (1)..(25): SEQ ID NO: 7376; WAN024FMZ; Start 204; Stop 228
ctttgagatttctttagagggtgct

SEQ ID NO: 466393 - DNA, 25 bp, Artificial
  probe
  misc_feature (1)..(25): SEQ ID NO: 7376; WAN024FMZ; Start 202; Stop 226
gactttgagatttctttagagggtg

SEQ ID NO: 466394 - DNA, 25 bp, Artificial
  probe
  misc_feature (1)..(25): SEQ ID NO: 7376; WAN024FMZ; Start 917; Stop 941
agtggaaaggtgtcaaacgattatt

SEQ ID NO: 466395 - DNA, 25 bp, Artificial
  probe
  misc_feature (1)..(25): SEQ ID NO: 7376; WAN024FMZ; Start 916; Stop 940
aagtggaaaggtgtcaaacgattat

SEQ ID NO: 466396 - DNA, 25 bp, Artificial
  probe
  misc_feature (1)..(25): SEQ ID NO: 7376; WAN024FMZ; Start 798; Stop 822
tgtttctgcttatttaatcgttcca

SEQ ID NO: 466397 - DNA, 25 bp, Artificial
  probe
  misc_feature (1)..(25): SEQ ID NO: 7376; WAN024FMZ; Start 508; Stop 532
gaagaatatgttgcaggaagtatca

SEQ ID NO: 466398 - DNA, 25 bp, Artificial
  probe
  misc_feature (1)..(25): SEQ ID NO: 7376; WAN024FMZ; Start 507; Stop 531
tgaagaatatgttgcaggaagtatc

SEQ ID NO: 466399 - DNA, 25 bp, Artificial
  probe
  misc_feature (1)..(25): SEQ ID NO: 7376; WAN024FMZ; Start 256; Stop 280
ttcggctatctttatgaggaaatga

SEQ ID NO: 466400 - DNA, 25 bp, Artificial
  probe
  misc_feature (1)..(25): SEQ ID NO: 7376; WAN024FMZ; Start 915; Stop 939
aaagtggaaaggtgtcaaacgatta

SEQ ID NO: 466401 - DNA, 25 bp, Artificial
  probe
  misc_feature (1)..(25): SEQ ID NO: 7376; WAN024FMZ; Start 595; Stop 619
tctggtttaagttatcatttccgac

SEQ ID NO: 466402 - DNA, 25 bp, Artificial
  probe
  misc_feature (1)..(25): SEQ ID NO: 7376; WAN024FMZ; Start 203; Stop 227
actttgagatttctttagagggtgc

SEQ ID NO: 466403 - DNA, 25 bp, Artificial
  probe
  misc_feature (1)..(25): SEQ ID NO: 7376; WAN024FMZ; Start 831; Stop 855
tgttgagatgcctaaagagataact

SEQ ID NO: 466404 - DNA, 25 bp, Artificial
  probe
  misc_feature (1)..(25): SEQ ID NO: 7376; WAN024FMZ; Start 510; Stop 534
agaatatgttgcaggaagtatcact

SEQ ID NO: 466405 - DNA, 25 bp, Artificial
  probe
  misc_feature (1)..(25): SEQ ID NO: 7376; WAN024FMZ; Start 511; Stop 535
gaatatgttgcaggaagtatcactc

SEQ ID NO: 466406 - DNA, 25 bp, Artificial
  probe
  misc_feature (1)..(25): SEQ ID NO: 7377; WAN024BPZ; Start 606; Stop 630
aacaataacttatacgcctgactct

SEQ ID NO: 466407 - DNA, 25 bp, Artificial
  probe
  misc_feature (1)..(25): SEQ ID NO: 7377; WAN024BPZ; Start 608; Stop 632
caataacttatacgcctgactctgt

SEQ ID NO: 466408 - DNA, 25 bp, Artificial
  probe
  misc_feature (1)..(25): SEQ ID NO: 7377; WAN024BPZ; Start 607; Stop 631
acaataacttatacgcctgactctg

SEQ ID NO: 466409 - DNA, 25 bp, Artificial
  probe
  misc_feature (1)..(25): SEQ ID NO: 7377; WAN024BPZ; Start 609; Stop 633
aataacttatacgcctgactctgtt

SEQ ID NO: 466410 - DNA, 25 bp, Artificial
  probe
  misc_feature (1)..(25): SEQ ID NO: 7377; WAN024BPZ; Start 659; Stop 683
gacagagtacgagtattcagaacta

SEQ ID NO: 466411 - DNA, 25 bp, Artificial
  probe
  misc_feature (1)..(25): SEQ ID NO: 7377; WAN024BPZ; Start 218; Stop 242
gtcatggatctacaattaatgctgg

SEQ ID NO: 466412 - DNA, 25 bp, Artificial
  probe
  misc_feature (1)..(25): SEQ ID NO: 7377; WAN024BPZ; Start 217; Stop 241
ggtcatggatctacaattaatgctg

SEQ ID NO: 466413 - DNA, 25 bp, Artificial
  probe
  misc_feature (1)..(25): SEQ ID NO: 7377; WAN024BPZ; Start 658; Stop 682
ggacagagtacgagtattcagaact

SEQ ID NO: 466414 - DNA, 25 bp, Artificial
  probe
  misc_feature (1)..(25): SEQ ID NO: 7377; WAN024BPZ; Start 660; Stop 684
acagagtacgagtattcagaactat

SEQ ID NO: 466415 - DNA, 25 bp, Artificial
  probe
  misc_feature (1)..(25): SEQ ID NO: 7377; WAN024BPZ; Start 216; Stop 240
cggtcatggatctacaattaatgct

SEQ ID NO: 466416 - DNA, 25 bp, Artificial
  probe
  misc_feature (1)..(25): SEQ ID NO: 7377; WAN024BPZ; Start 15; Stop 39
aatacttagcgtggtaattccatcc

SEQ ID NO: 466417 - DNA, 25 bp, Artificial
  probe
  misc_feature (1)..(25): SEQ ID NO: 7377; WAN024BPZ; Start 17; Stop 41
tacttagcgtggtaattccatccta

SEQ ID NO: 466418 - DNA, 25 bp, Artificial
  probe
  misc_feature (1)..(25): SEQ ID NO: 7377; WAN024BPZ; Start 613; Stop 637
acttatacgcctgactctgtttatc

SEQ ID NO: 466419 - DNA, 25 bp, Artificial
  probe
  misc_feature (1)..(25): SEQ ID NO: 7377; WAN024BPZ; Start 278; Stop 302
ttgatgctgatgattgggtagatag

SEQ ID NO: 466420 - DNA, 25 bp, Artificial
  probe
  misc_feature (1)..(25): SEQ ID NO: 7377; WAN024BPZ; Start 270; Stop 294
taaagttgttgatgctgatgattgg

SEQ ID NO: 466421 - DNA, 25 bp, Artificial
  probe
  misc_feature (1)..(25): SEQ ID NO: 7377; WAN024BPZ; Start 283; Stop 307
gctgatgattgggtagatagtgaaa

SEQ ID NO: 466422 - DNA, 25 bp, Artificial
  probe
  misc_feature (1)..(25): SEQ ID NO: 7377; WAN024BPZ; Start 277; Stop 301
gttgatgctgatgattgggtagata

SEQ ID NO: 466423 - DNA, 25 bp, Artificial
  probe
  misc_feature (1)..(25): SEQ ID NO: 7377; WAN024BPZ; Start 90; Stop 114
tagcagcagaaatgatattgaggtt

SEQ ID NO: 466424 - DNA, 25 bp, Artificial
  probe
  misc_feature (1)..(25): SEQ ID NO: 7377; WAN024BPZ; Start 89; Stop 113
ttagcagcagaaatgatattgaggt

SEQ ID NO: 466425 - DNA, 25 bp, Artificial
  probe
  misc_feature (1)..(25): SEQ ID NO: 7377; WAN024BPZ; Start 435; Stop 459
accataccaggattatgattatgtg

SEQ ID NO: 466426 - DNA, 25 bp, Artificial
  probe
  misc_feature (1)..(25): SEQ ID NO: 7377; WAN024BPZ; Start 280; Stop 304
gatgctgatgattgggtagatagtg

SEQ ID NO: 466427 - DNA, 25 bp, Artificial
  probe
  misc_feature (1)..(25): SEQ ID NO: 7377; WAN024BPZ; Start 212; Stop 236
atggcggtcatggatctacaattaa

SEQ ID NO: 466428 - DNA, 25 bp, Artificial
  probe
  misc_feature (1)..(25): SEQ ID NO: 7377; WAN024BPZ; Start 211; Stop 235
aatggcggtcatggatctacaatta

SEQ ID NO: 466429 - DNA, 25 bp, Artificial
  probe
  misc_feature (1)..(25): SEQ ID NO: 7377; WAN024BPZ; Start 88; Stop 112
attagcagcagaaatgatattgagg

SEQ ID NO: 466430 - DNA, 25 bp, Artificial
  probe
  misc_feature (1)..(25): SEQ ID NO: 7377; WAN024BPZ; Start 16; Stop 40
atacttagcgtggtaattccatcct

SEQ ID NO: 466431 - DNA, 25 bp, Artificial
  probe
  misc_feature (1)..(25): SEQ ID NO: 7377; WAN024BPZ; Start 214; Stop 238
ggcggtcatggatctacaattaatg

SEQ ID NO: 466432 - DNA, 25 bp, Artificial
  probe
  misc_feature (1)..(25): SEQ ID NO: 7377; WAN024BPZ; Start 605; Stop 629
aaacaataacttatacgcctgactc

SEQ ID NO: 466433 - DNA, 25 bp, Artificial
  probe
  misc_feature (1)..(25): SEQ ID NO: 7377; WAN024BPZ; Start 91; Stop 115
agcagcagaaatgatattgaggttt

SEQ ID NO: 466434 - DNA, 25 bp, Artificial
  probe
  misc_feature (1)..(25): SEQ ID NO: 7377; WAN024BPZ; Start 281; Stop 305
atgctgatgattgggtagatagtga

SEQ ID NO: 466435 - DNA, 25 bp, Artificial
  probe
  misc_feature (1)..(25): SEQ ID NO: 7377; WAN024BPZ; Start 279; Stop 303
tgatgctgatgattgggtagatagt

SEQ ID NO: 466436 - DNA, 25 bp, Artificial
  probe
  misc_feature (1)..(25): SEQ ID NO: 7377; WAN024BPZ; Start 612; Stop 636
aacttatacgcctgactctgtttat

SEQ ID NO: 466437 - DNA, 25 bp, Artificial
  probe
  misc_feature (1)..(25): SEQ ID NO: 7377; WAN024BPZ; Start 610; Stop 634
ataacttatacgcctgactctgttt

SEQ ID NO: 466438 - DNA, 25 bp, Artificial
  probe
  misc_feature (1)..(25): SEQ ID NO: 7377; WAN024BPZ; Start 213; Stop 237
tggcggtcatggatctacaattaat

SEQ ID NO: 466439 - DNA, 25 bp, Artificial
  probe
  misc_feature (1)..(25): SEQ ID NO: 7378; WAN024BNC; Start 69; Stop 93
cacaatagaacgcatattatcaggt

SEQ ID NO: 466440 - DNA, 25 bp, Artificial
  probe
  misc_feature (1)..(25): SEQ ID NO: 7378; WAN024BNC; Start 68; Stop 92
acacaatagaacgcatattatcagg

SEQ ID NO: 466441 - DNA, 25 bp, Artificial
  probe
  misc_feature (1)..(25): SEQ ID NO: 7378; WAN024BNC; Start 66; Stop 90
tgacacaatagaacgcatattatca

SEQ ID NO: 466442 - DNA, 25 bp, Artificial
  probe
  misc_feature (1)..(25): SEQ ID NO: 7378; WAN024BNC; Start 67; Stop 91
gacacaatagaacgcatattatcag

SEQ ID NO: 466443 - DNA, 25 bp, Artificial
  probe
  misc_feature (1)..(25): SEQ ID NO: 7378; WAN024BNC; Start 70; Stop 94
acaatagaacgcatattatcaggta

SEQ ID NO: 466444 - DNA, 25 bp, Artificial
  probe
  misc_feature (1)..(25): SEQ ID NO: 7378; WAN024BNC; Start 65; Stop 89
ttgacacaatagaacgcatattatc

SEQ ID NO: 466445 - DNA, 25 bp, Artificial
  probe
  misc_feature (1)..(25): SEQ ID NO: 7378; WAN024BNC; Start 71; Stop 95
caatagaacgcatattatcaggtat

SEQ ID NO: 466446 - DNA, 25 bp, Artificial
  probe
  misc_feature (1)..(25): SEQ ID NO: 7378; WAN024BNC; Start 19; Stop 43
aataaagatgagacaaagtttgagc

SEQ ID NO: 466447 - DNA, 25 bp, Artificial
  probe
  misc_feature (1)..(25): SEQ ID NO: 7378; WAN024BNC; Start 21; Stop 45
taaagatgagacaaagtttgagctg

SEQ ID NO: 466448 - DNA, 25 bp, Artificial
  probe
  misc_feature (1)..(25): SEQ ID NO: 7378; WAN024BNC; Start 41; Stop 65
agctgaggagaaatcaagtaagttt

SEQ ID NO: 466449 - DNA, 25 bp, Artificial
  probe
  misc_feature (1)..(25): SEQ ID NO: 7378; WAN024BNC; Start 40; Stop 64
gagctgaggagaaatcaagtaagtt

SEQ ID NO: 466450 - DNA, 25 bp, Artificial
  probe
  misc_feature (1)..(25): SEQ ID NO: 7378; WAN024BNC; Start 22; Stop 46
aaagatgagacaaagtttgagctga

SEQ ID NO: 466451 - DNA, 25 bp, Artificial
  probe
  misc_feature (1)..(25): SEQ ID NO: 7378; WAN024BNC; Start 23; Stop 47
aagatgagacaaagtttgagctgag

SEQ ID NO: 466452 - DNA, 25 bp, Artificial
  probe
  misc_feature (1)..(25): SEQ ID NO: 7378; WAN024BNC; Start 20; Stop 44
ataaagatgagacaaagtttgagct

SEQ ID NO: 466453 - DNA, 25 bp, Artificial
  probe
  misc_feature (1)..(25): SEQ ID NO: 7378; WAN024BNC; Start 31; Stop 55
acaaagtttgagctgaggagaaatc

SEQ ID NO: 466454 - DNA, 25 bp, Artificial
  probe
  misc_feature (1)..(25): SEQ ID NO: 7378; WAN024BNC; Start 30; Stop 54
gacaaagtttgagctgaggagaaat

SEQ ID NO: 466455 - DNA, 25 bp, Artificial
  probe
  misc_feature (1)..(25): SEQ ID NO: 7378; WAN024BNC; Start 64; Stop 88
tttgacacaatagaacgcatattat

SEQ ID NO: 466456 - DNA, 25 bp, Artificial
  probe
  misc_feature (1)..(25): SEQ ID NO: 7378; WAN024BNC; Start 39; Stop 63
tgagctgaggagaaatcaagtaagt

SEQ ID NO: 466457 - DNA, 25 bp, Artificial
  probe
  misc_feature (1)..(25): SEQ ID NO: 7378; WAN024BNC; Start 32; Stop 56
caaagtttgagctgaggagaaatca

SEQ ID NO: 466458 - DNA, 25 bp, Artificial
  probe
  misc_feature (1)..(25): SEQ ID NO: 7378; WAN024BNC; Start 29; Stop 53
agacaaagtttgagctgaggagaaa

SEQ ID NO: 466459 - DNA, 25 bp, Artificial
  probe
  misc_feature (1)..(25): SEQ ID NO: 7378; WAN024BNC; Start 57; Stop 81
agtaagttttgacacaatagaacgc

SEQ ID NO: 466460 - DNA, 25 bp, Artificial
  probe
  misc_feature (1)..(25): SEQ ID NO: 7378; WAN024BNC; Start 58; Stop 82
gtaagttttgacacaatagaacgca

SEQ ID NO: 466461 - DNA, 25 bp, Artificial
  probe
  misc_feature (1)..(25): SEQ ID NO: 7378; WAN024BNC; Start 60; Stop 84
aagttttgacacaatagaacgcata

SEQ ID NO: 466462 - DNA, 25 bp, Artificial
  probe
  misc_feature (1)..(25): SEQ ID NO: 7378; WAN024BNC; Start 59; Stop 83
taagttttgacacaatagaacgcat

SEQ ID NO: 466463 - DNA, 25 bp, Artificial
  probe
  misc_feature (1)..(25): SEQ ID NO: 7378; WAN024BNC; Start 61; Stop 85
agttttgacacaatagaacgcatat

SEQ ID NO: 466464 - DNA, 25 bp, Artificial
  probe
  misc_feature (1)..(25): SEQ ID NO: 7378; WAN024BNC; Start 42; Stop 66
gctgaggagaaatcaagtaagtttt

SEQ ID NO: 466465 - DNA, 25 bp, Artificial
  probe
  misc_feature (1)..(25): SEQ ID NO: 7378; WAN024BNC; Start 62; Stop 86
gttttgacacaatagaacgcatatt

SEQ ID NO: 466466 - DNA, 25 bp, Artificial
  probe
  misc_feature (1)..(25): SEQ ID NO: 7378; WAN024BNC; Start 28; Stop 52
gagacaaagtttgagctgaggagaa

SEQ ID NO: 466467 - DNA, 25 bp, Artificial
  probe
  misc_feature (1)..(25): SEQ ID NO: 7378; WAN024BNC; Start 26; Stop 50
atgagacaaagtttgagctgaggag

SEQ ID NO: 466468 - DNA, 25 bp, Artificial
  probe
  misc_feature (1)..(25): SEQ ID NO: 7378; WAN024BNC; Start 25; Stop 49
gatgagacaaagtttgagctgagga

SEQ ID NO: 466469 - DNA, 25 bp, Artificial
  probe
  misc_feature (1)..(25): SEQ ID NO: 7378; WAN024BNC; Start 24; Stop 48
agatgagacaaagtttgagctgagg

SEQ ID NO: 466470 - DNA, 25 bp, Artificial
  probe
  misc_feature (1)..(25): SEQ ID NO: 7378; WAN024BNC; Start 73; Stop 97
atagaacgcatattatcaggtataa

SEQ ID NO: 466471 - DNA, 25 bp, Artificial
  probe
  misc_feature (1)..(25): SEQ ID NO: 7378; WAN024BNC; Start 72; Stop 96
aatagaacgcatattatcaggtata

SEQ ID NO: 466472 - DNA, 25 bp, Artificial
  probe
  misc_feature (1)..(25): SEQ ID NO: 7379; WAN024DA6; Start 11; Stop 35
tcaagcctatcattcttagaaagga

SEQ ID NO: 466473 - DNA, 25 bp, Artificial
  probe
  misc_feature (1)..(25): SEQ ID NO: 7379; WAN024DA6; Start 36; Stop 60
aaactatggcaaacattctcttggc

SEQ ID NO: 466474 - DNA, 25 bp, Artificial
  probe
  misc_feature (1)..(25): SEQ ID NO: 7379; WAN024DA6; Start 12; Stop 36
caagcctatcattcttagaaaggaa

SEQ ID NO: 466475 - DNA, 25 bp, Artificial
  probe
  misc_feature (1)..(25): SEQ ID NO: 7379; WAN024DA6; Start 10; Stop 34
ttcaagcctatcattcttagaaagg

SEQ ID NO: 466476 - DNA, 25 bp, Artificial
  probe
  misc_feature (1)..(25): SEQ ID NO: 7379; WAN024DA6; Start 40; Stop 64
tatggcaaacattctcttggctgta

SEQ ID NO: 466477 - DNA, 25 bp, Artificial
  probe
  misc_feature (1)..(25): SEQ ID NO: 7379; WAN024DA6; Start 37; Stop 61
aactatggcaaacattctcttggct

SEQ ID NO: 466478 - DNA, 25 bp, Artificial
  probe
  misc_feature (1)..(25): SEQ ID NO: 7379; WAN024DA6; Start 13; Stop 37
aagcctatcattcttagaaaggaaa

SEQ ID NO: 466479 - DNA, 25 bp, Artificial
  probe
  misc_feature (1)..(25): SEQ ID NO: 7379; WAN024DA6; Start 33; Stop 57
ggaaaactatggcaaacattctctt

SEQ ID NO: 466480 - DNA, 25 bp, Artificial
  probe
  misc_feature (1)..(25): SEQ ID NO: 7379; WAN024DA6; Start 31; Stop 55
aaggaaaactatggcaaacattctc

SEQ ID NO: 466481 - DNA, 25 bp, Artificial
  probe
  misc_feature (1)..(25): SEQ ID NO: 7379; WAN024DA6; Start 26; Stop 50
ttagaaaggaaaactatggcaaaca

SEQ ID NO: 466482 - DNA, 25 bp, Artificial
  probe
  misc_feature (1)..(25): SEQ ID NO: 7379; WAN024DA6; Start 30; Stop 54
aaaggaaaactatggcaaacattct

SEQ ID NO: 466483 - DNA, 25 bp, Artificial
  probe
  misc_feature (1)..(25): SEQ ID NO: 7379; WAN024DA6; Start 28; Stop 52
agaaaggaaaactatggcaaacatt

SEQ ID NO: 466484 - DNA, 25 bp, Artificial
  probe
  misc_feature (1)..(25): SEQ ID NO: 7379; WAN024DA6; Start 32; Stop 56
aggaaaactatggcaaacattctct

SEQ ID NO: 466485 - DNA, 25 bp, Artificial
  probe
  misc_feature (1)..(25): SEQ ID NO: 7379; WAN024DA6; Start 29; Stop 53
gaaaggaaaactatggcaaacattc

SEQ ID NO: 466486 - DNA, 25 bp, Artificial
  probe
  misc_feature (1)..(25): SEQ ID NO: 7379; WAN024DA6; Start 9; Stop 33
attcaagcctatcattcttagaaag

SEQ ID NO: 466487 - DNA, 25 bp, Artificial
  probe
  misc_feature (1)..(25): SEQ ID NO: 7379; WAN024DA6; Start 35; Stop 59
aaaactatggcaaacattctcttgg

SEQ ID NO: 466488 - DNA, 25 bp, Artificial
  probe
  misc_feature (1)..(25): SEQ ID NO: 7379; WAN024DA6; Start 27; Stop 51
tagaaaggaaaactatggcaaacat

SEQ ID NO: 466489 - DNA, 25 bp, Artificial
  probe
  misc_feature (1)..(25): SEQ ID NO: 7379; WAN024DA6; Start 34; Stop 58
gaaaactatggcaaacattctcttg

SEQ ID NO: 466490 - DNA, 25 bp, Artificial
  probe
  misc_feature (1)..(25): SEQ ID NO: 7379; WAN024DA6; Start 25; Stop 49
cttagaaaggaaaactatggcaaac

SEQ ID NO: 466491 - DNA, 25 bp, Artificial
  probe
  misc_feature (1)..(25): SEQ ID NO: 7379; WAN024DA6; Start 24; Stop 48
tcttagaaaggaaaactatggcaaa

SEQ ID NO: 466492 - DNA, 25 bp, Artificial
  probe
  misc_feature (1)..(25): SEQ ID NO: 7379; WAN024DA6; Start 38; Stop 62
actatggcaaacattctcttggctg

SEQ ID NO: 466493 - DNA, 25 bp, Artificial
  probe
  misc_feature (1)..(25): SEQ ID NO: 7379; WAN024DA6; Start 8; Stop 32
aattcaagcctatcattcttagaaa

SEQ ID NO: 466494 - DNA, 25 bp, Artificial
  probe
  misc_feature (1)..(25): SEQ ID NO: 7379; WAN024DA6; Start 7; Stop 31
aaattcaagcctatcattcttagaa

SEQ ID NO: 466495 - DNA, 25 bp, Artificial
  probe
  misc_feature (1)..(25): SEQ ID NO: 7379; WAN024DA6; Start 23; Stop 47
ttcttagaaaggaaaactatggcaa

SEQ ID NO: 466496 - DNA, 25 bp, Artificial
  probe
  misc_feature (1)..(25): SEQ ID NO: 7379; WAN024DA6; Start 39; Stop 63
ctatggcaaacattctcttggctgt

SEQ ID NO: 466497 - DNA, 25 bp, Artificial
  probe
  misc_feature (1)..(25): SEQ ID NO: 7379; WAN024DA6; Start 22; Stop 46
attcttagaaaggaaaactatggca

SEQ ID NO: 466498 - DNA, 25 bp, Artificial
  probe
  misc_feature (1)..(25): SEQ ID NO: 7379; WAN024DA6; Start 21; Stop 45
cattcttagaaaggaaaactatggc

SEQ ID NO: 466499 - DNA, 25 bp, Artificial
  probe
  misc_feature (1)..(25): SEQ ID NO: 7379; WAN024DA6; Start 15; Stop 39
gcctatcattcttagaaaggaaaac

SEQ ID NO: 466500 - DNA, 25 bp, Artificial
  probe
  misc_feature (1)..(25): SEQ ID NO: 7379; WAN024DA6; Start 14; Stop 38
agcctatcattcttagaaaggaaaa

SEQ ID NO: 466501 - DNA, 25 bp, Artificial
  probe
  misc_feature (1)..(25): SEQ ID NO: 7379; WAN024DA6; Start 20; Stop 44
tcattcttagaaaggaaaactatgg

SEQ ID NO: 466502 - DNA, 25 bp, Artificial
  probe
  misc_feature (1)..(25): SEQ ID NO: 7379; WAN024DA6; Start 6; Stop 30
aaaattcaagcctatcattcttaga

SEQ ID NO: 466503 - DNA, 25 bp, Artificial
  probe
  misc_feature (1)..(25): SEQ ID NO: 7379; WAN024DA6; Start 16; Stop 40
cctatcattcttagaaaggaaaact

SEQ ID NO: 466504 - DNA, 25 bp, Artificial
  probe
  misc_feature (1)..(25): SEQ ID NO: 7379; WAN024DA6; Start 19; Stop 43
atcattcttagaaaggaaaactatg

SEQ ID NO: 466505 - DNA, 25 bp, Artificial
  probe
  misc_feature (1)..(25): SEQ ID NO: 7380; WAN024BT3; Start 25; Stop 49
tttcttgtggagatatttccttcaa

SEQ ID NO: 466506 - DNA, 25 bp, Artificial
  probe
  misc_feature (1)..(25): SEQ ID NO: 7380; WAN024BT3; Start 27; Stop 51
tcttgtggagatatttccttcaatt

SEQ ID NO: 466507 - DNA, 25 bp, Artificial
  probe
  misc_feature (1)..(25): SEQ ID NO: 7380; WAN024BT3; Start 26; Stop 50
ttcttgtggagatatttccttcaat

SEQ ID NO: 466508 - DNA, 25 bp, Artificial
  probe
  misc_feature (1)..(25): SEQ ID NO: 7380; WAN024BT3; Start 12; Stop 36
taatagtatgcgttttcttgtggag

SEQ ID NO: 466509 - DNA, 25 bp, Artificial
  probe
  misc_feature (1)..(25): SEQ ID NO: 7380; WAN024BT3; Start 28; Stop 52
cttgtggagatatttccttcaattt

SEQ ID NO: 466510 - DNA, 25 bp, Artificial
  probe
  misc_feature (1)..(25): SEQ ID NO: 7380; WAN024BT3; Start 9; Stop 33
gcttaatagtatgcgttttcttgtg

SEQ ID NO: 466511 - DNA, 25 bp, Artificial
  probe
  misc_feature (1)..(25): SEQ ID NO: 7380; WAN024BT3; Start 19; Stop 43
atgcgttttcttgtggagatatttc

SEQ ID NO: 466512 - DNA, 25 bp, Artificial
  probe
  misc_feature (1)..(25): SEQ ID NO: 7380; WAN024BT3; Start 15; Stop 39
tagtatgcgttttcttgtggagata

SEQ ID NO: 466513 - DNA, 25 bp, Artificial
  probe
  misc_feature (1)..(25): SEQ ID NO: 7380; WAN024BT3; Start 17; Stop 41
gtatgcgttttcttgtggagatatt

SEQ ID NO: 466514 - DNA, 25 bp, Artificial
  probe
  misc_feature (1)..(25): SEQ ID NO: 7380; WAN024BT3; Start 16; Stop 40
agtatgcgttttcttgtggagatat

SEQ ID NO: 466515 - DNA, 25 bp, Artificial
  probe
  misc_feature (1)..(25): SEQ ID NO: 7380; WAN024BT3; Start 14; Stop 38
atagtatgcgttttcttgtggagat

SEQ ID NO: 466516 - DNA, 25 bp, Artificial
  probe
  misc_feature (1)..(25): SEQ ID NO: 7380; WAN024BT3; Start 13; Stop 37
aatagtatgcgttttcttgtggaga

SEQ ID NO: 466517 - DNA, 25 bp, Artificial
  probe
  misc_feature (1)..(25): SEQ ID NO: 7380; WAN024BT3; Start 11; Stop 35
ttaatagtatgcgttttcttgtgga

SEQ ID NO: 466518 - DNA, 25 bp, Artificial
  probe
  misc_feature (1)..(25): SEQ ID NO: 7380; WAN024BT3; Start 18; Stop 42
tatgcgttttcttgtggagatattt

SEQ ID NO: 466519 - DNA, 25 bp, Artificial
  probe
  misc_feature (1)..(25): SEQ ID NO: 7380; WAN024BT3; Start 10; Stop 34
cttaatagtatgcgttttcttgtgg

SEQ ID NO: 466520 - DNA, 25 bp, Artificial
  probe
  misc_feature (1)..(25): SEQ ID NO: 7380; WAN024BT3; Start 22; Stop 46
cgttttcttgtggagatatttcctt

SEQ ID NO: 466521 - DNA, 25 bp, Artificial
  probe
  misc_feature (1)..(25): SEQ ID NO: 7380; WAN024BT3; Start 8; Stop 32
agcttaatagtatgcgttttcttgt

SEQ ID NO: 466522 - DNA, 25 bp, Artificial
  probe
  misc_feature (1)..(25): SEQ ID NO: 7380; WAN024BT3; Start 21; Stop 45
gcgttttcttgtggagatatttcct

SEQ ID NO: 466523 - DNA, 25 bp, Artificial
  probe
  misc_feature (1)..(25): SEQ ID NO: 7380; WAN024BT3; Start 24; Stop 48
ttttcttgtggagatatttccttca

SEQ ID NO: 466524 - DNA, 25 bp, Artificial
  probe
  misc_feature (1)..(25): SEQ ID NO: 7380; WAN024BT3; Start 23; Stop 47
gttttcttgtggagatatttccttc

SEQ ID NO: 466525 - DNA, 25 bp, Artificial
  probe
  misc_feature (1)..(25): SEQ ID NO: 7380; WAN024BT3; Start 20; Stop 44
tgcgttttcttgtggagatatttcc

SEQ ID NO: 466526 - DNA, 25 bp, Artificial
  probe
  misc_feature (1)..(25): SEQ ID NO: 7380; WAN024BT3; Start 29; Stop 53
ttgtggagatatttccttcaatttt

SEQ ID NO: 466527 - DNA, 25 bp, Artificial
  probe
  misc_feature (1)..(25): SEQ ID NO: 7380; WAN024BT3; Start 7; Stop 31
aagcttaatagtatgcgttttcttg

SEQ ID NO: 466528 - DNA, 25 bp, Artificial
  probe
  misc_feature (1)..(25): SEQ ID NO: 7380; WAN024BT3; Start 6; Stop 30
aaagcttaatagtatgcgttttctt

SEQ ID NO: 466529 - DNA, 25 bp, Artificial
  probe
  misc_feature (1)..(25): SEQ ID NO: 7380; WAN024BT3; Start 5; Stop 29
aaaagcttaatagtatgcgttttct

SEQ ID NO: 466530 - DNA, 25 bp, Artificial
  probe
  misc_feature (1)..(25): SEQ ID NO: 7381; WAN024BMS; Start 1551; Stop 1575
attattgctacggctgtatgatgta

SEQ ID NO: 466531 - DNA, 25 bp, Artificial
  probe
  misc_feature (1)..(25): SEQ ID NO: 7381; WAN024BMS; Start 1995; Stop 2019
atctaacgctcaggaatacgataat

SEQ ID NO: 466532 - DNA, 25 bp, Artificial
  probe
  misc_feature (1)..(25): SEQ ID NO: 7381; WAN024BMS; Start 323; Stop 347
cagaacgaggtagaattacagaaga

SEQ ID NO: 466533 - DNA, 25 bp, Artificial
  probe
  misc_feature (1)..(25): SEQ ID NO: 7381; WAN024BMS; Start 1996; Stop 2020
tctaacgctcaggaatacgataata

SEQ ID NO: 466534 - DNA, 25 bp, Artificial
  probe
  misc_feature (1)..(25): SEQ ID NO: 7381; WAN024BMS; Start 1550; Stop 1574
aattattgctacggctgtatgatgt

SEQ ID NO: 466535 - DNA, 25 bp, Artificial
  probe
  misc_feature (1)..(25): SEQ ID NO: 7381; WAN024BMS; Start 322; Stop 346
ccagaacgaggtagaattacagaag

SEQ ID NO: 466536 - DNA, 25 bp, Artificial
  probe
  misc_feature (1)..(25): SEQ ID NO: 7381; WAN024BMS; Start 1992; Stop 2016
actatctaacgctcaggaatacgat

SEQ ID NO: 466537 - DNA, 25 bp, Artificial
  probe
  misc_feature (1)..(25): SEQ ID NO: 7381; WAN024BMS; Start 320; Stop 344
atccagaacgaggtagaattacaga

SEQ ID NO: 466538 - DNA, 25 bp, Artificial
  probe
  misc_feature (1)..(25): SEQ ID NO: 7381; WAN024BMS; Start 321; Stop 345
tccagaacgaggtagaattacagaa

SEQ ID NO: 466539 - DNA, 25 bp, Artificial
  probe
  misc_feature (1)..(25): SEQ ID NO: 7381; WAN024BMS; Start 324; Stop 348
agaacgaggtagaattacagaagat

SEQ ID NO: 466540 - DNA, 25 bp, Artificial
  probe
  misc_feature (1)..(25): SEQ ID NO: 7381; WAN024BMS; Start 1991; Stop 2015
gactatctaacgctcaggaatacga

SEQ ID NO: 466541 - DNA, 25 bp, Artificial
  probe
  misc_feature (1)..(25): SEQ ID NO: 7381; WAN024BMS; Start 317; Stop 341
ttgatccagaacgaggtagaattac

SEQ ID NO: 466542 - DNA, 25 bp, Artificial
  probe
  misc_feature (1)..(25): SEQ ID NO: 7381; WAN024BMS; Start 319; Stop 343
gatccagaacgaggtagaattacag

SEQ ID NO: 466543 - DNA, 25 bp, Artificial
  probe
  misc_feature (1)..(25): SEQ ID NO: 7381; WAN024BMS; Start 315; Stop 339
cattgatccagaacgaggtagaatt

SEQ ID NO: 466544 - DNA, 25 bp, Artificial
  probe
  misc_feature (1)..(25): SEQ ID NO: 7381; WAN024BMS; Start 316; Stop 340
attgatccagaacgaggtagaatta

SEQ ID NO: 466545 - DNA, 25 bp, Artificial
  probe
  misc_feature (1)..(25): SEQ ID NO: 7381; WAN024BMS; Start 510; Stop 534
acagagtctcaccttattattacct

SEQ ID NO: 466546 - DNA, 25 bp, Artificial
  probe
  misc_feature (1)..(25): SEQ ID NO: 7381; WAN024BMS; Start 311; Stop 335
tattcattgatccagaacgaggtag

SEQ ID NO: 466547 - DNA, 25 bp, Artificial
  probe
  misc_feature (1)..(25): SEQ ID NO: 7381; WAN024BMS; Start 308; Stop 332
tagtattcattgatccagaacgagg

SEQ ID NO: 466548 - DNA, 25 bp, Artificial
  probe
  misc_feature (1)..(25): SEQ ID NO: 7381; WAN024BMS; Start 310; Stop 334
gtattcattgatccagaacgaggta

SEQ ID NO: 466549 - DNA, 25 bp, Artificial
  probe
  misc_feature (1)..(25): SEQ ID NO: 7381; WAN024BMS; Start 1997; Stop 2021
ctaacgctcaggaatacgataatat

SEQ ID NO: 466550 - DNA, 25 bp, Artificial
  probe
  misc_feature (1)..(25): SEQ ID NO: 7381; WAN024BMS; Start 306; Stop 330
tgtagtattcattgatccagaacga

SEQ ID NO: 466551 - DNA, 25 bp, Artificial
  probe
  misc_feature (1)..(25): SEQ ID NO: 7381; WAN024BMS; Start 305; Stop 329
gtgtagtattcattgatccagaacg

SEQ ID NO: 466552 - DNA, 25 bp, Artificial
  probe
  misc_feature (1)..(25): SEQ ID NO: 7381; WAN024BMS; Start 1990; Stop 2014
agactatctaacgctcaggaatacg

SEQ ID NO: 466553 - DNA, 25 bp, Artificial
  probe
  misc_feature (1)..(25): SEQ ID NO: 7381; WAN024BMS; Start 318; Stop 342
tgatccagaacgaggtagaattaca

SEQ ID NO: 466554 - DNA, 25 bp, Artificial
  probe
  misc_feature (1)..(25): SEQ ID NO: 7381; WAN024BMS; Start 1993; Stop 2017
ctatctaacgctcaggaatacgata

SEQ ID NO: 466555 - DNA, 25 bp, Artificial
  probe
  misc_feature (1)..(25): SEQ ID NO: 7381; WAN024BMS; Start 307; Stop 331
gtagtattcattgatccagaacgag

SEQ ID NO: 466556 - DNA, 25 bp, Artificial
  probe
  misc_feature (1)..(25): SEQ ID NO: 7381; WAN024BMS; Start 314; Stop 338
tcattgatccagaacgaggtagaat

SEQ ID NO: 466557 - DNA, 25 bp, Artificial
  probe
  misc_feature (1)..(25): SEQ ID NO: 7381; WAN024BMS; Start 1994; Stop 2018
tatctaacgctcaggaatacgataa

SEQ ID NO: 466558 - DNA, 25 bp, Artificial
  probe
  misc_feature (1)..(25): SEQ ID NO: 7381; WAN024BMS; Start 300; Stop 324
gcatagtgtagtattcattgatcca

SEQ ID NO: 466559 - DNA, 25 bp, Artificial
  probe
  misc_feature (1)..(25): SEQ ID NO: 7381; WAN024BMS; Start 312; Stop 336
attcattgatccagaacgaggtaga

SEQ ID NO: 466560 - DNA, 25 bp, Artificial
  probe
  misc_feature (1)..(25): SEQ ID NO: 7381; WAN024BMS; Start 313; Stop 337
ttcattgatccagaacgaggtagaa

SEQ ID NO: 466561 - DNA, 25 bp, Artificial
  probe
  misc_feature (1)..(25): SEQ ID NO: 7381; WAN024BMS; Start 309; Stop 333
agtattcattgatccagaacgaggt

SEQ ID NO: 466562 - DNA, 25 bp, Artificial
  probe
  misc_feature (1)..(25): SEQ ID NO: 7381; WAN024BMS; Start 304; Stop 328
agtgtagtattcattgatccagaac

SEQ ID NO: 466563 - DNA, 25 bp, Artificial
  probe
  misc_feature (1)..(25): SEQ ID NO: 7382; WAN024CWB; Start 8; Stop 32
atctcatgttcagttatcagagtga

SEQ ID NO: 466564 - DNA, 25 bp, Artificial
  probe
  misc_feature (1)..(25): SEQ ID NO: 7382; WAN024CWB; Start 7; Stop 31
aatctcatgttcagttatcagagtg

SEQ ID NO: 466565 - DNA, 25 bp, Artificial
  probe
  misc_feature (1)..(25): SEQ ID NO: 7382; WAN024CWB; Start 50; Stop 74
aaatgaaaggcatgtctgagattac

SEQ ID NO: 466566 - DNA, 25 bp, Artificial
  probe
  misc_feature (1)..(25): SEQ ID NO: 7382; WAN024CWB; Start 51; Stop 75
aatgaaaggcatgtctgagattacc

SEQ ID NO: 466567 - DNA, 25 bp, Artificial
  probe
  misc_feature (1)..(25): SEQ ID NO: 7382; WAN024CWB; Start 9; Stop 33
tctcatgttcagttatcagagtgaa

SEQ ID NO: 466568 - DNA, 25 bp, Artificial
  probe
  misc_feature (1)..(25): SEQ ID NO: 7382; WAN024CWB; Start 6; Stop 30
aaatctcatgttcagttatcagagt

SEQ ID NO: 466569 - DNA, 25 bp, Artificial
  probe
  misc_feature (1)..(25): SEQ ID NO: 7382; WAN024CWB; Start 52; Stop 76
atgaaaggcatgtctgagattaccc

SEQ ID NO: 466570 - DNA, 25 bp, Artificial
  probe
  misc_feature (1)..(25): SEQ ID NO: 7382; WAN024CWB; Start 57; Stop 81
aggcatgtctgagattaccctctat

SEQ ID NO: 466571 - DNA, 25 bp, Artificial
  probe
  misc_feature (1)..(25): SEQ ID NO: 7382; WAN024CWB; Start 56; Stop 80
aaggcatgtctgagattaccctcta

SEQ ID NO: 466572 - DNA, 25 bp, Artificial
  probe
  misc_feature (1)..(25): SEQ ID NO: 7382; WAN024CWB; Start 10; Stop 34
ctcatgttcagttatcagagtgaaa

SEQ ID NO: 466573 - DNA, 25 bp, Artificial
  probe
  misc_feature (1)..(25): SEQ ID NO: 7382; WAN024CWB; Start 48; Stop 72
caaaatgaaaggcatgtctgagatt

SEQ ID NO: 466574 - DNA, 25 bp, Artificial
  probe
  misc_feature (1)..(25): SEQ ID NO: 7382; WAN024CWB; Start 54; Stop 78
gaaaggcatgtctgagattaccctc

SEQ ID NO: 466575 - DNA, 25 bp, Artificial
  probe
  misc_feature (1)..(25): SEQ ID NO: 7382; WAN024CWB; Start 49; Stop 73
aaaatgaaaggcatgtctgagatta

SEQ ID NO: 466576 - DNA, 25 bp, Artificial
  probe
  misc_feature (1)..(25): SEQ ID NO: 7382; WAN024CWB; Start 43; Stop 67
atctacaaaatgaaaggcatgtctg

SEQ ID NO: 466577 - DNA, 25 bp, Artificial
  probe
  misc_feature (1)..(25): SEQ ID NO: 7382; WAN024CWB; Start 42; Stop 66
catctacaaaatgaaaggcatgtct

SEQ ID NO: 466578 - DNA, 25 bp, Artificial
  probe
  misc_feature (1)..(25): SEQ ID NO: 7382; WAN024CWB; Start 45; Stop 69
ctacaaaatgaaaggcatgtctgag

SEQ ID NO: 466579 - DNA, 25 bp, Artificial
  probe
  misc_feature (1)..(25): SEQ ID NO: 7382; WAN024CWB; Start 55; Stop 79
aaaggcatgtctgagattaccctct

SEQ ID NO: 466580 - DNA, 25 bp, Artificial
  probe
  misc_feature (1)..(25): SEQ ID NO: 7382; WAN024CWB; Start 46; Stop 70
tacaaaatgaaaggcatgtctgaga

SEQ ID NO: 466581 - DNA, 25 bp, Artificial
  probe
  misc_feature (1)..(25): SEQ ID NO: 7382; WAN024CWB; Start 44; Stop 68
tctacaaaatgaaaggcatgtctga

SEQ ID NO: 466582 - DNA, 25 bp, Artificial
  probe
  misc_feature (1)..(25): SEQ ID NO: 7382; WAN024CWB; Start 47; Stop 71
acaaaatgaaaggcatgtctgagat

SEQ ID NO: 466583 - DNA, 25 bp, Artificial
  probe
  misc_feature (1)..(25): SEQ ID NO: 7382; WAN024CWB; Start 53; Stop 77
tgaaaggcatgtctgagattaccct

SEQ ID NO: 466584 - DNA, 25 bp, Artificial
  probe
  misc_feature (1)..(25): SEQ ID NO: 7382; WAN024CWB; Start 41; Stop 65
tcatctacaaaatgaaaggcatgtc

SEQ ID NO: 466585 - DNA, 25 bp, Artificial
  probe
  misc_feature (1)..(25): SEQ ID NO: 7382; WAN024CWB; Start 5; Stop 29
aaaatctcatgttcagttatcagag

SEQ ID NO: 466586 - DNA, 25 bp, Artificial
  probe
  misc_feature (1)..(25): SEQ ID NO: 7382; WAN024CWB; Start 17; Stop 41
tcagttatcagagtgaaaatctttt

SEQ ID NO: 466587 - DNA, 25 bp, Artificial
  probe
  misc_feature (1)..(25): SEQ ID NO: 7382; WAN024CWB; Start 14; Stop 38
tgttcagttatcagagtgaaaatct

SEQ ID NO: 466588 - DNA, 25 bp, Artificial
  probe
  misc_feature (1)..(25): SEQ ID NO: 7382; WAN024CWB; Start 11; Stop 35
tcatgttcagttatcagagtgaaaa

SEQ ID NO: 466589 - DNA, 25 bp, Artificial
  probe
  misc_feature (1)..(25): SEQ ID NO: 7382; WAN024CWB; Start 12; Stop 36
catgttcagttatcagagtgaaaat

SEQ ID NO: 466590 - DNA, 25 bp, Artificial
  probe
  misc_feature (1)..(25): SEQ ID NO: 7382; WAN024CWB; Start 13; Stop 37
atgttcagttatcagagtgaaaatc

SEQ ID NO: 466591 - DNA, 25 bp, Artificial
  probe
  misc_feature (1)..(25): SEQ ID NO: 7382; WAN024CWB; Start 15; Stop 39
gttcagttatcagagtgaaaatctt

SEQ ID NO: 466592 - DNA, 25 bp, Artificial
  probe
  misc_feature (1)..(25): SEQ ID NO: 7382; WAN024CWB; Start 16; Stop 40
ttcagttatcagagtgaaaatcttt

SEQ ID NO: 466593 - DNA, 25 bp, Artificial
  probe
  misc_feature (1)..(25): SEQ ID NO: 7382; WAN024CWB; Start 18; Stop 42
cagttatcagagtgaaaatcttttc

SEQ ID NO: 466594 - DNA, 25 bp, Artificial
  probe
  misc_feature (1)..(25): SEQ ID NO: 7382; WAN024CWB; Start 40; Stop 64
ttcatctacaaaatgaaaggcatgt

SEQ ID NO: 466595 - DNA, 25 bp, Artificial
  probe
  misc_feature (1)..(25): SEQ ID NO: 7382; WAN024CWB; Start 25; Stop 49
cagagtgaaaatcttttcatctaca

SEQ ID NO: 466596 - DNA, 25 bp, Artificial
  probe
  misc_feature (1)..(25): SEQ ID NO: 7383; WAN024BZF; Start 50; Stop 74
cactggatgtgtatagagcaatggg

SEQ ID NO: 466597 - DNA, 25 bp, Artificial
  probe
  misc_feature (1)..(25): SEQ ID NO: 7383; WAN024BZF; Start 63; Stop 87
tagagcaatggggctttatttgata

SEQ ID NO: 466598 - DNA, 25 bp, Artificial
  probe
  misc_feature (1)..(25): SEQ ID NO: 7383; WAN024BZF; Start 61; Stop 85
tatagagcaatggggctttatttga

SEQ ID NO: 466599 - DNA, 25 bp, Artificial
  probe
  misc_feature (1)..(25): SEQ ID NO: 7383; WAN024BZF; Start 60; Stop 84
gtatagagcaatggggctttatttg

SEQ ID NO: 466600 - DNA, 25 bp, Artificial
  probe
  misc_feature (1)..(25): SEQ ID NO: 7383; WAN024BZF; Start 49; Stop 73
acactggatgtgtatagagcaatgg

SEQ ID NO: 466601 - DNA, 25 bp, Artificial
  probe
  misc_feature (1)..(25): SEQ ID NO: 7383; WAN024BZF; Start 59; Stop 83
tgtatagagcaatggggctttattt

SEQ ID NO: 466602 - DNA, 25 bp, Artificial
  probe
  misc_feature (1)..(25): SEQ ID NO: 7383; WAN024BZF; Start 62; Stop 86
atagagcaatggggctttatttgat

SEQ ID NO: 466603 - DNA, 25 bp, Artificial
  probe
  misc_feature (1)..(25): SEQ ID NO: 7383; WAN024BZF; Start 58; Stop 82
gtgtatagagcaatggggctttatt

SEQ ID NO: 466604 - DNA, 25 bp, Artificial
  probe
  misc_feature (1)..(25): SEQ ID NO: 7383; WAN024BZF; Start 57; Stop 81
tgtgtatagagcaatggggctttat

SEQ ID NO: 466605 - DNA, 25 bp, Artificial
  probe
  misc_feature (1)..(25): SEQ ID NO: 7383; WAN024BZF; Start 56; Stop 80
atgtgtatagagcaatggggcttta

SEQ ID NO: 466606 - DNA, 25 bp, Artificial
  probe
  misc_feature (1)..(25): SEQ ID NO: 7383; WAN024BZF; Start 51; Stop 75
actggatgtgtatagagcaatgggg

SEQ ID NO: 466607 - DNA, 25 bp, Artificial
  probe
  misc_feature (1)..(25): SEQ ID NO: 7383; WAN024BZF; Start 7; Stop 31
acagatgagtataaaattgaattgc

SEQ ID NO: 466608 - DNA, 25 bp, Artificial
  probe
  misc_feature (1)..(25): SEQ ID NO: 7383; WAN024BZF; Start 8; Stop 32
cagatgagtataaaattgaattgct

SEQ ID NO: 466609 - DNA, 25 bp, Artificial
  probe
  misc_feature (1)..(25): SEQ ID NO: 7383; WAN024BZF; Start 55; Stop 79
gatgtgtatagagcaatggggcttt

SEQ ID NO: 466610 - DNA, 25 bp, Artificial
  probe
  misc_feature (1)..(25): SEQ ID NO: 7383; WAN024BZF; Start 9; Stop 33
agatgagtataaaattgaattgctt

SEQ ID NO: 466611 - DNA, 25 bp, Artificial
  probe
  misc_feature (1)..(25): SEQ ID NO: 7383; WAN024BZF; Start 52; Stop 76
ctggatgtgtatagagcaatggggc

SEQ ID NO: 466612 - DNA, 25 bp, Artificial
  probe
  misc_feature (1)..(25): SEQ ID NO: 7383; WAN024BZF; Start 2; Stop 26
tgaaaacagatgagtataaaattga

SEQ ID NO: 466613 - DNA, 25 bp, Artificial
  probe
  misc_feature (1)..(25): SEQ ID NO: 7383; WAN024BZF; Start 54; Stop 78
ggatgtgtatagagcaatggggctt

SEQ ID NO: 466614 - DNA, 25 bp, Artificial
  probe
  misc_feature (1)..(25): SEQ ID NO: 7384; WAN024BSL; Start 14; Stop 38
ctaaggtaattggaactaagatgga

SEQ ID NO: 466615 - DNA, 25 bp, Artificial
  probe
  misc_feature (1)..(25): SEQ ID NO: 7384; WAN024BSL; Start 13; Stop 37
tctaaggtaattggaactaagatgg

SEQ ID NO: 466616 - DNA, 25 bp, Artificial
  probe
  misc_feature (1)..(25): SEQ ID NO: 7384; WAN024BSL; Start 33; Stop 57
gatggaaatagacgatgaaggaaac

SEQ ID NO: 466617 - DNA, 25 bp, Artificial
  probe
  misc_feature (1)..(25): SEQ ID NO: 7384; WAN024BSL; Start 32; Stop 56
agatggaaatagacgatgaaggaaa

SEQ ID NO: 466618 - DNA, 25 bp, Artificial
  probe
  misc_feature (1)..(25): SEQ ID NO: 7384; WAN024BSL; Start 31; Stop 55
aagatggaaatagacgatgaaggaa

SEQ ID NO: 466619 - DNA, 25 bp, Artificial
  probe
  misc_feature (1)..(25): SEQ ID NO: 7384; WAN024BSL; Start 15; Stop 39
taaggtaattggaactaagatggaa

SEQ ID NO: 466620 - DNA, 25 bp, Artificial
  probe
  misc_feature (1)..(25): SEQ ID NO: 7384; WAN024BSL; Start 23; Stop 47
ttggaactaagatggaaatagacga

SEQ ID NO: 466621 - DNA, 25 bp, Artificial
  probe
  misc_feature (1)..(25): SEQ ID NO: 7384; WAN024BSL; Start 24; Stop 48
tggaactaagatggaaatagacgat

SEQ ID NO: 466622 - DNA, 25 bp, Artificial
  probe
  misc_feature (1)..(25): SEQ ID NO: 7384; WAN024BSL; Start 30; Stop 54
taagatggaaatagacgatgaagga

SEQ ID NO: 466623 - DNA, 25 bp, Artificial
  probe
  misc_feature (1)..(25): SEQ ID NO: 7384; WAN024BSL; Start 25; Stop 49
ggaactaagatggaaatagacgatg

SEQ ID NO: 466624 - DNA, 25 bp, Artificial
  probe
  misc_feature (1)..(25): SEQ ID NO: 7384; WAN024BSL; Start 29; Stop 53
ctaagatggaaatagacgatgaagg

SEQ ID NO: 466625 - DNA, 25 bp, Artificial
  probe
  misc_feature (1)..(25): SEQ ID NO: 7384; WAN024BSL; Start 34; Stop 58
atggaaatagacgatgaaggaaacg

SEQ ID NO: 466626 - DNA, 25 bp, Artificial
  probe
  misc_feature (1)..(25): SEQ ID NO: 7384; WAN024BSL; Start 22; Stop 46
attggaactaagatggaaatagacg

SEQ ID NO: 466627 - DNA, 25 bp, Artificial
  probe
  misc_feature (1)..(25): SEQ ID NO: 7384; WAN024BSL; Start 28; Stop 52
actaagatggaaatagacgatgaag

SEQ ID NO: 466628 - DNA, 25 bp, Artificial
  probe
  misc_feature (1)..(25): SEQ ID NO: 7384; WAN024BSL; Start 26; Stop 50
gaactaagatggaaatagacgatga

SEQ ID NO: 466629 - DNA, 25 bp, Artificial
  probe
  misc_feature (1)..(25): SEQ ID NO: 7384; WAN024BSL; Start 16; Stop 40
aaggtaattggaactaagatggaaa

SEQ ID NO: 466630 - DNA, 25 bp, Artificial
  probe
  misc_feature (1)..(25): SEQ ID NO: 7384; WAN024BSL; Start 27; Stop 51
aactaagatggaaatagacgatgaa

SEQ ID NO: 466631 - DNA, 25 bp, Artificial
  probe
  misc_feature (1)..(25): SEQ ID NO: 7384; WAN024BSL; Start 17; Stop 41
aggtaattggaactaagatggaaat

SEQ ID NO: 466632 - DNA, 25 bp, Artificial
  probe
  misc_feature (1)..(25): SEQ ID NO: 7384; WAN024BSL; Start 37; Stop 61
gaaatagacgatgaaggaaacgctg

SEQ ID NO: 466633 - DNA, 25 bp, Artificial
  probe
  misc_feature (1)..(25): SEQ ID NO: 7384; WAN024BSL; Start 38; Stop 62
aaatagacgatgaaggaaacgctga

SEQ ID NO: 466634 - DNA, 25 bp, Artificial
  probe
  misc_feature (1)..(25): SEQ ID NO: 7384; WAN024BSL; Start 12; Stop 36
ttctaaggtaattggaactaagatg

SEQ ID NO: 466635 - DNA, 25 bp, Artificial
  probe
  misc_feature (1)..(25): SEQ ID NO: 7384; WAN024BSL; Start 39; Stop 63
aatagacgatgaaggaaacgctgac

SEQ ID NO: 466636 - DNA, 25 bp, Artificial
  probe
  misc_feature (1)..(25): SEQ ID NO: 7384; WAN024BSL; Start 36; Stop 60
ggaaatagacgatgaaggaaacgct

SEQ ID NO: 466637 - DNA, 25 bp, Artificial
  probe
  misc_feature (1)..(25): SEQ ID NO: 7384; WAN024BSL; Start 9; Stop 33
cggttctaaggtaattggaactaag

SEQ ID NO: 466638 - DNA, 25 bp, Artificial
  probe
  misc_feature (1)..(25): SEQ ID NO: 7384; WAN024BSL; Start 21; Stop 45
aattggaactaagatggaaatagac

SEQ ID NO: 466639 - DNA, 25 bp, Artificial
  probe
  misc_feature (1)..(25): SEQ ID NO: 7384; WAN024BSL; Start 35; Stop 59
tggaaatagacgatgaaggaaacgc

SEQ ID NO: 466640 - DNA, 25 bp, Artificial
  probe
  misc_feature (1)..(25): SEQ ID NO: 7384; WAN024BSL; Start 18; Stop 42
ggtaattggaactaagatggaaata

SEQ ID NO: 466641 - DNA, 25 bp, Artificial
  probe
  misc_feature (1)..(25): SEQ ID NO: 7384; WAN024BSL; Start 10; Stop 34
ggttctaaggtaattggaactaaga

SEQ ID NO: 466642 - DNA, 25 bp, Artificial
  probe
  misc_feature (1)..(25): SEQ ID NO: 7384; WAN024BSL; Start 40; Stop 64
atagacgatgaaggaaacgctgaca

SEQ ID NO: 466643 - DNA, 25 bp, Artificial
  probe
  misc_feature (1)..(25): SEQ ID NO: 7384; WAN024BSL; Start 41; Stop 65
tagacgatgaaggaaacgctgacat

SEQ ID NO: 466644 - DNA, 25 bp, Artificial
  probe
  misc_feature (1)..(25): SEQ ID NO: 7384; WAN024BSL; Start 8; Stop 32
ccggttctaaggtaattggaactaa

SEQ ID NO: 466645 - DNA, 25 bp, Artificial
  probe
  misc_feature (1)..(25): SEQ ID NO: 7384; WAN024BSL; Start 19; Stop 43
gtaattggaactaagatggaaatag

SEQ ID NO: 466646 - DNA, 25 bp, Artificial
  probe
  misc_feature (1)..(25): SEQ ID NO: 7384; WAN024BSL; Start 20; Stop 44
taattggaactaagatggaaataga

SEQ ID NO: 466647 - DNA, 25 bp, Artificial
  probe
  misc_feature (1)..(25): SEQ ID NO: 7385; WAN024BMJ; Start 35; Stop 59
acttctttcctgctatcctttcttt

SEQ ID NO: 466648 - DNA, 25 bp, Artificial
  probe
  misc_feature (1)..(25): SEQ ID NO: 7385; WAN024BMJ; Start 34; Stop 58
cacttctttcctgctatcctttctt

SEQ ID NO: 466649 - DNA, 25 bp, Artificial
  probe
  misc_feature (1)..(25): SEQ ID NO: 7385; WAN024BMJ; Start 32; Stop 56
ttcacttctttcctgctatcctttc

SEQ ID NO: 466650 - DNA, 25 bp, Artificial
  probe
  misc_feature (1)..(25): SEQ ID NO: 7385; WAN024BMJ; Start 31; Stop 55
cttcacttctttcctgctatccttt

SEQ ID NO: 466651 - DNA, 25 bp, Artificial
  probe
  misc_feature (1)..(25): SEQ ID NO: 7385; WAN024BMJ; Start 27; Stop 51
cttccttcacttctttcctgctatc

SEQ ID NO: 466652 - DNA, 25 bp, Artificial
  probe
  misc_feature (1)..(25): SEQ ID NO: 7385; WAN024BMJ; Start 19; Stop 43
cattctcccttccttcacttctttc

SEQ ID NO: 466653 - DNA, 25 bp, Artificial
  probe
  misc_feature (1)..(25): SEQ ID NO: 7385; WAN024BMJ; Start 17; Stop 41
atcattctcccttccttcacttctt

SEQ ID NO: 466654 - DNA, 25 bp, Artificial
  probe
  misc_feature (1)..(25): SEQ ID NO: 7385; WAN024BMJ; Start 33; Stop 57
tcacttctttcctgctatcctttct

SEQ ID NO: 466655 - DNA, 25 bp, Artificial
  probe
  misc_feature (1)..(25): SEQ ID NO: 7385; WAN024BMJ; Start 18; Stop 42
tcattctcccttccttcacttcttt

SEQ ID NO: 466656 - DNA, 25 bp, Artificial
  probe
  misc_feature (1)..(25): SEQ ID NO: 7385; WAN024BMJ; Start 14; Stop 38
ttcatcattctcccttccttcactt

SEQ ID NO: 466657 - DNA, 25 bp, Artificial
  probe
  misc_feature (1)..(25): SEQ ID NO: 7385; WAN024BMJ; Start 13; Stop 37
tttcatcattctcccttccttcact

SEQ ID NO: 466658 - DNA, 25 bp, Artificial
  probe
  misc_feature (1)..(25): SEQ ID NO: 7385; WAN024BMJ; Start 16; Stop 40
catcattctcccttccttcacttct

SEQ ID NO: 466659 - DNA, 25 bp, Artificial
  probe
  misc_feature (1)..(25): SEQ ID NO: 7385; WAN024BMJ; Start 15; Stop 39
tcatcattctcccttccttcacttc

SEQ ID NO: 466660 - DNA, 25 bp, Artificial
  probe
  misc_feature (1)..(25): SEQ ID NO: 7385; WAN024BMJ; Start 20; Stop 44
attctcccttccttcacttctttcc

SEQ ID NO: 466661 - DNA, 25 bp, Artificial
  probe
  misc_feature (1)..(25): SEQ ID NO: 7385; WAN024BMJ; Start 30; Stop 54
ccttcacttctttcctgctatcctt

SEQ ID NO: 466662 - DNA, 25 bp, Artificial
  probe
  misc_feature (1)..(25): SEQ ID NO: 7385; WAN024BMJ; Start 28; Stop 52
ttccttcacttctttcctgctatcc

SEQ ID NO: 466663 - DNA, 25 bp, Artificial
  probe
  misc_feature (1)..(25): SEQ ID NO: 7385; WAN024BMJ; Start 26; Stop 50
ccttccttcacttctttcctgctat

SEQ ID NO: 466664 - DNA, 25 bp, Artificial
  probe
  misc_feature (1)..(25): SEQ ID NO: 7385; WAN024BMJ; Start 29; Stop 53
tccttcacttctttcctgctatcct

SEQ ID NO: 466665 - DNA, 25 bp, Artificial
  probe
  misc_feature (1)..(25): SEQ ID NO: 7385; WAN024BMJ; Start 21; Stop 45
ttctcccttccttcacttctttcct

SEQ ID NO: 466666 - DNA, 25 bp, Artificial
  probe
  misc_feature (1)..(25): SEQ ID NO: 7385; WAN024BMJ; Start 36; Stop 60
cttctttcctgctatcctttctttt

SEQ ID NO: 466667 - DNA, 25 bp, Artificial
  probe
  misc_feature (1)..(25): SEQ ID NO: 7385; WAN024BMJ; Start 12; Stop 36
ttttcatcattctcccttccttcac

SEQ ID NO: 466668 - DNA, 25 bp, Artificial
  probe
  misc_feature (1)..(25): SEQ ID NO: 7385; WAN024BMJ; Start 22; Stop 46
tctcccttccttcacttctttcctg

SEQ ID NO: 466669 - DNA, 25 bp, Artificial
  probe
  misc_feature (1)..(25): SEQ ID NO: 7385; WAN024BMJ; Start 37; Stop 61
ttctttcctgctatcctttctttta

SEQ ID NO: 466670 - DNA, 25 bp, Artificial
  probe
  misc_feature (1)..(25): SEQ ID NO: 7385; WAN024BMJ; Start 25; Stop 49
cccttccttcacttctttcctgcta

SEQ ID NO: 466671 - DNA, 25 bp, Artificial
  probe
  misc_feature (1)..(25): SEQ ID NO: 7385; WAN024BMJ; Start 38; Stop 62
tctttcctgctatcctttcttttat

SEQ ID NO: 466672 - DNA, 25 bp, Artificial
  probe
  misc_feature (1)..(25): SEQ ID NO: 7385; WAN024BMJ; Start 39; Stop 63
ctttcctgctatcctttcttttatt

SEQ ID NO: 466673 - DNA, 25 bp, Artificial
  probe
  misc_feature (1)..(25): SEQ ID NO: 7385; WAN024BMJ; Start 41; Stop 65
ttcctgctatcctttcttttatttt

SEQ ID NO: 466674 - DNA, 25 bp, Artificial
  probe
  misc_feature (1)..(25): SEQ ID NO: 7385; WAN024BMJ; Start 40; Stop 64
tttcctgctatcctttcttttattt

SEQ ID NO: 466675 - DNA, 25 bp, Artificial
  probe
  misc_feature (1)..(25): SEQ ID NO: 7385; WAN024BMJ; Start 23; Stop 47
ctcccttccttcacttctttcctgc

SEQ ID NO: 466676 - DNA, 25 bp, Artificial
  probe
  misc_feature (1)..(25): SEQ ID NO: 7385; WAN024BMJ; Start 42; Stop 66
tcctgctatcctttcttttatttta

SEQ ID NO: 466677 - DNA, 25 bp, Artificial
  probe
  misc_feature (1)..(25): SEQ ID NO: 7385; WAN024BMJ; Start 43; Stop 67
cctgctatcctttcttttattttat

SEQ ID NO: 466678 - DNA, 25 bp, Artificial
  probe
  misc_feature (1)..(25): SEQ ID NO: 7386; WAN024BNR; Start 86; Stop 110
caattcacactatgcaagctatcaa

SEQ ID NO: 466679 - DNA, 25 bp, Artificial
  probe
  misc_feature (1)..(25): SEQ ID NO: 7386; WAN024BNR; Start 82; Stop 106
gttacaattcacactatgcaagcta

SEQ ID NO: 466680 - DNA, 25 bp, Artificial
  probe
  misc_feature (1)..(25): SEQ ID NO: 7386; WAN024BNR; Start 85; Stop 109
acaattcacactatgcaagctatca

SEQ ID NO: 466681 - DNA, 25 bp, Artificial
  probe
  misc_feature (1)..(25): SEQ ID NO: 7386; WAN024BNR; Start 84; Stop 108
tacaattcacactatgcaagctatc

SEQ ID NO: 466682 - DNA, 25 bp, Artificial
  probe
  misc_feature (1)..(25): SEQ ID NO: 7386; WAN024BNR; Start 83; Stop 107
ttacaattcacactatgcaagctat

SEQ ID NO: 466683 - DNA, 25 bp, Artificial
  probe
  misc_feature (1)..(25): SEQ ID NO: 7386; WAN024BNR; Start 80; Stop 104
ttgttacaattcacactatgcaagc

SEQ ID NO: 466684 - DNA, 25 bp, Artificial
  probe
  misc_feature (1)..(25): SEQ ID NO: 7386; WAN024BNR; Start 130; Stop 154
gattattatcagaaaccacaagtgc

SEQ ID NO: 466685 - DNA, 25 bp, Artificial
  probe
  misc_feature (1)..(25): SEQ ID NO: 7386; WAN024BNR; Start 81; Stop 105
tgttacaattcacactatgcaagct

SEQ ID NO: 466686 - DNA, 25 bp, Artificial
  probe
  misc_feature (1)..(25): SEQ ID NO: 7386; WAN024BNR; Start 129; Stop 153
ggattattatcagaaaccacaagtg

SEQ ID NO: 466687 - DNA, 25 bp, Artificial
  probe
  misc_feature (1)..(25): SEQ ID NO: 7386; WAN024BNR; Start 75; Stop 99
agcgattgttacaattcacactatg

SEQ ID NO: 466688 - DNA, 25 bp, Artificial
  probe
  misc_feature (1)..(25): SEQ ID NO: 7386; WAN024BNR; Start 74; Stop 98
cagcgattgttacaattcacactat

SEQ ID NO: 466689 - DNA, 25 bp, Artificial
  probe
  misc_feature (1)..(25): SEQ ID NO: 7386; WAN024BNR; Start 158; Stop 182
gtgagattgcacgtcatgtacttaa

SEQ ID NO: 466690 - DNA, 25 bp, Artificial
  probe
  misc_feature (1)..(25): SEQ ID NO: 7386; WAN024BNR; Start 36; Stop 60
cgttatggtacttacaactttgatg

SEQ ID NO: 466691 - DNA, 25 bp, Artificial
  probe
  misc_feature (1)..(25): SEQ ID NO: 7386; WAN024BNR; Start 35; Stop 59
tcgttatggtacttacaactttgat

SEQ ID NO: 466692 - DNA, 25 bp, Artificial
  probe
  misc_feature (1)..(25): SEQ ID NO: 7386; WAN024BNR; Start 34; Stop 58
atcgttatggtacttacaactttga

SEQ ID NO: 466693 - DNA, 25 bp, Artificial
  probe
  misc_feature (1)..(25): SEQ ID NO: 7386; WAN024BNR; Start 30; Stop 54
tgaaatcgttatggtacttacaact

SEQ ID NO: 466694 - DNA, 25 bp, Artificial
  probe
  misc_feature (1)..(25): SEQ ID NO: 7386; WAN024BNR; Start 77; Stop 101
cgattgttacaattcacactatgca

SEQ ID NO: 466695 - DNA, 25 bp, Artificial
  probe
  misc_feature (1)..(25): SEQ ID NO: 7386; WAN024BNR; Start 76; Stop 100
gcgattgttacaattcacactatgc

SEQ ID NO: 466696 - DNA, 25 bp, Artificial
  probe
  misc_feature (1)..(25): SEQ ID NO: 7386; WAN024BNR; Start 134; Stop 158
attatcagaaaccacaagtgcaatg

SEQ ID NO: 466697 - DNA, 25 bp, Artificial
  probe
  misc_feature (1)..(25): SEQ ID NO: 7386; WAN024BNR; Start 87; Stop 111
aattcacactatgcaagctatcaaa

SEQ ID NO: 466698 - DNA, 25 bp, Artificial
  probe
  misc_feature (1)..(25): SEQ ID NO: 7386; WAN024BNR; Start 132; Stop 156
ttattatcagaaaccacaagtgcaa

SEQ ID NO: 466699 - DNA, 25 bp, Artificial
  probe
  misc_feature (1)..(25): SEQ ID NO: 7386; WAN024BNR; Start 133; Stop 157
tattatcagaaaccacaagtgcaat

SEQ ID NO: 466700 - DNA, 25 bp, Artificial
  probe
  misc_feature (1)..(25): SEQ ID NO: 7386; WAN024BNR; Start 131; Stop 155
attattatcagaaaccacaagtgca

SEQ ID NO: 466701 - DNA, 25 bp, Artificial
  probe
  misc_feature (1)..(25): SEQ ID NO: 7386; WAN024BNR; Start 33; Stop 57
aatcgttatggtacttacaactttg

SEQ ID NO: 466702 - DNA, 25 bp, Artificial
  probe
  misc_feature (1)..(25): SEQ ID NO: 7386; WAN024BNR; Start 157; Stop 181
tgtgagattgcacgtcatgtactta

SEQ ID NO: 466703 - DNA, 25 bp, Artificial
  probe
  misc_feature (1)..(25): SEQ ID NO: 7386; WAN024BNR; Start 29; Stop 53
ttgaaatcgttatggtacttacaac

SEQ ID NO: 466704 - DNA, 25 bp, Artificial
  probe
  misc_feature (1)..(25): SEQ ID NO: 7386; WAN024BNR; Start 79; Stop 103
attgttacaattcacactatgcaag

SEQ ID NO: 466705 - DNA, 25 bp, Artificial
  probe
  misc_feature (1)..(25): SEQ ID NO: 7386; WAN024BNR; Start 78; Stop 102
gattgttacaattcacactatgcaa

SEQ ID NO: 466706 - DNA, 25 bp, Artificial
  probe
  misc_feature (1)..(25): SEQ ID NO: 7386; WAN024BNR; Start 159; Stop 183
tgagattgcacgtcatgtacttaaa

SEQ ID NO: 466707 - DNA, 25 bp, Artificial
  probe
  misc_feature (1)..(25): SEQ ID NO: 7386; WAN024BNR; Start 73; Stop 97
gcagcgattgttacaattcacacta

SEQ ID NO: 466708 - DNA, 25 bp, Artificial
  probe
  misc_feature (1)..(25): SEQ ID NO: 7386; WAN024BNR; Start 128; Stop 152
tggattattatcagaaaccacaagt

SEQ ID NO: 466709 - DNA, 25 bp, Artificial
  probe
  misc_feature (1)..(25): SEQ ID NO: 7386; WAN024BNR; Start 31; Stop 55
gaaatcgttatggtacttacaactt

SEQ ID NO: 466710 - DNA, 25 bp, Artificial
  probe
  misc_feature (1)..(25): SEQ ID NO: 7386; WAN024BNR; Start 41; Stop 65
tggtacttacaactttgatgtctat

SEQ ID NO: 466711 - DNA, 25 bp, Artificial
  probe
  misc_feature (1)..(25): SEQ ID NO: 7387; WAN024BT2; Start 53; Stop 77
ggtctattaaacgcattgtatcacg

SEQ ID NO: 466712 - DNA, 25 bp, Artificial
  probe
  misc_feature (1)..(25): SEQ ID NO: 7387; WAN024BT2; Start 52; Stop 76
tggtctattaaacgcattgtatcac

SEQ ID NO: 466713 - DNA, 25 bp, Artificial
  probe
  misc_feature (1)..(25): SEQ ID NO: 7387; WAN024BT2; Start 51; Stop 75
atggtctattaaacgcattgtatca

SEQ ID NO: 466714 - DNA, 25 bp, Artificial
  probe
  misc_feature (1)..(25): SEQ ID NO: 7387; WAN024BT2; Start 50; Stop 74
tatggtctattaaacgcattgtatc

SEQ ID NO: 466715 - DNA, 25 bp, Artificial
  probe
  misc_feature (1)..(25): SEQ ID NO: 7387; WAN024BT2; Start 48; Stop 72
tttatggtctattaaacgcattgta

SEQ ID NO: 466716 - DNA, 25 bp, Artificial
  probe
  misc_feature (1)..(25): SEQ ID NO: 7387; WAN024BT2; Start 49; Stop 73
ttatggtctattaaacgcattgtat

SEQ ID NO: 466717 - DNA, 25 bp, Artificial
  probe
  misc_feature (1)..(25): SEQ ID NO: 7387; WAN024BT2; Start 54; Stop 78
gtctattaaacgcattgtatcacgt

SEQ ID NO: 466718 - DNA, 25 bp, Artificial
  probe
  misc_feature (1)..(25): SEQ ID NO: 7387; WAN024BT2; Start 47; Stop 71
ttttatggtctattaaacgcattgt

SEQ ID NO: 466719 - DNA, 25 bp, Artificial
  probe
  misc_feature (1)..(25): SEQ ID NO: 7387; WAN024BT2; Start 20; Stop 44
ttcaatttgagaagaaaagacaact

SEQ ID NO: 466720 - DNA, 25 bp, Artificial
  probe
  misc_feature (1)..(25): SEQ ID NO: 7387; WAN024BT2; Start 46; Stop 70
attttatggtctattaaacgcattg

SEQ ID NO: 466721 - DNA, 25 bp, Artificial
  probe
  misc_feature (1)..(25): SEQ ID NO: 7387; WAN024BT2; Start 7; Stop 31
agtctaggcaaaattcaatttgaga

SEQ ID NO: 466722 - DNA, 25 bp, Artificial
  probe
  misc_feature (1)..(25): SEQ ID NO: 7387; WAN024BT2; Start 21; Stop 45
tcaatttgagaagaaaagacaacta

SEQ ID NO: 466723 - DNA, 25 bp, Artificial
  probe
  misc_feature (1)..(25): SEQ ID NO: 7387; WAN024BT2; Start 19; Stop 43
attcaatttgagaagaaaagacaac

SEQ ID NO: 466724 - DNA, 25 bp, Artificial
  probe
  misc_feature (1)..(25): SEQ ID NO: 7387; WAN024BT2; Start 12; Stop 36
aggcaaaattcaatttgagaagaaa

SEQ ID NO: 466725 - DNA, 25 bp, Artificial
  probe
  misc_feature (1)..(25): SEQ ID NO: 7387; WAN024BT2; Start 8; Stop 32
gtctaggcaaaattcaatttgagaa

SEQ ID NO: 466726 - DNA, 25 bp, Artificial
  probe
  misc_feature (1)..(25): SEQ ID NO: 7387; WAN024BT2; Start 6; Stop 30
aagtctaggcaaaattcaatttgag

SEQ ID NO: 466727 - DNA, 25 bp, Artificial
  probe
  misc_feature (1)..(25): SEQ ID NO: 7387; WAN024BT2; Start 3; Stop 27
gaaaagtctaggcaaaattcaattt

SEQ ID NO: 466728 - DNA, 25 bp, Artificial
  probe
  misc_feature (1)..(25): SEQ ID NO: 7387; WAN024BT2; Start 10; Stop 34
ctaggcaaaattcaatttgagaaga

SEQ ID NO: 466729 - DNA, 25 bp, Artificial
  probe
  misc_feature (1)..(25): SEQ ID NO: 7387; WAN024BT2; Start 9; Stop 33
tctaggcaaaattcaatttgagaag

SEQ ID NO: 466730 - DNA, 25 bp, Artificial
  probe
  misc_feature (1)..(25): SEQ ID NO: 7387; WAN024BT2; Start 22; Stop 46
caatttgagaagaaaagacaactaa

SEQ ID NO: 466731 - DNA, 25 bp, Artificial
  probe
  misc_feature (1)..(25): SEQ ID NO: 7387; WAN024BT2; Start 5; Stop 29
aaagtctaggcaaaattcaatttga

SEQ ID NO: 466732 - DNA, 25 bp, Artificial
  probe
  misc_feature (1)..(25): SEQ ID NO: 7387; WAN024BT2; Start 13; Stop 37
ggcaaaattcaatttgagaagaaaa

SEQ ID NO: 466733 - DNA, 25 bp, Artificial
  probe
  misc_feature (1)..(25): SEQ ID NO: 7387; WAN024BT2; Start 2; Stop 26
tgaaaagtctaggcaaaattcaatt

SEQ ID NO: 466734 - DNA, 25 bp, Artificial
  probe
  misc_feature (1)..(25): SEQ ID NO: 7387; WAN024BT2; Start 11; Stop 35
taggcaaaattcaatttgagaagaa

SEQ ID NO: 466735 - DNA, 25 bp, Artificial
  probe
  misc_feature (1)..(25): SEQ ID NO: 7387; WAN024BT2; Start 45; Stop 69
aattttatggtctattaaacgcatt

SEQ ID NO: 466736 - DNA, 25 bp, Artificial
  probe
  misc_feature (1)..(25): SEQ ID NO: 7387; WAN024BT2; Start 4; Stop 28
aaaagtctaggcaaaattcaatttg

SEQ ID NO: 466737 - DNA, 25 bp, Artificial
  probe
  misc_feature (1)..(25): SEQ ID NO: 7387; WAN024BT2; Start 18; Stop 42
aattcaatttgagaagaaaagacaa

SEQ ID NO: 466738 - DNA, 25 bp, Artificial
  probe
  misc_feature (1)..(25): SEQ ID NO: 7387; WAN024BT2; Start 43; Stop 67
ctaattttatggtctattaaacgca

SEQ ID NO: 466739 - DNA, 25 bp, Artificial
  probe
  misc_feature (1)..(25): SEQ ID NO: 7387; WAN024BT2; Start 42; Stop 66
actaattttatggtctattaaacgc

SEQ ID NO: 466740 - DNA, 25 bp, Artificial
  probe
  misc_feature (1)..(25): SEQ ID NO: 7387; WAN024BT2; Start 17; Stop 41
aaattcaatttgagaagaaaagaca

SEQ ID NO: 466741 - DNA, 25 bp, Artificial
  probe
  misc_feature (1)..(25): SEQ ID NO: 7387; WAN024BT2; Start 25; Stop 49
tttgagaagaaaagacaactaattt

SEQ ID NO: 466742 - DNA, 25 bp, Artificial
  probe
  misc_feature (1)..(25): SEQ ID NO: 7387; WAN024BT2; Start 55; Stop 79
tctattaaacgcattgtatcacgtt

SEQ ID NO: 466743 - DNA, 25 bp, Artificial
  probe
  misc_feature (1)..(25): SEQ ID NO: 7387; WAN024BT2; Start 32; Stop 56
agaaaagacaactaattttatggtc

SEQ ID NO: 466744 - DNA, 25 bp, Artificial
  probe
  misc_feature (1)..(25): SEQ ID NO: 7388; WAN024DBD; Start 806; Stop 830
ttggagcgatattaagtggtgttat

SEQ ID NO: 466745 - DNA, 25 bp, Artificial
  probe
  misc_feature (1)..(25): SEQ ID NO: 7388; WAN024DBD; Start 805; Stop 829
attggagcgatattaagtggtgtta

SEQ ID NO: 466746 - DNA, 25 bp, Artificial
  probe
  misc_feature (1)..(25): SEQ ID NO: 7388; WAN024DBD; Start 804; Stop 828
tattggagcgatattaagtggtgtt

SEQ ID NO: 466747 - DNA, 25 bp, Artificial
  probe
  misc_feature (1)..(25): SEQ ID NO: 7388; WAN024DBD; Start 803; Stop 827
ttattggagcgatattaagtggtgt

SEQ ID NO: 466748 - DNA, 25 bp, Artificial
  probe
  misc_feature (1)..(25): SEQ ID NO: 7388; WAN024DBD; Start 889; Stop 913
ttaatgctatcaacgccactctatt

SEQ ID NO: 466749 - DNA, 25 bp, Artificial
  probe
  misc_feature (1)..(25): SEQ ID NO: 7388; WAN024DBD; Start 1178; Stop 1202
gcacgctattgaagaggtatgataa

SEQ ID NO: 466750 - DNA, 25 bp, Artificial
  probe
  misc_feature (1)..(25): SEQ ID NO: 7388; WAN024DBD; Start 807; Stop 831
tggagcgatattaagtggtgttata

SEQ ID NO: 466751 - DNA, 25 bp, Artificial
  probe
  misc_feature (1)..(25): SEQ ID NO: 7388; WAN024DBD; Start 888; Stop 912
gttaatgctatcaacgccactctat

SEQ ID NO: 466752 - DNA, 25 bp, Artificial
  probe
  misc_feature (1)..(25): SEQ ID NO: 7388; WAN024DBD; Start 860; Stop 884
tggtcttcttatcatgttcaggatt

SEQ ID NO: 466753 - DNA, 25 bp, Artificial
  probe
  misc_feature (1)..(25): SEQ ID NO: 7388; WAN024DBD; Start 861; Stop 885
ggtcttcttatcatgttcaggattg

SEQ ID NO: 466754 - DNA, 25 bp, Artificial
  probe
  misc_feature (1)..(25): SEQ ID NO: 7388; WAN024DBD; Start 858; Stop 882
aatggtcttcttatcatgttcagga

SEQ ID NO: 466755 - DNA, 25 bp, Artificial
  probe
  misc_feature (1)..(25): SEQ ID NO: 7388; WAN024DBD; Start 859; Stop 883
atggtcttcttatcatgttcaggat

SEQ ID NO: 466756 - DNA, 25 bp, Artificial
  probe
  misc_feature (1)..(25): SEQ ID NO: 7388; WAN024DBD; Start 874; Stop 898
tgttcaggattgatgttaatgctat

SEQ ID NO: 466757 - DNA, 25 bp, Artificial
  probe
  misc_feature (1)..(25): SEQ ID NO: 7388; WAN024DBD; Start 873; Stop 897
atgttcaggattgatgttaatgcta

SEQ ID NO: 466758 - DNA, 25 bp, Artificial
  probe
  misc_feature (1)..(25): SEQ ID NO: 7388; WAN024DBD; Start 872; Stop 896
catgttcaggattgatgttaatgct

SEQ ID NO: 466759 - DNA, 25 bp, Artificial
  probe
  misc_feature (1)..(25): SEQ ID NO: 7388; WAN024DBD; Start 871; Stop 895
tcatgttcaggattgatgttaatgc

SEQ ID NO: 466760 - DNA, 25 bp, Artificial
  probe
  misc_feature (1)..(25): SEQ ID NO: 7388; WAN024DBD; Start 887; Stop 911
tgttaatgctatcaacgccactcta

SEQ ID NO: 466761 - DNA, 25 bp, Artificial
  probe
  misc_feature (1)..(25): SEQ ID NO: 7388; WAN024DBD; Start 875; Stop 899
gttcaggattgatgttaatgctatc

SEQ ID NO: 466762 - DNA, 25 bp, Artificial
  probe
  misc_feature (1)..(25): SEQ ID NO: 7388; WAN024DBD; Start 270; Stop 294
attcatatcacaagagcagtggatg

SEQ ID NO: 466763 - DNA, 25 bp, Artificial
  probe
  misc_feature (1)..(25): SEQ ID NO: 7388; WAN024DBD; Start 269; Stop 293
cattcatatcacaagagcagtggat

SEQ ID NO: 466764 - DNA, 25 bp, Artificial
  probe
  misc_feature (1)..(25): SEQ ID NO: 7388; WAN024DBD; Start 400; Stop 424
tcacaacttaattcattgctagaga

SEQ ID NO: 466765 - DNA, 25 bp, Artificial
  probe
  misc_feature (1)..(25): SEQ ID NO: 7388; WAN024DBD; Start 808; Stop 832
ggagcgatattaagtggtgttataa

SEQ ID NO: 466766 - DNA, 25 bp, Artificial
  probe
  misc_feature (1)..(25): SEQ ID NO: 7388; WAN024DBD; Start 267; Stop 291
ttcattcatatcacaagagcagtgg

SEQ ID NO: 466767 - DNA, 25 bp, Artificial
  probe
  misc_feature (1)..(25): SEQ ID NO: 7388; WAN024DBD; Start 885; Stop 909
gatgttaatgctatcaacgccactc

SEQ ID NO: 466768 - DNA, 25 bp, Artificial
  probe
  misc_feature (1)..(25): SEQ ID NO: 7388; WAN024DBD; Start 857; Stop 881
taatggtcttcttatcatgttcagg

SEQ ID NO: 466769 - DNA, 25 bp, Artificial
  probe
  misc_feature (1)..(25): SEQ ID NO: 7388; WAN024DBD; Start 862; Stop 886
gtcttcttatcatgttcaggattga

SEQ ID NO: 466770 - DNA, 25 bp, Artificial
  probe
  misc_feature (1)..(25): SEQ ID NO: 7388; WAN024DBD; Start 123; Stop 147
atcattggttgcagtatatcagtca

SEQ ID NO: 466771 - DNA, 25 bp, Artificial
  probe
  misc_feature (1)..(25): SEQ ID NO: 7388; WAN024DBD; Start 32; Stop 56
ttattgtaagtagaggcatatctcg

SEQ ID NO: 466772 - DNA, 25 bp, Artificial
  probe
  misc_feature (1)..(25): SEQ ID NO: 7388; WAN024DBD; Start 1038; Stop 1062
agtctttggaatcatctttacggta

SEQ ID NO: 466773 - DNA, 25 bp, Artificial
  probe
  misc_feature (1)..(25): SEQ ID NO: 7388; WAN024DBD; Start 794; Stop 818
ttggaggatttattggagcgatatt

SEQ ID NO: 466774 - DNA, 25 bp, Artificial
  probe
  misc_feature (1)..(25): SEQ ID NO: 7388; WAN024DBD; Start 793; Stop 817
attggaggatttattggagcgatat

SEQ ID NO: 466775 - DNA, 25 bp, Artificial
  probe
  misc_feature (1)..(25): SEQ ID NO: 7388; WAN024DBD; Start 890; Stop 914
taatgctatcaacgccactctattt

SEQ ID NO: 466776 - DNA, 25 bp, Artificial
  probe
  misc_feature (1)..(25): SEQ ID NO: 7388; WAN024DBD; Start 60; Stop 84
tggagatattatgtttgactttgcg

SEQ ID NO: 466777 - DNA, 25 bp, Artificial
  probe
  misc_feature (1)..(25): SEQ ID NO: 7389; WAN024DP5; Start 18; Stop 42
gttcacttactcgttcaattgtaaa

SEQ ID NO: 466778 - DNA, 25 bp, Artificial
  probe
  misc_feature (1)..(25): SEQ ID NO: 7389; WAN024DP5; Start 21; Stop 45
cacttactcgttcaattgtaaatca

SEQ ID NO: 466779 - DNA, 25 bp, Artificial
  probe
  misc_feature (1)..(25): SEQ ID NO: 7389; WAN024DP5; Start 20; Stop 44
tcacttactcgttcaattgtaaatc

SEQ ID NO: 466780 - DNA, 25 bp, Artificial
  probe
  misc_feature (1)..(25): SEQ ID NO: 7389; WAN024DP5; Start 22; Stop 46
acttactcgttcaattgtaaatcaa

SEQ ID NO: 466781 - DNA, 25 bp, Artificial
  probe
  misc_feature (1)..(25): SEQ ID NO: 7389; WAN024DP5; Start 19; Stop 43
ttcacttactcgttcaattgtaaat

SEQ ID NO: 466782 - DNA, 25 bp, Artificial
  probe
  misc_feature (1)..(25): SEQ ID NO: 7389; WAN024DP5; Start 23; Stop 47
cttactcgttcaattgtaaatcaat

SEQ ID NO: 466783 - DNA, 25 bp, Artificial
  probe
  misc_feature (1)..(25): SEQ ID NO: 7389; WAN024DP5; Start 26; Stop 50
actcgttcaattgtaaatcaatatt

SEQ ID NO: 466784 - DNA, 25 bp, Artificial
  probe
  misc_feature (1)..(25): SEQ ID NO: 7389; WAN024DP5; Start 58; Stop 82
aaaattgcgaaaacgcctttctttt

SEQ ID NO: 466785 - DNA, 25 bp, Artificial
  probe
  misc_feature (1)..(25): SEQ ID NO: 7389; WAN024DP5; Start 24; Stop 48
ttactcgttcaattgtaaatcaata

SEQ ID NO: 466786 - DNA, 25 bp, Artificial
  probe
  misc_feature (1)..(25): SEQ ID NO: 7390; WAN024BCL; Start 2; Stop 26
tgaaaatctcttcaaaccacgtcag

SEQ ID NO: 466787 - DNA, 25 bp, Artificial
  probe
  misc_feature (1)..(25): SEQ ID NO: 7391; WAN024BMR-5; Start 1262; Stop 1286
tggatattagcggtctaagttcaag

SEQ ID NO: 466788 - DNA, 25 bp, Artificial
  probe
  misc_feature (1)..(25): SEQ ID NO: 7391; WAN024BMR-5; Start 1261; Stop 1285
gtggatattagcggtctaagttcaa

SEQ ID NO: 466789 - DNA, 25 bp, Artificial
  probe
  misc_feature (1)..(25): SEQ ID NO: 7391; WAN024BMR-5; Start 960; Stop 984
agagtacatagaacacttaccatgc

SEQ ID NO: 466790 - DNA, 25 bp, Artificial
  probe
  misc_feature (1)..(25): SEQ ID NO: 7391; WAN024BMR-5; Start 1263; Stop 1287
ggatattagcggtctaagttcaagc

SEQ ID NO: 466791 - DNA, 25 bp, Artificial
  probe
  misc_feature (1)..(25): SEQ ID NO: 7391; WAN024BMR-5; Start 1264; Stop 1288
gatattagcggtctaagttcaagcg

SEQ ID NO: 466792 - DNA, 25 bp, Artificial
  probe
  misc_feature (1)..(25): SEQ ID NO: 7391; WAN024BMR-5; Start 1260; Stop 1284
ggtggatattagcggtctaagttca

SEQ ID NO: 466793 - DNA, 25 bp, Artificial
  probe
  misc_feature (1)..(25): SEQ ID NO: 7391; WAN024BMR-5; Start 1144; Stop 1168
gaatacagaaaggaatacgaaacgg

SEQ ID NO: 466794 - DNA, 25 bp, Artificial
  probe
  misc_feature (1)..(25): SEQ ID NO: 7391; WAN024BMR-5; Start 1143; Stop 1167
ggaatacagaaaggaatacgaaacg

SEQ ID NO: 466795 - DNA, 25 bp, Artificial
  probe
  misc_feature (1)..(25): SEQ ID NO: 7391; WAN024BMR-5; Start 1142; Stop 1166
cggaatacagaaaggaatacgaaac

SEQ ID NO: 466796 - DNA, 25 bp, Artificial
  probe
  misc_feature (1)..(25): SEQ ID NO: 7391; WAN024BMR-5; Start 1141; Stop 1165
acggaatacagaaaggaatacgaaa

SEQ ID NO: 466797 - DNA, 25 bp, Artificial
  probe
  misc_feature (1)..(25): SEQ ID NO: 7391; WAN024BMR-5; Start 1140; Stop 1164
aacggaatacagaaaggaatacgaa

SEQ ID NO: 466798 - DNA, 25 bp, Artificial
  probe
  misc_feature (1)..(25): SEQ ID NO: 7391; WAN024BMR-5; Start 1156; Stop 1180
gaatacgaaacggcagataaactaa

SEQ ID NO: 466799 - DNA, 25 bp, Artificial
  probe
  misc_feature (1)..(25): SEQ ID NO: 7391; WAN024BMR-5; Start 384; Stop 408
tgccgcctataaacttgaagataat

SEQ ID NO: 466800 - DNA, 25 bp, Artificial
  probe
  misc_feature (1)..(25): SEQ ID NO: 7391; WAN024BMR-5; Start 965; Stop 989
acatagaacacttaccatgcacata

SEQ ID NO: 466801 - DNA, 25 bp, Artificial
  probe
  misc_feature (1)..(25): SEQ ID NO: 7391; WAN024BMR-5; Start 964; Stop 988
tacatagaacacttaccatgcacat

SEQ ID NO: 466802 - DNA, 25 bp, Artificial
  probe
  misc_feature (1)..(25): SEQ ID NO: 7391; WAN024BMR-5; Start 383; Stop 407
ttgccgcctataaacttgaagataa

SEQ ID NO: 466803 - DNA, 25 bp, Artificial
  probe
  misc_feature (1)..(25): SEQ ID NO: 7391; WAN024BMR-5; Start 382; Stop 406
tttgccgcctataaacttgaagata

SEQ ID NO: 466804 - DNA, 25 bp, Artificial
  probe
  misc_feature (1)..(25): SEQ ID NO: 7391; WAN024BMR-5; Start 1139; Stop 1163
caacggaatacagaaaggaatacga

SEQ ID NO: 466805 - DNA, 25 bp, Artificial
  probe
  misc_feature (1)..(25): SEQ ID NO: 7391; WAN024BMR-5; Start 941; Stop 965
gtggaaattatggatgggtagagta

SEQ ID NO: 466806 - DNA, 25 bp, Artificial
  probe
  misc_feature (1)..(25): SEQ ID NO: 7391; WAN024BMR-5; Start 933; Stop 957
tttgaatcgtggaaattatggatgg

SEQ ID NO: 466807 - DNA, 25 bp, Artificial
  probe
  misc_feature (1)..(25): SEQ ID NO: 7391; WAN024BMR-5; Start 385; Stop 409
gccgcctataaacttgaagataatt

SEQ ID NO: 466808 - DNA, 25 bp, Artificial
  probe
  misc_feature (1)..(25): SEQ ID NO: 7391; WAN024BMR-5; Start 1155; Stop 1179
ggaatacgaaacggcagataaacta

SEQ ID NO: 466809 - DNA, 25 bp, Artificial
  probe
  misc_feature (1)..(25): SEQ ID NO: 7391; WAN024BMR-5; Start 963; Stop 987
gtacatagaacacttaccatgcaca

SEQ ID NO: 466810 - DNA, 25 bp, Artificial
  probe
  misc_feature (1)..(25): SEQ ID NO: 7391; WAN024BMR-5; Start 1157; Stop 1181
aatacgaaacggcagataaactaat

SEQ ID NO: 466811 - DNA, 25 bp, Artificial
  probe
  misc_feature (1)..(25): SEQ ID NO: 7391; WAN024BMR-5; Start 1152; Stop 1176
aaaggaatacgaaacggcagataaa

SEQ ID NO: 466812 - DNA, 25 bp, Artificial
  probe
  misc_feature (1)..(25): SEQ ID NO: 7391; WAN024BMR-5; Start 1138; Stop 1162
acaacggaatacagaaaggaatacg

SEQ ID NO: 466813 - DNA, 25 bp, Artificial
  probe
  misc_feature (1)..(25): SEQ ID NO: 7391; WAN024BMR-5; Start 966; Stop 990
catagaacacttaccatgcacatat

SEQ ID NO: 466814 - DNA, 25 bp, Artificial
  probe
  misc_feature (1)..(25): SEQ ID NO: 7391; WAN024BMR-5; Start 937; Stop 961
aatcgtggaaattatggatgggtag

SEQ ID NO: 466815 - DNA, 25 bp, Artificial
  probe
  misc_feature (1)..(25): SEQ ID NO: 7391; WAN024BMR-5; Start 936; Stop 960
gaatcgtggaaattatggatgggta

SEQ ID NO: 466816 - DNA, 25 bp, Artificial
  probe
  misc_feature (1)..(25): SEQ ID NO: 7391; WAN024BMR-5; Start 381; Stop 405
atttgccgcctataaacttgaagat

SEQ ID NO: 466817 - DNA, 25 bp, Artificial
  probe
  misc_feature (1)..(25): SEQ ID NO: 7391; WAN024BMR-5; Start 961; Stop 985
gagtacatagaacacttaccatgca

SEQ ID NO: 466818 - DNA, 25 bp, Artificial
  probe
  misc_feature (1)..(25): SEQ ID NO: 7391; WAN024BMR-5; Start 1350; Stop 1374
aattggttatgaacaatccgcattg

SEQ ID NO: 466819 - DNA, 25 bp, Artificial
  probe
  misc_feature (1)..(25): SEQ ID NO: 7391; WAN024BMR-5; Start 962; Stop 986
agtacatagaacacttaccatgcac

SEQ ID NO: 466820 - DNA, 25 bp, Artificial
  probe
  misc_feature (1)..(25): SEQ ID NO: 7392; WAN024BKZ; Start 62; Stop 86
ttggcttgaacacctttattgtatc

SEQ ID NO: 466821 - DNA, 25 bp, Artificial
  probe
  misc_feature (1)..(25): SEQ ID NO: 7392; WAN024BKZ; Start 60; Stop 84
aattggcttgaacacctttattgta

SEQ ID NO: 466822 - DNA, 25 bp, Artificial
  probe
  misc_feature (1)..(25): SEQ ID NO: 7392; WAN024BKZ; Start 61; Stop 85
attggcttgaacacctttattgtat

SEQ ID NO: 466823 - DNA, 25 bp, Artificial
  probe
  misc_feature (1)..(25): SEQ ID NO: 7392; WAN024BKZ; Start 63; Stop 87
tggcttgaacacctttattgtatcg

SEQ ID NO: 466824 - DNA, 25 bp, Artificial
  probe
  misc_feature (1)..(25): SEQ ID NO: 7392; WAN024BKZ; Start 64; Stop 88
ggcttgaacacctttattgtatcgc

SEQ ID NO: 466825 - DNA, 25 bp, Artificial
  probe
  misc_feature (1)..(25): SEQ ID NO: 7392; WAN024BKZ; Start 2; Stop 26
tgaaacaagaacaggacaaaagaac

SEQ ID NO: 466826 - DNA, 25 bp, Artificial
  probe
  misc_feature (1)..(25): SEQ ID NO: 7392; WAN024BKZ; Start 3; Stop 27
gaaacaagaacaggacaaaagaacc

SEQ ID NO: 466827 - DNA, 25 bp, Artificial
  probe
  misc_feature (1)..(25): SEQ ID NO: 7392; WAN024BKZ; Start 1; Stop 25
ttgaaacaagaacaggacaaaagaa

SEQ ID NO: 466828 - DNA, 25 bp, Artificial
  probe
  misc_feature (1)..(25): SEQ ID NO: 7392; WAN024BKZ; Start 55; Stop 79
tttacaattggcttgaacaccttta

SEQ ID NO: 466829 - DNA, 25 bp, Artificial
  probe
  misc_feature (1)..(25): SEQ ID NO: 7392; WAN024BKZ; Start 57; Stop 81
tacaattggcttgaacacctttatt

SEQ ID NO: 466830 - DNA, 25 bp, Artificial
  probe
  misc_feature (1)..(25): SEQ ID NO: 7392; WAN024BKZ; Start 56; Stop 80
ttacaattggcttgaacacctttat

SEQ ID NO: 466831 - DNA, 25 bp, Artificial
  probe
  misc_feature (1)..(25): SEQ ID NO: 7392; WAN024BKZ; Start 54; Stop 78
ctttacaattggcttgaacaccttt

SEQ ID NO: 466832 - DNA, 25 bp, Artificial
  probe
  misc_feature (1)..(25): SEQ ID NO: 7392; WAN024BKZ; Start 5; Stop 29
aacaagaacaggacaaaagaacctt

SEQ ID NO: 466833 - DNA, 25 bp, Artificial
  probe
  misc_feature (1)..(25): SEQ ID NO: 7392; WAN024BKZ; Start 4; Stop 28
aaacaagaacaggacaaaagaacct

SEQ ID NO: 466834 - DNA, 25 bp, Artificial
  probe
  misc_feature (1)..(25): SEQ ID NO: 7392; WAN024BKZ; Start 75; Stop 99
ctttattgtatcgcgtttggagttt

SEQ ID NO: 466835 - DNA, 25 bp, Artificial
  probe
  misc_feature (1)..(25): SEQ ID NO: 7392; WAN024BKZ; Start 48; Stop 72
ctttcgctttacaattggcttgaac

SEQ ID NO: 466836 - DNA, 25 bp, Artificial
  probe
  misc_feature (1)..(25): SEQ ID NO: 7392; WAN024BKZ; Start 42; Stop 66
tttctcctttcgctttacaattggc

SEQ ID NO: 466837 - DNA, 25 bp, Artificial
  probe
  misc_feature (1)..(25): SEQ ID NO: 7392; WAN024BKZ; Start 49; Stop 73
tttcgctttacaattggcttgaaca

SEQ ID NO: 466838 - DNA, 25 bp, Artificial
  probe
  misc_feature (1)..(25): SEQ ID NO: 7392; WAN024BKZ; Start 59; Stop 83
caattggcttgaacacctttattgt

SEQ ID NO: 466839 - DNA, 25 bp, Artificial
  probe
  misc_feature (1)..(25): SEQ ID NO: 7392; WAN024BKZ; Start 58; Stop 82
acaattggcttgaacacctttattg

SEQ ID NO: 466840 - DNA, 25 bp, Artificial
  probe
  misc_feature (1)..(25): SEQ ID NO: 7392; WAN024BKZ; Start 6; Stop 30
acaagaacaggacaaaagaaccttt

SEQ ID NO: 466841 - DNA, 25 bp, Artificial
  probe
  misc_feature (1)..(25): SEQ ID NO: 7392; WAN024BKZ; Start 74; Stop 98
cctttattgtatcgcgtttggagtt

SEQ ID NO: 466842 - DNA, 25 bp, Artificial
  probe
  misc_feature (1)..(25): SEQ ID NO: 7392; WAN024BKZ; Start 53; Stop 77
gctttacaattggcttgaacacctt

SEQ ID NO: 466843 - DNA, 25 bp, Artificial
  probe
  misc_feature (1)..(25): SEQ ID NO: 7392; WAN024BKZ; Start 47; Stop 71
cctttcgctttacaattggcttgaa

SEQ ID NO: 466844 - DNA, 25 bp, Artificial
  probe
  misc_feature (1)..(25): SEQ ID NO: 7392; WAN024BKZ; Start 69; Stop 93
gaacacctttattgtatcgcgtttg

SEQ ID NO: 466845 - DNA, 25 bp, Artificial
  probe
  misc_feature (1)..(25): SEQ ID NO: 7392; WAN024BKZ; Start 68; Stop 92
tgaacacctttattgtatcgcgttt

SEQ ID NO: 466846 - DNA, 25 bp, Artificial
  probe
  misc_feature (1)..(25): SEQ ID NO: 7392; WAN024BKZ; Start 67; Stop 91
ttgaacacctttattgtatcgcgtt

SEQ ID NO: 466847 - DNA, 25 bp, Artificial
  probe
  misc_feature (1)..(25): SEQ ID NO: 7392; WAN024BKZ; Start 44; Stop 68
tctcctttcgctttacaattggctt

SEQ ID NO: 466848 - DNA, 25 bp, Artificial
  probe
  misc_feature (1)..(25): SEQ ID NO: 7392; WAN024BKZ; Start 43; Stop 67
ttctcctttcgctttacaattggct

SEQ ID NO: 466849 - DNA, 25 bp, Artificial
  probe
  misc_feature (1)..(25): SEQ ID NO: 7392; WAN024BKZ; Start 50; Stop 74
ttcgctttacaattggcttgaacac

SEQ ID NO: 466850 - DNA, 25 bp, Artificial
  probe
  misc_feature (1)..(25): SEQ ID NO: 7392; WAN024BKZ; Start 72; Stop 96
cacctttattgtatcgcgtttggag

SEQ ID NO: 466851 - DNA, 25 bp, Artificial
  probe
  misc_feature (1)..(25): SEQ ID NO: 7392; WAN024BKZ; Start 66; Stop 90
cttgaacacctttattgtatcgcgt

SEQ ID NO: 466852 - DNA, 25 bp, Artificial
  probe
  misc_feature (1)..(25): SEQ ID NO: 7392; WAN024BKZ; Start 45; Stop 69
ctcctttcgctttacaattggcttg

SEQ ID NO: 466853 - DNA, 25 bp, Artificial
  probe
  misc_feature (1)..(25): SEQ ID NO: 7393; WAN024BTA; Start 362; Stop 386
tcacaggaggtaagttaggaagtaa

SEQ ID NO: 466854 - DNA, 25 bp, Artificial
  probe
  misc_feature (1)..(25): SEQ ID NO: 7393; WAN024BTA; Start 626; Stop 650
tcgtatgtaatgatggttggatgag

SEQ ID NO: 466855 - DNA, 25 bp, Artificial
  probe
  misc_feature (1)..(25): SEQ ID NO: 7393; WAN024BTA; Start 363; Stop 387
cacaggaggtaagttaggaagtaat

SEQ ID NO: 466856 - DNA, 25 bp, Artificial
  probe
  misc_feature (1)..(25): SEQ ID NO: 7393; WAN024BTA; Start 625; Stop 649
atcgtatgtaatgatggttggatga

SEQ ID NO: 466857 - DNA, 25 bp, Artificial
  probe
  misc_feature (1)..(25): SEQ ID NO: 7393; WAN024BTA; Start 627; Stop 651
cgtatgtaatgatggttggatgagt

SEQ ID NO: 466858 - DNA, 25 bp, Artificial
  probe
  misc_feature (1)..(25): SEQ ID NO: 7393; WAN024BTA; Start 624; Stop 648
aatcgtatgtaatgatggttggatg

SEQ ID NO: 466859 - DNA, 25 bp, Artificial
  probe
  misc_feature (1)..(25): SEQ ID NO: 7393; WAN024BTA; Start 361; Stop 385
ttcacaggaggtaagttaggaagta

SEQ ID NO: 466860 - DNA, 25 bp, Artificial
  probe
  misc_feature (1)..(25): SEQ ID NO: 7393; WAN024BTA; Start 628; Stop 652
gtatgtaatgatggttggatgagtt

SEQ ID NO: 466861 - DNA, 25 bp, Artificial
  probe
  misc_feature (1)..(25): SEQ ID NO: 7393; WAN024BTA; Start 142; Stop 166
agagaagatgaattacctgatgcta

SEQ ID NO: 466862 - DNA, 25 bp, Artificial
  probe
  misc_feature (1)..(25): SEQ ID NO: 7393; WAN024BTA; Start 141; Stop 165
tagagaagatgaattacctgatgct

SEQ ID NO: 466863 - DNA, 25 bp, Artificial
  probe
  misc_feature (1)..(25): SEQ ID NO: 7393; WAN024BTA; Start 623; Stop 647
caatcgtatgtaatgatggttggat

SEQ ID NO: 466864 - DNA, 25 bp, Artificial
  probe
  misc_feature (1)..(25): SEQ ID NO: 7393; WAN024BTA; Start 807; Stop 831
ggattgcttagtaactgatagtgga

SEQ ID NO: 466865 - DNA, 25 bp, Artificial
  probe
  misc_feature (1)..(25): SEQ ID NO: 7393; WAN024BTA; Start 369; Stop 393
aggtaagttaggaagtaatagtggt

SEQ ID NO: 466866 - DNA, 25 bp, Artificial
  probe
  misc_feature (1)..(25): SEQ ID NO: 7393; WAN024BTA; Start 370; Stop 394
ggtaagttaggaagtaatagtggtc

SEQ ID NO: 466867 - DNA, 25 bp, Artificial
  probe
  misc_feature (1)..(25): SEQ ID NO: 7393; WAN024BTA; Start 140; Stop 164
ttagagaagatgaattacctgatgc

SEQ ID NO: 466868 - DNA, 25 bp, Artificial
  probe
  misc_feature (1)..(25): SEQ ID NO: 7393; WAN024BTA; Start 622; Stop 646
acaatcgtatgtaatgatggttgga

SEQ ID NO: 466869 - DNA, 25 bp, Artificial
  probe
  misc_feature (1)..(25): SEQ ID NO: 7393; WAN024BTA; Start 364; Stop 388
acaggaggtaagttaggaagtaata

SEQ ID NO: 466870 - DNA, 25 bp, Artificial
  probe
  misc_feature (1)..(25): SEQ ID NO: 7393; WAN024BTA; Start 143; Stop 167
gagaagatgaattacctgatgctat

SEQ ID NO: 466871 - DNA, 25 bp, Artificial
  probe
  misc_feature (1)..(25): SEQ ID NO: 7393; WAN024BTA; Start 368; Stop 392
gaggtaagttaggaagtaatagtgg

SEQ ID NO: 466872 - DNA, 25 bp, Artificial
  probe
  misc_feature (1)..(25): SEQ ID NO: 7393; WAN024BTA; Start 367; Stop 391
ggaggtaagttaggaagtaatagtg

SEQ ID NO: 466873 - DNA, 25 bp, Artificial
  probe
  misc_feature (1)..(25): SEQ ID NO: 7393; WAN024BTA; Start 373; Stop 397
aagttaggaagtaatagtggtcaac

SEQ ID NO: 466874 - DNA, 25 bp, Artificial
  probe
  misc_feature (1)..(25): SEQ ID NO: 7393; WAN024BTA; Start 808; Stop 832
gattgcttagtaactgatagtggaa

SEQ ID NO: 466875 - DNA, 25 bp, Artificial
  probe
  misc_feature (1)..(25): SEQ ID NO: 7393; WAN024BTA; Start 366; Stop 390
aggaggtaagttaggaagtaatagt

SEQ ID NO: 466876 - DNA, 25 bp, Artificial
  probe
  misc_feature (1)..(25): SEQ ID NO: 7393; WAN024BTA; Start 365; Stop 389
caggaggtaagttaggaagtaatag

SEQ ID NO: 466877 - DNA, 25 bp, Artificial
  probe
  misc_feature (1)..(25): SEQ ID NO: 7393; WAN024BTA; Start 371; Stop 395
gtaagttaggaagtaatagtggtca

SEQ ID NO: 466878 - DNA, 25 bp, Artificial
  probe
  misc_feature (1)..(25): SEQ ID NO: 7393; WAN024BTA; Start 25; Stop 49
atagggtatggtataatgactcggg

SEQ ID NO: 466879 - DNA, 25 bp, Artificial
  probe
  misc_feature (1)..(25): SEQ ID NO: 7393; WAN024BTA; Start 636; Stop 660
tgatggttggatgagtttagtatgc

SEQ ID NO: 466880 - DNA, 25 bp, Artificial
  probe
  misc_feature (1)..(25): SEQ ID NO: 7393; WAN024BTA; Start 359; Stop 383
ctttcacaggaggtaagttaggaag

SEQ ID NO: 466881 - DNA, 25 bp, Artificial
  probe
  misc_feature (1)..(25): SEQ ID NO: 7393; WAN024BTA; Start 144; Stop 168
agaagatgaattacctgatgctata

SEQ ID NO: 466882 - DNA, 25 bp, Artificial
  probe
  misc_feature (1)..(25): SEQ ID NO: 7393; WAN024BTA; Start 632; Stop 656
gtaatgatggttggatgagtttagt

SEQ ID NO: 466883 - DNA, 25 bp, Artificial
  probe
  misc_feature (1)..(25): SEQ ID NO: 7393; WAN024BTA; Start 631; Stop 655
tgtaatgatggttggatgagtttag

SEQ ID NO: 466884 - DNA, 25 bp, Artificial
  probe
  misc_feature (1)..(25): SEQ ID NO: 7393; WAN024BTA; Start 372; Stop 396
taagttaggaagtaatagtggtcaa

SEQ ID NO: 466885 - DNA, 25 bp, Artificial
  probe
  misc_feature (1)..(25): SEQ ID NO: 7393; WAN024BTA; Start 360; Stop 384
tttcacaggaggtaagttaggaagt

SEQ ID NO: 466886 - DNA, 25 bp, Artificial
  probe
  misc_feature (1)..(25): SEQ ID NO: 7394; WAN024B54; Start 6; Stop 30
acgactggtaatgcctactagaatt

SEQ ID NO: 466887 - DNA, 25 bp, Artificial
  probe
  misc_feature (1)..(25): SEQ ID NO: 7394; WAN024B54; Start 5; Stop 29
aacgactggtaatgcctactagaat

SEQ ID NO: 466888 - DNA, 25 bp, Artificial
  probe
  misc_feature (1)..(25): SEQ ID NO: 7394; WAN024B54; Start 1; Stop 25
ttgaaacgactggtaatgcctacta

SEQ ID NO: 466889 - DNA, 25 bp, Artificial
  probe
  misc_feature (1)..(25): SEQ ID NO: 7394; WAN024B54; Start 4; Stop 28
aaacgactggtaatgcctactagaa

SEQ ID NO: 466890 - DNA, 25 bp, Artificial
  probe
  misc_feature (1)..(25): SEQ ID NO: 7394; WAN024B54; Start 7; Stop 31
cgactggtaatgcctactagaattc

SEQ ID NO: 466891 - DNA, 25 bp, Artificial
  probe
  misc_feature (1)..(25): SEQ ID NO: 7394; WAN024B54; Start 3; Stop 27
gaaacgactggtaatgcctactaga

SEQ ID NO: 466892 - DNA, 25 bp, Artificial
  probe
  misc_feature (1)..(25): SEQ ID NO: 7394; WAN024B54; Start 2; Stop 26
tgaaacgactggtaatgcctactag

SEQ ID NO: 466893 - DNA, 25 bp, Artificial
  probe
  misc_feature (1)..(25): SEQ ID NO: 7394; WAN024B54; Start 47; Stop 71
gattcaagtggctatcactgttcaa

SEQ ID NO: 466894 - DNA, 25 bp, Artificial
  probe
  misc_feature (1)..(25): SEQ ID NO: 7394; WAN024B54; Start 33; Stop 57
ccttagaaagcgtcgattcaagtgg

SEQ ID NO: 466895 - DNA, 25 bp, Artificial
  probe
  misc_feature (1)..(25): SEQ ID NO: 7394; WAN024B54; Start 48; Stop 72
attcaagtggctatcactgttcaaa

SEQ ID NO: 466896 - DNA, 25 bp, Artificial
  probe
  misc_feature (1)..(25): SEQ ID NO: 7394; WAN024B54; Start 46; Stop 70
cgattcaagtggctatcactgttca

SEQ ID NO: 466897 - DNA, 25 bp, Artificial
  probe
  misc_feature (1)..(25): SEQ ID NO: 7394; WAN024B54; Start 45; Stop 69
tcgattcaagtggctatcactgttc

SEQ ID NO: 466898 - DNA, 25 bp, Artificial
  probe
  misc_feature (1)..(25): SEQ ID NO: 7394; WAN024B54; Start 44; Stop 68
gtcgattcaagtggctatcactgtt

SEQ ID NO: 466899 - DNA, 25 bp, Artificial
  probe
  misc_feature (1)..(25): SEQ ID NO: 7394; WAN024B54; Start 34; Stop 58
cttagaaagcgtcgattcaagtggc

SEQ ID NO: 466900 - DNA, 25 bp, Artificial
  probe
  misc_feature (1)..(25): SEQ ID NO: 7394; WAN024B54; Start 36; Stop 60
tagaaagcgtcgattcaagtggcta

SEQ ID NO: 466901 - DNA, 25 bp, Artificial
  probe
  misc_feature (1)..(25): SEQ ID NO: 7394; WAN024B54; Start 38; Stop 62
gaaagcgtcgattcaagtggctatc

SEQ ID NO: 466902 - DNA, 25 bp, Artificial
  probe
  misc_feature (1)..(25): SEQ ID NO: 7394; WAN024B54; Start 49; Stop 73
ttcaagtggctatcactgttcaaaa

SEQ ID NO: 466903 - DNA, 25 bp, Artificial
  probe
  misc_feature (1)..(25): SEQ ID NO: 7394; WAN024B54; Start 37; Stop 61
agaaagcgtcgattcaagtggctat

SEQ ID NO: 466904 - DNA, 25 bp, Artificial
  probe
  misc_feature (1)..(25): SEQ ID NO: 7394; WAN024B54; Start 35; Stop 59
ttagaaagcgtcgattcaagtggct

SEQ ID NO: 466905 - DNA, 25 bp, Artificial
  probe
  misc_feature (1)..(25): SEQ ID NO: 7394; WAN024B54; Start 39; Stop 63
aaagcgtcgattcaagtggctatca

SEQ ID NO: 466906 - DNA, 25 bp, Artificial
  probe
  misc_feature (1)..(25): SEQ ID NO: 7394; WAN024B54; Start 43; Stop 67
cgtcgattcaagtggctatcactgt

SEQ ID NO: 466907 - DNA, 25 bp, Artificial
  probe
  misc_feature (1)..(25): SEQ ID NO: 7395; WAN024BXT; Start 37; Stop 61
caaaacctcgttctccttaaaatga

SEQ ID NO: 466908 - DNA, 25 bp, Artificial
  probe
  misc_feature (1)..(25): SEQ ID NO: 7395; WAN024BXT; Start 36; Stop 60
ccaaaacctcgttctccttaaaatg

SEQ ID NO: 466909 - DNA, 25 bp, Artificial
  probe
  misc_feature (1)..(25): SEQ ID NO: 7395; WAN024BXT; Start 38; Stop 62
aaaacctcgttctccttaaaatgat

SEQ ID NO: 466910 - DNA, 25 bp, Artificial
  probe
  misc_feature (1)..(25): SEQ ID NO: 7395; WAN024BXT; Start 41; Stop 65
acctcgttctccttaaaatgataaa

SEQ ID NO: 466911 - DNA, 25 bp, Artificial
  probe
  misc_feature (1)..(25): SEQ ID NO: 7395; WAN024BXT; Start 40; Stop 64
aacctcgttctccttaaaatgataa

SEQ ID NO: 466912 - DNA, 25 bp, Artificial
  probe
  misc_feature (1)..(25): SEQ ID NO: 7395; WAN024BXT; Start 39; Stop 63
aaacctcgttctccttaaaatgata

SEQ ID NO: 466913 - DNA, 25 bp, Artificial
  probe
  misc_feature (1)..(25): SEQ ID NO: 7395; WAN024BXT; Start 35; Stop 59
gccaaaacctcgttctccttaaaat

SEQ ID NO: 466914 - DNA, 25 bp, Artificial
  probe
  misc_feature (1)..(25): SEQ ID NO: 7395; WAN024BXT; Start 42; Stop 66
cctcgttctccttaaaatgataaaa

SEQ ID NO: 466915 - DNA, 25 bp, Artificial
  probe
  misc_feature (1)..(25): SEQ ID NO: 7395; WAN024BXT; Start 34; Stop 58
agccaaaacctcgttctccttaaaa

SEQ ID NO: 466916 - DNA, 25 bp, Artificial
  probe
  misc_feature (1)..(25): SEQ ID NO: 7395; WAN024BXT; Start 43; Stop 67
ctcgttctccttaaaatgataaaac

SEQ ID NO: 466917 - DNA, 25 bp, Artificial
  probe
  misc_feature (1)..(25): SEQ ID NO: 7395; WAN024BXT; Start 33; Stop 57
gagccaaaacctcgttctccttaaa

SEQ ID NO: 466918 - DNA, 25 bp, Artificial
  probe
  misc_feature (1)..(25): SEQ ID NO: 7395; WAN024BXT; Start 46; Stop 70
gttctccttaaaatgataaaacgtt

SEQ ID NO: 466919 - DNA, 25 bp, Artificial
  probe
  misc_feature (1)..(25): SEQ ID NO: 7395; WAN024BXT; Start 44; Stop 68
tcgttctccttaaaatgataaaacg

SEQ ID NO: 466920 - DNA, 25 bp, Artificial
  probe
  misc_feature (1)..(25): SEQ ID NO: 7395; WAN024BXT; Start 45; Stop 69
cgttctccttaaaatgataaaacgt

SEQ ID NO: 466921 - DNA, 25 bp, Artificial
  probe
  misc_feature (1)..(25): SEQ ID NO: 7395; WAN024BXT; Start 49; Stop 73
ctccttaaaatgataaaacgttact

SEQ ID NO: 466922 - DNA, 25 bp, Artificial
  probe
  misc_feature (1)..(25): SEQ ID NO: 7395; WAN024BXT; Start 48; Stop 72
tctccttaaaatgataaaacgttac

SEQ ID NO: 466923 - DNA, 25 bp, Artificial
  probe
  misc_feature (1)..(25): SEQ ID NO: 7395; WAN024BXT; Start 47; Stop 71
ttctccttaaaatgataaaacgtta

SEQ ID NO: 466924 - DNA, 25 bp, Artificial
  probe
  misc_feature (1)..(25): SEQ ID NO: 7395; WAN024BXT; Start 57; Stop 81
aatgataaaacgttactatcaaagt

SEQ ID NO: 466925 - DNA, 25 bp, Artificial
  probe
  misc_feature (1)..(25): SEQ ID NO: 7396; WAN024CWU; Start 16; Stop 40
tctatattcgcattgctagttctaa

SEQ ID NO: 466926 - DNA, 25 bp, Artificial
  probe
  misc_feature (1)..(25): SEQ ID NO: 7396; WAN024CWU; Start 15; Stop 39
ttctatattcgcattgctagttcta

SEQ ID NO: 466927 - DNA, 25 bp, Artificial
  probe
  misc_feature (1)..(25): SEQ ID NO: 7396; WAN024CWU; Start 105; Stop 129
aataaatcctactgccacctgtaaa

SEQ ID NO: 466928 - DNA, 25 bp, Artificial
  probe
  misc_feature (1)..(25): SEQ ID NO: 7396; WAN024CWU; Start 104; Stop 128
aaataaatcctactgccacctgtaa

SEQ ID NO: 466929 - DNA, 25 bp, Artificial
  probe
  misc_feature (1)..(25): SEQ ID NO: 7396; WAN024CWU; Start 14; Stop 38
tttctatattcgcattgctagttct

SEQ ID NO: 466930 - DNA, 25 bp, Artificial
  probe
  misc_feature (1)..(25): SEQ ID NO: 7396; WAN024CWU; Start 19; Stop 43
atattcgcattgctagttctaaatt

SEQ ID NO: 466931 - DNA, 25 bp, Artificial
  probe
  misc_feature (1)..(25): SEQ ID NO: 7396; WAN024CWU; Start 17; Stop 41
ctatattcgcattgctagttctaaa

SEQ ID NO: 466932 - DNA, 25 bp, Artificial
  probe
  misc_feature (1)..(25): SEQ ID NO: 7396; WAN024CWU; Start 102; Stop 126
taaaataaatcctactgccacctgt

SEQ ID NO: 466933 - DNA, 25 bp, Artificial
  probe
  misc_feature (1)..(25): SEQ ID NO: 7396; WAN024CWU; Start 106; Stop 130
ataaatcctactgccacctgtaaaa

SEQ ID NO: 466934 - DNA, 25 bp, Artificial
  probe
  misc_feature (1)..(25): SEQ ID NO: 7396; WAN024CWU; Start 103; Stop 127
aaaataaatcctactgccacctgta

SEQ ID NO: 466935 - DNA, 25 bp, Artificial
  probe
  misc_feature (1)..(25): SEQ ID NO: 7396; WAN024CWU; Start 101; Stop 125
ataaaataaatcctactgccacctg

SEQ ID NO: 466936 - DNA, 25 bp, Artificial
  probe
  misc_feature (1)..(25): SEQ ID NO: 7396; WAN024CWU; Start 199; Stop 223
acaatcttatcatattctaccactt

SEQ ID NO: 466937 - DNA, 25 bp, Artificial
  probe
  misc_feature (1)..(25): SEQ ID NO: 7396; WAN024CWU; Start 97; Stop 121
accaataaaataaatcctactgcca

SEQ ID NO: 466938 - DNA, 25 bp, Artificial
  probe
  misc_feature (1)..(25): SEQ ID NO: 7396; WAN024CWU; Start 20; Stop 44
tattcgcattgctagttctaaattt

SEQ ID NO: 466939 - DNA, 25 bp, Artificial
  probe
  misc_feature (1)..(25): SEQ ID NO: 7396; WAN024CWU; Start 100; Stop 124
aataaaataaatcctactgccacct

SEQ ID NO: 466940 - DNA, 25 bp, Artificial
  probe
  misc_feature (1)..(25): SEQ ID NO: 7396; WAN024CWU; Start 99; Stop 123
caataaaataaatcctactgccacc

SEQ ID NO: 466941 - DNA, 25 bp, Artificial
  probe
  misc_feature (1)..(25): SEQ ID NO: 7396; WAN024CWU; Start 98; Stop 122
ccaataaaataaatcctactgccac

SEQ ID NO: 466942 - DNA, 25 bp, Artificial
  probe
  misc_feature (1)..(25): SEQ ID NO: 7396; WAN024CWU; Start 18; Stop 42
tatattcgcattgctagttctaaat

SEQ ID NO: 466943 - DNA, 25 bp, Artificial
  probe
  misc_feature (1)..(25): SEQ ID NO: 7396; WAN024CWU; Start 200; Stop 224
caatcttatcatattctaccacttg

SEQ ID NO: 466944 - DNA, 25 bp, Artificial
  probe
  misc_feature (1)..(25): SEQ ID NO: 7396; WAN024CWU; Start 11; Stop 35
agttttctatattcgcattgctagt

SEQ ID NO: 466945 - DNA, 25 bp, Artificial
  probe
  misc_feature (1)..(25): SEQ ID NO: 7396; WAN024CWU; Start 48; Stop 72
caacaacaatataaatagagcaagt

SEQ ID NO: 466946 - DNA, 25 bp, Artificial
  probe
  misc_feature (1)..(25): SEQ ID NO: 7396; WAN024CWU; Start 47; Stop 71
acaacaacaatataaatagagcaag

SEQ ID NO: 466947 - DNA, 25 bp, Artificial
  probe
  misc_feature (1)..(25): SEQ ID NO: 7396; WAN024CWU; Start 201; Stop 225
aatcttatcatattctaccacttga

SEQ ID NO: 466948 - DNA, 25 bp, Artificial
  probe
  misc_feature (1)..(25): SEQ ID NO: 7396; WAN024CWU; Start 96; Stop 120
aaccaataaaataaatcctactgcc

SEQ ID NO: 466949 - DNA, 25 bp, Artificial
  probe
  misc_feature (1)..(25): SEQ ID NO: 7396; WAN024CWU; Start 12; Stop 36
gttttctatattcgcattgctagtt

SEQ ID NO: 466950 - DNA, 25 bp, Artificial
  probe
  misc_feature (1)..(25): SEQ ID NO: 7396; WAN024CWU; Start 13; Stop 37
ttttctatattcgcattgctagttc

SEQ ID NO: 466951 - DNA, 25 bp, Artificial
  probe
  misc_feature (1)..(25): SEQ ID NO: 7396; WAN024CWU; Start 10; Stop 34
aagttttctatattcgcattgctag

SEQ ID NO: 466952 - DNA, 25 bp, Artificial
  probe
  misc_feature (1)..(25): SEQ ID NO: 7396; WAN024CWU; Start 9; Stop 33
gaagttttctatattcgcattgcta

SEQ ID NO: 466953 - DNA, 25 bp, Artificial
  probe
  misc_feature (1)..(25): SEQ ID NO: 7396; WAN024CWU; Start 46; Stop 70
aacaacaacaatataaatagagcaa

SEQ ID NO: 466954 - DNA, 25 bp, Artificial
  probe
  misc_feature (1)..(25): SEQ ID NO: 7396; WAN024CWU; Start 21; Stop 45
attcgcattgctagttctaaatttt

SEQ ID NO: 466955 - DNA, 25 bp, Artificial
  probe
  misc_feature (1)..(25): SEQ ID NO: 7396; WAN024CWU; Start 8; Stop 32
agaagttttctatattcgcattgct

SEQ ID NO: 466956 - DNA, 25 bp, Artificial
  probe
  misc_feature (1)..(25): SEQ ID NO: 7396; WAN024CWU; Start 7; Stop 31
gagaagttttctatattcgcattgc

SEQ ID NO: 466957 - DNA, 25 bp, Artificial
  probe
  misc_feature (1)..(25): SEQ ID NO: 7396; WAN024CWU; Start 23; Stop 47
tcgcattgctagttctaaattttaa

SEQ ID NO: 466958 - DNA, 25 bp, Artificial
  probe
  misc_feature (1)..(25): SEQ ID NO: 7397; WAN024BWC; Start 88; Stop 112
ttcagttcaggcgatattagacaag

SEQ ID NO: 466959 - DNA, 25 bp, Artificial
  probe
  misc_feature (1)..(25): SEQ ID NO: 7397; WAN024BWC; Start 52; Stop 76
caagatgctactaattgcctgaatc

SEQ ID NO: 466960 - DNA, 25 bp, Artificial
  probe
  misc_feature (1)..(25): SEQ ID NO: 7397; WAN024BWC; Start 89; Stop 113
tcagttcaggcgatattagacaagt

SEQ ID NO: 466961 - DNA, 25 bp, Artificial
  probe
  misc_feature (1)..(25): SEQ ID NO: 7397; WAN024BWC; Start 92; Stop 116
gttcaggcgatattagacaagtcag

SEQ ID NO: 466962 - DNA, 25 bp, Artificial
  probe
  misc_feature (1)..(25): SEQ ID NO: 7397; WAN024BWC; Start 90; Stop 114
cagttcaggcgatattagacaagtc

SEQ ID NO: 466963 - DNA, 25 bp, Artificial
  probe
  misc_feature (1)..(25): SEQ ID NO: 7397; WAN024BWC; Start 51; Stop 75
tcaagatgctactaattgcctgaat

SEQ ID NO: 466964 - DNA, 25 bp, Artificial
  probe
  misc_feature (1)..(25): SEQ ID NO: 7397; WAN024BWC; Start 91; Stop 115
agttcaggcgatattagacaagtca

SEQ ID NO: 466965 - DNA, 25 bp, Artificial
  probe
  misc_feature (1)..(25): SEQ ID NO: 7397; WAN024BWC; Start 50; Stop 74
ctcaagatgctactaattgcctgaa

SEQ ID NO: 466966 - DNA, 25 bp, Artificial
  probe
  misc_feature (1)..(25): SEQ ID NO: 7397; WAN024BWC; Start 48; Stop 72
ctctcaagatgctactaattgcctg

SEQ ID NO: 466967 - DNA, 25 bp, Artificial
  probe
  misc_feature (1)..(25): SEQ ID NO: 7397; WAN024BWC; Start 47; Stop 71
tctctcaagatgctactaattgcct

SEQ ID NO: 466968 - DNA, 25 bp, Artificial
  probe
  misc_feature (1)..(25): SEQ ID NO: 7397; WAN024BWC; Start 49; Stop 73
tctcaagatgctactaattgcctga

SEQ ID NO: 466969 - DNA, 25 bp, Artificial
  probe
  misc_feature (1)..(25): SEQ ID NO: 7397; WAN024BWC; Start 86; Stop 110
atttcagttcaggcgatattagaca

SEQ ID NO: 466970 - DNA, 25 bp, Artificial
  probe
  misc_feature (1)..(25): SEQ ID NO: 7397; WAN024BWC; Start 87; Stop 111
tttcagttcaggcgatattagacaa

SEQ ID NO: 466971 - DNA, 25 bp, Artificial
  probe
  misc_feature (1)..(25): SEQ ID NO: 7397; WAN024BWC; Start 73; Stop 97
aatctttcccgttatttcagttcag

SEQ ID NO: 466972 - DNA, 25 bp, Artificial
  probe
  misc_feature (1)..(25): SEQ ID NO: 7397; WAN024BWC; Start 93; Stop 117
ttcaggcgatattagacaagtcagc

SEQ ID NO: 466973 - DNA, 25 bp, Artificial
  probe
  misc_feature (1)..(25): SEQ ID NO: 7397; WAN024BWC; Start 82; Stop 106
cgttatttcagttcaggcgatatta

SEQ ID NO: 466974 - DNA, 25 bp, Artificial
  probe
  misc_feature (1)..(25): SEQ ID NO: 7397; WAN024BWC; Start 74; Stop 98
atctttcccgttatttcagttcagg

SEQ ID NO: 466975 - DNA, 25 bp, Artificial
  probe
  misc_feature (1)..(25): SEQ ID NO: 7397; WAN024BWC; Start 72; Stop 96
gaatctttcccgttatttcagttca

SEQ ID NO: 466976 - DNA, 25 bp, Artificial
  probe
  misc_feature (1)..(25): SEQ ID NO: 7397; WAN024BWC; Start 54; Stop 78
agatgctactaattgcctgaatctt

SEQ ID NO: 466977 - DNA, 25 bp, Artificial
  probe
  misc_feature (1)..(25): SEQ ID NO: 7397; WAN024BWC; Start 53; Stop 77
aagatgctactaattgcctgaatct

SEQ ID NO: 466978 - DNA, 25 bp, Artificial
  probe
  misc_feature (1)..(25): SEQ ID NO: 7397; WAN024BWC; Start 40; Stop 64
cttccaatctctcaagatgctacta

SEQ ID NO: 466979 - DNA, 25 bp, Artificial
  probe
  misc_feature (1)..(25): SEQ ID NO: 7397; WAN024BWC; Start 55; Stop 79
gatgctactaattgcctgaatcttt

SEQ ID NO: 466980 - DNA, 25 bp, Artificial
  probe
  misc_feature (1)..(25): SEQ ID NO: 7397; WAN024BWC; Start 46; Stop 70
atctctcaagatgctactaattgcc

SEQ ID NO: 466981 - DNA, 25 bp, Artificial
  probe
  misc_feature (1)..(25): SEQ ID NO: 7397; WAN024BWC; Start 63; Stop 87
taattgcctgaatctttcccgttat

SEQ ID NO: 466982 - DNA, 25 bp, Artificial
  probe
  misc_feature (1)..(25): SEQ ID NO: 7397; WAN024BWC; Start 56; Stop 80
atgctactaattgcctgaatctttc

SEQ ID NO: 466983 - DNA, 25 bp, Artificial
  probe
  misc_feature (1)..(25): SEQ ID NO: 7397; WAN024BWC; Start 41; Stop 65
ttccaatctctcaagatgctactaa

SEQ ID NO: 466984 - DNA, 25 bp, Artificial
  probe
  misc_feature (1)..(25): SEQ ID NO: 7397; WAN024BWC; Start 45; Stop 69
aatctctcaagatgctactaattgc

SEQ ID NO: 466985 - DNA, 25 bp, Artificial
  probe
  misc_feature (1)..(25): SEQ ID NO: 7397; WAN024BWC; Start 42; Stop 66
tccaatctctcaagatgctactaat

SEQ ID NO: 466986 - DNA, 25 bp, Artificial
  probe
  misc_feature (1)..(25): SEQ ID NO: 7397; WAN024BWC; Start 65; Stop 89
attgcctgaatctttcccgttattt

SEQ ID NO: 466987 - DNA, 25 bp, Artificial
  probe
  misc_feature (1)..(25): SEQ ID NO: 7397; WAN024BWC; Start 85; Stop 109
tatttcagttcaggcgatattagac

SEQ ID NO: 466988 - DNA, 25 bp, Artificial
  probe
  misc_feature (1)..(25): SEQ ID NO: 7397; WAN024BWC; Start 81; Stop 105
ccgttatttcagttcaggcgatatt

SEQ ID NO: 466989 - DNA, 25 bp, Artificial
  probe
  misc_feature (1)..(25): SEQ ID NO: 7397; WAN024BWC; Start 62; Stop 86
ctaattgcctgaatctttcccgtta

SEQ ID NO: 466990 - DNA, 25 bp, Artificial
  probe
  misc_feature (1)..(25): SEQ ID NO: 7397; WAN024BWC; Start 57; Stop 81
tgctactaattgcctgaatctttcc

SEQ ID NO: 466991 - DNA, 25 bp, Artificial
  probe
  misc_feature (1)..(25): SEQ ID NO: 7398; WAN024DCV; Start 3; Stop 27
gaaagatggggaagttcacagaaaa

SEQ ID NO: 466992 - DNA, 25 bp, Artificial
  probe
  misc_feature (1)..(25): SEQ ID NO: 7398; WAN024DCV; Start 2; Stop 26
tgaaagatggggaagttcacagaaa

SEQ ID NO: 466993 - DNA, 25 bp, Artificial
  probe
  misc_feature (1)..(25): SEQ ID NO: 7398; WAN024DCV; Start 1; Stop 25
ttgaaagatggggaagttcacagaa

SEQ ID NO: 466994 - DNA, 25 bp, Artificial
  probe
  misc_feature (1)..(25): SEQ ID NO: 7399; WAN024EUP; Start 124; Stop 148
tctgccttcaagaacagtgataata

SEQ ID NO: 466995 - DNA, 25 bp, Artificial
  probe
  misc_feature (1)..(25): SEQ ID NO: 7399; WAN024EUP; Start 125; Stop 149
ctgccttcaagaacagtgataatat

SEQ ID NO: 466996 - DNA, 25 bp, Artificial
  probe
  misc_feature (1)..(25): SEQ ID NO: 7399; WAN024EUP; Start 126; Stop 150
tgccttcaagaacagtgataatatt

SEQ ID NO: 466997 - DNA, 25 bp, Artificial
  probe
  misc_feature (1)..(25): SEQ ID NO: 7399; WAN024EUP; Start 199; Stop 223
ggcatactcatcccaagacataatc

SEQ ID NO: 466998 - DNA, 25 bp, Artificial
  probe
  misc_feature (1)..(25): SEQ ID NO: 7399; WAN024EUP; Start 198; Stop 222
aggcatactcatcccaagacataat

SEQ ID NO: 466999 - DNA, 25 bp, Artificial
  probe
  misc_feature (1)..(25): SEQ ID NO: 7399; WAN024EUP; Start 197; Stop 221
aaggcatactcatcccaagacataa

SEQ ID NO: 467000 - DNA, 25 bp, Artificial
  probe
  misc_feature (1)..(25): SEQ ID NO: 7399; WAN024EUP; Start 123; Stop 147
ttctgccttcaagaacagtgataat

SEQ ID NO: 467001 - DNA, 25 bp, Artificial
  probe
  misc_feature (1)..(25): SEQ ID NO: 7399; WAN024EUP; Start 215; Stop 239
gacataatctttggaagccgagaaa

SEQ ID NO: 467002 - DNA, 25 bp, Artificial
  probe
  misc_feature (1)..(25): SEQ ID NO: 7399; WAN024EUP; Start 196; Stop 220
gaaggcatactcatcccaagacata

SEQ ID NO: 467003 - DNA, 25 bp, Artificial
  probe
  misc_feature (1)..(25): SEQ ID NO: 7399; WAN024EUP; Start 241; Stop 265
atcatgctcaaagtgaaagtcattg

SEQ ID NO: 467004 - DNA, 25 bp, Artificial
  probe
  misc_feature (1)..(25): SEQ ID NO: 7399; WAN024EUP; Start 240; Stop 264
aatcatgctcaaagtgaaagtcatt

SEQ ID NO: 467005 - DNA, 25 bp, Artificial
  probe
  misc_feature (1)..(25): SEQ ID NO: 7399; WAN024EUP; Start 239; Stop 263
aaatcatgctcaaagtgaaagtcat

SEQ ID NO: 467006 - DNA, 25 bp, Artificial
  probe
  misc_feature (1)..(25): SEQ ID NO: 7399; WAN024EUP; Start 214; Stop 238
agacataatctttggaagccgagaa

SEQ ID NO: 467007 - DNA, 25 bp, Artificial
  probe
  misc_feature (1)..(25): SEQ ID NO: 7399; WAN024EUP; Start 191; Stop 215
ttagtgaaggcatactcatcccaag

SEQ ID NO: 467008 - DNA, 25 bp, Artificial
  probe
  misc_feature (1)..(25): SEQ ID NO: 7399; WAN024EUP; Start 190; Stop 214
cttagtgaaggcatactcatcccaa

SEQ ID NO: 467009 - DNA, 25 bp, Artificial
  probe
  misc_feature (1)..(25): SEQ ID NO: 7399; WAN024EUP; Start 30; Stop 54
agtaaggactaaacatatccatcgt

SEQ ID NO: 467010 - DNA, 25 bp, Artificial
  probe
  misc_feature (1)..(25): SEQ ID NO: 7399; WAN024EUP; Start 35; Stop 59
ggactaaacatatccatcgtaatga

SEQ ID NO: 467011 - DNA, 25 bp, Artificial
  probe
  misc_feature (1)..(25): SEQ ID NO: 7399; WAN024EUP; Start 34; Stop 58
aggactaaacatatccatcgtaatg

SEQ ID NO: 467012 - DNA, 25 bp, Artificial
  probe
  misc_feature (1)..(25): SEQ ID NO: 7399; WAN024EUP; Start 174; Stop 198
tgaaactcatctttcccttagtgaa

SEQ ID NO: 467013 - DNA, 25 bp, Artificial
  probe
  misc_feature (1)..(25): SEQ ID NO: 7399; WAN024EUP; Start 175; Stop 199
gaaactcatctttcccttagtgaag

SEQ ID NO: 467014 - DNA, 25 bp, Artificial
  probe
  misc_feature (1)..(25): SEQ ID NO: 7399; WAN024EUP; Start 192; Stop 216
tagtgaaggcatactcatcccaaga

SEQ ID NO: 467015 - DNA, 25 bp, Artificial
  probe
  misc_feature (1)..(25): SEQ ID NO: 7399; WAN024EUP; Start 31; Stop 55
gtaaggactaaacatatccatcgta

SEQ ID NO: 467016 - DNA, 25 bp, Artificial
  probe
  misc_feature (1)..(25): SEQ ID NO: 7399; WAN024EUP; Start 170; Stop 194
gcaatgaaactcatctttcccttag

SEQ ID NO: 467017 - DNA, 25 bp, Artificial
  probe
  misc_feature (1)..(25): SEQ ID NO: 7399; WAN024EUP; Start 173; Stop 197
atgaaactcatctttcccttagtga

SEQ ID NO: 467018 - DNA, 25 bp, Artificial
  probe
  misc_feature (1)..(25): SEQ ID NO: 7399; WAN024EUP; Start 33; Stop 57
aaggactaaacatatccatcgtaat

SEQ ID NO: 467019 - DNA, 25 bp, Artificial
  probe
  misc_feature (1)..(25): SEQ ID NO: 7399; WAN024EUP; Start 172; Stop 196
aatgaaactcatctttcccttagtg

SEQ ID NO: 467020 - DNA, 25 bp, Artificial
  probe
  misc_feature (1)..(25): SEQ ID NO: 7399; WAN024EUP; Start 171; Stop 195
caatgaaactcatctttcccttagt

SEQ ID NO: 467021 - DNA, 25 bp, Artificial
  probe
  misc_feature (1)..(25): SEQ ID NO: 7399; WAN024EUP; Start 36; Stop 60
gactaaacatatccatcgtaatgat

SEQ ID NO: 467022 - DNA, 25 bp, Artificial
  probe
  misc_feature (1)..(25): SEQ ID NO: 7399; WAN024EUP; Start 203; Stop 227
tactcatcccaagacataatctttg

SEQ ID NO: 467023 - DNA, 25 bp, Artificial
  probe
  misc_feature (1)..(25): SEQ ID NO: 7399; WAN024EUP; Start 29; Stop 53
tagtaaggactaaacatatccatcg

SEQ ID NO: 467024 - DNA, 25 bp, Artificial
  probe
  misc_feature (1)..(25): SEQ ID NO: 7399; WAN024EUP; Start 216; Stop 240
acataatctttggaagccgagaaaa

SEQ ID NO: 467025 - DNA, 25 bp, Artificial
  probe
  misc_feature (1)..(25): SEQ ID NO: 7399; WAN024EUP; Start 201; Stop 225
catactcatcccaagacataatctt

SEQ ID NO: 467026 - DNA, 25 bp, Artificial
  probe
  misc_feature (1)..(25): SEQ ID NO: 7399; WAN024EUP; Start 169; Stop 193
cgcaatgaaactcatctttccctta

SEQ ID NO: 467027 - DNA, 25 bp, Artificial
  probe
  misc_feature (1)..(25): SEQ ID NO: 7401; WAN024B52; Start 294; Stop 318
aatgacagttgaagttgagatggaa

SEQ ID NO: 467028 - DNA, 25 bp, Artificial
  probe
  misc_feature (1)..(25): SEQ ID NO: 7401; WAN024B52; Start 293; Stop 317
gaatgacagttgaagttgagatgga

SEQ ID NO: 467029 - DNA, 25 bp, Artificial
  probe
  misc_feature (1)..(25): SEQ ID NO: 7401; WAN024B52; Start 292; Stop 316
cgaatgacagttgaagttgagatgg

SEQ ID NO: 467030 - DNA, 25 bp, Artificial
  probe
  misc_feature (1)..(25): SEQ ID NO: 7401; WAN024B52; Start 291; Stop 315
tcgaatgacagttgaagttgagatg

SEQ ID NO: 467031 - DNA, 25 bp, Artificial
  probe
  misc_feature (1)..(25): SEQ ID NO: 7401; WAN024B52; Start 295; Stop 319
atgacagttgaagttgagatggaaa

SEQ ID NO: 467032 - DNA, 25 bp, Artificial
  probe
  misc_feature (1)..(25): SEQ ID NO: 7401; WAN024B52; Start 296; Stop 320
tgacagttgaagttgagatggaaag

SEQ ID NO: 467033 - DNA, 25 bp, Artificial
  probe
  misc_feature (1)..(25): SEQ ID NO: 7401; WAN024B52; Start 297; Stop 321
gacagttgaagttgagatggaaagc

SEQ ID NO: 467034 - DNA, 25 bp, Artificial
  probe
  misc_feature (1)..(25): SEQ ID NO: 7401; WAN024B52; Start 130; Stop 154
ttcaagaacagtgatgatattgaga

SEQ ID NO: 467035 - DNA, 25 bp, Artificial
  probe
  misc_feature (1)..(25): SEQ ID NO: 7401; WAN024B52; Start 129; Stop 153
cttcaagaacagtgatgatattgag

SEQ ID NO: 467036 - DNA, 25 bp, Artificial
  probe
  misc_feature (1)..(25): SEQ ID NO: 7401; WAN024B52; Start 300; Stop 324
agttgaagttgagatggaaagctga

SEQ ID NO: 467037 - DNA, 25 bp, Artificial
  probe
  misc_feature (1)..(25): SEQ ID NO: 7401; WAN024B52; Start 290; Stop 314
ttcgaatgacagttgaagttgagat

SEQ ID NO: 467038 - DNA, 25 bp, Artificial
  probe
  misc_feature (1)..(25): SEQ ID NO: 7401; WAN024B52; Start 298; Stop 322
acagttgaagttgagatggaaagct

SEQ ID NO: 467039 - DNA, 25 bp, Artificial
  probe
  misc_feature (1)..(25): SEQ ID NO: 7401; WAN024B52; Start 299; Stop 323
cagttgaagttgagatggaaagctg

SEQ ID NO: 467040 - DNA, 25 bp, Artificial
  probe
  misc_feature (1)..(25): SEQ ID NO: 7401; WAN024B52; Start 288; Stop 312
ctttcgaatgacagttgaagttgag

SEQ ID NO: 467041 - DNA, 25 bp, Artificial
  probe
  misc_feature (1)..(25): SEQ ID NO: 7401; WAN024B52; Start 289; Stop 313
tttcgaatgacagttgaagttgaga

SEQ ID NO: 467042 - DNA, 25 bp, Artificial
  probe
  misc_feature (1)..(25): SEQ ID NO: 7402; WAN024BPB; Start 959; Stop 983
taatccaggtagagcatacgagtaa

SEQ ID NO: 467043 - DNA, 25 bp, Artificial
  probe
  misc_feature (1)..(25): SEQ ID NO: 7402; WAN024BPB; Start 968; Stop 992
tagagcatacgagtaacgaattagc

SEQ ID NO: 467044 - DNA, 25 bp, Artificial
  probe
  misc_feature (1)..(25): SEQ ID NO: 7402; WAN024BPB; Start 966; Stop 990
ggtagagcatacgagtaacgaatta

SEQ ID NO: 467045 - DNA, 25 bp, Artificial
  probe
  misc_feature (1)..(25): SEQ ID NO: 7402; WAN024BPB; Start 615; Stop 639
ttgtgcgataggaagattagaactt

SEQ ID NO: 467046 - DNA, 25 bp, Artificial
  probe
  misc_feature (1)..(25): SEQ ID NO: 7402; WAN024BPB; Start 618; Stop 642
tgcgataggaagattagaacttgtt

SEQ ID NO: 467047 - DNA, 25 bp, Artificial
  probe
  misc_feature (1)..(25): SEQ ID NO: 7402; WAN024BPB; Start 866; Stop 890
ttagttatgtattagcagaagcagc

SEQ ID NO: 467048 - DNA, 25 bp, Artificial
  probe
  misc_feature (1)..(25): SEQ ID NO: 7402; WAN024BPB; Start 958; Stop 982
gtaatccaggtagagcatacgagta

SEQ ID NO: 467049 - DNA, 25 bp, Artificial
  probe
  misc_feature (1)..(25): SEQ ID NO: 7402; WAN024BPB; Start 617; Stop 641
gtgcgataggaagattagaacttgt

SEQ ID NO: 467050 - DNA, 25 bp, Artificial
  probe
  misc_feature (1)..(25): SEQ ID NO: 7402; WAN024BPB; Start 616; Stop 640
tgtgcgataggaagattagaacttg

SEQ ID NO: 467051 - DNA, 25 bp, Artificial
  probe
  misc_feature (1)..(25): SEQ ID NO: 7402; WAN024BPB; Start 967; Stop 991
gtagagcatacgagtaacgaattag

SEQ ID NO: 467052 - DNA, 25 bp, Artificial
  probe
  misc_feature (1)..(25): SEQ ID NO: 7402; WAN024BPB; Start 220; Stop 244
cttgttaagttattaccaccgtcat

SEQ ID NO: 467053 - DNA, 25 bp, Artificial
  probe
  misc_feature (1)..(25): SEQ ID NO: 7402; WAN024BPB; Start 221; Stop 245
ttgttaagttattaccaccgtcatt

SEQ ID NO: 467054 - DNA, 25 bp, Artificial
  probe
  misc_feature (1)..(25): SEQ ID NO: 7402; WAN024BPB; Start 956; Stop 980
aagtaatccaggtagagcatacgag

SEQ ID NO: 467055 - DNA, 25 bp, Artificial
  probe
  misc_feature (1)..(25): SEQ ID NO: 7402; WAN024BPB; Start 955; Stop 979
gaagtaatccaggtagagcatacga

SEQ ID NO: 467056 - DNA, 25 bp, Artificial
  probe
  misc_feature (1)..(25): SEQ ID NO: 7402; WAN024BPB; Start 970; Stop 994
gagcatacgagtaacgaattagcaa

SEQ ID NO: 467057 - DNA, 25 bp, Artificial
  probe
  misc_feature (1)..(25): SEQ ID NO: 7402; WAN024BPB; Start 219; Stop 243
gcttgttaagttattaccaccgtca

SEQ ID NO: 467058 - DNA, 25 bp, Artificial
  probe
  misc_feature (1)..(25): SEQ ID NO: 7402; WAN024BPB; Start 965; Stop 989
aggtagagcatacgagtaacgaatt

SEQ ID NO: 467059 - DNA, 25 bp, Artificial
  probe
  misc_feature (1)..(25): SEQ ID NO: 7402; WAN024BPB; Start 753; Stop 777
aattaacaatctaggagagagccaa

SEQ ID NO: 467060 - DNA, 25 bp, Artificial
  probe
  misc_feature (1)..(25): SEQ ID NO: 7402; WAN024BPB; Start 960; Stop 984
aatccaggtagagcatacgagtaac

SEQ ID NO: 467061 - DNA, 25 bp, Artificial
  probe
  misc_feature (1)..(25): SEQ ID NO: 7402; WAN024BPB; Start 754; Stop 778
attaacaatctaggagagagccaat

SEQ ID NO: 467062 - DNA, 25 bp, Artificial
  probe
  misc_feature (1)..(25): SEQ ID NO: 7402; WAN024BPB; Start 619; Stop 643
gcgataggaagattagaacttgtta

SEQ ID NO: 467063 - DNA, 25 bp, Artificial
  probe
  misc_feature (1)..(25): SEQ ID NO: 7402; WAN024BPB; Start 964; Stop 988
caggtagagcatacgagtaacgaat

SEQ ID NO: 467064 - DNA, 25 bp, Artificial
  probe
  misc_feature (1)..(25): SEQ ID NO: 7402; WAN024BPB; Start 755; Stop 779
ttaacaatctaggagagagccaata

SEQ ID NO: 467065 - DNA, 25 bp, Artificial
  probe
  misc_feature (1)..(25): SEQ ID NO: 7402; WAN024BPB; Start 969; Stop 993
agagcatacgagtaacgaattagca

SEQ ID NO: 467066 - DNA, 25 bp, Artificial
  probe
  misc_feature (1)..(25): SEQ ID NO: 7402; WAN024BPB; Start 757; Stop 781
aacaatctaggagagagccaatata

SEQ ID NO: 467067 - DNA, 25 bp, Artificial
  probe
  misc_feature (1)..(25): SEQ ID NO: 7402; WAN024BPB; Start 756; Stop 780
taacaatctaggagagagccaatat

SEQ ID NO: 467068 - DNA, 25 bp, Artificial
  probe
  misc_feature (1)..(25): SEQ ID NO: 7402; WAN024BPB; Start 957; Stop 981
agtaatccaggtagagcatacgagt

SEQ ID NO: 467069 - DNA, 25 bp, Artificial
  probe
  misc_feature (1)..(25): SEQ ID NO: 7402; WAN024BPB; Start 758; Stop 782
acaatctaggagagagccaatatat

SEQ ID NO: 467070 - DNA, 25 bp, Artificial
  probe
  misc_feature (1)..(25): SEQ ID NO: 7402; WAN024BPB; Start 954; Stop 978
cgaagtaatccaggtagagcatacg

SEQ ID NO: 467071 - DNA, 25 bp, Artificial
  probe
  misc_feature (1)..(25): SEQ ID NO: 7402; WAN024BPB; Start 218; Stop 242
agcttgttaagttattaccaccgtc

SEQ ID NO: 467072 - DNA, 25 bp, Artificial
  probe
  misc_feature (1)..(25): SEQ ID NO: 7402; WAN024BPB; Start 614; Stop 638
tttgtgcgataggaagattagaact

SEQ ID NO: 467073 - DNA, 25 bp, Artificial
  probe
  misc_feature (1)..(25): SEQ ID NO: 7402; WAN024BPB; Start 539; Stop 563
tccctaacttgcttaacattgatga

SEQ ID NO: 467074 - DNA, 25 bp, Artificial
  probe
  misc_feature (1)..(25): SEQ ID NO: 7402; WAN024BPB; Start 953; Stop 977
tcgaagtaatccaggtagagcatac

SEQ ID NO: 467075 - DNA, 25 bp, Artificial
  probe
  misc_feature (1)..(25): SEQ ID NO: 7403; WAN024BMW; Start 77; Stop 101
aagtagttcatgtaccagcttatgc

SEQ ID NO: 467076 - DNA, 25 bp, Artificial
  probe
  misc_feature (1)..(25): SEQ ID NO: 7403; WAN024BMW; Start 71; Stop 95
gtaggaaagtagttcatgtaccagc

SEQ ID NO: 467077 - DNA, 25 bp, Artificial
  probe
  misc_feature (1)..(25): SEQ ID NO: 7403; WAN024BMW; Start 81; Stop 105
agttcatgtaccagcttatgcttat

SEQ ID NO: 467078 - DNA, 25 bp, Artificial
  probe
  misc_feature (1)..(25): SEQ ID NO: 7403; WAN024BMW; Start 80; Stop 104
tagttcatgtaccagcttatgctta

SEQ ID NO: 467079 - DNA, 25 bp, Artificial
  probe
  misc_feature (1)..(25): SEQ ID NO: 7403; WAN024BMW; Start 74; Stop 98
ggaaagtagttcatgtaccagctta

SEQ ID NO: 467080 - DNA, 25 bp, Artificial
  probe
  misc_feature (1)..(25): SEQ ID NO: 7403; WAN024BMW; Start 79; Stop 103
gtagttcatgtaccagcttatgctt

SEQ ID NO: 467081 - DNA, 25 bp, Artificial
  probe
  misc_feature (1)..(25): SEQ ID NO: 7403; WAN024BMW; Start 72; Stop 96
taggaaagtagttcatgtaccagct

SEQ ID NO: 467082 - DNA, 25 bp, Artificial
  probe
  misc_feature (1)..(25): SEQ ID NO: 7403; WAN024BMW; Start 67; Stop 91
aaaggtaggaaagtagttcatgtac

SEQ ID NO: 467083 - DNA, 25 bp, Artificial
  probe
  misc_feature (1)..(25): SEQ ID NO: 7403; WAN024BMW; Start 82; Stop 106
gttcatgtaccagcttatgcttata

SEQ ID NO: 467084 - DNA, 25 bp, Artificial
  probe
  misc_feature (1)..(25): SEQ ID NO: 7403; WAN024BMW; Start 76; Stop 100
aaagtagttcatgtaccagcttatg

SEQ ID NO: 467085 - DNA, 25 bp, Artificial
  probe
  misc_feature (1)..(25): SEQ ID NO: 7403; WAN024BMW; Start 78; Stop 102
agtagttcatgtaccagcttatgct

SEQ ID NO: 467086 - DNA, 25 bp, Artificial
  probe
  misc_feature (1)..(25): SEQ ID NO: 7403; WAN024BMW; Start 75; Stop 99
gaaagtagttcatgtaccagcttat

SEQ ID NO: 467087 - DNA, 25 bp, Artificial
  probe
  misc_feature (1)..(25): SEQ ID NO: 7403; WAN024BMW; Start 195; Stop 219
agatttagtagaatgtcttccagaa

SEQ ID NO: 467088 - DNA, 25 bp, Artificial
  probe
  misc_feature (1)..(25): SEQ ID NO: 7403; WAN024BMW; Start 73; Stop 97
aggaaagtagttcatgtaccagctt

SEQ ID NO: 467089 - DNA, 25 bp, Artificial
  probe
  misc_feature (1)..(25): SEQ ID NO: 7403; WAN024BMW; Start 83; Stop 107
ttcatgtaccagcttatgcttataa

SEQ ID NO: 467090 - DNA, 25 bp, Artificial
  probe
  misc_feature (1)..(25): SEQ ID NO: 7403; WAN024BMW; Start 196; Stop 220
gatttagtagaatgtcttccagaag

SEQ ID NO: 467091 - DNA, 25 bp, Artificial
  probe
  misc_feature (1)..(25): SEQ ID NO: 7403; WAN024BMW; Start 61; Stop 85
ccagtaaaaggtaggaaagtagttc

SEQ ID NO: 467092 - DNA, 25 bp, Artificial
  probe
  misc_feature (1)..(25): SEQ ID NO: 7403; WAN024BMW; Start 194; Stop 218
tagatttagtagaatgtcttccaga

SEQ ID NO: 467093 - DNA, 25 bp, Artificial
  probe
  misc_feature (1)..(25): SEQ ID NO: 7403; WAN024BMW; Start 62; Stop 86
cagtaaaaggtaggaaagtagttca

SEQ ID NO: 467094 - DNA, 25 bp, Artificial
  probe
  misc_feature (1)..(25): SEQ ID NO: 7403; WAN024BMW; Start 68; Stop 92
aaggtaggaaagtagttcatgtacc

SEQ ID NO: 467095 - DNA, 25 bp, Artificial
  probe
  misc_feature (1)..(25): SEQ ID NO: 7403; WAN024BMW; Start 70; Stop 94
ggtaggaaagtagttcatgtaccag

SEQ ID NO: 467096 - DNA, 25 bp, Artificial
  probe
  misc_feature (1)..(25): SEQ ID NO: 7403; WAN024BMW; Start 69; Stop 93
aggtaggaaagtagttcatgtacca

SEQ ID NO: 467097 - DNA, 25 bp, Artificial
  probe
  misc_feature (1)..(25): SEQ ID NO: 7403; WAN024BMW; Start 128; Stop 152
tttatctccataacaatgaacttca

SEQ ID NO: 467098 - DNA, 25 bp, Artificial
  probe
  misc_feature (1)..(25): SEQ ID NO: 7403; WAN024BMW; Start 90; Stop 114
accagcttatgcttataaagaagat

SEQ ID NO: 467099 - DNA, 25 bp, Artificial
  probe
  misc_feature (1)..(25): SEQ ID NO: 7403; WAN024BMW; Start 84; Stop 108
tcatgtaccagcttatgcttataaa

SEQ ID NO: 467100 - DNA, 25 bp, Artificial
  probe
  misc_feature (1)..(25): SEQ ID NO: 7403; WAN024BMW; Start 60; Stop 84
tccagtaaaaggtaggaaagtagtt

SEQ ID NO: 467101 - DNA, 25 bp, Artificial
  probe
  misc_feature (1)..(25): SEQ ID NO: 7403; WAN024BMW; Start 87; Stop 111
tgtaccagcttatgcttataaagaa

SEQ ID NO: 467102 - DNA, 25 bp, Artificial
  probe
  misc_feature (1)..(25): SEQ ID NO: 7403; WAN024BMW; Start 193; Stop 217
ttagatttagtagaatgtcttccag

SEQ ID NO: 467103 - DNA, 25 bp, Artificial
  probe
  misc_feature (1)..(25): SEQ ID NO: 7403; WAN024BMW; Start 91; Stop 115
ccagcttatgcttataaagaagatg

SEQ ID NO: 467104 - DNA, 25 bp, Artificial
  probe
  misc_feature (1)..(25): SEQ ID NO: 7403; WAN024BMW; Start 85; Stop 109
catgtaccagcttatgcttataaag

SEQ ID NO: 467105 - DNA, 25 bp, Artificial
  probe
  misc_feature (1)..(25): SEQ ID NO: 7403; WAN024BMW; Start 125; Stop 149
agatttatctccataacaatgaact

SEQ ID NO: 467106 - DNA, 25 bp, Artificial
  probe
  misc_feature (1)..(25): SEQ ID NO: 7403; WAN024BMW; Start 86; Stop 110
atgtaccagcttatgcttataaaga

SEQ ID NO: 467107 - DNA, 25 bp, Artificial
  probe
  misc_feature (1)..(25): SEQ ID NO: 7403; WAN024BMW; Start 63; Stop 87
agtaaaaggtaggaaagtagttcat

SEQ ID NO: 467108 - DNA, 25 bp, Artificial
  probe
  misc_feature (1)..(25): SEQ ID NO: 7404; WAN024BO2; Start 289; Stop 313
actgagaacataatcaagctgacaa

SEQ ID NO: 467109 - DNA, 25 bp, Artificial
  probe
  misc_feature (1)..(25): SEQ ID NO: 7404; WAN024BO2; Start 147; Stop 171
agcatttgaaaccctcttatctttg

SEQ ID NO: 467110 - DNA, 25 bp, Artificial
  probe
  misc_feature (1)..(25): SEQ ID NO: 7404; WAN024BO2; Start 338; Stop 362
aagaacagaaagagcgtattaaagc

SEQ ID NO: 467111 - DNA, 25 bp, Artificial
  probe
  misc_feature (1)..(25): SEQ ID NO: 7404; WAN024BO2; Start 165; Stop 189
atctttggatgtgacggatagtaaa

SEQ ID NO: 467112 - DNA, 25 bp, Artificial
  probe
  misc_feature (1)..(25): SEQ ID NO: 7404; WAN024BO2; Start 152; Stop 176
ttgaaaccctcttatctttggatgt

SEQ ID NO: 467113 - DNA, 25 bp, Artificial
  probe
  misc_feature (1)..(25): SEQ ID NO: 7404; WAN024BO2; Start 148; Stop 172
gcatttgaaaccctcttatctttgg

SEQ ID NO: 467114 - DNA, 25 bp, Artificial
  probe
  misc_feature (1)..(25): SEQ ID NO: 7404; WAN024BO2; Start 288; Stop 312
gactgagaacataatcaagctgaca

SEQ ID NO: 467115 - DNA, 25 bp, Artificial
  probe
  misc_feature (1)..(25): SEQ ID NO: 7404; WAN024BO2; Start 154; Stop 178
gaaaccctcttatctttggatgtga

SEQ ID NO: 467116 - DNA, 25 bp, Artificial
  probe
  misc_feature (1)..(25): SEQ ID NO: 7404; WAN024BO2; Start 149; Stop 173
catttgaaaccctcttatctttgga

SEQ ID NO: 467117 - DNA, 25 bp, Artificial
  probe
  misc_feature (1)..(25): SEQ ID NO: 7404; WAN024BO2; Start 155; Stop 179
aaaccctcttatctttggatgtgac

SEQ ID NO: 467118 - DNA, 25 bp, Artificial
  probe
  misc_feature (1)..(25): SEQ ID NO: 7404; WAN024BO2; Start 153; Stop 177
tgaaaccctcttatctttggatgtg

SEQ ID NO: 467119 - DNA, 25 bp, Artificial
  probe
  misc_feature (1)..(25): SEQ ID NO: 7404; WAN024BO2; Start 340; Stop 364
gaacagaaagagcgtattaaagcac

SEQ ID NO: 467120 - DNA, 25 bp, Artificial
  probe
  misc_feature (1)..(25): SEQ ID NO: 7404; WAN024BO2; Start 339; Stop 363
agaacagaaagagcgtattaaagca

SEQ ID NO: 467121 - DNA, 25 bp, Artificial
  probe
  misc_feature (1)..(25): SEQ ID NO: 7404; WAN024BO2; Start 151; Stop 175
tttgaaaccctcttatctttggatg

SEQ ID NO: 467122 - DNA, 25 bp, Artificial
  probe
  misc_feature (1)..(25): SEQ ID NO: 7404; WAN024BO2; Start 330; Stop 354
cgatatacaagaacagaaagagcgt

SEQ ID NO: 467123 - DNA, 25 bp, Artificial
  probe
  misc_feature (1)..(25): SEQ ID NO: 7404; WAN024BO2; Start 329; Stop 353
acgatatacaagaacagaaagagcg

SEQ ID NO: 467124 - DNA, 25 bp, Artificial
  probe
  misc_feature (1)..(25): SEQ ID NO: 7404; WAN024BO2; Start 341; Stop 365
aacagaaagagcgtattaaagcact

SEQ ID NO: 467125 - DNA, 25 bp, Artificial
  probe
  misc_feature (1)..(25): SEQ ID NO: 7404; WAN024BO2; Start 336; Stop 360
acaagaacagaaagagcgtattaaa

SEQ ID NO: 467126 - DNA, 25 bp, Artificial
  probe
  misc_feature (1)..(25): SEQ ID NO: 7404; WAN024BO2; Start 52; Stop 76
gttacagaacgaaccaaagatgaag

SEQ ID NO: 467127 - DNA, 25 bp, Artificial
  probe
  misc_feature (1)..(25): SEQ ID NO: 7404; WAN024BO2; Start 51; Stop 75
agttacagaacgaaccaaagatgaa

SEQ ID NO: 467128 - DNA, 25 bp, Artificial
  probe
  misc_feature (1)..(25): SEQ ID NO: 7404; WAN024BO2; Start 146; Stop 170
aagcatttgaaaccctcttatcttt

SEQ ID NO: 467129 - DNA, 25 bp, Artificial
  probe
  misc_feature (1)..(25): SEQ ID NO: 7404; WAN024BO2; Start 145; Stop 169
aaagcatttgaaaccctcttatctt

SEQ ID NO: 467130 - DNA, 25 bp, Artificial
  probe
  misc_feature (1)..(25): SEQ ID NO: 7404; WAN024BO2; Start 14; Stop 38
ggaaattgcctagagatggaactaa

SEQ ID NO: 467131 - DNA, 25 bp, Artificial
  probe
  misc_feature (1)..(25): SEQ ID NO: 7404; WAN024BO2; Start 195; Stop 219
gaaacaacttgaggagatgggtatg

SEQ ID NO: 467132 - DNA, 25 bp, Artificial
  probe
  misc_feature (1)..(25): SEQ ID NO: 7404; WAN024BO2; Start 337; Stop 361
caagaacagaaagagcgtattaaag

SEQ ID NO: 467133 - DNA, 25 bp, Artificial
  probe
  misc_feature (1)..(25): SEQ ID NO: 7404; WAN024BO2; Start 282; Stop 306
gaaagcgactgagaacataatcaag

SEQ ID NO: 467134 - DNA, 25 bp, Artificial
  probe
  misc_feature (1)..(25): SEQ ID NO: 7404; WAN024BO2; Start 194; Stop 218
agaaacaacttgaggagatgggtat

SEQ ID NO: 467135 - DNA, 25 bp, Artificial
  probe
  misc_feature (1)..(25): SEQ ID NO: 7404; WAN024BO2; Start 328; Stop 352
tacgatatacaagaacagaaagagc

SEQ ID NO: 467136 - DNA, 25 bp, Artificial
  probe
  misc_feature (1)..(25): SEQ ID NO: 7404; WAN024BO2; Start 331; Stop 355
gatatacaagaacagaaagagcgta

SEQ ID NO: 467137 - DNA, 25 bp, Artificial
  probe
  misc_feature (1)..(25): SEQ ID NO: 7404; WAN024BO2; Start 281; Stop 305
agaaagcgactgagaacataatcaa

SEQ ID NO: 467138 - DNA, 25 bp, Artificial
  probe
  misc_feature (1)..(25): SEQ ID NO: 7404; WAN024BO2; Start 345; Stop 369
gaaagagcgtattaaagcactcaaa

SEQ ID NO: 467139 - DNA, 25 bp, Artificial
  probe
  misc_feature (1)..(25): SEQ ID NO: 7404; WAN024BO2; Start 346; Stop 370
aaagagcgtattaaagcactcaaat

SEQ ID NO: 467140 - DNA, 25 bp, Artificial
  probe
  misc_feature (1)..(25): SEQ ID NO: 7404; WAN024BO2; Start 50; Stop 74
cagttacagaacgaaccaaagatga

SEQ ID NO: 467141 - DNA, 25 bp, Artificial
  probe
  misc_feature (1)..(25): SEQ ID NO: 7405; WAN024DX9; Start 104; Stop 128
gtgccttaaacatccctacaaacat

SEQ ID NO: 467142 - DNA, 25 bp, Artificial
  probe
  misc_feature (1)..(25): SEQ ID NO: 7405; WAN024DX9; Start 105; Stop 129
tgccttaaacatccctacaaacatg

SEQ ID NO: 467143 - DNA, 25 bp, Artificial
  probe
  misc_feature (1)..(25): SEQ ID NO: 7405; WAN024DX9; Start 108; Stop 132
cttaaacatccctacaaacatgccc

SEQ ID NO: 467144 - DNA, 25 bp, Artificial
  probe
  misc_feature (1)..(25): SEQ ID NO: 7405; WAN024DX9; Start 107; Stop 131
ccttaaacatccctacaaacatgcc

SEQ ID NO: 467145 - DNA, 25 bp, Artificial
  probe
  misc_feature (1)..(25): SEQ ID NO: 7405; WAN024DX9; Start 23; Stop 47
tgaaacctatcagtaaacaaatagc

SEQ ID NO: 467146 - DNA, 25 bp, Artificial
  probe
  misc_feature (1)..(25): SEQ ID NO: 7405; WAN024DX9; Start 110; Stop 134
taaacatccctacaaacatgcccaa

SEQ ID NO: 467147 - DNA, 25 bp, Artificial
  probe
  misc_feature (1)..(25): SEQ ID NO: 7405; WAN024DX9; Start 109; Stop 133
ttaaacatccctacaaacatgccca

SEQ ID NO: 467148 - DNA, 25 bp, Artificial
  probe
  misc_feature (1)..(25): SEQ ID NO: 7405; WAN024DX9; Start 106; Stop 130
gccttaaacatccctacaaacatgc

SEQ ID NO: 467149 - DNA, 25 bp, Artificial
  probe
  misc_feature (1)..(25): SEQ ID NO: 7405; WAN024DX9; Start 56; Stop 80
atggcatcaaggcttttacatctaa

SEQ ID NO: 467150 - DNA, 25 bp, Artificial
  probe
  misc_feature (1)..(25): SEQ ID NO: 7405; WAN024DX9; Start 103; Stop 127
cgtgccttaaacatccctacaaaca

SEQ ID NO: 467151 - DNA, 25 bp, Artificial
  probe
  misc_feature (1)..(25): SEQ ID NO: 7405; WAN024DX9; Start 57; Stop 81
tggcatcaaggcttttacatctaaa

SEQ ID NO: 467152 - DNA, 25 bp, Artificial
  probe
  misc_feature (1)..(25): SEQ ID NO: 7405; WAN024DX9; Start 25; Stop 49
aaacctatcagtaaacaaatagctg

SEQ ID NO: 467153 - DNA, 25 bp, Artificial
  probe
  misc_feature (1)..(25): SEQ ID NO: 7405; WAN024DX9; Start 75; Stop 99
atctaaaataatttcgtgggattcg

SEQ ID NO: 467154 - DNA, 25 bp, Artificial
  probe
  misc_feature (1)..(25): SEQ ID NO: 7405; WAN024DX9; Start 231; Stop 255
tcaatccattcaattactgggatga

SEQ ID NO: 467155 - DNA, 25 bp, Artificial
  probe
  misc_feature (1)..(25): SEQ ID NO: 7405; WAN024DX9; Start 55; Stop 79
catggcatcaaggcttttacatcta

SEQ ID NO: 467156 - DNA, 25 bp, Artificial
  probe
  misc_feature (1)..(25): SEQ ID NO: 7405; WAN024DX9; Start 24; Stop 48
gaaacctatcagtaaacaaatagct

SEQ ID NO: 467157 - DNA, 25 bp, Artificial
  probe
  misc_feature (1)..(25): SEQ ID NO: 7405; WAN024DX9; Start 230; Stop 254
ttcaatccattcaattactgggatg

SEQ ID NO: 467158 - DNA, 25 bp, Artificial
  probe
  misc_feature (1)..(25): SEQ ID NO: 7405; WAN024DX9; Start 34; Stop 58
agtaaacaaatagctgatatccatg

SEQ ID NO: 467159 - DNA, 25 bp, Artificial
  probe
  misc_feature (1)..(25): SEQ ID NO: 7405; WAN024DX9; Start 18; Stop 42
actaatgaaacctatcagtaaacaa

SEQ ID NO: 467160 - DNA, 25 bp, Artificial
  probe
  misc_feature (1)..(25): SEQ ID NO: 7405; WAN024DX9; Start 111; Stop 135
aaacatccctacaaacatgcccaag

SEQ ID NO: 467161 - DNA, 25 bp, Artificial
  probe
  misc_feature (1)..(25): SEQ ID NO: 7405; WAN024DX9; Start 229; Stop 253
tttcaatccattcaattactgggat

SEQ ID NO: 467162 - DNA, 25 bp, Artificial
  probe
  misc_feature (1)..(25): SEQ ID NO: 7405; WAN024DX9; Start 228; Stop 252
ttttcaatccattcaattactggga

SEQ ID NO: 467163 - DNA, 25 bp, Artificial
  probe
  misc_feature (1)..(25): SEQ ID NO: 7405; WAN024DX9; Start 12; Stop 36
aaacatactaatgaaacctatcagt

SEQ ID NO: 467164 - DNA, 25 bp, Artificial
  probe
  misc_feature (1)..(25): SEQ ID NO: 7405; WAN024DX9; Start 227; Stop 251
cttttcaatccattcaattactggg

SEQ ID NO: 467165 - DNA, 25 bp, Artificial
  probe
  misc_feature (1)..(25): SEQ ID NO: 7405; WAN024DX9; Start 102; Stop 126
acgtgccttaaacatccctacaaac

SEQ ID NO: 467166 - DNA, 25 bp, Artificial
  probe
  misc_feature (1)..(25): SEQ ID NO: 7405; WAN024DX9; Start 114; Stop 138
catccctacaaacatgcccaagaac

SEQ ID NO: 467167 - DNA, 25 bp, Artificial
  probe
  misc_feature (1)..(25): SEQ ID NO: 7405; WAN024DX9; Start 33; Stop 57
cagtaaacaaatagctgatatccat

SEQ ID NO: 467168 - DNA, 25 bp, Artificial
  probe
  misc_feature (1)..(25): SEQ ID NO: 7405; WAN024DX9; Start 73; Stop 97
acatctaaaataatttcgtgggatt

SEQ ID NO: 467169 - DNA, 25 bp, Artificial
  probe
  misc_feature (1)..(25): SEQ ID NO: 7405; WAN024DX9; Start 58; Stop 82
ggcatcaaggcttttacatctaaaa

SEQ ID NO: 467170 - DNA, 25 bp, Artificial
  probe
  misc_feature (1)..(25): SEQ ID NO: 7405; WAN024DX9; Start 113; Stop 137
acatccctacaaacatgcccaagaa

SEQ ID NO: 467171 - DNA, 25 bp, Artificial
  probe
  misc_feature (1)..(25): SEQ ID NO: 7405; WAN024DX9; Start 112; Stop 136
aacatccctacaaacatgcccaaga

SEQ ID NO: 467172 - DNA, 25 bp, Artificial
  probe
  misc_feature (1)..(25): SEQ ID NO: 7405; WAN024DX9; Start 226; Stop 250
tcttttcaatccattcaattactgg

SEQ ID NO: 467173 - DNA, 25 bp, Artificial
  probe
  misc_feature (1)..(25): SEQ ID NO: 7405; WAN024DX9; Start 74; Stop 98
catctaaaataatttcgtgggattc

SEQ ID NO: 467174 - DNA, 25 bp, Artificial
  probe
  misc_feature (1)..(25): SEQ ID NO: 7406; WAN024C7J; Start 169; Stop 193
ctacgattccgattgctatctgaag

SEQ ID NO: 467175 - DNA, 25 bp, Artificial
  probe
  misc_feature (1)..(25): SEQ ID NO: 7406; WAN024C7J; Start 168; Stop 192
gctacgattccgattgctatctgaa

SEQ ID NO: 467176 - DNA, 25 bp, Artificial
  probe
  misc_feature (1)..(25): SEQ ID NO: 7406; WAN024C7J; Start 165; Stop 189
atggctacgattccgattgctatct

SEQ ID NO: 467177 - DNA, 25 bp, Artificial
  probe
  misc_feature (1)..(25): SEQ ID NO: 7406; WAN024C7J; Start 55; Stop 79
ggtaattctccaagggaatggttaa

SEQ ID NO: 467178 - DNA, 25 bp, Artificial
  probe
  misc_feature (1)..(25): SEQ ID NO: 7406; WAN024C7J; Start 16; Stop 40
tataggcaaccacattcccatcaac

SEQ ID NO: 467179 - DNA, 25 bp, Artificial
  probe
  misc_feature (1)..(25): SEQ ID NO: 7406; WAN024C7J; Start 54; Stop 78
aggtaattctccaagggaatggtta

SEQ ID NO: 467180 - DNA, 25 bp, Artificial
  probe
  misc_feature (1)..(25): SEQ ID NO: 7406; WAN024C7J; Start 48; Stop 72
aaagtcaggtaattctccaagggaa

SEQ ID NO: 467181 - DNA, 25 bp, Artificial
  probe
  misc_feature (1)..(25): SEQ ID NO: 7406; WAN024C7J; Start 57; Stop 81
taattctccaagggaatggttaatg

SEQ ID NO: 467182 - DNA, 25 bp, Artificial
  probe
  misc_feature (1)..(25): SEQ ID NO: 7406; WAN024C7J; Start 56; Stop 80
gtaattctccaagggaatggttaat

SEQ ID NO: 467183 - DNA, 25 bp, Artificial
  probe
  misc_feature (1)..(25): SEQ ID NO: 7406; WAN024C7J; Start 49; Stop 73
aagtcaggtaattctccaagggaat

SEQ ID NO: 467184 - DNA, 25 bp, Artificial
  probe
  misc_feature (1)..(25): SEQ ID NO: 7406; WAN024C7J; Start 58; Stop 82
aattctccaagggaatggttaatgc

SEQ ID NO: 467185 - DNA, 25 bp, Artificial
  probe
  misc_feature (1)..(25): SEQ ID NO: 7406; WAN024C7J; Start 164; Stop 188
catggctacgattccgattgctatc

SEQ ID NO: 467186 - DNA, 25 bp, Artificial
  probe
  misc_feature (1)..(25): SEQ ID NO: 7406; WAN024C7J; Start 170; Stop 194
tacgattccgattgctatctgaagc

SEQ ID NO: 467187 - DNA, 25 bp, Artificial
  probe
  misc_feature (1)..(25): SEQ ID NO: 7406; WAN024C7J; Start 50; Stop 74
agtcaggtaattctccaagggaatg

SEQ ID NO: 467188 - DNA, 25 bp, Artificial
  probe
  misc_feature (1)..(25): SEQ ID NO: 7406; WAN024C7J; Start 167; Stop 191
ggctacgattccgattgctatctga

SEQ ID NO: 467189 - DNA, 25 bp, Artificial
  probe
  misc_feature (1)..(25): SEQ ID NO: 7406; WAN024C7J; Start 65; Stop 89
caagggaatggttaatgcaaaggtt

SEQ ID NO: 467190 - DNA, 25 bp, Artificial
  probe
  misc_feature (1)..(25): SEQ ID NO: 7406; WAN024C7J; Start 53; Stop 77
caggtaattctccaagggaatggtt

SEQ ID NO: 467191 - DNA, 25 bp, Artificial
  probe
  misc_feature (1)..(25): SEQ ID NO: 7406; WAN024C7J; Start 166; Stop 190
tggctacgattccgattgctatctg

SEQ ID NO: 467192 - DNA, 25 bp, Artificial
  probe
  misc_feature (1)..(25): SEQ ID NO: 7406; WAN024C7J; Start 124; Stop 148
tcgctagacctcttatcttcaaaag

SEQ ID NO: 467193 - DNA, 25 bp, Artificial
  probe
  misc_feature (1)..(25): SEQ ID NO: 7406; WAN024C7J; Start 125; Stop 149
cgctagacctcttatcttcaaaagt

SEQ ID NO: 467194 - DNA, 25 bp, Artificial
  probe
  misc_feature (1)..(25): SEQ ID NO: 7406; WAN024C7J; Start 66; Stop 90
aagggaatggttaatgcaaaggttg

SEQ ID NO: 467195 - DNA, 25 bp, Artificial
  probe
  misc_feature (1)..(25): SEQ ID NO: 7406; WAN024C7J; Start 15; Stop 39
ctataggcaaccacattcccatcaa

SEQ ID NO: 467196 - DNA, 25 bp, Artificial
  probe
  misc_feature (1)..(25): SEQ ID NO: 7406; WAN024C7J; Start 51; Stop 75
gtcaggtaattctccaagggaatgg

SEQ ID NO: 467197 - DNA, 25 bp, Artificial
  probe
  misc_feature (1)..(25): SEQ ID NO: 7406; WAN024C7J; Start 131; Stop 155
acctcttatcttcaaaagttcatgc

SEQ ID NO: 467198 - DNA, 25 bp, Artificial
  probe
  misc_feature (1)..(25): SEQ ID NO: 7406; WAN024C7J; Start 126; Stop 150
gctagacctcttatcttcaaaagtt

SEQ ID NO: 467199 - DNA, 25 bp, Artificial
  probe
  misc_feature (1)..(25): SEQ ID NO: 7406; WAN024C7J; Start 123; Stop 147
gtcgctagacctcttatcttcaaaa

SEQ ID NO: 467200 - DNA, 25 bp, Artificial
  probe
  misc_feature (1)..(25): SEQ ID NO: 7406; WAN024C7J; Start 10; Stop 34
aaacactataggcaaccacattccc

SEQ ID NO: 467201 - DNA, 25 bp, Artificial
  probe
  misc_feature (1)..(25): SEQ ID NO: 7406; WAN024C7J; Start 52; Stop 76
tcaggtaattctccaagggaatggt

SEQ ID NO: 467202 - DNA, 25 bp, Artificial
  probe
  misc_feature (1)..(25): SEQ ID NO: 7406; WAN024C7J; Start 129; Stop 153
agacctcttatcttcaaaagttcat

SEQ ID NO: 467203 - DNA, 25 bp, Artificial
  probe
  misc_feature (1)..(25): SEQ ID NO: 7406; WAN024C7J; Start 13; Stop 37
cactataggcaaccacattcccatc

SEQ ID NO: 467204 - DNA, 25 bp, Artificial
  probe
  misc_feature (1)..(25): SEQ ID NO: 7406; WAN024C7J; Start 17; Stop 41
ataggcaaccacattcccatcaact

SEQ ID NO: 467205 - DNA, 25 bp, Artificial
  probe
  misc_feature (1)..(25): SEQ ID NO: 7406; WAN024C7J; Start 4; Stop 28
aaatcaaaacactataggcaaccac

SEQ ID NO: 467206 - DNA, 25 bp, Artificial
  probe
  misc_feature (1)..(25): SEQ ID NO: 7406; WAN024C7J; Start 3; Stop 27
gaaatcaaaacactataggcaacca

SEQ ID NO: 467207 - DNA, 25 bp, Artificial
  probe
  misc_feature (1)..(25): SEQ ID NO: 7407; WAN024AJR; Start 22; Stop 46
gcggatgagggttttcttattttat

SEQ ID NO: 467208 - DNA, 25 bp, Artificial
  probe
  misc_feature (1)..(25): SEQ ID NO: 7407; WAN024AJR; Start 21; Stop 45
tgcggatgagggttttcttatttta

SEQ ID NO: 467209 - DNA, 25 bp, Artificial
  probe
  misc_feature (1)..(25): SEQ ID NO: 7407; WAN024AJR; Start 3; Stop 27
gaaatctctcatctgctttgcggat

SEQ ID NO: 467210 - DNA, 25 bp, Artificial
  probe
  misc_feature (1)..(25): SEQ ID NO: 7407; WAN024AJR; Start 20; Stop 44
ttgcggatgagggttttcttatttt

SEQ ID NO: 467211 - DNA, 25 bp, Artificial
  probe
  misc_feature (1)..(25): SEQ ID NO: 7407; WAN024AJR; Start 19; Stop 43
tttgcggatgagggttttcttattt

SEQ ID NO: 467212 - DNA, 25 bp, Artificial
  probe
  misc_feature (1)..(25): SEQ ID NO: 7407; WAN024AJR; Start 24; Stop 48
ggatgagggttttcttattttatgc

SEQ ID NO: 467213 - DNA, 25 bp, Artificial
  probe
  misc_feature (1)..(25): SEQ ID NO: 7407; WAN024AJR; Start 23; Stop 47
cggatgagggttttcttattttatg

SEQ ID NO: 467214 - DNA, 25 bp, Artificial
  probe
  misc_feature (1)..(25): SEQ ID NO: 7407; WAN024AJR; Start 18; Stop 42
ctttgcggatgagggttttcttatt

SEQ ID NO: 467215 - DNA, 25 bp, Artificial
  probe
  misc_feature (1)..(25): SEQ ID NO: 7407; WAN024AJR; Start 25; Stop 49
gatgagggttttcttattttatgct

SEQ ID NO: 467216 - DNA, 25 bp, Artificial
  probe
  misc_feature (1)..(25): SEQ ID NO: 7407; WAN024AJR; Start 1; Stop 25
ttgaaatctctcatctgctttgcgg

SEQ ID NO: 467217 - DNA, 25 bp, Artificial
  probe
  misc_feature (1)..(25): SEQ ID NO: 7407; WAN024AJR; Start 2; Stop 26
tgaaatctctcatctgctttgcgga

SEQ ID NO: 467218 - DNA, 25 bp, Artificial
  probe
  misc_feature (1)..(25): SEQ ID NO: 7407; WAN024AJR; Start 27; Stop 51
tgagggttttcttattttatgctat

SEQ ID NO: 467219 - DNA, 25 bp, Artificial
  probe
  misc_feature (1)..(25): SEQ ID NO: 7407; WAN024AJR; Start 26; Stop 50
atgagggttttcttattttatgcta

SEQ ID NO: 467220 - DNA, 25 bp, Artificial
  probe
  misc_feature (1)..(25): SEQ ID NO: 7407; WAN024AJR; Start 17; Stop 41
gctttgcggatgagggttttcttat

SEQ ID NO: 467221 - DNA, 25 bp, Artificial
  probe
  misc_feature (1)..(25): SEQ ID NO: 7407; WAN024AJR; Start 4; Stop 28
aaatctctcatctgctttgcggatg

SEQ ID NO: 467222 - DNA, 25 bp, Artificial
  probe
  misc_feature (1)..(25): SEQ ID NO: 7407; WAN024AJR; Start 30; Stop 54
gggttttcttattttatgctatact

SEQ ID NO: 467223 - DNA, 25 bp, Artificial
  probe
  misc_feature (1)..(25): SEQ ID NO: 7407; WAN024AJR; Start 29; Stop 53
agggttttcttattttatgctatac

SEQ ID NO: 467224 - DNA, 25 bp, Artificial
  probe
  misc_feature (1)..(25): SEQ ID NO: 7407; WAN024AJR; Start 16; Stop 40
tgctttgcggatgagggttttctta

SEQ ID NO: 467225 - DNA, 25 bp, Artificial
  probe
  misc_feature (1)..(25): SEQ ID NO: 7408; WAN024BN9; Start 27; Stop 51
aatcaagatgcaaggctatgagatg

SEQ ID NO: 467226 - DNA, 25 bp, Artificial
  probe
  misc_feature (1)..(25): SEQ ID NO: 7408; WAN024BN9; Start 30; Stop 54
caagatgcaaggctatgagatgttc

SEQ ID NO: 467227 - DNA, 25 bp, Artificial
  probe
  misc_feature (1)..(25): SEQ ID NO: 7408; WAN024BN9; Start 31; Stop 55
aagatgcaaggctatgagatgttct

SEQ ID NO: 467228 - DNA, 25 bp, Artificial
  probe
  misc_feature (1)..(25): SEQ ID NO: 7408; WAN024BN9; Start 28; Stop 52
atcaagatgcaaggctatgagatgt

SEQ ID NO: 467229 - DNA, 25 bp, Artificial
  probe
  misc_feature (1)..(25): SEQ ID NO: 7408; WAN024BN9; Start 29; Stop 53
tcaagatgcaaggctatgagatgtt

SEQ ID NO: 467230 - DNA, 25 bp, Artificial
  probe
  misc_feature (1)..(25): SEQ ID NO: 7408; WAN024BN9; Start 37; Stop 61
caaggctatgagatgttctctagtt

SEQ ID NO: 467231 - DNA, 25 bp, Artificial
  probe
  misc_feature (1)..(25): SEQ ID NO: 7408; WAN024BN9; Start 26; Stop 50
aaatcaagatgcaaggctatgagat

SEQ ID NO: 467232 - DNA, 25 bp, Artificial
  probe
  misc_feature (1)..(25): SEQ ID NO: 7408; WAN024BN9; Start 36; Stop 60
gcaaggctatgagatgttctctagt

SEQ ID NO: 467233 - DNA, 25 bp, Artificial
  probe
  misc_feature (1)..(25): SEQ ID NO: 7408; WAN024BN9; Start 34; Stop 58
atgcaaggctatgagatgttctcta

SEQ ID NO: 467234 - DNA, 25 bp, Artificial
  probe
  misc_feature (1)..(25): SEQ ID NO: 7408; WAN024BN9; Start 35; Stop 59
tgcaaggctatgagatgttctctag

SEQ ID NO: 467235 - DNA, 25 bp, Artificial
  probe
  misc_feature (1)..(25): SEQ ID NO: 7408; WAN024BN9; Start 38; Stop 62
aaggctatgagatgttctctagttt

SEQ ID NO: 467236 - DNA, 25 bp, Artificial
  probe
  misc_feature (1)..(25): SEQ ID NO: 7408; WAN024BN9; Start 33; Stop 57
gatgcaaggctatgagatgttctct

SEQ ID NO: 467237 - DNA, 25 bp, Artificial
  probe
  misc_feature (1)..(25): SEQ ID NO: 7408; WAN024BN9; Start 32; Stop 56
agatgcaaggctatgagatgttctc

SEQ ID NO: 467238 - DNA, 25 bp, Artificial
  probe
  misc_feature (1)..(25): SEQ ID NO: 7408; WAN024BN9; Start 39; Stop 63
aggctatgagatgttctctagttta

SEQ ID NO: 467239 - DNA, 25 bp, Artificial
  probe
  misc_feature (1)..(25): SEQ ID NO: 7408; WAN024BN9; Start 24; Stop 48
taaaatcaagatgcaaggctatgag

SEQ ID NO: 467240 - DNA, 25 bp, Artificial
  probe
  misc_feature (1)..(25): SEQ ID NO: 7408; WAN024BN9; Start 25; Stop 49
aaaatcaagatgcaaggctatgaga

SEQ ID NO: 467241 - DNA, 25 bp, Artificial
  probe
  misc_feature (1)..(25): SEQ ID NO: 7408; WAN024BN9; Start 40; Stop 64
ggctatgagatgttctctagtttaa

SEQ ID NO: 467242 - DNA, 25 bp, Artificial
  probe
  misc_feature (1)..(25): SEQ ID NO: 7408; WAN024BN9; Start 23; Stop 47
ataaaatcaagatgcaaggctatga

SEQ ID NO: 467243 - DNA, 25 bp, Artificial
  probe
  misc_feature (1)..(25): SEQ ID NO: 7408; WAN024BN9; Start 22; Stop 46
tataaaatcaagatgcaaggctatg

SEQ ID NO: 467244 - DNA, 25 bp, Artificial
  probe
  misc_feature (1)..(25): SEQ ID NO: 7408; WAN024BN9; Start 21; Stop 45
ttataaaatcaagatgcaaggctat

SEQ ID NO: 467245 - DNA, 25 bp, Artificial
  probe
  misc_feature (1)..(25): SEQ ID NO: 7408; WAN024BN9; Start 41; Stop 65
gctatgagatgttctctagtttaat

SEQ ID NO: 467246 - DNA, 25 bp, Artificial
  probe
  misc_feature (1)..(25): SEQ ID NO: 7408; WAN024BN9; Start 20; Stop 44
tttataaaatcaagatgcaaggcta

SEQ ID NO: 467247 - DNA, 25 bp, Artificial
  probe
  misc_feature (1)..(25): SEQ ID NO: 7409; WAN024BOM; Start 1146; Stop 1170
atcagttataggagaggcgacaata

SEQ ID NO: 467248 - DNA, 25 bp, Artificial
  probe
  misc_feature (1)..(25): SEQ ID NO: 7409; WAN024BOM; Start 888; Stop 912
tgttggtattatggtaatcggaagg

SEQ ID NO: 467249 - DNA, 25 bp, Artificial
  probe
  misc_feature (1)..(25): SEQ ID NO: 7409; WAN024BOM; Start 1147; Stop 1171
tcagttataggagaggcgacaatag

SEQ ID NO: 467250 - DNA, 25 bp, Artificial
  probe
  misc_feature (1)..(25): SEQ ID NO: 7409; WAN024BOM; Start 887; Stop 911
ttgttggtattatggtaatcggaag

SEQ ID NO: 467251 - DNA, 25 bp, Artificial
  probe
  misc_feature (1)..(25): SEQ ID NO: 7409; WAN024BOM; Start 889; Stop 913
gttggtattatggtaatcggaaggc

SEQ ID NO: 467252 - DNA, 25 bp, Artificial
  probe
  misc_feature (1)..(25): SEQ ID NO: 7409; WAN024BOM; Start 694; Stop 718
tcaacattatctcaatctggctatt

SEQ ID NO: 467253 - DNA, 25 bp, Artificial
  probe
  misc_feature (1)..(25): SEQ ID NO: 7409; WAN024BOM; Start 691; Stop 715
ttatcaacattatctcaatctggct

SEQ ID NO: 467254 - DNA, 25 bp, Artificial
  probe
  misc_feature (1)..(25): SEQ ID NO: 7409; WAN024BOM; Start 1145; Stop 1169
catcagttataggagaggcgacaat

SEQ ID NO: 467255 - DNA, 25 bp, Artificial
  probe
  misc_feature (1)..(25): SEQ ID NO: 7409; WAN024BOM; Start 886; Stop 910
attgttggtattatggtaatcggaa

SEQ ID NO: 467256 - DNA, 25 bp, Artificial
  probe
  misc_feature (1)..(25): SEQ ID NO: 7409; WAN024BOM; Start 693; Stop 717
atcaacattatctcaatctggctat

SEQ ID NO: 467257 - DNA, 25 bp, Artificial
  probe
  misc_feature (1)..(25): SEQ ID NO: 7409; WAN024BOM; Start 690; Stop 714
cttatcaacattatctcaatctggc

SEQ ID NO: 467258 - DNA, 25 bp, Artificial
  probe
  misc_feature (1)..(25): SEQ ID NO: 7409; WAN024BOM; Start 1074; Stop 1098
tgcttcattaatcttgctcatatcc

SEQ ID NO: 467259 - DNA, 25 bp, Artificial
  probe
  misc_feature (1)..(25): SEQ ID NO: 7409; WAN024BOM; Start 1075; Stop 1099
gcttcattaatcttgctcatatcct

SEQ ID NO: 467260 - DNA, 25 bp, Artificial
  probe
  misc_feature (1)..(25): SEQ ID NO: 7409; WAN024BOM; Start 1148; Stop 1172
cagttataggagaggcgacaatagc

SEQ ID NO: 467261 - DNA, 25 bp, Artificial
  probe
  misc_feature (1)..(25): SEQ ID NO: 7409; WAN024BOM; Start 1001; Stop 1025
ggtcatcagtcttaggtaaccaatt

SEQ ID NO: 467262 - DNA, 25 bp, Artificial
  probe
  misc_feature (1)..(25): SEQ ID NO: 7409; WAN024BOM; Start 692; Stop 716
tatcaacattatctcaatctggcta

SEQ ID NO: 467263 - DNA, 25 bp, Artificial
  probe
  misc_feature (1)..(25): SEQ ID NO: 7409; WAN024BOM; Start 1144; Stop 1168
tcatcagttataggagaggcgacaa

SEQ ID NO: 467264 - DNA, 25 bp, Artificial
  probe
  misc_feature (1)..(25): SEQ ID NO: 7409; WAN024BOM; Start 1143; Stop 1167
ttcatcagttataggagaggcgaca

SEQ ID NO: 467265 - DNA, 25 bp, Artificial
  probe
  misc_feature (1)..(25): SEQ ID NO: 7409; WAN024BOM; Start 884; Stop 908
tgattgttggtattatggtaatcgg

SEQ ID NO: 467266 - DNA, 25 bp, Artificial
  probe
  misc_feature (1)..(25): SEQ ID NO: 7409; WAN024BOM; Start 885; Stop 909
gattgttggtattatggtaatcgga

SEQ ID NO: 467267 - DNA, 25 bp, Artificial
  probe
  misc_feature (1)..(25): SEQ ID NO: 7409; WAN024BOM; Start 1271; Stop 1295
cttgtttggtaattgggagttgttt

SEQ ID NO: 467268 - DNA, 25 bp, Artificial
  probe
  misc_feature (1)..(25): SEQ ID NO: 7409; WAN024BOM; Start 1357; Stop 1381
atgatttggtatagcaggactgaaa

SEQ ID NO: 467269 - DNA, 25 bp, Artificial
  probe
  misc_feature (1)..(25): SEQ ID NO: 7409; WAN024BOM; Start 1356; Stop 1380
aatgatttggtatagcaggactgaa

SEQ ID NO: 467270 - DNA, 25 bp, Artificial
  probe
  misc_feature (1)..(25): SEQ ID NO: 7409; WAN024BOM; Start 1363; Stop 1387
tggtatagcaggactgaaattgtaa

SEQ ID NO: 467271 - DNA, 25 bp, Artificial
  probe
  misc_feature (1)..(25): SEQ ID NO: 7409; WAN024BOM; Start 1362; Stop 1386
ttggtatagcaggactgaaattgta

SEQ ID NO: 467272 - DNA, 25 bp, Artificial
  probe
  misc_feature (1)..(25): SEQ ID NO: 7409; WAN024BOM; Start 1140; Stop 1164
aatttcatcagttataggagaggcg

SEQ ID NO: 467273 - DNA, 25 bp, Artificial
  probe
  misc_feature (1)..(25): SEQ ID NO: 7409; WAN024BOM; Start 1361; Stop 1385
tttggtatagcaggactgaaattgt

SEQ ID NO: 467274 - DNA, 25 bp, Artificial
  probe
  misc_feature (1)..(25): SEQ ID NO: 7409; WAN024BOM; Start 1141; Stop 1165
atttcatcagttataggagaggcga

SEQ ID NO: 467275 - DNA, 25 bp, Artificial
  probe
  misc_feature (1)..(25): SEQ ID NO: 7409; WAN024BOM; Start 1139; Stop 1163
caatttcatcagttataggagaggc

SEQ ID NO: 467276 - DNA, 25 bp, Artificial
  probe
  misc_feature (1)..(25): SEQ ID NO: 7409; WAN024BOM; Start 1027; Stop 1051
ttagtagctgttaataagacgaagg

SEQ ID NO: 467277 - DNA, 25 bp, Artificial
  probe
  misc_feature (1)..(25): SEQ ID NO: 7409; WAN024BOM; Start 1355; Stop 1379
taatgatttggtatagcaggactga

SEQ ID NO: 467278 - DNA, 25 bp, Artificial
  probe
  misc_feature (1)..(25): SEQ ID NO: 7409; WAN024BOM; Start 1259; Stop 1283
taatgggaacgacttgtttggtaat

SEQ ID NO: 467279 - DNA, 25 bp, Artificial
  probe
  misc_feature (1)..(25): SEQ ID NO: 7409; WAN024BOM; Start 1258; Stop 1282
ataatgggaacgacttgtttggtaa

SEQ ID NO: 467280 - DNA, 25 bp, Artificial
  probe
  misc_feature (1)..(25): SEQ ID NO: 7410; WAN024BPA; Start 831; Stop 855
tggaattgtctcattagttcaagga

SEQ ID NO: 467281 - DNA, 25 bp, Artificial
  probe
  misc_feature (1)..(25): SEQ ID NO: 7410; WAN024BPA; Start 866; Stop 890
ttgacagtggttatataggattgct

SEQ ID NO: 467282 - DNA, 25 bp, Artificial
  probe
  misc_feature (1)..(25): SEQ ID NO: 7410; WAN024BPA; Start 832; Stop 856
ggaattgtctcattagttcaaggaa

SEQ ID NO: 467283 - DNA, 25 bp, Artificial
  probe
  misc_feature (1)..(25): SEQ ID NO: 7410; WAN024BPA; Start 830; Stop 854
atggaattgtctcattagttcaagg

SEQ ID NO: 467284 - DNA, 25 bp, Artificial
  probe
  misc_feature (1)..(25): SEQ ID NO: 7410; WAN024BPA; Start 867; Stop 891
tgacagtggttatataggattgcta

SEQ ID NO: 467285 - DNA, 25 bp, Artificial
  probe
  misc_feature (1)..(25): SEQ ID NO: 7410; WAN024BPA; Start 546; Stop 570
atggatattacagttagcagactct

SEQ ID NO: 467286 - DNA, 25 bp, Artificial
  probe
  misc_feature (1)..(25): SEQ ID NO: 7410; WAN024BPA; Start 865; Stop 889
attgacagtggttatataggattgc

SEQ ID NO: 467287 - DNA, 25 bp, Artificial
  probe
  misc_feature (1)..(25): SEQ ID NO: 7410; WAN024BPA; Start 828; Stop 852
tgatggaattgtctcattagttcaa

SEQ ID NO: 467288 - DNA, 25 bp, Artificial
  probe
  misc_feature (1)..(25): SEQ ID NO: 7410; WAN024BPA; Start 827; Stop 851
ttgatggaattgtctcattagttca

SEQ ID NO: 467289 - DNA, 25 bp, Artificial
  probe
  misc_feature (1)..(25): SEQ ID NO: 7410; WAN024BPA; Start 547; Stop 571
tggatattacagttagcagactcta

SEQ ID NO: 467290 - DNA, 25 bp, Artificial
  probe
  misc_feature (1)..(25): SEQ ID NO: 7410; WAN024BPA; Start 829; Stop 853
gatggaattgtctcattagttcaag

SEQ ID NO: 467291 - DNA, 25 bp, Artificial
  probe
  misc_feature (1)..(25): SEQ ID NO: 7410; WAN024BPA; Start 548; Stop 572
ggatattacagttagcagactctag

SEQ ID NO: 467292 - DNA, 25 bp, Artificial
  probe
  misc_feature (1)..(25): SEQ ID NO: 7410; WAN024BPA; Start 545; Stop 569
tatggatattacagttagcagactc

SEQ ID NO: 467293 - DNA, 25 bp, Artificial
  probe
  misc_feature (1)..(25): SEQ ID NO: 7410; WAN024BPA; Start 1025; Stop 1049
gttacaccgtatttctattcccaat

SEQ ID NO: 467294 - DNA, 25 bp, Artificial
  probe
  misc_feature (1)..(25): SEQ ID NO: 7410; WAN024BPA; Start 826; Stop 850
attgatggaattgtctcattagttc

SEQ ID NO: 467295 - DNA, 25 bp, Artificial
  probe
  misc_feature (1)..(25): SEQ ID NO: 7410; WAN024BPA; Start 824; Stop 848
gaattgatggaattgtctcattagt

SEQ ID NO: 467296 - DNA, 25 bp, Artificial
  probe
  misc_feature (1)..(25): SEQ ID NO: 7410; WAN024BPA; Start 868; Stop 892
gacagtggttatataggattgctat

SEQ ID NO: 467297 - DNA, 25 bp, Artificial
  probe
  misc_feature (1)..(25): SEQ ID NO: 7410; WAN024BPA; Start 544; Stop 568
ttatggatattacagttagcagact

SEQ ID NO: 467298 - DNA, 25 bp, Artificial
  probe
  misc_feature (1)..(25): SEQ ID NO: 7410; WAN024BPA; Start 402; Stop 426
tggtggtattaggaatagtttagga

SEQ ID NO: 467299 - DNA, 25 bp, Artificial
  probe
  misc_feature (1)..(25): SEQ ID NO: 7410; WAN024BPA; Start 560; Stop 584
tagcagactctagaacatcaggata

SEQ ID NO: 467300 - DNA, 25 bp, Artificial
  probe
  misc_feature (1)..(25): SEQ ID NO: 7410; WAN024BPA; Start 561; Stop 585
agcagactctagaacatcaggatat

SEQ ID NO: 467301 - DNA, 25 bp, Artificial
  probe
  misc_feature (1)..(25): SEQ ID NO: 7410; WAN024BPA; Start 823; Stop 847
agaattgatggaattgtctcattag

SEQ ID NO: 467302 - DNA, 25 bp, Artificial
  probe
  misc_feature (1)..(25): SEQ ID NO: 7410; WAN024BPA; Start 559; Stop 583
ttagcagactctagaacatcaggat

SEQ ID NO: 467303 - DNA, 25 bp, Artificial
  probe
  misc_feature (1)..(25): SEQ ID NO: 7410; WAN024BPA; Start 869; Stop 893
acagtggttatataggattgctatt

SEQ ID NO: 467304 - DNA, 25 bp, Artificial
  probe
  misc_feature (1)..(25): SEQ ID NO: 7410; WAN024BPA; Start 458; Stop 482
tctattccttaaccgtttgtagttt

SEQ ID NO: 467305 - DNA, 25 bp, Artificial
  probe
  misc_feature (1)..(25): SEQ ID NO: 7410; WAN024BPA; Start 825; Stop 849
aattgatggaattgtctcattagtt

SEQ ID NO: 467306 - DNA, 25 bp, Artificial
  probe
  misc_feature (1)..(25): SEQ ID NO: 7410; WAN024BPA; Start 634; Stop 658
aagttaaatagaccgttgagtagtt

SEQ ID NO: 467307 - DNA, 25 bp, Artificial
  probe
  misc_feature (1)..(25): SEQ ID NO: 7410; WAN024BPA; Start 453; Stop 477
aatgatctattccttaaccgtttgt

SEQ ID NO: 467308 - DNA, 25 bp, Artificial
  probe
  misc_feature (1)..(25): SEQ ID NO: 7410; WAN024BPA; Start 635; Stop 659
agttaaatagaccgttgagtagttt

SEQ ID NO: 467309 - DNA, 25 bp, Artificial
  probe
  misc_feature (1)..(25): SEQ ID NO: 7410; WAN024BPA; Start 562; Stop 586
gcagactctagaacatcaggatata

SEQ ID NO: 467310 - DNA, 25 bp, Artificial
  probe
  misc_feature (1)..(25): SEQ ID NO: 7410; WAN024BPA; Start 456; Stop 480
gatctattccttaaccgtttgtagt

SEQ ID NO: 467311 - DNA, 25 bp, Artificial
  probe
  misc_feature (1)..(25): SEQ ID NO: 7410; WAN024BPA; Start 455; Stop 479
tgatctattccttaaccgtttgtag

SEQ ID NO: 467312 - DNA, 25 bp, Artificial
  probe
  misc_feature (1)..(25): SEQ ID NO: 7410; WAN024BPA; Start 457; Stop 481
atctattccttaaccgtttgtagtt

SEQ ID NO: 467313 - DNA, 25 bp, Artificial
  probe
  misc_feature (1)..(25): SEQ ID NO: 7411; WAN024DBG; Start 244; Stop 268
caagtttctcagtttagttcaagtg

SEQ ID NO: 467314 - DNA, 25 bp, Artificial
  probe
  misc_feature (1)..(25): SEQ ID NO: 7411; WAN024DBG; Start 513; Stop 537
attccatagaagtcaagtgaatcaa

SEQ ID NO: 467315 - DNA, 25 bp, Artificial
  probe
  misc_feature (1)..(25): SEQ ID NO: 7411; WAN024DBG; Start 512; Stop 536
aattccatagaagtcaagtgaatca

SEQ ID NO: 467316 - DNA, 25 bp, Artificial
  probe
  misc_feature (1)..(25): SEQ ID NO: 7411; WAN024DBG; Start 243; Stop 267
tcaagtttctcagtttagttcaagt

SEQ ID NO: 467317 - DNA, 25 bp, Artificial
  probe
  misc_feature (1)..(25): SEQ ID NO: 7411; WAN024DBG; Start 233; Stop 257
gtgacaaatctcaagtttctcagtt

SEQ ID NO: 467318 - DNA, 25 bp, Artificial
  probe
  misc_feature (1)..(25): SEQ ID NO: 7411; WAN024DBG; Start 229; Stop 253
gttggtgacaaatctcaagtttctc

SEQ ID NO: 467319 - DNA, 25 bp, Artificial
  probe
  misc_feature (1)..(25): SEQ ID NO: 7411; WAN024DBG; Start 227; Stop 251
tagttggtgacaaatctcaagtttc

SEQ ID NO: 467320 - DNA, 25 bp, Artificial
  probe
  misc_feature (1)..(25): SEQ ID NO: 7411; WAN024DBG; Start 241; Stop 265
tctcaagtttctcagtttagttcaa

SEQ ID NO: 467321 - DNA, 25 bp, Artificial
  probe
  misc_feature (1)..(25): SEQ ID NO: 7411; WAN024DBG; Start 230; Stop 254
ttggtgacaaatctcaagtttctca

SEQ ID NO: 467322 - DNA, 25 bp, Artificial
  probe
  misc_feature (1)..(25): SEQ ID NO: 7411; WAN024DBG; Start 228; Stop 252
agttggtgacaaatctcaagtttct

SEQ ID NO: 467323 - DNA, 25 bp, Artificial
  probe
  misc_feature (1)..(25): SEQ ID NO: 7411; WAN024DBG; Start 234; Stop 258
tgacaaatctcaagtttctcagttt

SEQ ID NO: 467324 - DNA, 25 bp, Artificial
  probe
  misc_feature (1)..(25): SEQ ID NO: 7411; WAN024DBG; Start 380; Stop 404
agtcctctagtaggtgtcattcgtt

SEQ ID NO: 467325 - DNA, 25 bp, Artificial
  probe
  misc_feature (1)..(25): SEQ ID NO: 7411; WAN024DBG; Start 242; Stop 266
ctcaagtttctcagtttagttcaag

SEQ ID NO: 467326 - DNA, 25 bp, Artificial
  probe
  misc_feature (1)..(25): SEQ ID NO: 7411; WAN024DBG; Start 240; Stop 264
atctcaagtttctcagtttagttca

SEQ ID NO: 467327 - DNA, 25 bp, Artificial
  probe
  misc_feature (1)..(25): SEQ ID NO: 7411; WAN024DBG; Start 514; Stop 538
ttccatagaagtcaagtgaatcaaa

SEQ ID NO: 467328 - DNA, 25 bp, Artificial
  probe
  misc_feature (1)..(25): SEQ ID NO: 7411; WAN024DBG; Start 232; Stop 256
ggtgacaaatctcaagtttctcagt

SEQ ID NO: 467329 - DNA, 25 bp, Artificial
  probe
  misc_feature (1)..(25): SEQ ID NO: 7411; WAN024DBG; Start 231; Stop 255
tggtgacaaatctcaagtttctcag

SEQ ID NO: 467330 - DNA, 25 bp, Artificial
  probe
  misc_feature (1)..(25): SEQ ID NO: 7411; WAN024DBG; Start 226; Stop 250
atagttggtgacaaatctcaagttt

SEQ ID NO: 467331 - DNA, 25 bp, Artificial
  probe
  misc_feature (1)..(25): SEQ ID NO: 7411; WAN024DBG; Start 225; Stop 249
aatagttggtgacaaatctcaagtt

SEQ ID NO: 467332 - DNA, 25 bp, Artificial
  probe
  misc_feature (1)..(25): SEQ ID NO: 7411; WAN024DBG; Start 224; Stop 248
aaatagttggtgacaaatctcaagt

SEQ ID NO: 467333 - DNA, 25 bp, Artificial
  probe
  misc_feature (1)..(25): SEQ ID NO: 7411; WAN024DBG; Start 554; Stop 578
atggacctaaagttcaatctgtctt

SEQ ID NO: 467334 - DNA, 25 bp, Artificial
  probe
  misc_feature (1)..(25): SEQ ID NO: 7411; WAN024DBG; Start 553; Stop 577
gatggacctaaagttcaatctgtct

SEQ ID NO: 467335 - DNA, 25 bp, Artificial
  probe
  misc_feature (1)..(25): SEQ ID NO: 7411; WAN024DBG; Start 245; Stop 269
aagtttctcagtttagttcaagtga

SEQ ID NO: 467336 - DNA, 25 bp, Artificial
  probe
  misc_feature (1)..(25): SEQ ID NO: 7411; WAN024DBG; Start 555; Stop 579
tggacctaaagttcaatctgtctta

SEQ ID NO: 467337 - DNA, 25 bp, Artificial
  probe
  misc_feature (1)..(25): SEQ ID NO: 7411; WAN024DBG; Start 126; Stop 150
tggttattatgtcaaactactggtt

SEQ ID NO: 467338 - DNA, 25 bp, Artificial
  probe
  misc_feature (1)..(25): SEQ ID NO: 7411; WAN024DBG; Start 125; Stop 149
atggttattatgtcaaactactggt

SEQ ID NO: 467339 - DNA, 25 bp, Artificial
  probe
  misc_feature (1)..(25): SEQ ID NO: 7411; WAN024DBG; Start 610; Stop 634
gagggatttatactgattagacaca

SEQ ID NO: 467340 - DNA, 25 bp, Artificial
  probe
  misc_feature (1)..(25): SEQ ID NO: 7411; WAN024DBG; Start 383; Stop 407
cctctagtaggtgtcattcgtttac

SEQ ID NO: 467341 - DNA, 25 bp, Artificial
  probe
  misc_feature (1)..(25): SEQ ID NO: 7411; WAN024DBG; Start 382; Stop 406
tcctctagtaggtgtcattcgttta

SEQ ID NO: 467342 - DNA, 25 bp, Artificial
  probe
  misc_feature (1)..(25): SEQ ID NO: 7411; WAN024DBG; Start 607; Stop 631
gcagagggatttatactgattagac

SEQ ID NO: 467343 - DNA, 25 bp, Artificial
  probe
  misc_feature (1)..(25): SEQ ID NO: 7411; WAN024DBG; Start 237; Stop 261
caaatctcaagtttctcagtttagt

SEQ ID NO: 467344 - DNA, 25 bp, Artificial
  probe
  misc_feature (1)..(25): SEQ ID NO: 7411; WAN024DBG; Start 236; Stop 260
acaaatctcaagtttctcagtttag

SEQ ID NO: 467345 - DNA, 25 bp, Artificial
  probe
  misc_feature (1)..(25): SEQ ID NO: 7411; WAN024DBG; Start 235; Stop 259
gacaaatctcaagtttctcagttta

SEQ ID NO: 467346 - DNA, 25 bp, Artificial
  probe
  misc_feature (1)..(25): SEQ ID NO: 7412; WAN024F87; Start 37; Stop 61
atgatggatcgagttctgcttatag

SEQ ID NO: 467347 - DNA, 25 bp, Artificial
  probe
  misc_feature (1)..(25): SEQ ID NO: 7412; WAN024F87; Start 35; Stop 59
ctatgatggatcgagttctgcttat

SEQ ID NO: 467348 - DNA, 25 bp, Artificial
  probe
  misc_feature (1)..(25): SEQ ID NO: 7412; WAN024F87; Start 39; Stop 63
gatggatcgagttctgcttatagtc

SEQ ID NO: 467349 - DNA, 25 bp, Artificial
  probe
  misc_feature (1)..(25): SEQ ID NO: 7412; WAN024F87; Start 40; Stop 64
atggatcgagttctgcttatagtct

SEQ ID NO: 467350 - DNA, 25 bp, Artificial
  probe
  misc_feature (1)..(25): SEQ ID NO: 7412; WAN024F87; Start 34; Stop 58
tctatgatggatcgagttctgctta

SEQ ID NO: 467351 - DNA, 25 bp, Artificial
  probe
  misc_feature (1)..(25): SEQ ID NO: 7412; WAN024F87; Start 36; Stop 60
tatgatggatcgagttctgcttata

SEQ ID NO: 467352 - DNA, 25 bp, Artificial
  probe
  misc_feature (1)..(25): SEQ ID NO: 7412; WAN024F87; Start 38; Stop 62
tgatggatcgagttctgcttatagt

SEQ ID NO: 467353 - DNA, 25 bp, Artificial
  probe
  misc_feature (1)..(25): SEQ ID NO: 7412; WAN024F87; Start 43; Stop 67
gatcgagttctgcttatagtctcag

SEQ ID NO: 467354 - DNA, 25 bp, Artificial
  probe
  misc_feature (1)..(25): SEQ ID NO: 7412; WAN024F87; Start 42; Stop 66
ggatcgagttctgcttatagtctca

SEQ ID NO: 467355 - DNA, 25 bp, Artificial
  probe
  misc_feature (1)..(25): SEQ ID NO: 7412; WAN024F87; Start 41; Stop 65
tggatcgagttctgcttatagtctc

SEQ ID NO: 467356 - DNA, 25 bp, Artificial
  probe
  misc_feature (1)..(25): SEQ ID NO: 7412; WAN024F87; Start 33; Stop 57
gtctatgatggatcgagttctgctt

SEQ ID NO: 467357 - DNA, 25 bp, Artificial
  probe
  misc_feature (1)..(25): SEQ ID NO: 7412; WAN024F87; Start 23; Stop 47
ttaagatttcgtctatgatggatcg

SEQ ID NO: 467358 - DNA, 25 bp, Artificial
  probe
  misc_feature (1)..(25): SEQ ID NO: 7412; WAN024F87; Start 55; Stop 79
cttatagtctcagcagttgcttctg

SEQ ID NO: 467359 - DNA, 25 bp, Artificial
  probe
  misc_feature (1)..(25): SEQ ID NO: 7412; WAN024F87; Start 56; Stop 80
ttatagtctcagcagttgcttctgt

SEQ ID NO: 467360 - DNA, 25 bp, Artificial
  probe
  misc_feature (1)..(25): SEQ ID NO: 7412; WAN024F87; Start 44; Stop 68
atcgagttctgcttatagtctcagc

SEQ ID NO: 467361 - DNA, 25 bp, Artificial
  probe
  misc_feature (1)..(25): SEQ ID NO: 7412; WAN024F87; Start 30; Stop 54
ttcgtctatgatggatcgagttctg

SEQ ID NO: 467362 - DNA, 25 bp, Artificial
  probe
  misc_feature (1)..(25): SEQ ID NO: 7412; WAN024F87; Start 57; Stop 81
tatagtctcagcagttgcttctgtc

SEQ ID NO: 467363 - DNA, 25 bp, Artificial
  probe
  misc_feature (1)..(25): SEQ ID NO: 7412; WAN024F87; Start 83; Stop 107
ctgaagaaaagagagtcggagaaaa

SEQ ID NO: 467364 - DNA, 25 bp, Artificial
  probe
  misc_feature (1)..(25): SEQ ID NO: 7412; WAN024F87; Start 54; Stop 78
gcttatagtctcagcagttgcttct

SEQ ID NO: 467365 - DNA, 25 bp, Artificial
  probe
  misc_feature (1)..(25): SEQ ID NO: 7412; WAN024F87; Start 22; Stop 46
tttaagatttcgtctatgatggatc

SEQ ID NO: 467366 - DNA, 25 bp, Artificial
  probe
  misc_feature (1)..(25): SEQ ID NO: 7412; WAN024F87; Start 82; Stop 106
tctgaagaaaagagagtcggagaaa

SEQ ID NO: 467367 - DNA, 25 bp, Artificial
  probe
  misc_feature (1)..(25): SEQ ID NO: 7412; WAN024F87; Start 32; Stop 56
cgtctatgatggatcgagttctgct

SEQ ID NO: 467368 - DNA, 25 bp, Artificial
  probe
  misc_feature (1)..(25): SEQ ID NO: 7412; WAN024F87; Start 25; Stop 49
aagatttcgtctatgatggatcgag

SEQ ID NO: 467369 - DNA, 25 bp, Artificial
  probe
  misc_feature (1)..(25): SEQ ID NO: 7412; WAN024F87; Start 28; Stop 52
atttcgtctatgatggatcgagttc

SEQ ID NO: 467370 - DNA, 25 bp, Artificial
  probe
  misc_feature (1)..(25): SEQ ID NO: 7412; WAN024F87; Start 27; Stop 51
gatttcgtctatgatggatcgagtt

SEQ ID NO: 467371 - DNA, 25 bp, Artificial
  probe
  misc_feature (1)..(25): SEQ ID NO: 7412; WAN024F87; Start 24; Stop 48
taagatttcgtctatgatggatcga

SEQ ID NO: 467372 - DNA, 25 bp, Artificial
  probe
  misc_feature (1)..(25): SEQ ID NO: 7412; WAN024F87; Start 26; Stop 50
agatttcgtctatgatggatcgagt

SEQ ID NO: 467373 - DNA, 25 bp, Artificial
  probe
  misc_feature (1)..(25): SEQ ID NO: 7412; WAN024F87; Start 29; Stop 53
tttcgtctatgatggatcgagttct

SEQ ID NO: 467374 - DNA, 25 bp, Artificial
  probe
  misc_feature (1)..(25): SEQ ID NO: 7412; WAN024F87; Start 58; Stop 82
atagtctcagcagttgcttctgtct

SEQ ID NO: 467375 - DNA, 25 bp, Artificial
  probe
  misc_feature (1)..(25): SEQ ID NO: 7412; WAN024F87; Start 31; Stop 55
tcgtctatgatggatcgagttctgc

SEQ ID NO: 467376 - DNA, 25 bp, Artificial
  probe
  misc_feature (1)..(25): SEQ ID NO: 7412; WAN024F87; Start 59; Stop 83
tagtctcagcagttgcttctgtctc

SEQ ID NO: 467377 - DNA, 25 bp, Artificial
  probe
  misc_feature (1)..(25): SEQ ID NO: 7412; WAN024F87; Start 21; Stop 45
ttttaagatttcgtctatgatggat

SEQ ID NO: 467378 - DNA, 25 bp, Artificial
  probe
  misc_feature (1)..(25): SEQ ID NO: 7412; WAN024F87; Start 20; Stop 44
attttaagatttcgtctatgatgga

SEQ ID NO: 467379 - DNA, 25 bp, Artificial
  probe
  misc_feature (1)..(25): SEQ ID NO: 7414; WAN024AT5; Start 2; Stop 26
tgaacaagaatctttacactgctag

SEQ ID NO: 467380 - DNA, 25 bp, Artificial
  probe
  misc_feature (1)..(25): SEQ ID NO: 7414; WAN024AT5; Start 1; Stop 25
ttgaacaagaatctttacactgcta

SEQ ID NO: 467381 - DNA, 25 bp, Artificial
  probe
  misc_feature (1)..(25): SEQ ID NO: 7414; WAN024AT5; Start 3; Stop 27
gaacaagaatctttacactgctagt

SEQ ID NO: 467382 - DNA, 25 bp, Artificial
  probe
  misc_feature (1)..(25): SEQ ID NO: 7414; WAN024AT5; Start 4; Stop 28
aacaagaatctttacactgctagta

SEQ ID NO: 467383 - DNA, 25 bp, Artificial
  probe
  misc_feature (1)..(25): SEQ ID NO: 7414; WAN024AT5; Start 5; Stop 29
acaagaatctttacactgctagtat

SEQ ID NO: 467384 - DNA, 25 bp, Artificial
  probe
  misc_feature (1)..(25): SEQ ID NO: 7414; WAN024AT5; Start 33; Stop 57
actcattttgaccttggattactca

SEQ ID NO: 467385 - DNA, 25 bp, Artificial
  probe
  misc_feature (1)..(25): SEQ ID NO: 7414; WAN024AT5; Start 32; Stop 56
cactcattttgaccttggattactc

SEQ ID NO: 467386 - DNA, 25 bp, Artificial
  probe
  misc_feature (1)..(25): SEQ ID NO: 7414; WAN024AT5; Start 27; Stop 51
tatagcactcattttgaccttggat

SEQ ID NO: 467387 - DNA, 25 bp, Artificial
  probe
  misc_feature (1)..(25): SEQ ID NO: 7414; WAN024AT5; Start 29; Stop 53
tagcactcattttgaccttggatta

SEQ ID NO: 467388 - DNA, 25 bp, Artificial
  probe
  misc_feature (1)..(25): SEQ ID NO: 7414; WAN024AT5; Start 28; Stop 52
atagcactcattttgaccttggatt

SEQ ID NO: 467389 - DNA, 25 bp, Artificial
  probe
  misc_feature (1)..(25): SEQ ID NO: 7414; WAN024AT5; Start 26; Stop 50
gtatagcactcattttgaccttgga

SEQ ID NO: 467390 - DNA, 25 bp, Artificial
  probe
  misc_feature (1)..(25): SEQ ID NO: 7414; WAN024AT5; Start 25; Stop 49
agtatagcactcattttgaccttgg

SEQ ID NO: 467391 - DNA, 25 bp, Artificial
  probe
  misc_feature (1)..(25): SEQ ID NO: 7414; WAN024AT5; Start 40; Stop 64
ttgaccttggattactcaaatcatg

SEQ ID NO: 467392 - DNA, 25 bp, Artificial
  probe
  misc_feature (1)..(25): SEQ ID NO: 7414; WAN024AT5; Start 24; Stop 48
tagtatagcactcattttgaccttg

SEQ ID NO: 467393 - DNA, 25 bp, Artificial
  probe
  misc_feature (1)..(25): SEQ ID NO: 7414; WAN024AT5; Start 31; Stop 55
gcactcattttgaccttggattact

SEQ ID NO: 467394 - DNA, 25 bp, Artificial
  probe
  misc_feature (1)..(25): SEQ ID NO: 7414; WAN024AT5; Start 30; Stop 54
agcactcattttgaccttggattac

SEQ ID NO: 467395 - DNA, 25 bp, Artificial
  probe
  misc_feature (1)..(25): SEQ ID NO: 7414; WAN024AT5; Start 23; Stop 47
ctagtatagcactcattttgacctt

SEQ ID NO: 467396 - DNA, 25 bp, Artificial
  probe
  misc_feature (1)..(25): SEQ ID NO: 7414; WAN024AT5; Start 6; Stop 30
caagaatctttacactgctagtata

SEQ ID NO: 467397 - DNA, 25 bp, Artificial
  probe
  misc_feature (1)..(25): SEQ ID NO: 7414; WAN024AT5; Start 7; Stop 31
aagaatctttacactgctagtatag

SEQ ID NO: 467398 - DNA, 25 bp, Artificial
  probe
  misc_feature (1)..(25): SEQ ID NO: 7414; WAN024AT5; Start 41; Stop 65
tgaccttggattactcaaatcatga

SEQ ID NO: 467399 - DNA, 25 bp, Artificial
  probe
  misc_feature (1)..(25): SEQ ID NO: 7414; WAN024AT5; Start 48; Stop 72
ggattactcaaatcatgaatggtca

SEQ ID NO: 467400 - DNA, 25 bp, Artificial
  probe
  misc_feature (1)..(25): SEQ ID NO: 7414; WAN024AT5; Start 47; Stop 71
tggattactcaaatcatgaatggtc

SEQ ID NO: 467401 - DNA, 25 bp, Artificial
  probe
  misc_feature (1)..(25): SEQ ID NO: 7414; WAN024AT5; Start 42; Stop 66
gaccttggattactcaaatcatgaa

SEQ ID NO: 467402 - DNA, 25 bp, Artificial
  probe
  misc_feature (1)..(25): SEQ ID NO: 7414; WAN024AT5; Start 46; Stop 70
ttggattactcaaatcatgaatggt

SEQ ID NO: 467403 - DNA, 25 bp, Artificial
  probe
  misc_feature (1)..(25): SEQ ID NO: 7414; WAN024AT5; Start 43; Stop 67
accttggattactcaaatcatgaat

SEQ ID NO: 467404 - DNA, 25 bp, Artificial
  probe
  misc_feature (1)..(25): SEQ ID NO: 7414; WAN024AT5; Start 45; Stop 69
cttggattactcaaatcatgaatgg

SEQ ID NO: 467405 - DNA, 25 bp, Artificial
  probe
  misc_feature (1)..(25): SEQ ID NO: 7414; WAN024AT5; Start 44; Stop 68
ccttggattactcaaatcatgaatg

SEQ ID NO: 467406 - DNA, 25 bp, Artificial
  probe
  misc_feature (1)..(25): SEQ ID NO: 7414; WAN024AT5; Start 8; Stop 32
agaatctttacactgctagtatagc

SEQ ID NO: 467407 - DNA, 25 bp, Artificial
  probe
  misc_feature (1)..(25): SEQ ID NO: 7414; WAN024AT5; Start 34; Stop 58
ctcattttgaccttggattactcaa

SEQ ID NO: 467408 - DNA, 25 bp, Artificial
  probe
  misc_feature (1)..(25): SEQ ID NO: 7414; WAN024AT5; Start 53; Stop 77
actcaaatcatgaatggtcatcaaa

SEQ ID NO: 467409 - DNA, 25 bp, Artificial
  probe
  misc_feature (1)..(25): SEQ ID NO: 7414; WAN024AT5; Start 52; Stop 76
tactcaaatcatgaatggtcatcaa

SEQ ID NO: 467410 - DNA, 25 bp, Artificial
  probe
  misc_feature (1)..(25): SEQ ID NO: 7414; WAN024AT5; Start 51; Stop 75
ttactcaaatcatgaatggtcatca

SEQ ID NO: 467411 - DNA, 25 bp, Artificial
  probe
  misc_feature (1)..(25): SEQ ID NO: 7414; WAN024AT5; Start 50; Stop 74
attactcaaatcatgaatggtcatc

SEQ ID NO: 467412 - DNA, 25 bp, Artificial
  probe
  misc_feature (1)..(25): SEQ ID NO: 7415; WAN024FXJ; Start 240; Stop 264
tagcagatgtcatatcgttctcctt

SEQ ID NO: 467413 - DNA, 25 bp, Artificial
  probe
  misc_feature (1)..(25): SEQ ID NO: 7415; WAN024FXJ; Start 239; Stop 263
ttagcagatgtcatatcgttctcct

SEQ ID NO: 467414 - DNA, 25 bp, Artificial
  probe
  misc_feature (1)..(25): SEQ ID NO: 7415; WAN024FXJ; Start 236; Stop 260
tctttagcagatgtcatatcgttct

SEQ ID NO: 467415 - DNA, 25 bp, Artificial
  probe
  misc_feature (1)..(25): SEQ ID NO: 7415; WAN024FXJ; Start 238; Stop 262
tttagcagatgtcatatcgttctcc

SEQ ID NO: 467416 - DNA, 25 bp, Artificial
  probe
  misc_feature (1)..(25): SEQ ID NO: 7415; WAN024FXJ; Start 237; Stop 261
ctttagcagatgtcatatcgttctc

SEQ ID NO: 467417 - DNA, 25 bp, Artificial
  probe
  misc_feature (1)..(25): SEQ ID NO: 7415; WAN024FXJ; Start 81; Stop 105
gctcagtaatacgtgccaagatatt

SEQ ID NO: 467418 - DNA, 25 bp, Artificial
  probe
  misc_feature (1)..(25): SEQ ID NO: 7415; WAN024FXJ; Start 235; Stop 259
ttctttagcagatgtcatatcgttc

SEQ ID NO: 467419 - DNA, 25 bp, Artificial
  probe
  misc_feature (1)..(25): SEQ ID NO: 7415; WAN024FXJ; Start 132; Stop 156
caaatacaggttccaaagtgttgaa

SEQ ID NO: 467420 - DNA, 25 bp, Artificial
  probe
  misc_feature (1)..(25): SEQ ID NO: 7415; WAN024FXJ; Start 130; Stop 154
ttcaaatacaggttccaaagtgttg

SEQ ID NO: 467421 - DNA, 25 bp, Artificial
  probe
  misc_feature (1)..(25): SEQ ID NO: 7415; WAN024FXJ; Start 133; Stop 157
aaatacaggttccaaagtgttgaaa

SEQ ID NO: 467422 - DNA, 25 bp, Artificial
  probe
  misc_feature (1)..(25): SEQ ID NO: 7415; WAN024FXJ; Start 129; Stop 153
tttcaaatacaggttccaaagtgtt

SEQ ID NO: 467423 - DNA, 25 bp, Artificial
  probe
  misc_feature (1)..(25): SEQ ID NO: 7415; WAN024FXJ; Start 234; Stop 258
attctttagcagatgtcatatcgtt

SEQ ID NO: 467424 - DNA, 25 bp, Artificial
  probe
  misc_feature (1)..(25): SEQ ID NO: 7415; WAN024FXJ; Start 241; Stop 265
agcagatgtcatatcgttctccttt

SEQ ID NO: 467425 - DNA, 25 bp, Artificial
  probe
  misc_feature (1)..(25): SEQ ID NO: 7415; WAN024FXJ; Start 105; Stop 129
tttcttcgatatactcagggtgttt

SEQ ID NO: 467426 - DNA, 25 bp, Artificial
  probe
  misc_feature (1)..(25): SEQ ID NO: 7415; WAN024FXJ; Start 233; Stop 257
tattctttagcagatgtcatatcgt

SEQ ID NO: 467427 - DNA, 25 bp, Artificial
  probe
  misc_feature (1)..(25): SEQ ID NO: 7415; WAN024FXJ; Start 218; Stop 242
aacacgctttggatatattctttag

SEQ ID NO: 467428 - DNA, 25 bp, Artificial
  probe
  misc_feature (1)..(25): SEQ ID NO: 7415; WAN024FXJ; Start 82; Stop 106
ctcagtaatacgtgccaagatattt

SEQ ID NO: 467429 - DNA, 25 bp, Artificial
  probe
  misc_feature (1)..(25): SEQ ID NO: 7415; WAN024FXJ; Start 227; Stop 251
tggatatattctttagcagatgtca

SEQ ID NO: 467430 - DNA, 25 bp, Artificial
  probe
  misc_feature (1)..(25): SEQ ID NO: 7415; WAN024FXJ; Start 220; Stop 244
cacgctttggatatattctttagca

SEQ ID NO: 467431 - DNA, 25 bp, Artificial
  probe
  misc_feature (1)..(25): SEQ ID NO: 7415; WAN024FXJ; Start 219; Stop 243
acacgctttggatatattctttagc

SEQ ID NO: 467432 - DNA, 25 bp, Artificial
  probe
  misc_feature (1)..(25): SEQ ID NO: 7415; WAN024FXJ; Start 217; Stop 241
aaacacgctttggatatattcttta

SEQ ID NO: 467433 - DNA, 25 bp, Artificial
  probe
  misc_feature (1)..(25): SEQ ID NO: 7415; WAN024FXJ; Start 221; Stop 245
acgctttggatatattctttagcag

SEQ ID NO: 467434 - DNA, 25 bp, Artificial
  probe
  misc_feature (1)..(25): SEQ ID NO: 7415; WAN024FXJ; Start 210; Stop 234
cagtttcaaacacgctttggatata

SEQ ID NO: 467435 - DNA, 25 bp, Artificial
  probe
  misc_feature (1)..(25): SEQ ID NO: 7415; WAN024FXJ; Start 222; Stop 246
cgctttggatatattctttagcaga

SEQ ID NO: 467436 - DNA, 25 bp, Artificial
  probe
  misc_feature (1)..(25): SEQ ID NO: 7415; WAN024FXJ; Start 159; Stop 183
attcttcaacagcttggaggaattc

SEQ ID NO: 467437 - DNA, 25 bp, Artificial
  probe
  misc_feature (1)..(25): SEQ ID NO: 7415; WAN024FXJ; Start 160; Stop 184
ttcttcaacagcttggaggaattca

SEQ ID NO: 467438 - DNA, 25 bp, Artificial
  probe
  misc_feature (1)..(25): SEQ ID NO: 7415; WAN024FXJ; Start 232; Stop 256
atattctttagcagatgtcatatcg

SEQ ID NO: 467439 - DNA, 25 bp, Artificial
  probe
  misc_feature (1)..(25): SEQ ID NO: 7415; WAN024FXJ; Start 211; Stop 235
agtttcaaacacgctttggatatat

SEQ ID NO: 467440 - DNA, 25 bp, Artificial
  probe
  misc_feature (1)..(25): SEQ ID NO: 7415; WAN024FXJ; Start 157; Stop 181
aaattcttcaacagcttggaggaat

SEQ ID NO: 467441 - DNA, 25 bp, Artificial
  probe
  misc_feature (1)..(25): SEQ ID NO: 7415; WAN024FXJ; Start 215; Stop 239
tcaaacacgctttggatatattctt

SEQ ID NO: 467442 - DNA, 25 bp, Artificial
  probe
  misc_feature (1)..(25): SEQ ID NO: 7415; WAN024FXJ; Start 214; Stop 238
ttcaaacacgctttggatatattct

SEQ ID NO: 467443 - DNA, 25 bp, Artificial
  probe
  misc_feature (1)..(25): SEQ ID NO: 7415; WAN024FXJ; Start 208; Stop 232
tacagtttcaaacacgctttggata

SEQ ID NO: 467444 - DNA, 25 bp, Artificial
  probe
  misc_feature (1)..(25): SEQ ID NO: 7415; WAN024FXJ; Start 46; Stop 70
aacccaaggaacacggaaagaaatc

SEQ ID NO: 467445 - DNA, 25 bp, Artificial
  probe
  misc_feature (1)..(25): SEQ ID NO: 7416; WAN024GKE; Start 24; Stop 48
taacctgcttgtctgtaacgatata

SEQ ID NO: 467446 - DNA, 25 bp, Artificial
  probe
  misc_feature (1)..(25): SEQ ID NO: 7416; WAN024GKE; Start 23; Stop 47
gtaacctgcttgtctgtaacgatat

SEQ ID NO: 467447 - DNA, 25 bp, Artificial
  probe
  misc_feature (1)..(25): SEQ ID NO: 7416; WAN024GKE; Start 12; Stop 36
aattaagaatggtaacctgcttgtc

SEQ ID NO: 467448 - DNA, 25 bp, Artificial
  probe
  misc_feature (1)..(25): SEQ ID NO: 7416; WAN024GKE; Start 11; Stop 35
gaattaagaatggtaacctgcttgt

SEQ ID NO: 467449 - DNA, 25 bp, Artificial
  probe
  misc_feature (1)..(25): SEQ ID NO: 7416; WAN024GKE; Start 13; Stop 37
attaagaatggtaacctgcttgtct

SEQ ID NO: 467450 - DNA, 25 bp, Artificial
  probe
  misc_feature (1)..(25): SEQ ID NO: 7416; WAN024GKE; Start 10; Stop 34
agaattaagaatggtaacctgcttg

SEQ ID NO: 467451 - DNA, 25 bp, Artificial
  probe
  misc_feature (1)..(25): SEQ ID NO: 7416; WAN024GKE; Start 26; Stop 50
acctgcttgtctgtaacgatatatt

SEQ ID NO: 467452 - DNA, 25 bp, Artificial
  probe
  misc_feature (1)..(25): SEQ ID NO: 7416; WAN024GKE; Start 25; Stop 49
aacctgcttgtctgtaacgatatat

SEQ ID NO: 467453 - DNA, 25 bp, Artificial
  probe
  misc_feature (1)..(25): SEQ ID NO: 7416; WAN024GKE; Start 8; Stop 32
gtagaattaagaatggtaacctgct

SEQ ID NO: 467454 - DNA, 25 bp, Artificial
  probe
  misc_feature (1)..(25): SEQ ID NO: 7416; WAN024GKE; Start 7; Stop 31
agtagaattaagaatggtaacctgc

SEQ ID NO: 467455 - DNA, 25 bp, Artificial
  probe
  misc_feature (1)..(25): SEQ ID NO: 7416; WAN024GKE; Start 14; Stop 38
ttaagaatggtaacctgcttgtctg

SEQ ID NO: 467456 - DNA, 25 bp, Artificial
  probe
  misc_feature (1)..(25): SEQ ID NO: 7416; WAN024GKE; Start 18; Stop 42
gaatggtaacctgcttgtctgtaac

SEQ ID NO: 467457 - DNA, 25 bp, Artificial
  probe
  misc_feature (1)..(25): SEQ ID NO: 7416; WAN024GKE; Start 257; Stop 281
tcagtcatggattggatattagagt

SEQ ID NO: 467458 - DNA, 25 bp, Artificial
  probe
  misc_feature (1)..(25): SEQ ID NO: 7416; WAN024GKE; Start 258; Stop 282
cagtcatggattggatattagagtc

SEQ ID NO: 467459 - DNA, 25 bp, Artificial
  probe
  misc_feature (1)..(25): SEQ ID NO: 7416; WAN024GKE; Start 259; Stop 283
agtcatggattggatattagagtct

SEQ ID NO: 467460 - DNA, 25 bp, Artificial
  probe
  misc_feature (1)..(25): SEQ ID NO: 7416; WAN024GKE; Start 17; Stop 41
agaatggtaacctgcttgtctgtaa

SEQ ID NO: 467461 - DNA, 25 bp, Artificial
  probe
  misc_feature (1)..(25): SEQ ID NO: 7416; WAN024GKE; Start 16; Stop 40
aagaatggtaacctgcttgtctgta

SEQ ID NO: 467462 - DNA, 25 bp, Artificial
  probe
  misc_feature (1)..(25): SEQ ID NO: 7416; WAN024GKE; Start 15; Stop 39
taagaatggtaacctgcttgtctgt

SEQ ID NO: 467463 - DNA, 25 bp, Artificial
  probe
  misc_feature (1)..(25): SEQ ID NO: 7416; WAN024GKE; Start 9; Stop 33
tagaattaagaatggtaacctgctt

SEQ ID NO: 467464 - DNA, 25 bp, Artificial
  probe
  misc_feature (1)..(25): SEQ ID NO: 7416; WAN024GKE; Start 22; Stop 46
ggtaacctgcttgtctgtaacgata

SEQ ID NO: 467465 - DNA, 25 bp, Artificial
  probe
  misc_feature (1)..(25): SEQ ID NO: 7416; WAN024GKE; Start 256; Stop 280
ttcagtcatggattggatattagag

SEQ ID NO: 467466 - DNA, 25 bp, Artificial
  probe
  misc_feature (1)..(25): SEQ ID NO: 7416; WAN024GKE; Start 5; Stop 29
acagtagaattaagaatggtaacct

SEQ ID NO: 467467 - DNA, 25 bp, Artificial
  probe
  misc_feature (1)..(25): SEQ ID NO: 7416; WAN024GKE; Start 255; Stop 279
attcagtcatggattggatattaga

SEQ ID NO: 467468 - DNA, 25 bp, Artificial
  probe
  misc_feature (1)..(25): SEQ ID NO: 7416; WAN024GKE; Start 153; Stop 177
ggtcagcaaacaaattggtaacatt

SEQ ID NO: 467469 - DNA, 25 bp, Artificial
  probe
  misc_feature (1)..(25): SEQ ID NO: 7416; WAN024GKE; Start 230; Stop 254
gtgccacgaccaataatttgtttaa

SEQ ID NO: 467470 - DNA, 25 bp, Artificial
  probe
  misc_feature (1)..(25): SEQ ID NO: 7416; WAN024GKE; Start 260; Stop 284
gtcatggattggatattagagtcta

SEQ ID NO: 467471 - DNA, 25 bp, Artificial
  probe
  misc_feature (1)..(25): SEQ ID NO: 7416; WAN024GKE; Start 156; Stop 180
cagcaaacaaattggtaacatttcg

SEQ ID NO: 467472 - DNA, 25 bp, Artificial
  probe
  misc_feature (1)..(25): SEQ ID NO: 7416; WAN024GKE; Start 154; Stop 178
gtcagcaaacaaattggtaacattt

SEQ ID NO: 467473 - DNA, 25 bp, Artificial
  probe
  misc_feature (1)..(25): SEQ ID NO: 7416; WAN024GKE; Start 27; Stop 51
cctgcttgtctgtaacgatatattt

SEQ ID NO: 467474 - DNA, 25 bp, Artificial
  probe
  misc_feature (1)..(25): SEQ ID NO: 7416; WAN024GKE; Start 19; Stop 43
aatggtaacctgcttgtctgtaacg

SEQ ID NO: 467475 - DNA, 25 bp, Artificial
  probe
  misc_feature (1)..(25): SEQ ID NO: 7416; WAN024GKE; Start 4; Stop 28
aacagtagaattaagaatggtaacc

SEQ ID NO: 467476 - DNA, 25 bp, Artificial
  probe
  misc_feature (1)..(25): SEQ ID NO: 7416; WAN024GKE; Start 155; Stop 179
tcagcaaacaaattggtaacatttc

SEQ ID NO: 467477 - DNA, 25 bp, Artificial
  probe
  misc_feature (1)..(25): SEQ ID NO: 7416; WAN024GKE; Start 6; Stop 30
cagtagaattaagaatggtaacctg

SEQ ID NO: 467478 - DNA, 25 bp, Artificial
  probe
  misc_feature (1)..(25): SEQ ID NO: 7417; WAN024F6H; Start 45; Stop 69
cataaacaaagagactcatcaagcc

SEQ ID NO: 467479 - DNA, 25 bp, Artificial
  probe
  misc_feature (1)..(25): SEQ ID NO: 7417; WAN024F6H; Start 42; Stop 66
cagcataaacaaagagactcatcaa

SEQ ID NO: 467480 - DNA, 25 bp, Artificial
  probe
  misc_feature (1)..(25): SEQ ID NO: 7417; WAN024F6H; Start 44; Stop 68
gcataaacaaagagactcatcaagc

SEQ ID NO: 467481 - DNA, 25 bp, Artificial
  probe
  misc_feature (1)..(25): SEQ ID NO: 7417; WAN024F6H; Start 43; Stop 67
agcataaacaaagagactcatcaag

SEQ ID NO: 467482 - DNA, 25 bp, Artificial
  probe
  misc_feature (1)..(25): SEQ ID NO: 7417; WAN024F6H; Start 46; Stop 70
ataaacaaagagactcatcaagccc

SEQ ID NO: 467483 - DNA, 25 bp, Artificial
  probe
  misc_feature (1)..(25): SEQ ID NO: 7417; WAN024F6H; Start 41; Stop 65
ccagcataaacaaagagactcatca

SEQ ID NO: 467484 - DNA, 25 bp, Artificial
  probe
  misc_feature (1)..(25): SEQ ID NO: 7417; WAN024F6H; Start 40; Stop 64
cccagcataaacaaagagactcatc

SEQ ID NO: 467485 - DNA, 25 bp, Artificial
  probe
  misc_feature (1)..(25): SEQ ID NO: 7417; WAN024F6H; Start 39; Stop 63
tcccagcataaacaaagagactcat

SEQ ID NO: 467486 - DNA, 25 bp, Artificial
  probe
  misc_feature (1)..(25): SEQ ID NO: 7417; WAN024F6H; Start 47; Stop 71
taaacaaagagactcatcaagccca

SEQ ID NO: 467487 - DNA, 25 bp, Artificial
  probe
  misc_feature (1)..(25): SEQ ID NO: 7417; WAN024F6H; Start 185; Stop 209
ttcatctttctcctcatattgtctt

SEQ ID NO: 467488 - DNA, 25 bp, Artificial
  probe
  misc_feature (1)..(25): SEQ ID NO: 7417; WAN024F6H; Start 184; Stop 208
tttcatctttctcctcatattgtct

SEQ ID NO: 467489 - DNA, 25 bp, Artificial
  probe
  misc_feature (1)..(25): SEQ ID NO: 7417; WAN024F6H; Start 182; Stop 206
tctttcatctttctcctcatattgt

SEQ ID NO: 467490 - DNA, 25 bp, Artificial
  probe
  misc_feature (1)..(25): SEQ ID NO: 7417; WAN024F6H; Start 183; Stop 207
ctttcatctttctcctcatattgtc

SEQ ID NO: 467491 - DNA, 25 bp, Artificial
  probe
  misc_feature (1)..(25): SEQ ID NO: 7417; WAN024F6H; Start 48; Stop 72
aaacaaagagactcatcaagcccat

SEQ ID NO: 467492 - DNA, 25 bp, Artificial
  probe
  misc_feature (1)..(25): SEQ ID NO: 7417; WAN024F6H; Start 38; Stop 62
ctcccagcataaacaaagagactca

SEQ ID NO: 467493 - DNA, 25 bp, Artificial
  probe
  misc_feature (1)..(25): SEQ ID NO: 7417; WAN024F6H; Start 37; Stop 61
actcccagcataaacaaagagactc

SEQ ID NO: 467494 - DNA, 25 bp, Artificial
  probe
  misc_feature (1)..(25): SEQ ID NO: 7417; WAN024F6H; Start 186; Stop 210
tcatctttctcctcatattgtctta

SEQ ID NO: 467495 - DNA, 25 bp, Artificial
  probe
  misc_feature (1)..(25): SEQ ID NO: 7417; WAN024F6H; Start 49; Stop 73
aacaaagagactcatcaagcccatc

SEQ ID NO: 467496 - DNA, 25 bp, Artificial
  probe
  misc_feature (1)..(25): SEQ ID NO: 7417; WAN024F6H; Start 181; Stop 205
ttctttcatctttctcctcatattg

SEQ ID NO: 467497 - DNA, 25 bp, Artificial
  probe
  misc_feature (1)..(25): SEQ ID NO: 7417; WAN024F6H; Start 36; Stop 60
cactcccagcataaacaaagagact

SEQ ID NO: 467498 - DNA, 25 bp, Artificial
  probe
  misc_feature (1)..(25): SEQ ID NO: 7417; WAN024F6H; Start 121; Stop 145
gatactgacatagccaagagccgtt

SEQ ID NO: 467499 - DNA, 25 bp, Artificial
  probe
  misc_feature (1)..(25): SEQ ID NO: 7417; WAN024F6H; Start 187; Stop 211
catctttctcctcatattgtcttaa

SEQ ID NO: 467500 - DNA, 25 bp, Artificial
  probe
  misc_feature (1)..(25): SEQ ID NO: 7417; WAN024F6H; Start 180; Stop 204
tttctttcatctttctcctcatatt

SEQ ID NO: 467501 - DNA, 25 bp, Artificial
  probe
  misc_feature (1)..(25): SEQ ID NO: 7417; WAN024F6H; Start 122; Stop 146
atactgacatagccaagagccgttg

SEQ ID NO: 467502 - DNA, 25 bp, Artificial
  probe
  misc_feature (1)..(25): SEQ ID NO: 7417; WAN024F6H; Start 50; Stop 74
acaaagagactcatcaagcccatct

SEQ ID NO: 467503 - DNA, 25 bp, Artificial
  probe
  misc_feature (1)..(25): SEQ ID NO: 7417; WAN024F6H; Start 56; Stop 80
agactcatcaagcccatctcaacag

SEQ ID NO: 467504 - DNA, 25 bp, Artificial
  probe
  misc_feature (1)..(25): SEQ ID NO: 7417; WAN024F6H; Start 35; Stop 59
gcactcccagcataaacaaagagac

SEQ ID NO: 467505 - DNA, 25 bp, Artificial
  probe
  misc_feature (1)..(25): SEQ ID NO: 7417; WAN024F6H; Start 1; Stop 25
ttgaaccacaatcagtgccaacatg

SEQ ID NO: 467506 - DNA, 25 bp, Artificial
  probe
  misc_feature (1)..(25): SEQ ID NO: 7417; WAN024F6H; Start 188; Stop 212
atctttctcctcatattgtcttaat

SEQ ID NO: 467507 - DNA, 25 bp, Artificial
  probe
  misc_feature (1)..(25): SEQ ID NO: 7417; WAN024F6H; Start 69; Stop 93
ccatctcaacaggtgtcacataggg

SEQ ID NO: 467508 - DNA, 25 bp, Artificial
  probe
  misc_feature (1)..(25): SEQ ID NO: 7417; WAN024F6H; Start 68; Stop 92
cccatctcaacaggtgtcacatagg

SEQ ID NO: 467509 - DNA, 25 bp, Artificial
  probe
  misc_feature (1)..(25): SEQ ID NO: 7417; WAN024F6H; Start 179; Stop 203
ttttctttcatctttctcctcatat

SEQ ID NO: 467510 - DNA, 25 bp, Artificial
  probe
  misc_feature (1)..(25): SEQ ID NO: 7417; WAN024F6H; Start 189; Stop 213
tctttctcctcatattgtcttaata

SEQ ID NO: 467511 - DNA, 25 bp, Artificial
  probe
  misc_feature (1)..(25): SEQ ID NO: 7418; WAN024DMB; Start 174; Stop 198
gatgatgttaaatggtgagagaagc

SEQ ID NO: 467512 - DNA, 25 bp, Artificial
  probe
  misc_feature (1)..(25): SEQ ID NO: 7418; WAN024DMB; Start 175; Stop 199
atgatgttaaatggtgagagaagca

SEQ ID NO: 467513 - DNA, 25 bp, Artificial
  probe
  misc_feature (1)..(25): SEQ ID NO: 7418; WAN024DMB; Start 176; Stop 200
tgatgttaaatggtgagagaagcat

SEQ ID NO: 467514 - DNA, 25 bp, Artificial
  probe
  misc_feature (1)..(25): SEQ ID NO: 7418; WAN024DMB; Start 171; Stop 195
caagatgatgttaaatggtgagaga

SEQ ID NO: 467515 - DNA, 25 bp, Artificial
  probe
  misc_feature (1)..(25): SEQ ID NO: 7418; WAN024DMB; Start 131; Stop 155
gaatggcttctggaatggtcttctt

SEQ ID NO: 467516 - DNA, 25 bp, Artificial
  probe
  misc_feature (1)..(25): SEQ ID NO: 7418; WAN024DMB; Start 173; Stop 197
agatgatgttaaatggtgagagaag

SEQ ID NO: 467517 - DNA, 25 bp, Artificial
  probe
  misc_feature (1)..(25): SEQ ID NO: 7418; WAN024DMB; Start 132; Stop 156
aatggcttctggaatggtcttcttg

SEQ ID NO: 467518 - DNA, 25 bp, Artificial
  probe
  misc_feature (1)..(25): SEQ ID NO: 7418; WAN024DMB; Start 189; Stop 213
tgagagaagcattggaacaatcaag

SEQ ID NO: 467519 - DNA, 25 bp, Artificial
  probe
  misc_feature (1)..(25): SEQ ID NO: 7418; WAN024DMB; Start 172; Stop 196
aagatgatgttaaatggtgagagaa

SEQ ID NO: 467520 - DNA, 25 bp, Artificial
  probe
  misc_feature (1)..(25): SEQ ID NO: 7418; WAN024DMB; Start 170; Stop 194
tcaagatgatgttaaatggtgagag

SEQ ID NO: 467521 - DNA, 25 bp, Artificial
  probe
  misc_feature (1)..(25): SEQ ID NO: 7418; WAN024DMB; Start 188; Stop 212
gtgagagaagcattggaacaatcaa

SEQ ID NO: 467522 - DNA, 25 bp, Artificial
  probe
  misc_feature (1)..(25): SEQ ID NO: 7418; WAN024DMB; Start 58; Stop 82
ggtagtgacaatggcaaacagattt

SEQ ID NO: 467523 - DNA, 25 bp, Artificial
  probe
  misc_feature (1)..(25): SEQ ID NO: 7418; WAN024DMB; Start 190; Stop 214
gagagaagcattggaacaatcaagg

SEQ ID NO: 467524 - DNA, 25 bp, Artificial
  probe
  misc_feature (1)..(25): SEQ ID NO: 7418; WAN024DMB; Start 129; Stop 153
tagaatggcttctggaatggtcttc

SEQ ID NO: 467525 - DNA, 25 bp, Artificial
  probe
  misc_feature (1)..(25): SEQ ID NO: 7418; WAN024DMB; Start 128; Stop 152
ctagaatggcttctggaatggtctt

SEQ ID NO: 467526 - DNA, 25 bp, Artificial
  probe
  misc_feature (1)..(25): SEQ ID NO: 7418; WAN024DMB; Start 133; Stop 157
atggcttctggaatggtcttcttga

SEQ ID NO: 467527 - DNA, 25 bp, Artificial
  probe
  misc_feature (1)..(25): SEQ ID NO: 7418; WAN024DMB; Start 185; Stop 209
atggtgagagaagcattggaacaat

SEQ ID NO: 467528 - DNA, 25 bp, Artificial
  probe
  misc_feature (1)..(25): SEQ ID NO: 7418; WAN024DMB; Start 57; Stop 81
tggtagtgacaatggcaaacagatt

SEQ ID NO: 467529 - DNA, 25 bp, Artificial
  probe
  misc_feature (1)..(25): SEQ ID NO: 7418; WAN024DMB; Start 4; Stop 28
aaccagtcattccagaaaccaagag

SEQ ID NO: 467530 - DNA, 25 bp, Artificial
  probe
  misc_feature (1)..(25): SEQ ID NO: 7418; WAN024DMB; Start 184; Stop 208
aatggtgagagaagcattggaacaa

SEQ ID NO: 467531 - DNA, 25 bp, Artificial
  probe
  misc_feature (1)..(25): SEQ ID NO: 7418; WAN024DMB; Start 178; Stop 202
atgttaaatggtgagagaagcattg

SEQ ID NO: 467532 - DNA, 25 bp, Artificial
  probe
  misc_feature (1)..(25): SEQ ID NO: 7418; WAN024DMB; Start 177; Stop 201
gatgttaaatggtgagagaagcatt

SEQ ID NO: 467533 - DNA, 25 bp, Artificial
  probe
  misc_feature (1)..(25): SEQ ID NO: 7418; WAN024DMB; Start 181; Stop 205
ttaaatggtgagagaagcattggaa

SEQ ID NO: 467534 - DNA, 25 bp, Artificial
  probe
  misc_feature (1)..(25): SEQ ID NO: 7418; WAN024DMB; Start 3; Stop 27
gaaccagtcattccagaaaccaaga

SEQ ID NO: 467535 - DNA, 25 bp, Artificial
  probe
  misc_feature (1)..(25): SEQ ID NO: 7418; WAN024DMB; Start 1; Stop 25
ttgaaccagtcattccagaaaccaa

SEQ ID NO: 467536 - DNA, 25 bp, Artificial
  probe
  misc_feature (1)..(25): SEQ ID NO: 7418; WAN024DMB; Start 134; Stop 158
tggcttctggaatggtcttcttgaa

SEQ ID NO: 467537 - DNA, 25 bp, Artificial
  probe
  misc_feature (1)..(25): SEQ ID NO: 7418; WAN024DMB; Start 155; Stop 179
tgaagaaggaacgcatcaagatgat

SEQ ID NO: 467538 - DNA, 25 bp, Artificial
  probe
  misc_feature (1)..(25): SEQ ID NO: 7418; WAN024DMB; Start 31; Stop 55
gttaagagcgtgatggttgcgatac

SEQ ID NO: 467539 - DNA, 25 bp, Artificial
  probe
  misc_feature (1)..(25): SEQ ID NO: 7418; WAN024DMB; Start 46; Stop 70
gttgcgatacctggtagtgacaatg

SEQ ID NO: 467540 - DNA, 25 bp, Artificial
  probe
  misc_feature (1)..(25): SEQ ID NO: 7418; WAN024DMB; Start 182; Stop 206
taaatggtgagagaagcattggaac

SEQ ID NO: 467541 - DNA, 25 bp, Artificial
  probe
  misc_feature (1)..(25): SEQ ID NO: 7418; WAN024DMB; Start 180; Stop 204
gttaaatggtgagagaagcattgga

SEQ ID NO: 467542 - DNA, 25 bp, Artificial
  probe
  misc_feature (1)..(25): SEQ ID NO: 7418; WAN024DMB; Start 12; Stop 36
attccagaaaccaagagctgttaag

SEQ ID NO: 467543 - DNA, 25 bp, Artificial
  probe
  misc_feature (1)..(25): SEQ ID NO: 7418; WAN024DMB; Start 51; Stop 75
gatacctggtagtgacaatggcaaa

SEQ ID NO: 467544 - DNA, 25 bp, Artificial
  probe
  misc_feature (1)..(25): SEQ ID NO: 7419; WAN024AZO; Start 44; Stop 68
tgaacttgaaatttagcaataatct

SEQ ID NO: 467545 - DNA, 25 bp, Artificial
  probe
  misc_feature (1)..(25): SEQ ID NO: 7420; WAN024D8L; Start 2; Stop 26
tgaactacttcctctttgatataaa

SEQ ID NO: 467546 - DNA, 25 bp, Artificial
  probe
  misc_feature (1)..(25): SEQ ID NO: 7420; WAN024D8L; Start 1; Stop 25
ttgaactacttcctctttgatataa

SEQ ID NO: 467547 - DNA, 25 bp, Artificial
  probe
  misc_feature (1)..(25): SEQ ID NO: 7420; WAN024D8L; Start 46; Stop 70
gaagatgcctccttcataaaaccgg

SEQ ID NO: 467548 - DNA, 25 bp, Artificial
  probe
  misc_feature (1)..(25): SEQ ID NO: 7421; WAN024BLP; Start 50; Stop 74
gctggtttaacaaatttaagttgga

SEQ ID NO: 467549 - DNA, 25 bp, Artificial
  probe
  misc_feature (1)..(25): SEQ ID NO: 7421; WAN024BLP; Start 49; Stop 73
agctggtttaacaaatttaagttgg

SEQ ID NO: 467550 - DNA, 25 bp, Artificial
  probe
  misc_feature (1)..(25): SEQ ID NO: 7421; WAN024BLP; Start 48; Stop 72
aagctggtttaacaaatttaagttg

SEQ ID NO: 467551 - DNA, 25 bp, Artificial
  probe
  misc_feature (1)..(25): SEQ ID NO: 7421; WAN024BLP; Start 5; Stop 29
actgtcatagcttttctctcttttc

SEQ ID NO: 467552 - DNA, 25 bp, Artificial
  probe
  misc_feature (1)..(25): SEQ ID NO: 7421; WAN024BLP; Start 40; Stop 64
tgccttttaagctggtttaacaaat

SEQ ID NO: 467553 - DNA, 25 bp, Artificial
  probe
  misc_feature (1)..(25): SEQ ID NO: 7421; WAN024BLP; Start 38; Stop 62
attgccttttaagctggtttaacaa

SEQ ID NO: 467554 - DNA, 25 bp, Artificial
  probe
  misc_feature (1)..(25): SEQ ID NO: 7421; WAN024BLP; Start 39; Stop 63
ttgccttttaagctggtttaacaaa

SEQ ID NO: 467555 - DNA, 25 bp, Artificial
  probe
  misc_feature (1)..(25): SEQ ID NO: 7421; WAN024BLP; Start 6; Stop 30
ctgtcatagcttttctctcttttct

SEQ ID NO: 467556 - DNA, 25 bp, Artificial
  probe
  misc_feature (1)..(25): SEQ ID NO: 7421; WAN024BLP; Start 37; Stop 61
tattgccttttaagctggtttaaca

SEQ ID NO: 467557 - DNA, 25 bp, Artificial
  probe
  misc_feature (1)..(25): SEQ ID NO: 7421; WAN024BLP; Start 3; Stop 27
gaactgtcatagcttttctctcttt

SEQ ID NO: 467558 - DNA, 25 bp, Artificial
  probe
  misc_feature (1)..(25): SEQ ID NO: 7421; WAN024BLP; Start 2; Stop 26
tgaactgtcatagcttttctctctt

SEQ ID NO: 467559 - DNA, 25 bp, Artificial
  probe
  misc_feature (1)..(25): SEQ ID NO: 7421; WAN024BLP; Start 1; Stop 25
ttgaactgtcatagcttttctctct

SEQ ID NO: 467560 - DNA, 25 bp, Artificial
  probe
  misc_feature (1)..(25): SEQ ID NO: 7421; WAN024BLP; Start 4; Stop 28
aactgtcatagcttttctctctttt

SEQ ID NO: 467561 - DNA, 25 bp, Artificial
  probe
  misc_feature (1)..(25): SEQ ID NO: 7421; WAN024BLP; Start 41; Stop 65
gccttttaagctggtttaacaaatt

SEQ ID NO: 467562 - DNA, 25 bp, Artificial
  probe
  misc_feature (1)..(25): SEQ ID NO: 7421; WAN024BLP; Start 36; Stop 60
ttattgccttttaagctggtttaac

SEQ ID NO: 467563 - DNA, 25 bp, Artificial
  probe
  misc_feature (1)..(25): SEQ ID NO: 7421; WAN024BLP; Start 51; Stop 75
ctggtttaacaaatttaagttggat

SEQ ID NO: 467564 - DNA, 25 bp, Artificial
  probe
  misc_feature (1)..(25): SEQ ID NO: 7421; WAN024BLP; Start 34; Stop 58
atttattgccttttaagctggttta

SEQ ID NO: 467565 - DNA, 25 bp, Artificial
  probe
  misc_feature (1)..(25): SEQ ID NO: 7421; WAN024BLP; Start 33; Stop 57
tatttattgccttttaagctggttt

SEQ ID NO: 467566 - DNA, 25 bp, Artificial
  probe
  misc_feature (1)..(25): SEQ ID NO: 7421; WAN024BLP; Start 32; Stop 56
ttatttattgccttttaagctggtt

SEQ ID NO: 467567 - DNA, 25 bp, Artificial
  probe
  misc_feature (1)..(25): SEQ ID NO: 7421; WAN024BLP; Start 7; Stop 31
tgtcatagcttttctctcttttcta

SEQ ID NO: 467568 - DNA, 25 bp, Artificial
  probe
  misc_feature (1)..(25): SEQ ID NO: 7421; WAN024BLP; Start 35; Stop 59
tttattgccttttaagctggtttaa

SEQ ID NO: 467569 - DNA, 25 bp, Artificial
  probe
  misc_feature (1)..(25): SEQ ID NO: 7421; WAN024BLP; Start 31; Stop 55
attatttattgccttttaagctggt

SEQ ID NO: 467570 - DNA, 25 bp, Artificial
  probe
  misc_feature (1)..(25): SEQ ID NO: 7421; WAN024BLP; Start 52; Stop 76
tggtttaacaaatttaagttggatt

SEQ ID NO: 467571 - DNA, 25 bp, Artificial
  probe
  misc_feature (1)..(25): SEQ ID NO: 7421; WAN024BLP; Start 47; Stop 71
taagctggtttaacaaatttaagtt

SEQ ID NO: 467572 - DNA, 25 bp, Artificial
  probe
  misc_feature (1)..(25): SEQ ID NO: 7421; WAN024BLP; Start 46; Stop 70
ttaagctggtttaacaaatttaagt

SEQ ID NO: 467573 - DNA, 25 bp, Artificial
  probe
  misc_feature (1)..(25): SEQ ID NO: 7421; WAN024BLP; Start 42; Stop 66
ccttttaagctggtttaacaaattt

SEQ ID NO: 467574 - DNA, 25 bp, Artificial
  probe
  misc_feature (1)..(25): SEQ ID NO: 7421; WAN024BLP; Start 8; Stop 32
gtcatagcttttctctcttttctat

SEQ ID NO: 467575 - DNA, 25 bp, Artificial
  probe
  misc_feature (1)..(25): SEQ ID NO: 7421; WAN024BLP; Start 53; Stop 77
ggtttaacaaatttaagttggattt

SEQ ID NO: 467576 - DNA, 25 bp, Artificial
  probe
  misc_feature (1)..(25): SEQ ID NO: 7421; WAN024BLP; Start 45; Stop 69
tttaagctggtttaacaaatttaag

SEQ ID NO: 467577 - DNA, 25 bp, Artificial
  probe
  misc_feature (1)..(25): SEQ ID NO: 7421; WAN024BLP; Start 30; Stop 54
tattatttattgccttttaagctgg

SEQ ID NO: 467578 - DNA, 25 bp, Artificial
  probe
  misc_feature (1)..(25): SEQ ID NO: 7421; WAN024BLP; Start 9; Stop 33
tcatagcttttctctcttttctatt

SEQ ID NO: 467579 - DNA, 25 bp, Artificial
  probe
  misc_feature (1)..(25): SEQ ID NO: 7421; WAN024BLP; Start 43; Stop 67
cttttaagctggtttaacaaattta

SEQ ID NO: 467580 - DNA, 25 bp, Artificial
  probe
  misc_feature (1)..(25): SEQ ID NO: 7422; WAN024BX7; Start 80; Stop 104
aagaccagatatgtgaagcgagttc

SEQ ID NO: 467581 - DNA, 25 bp, Artificial
  probe
  misc_feature (1)..(25): SEQ ID NO: 7422; WAN024BX7; Start 86; Stop 110
agatatgtgaagcgagttctggaac

SEQ ID NO: 467582 - DNA, 25 bp, Artificial
  probe
  misc_feature (1)..(25): SEQ ID NO: 7422; WAN024BX7; Start 110; Stop 134
ctaggaaaggtgtatgctcatgttt

SEQ ID NO: 467583 - DNA, 25 bp, Artificial
  probe
  misc_feature (1)..(25): SEQ ID NO: 7422; WAN024BX7; Start 81; Stop 105
agaccagatatgtgaagcgagttct

SEQ ID NO: 467584 - DNA, 25 bp, Artificial
  probe
  misc_feature (1)..(25): SEQ ID NO: 7422; WAN024BX7; Start 111; Stop 135
taggaaaggtgtatgctcatgtttg

SEQ ID NO: 467585 - DNA, 25 bp, Artificial
  probe
  misc_feature (1)..(25): SEQ ID NO: 7422; WAN024BX7; Start 107; Stop 131
gaactaggaaaggtgtatgctcatg

SEQ ID NO: 467586 - DNA, 25 bp, Artificial
  probe
  misc_feature (1)..(25): SEQ ID NO: 7422; WAN024BX7; Start 101; Stop 125
gttctggaactaggaaaggtgtatg

SEQ ID NO: 467587 - DNA, 25 bp, Artificial
  probe
  misc_feature (1)..(25): SEQ ID NO: 7422; WAN024BX7; Start 79; Stop 103
aaagaccagatatgtgaagcgagtt

SEQ ID NO: 467588 - DNA, 25 bp, Artificial
  probe
  misc_feature (1)..(25): SEQ ID NO: 7422; WAN024BX7; Start 114; Stop 138
gaaaggtgtatgctcatgtttgatt

SEQ ID NO: 467589 - DNA, 25 bp, Artificial
  probe
  misc_feature (1)..(25): SEQ ID NO: 7422; WAN024BX7; Start 116; Stop 140
aaggtgtatgctcatgtttgattac

SEQ ID NO: 467590 - DNA, 25 bp, Artificial
  probe
  misc_feature (1)..(25): SEQ ID NO: 7422; WAN024BX7; Start 119; Stop 143
gtgtatgctcatgtttgattacgac

SEQ ID NO: 467591 - DNA, 25 bp, Artificial
  probe
  misc_feature (1)..(25): SEQ ID NO: 7422; WAN024BX7; Start 106; Stop 130
ggaactaggaaaggtgtatgctcat

SEQ ID NO: 467592 - DNA, 25 bp, Artificial
  probe
  misc_feature (1)..(25): SEQ ID NO: 7422; WAN024BX7; Start 115; Stop 139
aaaggtgtatgctcatgtttgatta

SEQ ID NO: 467593 - DNA, 25 bp, Artificial
  probe
  misc_feature (1)..(25): SEQ ID NO: 7422; WAN024BX7; Start 109; Stop 133
actaggaaaggtgtatgctcatgtt

SEQ ID NO: 467594 - DNA, 25 bp, Artificial
  probe
  misc_feature (1)..(25): SEQ ID NO: 7422; WAN024BX7; Start 108; Stop 132
aactaggaaaggtgtatgctcatgt

SEQ ID NO: 467595 - DNA, 25 bp, Artificial
  probe
  misc_feature (1)..(25): SEQ ID NO: 7422; WAN024BX7; Start 122; Stop 146
tatgctcatgtttgattacgacaga

SEQ ID NO: 467596 - DNA, 25 bp, Artificial
  probe
  misc_feature (1)..(25): SEQ ID NO: 7422; WAN024BX7; Start 121; Stop 145
gtatgctcatgtttgattacgacag

SEQ ID NO: 467597 - DNA, 25 bp, Artificial
  probe
  misc_feature (1)..(25): SEQ ID NO: 7422; WAN024BX7; Start 120; Stop 144
tgtatgctcatgtttgattacgaca

SEQ ID NO: 467598 - DNA, 25 bp, Artificial
  probe
  misc_feature (1)..(25): SEQ ID NO: 7422; WAN024BX7; Start 126; Stop 150
ctcatgtttgattacgacagagaca

SEQ ID NO: 467599 - DNA, 25 bp, Artificial
  probe
  misc_feature (1)..(25): SEQ ID NO: 7422; WAN024BX7; Start 118; Stop 142
ggtgtatgctcatgtttgattacga

SEQ ID NO: 467600 - DNA, 25 bp, Artificial
  probe
  misc_feature (1)..(25): SEQ ID NO: 7422; WAN024BX7; Start 117; Stop 141
aggtgtatgctcatgtttgattacg

SEQ ID NO: 467601 - DNA, 25 bp, Artificial
  probe
  misc_feature (1)..(25): SEQ ID NO: 7422; WAN024BX7; Start 102; Stop 126
ttctggaactaggaaaggtgtatgc

SEQ ID NO: 467602 - DNA, 25 bp, Artificial
  probe
  misc_feature (1)..(25): SEQ ID NO: 7422; WAN024BX7; Start 113; Stop 137
ggaaaggtgtatgctcatgtttgat

SEQ ID NO: 467603 - DNA, 25 bp, Artificial
  probe
  misc_feature (1)..(25): SEQ ID NO: 7422; WAN024BX7; Start 78; Stop 102
caaagaccagatatgtgaagcgagt

SEQ ID NO: 467604 - DNA, 25 bp, Artificial
  probe
  misc_feature (1)..(25): SEQ ID NO: 7422; WAN024BX7; Start 123; Stop 147
atgctcatgtttgattacgacagag

SEQ ID NO: 467605 - DNA, 25 bp, Artificial
  probe
  misc_feature (1)..(25): SEQ ID NO: 7422; WAN024BX7; Start 104; Stop 128
ctggaactaggaaaggtgtatgctc

SEQ ID NO: 467606 - DNA, 25 bp, Artificial
  probe
  misc_feature (1)..(25): SEQ ID NO: 7422; WAN024BX7; Start 77; Stop 101
tcaaagaccagatatgtgaagcgag

SEQ ID NO: 467607 - DNA, 25 bp, Artificial
  probe
  misc_feature (1)..(25): SEQ ID NO: 7422; WAN024BX7; Start 103; Stop 127
tctggaactaggaaaggtgtatgct

SEQ ID NO: 467608 - DNA, 25 bp, Artificial
  probe
  misc_feature (1)..(25): SEQ ID NO: 7422; WAN024BX7; Start 125; Stop 149
gctcatgtttgattacgacagagac

SEQ ID NO: 467609 - DNA, 25 bp, Artificial
  probe
  misc_feature (1)..(25): SEQ ID NO: 7422; WAN024BX7; Start 112; Stop 136
aggaaaggtgtatgctcatgtttga

SEQ ID NO: 467610 - DNA, 25 bp, Artificial
  probe
  misc_feature (1)..(25): SEQ ID NO: 7422; WAN024BX7; Start 72; Stop 96
taacgtcaaagaccagatatgtgaa

SEQ ID NO: 467611 - DNA, 25 bp, Artificial
  probe
  misc_feature (1)..(25): SEQ ID NO: 7422; WAN024BX7; Start 71; Stop 95
ctaacgtcaaagaccagatatgtga

SEQ ID NO: 467612 - DNA, 25 bp, Artificial
  probe
  misc_feature (1)..(25): SEQ ID NO: 7422; WAN024BX7; Start 105; Stop 129
tggaactaggaaaggtgtatgctca

SEQ ID NO: 467613 - DNA, 25 bp, Artificial
  probe
  misc_feature (1)..(25): SEQ ID NO: 7423; WAN024FCW; Start 62; Stop 86
atgatactgtctatatgagtgctgt

SEQ ID NO: 467614 - DNA, 25 bp, Artificial
  probe
  misc_feature (1)..(25): SEQ ID NO: 7423; WAN024FCW; Start 60; Stop 84
tgatgatactgtctatatgagtgct

SEQ ID NO: 467615 - DNA, 25 bp, Artificial
  probe
  misc_feature (1)..(25): SEQ ID NO: 7423; WAN024FCW; Start 61; Stop 85
gatgatactgtctatatgagtgctg

SEQ ID NO: 467616 - DNA, 25 bp, Artificial
  probe
  misc_feature (1)..(25): SEQ ID NO: 7423; WAN024FCW; Start 63; Stop 87
tgatactgtctatatgagtgctgta

SEQ ID NO: 467617 - DNA, 25 bp, Artificial
  probe
  misc_feature (1)..(25): SEQ ID NO: 7423; WAN024FCW; Start 59; Stop 83
ttgatgatactgtctatatgagtgc

SEQ ID NO: 467618 - DNA, 25 bp, Artificial
  probe
  misc_feature (1)..(25): SEQ ID NO: 7423; WAN024FCW; Start 15; Stop 39
agagatacatggaattagcaatcaa

SEQ ID NO: 467619 - DNA, 25 bp, Artificial
  probe
  misc_feature (1)..(25): SEQ ID NO: 7423; WAN024FCW; Start 49; Stop 73
atggctataattgatgatactgtct

SEQ ID NO: 467620 - DNA, 25 bp, Artificial
  probe
  misc_feature (1)..(25): SEQ ID NO: 7423; WAN024FCW; Start 64; Stop 88
gatactgtctatatgagtgctgtat

SEQ ID NO: 467621 - DNA, 25 bp, Artificial
  probe
  misc_feature (1)..(25): SEQ ID NO: 7423; WAN024FCW; Start 50; Stop 74
tggctataattgatgatactgtcta

SEQ ID NO: 467622 - DNA, 25 bp, Artificial
  probe
  misc_feature (1)..(25): SEQ ID NO: 7423; WAN024FCW; Start 48; Stop 72
aatggctataattgatgatactgtc

SEQ ID NO: 467623 - DNA, 25 bp, Artificial
  probe
  misc_feature (1)..(25): SEQ ID NO: 7423; WAN024FCW; Start 14; Stop 38
tagagatacatggaattagcaatca

SEQ ID NO: 467624 - DNA, 25 bp, Artificial
  probe
  misc_feature (1)..(25): SEQ ID NO: 7423; WAN024FCW; Start 10; Stop 34
tgtgtagagatacatggaattagca

SEQ ID NO: 467625 - DNA, 25 bp, Artificial
  probe
  misc_feature (1)..(25): SEQ ID NO: 7423; WAN024FCW; Start 13; Stop 37
gtagagatacatggaattagcaatc

SEQ ID NO: 467626 - DNA, 25 bp, Artificial
  probe
  misc_feature (1)..(25): SEQ ID NO: 7423; WAN024FCW; Start 11; Stop 35
gtgtagagatacatggaattagcaa

SEQ ID NO: 467627 - DNA, 25 bp, Artificial
  probe
  misc_feature (1)..(25): SEQ ID NO: 7423; WAN024FCW; Start 46; Stop 70
ccaatggctataattgatgatactg

SEQ ID NO: 467628 - DNA, 25 bp, Artificial
  probe
  misc_feature (1)..(25): SEQ ID NO: 7423; WAN024FCW; Start 65; Stop 89
atactgtctatatgagtgctgtatt

SEQ ID NO: 467629 - DNA, 25 bp, Artificial
  probe
  misc_feature (1)..(25): SEQ ID NO: 7423; WAN024FCW; Start 12; Stop 36
tgtagagatacatggaattagcaat

SEQ ID NO: 467630 - DNA, 25 bp, Artificial
  probe
  misc_feature (1)..(25): SEQ ID NO: 7423; WAN024FCW; Start 9; Stop 33
atgtgtagagatacatggaattagc

SEQ ID NO: 467631 - DNA, 25 bp, Artificial
  probe
  misc_feature (1)..(25): SEQ ID NO: 7423; WAN024FCW; Start 16; Stop 40
gagatacatggaattagcaatcaaa

SEQ ID NO: 467632 - DNA, 25 bp, Artificial
  probe
  misc_feature (1)..(25): SEQ ID NO: 7423; WAN024FCW; Start 47; Stop 71
caatggctataattgatgatactgt

SEQ ID NO: 467633 - DNA, 25 bp, Artificial
  probe
  misc_feature (1)..(25): SEQ ID NO: 7423; WAN024FCW; Start 51; Stop 75
ggctataattgatgatactgtctat

SEQ ID NO: 467634 - DNA, 25 bp, Artificial
  probe
  misc_feature (1)..(25): SEQ ID NO: 7423; WAN024FCW; Start 66; Stop 90
tactgtctatatgagtgctgtattt

SEQ ID NO: 467635 - DNA, 25 bp, Artificial
  probe
  misc_feature (1)..(25): SEQ ID NO: 7423; WAN024FCW; Start 45; Stop 69
cccaatggctataattgatgatact

SEQ ID NO: 467636 - DNA, 25 bp, Artificial
  probe
  misc_feature (1)..(25): SEQ ID NO: 7423; WAN024FCW; Start 44; Stop 68
tcccaatggctataattgatgatac

SEQ ID NO: 467637 - DNA, 25 bp, Artificial
  probe
  misc_feature (1)..(25): SEQ ID NO: 7423; WAN024FCW; Start 41; Stop 65
aaatcccaatggctataattgatga

SEQ ID NO: 467638 - DNA, 25 bp, Artificial
  probe
  misc_feature (1)..(25): SEQ ID NO: 7423; WAN024FCW; Start 42; Stop 66
aatcccaatggctataattgatgat

SEQ ID NO: 467639 - DNA, 25 bp, Artificial
  probe
  misc_feature (1)..(25): SEQ ID NO: 7423; WAN024FCW; Start 58; Stop 82
attgatgatactgtctatatgagtg

SEQ ID NO: 467640 - DNA, 25 bp, Artificial
  probe
  misc_feature (1)..(25): SEQ ID NO: 7423; WAN024FCW; Start 69; Stop 93
tgtctatatgagtgctgtattttgg

SEQ ID NO: 467641 - DNA, 25 bp, Artificial
  probe
  misc_feature (1)..(25): SEQ ID NO: 7423; WAN024FCW; Start 70; Stop 94
gtctatatgagtgctgtattttgga

SEQ ID NO: 467642 - DNA, 25 bp, Artificial
  probe
  misc_feature (1)..(25): SEQ ID NO: 7423; WAN024FCW; Start 43; Stop 67
atcccaatggctataattgatgata

SEQ ID NO: 467643 - DNA, 25 bp, Artificial
  probe
  misc_feature (1)..(25): SEQ ID NO: 7423; WAN024FCW; Start 71; Stop 95
tctatatgagtgctgtattttggaa

SEQ ID NO: 467644 - DNA, 25 bp, Artificial
  probe
  misc_feature (1)..(25): SEQ ID NO: 7423; WAN024FCW; Start 68; Stop 92
ctgtctatatgagtgctgtattttg

SEQ ID NO: 467645 - DNA, 25 bp, Artificial
  probe
  misc_feature (1)..(25): SEQ ID NO: 7423; WAN024FCW; Start 67; Stop 91
actgtctatatgagtgctgtatttt

SEQ ID NO: 467646 - DNA, 25 bp, Artificial
  probe
  misc_feature (1)..(25): SEQ ID NO: 7424; WAN024ETA; Start 19; Stop 43
tcctttctttatcctacttcaacag

SEQ ID NO: 467647 - DNA, 25 bp, Artificial
  probe
  misc_feature (1)..(25): SEQ ID NO: 7424; WAN024ETA; Start 20; Stop 44
cctttctttatcctacttcaacaga

SEQ ID NO: 467648 - DNA, 25 bp, Artificial
  probe
  misc_feature (1)..(25): SEQ ID NO: 7424; WAN024ETA; Start 18; Stop 42
atcctttctttatcctacttcaaca

SEQ ID NO: 467649 - DNA, 25 bp, Artificial
  probe
  misc_feature (1)..(25): SEQ ID NO: 7424; WAN024ETA; Start 29; Stop 53
atcctacttcaacagaaggttcatt

SEQ ID NO: 467650 - DNA, 25 bp, Artificial
  probe
  misc_feature (1)..(25): SEQ ID NO: 7424; WAN024ETA; Start 33; Stop 57
tacttcaacagaaggttcattggtt

SEQ ID NO: 467651 - DNA, 25 bp, Artificial
  probe
  misc_feature (1)..(25): SEQ ID NO: 7424; WAN024ETA; Start 30; Stop 54
tcctacttcaacagaaggttcattg

SEQ ID NO: 467652 - DNA, 25 bp, Artificial
  probe
  misc_feature (1)..(25): SEQ ID NO: 7424; WAN024ETA; Start 27; Stop 51
ttatcctacttcaacagaaggttca

SEQ ID NO: 467653 - DNA, 25 bp, Artificial
  probe
  misc_feature (1)..(25): SEQ ID NO: 7424; WAN024ETA; Start 32; Stop 56
ctacttcaacagaaggttcattggt

SEQ ID NO: 467654 - DNA, 25 bp, Artificial
  probe
  misc_feature (1)..(25): SEQ ID NO: 7424; WAN024ETA; Start 28; Stop 52
tatcctacttcaacagaaggttcat

SEQ ID NO: 467655 - DNA, 25 bp, Artificial
  probe
  misc_feature (1)..(25): SEQ ID NO: 7424; WAN024ETA; Start 31; Stop 55
cctacttcaacagaaggttcattgg

SEQ ID NO: 467656 - DNA, 25 bp, Artificial
  probe
  misc_feature (1)..(25): SEQ ID NO: 7424; WAN024ETA; Start 2; Stop 26
tgaagagacataaactatcctttct

SEQ ID NO: 467657 - DNA, 25 bp, Artificial
  probe
  misc_feature (1)..(25): SEQ ID NO: 7424; WAN024ETA; Start 15; Stop 39
actatcctttctttatcctacttca

SEQ ID NO: 467658 - DNA, 25 bp, Artificial
  probe
  misc_feature (1)..(25): SEQ ID NO: 7424; WAN024ETA; Start 1; Stop 25
ttgaagagacataaactatcctttc

SEQ ID NO: 467659 - DNA, 25 bp, Artificial
  probe
  misc_feature (1)..(25): SEQ ID NO: 7424; WAN024ETA; Start 40; Stop 64
acagaaggttcattggttgattttc

SEQ ID NO: 467660 - DNA, 25 bp, Artificial
  probe
  misc_feature (1)..(25): SEQ ID NO: 7424; WAN024ETA; Start 39; Stop 63
aacagaaggttcattggttgatttt

SEQ ID NO: 467661 - DNA, 25 bp, Artificial
  probe
  misc_feature (1)..(25): SEQ ID NO: 7424; WAN024ETA; Start 41; Stop 65
cagaaggttcattggttgattttcc

SEQ ID NO: 467662 - DNA, 25 bp, Artificial
  probe
  misc_feature (1)..(25): SEQ ID NO: 7424; WAN024ETA; Start 34; Stop 58
acttcaacagaaggttcattggttg

SEQ ID NO: 467663 - DNA, 25 bp, Artificial
  probe
  misc_feature (1)..(25): SEQ ID NO: 7424; WAN024ETA; Start 57; Stop 81
tgattttccaattctcggtacaact

SEQ ID NO: 467664 - DNA, 25 bp, Artificial
  probe
  misc_feature (1)..(25): SEQ ID NO: 7424; WAN024ETA; Start 24; Stop 48
tctttatcctacttcaacagaaggt

SEQ ID NO: 467665 - DNA, 25 bp, Artificial
  probe
  misc_feature (1)..(25): SEQ ID NO: 7424; WAN024ETA; Start 56; Stop 80
ttgattttccaattctcggtacaac

SEQ ID NO: 467666 - DNA, 25 bp, Artificial
  probe
  misc_feature (1)..(25): SEQ ID NO: 7424; WAN024ETA; Start 55; Stop 79
gttgattttccaattctcggtacaa

SEQ ID NO: 467667 - DNA, 25 bp, Artificial
  probe
  misc_feature (1)..(25): SEQ ID NO: 7424; WAN024ETA; Start 17; Stop 41
tatcctttctttatcctacttcaac

SEQ ID NO: 467668 - DNA, 25 bp, Artificial
  probe
  misc_feature (1)..(25): SEQ ID NO: 7424; WAN024ETA; Start 26; Stop 50
tttatcctacttcaacagaaggttc

SEQ ID NO: 467669 - DNA, 25 bp, Artificial
  probe
  misc_feature (1)..(25): SEQ ID NO: 7424; WAN024ETA; Start 25; Stop 49
ctttatcctacttcaacagaaggtt

SEQ ID NO: 467670 - DNA, 25 bp, Artificial
  probe
  misc_feature (1)..(25): SEQ ID NO: 7424; WAN024ETA; Start 54; Stop 78
ggttgattttccaattctcggtaca

SEQ ID NO: 467671 - DNA, 25 bp, Artificial
  probe
  misc_feature (1)..(25): SEQ ID NO: 7424; WAN024ETA; Start 23; Stop 47
ttctttatcctacttcaacagaagg

SEQ ID NO: 467672 - DNA, 25 bp, Artificial
  probe
  misc_feature (1)..(25): SEQ ID NO: 7424; WAN024ETA; Start 16; Stop 40
ctatcctttctttatcctacttcaa

SEQ ID NO: 467673 - DNA, 25 bp, Artificial
  probe
  misc_feature (1)..(25): SEQ ID NO: 7424; WAN024ETA; Start 14; Stop 38
aactatcctttctttatcctacttc

SEQ ID NO: 467674 - DNA, 25 bp, Artificial
  probe
  misc_feature (1)..(25): SEQ ID NO: 7424; WAN024ETA; Start 38; Stop 62
caacagaaggttcattggttgattt

SEQ ID NO: 467675 - DNA, 25 bp, Artificial
  probe
  misc_feature (1)..(25): SEQ ID NO: 7424; WAN024ETA; Start 42; Stop 66
agaaggttcattggttgattttcca

SEQ ID NO: 467676 - DNA, 25 bp, Artificial
  probe
  misc_feature (1)..(25): SEQ ID NO: 7424; WAN024ETA; Start 21; Stop 45
ctttctttatcctacttcaacagaa

SEQ ID NO: 467677 - DNA, 25 bp, Artificial
  probe
  misc_feature (1)..(25): SEQ ID NO: 7424; WAN024ETA; Start 53; Stop 77
tggttgattttccaattctcggtac

SEQ ID NO: 467678 - DNA, 25 bp, Artificial
  probe
  misc_feature (1)..(25): SEQ ID NO: 7424; WAN024ETA; Start 13; Stop 37
aaactatcctttctttatcctactt

SEQ ID NO: 467679 - DNA, 25 bp, Artificial
  probe
  misc_feature (1)..(25): SEQ ID NO: 7425; WAN024D36; Start 34; Stop 58
atcctagccccaagtaatttccaat

SEQ ID NO: 467680 - DNA, 25 bp, Artificial
  probe
  misc_feature (1)..(25): SEQ ID NO: 7425; WAN024D36; Start 42; Stop 66
cccaagtaatttccaattgatagct

SEQ ID NO: 467681 - DNA, 25 bp, Artificial
  probe
  misc_feature (1)..(25): SEQ ID NO: 7425; WAN024D36; Start 43; Stop 67
ccaagtaatttccaattgatagctg

SEQ ID NO: 467682 - DNA, 25 bp, Artificial
  probe
  misc_feature (1)..(25): SEQ ID NO: 7425; WAN024D36; Start 33; Stop 57
gatcctagccccaagtaatttccaa

SEQ ID NO: 467683 - DNA, 25 bp, Artificial
  probe
  misc_feature (1)..(25): SEQ ID NO: 7425; WAN024D36; Start 35; Stop 59
tcctagccccaagtaatttccaatt

SEQ ID NO: 467684 - DNA, 25 bp, Artificial
  probe
  misc_feature (1)..(25): SEQ ID NO: 7425; WAN024D36; Start 47; Stop 71
gtaatttccaattgatagctggcaa

SEQ ID NO: 467685 - DNA, 25 bp, Artificial
  probe
  misc_feature (1)..(25): SEQ ID NO: 7425; WAN024D36; Start 45; Stop 69
aagtaatttccaattgatagctggc

SEQ ID NO: 467686 - DNA, 25 bp, Artificial
  probe
  misc_feature (1)..(25): SEQ ID NO: 7425; WAN024D36; Start 48; Stop 72
taatttccaattgatagctggcaaa

SEQ ID NO: 467687 - DNA, 25 bp, Artificial
  probe
  misc_feature (1)..(25): SEQ ID NO: 7425; WAN024D36; Start 31; Stop 55
gagatcctagccccaagtaatttcc

SEQ ID NO: 467688 - DNA, 25 bp, Artificial
  probe
  misc_feature (1)..(25): SEQ ID NO: 7425; WAN024D36; Start 49; Stop 73
aatttccaattgatagctggcaaag

SEQ ID NO: 467689 - DNA, 25 bp, Artificial
  probe
  misc_feature (1)..(25): SEQ ID NO: 7425; WAN024D36; Start 46; Stop 70
agtaatttccaattgatagctggca

SEQ ID NO: 467690 - DNA, 25 bp, Artificial
  probe
  misc_feature (1)..(25): SEQ ID NO: 7425; WAN024D36; Start 30; Stop 54
cgagatcctagccccaagtaatttc

SEQ ID NO: 467691 - DNA, 25 bp, Artificial
  probe
  misc_feature (1)..(25): SEQ ID NO: 7425; WAN024D36; Start 44; Stop 68
caagtaatttccaattgatagctgg

SEQ ID NO: 467692 - DNA, 25 bp, Artificial
  probe
  misc_feature (1)..(25): SEQ ID NO: 7425; WAN024D36; Start 2; Stop 26
tgaagatagaaagtagatttgagaa

SEQ ID NO: 467693 - DNA, 25 bp, Artificial
  probe
  misc_feature (1)..(25): SEQ ID NO: 7425; WAN024D36; Start 1; Stop 25
ttgaagatagaaagtagatttgaga

SEQ ID NO: 467694 - DNA, 25 bp, Artificial
  probe
  misc_feature (1)..(25): SEQ ID NO: 7425; WAN024D36; Start 32; Stop 56
agatcctagccccaagtaatttcca

SEQ ID NO: 467695 - DNA, 25 bp, Artificial
  probe
  misc_feature (1)..(25): SEQ ID NO: 7425; WAN024D36; Start 50; Stop 74
atttccaattgatagctggcaaagg

SEQ ID NO: 467696 - DNA, 25 bp, Artificial
  probe
  misc_feature (1)..(25): SEQ ID NO: 7425; WAN024D36; Start 29; Stop 53
acgagatcctagccccaagtaattt

SEQ ID NO: 467697 - DNA, 25 bp, Artificial
  probe
  misc_feature (1)..(25): SEQ ID NO: 7425; WAN024D36; Start 28; Stop 52
aacgagatcctagccccaagtaatt

SEQ ID NO: 467698 - DNA, 25 bp, Artificial
  probe
  misc_feature (1)..(25): SEQ ID NO: 7425; WAN024D36; Start 27; Stop 51
aaacgagatcctagccccaagtaat

SEQ ID NO: 467699 - DNA, 25 bp, Artificial
  probe
  misc_feature (1)..(25): SEQ ID NO: 7425; WAN024D36; Start 26; Stop 50
aaaacgagatcctagccccaagtaa

SEQ ID NO: 467700 - DNA, 25 bp, Artificial
  probe
  misc_feature (1)..(25): SEQ ID NO: 7425; WAN024D36; Start 41; Stop 65
ccccaagtaatttccaattgatagc

SEQ ID NO: 467701 - DNA, 25 bp, Artificial
  probe
  misc_feature (1)..(25): SEQ ID NO: 7425; WAN024D36; Start 40; Stop 64
gccccaagtaatttccaattgatag

SEQ ID NO: 467702 - DNA, 25 bp, Artificial
  probe
  misc_feature (1)..(25): SEQ ID NO: 7425; WAN024D36; Start 39; Stop 63
agccccaagtaatttccaattgata

SEQ ID NO: 467703 - DNA, 25 bp, Artificial
  probe
  misc_feature (1)..(25): SEQ ID NO: 7425; WAN024D36; Start 38; Stop 62
tagccccaagtaatttccaattgat

SEQ ID NO: 467704 - DNA, 25 bp, Artificial
  probe
  misc_feature (1)..(25): SEQ ID NO: 7425; WAN024D36; Start 37; Stop 61
ctagccccaagtaatttccaattga

SEQ ID NO: 467705 - DNA, 25 bp, Artificial
  probe
  misc_feature (1)..(25): SEQ ID NO: 7425; WAN024D36; Start 36; Stop 60
cctagccccaagtaatttccaattg

SEQ ID NO: 467706 - DNA, 25 bp, Artificial
  probe
  misc_feature (1)..(25): SEQ ID NO: 7425; WAN024D36; Start 51; Stop 75
tttccaattgatagctggcaaaggg

SEQ ID NO: 467707 - DNA, 25 bp, Artificial
  probe
  misc_feature (1)..(25): SEQ ID NO: 7425; WAN024D36; Start 54; Stop 78
ccaattgatagctggcaaagggatg

SEQ ID NO: 467708 - DNA, 25 bp, Artificial
  probe
  misc_feature (1)..(25): SEQ ID NO: 7425; WAN024D36; Start 53; Stop 77
tccaattgatagctggcaaagggat

SEQ ID NO: 467709 - DNA, 25 bp, Artificial
  probe
  misc_feature (1)..(25): SEQ ID NO: 7425; WAN024D36; Start 52; Stop 76
ttccaattgatagctggcaaaggga

SEQ ID NO: 467710 - DNA, 25 bp, Artificial
  probe
  misc_feature (1)..(25): SEQ ID NO: 7425; WAN024D36; Start 55; Stop 79
caattgatagctggcaaagggatgc

SEQ ID NO: 467711 - DNA, 25 bp, Artificial
  probe
  misc_feature (1)..(25): SEQ ID NO: 7427; WAN024BUQ; Start 165; Stop 189
caatgcaaagattagtacgactgat

SEQ ID NO: 467712 - DNA, 25 bp, Artificial
  probe
  misc_feature (1)..(25): SEQ ID NO: 7427; WAN024BUQ; Start 164; Stop 188
ccaatgcaaagattagtacgactga

SEQ ID NO: 467713 - DNA, 25 bp, Artificial
  probe
  misc_feature (1)..(25): SEQ ID NO: 7427; WAN024BUQ; Start 168; Stop 192
tgcaaagattagtacgactgatatc

SEQ ID NO: 467714 - DNA, 25 bp, Artificial
  probe
  misc_feature (1)..(25): SEQ ID NO: 7427; WAN024BUQ; Start 166; Stop 190
aatgcaaagattagtacgactgata

SEQ ID NO: 467715 - DNA, 25 bp, Artificial
  probe
  misc_feature (1)..(25): SEQ ID NO: 7427; WAN024BUQ; Start 167; Stop 191
atgcaaagattagtacgactgatat

SEQ ID NO: 467716 - DNA, 25 bp, Artificial
  probe
  misc_feature (1)..(25): SEQ ID NO: 7427; WAN024BUQ; Start 122; Stop 146
gtgaggggtttgaattgactgtatc

SEQ ID NO: 467717 - DNA, 25 bp, Artificial
  probe
  misc_feature (1)..(25): SEQ ID NO: 7427; WAN024BUQ; Start 189; Stop 213
tatcaagagcatggctagaaataaa

SEQ ID NO: 467718 - DNA, 25 bp, Artificial
  probe
  misc_feature (1)..(25): SEQ ID NO: 7427; WAN024BUQ; Start 163; Stop 187
gccaatgcaaagattagtacgactg

SEQ ID NO: 467719 - DNA, 25 bp, Artificial
  probe
  misc_feature (1)..(25): SEQ ID NO: 7427; WAN024BUQ; Start 188; Stop 212
atatcaagagcatggctagaaataa

SEQ ID NO: 467720 - DNA, 25 bp, Artificial
  probe
  misc_feature (1)..(25): SEQ ID NO: 7427; WAN024BUQ; Start 121; Stop 145
ggtgaggggtttgaattgactgtat

SEQ ID NO: 467721 - DNA, 25 bp, Artificial
  probe
  misc_feature (1)..(25): SEQ ID NO: 7427; WAN024BUQ; Start 187; Stop 211
gatatcaagagcatggctagaaata

SEQ ID NO: 467722 - DNA, 25 bp, Artificial
  probe
  misc_feature (1)..(25): SEQ ID NO: 7427; WAN024BUQ; Start 123; Stop 147
tgaggggtttgaattgactgtatcg

SEQ ID NO: 467723 - DNA, 25 bp, Artificial
  probe
  misc_feature (1)..(25): SEQ ID NO: 7427; WAN024BUQ; Start 129; Stop 153
gtttgaattgactgtatcgccaggg

SEQ ID NO: 467724 - DNA, 25 bp, Artificial
  probe
  misc_feature (1)..(25): SEQ ID NO: 7427; WAN024BUQ; Start 128; Stop 152
ggtttgaattgactgtatcgccagg

SEQ ID NO: 467725 - DNA, 25 bp, Artificial
  probe
  misc_feature (1)..(25): SEQ ID NO: 7427; WAN024BUQ; Start 127; Stop 151
gggtttgaattgactgtatcgccag

SEQ ID NO: 467726 - DNA, 25 bp, Artificial
  probe
  misc_feature (1)..(25): SEQ ID NO: 7427; WAN024BUQ; Start 190; Stop 214
atcaagagcatggctagaaataaaa

SEQ ID NO: 467727 - DNA, 25 bp, Artificial
  probe
  misc_feature (1)..(25): SEQ ID NO: 7427; WAN024BUQ; Start 59; Stop 83
tacgttcttccgaaatgcagggtat

SEQ ID NO: 467728 - DNA, 25 bp, Artificial
  probe
  misc_feature (1)..(25): SEQ ID NO: 7427; WAN024BUQ; Start 72; Stop 96
aatgcagggtattttgagggagaaa

SEQ ID NO: 467729 - DNA, 25 bp, Artificial
  probe
  misc_feature (1)..(25): SEQ ID NO: 7427; WAN024BUQ; Start 161; Stop 185
gtgccaatgcaaagattagtacgac

SEQ ID NO: 467730 - DNA, 25 bp, Artificial
  probe
  misc_feature (1)..(25): SEQ ID NO: 7427; WAN024BUQ; Start 80; Stop 104
gtattttgagggagaaagggcaagg

SEQ ID NO: 467731 - DNA, 25 bp, Artificial
  probe
  misc_feature (1)..(25): SEQ ID NO: 7427; WAN024BUQ; Start 79; Stop 103
ggtattttgagggagaaagggcaag

SEQ ID NO: 467732 - DNA, 25 bp, Artificial
  probe
  misc_feature (1)..(25): SEQ ID NO: 7427; WAN024BUQ; Start 61; Stop 85
cgttcttccgaaatgcagggtattt

SEQ ID NO: 467733 - DNA, 25 bp, Artificial
  probe
  misc_feature (1)..(25): SEQ ID NO: 7427; WAN024BUQ; Start 63; Stop 87
ttcttccgaaatgcagggtattttg

SEQ ID NO: 467734 - DNA, 25 bp, Artificial
  probe
  misc_feature (1)..(25): SEQ ID NO: 7427; WAN024BUQ; Start 62; Stop 86
gttcttccgaaatgcagggtatttt

SEQ ID NO: 467735 - DNA, 25 bp, Artificial
  probe
  misc_feature (1)..(25): SEQ ID NO: 7427; WAN024BUQ; Start 162; Stop 186
tgccaatgcaaagattagtacgact

SEQ ID NO: 467736 - DNA, 25 bp, Artificial
  probe
  misc_feature (1)..(25): SEQ ID NO: 7427; WAN024BUQ; Start 73; Stop 97
atgcagggtattttgagggagaaag

SEQ ID NO: 467737 - DNA, 25 bp, Artificial
  probe
  misc_feature (1)..(25): SEQ ID NO: 7427; WAN024BUQ; Start 120; Stop 144
tggtgaggggtttgaattgactgta

SEQ ID NO: 467738 - DNA, 25 bp, Artificial
  probe
  misc_feature (1)..(25): SEQ ID NO: 7427; WAN024BUQ; Start 124; Stop 148
gaggggtttgaattgactgtatcgc

SEQ ID NO: 467739 - DNA, 25 bp, Artificial
  probe
  misc_feature (1)..(25): SEQ ID NO: 7427; WAN024BUQ; Start 71; Stop 95
aaatgcagggtattttgagggagaa

SEQ ID NO: 467740 - DNA, 25 bp, Artificial
  probe
  misc_feature (1)..(25): SEQ ID NO: 7427; WAN024BUQ; Start 65; Stop 89
cttccgaaatgcagggtattttgag

SEQ ID NO: 467741 - DNA, 25 bp, Artificial
  probe
  misc_feature (1)..(25): SEQ ID NO: 7427; WAN024BUQ; Start 70; Stop 94
gaaatgcagggtattttgagggaga

SEQ ID NO: 467742 - DNA, 25 bp, Artificial
  probe
  misc_feature (1)..(25): SEQ ID NO: 7427; WAN024BUQ; Start 64; Stop 88
tcttccgaaatgcagggtattttga

SEQ ID NO: 467743 - DNA, 25 bp, Artificial
  probe
  misc_feature (1)..(25): SEQ ID NO: 7427; WAN024BUQ; Start 58; Stop 82
ctacgttcttccgaaatgcagggta

SEQ ID NO: 467744 - DNA, 25 bp, Artificial
  probe
  misc_feature (1)..(25): SEQ ID NO: 7428; WAN024BKJ; Start 97; Stop 121
aagtatgtaagtgaagcagatatga

SEQ ID NO: 467745 - DNA, 25 bp, Artificial
  probe
  misc_feature (1)..(25): SEQ ID NO: 7428; WAN024BKJ; Start 96; Stop 120
caagtatgtaagtgaagcagatatg

SEQ ID NO: 467746 - DNA, 25 bp, Artificial
  probe
  misc_feature (1)..(25): SEQ ID NO: 7428; WAN024BKJ; Start 98; Stop 122
agtatgtaagtgaagcagatatgat

SEQ ID NO: 467747 - DNA, 25 bp, Artificial
  probe
  misc_feature (1)..(25): SEQ ID NO: 7428; WAN024BKJ; Start 95; Stop 119
acaagtatgtaagtgaagcagatat

SEQ ID NO: 467748 - DNA, 25 bp, Artificial
  probe
  misc_feature (1)..(25): SEQ ID NO: 7428; WAN024BKJ; Start 99; Stop 123
gtatgtaagtgaagcagatatgatc

SEQ ID NO: 467749 - DNA, 25 bp, Artificial
  probe
  misc_feature (1)..(25): SEQ ID NO: 7428; WAN024BKJ; Start 80; Stop 104
acgaacagttgtcttacaagtatgt

SEQ ID NO: 467750 - DNA, 25 bp, Artificial
  probe
  misc_feature (1)..(25): SEQ ID NO: 7428; WAN024BKJ; Start 79; Stop 103
aacgaacagttgtcttacaagtatg

SEQ ID NO: 467751 - DNA, 25 bp, Artificial
  probe
  misc_feature (1)..(25): SEQ ID NO: 7428; WAN024BKJ; Start 94; Stop 118
tacaagtatgtaagtgaagcagata

SEQ ID NO: 467752 - DNA, 25 bp, Artificial
  probe
  misc_feature (1)..(25): SEQ ID NO: 7428; WAN024BKJ; Start 81; Stop 105
cgaacagttgtcttacaagtatgta

SEQ ID NO: 467753 - DNA, 25 bp, Artificial
  probe
  misc_feature (1)..(25): SEQ ID NO: 7428; WAN024BKJ; Start 107; Stop 131
gtgaagcagatatgatcaatgttgt

SEQ ID NO: 467754 - DNA, 25 bp, Artificial
  probe
  misc_feature (1)..(25): SEQ ID NO: 7428; WAN024BKJ; Start 106; Stop 130
agtgaagcagatatgatcaatgttg

SEQ ID NO: 467755 - DNA, 25 bp, Artificial
  probe
  misc_feature (1)..(25): SEQ ID NO: 7428; WAN024BKJ; Start 108; Stop 132
tgaagcagatatgatcaatgttgtt

SEQ ID NO: 467756 - DNA, 25 bp, Artificial
  probe
  misc_feature (1)..(25): SEQ ID NO: 7428; WAN024BKJ; Start 71; Stop 95
atcttaccaacgaacagttgtctta

SEQ ID NO: 467757 - DNA, 25 bp, Artificial
  probe
  misc_feature (1)..(25): SEQ ID NO: 7428; WAN024BKJ; Start 78; Stop 102
caacgaacagttgtcttacaagtat

SEQ ID NO: 467758 - DNA, 25 bp, Artificial
  probe
  misc_feature (1)..(25): SEQ ID NO: 7428; WAN024BKJ; Start 105; Stop 129
aagtgaagcagatatgatcaatgtt

SEQ ID NO: 467759 - DNA, 25 bp, Artificial
  probe
  misc_feature (1)..(25): SEQ ID NO: 7428; WAN024BKJ; Start 149; Stop 173
ctaaacagtggcgtgaagaaaatag

SEQ ID NO: 467760 - DNA, 25 bp, Artificial
  probe
  misc_feature (1)..(25): SEQ ID NO: 7428; WAN024BKJ; Start 74; Stop 98
ttaccaacgaacagttgtcttacaa

SEQ ID NO: 467761 - DNA, 25 bp, Artificial
  probe
  misc_feature (1)..(25): SEQ ID NO: 7428; WAN024BKJ; Start 72; Stop 96
tcttaccaacgaacagttgtcttac

SEQ ID NO: 467762 - DNA, 25 bp, Artificial
  probe
  misc_feature (1)..(25): SEQ ID NO: 7428; WAN024BKJ; Start 77; Stop 101
ccaacgaacagttgtcttacaagta

SEQ ID NO: 467763 - DNA, 25 bp, Artificial
  probe
  misc_feature (1)..(25): SEQ ID NO: 7428; WAN024BKJ; Start 75; Stop 99
taccaacgaacagttgtcttacaag

SEQ ID NO: 467764 - DNA, 25 bp, Artificial
  probe
  misc_feature (1)..(25): SEQ ID NO: 7428; WAN024BKJ; Start 73; Stop 97
cttaccaacgaacagttgtcttaca

SEQ ID NO: 467765 - DNA, 25 bp, Artificial
  probe
  misc_feature (1)..(25): SEQ ID NO: 7428; WAN024BKJ; Start 70; Stop 94
gatcttaccaacgaacagttgtctt

SEQ ID NO: 467766 - DNA, 25 bp, Artificial
  probe
  misc_feature (1)..(25): SEQ ID NO: 7428; WAN024BKJ; Start 104; Stop 128
taagtgaagcagatatgatcaatgt

SEQ ID NO: 467767 - DNA, 25 bp, Artificial
  probe
  misc_feature (1)..(25): SEQ ID NO: 7428; WAN024BKJ; Start 102; Stop 126
tgtaagtgaagcagatatgatcaat

SEQ ID NO: 467768 - DNA, 25 bp, Artificial
  probe
  misc_feature (1)..(25): SEQ ID NO: 7428; WAN024BKJ; Start 101; Stop 125
atgtaagtgaagcagatatgatcaa

SEQ ID NO: 467769 - DNA, 25 bp, Artificial
  probe
  misc_feature (1)..(25): SEQ ID NO: 7428; WAN024BKJ; Start 150; Stop 174
taaacagtggcgtgaagaaaatagg

SEQ ID NO: 467770 - DNA, 25 bp, Artificial
  probe
  misc_feature (1)..(25): SEQ ID NO: 7428; WAN024BKJ; Start 103; Stop 127
gtaagtgaagcagatatgatcaatg

SEQ ID NO: 467771 - DNA, 25 bp, Artificial
  probe
  misc_feature (1)..(25): SEQ ID NO: 7428; WAN024BKJ; Start 33; Stop 57
aattcatacagatgcaatcaaagaa

SEQ ID NO: 467772 - DNA, 25 bp, Artificial
  probe
  misc_feature (1)..(25): SEQ ID NO: 7428; WAN024BKJ; Start 32; Stop 56
aaattcatacagatgcaatcaaaga

SEQ ID NO: 467773 - DNA, 25 bp, Artificial
  probe
  misc_feature (1)..(25): SEQ ID NO: 7428; WAN024BKJ; Start 156; Stop 180
gtggcgtgaagaaaataggaacaat

SEQ ID NO: 467774 - DNA, 25 bp, Artificial
  probe
  misc_feature (1)..(25): SEQ ID NO: 7428; WAN024BKJ; Start 148; Stop 172
gctaaacagtggcgtgaagaaaata

SEQ ID NO: 467775 - DNA, 25 bp, Artificial
  probe
  misc_feature (1)..(25): SEQ ID NO: 7428; WAN024BKJ; Start 100; Stop 124
tatgtaagtgaagcagatatgatca

SEQ ID NO: 467776 - DNA, 25 bp, Artificial
  probe
  misc_feature (1)..(25): SEQ ID NO: 7428; WAN024BKJ; Start 40; Stop 64
acagatgcaatcaaagaatatctct

SEQ ID NO: 467777 - DNA, 25 bp, Artificial
  probe
  misc_feature (1)..(25): SEQ ID NO: 7429; WAN024CQN; Start 117; Stop 141
atacaatgtaatcttctccacctgc

SEQ ID NO: 467778 - DNA, 25 bp, Artificial
  probe
  misc_feature (1)..(25): SEQ ID NO: 7429; WAN024CQN; Start 37; Stop 61
cataacgccataagtaccaccaata

SEQ ID NO: 467779 - DNA, 25 bp, Artificial
  probe
  misc_feature (1)..(25): SEQ ID NO: 7429; WAN024CQN; Start 38; Stop 62
ataacgccataagtaccaccaatac

SEQ ID NO: 467780 - DNA, 25 bp, Artificial
  probe
  misc_feature (1)..(25): SEQ ID NO: 7429; WAN024CQN; Start 116; Stop 140
aatacaatgtaatcttctccacctg

SEQ ID NO: 467781 - DNA, 25 bp, Artificial
  probe
  misc_feature (1)..(25): SEQ ID NO: 7429; WAN024CQN; Start 114; Stop 138
tgaatacaatgtaatcttctccacc

SEQ ID NO: 467782 - DNA, 25 bp, Artificial
  probe
  misc_feature (1)..(25): SEQ ID NO: 7429; WAN024CQN; Start 115; Stop 139
gaatacaatgtaatcttctccacct

SEQ ID NO: 467783 - DNA, 25 bp, Artificial
  probe
  misc_feature (1)..(25): SEQ ID NO: 7429; WAN024CQN; Start 46; Stop 70
ataagtaccaccaataccagcttct

SEQ ID NO: 467784 - DNA, 25 bp, Artificial
  probe
  misc_feature (1)..(25): SEQ ID NO: 7429; WAN024CQN; Start 45; Stop 69
cataagtaccaccaataccagcttc

SEQ ID NO: 467785 - DNA, 25 bp, Artificial
  probe
  misc_feature (1)..(25): SEQ ID NO: 7429; WAN024CQN; Start 39; Stop 63
taacgccataagtaccaccaatacc

SEQ ID NO: 467786 - DNA, 25 bp, Artificial
  probe
  misc_feature (1)..(25): SEQ ID NO: 7429; WAN024CQN; Start 92; Stop 116
agatattgttcatctggaccattga

SEQ ID NO: 467787 - DNA, 25 bp, Artificial
  probe
  misc_feature (1)..(25): SEQ ID NO: 7429; WAN024CQN; Start 80; Stop 104
aagcgaccaccaagatattgttcat

SEQ ID NO: 467788 - DNA, 25 bp, Artificial
  probe
  misc_feature (1)..(25): SEQ ID NO: 7429; WAN024CQN; Start 77; Stop 101
atcaagcgaccaccaagatattgtt

SEQ ID NO: 467789 - DNA, 25 bp, Artificial
  probe
  misc_feature (1)..(25): SEQ ID NO: 7429; WAN024CQN; Start 89; Stop 113
ccaagatattgttcatctggaccat

SEQ ID NO: 467790 - DNA, 25 bp, Artificial
  probe
  misc_feature (1)..(25): SEQ ID NO: 7429; WAN024CQN; Start 19; Stop 43
tttcaagaacaaatctggcataacg

SEQ ID NO: 467791 - DNA, 25 bp, Artificial
  probe
  misc_feature (1)..(25): SEQ ID NO: 7429; WAN024CQN; Start 91; Stop 115
aagatattgttcatctggaccattg

SEQ ID NO: 467792 - DNA, 25 bp, Artificial
  probe
  misc_feature (1)..(25): SEQ ID NO: 7429; WAN024CQN; Start 90; Stop 114
caagatattgttcatctggaccatt

SEQ ID NO: 467793 - DNA, 25 bp, Artificial
  probe
  misc_feature (1)..(25): SEQ ID NO: 7429; WAN024CQN; Start 118; Stop 142
tacaatgtaatcttctccacctgca

SEQ ID NO: 467794 - DNA, 25 bp, Artificial
  probe
  misc_feature (1)..(25): SEQ ID NO: 7429; WAN024CQN; Start 87; Stop 111
caccaagatattgttcatctggacc

SEQ ID NO: 467795 - DNA, 25 bp, Artificial
  probe
  misc_feature (1)..(25): SEQ ID NO: 7429; WAN024CQN; Start 86; Stop 110
ccaccaagatattgttcatctggac

SEQ ID NO: 467796 - DNA, 25 bp, Artificial
  probe
  misc_feature (1)..(25): SEQ ID NO: 7429; WAN024CQN; Start 84; Stop 108
gaccaccaagatattgttcatctgg

SEQ ID NO: 467797 - DNA, 25 bp, Artificial
  probe
  misc_feature (1)..(25): SEQ ID NO: 7429; WAN024CQN; Start 81; Stop 105
agcgaccaccaagatattgttcatc

SEQ ID NO: 467798 - DNA, 25 bp, Artificial
  probe
  misc_feature (1)..(25): SEQ ID NO: 7429; WAN024CQN; Start 113; Stop 137
ttgaatacaatgtaatcttctccac

SEQ ID NO: 467799 - DNA, 25 bp, Artificial
  probe
  misc_feature (1)..(25): SEQ ID NO: 7429; WAN024CQN; Start 88; Stop 112
accaagatattgttcatctggacca

SEQ ID NO: 467800 - DNA, 25 bp, Artificial
  probe
  misc_feature (1)..(25): SEQ ID NO: 7429; WAN024CQN; Start 85; Stop 109
accaccaagatattgttcatctgga

SEQ ID NO: 467801 - DNA, 25 bp, Artificial
  probe
  misc_feature (1)..(25): SEQ ID NO: 7429; WAN024CQN; Start 83; Stop 107
cgaccaccaagatattgttcatctg

SEQ ID NO: 467802 - DNA, 25 bp, Artificial
  probe
  misc_feature (1)..(25): SEQ ID NO: 7429; WAN024CQN; Start 44; Stop 68
ccataagtaccaccaataccagctt

SEQ ID NO: 467803 - DNA, 25 bp, Artificial
  probe
  misc_feature (1)..(25): SEQ ID NO: 7429; WAN024CQN; Start 6; Stop 30
tcaaactttccaatttcaagaacaa

SEQ ID NO: 467804 - DNA, 25 bp, Artificial
  probe
  misc_feature (1)..(25): SEQ ID NO: 7429; WAN024CQN; Start 78; Stop 102
tcaagcgaccaccaagatattgttc

SEQ ID NO: 467805 - DNA, 25 bp, Artificial
  probe
  misc_feature (1)..(25): SEQ ID NO: 7429; WAN024CQN; Start 76; Stop 100
catcaagcgaccaccaagatattgt

SEQ ID NO: 467806 - DNA, 25 bp, Artificial
  probe
  misc_feature (1)..(25): SEQ ID NO: 7429; WAN024CQN; Start 98; Stop 122
tgttcatctggaccattgaatacaa

SEQ ID NO: 467807 - DNA, 25 bp, Artificial
  probe
  misc_feature (1)..(25): SEQ ID NO: 7429; WAN024CQN; Start 97; Stop 121
ttgttcatctggaccattgaataca

SEQ ID NO: 467808 - DNA, 25 bp, Artificial
  probe
  misc_feature (1)..(25): SEQ ID NO: 7429; WAN024CQN; Start 5; Stop 29
atcaaactttccaatttcaagaaca

SEQ ID NO: 467809 - DNA, 25 bp, Artificial
  probe
  misc_feature (1)..(25): SEQ ID NO: 7429; WAN024CQN; Start 99; Stop 123
gttcatctggaccattgaatacaat

SEQ ID NO: 467810 - DNA, 25 bp, Artificial
  probe
  misc_feature (1)..(25): SEQ ID NO: 7430; WAN024CTI; Start 118; Stop 142
ttccacagatttcacagactctatt

SEQ ID NO: 467811 - DNA, 25 bp, Artificial
  probe
  misc_feature (1)..(25): SEQ ID NO: 7430; WAN024CTI; Start 117; Stop 141
tttccacagatttcacagactctat

SEQ ID NO: 467812 - DNA, 25 bp, Artificial
  probe
  misc_feature (1)..(25): SEQ ID NO: 7430; WAN024CTI; Start 119; Stop 143
tccacagatttcacagactctatta

SEQ ID NO: 467813 - DNA, 25 bp, Artificial
  probe
  misc_feature (1)..(25): SEQ ID NO: 7430; WAN024CTI; Start 120; Stop 144
ccacagatttcacagactctattat

SEQ ID NO: 467814 - DNA, 25 bp, Artificial
  probe
  misc_feature (1)..(25): SEQ ID NO: 7430; WAN024CTI; Start 93; Stop 117
tgatatgacttgtttaaaggctgtt

SEQ ID NO: 467815 - DNA, 25 bp, Artificial
  probe
  misc_feature (1)..(25): SEQ ID NO: 7430; WAN024CTI; Start 92; Stop 116
ttgatatgacttgtttaaaggctgt

SEQ ID NO: 467816 - DNA, 25 bp, Artificial
  probe
  misc_feature (1)..(25): SEQ ID NO: 7430; WAN024CTI; Start 90; Stop 114
acttgatatgacttgtttaaaggct

SEQ ID NO: 467817 - DNA, 25 bp, Artificial
  probe
  misc_feature (1)..(25): SEQ ID NO: 7430; WAN024CTI; Start 91; Stop 115
cttgatatgacttgtttaaaggctg

SEQ ID NO: 467818 - DNA, 25 bp, Artificial
  probe
  misc_feature (1)..(25): SEQ ID NO: 7430; WAN024CTI; Start 94; Stop 118
gatatgacttgtttaaaggctgttt

SEQ ID NO: 467819 - DNA, 25 bp, Artificial
  probe
  misc_feature (1)..(25): SEQ ID NO: 7430; WAN024CTI; Start 89; Stop 113
aacttgatatgacttgtttaaaggc

SEQ ID NO: 467820 - DNA, 25 bp, Artificial
  probe
  misc_feature (1)..(25): SEQ ID NO: 7430; WAN024CTI; Start 121; Stop 145
cacagatttcacagactctattatt

SEQ ID NO: 467821 - DNA, 25 bp, Artificial
  probe
  misc_feature (1)..(25): SEQ ID NO: 7430; WAN024CTI; Start 116; Stop 140
ttttccacagatttcacagactcta

SEQ ID NO: 467822 - DNA, 25 bp, Artificial
  probe
  misc_feature (1)..(25): SEQ ID NO: 7430; WAN024CTI; Start 115; Stop 139
gttttccacagatttcacagactct

SEQ ID NO: 467823 - DNA, 25 bp, Artificial
  probe
  misc_feature (1)..(25): SEQ ID NO: 7430; WAN024CTI; Start 114; Stop 138
tgttttccacagatttcacagactc

SEQ ID NO: 467824 - DNA, 25 bp, Artificial
  probe
  misc_feature (1)..(25): SEQ ID NO: 7430; WAN024CTI; Start 97; Stop 121
atgacttgtttaaaggctgttttcc

SEQ ID NO: 467825 - DNA, 25 bp, Artificial
  probe
  misc_feature (1)..(25): SEQ ID NO: 7430; WAN024CTI; Start 99; Stop 123
gacttgtttaaaggctgttttccac

SEQ ID NO: 467826 - DNA, 25 bp, Artificial
  probe
  misc_feature (1)..(25): SEQ ID NO: 7430; WAN024CTI; Start 98; Stop 122
tgacttgtttaaaggctgttttcca

SEQ ID NO: 467827 - DNA, 25 bp, Artificial
  probe
  misc_feature (1)..(25): SEQ ID NO: 7430; WAN024CTI; Start 96; Stop 120
tatgacttgtttaaaggctgttttc

SEQ ID NO: 467828 - DNA, 25 bp, Artificial
  probe
  misc_feature (1)..(25): SEQ ID NO: 7430; WAN024CTI; Start 100; Stop 124
acttgtttaaaggctgttttccaca

SEQ ID NO: 467829 - DNA, 25 bp, Artificial
  probe
  misc_feature (1)..(25): SEQ ID NO: 7430; WAN024CTI; Start 95; Stop 119
atatgacttgtttaaaggctgtttt

SEQ ID NO: 467830 - DNA, 25 bp, Artificial
  probe
  misc_feature (1)..(25): SEQ ID NO: 7430; WAN024CTI; Start 122; Stop 146
acagatttcacagactctattatta

SEQ ID NO: 467831 - DNA, 25 bp, Artificial
  probe
  misc_feature (1)..(25): SEQ ID NO: 7430; WAN024CTI; Start 123; Stop 147
cagatttcacagactctattattac

SEQ ID NO: 467832 - DNA, 25 bp, Artificial
  probe
  misc_feature (1)..(25): SEQ ID NO: 7430; WAN024CTI; Start 124; Stop 148
agatttcacagactctattattact

SEQ ID NO: 467833 - DNA, 25 bp, Artificial
  probe
  misc_feature (1)..(25): SEQ ID NO: 7430; WAN024CTI; Start 88; Stop 112
aaacttgatatgacttgtttaaagg

SEQ ID NO: 467834 - DNA, 25 bp, Artificial
  probe
  misc_feature (1)..(25): SEQ ID NO: 7430; WAN024CTI; Start 106; Stop 130
ttaaaggctgttttccacagatttc

SEQ ID NO: 467835 - DNA, 25 bp, Artificial
  probe
  misc_feature (1)..(25): SEQ ID NO: 7430; WAN024CTI; Start 107; Stop 131
taaaggctgttttccacagatttca

SEQ ID NO: 467836 - DNA, 25 bp, Artificial
  probe
  misc_feature (1)..(25): SEQ ID NO: 7430; WAN024CTI; Start 105; Stop 129
tttaaaggctgttttccacagattt

SEQ ID NO: 467837 - DNA, 25 bp, Artificial
  probe
  misc_feature (1)..(25): SEQ ID NO: 7430; WAN024CTI; Start 104; Stop 128
gtttaaaggctgttttccacagatt

SEQ ID NO: 467838 - DNA, 25 bp, Artificial
  probe
  misc_feature (1)..(25): SEQ ID NO: 7430; WAN024CTI; Start 113; Stop 137
ctgttttccacagatttcacagact

SEQ ID NO: 467839 - DNA, 25 bp, Artificial
  probe
  misc_feature (1)..(25): SEQ ID NO: 7430; WAN024CTI; Start 101; Stop 125
cttgtttaaaggctgttttccacag

SEQ ID NO: 467840 - DNA, 25 bp, Artificial
  probe
  misc_feature (1)..(25): SEQ ID NO: 7430; WAN024CTI; Start 103; Stop 127
tgtttaaaggctgttttccacagat

SEQ ID NO: 467841 - DNA, 25 bp, Artificial
  probe
  misc_feature (1)..(25): SEQ ID NO: 7430; WAN024CTI; Start 102; Stop 126
ttgtttaaaggctgttttccacaga

SEQ ID NO: 467842 - DNA, 25 bp, Artificial
  probe
  misc_feature (1)..(25): SEQ ID NO: 7430; WAN024CTI; Start 108; Stop 132
aaaggctgttttccacagatttcac

SEQ ID NO: 467843 - DNA, 25 bp, Artificial
  probe
  misc_feature (1)..(25): SEQ ID NO: 7431; WAN024BX4; Start 1; Stop 25
ttgaatccagacgaaattgccaatc

SEQ ID NO: 467844 - DNA, 25 bp, Artificial
  probe
  misc_feature (1)..(25): SEQ ID NO: 7431; WAN024BX4; Start 2; Stop 26
tgaatccagacgaaattgccaatct

SEQ ID NO: 467845 - DNA, 25 bp, Artificial
  probe
  misc_feature (1)..(25): SEQ ID NO: 7431; WAN024BX4; Start 65; Stop 89
agctgagaaagaccaaatacgaaaa

SEQ ID NO: 467846 - DNA, 25 bp, Artificial
  probe
  misc_feature (1)..(25): SEQ ID NO: 7431; WAN024BX4; Start 14; Stop 38
aaattgccaatctgggaagaaaatt

SEQ ID NO: 467847 - DNA, 25 bp, Artificial
  probe
  misc_feature (1)..(25): SEQ ID NO: 7431; WAN024BX4; Start 13; Stop 37
gaaattgccaatctgggaagaaaat

SEQ ID NO: 467848 - DNA, 25 bp, Artificial
  probe
  misc_feature (1)..(25): SEQ ID NO: 7431; WAN024BX4; Start 24; Stop 48
tctgggaagaaaattgccaataatt

SEQ ID NO: 467849 - DNA, 25 bp, Artificial
  probe
  misc_feature (1)..(25): SEQ ID NO: 7431; WAN024BX4; Start 22; Stop 46
aatctgggaagaaaattgccaataa

SEQ ID NO: 467850 - DNA, 25 bp, Artificial
  probe
  misc_feature (1)..(25): SEQ ID NO: 7431; WAN024BX4; Start 23; Stop 47
atctgggaagaaaattgccaataat

SEQ ID NO: 467851 - DNA, 25 bp, Artificial
  probe
  misc_feature (1)..(25): SEQ ID NO: 7431; WAN024BX4; Start 11; Stop 35
acgaaattgccaatctgggaagaaa

SEQ ID NO: 467852 - DNA, 25 bp, Artificial
  probe
  misc_feature (1)..(25): SEQ ID NO: 7431; WAN024BX4; Start 21; Stop 45
caatctgggaagaaaattgccaata

SEQ ID NO: 467853 - DNA, 25 bp, Artificial
  probe
  misc_feature (1)..(25): SEQ ID NO: 7431; WAN024BX4; Start 15; Stop 39
aattgccaatctgggaagaaaattg

SEQ ID NO: 467854 - DNA, 25 bp, Artificial
  probe
  misc_feature (1)..(25): SEQ ID NO: 7431; WAN024BX4; Start 10; Stop 34
gacgaaattgccaatctgggaagaa

SEQ ID NO: 467855 - DNA, 25 bp, Artificial
  probe
  misc_feature (1)..(25): SEQ ID NO: 7431; WAN024BX4; Start 12; Stop 36
cgaaattgccaatctgggaagaaaa

SEQ ID NO: 467856 - DNA, 25 bp, Artificial
  probe
  misc_feature (1)..(25): SEQ ID NO: 7431; WAN024BX4; Start 20; Stop 44
ccaatctgggaagaaaattgccaat

SEQ ID NO: 467857 - DNA, 25 bp, Artificial
  probe
  misc_feature (1)..(25): SEQ ID NO: 7431; WAN024BX4; Start 3; Stop 27
gaatccagacgaaattgccaatctg

SEQ ID NO: 467858 - DNA, 25 bp, Artificial
  probe
  misc_feature (1)..(25): SEQ ID NO: 7431; WAN024BX4; Start 9; Stop 33
agacgaaattgccaatctgggaaga

SEQ ID NO: 467859 - DNA, 25 bp, Artificial
  probe
  misc_feature (1)..(25): SEQ ID NO: 7431; WAN024BX4; Start 16; Stop 40
attgccaatctgggaagaaaattgc

SEQ ID NO: 467860 - DNA, 25 bp, Artificial
  probe
  misc_feature (1)..(25): SEQ ID NO: 7431; WAN024BX4; Start 25; Stop 49
ctgggaagaaaattgccaataattt

SEQ ID NO: 467861 - DNA, 25 bp, Artificial
  probe
  misc_feature (1)..(25): SEQ ID NO: 7431; WAN024BX4; Start 37; Stop 61
ttgccaataattttggacgataagc

SEQ ID NO: 467862 - DNA, 25 bp, Artificial
  probe
  misc_feature (1)..(25): SEQ ID NO: 7431; WAN024BX4; Start 36; Stop 60
attgccaataattttggacgataag

SEQ ID NO: 467863 - DNA, 25 bp, Artificial
  probe
  misc_feature (1)..(25): SEQ ID NO: 7431; WAN024BX4; Start 35; Stop 59
aattgccaataattttggacgataa

SEQ ID NO: 467864 - DNA, 25 bp, Artificial
  probe
  misc_feature (1)..(25): SEQ ID NO: 7431; WAN024BX4; Start 34; Stop 58
aaattgccaataattttggacgata

SEQ ID NO: 467865 - DNA, 25 bp, Artificial
  probe
  misc_feature (1)..(25): SEQ ID NO: 7431; WAN024BX4; Start 8; Stop 32
cagacgaaattgccaatctgggaag

SEQ ID NO: 467866 - DNA, 25 bp, Artificial
  probe
  misc_feature (1)..(25): SEQ ID NO: 7431; WAN024BX4; Start 39; Stop 63
gccaataattttggacgataagcgt

SEQ ID NO: 467867 - DNA, 25 bp, Artificial
  probe
  misc_feature (1)..(25): SEQ ID NO: 7431; WAN024BX4; Start 38; Stop 62
tgccaataattttggacgataagcg

SEQ ID NO: 467868 - DNA, 25 bp, Artificial
  probe
  misc_feature (1)..(25): SEQ ID NO: 7431; WAN024BX4; Start 19; Stop 43
gccaatctgggaagaaaattgccaa

SEQ ID NO: 467869 - DNA, 25 bp, Artificial
  probe
  misc_feature (1)..(25): SEQ ID NO: 7431; WAN024BX4; Start 17; Stop 41
ttgccaatctgggaagaaaattgcc

SEQ ID NO: 467870 - DNA, 25 bp, Artificial
  probe
  misc_feature (1)..(25): SEQ ID NO: 7433; WAN024C2I; Start 46; Stop 70
aaagctgtagctcgtgttcaaattg

SEQ ID NO: 467871 - DNA, 25 bp, Artificial
  probe
  misc_feature (1)..(25): SEQ ID NO: 7433; WAN024C2I; Start 45; Stop 69
caaagctgtagctcgtgttcaaatt

SEQ ID NO: 467872 - DNA, 25 bp, Artificial
  probe
  misc_feature (1)..(25): SEQ ID NO: 7433; WAN024C2I; Start 51; Stop 75
tgtagctcgtgttcaaattggcaag

SEQ ID NO: 467873 - DNA, 25 bp, Artificial
  probe
  misc_feature (1)..(25): SEQ ID NO: 7433; WAN024C2I; Start 50; Stop 74
ctgtagctcgtgttcaaattggcaa

SEQ ID NO: 467874 - DNA, 25 bp, Artificial
  probe
  misc_feature (1)..(25): SEQ ID NO: 7433; WAN024C2I; Start 47; Stop 71
aagctgtagctcgtgttcaaattgg

SEQ ID NO: 467875 - DNA, 25 bp, Artificial
  probe
  misc_feature (1)..(25): SEQ ID NO: 7433; WAN024C2I; Start 44; Stop 68
ccaaagctgtagctcgtgttcaaat

SEQ ID NO: 467876 - DNA, 25 bp, Artificial
  probe
  misc_feature (1)..(25): SEQ ID NO: 7433; WAN024C2I; Start 1; Stop 25
ttgaatgcagaagcaatgctccaaa

SEQ ID NO: 467877 - DNA, 25 bp, Artificial
  probe
  misc_feature (1)..(25): SEQ ID NO: 7433; WAN024C2I; Start 2; Stop 26
tgaatgcagaagcaatgctccaaag

SEQ ID NO: 467878 - DNA, 25 bp, Artificial
  probe
  misc_feature (1)..(25): SEQ ID NO: 7434; WAN024BNF; Start 21; Stop 45
aggggttttgttgtgttatgaaatc

SEQ ID NO: 467879 - DNA, 25 bp, Artificial
  probe
  misc_feature (1)..(25): SEQ ID NO: 7434; WAN024BNF; Start 20; Stop 44
aaggggttttgttgtgttatgaaat

SEQ ID NO: 467880 - DNA, 25 bp, Artificial
  probe
  misc_feature (1)..(25): SEQ ID NO: 7434; WAN024BNF; Start 22; Stop 46
ggggttttgttgtgttatgaaatca

SEQ ID NO: 467881 - DNA, 25 bp, Artificial
  probe
  misc_feature (1)..(25): SEQ ID NO: 7434; WAN024BNF; Start 11; Stop 35
aatatcttcaaggggttttgttgtg

SEQ ID NO: 467882 - DNA, 25 bp, Artificial
  probe
  misc_feature (1)..(25): SEQ ID NO: 7434; WAN024BNF; Start 10; Stop 34
caatatcttcaaggggttttgttgt

SEQ ID NO: 467883 - DNA, 25 bp, Artificial
  probe
  misc_feature (1)..(25): SEQ ID NO: 7434; WAN024BNF; Start 9; Stop 33
tcaatatcttcaaggggttttgttg

SEQ ID NO: 467884 - DNA, 25 bp, Artificial
  probe
  misc_feature (1)..(25): SEQ ID NO: 7434; WAN024BNF; Start 19; Stop 43
caaggggttttgttgtgttatgaaa

SEQ ID NO: 467885 - DNA, 25 bp, Artificial
  probe
  misc_feature (1)..(25): SEQ ID NO: 7434; WAN024BNF; Start 12; Stop 36
atatcttcaaggggttttgttgtgt

SEQ ID NO: 467886 - DNA, 25 bp, Artificial
  probe
  misc_feature (1)..(25): SEQ ID NO: 7434; WAN024BNF; Start 16; Stop 40
cttcaaggggttttgttgtgttatg

SEQ ID NO: 467887 - DNA, 25 bp, Artificial
  probe
  misc_feature (1)..(25): SEQ ID NO: 7434; WAN024BNF; Start 15; Stop 39
tcttcaaggggttttgttgtgttat

SEQ ID NO: 467888 - DNA, 25 bp, Artificial
  probe
  misc_feature (1)..(25): SEQ ID NO: 7434; WAN024BNF; Start 14; Stop 38
atcttcaaggggttttgttgtgtta

SEQ ID NO: 467889 - DNA, 25 bp, Artificial
  probe
  misc_feature (1)..(25): SEQ ID NO: 7434; WAN024BNF; Start 13; Stop 37
tatcttcaaggggttttgttgtgtt

SEQ ID NO: 467890 - DNA, 25 bp, Artificial
  probe
  misc_feature (1)..(25): SEQ ID NO: 7434; WAN024BNF; Start 23; Stop 47
gggttttgttgtgttatgaaatcaa

SEQ ID NO: 467891 - DNA, 25 bp, Artificial
  probe
  misc_feature (1)..(25): SEQ ID NO: 7434; WAN024BNF; Start 8; Stop 32
atcaatatcttcaaggggttttgtt

SEQ ID NO: 467892 - DNA, 25 bp, Artificial
  probe
  misc_feature (1)..(25): SEQ ID NO: 7434; WAN024BNF; Start 18; Stop 42
tcaaggggttttgttgtgttatgaa

SEQ ID NO: 467893 - DNA, 25 bp, Artificial
  probe
  misc_feature (1)..(25): SEQ ID NO: 7434; WAN024BNF; Start 17; Stop 41
ttcaaggggttttgttgtgttatga

SEQ ID NO: 467894 - DNA, 25 bp, Artificial
  probe
  misc_feature (1)..(25): SEQ ID NO: 7434; WAN024BNF; Start 7; Stop 31
tatcaatatcttcaaggggttttgt

SEQ ID NO: 467895 - DNA, 25 bp, Artificial
  probe
  misc_feature (1)..(25): SEQ ID NO: 7434; WAN024BNF; Start 6; Stop 30
ttatcaatatcttcaaggggttttg

SEQ ID NO: 467896 - DNA, 25 bp, Artificial
  probe
  misc_feature (1)..(25): SEQ ID NO: 7434; WAN024BNF; Start 3; Stop 27
gaattatcaatatcttcaaggggtt

SEQ ID NO: 467897 - DNA, 25 bp, Artificial
  probe
  misc_feature (1)..(25): SEQ ID NO: 7434; WAN024BNF; Start 5; Stop 29
attatcaatatcttcaaggggtttt

SEQ ID NO: 467898 - DNA, 25 bp, Artificial
  probe
  misc_feature (1)..(25): SEQ ID NO: 7434; WAN024BNF; Start 4; Stop 28
aattatcaatatcttcaaggggttt

SEQ ID NO: 467899 - DNA, 25 bp, Artificial
  probe
  misc_feature (1)..(25): SEQ ID NO: 7434; WAN024BNF; Start 24; Stop 48
ggttttgttgtgttatgaaatcaaa

SEQ ID NO: 467900 - DNA, 25 bp, Artificial
  probe
  misc_feature (1)..(25): SEQ ID NO: 7434; WAN024BNF; Start 2; Stop 26
tgaattatcaatatcttcaaggggt

SEQ ID NO: 467901 - DNA, 25 bp, Artificial
  probe
  misc_feature (1)..(25): SEQ ID NO: 7434; WAN024BNF; Start 1; Stop 25
ttgaattatcaatatcttcaagggg

SEQ ID NO: 467902 - DNA, 25 bp, Artificial
  probe
  misc_feature (1)..(25): SEQ ID NO: 7434; WAN024BNF; Start 25; Stop 49
gttttgttgtgttatgaaatcaaaa

SEQ ID NO: 467903 - DNA, 25 bp, Artificial
  probe
  misc_feature (1)..(25): SEQ ID NO: 7436; WAN024BQQ; Start 521; Stop 545
cacttcctgctaatatgcctaacta

SEQ ID NO: 467904 - DNA, 25 bp, Artificial
  probe
  misc_feature (1)..(25): SEQ ID NO: 7436; WAN024BQQ; Start 522; Stop 546
acttcctgctaatatgcctaactat

SEQ ID NO: 467905 - DNA, 25 bp, Artificial
  probe
  misc_feature (1)..(25): SEQ ID NO: 7436; WAN024BQQ; Start 519; Stop 543
aacacttcctgctaatatgcctaac

SEQ ID NO: 467906 - DNA, 25 bp, Artificial
  probe
  misc_feature (1)..(25): SEQ ID NO: 7436; WAN024BQQ; Start 393; Stop 417
aggatatagtgataccaattcggaa

SEQ ID NO: 467907 - DNA, 25 bp, Artificial
  probe
  misc_feature (1)..(25): SEQ ID NO: 7436; WAN024BQQ; Start 520; Stop 544
acacttcctgctaatatgcctaact

SEQ ID NO: 467908 - DNA, 25 bp, Artificial
  probe
  misc_feature (1)..(25): SEQ ID NO: 7436; WAN024BQQ; Start 394; Stop 418
ggatatagtgataccaattcggaag

SEQ ID NO: 467909 - DNA, 25 bp, Artificial
  probe
  misc_feature (1)..(25): SEQ ID NO: 7436; WAN024BQQ; Start 392; Stop 416
taggatatagtgataccaattcgga

SEQ ID NO: 467910 - DNA, 25 bp, Artificial
  probe
  misc_feature (1)..(25): SEQ ID NO: 7436; WAN024BQQ; Start 395; Stop 419
gatatagtgataccaattcggaaga

SEQ ID NO: 467911 - DNA, 25 bp, Artificial
  probe
  misc_feature (1)..(25): SEQ ID NO: 7436; WAN024BQQ; Start 523; Stop 547
cttcctgctaatatgcctaactata

SEQ ID NO: 467912 - DNA, 25 bp, Artificial
  probe
  misc_feature (1)..(25): SEQ ID NO: 7436; WAN024BQQ; Start 391; Stop 415
ttaggatatagtgataccaattcgg

SEQ ID NO: 467913 - DNA, 25 bp, Artificial
  probe
  misc_feature (1)..(25): SEQ ID NO: 7436; WAN024BQQ; Start 518; Stop 542
aaacacttcctgctaatatgcctaa

SEQ ID NO: 467914 - DNA, 25 bp, Artificial
  probe
  misc_feature (1)..(25): SEQ ID NO: 7436; WAN024BQQ; Start 514; Stop 538
cttcaaacacttcctgctaatatgc

SEQ ID NO: 467915 - DNA, 25 bp, Artificial
  probe
  misc_feature (1)..(25): SEQ ID NO: 7436; WAN024BQQ; Start 513; Stop 537
gcttcaaacacttcctgctaatatg

SEQ ID NO: 467916 - DNA, 25 bp, Artificial
  probe
  misc_feature (1)..(25): SEQ ID NO: 7436; WAN024BQQ; Start 396; Stop 420
atatagtgataccaattcggaagaa

SEQ ID NO: 467917 - DNA, 25 bp, Artificial
  probe
  misc_feature (1)..(25): SEQ ID NO: 7436; WAN024BQQ; Start 603; Stop 627
tgaattgttaagagacagtatagca

SEQ ID NO: 467918 - DNA, 25 bp, Artificial
  probe
  misc_feature (1)..(25): SEQ ID NO: 7436; WAN024BQQ; Start 517; Stop 541
caaacacttcctgctaatatgccta

SEQ ID NO: 467919 - DNA, 25 bp, Artificial
  probe
  misc_feature (1)..(25): SEQ ID NO: 7436; WAN024BQQ; Start 746; Stop 770
cgatggactacctaaagggaaataa

SEQ ID NO: 467920 - DNA, 25 bp, Artificial
  probe
  misc_feature (1)..(25): SEQ ID NO: 7436; WAN024BQQ; Start 108; Stop 132
tcctattatcccttctaatcaacgc

SEQ ID NO: 467921 - DNA, 25 bp, Artificial
  probe
  misc_feature (1)..(25): SEQ ID NO: 7436; WAN024BQQ; Start 265; Stop 289
cattcttgtgatatcggagttgtta

SEQ ID NO: 467922 - DNA, 25 bp, Artificial
  probe
  misc_feature (1)..(25): SEQ ID NO: 7436; WAN024BQQ; Start 733; Stop 757
atagtagagaatccgatggactacc

SEQ ID NO: 467923 - DNA, 25 bp, Artificial
  probe
  misc_feature (1)..(25): SEQ ID NO: 7436; WAN024BQQ; Start 262; Stop 286
gttcattcttgtgatatcggagttg

SEQ ID NO: 467924 - DNA, 25 bp, Artificial
  probe
  misc_feature (1)..(25): SEQ ID NO: 7436; WAN024BQQ; Start 261; Stop 285
agttcattcttgtgatatcggagtt

SEQ ID NO: 467925 - DNA, 25 bp, Artificial
  probe
  misc_feature (1)..(25): SEQ ID NO: 7436; WAN024BQQ; Start 260; Stop 284
aagttcattcttgtgatatcggagt

SEQ ID NO: 467926 - DNA, 25 bp, Artificial
  probe
  misc_feature (1)..(25): SEQ ID NO: 7436; WAN024BQQ; Start 264; Stop 288
tcattcttgtgatatcggagttgtt

SEQ ID NO: 467927 - DNA, 25 bp, Artificial
  probe
  misc_feature (1)..(25): SEQ ID NO: 7436; WAN024BQQ; Start 263; Stop 287
ttcattcttgtgatatcggagttgt

SEQ ID NO: 467928 - DNA, 25 bp, Artificial
  probe
  misc_feature (1)..(25): SEQ ID NO: 7436; WAN024BQQ; Start 745; Stop 769
ccgatggactacctaaagggaaata

SEQ ID NO: 467929 - DNA, 25 bp, Artificial
  probe
  misc_feature (1)..(25): SEQ ID NO: 7436; WAN024BQQ; Start 736; Stop 760
gtagagaatccgatggactacctaa

SEQ ID NO: 467930 - DNA, 25 bp, Artificial
  probe
  misc_feature (1)..(25): SEQ ID NO: 7436; WAN024BQQ; Start 515; Stop 539
ttcaaacacttcctgctaatatgcc

SEQ ID NO: 467931 - DNA, 25 bp, Artificial
  probe
  misc_feature (1)..(25): SEQ ID NO: 7436; WAN024BQQ; Start 512; Stop 536
cgcttcaaacacttcctgctaatat

SEQ ID NO: 467932 - DNA, 25 bp, Artificial
  probe
  misc_feature (1)..(25): SEQ ID NO: 7436; WAN024BQQ; Start 367; Stop 391
ccaacatttaggcaatctgagaaat

SEQ ID NO: 467933 - DNA, 25 bp, Artificial
  probe
  misc_feature (1)..(25): SEQ ID NO: 7436; WAN024BQQ; Start 266; Stop 290
attcttgtgatatcggagttgttaa

SEQ ID NO: 467934 - DNA, 25 bp, Artificial
  probe
  misc_feature (1)..(25): SEQ ID NO: 7436; WAN024BQQ; Start 350; Stop 374
aatacattgtctggttgccaacatt

SEQ ID NO: 467935 - DNA, 25 bp, Artificial
  probe
  misc_feature (1)..(25): SEQ ID NO: 7436; WAN024BQQ; Start 735; Stop 759
agtagagaatccgatggactaccta

SEQ ID NO: 467936 - DNA, 25 bp, Artificial
  probe
  misc_feature (1)..(25): SEQ ID NO: 7437; WAN024FPT; Start 115; Stop 139
aacaatatcattgccataccaagaa

SEQ ID NO: 467937 - DNA, 25 bp, Artificial
  probe
  misc_feature (1)..(25): SEQ ID NO: 7437; WAN024FPT; Start 92; Stop 116
tcaaagaaatcaaagttacagcaaa

SEQ ID NO: 467938 - DNA, 25 bp, Artificial
  probe
  misc_feature (1)..(25): SEQ ID NO: 7437; WAN024FPT; Start 95; Stop 119
aagaaatcaaagttacagcaaacaa

SEQ ID NO: 467939 - DNA, 25 bp, Artificial
  probe
  misc_feature (1)..(25): SEQ ID NO: 7437; WAN024FPT; Start 94; Stop 118
aaagaaatcaaagttacagcaaaca

SEQ ID NO: 467940 - DNA, 25 bp, Artificial
  probe
  misc_feature (1)..(25): SEQ ID NO: 7437; WAN024FPT; Start 93; Stop 117
caaagaaatcaaagttacagcaaac

SEQ ID NO: 467941 - DNA, 25 bp, Artificial
  probe
  misc_feature (1)..(25): SEQ ID NO: 7437; WAN024FPT; Start 91; Stop 115
ttcaaagaaatcaaagttacagcaa

SEQ ID NO: 467942 - DNA, 25 bp, Artificial
  probe
  misc_feature (1)..(25): SEQ ID NO: 7437; WAN024FPT; Start 96; Stop 120
agaaatcaaagttacagcaaacaat

SEQ ID NO: 467943 - DNA, 25 bp, Artificial
  probe
  misc_feature (1)..(25): SEQ ID NO: 7437; WAN024FPT; Start 101; Stop 125
tcaaagttacagcaaacaatatcat

SEQ ID NO: 467944 - DNA, 25 bp, Artificial
  probe
  misc_feature (1)..(25): SEQ ID NO: 7437; WAN024FPT; Start 100; Stop 124
atcaaagttacagcaaacaatatca

SEQ ID NO: 467945 - DNA, 25 bp, Artificial
  probe
  misc_feature (1)..(25): SEQ ID NO: 7437; WAN024FPT; Start 116; Stop 140
acaatatcattgccataccaagaaa

SEQ ID NO: 467946 - DNA, 25 bp, Artificial
  probe
  misc_feature (1)..(25): SEQ ID NO: 7437; WAN024FPT; Start 114; Stop 138
aaacaatatcattgccataccaaga

SEQ ID NO: 467947 - DNA, 25 bp, Artificial
  probe
  misc_feature (1)..(25): SEQ ID NO: 7437; WAN024FPT; Start 113; Stop 137
caaacaatatcattgccataccaag

SEQ ID NO: 467948 - DNA, 25 bp, Artificial
  probe
  misc_feature (1)..(25): SEQ ID NO: 7437; WAN024FPT; Start 102; Stop 126
caaagttacagcaaacaatatcatt

SEQ ID NO: 467949 - DNA, 25 bp, Artificial
  probe
  misc_feature (1)..(25): SEQ ID NO: 7437; WAN024FPT; Start 97; Stop 121
gaaatcaaagttacagcaaacaata

SEQ ID NO: 467950 - DNA, 25 bp, Artificial
  probe
  misc_feature (1)..(25): SEQ ID NO: 7437; WAN024FPT; Start 99; Stop 123
aatcaaagttacagcaaacaatatc

SEQ ID NO: 467951 - DNA, 25 bp, Artificial
  probe
  misc_feature (1)..(25): SEQ ID NO: 7437; WAN024FPT; Start 90; Stop 114
tttcaaagaaatcaaagttacagca

SEQ ID NO: 467952 - DNA, 25 bp, Artificial
  probe
  misc_feature (1)..(25): SEQ ID NO: 7437; WAN024FPT; Start 121; Stop 145
atcattgccataccaagaaaatcaa

SEQ ID NO: 467953 - DNA, 25 bp, Artificial
  probe
  misc_feature (1)..(25): SEQ ID NO: 7437; WAN024FPT; Start 120; Stop 144
tatcattgccataccaagaaaatca

SEQ ID NO: 467954 - DNA, 25 bp, Artificial
  probe
  misc_feature (1)..(25): SEQ ID NO: 7437; WAN024FPT; Start 89; Stop 113
ctttcaaagaaatcaaagttacagc

SEQ ID NO: 467955 - DNA, 25 bp, Artificial
  probe
  misc_feature (1)..(25): SEQ ID NO: 7437; WAN024FPT; Start 98; Stop 122
aaatcaaagttacagcaaacaatat

SEQ ID NO: 467956 - DNA, 25 bp, Artificial
  probe
  misc_feature (1)..(25): SEQ ID NO: 7437; WAN024FPT; Start 119; Stop 143
atatcattgccataccaagaaaatc

SEQ ID NO: 467957 - DNA, 25 bp, Artificial
  probe
  misc_feature (1)..(25): SEQ ID NO: 7437; WAN024FPT; Start 103; Stop 127
aaagttacagcaaacaatatcattg

SEQ ID NO: 467958 - DNA, 25 bp, Artificial
  probe
  misc_feature (1)..(25): SEQ ID NO: 7437; WAN024FPT; Start 118; Stop 142
aatatcattgccataccaagaaaat

SEQ ID NO: 467959 - DNA, 25 bp, Artificial
  probe
  misc_feature (1)..(25): SEQ ID NO: 7437; WAN024FPT; Start 122; Stop 146
tcattgccataccaagaaaatcaat

SEQ ID NO: 467960 - DNA, 25 bp, Artificial
  probe
  misc_feature (1)..(25): SEQ ID NO: 7437; WAN024FPT; Start 14; Stop 38
tgaaaataattagattaccacgcaa

SEQ ID NO: 467961 - DNA, 25 bp, Artificial
  probe
  misc_feature (1)..(25): SEQ ID NO: 7437; WAN024FPT; Start 13; Stop 37
ttgaaaataattagattaccacgca

SEQ ID NO: 467962 - DNA, 25 bp, Artificial
  probe
  misc_feature (1)..(25): SEQ ID NO: 7437; WAN024FPT; Start 117; Stop 141
caatatcattgccataccaagaaaa

SEQ ID NO: 467963 - DNA, 25 bp, Artificial
  probe
  misc_feature (1)..(25): SEQ ID NO: 7437; WAN024FPT; Start 12; Stop 36
cttgaaaataattagattaccacgc

SEQ ID NO: 467964 - DNA, 25 bp, Artificial
  probe
  misc_feature (1)..(25): SEQ ID NO: 7437; WAN024FPT; Start 88; Stop 112
tctttcaaagaaatcaaagttacag

SEQ ID NO: 467965 - DNA, 25 bp, Artificial
  probe
  misc_feature (1)..(25): SEQ ID NO: 7437; WAN024FPT; Start 15; Stop 39
gaaaataattagattaccacgcaaa

SEQ ID NO: 467966 - DNA, 25 bp, Artificial
  probe
  misc_feature (1)..(25): SEQ ID NO: 7437; WAN024FPT; Start 124; Stop 148
attgccataccaagaaaatcaatgg

SEQ ID NO: 467967 - DNA, 25 bp, Artificial
  probe
  misc_feature (1)..(25): SEQ ID NO: 7437; WAN024FPT; Start 16; Stop 40
aaaataattagattaccacgcaaaa

SEQ ID NO: 467968 - DNA, 25 bp, Artificial
  probe
  misc_feature (1)..(25): SEQ ID NO: 7437; WAN024FPT; Start 107; Stop 131
ttacagcaaacaatatcattgccat

SEQ ID NO: 467969 - DNA, 25 bp, Artificial
  probe
  misc_feature (1)..(25): SEQ ID NO: 7438; WAN024DGN; Start 23; Stop 47
tttctaatgcctcaatcgttgtctg

SEQ ID NO: 467970 - DNA, 25 bp, Artificial
  probe
  misc_feature (1)..(25): SEQ ID NO: 7438; WAN024DGN; Start 24; Stop 48
ttctaatgcctcaatcgttgtctgc

SEQ ID NO: 467971 - DNA, 25 bp, Artificial
  probe
  misc_feature (1)..(25): SEQ ID NO: 7438; WAN024DGN; Start 21; Stop 45
cttttctaatgcctcaatcgttgtc

SEQ ID NO: 467972 - DNA, 25 bp, Artificial
  probe
  misc_feature (1)..(25): SEQ ID NO: 7438; WAN024DGN; Start 22; Stop 46
ttttctaatgcctcaatcgttgtct

SEQ ID NO: 467973 - DNA, 25 bp, Artificial
  probe
  misc_feature (1)..(25): SEQ ID NO: 7438; WAN024DGN; Start 17; Stop 41
atagcttttctaatgcctcaatcgt

SEQ ID NO: 467974 - DNA, 25 bp, Artificial
  probe
  misc_feature (1)..(25): SEQ ID NO: 7438; WAN024DGN; Start 18; Stop 42
tagcttttctaatgcctcaatcgtt

SEQ ID NO: 467975 - DNA, 25 bp, Artificial
  probe
  misc_feature (1)..(25): SEQ ID NO: 7438; WAN024DGN; Start 16; Stop 40
catagcttttctaatgcctcaatcg

SEQ ID NO: 467976 - DNA, 25 bp, Artificial
  probe
  misc_feature (1)..(25): SEQ ID NO: 7438; WAN024DGN; Start 14; Stop 38
cacatagcttttctaatgcctcaat

SEQ ID NO: 467977 - DNA, 25 bp, Artificial
  probe
  misc_feature (1)..(25): SEQ ID NO: 7438; WAN024DGN; Start 15; Stop 39
acatagcttttctaatgcctcaatc

SEQ ID NO: 467978 - DNA, 25 bp, Artificial
  probe
  misc_feature (1)..(25): SEQ ID NO: 7438; WAN024DGN; Start 20; Stop 44
gcttttctaatgcctcaatcgttgt

SEQ ID NO: 467979 - DNA, 25 bp, Artificial
  probe
  misc_feature (1)..(25): SEQ ID NO: 7438; WAN024DGN; Start 13; Stop 37
ccacatagcttttctaatgcctcaa

SEQ ID NO: 467980 - DNA, 25 bp, Artificial
  probe
  misc_feature (1)..(25): SEQ ID NO: 7438; WAN024DGN; Start 19; Stop 43
agcttttctaatgcctcaatcgttg

SEQ ID NO: 467981 - DNA, 25 bp, Artificial
  probe
  misc_feature (1)..(25): SEQ ID NO: 7438; WAN024DGN; Start 12; Stop 36
gccacatagcttttctaatgcctca

SEQ ID NO: 467982 - DNA, 25 bp, Artificial
  probe
  misc_feature (1)..(25): SEQ ID NO: 7438; WAN024DGN; Start 49; Stop 73
ggtcgggtgatgacagacttatcag

SEQ ID NO: 467983 - DNA, 25 bp, Artificial
  probe
  misc_feature (1)..(25): SEQ ID NO: 7438; WAN024DGN; Start 11; Stop 35
agccacatagcttttctaatgcctc

SEQ ID NO: 467984 - DNA, 25 bp, Artificial
  probe
  misc_feature (1)..(25): SEQ ID NO: 7438; WAN024DGN; Start 50; Stop 74
gtcgggtgatgacagacttatcagc

SEQ ID NO: 467985 - DNA, 25 bp, Artificial
  probe
  misc_feature (1)..(25): SEQ ID NO: 7438; WAN024DGN; Start 4; Stop 28
acaagtaagccacatagcttttcta

SEQ ID NO: 467986 - DNA, 25 bp, Artificial
  probe
  misc_feature (1)..(25): SEQ ID NO: 7438; WAN024DGN; Start 8; Stop 32
gtaagccacatagcttttctaatgc

SEQ ID NO: 467987 - DNA, 25 bp, Artificial
  probe
  misc_feature (1)..(25): SEQ ID NO: 7438; WAN024DGN; Start 5; Stop 29
caagtaagccacatagcttttctaa

SEQ ID NO: 467988 - DNA, 25 bp, Artificial
  probe
  misc_feature (1)..(25): SEQ ID NO: 7438; WAN024DGN; Start 7; Stop 31
agtaagccacatagcttttctaatg

SEQ ID NO: 467989 - DNA, 25 bp, Artificial
  probe
  misc_feature (1)..(25): SEQ ID NO: 7438; WAN024DGN; Start 51; Stop 75
tcgggtgatgacagacttatcagct

SEQ ID NO: 467990 - DNA, 25 bp, Artificial
  probe
  misc_feature (1)..(25): SEQ ID NO: 7438; WAN024DGN; Start 1; Stop 25
ttgacaagtaagccacatagctttt

SEQ ID NO: 467991 - DNA, 25 bp, Artificial
  probe
  misc_feature (1)..(25): SEQ ID NO: 7438; WAN024DGN; Start 3; Stop 27
gacaagtaagccacatagcttttct

SEQ ID NO: 467992 - DNA, 25 bp, Artificial
  probe
  misc_feature (1)..(25): SEQ ID NO: 7438; WAN024DGN; Start 9; Stop 33
taagccacatagcttttctaatgcc

SEQ ID NO: 467993 - DNA, 25 bp, Artificial
  probe
  misc_feature (1)..(25): SEQ ID NO: 7438; WAN024DGN; Start 6; Stop 30
aagtaagccacatagcttttctaat

SEQ ID NO: 467994 - DNA, 25 bp, Artificial
  probe
  misc_feature (1)..(25): SEQ ID NO: 7438; WAN024DGN; Start 2; Stop 26
tgacaagtaagccacatagcttttc

SEQ ID NO: 467995 - DNA, 25 bp, Artificial
  probe
  misc_feature (1)..(25): SEQ ID NO: 7438; WAN024DGN; Start 10; Stop 34
aagccacatagcttttctaatgcct

SEQ ID NO: 467996 - DNA, 25 bp, Artificial
  probe
  misc_feature (1)..(25): SEQ ID NO: 7439; WAN024GJH; Start 28; Stop 52
ttaccagaaccactaactccaacta

SEQ ID NO: 467997 - DNA, 25 bp, Artificial
  probe
  misc_feature (1)..(25): SEQ ID NO: 7439; WAN024GJH; Start 29; Stop 53
taccagaaccactaactccaactag

SEQ ID NO: 467998 - DNA, 25 bp, Artificial
  probe
  misc_feature (1)..(25): SEQ ID NO: 7439; WAN024GJH; Start 34; Stop 58
gaaccactaactccaactaggctaa

SEQ ID NO: 467999 - DNA, 25 bp, Artificial
  probe
  misc_feature (1)..(25): SEQ ID NO: 7439; WAN024GJH; Start 35; Stop 59
aaccactaactccaactaggctaac

SEQ ID NO: 468000 - DNA, 25 bp, Artificial
  probe
  misc_feature (1)..(25): SEQ ID NO: 7439; WAN024GJH; Start 47; Stop 71
caactaggctaaccttatctccttg

SEQ ID NO: 468001 - DNA, 25 bp, Artificial
  probe
  misc_feature (1)..(25): SEQ ID NO: 7439; WAN024GJH; Start 39; Stop 63
actaactccaactaggctaacctta

SEQ ID NO: 468002 - DNA, 25 bp, Artificial
  probe
  misc_feature (1)..(25): SEQ ID NO: 7439; WAN024GJH; Start 49; Stop 73
actaggctaaccttatctccttgtt

SEQ ID NO: 468003 - DNA, 25 bp, Artificial
  probe
  misc_feature (1)..(25): SEQ ID NO: 7439; WAN024GJH; Start 48; Stop 72
aactaggctaaccttatctccttgt

SEQ ID NO: 468004 - DNA, 25 bp, Artificial
  probe
  misc_feature (1)..(25): SEQ ID NO: 7439; WAN024GJH; Start 42; Stop 66
aactccaactaggctaaccttatct

SEQ ID NO: 468005 - DNA, 25 bp, Artificial
  probe
  misc_feature (1)..(25): SEQ ID NO: 7439; WAN024GJH; Start 41; Stop 65
taactccaactaggctaaccttatc

SEQ ID NO: 468006 - DNA, 25 bp, Artificial
  probe
  misc_feature (1)..(25): SEQ ID NO: 7439; WAN024GJH; Start 40; Stop 64
ctaactccaactaggctaaccttat

SEQ ID NO: 468007 - DNA, 25 bp, Artificial
  probe
  misc_feature (1)..(25): SEQ ID NO: 7439; WAN024GJH; Start 43; Stop 67
actccaactaggctaaccttatctc

SEQ ID NO: 468008 - DNA, 25 bp, Artificial
  probe
  misc_feature (1)..(25): SEQ ID NO: 7439; WAN024GJH; Start 46; Stop 70
ccaactaggctaaccttatctcctt

SEQ ID NO: 468009 - DNA, 25 bp, Artificial
  probe
  misc_feature (1)..(25): SEQ ID NO: 7439; WAN024GJH; Start 33; Stop 57
agaaccactaactccaactaggcta

SEQ ID NO: 468010 - DNA, 25 bp, Artificial
  probe
  misc_feature (1)..(25): SEQ ID NO: 7439; WAN024GJH; Start 58; Stop 82
accttatctccttgtttaatcgtga

SEQ ID NO: 468011 - DNA, 25 bp, Artificial
  probe
  misc_feature (1)..(25): SEQ ID NO: 7439; WAN024GJH; Start 44; Stop 68
ctccaactaggctaaccttatctcc

SEQ ID NO: 468012 - DNA, 25 bp, Artificial
  probe
  misc_feature (1)..(25): SEQ ID NO: 7439; WAN024GJH; Start 38; Stop 62
cactaactccaactaggctaacctt

SEQ ID NO: 468013 - DNA, 25 bp, Artificial
  probe
  misc_feature (1)..(25): SEQ ID NO: 7439; WAN024GJH; Start 45; Stop 69
tccaactaggctaaccttatctcct

SEQ ID NO: 468014 - DNA, 25 bp, Artificial
  probe
  misc_feature (1)..(25): SEQ ID NO: 7439; WAN024GJH; Start 57; Stop 81
aaccttatctccttgtttaatcgtg

SEQ ID NO: 468015 - DNA, 25 bp, Artificial
  probe
  misc_feature (1)..(25): SEQ ID NO: 7439; WAN024GJH; Start 27; Stop 51
tttaccagaaccactaactccaact

SEQ ID NO: 468016 - DNA, 25 bp, Artificial
  probe
  misc_feature (1)..(25): SEQ ID NO: 7439; WAN024GJH; Start 59; Stop 83
ccttatctccttgtttaatcgtgag

SEQ ID NO: 468017 - DNA, 25 bp, Artificial
  probe
  misc_feature (1)..(25): SEQ ID NO: 7439; WAN024GJH; Start 53; Stop 77
ggctaaccttatctccttgtttaat

SEQ ID NO: 468018 - DNA, 25 bp, Artificial
  probe
  misc_feature (1)..(25): SEQ ID NO: 7439; WAN024GJH; Start 88; Stop 112
atatctgttaaggtatctcatccaa

SEQ ID NO: 468019 - DNA, 25 bp, Artificial
  probe
  misc_feature (1)..(25): SEQ ID NO: 7439; WAN024GJH; Start 87; Stop 111
aatatctgttaaggtatctcatcca

SEQ ID NO: 468020 - DNA, 25 bp, Artificial
  probe
  misc_feature (1)..(25): SEQ ID NO: 7439; WAN024GJH; Start 52; Stop 76
aggctaaccttatctccttgtttaa

SEQ ID NO: 468021 - DNA, 25 bp, Artificial
  probe
  misc_feature (1)..(25): SEQ ID NO: 7439; WAN024GJH; Start 36; Stop 60
accactaactccaactaggctaacc

SEQ ID NO: 468022 - DNA, 25 bp, Artificial
  probe
  misc_feature (1)..(25): SEQ ID NO: 7439; WAN024GJH; Start 30; Stop 54
accagaaccactaactccaactagg

SEQ ID NO: 468023 - DNA, 25 bp, Artificial
  probe
  misc_feature (1)..(25): SEQ ID NO: 7439; WAN024GJH; Start 50; Stop 74
ctaggctaaccttatctccttgttt

SEQ ID NO: 468024 - DNA, 25 bp, Artificial
  probe
  misc_feature (1)..(25): SEQ ID NO: 7439; WAN024GJH; Start 56; Stop 80
taaccttatctccttgtttaatcgt

SEQ ID NO: 468025 - DNA, 25 bp, Artificial
  probe
  misc_feature (1)..(25): SEQ ID NO: 7439; WAN024GJH; Start 51; Stop 75
taggctaaccttatctccttgttta

SEQ ID NO: 468026 - DNA, 25 bp, Artificial
  probe
  misc_feature (1)..(25): SEQ ID NO: 7439; WAN024GJH; Start 32; Stop 56
cagaaccactaactccaactaggct

SEQ ID NO: 468027 - DNA, 25 bp, Artificial
  probe
  misc_feature (1)..(25): SEQ ID NO: 7439; WAN024GJH; Start 54; Stop 78
gctaaccttatctccttgtttaatc

SEQ ID NO: 468028 - DNA, 25 bp, Artificial
  probe
  misc_feature (1)..(25): SEQ ID NO: 7439; WAN024GJH; Start 37; Stop 61
ccactaactccaactaggctaacct

SEQ ID NO: 468029 - DNA, 25 bp, Artificial
  probe
  misc_feature (1)..(25): SEQ ID NO: 7440; WAN024FJP; Start 142; Stop 166
cctgtttgtgtatttacgaatgtgt

SEQ ID NO: 468030 - DNA, 25 bp, Artificial
  probe
  misc_feature (1)..(25): SEQ ID NO: 7440; WAN024FJP; Start 141; Stop 165
tcctgtttgtgtatttacgaatgtg

SEQ ID NO: 468031 - DNA, 25 bp, Artificial
  probe
  misc_feature (1)..(25): SEQ ID NO: 7440; WAN024FJP; Start 146; Stop 170
tttgtgtatttacgaatgtgtctcc

SEQ ID NO: 468032 - DNA, 25 bp, Artificial
  probe
  misc_feature (1)..(25): SEQ ID NO: 7440; WAN024FJP; Start 140; Stop 164
ctcctgtttgtgtatttacgaatgt

SEQ ID NO: 468033 - DNA, 25 bp, Artificial
  probe
  misc_feature (1)..(25): SEQ ID NO: 7440; WAN024FJP; Start 147; Stop 171
ttgtgtatttacgaatgtgtctcca

SEQ ID NO: 468034 - DNA, 25 bp, Artificial
  probe
  misc_feature (1)..(25): SEQ ID NO: 7440; WAN024FJP; Start 139; Stop 163
tctcctgtttgtgtatttacgaatg

SEQ ID NO: 468035 - DNA, 25 bp, Artificial
  probe
  misc_feature (1)..(25): SEQ ID NO: 7440; WAN024FJP; Start 137; Stop 161
catctcctgtttgtgtatttacgaa

SEQ ID NO: 468036 - DNA, 25 bp, Artificial
  probe
  misc_feature (1)..(25): SEQ ID NO: 7440; WAN024FJP; Start 166; Stop 190
tctccatctttaccttctgttgttg

SEQ ID NO: 468037 - DNA, 25 bp, Artificial
  probe
  misc_feature (1)..(25): SEQ ID NO: 7440; WAN024FJP; Start 165; Stop 189
gtctccatctttaccttctgttgtt

SEQ ID NO: 468038 - DNA, 25 bp, Artificial
  probe
  misc_feature (1)..(25): SEQ ID NO: 7440; WAN024FJP; Start 144; Stop 168
tgtttgtgtatttacgaatgtgtct

SEQ ID NO: 468039 - DNA, 25 bp, Artificial
  probe
  misc_feature (1)..(25): SEQ ID NO: 7440; WAN024FJP; Start 159; Stop 183
gaatgtgtctccatctttaccttct

SEQ ID NO: 468040 - DNA, 25 bp, Artificial
  probe
  misc_feature (1)..(25): SEQ ID NO: 7440; WAN024FJP; Start 150; Stop 174
tgtatttacgaatgtgtctccatct

SEQ ID NO: 468041 - DNA, 25 bp, Artificial
  probe
  misc_feature (1)..(25): SEQ ID NO: 7440; WAN024FJP; Start 149; Stop 173
gtgtatttacgaatgtgtctccatc

SEQ ID NO: 468042 - DNA, 25 bp, Artificial
  probe
  misc_feature (1)..(25): SEQ ID NO: 7440; WAN024FJP; Start 148; Stop 172
tgtgtatttacgaatgtgtctccat

SEQ ID NO: 468043 - DNA, 25 bp, Artificial
  probe
  misc_feature (1)..(25): SEQ ID NO: 7440; WAN024FJP; Start 143; Stop 167
ctgtttgtgtatttacgaatgtgtc

SEQ ID NO: 468044 - DNA, 25 bp, Artificial
  probe
  misc_feature (1)..(25): SEQ ID NO: 7440; WAN024FJP; Start 160; Stop 184
aatgtgtctccatctttaccttctg

SEQ ID NO: 468045 - DNA, 25 bp, Artificial
  probe
  misc_feature (1)..(25): SEQ ID NO: 7440; WAN024FJP; Start 155; Stop 179
ttacgaatgtgtctccatctttacc

SEQ ID NO: 468046 - DNA, 25 bp, Artificial
  probe
  misc_feature (1)..(25): SEQ ID NO: 7440; WAN024FJP; Start 120; Stop 144
acctttcttaacgaatacatctcct

SEQ ID NO: 468047 - DNA, 25 bp, Artificial
  probe
  misc_feature (1)..(25): SEQ ID NO: 7440; WAN024FJP; Start 255; Stop 279
tccgtctttaactactgttgtttga

SEQ ID NO: 468048 - DNA, 25 bp, Artificial
  probe
  misc_feature (1)..(25): SEQ ID NO: 7440; WAN024FJP; Start 254; Stop 278
gtccgtctttaactactgttgtttg

SEQ ID NO: 468049 - DNA, 25 bp, Artificial
  probe
  misc_feature (1)..(25): SEQ ID NO: 7440; WAN024FJP; Start 145; Stop 169
gtttgtgtatttacgaatgtgtctc

SEQ ID NO: 468050 - DNA, 25 bp, Artificial
  probe
  misc_feature (1)..(25): SEQ ID NO: 7440; WAN024FJP; Start 121; Stop 145
cctttcttaacgaatacatctcctg

SEQ ID NO: 468051 - DNA, 25 bp, Artificial
  probe
  misc_feature (1)..(25): SEQ ID NO: 7440; WAN024FJP; Start 163; Stop 187
gtgtctccatctttaccttctgttg

SEQ ID NO: 468052 - DNA, 25 bp, Artificial
  probe
  misc_feature (1)..(25): SEQ ID NO: 7440; WAN024FJP; Start 154; Stop 178
tttacgaatgtgtctccatctttac

SEQ ID NO: 468053 - DNA, 25 bp, Artificial
  probe
  misc_feature (1)..(25): SEQ ID NO: 7440; WAN024FJP; Start 253; Stop 277
tgtccgtctttaactactgttgttt

SEQ ID NO: 468054 - DNA, 25 bp, Artificial
  probe
  misc_feature (1)..(25): SEQ ID NO: 7440; WAN024FJP; Start 252; Stop 276
ttgtccgtctttaactactgttgtt

SEQ ID NO: 468055 - DNA, 25 bp, Artificial
  probe
  misc_feature (1)..(25): SEQ ID NO: 7440; WAN024FJP; Start 250; Stop 274
tcttgtccgtctttaactactgttg

SEQ ID NO: 468056 - DNA, 25 bp, Artificial
  probe
  misc_feature (1)..(25): SEQ ID NO: 7440; WAN024FJP; Start 249; Stop 273
gtcttgtccgtctttaactactgtt

SEQ ID NO: 468057 - DNA, 25 bp, Artificial
  probe
  misc_feature (1)..(25): SEQ ID NO: 7440; WAN024FJP; Start 151; Stop 175
gtatttacgaatgtgtctccatctt

SEQ ID NO: 468058 - DNA, 25 bp, Artificial
  probe
  misc_feature (1)..(25): SEQ ID NO: 7440; WAN024FJP; Start 156; Stop 180
tacgaatgtgtctccatctttacct

SEQ ID NO: 468059 - DNA, 25 bp, Artificial
  probe
  misc_feature (1)..(25): SEQ ID NO: 7440; WAN024FJP; Start 138; Stop 162
atctcctgtttgtgtatttacgaat

SEQ ID NO: 468060 - DNA, 25 bp, Artificial
  probe
  misc_feature (1)..(25): SEQ ID NO: 7440; WAN024FJP; Start 251; Stop 275
cttgtccgtctttaactactgttgt

SEQ ID NO: 468061 - DNA, 25 bp, Artificial
  probe
  misc_feature (1)..(25): SEQ ID NO: 7440; WAN024FJP; Start 164; Stop 188
tgtctccatctttaccttctgttgt

SEQ ID NO: 468062 - DNA, 25 bp, Artificial
  probe
  misc_feature (1)..(25): SEQ ID NO: 7441; WAN024BLN; Start 86; Stop 110
tgctatttgaggtattagaaaggtt

SEQ ID NO: 468063 - DNA, 25 bp, Artificial
  probe
  misc_feature (1)..(25): SEQ ID NO: 7441; WAN024BLN; Start 85; Stop 109
atgctatttgaggtattagaaaggt

SEQ ID NO: 468064 - DNA, 25 bp, Artificial
  probe
  misc_feature (1)..(25): SEQ ID NO: 7441; WAN024BLN; Start 110; Stop 134
tttcatccacaattaaagccaagcc

SEQ ID NO: 468065 - DNA, 25 bp, Artificial
  probe
  misc_feature (1)..(25): SEQ ID NO: 7441; WAN024BLN; Start 87; Stop 111
gctatttgaggtattagaaaggttt

SEQ ID NO: 468066 - DNA, 25 bp, Artificial
  probe
  misc_feature (1)..(25): SEQ ID NO: 7441; WAN024BLN; Start 108; Stop 132
gttttcatccacaattaaagccaag

SEQ ID NO: 468067 - DNA, 25 bp, Artificial
  probe
  misc_feature (1)..(25): SEQ ID NO: 7441; WAN024BLN; Start 105; Stop 129
aaggttttcatccacaattaaagcc

SEQ ID NO: 468068 - DNA, 25 bp, Artificial
  probe
  misc_feature (1)..(25): SEQ ID NO: 7441; WAN024BLN; Start 107; Stop 131
ggttttcatccacaattaaagccaa

SEQ ID NO: 468069 - DNA, 25 bp, Artificial
  probe
  misc_feature (1)..(25): SEQ ID NO: 7441; WAN024BLN; Start 109; Stop 133
ttttcatccacaattaaagccaagc

SEQ ID NO: 468070 - DNA, 25 bp, Artificial
  probe
  misc_feature (1)..(25): SEQ ID NO: 7441; WAN024BLN; Start 104; Stop 128
aaaggttttcatccacaattaaagc

SEQ ID NO: 468071 - DNA, 25 bp, Artificial
  probe
  misc_feature (1)..(25): SEQ ID NO: 7441; WAN024BLN; Start 106; Stop 130
aggttttcatccacaattaaagcca

SEQ ID NO: 468072 - DNA, 25 bp, Artificial
  probe
  misc_feature (1)..(25): SEQ ID NO: 7441; WAN024BLN; Start 84; Stop 108
tatgctatttgaggtattagaaagg

SEQ ID NO: 468073 - DNA, 25 bp, Artificial
  probe
  misc_feature (1)..(25): SEQ ID NO: 7441; WAN024BLN; Start 111; Stop 135
ttcatccacaattaaagccaagccc

SEQ ID NO: 468074 - DNA, 25 bp, Artificial
  probe
  misc_feature (1)..(25): SEQ ID NO: 7441; WAN024BLN; Start 120; Stop 144
aattaaagccaagcccctcattctt

SEQ ID NO: 468075 - DNA, 25 bp, Artificial
  probe
  misc_feature (1)..(25): SEQ ID NO: 7441; WAN024BLN; Start 96; Stop 120
ggtattagaaaggttttcatccaca

SEQ ID NO: 468076 - DNA, 25 bp, Artificial
  probe
  misc_feature (1)..(25): SEQ ID NO: 7441; WAN024BLN; Start 95; Stop 119
aggtattagaaaggttttcatccac

SEQ ID NO: 468077 - DNA, 25 bp, Artificial
  probe
  misc_feature (1)..(25): SEQ ID NO: 7441; WAN024BLN; Start 94; Stop 118
gaggtattagaaaggttttcatcca

SEQ ID NO: 468078 - DNA, 25 bp, Artificial
  probe
  misc_feature (1)..(25): SEQ ID NO: 7441; WAN024BLN; Start 93; Stop 117
tgaggtattagaaaggttttcatcc

SEQ ID NO: 468079 - DNA, 25 bp, Artificial
  probe
  misc_feature (1)..(25): SEQ ID NO: 7441; WAN024BLN; Start 119; Stop 143
caattaaagccaagcccctcattct

SEQ ID NO: 468080 - DNA, 25 bp, Artificial
  probe
  misc_feature (1)..(25): SEQ ID NO: 7441; WAN024BLN; Start 118; Stop 142
acaattaaagccaagcccctcattc

SEQ ID NO: 468081 - DNA, 25 bp, Artificial
  probe
  misc_feature (1)..(25): SEQ ID NO: 7441; WAN024BLN; Start 102; Stop 126
agaaaggttttcatccacaattaaa

SEQ ID NO: 468082 - DNA, 25 bp, Artificial
  probe
  misc_feature (1)..(25): SEQ ID NO: 7441; WAN024BLN; Start 97; Stop 121
gtattagaaaggttttcatccacaa

SEQ ID NO: 468083 - DNA, 25 bp, Artificial
  probe
  misc_feature (1)..(25): SEQ ID NO: 7441; WAN024BLN; Start 103; Stop 127
gaaaggttttcatccacaattaaag

SEQ ID NO: 468084 - DNA, 25 bp, Artificial
  probe
  misc_feature (1)..(25): SEQ ID NO: 7441; WAN024BLN; Start 99; Stop 123
attagaaaggttttcatccacaatt

SEQ ID NO: 468085 - DNA, 25 bp, Artificial
  probe
  misc_feature (1)..(25): SEQ ID NO: 7441; WAN024BLN; Start 117; Stop 141
cacaattaaagccaagcccctcatt

SEQ ID NO: 468086 - DNA, 25 bp, Artificial
  probe
  misc_feature (1)..(25): SEQ ID NO: 7441; WAN024BLN; Start 92; Stop 116
ttgaggtattagaaaggttttcatc

SEQ ID NO: 468087 - DNA, 25 bp, Artificial
  probe
  misc_feature (1)..(25): SEQ ID NO: 7441; WAN024BLN; Start 101; Stop 125
tagaaaggttttcatccacaattaa

SEQ ID NO: 468088 - DNA, 25 bp, Artificial
  probe
  misc_feature (1)..(25): SEQ ID NO: 7441; WAN024BLN; Start 100; Stop 124
ttagaaaggttttcatccacaatta

SEQ ID NO: 468089 - DNA, 25 bp, Artificial
  probe
  misc_feature (1)..(25): SEQ ID NO: 7441; WAN024BLN; Start 98; Stop 122
tattagaaaggttttcatccacaat

SEQ ID NO: 468090 - DNA, 25 bp, Artificial
  probe
  misc_feature (1)..(25): SEQ ID NO: 7441; WAN024BLN; Start 91; Stop 115
tttgaggtattagaaaggttttcat

SEQ ID NO: 468091 - DNA, 25 bp, Artificial
  probe
  misc_feature (1)..(25): SEQ ID NO: 7441; WAN024BLN; Start 90; Stop 114
atttgaggtattagaaaggttttca

SEQ ID NO: 468092 - DNA, 25 bp, Artificial
  probe
  misc_feature (1)..(25): SEQ ID NO: 7441; WAN024BLN; Start 88; Stop 112
ctatttgaggtattagaaaggtttt

SEQ ID NO: 468093 - DNA, 25 bp, Artificial
  probe
  misc_feature (1)..(25): SEQ ID NO: 7441; WAN024BLN; Start 89; Stop 113
tatttgaggtattagaaaggttttc

SEQ ID NO: 468094 - DNA, 25 bp, Artificial
  probe
  misc_feature (1)..(25): SEQ ID NO: 7441; WAN024BLN; Start 37; Stop 61
tttatttccctaaataaggtgtttt

SEQ ID NO: 468095 - DNA, 25 bp, Artificial
  probe
  misc_feature (1)..(25): SEQ ID NO: 7441; WAN024BLN; Start 36; Stop 60
ttttatttccctaaataaggtgttt

SEQ ID NO: 468096 - DNA, 25 bp, Artificial
  probe
  misc_feature (1)..(25): SEQ ID NO: 7442; WAN024BW3; Start 35; Stop 59
ttgatgtagaggtcgagtttagatg

SEQ ID NO: 468097 - DNA, 25 bp, Artificial
  probe
  misc_feature (1)..(25): SEQ ID NO: 7442; WAN024BW3; Start 34; Stop 58
gttgatgtagaggtcgagtttagat

SEQ ID NO: 468098 - DNA, 25 bp, Artificial
  probe
  misc_feature (1)..(25): SEQ ID NO: 7442; WAN024BW3; Start 32; Stop 56
ctgttgatgtagaggtcgagtttag

SEQ ID NO: 468099 - DNA, 25 bp, Artificial
  probe
  misc_feature (1)..(25): SEQ ID NO: 7442; WAN024BW3; Start 33; Stop 57
tgttgatgtagaggtcgagtttaga

SEQ ID NO: 468100 - DNA, 25 bp, Artificial
  probe
  misc_feature (1)..(25): SEQ ID NO: 7442; WAN024BW3; Start 22; Stop 46
cattggaagcctgttgatgtagagg

SEQ ID NO: 468101 - DNA, 25 bp, Artificial
  probe
  misc_feature (1)..(25): SEQ ID NO: 7442; WAN024BW3; Start 21; Stop 45
gcattggaagcctgttgatgtagag

SEQ ID NO: 468102 - DNA, 25 bp, Artificial
  probe
  misc_feature (1)..(25): SEQ ID NO: 7442; WAN024BW3; Start 19; Stop 43
gagcattggaagcctgttgatgtag

SEQ ID NO: 468103 - DNA, 25 bp, Artificial
  probe
  misc_feature (1)..(25): SEQ ID NO: 7442; WAN024BW3; Start 41; Stop 65
tagaggtcgagtttagatgcaagtt

SEQ ID NO: 468104 - DNA, 25 bp, Artificial
  probe
  misc_feature (1)..(25): SEQ ID NO: 7442; WAN024BW3; Start 38; Stop 62
atgtagaggtcgagtttagatgcaa

SEQ ID NO: 468105 - DNA, 25 bp, Artificial
  probe
  misc_feature (1)..(25): SEQ ID NO: 7442; WAN024BW3; Start 36; Stop 60
tgatgtagaggtcgagtttagatgc

SEQ ID NO: 468106 - DNA, 25 bp, Artificial
  probe
  misc_feature (1)..(25): SEQ ID NO: 7442; WAN024BW3; Start 23; Stop 47
attggaagcctgttgatgtagaggt

SEQ ID NO: 468107 - DNA, 25 bp, Artificial
  probe
  misc_feature (1)..(25): SEQ ID NO: 7442; WAN024BW3; Start 20; Stop 44
agcattggaagcctgttgatgtaga

SEQ ID NO: 468108 - DNA, 25 bp, Artificial
  probe
  misc_feature (1)..(25): SEQ ID NO: 7442; WAN024BW3; Start 18; Stop 42
agagcattggaagcctgttgatgta

SEQ ID NO: 468109 - DNA, 25 bp, Artificial
  probe
  misc_feature (1)..(25): SEQ ID NO: 7442; WAN024BW3; Start 48; Stop 72
cgagtttagatgcaagttcaaggag

SEQ ID NO: 468110 - DNA, 25 bp, Artificial
  probe
  misc_feature (1)..(25): SEQ ID NO: 7442; WAN024BW3; Start 37; Stop 61
gatgtagaggtcgagtttagatgca

SEQ ID NO: 468111 - DNA, 25 bp, Artificial
  probe
  misc_feature (1)..(25): SEQ ID NO: 7442; WAN024BW3; Start 16; Stop 40
gaagagcattggaagcctgttgatg

SEQ ID NO: 468112 - DNA, 25 bp, Artificial
  probe
  misc_feature (1)..(25): SEQ ID NO: 7442; WAN024BW3; Start 12; Stop 36
atttgaagagcattggaagcctgtt

SEQ ID NO: 468113 - DNA, 25 bp, Artificial
  probe
  misc_feature (1)..(25): SEQ ID NO: 7442; WAN024BW3; Start 49; Stop 73
gagtttagatgcaagttcaaggagc

SEQ ID NO: 468114 - DNA, 25 bp, Artificial
  probe
  misc_feature (1)..(25): SEQ ID NO: 7442; WAN024BW3; Start 46; Stop 70
gtcgagtttagatgcaagttcaagg

SEQ ID NO: 468115 - DNA, 25 bp, Artificial
  probe
  misc_feature (1)..(25): SEQ ID NO: 7442; WAN024BW3; Start 45; Stop 69
ggtcgagtttagatgcaagttcaag

SEQ ID NO: 468116 - DNA, 25 bp, Artificial
  probe
  misc_feature (1)..(25): SEQ ID NO: 7442; WAN024BW3; Start 40; Stop 64
gtagaggtcgagtttagatgcaagt

SEQ ID NO: 468117 - DNA, 25 bp, Artificial
  probe
  misc_feature (1)..(25): SEQ ID NO: 7442; WAN024BW3; Start 39; Stop 63
tgtagaggtcgagtttagatgcaag

SEQ ID NO: 468118 - DNA, 25 bp, Artificial
  probe
  misc_feature (1)..(25): SEQ ID NO: 7442; WAN024BW3; Start 11; Stop 35
aatttgaagagcattggaagcctgt

SEQ ID NO: 468119 - DNA, 25 bp, Artificial
  probe
  misc_feature (1)..(25): SEQ ID NO: 7442; WAN024BW3; Start 47; Stop 71
tcgagtttagatgcaagttcaagga

SEQ ID NO: 468120 - DNA, 25 bp, Artificial
  probe
  misc_feature (1)..(25): SEQ ID NO: 7442; WAN024BW3; Start 44; Stop 68
aggtcgagtttagatgcaagttcaa

SEQ ID NO: 468121 - DNA, 25 bp, Artificial
  probe
  misc_feature (1)..(25): SEQ ID NO: 7442; WAN024BW3; Start 15; Stop 39
tgaagagcattggaagcctgttgat

SEQ ID NO: 468122 - DNA, 25 bp, Artificial
  probe
  misc_feature (1)..(25): SEQ ID NO: 7442; WAN024BW3; Start 10; Stop 34
aaatttgaagagcattggaagcctg

SEQ ID NO: 468123 - DNA, 25 bp, Artificial
  probe
  misc_feature (1)..(25): SEQ ID NO: 7442; WAN024BW3; Start 31; Stop 55
cctgttgatgtagaggtcgagttta

SEQ ID NO: 468124 - DNA, 25 bp, Artificial
  probe
  misc_feature (1)..(25): SEQ ID NO: 7442; WAN024BW3; Start 42; Stop 66
agaggtcgagtttagatgcaagttc

SEQ ID NO: 468125 - DNA, 25 bp, Artificial
  probe
  misc_feature (1)..(25): SEQ ID NO: 7442; WAN024BW3; Start 24; Stop 48
ttggaagcctgttgatgtagaggtc

SEQ ID NO: 468126 - DNA, 25 bp, Artificial
  probe
  misc_feature (1)..(25): SEQ ID NO: 7442; WAN024BW3; Start 14; Stop 38
ttgaagagcattggaagcctgttga

SEQ ID NO: 468127 - DNA, 25 bp, Artificial
  probe
  misc_feature (1)..(25): SEQ ID NO: 7442; WAN024BW3; Start 43; Stop 67
gaggtcgagtttagatgcaagttca

SEQ ID NO: 468128 - DNA, 25 bp, Artificial
  probe
  misc_feature (1)..(25): SEQ ID NO: 7442; WAN024BW3; Start 53; Stop 77
ttagatgcaagttcaaggagcgaaa

SEQ ID NO: 468129 - DNA, 25 bp, Artificial
  probe
  misc_feature (1)..(25): SEQ ID NO: 7443; WAN024BS5; Start 22; Stop 46
tgctcaagctatttggaaaagaaaa

SEQ ID NO: 468130 - DNA, 25 bp, Artificial
  probe
  misc_feature (1)..(25): SEQ ID NO: 7443; WAN024BS5; Start 21; Stop 45
ttgctcaagctatttggaaaagaaa

SEQ ID NO: 468131 - DNA, 25 bp, Artificial
  probe
  misc_feature (1)..(25): SEQ ID NO: 7443; WAN024BS5; Start 20; Stop 44
tttgctcaagctatttggaaaagaa

SEQ ID NO: 468132 - DNA, 25 bp, Artificial
  probe
  misc_feature (1)..(25): SEQ ID NO: 7443; WAN024BS5; Start 19; Stop 43
gtttgctcaagctatttggaaaaga

SEQ ID NO: 468133 - DNA, 25 bp, Artificial
  probe
  misc_feature (1)..(25): SEQ ID NO: 7443; WAN024BS5; Start 18; Stop 42
ggtttgctcaagctatttggaaaag

SEQ ID NO: 468134 - DNA, 25 bp, Artificial
  probe
  misc_feature (1)..(25): SEQ ID NO: 7443; WAN024BS5; Start 28; Stop 52
agctatttggaaaagaaaatgtcga

SEQ ID NO: 468135 - DNA, 25 bp, Artificial
  probe
  misc_feature (1)..(25): SEQ ID NO: 7443; WAN024BS5; Start 27; Stop 51
aagctatttggaaaagaaaatgtcg

SEQ ID NO: 468136 - DNA, 25 bp, Artificial
  probe
  misc_feature (1)..(25): SEQ ID NO: 7443; WAN024BS5; Start 23; Stop 47
gctcaagctatttggaaaagaaaat

SEQ ID NO: 468137 - DNA, 25 bp, Artificial
  probe
  misc_feature (1)..(25): SEQ ID NO: 7443; WAN024BS5; Start 25; Stop 49
tcaagctatttggaaaagaaaatgt

SEQ ID NO: 468138 - DNA, 25 bp, Artificial
  probe
  misc_feature (1)..(25): SEQ ID NO: 7443; WAN024BS5; Start 26; Stop 50
caagctatttggaaaagaaaatgtc

SEQ ID NO: 468139 - DNA, 25 bp, Artificial
  probe
  misc_feature (1)..(25): SEQ ID NO: 7443; WAN024BS5; Start 17; Stop 41
cggtttgctcaagctatttggaaaa

SEQ ID NO: 468140 - DNA, 25 bp, Artificial
  probe
  misc_feature (1)..(25): SEQ ID NO: 7443; WAN024BS5; Start 24; Stop 48
ctcaagctatttggaaaagaaaatg

SEQ ID NO: 468141 - DNA, 25 bp, Artificial
  probe
  misc_feature (1)..(25): SEQ ID NO: 7443; WAN024BS5; Start 16; Stop 40
ccggtttgctcaagctatttggaaa

SEQ ID NO: 468142 - DNA, 25 bp, Artificial
  probe
  misc_feature (1)..(25): SEQ ID NO: 7444; WAN024CAM; Start 89; Stop 113
gccatctattacctcctcattatca

SEQ ID NO: 468143 - DNA, 25 bp, Artificial
  probe
  misc_feature (1)..(25): SEQ ID NO: 7444; WAN024CAM; Start 88; Stop 112
tgccatctattacctcctcattatc

SEQ ID NO: 468144 - DNA, 25 bp, Artificial
  probe
  misc_feature (1)..(25): SEQ ID NO: 7444; WAN024CAM; Start 87; Stop 111
ctgccatctattacctcctcattat

SEQ ID NO: 468145 - DNA, 25 bp, Artificial
  probe
  misc_feature (1)..(25): SEQ ID NO: 7444; WAN024CAM; Start 86; Stop 110
cctgccatctattacctcctcatta

SEQ ID NO: 468146 - DNA, 25 bp, Artificial
  probe
  misc_feature (1)..(25): SEQ ID NO: 7444; WAN024CAM; Start 85; Stop 109
tcctgccatctattacctcctcatt

SEQ ID NO: 468147 - DNA, 25 bp, Artificial
  probe
  misc_feature (1)..(25): SEQ ID NO: 7444; WAN024CAM; Start 84; Stop 108
ttcctgccatctattacctcctcat

SEQ ID NO: 468148 - DNA, 25 bp, Artificial
  probe
  misc_feature (1)..(25): SEQ ID NO: 7444; WAN024CAM; Start 90; Stop 114
ccatctattacctcctcattatcaa

SEQ ID NO: 468149 - DNA, 25 bp, Artificial
  probe
  misc_feature (1)..(25): SEQ ID NO: 7444; WAN024CAM; Start 78; Stop 102
tttcatttcctgccatctattacct

SEQ ID NO: 468150 - DNA, 25 bp, Artificial
  probe
  misc_feature (1)..(25): SEQ ID NO: 7444; WAN024CAM; Start 79; Stop 103
ttcatttcctgccatctattacctc

SEQ ID NO: 468151 - DNA, 25 bp, Artificial
  probe
  misc_feature (1)..(25): SEQ ID NO: 7444; WAN024CAM; Start 26; Stop 50
tcggtaagcatggcatctatgaatt

SEQ ID NO: 468152 - DNA, 25 bp, Artificial
  probe
  misc_feature (1)..(25): SEQ ID NO: 7444; WAN024CAM; Start 82; Stop 106
atttcctgccatctattacctcctc

SEQ ID NO: 468153 - DNA, 25 bp, Artificial
  probe
  misc_feature (1)..(25): SEQ ID NO: 7444; WAN024CAM; Start 81; Stop 105
catttcctgccatctattacctcct

SEQ ID NO: 468154 - DNA, 25 bp, Artificial
  probe
  misc_feature (1)..(25): SEQ ID NO: 7444; WAN024CAM; Start 80; Stop 104
tcatttcctgccatctattacctcc

SEQ ID NO: 468155 - DNA, 25 bp, Artificial
  probe
  misc_feature (1)..(25): SEQ ID NO: 7444; WAN024CAM; Start 41; Stop 65
tctatgaatttaatttgcttggacg

SEQ ID NO: 468156 - DNA, 25 bp, Artificial
  probe
  misc_feature (1)..(25): SEQ ID NO: 7444; WAN024CAM; Start 25; Stop 49
ctcggtaagcatggcatctatgaat

SEQ ID NO: 468157 - DNA, 25 bp, Artificial
  probe
  misc_feature (1)..(25): SEQ ID NO: 7444; WAN024CAM; Start 28; Stop 52
ggtaagcatggcatctatgaattta

SEQ ID NO: 468158 - DNA, 25 bp, Artificial
  probe
  misc_feature (1)..(25): SEQ ID NO: 7444; WAN024CAM; Start 134; Stop 158
atttccctatgctagataattctgc

SEQ ID NO: 468159 - DNA, 25 bp, Artificial
  probe
  misc_feature (1)..(25): SEQ ID NO: 7444; WAN024CAM; Start 188; Stop 212
ctcaacaatcatttcatgctgtact

SEQ ID NO: 468160 - DNA, 25 bp, Artificial
  probe
  misc_feature (1)..(25): SEQ ID NO: 7444; WAN024CAM; Start 187; Stop 211
cctcaacaatcatttcatgctgtac

SEQ ID NO: 468161 - DNA, 25 bp, Artificial
  probe
  misc_feature (1)..(25): SEQ ID NO: 7444; WAN024CAM; Start 27; Stop 51
cggtaagcatggcatctatgaattt

SEQ ID NO: 468162 - DNA, 25 bp, Artificial
  probe
  misc_feature (1)..(25): SEQ ID NO: 7444; WAN024CAM; Start 83; Stop 107
tttcctgccatctattacctcctca

SEQ ID NO: 468163 - DNA, 25 bp, Artificial
  probe
  misc_feature (1)..(25): SEQ ID NO: 7444; WAN024CAM; Start 189; Stop 213
tcaacaatcatttcatgctgtacta

SEQ ID NO: 468164 - DNA, 25 bp, Artificial
  probe
  misc_feature (1)..(25): SEQ ID NO: 7444; WAN024CAM; Start 128; Stop 152
ccctttatttccctatgctagataa

SEQ ID NO: 468165 - DNA, 25 bp, Artificial
  probe
  misc_feature (1)..(25): SEQ ID NO: 7444; WAN024CAM; Start 48; Stop 72
atttaatttgcttggacgtaaggtt

SEQ ID NO: 468166 - DNA, 25 bp, Artificial
  probe
  misc_feature (1)..(25): SEQ ID NO: 7444; WAN024CAM; Start 47; Stop 71
aatttaatttgcttggacgtaaggt

SEQ ID NO: 468167 - DNA, 25 bp, Artificial
  probe
  misc_feature (1)..(25): SEQ ID NO: 7444; WAN024CAM; Start 51; Stop 75
taatttgcttggacgtaaggttatc

SEQ ID NO: 468168 - DNA, 25 bp, Artificial
  probe
  misc_feature (1)..(25): SEQ ID NO: 7444; WAN024CAM; Start 186; Stop 210
ccctcaacaatcatttcatgctgta

SEQ ID NO: 468169 - DNA, 25 bp, Artificial
  probe
  misc_feature (1)..(25): SEQ ID NO: 7444; WAN024CAM; Start 46; Stop 70
gaatttaatttgcttggacgtaagg

SEQ ID NO: 468170 - DNA, 25 bp, Artificial
  probe
  misc_feature (1)..(25): SEQ ID NO: 7444; WAN024CAM; Start 53; Stop 77
atttgcttggacgtaaggttatcat

SEQ ID NO: 468171 - DNA, 25 bp, Artificial
  probe
  misc_feature (1)..(25): SEQ ID NO: 7444; WAN024CAM; Start 49; Stop 73
tttaatttgcttggacgtaaggtta

SEQ ID NO: 468172 - DNA, 25 bp, Artificial
  probe
  misc_feature (1)..(25): SEQ ID NO: 7444; WAN024CAM; Start 29; Stop 53
gtaagcatggcatctatgaatttaa

SEQ ID NO: 468173 - DNA, 25 bp, Artificial
  probe
  misc_feature (1)..(25): SEQ ID NO: 7444; WAN024CAM; Start 180; Stop 204
gaattgccctcaacaatcatttcat

SEQ ID NO: 468174 - DNA, 25 bp, Artificial
  probe
  misc_feature (1)..(25): SEQ ID NO: 7444; WAN024CAM; Start 55; Stop 79
ttgcttggacgtaaggttatcattt

SEQ ID NO: 468175 - DNA, 25 bp, Artificial
  probe
  misc_feature (1)..(25): SEQ ID NO: 7445; WAN024CJM; Start 62; Stop 86
attggacaaatagtatcgttgcttt

SEQ ID NO: 468176 - DNA, 25 bp, Artificial
  probe
  misc_feature (1)..(25): SEQ ID NO: 7445; WAN024CJM; Start 61; Stop 85
aattggacaaatagtatcgttgctt

SEQ ID NO: 468177 - DNA, 25 bp, Artificial
  probe
  misc_feature (1)..(25): SEQ ID NO: 7445; WAN024CJM; Start 63; Stop 87
ttggacaaatagtatcgttgcttta

SEQ ID NO: 468178 - DNA, 25 bp, Artificial
  probe
  misc_feature (1)..(25): SEQ ID NO: 7445; WAN024CJM; Start 64; Stop 88
tggacaaatagtatcgttgctttat

SEQ ID NO: 468179 - DNA, 25 bp, Artificial
  probe
  misc_feature (1)..(25): SEQ ID NO: 7445; WAN024CJM; Start 65; Stop 89
ggacaaatagtatcgttgctttatc

SEQ ID NO: 468180 - DNA, 25 bp, Artificial
  probe
  misc_feature (1)..(25): SEQ ID NO: 7445; WAN024CJM; Start 66; Stop 90
gacaaatagtatcgttgctttatca

SEQ ID NO: 468181 - DNA, 25 bp, Artificial
  probe
  misc_feature (1)..(25): SEQ ID NO: 7445; WAN024CJM; Start 67; Stop 91
acaaatagtatcgttgctttatcaa

SEQ ID NO: 468182 - DNA, 25 bp, Artificial
  probe
  misc_feature (1)..(25): SEQ ID NO: 7445; WAN024CJM; Start 18; Stop 42
agcagttcttttattagcattagca

SEQ ID NO: 468183 - DNA, 25 bp, Artificial
  probe
  misc_feature (1)..(25): SEQ ID NO: 7445; WAN024CJM; Start 19; Stop 43
gcagttcttttattagcattagcaa

SEQ ID NO: 468184 - DNA, 25 bp, Artificial
  probe
  misc_feature (1)..(25): SEQ ID NO: 7445; WAN024CJM; Start 46; Stop 70
acatgcttctttatcaattggacaa

SEQ ID NO: 468185 - DNA, 25 bp, Artificial
  probe
  misc_feature (1)..(25): SEQ ID NO: 7445; WAN024CJM; Start 45; Stop 69
aacatgcttctttatcaattggaca

SEQ ID NO: 468186 - DNA, 25 bp, Artificial
  probe
  misc_feature (1)..(25): SEQ ID NO: 7445; WAN024CJM; Start 60; Stop 84
caattggacaaatagtatcgttgct

SEQ ID NO: 468187 - DNA, 25 bp, Artificial
  probe
  misc_feature (1)..(25): SEQ ID NO: 7445; WAN024CJM; Start 59; Stop 83
tcaattggacaaatagtatcgttgc

SEQ ID NO: 468188 - DNA, 25 bp, Artificial
  probe
  misc_feature (1)..(25): SEQ ID NO: 7445; WAN024CJM; Start 17; Stop 41
aagcagttcttttattagcattagc

SEQ ID NO: 468189 - DNA, 25 bp, Artificial
  probe
  misc_feature (1)..(25): SEQ ID NO: 7445; WAN024CJM; Start 68; Stop 92
caaatagtatcgttgctttatcaaa

SEQ ID NO: 468190 - DNA, 25 bp, Artificial
  probe
  misc_feature (1)..(25): SEQ ID NO: 7445; WAN024CJM; Start 47; Stop 71
catgcttctttatcaattggacaaa

SEQ ID NO: 468191 - DNA, 25 bp, Artificial
  probe
  misc_feature (1)..(25): SEQ ID NO: 7445; WAN024CJM; Start 44; Stop 68
aaacatgcttctttatcaattggac

SEQ ID NO: 468192 - DNA, 25 bp, Artificial
  probe
  misc_feature (1)..(25): SEQ ID NO: 7445; WAN024CJM; Start 48; Stop 72
atgcttctttatcaattggacaaat

SEQ ID NO: 468193 - DNA, 25 bp, Artificial
  probe
  misc_feature (1)..(25): SEQ ID NO: 7445; WAN024CJM; Start 1; Stop 25
ttgaccaaaacgaagaaagcagttc

SEQ ID NO: 468194 - DNA, 25 bp, Artificial
  probe
  misc_feature (1)..(25): SEQ ID NO: 7445; WAN024CJM; Start 58; Stop 82
atcaattggacaaatagtatcgttg

SEQ ID NO: 468195 - DNA, 25 bp, Artificial
  probe
  misc_feature (1)..(25): SEQ ID NO: 7445; WAN024CJM; Start 49; Stop 73
tgcttctttatcaattggacaaata

SEQ ID NO: 468196 - DNA, 25 bp, Artificial
  probe
  misc_feature (1)..(25): SEQ ID NO: 7445; WAN024CJM; Start 50; Stop 74
gcttctttatcaattggacaaatag

SEQ ID NO: 468197 - DNA, 25 bp, Artificial
  probe
  misc_feature (1)..(25): SEQ ID NO: 7445; WAN024CJM; Start 20; Stop 44
cagttcttttattagcattagcaaa

SEQ ID NO: 468198 - DNA, 25 bp, Artificial
  probe
  misc_feature (1)..(25): SEQ ID NO: 7445; WAN024CJM; Start 57; Stop 81
tatcaattggacaaatagtatcgtt

SEQ ID NO: 468199 - DNA, 25 bp, Artificial
  probe
  misc_feature (1)..(25): SEQ ID NO: 7445; WAN024CJM; Start 56; Stop 80
ttatcaattggacaaatagtatcgt

SEQ ID NO: 468200 - DNA, 25 bp, Artificial
  probe
  misc_feature (1)..(25): SEQ ID NO: 7445; WAN024CJM; Start 14; Stop 38
agaaagcagttcttttattagcatt

SEQ ID NO: 468201 - DNA, 25 bp, Artificial
  probe
  misc_feature (1)..(25): SEQ ID NO: 7445; WAN024CJM; Start 43; Stop 67
aaaacatgcttctttatcaattgga

SEQ ID NO: 468202 - DNA, 25 bp, Artificial
  probe
  misc_feature (1)..(25): SEQ ID NO: 7445; WAN024CJM; Start 2; Stop 26
tgaccaaaacgaagaaagcagttct

SEQ ID NO: 468203 - DNA, 25 bp, Artificial
  probe
  misc_feature (1)..(25): SEQ ID NO: 7445; WAN024CJM; Start 69; Stop 93
aaatagtatcgttgctttatcaaaa

SEQ ID NO: 468204 - DNA, 25 bp, Artificial
  probe
  misc_feature (1)..(25): SEQ ID NO: 7445; WAN024CJM; Start 55; Stop 79
tttatcaattggacaaatagtatcg

SEQ ID NO: 468205 - DNA, 25 bp, Artificial
  probe
  misc_feature (1)..(25): SEQ ID NO: 7445; WAN024CJM; Start 51; Stop 75
cttctttatcaattggacaaatagt

SEQ ID NO: 468206 - DNA, 25 bp, Artificial
  probe
  misc_feature (1)..(25): SEQ ID NO: 7445; WAN024CJM; Start 16; Stop 40
aaagcagttcttttattagcattag

SEQ ID NO: 468207 - DNA, 25 bp, Artificial
  probe
  misc_feature (1)..(25): SEQ ID NO: 7445; WAN024CJM; Start 15; Stop 39
gaaagcagttcttttattagcatta

SEQ ID NO: 468208 - DNA, 25 bp, Artificial
  probe
  misc_feature (1)..(25): SEQ ID NO: 7446; WAN024DL5; Start 372; Stop 396
tcagaaagtcaaacaggttacattt

SEQ ID NO: 468209 - DNA, 25 bp, Artificial
  probe
  misc_feature (1)..(25): SEQ ID NO: 7446; WAN024DL5; Start 65; Stop 89
tggtagcagaaaggaaattcatcat

SEQ ID NO: 468210 - DNA, 25 bp, Artificial
  probe
  misc_feature (1)..(25): SEQ ID NO: 7446; WAN024DL5; Start 63; Stop 87
attggtagcagaaaggaaattcatc

SEQ ID NO: 468211 - DNA, 25 bp, Artificial
  probe
  misc_feature (1)..(25): SEQ ID NO: 7446; WAN024DL5; Start 64; Stop 88
ttggtagcagaaaggaaattcatca

SEQ ID NO: 468212 - DNA, 25 bp, Artificial
  probe
  misc_feature (1)..(25): SEQ ID NO: 7446; WAN024DL5; Start 382; Stop 406
aaacaggttacatttgattcagcaa

SEQ ID NO: 468213 - DNA, 25 bp, Artificial
  probe
  misc_feature (1)..(25): SEQ ID NO: 7446; WAN024DL5; Start 56; Stop 80
tctctaaattggtagcagaaaggaa

SEQ ID NO: 468214 - DNA, 25 bp, Artificial
  probe
  misc_feature (1)..(25): SEQ ID NO: 7446; WAN024DL5; Start 57; Stop 81
ctctaaattggtagcagaaaggaaa

SEQ ID NO: 468215 - DNA, 25 bp, Artificial
  probe
  misc_feature (1)..(25): SEQ ID NO: 7446; WAN024DL5; Start 61; Stop 85
aaattggtagcagaaaggaaattca

SEQ ID NO: 468216 - DNA, 25 bp, Artificial
  probe
  misc_feature (1)..(25): SEQ ID NO: 7446; WAN024DL5; Start 66; Stop 90
ggtagcagaaaggaaattcatcatg

SEQ ID NO: 468217 - DNA, 25 bp, Artificial
  probe
  misc_feature (1)..(25): SEQ ID NO: 7446; WAN024DL5; Start 62; Stop 86
aattggtagcagaaaggaaattcat

SEQ ID NO: 468218 - DNA, 25 bp, Artificial
  probe
  misc_feature (1)..(25): SEQ ID NO: 7446; WAN024DL5; Start 180; Stop 204
gcctgctcaacagaataccaatact

SEQ ID NO: 468219 - DNA, 25 bp, Artificial
  probe
  misc_feature (1)..(25): SEQ ID NO: 7446; WAN024DL5; Start 58; Stop 82
tctaaattggtagcagaaaggaaat

SEQ ID NO: 468220 - DNA, 25 bp, Artificial
  probe
  misc_feature (1)..(25): SEQ ID NO: 7446; WAN024DL5; Start 179; Stop 203
agcctgctcaacagaataccaatac

SEQ ID NO: 468221 - DNA, 25 bp, Artificial
  probe
  misc_feature (1)..(25): SEQ ID NO: 7446; WAN024DL5; Start 178; Stop 202
cagcctgctcaacagaataccaata

SEQ ID NO: 468222 - DNA, 25 bp, Artificial
  probe
  misc_feature (1)..(25): SEQ ID NO: 7446; WAN024DL5; Start 60; Stop 84
taaattggtagcagaaaggaaattc

SEQ ID NO: 468223 - DNA, 25 bp, Artificial
  probe
  misc_feature (1)..(25): SEQ ID NO: 7446; WAN024DL5; Start 59; Stop 83
ctaaattggtagcagaaaggaaatt

SEQ ID NO: 468224 - DNA, 25 bp, Artificial
  probe
  misc_feature (1)..(25): SEQ ID NO: 7446; WAN024DL5; Start 173; Stop 197
ttcaacagcctgctcaacagaatac

SEQ ID NO: 468225 - DNA, 25 bp, Artificial
  probe
  misc_feature (1)..(25): SEQ ID NO: 7446; WAN024DL5; Start 172; Stop 196
gttcaacagcctgctcaacagaata

SEQ ID NO: 468226 - DNA, 25 bp, Artificial
  probe
  misc_feature (1)..(25): SEQ ID NO: 7446; WAN024DL5; Start 55; Stop 79
ttctctaaattggtagcagaaagga

SEQ ID NO: 468227 - DNA, 25 bp, Artificial
  probe
  misc_feature (1)..(25): SEQ ID NO: 7446; WAN024DL5; Start 383; Stop 407
aacaggttacatttgattcagcaaa

SEQ ID NO: 468228 - DNA, 25 bp, Artificial
  probe
  misc_feature (1)..(25): SEQ ID NO: 7446; WAN024DL5; Start 381; Stop 405
caaacaggttacatttgattcagca

SEQ ID NO: 468229 - DNA, 25 bp, Artificial
  probe
  misc_feature (1)..(25): SEQ ID NO: 7446; WAN024DL5; Start 493; Stop 517
tcggaccaaatcgttttaactaaat

SEQ ID NO: 468230 - DNA, 25 bp, Artificial
  probe
  misc_feature (1)..(25): SEQ ID NO: 7446; WAN024DL5; Start 373; Stop 397
cagaaagtcaaacaggttacatttg

SEQ ID NO: 468231 - DNA, 25 bp, Artificial
  probe
  misc_feature (1)..(25): SEQ ID NO: 7446; WAN024DL5; Start 24; Stop 48
tatactaggggaattgctggttaga

SEQ ID NO: 468232 - DNA, 25 bp, Artificial
  probe
  misc_feature (1)..(25): SEQ ID NO: 7446; WAN024DL5; Start 22; Stop 46
gttatactaggggaattgctggtta

SEQ ID NO: 468233 - DNA, 25 bp, Artificial
  probe
  misc_feature (1)..(25): SEQ ID NO: 7446; WAN024DL5; Start 23; Stop 47
ttatactaggggaattgctggttag

SEQ ID NO: 468234 - DNA, 25 bp, Artificial
  probe
  misc_feature (1)..(25): SEQ ID NO: 7446; WAN024DL5; Start 18; Stop 42
acttgttatactaggggaattgctg

SEQ ID NO: 468235 - DNA, 25 bp, Artificial
  probe
  misc_feature (1)..(25): SEQ ID NO: 7446; WAN024DL5; Start 17; Stop 41
aacttgttatactaggggaattgct

SEQ ID NO: 468236 - DNA, 25 bp, Artificial
  probe
  misc_feature (1)..(25): SEQ ID NO: 7446; WAN024DL5; Start 16; Stop 40
gaacttgttatactaggggaattgc

SEQ ID NO: 468237 - DNA, 25 bp, Artificial
  probe
  misc_feature (1)..(25): SEQ ID NO: 7446; WAN024DL5; Start 19; Stop 43
cttgttatactaggggaattgctgg

SEQ ID NO: 468238 - DNA, 25 bp, Artificial
  probe
  misc_feature (1)..(25): SEQ ID NO: 7446; WAN024DL5; Start 29; Stop 53
taggggaattgctggttagagaaaa

SEQ ID NO: 468239 - DNA, 25 bp, Artificial
  probe
  misc_feature (1)..(25): SEQ ID NO: 7446; WAN024DL5; Start 25; Stop 49
atactaggggaattgctggttagag

SEQ ID NO: 468240 - DNA, 25 bp, Artificial
  probe
  misc_feature (1)..(25): SEQ ID NO: 7446; WAN024DL5; Start 21; Stop 45
tgttatactaggggaattgctggtt

SEQ ID NO: 468241 - DNA, 25 bp, Artificial
  probe
  misc_feature (1)..(25): SEQ ID NO: 7447; WAN024BAQ; Start 66; Stop 90
cgtcaacgtcaccttggattatata

SEQ ID NO: 468242 - DNA, 25 bp, Artificial
  probe
  misc_feature (1)..(25): SEQ ID NO: 7447; WAN024BAQ; Start 69; Stop 93
caacgtcaccttggattatatatgt

SEQ ID NO: 468243 - DNA, 25 bp, Artificial
  probe
  misc_feature (1)..(25): SEQ ID NO: 7447; WAN024BAQ; Start 68; Stop 92
tcaacgtcaccttggattatatatg

SEQ ID NO: 468244 - DNA, 25 bp, Artificial
  probe
  misc_feature (1)..(25): SEQ ID NO: 7447; WAN024BAQ; Start 67; Stop 91
gtcaacgtcaccttggattatatat

SEQ ID NO: 468245 - DNA, 25 bp, Artificial
  probe
  misc_feature (1)..(25): SEQ ID NO: 7447; WAN024BAQ; Start 81; Stop 105
ggattatatatgtgatctgacttcg

SEQ ID NO: 468246 - DNA, 25 bp, Artificial
  probe
  misc_feature (1)..(25): SEQ ID NO: 7447; WAN024BAQ; Start 76; Stop 100
accttggattatatatgtgatctga

SEQ ID NO: 468247 - DNA, 25 bp, Artificial
  probe
  misc_feature (1)..(25): SEQ ID NO: 7447; WAN024BAQ; Start 70; Stop 94
aacgtcaccttggattatatatgtg

SEQ ID NO: 468248 - DNA, 25 bp, Artificial
  probe
  misc_feature (1)..(25): SEQ ID NO: 7447; WAN024BAQ; Start 77; Stop 101
ccttggattatatatgtgatctgac

SEQ ID NO: 468249 - DNA, 25 bp, Artificial
  probe
  misc_feature (1)..(25): SEQ ID NO: 7447; WAN024BAQ; Start 75; Stop 99
caccttggattatatatgtgatctg

SEQ ID NO: 468250 - DNA, 25 bp, Artificial
  probe
  misc_feature (1)..(25): SEQ ID NO: 7447; WAN024BAQ; Start 82; Stop 106
gattatatatgtgatctgacttcgt

SEQ ID NO: 468251 - DNA, 25 bp, Artificial
  probe
  misc_feature (1)..(25): SEQ ID NO: 7447; WAN024BAQ; Start 65; Stop 89
gcgtcaacgtcaccttggattatat

SEQ ID NO: 468252 - DNA, 25 bp, Artificial
  probe
  misc_feature (1)..(25): SEQ ID NO: 7447; WAN024BAQ; Start 83; Stop 107
attatatatgtgatctgacttcgtc

SEQ ID NO: 468253 - DNA, 25 bp, Artificial
  probe
  misc_feature (1)..(25): SEQ ID NO: 7447; WAN024BAQ; Start 80; Stop 104
tggattatatatgtgatctgacttc

SEQ ID NO: 468254 - DNA, 25 bp, Artificial
  probe
  misc_feature (1)..(25): SEQ ID NO: 7447; WAN024BAQ; Start 78; Stop 102
cttggattatatatgtgatctgact

SEQ ID NO: 468255 - DNA, 25 bp, Artificial
  probe
  misc_feature (1)..(25): SEQ ID NO: 7447; WAN024BAQ; Start 72; Stop 96
cgtcaccttggattatatatgtgat

SEQ ID NO: 468256 - DNA, 25 bp, Artificial
  probe
  misc_feature (1)..(25): SEQ ID NO: 7447; WAN024BAQ; Start 79; Stop 103
ttggattatatatgtgatctgactt

SEQ ID NO: 468257 - DNA, 25 bp, Artificial
  probe
  misc_feature (1)..(25): SEQ ID NO: 7447; WAN024BAQ; Start 71; Stop 95
acgtcaccttggattatatatgtga

SEQ ID NO: 468258 - DNA, 25 bp, Artificial
  probe
  misc_feature (1)..(25): SEQ ID NO: 7447; WAN024BAQ; Start 84; Stop 108
ttatatatgtgatctgacttcgtca

SEQ ID NO: 468259 - DNA, 25 bp, Artificial
  probe
  misc_feature (1)..(25): SEQ ID NO: 7447; WAN024BAQ; Start 73; Stop 97
gtcaccttggattatatatgtgatc

SEQ ID NO: 468260 - DNA, 25 bp, Artificial
  probe
  misc_feature (1)..(25): SEQ ID NO: 7447; WAN024BAQ; Start 74; Stop 98
tcaccttggattatatatgtgatct

SEQ ID NO: 468261 - DNA, 25 bp, Artificial
  probe
  misc_feature (1)..(25): SEQ ID NO: 7448; WAN024FSI; Start 29; Stop 53
caaattcatctgccgctacttcaac

SEQ ID NO: 468262 - DNA, 25 bp, Artificial
  probe
  misc_feature (1)..(25): SEQ ID NO: 7448; WAN024FSI; Start 91; Stop 115
gattctccacgatcaatccagctag

SEQ ID NO: 468263 - DNA, 25 bp, Artificial
  probe
  misc_feature (1)..(25): SEQ ID NO: 7448; WAN024FSI; Start 32; Stop 56
attcatctgccgctacttcaaccaa

SEQ ID NO: 468264 - DNA, 25 bp, Artificial
  probe
  misc_feature (1)..(25): SEQ ID NO: 7448; WAN024FSI; Start 31; Stop 55
aattcatctgccgctacttcaacca

SEQ ID NO: 468265 - DNA, 25 bp, Artificial
  probe
  misc_feature (1)..(25): SEQ ID NO: 7448; WAN024FSI; Start 30; Stop 54
aaattcatctgccgctacttcaacc

SEQ ID NO: 468266 - DNA, 25 bp, Artificial
  probe
  misc_feature (1)..(25): SEQ ID NO: 7448; WAN024FSI; Start 28; Stop 52
ccaaattcatctgccgctacttcaa

SEQ ID NO: 468267 - DNA, 25 bp, Artificial
  probe
  misc_feature (1)..(25): SEQ ID NO: 7448; WAN024FSI; Start 14; Stop 38
caacatggatcgtgccaaattcatc

SEQ ID NO: 468268 - DNA, 25 bp, Artificial
  probe
  misc_feature (1)..(25): SEQ ID NO: 7448; WAN024FSI; Start 15; Stop 39
aacatggatcgtgccaaattcatct

SEQ ID NO: 468269 - DNA, 25 bp, Artificial
  probe
  misc_feature (1)..(25): SEQ ID NO: 7448; WAN024FSI; Start 84; Stop 108
cgttatggattctccacgatcaatc

SEQ ID NO: 468270 - DNA, 25 bp, Artificial
  probe
  misc_feature (1)..(25): SEQ ID NO: 7448; WAN024FSI; Start 144; Stop 168
aaaagcgataagagacagagcaagc

SEQ ID NO: 468271 - DNA, 25 bp, Artificial
  probe
  misc_feature (1)..(25): SEQ ID NO: 7448; WAN024FSI; Start 16; Stop 40
acatggatcgtgccaaattcatctg

SEQ ID NO: 468272 - DNA, 25 bp, Artificial
  probe
  misc_feature (1)..(25): SEQ ID NO: 7448; WAN024FSI; Start 122; Stop 146
ctactaaacaagccgtcagccaaaa

SEQ ID NO: 468273 - DNA, 25 bp, Artificial
  probe
  misc_feature (1)..(25): SEQ ID NO: 7448; WAN024FSI; Start 83; Stop 107
ccgttatggattctccacgatcaat

SEQ ID NO: 468274 - DNA, 25 bp, Artificial
  probe
  misc_feature (1)..(25): SEQ ID NO: 7448; WAN024FSI; Start 13; Stop 37
ccaacatggatcgtgccaaattcat

SEQ ID NO: 468275 - DNA, 25 bp, Artificial
  probe
  misc_feature (1)..(25): SEQ ID NO: 7448; WAN024FSI; Start 145; Stop 169
aaagcgataagagacagagcaagct

SEQ ID NO: 468276 - DNA, 25 bp, Artificial
  probe
  misc_feature (1)..(25): SEQ ID NO: 7448; WAN024FSI; Start 17; Stop 41
catggatcgtgccaaattcatctgc

SEQ ID NO: 468277 - DNA, 25 bp, Artificial
  probe
  misc_feature (1)..(25): SEQ ID NO: 7448; WAN024FSI; Start 10; Stop 34
tttccaacatggatcgtgccaaatt

SEQ ID NO: 468278 - DNA, 25 bp, Artificial
  probe
  misc_feature (1)..(25): SEQ ID NO: 7448; WAN024FSI; Start 82; Stop 106
gccgttatggattctccacgatcaa

SEQ ID NO: 468279 - DNA, 25 bp, Artificial
  probe
  misc_feature (1)..(25): SEQ ID NO: 7448; WAN024FSI; Start 148; Stop 172
gcgataagagacagagcaagctttt

SEQ ID NO: 468280 - DNA, 25 bp, Artificial
  probe
  misc_feature (1)..(25): SEQ ID NO: 7448; WAN024FSI; Start 11; Stop 35
ttccaacatggatcgtgccaaattc

SEQ ID NO: 468281 - DNA, 25 bp, Artificial
  probe
  misc_feature (1)..(25): SEQ ID NO: 7448; WAN024FSI; Start 147; Stop 171
agcgataagagacagagcaagcttt

SEQ ID NO: 468282 - DNA, 25 bp, Artificial
  probe
  misc_feature (1)..(25): SEQ ID NO: 7448; WAN024FSI; Start 195; Stop 219
cctcgaaaataattatgaatactgt

SEQ ID NO: 468283 - DNA, 25 bp, Artificial
  probe
  misc_feature (1)..(25): SEQ ID NO: 7448; WAN024FSI; Start 194; Stop 218
tcctcgaaaataattatgaatactg

SEQ ID NO: 468284 - DNA, 25 bp, Artificial
  probe
  misc_feature (1)..(25): SEQ ID NO: 7448; WAN024FSI; Start 146; Stop 170
aagcgataagagacagagcaagctt

SEQ ID NO: 468285 - DNA, 25 bp, Artificial
  probe
  misc_feature (1)..(25): SEQ ID NO: 7448; WAN024FSI; Start 9; Stop 33
ttttccaacatggatcgtgccaaat

SEQ ID NO: 468286 - DNA, 25 bp, Artificial
  probe
  misc_feature (1)..(25): SEQ ID NO: 7448; WAN024FSI; Start 189; Stop 213
ttttctcctcgaaaataattatgaa

SEQ ID NO: 468287 - DNA, 25 bp, Artificial
  probe
  misc_feature (1)..(25): SEQ ID NO: 7450; WAN024BSI; Start 34; Stop 58
ttgactgataccaatgaagttgagt

SEQ ID NO: 468288 - DNA, 25 bp, Artificial
  probe
  misc_feature (1)..(25): SEQ ID NO: 7450; WAN024BSI; Start 33; Stop 57
cttgactgataccaatgaagttgag

SEQ ID NO: 468289 - DNA, 25 bp, Artificial
  probe
  misc_feature (1)..(25): SEQ ID NO: 7450; WAN024BSI; Start 32; Stop 56
gcttgactgataccaatgaagttga

SEQ ID NO: 468290 - DNA, 25 bp, Artificial
  probe
  misc_feature (1)..(25): SEQ ID NO: 7450; WAN024BSI; Start 31; Stop 55
ggcttgactgataccaatgaagttg

SEQ ID NO: 468291 - DNA, 25 bp, Artificial
  probe
  misc_feature (1)..(25): SEQ ID NO: 7450; WAN024BSI; Start 39; Stop 63
tgataccaatgaagttgagtcagct

SEQ ID NO: 468292 - DNA, 25 bp, Artificial
  probe
  misc_feature (1)..(25): SEQ ID NO: 7450; WAN024BSI; Start 30; Stop 54
tggcttgactgataccaatgaagtt

SEQ ID NO: 468293 - DNA, 25 bp, Artificial
  probe
  misc_feature (1)..(25): SEQ ID NO: 7450; WAN024BSI; Start 29; Stop 53
ctggcttgactgataccaatgaagt

SEQ ID NO: 468294 - DNA, 25 bp, Artificial
  probe
  misc_feature (1)..(25): SEQ ID NO: 7450; WAN024BSI; Start 28; Stop 52
cctggcttgactgataccaatgaag

SEQ ID NO: 468295 - DNA, 25 bp, Artificial
  probe
  misc_feature (1)..(25): SEQ ID NO: 7450; WAN024BSI; Start 37; Stop 61
actgataccaatgaagttgagtcag

SEQ ID NO: 468296 - DNA, 25 bp, Artificial
  probe
  misc_feature (1)..(25): SEQ ID NO: 7450; WAN024BSI; Start 36; Stop 60
gactgataccaatgaagttgagtca

SEQ ID NO: 468297 - DNA, 25 bp, Artificial
  probe
  misc_feature (1)..(25): SEQ ID NO: 7450; WAN024BSI; Start 35; Stop 59
tgactgataccaatgaagttgagtc

SEQ ID NO: 468298 - DNA, 25 bp, Artificial
  probe
  misc_feature (1)..(25): SEQ ID NO: 7450; WAN024BSI; Start 25; Stop 49
gaacctggcttgactgataccaatg

SEQ ID NO: 468299 - DNA, 25 bp, Artificial
  probe
  misc_feature (1)..(25): SEQ ID NO: 7450; WAN024BSI; Start 24; Stop 48
agaacctggcttgactgataccaat

SEQ ID NO: 468300 - DNA, 25 bp, Artificial
  probe
  misc_feature (1)..(25): SEQ ID NO: 7450; WAN024BSI; Start 38; Stop 62
ctgataccaatgaagttgagtcagc

SEQ ID NO: 468301 - DNA, 25 bp, Artificial
  probe
  misc_feature (1)..(25): SEQ ID NO: 7450; WAN024BSI; Start 27; Stop 51
acctggcttgactgataccaatgaa

SEQ ID NO: 468302 - DNA, 25 bp, Artificial
  probe
  misc_feature (1)..(25): SEQ ID NO: 7450; WAN024BSI; Start 26; Stop 50
aacctggcttgactgataccaatga

SEQ ID NO: 468303 - DNA, 25 bp, Artificial
  probe
  misc_feature (1)..(25): SEQ ID NO: 7450; WAN024BSI; Start 23; Stop 47
cagaacctggcttgactgataccaa

SEQ ID NO: 468304 - DNA, 25 bp, Artificial
  probe
  misc_feature (1)..(25): SEQ ID NO: 7450; WAN024BSI; Start 21; Stop 45
cacagaacctggcttgactgatacc

SEQ ID NO: 468305 - DNA, 25 bp, Artificial
  probe
  misc_feature (1)..(25): SEQ ID NO: 7451; WAN024BUO; Start 579; Stop 603
cactcactacgaatacattcaagga

SEQ ID NO: 468306 - DNA, 25 bp, Artificial
  probe
  misc_feature (1)..(25): SEQ ID NO: 7451; WAN024BUO; Start 578; Stop 602
acactcactacgaatacattcaagg

SEQ ID NO: 468307 - DNA, 25 bp, Artificial
  probe
  misc_feature (1)..(25): SEQ ID NO: 7451; WAN024BUO; Start 577; Stop 601
aacactcactacgaatacattcaag

SEQ ID NO: 468308 - DNA, 25 bp, Artificial
  probe
  misc_feature (1)..(25): SEQ ID NO: 7451; WAN024BUO; Start 416; Stop 440
cagaacattgcttggttattgatac

SEQ ID NO: 468309 - DNA, 25 bp, Artificial
  probe
  misc_feature (1)..(25): SEQ ID NO: 7451; WAN024BUO; Start 417; Stop 441
agaacattgcttggttattgatact

SEQ ID NO: 468310 - DNA, 25 bp, Artificial
  probe
  misc_feature (1)..(25): SEQ ID NO: 7451; WAN024BUO; Start 580; Stop 604
actcactacgaatacattcaaggag

SEQ ID NO: 468311 - DNA, 25 bp, Artificial
  probe
  misc_feature (1)..(25): SEQ ID NO: 7451; WAN024BUO; Start 418; Stop 442
gaacattgcttggttattgatactt

SEQ ID NO: 468312 - DNA, 25 bp, Artificial
  probe
  misc_feature (1)..(25): SEQ ID NO: 7451; WAN024BUO; Start 581; Stop 605
ctcactacgaatacattcaaggagc

SEQ ID NO: 468313 - DNA, 25 bp, Artificial
  probe
  misc_feature (1)..(25): SEQ ID NO: 7451; WAN024BUO; Start 415; Stop 439
ccagaacattgcttggttattgata

SEQ ID NO: 468314 - DNA, 25 bp, Artificial
  probe
  misc_feature (1)..(25): SEQ ID NO: 7451; WAN024BUO; Start 425; Stop 449
gcttggttattgatactttgctgaa

SEQ ID NO: 468315 - DNA, 25 bp, Artificial
  probe
  misc_feature (1)..(25): SEQ ID NO: 7451; WAN024BUO; Start 423; Stop 447
ttgcttggttattgatactttgctg

SEQ ID NO: 468316 - DNA, 25 bp, Artificial
  probe
  misc_feature (1)..(25): SEQ ID NO: 7451; WAN024BUO; Start 28; Stop 52
acagaatcaacaggaggaaagaata

SEQ ID NO: 468317 - DNA, 25 bp, Artificial
  probe
  misc_feature (1)..(25): SEQ ID NO: 7451; WAN024BUO; Start 27; Stop 51
tacagaatcaacaggaggaaagaat

SEQ ID NO: 468318 - DNA, 25 bp, Artificial
  probe
  misc_feature (1)..(25): SEQ ID NO: 7451; WAN024BUO; Start 26; Stop 50
atacagaatcaacaggaggaaagaa

SEQ ID NO: 468319 - DNA, 25 bp, Artificial
  probe
  misc_feature (1)..(25): SEQ ID NO: 7451; WAN024BUO; Start 25; Stop 49
aatacagaatcaacaggaggaaaga

SEQ ID NO: 468320 - DNA, 25 bp, Artificial
  probe
  misc_feature (1)..(25): SEQ ID NO: 7451; WAN024BUO; Start 422; Stop 446
attgcttggttattgatactttgct

SEQ ID NO: 468321 - DNA, 25 bp, Artificial
  probe
  misc_feature (1)..(25): SEQ ID NO: 7451; WAN024BUO; Start 421; Stop 445
cattgcttggttattgatactttgc

SEQ ID NO: 468322 - DNA, 25 bp, Artificial
  probe
  misc_feature (1)..(25): SEQ ID NO: 7451; WAN024BUO; Start 424; Stop 448
tgcttggttattgatactttgctga

SEQ ID NO: 468323 - DNA, 25 bp, Artificial
  probe
  misc_feature (1)..(25): SEQ ID NO: 7451; WAN024BUO; Start 24; Stop 48
aaatacagaatcaacaggaggaaag

SEQ ID NO: 468324 - DNA, 25 bp, Artificial
  probe
  misc_feature (1)..(25): SEQ ID NO: 7451; WAN024BUO; Start 582; Stop 606
tcactacgaatacattcaaggagcg

SEQ ID NO: 468325 - DNA, 25 bp, Artificial
  probe
  misc_feature (1)..(25): SEQ ID NO: 7451; WAN024BUO; Start 538; Stop 562
tatgaattgacgatcactgcattac

SEQ ID NO: 468326 - DNA, 25 bp, Artificial
  probe
  misc_feature (1)..(25): SEQ ID NO: 7451; WAN024BUO; Start 312; Stop 336
tgaaggtctgaacattaaagtcttg

SEQ ID NO: 468327 - DNA, 25 bp, Artificial
  probe
  misc_feature (1)..(25): SEQ ID NO: 7451; WAN024BUO; Start 537; Stop 561
ctatgaattgacgatcactgcatta

SEQ ID NO: 468328 - DNA, 25 bp, Artificial
  probe
  misc_feature (1)..(25): SEQ ID NO: 7451; WAN024BUO; Start 470; Stop 494
ttgtcattcctcgtggtaaggttag

SEQ ID NO: 468329 - DNA, 25 bp, Artificial
  probe
  misc_feature (1)..(25): SEQ ID NO: 7451; WAN024BUO; Start 313; Stop 337
gaaggtctgaacattaaagtcttga

SEQ ID NO: 468330 - DNA, 25 bp, Artificial
  probe
  misc_feature (1)..(25): SEQ ID NO: 7451; WAN024BUO; Start 35; Stop 59
caacaggaggaaagaatatgacgac

SEQ ID NO: 468331 - DNA, 25 bp, Artificial
  probe
  misc_feature (1)..(25): SEQ ID NO: 7451; WAN024BUO; Start 30; Stop 54
agaatcaacaggaggaaagaatatg

SEQ ID NO: 468332 - DNA, 25 bp, Artificial
  probe
  misc_feature (1)..(25): SEQ ID NO: 7451; WAN024BUO; Start 29; Stop 53
cagaatcaacaggaggaaagaatat

SEQ ID NO: 468333 - DNA, 25 bp, Artificial
  probe
  misc_feature (1)..(25): SEQ ID NO: 7451; WAN024BUO; Start 315; Stop 339
aggtctgaacattaaagtcttgaaa

SEQ ID NO: 468334 - DNA, 25 bp, Artificial
  probe
  misc_feature (1)..(25): SEQ ID NO: 7451; WAN024BUO; Start 36; Stop 60
aacaggaggaaagaatatgacgact

SEQ ID NO: 468335 - DNA, 25 bp, Artificial
  probe
  misc_feature (1)..(25): SEQ ID NO: 7451; WAN024BUO; Start 420; Stop 444
acattgcttggttattgatactttg

SEQ ID NO: 468336 - DNA, 25 bp, Artificial
  probe
  misc_feature (1)..(25): SEQ ID NO: 7451; WAN024BUO; Start 33; Stop 57
atcaacaggaggaaagaatatgacg

SEQ ID NO: 468337 - DNA, 25 bp, Artificial
  probe
  misc_feature (1)..(25): SEQ ID NO: 7451; WAN024BUO; Start 316; Stop 340
ggtctgaacattaaagtcttgaaag

SEQ ID NO: 468338 - DNA, 25 bp, Artificial
  probe
  misc_feature (1)..(25): SEQ ID NO: 7452; WAN024BUB; Start 69; Stop 93
acgaacacccttattcctttctatt

SEQ ID NO: 468339 - DNA, 25 bp, Artificial
  probe
  misc_feature (1)..(25): SEQ ID NO: 7452; WAN024BUB; Start 70; Stop 94
cgaacacccttattcctttctattg

SEQ ID NO: 468340 - DNA, 25 bp, Artificial
  probe
  misc_feature (1)..(25): SEQ ID NO: 7452; WAN024BUB; Start 67; Stop 91
ttacgaacacccttattcctttcta

SEQ ID NO: 468341 - DNA, 25 bp, Artificial
  probe
  misc_feature (1)..(25): SEQ ID NO: 7452; WAN024BUB; Start 68; Stop 92
tacgaacacccttattcctttctat

SEQ ID NO: 468342 - DNA, 25 bp, Artificial
  probe
  misc_feature (1)..(25): SEQ ID NO: 7452; WAN024BUB; Start 66; Stop 90
gttacgaacacccttattcctttct

SEQ ID NO: 468343 - DNA, 25 bp, Artificial
  probe
  misc_feature (1)..(25): SEQ ID NO: 7452; WAN024BUB; Start 65; Stop 89
agttacgaacacccttattcctttc

SEQ ID NO: 468344 - DNA, 25 bp, Artificial
  probe
  misc_feature (1)..(25): SEQ ID NO: 7452; WAN024BUB; Start 83; Stop 107
tcctttctattgatgttctgaatcg

SEQ ID NO: 468345 - DNA, 25 bp, Artificial
  probe
  misc_feature (1)..(25): SEQ ID NO: 7452; WAN024BUB; Start 74; Stop 98
cacccttattcctttctattgatgt

SEQ ID NO: 468346 - DNA, 25 bp, Artificial
  probe
  misc_feature (1)..(25): SEQ ID NO: 7452; WAN024BUB; Start 73; Stop 97
acacccttattcctttctattgatg

SEQ ID NO: 468347 - DNA, 25 bp, Artificial
  probe
  misc_feature (1)..(25): SEQ ID NO: 7452; WAN024BUB; Start 64; Stop 88
cagttacgaacacccttattccttt

SEQ ID NO: 468348 - DNA, 25 bp, Artificial
  probe
  misc_feature (1)..(25): SEQ ID NO: 7452; WAN024BUB; Start 71; Stop 95
gaacacccttattcctttctattga

SEQ ID NO: 468349 - DNA, 25 bp, Artificial
  probe
  misc_feature (1)..(25): SEQ ID NO: 7452; WAN024BUB; Start 63; Stop 87
tcagttacgaacacccttattcctt

SEQ ID NO: 468350 - DNA, 25 bp, Artificial
  probe
  misc_feature (1)..(25): SEQ ID NO: 7452; WAN024BUB; Start 62; Stop 86
ttcagttacgaacacccttattcct

SEQ ID NO: 468351 - DNA, 25 bp, Artificial
  probe
  misc_feature (1)..(25): SEQ ID NO: 7452; WAN024BUB; Start 75; Stop 99
acccttattcctttctattgatgtt

SEQ ID NO: 468352 - DNA, 25 bp, Artificial
  probe
  misc_feature (1)..(25): SEQ ID NO: 7452; WAN024BUB; Start 72; Stop 96
aacacccttattcctttctattgat

SEQ ID NO: 468353 - DNA, 25 bp, Artificial
  probe
  misc_feature (1)..(25): SEQ ID NO: 7452; WAN024BUB; Start 76; Stop 100
cccttattcctttctattgatgttc

SEQ ID NO: 468354 - DNA, 25 bp, Artificial
  probe
  misc_feature (1)..(25): SEQ ID NO: 7452; WAN024BUB; Start 84; Stop 108
cctttctattgatgttctgaatcga

SEQ ID NO: 468355 - DNA, 25 bp, Artificial
  probe
  misc_feature (1)..(25): SEQ ID NO: 7452; WAN024BUB; Start 82; Stop 106
ttcctttctattgatgttctgaatc

SEQ ID NO: 468356 - DNA, 25 bp, Artificial
  probe
  misc_feature (1)..(25): SEQ ID NO: 7452; WAN024BUB; Start 77; Stop 101
ccttattcctttctattgatgttct

SEQ ID NO: 468357 - DNA, 25 bp, Artificial
  probe
  misc_feature (1)..(25): SEQ ID NO: 7452; WAN024BUB; Start 89; Stop 113
ctattgatgttctgaatcgaaccac

SEQ ID NO: 468358 - DNA, 25 bp, Artificial
  probe
  misc_feature (1)..(25): SEQ ID NO: 7452; WAN024BUB; Start 88; Stop 112
tctattgatgttctgaatcgaacca

SEQ ID NO: 468359 - DNA, 25 bp, Artificial
  probe
  misc_feature (1)..(25): SEQ ID NO: 7452; WAN024BUB; Start 87; Stop 111
ttctattgatgttctgaatcgaacc

SEQ ID NO: 468360 - DNA, 25 bp, Artificial
  probe
  misc_feature (1)..(25): SEQ ID NO: 7452; WAN024BUB; Start 90; Stop 114
tattgatgttctgaatcgaaccacc

SEQ ID NO: 468361 - DNA, 25 bp, Artificial
  probe
  misc_feature (1)..(25): SEQ ID NO: 7452; WAN024BUB; Start 85; Stop 109
ctttctattgatgttctgaatcgaa

SEQ ID NO: 468362 - DNA, 25 bp, Artificial
  probe
  misc_feature (1)..(25): SEQ ID NO: 7452; WAN024BUB; Start 79; Stop 103
ttattcctttctattgatgttctga

SEQ ID NO: 468363 - DNA, 25 bp, Artificial
  probe
  misc_feature (1)..(25): SEQ ID NO: 7452; WAN024BUB; Start 78; Stop 102
cttattcctttctattgatgttctg

SEQ ID NO: 468364 - DNA, 25 bp, Artificial
  probe
  misc_feature (1)..(25): SEQ ID NO: 7452; WAN024BUB; Start 80; Stop 104
tattcctttctattgatgttctgaa

SEQ ID NO: 468365 - DNA, 25 bp, Artificial
  probe
  misc_feature (1)..(25): SEQ ID NO: 7452; WAN024BUB; Start 81; Stop 105
attcctttctattgatgttctgaat

SEQ ID NO: 468366 - DNA, 25 bp, Artificial
  probe
  misc_feature (1)..(25): SEQ ID NO: 7452; WAN024BUB; Start 93; Stop 117
tgatgttctgaatcgaaccaccatt

SEQ ID NO: 468367 - DNA, 25 bp, Artificial
  probe
  misc_feature (1)..(25): SEQ ID NO: 7452; WAN024BUB; Start 92; Stop 116
ttgatgttctgaatcgaaccaccat

SEQ ID NO: 468368 - DNA, 25 bp, Artificial
  probe
  misc_feature (1)..(25): SEQ ID NO: 7452; WAN024BUB; Start 91; Stop 115
attgatgttctgaatcgaaccacca

SEQ ID NO: 468369 - DNA, 25 bp, Artificial
  probe
  misc_feature (1)..(25): SEQ ID NO: 7452; WAN024BUB; Start 61; Stop 85
gttcagttacgaacacccttattcc

SEQ ID NO: 468370 - DNA, 25 bp, Artificial
  probe
  misc_feature (1)..(25): SEQ ID NO: 7452; WAN024BUB; Start 86; Stop 110
tttctattgatgttctgaatcgaac

SEQ ID NO: 468371 - DNA, 25 bp, Artificial
  probe
  misc_feature (1)..(25): SEQ ID NO: 7453; WAN024ER9; Start 30; Stop 54
ggacaagcgaaagattattcatagt

SEQ ID NO: 468372 - DNA, 25 bp, Artificial
  probe
  misc_feature (1)..(25): SEQ ID NO: 7453; WAN024ER9; Start 24; Stop 48
ccataaggacaagcgaaagattatt

SEQ ID NO: 468373 - DNA, 25 bp, Artificial
  probe
  misc_feature (1)..(25): SEQ ID NO: 7453; WAN024ER9; Start 29; Stop 53
aggacaagcgaaagattattcatag

SEQ ID NO: 468374 - DNA, 25 bp, Artificial
  probe
  misc_feature (1)..(25): SEQ ID NO: 7453; WAN024ER9; Start 28; Stop 52
aaggacaagcgaaagattattcata

SEQ ID NO: 468375 - DNA, 25 bp, Artificial
  probe
  misc_feature (1)..(25): SEQ ID NO: 7453; WAN024ER9; Start 27; Stop 51
taaggacaagcgaaagattattcat

SEQ ID NO: 468376 - DNA, 25 bp, Artificial
  probe
  misc_feature (1)..(25): SEQ ID NO: 7453; WAN024ER9; Start 26; Stop 50
ataaggacaagcgaaagattattca

SEQ ID NO: 468377 - DNA, 25 bp, Artificial
  probe
  misc_feature (1)..(25): SEQ ID NO: 7453; WAN024ER9; Start 25; Stop 49
cataaggacaagcgaaagattattc

SEQ ID NO: 468378 - DNA, 25 bp, Artificial
  probe
  misc_feature (1)..(25): SEQ ID NO: 7453; WAN024ER9; Start 31; Stop 55
gacaagcgaaagattattcatagtt

SEQ ID NO: 468379 - DNA, 25 bp, Artificial
  probe
  misc_feature (1)..(25): SEQ ID NO: 7453; WAN024ER9; Start 23; Stop 47
tccataaggacaagcgaaagattat

SEQ ID NO: 468380 - DNA, 25 bp, Artificial
  probe
  misc_feature (1)..(25): SEQ ID NO: 7453; WAN024ER9; Start 22; Stop 46
atccataaggacaagcgaaagatta

SEQ ID NO: 468381 - DNA, 25 bp, Artificial
  probe
  misc_feature (1)..(25): SEQ ID NO: 7453; WAN024ER9; Start 21; Stop 45
tatccataaggacaagcgaaagatt

SEQ ID NO: 468382 - DNA, 25 bp, Artificial
  probe
  misc_feature (1)..(25): SEQ ID NO: 7453; WAN024ER9; Start 20; Stop 44
atatccataaggacaagcgaaagat

SEQ ID NO: 468383 - DNA, 25 bp, Artificial
  probe
  misc_feature (1)..(25): SEQ ID NO: 7453; WAN024ER9; Start 19; Stop 43
tatatccataaggacaagcgaaaga

SEQ ID NO: 468384 - DNA, 25 bp, Artificial
  probe
  misc_feature (1)..(25): SEQ ID NO: 7453; WAN024ER9; Start 32; Stop 56
acaagcgaaagattattcatagttt

SEQ ID NO: 468385 - DNA, 25 bp, Artificial
  probe
  misc_feature (1)..(25): SEQ ID NO: 7453; WAN024ER9; Start 82; Stop 106
gttgtttatcaccctcggttagaaa

SEQ ID NO: 468386 - DNA, 25 bp, Artificial
  probe
  misc_feature (1)..(25): SEQ ID NO: 7453; WAN024ER9; Start 18; Stop 42
atatatccataaggacaagcgaaag

SEQ ID NO: 468387 - DNA, 25 bp, Artificial
  probe
  misc_feature (1)..(25): SEQ ID NO: 7453; WAN024ER9; Start 69; Stop 93
tttgcttgaagacgttgtttatcac

SEQ ID NO: 468388 - DNA, 25 bp, Artificial
  probe
  misc_feature (1)..(25): SEQ ID NO: 7453; WAN024ER9; Start 73; Stop 97
cttgaagacgttgtttatcaccctc

SEQ ID NO: 468389 - DNA, 25 bp, Artificial
  probe
  misc_feature (1)..(25): SEQ ID NO: 7453; WAN024ER9; Start 70; Stop 94
ttgcttgaagacgttgtttatcacc

SEQ ID NO: 468390 - DNA, 25 bp, Artificial
  probe
  misc_feature (1)..(25): SEQ ID NO: 7453; WAN024ER9; Start 81; Stop 105
cgttgtttatcaccctcggttagaa

SEQ ID NO: 468391 - DNA, 25 bp, Artificial
  probe
  misc_feature (1)..(25): SEQ ID NO: 7453; WAN024ER9; Start 15; Stop 39
cagatatatccataaggacaagcga

SEQ ID NO: 468392 - DNA, 25 bp, Artificial
  probe
  misc_feature (1)..(25): SEQ ID NO: 7453; WAN024ER9; Start 14; Stop 38
acagatatatccataaggacaagcg

SEQ ID NO: 468393 - DNA, 25 bp, Artificial
  probe
  misc_feature (1)..(25): SEQ ID NO: 7453; WAN024ER9; Start 16; Stop 40
agatatatccataaggacaagcgaa

SEQ ID NO: 468394 - DNA, 25 bp, Artificial
  probe
  misc_feature (1)..(25): SEQ ID NO: 7453; WAN024ER9; Start 83; Stop 107
ttgtttatcaccctcggttagaaaa

SEQ ID NO: 468395 - DNA, 25 bp, Artificial
  probe
  misc_feature (1)..(25): SEQ ID NO: 7453; WAN024ER9; Start 13; Stop 37
aacagatatatccataaggacaagc

SEQ ID NO: 468396 - DNA, 25 bp, Artificial
  probe
  misc_feature (1)..(25): SEQ ID NO: 7453; WAN024ER9; Start 33; Stop 57
caagcgaaagattattcatagttta

SEQ ID NO: 468397 - DNA, 25 bp, Artificial
  probe
  misc_feature (1)..(25): SEQ ID NO: 7453; WAN024ER9; Start 74; Stop 98
ttgaagacgttgtttatcaccctcg

SEQ ID NO: 468398 - DNA, 25 bp, Artificial
  probe
  misc_feature (1)..(25): SEQ ID NO: 7453; WAN024ER9; Start 68; Stop 92
ttttgcttgaagacgttgtttatca

SEQ ID NO: 468399 - DNA, 25 bp, Artificial
  probe
  misc_feature (1)..(25): SEQ ID NO: 7453; WAN024ER9; Start 72; Stop 96
gcttgaagacgttgtttatcaccct

SEQ ID NO: 468400 - DNA, 25 bp, Artificial
  probe
  misc_feature (1)..(25): SEQ ID NO: 7453; WAN024ER9; Start 35; Stop 59
agcgaaagattattcatagtttatc

SEQ ID NO: 468401 - DNA, 25 bp, Artificial
  probe
  misc_feature (1)..(25): SEQ ID NO: 7453; WAN024ER9; Start 71; Stop 95
tgcttgaagacgttgtttatcaccc

SEQ ID NO: 468402 - DNA, 25 bp, Artificial
  probe
  misc_feature (1)..(25): SEQ ID NO: 7453; WAN024ER9; Start 11; Stop 35
tgaacagatatatccataaggacaa

SEQ ID NO: 468403 - DNA, 25 bp, Artificial
  probe
  misc_feature (1)..(25): SEQ ID NO: 7453; WAN024ER9; Start 10; Stop 34
ttgaacagatatatccataaggaca

SEQ ID NO: 468404 - DNA, 25 bp, Artificial
  probe
  misc_feature (1)..(25): SEQ ID NO: 7454; WAN024C45; Start 15; Stop 39
caatcaattcagccttgtcttcttc

SEQ ID NO: 468405 - DNA, 25 bp, Artificial
  probe
  misc_feature (1)..(25): SEQ ID NO: 7454; WAN024C45; Start 17; Stop 41
atcaattcagccttgtcttcttcaa

SEQ ID NO: 468406 - DNA, 25 bp, Artificial
  probe
  misc_feature (1)..(25): SEQ ID NO: 7454; WAN024C45; Start 16; Stop 40
aatcaattcagccttgtcttcttca

SEQ ID NO: 468407 - DNA, 25 bp, Artificial
  probe
  misc_feature (1)..(25): SEQ ID NO: 7454; WAN024C45; Start 14; Stop 38
tcaatcaattcagccttgtcttctt

SEQ ID NO: 468408 - DNA, 25 bp, Artificial
  probe
  misc_feature (1)..(25): SEQ ID NO: 7454; WAN024C45; Start 13; Stop 37
ttcaatcaattcagccttgtcttct

SEQ ID NO: 468409 - DNA, 25 bp, Artificial
  probe
  misc_feature (1)..(25): SEQ ID NO: 7454; WAN024C45; Start 12; Stop 36
tttcaatcaattcagccttgtcttc

SEQ ID NO: 468410 - DNA, 25 bp, Artificial
  probe
  misc_feature (1)..(25): SEQ ID NO: 7454; WAN024C45; Start 19; Stop 43
caattcagccttgtcttcttcaaag

SEQ ID NO: 468411 - DNA, 25 bp, Artificial
  probe
  misc_feature (1)..(25): SEQ ID NO: 7454; WAN024C45; Start 21; Stop 45
attcagccttgtcttcttcaaagtt

SEQ ID NO: 468412 - DNA, 25 bp, Artificial
  probe
  misc_feature (1)..(25): SEQ ID NO: 7454; WAN024C45; Start 20; Stop 44
aattcagccttgtcttcttcaaagt

SEQ ID NO: 468413 - DNA, 25 bp, Artificial
  probe
  misc_feature (1)..(25): SEQ ID NO: 7454; WAN024C45; Start 18; Stop 42
tcaattcagccttgtcttcttcaaa

SEQ ID NO: 468414 - DNA, 25 bp, Artificial
  probe
  misc_feature (1)..(25): SEQ ID NO: 7454; WAN024C45; Start 22; Stop 46
ttcagccttgtcttcttcaaagttg

SEQ ID NO: 468415 - DNA, 25 bp, Artificial
  probe
  misc_feature (1)..(25): SEQ ID NO: 7454; WAN024C45; Start 77; Stop 101
catgtaccacgttcttctttgtaaa

SEQ ID NO: 468416 - DNA, 25 bp, Artificial
  probe
  misc_feature (1)..(25): SEQ ID NO: 7454; WAN024C45; Start 78; Stop 102
atgtaccacgttcttctttgtaaag

SEQ ID NO: 468417 - DNA, 25 bp, Artificial
  probe
  misc_feature (1)..(25): SEQ ID NO: 7454; WAN024C45; Start 28; Stop 52
cttgtcttcttcaaagttgaggcag

SEQ ID NO: 468418 - DNA, 25 bp, Artificial
  probe
  misc_feature (1)..(25): SEQ ID NO: 7454; WAN024C45; Start 24; Stop 48
cagccttgtcttcttcaaagttgag

SEQ ID NO: 468419 - DNA, 25 bp, Artificial
  probe
  misc_feature (1)..(25): SEQ ID NO: 7454; WAN024C45; Start 23; Stop 47
tcagccttgtcttcttcaaagttga

SEQ ID NO: 468420 - DNA, 25 bp, Artificial
  probe
  misc_feature (1)..(25): SEQ ID NO: 7454; WAN024C45; Start 76; Stop 100
gcatgtaccacgttcttctttgtaa

SEQ ID NO: 468421 - DNA, 25 bp, Artificial
  probe
  misc_feature (1)..(25): SEQ ID NO: 7454; WAN024C45; Start 73; Stop 97
ctagcatgtaccacgttcttctttg

SEQ ID NO: 468422 - DNA, 25 bp, Artificial
  probe
  misc_feature (1)..(25): SEQ ID NO: 7454; WAN024C45; Start 11; Stop 35
ttttcaatcaattcagccttgtctt

SEQ ID NO: 468423 - DNA, 25 bp, Artificial
  probe
  misc_feature (1)..(25): SEQ ID NO: 7454; WAN024C45; Start 74; Stop 98
tagcatgtaccacgttcttctttgt

SEQ ID NO: 468424 - DNA, 25 bp, Artificial
  probe
  misc_feature (1)..(25): SEQ ID NO: 7454; WAN024C45; Start 75; Stop 99
agcatgtaccacgttcttctttgta

SEQ ID NO: 468425 - DNA, 25 bp, Artificial
  probe
  misc_feature (1)..(25): SEQ ID NO: 7454; WAN024C45; Start 25; Stop 49
agccttgtcttcttcaaagttgagg

SEQ ID NO: 468426 - DNA, 25 bp, Artificial
  probe
  misc_feature (1)..(25): SEQ ID NO: 7454; WAN024C45; Start 27; Stop 51
ccttgtcttcttcaaagttgaggca

SEQ ID NO: 468427 - DNA, 25 bp, Artificial
  probe
  misc_feature (1)..(25): SEQ ID NO: 7454; WAN024C45; Start 29; Stop 53
ttgtcttcttcaaagttgaggcagc

SEQ ID NO: 468428 - DNA, 25 bp, Artificial
  probe
  misc_feature (1)..(25): SEQ ID NO: 7454; WAN024C45; Start 30; Stop 54
tgtcttcttcaaagttgaggcagct

SEQ ID NO: 468429 - DNA, 25 bp, Artificial
  probe
  misc_feature (1)..(25): SEQ ID NO: 7455; WAN024FP2-5; Start 17; Stop 41
ctgatacacacgagaactctgataa

SEQ ID NO: 468430 - DNA, 25 bp, Artificial
  probe
  misc_feature (1)..(25): SEQ ID NO: 7455; WAN024FP2-5; Start 18; Stop 42
tgatacacacgagaactctgataat

SEQ ID NO: 468431 - DNA, 25 bp, Artificial
  probe
  misc_feature (1)..(25): SEQ ID NO: 7455; WAN024FP2-5; Start 995; Stop 1019
caggctcctatacattaacagaaga

SEQ ID NO: 468432 - DNA, 25 bp, Artificial
  probe
  misc_feature (1)..(25): SEQ ID NO: 7455; WAN024FP2-5; Start 10; Stop 34
attacatctgatacacacgagaact

SEQ ID NO: 468433 - DNA, 25 bp, Artificial
  probe
  misc_feature (1)..(25): SEQ ID NO: 7455; WAN024FP2-5; Start 8; Stop 32
tgattacatctgatacacacgagaa

SEQ ID NO: 468434 - DNA, 25 bp, Artificial
  probe
  misc_feature (1)..(25): SEQ ID NO: 7455; WAN024FP2-5; Start 11; Stop 35
ttacatctgatacacacgagaactc

SEQ ID NO: 468435 - DNA, 25 bp, Artificial
  probe
  misc_feature (1)..(25): SEQ ID NO: 7455; WAN024FP2-5; Start 9; Stop 33
gattacatctgatacacacgagaac

SEQ ID NO: 468436 - DNA, 25 bp, Artificial
  probe
  misc_feature (1)..(25): SEQ ID NO: 7455; WAN024FP2-5; Start 16; Stop 40
tctgatacacacgagaactctgata

SEQ ID NO: 468437 - DNA, 25 bp, Artificial
  probe
  misc_feature (1)..(25): SEQ ID NO: 7455; WAN024FP2-5; Start 996; Stop 1020
aggctcctatacattaacagaagaa

SEQ ID NO: 468438 - DNA, 25 bp, Artificial
  probe
  misc_feature (1)..(25): SEQ ID NO: 7455; WAN024FP2-5; Start 994; Stop 1018
gcaggctcctatacattaacagaag

SEQ ID NO: 468439 - DNA, 25 bp, Artificial
  probe
  misc_feature (1)..(25): SEQ ID NO: 7455; WAN024FP2-5; Start 12; Stop 36
tacatctgatacacacgagaactct

SEQ ID NO: 468440 - DNA, 25 bp, Artificial
  probe
  misc_feature (1)..(25): SEQ ID NO: 7455; WAN024FP2-5; Start 15; Stop 39
atctgatacacacgagaactctgat

SEQ ID NO: 468441 - DNA, 25 bp, Artificial
  probe
  misc_feature (1)..(25): SEQ ID NO: 7455; WAN024FP2-5; Start 338; Stop 362
cggatggtatgagagtatctagtga

SEQ ID NO: 468442 - DNA, 25 bp, Artificial
  probe
  misc_feature (1)..(25): SEQ ID NO: 7455; WAN024FP2-5; Start 336; Stop 360
tacggatggtatgagagtatctagt

SEQ ID NO: 468443 - DNA, 25 bp, Artificial
  probe
  misc_feature (1)..(25): SEQ ID NO: 7455; WAN024FP2-5; Start 19; Stop 43
gatacacacgagaactctgataatt

SEQ ID NO: 468444 - DNA, 25 bp, Artificial
  probe
  misc_feature (1)..(25): SEQ ID NO: 7455; WAN024FP2-5; Start 337; Stop 361
acggatggtatgagagtatctagtg

SEQ ID NO: 468445 - DNA, 25 bp, Artificial
  probe
  misc_feature (1)..(25): SEQ ID NO: 7455; WAN024FP2-5; Start 339; Stop 363
ggatggtatgagagtatctagtgat

SEQ ID NO: 468446 - DNA, 25 bp, Artificial
  probe
  misc_feature (1)..(25): SEQ ID NO: 7455; WAN024FP2-5; Start 327; Stop 351
atggagatatacggatggtatgaga

SEQ ID NO: 468447 - DNA, 25 bp, Artificial
  probe
  misc_feature (1)..(25): SEQ ID NO: 7455; WAN024FP2-5; Start 7; Stop 31
gtgattacatctgatacacacgaga

SEQ ID NO: 468448 - DNA, 25 bp, Artificial
  probe
  misc_feature (1)..(25): SEQ ID NO: 7455; WAN024FP2-5; Start 14; Stop 38
catctgatacacacgagaactctga

SEQ ID NO: 468449 - DNA, 25 bp, Artificial
  probe
  misc_feature (1)..(25): SEQ ID NO: 7455; WAN024FP2-5; Start 329; Stop 353
ggagatatacggatggtatgagagt

SEQ ID NO: 468450 - DNA, 25 bp, Artificial
  probe
  misc_feature (1)..(25): SEQ ID NO: 7455; WAN024FP2-5; Start 328; Stop 352
tggagatatacggatggtatgagag

SEQ ID NO: 468451 - DNA, 25 bp, Artificial
  probe
  misc_feature (1)..(25): SEQ ID NO: 7455; WAN024FP2-5; Start 1; Stop 25
ttgacggtgattacatctgatacac

SEQ ID NO: 468452 - DNA, 25 bp, Artificial
  probe
  misc_feature (1)..(25): SEQ ID NO: 7455; WAN024FP2-5; Start 13; Stop 37
acatctgatacacacgagaactctg

SEQ ID NO: 468453 - DNA, 25 bp, Artificial
  probe
  misc_feature (1)..(25): SEQ ID NO: 7455; WAN024FP2-5; Start 6; Stop 30
ggtgattacatctgatacacacgag

SEQ ID NO: 468454 - DNA, 25 bp, Artificial
  probe
  misc_feature (1)..(25): SEQ ID NO: 7455; WAN024FP2-5; Start 3; Stop 27
gacggtgattacatctgatacacac

SEQ ID NO: 468455 - DNA, 25 bp, Artificial
  probe
  misc_feature (1)..(25): SEQ ID NO: 7455; WAN024FP2-5; Start 326; Stop 350
tatggagatatacggatggtatgag

SEQ ID NO: 468456 - DNA, 25 bp, Artificial
  probe
  misc_feature (1)..(25): SEQ ID NO: 7455; WAN024FP2-5; Start 2; Stop 26
tgacggtgattacatctgatacaca

SEQ ID NO: 468457 - DNA, 25 bp, Artificial
  probe
  misc_feature (1)..(25): SEQ ID NO: 7455; WAN024FP2-5; Start 1110; Stop 1134
agaagctcagaatgataagaccatc

SEQ ID NO: 468458 - DNA, 25 bp, Artificial
  probe
  misc_feature (1)..(25): SEQ ID NO: 7455; WAN024FP2-5; Start 924; Stop 948
tgatgatggtaatggtttgctgata

SEQ ID NO: 468459 - DNA, 25 bp, Artificial
  probe
  misc_feature (1)..(25): SEQ ID NO: 7455; WAN024FP2-5; Start 330; Stop 354
gagatatacggatggtatgagagta

SEQ ID NO: 468460 - DNA, 25 bp, Artificial
  probe
  misc_feature (1)..(25): SEQ ID NO: 7455; WAN024FP2-5; Start 925; Stop 949
gatgatggtaatggtttgctgataa

SEQ ID NO: 468461 - DNA, 25 bp, Artificial
  probe
  misc_feature (1)..(25): SEQ ID NO: 7455; WAN024FP2-5; Start 919; Stop 943
atctttgatgatggtaatggtttgc

SEQ ID NO: 468462 - DNA, 25 bp, Artificial
  probe
  misc_feature (1)..(25): SEQ ID NO: 7456; WAN024F6D; Start 120; Stop 144
aataaaaggaggaatctatgaacgc

SEQ ID NO: 468463 - DNA, 25 bp, Artificial
  probe
  misc_feature (1)..(25): SEQ ID NO: 7456; WAN024F6D; Start 111; Stop 135
agactgtagaataaaaggaggaatc

SEQ ID NO: 468464 - DNA, 25 bp, Artificial
  probe
  misc_feature (1)..(25): SEQ ID NO: 7456; WAN024F6D; Start 119; Stop 143
gaataaaaggaggaatctatgaacg

SEQ ID NO: 468465 - DNA, 25 bp, Artificial
  probe
  misc_feature (1)..(25): SEQ ID NO: 7456; WAN024F6D; Start 112; Stop 136
gactgtagaataaaaggaggaatct

SEQ ID NO: 468466 - DNA, 25 bp, Artificial
  probe
  misc_feature (1)..(25): SEQ ID NO: 7456; WAN024F6D; Start 54; Stop 78
acaatgtcctcgccttttatgtttt

SEQ ID NO: 468467 - DNA, 25 bp, Artificial
  probe
  misc_feature (1)..(25): SEQ ID NO: 7456; WAN024F6D; Start 82; Stop 106
gttgcttcctttgtgaaaagagtta

SEQ ID NO: 468468 - DNA, 25 bp, Artificial
  probe
  misc_feature (1)..(25): SEQ ID NO: 7456; WAN024F6D; Start 79; Stop 103
ttagttgcttcctttgtgaaaagag

SEQ ID NO: 468469 - DNA, 25 bp, Artificial
  probe
  misc_feature (1)..(25): SEQ ID NO: 7456; WAN024F6D; Start 78; Stop 102
tttagttgcttcctttgtgaaaaga

SEQ ID NO: 468470 - DNA, 25 bp, Artificial
  probe
  misc_feature (1)..(25): SEQ ID NO: 7456; WAN024F6D; Start 135; Stop 159
ctatgaacgcgattcaagaatcatt

SEQ ID NO: 468471 - DNA, 25 bp, Artificial
  probe
  misc_feature (1)..(25): SEQ ID NO: 7456; WAN024F6D; Start 132; Stop 156
aatctatgaacgcgattcaagaatc

SEQ ID NO: 468472 - DNA, 25 bp, Artificial
  probe
  misc_feature (1)..(25): SEQ ID NO: 7456; WAN024F6D; Start 83; Stop 107
ttgcttcctttgtgaaaagagttat

SEQ ID NO: 468473 - DNA, 25 bp, Artificial
  probe
  misc_feature (1)..(25): SEQ ID NO: 7456; WAN024F6D; Start 80; Stop 104
tagttgcttcctttgtgaaaagagt

SEQ ID NO: 468474 - DNA, 25 bp, Artificial
  probe
  misc_feature (1)..(25): SEQ ID NO: 7456; WAN024F6D; Start 134; Stop 158
tctatgaacgcgattcaagaatcat

SEQ ID NO: 468475 - DNA, 25 bp, Artificial
  probe
  misc_feature (1)..(25): SEQ ID NO: 7456; WAN024F6D; Start 133; Stop 157
atctatgaacgcgattcaagaatca

SEQ ID NO: 468476 - DNA, 25 bp, Artificial
  probe
  misc_feature (1)..(25): SEQ ID NO: 7456; WAN024F6D; Start 77; Stop 101
ttttagttgcttcctttgtgaaaag

SEQ ID NO: 468477 - DNA, 25 bp, Artificial
  probe
  misc_feature (1)..(25): SEQ ID NO: 7456; WAN024F6D; Start 84; Stop 108
tgcttcctttgtgaaaagagttata

SEQ ID NO: 468478 - DNA, 25 bp, Artificial
  probe
  misc_feature (1)..(25): SEQ ID NO: 7456; WAN024F6D; Start 81; Stop 105
agttgcttcctttgtgaaaagagtt

SEQ ID NO: 468479 - DNA, 25 bp, Artificial
  probe
  misc_feature (1)..(25): SEQ ID NO: 7456; WAN024F6D; Start 110; Stop 134
tagactgtagaataaaaggaggaat

SEQ ID NO: 468480 - DNA, 25 bp, Artificial
  probe
  misc_feature (1)..(25): SEQ ID NO: 7456; WAN024F6D; Start 109; Stop 133
atagactgtagaataaaaggaggaa

SEQ ID NO: 468481 - DNA, 25 bp, Artificial
  probe
  misc_feature (1)..(25): SEQ ID NO: 7456; WAN024F6D; Start 108; Stop 132
aatagactgtagaataaaaggagga

SEQ ID NO: 468482 - DNA, 25 bp, Artificial
  probe
  misc_feature (1)..(25): SEQ ID NO: 7456; WAN024F6D; Start 53; Stop 77
gacaatgtcctcgccttttatgttt

SEQ ID NO: 468483 - DNA, 25 bp, Artificial
  probe
  misc_feature (1)..(25): SEQ ID NO: 7456; WAN024F6D; Start 118; Stop 142
agaataaaaggaggaatctatgaac

SEQ ID NO: 468484 - DNA, 25 bp, Artificial
  probe
  misc_feature (1)..(25): SEQ ID NO: 7456; WAN024F6D; Start 85; Stop 109
gcttcctttgtgaaaagagttataa

SEQ ID NO: 468485 - DNA, 25 bp, Artificial
  probe
  misc_feature (1)..(25): SEQ ID NO: 7456; WAN024F6D; Start 136; Stop 160
tatgaacgcgattcaagaatcattt

SEQ ID NO: 468486 - DNA, 25 bp, Artificial
  probe
  misc_feature (1)..(25): SEQ ID NO: 7456; WAN024F6D; Start 113; Stop 137
actgtagaataaaaggaggaatcta

SEQ ID NO: 468487 - DNA, 25 bp, Artificial
  probe
  misc_feature (1)..(25): SEQ ID NO: 7456; WAN024F6D; Start 124; Stop 148
aaaggaggaatctatgaacgcgatt

SEQ ID NO: 468488 - DNA, 25 bp, Artificial
  probe
  misc_feature (1)..(25): SEQ ID NO: 7456; WAN024F6D; Start 121; Stop 145
ataaaaggaggaatctatgaacgcg

SEQ ID NO: 468489 - DNA, 25 bp, Artificial
  probe
  misc_feature (1)..(25): SEQ ID NO: 7456; WAN024F6D; Start 122; Stop 146
taaaaggaggaatctatgaacgcga

SEQ ID NO: 468490 - DNA, 25 bp, Artificial
  probe
  misc_feature (1)..(25): SEQ ID NO: 7456; WAN024F6D; Start 107; Stop 131
taatagactgtagaataaaaggagg

SEQ ID NO: 468491 - DNA, 25 bp, Artificial
  probe
  misc_feature (1)..(25): SEQ ID NO: 7456; WAN024F6D; Start 115; Stop 139
tgtagaataaaaggaggaatctatg

SEQ ID NO: 468492 - DNA, 25 bp, Artificial
  probe
  misc_feature (1)..(25): SEQ ID NO: 7456; WAN024F6D; Start 123; Stop 147
aaaaggaggaatctatgaacgcgat

SEQ ID NO: 468493 - DNA, 25 bp, Artificial
  probe
  misc_feature (1)..(25): SEQ ID NO: 7456; WAN024F6D; Start 93; Stop 117
tgtgaaaagagttataatagactgt

SEQ ID NO: 468494 - DNA, 25 bp, Artificial
  probe
  misc_feature (1)..(25): SEQ ID NO: 7456; WAN024F6D; Start 131; Stop 155
gaatctatgaacgcgattcaagaat

SEQ ID NO: 468495 - DNA, 25 bp, Artificial
  probe
  misc_feature (1)..(25): SEQ ID NO: 7457; WAN024BLC; Start 9; Stop 33
ttatcccaaaaggtgtaaaatgttt

SEQ ID NO: 468496 - DNA, 25 bp, Artificial
  probe
  misc_feature (1)..(25): SEQ ID NO: 7457; WAN024BLC; Start 8; Stop 32
attatcccaaaaggtgtaaaatgtt

SEQ ID NO: 468497 - DNA, 25 bp, Artificial
  probe
  misc_feature (1)..(25): SEQ ID NO: 7457; WAN024BLC; Start 7; Stop 31
aattatcccaaaaggtgtaaaatgt

SEQ ID NO: 468498 - DNA, 25 bp, Artificial
  probe
  misc_feature (1)..(25): SEQ ID NO: 7457; WAN024BLC; Start 2; Stop 26
tgactaattatcccaaaaggtgtaa

SEQ ID NO: 468499 - DNA, 25 bp, Artificial
  probe
  misc_feature (1)..(25): SEQ ID NO: 7457; WAN024BLC; Start 1; Stop 25
ttgactaattatcccaaaaggtgta

SEQ ID NO: 468500 - DNA, 25 bp, Artificial
  probe
  misc_feature (1)..(25): SEQ ID NO: 7457; WAN024BLC; Start 10; Stop 34
tatcccaaaaggtgtaaaatgtttt

SEQ ID NO: 468501 - DNA, 25 bp, Artificial
  probe
  misc_feature (1)..(25): SEQ ID NO: 7457; WAN024BLC; Start 3; Stop 27
gactaattatcccaaaaggtgtaaa

SEQ ID NO: 468502 - DNA, 25 bp, Artificial
  probe
  misc_feature (1)..(25): SEQ ID NO: 7457; WAN024BLC; Start 4; Stop 28
actaattatcccaaaaggtgtaaaa

SEQ ID NO: 468503 - DNA, 25 bp, Artificial
  probe
  misc_feature (1)..(25): SEQ ID NO: 7457; WAN024BLC; Start 6; Stop 30
taattatcccaaaaggtgtaaaatg

SEQ ID NO: 468504 - DNA, 25 bp, Artificial
  probe
  misc_feature (1)..(25): SEQ ID NO: 7457; WAN024BLC; Start 5; Stop 29
ctaattatcccaaaaggtgtaaaat

SEQ ID NO: 468505 - DNA, 25 bp, Artificial
  probe
  misc_feature (1)..(25): SEQ ID NO: 7458; WAN024BX3; Start 21; Stop 45
aatagtattaaatcgcttggttgcc

SEQ ID NO: 468506 - DNA, 25 bp, Artificial
  probe
  misc_feature (1)..(25): SEQ ID NO: 7458; WAN024BX3; Start 11; Stop 35
ggcgtcaacaaatagtattaaatcg

SEQ ID NO: 468507 - DNA, 25 bp, Artificial
  probe
  misc_feature (1)..(25): SEQ ID NO: 7458; WAN024BX3; Start 20; Stop 44
aaatagtattaaatcgcttggttgc

SEQ ID NO: 468508 - DNA, 25 bp, Artificial
  probe
  misc_feature (1)..(25): SEQ ID NO: 7458; WAN024BX3; Start 13; Stop 37
cgtcaacaaatagtattaaatcgct

SEQ ID NO: 468509 - DNA, 25 bp, Artificial
  probe
  misc_feature (1)..(25): SEQ ID NO: 7458; WAN024BX3; Start 10; Stop 34
tggcgtcaacaaatagtattaaatc

SEQ ID NO: 468510 - DNA, 25 bp, Artificial
  probe
  misc_feature (1)..(25): SEQ ID NO: 7458; WAN024BX3; Start 22; Stop 46
atagtattaaatcgcttggttgcca

SEQ ID NO: 468511 - DNA, 25 bp, Artificial
  probe
  misc_feature (1)..(25): SEQ ID NO: 7458; WAN024BX3; Start 9; Stop 33
ttggcgtcaacaaatagtattaaat

SEQ ID NO: 468512 - DNA, 25 bp, Artificial
  probe
  misc_feature (1)..(25): SEQ ID NO: 7458; WAN024BX3; Start 18; Stop 42
acaaatagtattaaatcgcttggtt

SEQ ID NO: 468513 - DNA, 25 bp, Artificial
  probe
  misc_feature (1)..(25): SEQ ID NO: 7458; WAN024BX3; Start 17; Stop 41
aacaaatagtattaaatcgcttggt

SEQ ID NO: 468514 - DNA, 25 bp, Artificial
  probe
  misc_feature (1)..(25): SEQ ID NO: 7458; WAN024BX3; Start 19; Stop 43
caaatagtattaaatcgcttggttg

SEQ ID NO: 468515 - DNA, 25 bp, Artificial
  probe
  misc_feature (1)..(25): SEQ ID NO: 7458; WAN024BX3; Start 16; Stop 40
caacaaatagtattaaatcgcttgg

SEQ ID NO: 468516 - DNA, 25 bp, Artificial
  probe
  misc_feature (1)..(25): SEQ ID NO: 7458; WAN024BX3; Start 69; Stop 93
tgctctgaaagtactgtctgaatta

SEQ ID NO: 468517 - DNA, 25 bp, Artificial
  probe
  misc_feature (1)..(25): SEQ ID NO: 7458; WAN024BX3; Start 67; Stop 91
attgctctgaaagtactgtctgaat

SEQ ID NO: 468518 - DNA, 25 bp, Artificial
  probe
  misc_feature (1)..(25): SEQ ID NO: 7458; WAN024BX3; Start 68; Stop 92
ttgctctgaaagtactgtctgaatt

SEQ ID NO: 468519 - DNA, 25 bp, Artificial
  probe
  misc_feature (1)..(25): SEQ ID NO: 7458; WAN024BX3; Start 66; Stop 90
aattgctctgaaagtactgtctgaa

SEQ ID NO: 468520 - DNA, 25 bp, Artificial
  probe
  misc_feature (1)..(25): SEQ ID NO: 7458; WAN024BX3; Start 65; Stop 89
aaattgctctgaaagtactgtctga

SEQ ID NO: 468521 - DNA, 25 bp, Artificial
  probe
  misc_feature (1)..(25): SEQ ID NO: 7458; WAN024BX3; Start 39; Stop 63
ggttgccaattttgttgacattaac

SEQ ID NO: 468522 - DNA, 25 bp, Artificial
  probe
  misc_feature (1)..(25): SEQ ID NO: 7458; WAN024BX3; Start 14; Stop 38
gtcaacaaatagtattaaatcgctt

SEQ ID NO: 468523 - DNA, 25 bp, Artificial
  probe
  misc_feature (1)..(25): SEQ ID NO: 7458; WAN024BX3; Start 70; Stop 94
gctctgaaagtactgtctgaattaa

SEQ ID NO: 468524 - DNA, 25 bp, Artificial
  probe
  misc_feature (1)..(25): SEQ ID NO: 7458; WAN024BX3; Start 52; Stop 76
gttgacattaacaaaattgctctga

SEQ ID NO: 468525 - DNA, 25 bp, Artificial
  probe
  misc_feature (1)..(25): SEQ ID NO: 7458; WAN024BX3; Start 54; Stop 78
tgacattaacaaaattgctctgaaa

SEQ ID NO: 468526 - DNA, 25 bp, Artificial
  probe
  misc_feature (1)..(25): SEQ ID NO: 7458; WAN024BX3; Start 56; Stop 80
acattaacaaaattgctctgaaagt

SEQ ID NO: 468527 - DNA, 25 bp, Artificial
  probe
  misc_feature (1)..(25): SEQ ID NO: 7458; WAN024BX3; Start 15; Stop 39
tcaacaaatagtattaaatcgcttg

SEQ ID NO: 468528 - DNA, 25 bp, Artificial
  probe
  misc_feature (1)..(25): SEQ ID NO: 7458; WAN024BX3; Start 53; Stop 77
ttgacattaacaaaattgctctgaa

SEQ ID NO: 468529 - DNA, 25 bp, Artificial
  probe
  misc_feature (1)..(25): SEQ ID NO: 7458; WAN024BX3; Start 55; Stop 79
gacattaacaaaattgctctgaaag

SEQ ID NO: 468530 - DNA, 25 bp, Artificial
  probe
  misc_feature (1)..(25): SEQ ID NO: 7458; WAN024BX3; Start 38; Stop 62
tggttgccaattttgttgacattaa

SEQ ID NO: 468531 - DNA, 25 bp, Artificial
  probe
  misc_feature (1)..(25): SEQ ID NO: 7458; WAN024BX3; Start 8; Stop 32
gttggcgtcaacaaatagtattaaa

SEQ ID NO: 468532 - DNA, 25 bp, Artificial
  probe
  misc_feature (1)..(25): SEQ ID NO: 7458; WAN024BX3; Start 26; Stop 50
tattaaatcgcttggttgccaattt

SEQ ID NO: 468533 - DNA, 25 bp, Artificial
  probe
  misc_feature (1)..(25): SEQ ID NO: 7458; WAN024BX3; Start 25; Stop 49
gtattaaatcgcttggttgccaatt

SEQ ID NO: 468534 - DNA, 25 bp, Artificial
  probe
  misc_feature (1)..(25): SEQ ID NO: 7458; WAN024BX3; Start 23; Stop 47
tagtattaaatcgcttggttgccaa

SEQ ID NO: 468535 - DNA, 25 bp, Artificial
  probe
  misc_feature (1)..(25): SEQ ID NO: 7458; WAN024BX3; Start 71; Stop 95
ctctgaaagtactgtctgaattaaa

SEQ ID NO: 468536 - DNA, 25 bp, Artificial
  probe
  misc_feature (1)..(25): SEQ ID NO: 7458; WAN024BX3; Start 57; Stop 81
cattaacaaaattgctctgaaagta

SEQ ID NO: 468537 - DNA, 25 bp, Artificial
  probe
  misc_feature (1)..(25): SEQ ID NO: 7458; WAN024BX3; Start 64; Stop 88
aaaattgctctgaaagtactgtctg

SEQ ID NO: 468538 - DNA, 25 bp, Artificial
  probe
  misc_feature (1)..(25): SEQ ID NO: 7459; WAN024C2M; Start 85; Stop 109
gtgtgtgttccgttattgttatctg

SEQ ID NO: 468539 - DNA, 25 bp, Artificial
  probe
  misc_feature (1)..(25): SEQ ID NO: 7459; WAN024C2M; Start 41; Stop 65
ttgttgttaatgatggtctgttgtc

SEQ ID NO: 468540 - DNA, 25 bp, Artificial
  probe
  misc_feature (1)..(25): SEQ ID NO: 7459; WAN024C2M; Start 38; Stop 62
cgattgttgttaatgatggtctgtt

SEQ ID NO: 468541 - DNA, 25 bp, Artificial
  probe
  misc_feature (1)..(25): SEQ ID NO: 7459; WAN024C2M; Start 86; Stop 110
tgtgtgttccgttattgttatctgt

SEQ ID NO: 468542 - DNA, 25 bp, Artificial
  probe
  misc_feature (1)..(25): SEQ ID NO: 7459; WAN024C2M; Start 43; Stop 67
gttgttaatgatggtctgttgtctg

SEQ ID NO: 468543 - DNA, 25 bp, Artificial
  probe
  misc_feature (1)..(25): SEQ ID NO: 7459; WAN024C2M; Start 87; Stop 111
gtgtgttccgttattgttatctgta

SEQ ID NO: 468544 - DNA, 25 bp, Artificial
  probe
  misc_feature (1)..(25): SEQ ID NO: 7459; WAN024C2M; Start 42; Stop 66
tgttgttaatgatggtctgttgtct

SEQ ID NO: 468545 - DNA, 25 bp, Artificial
  probe
  misc_feature (1)..(25): SEQ ID NO: 7459; WAN024C2M; Start 40; Stop 64
attgttgttaatgatggtctgttgt

SEQ ID NO: 468546 - DNA, 25 bp, Artificial
  probe
  misc_feature (1)..(25): SEQ ID NO: 7459; WAN024C2M; Start 82; Stop 106
atggtgtgtgttccgttattgttat

SEQ ID NO: 468547 - DNA, 25 bp, Artificial
  probe
  misc_feature (1)..(25): SEQ ID NO: 7459; WAN024C2M; Start 39; Stop 63
gattgttgttaatgatggtctgttg

SEQ ID NO: 468548 - DNA, 25 bp, Artificial
  probe
  misc_feature (1)..(25): SEQ ID NO: 7459; WAN024C2M; Start 37; Stop 61
acgattgttgttaatgatggtctgt

SEQ ID NO: 468549 - DNA, 25 bp, Artificial
  probe
  misc_feature (1)..(25): SEQ ID NO: 7459; WAN024C2M; Start 36; Stop 60
aacgattgttgttaatgatggtctg

SEQ ID NO: 468550 - DNA, 25 bp, Artificial
  probe
  misc_feature (1)..(25): SEQ ID NO: 7459; WAN024C2M; Start 84; Stop 108
ggtgtgtgttccgttattgttatct

SEQ ID NO: 468551 - DNA, 25 bp, Artificial
  probe
  misc_feature (1)..(25): SEQ ID NO: 7459; WAN024C2M; Start 47; Stop 71
ttaatgatggtctgttgtctggttg

SEQ ID NO: 468552 - DNA, 25 bp, Artificial
  probe
  misc_feature (1)..(25): SEQ ID NO: 7459; WAN024C2M; Start 46; Stop 70
gttaatgatggtctgttgtctggtt

SEQ ID NO: 468553 - DNA, 25 bp, Artificial
  probe
  misc_feature (1)..(25): SEQ ID NO: 7459; WAN024C2M; Start 44; Stop 68
ttgttaatgatggtctgttgtctgg

SEQ ID NO: 468554 - DNA, 25 bp, Artificial
  probe
  misc_feature (1)..(25): SEQ ID NO: 7459; WAN024C2M; Start 110; Stop 134
taactgttacttctggtgtgaatcc

SEQ ID NO: 468555 - DNA, 25 bp, Artificial
  probe
  misc_feature (1)..(25): SEQ ID NO: 7459; WAN024C2M; Start 88; Stop 112
tgtgttccgttattgttatctgtaa

SEQ ID NO: 468556 - DNA, 25 bp, Artificial
  probe
  misc_feature (1)..(25): SEQ ID NO: 7459; WAN024C2M; Start 83; Stop 107
tggtgtgtgttccgttattgttatc

SEQ ID NO: 468557 - DNA, 25 bp, Artificial
  probe
  misc_feature (1)..(25): SEQ ID NO: 7459; WAN024C2M; Start 81; Stop 105
gatggtgtgtgttccgttattgtta

SEQ ID NO: 468558 - DNA, 25 bp, Artificial
  probe
  misc_feature (1)..(25): SEQ ID NO: 7459; WAN024C2M; Start 48; Stop 72
taatgatggtctgttgtctggttgt

SEQ ID NO: 468559 - DNA, 25 bp, Artificial
  probe
  misc_feature (1)..(25): SEQ ID NO: 7459; WAN024C2M; Start 45; Stop 69
tgttaatgatggtctgttgtctggt

SEQ ID NO: 468560 - DNA, 25 bp, Artificial
  probe
  misc_feature (1)..(25): SEQ ID NO: 7459; WAN024C2M; Start 115; Stop 139
gttacttctggtgtgaatccatctt

SEQ ID NO: 468561 - DNA, 25 bp, Artificial
  probe
  misc_feature (1)..(25): SEQ ID NO: 7459; WAN024C2M; Start 35; Stop 59
taacgattgttgttaatgatggtct

SEQ ID NO: 468562 - DNA, 25 bp, Artificial
  probe
  misc_feature (1)..(25): SEQ ID NO: 7459; WAN024C2M; Start 60; Stop 84
gttgtctggttgtgtgattgtgatg

SEQ ID NO: 468563 - DNA, 25 bp, Artificial
  probe
  misc_feature (1)..(25): SEQ ID NO: 7459; WAN024C2M; Start 177; Stop 201
tccatctgcgataacaacttcttta

SEQ ID NO: 468564 - DNA, 25 bp, Artificial
  probe
  misc_feature (1)..(25): SEQ ID NO: 7459; WAN024C2M; Start 76; Stop 100
attgtgatggtgtgtgttccgttat

SEQ ID NO: 468565 - DNA, 25 bp, Artificial
  probe
  misc_feature (1)..(25): SEQ ID NO: 7459; WAN024C2M; Start 178; Stop 202
ccatctgcgataacaacttctttaa

SEQ ID NO: 468566 - DNA, 25 bp, Artificial
  probe
  misc_feature (1)..(25): SEQ ID NO: 7459; WAN024C2M; Start 113; Stop 137
ctgttacttctggtgtgaatccatc

SEQ ID NO: 468567 - DNA, 25 bp, Artificial
  probe
  misc_feature (1)..(25): SEQ ID NO: 7459; WAN024C2M; Start 93; Stop 117
tccgttattgttatctgtaactgtt

SEQ ID NO: 468568 - DNA, 25 bp, Artificial
  probe
  misc_feature (1)..(25): SEQ ID NO: 7459; WAN024C2M; Start 92; Stop 116
ttccgttattgttatctgtaactgt

SEQ ID NO: 468569 - DNA, 25 bp, Artificial
  probe
  misc_feature (1)..(25): SEQ ID NO: 7459; WAN024C2M; Start 90; Stop 114
tgttccgttattgttatctgtaact

SEQ ID NO: 468570 - DNA, 25 bp, Artificial
  probe
  misc_feature (1)..(25): SEQ ID NO: 7459; WAN024C2M; Start 89; Stop 113
gtgttccgttattgttatctgtaac

SEQ ID NO: 468571 - DNA, 25 bp, Artificial
  probe
  misc_feature (1)..(25): SEQ ID NO: 7460; WAN024EUN; Start 124; Stop 148
acaaggtatctatcattcatggagc

SEQ ID NO: 468572 - DNA, 25 bp, Artificial
  probe
  misc_feature (1)..(25): SEQ ID NO: 7460; WAN024EUN; Start 348; Stop 372
taaggtgttgctctatgacaattca

SEQ ID NO: 468573 - DNA, 25 bp, Artificial
  probe
  misc_feature (1)..(25): SEQ ID NO: 7460; WAN024EUN; Start 345; Stop 369
ggataaggtgttgctctatgacaat

SEQ ID NO: 468574 - DNA, 25 bp, Artificial
  probe
  misc_feature (1)..(25): SEQ ID NO: 7460; WAN024EUN; Start 347; Stop 371
ataaggtgttgctctatgacaattc

SEQ ID NO: 468575 - DNA, 25 bp, Artificial
  probe
  misc_feature (1)..(25): SEQ ID NO: 7460; WAN024EUN; Start 346; Stop 370
gataaggtgttgctctatgacaatt

SEQ ID NO: 468576 - DNA, 25 bp, Artificial
  probe
  misc_feature (1)..(25): SEQ ID NO: 7460; WAN024EUN; Start 125; Stop 149
caaggtatctatcattcatggagct

SEQ ID NO: 468577 - DNA, 25 bp, Artificial
  probe
  misc_feature (1)..(25): SEQ ID NO: 7460; WAN024EUN; Start 344; Stop 368
tggataaggtgttgctctatgacaa

SEQ ID NO: 468578 - DNA, 25 bp, Artificial
  probe
  misc_feature (1)..(25): SEQ ID NO: 7460; WAN024EUN; Start 343; Stop 367
ttggataaggtgttgctctatgaca

SEQ ID NO: 468579 - DNA, 25 bp, Artificial
  probe
  misc_feature (1)..(25): SEQ ID NO: 7460; WAN024EUN; Start 342; Stop 366
tttggataaggtgttgctctatgac

SEQ ID NO: 468580 - DNA, 25 bp, Artificial
  probe
  misc_feature (1)..(25): SEQ ID NO: 7460; WAN024EUN; Start 349; Stop 373
aaggtgttgctctatgacaattcat

SEQ ID NO: 468581 - DNA, 25 bp, Artificial
  probe
  misc_feature (1)..(25): SEQ ID NO: 7460; WAN024EUN; Start 351; Stop 375
ggtgttgctctatgacaattcatct

SEQ ID NO: 468582 - DNA, 25 bp, Artificial
  probe
  misc_feature (1)..(25): SEQ ID NO: 7460; WAN024EUN; Start 350; Stop 374
aggtgttgctctatgacaattcatc

SEQ ID NO: 468583 - DNA, 25 bp, Artificial
  probe
  misc_feature (1)..(25): SEQ ID NO: 7460; WAN024EUN; Start 318; Stop 342
caatctcgaaatgatagaacagctt

SEQ ID NO: 468584 - DNA, 25 bp, Artificial
  probe
  misc_feature (1)..(25): SEQ ID NO: 7460; WAN024EUN; Start 317; Stop 341
tcaatctcgaaatgatagaacagct

SEQ ID NO: 468585 - DNA, 25 bp, Artificial
  probe
  misc_feature (1)..(25): SEQ ID NO: 7460; WAN024EUN; Start 316; Stop 340
ctcaatctcgaaatgatagaacagc

SEQ ID NO: 468586 - DNA, 25 bp, Artificial
  probe
  misc_feature (1)..(25): SEQ ID NO: 7460; WAN024EUN; Start 354; Stop 378
gttgctctatgacaattcatctatc

SEQ ID NO: 468587 - DNA, 25 bp, Artificial
  probe
  misc_feature (1)..(25): SEQ ID NO: 7460; WAN024EUN; Start 319; Stop 343
aatctcgaaatgatagaacagcttt

SEQ ID NO: 468588 - DNA, 25 bp, Artificial
  probe
  misc_feature (1)..(25): SEQ ID NO: 7460; WAN024EUN; Start 355; Stop 379
ttgctctatgacaattcatctatct

SEQ ID NO: 468589 - DNA, 25 bp, Artificial
  probe
  misc_feature (1)..(25): SEQ ID NO: 7460; WAN024EUN; Start 315; Stop 339
tctcaatctcgaaatgatagaacag

SEQ ID NO: 468590 - DNA, 25 bp, Artificial
  probe
  misc_feature (1)..(25): SEQ ID NO: 7460; WAN024EUN; Start 314; Stop 338
ctctcaatctcgaaatgatagaaca

SEQ ID NO: 468591 - DNA, 25 bp, Artificial
  probe
  misc_feature (1)..(25): SEQ ID NO: 7460; WAN024EUN; Start 308; Stop 332
ttcaatctctcaatctcgaaatgat

SEQ ID NO: 468592 - DNA, 25 bp, Artificial
  probe
  misc_feature (1)..(25): SEQ ID NO: 7460; WAN024EUN; Start 313; Stop 337
tctctcaatctcgaaatgatagaac

SEQ ID NO: 468593 - DNA, 25 bp, Artificial
  probe
  misc_feature (1)..(25): SEQ ID NO: 7460; WAN024EUN; Start 341; Stop 365
ttttggataaggtgttgctctatga

SEQ ID NO: 468594 - DNA, 25 bp, Artificial
  probe
  misc_feature (1)..(25): SEQ ID NO: 7460; WAN024EUN; Start 340; Stop 364
cttttggataaggtgttgctctatg

SEQ ID NO: 468595 - DNA, 25 bp, Artificial
  probe
  misc_feature (1)..(25): SEQ ID NO: 7460; WAN024EUN; Start 146; Stop 170
agctcctcctgtatactattagtaa

SEQ ID NO: 468596 - DNA, 25 bp, Artificial
  probe
  misc_feature (1)..(25): SEQ ID NO: 7460; WAN024EUN; Start 356; Stop 380
tgctctatgacaattcatctatcta

SEQ ID NO: 468597 - DNA, 25 bp, Artificial
  probe
  misc_feature (1)..(25): SEQ ID NO: 7460; WAN024EUN; Start 268; Stop 292
ctacttaaaattcgtattggcaagc

SEQ ID NO: 468598 - DNA, 25 bp, Artificial
  probe
  misc_feature (1)..(25): SEQ ID NO: 7460; WAN024EUN; Start 309; Stop 333
tcaatctctcaatctcgaaatgata

SEQ ID NO: 468599 - DNA, 25 bp, Artificial
  probe
  misc_feature (1)..(25): SEQ ID NO: 7460; WAN024EUN; Start 339; Stop 363
gcttttggataaggtgttgctctat

SEQ ID NO: 468600 - DNA, 25 bp, Artificial
  probe
  misc_feature (1)..(25): SEQ ID NO: 7460; WAN024EUN; Start 310; Stop 334
caatctctcaatctcgaaatgatag

SEQ ID NO: 468601 - DNA, 25 bp, Artificial
  probe
  misc_feature (1)..(25): SEQ ID NO: 7460; WAN024EUN; Start 100; Stop 124
cttgataagtgtaagcgcgtcataa

SEQ ID NO: 468602 - DNA, 25 bp, Artificial
  probe
  misc_feature (1)..(25): SEQ ID NO: 7460; WAN024EUN; Start 312; Stop 336
atctctcaatctcgaaatgatagaa

SEQ ID NO: 468603 - DNA, 25 bp, Artificial
  probe
  misc_feature (1)..(25): SEQ ID NO: 7460; WAN024EUN; Start 311; Stop 335
aatctctcaatctcgaaatgataga

SEQ ID NO: 468604 - DNA, 25 bp, Artificial
  probe
  misc_feature (1)..(25): SEQ ID NO: 7461; WAN024EUM; Start 154; Stop 178
caattcaatggcgttagtgatgtag

SEQ ID NO: 468605 - DNA, 25 bp, Artificial
  probe
  misc_feature (1)..(25): SEQ ID NO: 7461; WAN024EUM; Start 156; Stop 180
attcaatggcgttagtgatgtagtt

SEQ ID NO: 468606 - DNA, 25 bp, Artificial
  probe
  misc_feature (1)..(25): SEQ ID NO: 7461; WAN024EUM; Start 147; Stop 171
aataaggcaattcaatggcgttagt

SEQ ID NO: 468607 - DNA, 25 bp, Artificial
  probe
  misc_feature (1)..(25): SEQ ID NO: 7461; WAN024EUM; Start 155; Stop 179
aattcaatggcgttagtgatgtagt

SEQ ID NO: 468608 - DNA, 25 bp, Artificial
  probe
  misc_feature (1)..(25): SEQ ID NO: 7461; WAN024EUM; Start 148; Stop 172
ataaggcaattcaatggcgttagtg

SEQ ID NO: 468609 - DNA, 25 bp, Artificial
  probe
  misc_feature (1)..(25): SEQ ID NO: 7461; WAN024EUM; Start 139; Stop 163
agcgttagaataaggcaattcaatg

SEQ ID NO: 468610 - DNA, 25 bp, Artificial
  probe
  misc_feature (1)..(25): SEQ ID NO: 7461; WAN024EUM; Start 153; Stop 177
gcaattcaatggcgttagtgatgta

SEQ ID NO: 468611 - DNA, 25 bp, Artificial
  probe
  misc_feature (1)..(25): SEQ ID NO: 7461; WAN024EUM; Start 137; Stop 161
ttagcgttagaataaggcaattcaa

SEQ ID NO: 468612 - DNA, 25 bp, Artificial
  probe
  misc_feature (1)..(25): SEQ ID NO: 7461; WAN024EUM; Start 132; Stop 156
caagtttagcgttagaataaggcaa

SEQ ID NO: 468613 - DNA, 25 bp, Artificial
  probe
  misc_feature (1)..(25): SEQ ID NO: 7461; WAN024EUM; Start 130; Stop 154
ctcaagtttagcgttagaataaggc

SEQ ID NO: 468614 - DNA, 25 bp, Artificial
  probe
  misc_feature (1)..(25): SEQ ID NO: 7461; WAN024EUM; Start 128; Stop 152
gcctcaagtttagcgttagaataag

SEQ ID NO: 468615 - DNA, 25 bp, Artificial
  probe
  misc_feature (1)..(25): SEQ ID NO: 7461; WAN024EUM; Start 146; Stop 170
gaataaggcaattcaatggcgttag

SEQ ID NO: 468616 - DNA, 25 bp, Artificial
  probe
  misc_feature (1)..(25): SEQ ID NO: 7461; WAN024EUM; Start 142; Stop 166
gttagaataaggcaattcaatggcg

SEQ ID NO: 468617 - DNA, 25 bp, Artificial
  probe
  misc_feature (1)..(25): SEQ ID NO: 7461; WAN024EUM; Start 141; Stop 165
cgttagaataaggcaattcaatggc

SEQ ID NO: 468618 - DNA, 25 bp, Artificial
  probe
  misc_feature (1)..(25): SEQ ID NO: 7461; WAN024EUM; Start 140; Stop 164
gcgttagaataaggcaattcaatgg

SEQ ID NO: 468619 - DNA, 25 bp, Artificial
  probe
  misc_feature (1)..(25): SEQ ID NO: 7461; WAN024EUM; Start 138; Stop 162
tagcgttagaataaggcaattcaat

SEQ ID NO: 468620 - DNA, 25 bp, Artificial
  probe
  misc_feature (1)..(25): SEQ ID NO: 7461; WAN024EUM; Start 131; Stop 155
tcaagtttagcgttagaataaggca

SEQ ID NO: 468621 - DNA, 25 bp, Artificial
  probe
  misc_feature (1)..(25): SEQ ID NO: 7461; WAN024EUM; Start 104; Stop 128
atgtctttgatgagtttgttagtgg

SEQ ID NO: 468622 - DNA, 25 bp, Artificial
  probe
  misc_feature (1)..(25): SEQ ID NO: 7461; WAN024EUM; Start 99; Stop 123
gcttgatgtctttgatgagtttgtt

SEQ ID NO: 468623 - DNA, 25 bp, Artificial
  probe
  misc_feature (1)..(25): SEQ ID NO: 7461; WAN024EUM; Start 188; Stop 212
caaataaatgtgctcaaagtggttt

SEQ ID NO: 468624 - DNA, 25 bp, Artificial
  probe
  misc_feature (1)..(25): SEQ ID NO: 7461; WAN024EUM; Start 145; Stop 169
agaataaggcaattcaatggcgtta

SEQ ID NO: 468625 - DNA, 25 bp, Artificial
  probe
  misc_feature (1)..(25): SEQ ID NO: 7461; WAN024EUM; Start 144; Stop 168
tagaataaggcaattcaatggcgtt

SEQ ID NO: 468626 - DNA, 25 bp, Artificial
  probe
  misc_feature (1)..(25): SEQ ID NO: 7461; WAN024EUM; Start 143; Stop 167
ttagaataaggcaattcaatggcgt

SEQ ID NO: 468627 - DNA, 25 bp, Artificial
  probe
  misc_feature (1)..(25): SEQ ID NO: 7461; WAN024EUM; Start 133; Stop 157
aagtttagcgttagaataaggcaat

SEQ ID NO: 468628 - DNA, 25 bp, Artificial
  probe
  misc_feature (1)..(25): SEQ ID NO: 7461; WAN024EUM; Start 134; Stop 158
agtttagcgttagaataaggcaatt

SEQ ID NO: 468629 - DNA, 25 bp, Artificial
  probe
  misc_feature (1)..(25): SEQ ID NO: 7461; WAN024EUM; Start 102; Stop 126
tgatgtctttgatgagtttgttagt

SEQ ID NO: 468630 - DNA, 25 bp, Artificial
  probe
  misc_feature (1)..(25): SEQ ID NO: 7461; WAN024EUM; Start 103; Stop 127
gatgtctttgatgagtttgttagtg

SEQ ID NO: 468631 - DNA, 25 bp, Artificial
  probe
  misc_feature (1)..(25): SEQ ID NO: 7461; WAN024EUM; Start 105; Stop 129
tgtctttgatgagtttgttagtggc

SEQ ID NO: 468632 - DNA, 25 bp, Artificial
  probe
  misc_feature (1)..(25): SEQ ID NO: 7461; WAN024EUM; Start 157; Stop 181
ttcaatggcgttagtgatgtagttt

SEQ ID NO: 468633 - DNA, 25 bp, Artificial
  probe
  misc_feature (1)..(25): SEQ ID NO: 7461; WAN024EUM; Start 149; Stop 173
taaggcaattcaatggcgttagtga

SEQ ID NO: 468634 - DNA, 25 bp, Artificial
  probe
  misc_feature (1)..(25): SEQ ID NO: 7461; WAN024EUM; Start 101; Stop 125
ttgatgtctttgatgagtttgttag

SEQ ID NO: 468635 - DNA, 25 bp, Artificial
  probe
  misc_feature (1)..(25): SEQ ID NO: 7461; WAN024EUM; Start 100; Stop 124
cttgatgtctttgatgagtttgtta

SEQ ID NO: 468636 - DNA, 25 bp, Artificial
  probe
  misc_feature (1)..(25): SEQ ID NO: 7461; WAN024EUM; Start 129; Stop 153
cctcaagtttagcgttagaataagg

SEQ ID NO: 468637 - DNA, 25 bp, Artificial
  probe
  misc_feature (1)..(25): SEQ ID NO: 7462; WAN024G82; Start 2; Stop 26
tgagaaggtttgttgtagtaaggaa

SEQ ID NO: 468638 - DNA, 25 bp, Artificial
  probe
  misc_feature (1)..(25): SEQ ID NO: 7462; WAN024G82; Start 1; Stop 25
ttgagaaggtttgttgtagtaagga

SEQ ID NO: 468639 - DNA, 25 bp, Artificial
  probe
  misc_feature (1)..(25): SEQ ID NO: 7462; WAN024G82; Start 3; Stop 27
gagaaggtttgttgtagtaaggaac

SEQ ID NO: 468640 - DNA, 25 bp, Artificial
  probe
  misc_feature (1)..(25): SEQ ID NO: 7462; WAN024G82; Start 55; Stop 79
aaattccgctacttctttgacaaac

SEQ ID NO: 468641 - DNA, 25 bp, Artificial
  probe
  misc_feature (1)..(25): SEQ ID NO: 7462; WAN024G82; Start 96; Stop 120
tatcattagtacctacacccgcaat

SEQ ID NO: 468642 - DNA, 25 bp, Artificial
  probe
  misc_feature (1)..(25): SEQ ID NO: 7462; WAN024G82; Start 56; Stop 80
aattccgctacttctttgacaaact

SEQ ID NO: 468643 - DNA, 25 bp, Artificial
  probe
  misc_feature (1)..(25): SEQ ID NO: 7462; WAN024G82; Start 57; Stop 81
attccgctacttctttgacaaactc

SEQ ID NO: 468644 - DNA, 25 bp, Artificial
  probe
  misc_feature (1)..(25): SEQ ID NO: 7462; WAN024G82; Start 17; Stop 41
tagtaaggaacaatagcaagcccag

SEQ ID NO: 468645 - DNA, 25 bp, Artificial
  probe
  misc_feature (1)..(25): SEQ ID NO: 7462; WAN024G82; Start 95; Stop 119
gtatcattagtacctacacccgcaa

SEQ ID NO: 468646 - DNA, 25 bp, Artificial
  probe
  misc_feature (1)..(25): SEQ ID NO: 7462; WAN024G82; Start 16; Stop 40
gtagtaaggaacaatagcaagccca

SEQ ID NO: 468647 - DNA, 25 bp, Artificial
  probe
  misc_feature (1)..(25): SEQ ID NO: 7462; WAN024G82; Start 100; Stop 124
attagtacctacacccgcaatcaaa

SEQ ID NO: 468648 - DNA, 25 bp, Artificial
  probe
  misc_feature (1)..(25): SEQ ID NO: 7462; WAN024G82; Start 97; Stop 121
atcattagtacctacacccgcaatc

SEQ ID NO: 468649 - DNA, 25 bp, Artificial
  probe
  misc_feature (1)..(25): SEQ ID NO: 7462; WAN024G82; Start 13; Stop 37
gttgtagtaaggaacaatagcaagc

SEQ ID NO: 468650 - DNA, 25 bp, Artificial
  probe
  misc_feature (1)..(25): SEQ ID NO: 7462; WAN024G82; Start 14; Stop 38
ttgtagtaaggaacaatagcaagcc

SEQ ID NO: 468651 - DNA, 25 bp, Artificial
  probe
  misc_feature (1)..(25): SEQ ID NO: 7462; WAN024G82; Start 12; Stop 36
tgttgtagtaaggaacaatagcaag

SEQ ID NO: 468652 - DNA, 25 bp, Artificial
  probe
  misc_feature (1)..(25): SEQ ID NO: 7462; WAN024G82; Start 101; Stop 125
ttagtacctacacccgcaatcaaag

SEQ ID NO: 468653 - DNA, 25 bp, Artificial
  probe
  misc_feature (1)..(25): SEQ ID NO: 7462; WAN024G82; Start 99; Stop 123
cattagtacctacacccgcaatcaa

SEQ ID NO: 468654 - DNA, 25 bp, Artificial
  probe
  misc_feature (1)..(25): SEQ ID NO: 7462; WAN024G82; Start 15; Stop 39
tgtagtaaggaacaatagcaagccc

SEQ ID NO: 468655 - DNA, 25 bp, Artificial
  probe
  misc_feature (1)..(25): SEQ ID NO: 7462; WAN024G82; Start 48; Stop 72
aaccaccaaattccgctacttcttt

SEQ ID NO: 468656 - DNA, 25 bp, Artificial
  probe
  misc_feature (1)..(25): SEQ ID NO: 7462; WAN024G82; Start 47; Stop 71
aaaccaccaaattccgctacttctt

SEQ ID NO: 468657 - DNA, 25 bp, Artificial
  probe
  misc_feature (1)..(25): SEQ ID NO: 7462; WAN024G82; Start 58; Stop 82
ttccgctacttctttgacaaactca

SEQ ID NO: 468658 - DNA, 25 bp, Artificial
  probe
  misc_feature (1)..(25): SEQ ID NO: 7462; WAN024G82; Start 54; Stop 78
caaattccgctacttctttgacaaa

SEQ ID NO: 468659 - DNA, 25 bp, Artificial
  probe
  misc_feature (1)..(25): SEQ ID NO: 7462; WAN024G82; Start 215; Stop 239
gcgagaagaattccatccgtatgat

SEQ ID NO: 468660 - DNA, 25 bp, Artificial
  probe
  misc_feature (1)..(25): SEQ ID NO: 7462; WAN024G82; Start 61; Stop 85
cgctacttctttgacaaactcaata

SEQ ID NO: 468661 - DNA, 25 bp, Artificial
  probe
  misc_feature (1)..(25): SEQ ID NO: 7462; WAN024G82; Start 98; Stop 122
tcattagtacctacacccgcaatca

SEQ ID NO: 468662 - DNA, 25 bp, Artificial
  probe
  misc_feature (1)..(25): SEQ ID NO: 7462; WAN024G82; Start 46; Stop 70
gaaaccaccaaattccgctacttct

SEQ ID NO: 468663 - DNA, 25 bp, Artificial
  probe
  misc_feature (1)..(25): SEQ ID NO: 7462; WAN024G82; Start 53; Stop 77
ccaaattccgctacttctttgacaa

SEQ ID NO: 468664 - DNA, 25 bp, Artificial
  probe
  misc_feature (1)..(25): SEQ ID NO: 7462; WAN024G82; Start 4; Stop 28
agaaggtttgttgtagtaaggaaca

SEQ ID NO: 468665 - DNA, 25 bp, Artificial
  probe
  misc_feature (1)..(25): SEQ ID NO: 7462; WAN024G82; Start 62; Stop 86
gctacttctttgacaaactcaatag

SEQ ID NO: 468666 - DNA, 25 bp, Artificial
  probe
  misc_feature (1)..(25): SEQ ID NO: 7462; WAN024G82; Start 60; Stop 84
ccgctacttctttgacaaactcaat

SEQ ID NO: 468667 - DNA, 25 bp, Artificial
  probe
  misc_feature (1)..(25): SEQ ID NO: 7462; WAN024G82; Start 159; Stop 183
caaacaactccaactcctcatcgtg

SEQ ID NO: 468668 - DNA, 25 bp, Artificial
  probe
  misc_feature (1)..(25): SEQ ID NO: 7462; WAN024G82; Start 94; Stop 118
cgtatcattagtacctacacccgca

SEQ ID NO: 468669 - DNA, 25 bp, Artificial
  probe
  misc_feature (1)..(25): SEQ ID NO: 7462; WAN024G82; Start 213; Stop 237
ctgcgagaagaattccatccgtatg

SEQ ID NO: 468670 - DNA, 25 bp, Artificial
  probe
  misc_feature (1)..(25): SEQ ID NO: 7464; WAN024C27; Start 15; Stop 39
tctaaaacgaaattccattttgtat

SEQ ID NO: 468671 - DNA, 25 bp, Artificial
  probe
  misc_feature (1)..(25): SEQ ID NO: 7464; WAN024C27; Start 14; Stop 38
atctaaaacgaaattccattttgta

SEQ ID NO: 468672 - DNA, 25 bp, Artificial
  probe
  misc_feature (1)..(25): SEQ ID NO: 7464; WAN024C27; Start 13; Stop 37
tatctaaaacgaaattccattttgt

SEQ ID NO: 468673 - DNA, 25 bp, Artificial
  probe
  misc_feature (1)..(25): SEQ ID NO: 7464; WAN024C27; Start 12; Stop 36
ttatctaaaacgaaattccattttg

SEQ ID NO: 468674 - DNA, 25 bp, Artificial
  probe
  misc_feature (1)..(25): SEQ ID NO: 7464; WAN024C27; Start 19; Stop 43
aaacgaaattccattttgtataatg

SEQ ID NO: 468675 - DNA, 25 bp, Artificial
  probe
  misc_feature (1)..(25): SEQ ID NO: 7464; WAN024C27; Start 2; Stop 26
tgagagaattttatctaaaacgaaa

SEQ ID NO: 468676 - DNA, 25 bp, Artificial
  probe
  misc_feature (1)..(25): SEQ ID NO: 7464; WAN024C27; Start 1; Stop 25
ttgagagaattttatctaaaacgaa

SEQ ID NO: 468677 - DNA, 25 bp, Artificial
  probe
  misc_feature (1)..(25): SEQ ID NO: 7465; WAN024F6E; Start 12; Stop 36
gatagagctgacgtggtttgaagag

SEQ ID NO: 468678 - DNA, 25 bp, Artificial
  probe
  misc_feature (1)..(25): SEQ ID NO: 7465; WAN024F6E; Start 1; Stop 25
ttgagattgcagatagagctgacgt

SEQ ID NO: 468679 - DNA, 25 bp, Artificial
  probe
  misc_feature (1)..(25): SEQ ID NO: 7465; WAN024F6E; Start 14; Stop 38
tagagctgacgtggtttgaagagat

SEQ ID NO: 468680 - DNA, 25 bp, Artificial
  probe
  misc_feature (1)..(25): SEQ ID NO: 7465; WAN024F6E; Start 13; Stop 37
atagagctgacgtggtttgaagaga

SEQ ID NO: 468681 - DNA, 25 bp, Artificial
  probe
  misc_feature (1)..(25): SEQ ID NO: 7465; WAN024F6E; Start 11; Stop 35
agatagagctgacgtggtttgaaga

SEQ ID NO: 468682 - DNA, 25 bp, Artificial
  probe
  misc_feature (1)..(25): SEQ ID NO: 7465; WAN024F6E; Start 16; Stop 40
gagctgacgtggtttgaagagattt

SEQ ID NO: 468683 - DNA, 25 bp, Artificial
  probe
  misc_feature (1)..(25): SEQ ID NO: 7465; WAN024F6E; Start 10; Stop 34
cagatagagctgacgtggtttgaag

SEQ ID NO: 468684 - DNA, 25 bp, Artificial
  probe
  misc_feature (1)..(25): SEQ ID NO: 7465; WAN024F6E; Start 2; Stop 26
tgagattgcagatagagctgacgtg

SEQ ID NO: 468685 - DNA, 25 bp, Artificial
  probe
  misc_feature (1)..(25): SEQ ID NO: 7465; WAN024F6E; Start 15; Stop 39
agagctgacgtggtttgaagagatt

SEQ ID NO: 468686 - DNA, 25 bp, Artificial
  probe
  misc_feature (1)..(25): SEQ ID NO: 7465; WAN024F6E; Start 5; Stop 29
gattgcagatagagctgacgtggtt

SEQ ID NO: 468687 - DNA, 25 bp, Artificial
  probe
  misc_feature (1)..(25): SEQ ID NO: 7465; WAN024F6E; Start 3; Stop 27
gagattgcagatagagctgacgtgg

SEQ ID NO: 468688 - DNA, 25 bp, Artificial
  probe
  misc_feature (1)..(25): SEQ ID NO: 7465; WAN024F6E; Start 24; Stop 48
gtggtttgaagagattttcgaagaa

SEQ ID NO: 468689 - DNA, 25 bp, Artificial
  probe
  misc_feature (1)..(25): SEQ ID NO: 7465; WAN024F6E; Start 25; Stop 49
tggtttgaagagattttcgaagaat

SEQ ID NO: 468690 - DNA, 25 bp, Artificial
  probe
  misc_feature (1)..(25): SEQ ID NO: 7465; WAN024F6E; Start 6; Stop 30
attgcagatagagctgacgtggttt

SEQ ID NO: 468691 - DNA, 25 bp, Artificial
  probe
  misc_feature (1)..(25): SEQ ID NO: 7465; WAN024F6E; Start 53; Stop 77
aatttgaaatcatgaaaatccgtca

SEQ ID NO: 468692 - DNA, 25 bp, Artificial
  probe
  misc_feature (1)..(25): SEQ ID NO: 7465; WAN024F6E; Start 52; Stop 76
aaatttgaaatcatgaaaatccgtc

SEQ ID NO: 468693 - DNA, 25 bp, Artificial
  probe
  misc_feature (1)..(25): SEQ ID NO: 7465; WAN024F6E; Start 9; Stop 33
gcagatagagctgacgtggtttgaa

SEQ ID NO: 468694 - DNA, 25 bp, Artificial
  probe
  misc_feature (1)..(25): SEQ ID NO: 7465; WAN024F6E; Start 26; Stop 50
ggtttgaagagattttcgaagaata

SEQ ID NO: 468695 - DNA, 25 bp, Artificial
  probe
  misc_feature (1)..(25): SEQ ID NO: 7465; WAN024F6E; Start 57; Stop 81
tgaaatcatgaaaatccgtcaaacg

SEQ ID NO: 468696 - DNA, 25 bp, Artificial
  probe
  misc_feature (1)..(25): SEQ ID NO: 7465; WAN024F6E; Start 56; Stop 80
ttgaaatcatgaaaatccgtcaaac

SEQ ID NO: 468697 - DNA, 25 bp, Artificial
  probe
  misc_feature (1)..(25): SEQ ID NO: 7465; WAN024F6E; Start 54; Stop 78
atttgaaatcatgaaaatccgtcaa

SEQ ID NO: 468698 - DNA, 25 bp, Artificial
  probe
  misc_feature (1)..(25): SEQ ID NO: 7465; WAN024F6E; Start 51; Stop 75
taaatttgaaatcatgaaaatccgt

SEQ ID NO: 468699 - DNA, 25 bp, Artificial
  probe
  misc_feature (1)..(25): SEQ ID NO: 7465; WAN024F6E; Start 74; Stop 98
gtcaaacgggtggttgttttgtctc

SEQ ID NO: 468700 - DNA, 25 bp, Artificial
  probe
  misc_feature (1)..(25): SEQ ID NO: 7465; WAN024F6E; Start 27; Stop 51
gtttgaagagattttcgaagaatat

SEQ ID NO: 468701 - DNA, 25 bp, Artificial
  probe
  misc_feature (1)..(25): SEQ ID NO: 7465; WAN024F6E; Start 50; Stop 74
ataaatttgaaatcatgaaaatccg

SEQ ID NO: 468702 - DNA, 25 bp, Artificial
  probe
  misc_feature (1)..(25): SEQ ID NO: 7465; WAN024F6E; Start 55; Stop 79
tttgaaatcatgaaaatccgtcaaa

SEQ ID NO: 468703 - DNA, 25 bp, Artificial
  probe
  misc_feature (1)..(25): SEQ ID NO: 7466; WAN024BP2; Start 1009; Stop 1033
ctaggagtctcaggtagtcagtatt

SEQ ID NO: 468704 - DNA, 25 bp, Artificial
  probe
  misc_feature (1)..(25): SEQ ID NO: 7466; WAN024BP2; Start 195; Stop 219
cgaatgtgcctatactagagatgat

SEQ ID NO: 468705 - DNA, 25 bp, Artificial
  probe
  misc_feature (1)..(25): SEQ ID NO: 7466; WAN024BP2; Start 733; Stop 757
gcagagaagattatacagataccac

SEQ ID NO: 468706 - DNA, 25 bp, Artificial
  probe
  misc_feature (1)..(25): SEQ ID NO: 7466; WAN024BP2; Start 367; Stop 391
tctattcttgattgtacttggctct

SEQ ID NO: 468707 - DNA, 25 bp, Artificial
  probe
  misc_feature (1)..(25): SEQ ID NO: 7466; WAN024BP2; Start 366; Stop 390
gtctattcttgattgtacttggctc

SEQ ID NO: 468708 - DNA, 25 bp, Artificial
  probe
  misc_feature (1)..(25): SEQ ID NO: 7466; WAN024BP2; Start 365; Stop 389
ggtctattcttgattgtacttggct

SEQ ID NO: 468709 - DNA, 25 bp, Artificial
  probe
  misc_feature (1)..(25): SEQ ID NO: 7466; WAN024BP2; Start 371; Stop 395
ttcttgattgtacttggctctatcg

SEQ ID NO: 468710 - DNA, 25 bp, Artificial
  probe
  misc_feature (1)..(25): SEQ ID NO: 7466; WAN024BP2; Start 1364; Stop 1388
tgaacttgttgacacgagatgtatt

SEQ ID NO: 468711 - DNA, 25 bp, Artificial
  probe
  misc_feature (1)..(25): SEQ ID NO: 7466; WAN024BP2; Start 1363; Stop 1387
ttgaacttgttgacacgagatgtat

SEQ ID NO: 468712 - DNA, 25 bp, Artificial
  probe
  misc_feature (1)..(25): SEQ ID NO: 7466; WAN024BP2; Start 370; Stop 394
attcttgattgtacttggctctatc

SEQ ID NO: 468713 - DNA, 25 bp, Artificial
  probe
  misc_feature (1)..(25): SEQ ID NO: 7466; WAN024BP2; Start 194; Stop 218
gcgaatgtgcctatactagagatga

SEQ ID NO: 468714 - DNA, 25 bp, Artificial
  probe
  misc_feature (1)..(25): SEQ ID NO: 7466; WAN024BP2; Start 60; Stop 84
attgccactattgattactccatat

SEQ ID NO: 468715 - DNA, 25 bp, Artificial
  probe
  misc_feature (1)..(25): SEQ ID NO: 7466; WAN024BP2; Start 58; Stop 82
atattgccactattgattactccat

SEQ ID NO: 468716 - DNA, 25 bp, Artificial
  probe
  misc_feature (1)..(25): SEQ ID NO: 7466; WAN024BP2; Start 373; Stop 397
cttgattgtacttggctctatcgtg

SEQ ID NO: 468717 - DNA, 25 bp, Artificial
  probe
  misc_feature (1)..(25): SEQ ID NO: 7466; WAN024BP2; Start 372; Stop 396
tcttgattgtacttggctctatcgt

SEQ ID NO: 468718 - DNA, 25 bp, Artificial
  probe
  misc_feature (1)..(25): SEQ ID NO: 7466; WAN024BP2; Start 1008; Stop 1032
gctaggagtctcaggtagtcagtat

SEQ ID NO: 468719 - DNA, 25 bp, Artificial
  probe
  misc_feature (1)..(25): SEQ ID NO: 7466; WAN024BP2; Start 368; Stop 392
ctattcttgattgtacttggctcta

SEQ ID NO: 468720 - DNA, 25 bp, Artificial
  probe
  misc_feature (1)..(25): SEQ ID NO: 7466; WAN024BP2; Start 59; Stop 83
tattgccactattgattactccata

SEQ ID NO: 468721 - DNA, 25 bp, Artificial
  probe
  misc_feature (1)..(25): SEQ ID NO: 7466; WAN024BP2; Start 734; Stop 758
cagagaagattatacagataccact

SEQ ID NO: 468722 - DNA, 25 bp, Artificial
  probe
  misc_feature (1)..(25): SEQ ID NO: 7466; WAN024BP2; Start 454; Stop 478
acgatagcgaccttcttatttgtaa

SEQ ID NO: 468723 - DNA, 25 bp, Artificial
  probe
  misc_feature (1)..(25): SEQ ID NO: 7466; WAN024BP2; Start 452; Stop 476
ttacgatagcgaccttcttatttgt

SEQ ID NO: 468724 - DNA, 25 bp, Artificial
  probe
  misc_feature (1)..(25): SEQ ID NO: 7466; WAN024BP2; Start 170; Stop 194
taggtattggtcactatggaaatcg

SEQ ID NO: 468725 - DNA, 25 bp, Artificial
  probe
  misc_feature (1)..(25): SEQ ID NO: 7466; WAN024BP2; Start 455; Stop 479
cgatagcgaccttcttatttgtaaa

SEQ ID NO: 468726 - DNA, 25 bp, Artificial
  probe
  misc_feature (1)..(25): SEQ ID NO: 7466; WAN024BP2; Start 453; Stop 477
tacgatagcgaccttcttatttgta

SEQ ID NO: 468727 - DNA, 25 bp, Artificial
  probe
  misc_feature (1)..(25): SEQ ID NO: 7466; WAN024BP2; Start 451; Stop 475
tttacgatagcgaccttcttatttg

SEQ ID NO: 468728 - DNA, 25 bp, Artificial
  probe
  misc_feature (1)..(25): SEQ ID NO: 7466; WAN024BP2; Start 957; Stop 981
atctatggatgctcttaaatggctt

SEQ ID NO: 468729 - DNA, 25 bp, Artificial
  probe
  misc_feature (1)..(25): SEQ ID NO: 7466; WAN024BP2; Start 1010; Stop 1034
taggagtctcaggtagtcagtattt

SEQ ID NO: 468730 - DNA, 25 bp, Artificial
  probe
  misc_feature (1)..(25): SEQ ID NO: 7466; WAN024BP2; Start 1354; Stop 1378
tactttggtttgaacttgttgacac

SEQ ID NO: 468731 - DNA, 25 bp, Artificial
  probe
  misc_feature (1)..(25): SEQ ID NO: 7466; WAN024BP2; Start 1353; Stop 1377
ttactttggtttgaacttgttgaca

SEQ ID NO: 468732 - DNA, 25 bp, Artificial
  probe
  misc_feature (1)..(25): SEQ ID NO: 7466; WAN024BP2; Start 103; Stop 127
gcacaccagttaggaatttatgatt

SEQ ID NO: 468733 - DNA, 25 bp, Artificial
  probe
  misc_feature (1)..(25): SEQ ID NO: 7466; WAN024BP2; Start 369; Stop 393
tattcttgattgtacttggctctat

SEQ ID NO: 468734 - DNA, 25 bp, Artificial
  probe
  misc_feature (1)..(25): SEQ ID NO: 7466; WAN024BP2; Start 874; Stop 898
ttcttagctgttccattgtcgattg

SEQ ID NO: 468735 - DNA, 25 bp, Artificial
  probe
  misc_feature (1)..(25): SEQ ID NO: 7466; WAN024BP2; Start 873; Stop 897
gttcttagctgttccattgtcgatt

SEQ ID NO: 468736 - DNA, 25 bp, Artificial
  probe
  misc_feature (1)..(25): SEQ ID NO: 7467; WAN024G57; Start 39; Stop 63
cgccgacttcaacattaatagatta

SEQ ID NO: 468737 - DNA, 25 bp, Artificial
  probe
  misc_feature (1)..(25): SEQ ID NO: 7467; WAN024G57; Start 38; Stop 62
ccgccgacttcaacattaatagatt

SEQ ID NO: 468738 - DNA, 25 bp, Artificial
  probe
  misc_feature (1)..(25): SEQ ID NO: 7467; WAN024G57; Start 37; Stop 61
tccgccgacttcaacattaatagat

SEQ ID NO: 468739 - DNA, 25 bp, Artificial
  probe
  misc_feature (1)..(25): SEQ ID NO: 7467; WAN024G57; Start 32; Stop 56
ctaactccgccgacttcaacattaa

SEQ ID NO: 468740 - DNA, 25 bp, Artificial
  probe
  misc_feature (1)..(25): SEQ ID NO: 7467; WAN024G57; Start 34; Stop 58
aactccgccgacttcaacattaata

SEQ ID NO: 468741 - DNA, 25 bp, Artificial
  probe
  misc_feature (1)..(25): SEQ ID NO: 7467; WAN024G57; Start 33; Stop 57
taactccgccgacttcaacattaat

SEQ ID NO: 468742 - DNA, 25 bp, Artificial
  probe
  misc_feature (1)..(25): SEQ ID NO: 7467; WAN024G57; Start 40; Stop 64
gccgacttcaacattaatagattat

SEQ ID NO: 468743 - DNA, 25 bp, Artificial
  probe
  misc_feature (1)..(25): SEQ ID NO: 7467; WAN024G57; Start 36; Stop 60
ctccgccgacttcaacattaataga

SEQ ID NO: 468744 - DNA, 25 bp, Artificial
  probe
  misc_feature (1)..(25): SEQ ID NO: 7467; WAN024G57; Start 35; Stop 59
actccgccgacttcaacattaatag

SEQ ID NO: 468745 - DNA, 25 bp, Artificial
  probe
  misc_feature (1)..(25): SEQ ID NO: 7467; WAN024G57; Start 77; Stop 101
cgattgccacccttctttctttaga

SEQ ID NO: 468746 - DNA, 25 bp, Artificial
  probe
  misc_feature (1)..(25): SEQ ID NO: 7467; WAN024G57; Start 78; Stop 102
gattgccacccttctttctttagaa

SEQ ID NO: 468747 - DNA, 25 bp, Artificial
  probe
  misc_feature (1)..(25): SEQ ID NO: 7467; WAN024G57; Start 58; Stop 82
agattattaaccccatcaccgattg

SEQ ID NO: 468748 - DNA, 25 bp, Artificial
  probe
  misc_feature (1)..(25): SEQ ID NO: 7467; WAN024G57; Start 57; Stop 81
tagattattaaccccatcaccgatt

SEQ ID NO: 468749 - DNA, 25 bp, Artificial
  probe
  misc_feature (1)..(25): SEQ ID NO: 7467; WAN024G57; Start 56; Stop 80
atagattattaaccccatcaccgat

SEQ ID NO: 468750 - DNA, 25 bp, Artificial
  probe
  misc_feature (1)..(25): SEQ ID NO: 7467; WAN024G57; Start 31; Stop 55
cctaactccgccgacttcaacatta

SEQ ID NO: 468751 - DNA, 25 bp, Artificial
  probe
  misc_feature (1)..(25): SEQ ID NO: 7467; WAN024G57; Start 55; Stop 79
aatagattattaaccccatcaccga

SEQ ID NO: 468752 - DNA, 25 bp, Artificial
  probe
  misc_feature (1)..(25): SEQ ID NO: 7467; WAN024G57; Start 79; Stop 103
attgccacccttctttctttagaaa

SEQ ID NO: 468753 - DNA, 25 bp, Artificial
  probe
  misc_feature (1)..(25): SEQ ID NO: 7467; WAN024G57; Start 76; Stop 100
ccgattgccacccttctttctttag

SEQ ID NO: 468754 - DNA, 25 bp, Artificial
  probe
  misc_feature (1)..(25): SEQ ID NO: 7467; WAN024G57; Start 141; Stop 165
tttgacctggggacttataatttgt

SEQ ID NO: 468755 - DNA, 25 bp, Artificial
  probe
  misc_feature (1)..(25): SEQ ID NO: 7467; WAN024G57; Start 59; Stop 83
gattattaaccccatcaccgattgc

SEQ ID NO: 468756 - DNA, 25 bp, Artificial
  probe
  misc_feature (1)..(25): SEQ ID NO: 7467; WAN024G57; Start 140; Stop 164
ttttgacctggggacttataatttg

SEQ ID NO: 468757 - DNA, 25 bp, Artificial
  probe
  misc_feature (1)..(25): SEQ ID NO: 7467; WAN024G57; Start 142; Stop 166
ttgacctggggacttataatttgtc

SEQ ID NO: 468758 - DNA, 25 bp, Artificial
  probe
  misc_feature (1)..(25): SEQ ID NO: 7467; WAN024G57; Start 159; Stop 183
aatttgtccaactaattttcctgtt

SEQ ID NO: 468759 - DNA, 25 bp, Artificial
  probe
  misc_feature (1)..(25): SEQ ID NO: 7467; WAN024G57; Start 75; Stop 99
accgattgccacccttctttcttta

SEQ ID NO: 468760 - DNA, 25 bp, Artificial
  probe
  misc_feature (1)..(25): SEQ ID NO: 7467; WAN024G57; Start 162; Stop 186
ttgtccaactaattttcctgttaaa

SEQ ID NO: 468761 - DNA, 25 bp, Artificial
  probe
  misc_feature (1)..(25): SEQ ID NO: 7467; WAN024G57; Start 161; Stop 185
tttgtccaactaattttcctgttaa

SEQ ID NO: 468762 - DNA, 25 bp, Artificial
  probe
  misc_feature (1)..(25): SEQ ID NO: 7467; WAN024G57; Start 54; Stop 78
taatagattattaaccccatcaccg

SEQ ID NO: 468763 - DNA, 25 bp, Artificial
  probe
  misc_feature (1)..(25): SEQ ID NO: 7467; WAN024G57; Start 41; Stop 65
ccgacttcaacattaatagattatt

SEQ ID NO: 468764 - DNA, 25 bp, Artificial
  probe
  misc_feature (1)..(25): SEQ ID NO: 7467; WAN024G57; Start 160; Stop 184
atttgtccaactaattttcctgtta

SEQ ID NO: 468765 - DNA, 25 bp, Artificial
  probe
  misc_feature (1)..(25): SEQ ID NO: 7467; WAN024G57; Start 60; Stop 84
attattaaccccatcaccgattgcc

SEQ ID NO: 468766 - DNA, 25 bp, Artificial
  probe
  misc_feature (1)..(25): SEQ ID NO: 7467; WAN024G57; Start 188; Stop 212
gaccttctttgacttcaagctggtt

SEQ ID NO: 468767 - DNA, 25 bp, Artificial
  probe
  misc_feature (1)..(25): SEQ ID NO: 7467; WAN024G57; Start 158; Stop 182
taatttgtccaactaattttcctgt

SEQ ID NO: 468768 - DNA, 25 bp, Artificial
  probe
  misc_feature (1)..(25): SEQ ID NO: 7467; WAN024G57; Start 163; Stop 187
tgtccaactaattttcctgttaaaa

SEQ ID NO: 468769 - DNA, 25 bp, Artificial
  probe
  misc_feature (1)..(25): SEQ ID NO: 7468; WAN024F76; Start 54; Stop 78
aaaagaaaacttcagaccaatccac

SEQ ID NO: 468770 - DNA, 25 bp, Artificial
  probe
  misc_feature (1)..(25): SEQ ID NO: 7468; WAN024F76; Start 59; Stop 83
aaaacttcagaccaatccacaaaag

SEQ ID NO: 468771 - DNA, 25 bp, Artificial
  probe
  misc_feature (1)..(25): SEQ ID NO: 7468; WAN024F76; Start 58; Stop 82
gaaaacttcagaccaatccacaaaa

SEQ ID NO: 468772 - DNA, 25 bp, Artificial
  probe
  misc_feature (1)..(25): SEQ ID NO: 7468; WAN024F76; Start 57; Stop 81
agaaaacttcagaccaatccacaaa

SEQ ID NO: 468773 - DNA, 25 bp, Artificial
  probe
  misc_feature (1)..(25): SEQ ID NO: 7468; WAN024F76; Start 56; Stop 80
aagaaaacttcagaccaatccacaa

SEQ ID NO: 468774 - DNA, 25 bp, Artificial
  probe
  misc_feature (1)..(25): SEQ ID NO: 7468; WAN024F76; Start 55; Stop 79
aaagaaaacttcagaccaatccaca

SEQ ID NO: 468775 - DNA, 25 bp, Artificial
  probe
  misc_feature (1)..(25): SEQ ID NO: 7468; WAN024F76; Start 60; Stop 84
aaacttcagaccaatccacaaaagg

SEQ ID NO: 468776 - DNA, 25 bp, Artificial
  probe
  misc_feature (1)..(25): SEQ ID NO: 7469; WAN024F36; Start 166; Stop 190
gtcatatccatagatacgagcgatt

SEQ ID NO: 468777 - DNA, 25 bp, Artificial
  probe
  misc_feature (1)..(25): SEQ ID NO: 7469; WAN024F36; Start 31; Stop 55
agttgtcagagcataggtgatgatt

SEQ ID NO: 468778 - DNA, 25 bp, Artificial
  probe
  misc_feature (1)..(25): SEQ ID NO: 7469; WAN024F36; Start 165; Stop 189
ggtcatatccatagatacgagcgat

SEQ ID NO: 468779 - DNA, 25 bp, Artificial
  probe
  misc_feature (1)..(25): SEQ ID NO: 7469; WAN024F36; Start 161; Stop 185
aagcggtcatatccatagatacgag

SEQ ID NO: 468780 - DNA, 25 bp, Artificial
  probe
  misc_feature (1)..(25): SEQ ID NO: 7469; WAN024F36; Start 30; Stop 54
gagttgtcagagcataggtgatgat

SEQ ID NO: 468781 - DNA, 25 bp, Artificial
  probe
  misc_feature (1)..(25): SEQ ID NO: 7469; WAN024F36; Start 160; Stop 184
caagcggtcatatccatagatacga

SEQ ID NO: 468782 - DNA, 25 bp, Artificial
  probe
  misc_feature (1)..(25): SEQ ID NO: 7469; WAN024F36; Start 171; Stop 195
atccatagatacgagcgatttcttc

SEQ ID NO: 468783 - DNA, 25 bp, Artificial
  probe
  misc_feature (1)..(25): SEQ ID NO: 7469; WAN024F36; Start 174; Stop 198
catagatacgagcgatttcttcaaa

SEQ ID NO: 468784 - DNA, 25 bp, Artificial
  probe
  misc_feature (1)..(25): SEQ ID NO: 7469; WAN024F36; Start 173; Stop 197
ccatagatacgagcgatttcttcaa

SEQ ID NO: 468785 - DNA, 25 bp, Artificial
  probe
  misc_feature (1)..(25): SEQ ID NO: 7469; WAN024F36; Start 175; Stop 199
atagatacgagcgatttcttcaaag

SEQ ID NO: 468786 - DNA, 25 bp, Artificial
  probe
  misc_feature (1)..(25): SEQ ID NO: 7469; WAN024F36; Start 41; Stop 65
gcataggtgatgatttctgtcaaac

SEQ ID NO: 468787 - DNA, 25 bp, Artificial
  probe
  misc_feature (1)..(25): SEQ ID NO: 7469; WAN024F36; Start 40; Stop 64
agcataggtgatgatttctgtcaaa

SEQ ID NO: 468788 - DNA, 25 bp, Artificial
  probe
  misc_feature (1)..(25): SEQ ID NO: 7469; WAN024F36; Start 176; Stop 200
tagatacgagcgatttcttcaaaga

SEQ ID NO: 468789 - DNA, 25 bp, Artificial
  probe
  misc_feature (1)..(25): SEQ ID NO: 7469; WAN024F36; Start 39; Stop 63
gagcataggtgatgatttctgtcaa

SEQ ID NO: 468790 - DNA, 25 bp, Artificial
  probe
  misc_feature (1)..(25): SEQ ID NO: 7469; WAN024F36; Start 33; Stop 57
ttgtcagagcataggtgatgatttc

SEQ ID NO: 468791 - DNA, 25 bp, Artificial
  probe
  misc_feature (1)..(25): SEQ ID NO: 7469; WAN024F36; Start 179; Stop 203
atacgagcgatttcttcaaagagat

SEQ ID NO: 468792 - DNA, 25 bp, Artificial
  probe
  misc_feature (1)..(25): SEQ ID NO: 7469; WAN024F36; Start 172; Stop 196
tccatagatacgagcgatttcttca

SEQ ID NO: 468793 - DNA, 25 bp, Artificial
  probe
  misc_feature (1)..(25): SEQ ID NO: 7469; WAN024F36; Start 32; Stop 56
gttgtcagagcataggtgatgattt

SEQ ID NO: 468794 - DNA, 25 bp, Artificial
  probe
  misc_feature (1)..(25): SEQ ID NO: 7469; WAN024F36; Start 167; Stop 191
tcatatccatagatacgagcgattt

SEQ ID NO: 468795 - DNA, 25 bp, Artificial
  probe
  misc_feature (1)..(25): SEQ ID NO: 7469; WAN024F36; Start 170; Stop 194
tatccatagatacgagcgatttctt

SEQ ID NO: 468796 - DNA, 25 bp, Artificial
  probe
  misc_feature (1)..(25): SEQ ID NO: 7469; WAN024F36; Start 178; Stop 202
gatacgagcgatttcttcaaagaga

SEQ ID NO: 468797 - DNA, 25 bp, Artificial
  probe
  misc_feature (1)..(25): SEQ ID NO: 7469; WAN024F36; Start 177; Stop 201
agatacgagcgatttcttcaaagag

SEQ ID NO: 468798 - DNA, 25 bp, Artificial
  probe
  misc_feature (1)..(25): SEQ ID NO: 7469; WAN024F36; Start 158; Stop 182
ggcaagcggtcatatccatagatac

SEQ ID NO: 468799 - DNA, 25 bp, Artificial
  probe
  misc_feature (1)..(25): SEQ ID NO: 7469; WAN024F36; Start 168; Stop 192
catatccatagatacgagcgatttc

SEQ ID NO: 468800 - DNA, 25 bp, Artificial
  probe
  misc_feature (1)..(25): SEQ ID NO: 7469; WAN024F36; Start 169; Stop 193
atatccatagatacgagcgatttct

SEQ ID NO: 468801 - DNA, 25 bp, Artificial
  probe
  misc_feature (1)..(25): SEQ ID NO: 7469; WAN024F36; Start 180; Stop 204
tacgagcgatttcttcaaagagatc

SEQ ID NO: 468802 - DNA, 25 bp, Artificial
  probe
  misc_feature (1)..(25): SEQ ID NO: 7469; WAN024F36; Start 38; Stop 62
agagcataggtgatgatttctgtca

SEQ ID NO: 468803 - DNA, 25 bp, Artificial
  probe
  misc_feature (1)..(25): SEQ ID NO: 7469; WAN024F36; Start 34; Stop 58
tgtcagagcataggtgatgatttct

SEQ ID NO: 468804 - DNA, 25 bp, Artificial
  probe
  misc_feature (1)..(25): SEQ ID NO: 7469; WAN024F36; Start 159; Stop 183
gcaagcggtcatatccatagatacg

SEQ ID NO: 468805 - DNA, 25 bp, Artificial
  probe
  misc_feature (1)..(25): SEQ ID NO: 7469; WAN024F36; Start 106; Stop 130
ttgtatcacagtcaattcaccagct

SEQ ID NO: 468806 - DNA, 25 bp, Artificial
  probe
  misc_feature (1)..(25): SEQ ID NO: 7469; WAN024F36; Start 105; Stop 129
tttgtatcacagtcaattcaccagc

SEQ ID NO: 468807 - DNA, 25 bp, Artificial
  probe
  misc_feature (1)..(25): SEQ ID NO: 7469; WAN024F36; Start 42; Stop 66
cataggtgatgatttctgtcaaacc

SEQ ID NO: 468808 - DNA, 25 bp, Artificial
  probe
  misc_feature (1)..(25): SEQ ID NO: 7469; WAN024F36; Start 187; Stop 211
gatttcttcaaagagatcagcttcg

SEQ ID NO: 468809 - DNA, 25 bp, Artificial
  probe
  misc_feature (1)..(25): SEQ ID NO: 7470; WAN024BNW; Start 11; Stop 35
ggataaagaaggaagatgacgaaga

SEQ ID NO: 468810 - DNA, 25 bp, Artificial
  probe
  misc_feature (1)..(25): SEQ ID NO: 7470; WAN024BNW; Start 9; Stop 33
atggataaagaaggaagatgacgaa

SEQ ID NO: 468811 - DNA, 25 bp, Artificial
  probe
  misc_feature (1)..(25): SEQ ID NO: 7470; WAN024BNW; Start 8; Stop 32
gatggataaagaaggaagatgacga

SEQ ID NO: 468812 - DNA, 25 bp, Artificial
  probe
  misc_feature (1)..(25): SEQ ID NO: 7470; WAN024BNW; Start 7; Stop 31
agatggataaagaaggaagatgacg

SEQ ID NO: 468813 - DNA, 25 bp, Artificial
  probe
  misc_feature (1)..(25): SEQ ID NO: 7470; WAN024BNW; Start 1; Stop 25
ttgaggagatggataaagaaggaag

SEQ ID NO: 468814 - DNA, 25 bp, Artificial
  probe
  misc_feature (1)..(25): SEQ ID NO: 7470; WAN024BNW; Start 10; Stop 34
tggataaagaaggaagatgacgaag

SEQ ID NO: 468815 - DNA, 25 bp, Artificial
  probe
  misc_feature (1)..(25): SEQ ID NO: 7470; WAN024BNW; Start 5; Stop 29
ggagatggataaagaaggaagatga

SEQ ID NO: 468816 - DNA, 25 bp, Artificial
  probe
  misc_feature (1)..(25): SEQ ID NO: 7470; WAN024BNW; Start 4; Stop 28
aggagatggataaagaaggaagatg

SEQ ID NO: 468817 - DNA, 25 bp, Artificial
  probe
  misc_feature (1)..(25): SEQ ID NO: 7470; WAN024BNW; Start 2; Stop 26
tgaggagatggataaagaaggaaga

SEQ ID NO: 468818 - DNA, 25 bp, Artificial
  probe
  misc_feature (1)..(25): SEQ ID NO: 7470; WAN024BNW; Start 3; Stop 27
gaggagatggataaagaaggaagat

SEQ ID NO: 468819 - DNA, 25 bp, Artificial
  probe
  misc_feature (1)..(25): SEQ ID NO: 7470; WAN024BNW; Start 12; Stop 36
gataaagaaggaagatgacgaagaa

SEQ ID NO: 468820 - DNA, 25 bp, Artificial
  probe
  misc_feature (1)..(25): SEQ ID NO: 7470; WAN024BNW; Start 6; Stop 30
gagatggataaagaaggaagatgac

SEQ ID NO: 468821 - DNA, 25 bp, Artificial
  probe
  misc_feature (1)..(25): SEQ ID NO: 7470; WAN024BNW; Start 13; Stop 37
ataaagaaggaagatgacgaagaaa

SEQ ID NO: 468822 - DNA, 25 bp, Artificial
  probe
  misc_feature (1)..(25): SEQ ID NO: 7470; WAN024BNW; Start 56; Stop 80
gttatccatcgcagggaaatcaatt

SEQ ID NO: 468823 - DNA, 25 bp, Artificial
  probe
  misc_feature (1)..(25): SEQ ID NO: 7470; WAN024BNW; Start 55; Stop 79
agttatccatcgcagggaaatcaat

SEQ ID NO: 468824 - DNA, 25 bp, Artificial
  probe
  misc_feature (1)..(25): SEQ ID NO: 7470; WAN024BNW; Start 14; Stop 38
taaagaaggaagatgacgaagaaaa

SEQ ID NO: 468825 - DNA, 25 bp, Artificial
  probe
  misc_feature (1)..(25): SEQ ID NO: 7470; WAN024BNW; Start 70; Stop 94
ggaaatcaattggctaaagtggtat

SEQ ID NO: 468826 - DNA, 25 bp, Artificial
  probe
  misc_feature (1)..(25): SEQ ID NO: 7470; WAN024BNW; Start 69; Stop 93
gggaaatcaattggctaaagtggta

SEQ ID NO: 468827 - DNA, 25 bp, Artificial
  probe
  misc_feature (1)..(25): SEQ ID NO: 7470; WAN024BNW; Start 54; Stop 78
cagttatccatcgcagggaaatcaa

SEQ ID NO: 468828 - DNA, 25 bp, Artificial
  probe
  misc_feature (1)..(25): SEQ ID NO: 7470; WAN024BNW; Start 71; Stop 95
gaaatcaattggctaaagtggtatt

SEQ ID NO: 468829 - DNA, 25 bp, Artificial
  probe
  misc_feature (1)..(25): SEQ ID NO: 7470; WAN024BNW; Start 52; Stop 76
gtcagttatccatcgcagggaaatc

SEQ ID NO: 468830 - DNA, 25 bp, Artificial
  probe
  misc_feature (1)..(25): SEQ ID NO: 7470; WAN024BNW; Start 67; Stop 91
cagggaaatcaattggctaaagtgg

SEQ ID NO: 468831 - DNA, 25 bp, Artificial
  probe
  misc_feature (1)..(25): SEQ ID NO: 7470; WAN024BNW; Start 68; Stop 92
agggaaatcaattggctaaagtggt

SEQ ID NO: 468832 - DNA, 25 bp, Artificial
  probe
  misc_feature (1)..(25): SEQ ID NO: 7470; WAN024BNW; Start 53; Stop 77
tcagttatccatcgcagggaaatca

SEQ ID NO: 468833 - DNA, 25 bp, Artificial
  probe
  misc_feature (1)..(25): SEQ ID NO: 7470; WAN024BNW; Start 57; Stop 81
ttatccatcgcagggaaatcaattg

SEQ ID NO: 468834 - DNA, 25 bp, Artificial
  probe
  misc_feature (1)..(25): SEQ ID NO: 7470; WAN024BNW; Start 66; Stop 90
gcagggaaatcaattggctaaagtg

SEQ ID NO: 468835 - DNA, 25 bp, Artificial
  probe
  misc_feature (1)..(25): SEQ ID NO: 7470; WAN024BNW; Start 72; Stop 96
aaatcaattggctaaagtggtattt

SEQ ID NO: 468836 - DNA, 25 bp, Artificial
  probe
  misc_feature (1)..(25): SEQ ID NO: 7470; WAN024BNW; Start 51; Stop 75
tgtcagttatccatcgcagggaaat

SEQ ID NO: 468837 - DNA, 25 bp, Artificial
  probe
  misc_feature (1)..(25): SEQ ID NO: 7470; WAN024BNW; Start 50; Stop 74
ttgtcagttatccatcgcagggaaa

SEQ ID NO: 468838 - DNA, 25 bp, Artificial
  probe
  misc_feature (1)..(25): SEQ ID NO: 7470; WAN024BNW; Start 63; Stop 87
atcgcagggaaatcaattggctaaa

SEQ ID NO: 468839 - DNA, 25 bp, Artificial
  probe
  misc_feature (1)..(25): SEQ ID NO: 7470; WAN024BNW; Start 49; Stop 73
cttgtcagttatccatcgcagggaa

SEQ ID NO: 468840 - DNA, 25 bp, Artificial
  probe
  misc_feature (1)..(25): SEQ ID NO: 7470; WAN024BNW; Start 64; Stop 88
tcgcagggaaatcaattggctaaag

SEQ ID NO: 468841 - DNA, 25 bp, Artificial
  probe
  misc_feature (1)..(25): SEQ ID NO: 7470; WAN024BNW; Start 62; Stop 86
catcgcagggaaatcaattggctaa

SEQ ID NO: 468842 - DNA, 25 bp, Artificial
  probe
  misc_feature (1)..(25): SEQ ID NO: 7471; WAN024BZM; Start 17; Stop 41
tcaatcatagacaaccaatccgtat

SEQ ID NO: 468843 - DNA, 25 bp, Artificial
  probe
  misc_feature (1)..(25): SEQ ID NO: 7471; WAN024BZM; Start 16; Stop 40
atcaatcatagacaaccaatccgta

SEQ ID NO: 468844 - DNA, 25 bp, Artificial
  probe
  misc_feature (1)..(25): SEQ ID NO: 7471; WAN024BZM; Start 15; Stop 39
tatcaatcatagacaaccaatccgt

SEQ ID NO: 468845 - DNA, 25 bp, Artificial
  probe
  misc_feature (1)..(25): SEQ ID NO: 7471; WAN024BZM; Start 18; Stop 42
caatcatagacaaccaatccgtatc

SEQ ID NO: 468846 - DNA, 25 bp, Artificial
  probe
  misc_feature (1)..(25): SEQ ID NO: 7471; WAN024BZM; Start 316; Stop 340
cttaccagttgccttgtctatgatt

SEQ ID NO: 468847 - DNA, 25 bp, Artificial
  probe
  misc_feature (1)..(25): SEQ ID NO: 7471; WAN024BZM; Start 317; Stop 341
ttaccagttgccttgtctatgattg

SEQ ID NO: 468848 - DNA, 25 bp, Artificial
  probe
  misc_feature (1)..(25): SEQ ID NO: 7471; WAN024BZM; Start 14; Stop 38
ttatcaatcatagacaaccaatccg

SEQ ID NO: 468849 - DNA, 25 bp, Artificial
  probe
  misc_feature (1)..(25): SEQ ID NO: 7471; WAN024BZM; Start 22; Stop 46
catagacaaccaatccgtatctctt

SEQ ID NO: 468850 - DNA, 25 bp, Artificial
  probe
  misc_feature (1)..(25): SEQ ID NO: 7471; WAN024BZM; Start 20; Stop 44
atcatagacaaccaatccgtatctc

SEQ ID NO: 468851 - DNA, 25 bp, Artificial
  probe
  misc_feature (1)..(25): SEQ ID NO: 7471; WAN024BZM; Start 19; Stop 43
aatcatagacaaccaatccgtatct

SEQ ID NO: 468852 - DNA, 25 bp, Artificial
  probe
  misc_feature (1)..(25): SEQ ID NO: 7471; WAN024BZM; Start 258; Stop 282
ccacttctattactcggttattctg

SEQ ID NO: 468853 - DNA, 25 bp, Artificial
  probe
  misc_feature (1)..(25): SEQ ID NO: 7471; WAN024BZM; Start 23; Stop 47
atagacaaccaatccgtatctcttg

SEQ ID NO: 468854 - DNA, 25 bp, Artificial
  probe
  misc_feature (1)..(25): SEQ ID NO: 7471; WAN024BZM; Start 21; Stop 45
tcatagacaaccaatccgtatctct

SEQ ID NO: 468855 - DNA, 25 bp, Artificial
  probe
  misc_feature (1)..(25): SEQ ID NO: 7471; WAN024BZM; Start 179; Stop 203
aagacatagcaagccaagagatact

SEQ ID NO: 468856 - DNA, 25 bp, Artificial
  probe
  misc_feature (1)..(25): SEQ ID NO: 7471; WAN024BZM; Start 259; Stop 283
cacttctattactcggttattctga

SEQ ID NO: 468857 - DNA, 25 bp, Artificial
  probe
  misc_feature (1)..(25): SEQ ID NO: 7471; WAN024BZM; Start 146; Stop 170
ttccactcatagcgacgatagttaa

SEQ ID NO: 468858 - DNA, 25 bp, Artificial
  probe
  misc_feature (1)..(25): SEQ ID NO: 7471; WAN024BZM; Start 6; Stop 30
gccagtccttatcaatcatagacaa

SEQ ID NO: 468859 - DNA, 25 bp, Artificial
  probe
  misc_feature (1)..(25): SEQ ID NO: 7471; WAN024BZM; Start 180; Stop 204
agacatagcaagccaagagatactg

SEQ ID NO: 468860 - DNA, 25 bp, Artificial
  probe
  misc_feature (1)..(25): SEQ ID NO: 7471; WAN024BZM; Start 9; Stop 33
agtccttatcaatcatagacaacca

SEQ ID NO: 468861 - DNA, 25 bp, Artificial
  probe
  misc_feature (1)..(25): SEQ ID NO: 7471; WAN024BZM; Start 8; Stop 32
cagtccttatcaatcatagacaacc

SEQ ID NO: 468862 - DNA, 25 bp, Artificial
  probe
  misc_feature (1)..(25): SEQ ID NO: 7471; WAN024BZM; Start 7; Stop 31
ccagtccttatcaatcatagacaac

SEQ ID NO: 468863 - DNA, 25 bp, Artificial
  probe
  misc_feature (1)..(25): SEQ ID NO: 7471; WAN024BZM; Start 315; Stop 339
ccttaccagttgccttgtctatgat

SEQ ID NO: 468864 - DNA, 25 bp, Artificial
  probe
  misc_feature (1)..(25): SEQ ID NO: 7471; WAN024BZM; Start 11; Stop 35
tccttatcaatcatagacaaccaat

SEQ ID NO: 468865 - DNA, 25 bp, Artificial
  probe
  misc_feature (1)..(25): SEQ ID NO: 7471; WAN024BZM; Start 147; Stop 171
tccactcatagcgacgatagttaag

SEQ ID NO: 468866 - DNA, 25 bp, Artificial
  probe
  misc_feature (1)..(25): SEQ ID NO: 7471; WAN024BZM; Start 13; Stop 37
cttatcaatcatagacaaccaatcc

SEQ ID NO: 468867 - DNA, 25 bp, Artificial
  probe
  misc_feature (1)..(25): SEQ ID NO: 7471; WAN024BZM; Start 12; Stop 36
ccttatcaatcatagacaaccaatc

SEQ ID NO: 468868 - DNA, 25 bp, Artificial
  probe
  misc_feature (1)..(25): SEQ ID NO: 7471; WAN024BZM; Start 10; Stop 34
gtccttatcaatcatagacaaccaa

SEQ ID NO: 468869 - DNA, 25 bp, Artificial
  probe
  misc_feature (1)..(25): SEQ ID NO: 7471; WAN024BZM; Start 257; Stop 281
cccacttctattactcggttattct

SEQ ID NO: 468870 - DNA, 25 bp, Artificial
  probe
  misc_feature (1)..(25): SEQ ID NO: 7471; WAN024BZM; Start 256; Stop 280
tcccacttctattactcggttattc

SEQ ID NO: 468871 - DNA, 25 bp, Artificial
  probe
  misc_feature (1)..(25): SEQ ID NO: 7471; WAN024BZM; Start 255; Stop 279
ctcccacttctattactcggttatt

SEQ ID NO: 468872 - DNA, 25 bp, Artificial
  probe
  misc_feature (1)..(25): SEQ ID NO: 7471; WAN024BZM; Start 260; Stop 284
acttctattactcggttattctgat

SEQ ID NO: 468873 - DNA, 25 bp, Artificial
  probe
  misc_feature (1)..(25): SEQ ID NO: 7471; WAN024BZM; Start 178; Stop 202
aaagacatagcaagccaagagatac

SEQ ID NO: 468874 - DNA, 25 bp, Artificial
  probe
  misc_feature (1)..(25): SEQ ID NO: 7471; WAN024BZM; Start 177; Stop 201
caaagacatagcaagccaagagata

SEQ ID NO: 468875 - DNA, 25 bp, Artificial
  probe
  misc_feature (1)..(25): SEQ ID NO: 7472; WAN024BNX; Start 226; Stop 250
ccgactcaagcctatgtattactta

SEQ ID NO: 468876 - DNA, 25 bp, Artificial
  probe
  misc_feature (1)..(25): SEQ ID NO: 7472; WAN024BNX; Start 234; Stop 258
agcctatgtattacttaatgcgtgg

SEQ ID NO: 468877 - DNA, 25 bp, Artificial
  probe
  misc_feature (1)..(25): SEQ ID NO: 7472; WAN024BNX; Start 236; Stop 260
cctatgtattacttaatgcgtggtt

SEQ ID NO: 468878 - DNA, 25 bp, Artificial
  probe
  misc_feature (1)..(25): SEQ ID NO: 7472; WAN024BNX; Start 235; Stop 259
gcctatgtattacttaatgcgtggt

SEQ ID NO: 468879 - DNA, 25 bp, Artificial
  probe
  misc_feature (1)..(25): SEQ ID NO: 7472; WAN024BNX; Start 233; Stop 257
aagcctatgtattacttaatgcgtg

SEQ ID NO: 468880 - DNA, 25 bp, Artificial
  probe
  misc_feature (1)..(25): SEQ ID NO: 7472; WAN024BNX; Start 232; Stop 256
caagcctatgtattacttaatgcgt

SEQ ID NO: 468881 - DNA, 25 bp, Artificial
  probe
  misc_feature (1)..(25): SEQ ID NO: 7472; WAN024BNX; Start 276; Stop 300
tgcgacttacacagaattactagaa

SEQ ID NO: 468882 - DNA, 25 bp, Artificial
  probe
  misc_feature (1)..(25): SEQ ID NO: 7472; WAN024BNX; Start 231; Stop 255
tcaagcctatgtattacttaatgcg

SEQ ID NO: 468883 - DNA, 25 bp, Artificial
  probe
  misc_feature (1)..(25): SEQ ID NO: 7472; WAN024BNX; Start 225; Stop 249
tccgactcaagcctatgtattactt

SEQ ID NO: 468884 - DNA, 25 bp, Artificial
  probe
  misc_feature (1)..(25): SEQ ID NO: 7472; WAN024BNX; Start 224; Stop 248
gtccgactcaagcctatgtattact

SEQ ID NO: 468885 - DNA, 25 bp, Artificial
  probe
  misc_feature (1)..(25): SEQ ID NO: 7472; WAN024BNX; Start 227; Stop 251
cgactcaagcctatgtattacttaa

SEQ ID NO: 468886 - DNA, 25 bp, Artificial
  probe
  misc_feature (1)..(25): SEQ ID NO: 7472; WAN024BNX; Start 222; Stop 246
tagtccgactcaagcctatgtatta

SEQ ID NO: 468887 - DNA, 25 bp, Artificial
  probe
  misc_feature (1)..(25): SEQ ID NO: 7472; WAN024BNX; Start 275; Stop 299
gtgcgacttacacagaattactaga

SEQ ID NO: 468888 - DNA, 25 bp, Artificial
  probe
  misc_feature (1)..(25): SEQ ID NO: 7472; WAN024BNX; Start 230; Stop 254
ctcaagcctatgtattacttaatgc

SEQ ID NO: 468889 - DNA, 25 bp, Artificial
  probe
  misc_feature (1)..(25): SEQ ID NO: 7472; WAN024BNX; Start 220; Stop 244
tatagtccgactcaagcctatgtat

SEQ ID NO: 468890 - DNA, 25 bp, Artificial
  probe
  misc_feature (1)..(25): SEQ ID NO: 7472; WAN024BNX; Start 219; Stop 243
ttatagtccgactcaagcctatgta

SEQ ID NO: 468891 - DNA, 25 bp, Artificial
  probe
  misc_feature (1)..(25): SEQ ID NO: 7472; WAN024BNX; Start 221; Stop 245
atagtccgactcaagcctatgtatt

SEQ ID NO: 468892 - DNA, 25 bp, Artificial
  probe
  misc_feature (1)..(25): SEQ ID NO: 7472; WAN024BNX; Start 274; Stop 298
cgtgcgacttacacagaattactag

SEQ ID NO: 468893 - DNA, 25 bp, Artificial
  probe
  misc_feature (1)..(25): SEQ ID NO: 7472; WAN024BNX; Start 223; Stop 247
agtccgactcaagcctatgtattac

SEQ ID NO: 468894 - DNA, 25 bp, Artificial
  probe
  misc_feature (1)..(25): SEQ ID NO: 7472; WAN024BNX; Start 273; Stop 297
tcgtgcgacttacacagaattacta

SEQ ID NO: 468895 - DNA, 25 bp, Artificial
  probe
  misc_feature (1)..(25): SEQ ID NO: 7472; WAN024BNX; Start 277; Stop 301
gcgacttacacagaattactagaaa

SEQ ID NO: 468896 - DNA, 25 bp, Artificial
  probe
  misc_feature (1)..(25): SEQ ID NO: 7472; WAN024BNX; Start 272; Stop 296
ttcgtgcgacttacacagaattact

SEQ ID NO: 468897 - DNA, 25 bp, Artificial
  probe
  misc_feature (1)..(25): SEQ ID NO: 7472; WAN024BNX; Start 229; Stop 253
actcaagcctatgtattacttaatg

SEQ ID NO: 468898 - DNA, 25 bp, Artificial
  probe
  misc_feature (1)..(25): SEQ ID NO: 7472; WAN024BNX; Start 240; Stop 264
tgtattacttaatgcgtggtttaac

SEQ ID NO: 468899 - DNA, 25 bp, Artificial
  probe
  misc_feature (1)..(25): SEQ ID NO: 7472; WAN024BNX; Start 237; Stop 261
ctatgtattacttaatgcgtggttt

SEQ ID NO: 468900 - DNA, 25 bp, Artificial
  probe
  misc_feature (1)..(25): SEQ ID NO: 7472; WAN024BNX; Start 228; Stop 252
gactcaagcctatgtattacttaat

SEQ ID NO: 468901 - DNA, 25 bp, Artificial
  probe
  misc_feature (1)..(25): SEQ ID NO: 7472; WAN024BNX; Start 218; Stop 242
tttatagtccgactcaagcctatgt

SEQ ID NO: 468902 - DNA, 25 bp, Artificial
  probe
  misc_feature (1)..(25): SEQ ID NO: 7472; WAN024BNX; Start 271; Stop 295
tttcgtgcgacttacacagaattac

SEQ ID NO: 468903 - DNA, 25 bp, Artificial
  probe
  misc_feature (1)..(25): SEQ ID NO: 7472; WAN024BNX; Start 239; Stop 263
atgtattacttaatgcgtggtttaa

SEQ ID NO: 468904 - DNA, 25 bp, Artificial
  probe
  misc_feature (1)..(25): SEQ ID NO: 7472; WAN024BNX; Start 183; Stop 207
catgaatgtcattggagcttgtcaa

SEQ ID NO: 468905 - DNA, 25 bp, Artificial
  probe
  misc_feature (1)..(25): SEQ ID NO: 7472; WAN024BNX; Start 181; Stop 205
aacatgaatgtcattggagcttgtc

SEQ ID NO: 468906 - DNA, 25 bp, Artificial
  probe
  misc_feature (1)..(25): SEQ ID NO: 7472; WAN024BNX; Start 283; Stop 307
tacacagaattactagaaaacgcca

SEQ ID NO: 468907 - DNA, 25 bp, Artificial
  probe
  misc_feature (1)..(25): SEQ ID NO: 7472; WAN024BNX; Start 285; Stop 309
cacagaattactagaaaacgccatc

SEQ ID NO: 468908 - DNA, 25 bp, Artificial
  probe
  misc_feature (1)..(25): SEQ ID NO: 7473; WAN024BXJ; Start 10; Stop 34
gttctttctagttcgttcatcttcc

SEQ ID NO: 468909 - DNA, 25 bp, Artificial
  probe
  misc_feature (1)..(25): SEQ ID NO: 7473; WAN024BXJ; Start 11; Stop 35
ttctttctagttcgttcatcttccc

SEQ ID NO: 468910 - DNA, 25 bp, Artificial
  probe
  misc_feature (1)..(25): SEQ ID NO: 7473; WAN024BXJ; Start 9; Stop 33
tgttctttctagttcgttcatcttc

SEQ ID NO: 468911 - DNA, 25 bp, Artificial
  probe
  misc_feature (1)..(25): SEQ ID NO: 7473; WAN024BXJ; Start 8; Stop 32
ctgttctttctagttcgttcatctt

SEQ ID NO: 468912 - DNA, 25 bp, Artificial
  probe
  misc_feature (1)..(25): SEQ ID NO: 7473; WAN024BXJ; Start 7; Stop 31
gctgttctttctagttcgttcatct

SEQ ID NO: 468913 - DNA, 25 bp, Artificial
  probe
  misc_feature (1)..(25): SEQ ID NO: 7473; WAN024BXJ; Start 13; Stop 37
ctttctagttcgttcatcttcccac

SEQ ID NO: 468914 - DNA, 25 bp, Artificial
  probe
  misc_feature (1)..(25): SEQ ID NO: 7473; WAN024BXJ; Start 12; Stop 36
tctttctagttcgttcatcttccca

SEQ ID NO: 468915 - DNA, 25 bp, Artificial
  probe
  misc_feature (1)..(25): SEQ ID NO: 7473; WAN024BXJ; Start 6; Stop 30
ggctgttctttctagttcgttcatc

SEQ ID NO: 468916 - DNA, 25 bp, Artificial
  probe
  misc_feature (1)..(25): SEQ ID NO: 7473; WAN024BXJ; Start 14; Stop 38
tttctagttcgttcatcttcccacc

SEQ ID NO: 468917 - DNA, 25 bp, Artificial
  probe
  misc_feature (1)..(25): SEQ ID NO: 7473; WAN024BXJ; Start 5; Stop 29
gggctgttctttctagttcgttcat

SEQ ID NO: 468918 - DNA, 25 bp, Artificial
  probe
  misc_feature (1)..(25): SEQ ID NO: 7473; WAN024BXJ; Start 15; Stop 39
ttctagttcgttcatcttcccacct

SEQ ID NO: 468919 - DNA, 25 bp, Artificial
  probe
  misc_feature (1)..(25): SEQ ID NO: 7473; WAN024BXJ; Start 25; Stop 49
ttcatcttcccacctccttgtcttt

SEQ ID NO: 468920 - DNA, 25 bp, Artificial
  probe
  misc_feature (1)..(25): SEQ ID NO: 7473; WAN024BXJ; Start 3; Stop 27
gagggctgttctttctagttcgttc

SEQ ID NO: 468921 - DNA, 25 bp, Artificial
  probe
  misc_feature (1)..(25): SEQ ID NO: 7473; WAN024BXJ; Start 16; Stop 40
tctagttcgttcatcttcccacctc

SEQ ID NO: 468922 - DNA, 25 bp, Artificial
  probe
  misc_feature (1)..(25): SEQ ID NO: 7473; WAN024BXJ; Start 4; Stop 28
agggctgttctttctagttcgttca

SEQ ID NO: 468923 - DNA, 25 bp, Artificial
  probe
  misc_feature (1)..(25): SEQ ID NO: 7473; WAN024BXJ; Start 2; Stop 26
tgagggctgttctttctagttcgtt

SEQ ID NO: 468924 - DNA, 25 bp, Artificial
  probe
  misc_feature (1)..(25): SEQ ID NO: 7473; WAN024BXJ; Start 1; Stop 25
ttgagggctgttctttctagttcgt

SEQ ID NO: 468925 - DNA, 25 bp, Artificial
  probe
  misc_feature (1)..(25): SEQ ID NO: 7473; WAN024BXJ; Start 24; Stop 48
gttcatcttcccacctccttgtctt

SEQ ID NO: 468926 - DNA, 25 bp, Artificial
  probe
  misc_feature (1)..(25): SEQ ID NO: 7473; WAN024BXJ; Start 17; Stop 41
ctagttcgttcatcttcccacctcc

SEQ ID NO: 468927 - DNA, 25 bp, Artificial
  probe
  misc_feature (1)..(25): SEQ ID NO: 7473; WAN024BXJ; Start 18; Stop 42
tagttcgttcatcttcccacctcct

SEQ ID NO: 468928 - DNA, 25 bp, Artificial
  probe
  misc_feature (1)..(25): SEQ ID NO: 7473; WAN024BXJ; Start 26; Stop 50
tcatcttcccacctccttgtctttt

SEQ ID NO: 468929 - DNA, 25 bp, Artificial
  probe
  misc_feature (1)..(25): SEQ ID NO: 7474; WAN024FMV; Start 122; Stop 146
ttactttactggagaagcaagatgg

SEQ ID NO: 468930 - DNA, 25 bp, Artificial
  probe
  misc_feature (1)..(25): SEQ ID NO: 7474; WAN024FMV; Start 126; Stop 150
tttactggagaagcaagatggaaac

SEQ ID NO: 468931 - DNA, 25 bp, Artificial
  probe
  misc_feature (1)..(25): SEQ ID NO: 7474; WAN024FMV; Start 125; Stop 149
ctttactggagaagcaagatggaaa

SEQ ID NO: 468932 - DNA, 25 bp, Artificial
  probe
  misc_feature (1)..(25): SEQ ID NO: 7474; WAN024FMV; Start 116; Stop 140
aggatattactttactggagaagca

SEQ ID NO: 468933 - DNA, 25 bp, Artificial
  probe
  misc_feature (1)..(25): SEQ ID NO: 7474; WAN024FMV; Start 123; Stop 147
tactttactggagaagcaagatgga

SEQ ID NO: 468934 - DNA, 25 bp, Artificial
  probe
  misc_feature (1)..(25): SEQ ID NO: 7474; WAN024FMV; Start 121; Stop 145
attactttactggagaagcaagatg

SEQ ID NO: 468935 - DNA, 25 bp, Artificial
  probe
  misc_feature (1)..(25): SEQ ID NO: 7474; WAN024FMV; Start 117; Stop 141
ggatattactttactggagaagcaa

SEQ ID NO: 468936 - DNA, 25 bp, Artificial
  probe
  misc_feature (1)..(25): SEQ ID NO: 7474; WAN024FMV; Start 128; Stop 152
tactggagaagcaagatggaaacaa

SEQ ID NO: 468937 - DNA, 25 bp, Artificial
  probe
  misc_feature (1)..(25): SEQ ID NO: 7474; WAN024FMV; Start 127; Stop 151
ttactggagaagcaagatggaaaca

SEQ ID NO: 468938 - DNA, 25 bp, Artificial
  probe
  misc_feature (1)..(25): SEQ ID NO: 7474; WAN024FMV; Start 124; Stop 148
actttactggagaagcaagatggaa

SEQ ID NO: 468939 - DNA, 25 bp, Artificial
  probe
  misc_feature (1)..(25): SEQ ID NO: 7474; WAN024FMV; Start 115; Stop 139
aaggatattactttactggagaagc

SEQ ID NO: 468940 - DNA, 25 bp, Artificial
  probe
  misc_feature (1)..(25): SEQ ID NO: 7474; WAN024FMV; Start 120; Stop 144
tattactttactggagaagcaagat

SEQ ID NO: 468941 - DNA, 25 bp, Artificial
  probe
  misc_feature (1)..(25): SEQ ID NO: 7474; WAN024FMV; Start 119; Stop 143
atattactttactggagaagcaaga

SEQ ID NO: 468942 - DNA, 25 bp, Artificial
  probe
  misc_feature (1)..(25): SEQ ID NO: 7474; WAN024FMV; Start 129; Stop 153
actggagaagcaagatggaaacaaa

SEQ ID NO: 468943 - DNA, 25 bp, Artificial
  probe
  misc_feature (1)..(25): SEQ ID NO: 7474; WAN024FMV; Start 118; Stop 142
gatattactttactggagaagcaag

SEQ ID NO: 468944 - DNA, 25 bp, Artificial
  probe
  misc_feature (1)..(25): SEQ ID NO: 7474; WAN024FMV; Start 134; Stop 158
agaagcaagatggaaacaaaagaaa

SEQ ID NO: 468945 - DNA, 25 bp, Artificial
  probe
  misc_feature (1)..(25): SEQ ID NO: 7474; WAN024FMV; Start 133; Stop 157
gagaagcaagatggaaacaaaagaa

SEQ ID NO: 468946 - DNA, 25 bp, Artificial
  probe
  misc_feature (1)..(25): SEQ ID NO: 7474; WAN024FMV; Start 135; Stop 159
gaagcaagatggaaacaaaagaaaa

SEQ ID NO: 468947 - DNA, 25 bp, Artificial
  probe
  misc_feature (1)..(25): SEQ ID NO: 7474; WAN024FMV; Start 111; Stop 135
tggaaaggatattactttactggag

SEQ ID NO: 468948 - DNA, 25 bp, Artificial
  probe
  misc_feature (1)..(25): SEQ ID NO: 7474; WAN024FMV; Start 132; Stop 156
ggagaagcaagatggaaacaaaaga

SEQ ID NO: 468949 - DNA, 25 bp, Artificial
  probe
  misc_feature (1)..(25): SEQ ID NO: 7474; WAN024FMV; Start 131; Stop 155
tggagaagcaagatggaaacaaaag

SEQ ID NO: 468950 - DNA, 25 bp, Artificial
  probe
  misc_feature (1)..(25): SEQ ID NO: 7474; WAN024FMV; Start 130; Stop 154
ctggagaagcaagatggaaacaaaa

SEQ ID NO: 468951 - DNA, 25 bp, Artificial
  probe
  misc_feature (1)..(25): SEQ ID NO: 7474; WAN024FMV; Start 112; Stop 136
ggaaaggatattactttactggaga

SEQ ID NO: 468952 - DNA, 25 bp, Artificial
  probe
  misc_feature (1)..(25): SEQ ID NO: 7474; WAN024FMV; Start 110; Stop 134
ttggaaaggatattactttactgga

SEQ ID NO: 468953 - DNA, 25 bp, Artificial
  probe
  misc_feature (1)..(25): SEQ ID NO: 7474; WAN024FMV; Start 85; Stop 109
agtccagagcattataatttagagt

SEQ ID NO: 468954 - DNA, 25 bp, Artificial
  probe
  misc_feature (1)..(25): SEQ ID NO: 7474; WAN024FMV; Start 109; Stop 133
tttggaaaggatattactttactgg

SEQ ID NO: 468955 - DNA, 25 bp, Artificial
  probe
  misc_feature (1)..(25): SEQ ID NO: 7474; WAN024FMV; Start 103; Stop 127
ttagagtttggaaaggatattactt

SEQ ID NO: 468956 - DNA, 25 bp, Artificial
  probe
  misc_feature (1)..(25): SEQ ID NO: 7474; WAN024FMV; Start 102; Stop 126
tttagagtttggaaaggatattact

SEQ ID NO: 468957 - DNA, 25 bp, Artificial
  probe
  misc_feature (1)..(25): SEQ ID NO: 7474; WAN024FMV; Start 86; Stop 110
gtccagagcattataatttagagtt

SEQ ID NO: 468958 - DNA, 25 bp, Artificial
  probe
  misc_feature (1)..(25): SEQ ID NO: 7474; WAN024FMV; Start 113; Stop 137
gaaaggatattactttactggagaa

SEQ ID NO: 468959 - DNA, 25 bp, Artificial
  probe
  misc_feature (1)..(25): SEQ ID NO: 7474; WAN024FMV; Start 114; Stop 138
aaaggatattactttactggagaag

SEQ ID NO: 468960 - DNA, 25 bp, Artificial
  probe
  misc_feature (1)..(25): SEQ ID NO: 7474; WAN024FMV; Start 108; Stop 132
gtttggaaaggatattactttactg

SEQ ID NO: 468961 - DNA, 25 bp, Artificial
  probe
  misc_feature (1)..(25): SEQ ID NO: 7474; WAN024FMV; Start 63; Stop 87
agaatcaggttttggaaaatttagt

SEQ ID NO: 468962 - DNA, 25 bp, Artificial
  probe
  misc_feature (1)..(25): SEQ ID NO: 7475; WAN024F6A; Start 42; Stop 66
cgaagagtataatttacgtgttccc

SEQ ID NO: 468963 - DNA, 25 bp, Artificial
  probe
  misc_feature (1)..(25): SEQ ID NO: 7475; WAN024F6A; Start 46; Stop 70
gagtataatttacgtgttcccaaga

SEQ ID NO: 468964 - DNA, 25 bp, Artificial
  probe
  misc_feature (1)..(25): SEQ ID NO: 7475; WAN024F6A; Start 45; Stop 69
agagtataatttacgtgttcccaag

SEQ ID NO: 468965 - DNA, 25 bp, Artificial
  probe
  misc_feature (1)..(25): SEQ ID NO: 7475; WAN024F6A; Start 41; Stop 65
tcgaagagtataatttacgtgttcc

SEQ ID NO: 468966 - DNA, 25 bp, Artificial
  probe
  misc_feature (1)..(25): SEQ ID NO: 7475; WAN024F6A; Start 43; Stop 67
gaagagtataatttacgtgttccca

SEQ ID NO: 468967 - DNA, 25 bp, Artificial
  probe
  misc_feature (1)..(25): SEQ ID NO: 7475; WAN024F6A; Start 60; Stop 84
tgttcccaagatggagaagttagac

SEQ ID NO: 468968 - DNA, 25 bp, Artificial
  probe
  misc_feature (1)..(25): SEQ ID NO: 7475; WAN024F6A; Start 59; Stop 83
gtgttcccaagatggagaagttaga

SEQ ID NO: 468969 - DNA, 25 bp, Artificial
  probe
  misc_feature (1)..(25): SEQ ID NO: 7475; WAN024F6A; Start 44; Stop 68
aagagtataatttacgtgttcccaa

SEQ ID NO: 468970 - DNA, 25 bp, Artificial
  probe
  misc_feature (1)..(25): SEQ ID NO: 7475; WAN024F6A; Start 48; Stop 72
gtataatttacgtgttcccaagatg

SEQ ID NO: 468971 - DNA, 25 bp, Artificial
  probe
  misc_feature (1)..(25): SEQ ID NO: 7475; WAN024F6A; Start 47; Stop 71
agtataatttacgtgttcccaagat

SEQ ID NO: 468972 - DNA, 25 bp, Artificial
  probe
  misc_feature (1)..(25): SEQ ID NO: 7475; WAN024F6A; Start 50; Stop 74
ataatttacgtgttcccaagatgga

SEQ ID NO: 468973 - DNA, 25 bp, Artificial
  probe
  misc_feature (1)..(25): SEQ ID NO: 7475; WAN024F6A; Start 51; Stop 75
taatttacgtgttcccaagatggag

SEQ ID NO: 468974 - DNA, 25 bp, Artificial
  probe
  misc_feature (1)..(25): SEQ ID NO: 7475; WAN024F6A; Start 49; Stop 73
tataatttacgtgttcccaagatgg

SEQ ID NO: 468975 - DNA, 25 bp, Artificial
  probe
  misc_feature (1)..(25): SEQ ID NO: 7475; WAN024F6A; Start 19; Stop 43
ctgacatggtttgaagagattttcg

SEQ ID NO: 468976 - DNA, 25 bp, Artificial
  probe
  misc_feature (1)..(25): SEQ ID NO: 7475; WAN024F6A; Start 58; Stop 82
cgtgttcccaagatggagaagttag

SEQ ID NO: 468977 - DNA, 25 bp, Artificial
  probe
  misc_feature (1)..(25): SEQ ID NO: 7475; WAN024F6A; Start 53; Stop 77
atttacgtgttcccaagatggagaa

SEQ ID NO: 468978 - DNA, 25 bp, Artificial
  probe
  misc_feature (1)..(25): SEQ ID NO: 7475; WAN024F6A; Start 52; Stop 76
aatttacgtgttcccaagatggaga

SEQ ID NO: 468979 - DNA, 25 bp, Artificial
  probe
  misc_feature (1)..(25): SEQ ID NO: 7475; WAN024F6A; Start 20; Stop 44
tgacatggtttgaagagattttcga

SEQ ID NO: 468980 - DNA, 25 bp, Artificial
  probe
  misc_feature (1)..(25): SEQ ID NO: 7475; WAN024F6A; Start 54; Stop 78
tttacgtgttcccaagatggagaag

SEQ ID NO: 468981 - DNA, 25 bp, Artificial
  probe
  misc_feature (1)..(25): SEQ ID NO: 7475; WAN024F6A; Start 57; Stop 81
acgtgttcccaagatggagaagtta

SEQ ID NO: 468982 - DNA, 25 bp, Artificial
  probe
  misc_feature (1)..(25): SEQ ID NO: 7475; WAN024F6A; Start 56; Stop 80
tacgtgttcccaagatggagaagtt

SEQ ID NO: 468983 - DNA, 25 bp, Artificial
  probe
  misc_feature (1)..(25): SEQ ID NO: 7475; WAN024F6A; Start 55; Stop 79
ttacgtgttcccaagatggagaagt

SEQ ID NO: 468984 - DNA, 25 bp, Artificial
  probe
  misc_feature (1)..(25): SEQ ID NO: 7475; WAN024F6A; Start 40; Stop 64
ttcgaagagtataatttacgtgttc

SEQ ID NO: 468985 - DNA, 25 bp, Artificial
  probe
  misc_feature (1)..(25): SEQ ID NO: 7475; WAN024F6A; Start 39; Stop 63
tttcgaagagtataatttacgtgtt

SEQ ID NO: 468986 - DNA, 25 bp, Artificial
  probe
  misc_feature (1)..(25): SEQ ID NO: 7475; WAN024F6A; Start 22; Stop 46
acatggtttgaagagattttcgaag

SEQ ID NO: 468987 - DNA, 25 bp, Artificial
  probe
  misc_feature (1)..(25): SEQ ID NO: 7475; WAN024F6A; Start 21; Stop 45
gacatggtttgaagagattttcgaa

SEQ ID NO: 468988 - DNA, 25 bp, Artificial
  probe
  misc_feature (1)..(25): SEQ ID NO: 7475; WAN024F6A; Start 24; Stop 48
atggtttgaagagattttcgaagag

SEQ ID NO: 468989 - DNA, 25 bp, Artificial
  probe
  misc_feature (1)..(25): SEQ ID NO: 7475; WAN024F6A; Start 23; Stop 47
catggtttgaagagattttcgaaga

SEQ ID NO: 468990 - DNA, 25 bp, Artificial
  probe
  misc_feature (1)..(25): SEQ ID NO: 7475; WAN024F6A; Start 15; Stop 39
ggggctgacatggtttgaagagatt

SEQ ID NO: 468991 - DNA, 25 bp, Artificial
  probe
  misc_feature (1)..(25): SEQ ID NO: 7475; WAN024F6A; Start 38; Stop 62
ttttcgaagagtataatttacgtgt

SEQ ID NO: 468992 - DNA, 25 bp, Artificial
  probe
  misc_feature (1)..(25): SEQ ID NO: 7475; WAN024F6A; Start 37; Stop 61
attttcgaagagtataatttacgtg

SEQ ID NO: 468993 - DNA, 25 bp, Artificial
  probe
  misc_feature (1)..(25): SEQ ID NO: 7475; WAN024F6A; Start 30; Stop 54
tgaagagattttcgaagagtataat

SEQ ID NO: 468994 - DNA, 25 bp, Artificial
  probe
  misc_feature (1)..(25): SEQ ID NO: 7475; WAN024F6A; Start 36; Stop 60
gattttcgaagagtataatttacgt

SEQ ID NO: 468995 - DNA, 25 bp, Artificial
  probe
  misc_feature (1)..(25): SEQ ID NO: 7476; WAN024BM9; Start 9; Stop 33
aattgaaatagcacaaatagggacg

SEQ ID NO: 468996 - DNA, 25 bp, Artificial
  probe
  misc_feature (1)..(25): SEQ ID NO: 7476; WAN024BM9; Start 13; Stop 37
gaaatagcacaaatagggacggaag

SEQ ID NO: 468997 - DNA, 25 bp, Artificial
  probe
  misc_feature (1)..(25): SEQ ID NO: 7476; WAN024BM9; Start 10; Stop 34
attgaaatagcacaaatagggacgg

SEQ ID NO: 468998 - DNA, 25 bp, Artificial
  probe
  misc_feature (1)..(25): SEQ ID NO: 7476; WAN024BM9; Start 14; Stop 38
aaatagcacaaatagggacggaaga

SEQ ID NO: 468999 - DNA, 25 bp, Artificial
  probe
  misc_feature (1)..(25): SEQ ID NO: 7476; WAN024BM9; Start 12; Stop 36
tgaaatagcacaaatagggacggaa

SEQ ID NO: 469000 - DNA, 25 bp, Artificial
  probe
  misc_feature (1)..(25): SEQ ID NO: 7476; WAN024BM9; Start 11; Stop 35
ttgaaatagcacaaatagggacgga

SEQ ID NO: 469001 - DNA, 25 bp, Artificial
  probe
  misc_feature (1)..(25): SEQ ID NO: 7476; WAN024BM9; Start 15; Stop 39
aatagcacaaatagggacggaagac

SEQ ID NO: 469002 - DNA, 25 bp, Artificial
  probe
  misc_feature (1)..(25): SEQ ID NO: 7476; WAN024BM9; Start 8; Stop 32
taattgaaatagcacaaatagggac

SEQ ID NO: 469003 - DNA, 25 bp, Artificial
  probe
  misc_feature (1)..(25): SEQ ID NO: 7476; WAN024BM9; Start 16; Stop 40
atagcacaaatagggacggaagact

SEQ ID NO: 469004 - DNA, 25 bp, Artificial
  probe
  misc_feature (1)..(25): SEQ ID NO: 7476; WAN024BM9; Start 57; Stop 81
cagaaaaggagaaacagatgacact

SEQ ID NO: 469005 - DNA, 25 bp, Artificial
  probe
  misc_feature (1)..(25): SEQ ID NO: 7476; WAN024BM9; Start 55; Stop 79
atcagaaaaggagaaacagatgaca

SEQ ID NO: 469006 - DNA, 25 bp, Artificial
  probe
  misc_feature (1)..(25): SEQ ID NO: 7476; WAN024BM9; Start 56; Stop 80
tcagaaaaggagaaacagatgacac

SEQ ID NO: 469007 - DNA, 25 bp, Artificial
  probe
  misc_feature (1)..(25): SEQ ID NO: 7476; WAN024BM9; Start 7; Stop 31
ataattgaaatagcacaaataggga

SEQ ID NO: 469008 - DNA, 25 bp, Artificial
  probe
  misc_feature (1)..(25): SEQ ID NO: 7476; WAN024BM9; Start 54; Stop 78
tatcagaaaaggagaaacagatgac

SEQ ID NO: 469009 - DNA, 25 bp, Artificial
  probe
  misc_feature (1)..(25): SEQ ID NO: 7476; WAN024BM9; Start 17; Stop 41
tagcacaaatagggacggaagactg

SEQ ID NO: 469010 - DNA, 25 bp, Artificial
  probe
  misc_feature (1)..(25): SEQ ID NO: 7476; WAN024BM9; Start 39; Stop 63
ctgcttcctcccttttatcagaaaa

SEQ ID NO: 469011 - DNA, 25 bp, Artificial
  probe
  misc_feature (1)..(25): SEQ ID NO: 7476; WAN024BM9; Start 53; Stop 77
ttatcagaaaaggagaaacagatga

SEQ ID NO: 469012 - DNA, 25 bp, Artificial
  probe
  misc_feature (1)..(25): SEQ ID NO: 7476; WAN024BM9; Start 38; Stop 62
actgcttcctcccttttatcagaaa

SEQ ID NO: 469013 - DNA, 25 bp, Artificial
  probe
  misc_feature (1)..(25): SEQ ID NO: 7476; WAN024BM9; Start 52; Stop 76
tttatcagaaaaggagaaacagatg

SEQ ID NO: 469014 - DNA, 25 bp, Artificial
  probe
  misc_feature (1)..(25): SEQ ID NO: 7476; WAN024BM9; Start 37; Stop 61
gactgcttcctcccttttatcagaa

SEQ ID NO: 469015 - DNA, 25 bp, Artificial
  probe
  misc_feature (1)..(25): SEQ ID NO: 7476; WAN024BM9; Start 35; Stop 59
aagactgcttcctcccttttatcag

SEQ ID NO: 469016 - DNA, 25 bp, Artificial
  probe
  misc_feature (1)..(25): SEQ ID NO: 7476; WAN024BM9; Start 20; Stop 44
cacaaatagggacggaagactgctt

SEQ ID NO: 469017 - DNA, 25 bp, Artificial
  probe
  misc_feature (1)..(25): SEQ ID NO: 7476; WAN024BM9; Start 36; Stop 60
agactgcttcctcccttttatcaga

SEQ ID NO: 469018 - DNA, 25 bp, Artificial
  probe
  misc_feature (1)..(25): SEQ ID NO: 7476; WAN024BM9; Start 1; Stop 25
ttgagtataattgaaatagcacaaa

SEQ ID NO: 469019 - DNA, 25 bp, Artificial
  probe
  misc_feature (1)..(25): SEQ ID NO: 7476; WAN024BM9; Start 6; Stop 30
tataattgaaatagcacaaataggg

SEQ ID NO: 469020 - DNA, 25 bp, Artificial
  probe
  misc_feature (1)..(25): SEQ ID NO: 7476; WAN024BM9; Start 2; Stop 26
tgagtataattgaaatagcacaaat

SEQ ID NO: 469021 - DNA, 25 bp, Artificial
  probe
  misc_feature (1)..(25): SEQ ID NO: 7476; WAN024BM9; Start 51; Stop 75
ttttatcagaaaaggagaaacagat

SEQ ID NO: 469022 - DNA, 25 bp, Artificial
  probe
  misc_feature (1)..(25): SEQ ID NO: 7476; WAN024BM9; Start 34; Stop 58
gaagactgcttcctcccttttatca

SEQ ID NO: 469023 - DNA, 25 bp, Artificial
  probe
  misc_feature (1)..(25): SEQ ID NO: 7476; WAN024BM9; Start 21; Stop 45
acaaatagggacggaagactgcttc

SEQ ID NO: 469024 - DNA, 25 bp, Artificial
  probe
  misc_feature (1)..(25): SEQ ID NO: 7476; WAN024BM9; Start 40; Stop 64
tgcttcctcccttttatcagaaaag

SEQ ID NO: 469025 - DNA, 25 bp, Artificial
  probe
  misc_feature (1)..(25): SEQ ID NO: 7476; WAN024BM9; Start 50; Stop 74
cttttatcagaaaaggagaaacaga

SEQ ID NO: 469026 - DNA, 25 bp, Artificial
  probe
  misc_feature (1)..(25): SEQ ID NO: 7477; WAN024FDK; Start 42; Stop 66
caacagttattacaaggatgcgatt

SEQ ID NO: 469027 - DNA, 25 bp, Artificial
  probe
  misc_feature (1)..(25): SEQ ID NO: 7477; WAN024FDK; Start 41; Stop 65
tcaacagttattacaaggatgcgat

SEQ ID NO: 469028 - DNA, 25 bp, Artificial
  probe
  misc_feature (1)..(25): SEQ ID NO: 7477; WAN024FDK; Start 40; Stop 64
ttcaacagttattacaaggatgcga

SEQ ID NO: 469029 - DNA, 25 bp, Artificial
  probe
  misc_feature (1)..(25): SEQ ID NO: 7477; WAN024FDK; Start 4; Stop 28
agtatgattaactctcaagtcttcg

SEQ ID NO: 469030 - DNA, 25 bp, Artificial
  probe
  misc_feature (1)..(25): SEQ ID NO: 7477; WAN024FDK; Start 39; Stop 63
tttcaacagttattacaaggatgcg

SEQ ID NO: 469031 - DNA, 25 bp, Artificial
  probe
  misc_feature (1)..(25): SEQ ID NO: 7477; WAN024FDK; Start 43; Stop 67
aacagttattacaaggatgcgattt

SEQ ID NO: 469032 - DNA, 25 bp, Artificial
  probe
  misc_feature (1)..(25): SEQ ID NO: 7477; WAN024FDK; Start 54; Stop 78
caaggatgcgatttactacttcaaa

SEQ ID NO: 469033 - DNA, 25 bp, Artificial
  probe
  misc_feature (1)..(25): SEQ ID NO: 7477; WAN024FDK; Start 52; Stop 76
tacaaggatgcgatttactacttca

SEQ ID NO: 469034 - DNA, 25 bp, Artificial
  probe
  misc_feature (1)..(25): SEQ ID NO: 7477; WAN024FDK; Start 53; Stop 77
acaaggatgcgatttactacttcaa

SEQ ID NO: 469035 - DNA, 25 bp, Artificial
  probe
  misc_feature (1)..(25): SEQ ID NO: 7477; WAN024FDK; Start 51; Stop 75
ttacaaggatgcgatttactacttc

SEQ ID NO: 469036 - DNA, 25 bp, Artificial
  probe
  misc_feature (1)..(25): SEQ ID NO: 7477; WAN024FDK; Start 44; Stop 68
acagttattacaaggatgcgattta

SEQ ID NO: 469037 - DNA, 25 bp, Artificial
  probe
  misc_feature (1)..(25): SEQ ID NO: 7477; WAN024FDK; Start 45; Stop 69
cagttattacaaggatgcgatttac

SEQ ID NO: 469038 - DNA, 25 bp, Artificial
  probe
  misc_feature (1)..(25): SEQ ID NO: 7477; WAN024FDK; Start 50; Stop 74
attacaaggatgcgatttactactt

SEQ ID NO: 469039 - DNA, 25 bp, Artificial
  probe
  misc_feature (1)..(25): SEQ ID NO: 7477; WAN024FDK; Start 5; Stop 29
gtatgattaactctcaagtcttcga

SEQ ID NO: 469040 - DNA, 25 bp, Artificial
  probe
  misc_feature (1)..(25): SEQ ID NO: 7477; WAN024FDK; Start 46; Stop 70
agttattacaaggatgcgatttact

SEQ ID NO: 469041 - DNA, 25 bp, Artificial
  probe
  misc_feature (1)..(25): SEQ ID NO: 7477; WAN024FDK; Start 49; Stop 73
tattacaaggatgcgatttactact

SEQ ID NO: 469042 - DNA, 25 bp, Artificial
  probe
  misc_feature (1)..(25): SEQ ID NO: 7477; WAN024FDK; Start 48; Stop 72
ttattacaaggatgcgatttactac

SEQ ID NO: 469043 - DNA, 25 bp, Artificial
  probe
  misc_feature (1)..(25): SEQ ID NO: 7477; WAN024FDK; Start 47; Stop 71
gttattacaaggatgcgatttacta

SEQ ID NO: 469044 - DNA, 25 bp, Artificial
  probe
  misc_feature (1)..(25): SEQ ID NO: 7477; WAN024FDK; Start 55; Stop 79
aaggatgcgatttactacttcaaaa

SEQ ID NO: 469045 - DNA, 25 bp, Artificial
  probe
  misc_feature (1)..(25): SEQ ID NO: 7477; WAN024FDK; Start 38; Stop 62
ttttcaacagttattacaaggatgc

SEQ ID NO: 469046 - DNA, 25 bp, Artificial
  probe
  misc_feature (1)..(25): SEQ ID NO: 7477; WAN024FDK; Start 35; Stop 59
ggattttcaacagttattacaagga

SEQ ID NO: 469047 - DNA, 25 bp, Artificial
  probe
  misc_feature (1)..(25): SEQ ID NO: 7477; WAN024FDK; Start 34; Stop 58
aggattttcaacagttattacaagg

SEQ ID NO: 469048 - DNA, 25 bp, Artificial
  probe
  misc_feature (1)..(25): SEQ ID NO: 7477; WAN024FDK; Start 2; Stop 26
tgagtatgattaactctcaagtctt

SEQ ID NO: 469049 - DNA, 25 bp, Artificial
  probe
  misc_feature (1)..(25): SEQ ID NO: 7477; WAN024FDK; Start 6; Stop 30
tatgattaactctcaagtcttcgaa

SEQ ID NO: 469050 - DNA, 25 bp, Artificial
  probe
  misc_feature (1)..(25): SEQ ID NO: 7477; WAN024FDK; Start 15; Stop 39
ctctcaagtcttcgaaatcaggatt

SEQ ID NO: 469051 - DNA, 25 bp, Artificial
  probe
  misc_feature (1)..(25): SEQ ID NO: 7477; WAN024FDK; Start 12; Stop 36
taactctcaagtcttcgaaatcagg

SEQ ID NO: 469052 - DNA, 25 bp, Artificial
  probe
  misc_feature (1)..(25): SEQ ID NO: 7477; WAN024FDK; Start 32; Stop 56
tcaggattttcaacagttattacaa

SEQ ID NO: 469053 - DNA, 25 bp, Artificial
  probe
  misc_feature (1)..(25): SEQ ID NO: 7477; WAN024FDK; Start 3; Stop 27
gagtatgattaactctcaagtcttc

SEQ ID NO: 469054 - DNA, 25 bp, Artificial
  probe
  misc_feature (1)..(25): SEQ ID NO: 7477; WAN024FDK; Start 16; Stop 40
tctcaagtcttcgaaatcaggattt

SEQ ID NO: 469055 - DNA, 25 bp, Artificial
  probe
  misc_feature (1)..(25): SEQ ID NO: 7477; WAN024FDK; Start 11; Stop 35
ttaactctcaagtcttcgaaatcag

SEQ ID NO: 469056 - DNA, 25 bp, Artificial
  probe
  misc_feature (1)..(25): SEQ ID NO: 7477; WAN024FDK; Start 33; Stop 57
caggattttcaacagttattacaag

SEQ ID NO: 469057 - DNA, 25 bp, Artificial
  probe
  misc_feature (1)..(25): SEQ ID NO: 7477; WAN024FDK; Start 31; Stop 55
atcaggattttcaacagttattaca

SEQ ID NO: 469058 - DNA, 25 bp, Artificial
  probe
  misc_feature (1)..(25): SEQ ID NO: 7477; WAN024FDK; Start 14; Stop 38
actctcaagtcttcgaaatcaggat

SEQ ID NO: 469059 - DNA, 25 bp, Artificial
  probe
  misc_feature (1)..(25): SEQ ID NO: 7478; WAN024BVJ; Start 81; Stop 105
cttggaagagttgtgtgagagtaag

SEQ ID NO: 469060 - DNA, 25 bp, Artificial
  probe
  misc_feature (1)..(25): SEQ ID NO: 7478; WAN024BVJ; Start 154; Stop 178
ttggataagcgtatcaatcagtcta

SEQ ID NO: 469061 - DNA, 25 bp, Artificial
  probe
  misc_feature (1)..(25): SEQ ID NO: 7478; WAN024BVJ; Start 155; Stop 179
tggataagcgtatcaatcagtctat

SEQ ID NO: 469062 - DNA, 25 bp, Artificial
  probe
  misc_feature (1)..(25): SEQ ID NO: 7478; WAN024BVJ; Start 82; Stop 106
ttggaagagttgtgtgagagtaagg

SEQ ID NO: 469063 - DNA, 25 bp, Artificial
  probe
  misc_feature (1)..(25): SEQ ID NO: 7478; WAN024BVJ; Start 80; Stop 104
tcttggaagagttgtgtgagagtaa

SEQ ID NO: 469064 - DNA, 25 bp, Artificial
  probe
  misc_feature (1)..(25): SEQ ID NO: 7478; WAN024BVJ; Start 84; Stop 108
ggaagagttgtgtgagagtaaggag

SEQ ID NO: 469065 - DNA, 25 bp, Artificial
  probe
  misc_feature (1)..(25): SEQ ID NO: 7478; WAN024BVJ; Start 156; Stop 180
ggataagcgtatcaatcagtctatt

SEQ ID NO: 469066 - DNA, 25 bp, Artificial
  probe
  misc_feature (1)..(25): SEQ ID NO: 7478; WAN024BVJ; Start 52; Stop 76
acttctgctaatattcacgattctc

SEQ ID NO: 469067 - DNA, 25 bp, Artificial
  probe
  misc_feature (1)..(25): SEQ ID NO: 7478; WAN024BVJ; Start 79; Stop 103
gtcttggaagagttgtgtgagagta

SEQ ID NO: 469068 - DNA, 25 bp, Artificial
  probe
  misc_feature (1)..(25): SEQ ID NO: 7478; WAN024BVJ; Start 167; Stop 191
tcaatcagtctatttctcgtatccg

SEQ ID NO: 469069 - DNA, 25 bp, Artificial
  probe
  misc_feature (1)..(25): SEQ ID NO: 7478; WAN024BVJ; Start 85; Stop 109
gaagagttgtgtgagagtaaggagc

SEQ ID NO: 469070 - DNA, 25 bp, Artificial
  probe
  misc_feature (1)..(25): SEQ ID NO: 7478; WAN024BVJ; Start 83; Stop 107
tggaagagttgtgtgagagtaagga

SEQ ID NO: 469071 - DNA, 25 bp, Artificial
  probe
  misc_feature (1)..(25): SEQ ID NO: 7478; WAN024BVJ; Start 161; Stop 185
agcgtatcaatcagtctatttctcg

SEQ ID NO: 469072 - DNA, 25 bp, Artificial
  probe
  misc_feature (1)..(25): SEQ ID NO: 7478; WAN024BVJ; Start 162; Stop 186
gcgtatcaatcagtctatttctcgt

SEQ ID NO: 469073 - DNA, 25 bp, Artificial
  probe
  misc_feature (1)..(25): SEQ ID NO: 7478; WAN024BVJ; Start 160; Stop 184
aagcgtatcaatcagtctatttctc

SEQ ID NO: 469074 - DNA, 25 bp, Artificial
  probe
  misc_feature (1)..(25): SEQ ID NO: 7478; WAN024BVJ; Start 143; Stop 167
ccttgactgatttggataagcgtat

SEQ ID NO: 469075 - DNA, 25 bp, Artificial
  probe
  misc_feature (1)..(25): SEQ ID NO: 7478; WAN024BVJ; Start 169; Stop 193
aatcagtctatttctcgtatccgct

SEQ ID NO: 469076 - DNA, 25 bp, Artificial
  probe
  misc_feature (1)..(25): SEQ ID NO: 7478; WAN024BVJ; Start 168; Stop 192
caatcagtctatttctcgtatccgc

SEQ ID NO: 469077 - DNA, 25 bp, Artificial
  probe
  misc_feature (1)..(25): SEQ ID NO: 7478; WAN024BVJ; Start 51; Stop 75
tacttctgctaatattcacgattct

SEQ ID NO: 469078 - DNA, 25 bp, Artificial
  probe
  misc_feature (1)..(25): SEQ ID NO: 7478; WAN024BVJ; Start 163; Stop 187
cgtatcaatcagtctatttctcgta

SEQ ID NO: 469079 - DNA, 25 bp, Artificial
  probe
  misc_feature (1)..(25): SEQ ID NO: 7478; WAN024BVJ; Start 153; Stop 177
tttggataagcgtatcaatcagtct

SEQ ID NO: 469080 - DNA, 25 bp, Artificial
  probe
  misc_feature (1)..(25): SEQ ID NO: 7478; WAN024BVJ; Start 144; Stop 168
cttgactgatttggataagcgtatc

SEQ ID NO: 469081 - DNA, 25 bp, Artificial
  probe
  misc_feature (1)..(25): SEQ ID NO: 7478; WAN024BVJ; Start 166; Stop 190
atcaatcagtctatttctcgtatcc

SEQ ID NO: 469082 - DNA, 25 bp, Artificial
  probe
  misc_feature (1)..(25): SEQ ID NO: 7478; WAN024BVJ; Start 152; Stop 176
atttggataagcgtatcaatcagtc

SEQ ID NO: 469083 - DNA, 25 bp, Artificial
  probe
  misc_feature (1)..(25): SEQ ID NO: 7478; WAN024BVJ; Start 101; Stop 125
gtaaggagccgatctttgatgatag

SEQ ID NO: 469084 - DNA, 25 bp, Artificial
  probe
  misc_feature (1)..(25): SEQ ID NO: 7478; WAN024BVJ; Start 140; Stop 164
aaaccttgactgatttggataagcg

SEQ ID NO: 469085 - DNA, 25 bp, Artificial
  probe
  misc_feature (1)..(25): SEQ ID NO: 7478; WAN024BVJ; Start 102; Stop 126
taaggagccgatctttgatgatagt

SEQ ID NO: 469086 - DNA, 25 bp, Artificial
  probe
  misc_feature (1)..(25): SEQ ID NO: 7478; WAN024BVJ; Start 100; Stop 124
agtaaggagccgatctttgatgata

SEQ ID NO: 469087 - DNA, 25 bp, Artificial
  probe
  misc_feature (1)..(25): SEQ ID NO: 7478; WAN024BVJ; Start 142; Stop 166
accttgactgatttggataagcgta

SEQ ID NO: 469088 - DNA, 25 bp, Artificial
  probe
  misc_feature (1)..(25): SEQ ID NO: 7478; WAN024BVJ; Start 53; Stop 77
cttctgctaatattcacgattctcg

SEQ ID NO: 469089 - DNA, 25 bp, Artificial
  probe
  misc_feature (1)..(25): SEQ ID NO: 7478; WAN024BVJ; Start 159; Stop 183
taagcgtatcaatcagtctatttct

SEQ ID NO: 469090 - DNA, 25 bp, Artificial
  probe
  misc_feature (1)..(25): SEQ ID NO: 7478; WAN024BVJ; Start 50; Stop 74
ttacttctgctaatattcacgattc

SEQ ID NO: 469091 - DNA, 25 bp, Artificial
  probe
  misc_feature (1)..(25): SEQ ID NO: 7478; WAN024BVJ; Start 298; Stop 322
ttgttgtataatatctgtcgtttcg

SEQ ID NO: 469092 - DNA, 25 bp, Artificial
  probe
  misc_feature (1)..(25): SEQ ID NO: 7479; WAN024BZB; Start 59; Stop 83
tgacagcaattctacagaatagtct

SEQ ID NO: 469093 - DNA, 25 bp, Artificial
  probe
  misc_feature (1)..(25): SEQ ID NO: 7479; WAN024BZB; Start 58; Stop 82
ttgacagcaattctacagaatagtc

SEQ ID NO: 469094 - DNA, 25 bp, Artificial
  probe
  misc_feature (1)..(25): SEQ ID NO: 7479; WAN024BZB; Start 15; Stop 39
tgattataaacacaagtgggaagga

SEQ ID NO: 469095 - DNA, 25 bp, Artificial
  probe
  misc_feature (1)..(25): SEQ ID NO: 7479; WAN024BZB; Start 60; Stop 84
gacagcaattctacagaatagtctt

SEQ ID NO: 469096 - DNA, 25 bp, Artificial
  probe
  misc_feature (1)..(25): SEQ ID NO: 7479; WAN024BZB; Start 16; Stop 40
gattataaacacaagtgggaaggaa

SEQ ID NO: 469097 - DNA, 25 bp, Artificial
  probe
  misc_feature (1)..(25): SEQ ID NO: 7479; WAN024BZB; Start 14; Stop 38
atgattataaacacaagtgggaagg

SEQ ID NO: 469098 - DNA, 25 bp, Artificial
  probe
  misc_feature (1)..(25): SEQ ID NO: 7479; WAN024BZB; Start 17; Stop 41
attataaacacaagtgggaaggaaa

SEQ ID NO: 469099 - DNA, 25 bp, Artificial
  probe
  misc_feature (1)..(25): SEQ ID NO: 7479; WAN024BZB; Start 61; Stop 85
acagcaattctacagaatagtctta

SEQ ID NO: 469100 - DNA, 25 bp, Artificial
  probe
  misc_feature (1)..(25): SEQ ID NO: 7479; WAN024BZB; Start 13; Stop 37
aatgattataaacacaagtgggaag

SEQ ID NO: 469101 - DNA, 25 bp, Artificial
  probe
  misc_feature (1)..(25): SEQ ID NO: 7479; WAN024BZB; Start 57; Stop 81
tttgacagcaattctacagaatagt

SEQ ID NO: 469102 - DNA, 25 bp, Artificial
  probe
  misc_feature (1)..(25): SEQ ID NO: 7479; WAN024BZB; Start 62; Stop 86
cagcaattctacagaatagtcttat

SEQ ID NO: 469103 - DNA, 25 bp, Artificial
  probe
  misc_feature (1)..(25): SEQ ID NO: 7479; WAN024BZB; Start 18; Stop 42
ttataaacacaagtgggaaggaaaa

SEQ ID NO: 469104 - DNA, 25 bp, Artificial
  probe
  misc_feature (1)..(25): SEQ ID NO: 7479; WAN024BZB; Start 12; Stop 36
taatgattataaacacaagtgggaa

SEQ ID NO: 469105 - DNA, 25 bp, Artificial
  probe
  misc_feature (1)..(25): SEQ ID NO: 7479; WAN024BZB; Start 11; Stop 35
ttaatgattataaacacaagtggga

SEQ ID NO: 469106 - DNA, 25 bp, Artificial
  probe
  misc_feature (1)..(25): SEQ ID NO: 7479; WAN024BZB; Start 66; Stop 90
aattctacagaatagtcttattgct

SEQ ID NO: 469107 - DNA, 25 bp, Artificial
  probe
  misc_feature (1)..(25): SEQ ID NO: 7479; WAN024BZB; Start 63; Stop 87
agcaattctacagaatagtcttatt

SEQ ID NO: 469108 - DNA, 25 bp, Artificial
  probe
  misc_feature (1)..(25): SEQ ID NO: 7479; WAN024BZB; Start 68; Stop 92
ttctacagaatagtcttattgctat

SEQ ID NO: 469109 - DNA, 25 bp, Artificial
  probe
  misc_feature (1)..(25): SEQ ID NO: 7479; WAN024BZB; Start 65; Stop 89
caattctacagaatagtcttattgc

SEQ ID NO: 469110 - DNA, 25 bp, Artificial
  probe
  misc_feature (1)..(25): SEQ ID NO: 7479; WAN024BZB; Start 64; Stop 88
gcaattctacagaatagtcttattg

SEQ ID NO: 469111 - DNA, 25 bp, Artificial
  probe
  misc_feature (1)..(25): SEQ ID NO: 7479; WAN024BZB; Start 10; Stop 34
tttaatgattataaacacaagtggg

SEQ ID NO: 469112 - DNA, 25 bp, Artificial
  probe
  misc_feature (1)..(25): SEQ ID NO: 7479; WAN024BZB; Start 67; Stop 91
attctacagaatagtcttattgcta

SEQ ID NO: 469113 - DNA, 25 bp, Artificial
  probe
  misc_feature (1)..(25): SEQ ID NO: 7479; WAN024BZB; Start 56; Stop 80
ttttgacagcaattctacagaatag

SEQ ID NO: 469114 - DNA, 25 bp, Artificial
  probe
  misc_feature (1)..(25): SEQ ID NO: 7480; WAN024BA3; Start 205; Stop 229
ttgaaggaagaattaactcgtaacc

SEQ ID NO: 469115 - DNA, 25 bp, Artificial
  probe
  misc_feature (1)..(25): SEQ ID NO: 7480; WAN024BA3; Start 206; Stop 230
tgaaggaagaattaactcgtaaccc

SEQ ID NO: 469116 - DNA, 25 bp, Artificial
  probe
  misc_feature (1)..(25): SEQ ID NO: 7480; WAN024BA3; Start 207; Stop 231
gaaggaagaattaactcgtaacccg

SEQ ID NO: 469117 - DNA, 25 bp, Artificial
  probe
  misc_feature (1)..(25): SEQ ID NO: 7480; WAN024BA3; Start 211; Stop 235
gaagaattaactcgtaacccgcaag

SEQ ID NO: 469118 - DNA, 25 bp, Artificial
  probe
  misc_feature (1)..(25): SEQ ID NO: 7480; WAN024BA3; Start 204; Stop 228
tttgaaggaagaattaactcgtaac

SEQ ID NO: 469119 - DNA, 25 bp, Artificial
  probe
  misc_feature (1)..(25): SEQ ID NO: 7480; WAN024BA3; Start 175; Stop 199
tttgagtcacttcgtcaggagattg

SEQ ID NO: 469120 - DNA, 25 bp, Artificial
  probe
  misc_feature (1)..(25): SEQ ID NO: 7480; WAN024BA3; Start 212; Stop 236
aagaattaactcgtaacccgcaagt

SEQ ID NO: 469121 - DNA, 25 bp, Artificial
  probe
  misc_feature (1)..(25): SEQ ID NO: 7480; WAN024BA3; Start 208; Stop 232
aaggaagaattaactcgtaacccgc

SEQ ID NO: 469122 - DNA, 25 bp, Artificial
  probe
  misc_feature (1)..(25): SEQ ID NO: 7480; WAN024BA3; Start 210; Stop 234
ggaagaattaactcgtaacccgcaa

SEQ ID NO: 469123 - DNA, 25 bp, Artificial
  probe
  misc_feature (1)..(25): SEQ ID NO: 7480; WAN024BA3; Start 214; Stop 238
gaattaactcgtaacccgcaagtga

SEQ ID NO: 469124 - DNA, 25 bp, Artificial
  probe
  misc_feature (1)..(25): SEQ ID NO: 7480; WAN024BA3; Start 213; Stop 237
agaattaactcgtaacccgcaagtg

SEQ ID NO: 469125 - DNA, 25 bp, Artificial
  probe
  misc_feature (1)..(25): SEQ ID NO: 7480; WAN024BA3; Start 215; Stop 239
aattaactcgtaacccgcaagtgag

SEQ ID NO: 469126 - DNA, 25 bp, Artificial
  probe
  misc_feature (1)..(25): SEQ ID NO: 7480; WAN024BA3; Start 176; Stop 200
ttgagtcacttcgtcaggagattgc

SEQ ID NO: 469127 - DNA, 25 bp, Artificial
  probe
  misc_feature (1)..(25): SEQ ID NO: 7480; WAN024BA3; Start 209; Stop 233
aggaagaattaactcgtaacccgca

SEQ ID NO: 469128 - DNA, 25 bp, Artificial
  probe
  misc_feature (1)..(25): SEQ ID NO: 7480; WAN024BA3; Start 174; Stop 198
ttttgagtcacttcgtcaggagatt

SEQ ID NO: 469129 - DNA, 25 bp, Artificial
  probe
  misc_feature (1)..(25): SEQ ID NO: 7480; WAN024BA3; Start 173; Stop 197
gttttgagtcacttcgtcaggagat

SEQ ID NO: 469130 - DNA, 25 bp, Artificial
  probe
  misc_feature (1)..(25): SEQ ID NO: 7480; WAN024BA3; Start 63; Stop 87
tgacttgtactcaatgaaaatcaaa

SEQ ID NO: 469131 - DNA, 25 bp, Artificial
  probe
  misc_feature (1)..(25): SEQ ID NO: 7480; WAN024BA3; Start 65; Stop 89
acttgtactcaatgaaaatcaaaga

SEQ ID NO: 469132 - DNA, 25 bp, Artificial
  probe
  misc_feature (1)..(25): SEQ ID NO: 7480; WAN024BA3; Start 53; Stop 77
gctgttttgttgacttgtactcaat

SEQ ID NO: 469133 - DNA, 25 bp, Artificial
  probe
  misc_feature (1)..(25): SEQ ID NO: 7480; WAN024BA3; Start 55; Stop 79
tgttttgttgacttgtactcaatga

SEQ ID NO: 469134 - DNA, 25 bp, Artificial
  probe
  misc_feature (1)..(25): SEQ ID NO: 7480; WAN024BA3; Start 64; Stop 88
gacttgtactcaatgaaaatcaaag

SEQ ID NO: 469135 - DNA, 25 bp, Artificial
  probe
  misc_feature (1)..(25): SEQ ID NO: 7480; WAN024BA3; Start 54; Stop 78
ctgttttgttgacttgtactcaatg

SEQ ID NO: 469136 - DNA, 25 bp, Artificial
  probe
  misc_feature (1)..(25): SEQ ID NO: 7480; WAN024BA3; Start 56; Stop 80
gttttgttgacttgtactcaatgaa

SEQ ID NO: 469137 - DNA, 25 bp, Artificial
  probe
  misc_feature (1)..(25): SEQ ID NO: 7480; WAN024BA3; Start 66; Stop 90
cttgtactcaatgaaaatcaaagag

SEQ ID NO: 469138 - DNA, 25 bp, Artificial
  probe
  misc_feature (1)..(25): SEQ ID NO: 7480; WAN024BA3; Start 61; Stop 85
gttgacttgtactcaatgaaaatca

SEQ ID NO: 469139 - DNA, 25 bp, Artificial
  probe
  misc_feature (1)..(25): SEQ ID NO: 7480; WAN024BA3; Start 60; Stop 84
tgttgacttgtactcaatgaaaatc

SEQ ID NO: 469140 - DNA, 25 bp, Artificial
  probe
  misc_feature (1)..(25): SEQ ID NO: 7480; WAN024BA3; Start 52; Stop 76
ggctgttttgttgacttgtactcaa

SEQ ID NO: 469141 - DNA, 25 bp, Artificial
  probe
  misc_feature (1)..(25): SEQ ID NO: 7480; WAN024BA3; Start 51; Stop 75
gggctgttttgttgacttgtactca

SEQ ID NO: 469142 - DNA, 25 bp, Artificial
  probe
  misc_feature (1)..(25): SEQ ID NO: 7480; WAN024BA3; Start 58; Stop 82
tttgttgacttgtactcaatgaaaa

SEQ ID NO: 469143 - DNA, 25 bp, Artificial
  probe
  misc_feature (1)..(25): SEQ ID NO: 7480; WAN024BA3; Start 57; Stop 81
ttttgttgacttgtactcaatgaaa

SEQ ID NO: 469144 - DNA, 25 bp, Artificial
  probe
  misc_feature (1)..(25): SEQ ID NO: 7480; WAN024BA3; Start 59; Stop 83
ttgttgacttgtactcaatgaaaat

SEQ ID NO: 469145 - DNA, 25 bp, Artificial
  probe
  misc_feature (1)..(25): SEQ ID NO: 7480; WAN024BA3; Start 62; Stop 86
ttgacttgtactcaatgaaaatcaa

SEQ ID NO: 469146 - DNA, 25 bp, Artificial
  probe
  misc_feature (1)..(25): SEQ ID NO: 7480; WAN024BA3; Start 50; Stop 74
ggggctgttttgttgacttgtactc

SEQ ID NO: 469147 - DNA, 25 bp, Artificial
  probe
  misc_feature (1)..(25): SEQ ID NO: 7481; WAN024BW4; Start 69; Stop 93
cagatatttgcttgatttcattcca

SEQ ID NO: 469148 - DNA, 25 bp, Artificial
  probe
  misc_feature (1)..(25): SEQ ID NO: 7481; WAN024BW4; Start 27; Stop 51
agttcctttctatttacaggtcagc

SEQ ID NO: 469149 - DNA, 25 bp, Artificial
  probe
  misc_feature (1)..(25): SEQ ID NO: 7481; WAN024BW4; Start 41; Stop 65
tacaggtcagcttattccaaacttt

SEQ ID NO: 469150 - DNA, 25 bp, Artificial
  probe
  misc_feature (1)..(25): SEQ ID NO: 7481; WAN024BW4; Start 40; Stop 64
ttacaggtcagcttattccaaactt

SEQ ID NO: 469151 - DNA, 25 bp, Artificial
  probe
  misc_feature (1)..(25): SEQ ID NO: 7481; WAN024BW4; Start 39; Stop 63
tttacaggtcagcttattccaaact

SEQ ID NO: 469152 - DNA, 25 bp, Artificial
  probe
  misc_feature (1)..(25): SEQ ID NO: 7481; WAN024BW4; Start 38; Stop 62
atttacaggtcagcttattccaaac

SEQ ID NO: 469153 - DNA, 25 bp, Artificial
  probe
  misc_feature (1)..(25): SEQ ID NO: 7481; WAN024BW4; Start 35; Stop 59
tctatttacaggtcagcttattcca

SEQ ID NO: 469154 - DNA, 25 bp, Artificial
  probe
  misc_feature (1)..(25): SEQ ID NO: 7481; WAN024BW4; Start 70; Stop 94
agatatttgcttgatttcattccat

SEQ ID NO: 469155 - DNA, 25 bp, Artificial
  probe
  misc_feature (1)..(25): SEQ ID NO: 7481; WAN024BW4; Start 36; Stop 60
ctatttacaggtcagcttattccaa

SEQ ID NO: 469156 - DNA, 25 bp, Artificial
  probe
  misc_feature (1)..(25): SEQ ID NO: 7481; WAN024BW4; Start 34; Stop 58
ttctatttacaggtcagcttattcc

SEQ ID NO: 469157 - DNA, 25 bp, Artificial
  probe
  misc_feature (1)..(25): SEQ ID NO: 7481; WAN024BW4; Start 37; Stop 61
tatttacaggtcagcttattccaaa

SEQ ID NO: 469158 - DNA, 25 bp, Artificial
  probe
  misc_feature (1)..(25): SEQ ID NO: 7481; WAN024BW4; Start 26; Stop 50
tagttcctttctatttacaggtcag

SEQ ID NO: 469159 - DNA, 25 bp, Artificial
  probe
  misc_feature (1)..(25): SEQ ID NO: 7481; WAN024BW4; Start 29; Stop 53
ttcctttctatttacaggtcagctt

SEQ ID NO: 469160 - DNA, 25 bp, Artificial
  probe
  misc_feature (1)..(25): SEQ ID NO: 7481; WAN024BW4; Start 28; Stop 52
gttcctttctatttacaggtcagct

SEQ ID NO: 469161 - DNA, 25 bp, Artificial
  probe
  misc_feature (1)..(25): SEQ ID NO: 7481; WAN024BW4; Start 30; Stop 54
tcctttctatttacaggtcagctta

SEQ ID NO: 469162 - DNA, 25 bp, Artificial
  probe
  misc_feature (1)..(25): SEQ ID NO: 7481; WAN024BW4; Start 71; Stop 95
gatatttgcttgatttcattccatt

SEQ ID NO: 469163 - DNA, 25 bp, Artificial
  probe
  misc_feature (1)..(25): SEQ ID NO: 7481; WAN024BW4; Start 78; Stop 102
gcttgatttcattccattttgtgtc

SEQ ID NO: 469164 - DNA, 25 bp, Artificial
  probe
  misc_feature (1)..(25): SEQ ID NO: 7481; WAN024BW4; Start 77; Stop 101
tgcttgatttcattccattttgtgt

SEQ ID NO: 469165 - DNA, 25 bp, Artificial
  probe
  misc_feature (1)..(25): SEQ ID NO: 7481; WAN024BW4; Start 76; Stop 100
ttgcttgatttcattccattttgtg

SEQ ID NO: 469166 - DNA, 25 bp, Artificial
  probe
  misc_feature (1)..(25): SEQ ID NO: 7481; WAN024BW4; Start 75; Stop 99
tttgcttgatttcattccattttgt

SEQ ID NO: 469167 - DNA, 25 bp, Artificial
  probe
  misc_feature (1)..(25): SEQ ID NO: 7481; WAN024BW4; Start 31; Stop 55
cctttctatttacaggtcagcttat

SEQ ID NO: 469168 - DNA, 25 bp, Artificial
  probe
  misc_feature (1)..(25): SEQ ID NO: 7481; WAN024BW4; Start 68; Stop 92
gcagatatttgcttgatttcattcc

SEQ ID NO: 469169 - DNA, 25 bp, Artificial
  probe
  misc_feature (1)..(25): SEQ ID NO: 7481; WAN024BW4; Start 25; Stop 49
atagttcctttctatttacaggtca

SEQ ID NO: 469170 - DNA, 25 bp, Artificial
  probe
  misc_feature (1)..(25): SEQ ID NO: 7481; WAN024BW4; Start 72; Stop 96
atatttgcttgatttcattccattt

SEQ ID NO: 469171 - DNA, 25 bp, Artificial
  probe
  misc_feature (1)..(25): SEQ ID NO: 7481; WAN024BW4; Start 33; Stop 57
tttctatttacaggtcagcttattc

SEQ ID NO: 469172 - DNA, 25 bp, Artificial
  probe
  misc_feature (1)..(25): SEQ ID NO: 7481; WAN024BW4; Start 32; Stop 56
ctttctatttacaggtcagcttatt

SEQ ID NO: 469173 - DNA, 25 bp, Artificial
  probe
  misc_feature (1)..(25): SEQ ID NO: 7481; WAN024BW4; Start 74; Stop 98
atttgcttgatttcattccattttg

SEQ ID NO: 469174 - DNA, 25 bp, Artificial
  probe
  misc_feature (1)..(25): SEQ ID NO: 7481; WAN024BW4; Start 43; Stop 67
caggtcagcttattccaaactttta

SEQ ID NO: 469175 - DNA, 25 bp, Artificial
  probe
  misc_feature (1)..(25): SEQ ID NO: 7481; WAN024BW4; Start 44; Stop 68
aggtcagcttattccaaacttttag

SEQ ID NO: 469176 - DNA, 25 bp, Artificial
  probe
  misc_feature (1)..(25): SEQ ID NO: 7481; WAN024BW4; Start 42; Stop 66
acaggtcagcttattccaaactttt

SEQ ID NO: 469177 - DNA, 25 bp, Artificial
  probe
  misc_feature (1)..(25): SEQ ID NO: 7481; WAN024BW4; Start 73; Stop 97
tatttgcttgatttcattccatttt

SEQ ID NO: 469178 - DNA, 25 bp, Artificial
  probe
  misc_feature (1)..(25): SEQ ID NO: 7481; WAN024BW4; Start 24; Stop 48
tatagttcctttctatttacaggtc

SEQ ID NO: 469179 - DNA, 25 bp, Artificial
  probe
  misc_feature (1)..(25): SEQ ID NO: 7481; WAN024BW4; Start 48; Stop 72
cagcttattccaaacttttagcaga

SEQ ID NO: 469180 - DNA, 25 bp, Artificial
  probe
  misc_feature (1)..(25): SEQ ID NO: 7482; WAN024EXC; Start 228; Stop 252
tcacactcatctgttcatccttctc

SEQ ID NO: 469181 - DNA, 25 bp, Artificial
  probe
  misc_feature (1)..(25): SEQ ID NO: 7482; WAN024EXC; Start 227; Stop 251
gtcacactcatctgttcatccttct

SEQ ID NO: 469182 - DNA, 25 bp, Artificial
  probe
  misc_feature (1)..(25): SEQ ID NO: 7482; WAN024EXC; Start 226; Stop 250
agtcacactcatctgttcatccttc

SEQ ID NO: 469183 - DNA, 25 bp, Artificial
  probe
  misc_feature (1)..(25): SEQ ID NO: 7482; WAN024EXC; Start 134; Stop 158
gtgtattcctgaccgttgacaagta

SEQ ID NO: 469184 - DNA, 25 bp, Artificial
  probe
  misc_feature (1)..(25): SEQ ID NO: 7482; WAN024EXC; Start 225; Stop 249
cagtcacactcatctgttcatcctt

SEQ ID NO: 469185 - DNA, 25 bp, Artificial
  probe
  misc_feature (1)..(25): SEQ ID NO: 7482; WAN024EXC; Start 231; Stop 255
cactcatctgttcatccttctccag

SEQ ID NO: 469186 - DNA, 25 bp, Artificial
  probe
  misc_feature (1)..(25): SEQ ID NO: 7482; WAN024EXC; Start 229; Stop 253
cacactcatctgttcatccttctcc

SEQ ID NO: 469187 - DNA, 25 bp, Artificial
  probe
  misc_feature (1)..(25): SEQ ID NO: 7482; WAN024EXC; Start 135; Stop 159
tgtattcctgaccgttgacaagtac

SEQ ID NO: 469188 - DNA, 25 bp, Artificial
  probe
  misc_feature (1)..(25): SEQ ID NO: 7482; WAN024EXC; Start 255; Stop 279
gactagcttgtctctcaggactaag

SEQ ID NO: 469189 - DNA, 25 bp, Artificial
  probe
  misc_feature (1)..(25): SEQ ID NO: 7482; WAN024EXC; Start 137; Stop 161
tattcctgaccgttgacaagtacct

SEQ ID NO: 469190 - DNA, 25 bp, Artificial
  probe
  misc_feature (1)..(25): SEQ ID NO: 7482; WAN024EXC; Start 136; Stop 160
gtattcctgaccgttgacaagtacc

SEQ ID NO: 469191 - DNA, 25 bp, Artificial
  probe
  misc_feature (1)..(25): SEQ ID NO: 7482; WAN024EXC; Start 240; Stop 264
gttcatccttctccagactagcttg

SEQ ID NO: 469192 - DNA, 25 bp, Artificial
  probe
  misc_feature (1)..(25): SEQ ID NO: 7482; WAN024EXC; Start 230; Stop 254
acactcatctgttcatccttctcca

SEQ ID NO: 469193 - DNA, 25 bp, Artificial
  probe
  misc_feature (1)..(25): SEQ ID NO: 7482; WAN024EXC; Start 241; Stop 265
ttcatccttctccagactagcttgt

SEQ ID NO: 469194 - DNA, 25 bp, Artificial
  probe
  misc_feature (1)..(25): SEQ ID NO: 7482; WAN024EXC; Start 239; Stop 263
tgttcatccttctccagactagctt

SEQ ID NO: 469195 - DNA, 25 bp, Artificial
  probe
  misc_feature (1)..(25): SEQ ID NO: 7482; WAN024EXC; Start 258; Stop 282
tagcttgtctctcaggactaaggag

SEQ ID NO: 469196 - DNA, 25 bp, Artificial
  probe
  misc_feature (1)..(25): SEQ ID NO: 7482; WAN024EXC; Start 257; Stop 281
ctagcttgtctctcaggactaagga

SEQ ID NO: 469197 - DNA, 25 bp, Artificial
  probe
  misc_feature (1)..(25): SEQ ID NO: 7482; WAN024EXC; Start 256; Stop 280
actagcttgtctctcaggactaagg

SEQ ID NO: 469198 - DNA, 25 bp, Artificial
  probe
  misc_feature (1)..(25): SEQ ID NO: 7482; WAN024EXC; Start 236; Stop 260
atctgttcatccttctccagactag

SEQ ID NO: 469199 - DNA, 25 bp, Artificial
  probe
  misc_feature (1)..(25): SEQ ID NO: 7482; WAN024EXC; Start 235; Stop 259
catctgttcatccttctccagacta

SEQ ID NO: 469200 - DNA, 25 bp, Artificial
  probe
  misc_feature (1)..(25): SEQ ID NO: 7482; WAN024EXC; Start 242; Stop 266
tcatccttctccagactagcttgtc

SEQ ID NO: 469201 - DNA, 25 bp, Artificial
  probe
  misc_feature (1)..(25): SEQ ID NO: 7482; WAN024EXC; Start 238; Stop 262
ctgttcatccttctccagactagct

SEQ ID NO: 469202 - DNA, 25 bp, Artificial
  probe
  misc_feature (1)..(25): SEQ ID NO: 7482; WAN024EXC; Start 138; Stop 162
attcctgaccgttgacaagtacctc

SEQ ID NO: 469203 - DNA, 25 bp, Artificial
  probe
  misc_feature (1)..(25): SEQ ID NO: 7482; WAN024EXC; Start 107; Stop 131
gagggttcttctgtcacatagggaa

SEQ ID NO: 469204 - DNA, 25 bp, Artificial
  probe
  misc_feature (1)..(25): SEQ ID NO: 7482; WAN024EXC; Start 117; Stop 141
ctgtcacatagggaacggtgtattc

SEQ ID NO: 469205 - DNA, 25 bp, Artificial
  probe
  misc_feature (1)..(25): SEQ ID NO: 7482; WAN024EXC; Start 116; Stop 140
tctgtcacatagggaacggtgtatt

SEQ ID NO: 469206 - DNA, 25 bp, Artificial
  probe
  misc_feature (1)..(25): SEQ ID NO: 7482; WAN024EXC; Start 115; Stop 139
ttctgtcacatagggaacggtgtat

SEQ ID NO: 469207 - DNA, 25 bp, Artificial
  probe
  misc_feature (1)..(25): SEQ ID NO: 7482; WAN024EXC; Start 254; Stop 278
agactagcttgtctctcaggactaa

SEQ ID NO: 469208 - DNA, 25 bp, Artificial
  probe
  misc_feature (1)..(25): SEQ ID NO: 7482; WAN024EXC; Start 233; Stop 257
ctcatctgttcatccttctccagac

SEQ ID NO: 469209 - DNA, 25 bp, Artificial
  probe
  misc_feature (1)..(25): SEQ ID NO: 7482; WAN024EXC; Start 234; Stop 258
tcatctgttcatccttctccagact

SEQ ID NO: 469210 - DNA, 25 bp, Artificial
  probe
  misc_feature (1)..(25): SEQ ID NO: 7482; WAN024EXC; Start 232; Stop 256
actcatctgttcatccttctccaga

SEQ ID NO: 469211 - DNA, 25 bp, Artificial
  probe
  misc_feature (1)..(25): SEQ ID NO: 7482; WAN024EXC; Start 188; Stop 212
aaagttcccaccacattctcactca

SEQ ID NO: 469212 - DNA, 25 bp, Artificial
  probe
  misc_feature (1)..(25): SEQ ID NO: 7482; WAN024EXC; Start 106; Stop 130
agagggttcttctgtcacataggga

SEQ ID NO: 469213 - DNA, 25 bp, Artificial
  probe
  misc_feature (1)..(25): SEQ ID NO: 7483; WAN024BLT; Start 17; Stop 41
tagatacttgtaccacgatgtttgt

SEQ ID NO: 469214 - DNA, 25 bp, Artificial
  probe
  misc_feature (1)..(25): SEQ ID NO: 7483; WAN024BLT; Start 19; Stop 43
gatacttgtaccacgatgtttgttg

SEQ ID NO: 469215 - DNA, 25 bp, Artificial
  probe
  misc_feature (1)..(25): SEQ ID NO: 7483; WAN024BLT; Start 18; Stop 42
agatacttgtaccacgatgtttgtt

SEQ ID NO: 469216 - DNA, 25 bp, Artificial
  probe
  misc_feature (1)..(25): SEQ ID NO: 7483; WAN024BLT; Start 16; Stop 40
gtagatacttgtaccacgatgtttg

SEQ ID NO: 469217 - DNA, 25 bp, Artificial
  probe
  misc_feature (1)..(25): SEQ ID NO: 7483; WAN024BLT; Start 21; Stop 45
tacttgtaccacgatgtttgttgat

SEQ ID NO: 469218 - DNA, 25 bp, Artificial
  probe
  misc_feature (1)..(25): SEQ ID NO: 7483; WAN024BLT; Start 20; Stop 44
atacttgtaccacgatgtttgttga

SEQ ID NO: 469219 - DNA, 25 bp, Artificial
  probe
  misc_feature (1)..(25): SEQ ID NO: 7483; WAN024BLT; Start 15; Stop 39
agtagatacttgtaccacgatgttt

SEQ ID NO: 469220 - DNA, 25 bp, Artificial
  probe
  misc_feature (1)..(25): SEQ ID NO: 7483; WAN024BLT; Start 22; Stop 46
acttgtaccacgatgtttgttgatc

SEQ ID NO: 469221 - DNA, 25 bp, Artificial
  probe
  misc_feature (1)..(25): SEQ ID NO: 7483; WAN024BLT; Start 14; Stop 38
aagtagatacttgtaccacgatgtt

SEQ ID NO: 469222 - DNA, 25 bp, Artificial
  probe
  misc_feature (1)..(25): SEQ ID NO: 7483; WAN024BLT; Start 13; Stop 37
aaagtagatacttgtaccacgatgt

SEQ ID NO: 469223 - DNA, 25 bp, Artificial
  probe
  misc_feature (1)..(25): SEQ ID NO: 7483; WAN024BLT; Start 10; Stop 34
ttcaaagtagatacttgtaccacga

SEQ ID NO: 469224 - DNA, 25 bp, Artificial
  probe
  misc_feature (1)..(25): SEQ ID NO: 7483; WAN024BLT; Start 12; Stop 36
caaagtagatacttgtaccacgatg

SEQ ID NO: 469225 - DNA, 25 bp, Artificial
  probe
  misc_feature (1)..(25): SEQ ID NO: 7483; WAN024BLT; Start 11; Stop 35
tcaaagtagatacttgtaccacgat

SEQ ID NO: 469226 - DNA, 25 bp, Artificial
  probe
  misc_feature (1)..(25): SEQ ID NO: 7483; WAN024BLT; Start 9; Stop 33
tttcaaagtagatacttgtaccacg

SEQ ID NO: 469227 - DNA, 25 bp, Artificial
  probe
  misc_feature (1)..(25): SEQ ID NO: 7483; WAN024BLT; Start 33; Stop 57
gatgtttgttgatcgagttattaac

SEQ ID NO: 469228 - DNA, 25 bp, Artificial
  probe
  misc_feature (1)..(25): SEQ ID NO: 7483; WAN024BLT; Start 42; Stop 66
tgatcgagttattaacaaaagagct

SEQ ID NO: 469229 - DNA, 25 bp, Artificial
  probe
  misc_feature (1)..(25): SEQ ID NO: 7483; WAN024BLT; Start 41; Stop 65
ttgatcgagttattaacaaaagagc

SEQ ID NO: 469230 - DNA, 25 bp, Artificial
  probe
  misc_feature (1)..(25): SEQ ID NO: 7483; WAN024BLT; Start 45; Stop 69
tcgagttattaacaaaagagctact

SEQ ID NO: 469231 - DNA, 25 bp, Artificial
  probe
  misc_feature (1)..(25): SEQ ID NO: 7483; WAN024BLT; Start 8; Stop 32
atttcaaagtagatacttgtaccac

SEQ ID NO: 469232 - DNA, 25 bp, Artificial
  probe
  misc_feature (1)..(25): SEQ ID NO: 7483; WAN024BLT; Start 46; Stop 70
cgagttattaacaaaagagctactt

SEQ ID NO: 469233 - DNA, 25 bp, Artificial
  probe
  misc_feature (1)..(25): SEQ ID NO: 7483; WAN024BLT; Start 44; Stop 68
atcgagttattaacaaaagagctac

SEQ ID NO: 469234 - DNA, 25 bp, Artificial
  probe
  misc_feature (1)..(25): SEQ ID NO: 7483; WAN024BLT; Start 34; Stop 58
atgtttgttgatcgagttattaaca

SEQ ID NO: 469235 - DNA, 25 bp, Artificial
  probe
  misc_feature (1)..(25): SEQ ID NO: 7483; WAN024BLT; Start 30; Stop 54
cacgatgtttgttgatcgagttatt

SEQ ID NO: 469236 - DNA, 25 bp, Artificial
  probe
  misc_feature (1)..(25): SEQ ID NO: 7483; WAN024BLT; Start 43; Stop 67
gatcgagttattaacaaaagagcta

SEQ ID NO: 469237 - DNA, 25 bp, Artificial
  probe
  misc_feature (1)..(25): SEQ ID NO: 7483; WAN024BLT; Start 31; Stop 55
acgatgtttgttgatcgagttatta

SEQ ID NO: 469238 - DNA, 25 bp, Artificial
  probe
  misc_feature (1)..(25): SEQ ID NO: 7483; WAN024BLT; Start 29; Stop 53
ccacgatgtttgttgatcgagttat

SEQ ID NO: 469239 - DNA, 25 bp, Artificial
  probe
  misc_feature (1)..(25): SEQ ID NO: 7483; WAN024BLT; Start 7; Stop 31
aatttcaaagtagatacttgtacca

SEQ ID NO: 469240 - DNA, 25 bp, Artificial
  probe
  misc_feature (1)..(25): SEQ ID NO: 7483; WAN024BLT; Start 40; Stop 64
gttgatcgagttattaacaaaagag

SEQ ID NO: 469241 - DNA, 25 bp, Artificial
  probe
  misc_feature (1)..(25): SEQ ID NO: 7483; WAN024BLT; Start 32; Stop 56
cgatgtttgttgatcgagttattaa

SEQ ID NO: 469242 - DNA, 25 bp, Artificial
  probe
  misc_feature (1)..(25): SEQ ID NO: 7483; WAN024BLT; Start 23; Stop 47
cttgtaccacgatgtttgttgatcg

SEQ ID NO: 469243 - DNA, 25 bp, Artificial
  probe
  misc_feature (1)..(25): SEQ ID NO: 7483; WAN024BLT; Start 28; Stop 52
accacgatgtttgttgatcgagtta

SEQ ID NO: 469244 - DNA, 25 bp, Artificial
  probe
  misc_feature (1)..(25): SEQ ID NO: 7483; WAN024BLT; Start 27; Stop 51
taccacgatgtttgttgatcgagtt

SEQ ID NO: 469245 - DNA, 25 bp, Artificial
  probe
  misc_feature (1)..(25): SEQ ID NO: 7483; WAN024BLT; Start 24; Stop 48
ttgtaccacgatgtttgttgatcga

SEQ ID NO: 469246 - DNA, 25 bp, Artificial
  probe
  misc_feature (1)..(25): SEQ ID NO: 7484; WAN024DEA; Start 14; Stop 38
tcagaaatatctacaggagtggaga

SEQ ID NO: 469247 - DNA, 25 bp, Artificial
  probe
  misc_feature (1)..(25): SEQ ID NO: 7484; WAN024DEA; Start 15; Stop 39
cagaaatatctacaggagtggagag

SEQ ID NO: 469248 - DNA, 25 bp, Artificial
  probe
  misc_feature (1)..(25): SEQ ID NO: 7484; WAN024DEA; Start 16; Stop 40
agaaatatctacaggagtggagagg

SEQ ID NO: 469249 - DNA, 25 bp, Artificial
  probe
  misc_feature (1)..(25): SEQ ID NO: 7484; WAN024DEA; Start 13; Stop 37
atcagaaatatctacaggagtggag

SEQ ID NO: 469250 - DNA, 25 bp, Artificial
  probe
  misc_feature (1)..(25): SEQ ID NO: 7484; WAN024DEA; Start 62; Stop 86
gcttcatagaccagataaacagtaa

SEQ ID NO: 469251 - DNA, 25 bp, Artificial
  probe
  misc_feature (1)..(25): SEQ ID NO: 7484; WAN024DEA; Start 22; Stop 46
atctacaggagtggagagggtaata

SEQ ID NO: 469252 - DNA, 25 bp, Artificial
  probe
  misc_feature (1)..(25): SEQ ID NO: 7484; WAN024DEA; Start 21; Stop 45
tatctacaggagtggagagggtaat

SEQ ID NO: 469253 - DNA, 25 bp, Artificial
  probe
  misc_feature (1)..(25): SEQ ID NO: 7484; WAN024DEA; Start 20; Stop 44
atatctacaggagtggagagggtaa

SEQ ID NO: 469254 - DNA, 25 bp, Artificial
  probe
  misc_feature (1)..(25): SEQ ID NO: 7484; WAN024DEA; Start 19; Stop 43
aatatctacaggagtggagagggta

SEQ ID NO: 469255 - DNA, 25 bp, Artificial
  probe
  misc_feature (1)..(25): SEQ ID NO: 7484; WAN024DEA; Start 12; Stop 36
aatcagaaatatctacaggagtgga

SEQ ID NO: 469256 - DNA, 25 bp, Artificial
  probe
  misc_feature (1)..(25): SEQ ID NO: 7484; WAN024DEA; Start 17; Stop 41
gaaatatctacaggagtggagaggg

SEQ ID NO: 469257 - DNA, 25 bp, Artificial
  probe
  misc_feature (1)..(25): SEQ ID NO: 7484; WAN024DEA; Start 194; Stop 218
aaatcttgagcaacagcagtagaag

SEQ ID NO: 469258 - DNA, 25 bp, Artificial
  probe
  misc_feature (1)..(25): SEQ ID NO: 7484; WAN024DEA; Start 25; Stop 49
tacaggagtggagagggtaatactt

SEQ ID NO: 469259 - DNA, 25 bp, Artificial
  probe
  misc_feature (1)..(25): SEQ ID NO: 7484; WAN024DEA; Start 18; Stop 42
aaatatctacaggagtggagagggt

SEQ ID NO: 469260 - DNA, 25 bp, Artificial
  probe
  misc_feature (1)..(25): SEQ ID NO: 7484; WAN024DEA; Start 23; Stop 47
tctacaggagtggagagggtaatac

SEQ ID NO: 469261 - DNA, 25 bp, Artificial
  probe
  misc_feature (1)..(25): SEQ ID NO: 7484; WAN024DEA; Start 195; Stop 219
aatcttgagcaacagcagtagaagc

SEQ ID NO: 469262 - DNA, 25 bp, Artificial
  probe
  misc_feature (1)..(25): SEQ ID NO: 7484; WAN024DEA; Start 24; Stop 48
ctacaggagtggagagggtaatact

SEQ ID NO: 469263 - DNA, 25 bp, Artificial
  probe
  misc_feature (1)..(25): SEQ ID NO: 7484; WAN024DEA; Start 61; Stop 85
agcttcatagaccagataaacagta

SEQ ID NO: 469264 - DNA, 25 bp, Artificial
  probe
  misc_feature (1)..(25): SEQ ID NO: 7484; WAN024DEA; Start 11; Stop 35
taatcagaaatatctacaggagtgg

SEQ ID NO: 469265 - DNA, 25 bp, Artificial
  probe
  misc_feature (1)..(25): SEQ ID NO: 7484; WAN024DEA; Start 65; Stop 89
tcatagaccagataaacagtaatca

SEQ ID NO: 469266 - DNA, 25 bp, Artificial
  probe
  misc_feature (1)..(25): SEQ ID NO: 7484; WAN024DEA; Start 92; Stop 116
tttgttatggaagcaatttcgacag

SEQ ID NO: 469267 - DNA, 25 bp, Artificial
  probe
  misc_feature (1)..(25): SEQ ID NO: 7484; WAN024DEA; Start 26; Stop 50
acaggagtggagagggtaatacttc

SEQ ID NO: 469268 - DNA, 25 bp, Artificial
  probe
  misc_feature (1)..(25): SEQ ID NO: 7484; WAN024DEA; Start 95; Stop 119
gttatggaagcaatttcgacaggtt

SEQ ID NO: 469269 - DNA, 25 bp, Artificial
  probe
  misc_feature (1)..(25): SEQ ID NO: 7484; WAN024DEA; Start 191; Stop 215
gtaaaatcttgagcaacagcagtag

SEQ ID NO: 469270 - DNA, 25 bp, Artificial
  probe
  misc_feature (1)..(25): SEQ ID NO: 7484; WAN024DEA; Start 96; Stop 120
ttatggaagcaatttcgacaggttg

SEQ ID NO: 469271 - DNA, 25 bp, Artificial
  probe
  misc_feature (1)..(25): SEQ ID NO: 7484; WAN024DEA; Start 37; Stop 61
gagggtaatacttccgttttccaaa

SEQ ID NO: 469272 - DNA, 25 bp, Artificial
  probe
  misc_feature (1)..(25): SEQ ID NO: 7484; WAN024DEA; Start 192; Stop 216
taaaatcttgagcaacagcagtaga

SEQ ID NO: 469273 - DNA, 25 bp, Artificial
  probe
  misc_feature (1)..(25): SEQ ID NO: 7484; WAN024DEA; Start 143; Stop 167
attttaccagtatttgcctcaacag

SEQ ID NO: 469274 - DNA, 25 bp, Artificial
  probe
  misc_feature (1)..(25): SEQ ID NO: 7484; WAN024DEA; Start 38; Stop 62
agggtaatacttccgttttccaaag

SEQ ID NO: 469275 - DNA, 25 bp, Artificial
  probe
  misc_feature (1)..(25): SEQ ID NO: 7484; WAN024DEA; Start 196; Stop 220
atcttgagcaacagcagtagaagca

SEQ ID NO: 469276 - DNA, 25 bp, Artificial
  probe
  misc_feature (1)..(25): SEQ ID NO: 7484; WAN024DEA; Start 93; Stop 117
ttgttatggaagcaatttcgacagg

SEQ ID NO: 469277 - DNA, 25 bp, Artificial
  probe
  misc_feature (1)..(25): SEQ ID NO: 7484; WAN024DEA; Start 66; Stop 90
catagaccagataaacagtaatcaa

SEQ ID NO: 469278 - DNA, 25 bp, Artificial
  probe
  misc_feature (1)..(25): SEQ ID NO: 7484; WAN024DEA; Start 142; Stop 166
aattttaccagtatttgcctcaaca

SEQ ID NO: 469279 - DNA, 25 bp, Artificial
  probe
  misc_feature (1)..(25): SEQ ID NO: 7485; WAN024G6H; Start 159; Stop 183
attcatctgtcaattccatcaaagc

SEQ ID NO: 469280 - DNA, 25 bp, Artificial
  probe
  misc_feature (1)..(25): SEQ ID NO: 7485; WAN024G6H; Start 91; Stop 115
gccatatttgagagcatcttccata

SEQ ID NO: 469281 - DNA, 25 bp, Artificial
  probe
  misc_feature (1)..(25): SEQ ID NO: 7485; WAN024G6H; Start 38; Stop 62
tcttgtttcaaatcttggataaccc

SEQ ID NO: 469282 - DNA, 25 bp, Artificial
  probe
  misc_feature (1)..(25): SEQ ID NO: 7485; WAN024G6H; Start 167; Stop 191
gtcaattccatcaaagcaacactag

SEQ ID NO: 469283 - DNA, 25 bp, Artificial
  probe
  misc_feature (1)..(25): SEQ ID NO: 7485; WAN024G6H; Start 39; Stop 63
cttgtttcaaatcttggataacccg

SEQ ID NO: 469284 - DNA, 25 bp, Artificial
  probe
  misc_feature (1)..(25): SEQ ID NO: 7485; WAN024G6H; Start 162; Stop 186
catctgtcaattccatcaaagcaac

SEQ ID NO: 469285 - DNA, 25 bp, Artificial
  probe
  misc_feature (1)..(25): SEQ ID NO: 7485; WAN024G6H; Start 161; Stop 185
tcatctgtcaattccatcaaagcaa

SEQ ID NO: 469286 - DNA, 25 bp, Artificial
  probe
  misc_feature (1)..(25): SEQ ID NO: 7485; WAN024G6H; Start 160; Stop 184
ttcatctgtcaattccatcaaagca

SEQ ID NO: 469287 - DNA, 25 bp, Artificial
  probe
  misc_feature (1)..(25): SEQ ID NO: 7485; WAN024G6H; Start 40; Stop 64
ttgtttcaaatcttggataacccgt

SEQ ID NO: 469288 - DNA, 25 bp, Artificial
  probe
  misc_feature (1)..(25): SEQ ID NO: 7485; WAN024G6H; Start 92; Stop 116
ccatatttgagagcatcttccatat

SEQ ID NO: 469289 - DNA, 25 bp, Artificial
  probe
  misc_feature (1)..(25): SEQ ID NO: 7485; WAN024G6H; Start 41; Stop 65
tgtttcaaatcttggataacccgtc

SEQ ID NO: 469290 - DNA, 25 bp, Artificial
  probe
  misc_feature (1)..(25): SEQ ID NO: 7485; WAN024G6H; Start 155; Stop 179
acaaattcatctgtcaattccatca

SEQ ID NO: 469291 - DNA, 25 bp, Artificial
  probe
  misc_feature (1)..(25): SEQ ID NO: 7485; WAN024G6H; Start 118; Stop 142
atgggtaatcataagggctgtcaat

SEQ ID NO: 469292 - DNA, 25 bp, Artificial
  probe
  misc_feature (1)..(25): SEQ ID NO: 7485; WAN024G6H; Start 119; Stop 143
tgggtaatcataagggctgtcaatt

SEQ ID NO: 469293 - DNA, 25 bp, Artificial
  probe
  misc_feature (1)..(25): SEQ ID NO: 7485; WAN024G6H; Start 166; Stop 190
tgtcaattccatcaaagcaacacta

SEQ ID NO: 469294 - DNA, 25 bp, Artificial
  probe
  misc_feature (1)..(25): SEQ ID NO: 7485; WAN024G6H; Start 163; Stop 187
atctgtcaattccatcaaagcaaca

SEQ ID NO: 469295 - DNA, 25 bp, Artificial
  probe
  misc_feature (1)..(25): SEQ ID NO: 7485; WAN024G6H; Start 37; Stop 61
ttcttgtttcaaatcttggataacc

SEQ ID NO: 469296 - DNA, 25 bp, Artificial
  probe
  misc_feature (1)..(25): SEQ ID NO: 7485; WAN024G6H; Start 117; Stop 141
gatgggtaatcataagggctgtcaa

SEQ ID NO: 469297 - DNA, 25 bp, Artificial
  probe
  misc_feature (1)..(25): SEQ ID NO: 7485; WAN024G6H; Start 156; Stop 180
caaattcatctgtcaattccatcaa

SEQ ID NO: 469298 - DNA, 25 bp, Artificial
  probe
  misc_feature (1)..(25): SEQ ID NO: 7485; WAN024G6H; Start 154; Stop 178
aacaaattcatctgtcaattccatc

SEQ ID NO: 469299 - DNA, 25 bp, Artificial
  probe
  misc_feature (1)..(25): SEQ ID NO: 7485; WAN024G6H; Start 158; Stop 182
aattcatctgtcaattccatcaaag

SEQ ID NO: 469300 - DNA, 25 bp, Artificial
  probe
  misc_feature (1)..(25): SEQ ID NO: 7485; WAN024G6H; Start 33; Stop 57
tttcttcttgtttcaaatcttggat

SEQ ID NO: 469301 - DNA, 25 bp, Artificial
  probe
  misc_feature (1)..(25): SEQ ID NO: 7485; WAN024G6H; Start 165; Stop 189
ctgtcaattccatcaaagcaacact

SEQ ID NO: 469302 - DNA, 25 bp, Artificial
  probe
  misc_feature (1)..(25): SEQ ID NO: 7485; WAN024G6H; Start 164; Stop 188
tctgtcaattccatcaaagcaacac

SEQ ID NO: 469303 - DNA, 25 bp, Artificial
  probe
  misc_feature (1)..(25): SEQ ID NO: 7485; WAN024G6H; Start 157; Stop 181
aaattcatctgtcaattccatcaaa

SEQ ID NO: 469304 - DNA, 25 bp, Artificial
  probe
  misc_feature (1)..(25): SEQ ID NO: 7485; WAN024G6H; Start 48; Stop 72
aatcttggataacccgtccttcttt

SEQ ID NO: 469305 - DNA, 25 bp, Artificial
  probe
  misc_feature (1)..(25): SEQ ID NO: 7485; WAN024G6H; Start 47; Stop 71
aaatcttggataacccgtccttctt

SEQ ID NO: 469306 - DNA, 25 bp, Artificial
  probe
  misc_feature (1)..(25): SEQ ID NO: 7485; WAN024G6H; Start 152; Stop 176
ttaacaaattcatctgtcaattcca

SEQ ID NO: 469307 - DNA, 25 bp, Artificial
  probe
  misc_feature (1)..(25): SEQ ID NO: 7485; WAN024G6H; Start 44; Stop 68
ttcaaatcttggataacccgtcctt

SEQ ID NO: 469308 - DNA, 25 bp, Artificial
  probe
  misc_feature (1)..(25): SEQ ID NO: 7485; WAN024G6H; Start 43; Stop 67
tttcaaatcttggataacccgtcct

SEQ ID NO: 469309 - DNA, 25 bp, Artificial
  probe
  misc_feature (1)..(25): SEQ ID NO: 7485; WAN024G6H; Start 42; Stop 66
gtttcaaatcttggataacccgtcc

SEQ ID NO: 469310 - DNA, 25 bp, Artificial
  probe
  misc_feature (1)..(25): SEQ ID NO: 7485; WAN024G6H; Start 49; Stop 73
atcttggataacccgtccttctttc

SEQ ID NO: 469311 - DNA, 25 bp, Artificial
  probe
  misc_feature (1)..(25): SEQ ID NO: 7485; WAN024G6H; Start 153; Stop 177
taacaaattcatctgtcaattccat

SEQ ID NO: 469312 - DNA, 25 bp, Artificial
  probe
  misc_feature (1)..(25): SEQ ID NO: 7486; WAN024C6V; Start 437; Stop 461
caggagtattcggtgttagtattga

SEQ ID NO: 469313 - DNA, 25 bp, Artificial
  probe
  misc_feature (1)..(25): SEQ ID NO: 7486; WAN024C6V; Start 436; Stop 460
tcaggagtattcggtgttagtattg

SEQ ID NO: 469314 - DNA, 25 bp, Artificial
  probe
  misc_feature (1)..(25): SEQ ID NO: 7486; WAN024C6V; Start 509; Stop 533
tattggcggatgctattaagttagt

SEQ ID NO: 469315 - DNA, 25 bp, Artificial
  probe
  misc_feature (1)..(25): SEQ ID NO: 7486; WAN024C6V; Start 508; Stop 532
ctattggcggatgctattaagttag

SEQ ID NO: 469316 - DNA, 25 bp, Artificial
  probe
  misc_feature (1)..(25): SEQ ID NO: 7486; WAN024C6V; Start 435; Stop 459
atcaggagtattcggtgttagtatt

SEQ ID NO: 469317 - DNA, 25 bp, Artificial
  probe
  misc_feature (1)..(25): SEQ ID NO: 7486; WAN024C6V; Start 520; Stop 544
gctattaagttagtggcagatggtt

SEQ ID NO: 469318 - DNA, 25 bp, Artificial
  probe
  misc_feature (1)..(25): SEQ ID NO: 7486; WAN024C6V; Start 441; Stop 465
agtattcggtgttagtattgaagga

SEQ ID NO: 469319 - DNA, 25 bp, Artificial
  probe
  misc_feature (1)..(25): SEQ ID NO: 7486; WAN024C6V; Start 438; Stop 462
aggagtattcggtgttagtattgaa

SEQ ID NO: 469320 - DNA, 25 bp, Artificial
  probe
  misc_feature (1)..(25): SEQ ID NO: 7486; WAN024C6V; Start 510; Stop 534
attggcggatgctattaagttagtg

SEQ ID NO: 469321 - DNA, 25 bp, Artificial
  probe
  misc_feature (1)..(25): SEQ ID NO: 7486; WAN024C6V; Start 440; Stop 464
gagtattcggtgttagtattgaagg

SEQ ID NO: 469322 - DNA, 25 bp, Artificial
  probe
  misc_feature (1)..(25): SEQ ID NO: 7486; WAN024C6V; Start 439; Stop 463
ggagtattcggtgttagtattgaag

SEQ ID NO: 469323 - DNA, 25 bp, Artificial
  probe
  misc_feature (1)..(25): SEQ ID NO: 7486; WAN024C6V; Start 507; Stop 531
actattggcggatgctattaagtta

SEQ ID NO: 469324 - DNA, 25 bp, Artificial
  probe
  misc_feature (1)..(25): SEQ ID NO: 7486; WAN024C6V; Start 433; Stop 457
ttatcaggagtattcggtgttagta

SEQ ID NO: 469325 - DNA, 25 bp, Artificial
  probe
  misc_feature (1)..(25): SEQ ID NO: 7486; WAN024C6V; Start 442; Stop 466
gtattcggtgttagtattgaaggaa

SEQ ID NO: 469326 - DNA, 25 bp, Artificial
  probe
  misc_feature (1)..(25): SEQ ID NO: 7486; WAN024C6V; Start 434; Stop 458
tatcaggagtattcggtgttagtat

SEQ ID NO: 469327 - DNA, 25 bp, Artificial
  probe
  misc_feature (1)..(25): SEQ ID NO: 7486; WAN024C6V; Start 506; Stop 530
gactattggcggatgctattaagtt

SEQ ID NO: 469328 - DNA, 25 bp, Artificial
  probe
  misc_feature (1)..(25): SEQ ID NO: 7486; WAN024C6V; Start 133; Stop 157
ttgacatctaccattgttgaagttg

SEQ ID NO: 469329 - DNA, 25 bp, Artificial
  probe
  misc_feature (1)..(25): SEQ ID NO: 7486; WAN024C6V; Start 342; Stop 366
tgctattaactctattgctaatgct

SEQ ID NO: 469330 - DNA, 25 bp, Artificial
  probe
  misc_feature (1)..(25): SEQ ID NO: 7486; WAN024C6V; Start 341; Stop 365
ctgctattaactctattgctaatgc

SEQ ID NO: 469331 - DNA, 25 bp, Artificial
  probe
  misc_feature (1)..(25): SEQ ID NO: 7486; WAN024C6V; Start 663; Stop 687
attcagcttgttaggtagtaaggtc

SEQ ID NO: 469332 - DNA, 25 bp, Artificial
  probe
  misc_feature (1)..(25): SEQ ID NO: 7486; WAN024C6V; Start 662; Stop 686
cattcagcttgttaggtagtaaggt

SEQ ID NO: 469333 - DNA, 25 bp, Artificial
  probe
  misc_feature (1)..(25): SEQ ID NO: 7486; WAN024C6V; Start 667; Stop 691
agcttgttaggtagtaaggtctctt

SEQ ID NO: 469334 - DNA, 25 bp, Artificial
  probe
  misc_feature (1)..(25): SEQ ID NO: 7486; WAN024C6V; Start 664; Stop 688
ttcagcttgttaggtagtaaggtct

SEQ ID NO: 469335 - DNA, 25 bp, Artificial
  probe
  misc_feature (1)..(25): SEQ ID NO: 7486; WAN024C6V; Start 731; Stop 755
aagcattgacatttgataagttggt

SEQ ID NO: 469336 - DNA, 25 bp, Artificial
  probe
  misc_feature (1)..(25): SEQ ID NO: 7486; WAN024C6V; Start 263; Stop 287
ctgtatttgagagcattgaaaggtc

SEQ ID NO: 469337 - DNA, 25 bp, Artificial
  probe
  misc_feature (1)..(25): SEQ ID NO: 7486; WAN024C6V; Start 666; Stop 690
cagcttgttaggtagtaaggtctct

SEQ ID NO: 469338 - DNA, 25 bp, Artificial
  probe
  misc_feature (1)..(25): SEQ ID NO: 7486; WAN024C6V; Start 665; Stop 689
tcagcttgttaggtagtaaggtctc

SEQ ID NO: 469339 - DNA, 25 bp, Artificial
  probe
  misc_feature (1)..(25): SEQ ID NO: 7486; WAN024C6V; Start 340; Stop 364
cctgctattaactctattgctaatg

SEQ ID NO: 469340 - DNA, 25 bp, Artificial
  probe
  misc_feature (1)..(25): SEQ ID NO: 7486; WAN024C6V; Start 596; Stop 620
tgataacaacttggcaaacgattaa

SEQ ID NO: 469341 - DNA, 25 bp, Artificial
  probe
  misc_feature (1)..(25): SEQ ID NO: 7486; WAN024C6V; Start 337; Stop 361
gtccctgctattaactctattgcta

SEQ ID NO: 469342 - DNA, 25 bp, Artificial
  probe
  misc_feature (1)..(25): SEQ ID NO: 7486; WAN024C6V; Start 134; Stop 158
tgacatctaccattgttgaagttgg

SEQ ID NO: 469343 - DNA, 25 bp, Artificial
  probe
  misc_feature (1)..(25): SEQ ID NO: 7486; WAN024C6V; Start 523; Stop 547
attaagttagtggcagatggtttca

SEQ ID NO: 469344 - DNA, 25 bp, Artificial
  probe
  misc_feature (1)..(25): SEQ ID NO: 7486; WAN024C6V; Start 432; Stop 456
tttatcaggagtattcggtgttagt

SEQ ID NO: 469345 - DNA, 25 bp, Artificial
  probe
  misc_feature (1)..(25): SEQ ID NO: 7488; WAN024G7M; Start 75; Stop 99
acatctggtccgtaatatagtcttg

SEQ ID NO: 469346 - DNA, 25 bp, Artificial
  probe
  misc_feature (1)..(25): SEQ ID NO: 7488; WAN024G7M; Start 73; Stop 97
caacatctggtccgtaatatagtct

SEQ ID NO: 469347 - DNA, 25 bp, Artificial
  probe
  misc_feature (1)..(25): SEQ ID NO: 7488; WAN024G7M; Start 76; Stop 100
catctggtccgtaatatagtcttga

SEQ ID NO: 469348 - DNA, 25 bp, Artificial
  probe
  misc_feature (1)..(25): SEQ ID NO: 7488; WAN024G7M; Start 135; Stop 159
cattggtattctggtcgttgatatt

SEQ ID NO: 469349 - DNA, 25 bp, Artificial
  probe
  misc_feature (1)..(25): SEQ ID NO: 7488; WAN024G7M; Start 74; Stop 98
aacatctggtccgtaatatagtctt

SEQ ID NO: 469350 - DNA, 25 bp, Artificial
  probe
  misc_feature (1)..(25): SEQ ID NO: 7488; WAN024G7M; Start 134; Stop 158
gcattggtattctggtcgttgatat

SEQ ID NO: 469351 - DNA, 25 bp, Artificial
  probe
  misc_feature (1)..(25): SEQ ID NO: 7488; WAN024G7M; Start 77; Stop 101
atctggtccgtaatatagtcttgac

SEQ ID NO: 469352 - DNA, 25 bp, Artificial
  probe
  misc_feature (1)..(25): SEQ ID NO: 7488; WAN024G7M; Start 72; Stop 96
ccaacatctggtccgtaatatagtc

SEQ ID NO: 469353 - DNA, 25 bp, Artificial
  probe
  misc_feature (1)..(25): SEQ ID NO: 7488; WAN024G7M; Start 82; Stop 106
gtccgtaatatagtcttgaccataa

SEQ ID NO: 469354 - DNA, 25 bp, Artificial
  probe
  misc_feature (1)..(25): SEQ ID NO: 7488; WAN024G7M; Start 136; Stop 160
attggtattctggtcgttgatattt

SEQ ID NO: 469355 - DNA, 25 bp, Artificial
  probe
  misc_feature (1)..(25): SEQ ID NO: 7488; WAN024G7M; Start 133; Stop 157
cgcattggtattctggtcgttgata

SEQ ID NO: 469356 - DNA, 25 bp, Artificial
  probe
  misc_feature (1)..(25): SEQ ID NO: 7488; WAN024G7M; Start 176; Stop 200
atctctgggaactgcttgataactt

SEQ ID NO: 469357 - DNA, 25 bp, Artificial
  probe
  misc_feature (1)..(25): SEQ ID NO: 7488; WAN024G7M; Start 175; Stop 199
aatctctgggaactgcttgataact

SEQ ID NO: 469358 - DNA, 25 bp, Artificial
  probe
  misc_feature (1)..(25): SEQ ID NO: 7488; WAN024G7M; Start 174; Stop 198
caatctctgggaactgcttgataac

SEQ ID NO: 469359 - DNA, 25 bp, Artificial
  probe
  misc_feature (1)..(25): SEQ ID NO: 7488; WAN024G7M; Start 185; Stop 209
aactgcttgataacttgttcaatca

SEQ ID NO: 469360 - DNA, 25 bp, Artificial
  probe
  misc_feature (1)..(25): SEQ ID NO: 7488; WAN024G7M; Start 5; Stop 29
tagagtttctccgccatttcagtat

SEQ ID NO: 469361 - DNA, 25 bp, Artificial
  probe
  misc_feature (1)..(25): SEQ ID NO: 7488; WAN024G7M; Start 4; Stop 28
atagagtttctccgccatttcagta

SEQ ID NO: 469362 - DNA, 25 bp, Artificial
  probe
  misc_feature (1)..(25): SEQ ID NO: 7488; WAN024G7M; Start 173; Stop 197
acaatctctgggaactgcttgataa

SEQ ID NO: 469363 - DNA, 25 bp, Artificial
  probe
  misc_feature (1)..(25): SEQ ID NO: 7488; WAN024G7M; Start 177; Stop 201
tctctgggaactgcttgataacttg

SEQ ID NO: 469364 - DNA, 25 bp, Artificial
  probe
  misc_feature (1)..(25): SEQ ID NO: 7488; WAN024G7M; Start 179; Stop 203
tctgggaactgcttgataacttgtt

SEQ ID NO: 469365 - DNA, 25 bp, Artificial
  probe
  misc_feature (1)..(25): SEQ ID NO: 7488; WAN024G7M; Start 17; Stop 41
gccatttcagtattgacttggtaaa

SEQ ID NO: 469366 - DNA, 25 bp, Artificial
  probe
  misc_feature (1)..(25): SEQ ID NO: 7488; WAN024G7M; Start 178; Stop 202
ctctgggaactgcttgataacttgt

SEQ ID NO: 469367 - DNA, 25 bp, Artificial
  probe
  misc_feature (1)..(25): SEQ ID NO: 7488; WAN024G7M; Start 130; Stop 154
aatcgcattggtattctggtcgttg

SEQ ID NO: 469368 - DNA, 25 bp, Artificial
  probe
  misc_feature (1)..(25): SEQ ID NO: 7488; WAN024G7M; Start 7; Stop 31
gagtttctccgccatttcagtattg

SEQ ID NO: 469369 - DNA, 25 bp, Artificial
  probe
  misc_feature (1)..(25): SEQ ID NO: 7488; WAN024G7M; Start 6; Stop 30
agagtttctccgccatttcagtatt

SEQ ID NO: 469370 - DNA, 25 bp, Artificial
  probe
  misc_feature (1)..(25): SEQ ID NO: 7488; WAN024G7M; Start 1; Stop 25
ttgatagagtttctccgccatttca

SEQ ID NO: 469371 - DNA, 25 bp, Artificial
  probe
  misc_feature (1)..(25): SEQ ID NO: 7488; WAN024G7M; Start 69; Stop 93
ttcccaacatctggtccgtaatata

SEQ ID NO: 469372 - DNA, 25 bp, Artificial
  probe
  misc_feature (1)..(25): SEQ ID NO: 7488; WAN024G7M; Start 172; Stop 196
cacaatctctgggaactgcttgata

SEQ ID NO: 469373 - DNA, 25 bp, Artificial
  probe
  misc_feature (1)..(25): SEQ ID NO: 7488; WAN024G7M; Start 9; Stop 33
gtttctccgccatttcagtattgac

SEQ ID NO: 469374 - DNA, 25 bp, Artificial
  probe
  misc_feature (1)..(25): SEQ ID NO: 7488; WAN024G7M; Start 11; Stop 35
ttctccgccatttcagtattgactt

SEQ ID NO: 469375 - DNA, 25 bp, Artificial
  probe
  misc_feature (1)..(25): SEQ ID NO: 7488; WAN024G7M; Start 10; Stop 34
tttctccgccatttcagtattgact

SEQ ID NO: 469376 - DNA, 25 bp, Artificial
  probe
  misc_feature (1)..(25): SEQ ID NO: 7488; WAN024G7M; Start 8; Stop 32
agtttctccgccatttcagtattga

SEQ ID NO: 469377 - DNA, 25 bp, Artificial
  probe
  misc_feature (1)..(25): SEQ ID NO: 7488; WAN024G7M; Start 70; Stop 94
tcccaacatctggtccgtaatatag

SEQ ID NO: 469378 - DNA, 25 bp, Artificial
  probe
  misc_feature (1)..(25): SEQ ID NO: 7489; WAN024FX3; Start 366; Stop 390
gaggaataagtggagtatcagtgtt

SEQ ID NO: 469379 - DNA, 25 bp, Artificial
  probe
  misc_feature (1)..(25): SEQ ID NO: 7489; WAN024FX3; Start 335; Stop 359
aattctccatcaccatattgacctt

SEQ ID NO: 469380 - DNA, 25 bp, Artificial
  probe
  misc_feature (1)..(25): SEQ ID NO: 7489; WAN024FX3; Start 365; Stop 389
cgaggaataagtggagtatcagtgt

SEQ ID NO: 469381 - DNA, 25 bp, Artificial
  probe
  misc_feature (1)..(25): SEQ ID NO: 7489; WAN024FX3; Start 364; Stop 388
acgaggaataagtggagtatcagtg

SEQ ID NO: 469382 - DNA, 25 bp, Artificial
  probe
  misc_feature (1)..(25): SEQ ID NO: 7489; WAN024FX3; Start 363; Stop 387
cacgaggaataagtggagtatcagt

SEQ ID NO: 469383 - DNA, 25 bp, Artificial
  probe
  misc_feature (1)..(25): SEQ ID NO: 7489; WAN024FX3; Start 367; Stop 391
aggaataagtggagtatcagtgttt

SEQ ID NO: 469384 - DNA, 25 bp, Artificial
  probe
  misc_feature (1)..(25): SEQ ID NO: 7489; WAN024FX3; Start 328; Stop 352
acagtcaaattctccatcaccatat

SEQ ID NO: 469385 - DNA, 25 bp, Artificial
  probe
  misc_feature (1)..(25): SEQ ID NO: 7489; WAN024FX3; Start 46; Stop 70
cattggagtgtgattattctcgaac

SEQ ID NO: 469386 - DNA, 25 bp, Artificial
  probe
  misc_feature (1)..(25): SEQ ID NO: 7489; WAN024FX3; Start 242; Stop 266
aagtttgtatgttgtccatttcctc

SEQ ID NO: 469387 - DNA, 25 bp, Artificial
  probe
  misc_feature (1)..(25): SEQ ID NO: 7489; WAN024FX3; Start 241; Stop 265
gaagtttgtatgttgtccatttcct

SEQ ID NO: 469388 - DNA, 25 bp, Artificial
  probe
  misc_feature (1)..(25): SEQ ID NO: 7489; WAN024FX3; Start 230; Stop 254
cttgtttcacggaagtttgtatgtt

SEQ ID NO: 469389 - DNA, 25 bp, Artificial
  probe
  misc_feature (1)..(25): SEQ ID NO: 7489; WAN024FX3; Start 327; Stop 351
cacagtcaaattctccatcaccata

SEQ ID NO: 469390 - DNA, 25 bp, Artificial
  probe
  misc_feature (1)..(25): SEQ ID NO: 7489; WAN024FX3; Start 231; Stop 255
ttgtttcacggaagtttgtatgttg

SEQ ID NO: 469391 - DNA, 25 bp, Artificial
  probe
  misc_feature (1)..(25): SEQ ID NO: 7489; WAN024FX3; Start 49; Stop 73
tggagtgtgattattctcgaacaat

SEQ ID NO: 469392 - DNA, 25 bp, Artificial
  probe
  misc_feature (1)..(25): SEQ ID NO: 7489; WAN024FX3; Start 47; Stop 71
attggagtgtgattattctcgaaca

SEQ ID NO: 469393 - DNA, 25 bp, Artificial
  probe
  misc_feature (1)..(25): SEQ ID NO: 7489; WAN024FX3; Start 329; Stop 353
cagtcaaattctccatcaccatatt

SEQ ID NO: 469394 - DNA, 25 bp, Artificial
  probe
  misc_feature (1)..(25): SEQ ID NO: 7489; WAN024FX3; Start 48; Stop 72
ttggagtgtgattattctcgaacaa

SEQ ID NO: 469395 - DNA, 25 bp, Artificial
  probe
  misc_feature (1)..(25): SEQ ID NO: 7489; WAN024FX3; Start 45; Stop 69
ccattggagtgtgattattctcgaa

SEQ ID NO: 469396 - DNA, 25 bp, Artificial
  probe
  misc_feature (1)..(25): SEQ ID NO: 7489; WAN024FX3; Start 50; Stop 74
ggagtgtgattattctcgaacaatt

SEQ ID NO: 469397 - DNA, 25 bp, Artificial
  probe
  misc_feature (1)..(25): SEQ ID NO: 7489; WAN024FX3; Start 233; Stop 257
gtttcacggaagtttgtatgttgtc

SEQ ID NO: 469398 - DNA, 25 bp, Artificial
  probe
  misc_feature (1)..(25): SEQ ID NO: 7489; WAN024FX3; Start 338; Stop 362
tctccatcaccatattgacctttac

SEQ ID NO: 469399 - DNA, 25 bp, Artificial
  probe
  misc_feature (1)..(25): SEQ ID NO: 7489; WAN024FX3; Start 336; Stop 360
attctccatcaccatattgaccttt

SEQ ID NO: 469400 - DNA, 25 bp, Artificial
  probe
  misc_feature (1)..(25): SEQ ID NO: 7489; WAN024FX3; Start 243; Stop 267
agtttgtatgttgtccatttcctcc

SEQ ID NO: 469401 - DNA, 25 bp, Artificial
  probe
  misc_feature (1)..(25): SEQ ID NO: 7489; WAN024FX3; Start 334; Stop 358
aaattctccatcaccatattgacct

SEQ ID NO: 469402 - DNA, 25 bp, Artificial
  probe
  misc_feature (1)..(25): SEQ ID NO: 7489; WAN024FX3; Start 333; Stop 357
caaattctccatcaccatattgacc

SEQ ID NO: 469403 - DNA, 25 bp, Artificial
  probe
  misc_feature (1)..(25): SEQ ID NO: 7489; WAN024FX3; Start 337; Stop 361
ttctccatcaccatattgaccttta

SEQ ID NO: 469404 - DNA, 25 bp, Artificial
  probe
  misc_feature (1)..(25): SEQ ID NO: 7489; WAN024FX3; Start 52; Stop 76
agtgtgattattctcgaacaattca

SEQ ID NO: 469405 - DNA, 25 bp, Artificial
  probe
  misc_feature (1)..(25): SEQ ID NO: 7489; WAN024FX3; Start 270; Stop 294
tgtagtagaaataagtacggtcacc

SEQ ID NO: 469406 - DNA, 25 bp, Artificial
  probe
  misc_feature (1)..(25): SEQ ID NO: 7489; WAN024FX3; Start 43; Stop 67
ttccattggagtgtgattattctcg

SEQ ID NO: 469407 - DNA, 25 bp, Artificial
  probe
  misc_feature (1)..(25): SEQ ID NO: 7489; WAN024FX3; Start 330; Stop 354
agtcaaattctccatcaccatattg

SEQ ID NO: 469408 - DNA, 25 bp, Artificial
  probe
  misc_feature (1)..(25): SEQ ID NO: 7489; WAN024FX3; Start 339; Stop 363
ctccatcaccatattgacctttacc

SEQ ID NO: 469409 - DNA, 25 bp, Artificial
  probe
  misc_feature (1)..(25): SEQ ID NO: 7489; WAN024FX3; Start 294; Stop 318
cgatagtaactggtgcagaagaata

SEQ ID NO: 469410 - DNA, 25 bp, Artificial
  probe
  misc_feature (1)..(25): SEQ ID NO: 7489; WAN024FX3; Start 298; Stop 322
agtaactggtgcagaagaatagatg

SEQ ID NO: 469411 - DNA, 25 bp, Artificial
  probe
  misc_feature (1)..(25): SEQ ID NO: 7490; WAN024CJQ; Start 15; Stop 39
tcatcgttcttcctcaactatcctt

SEQ ID NO: 469412 - DNA, 25 bp, Artificial
  probe
  misc_feature (1)..(25): SEQ ID NO: 7490; WAN024CJQ; Start 14; Stop 38
ttcatcgttcttcctcaactatcct

SEQ ID NO: 469413 - DNA, 25 bp, Artificial
  probe
  misc_feature (1)..(25): SEQ ID NO: 7490; WAN024CJQ; Start 4; Stop 28
atcaatcactttcatcgttcttcct

SEQ ID NO: 469414 - DNA, 25 bp, Artificial
  probe
  misc_feature (1)..(25): SEQ ID NO: 7490; WAN024CJQ; Start 7; Stop 31
aatcactttcatcgttcttcctcaa

SEQ ID NO: 469415 - DNA, 25 bp, Artificial
  probe
  misc_feature (1)..(25): SEQ ID NO: 7490; WAN024CJQ; Start 5; Stop 29
tcaatcactttcatcgttcttcctc

SEQ ID NO: 469416 - DNA, 25 bp, Artificial
  probe
  misc_feature (1)..(25): SEQ ID NO: 7490; WAN024CJQ; Start 11; Stop 35
actttcatcgttcttcctcaactat

SEQ ID NO: 469417 - DNA, 25 bp, Artificial
  probe
  misc_feature (1)..(25): SEQ ID NO: 7490; WAN024CJQ; Start 12; Stop 36
ctttcatcgttcttcctcaactatc

SEQ ID NO: 469418 - DNA, 25 bp, Artificial
  probe
  misc_feature (1)..(25): SEQ ID NO: 7490; WAN024CJQ; Start 16; Stop 40
catcgttcttcctcaactatccttt

SEQ ID NO: 469419 - DNA, 25 bp, Artificial
  probe
  misc_feature (1)..(25): SEQ ID NO: 7490; WAN024CJQ; Start 13; Stop 37
tttcatcgttcttcctcaactatcc

SEQ ID NO: 469420 - DNA, 25 bp, Artificial
  probe
  misc_feature (1)..(25): SEQ ID NO: 7490; WAN024CJQ; Start 6; Stop 30
caatcactttcatcgttcttcctca

SEQ ID NO: 469421 - DNA, 25 bp, Artificial
  probe
  misc_feature (1)..(25): SEQ ID NO: 7490; WAN024CJQ; Start 18; Stop 42
tcgttcttcctcaactatcctttat

SEQ ID NO: 469422 - DNA, 25 bp, Artificial
  probe
  misc_feature (1)..(25): SEQ ID NO: 7490; WAN024CJQ; Start 17; Stop 41
atcgttcttcctcaactatccttta

SEQ ID NO: 469423 - DNA, 25 bp, Artificial
  probe
  misc_feature (1)..(25): SEQ ID NO: 7490; WAN024CJQ; Start 10; Stop 34
cactttcatcgttcttcctcaacta

SEQ ID NO: 469424 - DNA, 25 bp, Artificial
  probe
  misc_feature (1)..(25): SEQ ID NO: 7490; WAN024CJQ; Start 19; Stop 43
cgttcttcctcaactatcctttatc

SEQ ID NO: 469425 - DNA, 25 bp, Artificial
  probe
  misc_feature (1)..(25): SEQ ID NO: 7490; WAN024CJQ; Start 3; Stop 27
gatcaatcactttcatcgttcttcc

SEQ ID NO: 469426 - DNA, 25 bp, Artificial
  probe
  misc_feature (1)..(25): SEQ ID NO: 7490; WAN024CJQ; Start 8; Stop 32
atcactttcatcgttcttcctcaac

SEQ ID NO: 469427 - DNA, 25 bp, Artificial
  probe
  misc_feature (1)..(25): SEQ ID NO: 7490; WAN024CJQ; Start 22; Stop 46
tcttcctcaactatcctttatctga

SEQ ID NO: 469428 - DNA, 25 bp, Artificial
  probe
  misc_feature (1)..(25): SEQ ID NO: 7490; WAN024CJQ; Start 21; Stop 45
ttcttcctcaactatcctttatctg

SEQ ID NO: 469429 - DNA, 25 bp, Artificial
  probe
  misc_feature (1)..(25): SEQ ID NO: 7490; WAN024CJQ; Start 9; Stop 33
tcactttcatcgttcttcctcaact

SEQ ID NO: 469430 - DNA, 25 bp, Artificial
  probe
  misc_feature (1)..(25): SEQ ID NO: 7490; WAN024CJQ; Start 26; Stop 50
cctcaactatcctttatctgattgt

SEQ ID NO: 469431 - DNA, 25 bp, Artificial
  probe
  misc_feature (1)..(25): SEQ ID NO: 7490; WAN024CJQ; Start 20; Stop 44
gttcttcctcaactatcctttatct

SEQ ID NO: 469432 - DNA, 25 bp, Artificial
  probe
  misc_feature (1)..(25): SEQ ID NO: 7490; WAN024CJQ; Start 25; Stop 49
tcctcaactatcctttatctgattg

SEQ ID NO: 469433 - DNA, 25 bp, Artificial
  probe
  misc_feature (1)..(25): SEQ ID NO: 7490; WAN024CJQ; Start 23; Stop 47
cttcctcaactatcctttatctgat

SEQ ID NO: 469434 - DNA, 25 bp, Artificial
  probe
  misc_feature (1)..(25): SEQ ID NO: 7490; WAN024CJQ; Start 24; Stop 48
ttcctcaactatcctttatctgatt

SEQ ID NO: 469435 - DNA, 25 bp, Artificial
  probe
  misc_feature (1)..(25): SEQ ID NO: 7490; WAN024CJQ; Start 27; Stop 51
ctcaactatcctttatctgattgtt

SEQ ID NO: 469436 - DNA, 25 bp, Artificial
  probe
  misc_feature (1)..(25): SEQ ID NO: 7490; WAN024CJQ; Start 28; Stop 52
tcaactatcctttatctgattgttt

SEQ ID NO: 469437 - DNA, 25 bp, Artificial
  probe
  misc_feature (1)..(25): SEQ ID NO: 7490; WAN024CJQ; Start 2; Stop 26
tgatcaatcactttcatcgttcttc

SEQ ID NO: 469438 - DNA, 25 bp, Artificial
  probe
  misc_feature (1)..(25): SEQ ID NO: 7490; WAN024CJQ; Start 29; Stop 53
caactatcctttatctgattgtttt

SEQ ID NO: 469439 - DNA, 25 bp, Artificial
  probe
  misc_feature (1)..(25): SEQ ID NO: 7490; WAN024CJQ; Start 51; Stop 75
tttaaaacaacttgatagactttct

SEQ ID NO: 469440 - DNA, 25 bp, Artificial
  probe
  misc_feature (1)..(25): SEQ ID NO: 7492; WAN024FDI; Start 4; Stop 28
atcactaagaatccaatgacgaatt

SEQ ID NO: 469441 - DNA, 25 bp, Artificial
  probe
  misc_feature (1)..(25): SEQ ID NO: 7492; WAN024FDI; Start 3; Stop 27
gatcactaagaatccaatgacgaat

SEQ ID NO: 469442 - DNA, 25 bp, Artificial
  probe
  misc_feature (1)..(25): SEQ ID NO: 7492; WAN024FDI; Start 201; Stop 225
tcatgctgatacctctcctcattaa

SEQ ID NO: 469443 - DNA, 25 bp, Artificial
  probe
  misc_feature (1)..(25): SEQ ID NO: 7492; WAN024FDI; Start 200; Stop 224
ctcatgctgatacctctcctcatta

SEQ ID NO: 469444 - DNA, 25 bp, Artificial
  probe
  misc_feature (1)..(25): SEQ ID NO: 7492; WAN024FDI; Start 67; Stop 91
atttccattgcttatcacctctctt

SEQ ID NO: 469445 - DNA, 25 bp, Artificial
  probe
  misc_feature (1)..(25): SEQ ID NO: 7492; WAN024FDI; Start 145; Stop 169
ttccacttctttaggctcaactatc

SEQ ID NO: 469446 - DNA, 25 bp, Artificial
  probe
  misc_feature (1)..(25): SEQ ID NO: 7492; WAN024FDI; Start 144; Stop 168
cttccacttctttaggctcaactat

SEQ ID NO: 469447 - DNA, 25 bp, Artificial
  probe
  misc_feature (1)..(25): SEQ ID NO: 7492; WAN024FDI; Start 64; Stop 88
atcatttccattgcttatcacctct

SEQ ID NO: 469448 - DNA, 25 bp, Artificial
  probe
  misc_feature (1)..(25): SEQ ID NO: 7492; WAN024FDI; Start 63; Stop 87
catcatttccattgcttatcacctc

SEQ ID NO: 469449 - DNA, 25 bp, Artificial
  probe
  misc_feature (1)..(25): SEQ ID NO: 7492; WAN024FDI; Start 68; Stop 92
tttccattgcttatcacctctcttt

SEQ ID NO: 469450 - DNA, 25 bp, Artificial
  probe
  misc_feature (1)..(25): SEQ ID NO: 7492; WAN024FDI; Start 60; Stop 84
gtccatcatttccattgcttatcac

SEQ ID NO: 469451 - DNA, 25 bp, Artificial
  probe
  misc_feature (1)..(25): SEQ ID NO: 7492; WAN024FDI; Start 66; Stop 90
catttccattgcttatcacctctct

SEQ ID NO: 469452 - DNA, 25 bp, Artificial
  probe
  misc_feature (1)..(25): SEQ ID NO: 7492; WAN024FDI; Start 65; Stop 89
tcatttccattgcttatcacctctc

SEQ ID NO: 469453 - DNA, 25 bp, Artificial
  probe
  misc_feature (1)..(25): SEQ ID NO: 7492; WAN024FDI; Start 143; Stop 167
acttccacttctttaggctcaacta

SEQ ID NO: 469454 - DNA, 25 bp, Artificial
  probe
  misc_feature (1)..(25): SEQ ID NO: 7492; WAN024FDI; Start 62; Stop 86
ccatcatttccattgcttatcacct

SEQ ID NO: 469455 - DNA, 25 bp, Artificial
  probe
  misc_feature (1)..(25): SEQ ID NO: 7492; WAN024FDI; Start 61; Stop 85
tccatcatttccattgcttatcacc

SEQ ID NO: 469456 - DNA, 25 bp, Artificial
  probe
  misc_feature (1)..(25): SEQ ID NO: 7492; WAN024FDI; Start 59; Stop 83
ggtccatcatttccattgcttatca

SEQ ID NO: 469457 - DNA, 25 bp, Artificial
  probe
  misc_feature (1)..(25): SEQ ID NO: 7492; WAN024FDI; Start 195; Stop 219
aatctctcatgctgatacctctcct

SEQ ID NO: 469458 - DNA, 25 bp, Artificial
  probe
  misc_feature (1)..(25): SEQ ID NO: 7492; WAN024FDI; Start 7; Stop 31
actaagaatccaatgacgaatttgt

SEQ ID NO: 469459 - DNA, 25 bp, Artificial
  probe
  misc_feature (1)..(25): SEQ ID NO: 7492; WAN024FDI; Start 146; Stop 170
tccacttctttaggctcaactatcc

SEQ ID NO: 469460 - DNA, 25 bp, Artificial
  probe
  misc_feature (1)..(25): SEQ ID NO: 7492; WAN024FDI; Start 6; Stop 30
cactaagaatccaatgacgaatttg

SEQ ID NO: 469461 - DNA, 25 bp, Artificial
  probe
  misc_feature (1)..(25): SEQ ID NO: 7492; WAN024FDI; Start 199; Stop 223
tctcatgctgatacctctcctcatt

SEQ ID NO: 469462 - DNA, 25 bp, Artificial
  probe
  misc_feature (1)..(25): SEQ ID NO: 7492; WAN024FDI; Start 100; Stop 124
agttcatacaatgacattcagcaat

SEQ ID NO: 469463 - DNA, 25 bp, Artificial
  probe
  misc_feature (1)..(25): SEQ ID NO: 7492; WAN024FDI; Start 5; Stop 29
tcactaagaatccaatgacgaattt

SEQ ID NO: 469464 - DNA, 25 bp, Artificial
  probe
  misc_feature (1)..(25): SEQ ID NO: 7492; WAN024FDI; Start 196; Stop 220
atctctcatgctgatacctctcctc

SEQ ID NO: 469465 - DNA, 25 bp, Artificial
  probe
  misc_feature (1)..(25): SEQ ID NO: 7492; WAN024FDI; Start 99; Stop 123
tagttcatacaatgacattcagcaa

SEQ ID NO: 469466 - DNA, 25 bp, Artificial
  probe
  misc_feature (1)..(25): SEQ ID NO: 7492; WAN024FDI; Start 46; Stop 70
aatttcctgacttggtccatcattt

SEQ ID NO: 469467 - DNA, 25 bp, Artificial
  probe
  misc_feature (1)..(25): SEQ ID NO: 7492; WAN024FDI; Start 8; Stop 32
ctaagaatccaatgacgaatttgtt

SEQ ID NO: 469468 - DNA, 25 bp, Artificial
  probe
  misc_feature (1)..(25): SEQ ID NO: 7492; WAN024FDI; Start 98; Stop 122
atagttcatacaatgacattcagca

SEQ ID NO: 469469 - DNA, 25 bp, Artificial
  probe
  misc_feature (1)..(25): SEQ ID NO: 7492; WAN024FDI; Start 198; Stop 222
ctctcatgctgatacctctcctcat

SEQ ID NO: 469470 - DNA, 25 bp, Artificial
  probe
  misc_feature (1)..(25): SEQ ID NO: 7492; WAN024FDI; Start 193; Stop 217
caaatctctcatgctgatacctctc

SEQ ID NO: 469471 - DNA, 25 bp, Artificial
  probe
  misc_feature (1)..(25): SEQ ID NO: 7492; WAN024FDI; Start 120; Stop 144
gcaatattatttctcaagtcagcac

SEQ ID NO: 469472 - DNA, 25 bp, Artificial
  probe
  misc_feature (1)..(25): SEQ ID NO: 7492; WAN024FDI; Start 192; Stop 216
tcaaatctctcatgctgatacctct

SEQ ID NO: 469473 - DNA, 25 bp, Artificial
  probe
  misc_feature (1)..(25): SEQ ID NO: 7493; WAN024BXU; Start 91; Stop 115
cgtgaagaagatacaactaattggt

SEQ ID NO: 469474 - DNA, 25 bp, Artificial
  probe
  misc_feature (1)..(25): SEQ ID NO: 7493; WAN024BXU; Start 90; Stop 114
tcgtgaagaagatacaactaattgg

SEQ ID NO: 469475 - DNA, 25 bp, Artificial
  probe
  misc_feature (1)..(25): SEQ ID NO: 7493; WAN024BXU; Start 89; Stop 113
ttcgtgaagaagatacaactaattg

SEQ ID NO: 469476 - DNA, 25 bp, Artificial
  probe
  misc_feature (1)..(25): SEQ ID NO: 7493; WAN024BXU; Start 84; Stop 108
agaaattcgtgaagaagatacaact

SEQ ID NO: 469477 - DNA, 25 bp, Artificial
  probe
  misc_feature (1)..(25): SEQ ID NO: 7493; WAN024BXU; Start 81; Stop 105
tgaagaaattcgtgaagaagataca

SEQ ID NO: 469478 - DNA, 25 bp, Artificial
  probe
  misc_feature (1)..(25): SEQ ID NO: 7493; WAN024BXU; Start 88; Stop 112
attcgtgaagaagatacaactaatt

SEQ ID NO: 469479 - DNA, 25 bp, Artificial
  probe
  misc_feature (1)..(25): SEQ ID NO: 7493; WAN024BXU; Start 87; Stop 111
aattcgtgaagaagatacaactaat

SEQ ID NO: 469480 - DNA, 25 bp, Artificial
  probe
  misc_feature (1)..(25): SEQ ID NO: 7493; WAN024BXU; Start 92; Stop 116
gtgaagaagatacaactaattggta

SEQ ID NO: 469481 - DNA, 25 bp, Artificial
  probe
  misc_feature (1)..(25): SEQ ID NO: 7493; WAN024BXU; Start 83; Stop 107
aagaaattcgtgaagaagatacaac

SEQ ID NO: 469482 - DNA, 25 bp, Artificial
  probe
  misc_feature (1)..(25): SEQ ID NO: 7493; WAN024BXU; Start 82; Stop 106
gaagaaattcgtgaagaagatacaa

SEQ ID NO: 469483 - DNA, 25 bp, Artificial
  probe
  misc_feature (1)..(25): SEQ ID NO: 7493; WAN024BXU; Start 80; Stop 104
ttgaagaaattcgtgaagaagatac

SEQ ID NO: 469484 - DNA, 25 bp, Artificial
  probe
  misc_feature (1)..(25): SEQ ID NO: 7493; WAN024BXU; Start 93; Stop 117
tgaagaagatacaactaattggtac

SEQ ID NO: 469485 - DNA, 25 bp, Artificial
  probe
  misc_feature (1)..(25): SEQ ID NO: 7493; WAN024BXU; Start 85; Stop 109
gaaattcgtgaagaagatacaacta

SEQ ID NO: 469486 - DNA, 25 bp, Artificial
  probe
  misc_feature (1)..(25): SEQ ID NO: 7493; WAN024BXU; Start 94; Stop 118
gaagaagatacaactaattggtact

SEQ ID NO: 469487 - DNA, 25 bp, Artificial
  probe
  misc_feature (1)..(25): SEQ ID NO: 7493; WAN024BXU; Start 78; Stop 102
atttgaagaaattcgtgaagaagat

SEQ ID NO: 469488 - DNA, 25 bp, Artificial
  probe
  misc_feature (1)..(25): SEQ ID NO: 7493; WAN024BXU; Start 79; Stop 103
tttgaagaaattcgtgaagaagata

SEQ ID NO: 469489 - DNA, 25 bp, Artificial
  probe
  misc_feature (1)..(25): SEQ ID NO: 7493; WAN024BXU; Start 86; Stop 110
aaattcgtgaagaagatacaactaa

SEQ ID NO: 469490 - DNA, 25 bp, Artificial
  probe
  misc_feature (1)..(25): SEQ ID NO: 7493; WAN024BXU; Start 95; Stop 119
aagaagatacaactaattggtactt

SEQ ID NO: 469491 - DNA, 25 bp, Artificial
  probe
  misc_feature (1)..(25): SEQ ID NO: 7493; WAN024BXU; Start 50; Stop 74
tggaagatttcaacattttggagtt

SEQ ID NO: 469492 - DNA, 25 bp, Artificial
  probe
  misc_feature (1)..(25): SEQ ID NO: 7493; WAN024BXU; Start 49; Stop 73
atggaagatttcaacattttggagt

SEQ ID NO: 469493 - DNA, 25 bp, Artificial
  probe
  misc_feature (1)..(25): SEQ ID NO: 7493; WAN024BXU; Start 51; Stop 75
ggaagatttcaacattttggagtta

SEQ ID NO: 469494 - DNA, 25 bp, Artificial
  probe
  misc_feature (1)..(25): SEQ ID NO: 7493; WAN024BXU; Start 48; Stop 72
tatggaagatttcaacattttggag

SEQ ID NO: 469495 - DNA, 25 bp, Artificial
  probe
  misc_feature (1)..(25): SEQ ID NO: 7493; WAN024BXU; Start 47; Stop 71
ttatggaagatttcaacattttgga

SEQ ID NO: 469496 - DNA, 25 bp, Artificial
  probe
  misc_feature (1)..(25): SEQ ID NO: 7493; WAN024BXU; Start 42; Stop 66
catgattatggaagatttcaacatt

SEQ ID NO: 469497 - DNA, 25 bp, Artificial
  probe
  misc_feature (1)..(25): SEQ ID NO: 7493; WAN024BXU; Start 62; Stop 86
acattttggagttagaatttgaaga

SEQ ID NO: 469498 - DNA, 25 bp, Artificial
  probe
  misc_feature (1)..(25): SEQ ID NO: 7493; WAN024BXU; Start 77; Stop 101
aatttgaagaaattcgtgaagaaga

SEQ ID NO: 469499 - DNA, 25 bp, Artificial
  probe
  misc_feature (1)..(25): SEQ ID NO: 7493; WAN024BXU; Start 96; Stop 120
agaagatacaactaattggtacttt

SEQ ID NO: 469500 - DNA, 25 bp, Artificial
  probe
  misc_feature (1)..(25): SEQ ID NO: 7493; WAN024BXU; Start 54; Stop 78
agatttcaacattttggagttagaa

SEQ ID NO: 469501 - DNA, 25 bp, Artificial
  probe
  misc_feature (1)..(25): SEQ ID NO: 7493; WAN024BXU; Start 53; Stop 77
aagatttcaacattttggagttaga

SEQ ID NO: 469502 - DNA, 25 bp, Artificial
  probe
  misc_feature (1)..(25): SEQ ID NO: 7493; WAN024BXU; Start 52; Stop 76
gaagatttcaacattttggagttag

SEQ ID NO: 469503 - DNA, 25 bp, Artificial
  probe
  misc_feature (1)..(25): SEQ ID NO: 7493; WAN024BXU; Start 43; Stop 67
atgattatggaagatttcaacattt

SEQ ID NO: 469504 - DNA, 25 bp, Artificial
  probe
  misc_feature (1)..(25): SEQ ID NO: 7493; WAN024BXU; Start 18; Stop 42
ttataatagaaaggaggtgatgatc

SEQ ID NO: 469505 - DNA, 25 bp, Artificial
  probe
  misc_feature (1)..(25): SEQ ID NO: 7493; WAN024BXU; Start 60; Stop 84
caacattttggagttagaatttgaa

SEQ ID NO: 469506 - DNA, 25 bp, Artificial
  probe
  misc_feature (1)..(25): SEQ ID NO: 7494; WAN024GJV; Start 115; Stop 139
gcagacaacaatactgaggtaacaa

SEQ ID NO: 469507 - DNA, 25 bp, Artificial
  probe
  misc_feature (1)..(25): SEQ ID NO: 7494; WAN024GJV; Start 17; Stop 41
caactactgtccaaatcataccaat

SEQ ID NO: 469508 - DNA, 25 bp, Artificial
  probe
  misc_feature (1)..(25): SEQ ID NO: 7494; WAN024GJV; Start 112; Stop 136
aatgcagacaacaatactgaggtaa

SEQ ID NO: 469509 - DNA, 25 bp, Artificial
  probe
  misc_feature (1)..(25): SEQ ID NO: 7494; WAN024GJV; Start 18; Stop 42
aactactgtccaaatcataccaatt

SEQ ID NO: 469510 - DNA, 25 bp, Artificial
  probe
  misc_feature (1)..(25): SEQ ID NO: 7494; WAN024GJV; Start 16; Stop 40
acaactactgtccaaatcataccaa

SEQ ID NO: 469511 - DNA, 25 bp, Artificial
  probe
  misc_feature (1)..(25): SEQ ID NO: 7494; WAN024GJV; Start 15; Stop 39
tacaactactgtccaaatcatacca

SEQ ID NO: 469512 - DNA, 25 bp, Artificial
  probe
  misc_feature (1)..(25): SEQ ID NO: 7494; WAN024GJV; Start 113; Stop 137
atgcagacaacaatactgaggtaac

SEQ ID NO: 469513 - DNA, 25 bp, Artificial
  probe
  misc_feature (1)..(25): SEQ ID NO: 7494; WAN024GJV; Start 116; Stop 140
cagacaacaatactgaggtaacaaa

SEQ ID NO: 469514 - DNA, 25 bp, Artificial
  probe
  misc_feature (1)..(25): SEQ ID NO: 7494; WAN024GJV; Start 19; Stop 43
actactgtccaaatcataccaatta

SEQ ID NO: 469515 - DNA, 25 bp, Artificial
  probe
  misc_feature (1)..(25): SEQ ID NO: 7494; WAN024GJV; Start 14; Stop 38
atacaactactgtccaaatcatacc

SEQ ID NO: 469516 - DNA, 25 bp, Artificial
  probe
  misc_feature (1)..(25): SEQ ID NO: 7494; WAN024GJV; Start 10; Stop 34
agaaatacaactactgtccaaatca

SEQ ID NO: 469517 - DNA, 25 bp, Artificial
  probe
  misc_feature (1)..(25): SEQ ID NO: 7494; WAN024GJV; Start 114; Stop 138
tgcagacaacaatactgaggtaaca

SEQ ID NO: 469518 - DNA, 25 bp, Artificial
  probe
  misc_feature (1)..(25): SEQ ID NO: 7494; WAN024GJV; Start 105; Stop 129
cgatacaaatgcagacaacaatact

SEQ ID NO: 469519 - DNA, 25 bp, Artificial
  probe
  misc_feature (1)..(25): SEQ ID NO: 7494; WAN024GJV; Start 104; Stop 128
ccgatacaaatgcagacaacaatac

SEQ ID NO: 469520 - DNA, 25 bp, Artificial
  probe
  misc_feature (1)..(25): SEQ ID NO: 7494; WAN024GJV; Start 11; Stop 35
gaaatacaactactgtccaaatcat

SEQ ID NO: 469521 - DNA, 25 bp, Artificial
  probe
  misc_feature (1)..(25): SEQ ID NO: 7494; WAN024GJV; Start 5; Stop 29
tcataagaaatacaactactgtcca

SEQ ID NO: 469522 - DNA, 25 bp, Artificial
  probe
  misc_feature (1)..(25): SEQ ID NO: 7494; WAN024GJV; Start 9; Stop 33
aagaaatacaactactgtccaaatc

SEQ ID NO: 469523 - DNA, 25 bp, Artificial
  probe
  misc_feature (1)..(25): SEQ ID NO: 7494; WAN024GJV; Start 165; Stop 189
gatacaactatcatgttcagctaat

SEQ ID NO: 469524 - DNA, 25 bp, Artificial
  probe
  misc_feature (1)..(25): SEQ ID NO: 7494; WAN024GJV; Start 111; Stop 135
aaatgcagacaacaatactgaggta

SEQ ID NO: 469525 - DNA, 25 bp, Artificial
  probe
  misc_feature (1)..(25): SEQ ID NO: 7494; WAN024GJV; Start 108; Stop 132
tacaaatgcagacaacaatactgag

SEQ ID NO: 469526 - DNA, 25 bp, Artificial
  probe
  misc_feature (1)..(25): SEQ ID NO: 7494; WAN024GJV; Start 134; Stop 158
taacaaaattccttaccgcttcatc

SEQ ID NO: 469527 - DNA, 25 bp, Artificial
  probe
  misc_feature (1)..(25): SEQ ID NO: 7494; WAN024GJV; Start 137; Stop 161
caaaattccttaccgcttcatcatt

SEQ ID NO: 469528 - DNA, 25 bp, Artificial
  probe
  misc_feature (1)..(25): SEQ ID NO: 7494; WAN024GJV; Start 107; Stop 131
atacaaatgcagacaacaatactga

SEQ ID NO: 469529 - DNA, 25 bp, Artificial
  probe
  misc_feature (1)..(25): SEQ ID NO: 7494; WAN024GJV; Start 20; Stop 44
ctactgtccaaatcataccaattat

SEQ ID NO: 469530 - DNA, 25 bp, Artificial
  probe
  misc_feature (1)..(25): SEQ ID NO: 7494; WAN024GJV; Start 106; Stop 130
gatacaaatgcagacaacaatactg

SEQ ID NO: 469531 - DNA, 25 bp, Artificial
  probe
  misc_feature (1)..(25): SEQ ID NO: 7494; WAN024GJV; Start 103; Stop 127
gccgatacaaatgcagacaacaata

SEQ ID NO: 469532 - DNA, 25 bp, Artificial
  probe
  misc_feature (1)..(25): SEQ ID NO: 7494; WAN024GJV; Start 136; Stop 160
acaaaattccttaccgcttcatcat

SEQ ID NO: 469533 - DNA, 25 bp, Artificial
  probe
  misc_feature (1)..(25): SEQ ID NO: 7494; WAN024GJV; Start 117; Stop 141
agacaacaatactgaggtaacaaaa

SEQ ID NO: 469534 - DNA, 25 bp, Artificial
  probe
  misc_feature (1)..(25): SEQ ID NO: 7494; WAN024GJV; Start 13; Stop 37
aatacaactactgtccaaatcatac

SEQ ID NO: 469535 - DNA, 25 bp, Artificial
  probe
  misc_feature (1)..(25): SEQ ID NO: 7494; WAN024GJV; Start 135; Stop 159
aacaaaattccttaccgcttcatca

SEQ ID NO: 469536 - DNA, 25 bp, Artificial
  probe
  misc_feature (1)..(25): SEQ ID NO: 7494; WAN024GJV; Start 6; Stop 30
cataagaaatacaactactgtccaa

SEQ ID NO: 469537 - DNA, 25 bp, Artificial
  probe
  misc_feature (1)..(25): SEQ ID NO: 7494; WAN024GJV; Start 110; Stop 134
caaatgcagacaacaatactgaggt

SEQ ID NO: 469538 - DNA, 25 bp, Artificial
  probe
  misc_feature (1)..(25): SEQ ID NO: 7494; WAN024GJV; Start 109; Stop 133
acaaatgcagacaacaatactgagg

SEQ ID NO: 469539 - DNA, 25 bp, Artificial
  probe
  misc_feature (1)..(25): SEQ ID NO: 7495; WAN024CQH; Start 145; Stop 169
attatgaagttgaacagactggtca

SEQ ID NO: 469540 - DNA, 25 bp, Artificial
  probe
  misc_feature (1)..(25): SEQ ID NO: 7495; WAN024CQH; Start 143; Stop 167
tgattatgaagttgaacagactggt

SEQ ID NO: 469541 - DNA, 25 bp, Artificial
  probe
  misc_feature (1)..(25): SEQ ID NO: 7495; WAN024CQH; Start 144; Stop 168
gattatgaagttgaacagactggtc

SEQ ID NO: 469542 - DNA, 25 bp, Artificial
  probe
  misc_feature (1)..(25): SEQ ID NO: 7495; WAN024CQH; Start 72; Stop 96
ccaactgagcaatatcttctccata

SEQ ID NO: 469543 - DNA, 25 bp, Artificial
  probe
  misc_feature (1)..(25): SEQ ID NO: 7495; WAN024CQH; Start 146; Stop 170
ttatgaagttgaacagactggtcac

SEQ ID NO: 469544 - DNA, 25 bp, Artificial
  probe
  misc_feature (1)..(25): SEQ ID NO: 7495; WAN024CQH; Start 73; Stop 97
caactgagcaatatcttctccatag

SEQ ID NO: 469545 - DNA, 25 bp, Artificial
  probe
  misc_feature (1)..(25): SEQ ID NO: 7495; WAN024CQH; Start 74; Stop 98
aactgagcaatatcttctccataga

SEQ ID NO: 469546 - DNA, 25 bp, Artificial
  probe
  misc_feature (1)..(25): SEQ ID NO: 7495; WAN024CQH; Start 142; Stop 166
ctgattatgaagttgaacagactgg

SEQ ID NO: 469547 - DNA, 25 bp, Artificial
  probe
  misc_feature (1)..(25): SEQ ID NO: 7495; WAN024CQH; Start 67; Stop 91
ttgagccaactgagcaatatcttct

SEQ ID NO: 469548 - DNA, 25 bp, Artificial
  probe
  misc_feature (1)..(25): SEQ ID NO: 7495; WAN024CQH; Start 147; Stop 171
tatgaagttgaacagactggtcacc

SEQ ID NO: 469549 - DNA, 25 bp, Artificial
  probe
  misc_feature (1)..(25): SEQ ID NO: 7495; WAN024CQH; Start 68; Stop 92
tgagccaactgagcaatatcttctc

SEQ ID NO: 469550 - DNA, 25 bp, Artificial
  probe
  misc_feature (1)..(25): SEQ ID NO: 7495; WAN024CQH; Start 65; Stop 89
aattgagccaactgagcaatatctt

SEQ ID NO: 469551 - DNA, 25 bp, Artificial
  probe
  misc_feature (1)..(25): SEQ ID NO: 7495; WAN024CQH; Start 66; Stop 90
attgagccaactgagcaatatcttc

SEQ ID NO: 469552 - DNA, 25 bp, Artificial
  probe
  misc_feature (1)..(25): SEQ ID NO: 7495; WAN024CQH; Start 75; Stop 99
actgagcaatatcttctccatagaa

SEQ ID NO: 469553 - DNA, 25 bp, Artificial
  probe
  misc_feature (1)..(25): SEQ ID NO: 7495; WAN024CQH; Start 71; Stop 95
gccaactgagcaatatcttctccat

SEQ ID NO: 469554 - DNA, 25 bp, Artificial
  probe
  misc_feature (1)..(25): SEQ ID NO: 7495; WAN024CQH; Start 69; Stop 93
gagccaactgagcaatatcttctcc

SEQ ID NO: 469555 - DNA, 25 bp, Artificial
  probe
  misc_feature (1)..(25): SEQ ID NO: 7495; WAN024CQH; Start 70; Stop 94
agccaactgagcaatatcttctcca

SEQ ID NO: 469556 - DNA, 25 bp, Artificial
  probe
  misc_feature (1)..(25): SEQ ID NO: 7495; WAN024CQH; Start 99; Stop 123
aaataacgatatcaagcacatctgg

SEQ ID NO: 469557 - DNA, 25 bp, Artificial
  probe
  misc_feature (1)..(25): SEQ ID NO: 7495; WAN024CQH; Start 100; Stop 124
aataacgatatcaagcacatctggg

SEQ ID NO: 469558 - DNA, 25 bp, Artificial
  probe
  misc_feature (1)..(25): SEQ ID NO: 7495; WAN024CQH; Start 137; Stop 161
atcatctgattatgaagttgaacag

SEQ ID NO: 469559 - DNA, 25 bp, Artificial
  probe
  misc_feature (1)..(25): SEQ ID NO: 7495; WAN024CQH; Start 141; Stop 165
tctgattatgaagttgaacagactg

SEQ ID NO: 469560 - DNA, 25 bp, Artificial
  probe
  misc_feature (1)..(25): SEQ ID NO: 7495; WAN024CQH; Start 76; Stop 100
ctgagcaatatcttctccatagaaa

SEQ ID NO: 469561 - DNA, 25 bp, Artificial
  probe
  misc_feature (1)..(25): SEQ ID NO: 7495; WAN024CQH; Start 140; Stop 164
atctgattatgaagttgaacagact

SEQ ID NO: 469562 - DNA, 25 bp, Artificial
  probe
  misc_feature (1)..(25): SEQ ID NO: 7495; WAN024CQH; Start 139; Stop 163
catctgattatgaagttgaacagac

SEQ ID NO: 469563 - DNA, 25 bp, Artificial
  probe
  misc_feature (1)..(25): SEQ ID NO: 7495; WAN024CQH; Start 138; Stop 162
tcatctgattatgaagttgaacaga

SEQ ID NO: 469564 - DNA, 25 bp, Artificial
  probe
  misc_feature (1)..(25): SEQ ID NO: 7495; WAN024CQH; Start 1; Stop 25
ttgatcctggtcttctgttttcttg

SEQ ID NO: 469565 - DNA, 25 bp, Artificial
  probe
  misc_feature (1)..(25): SEQ ID NO: 7495; WAN024CQH; Start 3; Stop 27
gatcctggtcttctgttttcttgaa

SEQ ID NO: 469566 - DNA, 25 bp, Artificial
  probe
  misc_feature (1)..(25): SEQ ID NO: 7495; WAN024CQH; Start 64; Stop 88
caattgagccaactgagcaatatct

SEQ ID NO: 469567 - DNA, 25 bp, Artificial
  probe
  misc_feature (1)..(25): SEQ ID NO: 7495; WAN024CQH; Start 150; Stop 174
gaagttgaacagactggtcaccaag

SEQ ID NO: 469568 - DNA, 25 bp, Artificial
  probe
  misc_feature (1)..(25): SEQ ID NO: 7495; WAN024CQH; Start 178; Stop 202
cttcatatccgccaacactgcaatt

SEQ ID NO: 469569 - DNA, 25 bp, Artificial
  probe
  misc_feature (1)..(25): SEQ ID NO: 7495; WAN024CQH; Start 2; Stop 26
tgatcctggtcttctgttttcttga

SEQ ID NO: 469570 - DNA, 25 bp, Artificial
  probe
  misc_feature (1)..(25): SEQ ID NO: 7495; WAN024CQH; Start 136; Stop 160
aatcatctgattatgaagttgaaca

SEQ ID NO: 469571 - DNA, 25 bp, Artificial
  probe
  misc_feature (1)..(25): SEQ ID NO: 7495; WAN024CQH; Start 63; Stop 87
ccaattgagccaactgagcaatatc

SEQ ID NO: 469572 - DNA, 25 bp, Artificial
  probe
  misc_feature (1)..(25): SEQ ID NO: 7496; WAN024BKS; Start 92; Stop 116
caagaattagagttgacttacaaga

SEQ ID NO: 469573 - DNA, 25 bp, Artificial
  probe
  misc_feature (1)..(25): SEQ ID NO: 7496; WAN024BKS; Start 26; Stop 50
gtatttgcagagagctaactaaaca

SEQ ID NO: 469574 - DNA, 25 bp, Artificial
  probe
  misc_feature (1)..(25): SEQ ID NO: 7496; WAN024BKS; Start 28; Stop 52
atttgcagagagctaactaaacaag

SEQ ID NO: 469575 - DNA, 25 bp, Artificial
  probe
  misc_feature (1)..(25): SEQ ID NO: 7496; WAN024BKS; Start 22; Stop 46
gagagtatttgcagagagctaacta

SEQ ID NO: 469576 - DNA, 25 bp, Artificial
  probe
  misc_feature (1)..(25): SEQ ID NO: 7496; WAN024BKS; Start 19; Stop 43
atcgagagtatttgcagagagctaa

SEQ ID NO: 469577 - DNA, 25 bp, Artificial
  probe
  misc_feature (1)..(25): SEQ ID NO: 7496; WAN024BKS; Start 13; Stop 37
aaacacatcgagagtatttgcagag

SEQ ID NO: 469578 - DNA, 25 bp, Artificial
  probe
  misc_feature (1)..(25): SEQ ID NO: 7496; WAN024BKS; Start 23; Stop 47
agagtatttgcagagagctaactaa

SEQ ID NO: 469579 - DNA, 25 bp, Artificial
  probe
  misc_feature (1)..(25): SEQ ID NO: 7496; WAN024BKS; Start 80; Stop 104
tccaattacaatcaagaattagagt

SEQ ID NO: 469580 - DNA, 25 bp, Artificial
  probe
  misc_feature (1)..(25): SEQ ID NO: 7496; WAN024BKS; Start 78; Stop 102
actccaattacaatcaagaattaga

SEQ ID NO: 469581 - DNA, 25 bp, Artificial
  probe
  misc_feature (1)..(25): SEQ ID NO: 7496; WAN024BKS; Start 25; Stop 49
agtatttgcagagagctaactaaac

SEQ ID NO: 469582 - DNA, 25 bp, Artificial
  probe
  misc_feature (1)..(25): SEQ ID NO: 7496; WAN024BKS; Start 24; Stop 48
gagtatttgcagagagctaactaaa

SEQ ID NO: 469583 - DNA, 25 bp, Artificial
  probe
  misc_feature (1)..(25): SEQ ID NO: 7496; WAN024BKS; Start 93; Stop 117
aagaattagagttgacttacaagat

SEQ ID NO: 469584 - DNA, 25 bp, Artificial
  probe
  misc_feature (1)..(25): SEQ ID NO: 7496; WAN024BKS; Start 27; Stop 51
tatttgcagagagctaactaaacaa

SEQ ID NO: 469585 - DNA, 25 bp, Artificial
  probe
  misc_feature (1)..(25): SEQ ID NO: 7496; WAN024BKS; Start 18; Stop 42
catcgagagtatttgcagagagcta

SEQ ID NO: 469586 - DNA, 25 bp, Artificial
  probe
  misc_feature (1)..(25): SEQ ID NO: 7496; WAN024BKS; Start 14; Stop 38
aacacatcgagagtatttgcagaga

SEQ ID NO: 469587 - DNA, 25 bp, Artificial
  probe
  misc_feature (1)..(25): SEQ ID NO: 7496; WAN024BKS; Start 20; Stop 44
tcgagagtatttgcagagagctaac

SEQ ID NO: 469588 - DNA, 25 bp, Artificial
  probe
  misc_feature (1)..(25): SEQ ID NO: 7496; WAN024BKS; Start 39; Stop 63
gctaactaaacaagcctatccagtt

SEQ ID NO: 469589 - DNA, 25 bp, Artificial
  probe
  misc_feature (1)..(25): SEQ ID NO: 7496; WAN024BKS; Start 79; Stop 103
ctccaattacaatcaagaattagag

SEQ ID NO: 469590 - DNA, 25 bp, Artificial
  probe
  misc_feature (1)..(25): SEQ ID NO: 7496; WAN024BKS; Start 15; Stop 39
acacatcgagagtatttgcagagag

SEQ ID NO: 469591 - DNA, 25 bp, Artificial
  probe
  misc_feature (1)..(25): SEQ ID NO: 7496; WAN024BKS; Start 34; Stop 58
agagagctaactaaacaagcctatc

SEQ ID NO: 469592 - DNA, 25 bp, Artificial
  probe
  misc_feature (1)..(25): SEQ ID NO: 7496; WAN024BKS; Start 33; Stop 57
cagagagctaactaaacaagcctat

SEQ ID NO: 469593 - DNA, 25 bp, Artificial
  probe
  misc_feature (1)..(25): SEQ ID NO: 7496; WAN024BKS; Start 40; Stop 64
ctaactaaacaagcctatccagttt

SEQ ID NO: 469594 - DNA, 25 bp, Artificial
  probe
  misc_feature (1)..(25): SEQ ID NO: 7496; WAN024BKS; Start 21; Stop 45
cgagagtatttgcagagagctaact

SEQ ID NO: 469595 - DNA, 25 bp, Artificial
  probe
  misc_feature (1)..(25): SEQ ID NO: 7496; WAN024BKS; Start 35; Stop 59
gagagctaactaaacaagcctatcc

SEQ ID NO: 469596 - DNA, 25 bp, Artificial
  probe
  misc_feature (1)..(25): SEQ ID NO: 7496; WAN024BKS; Start 37; Stop 61
gagctaactaaacaagcctatccag

SEQ ID NO: 469597 - DNA, 25 bp, Artificial
  probe
  misc_feature (1)..(25): SEQ ID NO: 7496; WAN024BKS; Start 91; Stop 115
tcaagaattagagttgacttacaag

SEQ ID NO: 469598 - DNA, 25 bp, Artificial
  probe
  misc_feature (1)..(25): SEQ ID NO: 7496; WAN024BKS; Start 81; Stop 105
ccaattacaatcaagaattagagtt

SEQ ID NO: 469599 - DNA, 25 bp, Artificial
  probe
  misc_feature (1)..(25): SEQ ID NO: 7496; WAN024BKS; Start 77; Stop 101
aactccaattacaatcaagaattag

SEQ ID NO: 469600 - DNA, 25 bp, Artificial
  probe
  misc_feature (1)..(25): SEQ ID NO: 7496; WAN024BKS; Start 36; Stop 60
agagctaactaaacaagcctatcca

SEQ ID NO: 469601 - DNA, 25 bp, Artificial
  probe
  misc_feature (1)..(25): SEQ ID NO: 7496; WAN024BKS; Start 38; Stop 62
agctaactaaacaagcctatccagt

SEQ ID NO: 469602 - DNA, 25 bp, Artificial
  probe
  misc_feature (1)..(25): SEQ ID NO: 7496; WAN024BKS; Start 11; Stop 35
taaaacacatcgagagtatttgcag

SEQ ID NO: 469603 - DNA, 25 bp, Artificial
  probe
  misc_feature (1)..(25): SEQ ID NO: 7496; WAN024BKS; Start 29; Stop 53
tttgcagagagctaactaaacaagc

SEQ ID NO: 469604 - DNA, 25 bp, Artificial
  probe
  misc_feature (1)..(25): SEQ ID NO: 7496; WAN024BKS; Start 10; Stop 34
ttaaaacacatcgagagtatttgca

SEQ ID NO: 469605 - DNA, 25 bp, Artificial
  probe
  misc_feature (1)..(25): SEQ ID NO: 7497; WAN024BWO; Start 97; Stop 121
ggaaatcaaagacagcaaagagaaa

SEQ ID NO: 469606 - DNA, 25 bp, Artificial
  probe
  misc_feature (1)..(25): SEQ ID NO: 7497; WAN024BWO; Start 80; Stop 104
agaatcagaacaaagagggaaatca

SEQ ID NO: 469607 - DNA, 25 bp, Artificial
  probe
  misc_feature (1)..(25): SEQ ID NO: 7497; WAN024BWO; Start 73; Stop 97
tatcaggagaatcagaacaaagagg

SEQ ID NO: 469608 - DNA, 25 bp, Artificial
  probe
  misc_feature (1)..(25): SEQ ID NO: 7497; WAN024BWO; Start 87; Stop 111
gaacaaagagggaaatcaaagacag

SEQ ID NO: 469609 - DNA, 25 bp, Artificial
  probe
  misc_feature (1)..(25): SEQ ID NO: 7497; WAN024BWO; Start 85; Stop 109
cagaacaaagagggaaatcaaagac

SEQ ID NO: 469610 - DNA, 25 bp, Artificial
  probe
  misc_feature (1)..(25): SEQ ID NO: 7497; WAN024BWO; Start 84; Stop 108
tcagaacaaagagggaaatcaaaga

SEQ ID NO: 469611 - DNA, 25 bp, Artificial
  probe
  misc_feature (1)..(25): SEQ ID NO: 7497; WAN024BWO; Start 79; Stop 103
gagaatcagaacaaagagggaaatc

SEQ ID NO: 469612 - DNA, 25 bp, Artificial
  probe
  misc_feature (1)..(25): SEQ ID NO: 7497; WAN024BWO; Start 86; Stop 110
agaacaaagagggaaatcaaagaca

SEQ ID NO: 469613 - DNA, 25 bp, Artificial
  probe
  misc_feature (1)..(25): SEQ ID NO: 7497; WAN024BWO; Start 83; Stop 107
atcagaacaaagagggaaatcaaag

SEQ ID NO: 469614 - DNA, 25 bp, Artificial
  probe
  misc_feature (1)..(25): SEQ ID NO: 7497; WAN024BWO; Start 81; Stop 105
gaatcagaacaaagagggaaatcaa

SEQ ID NO: 469615 - DNA, 25 bp, Artificial
  probe
  misc_feature (1)..(25): SEQ ID NO: 7497; WAN024BWO; Start 99; Stop 123
aaatcaaagacagcaaagagaaagc

SEQ ID NO: 469616 - DNA, 25 bp, Artificial
  probe
  misc_feature (1)..(25): SEQ ID NO: 7497; WAN024BWO; Start 78; Stop 102
ggagaatcagaacaaagagggaaat

SEQ ID NO: 469617 - DNA, 25 bp, Artificial
  probe
  misc_feature (1)..(25): SEQ ID NO: 7497; WAN024BWO; Start 98; Stop 122
gaaatcaaagacagcaaagagaaag

SEQ ID NO: 469618 - DNA, 25 bp, Artificial
  probe
  misc_feature (1)..(25): SEQ ID NO: 7497; WAN024BWO; Start 82; Stop 106
aatcagaacaaagagggaaatcaaa

SEQ ID NO: 469619 - DNA, 25 bp, Artificial
  probe
  misc_feature (1)..(25): SEQ ID NO: 7497; WAN024BWO; Start 72; Stop 96
gtatcaggagaatcagaacaaagag

SEQ ID NO: 469620 - DNA, 25 bp, Artificial
  probe
  misc_feature (1)..(25): SEQ ID NO: 7497; WAN024BWO; Start 91; Stop 115
aaagagggaaatcaaagacagcaaa

SEQ ID NO: 469621 - DNA, 25 bp, Artificial
  probe
  misc_feature (1)..(25): SEQ ID NO: 7497; WAN024BWO; Start 77; Stop 101
aggagaatcagaacaaagagggaaa

SEQ ID NO: 469622 - DNA, 25 bp, Artificial
  probe
  misc_feature (1)..(25): SEQ ID NO: 7497; WAN024BWO; Start 101; Stop 125
atcaaagacagcaaagagaaagcaa

SEQ ID NO: 469623 - DNA, 25 bp, Artificial
  probe
  misc_feature (1)..(25): SEQ ID NO: 7497; WAN024BWO; Start 100; Stop 124
aatcaaagacagcaaagagaaagca

SEQ ID NO: 469624 - DNA, 25 bp, Artificial
  probe
  misc_feature (1)..(25): SEQ ID NO: 7497; WAN024BWO; Start 96; Stop 120
gggaaatcaaagacagcaaagagaa

SEQ ID NO: 469625 - DNA, 25 bp, Artificial
  probe
  misc_feature (1)..(25): SEQ ID NO: 7497; WAN024BWO; Start 92; Stop 116
aagagggaaatcaaagacagcaaag

SEQ ID NO: 469626 - DNA, 25 bp, Artificial
  probe
  misc_feature (1)..(25): SEQ ID NO: 7497; WAN024BWO; Start 102; Stop 126
tcaaagacagcaaagagaaagcaaa

SEQ ID NO: 469627 - DNA, 25 bp, Artificial
  probe
  misc_feature (1)..(25): SEQ ID NO: 7497; WAN024BWO; Start 90; Stop 114
caaagagggaaatcaaagacagcaa

SEQ ID NO: 469628 - DNA, 25 bp, Artificial
  probe
  misc_feature (1)..(25): SEQ ID NO: 7497; WAN024BWO; Start 88; Stop 112
aacaaagagggaaatcaaagacagc

SEQ ID NO: 469629 - DNA, 25 bp, Artificial
  probe
  misc_feature (1)..(25): SEQ ID NO: 7497; WAN024BWO; Start 71; Stop 95
tgtatcaggagaatcagaacaaaga

SEQ ID NO: 469630 - DNA, 25 bp, Artificial
  probe
  misc_feature (1)..(25): SEQ ID NO: 7497; WAN024BWO; Start 94; Stop 118
gagggaaatcaaagacagcaaagag

SEQ ID NO: 469631 - DNA, 25 bp, Artificial
  probe
  misc_feature (1)..(25): SEQ ID NO: 7497; WAN024BWO; Start 74; Stop 98
atcaggagaatcagaacaaagaggg

SEQ ID NO: 469632 - DNA, 25 bp, Artificial
  probe
  misc_feature (1)..(25): SEQ ID NO: 7497; WAN024BWO; Start 76; Stop 100
caggagaatcagaacaaagagggaa

SEQ ID NO: 469633 - DNA, 25 bp, Artificial
  probe
  misc_feature (1)..(25): SEQ ID NO: 7497; WAN024BWO; Start 70; Stop 94
ctgtatcaggagaatcagaacaaag

SEQ ID NO: 469634 - DNA, 25 bp, Artificial
  probe
  misc_feature (1)..(25): SEQ ID NO: 7497; WAN024BWO; Start 95; Stop 119
agggaaatcaaagacagcaaagaga

SEQ ID NO: 469635 - DNA, 25 bp, Artificial
  probe
  misc_feature (1)..(25): SEQ ID NO: 7497; WAN024BWO; Start 93; Stop 117
agagggaaatcaaagacagcaaaga

SEQ ID NO: 469636 - DNA, 25 bp, Artificial
  probe
  misc_feature (1)..(25): SEQ ID NO: 7497; WAN024BWO; Start 150; Stop 174
cagtctatttgaggagttcatccag

SEQ ID NO: 469637 - DNA, 25 bp, Artificial
  probe
  misc_feature (1)..(25): SEQ ID NO: 7497; WAN024BWO; Start 153; Stop 177
tctatttgaggagttcatccaggag

SEQ ID NO: 469638 - DNA, 25 bp, Artificial
  probe
  misc_feature (1)..(25): SEQ ID NO: 7498; WAN024B6V; Start 72; Stop 96
actatattttcgtacaggtgcttca

SEQ ID NO: 469639 - DNA, 25 bp, Artificial
  probe
  misc_feature (1)..(25): SEQ ID NO: 7498; WAN024B6V; Start 74; Stop 98
tatattttcgtacaggtgcttcaac

SEQ ID NO: 469640 - DNA, 25 bp, Artificial
  probe
  misc_feature (1)..(25): SEQ ID NO: 7498; WAN024B6V; Start 73; Stop 97
ctatattttcgtacaggtgcttcaa

SEQ ID NO: 469641 - DNA, 25 bp, Artificial
  probe
  misc_feature (1)..(25): SEQ ID NO: 7498; WAN024B6V; Start 69; Stop 93
tctactatattttcgtacaggtgct

SEQ ID NO: 469642 - DNA, 25 bp, Artificial
  probe
  misc_feature (1)..(25): SEQ ID NO: 7498; WAN024B6V; Start 71; Stop 95
tactatattttcgtacaggtgcttc

SEQ ID NO: 469643 - DNA, 25 bp, Artificial
  probe
  misc_feature (1)..(25): SEQ ID NO: 7498; WAN024B6V; Start 70; Stop 94
ctactatattttcgtacaggtgctt

SEQ ID NO: 469644 - DNA, 25 bp, Artificial
  probe
  misc_feature (1)..(25): SEQ ID NO: 7498; WAN024B6V; Start 68; Stop 92
atctactatattttcgtacaggtgc

SEQ ID NO: 469645 - DNA, 25 bp, Artificial
  probe
  misc_feature (1)..(25): SEQ ID NO: 7498; WAN024B6V; Start 75; Stop 99
atattttcgtacaggtgcttcaacc

SEQ ID NO: 469646 - DNA, 25 bp, Artificial
  probe
  misc_feature (1)..(25): SEQ ID NO: 7498; WAN024B6V; Start 76; Stop 100
tattttcgtacaggtgcttcaacca

SEQ ID NO: 469647 - DNA, 25 bp, Artificial
  probe
  misc_feature (1)..(25): SEQ ID NO: 7498; WAN024B6V; Start 67; Stop 91
aatctactatattttcgtacaggtg

SEQ ID NO: 469648 - DNA, 25 bp, Artificial
  probe
  misc_feature (1)..(25): SEQ ID NO: 7498; WAN024B6V; Start 66; Stop 90
caatctactatattttcgtacaggt

SEQ ID NO: 469649 - DNA, 25 bp, Artificial
  probe
  misc_feature (1)..(25): SEQ ID NO: 7498; WAN024B6V; Start 77; Stop 101
attttcgtacaggtgcttcaaccat

SEQ ID NO: 469650 - DNA, 25 bp, Artificial
  probe
  misc_feature (1)..(25): SEQ ID NO: 7498; WAN024B6V; Start 65; Stop 89
tcaatctactatattttcgtacagg

SEQ ID NO: 469651 - DNA, 25 bp, Artificial
  probe
  misc_feature (1)..(25): SEQ ID NO: 7498; WAN024B6V; Start 78; Stop 102
ttttcgtacaggtgcttcaaccatt

SEQ ID NO: 469652 - DNA, 25 bp, Artificial
  probe
  misc_feature (1)..(25): SEQ ID NO: 7499; WAN024CTN; Start 99; Stop 123
gttcaaggcattcataagttcagtt

SEQ ID NO: 469653 - DNA, 25 bp, Artificial
  probe
  misc_feature (1)..(25): SEQ ID NO: 7499; WAN024CTN; Start 103; Stop 127
aaggcattcataagttcagttgtct

SEQ ID NO: 469654 - DNA, 25 bp, Artificial
  probe
  misc_feature (1)..(25): SEQ ID NO: 7499; WAN024CTN; Start 97; Stop 121
gtgttcaaggcattcataagttcag

SEQ ID NO: 469655 - DNA, 25 bp, Artificial
  probe
  misc_feature (1)..(25): SEQ ID NO: 7499; WAN024CTN; Start 98; Stop 122
tgttcaaggcattcataagttcagt

SEQ ID NO: 469656 - DNA, 25 bp, Artificial
  probe
  misc_feature (1)..(25): SEQ ID NO: 7499; WAN024CTN; Start 104; Stop 128
aggcattcataagttcagttgtctt

SEQ ID NO: 469657 - DNA, 25 bp, Artificial
  probe
  misc_feature (1)..(25): SEQ ID NO: 7499; WAN024CTN; Start 100; Stop 124
ttcaaggcattcataagttcagttg

SEQ ID NO: 469658 - DNA, 25 bp, Artificial
  probe
  misc_feature (1)..(25): SEQ ID NO: 7499; WAN024CTN; Start 72; Stop 96
gtctgtcaacttatattgtccttgc

SEQ ID NO: 469659 - DNA, 25 bp, Artificial
  probe
  misc_feature (1)..(25): SEQ ID NO: 7499; WAN024CTN; Start 102; Stop 126
caaggcattcataagttcagttgtc

SEQ ID NO: 469660 - DNA, 25 bp, Artificial
  probe
  misc_feature (1)..(25): SEQ ID NO: 7499; WAN024CTN; Start 78; Stop 102
caacttatattgtccttgcgtgttc

SEQ ID NO: 469661 - DNA, 25 bp, Artificial
  probe
  misc_feature (1)..(25): SEQ ID NO: 7499; WAN024CTN; Start 79; Stop 103
aacttatattgtccttgcgtgttca

SEQ ID NO: 469662 - DNA, 25 bp, Artificial
  probe
  misc_feature (1)..(25): SEQ ID NO: 7499; WAN024CTN; Start 101; Stop 125
tcaaggcattcataagttcagttgt

SEQ ID NO: 469663 - DNA, 25 bp, Artificial
  probe
  misc_feature (1)..(25): SEQ ID NO: 7499; WAN024CTN; Start 80; Stop 104
acttatattgtccttgcgtgttcaa

SEQ ID NO: 469664 - DNA, 25 bp, Artificial
  probe
  misc_feature (1)..(25): SEQ ID NO: 7499; WAN024CTN; Start 77; Stop 101
tcaacttatattgtccttgcgtgtt

SEQ ID NO: 469665 - DNA, 25 bp, Artificial
  probe
  misc_feature (1)..(25): SEQ ID NO: 7499; WAN024CTN; Start 73; Stop 97
tctgtcaacttatattgtccttgcg

SEQ ID NO: 469666 - DNA, 25 bp, Artificial
  probe
  misc_feature (1)..(25): SEQ ID NO: 7499; WAN024CTN; Start 74; Stop 98
ctgtcaacttatattgtccttgcgt

SEQ ID NO: 469667 - DNA, 25 bp, Artificial
  probe
  misc_feature (1)..(25): SEQ ID NO: 7499; WAN024CTN; Start 71; Stop 95
agtctgtcaacttatattgtccttg

SEQ ID NO: 469668 - DNA, 25 bp, Artificial
  probe
  misc_feature (1)..(25): SEQ ID NO: 7499; WAN024CTN; Start 76; Stop 100
gtcaacttatattgtccttgcgtgt

SEQ ID NO: 469669 - DNA, 25 bp, Artificial
  probe
  misc_feature (1)..(25): SEQ ID NO: 7499; WAN024CTN; Start 75; Stop 99
tgtcaacttatattgtccttgcgtg

SEQ ID NO: 469670 - DNA, 25 bp, Artificial
  probe
  misc_feature (1)..(25): SEQ ID NO: 7499; WAN024CTN; Start 96; Stop 120
cgtgttcaaggcattcataagttca

SEQ ID NO: 469671 - DNA, 25 bp, Artificial
  probe
  misc_feature (1)..(25): SEQ ID NO: 7499; WAN024CTN; Start 105; Stop 129
ggcattcataagttcagttgtcttt

SEQ ID NO: 469672 - DNA, 25 bp, Artificial
  probe
  misc_feature (1)..(25): SEQ ID NO: 7499; WAN024CTN; Start 95; Stop 119
gcgtgttcaaggcattcataagttc

SEQ ID NO: 469673 - DNA, 25 bp, Artificial
  probe
  misc_feature (1)..(25): SEQ ID NO: 7499; WAN024CTN; Start 164; Stop 188
gctccaagtttgaagataccaagat

SEQ ID NO: 469674 - DNA, 25 bp, Artificial
  probe
  misc_feature (1)..(25): SEQ ID NO: 7499; WAN024CTN; Start 16; Stop 40
gtttcttcctcagtcgcatattcag

SEQ ID NO: 469675 - DNA, 25 bp, Artificial
  probe
  misc_feature (1)..(25): SEQ ID NO: 7499; WAN024CTN; Start 165; Stop 189
ctccaagtttgaagataccaagata

SEQ ID NO: 469676 - DNA, 25 bp, Artificial
  probe
  misc_feature (1)..(25): SEQ ID NO: 7499; WAN024CTN; Start 166; Stop 190
tccaagtttgaagataccaagatat

SEQ ID NO: 469677 - DNA, 25 bp, Artificial
  probe
  misc_feature (1)..(25): SEQ ID NO: 7499; WAN024CTN; Start 56; Stop 80
aaatctctgcatcaaagtctgtcaa

SEQ ID NO: 469678 - DNA, 25 bp, Artificial
  probe
  misc_feature (1)..(25): SEQ ID NO: 7499; WAN024CTN; Start 193; Stop 217
atagatgggctggttgttaccttaa

SEQ ID NO: 469679 - DNA, 25 bp, Artificial
  probe
  misc_feature (1)..(25): SEQ ID NO: 7499; WAN024CTN; Start 70; Stop 94
aagtctgtcaacttatattgtcctt

SEQ ID NO: 469680 - DNA, 25 bp, Artificial
  probe
  misc_feature (1)..(25): SEQ ID NO: 7499; WAN024CTN; Start 81; Stop 105
cttatattgtccttgcgtgttcaag

SEQ ID NO: 469681 - DNA, 25 bp, Artificial
  probe
  misc_feature (1)..(25): SEQ ID NO: 7499; WAN024CTN; Start 194; Stop 218
tagatgggctggttgttaccttaaa

SEQ ID NO: 469682 - DNA, 25 bp, Artificial
  probe
  misc_feature (1)..(25): SEQ ID NO: 7499; WAN024CTN; Start 17; Stop 41
tttcttcctcagtcgcatattcagc

SEQ ID NO: 469683 - DNA, 25 bp, Artificial
  probe
  misc_feature (1)..(25): SEQ ID NO: 7499; WAN024CTN; Start 15; Stop 39
cgtttcttcctcagtcgcatattca

SEQ ID NO: 469684 - DNA, 25 bp, Artificial
  probe
  misc_feature (1)..(25): SEQ ID NO: 7499; WAN024CTN; Start 57; Stop 81
aatctctgcatcaaagtctgtcaac

SEQ ID NO: 469685 - DNA, 25 bp, Artificial
  probe
  misc_feature (1)..(25): SEQ ID NO: 7500; WAN024BPJ; Start 30; Stop 54
agcatcaatttcttctgagggtatt

SEQ ID NO: 469686 - DNA, 25 bp, Artificial
  probe
  misc_feature (1)..(25): SEQ ID NO: 7500; WAN024BPJ; Start 29; Stop 53
aagcatcaatttcttctgagggtat

SEQ ID NO: 469687 - DNA, 25 bp, Artificial
  probe
  misc_feature (1)..(25): SEQ ID NO: 7500; WAN024BPJ; Start 31; Stop 55
gcatcaatttcttctgagggtattt

SEQ ID NO: 469688 - DNA, 25 bp, Artificial
  probe
  misc_feature (1)..(25): SEQ ID NO: 7500; WAN024BPJ; Start 28; Stop 52
aaagcatcaatttcttctgagggta

SEQ ID NO: 469689 - DNA, 25 bp, Artificial
  probe
  misc_feature (1)..(25): SEQ ID NO: 7500; WAN024BPJ; Start 27; Stop 51
taaagcatcaatttcttctgagggt

SEQ ID NO: 469690 - DNA, 25 bp, Artificial
  probe
  misc_feature (1)..(25): SEQ ID NO: 7500; WAN024BPJ; Start 26; Stop 50
ataaagcatcaatttcttctgaggg

SEQ ID NO: 469691 - DNA, 25 bp, Artificial
  probe
  misc_feature (1)..(25): SEQ ID NO: 7500; WAN024BPJ; Start 39; Stop 63
ttcttctgagggtatttatgaatcg

SEQ ID NO: 469692 - DNA, 25 bp, Artificial
  probe
  misc_feature (1)..(25): SEQ ID NO: 7500; WAN024BPJ; Start 25; Stop 49
aataaagcatcaatttcttctgagg

SEQ ID NO: 469693 - DNA, 25 bp, Artificial
  probe
  misc_feature (1)..(25): SEQ ID NO: 7500; WAN024BPJ; Start 40; Stop 64
tcttctgagggtatttatgaatcga

SEQ ID NO: 469694 - DNA, 25 bp, Artificial
  probe
  misc_feature (1)..(25): SEQ ID NO: 7500; WAN024BPJ; Start 35; Stop 59
caatttcttctgagggtatttatga

SEQ ID NO: 469695 - DNA, 25 bp, Artificial
  probe
  misc_feature (1)..(25): SEQ ID NO: 7500; WAN024BPJ; Start 14; Stop 38
ccagagagcaaaataaagcatcaat

SEQ ID NO: 469696 - DNA, 25 bp, Artificial
  probe
  misc_feature (1)..(25): SEQ ID NO: 7500; WAN024BPJ; Start 38; Stop 62
tttcttctgagggtatttatgaatc

SEQ ID NO: 469697 - DNA, 25 bp, Artificial
  probe
  misc_feature (1)..(25): SEQ ID NO: 7500; WAN024BPJ; Start 34; Stop 58
tcaatttcttctgagggtatttatg

SEQ ID NO: 469698 - DNA, 25 bp, Artificial
  probe
  misc_feature (1)..(25): SEQ ID NO: 7500; WAN024BPJ; Start 32; Stop 56
catcaatttcttctgagggtattta

SEQ ID NO: 469699 - DNA, 25 bp, Artificial
  probe
  misc_feature (1)..(25): SEQ ID NO: 7500; WAN024BPJ; Start 15; Stop 39
cagagagcaaaataaagcatcaatt

SEQ ID NO: 469700 - DNA, 25 bp, Artificial
  probe
  misc_feature (1)..(25): SEQ ID NO: 7500; WAN024BPJ; Start 1; Stop 25
ttgatgaaatatgccagagagcaaa

SEQ ID NO: 469701 - DNA, 25 bp, Artificial
  probe
  misc_feature (1)..(25): SEQ ID NO: 7500; WAN024BPJ; Start 13; Stop 37
gccagagagcaaaataaagcatcaa

SEQ ID NO: 469702 - DNA, 25 bp, Artificial
  probe
  misc_feature (1)..(25): SEQ ID NO: 7500; WAN024BPJ; Start 24; Stop 48
aaataaagcatcaatttcttctgag

SEQ ID NO: 469703 - DNA, 25 bp, Artificial
  probe
  misc_feature (1)..(25): SEQ ID NO: 7500; WAN024BPJ; Start 36; Stop 60
aatttcttctgagggtatttatgaa

SEQ ID NO: 469704 - DNA, 25 bp, Artificial
  probe
  misc_feature (1)..(25): SEQ ID NO: 7500; WAN024BPJ; Start 37; Stop 61
atttcttctgagggtatttatgaat

SEQ ID NO: 469705 - DNA, 25 bp, Artificial
  probe
  misc_feature (1)..(25): SEQ ID NO: 7500; WAN024BPJ; Start 18; Stop 42
agagcaaaataaagcatcaatttct

SEQ ID NO: 469706 - DNA, 25 bp, Artificial
  probe
  misc_feature (1)..(25): SEQ ID NO: 7500; WAN024BPJ; Start 16; Stop 40
agagagcaaaataaagcatcaattt

SEQ ID NO: 469707 - DNA, 25 bp, Artificial
  probe
  misc_feature (1)..(25): SEQ ID NO: 7500; WAN024BPJ; Start 33; Stop 57
atcaatttcttctgagggtatttat

SEQ ID NO: 469708 - DNA, 25 bp, Artificial
  probe
  misc_feature (1)..(25): SEQ ID NO: 7500; WAN024BPJ; Start 17; Stop 41
gagagcaaaataaagcatcaatttc

SEQ ID NO: 469709 - DNA, 25 bp, Artificial
  probe
  misc_feature (1)..(25): SEQ ID NO: 7500; WAN024BPJ; Start 41; Stop 65
cttctgagggtatttatgaatcgat

SEQ ID NO: 469710 - DNA, 25 bp, Artificial
  probe
  misc_feature (1)..(25): SEQ ID NO: 7500; WAN024BPJ; Start 21; Stop 45
gcaaaataaagcatcaatttcttct

SEQ ID NO: 469711 - DNA, 25 bp, Artificial
  probe
  misc_feature (1)..(25): SEQ ID NO: 7500; WAN024BPJ; Start 20; Stop 44
agcaaaataaagcatcaatttcttc

SEQ ID NO: 469712 - DNA, 25 bp, Artificial
  probe
  misc_feature (1)..(25): SEQ ID NO: 7500; WAN024BPJ; Start 19; Stop 43
gagcaaaataaagcatcaatttctt

SEQ ID NO: 469713 - DNA, 25 bp, Artificial
  probe
  misc_feature (1)..(25): SEQ ID NO: 7500; WAN024BPJ; Start 8; Stop 32
aatatgccagagagcaaaataaagc

SEQ ID NO: 469714 - DNA, 25 bp, Artificial
  probe
  misc_feature (1)..(25): SEQ ID NO: 7500; WAN024BPJ; Start 3; Stop 27
gatgaaatatgccagagagcaaaat

SEQ ID NO: 469715 - DNA, 25 bp, Artificial
  probe
  misc_feature (1)..(25): SEQ ID NO: 7500; WAN024BPJ; Start 5; Stop 29
tgaaatatgccagagagcaaaataa

SEQ ID NO: 469716 - DNA, 25 bp, Artificial
  probe
  misc_feature (1)..(25): SEQ ID NO: 7500; WAN024BPJ; Start 2; Stop 26
tgatgaaatatgccagagagcaaaa

SEQ ID NO: 469717 - DNA, 25 bp, Artificial
  probe
  misc_feature (1)..(25): SEQ ID NO: 7500; WAN024BPJ; Start 9; Stop 33
atatgccagagagcaaaataaagca

SEQ ID NO: 469718 - DNA, 25 bp, Artificial
  probe
  misc_feature (1)..(25): SEQ ID NO: 7501; WAN024BXW; Start 226; Stop 250
ttaagtggttactgtctagctgaag

SEQ ID NO: 469719 - DNA, 25 bp, Artificial
  probe
  misc_feature (1)..(25): SEQ ID NO: 7501; WAN024BXW; Start 129; Stop 153
tttactaatacgagcagggaatgaa

SEQ ID NO: 469720 - DNA, 25 bp, Artificial
  probe
  misc_feature (1)..(25): SEQ ID NO: 7501; WAN024BXW; Start 126; Stop 150
acatttactaatacgagcagggaat

SEQ ID NO: 469721 - DNA, 25 bp, Artificial
  probe
  misc_feature (1)..(25): SEQ ID NO: 7501; WAN024BXW; Start 125; Stop 149
aacatttactaatacgagcagggaa

SEQ ID NO: 469722 - DNA, 25 bp, Artificial
  probe
  misc_feature (1)..(25): SEQ ID NO: 7501; WAN024BXW; Start 304; Stop 328
actgaagatgaactattgagggaaa

SEQ ID NO: 469723 - DNA, 25 bp, Artificial
  probe
  misc_feature (1)..(25): SEQ ID NO: 7501; WAN024BXW; Start 227; Stop 251
taagtggttactgtctagctgaaga

SEQ ID NO: 469724 - DNA, 25 bp, Artificial
  probe
  misc_feature (1)..(25): SEQ ID NO: 7501; WAN024BXW; Start 130; Stop 154
ttactaatacgagcagggaatgaac

SEQ ID NO: 469725 - DNA, 25 bp, Artificial
  probe
  misc_feature (1)..(25): SEQ ID NO: 7501; WAN024BXW; Start 128; Stop 152
atttactaatacgagcagggaatga

SEQ ID NO: 469726 - DNA, 25 bp, Artificial
  probe
  misc_feature (1)..(25): SEQ ID NO: 7501; WAN024BXW; Start 124; Stop 148
gaacatttactaatacgagcaggga

SEQ ID NO: 469727 - DNA, 25 bp, Artificial
  probe
  misc_feature (1)..(25): SEQ ID NO: 7501; WAN024BXW; Start 123; Stop 147
tgaacatttactaatacgagcaggg

SEQ ID NO: 469728 - DNA, 25 bp, Artificial
  probe
  misc_feature (1)..(25): SEQ ID NO: 7501; WAN024BXW; Start 122; Stop 146
ttgaacatttactaatacgagcagg

SEQ ID NO: 469729 - DNA, 25 bp, Artificial
  probe
  misc_feature (1)..(25): SEQ ID NO: 7501; WAN024BXW; Start 134; Stop 158
taatacgagcagggaatgaacaatc

SEQ ID NO: 469730 - DNA, 25 bp, Artificial
  probe
  misc_feature (1)..(25): SEQ ID NO: 7501; WAN024BXW; Start 133; Stop 157
ctaatacgagcagggaatgaacaat

SEQ ID NO: 469731 - DNA, 25 bp, Artificial
  probe
  misc_feature (1)..(25): SEQ ID NO: 7501; WAN024BXW; Start 303; Stop 327
tactgaagatgaactattgagggaa

SEQ ID NO: 469732 - DNA, 25 bp, Artificial
  probe
  misc_feature (1)..(25): SEQ ID NO: 7501; WAN024BXW; Start 302; Stop 326
ttactgaagatgaactattgaggga

SEQ ID NO: 469733 - DNA, 25 bp, Artificial
  probe
  misc_feature (1)..(25): SEQ ID NO: 7501; WAN024BXW; Start 229; Stop 253
agtggttactgtctagctgaagatt

SEQ ID NO: 469734 - DNA, 25 bp, Artificial
  probe
  misc_feature (1)..(25): SEQ ID NO: 7501; WAN024BXW; Start 228; Stop 252
aagtggttactgtctagctgaagat

SEQ ID NO: 469735 - DNA, 25 bp, Artificial
  probe
  misc_feature (1)..(25): SEQ ID NO: 7501; WAN024BXW; Start 131; Stop 155
tactaatacgagcagggaatgaaca

SEQ ID NO: 469736 - DNA, 25 bp, Artificial
  probe
  misc_feature (1)..(25): SEQ ID NO: 7501; WAN024BXW; Start 173; Stop 197
ttgatatgaatggtgcagctattaa

SEQ ID NO: 469737 - DNA, 25 bp, Artificial
  probe
  misc_feature (1)..(25): SEQ ID NO: 7501; WAN024BXW; Start 164; Stop 188
atgaattgtttgatatgaatggtgc

SEQ ID NO: 469738 - DNA, 25 bp, Artificial
  probe
  misc_feature (1)..(25): SEQ ID NO: 7501; WAN024BXW; Start 143; Stop 167
cagggaatgaacaatcactaaatga

SEQ ID NO: 469739 - DNA, 25 bp, Artificial
  probe
  misc_feature (1)..(25): SEQ ID NO: 7501; WAN024BXW; Start 142; Stop 166
gcagggaatgaacaatcactaaatg

SEQ ID NO: 469740 - DNA, 25 bp, Artificial
  probe
  misc_feature (1)..(25): SEQ ID NO: 7501; WAN024BXW; Start 141; Stop 165
agcagggaatgaacaatcactaaat

SEQ ID NO: 469741 - DNA, 25 bp, Artificial
  probe
  misc_feature (1)..(25): SEQ ID NO: 7501; WAN024BXW; Start 301; Stop 325
attactgaagatgaactattgaggg

SEQ ID NO: 469742 - DNA, 25 bp, Artificial
  probe
  misc_feature (1)..(25): SEQ ID NO: 7501; WAN024BXW; Start 140; Stop 164
gagcagggaatgaacaatcactaaa

SEQ ID NO: 469743 - DNA, 25 bp, Artificial
  probe
  misc_feature (1)..(25): SEQ ID NO: 7501; WAN024BXW; Start 132; Stop 156
actaatacgagcagggaatgaacaa

SEQ ID NO: 469744 - DNA, 25 bp, Artificial
  probe
  misc_feature (1)..(25): SEQ ID NO: 7501; WAN024BXW; Start 144; Stop 168
agggaatgaacaatcactaaatgaa

SEQ ID NO: 469745 - DNA, 25 bp, Artificial
  probe
  misc_feature (1)..(25): SEQ ID NO: 7501; WAN024BXW; Start 121; Stop 145
attgaacatttactaatacgagcag

SEQ ID NO: 469746 - DNA, 25 bp, Artificial
  probe
  misc_feature (1)..(25): SEQ ID NO: 7501; WAN024BXW; Start 231; Stop 255
tggttactgtctagctgaagatttc

SEQ ID NO: 469747 - DNA, 25 bp, Artificial
  probe
  misc_feature (1)..(25): SEQ ID NO: 7501; WAN024BXW; Start 187; Stop 211
gcagctattaaaggagagacatcta

SEQ ID NO: 469748 - DNA, 25 bp, Artificial
  probe
  misc_feature (1)..(25): SEQ ID NO: 7501; WAN024BXW; Start 230; Stop 254
gtggttactgtctagctgaagattt

SEQ ID NO: 469749 - DNA, 25 bp, Artificial
  probe
  misc_feature (1)..(25): SEQ ID NO: 7501; WAN024BXW; Start 145; Stop 169
gggaatgaacaatcactaaatgaat

SEQ ID NO: 469750 - DNA, 25 bp, Artificial
  probe
  misc_feature (1)..(25): SEQ ID NO: 7501; WAN024BXW; Start 177; Stop 201
tatgaatggtgcagctattaaagga

SEQ ID NO: 469751 - DNA, 25 bp, Artificial
  probe
  misc_feature (1)..(25): SEQ ID NO: 7502; WAN024BK4; Start 39; Stop 63
tttagcttcttgccctgaaattaaa

SEQ ID NO: 469752 - DNA, 25 bp, Artificial
  probe
  misc_feature (1)..(25): SEQ ID NO: 7502; WAN024BK4; Start 40; Stop 64
ttagcttcttgccctgaaattaaaa

SEQ ID NO: 469753 - DNA, 25 bp, Artificial
  probe
  misc_feature (1)..(25): SEQ ID NO: 7502; WAN024BK4; Start 38; Stop 62
ttttagcttcttgccctgaaattaa

SEQ ID NO: 469754 - DNA, 25 bp, Artificial
  probe
  misc_feature (1)..(25): SEQ ID NO: 7502; WAN024BK4; Start 80; Stop 104
cactggaggttttcagcctctcatc

SEQ ID NO: 469755 - DNA, 25 bp, Artificial
  probe
  misc_feature (1)..(25): SEQ ID NO: 7503; WAN024CI9; Start 49; Stop 73
tttaccatatcacaaacaatgaagg

SEQ ID NO: 469756 - DNA, 25 bp, Artificial
  probe
  misc_feature (1)..(25): SEQ ID NO: 7503; WAN024CI9; Start 51; Stop 75
taccatatcacaaacaatgaaggtg

SEQ ID NO: 469757 - DNA, 25 bp, Artificial
  probe
  misc_feature (1)..(25): SEQ ID NO: 7503; WAN024CI9; Start 50; Stop 74
ttaccatatcacaaacaatgaaggt

SEQ ID NO: 469758 - DNA, 25 bp, Artificial
  probe
  misc_feature (1)..(25): SEQ ID NO: 7503; WAN024CI9; Start 6; Stop 30
gcagaacaaagaaatggtaaaagtt

SEQ ID NO: 469759 - DNA, 25 bp, Artificial
  probe
  misc_feature (1)..(25): SEQ ID NO: 7503; WAN024CI9; Start 48; Stop 72
atttaccatatcacaaacaatgaag

SEQ ID NO: 469760 - DNA, 25 bp, Artificial
  probe
  misc_feature (1)..(25): SEQ ID NO: 7503; WAN024CI9; Start 7; Stop 31
cagaacaaagaaatggtaaaagttg

SEQ ID NO: 469761 - DNA, 25 bp, Artificial
  probe
  misc_feature (1)..(25): SEQ ID NO: 7503; WAN024CI9; Start 8; Stop 32
agaacaaagaaatggtaaaagttga

SEQ ID NO: 469762 - DNA, 25 bp, Artificial
  probe
  misc_feature (1)..(25): SEQ ID NO: 7503; WAN024CI9; Start 54; Stop 78
catatcacaaacaatgaaggtgagg

SEQ ID NO: 469763 - DNA, 25 bp, Artificial
  probe
  misc_feature (1)..(25): SEQ ID NO: 7503; WAN024CI9; Start 53; Stop 77
ccatatcacaaacaatgaaggtgag

SEQ ID NO: 469764 - DNA, 25 bp, Artificial
  probe
  misc_feature (1)..(25): SEQ ID NO: 7503; WAN024CI9; Start 52; Stop 76
accatatcacaaacaatgaaggtga

SEQ ID NO: 469765 - DNA, 25 bp, Artificial
  probe
  misc_feature (1)..(25): SEQ ID NO: 7503; WAN024CI9; Start 9; Stop 33
gaacaaagaaatggtaaaagttgaa

SEQ ID NO: 469766 - DNA, 25 bp, Artificial
  probe
  misc_feature (1)..(25): SEQ ID NO: 7503; WAN024CI9; Start 55; Stop 79
atatcacaaacaatgaaggtgaggg

SEQ ID NO: 469767 - DNA, 25 bp, Artificial
  probe
  misc_feature (1)..(25): SEQ ID NO: 7503; WAN024CI9; Start 10; Stop 34
aacaaagaaatggtaaaagttgaaa

SEQ ID NO: 469768 - DNA, 25 bp, Artificial
  probe
  misc_feature (1)..(25): SEQ ID NO: 7503; WAN024CI9; Start 45; Stop 69
gttatttaccatatcacaaacaatg

SEQ ID NO: 469769 - DNA, 25 bp, Artificial
  probe
  misc_feature (1)..(25): SEQ ID NO: 7503; WAN024CI9; Start 11; Stop 35
acaaagaaatggtaaaagttgaaat

SEQ ID NO: 469770 - DNA, 25 bp, Artificial
  probe
  misc_feature (1)..(25): SEQ ID NO: 7503; WAN024CI9; Start 47; Stop 71
tatttaccatatcacaaacaatgaa

SEQ ID NO: 469771 - DNA, 25 bp, Artificial
  probe
  misc_feature (1)..(25): SEQ ID NO: 7503; WAN024CI9; Start 46; Stop 70
ttatttaccatatcacaaacaatga

SEQ ID NO: 469772 - DNA, 25 bp, Artificial
  probe
  misc_feature (1)..(25): SEQ ID NO: 7503; WAN024CI9; Start 66; Stop 90
aatgaaggtgaggggcgtgttttat

SEQ ID NO: 469773 - DNA, 25 bp, Artificial
  probe
  misc_feature (1)..(25): SEQ ID NO: 7503; WAN024CI9; Start 44; Stop 68
tgttatttaccatatcacaaacaat

SEQ ID NO: 469774 - DNA, 25 bp, Artificial
  probe
  misc_feature (1)..(25): SEQ ID NO: 7503; WAN024CI9; Start 42; Stop 66
attgttatttaccatatcacaaaca

SEQ ID NO: 469775 - DNA, 25 bp, Artificial
  probe
  misc_feature (1)..(25): SEQ ID NO: 7503; WAN024CI9; Start 56; Stop 80
tatcacaaacaatgaaggtgagggg

SEQ ID NO: 469776 - DNA, 25 bp, Artificial
  probe
  misc_feature (1)..(25): SEQ ID NO: 7504; WAN024BOC; Start 139; Stop 163
gatagagagtatatggatggcacac

SEQ ID NO: 469777 - DNA, 25 bp, Artificial
  probe
  misc_feature (1)..(25): SEQ ID NO: 7504; WAN024BOC; Start 140; Stop 164
atagagagtatatggatggcacaca

SEQ ID NO: 469778 - DNA, 25 bp, Artificial
  probe
  misc_feature (1)..(25): SEQ ID NO: 7504; WAN024BOC; Start 135; Stop 159
agtggatagagagtatatggatggc

SEQ ID NO: 469779 - DNA, 25 bp, Artificial
  probe
  misc_feature (1)..(25): SEQ ID NO: 7504; WAN024BOC; Start 141; Stop 165
tagagagtatatggatggcacacaa

SEQ ID NO: 469780 - DNA, 25 bp, Artificial
  probe
  misc_feature (1)..(25): SEQ ID NO: 7504; WAN024BOC; Start 138; Stop 162
ggatagagagtatatggatggcaca

SEQ ID NO: 469781 - DNA, 25 bp, Artificial
  probe
  misc_feature (1)..(25): SEQ ID NO: 7504; WAN024BOC; Start 137; Stop 161
tggatagagagtatatggatggcac

SEQ ID NO: 469782 - DNA, 25 bp, Artificial
  probe
  misc_feature (1)..(25): SEQ ID NO: 7504; WAN024BOC; Start 136; Stop 160
gtggatagagagtatatggatggca

SEQ ID NO: 469783 - DNA, 25 bp, Artificial
  probe
  misc_feature (1)..(25): SEQ ID NO: 7504; WAN024BOC; Start 147; Stop 171
gtatatggatggcacacaagaagtt

SEQ ID NO: 469784 - DNA, 25 bp, Artificial
  probe
  misc_feature (1)..(25): SEQ ID NO: 7504; WAN024BOC; Start 145; Stop 169
gagtatatggatggcacacaagaag

SEQ ID NO: 469785 - DNA, 25 bp, Artificial
  probe
  misc_feature (1)..(25): SEQ ID NO: 7504; WAN024BOC; Start 134; Stop 158
aagtggatagagagtatatggatgg

SEQ ID NO: 469786 - DNA, 25 bp, Artificial
  probe
  misc_feature (1)..(25): SEQ ID NO: 7504; WAN024BOC; Start 144; Stop 168
agagtatatggatggcacacaagaa

SEQ ID NO: 469787 - DNA, 25 bp, Artificial
  probe
  misc_feature (1)..(25): SEQ ID NO: 7504; WAN024BOC; Start 207; Stop 231
gaactcagtagccaatgacactatt

SEQ ID NO: 469788 - DNA, 25 bp, Artificial
  probe
  misc_feature (1)..(25): SEQ ID NO: 7504; WAN024BOC; Start 146; Stop 170
agtatatggatggcacacaagaagt

SEQ ID NO: 469789 - DNA, 25 bp, Artificial
  probe
  misc_feature (1)..(25): SEQ ID NO: 7504; WAN024BOC; Start 206; Stop 230
agaactcagtagccaatgacactat

SEQ ID NO: 469790 - DNA, 25 bp, Artificial
  probe
  misc_feature (1)..(25): SEQ ID NO: 7504; WAN024BOC; Start 143; Stop 167
gagagtatatggatggcacacaaga

SEQ ID NO: 469791 - DNA, 25 bp, Artificial
  probe
  misc_feature (1)..(25): SEQ ID NO: 7504; WAN024BOC; Start 142; Stop 166
agagagtatatggatggcacacaag

SEQ ID NO: 469792 - DNA, 25 bp, Artificial
  probe
  misc_feature (1)..(25): SEQ ID NO: 7504; WAN024BOC; Start 205; Stop 229
aagaactcagtagccaatgacacta

SEQ ID NO: 469793 - DNA, 25 bp, Artificial
  probe
  misc_feature (1)..(25): SEQ ID NO: 7504; WAN024BOC; Start 129; Stop 153
cgggaaagtggatagagagtatatg

SEQ ID NO: 469794 - DNA, 25 bp, Artificial
  probe
  misc_feature (1)..(25): SEQ ID NO: 7504; WAN024BOC; Start 148; Stop 172
tatatggatggcacacaagaagttt

SEQ ID NO: 469795 - DNA, 25 bp, Artificial
  probe
  misc_feature (1)..(25): SEQ ID NO: 7504; WAN024BOC; Start 130; Stop 154
gggaaagtggatagagagtatatgg

SEQ ID NO: 469796 - DNA, 25 bp, Artificial
  probe
  misc_feature (1)..(25): SEQ ID NO: 7504; WAN024BOC; Start 128; Stop 152
gcgggaaagtggatagagagtatat

SEQ ID NO: 469797 - DNA, 25 bp, Artificial
  probe
  misc_feature (1)..(25): SEQ ID NO: 7504; WAN024BOC; Start 74; Stop 98
gctttgattactttgaggatgacaa

SEQ ID NO: 469798 - DNA, 25 bp, Artificial
  probe
  misc_feature (1)..(25): SEQ ID NO: 7504; WAN024BOC; Start 241; Stop 265
acctcagaactagcaaagatagact

SEQ ID NO: 469799 - DNA, 25 bp, Artificial
  probe
  misc_feature (1)..(25): SEQ ID NO: 7504; WAN024BOC; Start 240; Stop 264
cacctcagaactagcaaagatagac

SEQ ID NO: 469800 - DNA, 25 bp, Artificial
  probe
  misc_feature (1)..(25): SEQ ID NO: 7504; WAN024BOC; Start 239; Stop 263
tcacctcagaactagcaaagataga

SEQ ID NO: 469801 - DNA, 25 bp, Artificial
  probe
  misc_feature (1)..(25): SEQ ID NO: 7504; WAN024BOC; Start 238; Stop 262
gtcacctcagaactagcaaagatag

SEQ ID NO: 469802 - DNA, 25 bp, Artificial
  probe
  misc_feature (1)..(25): SEQ ID NO: 7504; WAN024BOC; Start 131; Stop 155
ggaaagtggatagagagtatatgga

SEQ ID NO: 469803 - DNA, 25 bp, Artificial
  probe
  misc_feature (1)..(25): SEQ ID NO: 7504; WAN024BOC; Start 242; Stop 266
cctcagaactagcaaagatagactt

SEQ ID NO: 469804 - DNA, 25 bp, Artificial
  probe
  misc_feature (1)..(25): SEQ ID NO: 7504; WAN024BOC; Start 208; Stop 232
aactcagtagccaatgacactattt

SEQ ID NO: 469805 - DNA, 25 bp, Artificial
  probe
  misc_feature (1)..(25): SEQ ID NO: 7504; WAN024BOC; Start 73; Stop 97
cgctttgattactttgaggatgaca

SEQ ID NO: 469806 - DNA, 25 bp, Artificial
  probe
  misc_feature (1)..(25): SEQ ID NO: 7504; WAN024BOC; Start 72; Stop 96
acgctttgattactttgaggatgac

SEQ ID NO: 469807 - DNA, 25 bp, Artificial
  probe
  misc_feature (1)..(25): SEQ ID NO: 7504; WAN024BOC; Start 71; Stop 95
cacgctttgattactttgaggatga

SEQ ID NO: 469808 - DNA, 25 bp, Artificial
  probe
  misc_feature (1)..(25): SEQ ID NO: 7504; WAN024BOC; Start 65; Stop 89
ttgaaccacgctttgattactttga

SEQ ID NO: 469809 - DNA, 25 bp, Artificial
  probe
  misc_feature (1)..(25): SEQ ID NO: 7505; WAN024FJU; Start 127; Stop 151
ctctttattagacgcagaaacctct

SEQ ID NO: 469810 - DNA, 25 bp, Artificial
  probe
  misc_feature (1)..(25): SEQ ID NO: 7505; WAN024FJU; Start 126; Stop 150
tctctttattagacgcagaaacctc

SEQ ID NO: 469811 - DNA, 25 bp, Artificial
  probe
  misc_feature (1)..(25): SEQ ID NO: 7505; WAN024FJU; Start 46; Stop 70
ttctgctggtttagtaacttcttca

SEQ ID NO: 469812 - DNA, 25 bp, Artificial
  probe
  misc_feature (1)..(25): SEQ ID NO: 7505; WAN024FJU; Start 45; Stop 69
tttctgctggtttagtaacttcttc

SEQ ID NO: 469813 - DNA, 25 bp, Artificial
  probe
  misc_feature (1)..(25): SEQ ID NO: 7505; WAN024FJU; Start 76; Stop 100
aactggagtcgtttctactggatta

SEQ ID NO: 469814 - DNA, 25 bp, Artificial
  probe
  misc_feature (1)..(25): SEQ ID NO: 7505; WAN024FJU; Start 75; Stop 99
taactggagtcgtttctactggatt

SEQ ID NO: 469815 - DNA, 25 bp, Artificial
  probe
  misc_feature (1)..(25): SEQ ID NO: 7505; WAN024FJU; Start 74; Stop 98
ttaactggagtcgtttctactggat

SEQ ID NO: 469816 - DNA, 25 bp, Artificial
  probe
  misc_feature (1)..(25): SEQ ID NO: 7505; WAN024FJU; Start 73; Stop 97
tttaactggagtcgtttctactgga

SEQ ID NO: 469817 - DNA, 25 bp, Artificial
  probe
  misc_feature (1)..(25): SEQ ID NO: 7505; WAN024FJU; Start 47; Stop 71
tctgctggtttagtaacttcttcag

SEQ ID NO: 469818 - DNA, 25 bp, Artificial
  probe
  misc_feature (1)..(25): SEQ ID NO: 7505; WAN024FJU; Start 48; Stop 72
ctgctggtttagtaacttcttcagt

SEQ ID NO: 469819 - DNA, 25 bp, Artificial
  probe
  misc_feature (1)..(25): SEQ ID NO: 7505; WAN024FJU; Start 77; Stop 101
actggagtcgtttctactggattag

SEQ ID NO: 469820 - DNA, 25 bp, Artificial
  probe
  misc_feature (1)..(25): SEQ ID NO: 7505; WAN024FJU; Start 78; Stop 102
ctggagtcgtttctactggattagc

SEQ ID NO: 469821 - DNA, 25 bp, Artificial
  probe
  misc_feature (1)..(25): SEQ ID NO: 7505; WAN024FJU; Start 125; Stop 149
ttctctttattagacgcagaaacct

SEQ ID NO: 469822 - DNA, 25 bp, Artificial
  probe
  misc_feature (1)..(25): SEQ ID NO: 7505; WAN024FJU; Start 197; Stop 221
gtagtttcttgtttgttttcttccg

SEQ ID NO: 469823 - DNA, 25 bp, Artificial
  probe
  misc_feature (1)..(25): SEQ ID NO: 7505; WAN024FJU; Start 198; Stop 222
tagtttcttgtttgttttcttccgc

SEQ ID NO: 469824 - DNA, 25 bp, Artificial
  probe
  misc_feature (1)..(25): SEQ ID NO: 7505; WAN024FJU; Start 171; Stop 195
ctcccctaccaacagaaatactatt

SEQ ID NO: 469825 - DNA, 25 bp, Artificial
  probe
  misc_feature (1)..(25): SEQ ID NO: 7505; WAN024FJU; Start 196; Stop 220
ggtagtttcttgtttgttttcttcc

SEQ ID NO: 469826 - DNA, 25 bp, Artificial
  probe
  misc_feature (1)..(25): SEQ ID NO: 7505; WAN024FJU; Start 170; Stop 194
tctcccctaccaacagaaatactat

SEQ ID NO: 469827 - DNA, 25 bp, Artificial
  probe
  misc_feature (1)..(25): SEQ ID NO: 7505; WAN024FJU; Start 120; Stop 144
aggttttctctttattagacgcaga

SEQ ID NO: 469828 - DNA, 25 bp, Artificial
  probe
  misc_feature (1)..(25): SEQ ID NO: 7505; WAN024FJU; Start 49; Stop 73
tgctggtttagtaacttcttcagtt

SEQ ID NO: 469829 - DNA, 25 bp, Artificial
  probe
  misc_feature (1)..(25): SEQ ID NO: 7505; WAN024FJU; Start 172; Stop 196
tcccctaccaacagaaatactattg

SEQ ID NO: 469830 - DNA, 25 bp, Artificial
  probe
  misc_feature (1)..(25): SEQ ID NO: 7505; WAN024FJU; Start 50; Stop 74
gctggtttagtaacttcttcagttt

SEQ ID NO: 469831 - DNA, 25 bp, Artificial
  probe
  misc_feature (1)..(25): SEQ ID NO: 7505; WAN024FJU; Start 201; Stop 225
tttcttgtttgttttcttccgcttg

SEQ ID NO: 469832 - DNA, 25 bp, Artificial
  probe
  misc_feature (1)..(25): SEQ ID NO: 7505; WAN024FJU; Start 200; Stop 224
gtttcttgtttgttttcttccgctt

SEQ ID NO: 469833 - DNA, 25 bp, Artificial
  probe
  misc_feature (1)..(25): SEQ ID NO: 7505; WAN024FJU; Start 71; Stop 95
gttttaactggagtcgtttctactg

SEQ ID NO: 469834 - DNA, 25 bp, Artificial
  probe
  misc_feature (1)..(25): SEQ ID NO: 7505; WAN024FJU; Start 203; Stop 227
tcttgtttgttttcttccgcttgta

SEQ ID NO: 469835 - DNA, 25 bp, Artificial
  probe
  misc_feature (1)..(25): SEQ ID NO: 7505; WAN024FJU; Start 195; Stop 219
tggtagtttcttgtttgttttcttc

SEQ ID NO: 469836 - DNA, 25 bp, Artificial
  probe
  misc_feature (1)..(25): SEQ ID NO: 7505; WAN024FJU; Start 72; Stop 96
ttttaactggagtcgtttctactgg

SEQ ID NO: 469837 - DNA, 25 bp, Artificial
  probe
  misc_feature (1)..(25): SEQ ID NO: 7505; WAN024FJU; Start 119; Stop 143
taggttttctctttattagacgcag

SEQ ID NO: 469838 - DNA, 25 bp, Artificial
  probe
  misc_feature (1)..(25): SEQ ID NO: 7505; WAN024FJU; Start 44; Stop 68
ttttctgctggtttagtaacttctt

SEQ ID NO: 469839 - DNA, 25 bp, Artificial
  probe
  misc_feature (1)..(25): SEQ ID NO: 7505; WAN024FJU; Start 190; Stop 214
actattggtagtttcttgtttgttt

SEQ ID NO: 469840 - DNA, 25 bp, Artificial
  probe
  misc_feature (1)..(25): SEQ ID NO: 7505; WAN024FJU; Start 22; Stop 46
tttgtcttttgcttcttcaactttt

SEQ ID NO: 469841 - DNA, 25 bp, Artificial
  probe
  misc_feature (1)..(25): SEQ ID NO: 7505; WAN024FJU; Start 21; Stop 45
ttttgtcttttgcttcttcaacttt

SEQ ID NO: 469842 - DNA, 25 bp, Artificial
  probe
  misc_feature (1)..(25): SEQ ID NO: 7507; WAN024CC3; Start 196; Stop 220
ttggtattatcaagagtgtatagaa

SEQ ID NO: 469843 - DNA, 25 bp, Artificial
  probe
  misc_feature (1)..(25): SEQ ID NO: 7507; WAN024CC3; Start 114; Stop 138
tattggactagtgattggatatact

SEQ ID NO: 469844 - DNA, 25 bp, Artificial
  probe
  misc_feature (1)..(25): SEQ ID NO: 7507; WAN024CC3; Start 95; Stop 119
gcatgtctgctagtccaattattgg

SEQ ID NO: 469845 - DNA, 25 bp, Artificial
  probe
  misc_feature (1)..(25): SEQ ID NO: 7507; WAN024CC3; Start 116; Stop 140
ttggactagtgattggatatactaa

SEQ ID NO: 469846 - DNA, 25 bp, Artificial
  probe
  misc_feature (1)..(25): SEQ ID NO: 7507; WAN024CC3; Start 113; Stop 137
ttattggactagtgattggatatac

SEQ ID NO: 469847 - DNA, 25 bp, Artificial
  probe
  misc_feature (1)..(25): SEQ ID NO: 7507; WAN024CC3; Start 115; Stop 139
attggactagtgattggatatacta

SEQ ID NO: 469848 - DNA, 25 bp, Artificial
  probe
  misc_feature (1)..(25): SEQ ID NO: 7507; WAN024CC3; Start 197; Stop 221
tggtattatcaagagtgtatagaaa

SEQ ID NO: 469849 - DNA, 25 bp, Artificial
  probe
  misc_feature (1)..(25): SEQ ID NO: 7507; WAN024CC3; Start 110; Stop 134
caattattggactagtgattggata

SEQ ID NO: 469850 - DNA, 25 bp, Artificial
  probe
  misc_feature (1)..(25): SEQ ID NO: 7507; WAN024CC3; Start 111; Stop 135
aattattggactagtgattggatat

SEQ ID NO: 469851 - DNA, 25 bp, Artificial
  probe
  misc_feature (1)..(25): SEQ ID NO: 7507; WAN024CC3; Start 195; Stop 219
tttggtattatcaagagtgtataga

SEQ ID NO: 469852 - DNA, 25 bp, Artificial
  probe
  misc_feature (1)..(25): SEQ ID NO: 7507; WAN024CC3; Start 117; Stop 141
tggactagtgattggatatactaaa

SEQ ID NO: 469853 - DNA, 25 bp, Artificial
  probe
  misc_feature (1)..(25): SEQ ID NO: 7507; WAN024CC3; Start 80; Stop 104
ttttattatatctaagcatgtctgc

SEQ ID NO: 469854 - DNA, 25 bp, Artificial
  probe
  misc_feature (1)..(25): SEQ ID NO: 7507; WAN024CC3; Start 118; Stop 142
ggactagtgattggatatactaaaa

SEQ ID NO: 469855 - DNA, 25 bp, Artificial
  probe
  misc_feature (1)..(25): SEQ ID NO: 7508; WAN024BTT; Start 168; Stop 192
tgactacggttctaaggattgttac

SEQ ID NO: 469856 - DNA, 25 bp, Artificial
  probe
  misc_feature (1)..(25): SEQ ID NO: 7508; WAN024BTT; Start 169; Stop 193
gactacggttctaaggattgttact

SEQ ID NO: 469857 - DNA, 25 bp, Artificial
  probe
  misc_feature (1)..(25): SEQ ID NO: 7508; WAN024BTT; Start 167; Stop 191
ttgactacggttctaaggattgtta

SEQ ID NO: 469858 - DNA, 25 bp, Artificial
  probe
  misc_feature (1)..(25): SEQ ID NO: 7508; WAN024BTT; Start 170; Stop 194
actacggttctaaggattgttacta

SEQ ID NO: 469859 - DNA, 25 bp, Artificial
  probe
  misc_feature (1)..(25): SEQ ID NO: 7508; WAN024BTT; Start 171; Stop 195
ctacggttctaaggattgttactat

SEQ ID NO: 469860 - DNA, 25 bp, Artificial
  probe
  misc_feature (1)..(25): SEQ ID NO: 7508; WAN024BTT; Start 172; Stop 196
tacggttctaaggattgttactatt

SEQ ID NO: 469861 - DNA, 25 bp, Artificial
  probe
  misc_feature (1)..(25): SEQ ID NO: 7508; WAN024BTT; Start 166; Stop 190
tttgactacggttctaaggattgtt

SEQ ID NO: 469862 - DNA, 25 bp, Artificial
  probe
  misc_feature (1)..(25): SEQ ID NO: 7508; WAN024BTT; Start 165; Stop 189
atttgactacggttctaaggattgt

SEQ ID NO: 469863 - DNA, 25 bp, Artificial
  probe
  misc_feature (1)..(25): SEQ ID NO: 7508; WAN024BTT; Start 164; Stop 188
gatttgactacggttctaaggattg

SEQ ID NO: 469864 - DNA, 25 bp, Artificial
  probe
  misc_feature (1)..(25): SEQ ID NO: 7508; WAN024BTT; Start 163; Stop 187
cgatttgactacggttctaaggatt

SEQ ID NO: 469865 - DNA, 25 bp, Artificial
  probe
  misc_feature (1)..(25): SEQ ID NO: 7508; WAN024BTT; Start 115; Stop 139
gctatcactcatccaagatttcaga

SEQ ID NO: 469866 - DNA, 25 bp, Artificial
  probe
  misc_feature (1)..(25): SEQ ID NO: 7508; WAN024BTT; Start 123; Stop 147
tcatccaagatttcagaagcacatt

SEQ ID NO: 469867 - DNA, 25 bp, Artificial
  probe
  misc_feature (1)..(25): SEQ ID NO: 7508; WAN024BTT; Start 118; Stop 142
atcactcatccaagatttcagaagc

SEQ ID NO: 469868 - DNA, 25 bp, Artificial
  probe
  misc_feature (1)..(25): SEQ ID NO: 7508; WAN024BTT; Start 114; Stop 138
ggctatcactcatccaagatttcag

SEQ ID NO: 469869 - DNA, 25 bp, Artificial
  probe
  misc_feature (1)..(25): SEQ ID NO: 7508; WAN024BTT; Start 122; Stop 146
ctcatccaagatttcagaagcacat

SEQ ID NO: 469870 - DNA, 25 bp, Artificial
  probe
  misc_feature (1)..(25): SEQ ID NO: 7508; WAN024BTT; Start 162; Stop 186
acgatttgactacggttctaaggat

SEQ ID NO: 469871 - DNA, 25 bp, Artificial
  probe
  misc_feature (1)..(25): SEQ ID NO: 7508; WAN024BTT; Start 159; Stop 183
gacacgatttgactacggttctaag

SEQ ID NO: 469872 - DNA, 25 bp, Artificial
  probe
  misc_feature (1)..(25): SEQ ID NO: 7508; WAN024BTT; Start 124; Stop 148
catccaagatttcagaagcacattg

SEQ ID NO: 469873 - DNA, 25 bp, Artificial
  probe
  misc_feature (1)..(25): SEQ ID NO: 7508; WAN024BTT; Start 182; Stop 206
aggattgttactatttagcgacttt

SEQ ID NO: 469874 - DNA, 25 bp, Artificial
  probe
  misc_feature (1)..(25): SEQ ID NO: 7508; WAN024BTT; Start 117; Stop 141
tatcactcatccaagatttcagaag

SEQ ID NO: 469875 - DNA, 25 bp, Artificial
  probe
  misc_feature (1)..(25): SEQ ID NO: 7508; WAN024BTT; Start 116; Stop 140
ctatcactcatccaagatttcagaa

SEQ ID NO: 469876 - DNA, 25 bp, Artificial
  probe
  misc_feature (1)..(25): SEQ ID NO: 7508; WAN024BTT; Start 129; Stop 153
aagatttcagaagcacattggtcag

SEQ ID NO: 469877 - DNA, 25 bp, Artificial
  probe
  misc_feature (1)..(25): SEQ ID NO: 7508; WAN024BTT; Start 110; Stop 134
tctcggctatcactcatccaagatt

SEQ ID NO: 469878 - DNA, 25 bp, Artificial
  probe
  misc_feature (1)..(25): SEQ ID NO: 7508; WAN024BTT; Start 109; Stop 133
ttctcggctatcactcatccaagat

SEQ ID NO: 469879 - DNA, 25 bp, Artificial
  probe
  misc_feature (1)..(25): SEQ ID NO: 7508; WAN024BTT; Start 181; Stop 205
aaggattgttactatttagcgactt

SEQ ID NO: 469880 - DNA, 25 bp, Artificial
  probe
  misc_feature (1)..(25): SEQ ID NO: 7508; WAN024BTT; Start 173; Stop 197
acggttctaaggattgttactattt

SEQ ID NO: 469881 - DNA, 25 bp, Artificial
  probe
  misc_feature (1)..(25): SEQ ID NO: 7508; WAN024BTT; Start 70; Stop 94
gatgatctcattgagcagatggaag

SEQ ID NO: 469882 - DNA, 25 bp, Artificial
  probe
  misc_feature (1)..(25): SEQ ID NO: 7508; WAN024BTT; Start 120; Stop 144
cactcatccaagatttcagaagcac

SEQ ID NO: 469883 - DNA, 25 bp, Artificial
  probe
  misc_feature (1)..(25): SEQ ID NO: 7508; WAN024BTT; Start 161; Stop 185
cacgatttgactacggttctaagga

SEQ ID NO: 469884 - DNA, 25 bp, Artificial
  probe
  misc_feature (1)..(25): SEQ ID NO: 7508; WAN024BTT; Start 119; Stop 143
tcactcatccaagatttcagaagca

SEQ ID NO: 469885 - DNA, 25 bp, Artificial
  probe
  misc_feature (1)..(25): SEQ ID NO: 7508; WAN024BTT; Start 71; Stop 95
atgatctcattgagcagatggaaga

SEQ ID NO: 469886 - DNA, 25 bp, Artificial
  probe
  misc_feature (1)..(25): SEQ ID NO: 7508; WAN024BTT; Start 128; Stop 152
caagatttcagaagcacattggtca

SEQ ID NO: 469887 - DNA, 25 bp, Artificial
  probe
  misc_feature (1)..(25): SEQ ID NO: 7508; WAN024BTT; Start 180; Stop 204
taaggattgttactatttagcgact

SEQ ID NO: 469888 - DNA, 25 bp, Artificial
  probe
  misc_feature (1)..(25): SEQ ID NO: 7509; WAN024CMB; Start 263; Stop 287
gtatcacagcaggagaatcttatca

SEQ ID NO: 469889 - DNA, 25 bp, Artificial
  probe
  misc_feature (1)..(25): SEQ ID NO: 7509; WAN024CMB; Start 270; Stop 294
agcaggagaatcttatcaacaacta

SEQ ID NO: 469890 - DNA, 25 bp, Artificial
  probe
  misc_feature (1)..(25): SEQ ID NO: 7509; WAN024CMB; Start 262; Stop 286
ggtatcacagcaggagaatcttatc

SEQ ID NO: 469891 - DNA, 25 bp, Artificial
  probe
  misc_feature (1)..(25): SEQ ID NO: 7509; WAN024CMB; Start 265; Stop 289
atcacagcaggagaatcttatcaac

SEQ ID NO: 469892 - DNA, 25 bp, Artificial
  probe
  misc_feature (1)..(25): SEQ ID NO: 7509; WAN024CMB; Start 264; Stop 288
tatcacagcaggagaatcttatcaa

SEQ ID NO: 469893 - DNA, 25 bp, Artificial
  probe
  misc_feature (1)..(25): SEQ ID NO: 7509; WAN024CMB; Start 269; Stop 293
cagcaggagaatcttatcaacaact

SEQ ID NO: 469894 - DNA, 25 bp, Artificial
  probe
  misc_feature (1)..(25): SEQ ID NO: 7509; WAN024CMB; Start 261; Stop 285
aggtatcacagcaggagaatcttat

SEQ ID NO: 469895 - DNA, 25 bp, Artificial
  probe
  misc_feature (1)..(25): SEQ ID NO: 7509; WAN024CMB; Start 268; Stop 292
acagcaggagaatcttatcaacaac

SEQ ID NO: 469896 - DNA, 25 bp, Artificial
  probe
  misc_feature (1)..(25): SEQ ID NO: 7509; WAN024CMB; Start 267; Stop 291
cacagcaggagaatcttatcaacaa

SEQ ID NO: 469897 - DNA, 25 bp, Artificial
  probe
  misc_feature (1)..(25): SEQ ID NO: 7509; WAN024CMB; Start 271; Stop 295
gcaggagaatcttatcaacaactaa

SEQ ID NO: 469898 - DNA, 25 bp, Artificial
  probe
  misc_feature (1)..(25): SEQ ID NO: 7509; WAN024CMB; Start 287; Stop 311
aacaactaatcgcttatattggtgc

SEQ ID NO: 469899 - DNA, 25 bp, Artificial
  probe
  misc_feature (1)..(25): SEQ ID NO: 7509; WAN024CMB; Start 294; Stop 318
aatcgcttatattggtgctattctt

SEQ ID NO: 469900 - DNA, 25 bp, Artificial
  probe
  misc_feature (1)..(25): SEQ ID NO: 7509; WAN024CMB; Start 288; Stop 312
acaactaatcgcttatattggtgct

SEQ ID NO: 469901 - DNA, 25 bp, Artificial
  probe
  misc_feature (1)..(25): SEQ ID NO: 7509; WAN024CMB; Start 260; Stop 284
gaggtatcacagcaggagaatctta

SEQ ID NO: 469902 - DNA, 25 bp, Artificial
  probe
  misc_feature (1)..(25): SEQ ID NO: 7509; WAN024CMB; Start 289; Stop 313
caactaatcgcttatattggtgcta

SEQ ID NO: 469903 - DNA, 25 bp, Artificial
  probe
  misc_feature (1)..(25): SEQ ID NO: 7509; WAN024CMB; Start 276; Stop 300
agaatcttatcaacaactaatcgct

SEQ ID NO: 469904 - DNA, 25 bp, Artificial
  probe
  misc_feature (1)..(25): SEQ ID NO: 7509; WAN024CMB; Start 266; Stop 290
tcacagcaggagaatcttatcaaca

SEQ ID NO: 469905 - DNA, 25 bp, Artificial
  probe
  misc_feature (1)..(25): SEQ ID NO: 7509; WAN024CMB; Start 190; Stop 214
gttagtcctagaaccaatcaactca

SEQ ID NO: 469906 - DNA, 25 bp, Artificial
  probe
  misc_feature (1)..(25): SEQ ID NO: 7509; WAN024CMB; Start 291; Stop 315
actaatcgcttatattggtgctatt

SEQ ID NO: 469907 - DNA, 25 bp, Artificial
  probe
  misc_feature (1)..(25): SEQ ID NO: 7509; WAN024CMB; Start 290; Stop 314
aactaatcgcttatattggtgctat

SEQ ID NO: 469908 - DNA, 25 bp, Artificial
  probe
  misc_feature (1)..(25): SEQ ID NO: 7509; WAN024CMB; Start 275; Stop 299
gagaatcttatcaacaactaatcgc

SEQ ID NO: 469909 - DNA, 25 bp, Artificial
  probe
  misc_feature (1)..(25): SEQ ID NO: 7509; WAN024CMB; Start 286; Stop 310
caacaactaatcgcttatattggtg

SEQ ID NO: 469910 - DNA, 25 bp, Artificial
  probe
  misc_feature (1)..(25): SEQ ID NO: 7509; WAN024CMB; Start 285; Stop 309
tcaacaactaatcgcttatattggt

SEQ ID NO: 469911 - DNA, 25 bp, Artificial
  probe
  misc_feature (1)..(25): SEQ ID NO: 7509; WAN024CMB; Start 293; Stop 317
taatcgcttatattggtgctattct

SEQ ID NO: 469912 - DNA, 25 bp, Artificial
  probe
  misc_feature (1)..(25): SEQ ID NO: 7509; WAN024CMB; Start 191; Stop 215
ttagtcctagaaccaatcaactcat

SEQ ID NO: 469913 - DNA, 25 bp, Artificial
  probe
  misc_feature (1)..(25): SEQ ID NO: 7509; WAN024CMB; Start 277; Stop 301
gaatcttatcaacaactaatcgctt

SEQ ID NO: 469914 - DNA, 25 bp, Artificial
  probe
  misc_feature (1)..(25): SEQ ID NO: 7509; WAN024CMB; Start 194; Stop 218
gtcctagaaccaatcaactcatgtt

SEQ ID NO: 469915 - DNA, 25 bp, Artificial
  probe
  misc_feature (1)..(25): SEQ ID NO: 7509; WAN024CMB; Start 292; Stop 316
ctaatcgcttatattggtgctattc

SEQ ID NO: 469916 - DNA, 25 bp, Artificial
  probe
  misc_feature (1)..(25): SEQ ID NO: 7509; WAN024CMB; Start 192; Stop 216
tagtcctagaaccaatcaactcatg

SEQ ID NO: 469917 - DNA, 25 bp, Artificial
  probe
  misc_feature (1)..(25): SEQ ID NO: 7509; WAN024CMB; Start 258; Stop 282
tagaggtatcacagcaggagaatct

SEQ ID NO: 469918 - DNA, 25 bp, Artificial
  probe
  misc_feature (1)..(25): SEQ ID NO: 7509; WAN024CMB; Start 274; Stop 298
ggagaatcttatcaacaactaatcg

SEQ ID NO: 469919 - DNA, 25 bp, Artificial
  probe
  misc_feature (1)..(25): SEQ ID NO: 7509; WAN024CMB; Start 193; Stop 217
agtcctagaaccaatcaactcatgt

SEQ ID NO: 469920 - DNA, 25 bp, Artificial
  probe
  misc_feature (1)..(25): SEQ ID NO: 7509; WAN024CMB; Start 284; Stop 308
atcaacaactaatcgcttatattgg

SEQ ID NO: 469921 - DNA, 25 bp, Artificial
  probe
  misc_feature (1)..(25): SEQ ID NO: 7510; WAN024BKE; Start 41; Stop 65
aaatggacatccgaataaagaaagg

SEQ ID NO: 469922 - DNA, 25 bp, Artificial
  probe
  misc_feature (1)..(25): SEQ ID NO: 7510; WAN024BKE; Start 42; Stop 66
aatggacatccgaataaagaaaggc

SEQ ID NO: 469923 - DNA, 25 bp, Artificial
  probe
  misc_feature (1)..(25): SEQ ID NO: 7510; WAN024BKE; Start 53; Stop 77
gaataaagaaaggctggctgacttc

SEQ ID NO: 469924 - DNA, 25 bp, Artificial
  probe
  misc_feature (1)..(25): SEQ ID NO: 7510; WAN024BKE; Start 43; Stop 67
atggacatccgaataaagaaaggct

SEQ ID NO: 469925 - DNA, 25 bp, Artificial
  probe
  misc_feature (1)..(25): SEQ ID NO: 7510; WAN024BKE; Start 70; Stop 94
ctgacttcgtctgttgagatgaaac

SEQ ID NO: 469926 - DNA, 25 bp, Artificial
  probe
  misc_feature (1)..(25): SEQ ID NO: 7510; WAN024BKE; Start 44; Stop 68
tggacatccgaataaagaaaggctg

SEQ ID NO: 469927 - DNA, 25 bp, Artificial
  probe
  misc_feature (1)..(25): SEQ ID NO: 7510; WAN024BKE; Start 54; Stop 78
aataaagaaaggctggctgacttcg

SEQ ID NO: 469928 - DNA, 25 bp, Artificial
  probe
  misc_feature (1)..(25): SEQ ID NO: 7510; WAN024BKE; Start 52; Stop 76
cgaataaagaaaggctggctgactt

SEQ ID NO: 469929 - DNA, 25 bp, Artificial
  probe
  misc_feature (1)..(25): SEQ ID NO: 7510; WAN024BKE; Start 45; Stop 69
ggacatccgaataaagaaaggctgg

SEQ ID NO: 469930 - DNA, 25 bp, Artificial
  probe
  misc_feature (1)..(25): SEQ ID NO: 7510; WAN024BKE; Start 69; Stop 93
gctgacttcgtctgttgagatgaaa

SEQ ID NO: 469931 - DNA, 25 bp, Artificial
  probe
  misc_feature (1)..(25): SEQ ID NO: 7510; WAN024BKE; Start 40; Stop 64
aaaatggacatccgaataaagaaag

SEQ ID NO: 469932 - DNA, 25 bp, Artificial
  probe
  misc_feature (1)..(25): SEQ ID NO: 7510; WAN024BKE; Start 17; Stop 41
tccaaaataaagcccaacagcaaaa

SEQ ID NO: 469933 - DNA, 25 bp, Artificial
  probe
  misc_feature (1)..(25): SEQ ID NO: 7510; WAN024BKE; Start 16; Stop 40
ttccaaaataaagcccaacagcaaa

SEQ ID NO: 469934 - DNA, 25 bp, Artificial
  probe
  misc_feature (1)..(25): SEQ ID NO: 7510; WAN024BKE; Start 15; Stop 39
tttccaaaataaagcccaacagcaa

SEQ ID NO: 469935 - DNA, 25 bp, Artificial
  probe
  misc_feature (1)..(25): SEQ ID NO: 7510; WAN024BKE; Start 73; Stop 97
acttcgtctgttgagatgaaacatc

SEQ ID NO: 469936 - DNA, 25 bp, Artificial
  probe
  misc_feature (1)..(25): SEQ ID NO: 7510; WAN024BKE; Start 72; Stop 96
gacttcgtctgttgagatgaaacat

SEQ ID NO: 469937 - DNA, 25 bp, Artificial
  probe
  misc_feature (1)..(25): SEQ ID NO: 7510; WAN024BKE; Start 49; Stop 73
atccgaataaagaaaggctggctga

SEQ ID NO: 469938 - DNA, 25 bp, Artificial
  probe
  misc_feature (1)..(25): SEQ ID NO: 7510; WAN024BKE; Start 48; Stop 72
catccgaataaagaaaggctggctg

SEQ ID NO: 469939 - DNA, 25 bp, Artificial
  probe
  misc_feature (1)..(25): SEQ ID NO: 7510; WAN024BKE; Start 46; Stop 70
gacatccgaataaagaaaggctggc

SEQ ID NO: 469940 - DNA, 25 bp, Artificial
  probe
  misc_feature (1)..(25): SEQ ID NO: 7510; WAN024BKE; Start 68; Stop 92
ggctgacttcgtctgttgagatgaa

SEQ ID NO: 469941 - DNA, 25 bp, Artificial
  probe
  misc_feature (1)..(25): SEQ ID NO: 7510; WAN024BKE; Start 11; Stop 35
attctttccaaaataaagcccaaca

SEQ ID NO: 469942 - DNA, 25 bp, Artificial
  probe
  misc_feature (1)..(25): SEQ ID NO: 7510; WAN024BKE; Start 12; Stop 36
ttctttccaaaataaagcccaacag

SEQ ID NO: 469943 - DNA, 25 bp, Artificial
  probe
  misc_feature (1)..(25): SEQ ID NO: 7510; WAN024BKE; Start 74; Stop 98
cttcgtctgttgagatgaaacatcg

SEQ ID NO: 469944 - DNA, 25 bp, Artificial
  probe
  misc_feature (1)..(25): SEQ ID NO: 7510; WAN024BKE; Start 55; Stop 79
ataaagaaaggctggctgacttcgt

SEQ ID NO: 469945 - DNA, 25 bp, Artificial
  probe
  misc_feature (1)..(25): SEQ ID NO: 7510; WAN024BKE; Start 47; Stop 71
acatccgaataaagaaaggctggct

SEQ ID NO: 469946 - DNA, 25 bp, Artificial
  probe
  misc_feature (1)..(25): SEQ ID NO: 7510; WAN024BKE; Start 78; Stop 102
gtctgttgagatgaaacatcgcttc

SEQ ID NO: 469947 - DNA, 25 bp, Artificial
  probe
  misc_feature (1)..(25): SEQ ID NO: 7510; WAN024BKE; Start 71; Stop 95
tgacttcgtctgttgagatgaaaca

SEQ ID NO: 469948 - DNA, 25 bp, Artificial
  probe
  misc_feature (1)..(25): SEQ ID NO: 7510; WAN024BKE; Start 10; Stop 34
aattctttccaaaataaagcccaac

SEQ ID NO: 469949 - DNA, 25 bp, Artificial
  probe
  misc_feature (1)..(25): SEQ ID NO: 7510; WAN024BKE; Start 9; Stop 33
aaattctttccaaaataaagcccaa

SEQ ID NO: 469950 - DNA, 25 bp, Artificial
  probe
  misc_feature (1)..(25): SEQ ID NO: 7510; WAN024BKE; Start 8; Stop 32
aaaattctttccaaaataaagccca

SEQ ID NO: 469951 - DNA, 25 bp, Artificial
  probe
  misc_feature (1)..(25): SEQ ID NO: 7510; WAN024BKE; Start 81; Stop 105
tgttgagatgaaacatcgcttcctt

SEQ ID NO: 469952 - DNA, 25 bp, Artificial
  probe
  misc_feature (1)..(25): SEQ ID NO: 7510; WAN024BKE; Start 51; Stop 75
ccgaataaagaaaggctggctgact

SEQ ID NO: 469953 - DNA, 25 bp, Artificial
  probe
  misc_feature (1)..(25): SEQ ID NO: 7510; WAN024BKE; Start 50; Stop 74
tccgaataaagaaaggctggctgac

SEQ ID NO: 469954 - DNA, 25 bp, Artificial
  probe
  misc_feature (1)..(25): SEQ ID NO: 7511; WAN024FTJ; Start 222; Stop 246
cattctcaagatcactggcttctag

SEQ ID NO: 469955 - DNA, 25 bp, Artificial
  probe
  misc_feature (1)..(25): SEQ ID NO: 7511; WAN024FTJ; Start 221; Stop 245
acattctcaagatcactggcttcta

SEQ ID NO: 469956 - DNA, 25 bp, Artificial
  probe
  misc_feature (1)..(25): SEQ ID NO: 7511; WAN024FTJ; Start 34; Stop 58
atcttgatagtaggcgtttctcttt

SEQ ID NO: 469957 - DNA, 25 bp, Artificial
  probe
  misc_feature (1)..(25): SEQ ID NO: 7511; WAN024FTJ; Start 33; Stop 57
catcttgatagtaggcgtttctctt

SEQ ID NO: 469958 - DNA, 25 bp, Artificial
  probe
  misc_feature (1)..(25): SEQ ID NO: 7511; WAN024FTJ; Start 1; Stop 25
ttgattaaagagacgaaaggcagtt

SEQ ID NO: 469959 - DNA, 25 bp, Artificial
  probe
  misc_feature (1)..(25): SEQ ID NO: 7511; WAN024FTJ; Start 220; Stop 244
gacattctcaagatcactggcttct

SEQ ID NO: 469960 - DNA, 25 bp, Artificial
  probe
  misc_feature (1)..(25): SEQ ID NO: 7511; WAN024FTJ; Start 3; Stop 27
gattaaagagacgaaaggcagttgt

SEQ ID NO: 469961 - DNA, 25 bp, Artificial
  probe
  misc_feature (1)..(25): SEQ ID NO: 7511; WAN024FTJ; Start 2; Stop 26
tgattaaagagacgaaaggcagttg

SEQ ID NO: 469962 - DNA, 25 bp, Artificial
  probe
  misc_feature (1)..(25): SEQ ID NO: 7511; WAN024FTJ; Start 15; Stop 39
gaaaggcagttgtcaaatcatcttg

SEQ ID NO: 469963 - DNA, 25 bp, Artificial
  probe
  misc_feature (1)..(25): SEQ ID NO: 7511; WAN024FTJ; Start 194; Stop 218
acctctacttcctgatccttaagat

SEQ ID NO: 469964 - DNA, 25 bp, Artificial
  probe
  misc_feature (1)..(25): SEQ ID NO: 7511; WAN024FTJ; Start 200; Stop 224
acttcctgatccttaagattgacat

SEQ ID NO: 469965 - DNA, 25 bp, Artificial
  probe
  misc_feature (1)..(25): SEQ ID NO: 7511; WAN024FTJ; Start 32; Stop 56
tcatcttgatagtaggcgtttctct

SEQ ID NO: 469966 - DNA, 25 bp, Artificial
  probe
  misc_feature (1)..(25): SEQ ID NO: 7511; WAN024FTJ; Start 193; Stop 217
cacctctacttcctgatccttaaga

SEQ ID NO: 469967 - DNA, 25 bp, Artificial
  probe
  misc_feature (1)..(25): SEQ ID NO: 7511; WAN024FTJ; Start 203; Stop 227
tcctgatccttaagattgacattct

SEQ ID NO: 469968 - DNA, 25 bp, Artificial
  probe
  misc_feature (1)..(25): SEQ ID NO: 7511; WAN024FTJ; Start 199; Stop 223
tacttcctgatccttaagattgaca

SEQ ID NO: 469969 - DNA, 25 bp, Artificial
  probe
  misc_feature (1)..(25): SEQ ID NO: 7511; WAN024FTJ; Start 204; Stop 228
cctgatccttaagattgacattctc

SEQ ID NO: 469970 - DNA, 25 bp, Artificial
  probe
  misc_feature (1)..(25): SEQ ID NO: 7511; WAN024FTJ; Start 195; Stop 219
cctctacttcctgatccttaagatt

SEQ ID NO: 469971 - DNA, 25 bp, Artificial
  probe
  misc_feature (1)..(25): SEQ ID NO: 7511; WAN024FTJ; Start 219; Stop 243
tgacattctcaagatcactggcttc

SEQ ID NO: 469972 - DNA, 25 bp, Artificial
  probe
  misc_feature (1)..(25): SEQ ID NO: 7511; WAN024FTJ; Start 202; Stop 226
ttcctgatccttaagattgacattc

SEQ ID NO: 469973 - DNA, 25 bp, Artificial
  probe
  misc_feature (1)..(25): SEQ ID NO: 7511; WAN024FTJ; Start 201; Stop 225
cttcctgatccttaagattgacatt

SEQ ID NO: 469974 - DNA, 25 bp, Artificial
  probe
  misc_feature (1)..(25): SEQ ID NO: 7511; WAN024FTJ; Start 215; Stop 239
agattgacattctcaagatcactgg

SEQ ID NO: 469975 - DNA, 25 bp, Artificial
  probe
  misc_feature (1)..(25): SEQ ID NO: 7511; WAN024FTJ; Start 198; Stop 222
ctacttcctgatccttaagattgac

SEQ ID NO: 469976 - DNA, 25 bp, Artificial
  probe
  misc_feature (1)..(25): SEQ ID NO: 7511; WAN024FTJ; Start 214; Stop 238
aagattgacattctcaagatcactg

SEQ ID NO: 469977 - DNA, 25 bp, Artificial
  probe
  misc_feature (1)..(25): SEQ ID NO: 7511; WAN024FTJ; Start 197; Stop 221
tctacttcctgatccttaagattga

SEQ ID NO: 469978 - DNA, 25 bp, Artificial
  probe
  misc_feature (1)..(25): SEQ ID NO: 7511; WAN024FTJ; Start 14; Stop 38
cgaaaggcagttgtcaaatcatctt

SEQ ID NO: 469979 - DNA, 25 bp, Artificial
  probe
  misc_feature (1)..(25): SEQ ID NO: 7511; WAN024FTJ; Start 4; Stop 28
attaaagagacgaaaggcagttgtc

SEQ ID NO: 469980 - DNA, 25 bp, Artificial
  probe
  misc_feature (1)..(25): SEQ ID NO: 7511; WAN024FTJ; Start 196; Stop 220
ctctacttcctgatccttaagattg

SEQ ID NO: 469981 - DNA, 25 bp, Artificial
  probe
  misc_feature (1)..(25): SEQ ID NO: 7511; WAN024FTJ; Start 205; Stop 229
ctgatccttaagattgacattctca

SEQ ID NO: 469982 - DNA, 25 bp, Artificial
  probe
  misc_feature (1)..(25): SEQ ID NO: 7511; WAN024FTJ; Start 191; Stop 215
tgcacctctacttcctgatccttaa

SEQ ID NO: 469983 - DNA, 25 bp, Artificial
  probe
  misc_feature (1)..(25): SEQ ID NO: 7511; WAN024FTJ; Start 192; Stop 216
gcacctctacttcctgatccttaag

SEQ ID NO: 469984 - DNA, 25 bp, Artificial
  probe
  misc_feature (1)..(25): SEQ ID NO: 7511; WAN024FTJ; Start 216; Stop 240
gattgacattctcaagatcactggc

SEQ ID NO: 469985 - DNA, 25 bp, Artificial
  probe
  misc_feature (1)..(25): SEQ ID NO: 7511; WAN024FTJ; Start 190; Stop 214
ctgcacctctacttcctgatcctta

SEQ ID NO: 469986 - DNA, 25 bp, Artificial
  probe
  misc_feature (1)..(25): SEQ ID NO: 7511; WAN024FTJ; Start 106; Stop 130
caccttgtctttgctgataaaccag

SEQ ID NO: 469987 - DNA, 25 bp, Artificial
  probe
  misc_feature (1)..(25): SEQ ID NO: 7512; WAN024F6G; Start 242; Stop 266
actctactacacctgctacaagtaa

SEQ ID NO: 469988 - DNA, 25 bp, Artificial
  probe
  misc_feature (1)..(25): SEQ ID NO: 7512; WAN024F6G; Start 241; Stop 265
gactctactacacctgctacaagta

SEQ ID NO: 469989 - DNA, 25 bp, Artificial
  probe
  misc_feature (1)..(25): SEQ ID NO: 7512; WAN024F6G; Start 228; Stop 252
aacagcaactcaggactctactaca

SEQ ID NO: 469990 - DNA, 25 bp, Artificial
  probe
  misc_feature (1)..(25): SEQ ID NO: 7512; WAN024F6G; Start 24; Stop 48
catgaacgccttggataataataat

SEQ ID NO: 469991 - DNA, 25 bp, Artificial
  probe
  misc_feature (1)..(25): SEQ ID NO: 7512; WAN024F6G; Start 240; Stop 264
ggactctactacacctgctacaagt

SEQ ID NO: 469992 - DNA, 25 bp, Artificial
  probe
  misc_feature (1)..(25): SEQ ID NO: 7512; WAN024F6G; Start 227; Stop 251
aaacagcaactcaggactctactac

SEQ ID NO: 469993 - DNA, 25 bp, Artificial
  probe
  misc_feature (1)..(25): SEQ ID NO: 7512; WAN024F6G; Start 239; Stop 263
aggactctactacacctgctacaag

SEQ ID NO: 469994 - DNA, 25 bp, Artificial
  probe
  misc_feature (1)..(25): SEQ ID NO: 7512; WAN024F6G; Start 229; Stop 253
acagcaactcaggactctactacac

SEQ ID NO: 469995 - DNA, 25 bp, Artificial
  probe
  misc_feature (1)..(25): SEQ ID NO: 7512; WAN024F6G; Start 26; Stop 50
tgaacgccttggataataataataa

SEQ ID NO: 469996 - DNA, 25 bp, Artificial
  probe
  misc_feature (1)..(25): SEQ ID NO: 7512; WAN024F6G; Start 25; Stop 49
atgaacgccttggataataataata

SEQ ID NO: 469997 - DNA, 25 bp, Artificial
  probe
  misc_feature (1)..(25): SEQ ID NO: 7512; WAN024F6G; Start 244; Stop 268
tctactacacctgctacaagtaaac

SEQ ID NO: 469998 - DNA, 25 bp, Artificial
  probe
  misc_feature (1)..(25): SEQ ID NO: 7512; WAN024F6G; Start 247; Stop 271
actacacctgctacaagtaaacctg

SEQ ID NO: 469999 - DNA, 25 bp, Artificial
  probe
  misc_feature (1)..(25): SEQ ID NO: 7512; WAN024F6G; Start 243; Stop 267
ctctactacacctgctacaagtaaa

SEQ ID NO: 470000 - DNA, 25 bp, Artificial
  probe
  misc_feature (1)..(25): SEQ ID NO: 7512; WAN024F6G; Start 245; Stop 269
ctactacacctgctacaagtaaacc

SEQ ID NO: 470001 - DNA, 25 bp, Artificial
  probe
  misc_feature (1)..(25): SEQ ID NO: 7512; WAN024F6G; Start 167; Stop 191
aaacacaacaagaagaaacgccaaa

SEQ ID NO: 470002 - DNA, 25 bp, Artificial
  probe
  misc_feature (1)..(25): SEQ ID NO: 7512; WAN024F6G; Start 246; Stop 270
tactacacctgctacaagtaaacct

SEQ ID NO: 470003 - DNA, 25 bp, Artificial
  probe
  misc_feature (1)..(25): SEQ ID NO: 7512; WAN024F6G; Start 230; Stop 254
cagcaactcaggactctactacacc

SEQ ID NO: 470004 - DNA, 25 bp, Artificial
  probe
  misc_feature (1)..(25): SEQ ID NO: 7512; WAN024F6G; Start 21; Stop 45
gatcatgaacgccttggataataat

SEQ ID NO: 470005 - DNA, 25 bp, Artificial
  probe
  misc_feature (1)..(25): SEQ ID NO: 7512; WAN024F6G; Start 289; Stop 313
cagcccaatactccaacttcagaaa

SEQ ID NO: 470006 - DNA, 25 bp, Artificial
  probe
  misc_feature (1)..(25): SEQ ID NO: 7512; WAN024F6G; Start 20; Stop 44
cgatcatgaacgccttggataataa

SEQ ID NO: 470007 - DNA, 25 bp, Artificial
  probe
  misc_feature (1)..(25): SEQ ID NO: 7512; WAN024F6G; Start 23; Stop 47
tcatgaacgccttggataataataa

SEQ ID NO: 470008 - DNA, 25 bp, Artificial
  probe
  misc_feature (1)..(25): SEQ ID NO: 7512; WAN024F6G; Start 286; Stop 310
aaacagcccaatactccaacttcag

SEQ ID NO: 470009 - DNA, 25 bp, Artificial
  probe
  misc_feature (1)..(25): SEQ ID NO: 7512; WAN024F6G; Start 248; Stop 272
ctacacctgctacaagtaaacctgc

SEQ ID NO: 470010 - DNA, 25 bp, Artificial
  probe
  misc_feature (1)..(25): SEQ ID NO: 7512; WAN024F6G; Start 22; Stop 46
atcatgaacgccttggataataata

SEQ ID NO: 470011 - DNA, 25 bp, Artificial
  probe
  misc_feature (1)..(25): SEQ ID NO: 7512; WAN024F6G; Start 263; Stop 287
gtaaacctgccactgaaaatgaaaa

SEQ ID NO: 470012 - DNA, 25 bp, Artificial
  probe
  misc_feature (1)..(25): SEQ ID NO: 7512; WAN024F6G; Start 172; Stop 196
caacaagaagaaacgccaaaatcta

SEQ ID NO: 470013 - DNA, 25 bp, Artificial
  probe
  misc_feature (1)..(25): SEQ ID NO: 7512; WAN024F6G; Start 226; Stop 250
aaaacagcaactcaggactctacta

SEQ ID NO: 470014 - DNA, 25 bp, Artificial
  probe
  misc_feature (1)..(25): SEQ ID NO: 7512; WAN024F6G; Start 19; Stop 43
acgatcatgaacgccttggataata

SEQ ID NO: 470015 - DNA, 25 bp, Artificial
  probe
  misc_feature (1)..(25): SEQ ID NO: 7512; WAN024F6G; Start 292; Stop 316
cccaatactccaacttcagaaaata

SEQ ID NO: 470016 - DNA, 25 bp, Artificial
  probe
  misc_feature (1)..(25): SEQ ID NO: 7512; WAN024F6G; Start 291; Stop 315
gcccaatactccaacttcagaaaat

SEQ ID NO: 470017 - DNA, 25 bp, Artificial
  probe
  misc_feature (1)..(25): SEQ ID NO: 7512; WAN024F6G; Start 173; Stop 197
aacaagaagaaacgccaaaatctag

SEQ ID NO: 470018 - DNA, 25 bp, Artificial
  probe
  misc_feature (1)..(25): SEQ ID NO: 7512; WAN024F6G; Start 258; Stop 282
tacaagtaaacctgccactgaaaat

SEQ ID NO: 470019 - DNA, 25 bp, Artificial
  probe
  misc_feature (1)..(25): SEQ ID NO: 7512; WAN024F6G; Start 256; Stop 280
gctacaagtaaacctgccactgaaa

SEQ ID NO: 470020 - DNA, 25 bp, Artificial
  probe
  misc_feature (1)..(25): SEQ ID NO: 7513; WAN024BQ4; Start 402; Stop 426
agaagaggtagagttgatagatgac

SEQ ID NO: 470021 - DNA, 25 bp, Artificial
  probe
  misc_feature (1)..(25): SEQ ID NO: 7513; WAN024BQ4; Start 401; Stop 425
cagaagaggtagagttgatagatga

SEQ ID NO: 470022 - DNA, 25 bp, Artificial
  probe
  misc_feature (1)..(25): SEQ ID NO: 7513; WAN024BQ4; Start 48; Stop 72
tggagaagatacgattattagagca

SEQ ID NO: 470023 - DNA, 25 bp, Artificial
  probe
  misc_feature (1)..(25): SEQ ID NO: 7513; WAN024BQ4; Start 411; Stop 435
agagttgatagatgaccttgattct

SEQ ID NO: 470024 - DNA, 25 bp, Artificial
  probe
  misc_feature (1)..(25): SEQ ID NO: 7513; WAN024BQ4; Start 49; Stop 73
ggagaagatacgattattagagcag

SEQ ID NO: 470025 - DNA, 25 bp, Artificial
  probe
  misc_feature (1)..(25): SEQ ID NO: 7513; WAN024BQ4; Start 400; Stop 424
tcagaagaggtagagttgatagatg

SEQ ID NO: 470026 - DNA, 25 bp, Artificial
  probe
  misc_feature (1)..(25): SEQ ID NO: 7513; WAN024BQ4; Start 412; Stop 436
gagttgatagatgaccttgattctt

SEQ ID NO: 470027 - DNA, 25 bp, Artificial
  probe
  misc_feature (1)..(25): SEQ ID NO: 7513; WAN024BQ4; Start 409; Stop 433
gtagagttgatagatgaccttgatt

SEQ ID NO: 470028 - DNA, 25 bp, Artificial
  probe
  misc_feature (1)..(25): SEQ ID NO: 7513; WAN024BQ4; Start 50; Stop 74
gagaagatacgattattagagcagt

SEQ ID NO: 470029 - DNA, 25 bp, Artificial
  probe
  misc_feature (1)..(25): SEQ ID NO: 7513; WAN024BQ4; Start 47; Stop 71
atggagaagatacgattattagagc

SEQ ID NO: 470030 - DNA, 25 bp, Artificial
  probe
  misc_feature (1)..(25): SEQ ID NO: 7513; WAN024BQ4; Start 410; Stop 434
tagagttgatagatgaccttgattc

SEQ ID NO: 470031 - DNA, 25 bp, Artificial
  probe
  misc_feature (1)..(25): SEQ ID NO: 7513; WAN024BQ4; Start 399; Stop 423
ttcagaagaggtagagttgatagat

SEQ ID NO: 470032 - DNA, 25 bp, Artificial
  probe
  misc_feature (1)..(25): SEQ ID NO: 7513; WAN024BQ4; Start 403; Stop 427
gaagaggtagagttgatagatgacc

SEQ ID NO: 470033 - DNA, 25 bp, Artificial
  probe
  misc_feature (1)..(25): SEQ ID NO: 7513; WAN024BQ4; Start 408; Stop 432
ggtagagttgatagatgaccttgat

SEQ ID NO: 470034 - DNA, 25 bp, Artificial
  probe
  misc_feature (1)..(25): SEQ ID NO: 7513; WAN024BQ4; Start 964; Stop 988
ttagcggcattggtttacattattc

SEQ ID NO: 470035 - DNA, 25 bp, Artificial
  probe
  misc_feature (1)..(25): SEQ ID NO: 7513; WAN024BQ4; Start 963; Stop 987
tttagcggcattggtttacattatt

SEQ ID NO: 470036 - DNA, 25 bp, Artificial
  probe
  misc_feature (1)..(25): SEQ ID NO: 7513; WAN024BQ4; Start 962; Stop 986
atttagcggcattggtttacattat

SEQ ID NO: 470037 - DNA, 25 bp, Artificial
  probe
  misc_feature (1)..(25): SEQ ID NO: 7513; WAN024BQ4; Start 961; Stop 985
catttagcggcattggtttacatta

SEQ ID NO: 470038 - DNA, 25 bp, Artificial
  probe
  misc_feature (1)..(25): SEQ ID NO: 7513; WAN024BQ4; Start 957; Stop 981
gtatcatttagcggcattggtttac

SEQ ID NO: 470039 - DNA, 25 bp, Artificial
  probe
  misc_feature (1)..(25): SEQ ID NO: 7513; WAN024BQ4; Start 958; Stop 982
tatcatttagcggcattggtttaca

SEQ ID NO: 470040 - DNA, 25 bp, Artificial
  probe
  misc_feature (1)..(25): SEQ ID NO: 7513; WAN024BQ4; Start 956; Stop 980
tgtatcatttagcggcattggttta

SEQ ID NO: 470041 - DNA, 25 bp, Artificial
  probe
  misc_feature (1)..(25): SEQ ID NO: 7513; WAN024BQ4; Start 602; Stop 626
ctttaacttctcaaacgctatacca

SEQ ID NO: 470042 - DNA, 25 bp, Artificial
  probe
  misc_feature (1)..(25): SEQ ID NO: 7513; WAN024BQ4; Start 601; Stop 625
actttaacttctcaaacgctatacc

SEQ ID NO: 470043 - DNA, 25 bp, Artificial
  probe
  misc_feature (1)..(25): SEQ ID NO: 7513; WAN024BQ4; Start 445; Stop 469
caatctctttctgaacccactaaat

SEQ ID NO: 470044 - DNA, 25 bp, Artificial
  probe
  misc_feature (1)..(25): SEQ ID NO: 7513; WAN024BQ4; Start 951; Stop 975
acatttgtatcatttagcggcattg

SEQ ID NO: 470045 - DNA, 25 bp, Artificial
  probe
  misc_feature (1)..(25): SEQ ID NO: 7513; WAN024BQ4; Start 195; Stop 219
acgagtcttgaaatcagataaagga

SEQ ID NO: 470046 - DNA, 25 bp, Artificial
  probe
  misc_feature (1)..(25): SEQ ID NO: 7513; WAN024BQ4; Start 952; Stop 976
catttgtatcatttagcggcattgg

SEQ ID NO: 470047 - DNA, 25 bp, Artificial
  probe
  misc_feature (1)..(25): SEQ ID NO: 7513; WAN024BQ4; Start 201; Stop 225
cttgaaatcagataaaggaaccagt

SEQ ID NO: 470048 - DNA, 25 bp, Artificial
  probe
  misc_feature (1)..(25): SEQ ID NO: 7513; WAN024BQ4; Start 950; Stop 974
tacatttgtatcatttagcggcatt

SEQ ID NO: 470049 - DNA, 25 bp, Artificial
  probe
  misc_feature (1)..(25): SEQ ID NO: 7513; WAN024BQ4; Start 444; Stop 468
tcaatctctttctgaacccactaaa

SEQ ID NO: 470050 - DNA, 25 bp, Artificial
  probe
  misc_feature (1)..(25): SEQ ID NO: 7513; WAN024BQ4; Start 202; Stop 226
ttgaaatcagataaaggaaccagtt

SEQ ID NO: 470051 - DNA, 25 bp, Artificial
  probe
  misc_feature (1)..(25): SEQ ID NO: 7513; WAN024BQ4; Start 203; Stop 227
tgaaatcagataaaggaaccagttt

SEQ ID NO: 470052 - DNA, 25 bp, Artificial
  probe
  misc_feature (1)..(25): SEQ ID NO: 7513; WAN024BQ4; Start 199; Stop 223
gtcttgaaatcagataaaggaacca

SEQ ID NO: 470053 - DNA, 25 bp, Artificial
  probe
  misc_feature (1)..(25): SEQ ID NO: 7514; WAN024BUG; Start 64; Stop 88
atactgcttatattgttctctgagg

SEQ ID NO: 470054 - DNA, 25 bp, Artificial
  probe
  misc_feature (1)..(25): SEQ ID NO: 7514; WAN024BUG; Start 65; Stop 89
tactgcttatattgttctctgaggg

SEQ ID NO: 470055 - DNA, 25 bp, Artificial
  probe
  misc_feature (1)..(25): SEQ ID NO: 7514; WAN024BUG; Start 67; Stop 91
ctgcttatattgttctctgagggaa

SEQ ID NO: 470056 - DNA, 25 bp, Artificial
  probe
  misc_feature (1)..(25): SEQ ID NO: 7514; WAN024BUG; Start 66; Stop 90
actgcttatattgttctctgaggga

SEQ ID NO: 470057 - DNA, 25 bp, Artificial
  probe
  misc_feature (1)..(25): SEQ ID NO: 7514; WAN024BUG; Start 33; Stop 57
gctgattatgaaacctaaaccattt

SEQ ID NO: 470058 - DNA, 25 bp, Artificial
  probe
  misc_feature (1)..(25): SEQ ID NO: 7514; WAN024BUG; Start 63; Stop 87
aatactgcttatattgttctctgag

SEQ ID NO: 470059 - DNA, 25 bp, Artificial
  probe
  misc_feature (1)..(25): SEQ ID NO: 7514; WAN024BUG; Start 8; Stop 32
ttgataagctaccacatttctcaca

SEQ ID NO: 470060 - DNA, 25 bp, Artificial
  probe
  misc_feature (1)..(25): SEQ ID NO: 7514; WAN024BUG; Start 9; Stop 33
tgataagctaccacatttctcacag

SEQ ID NO: 470061 - DNA, 25 bp, Artificial
  probe
  misc_feature (1)..(25): SEQ ID NO: 7514; WAN024BUG; Start 32; Stop 56
agctgattatgaaacctaaaccatt

SEQ ID NO: 470062 - DNA, 25 bp, Artificial
  probe
  misc_feature (1)..(25): SEQ ID NO: 7514; WAN024BUG; Start 7; Stop 31
attgataagctaccacatttctcac

SEQ ID NO: 470063 - DNA, 25 bp, Artificial
  probe
  misc_feature (1)..(25): SEQ ID NO: 7514; WAN024BUG; Start 1; Stop 25
ttgattattgataagctaccacatt

SEQ ID NO: 470064 - DNA, 25 bp, Artificial
  probe
  misc_feature (1)..(25): SEQ ID NO: 7514; WAN024BUG; Start 35; Stop 59
tgattatgaaacctaaaccatttga

SEQ ID NO: 470065 - DNA, 25 bp, Artificial
  probe
  misc_feature (1)..(25): SEQ ID NO: 7514; WAN024BUG; Start 34; Stop 58
ctgattatgaaacctaaaccatttg

SEQ ID NO: 470066 - DNA, 25 bp, Artificial
  probe
  misc_feature (1)..(25): SEQ ID NO: 7514; WAN024BUG; Start 6; Stop 30
tattgataagctaccacatttctca

SEQ ID NO: 470067 - DNA, 25 bp, Artificial
  probe
  misc_feature (1)..(25): SEQ ID NO: 7514; WAN024BUG; Start 46; Stop 70
cctaaaccatttgaattaatactgc

SEQ ID NO: 470068 - DNA, 25 bp, Artificial
  probe
  misc_feature (1)..(25): SEQ ID NO: 7514; WAN024BUG; Start 62; Stop 86
taatactgcttatattgttctctga

SEQ ID NO: 470069 - DNA, 25 bp, Artificial
  probe
  misc_feature (1)..(25): SEQ ID NO: 7514; WAN024BUG; Start 5; Stop 29
ttattgataagctaccacatttctc

SEQ ID NO: 470070 - DNA, 25 bp, Artificial
  probe
  misc_feature (1)..(25): SEQ ID NO: 7514; WAN024BUG; Start 36; Stop 60
gattatgaaacctaaaccatttgaa

SEQ ID NO: 470071 - DNA, 25 bp, Artificial
  probe
  misc_feature (1)..(25): SEQ ID NO: 7514; WAN024BUG; Start 69; Stop 93
gcttatattgttctctgagggaact

SEQ ID NO: 470072 - DNA, 25 bp, Artificial
  probe
  misc_feature (1)..(25): SEQ ID NO: 7514; WAN024BUG; Start 10; Stop 34
gataagctaccacatttctcacagc

SEQ ID NO: 470073 - DNA, 25 bp, Artificial
  probe
  misc_feature (1)..(25): SEQ ID NO: 7514; WAN024BUG; Start 68; Stop 92
tgcttatattgttctctgagggaac

SEQ ID NO: 470074 - DNA, 25 bp, Artificial
  probe
  misc_feature (1)..(25): SEQ ID NO: 7514; WAN024BUG; Start 2; Stop 26
tgattattgataagctaccacattt

SEQ ID NO: 470075 - DNA, 25 bp, Artificial
  probe
  misc_feature (1)..(25): SEQ ID NO: 7514; WAN024BUG; Start 4; Stop 28
attattgataagctaccacatttct

SEQ ID NO: 470076 - DNA, 25 bp, Artificial
  probe
  misc_feature (1)..(25): SEQ ID NO: 7514; WAN024BUG; Start 72; Stop 96
tatattgttctctgagggaactttg

SEQ ID NO: 470077 - DNA, 25 bp, Artificial
  probe
  misc_feature (1)..(25): SEQ ID NO: 7514; WAN024BUG; Start 3; Stop 27
gattattgataagctaccacatttc

SEQ ID NO: 470078 - DNA, 25 bp, Artificial
  probe
  misc_feature (1)..(25): SEQ ID NO: 7514; WAN024BUG; Start 40; Stop 64
atgaaacctaaaccatttgaattaa

SEQ ID NO: 470079 - DNA, 25 bp, Artificial
  probe
  misc_feature (1)..(25): SEQ ID NO: 7514; WAN024BUG; Start 38; Stop 62
ttatgaaacctaaaccatttgaatt

SEQ ID NO: 470080 - DNA, 25 bp, Artificial
  probe
  misc_feature (1)..(25): SEQ ID NO: 7514; WAN024BUG; Start 70; Stop 94
cttatattgttctctgagggaactt

SEQ ID NO: 470081 - DNA, 25 bp, Artificial
  probe
  misc_feature (1)..(25): SEQ ID NO: 7514; WAN024BUG; Start 47; Stop 71
ctaaaccatttgaattaatactgct

SEQ ID NO: 470082 - DNA, 25 bp, Artificial
  probe
  misc_feature (1)..(25): SEQ ID NO: 7514; WAN024BUG; Start 37; Stop 61
attatgaaacctaaaccatttgaat

SEQ ID NO: 470083 - DNA, 25 bp, Artificial
  probe
  misc_feature (1)..(25): SEQ ID NO: 7514; WAN024BUG; Start 71; Stop 95
ttatattgttctctgagggaacttt

SEQ ID NO: 470084 - DNA, 25 bp, Artificial
  probe
  misc_feature (1)..(25): SEQ ID NO: 7514; WAN024BUG; Start 45; Stop 69
acctaaaccatttgaattaatactg

SEQ ID NO: 470085 - DNA, 25 bp, Artificial
  probe
  misc_feature (1)..(25): SEQ ID NO: 7514; WAN024BUG; Start 41; Stop 65
tgaaacctaaaccatttgaattaat

SEQ ID NO: 470086 - DNA, 25 bp, Artificial
  probe
  misc_feature (1)..(25): SEQ ID NO: 7516; WAN024AZW; Start 50; Stop 74
agaatgatagccatctgacctacta

SEQ ID NO: 470087 - DNA, 25 bp, Artificial
  probe
  misc_feature (1)..(25): SEQ ID NO: 7516; WAN024AZW; Start 47; Stop 71
tagagaatgatagccatctgaccta

SEQ ID NO: 470088 - DNA, 25 bp, Artificial
  probe
  misc_feature (1)..(25): SEQ ID NO: 7516; WAN024AZW; Start 49; Stop 73
gagaatgatagccatctgacctact

SEQ ID NO: 470089 - DNA, 25 bp, Artificial
  probe
  misc_feature (1)..(25): SEQ ID NO: 7516; WAN024AZW; Start 48; Stop 72
agagaatgatagccatctgacctac

SEQ ID NO: 470090 - DNA, 25 bp, Artificial
  probe
  misc_feature (1)..(25): SEQ ID NO: 7516; WAN024AZW; Start 46; Stop 70
ctagagaatgatagccatctgacct

SEQ ID NO: 470091 - DNA, 25 bp, Artificial
  probe
  misc_feature (1)..(25): SEQ ID NO: 7516; WAN024AZW; Start 53; Stop 77
atgatagccatctgacctactattg

SEQ ID NO: 470092 - DNA, 25 bp, Artificial
  probe
  misc_feature (1)..(25): SEQ ID NO: 7516; WAN024AZW; Start 51; Stop 75
gaatgatagccatctgacctactat

SEQ ID NO: 470093 - DNA, 25 bp, Artificial
  probe
  misc_feature (1)..(25): SEQ ID NO: 7516; WAN024AZW; Start 52; Stop 76
aatgatagccatctgacctactatt

SEQ ID NO: 470094 - DNA, 25 bp, Artificial
  probe
  misc_feature (1)..(25): SEQ ID NO: 7516; WAN024AZW; Start 55; Stop 79
gatagccatctgacctactattgga

SEQ ID NO: 470095 - DNA, 25 bp, Artificial
  probe
  misc_feature (1)..(25): SEQ ID NO: 7516; WAN024AZW; Start 54; Stop 78
tgatagccatctgacctactattgg

SEQ ID NO: 470096 - DNA, 25 bp, Artificial
  probe
  misc_feature (1)..(25): SEQ ID NO: 7516; WAN024AZW; Start 42; Stop 66
ggttctagagaatgatagccatctg

SEQ ID NO: 470097 - DNA, 25 bp, Artificial
  probe
  misc_feature (1)..(25): SEQ ID NO: 7516; WAN024AZW; Start 44; Stop 68
ttctagagaatgatagccatctgac

SEQ ID NO: 470098 - DNA, 25 bp, Artificial
  probe
  misc_feature (1)..(25): SEQ ID NO: 7516; WAN024AZW; Start 43; Stop 67
gttctagagaatgatagccatctga

SEQ ID NO: 470099 - DNA, 25 bp, Artificial
  probe
  misc_feature (1)..(25): SEQ ID NO: 7516; WAN024AZW; Start 45; Stop 69
tctagagaatgatagccatctgacc

SEQ ID NO: 470100 - DNA, 25 bp, Artificial
  probe
  misc_feature (1)..(25): SEQ ID NO: 7516; WAN024AZW; Start 98; Stop 122
ctgagaatcaagcaatcacgctgta

SEQ ID NO: 470101 - DNA, 25 bp, Artificial
  probe
  misc_feature (1)..(25): SEQ ID NO: 7516; WAN024AZW; Start 41; Stop 65
gggttctagagaatgatagccatct

SEQ ID NO: 470102 - DNA, 25 bp, Artificial
  probe
  misc_feature (1)..(25): SEQ ID NO: 7516; WAN024AZW; Start 84; Stop 108
tttgtctgggaaagctgagaatcaa

SEQ ID NO: 470103 - DNA, 25 bp, Artificial
  probe
  misc_feature (1)..(25): SEQ ID NO: 7516; WAN024AZW; Start 33; Stop 57
ctcctatcgggttctagagaatgat

SEQ ID NO: 470104 - DNA, 25 bp, Artificial
  probe
  misc_feature (1)..(25): SEQ ID NO: 7516; WAN024AZW; Start 34; Stop 58
tcctatcgggttctagagaatgata

SEQ ID NO: 470105 - DNA, 25 bp, Artificial
  probe
  misc_feature (1)..(25): SEQ ID NO: 7516; WAN024AZW; Start 37; Stop 61
tatcgggttctagagaatgatagcc

SEQ ID NO: 470106 - DNA, 25 bp, Artificial
  probe
  misc_feature (1)..(25): SEQ ID NO: 7516; WAN024AZW; Start 3; Stop 27
gattcagcccttacttcatgcagat

SEQ ID NO: 470107 - DNA, 25 bp, Artificial
  probe
  misc_feature (1)..(25): SEQ ID NO: 7516; WAN024AZW; Start 85; Stop 109
ttgtctgggaaagctgagaatcaag

SEQ ID NO: 470108 - DNA, 25 bp, Artificial
  probe
  misc_feature (1)..(25): SEQ ID NO: 7516; WAN024AZW; Start 183; Stop 207
ctatgtgcattgtgatatgttgcgg

SEQ ID NO: 470109 - DNA, 25 bp, Artificial
  probe
  misc_feature (1)..(25): SEQ ID NO: 7516; WAN024AZW; Start 40; Stop 64
cgggttctagagaatgatagccatc

SEQ ID NO: 470110 - DNA, 25 bp, Artificial
  probe
  misc_feature (1)..(25): SEQ ID NO: 7516; WAN024AZW; Start 4; Stop 28
attcagcccttacttcatgcagatg

SEQ ID NO: 470111 - DNA, 25 bp, Artificial
  probe
  misc_feature (1)..(25): SEQ ID NO: 7516; WAN024AZW; Start 181; Stop 205
ggctatgtgcattgtgatatgttgc

SEQ ID NO: 470112 - DNA, 25 bp, Artificial
  probe
  misc_feature (1)..(25): SEQ ID NO: 7516; WAN024AZW; Start 39; Stop 63
tcgggttctagagaatgatagccat

SEQ ID NO: 470113 - DNA, 25 bp, Artificial
  probe
  misc_feature (1)..(25): SEQ ID NO: 7516; WAN024AZW; Start 38; Stop 62
atcgggttctagagaatgatagcca

SEQ ID NO: 470114 - DNA, 25 bp, Artificial
  probe
  misc_feature (1)..(25): SEQ ID NO: 7516; WAN024AZW; Start 32; Stop 56
cctcctatcgggttctagagaatga

SEQ ID NO: 470115 - DNA, 25 bp, Artificial
  probe
  misc_feature (1)..(25): SEQ ID NO: 7516; WAN024AZW; Start 1; Stop 25
ttgattcagcccttacttcatgcag

SEQ ID NO: 470116 - DNA, 25 bp, Artificial
  probe
  misc_feature (1)..(25): SEQ ID NO: 7516; WAN024AZW; Start 92; Stop 116
ggaaagctgagaatcaagcaatcac

SEQ ID NO: 470117 - DNA, 25 bp, Artificial
  probe
  misc_feature (1)..(25): SEQ ID NO: 7516; WAN024AZW; Start 182; Stop 206
gctatgtgcattgtgatatgttgcg

SEQ ID NO: 470118 - DNA, 25 bp, Artificial
  probe
  misc_feature (1)..(25): SEQ ID NO: 7516; WAN024AZW; Start 93; Stop 117
gaaagctgagaatcaagcaatcacg

SEQ ID NO: 470119 - DNA, 25 bp, Artificial
  probe
  misc_feature (1)..(25): SEQ ID NO: 7517; WAN024DMZ; Start 53; Stop 77
acttgccaaattgtcagaattatga

SEQ ID NO: 470120 - DNA, 25 bp, Artificial
  probe
  misc_feature (1)..(25): SEQ ID NO: 7517; WAN024DMZ; Start 56; Stop 80
tgccaaattgtcagaattatgagaa

SEQ ID NO: 470121 - DNA, 25 bp, Artificial
  probe
  misc_feature (1)..(25): SEQ ID NO: 7517; WAN024DMZ; Start 55; Stop 79
ttgccaaattgtcagaattatgaga

SEQ ID NO: 470122 - DNA, 25 bp, Artificial
  probe
  misc_feature (1)..(25): SEQ ID NO: 7517; WAN024DMZ; Start 54; Stop 78
cttgccaaattgtcagaattatgag

SEQ ID NO: 470123 - DNA, 25 bp, Artificial
  probe
  misc_feature (1)..(25): SEQ ID NO: 7517; WAN024DMZ; Start 52; Stop 76
aacttgccaaattgtcagaattatg

SEQ ID NO: 470124 - DNA, 25 bp, Artificial
  probe
  misc_feature (1)..(25): SEQ ID NO: 7517; WAN024DMZ; Start 57; Stop 81
gccaaattgtcagaattatgagaaa

SEQ ID NO: 470125 - DNA, 25 bp, Artificial
  probe
  misc_feature (1)..(25): SEQ ID NO: 7517; WAN024DMZ; Start 51; Stop 75
aaacttgccaaattgtcagaattat

SEQ ID NO: 470126 - DNA, 25 bp, Artificial
  probe
  misc_feature (1)..(25): SEQ ID NO: 7517; WAN024DMZ; Start 50; Stop 74
aaaacttgccaaattgtcagaatta

SEQ ID NO: 470127 - DNA, 25 bp, Artificial
  probe
  misc_feature (1)..(25): SEQ ID NO: 7517; WAN024DMZ; Start 64; Stop 88
tgtcagaattatgagaaaatagagg

SEQ ID NO: 470128 - DNA, 25 bp, Artificial
  probe
  misc_feature (1)..(25): SEQ ID NO: 7517; WAN024DMZ; Start 58; Stop 82
ccaaattgtcagaattatgagaaaa

SEQ ID NO: 470129 - DNA, 25 bp, Artificial
  probe
  misc_feature (1)..(25): SEQ ID NO: 7517; WAN024DMZ; Start 65; Stop 89
gtcagaattatgagaaaatagagga

SEQ ID NO: 470130 - DNA, 25 bp, Artificial
  probe
  misc_feature (1)..(25): SEQ ID NO: 7517; WAN024DMZ; Start 5; Stop 29
ttccgtattttcttcattttatcat

SEQ ID NO: 470131 - DNA, 25 bp, Artificial
  probe
  misc_feature (1)..(25): SEQ ID NO: 7517; WAN024DMZ; Start 4; Stop 28
attccgtattttcttcattttatca

SEQ ID NO: 470132 - DNA, 25 bp, Artificial
  probe
  misc_feature (1)..(25): SEQ ID NO: 7517; WAN024DMZ; Start 1; Stop 25
ttgattccgtattttcttcatttta

SEQ ID NO: 470133 - DNA, 25 bp, Artificial
  probe
  misc_feature (1)..(25): SEQ ID NO: 7517; WAN024DMZ; Start 2; Stop 26
tgattccgtattttcttcattttat

SEQ ID NO: 470134 - DNA, 25 bp, Artificial
  probe
  misc_feature (1)..(25): SEQ ID NO: 7517; WAN024DMZ; Start 3; Stop 27
gattccgtattttcttcattttatc

SEQ ID NO: 470135 - DNA, 25 bp, Artificial
  probe
  misc_feature (1)..(25): SEQ ID NO: 7517; WAN024DMZ; Start 66; Stop 90
tcagaattatgagaaaatagaggat

SEQ ID NO: 470136 - DNA, 25 bp, Artificial
  probe
  misc_feature (1)..(25): SEQ ID NO: 7517; WAN024DMZ; Start 76; Stop 100
gagaaaatagaggatatttatcacg

SEQ ID NO: 470137 - DNA, 25 bp, Artificial
  probe
  misc_feature (1)..(25): SEQ ID NO: 7517; WAN024DMZ; Start 77; Stop 101
agaaaatagaggatatttatcacgt

SEQ ID NO: 470138 - DNA, 25 bp, Artificial
  probe
  misc_feature (1)..(25): SEQ ID NO: 7518; WAN024CBP; Start 67; Stop 91
tattgtagtaagcataatgatgaca

SEQ ID NO: 470139 - DNA, 25 bp, Artificial
  probe
  misc_feature (1)..(25): SEQ ID NO: 7518; WAN024CBP; Start 73; Stop 97
agtaagcataatgatgacaaaagga

SEQ ID NO: 470140 - DNA, 25 bp, Artificial
  probe
  misc_feature (1)..(25): SEQ ID NO: 7518; WAN024CBP; Start 74; Stop 98
gtaagcataatgatgacaaaaggaa

SEQ ID NO: 470141 - DNA, 25 bp, Artificial
  probe
  misc_feature (1)..(25): SEQ ID NO: 7518; WAN024CBP; Start 77; Stop 101
agcataatgatgacaaaaggaattt

SEQ ID NO: 470142 - DNA, 25 bp, Artificial
  probe
  misc_feature (1)..(25): SEQ ID NO: 7518; WAN024CBP; Start 76; Stop 100
aagcataatgatgacaaaaggaatt

SEQ ID NO: 470143 - DNA, 25 bp, Artificial
  probe
  misc_feature (1)..(25): SEQ ID NO: 7518; WAN024CBP; Start 68; Stop 92
attgtagtaagcataatgatgacaa

SEQ ID NO: 470144 - DNA, 25 bp, Artificial
  probe
  misc_feature (1)..(25): SEQ ID NO: 7518; WAN024CBP; Start 72; Stop 96
tagtaagcataatgatgacaaaagg

SEQ ID NO: 470145 - DNA, 25 bp, Artificial
  probe
  misc_feature (1)..(25): SEQ ID NO: 7518; WAN024CBP; Start 75; Stop 99
taagcataatgatgacaaaaggaat

SEQ ID NO: 470146 - DNA, 25 bp, Artificial
  probe
  misc_feature (1)..(25): SEQ ID NO: 7518; WAN024CBP; Start 31; Stop 55
aacgagatgattgatatccattata

SEQ ID NO: 470147 - DNA, 25 bp, Artificial
  probe
  misc_feature (1)..(25): SEQ ID NO: 7518; WAN024CBP; Start 32; Stop 56
acgagatgattgatatccattatat

SEQ ID NO: 470148 - DNA, 25 bp, Artificial
  probe
  misc_feature (1)..(25): SEQ ID NO: 7518; WAN024CBP; Start 30; Stop 54
aaacgagatgattgatatccattat

SEQ ID NO: 470149 - DNA, 25 bp, Artificial
  probe
  misc_feature (1)..(25): SEQ ID NO: 7518; WAN024CBP; Start 78; Stop 102
gcataatgatgacaaaaggaatttt

SEQ ID NO: 470150 - DNA, 25 bp, Artificial
  probe
  misc_feature (1)..(25): SEQ ID NO: 7518; WAN024CBP; Start 71; Stop 95
gtagtaagcataatgatgacaaaag

SEQ ID NO: 470151 - DNA, 25 bp, Artificial
  probe
  misc_feature (1)..(25): SEQ ID NO: 7518; WAN024CBP; Start 70; Stop 94
tgtagtaagcataatgatgacaaaa

SEQ ID NO: 470152 - DNA, 25 bp, Artificial
  probe
  misc_feature (1)..(25): SEQ ID NO: 7518; WAN024CBP; Start 69; Stop 93
ttgtagtaagcataatgatgacaaa

SEQ ID NO: 470153 - DNA, 25 bp, Artificial
  probe
  misc_feature (1)..(25): SEQ ID NO: 7518; WAN024CBP; Start 1; Stop 25
ttgattgaaaagaaattccgtctta

SEQ ID NO: 470154 - DNA, 25 bp, Artificial
  probe
  misc_feature (1)..(25): SEQ ID NO: 7518; WAN024CBP; Start 2; Stop 26
tgattgaaaagaaattccgtcttat

SEQ ID NO: 470155 - DNA, 25 bp, Artificial
  probe
  misc_feature (1)..(25): SEQ ID NO: 7518; WAN024CBP; Start 29; Stop 53
aaaacgagatgattgatatccatta

SEQ ID NO: 470156 - DNA, 25 bp, Artificial
  probe
  misc_feature (1)..(25): SEQ ID NO: 7518; WAN024CBP; Start 3; Stop 27
gattgaaaagaaattccgtcttatt

SEQ ID NO: 470157 - DNA, 25 bp, Artificial
  probe
  misc_feature (1)..(25): SEQ ID NO: 7518; WAN024CBP; Start 6; Stop 30
tgaaaagaaattccgtcttattaaa

SEQ ID NO: 470158 - DNA, 25 bp, Artificial
  probe
  misc_feature (1)..(25): SEQ ID NO: 7518; WAN024CBP; Start 5; Stop 29
ttgaaaagaaattccgtcttattaa

SEQ ID NO: 470159 - DNA, 25 bp, Artificial
  probe
  misc_feature (1)..(25): SEQ ID NO: 7518; WAN024CBP; Start 4; Stop 28
attgaaaagaaattccgtcttatta

SEQ ID NO: 470160 - DNA, 25 bp, Artificial
  probe
  misc_feature (1)..(25): SEQ ID NO: 7519; WAN024DUB; Start 32; Stop 56
aaagcaaatctcctgtcggtctatc

SEQ ID NO: 470161 - DNA, 25 bp, Artificial
  probe
  misc_feature (1)..(25): SEQ ID NO: 7519; WAN024DUB; Start 3; Stop 27
gattgaagcatttaacccatcatgg

SEQ ID NO: 470162 - DNA, 25 bp, Artificial
  probe
  misc_feature (1)..(25): SEQ ID NO: 7519; WAN024DUB; Start 9; Stop 33
agcatttaacccatcatggaagaaa

SEQ ID NO: 470163 - DNA, 25 bp, Artificial
  probe
  misc_feature (1)..(25): SEQ ID NO: 7519; WAN024DUB; Start 8; Stop 32
aagcatttaacccatcatggaagaa

SEQ ID NO: 470164 - DNA, 25 bp, Artificial
  probe
  misc_feature (1)..(25): SEQ ID NO: 7519; WAN024DUB; Start 4; Stop 28
attgaagcatttaacccatcatgga

SEQ ID NO: 470165 - DNA, 25 bp, Artificial
  probe
  misc_feature (1)..(25): SEQ ID NO: 7519; WAN024DUB; Start 36; Stop 60
caaatctcctgtcggtctatccatg

SEQ ID NO: 470166 - DNA, 25 bp, Artificial
  probe
  misc_feature (1)..(25): SEQ ID NO: 7519; WAN024DUB; Start 5; Stop 29
ttgaagcatttaacccatcatggaa

SEQ ID NO: 470167 - DNA, 25 bp, Artificial
  probe
  misc_feature (1)..(25): SEQ ID NO: 7519; WAN024DUB; Start 7; Stop 31
gaagcatttaacccatcatggaaga

SEQ ID NO: 470168 - DNA, 25 bp, Artificial
  probe
  misc_feature (1)..(25): SEQ ID NO: 7519; WAN024DUB; Start 1; Stop 25
ttgattgaagcatttaacccatcat

SEQ ID NO: 470169 - DNA, 25 bp, Artificial
  probe
  misc_feature (1)..(25): SEQ ID NO: 7519; WAN024DUB; Start 6; Stop 30
tgaagcatttaacccatcatggaag

SEQ ID NO: 470170 - DNA, 25 bp, Artificial
  probe
  misc_feature (1)..(25): SEQ ID NO: 7519; WAN024DUB; Start 2; Stop 26
tgattgaagcatttaacccatcatg

SEQ ID NO: 470171 - DNA, 25 bp, Artificial
  probe
  misc_feature (1)..(25): SEQ ID NO: 7519; WAN024DUB; Start 31; Stop 55
aaaagcaaatctcctgtcggtctat

SEQ ID NO: 470172 - DNA, 25 bp, Artificial
  probe
  misc_feature (1)..(25): SEQ ID NO: 7519; WAN024DUB; Start 35; Stop 59
gcaaatctcctgtcggtctatccat

SEQ ID NO: 470173 - DNA, 25 bp, Artificial
  probe
  misc_feature (1)..(25): SEQ ID NO: 7519; WAN024DUB; Start 33; Stop 57
aagcaaatctcctgtcggtctatcc

SEQ ID NO: 470174 - DNA, 25 bp, Artificial
  probe
  misc_feature (1)..(25): SEQ ID NO: 7519; WAN024DUB; Start 39; Stop 63
atctcctgtcggtctatccatgctt

SEQ ID NO: 470175 - DNA, 25 bp, Artificial
  probe
  misc_feature (1)..(25): SEQ ID NO: 7519; WAN024DUB; Start 38; Stop 62
aatctcctgtcggtctatccatgct

SEQ ID NO: 470176 - DNA, 25 bp, Artificial
  probe
  misc_feature (1)..(25): SEQ ID NO: 7519; WAN024DUB; Start 30; Stop 54
gaaaagcaaatctcctgtcggtcta

SEQ ID NO: 470177 - DNA, 25 bp, Artificial
  probe
  misc_feature (1)..(25): SEQ ID NO: 7519; WAN024DUB; Start 24; Stop 48
atggaagaaaagcaaatctcctgtc

SEQ ID NO: 470178 - DNA, 25 bp, Artificial
  probe
  misc_feature (1)..(25): SEQ ID NO: 7519; WAN024DUB; Start 49; Stop 73
ggtctatccatgcttcgtccaactc

SEQ ID NO: 470179 - DNA, 25 bp, Artificial
  probe
  misc_feature (1)..(25): SEQ ID NO: 7519; WAN024DUB; Start 21; Stop 45
atcatggaagaaaagcaaatctcct

SEQ ID NO: 470180 - DNA, 25 bp, Artificial
  probe
  misc_feature (1)..(25): SEQ ID NO: 7519; WAN024DUB; Start 20; Stop 44
catcatggaagaaaagcaaatctcc

SEQ ID NO: 470181 - DNA, 25 bp, Artificial
  probe
  misc_feature (1)..(25): SEQ ID NO: 7519; WAN024DUB; Start 37; Stop 61
aaatctcctgtcggtctatccatgc

SEQ ID NO: 470182 - DNA, 25 bp, Artificial
  probe
  misc_feature (1)..(25): SEQ ID NO: 7519; WAN024DUB; Start 12; Stop 36
atttaacccatcatggaagaaaagc

SEQ ID NO: 470183 - DNA, 25 bp, Artificial
  probe
  misc_feature (1)..(25): SEQ ID NO: 7519; WAN024DUB; Start 10; Stop 34
gcatttaacccatcatggaagaaaa

SEQ ID NO: 470184 - DNA, 25 bp, Artificial
  probe
  misc_feature (1)..(25): SEQ ID NO: 7519; WAN024DUB; Start 19; Stop 43
ccatcatggaagaaaagcaaatctc

SEQ ID NO: 470185 - DNA, 25 bp, Artificial
  probe
  misc_feature (1)..(25): SEQ ID NO: 7519; WAN024DUB; Start 22; Stop 46
tcatggaagaaaagcaaatctcctg

SEQ ID NO: 470186 - DNA, 25 bp, Artificial
  probe
  misc_feature (1)..(25): SEQ ID NO: 7519; WAN024DUB; Start 15; Stop 39
taacccatcatggaagaaaagcaaa

SEQ ID NO: 470187 - DNA, 25 bp, Artificial
  probe
  misc_feature (1)..(25): SEQ ID NO: 7519; WAN024DUB; Start 14; Stop 38
ttaacccatcatggaagaaaagcaa

SEQ ID NO: 470188 - DNA, 25 bp, Artificial
  probe
  misc_feature (1)..(25): SEQ ID NO: 7519; WAN024DUB; Start 13; Stop 37
tttaacccatcatggaagaaaagca

SEQ ID NO: 470189 - DNA, 25 bp, Artificial
  probe
  misc_feature (1)..(25): SEQ ID NO: 7519; WAN024DUB; Start 23; Stop 47
catggaagaaaagcaaatctcctgt

SEQ ID NO: 470190 - DNA, 25 bp, Artificial
  probe
  misc_feature (1)..(25): SEQ ID NO: 7519; WAN024DUB; Start 11; Stop 35
catttaacccatcatggaagaaaag

SEQ ID NO: 470191 - DNA, 25 bp, Artificial
  probe
  misc_feature (1)..(25): SEQ ID NO: 7519; WAN024DUB; Start 16; Stop 40
aacccatcatggaagaaaagcaaat

SEQ ID NO: 470192 - DNA, 25 bp, Artificial
  probe
  misc_feature (1)..(25): SEQ ID NO: 7519; WAN024DUB; Start 18; Stop 42
cccatcatggaagaaaagcaaatct

SEQ ID NO: 470193 - DNA, 25 bp, Artificial
  probe
  misc_feature (1)..(25): SEQ ID NO: 7520; WAN024GLN; Start 6; Stop 30
tgacgaaatccaactagaacgaatt

SEQ ID NO: 470194 - DNA, 25 bp, Artificial
  probe
  misc_feature (1)..(25): SEQ ID NO: 7520; WAN024GLN; Start 7; Stop 31
gacgaaatccaactagaacgaattg

SEQ ID NO: 470195 - DNA, 25 bp, Artificial
  probe
  misc_feature (1)..(25): SEQ ID NO: 7520; WAN024GLN; Start 5; Stop 29
ttgacgaaatccaactagaacgaat

SEQ ID NO: 470196 - DNA, 25 bp, Artificial
  probe
  misc_feature (1)..(25): SEQ ID NO: 7520; WAN024GLN; Start 4; Stop 28
attgacgaaatccaactagaacgaa

SEQ ID NO: 470197 - DNA, 25 bp, Artificial
  probe
  misc_feature (1)..(25): SEQ ID NO: 7520; WAN024GLN; Start 1; Stop 25
ttgattgacgaaatccaactagaac

SEQ ID NO: 470198 - DNA, 25 bp, Artificial
  probe
  misc_feature (1)..(25): SEQ ID NO: 7520; WAN024GLN; Start 8; Stop 32
acgaaatccaactagaacgaattgc

SEQ ID NO: 470199 - DNA, 25 bp, Artificial
  probe
  misc_feature (1)..(25): SEQ ID NO: 7520; WAN024GLN; Start 3; Stop 27
gattgacgaaatccaactagaacga

SEQ ID NO: 470200 - DNA, 25 bp, Artificial
  probe
  misc_feature (1)..(25): SEQ ID NO: 7520; WAN024GLN; Start 10; Stop 34
gaaatccaactagaacgaattgccc

SEQ ID NO: 470201 - DNA, 25 bp, Artificial
  probe
  misc_feature (1)..(25): SEQ ID NO: 7520; WAN024GLN; Start 2; Stop 26
tgattgacgaaatccaactagaacg

SEQ ID NO: 470202 - DNA, 25 bp, Artificial
  probe
  misc_feature (1)..(25): SEQ ID NO: 7520; WAN024GLN; Start 9; Stop 33
cgaaatccaactagaacgaattgcc

SEQ ID NO: 470203 - DNA, 25 bp, Artificial
  probe
  misc_feature (1)..(25): SEQ ID NO: 7520; WAN024GLN; Start 11; Stop 35
aaatccaactagaacgaattgccca

SEQ ID NO: 470204 - DNA, 25 bp, Artificial
  probe
  misc_feature (1)..(25): SEQ ID NO: 7520; WAN024GLN; Start 17; Stop 41
aactagaacgaattgcccagctaat

SEQ ID NO: 470205 - DNA, 25 bp, Artificial
  probe
  misc_feature (1)..(25): SEQ ID NO: 7520; WAN024GLN; Start 12; Stop 36
aatccaactagaacgaattgcccag

SEQ ID NO: 470206 - DNA, 25 bp, Artificial
  probe
  misc_feature (1)..(25): SEQ ID NO: 7520; WAN024GLN; Start 18; Stop 42
actagaacgaattgcccagctaatc

SEQ ID NO: 470207 - DNA, 25 bp, Artificial
  probe
  misc_feature (1)..(25): SEQ ID NO: 7520; WAN024GLN; Start 16; Stop 40
caactagaacgaattgcccagctaa

SEQ ID NO: 470208 - DNA, 25 bp, Artificial
  probe
  misc_feature (1)..(25): SEQ ID NO: 7520; WAN024GLN; Start 26; Stop 50
gaattgcccagctaatcgaagatgc

SEQ ID NO: 470209 - DNA, 25 bp, Artificial
  probe
  misc_feature (1)..(25): SEQ ID NO: 7520; WAN024GLN; Start 19; Stop 43
ctagaacgaattgcccagctaatcg

SEQ ID NO: 470210 - DNA, 25 bp, Artificial
  probe
  misc_feature (1)..(25): SEQ ID NO: 7520; WAN024GLN; Start 15; Stop 39
ccaactagaacgaattgcccagcta

SEQ ID NO: 470211 - DNA, 25 bp, Artificial
  probe
  misc_feature (1)..(25): SEQ ID NO: 7520; WAN024GLN; Start 20; Stop 44
tagaacgaattgcccagctaatcga

SEQ ID NO: 470212 - DNA, 25 bp, Artificial
  probe
  misc_feature (1)..(25): SEQ ID NO: 7520; WAN024GLN; Start 25; Stop 49
cgaattgcccagctaatcgaagatg

SEQ ID NO: 470213 - DNA, 25 bp, Artificial
  probe
  misc_feature (1)..(25): SEQ ID NO: 7520; WAN024GLN; Start 22; Stop 46
gaacgaattgcccagctaatcgaag

SEQ ID NO: 470214 - DNA, 25 bp, Artificial
  probe
  misc_feature (1)..(25): SEQ ID NO: 7520; WAN024GLN; Start 24; Stop 48
acgaattgcccagctaatcgaagat

SEQ ID NO: 470215 - DNA, 25 bp, Artificial
  probe
  misc_feature (1)..(25): SEQ ID NO: 7520; WAN024GLN; Start 27; Stop 51
aattgcccagctaatcgaagatgct

SEQ ID NO: 470216 - DNA, 25 bp, Artificial
  probe
  misc_feature (1)..(25): SEQ ID NO: 7520; WAN024GLN; Start 23; Stop 47
aacgaattgcccagctaatcgaaga

SEQ ID NO: 470217 - DNA, 25 bp, Artificial
  probe
  misc_feature (1)..(25): SEQ ID NO: 7520; WAN024GLN; Start 21; Stop 45
agaacgaattgcccagctaatcgaa

SEQ ID NO: 470218 - DNA, 25 bp, Artificial
  probe
  misc_feature (1)..(25): SEQ ID NO: 7520; WAN024GLN; Start 66; Stop 90
gttgcccaattctcacatctgcaaa

SEQ ID NO: 470219 - DNA, 25 bp, Artificial
  probe
  misc_feature (1)..(25): SEQ ID NO: 7521; WAN024G6W; Start 22; Stop 46
gaccataacgcacctccatattatt

SEQ ID NO: 470220 - DNA, 25 bp, Artificial
  probe
  misc_feature (1)..(25): SEQ ID NO: 7521; WAN024G6W; Start 20; Stop 44
ttgaccataacgcacctccatatta

SEQ ID NO: 470221 - DNA, 25 bp, Artificial
  probe
  misc_feature (1)..(25): SEQ ID NO: 7521; WAN024G6W; Start 21; Stop 45
tgaccataacgcacctccatattat

SEQ ID NO: 470222 - DNA, 25 bp, Artificial
  probe
  misc_feature (1)..(25): SEQ ID NO: 7521; WAN024G6W; Start 186; Stop 210
tattaatgctccaatccaaccgtat

SEQ ID NO: 470223 - DNA, 25 bp, Artificial
  probe
  misc_feature (1)..(25): SEQ ID NO: 7521; WAN024G6W; Start 185; Stop 209
ctattaatgctccaatccaaccgta

SEQ ID NO: 470224 - DNA, 25 bp, Artificial
  probe
  misc_feature (1)..(25): SEQ ID NO: 7521; WAN024G6W; Start 187; Stop 211
attaatgctccaatccaaccgtatt

SEQ ID NO: 470225 - DNA, 25 bp, Artificial
  probe
  misc_feature (1)..(25): SEQ ID NO: 7521; WAN024G6W; Start 123; Stop 147
agcaagatatgtccataacgtaagt

SEQ ID NO: 470226 - DNA, 25 bp, Artificial
  probe
  misc_feature (1)..(25): SEQ ID NO: 7521; WAN024G6W; Start 119; Stop 143
aactagcaagatatgtccataacgt

SEQ ID NO: 470227 - DNA, 25 bp, Artificial
  probe
  misc_feature (1)..(25): SEQ ID NO: 7521; WAN024G6W; Start 189; Stop 213
taatgctccaatccaaccgtattta

SEQ ID NO: 470228 - DNA, 25 bp, Artificial
  probe
  misc_feature (1)..(25): SEQ ID NO: 7521; WAN024G6W; Start 120; Stop 144
actagcaagatatgtccataacgta

SEQ ID NO: 470229 - DNA, 25 bp, Artificial
  probe
  misc_feature (1)..(25): SEQ ID NO: 7521; WAN024G6W; Start 190; Stop 214
aatgctccaatccaaccgtatttaa

SEQ ID NO: 470230 - DNA, 25 bp, Artificial
  probe
  misc_feature (1)..(25): SEQ ID NO: 7521; WAN024G6W; Start 188; Stop 212
ttaatgctccaatccaaccgtattt

SEQ ID NO: 470231 - DNA, 25 bp, Artificial
  probe
  misc_feature (1)..(25): SEQ ID NO: 7521; WAN024G6W; Start 23; Stop 47
accataacgcacctccatattattt

SEQ ID NO: 470232 - DNA, 25 bp, Artificial
  probe
  misc_feature (1)..(25): SEQ ID NO: 7521; WAN024G6W; Start 124; Stop 148
gcaagatatgtccataacgtaagta

SEQ ID NO: 470233 - DNA, 25 bp, Artificial
  probe
  misc_feature (1)..(25): SEQ ID NO: 7521; WAN024G6W; Start 59; Stop 83
attctcttatcttctcgtatcccat

SEQ ID NO: 470234 - DNA, 25 bp, Artificial
  probe
  misc_feature (1)..(25): SEQ ID NO: 7521; WAN024G6W; Start 58; Stop 82
aattctcttatcttctcgtatccca

SEQ ID NO: 470235 - DNA, 25 bp, Artificial
  probe
  misc_feature (1)..(25): SEQ ID NO: 7521; WAN024G6W; Start 118; Stop 142
aaactagcaagatatgtccataacg

SEQ ID NO: 470236 - DNA, 25 bp, Artificial
  probe
  misc_feature (1)..(25): SEQ ID NO: 7521; WAN024G6W; Start 122; Stop 146
tagcaagatatgtccataacgtaag

SEQ ID NO: 470237 - DNA, 25 bp, Artificial
  probe
  misc_feature (1)..(25): SEQ ID NO: 7521; WAN024G6W; Start 121; Stop 145
ctagcaagatatgtccataacgtaa

SEQ ID NO: 470238 - DNA, 25 bp, Artificial
  probe
  misc_feature (1)..(25): SEQ ID NO: 7521; WAN024G6W; Start 24; Stop 48
ccataacgcacctccatattattta

SEQ ID NO: 470239 - DNA, 25 bp, Artificial
  probe
  misc_feature (1)..(25): SEQ ID NO: 7521; WAN024G6W; Start 60; Stop 84
ttctcttatcttctcgtatcccata

SEQ ID NO: 470240 - DNA, 25 bp, Artificial
  probe
  misc_feature (1)..(25): SEQ ID NO: 7521; WAN024G6W; Start 61; Stop 85
tctcttatcttctcgtatcccatat

SEQ ID NO: 470241 - DNA, 25 bp, Artificial
  probe
  misc_feature (1)..(25): SEQ ID NO: 7521; WAN024G6W; Start 130; Stop 154
tatgtccataacgtaagtattccaa

SEQ ID NO: 470242 - DNA, 25 bp, Artificial
  probe
  misc_feature (1)..(25): SEQ ID NO: 7521; WAN024G6W; Start 92; Stop 116
atactaatgccactacaattgctct

SEQ ID NO: 470243 - DNA, 25 bp, Artificial
  probe
  misc_feature (1)..(25): SEQ ID NO: 7521; WAN024G6W; Start 94; Stop 118
actaatgccactacaattgctctaa

SEQ ID NO: 470244 - DNA, 25 bp, Artificial
  probe
  misc_feature (1)..(25): SEQ ID NO: 7521; WAN024G6W; Start 93; Stop 117
tactaatgccactacaattgctcta

SEQ ID NO: 470245 - DNA, 25 bp, Artificial
  probe
  misc_feature (1)..(25): SEQ ID NO: 7521; WAN024G6W; Start 91; Stop 115
aatactaatgccactacaattgctc

SEQ ID NO: 470246 - DNA, 25 bp, Artificial
  probe
  misc_feature (1)..(25): SEQ ID NO: 7521; WAN024G6W; Start 175; Stop 199
agaagacaagctattaatgctccaa

SEQ ID NO: 470247 - DNA, 25 bp, Artificial
  probe
  misc_feature (1)..(25): SEQ ID NO: 7521; WAN024G6W; Start 174; Stop 198
aagaagacaagctattaatgctcca

SEQ ID NO: 470248 - DNA, 25 bp, Artificial
  probe
  misc_feature (1)..(25): SEQ ID NO: 7521; WAN024G6W; Start 181; Stop 205
caagctattaatgctccaatccaac

SEQ ID NO: 470249 - DNA, 25 bp, Artificial
  probe
  misc_feature (1)..(25): SEQ ID NO: 7521; WAN024G6W; Start 19; Stop 43
tttgaccataacgcacctccatatt

SEQ ID NO: 470250 - DNA, 25 bp, Artificial
  probe
  misc_feature (1)..(25): SEQ ID NO: 7521; WAN024G6W; Start 177; Stop 201
aagacaagctattaatgctccaatc

SEQ ID NO: 470251 - DNA, 25 bp, Artificial
  probe
  misc_feature (1)..(25): SEQ ID NO: 7521; WAN024G6W; Start 176; Stop 200
gaagacaagctattaatgctccaat

SEQ ID NO: 470252 - DNA, 25 bp, Artificial
  probe
  misc_feature (1)..(25): SEQ ID NO: 7522; WAN024CBO; Start 2; Stop 26
tgattgattctgatgaggtgtatcc

SEQ ID NO: 470253 - DNA, 25 bp, Artificial
  probe
  misc_feature (1)..(25): SEQ ID NO: 7522; WAN024CBO; Start 41; Stop 65
ttgttggaccagttgttattgttac

SEQ ID NO: 470254 - DNA, 25 bp, Artificial
  probe
  misc_feature (1)..(25): SEQ ID NO: 7522; WAN024CBO; Start 40; Stop 64
cttgttggaccagttgttattgtta

SEQ ID NO: 470255 - DNA, 25 bp, Artificial
  probe
  misc_feature (1)..(25): SEQ ID NO: 7522; WAN024CBO; Start 1; Stop 25
ttgattgattctgatgaggtgtatc

SEQ ID NO: 470256 - DNA, 25 bp, Artificial
  probe
  misc_feature (1)..(25): SEQ ID NO: 7522; WAN024CBO; Start 42; Stop 66
tgttggaccagttgttattgttact

SEQ ID NO: 470257 - DNA, 25 bp, Artificial
  probe
  misc_feature (1)..(25): SEQ ID NO: 7522; WAN024CBO; Start 43; Stop 67
gttggaccagttgttattgttacta

SEQ ID NO: 470258 - DNA, 25 bp, Artificial
  probe
  misc_feature (1)..(25): SEQ ID NO: 7522; WAN024CBO; Start 39; Stop 63
ccttgttggaccagttgttattgtt

SEQ ID NO: 470259 - DNA, 25 bp, Artificial
  probe
  misc_feature (1)..(25): SEQ ID NO: 7522; WAN024CBO; Start 3; Stop 27
gattgattctgatgaggtgtatcct

SEQ ID NO: 470260 - DNA, 25 bp, Artificial
  probe
  misc_feature (1)..(25): SEQ ID NO: 7522; WAN024CBO; Start 37; Stop 61
aaccttgttggaccagttgttattg

SEQ ID NO: 470261 - DNA, 25 bp, Artificial
  probe
  misc_feature (1)..(25): SEQ ID NO: 7522; WAN024CBO; Start 44; Stop 68
ttggaccagttgttattgttactaa

SEQ ID NO: 470262 - DNA, 25 bp, Artificial
  probe
  misc_feature (1)..(25): SEQ ID NO: 7522; WAN024CBO; Start 5; Stop 29
ttgattctgatgaggtgtatcctaa

SEQ ID NO: 470263 - DNA, 25 bp, Artificial
  probe
  misc_feature (1)..(25): SEQ ID NO: 7522; WAN024CBO; Start 6; Stop 30
tgattctgatgaggtgtatcctaat

SEQ ID NO: 470264 - DNA, 25 bp, Artificial
  probe
  misc_feature (1)..(25): SEQ ID NO: 7522; WAN024CBO; Start 4; Stop 28
attgattctgatgaggtgtatccta

SEQ ID NO: 470265 - DNA, 25 bp, Artificial
  probe
  misc_feature (1)..(25): SEQ ID NO: 7522; WAN024CBO; Start 45; Stop 69
tggaccagttgttattgttactaat

SEQ ID NO: 470266 - DNA, 25 bp, Artificial
  probe
  misc_feature (1)..(25): SEQ ID NO: 7522; WAN024CBO; Start 38; Stop 62
accttgttggaccagttgttattgt

SEQ ID NO: 470267 - DNA, 25 bp, Artificial
  probe
  misc_feature (1)..(25): SEQ ID NO: 7522; WAN024CBO; Start 7; Stop 31
gattctgatgaggtgtatcctaatt

SEQ ID NO: 470268 - DNA, 25 bp, Artificial
  probe
  misc_feature (1)..(25): SEQ ID NO: 7522; WAN024CBO; Start 46; Stop 70
ggaccagttgttattgttactaata

SEQ ID NO: 470269 - DNA, 25 bp, Artificial
  probe
  misc_feature (1)..(25): SEQ ID NO: 7522; WAN024CBO; Start 8; Stop 32
attctgatgaggtgtatcctaattt

SEQ ID NO: 470270 - DNA, 25 bp, Artificial
  probe
  misc_feature (1)..(25): SEQ ID NO: 7522; WAN024CBO; Start 48; Stop 72
accagttgttattgttactaataga

SEQ ID NO: 470271 - DNA, 25 bp, Artificial
  probe
  misc_feature (1)..(25): SEQ ID NO: 7522; WAN024CBO; Start 36; Stop 60
caaccttgttggaccagttgttatt

SEQ ID NO: 470272 - DNA, 25 bp, Artificial
  probe
  misc_feature (1)..(25): SEQ ID NO: 7522; WAN024CBO; Start 49; Stop 73
ccagttgttattgttactaatagac

SEQ ID NO: 470273 - DNA, 25 bp, Artificial
  probe
  misc_feature (1)..(25): SEQ ID NO: 7522; WAN024CBO; Start 47; Stop 71
gaccagttgttattgttactaatag

SEQ ID NO: 470274 - DNA, 25 bp, Artificial
  probe
  misc_feature (1)..(25): SEQ ID NO: 7522; WAN024CBO; Start 35; Stop 59
tcaaccttgttggaccagttgttat

SEQ ID NO: 470275 - DNA, 25 bp, Artificial
  probe
  misc_feature (1)..(25): SEQ ID NO: 7522; WAN024CBO; Start 34; Stop 58
atcaaccttgttggaccagttgtta

SEQ ID NO: 470276 - DNA, 25 bp, Artificial
  probe
  misc_feature (1)..(25): SEQ ID NO: 7522; WAN024CBO; Start 33; Stop 57
tatcaaccttgttggaccagttgtt

SEQ ID NO: 470277 - DNA, 25 bp, Artificial
  probe
  misc_feature (1)..(25): SEQ ID NO: 7522; WAN024CBO; Start 32; Stop 56
ttatcaaccttgttggaccagttgt

SEQ ID NO: 470278 - DNA, 25 bp, Artificial
  probe
  misc_feature (1)..(25): SEQ ID NO: 7522; WAN024CBO; Start 31; Stop 55
tttatcaaccttgttggaccagttg

SEQ ID NO: 470279 - DNA, 25 bp, Artificial
  probe
  misc_feature (1)..(25): SEQ ID NO: 7522; WAN024CBO; Start 9; Stop 33
ttctgatgaggtgtatcctaatttt

SEQ ID NO: 470280 - DNA, 25 bp, Artificial
  probe
  misc_feature (1)..(25): SEQ ID NO: 7522; WAN024CBO; Start 10; Stop 34
tctgatgaggtgtatcctaatttta

SEQ ID NO: 470281 - DNA, 25 bp, Artificial
  probe
  misc_feature (1)..(25): SEQ ID NO: 7522; WAN024CBO; Start 16; Stop 40
gaggtgtatcctaattttatcaacc

SEQ ID NO: 470282 - DNA, 25 bp, Artificial
  probe
  misc_feature (1)..(25): SEQ ID NO: 7522; WAN024CBO; Start 20; Stop 44
tgtatcctaattttatcaaccttgt

SEQ ID NO: 470283 - DNA, 25 bp, Artificial
  probe
  misc_feature (1)..(25): SEQ ID NO: 7522; WAN024CBO; Start 15; Stop 39
tgaggtgtatcctaattttatcaac

SEQ ID NO: 470284 - DNA, 25 bp, Artificial
  probe
  misc_feature (1)..(25): SEQ ID NO: 7522; WAN024CBO; Start 19; Stop 43
gtgtatcctaattttatcaaccttg

SEQ ID NO: 470285 - DNA, 25 bp, Artificial
  probe
  misc_feature (1)..(25): SEQ ID NO: 7523; WAN024C6W; Start 278; Stop 302
ttaatatcttcactccaatcggctc

SEQ ID NO: 470286 - DNA, 25 bp, Artificial
  probe
  misc_feature (1)..(25): SEQ ID NO: 7523; WAN024C6W; Start 275; Stop 299
tcgttaatatcttcactccaatcgg

SEQ ID NO: 470287 - DNA, 25 bp, Artificial
  probe
  misc_feature (1)..(25): SEQ ID NO: 7523; WAN024C6W; Start 277; Stop 301
gttaatatcttcactccaatcggct

SEQ ID NO: 470288 - DNA, 25 bp, Artificial
  probe
  misc_feature (1)..(25): SEQ ID NO: 7523; WAN024C6W; Start 207; Stop 231
cattgtcaacatcttctctggtatc

SEQ ID NO: 470289 - DNA, 25 bp, Artificial
  probe
  misc_feature (1)..(25): SEQ ID NO: 7523; WAN024C6W; Start 208; Stop 232
attgtcaacatcttctctggtatcg

SEQ ID NO: 470290 - DNA, 25 bp, Artificial
  probe
  misc_feature (1)..(25): SEQ ID NO: 7523; WAN024C6W; Start 455; Stop 479
gtgttcttgcgaatgtatcttcttg

SEQ ID NO: 470291 - DNA, 25 bp, Artificial
  probe
  misc_feature (1)..(25): SEQ ID NO: 7523; WAN024C6W; Start 454; Stop 478
agtgttcttgcgaatgtatcttctt

SEQ ID NO: 470292 - DNA, 25 bp, Artificial
  probe
  misc_feature (1)..(25): SEQ ID NO: 7523; WAN024C6W; Start 453; Stop 477
aagtgttcttgcgaatgtatcttct

SEQ ID NO: 470293 - DNA, 25 bp, Artificial
  probe
  misc_feature (1)..(25): SEQ ID NO: 7523; WAN024C6W; Start 274; Stop 298
atcgttaatatcttcactccaatcg

SEQ ID NO: 470294 - DNA, 25 bp, Artificial
  probe
  misc_feature (1)..(25): SEQ ID NO: 7523; WAN024C6W; Start 279; Stop 303
taatatcttcactccaatcggctca

SEQ ID NO: 470295 - DNA, 25 bp, Artificial
  probe
  misc_feature (1)..(25): SEQ ID NO: 7523; WAN024C6W; Start 458; Stop 482
ttcttgcgaatgtatcttcttggtt

SEQ ID NO: 470296 - DNA, 25 bp, Artificial
  probe
  misc_feature (1)..(25): SEQ ID NO: 7523; WAN024C6W; Start 271; Stop 295
gctatcgttaatatcttcactccaa

SEQ ID NO: 470297 - DNA, 25 bp, Artificial
  probe
  misc_feature (1)..(25): SEQ ID NO: 7523; WAN024C6W; Start 457; Stop 481
gttcttgcgaatgtatcttcttggt

SEQ ID NO: 470298 - DNA, 25 bp, Artificial
  probe
  misc_feature (1)..(25): SEQ ID NO: 7523; WAN024C6W; Start 456; Stop 480
tgttcttgcgaatgtatcttcttgg

SEQ ID NO: 470299 - DNA, 25 bp, Artificial
  probe
  misc_feature (1)..(25): SEQ ID NO: 7523; WAN024C6W; Start 280; Stop 304
aatatcttcactccaatcggctcat

SEQ ID NO: 470300 - DNA, 25 bp, Artificial
  probe
  misc_feature (1)..(25): SEQ ID NO: 7523; WAN024C6W; Start 276; Stop 300
cgttaatatcttcactccaatcggc

SEQ ID NO: 470301 - DNA, 25 bp, Artificial
  probe
  misc_feature (1)..(25): SEQ ID NO: 7523; WAN024C6W; Start 209; Stop 233
ttgtcaacatcttctctggtatcgg

SEQ ID NO: 470302 - DNA, 25 bp, Artificial
  probe
  misc_feature (1)..(25): SEQ ID NO: 7523; WAN024C6W; Start 206; Stop 230
ccattgtcaacatcttctctggtat

SEQ ID NO: 470303 - DNA, 25 bp, Artificial
  probe
  misc_feature (1)..(25): SEQ ID NO: 7523; WAN024C6W; Start 385; Stop 409
tggactggtctaacaaacatcttta

SEQ ID NO: 470304 - DNA, 25 bp, Artificial
  probe
  misc_feature (1)..(25): SEQ ID NO: 7523; WAN024C6W; Start 211; Stop 235
gtcaacatcttctctggtatcggag

SEQ ID NO: 470305 - DNA, 25 bp, Artificial
  probe
  misc_feature (1)..(25): SEQ ID NO: 7523; WAN024C6W; Start 465; Stop 489
gaatgtatcttcttggtttgggaat

SEQ ID NO: 470306 - DNA, 25 bp, Artificial
  probe
  misc_feature (1)..(25): SEQ ID NO: 7523; WAN024C6W; Start 384; Stop 408
atggactggtctaacaaacatcttt

SEQ ID NO: 470307 - DNA, 25 bp, Artificial
  probe
  misc_feature (1)..(25): SEQ ID NO: 7523; WAN024C6W; Start 281; Stop 305
atatcttcactccaatcggctcatg

SEQ ID NO: 470308 - DNA, 25 bp, Artificial
  probe
  misc_feature (1)..(25): SEQ ID NO: 7523; WAN024C6W; Start 460; Stop 484
cttgcgaatgtatcttcttggtttg

SEQ ID NO: 470309 - DNA, 25 bp, Artificial
  probe
  misc_feature (1)..(25): SEQ ID NO: 7523; WAN024C6W; Start 459; Stop 483
tcttgcgaatgtatcttcttggttt

SEQ ID NO: 470310 - DNA, 25 bp, Artificial
  probe
  misc_feature (1)..(25): SEQ ID NO: 7523; WAN024C6W; Start 210; Stop 234
tgtcaacatcttctctggtatcgga

SEQ ID NO: 470311 - DNA, 25 bp, Artificial
  probe
  misc_feature (1)..(25): SEQ ID NO: 7523; WAN024C6W; Start 471; Stop 495
atcttcttggtttgggaatatgttt

SEQ ID NO: 470312 - DNA, 25 bp, Artificial
  probe
  misc_feature (1)..(25): SEQ ID NO: 7523; WAN024C6W; Start 469; Stop 493
gtatcttcttggtttgggaatatgt

SEQ ID NO: 470313 - DNA, 25 bp, Artificial
  probe
  misc_feature (1)..(25): SEQ ID NO: 7523; WAN024C6W; Start 468; Stop 492
tgtatcttcttggtttgggaatatg

SEQ ID NO: 470314 - DNA, 25 bp, Artificial
  probe
  misc_feature (1)..(25): SEQ ID NO: 7523; WAN024C6W; Start 396; Stop 420
aacaaacatctttagcaaactaggt

SEQ ID NO: 470315 - DNA, 25 bp, Artificial
  probe
  misc_feature (1)..(25): SEQ ID NO: 7523; WAN024C6W; Start 464; Stop 488
cgaatgtatcttcttggtttgggaa

SEQ ID NO: 470316 - DNA, 25 bp, Artificial
  probe
  misc_feature (1)..(25): SEQ ID NO: 7523; WAN024C6W; Start 474; Stop 498
ttcttggtttgggaatatgtttact

SEQ ID NO: 470317 - DNA, 25 bp, Artificial
  probe
  misc_feature (1)..(25): SEQ ID NO: 7523; WAN024C6W; Start 397; Stop 421
acaaacatctttagcaaactaggtt

SEQ ID NO: 470318 - DNA, 25 bp, Artificial
  probe
  misc_feature (1)..(25): SEQ ID NO: 7524; WAN024EUE; Start 85; Stop 109
aatagattaaagcacctagcacctg

SEQ ID NO: 470319 - DNA, 25 bp, Artificial
  probe
  misc_feature (1)..(25): SEQ ID NO: 7524; WAN024EUE; Start 84; Stop 108
taatagattaaagcacctagcacct

SEQ ID NO: 470320 - DNA, 25 bp, Artificial
  probe
  misc_feature (1)..(25): SEQ ID NO: 7524; WAN024EUE; Start 86; Stop 110
atagattaaagcacctagcacctgt

SEQ ID NO: 470321 - DNA, 25 bp, Artificial
  probe
  misc_feature (1)..(25): SEQ ID NO: 7524; WAN024EUE; Start 87; Stop 111
tagattaaagcacctagcacctgtt

SEQ ID NO: 470322 - DNA, 25 bp, Artificial
  probe
  misc_feature (1)..(25): SEQ ID NO: 7524; WAN024EUE; Start 83; Stop 107
ttaatagattaaagcacctagcacc

SEQ ID NO: 470323 - DNA, 25 bp, Artificial
  probe
  misc_feature (1)..(25): SEQ ID NO: 7524; WAN024EUE; Start 2; Stop 26
tgattgcttcatctttcatgttctt

SEQ ID NO: 470324 - DNA, 25 bp, Artificial
  probe
  misc_feature (1)..(25): SEQ ID NO: 7524; WAN024EUE; Start 1; Stop 25
ttgattgcttcatctttcatgttct

SEQ ID NO: 470325 - DNA, 25 bp, Artificial
  probe
  misc_feature (1)..(25): SEQ ID NO: 7524; WAN024EUE; Start 3; Stop 27
gattgcttcatctttcatgttcttt

SEQ ID NO: 470326 - DNA, 25 bp, Artificial
  probe
  misc_feature (1)..(25): SEQ ID NO: 7524; WAN024EUE; Start 34; Stop 58
tctaattatgaacaagacccagaaa

SEQ ID NO: 470327 - DNA, 25 bp, Artificial
  probe
  misc_feature (1)..(25): SEQ ID NO: 7524; WAN024EUE; Start 30; Stop 54
tcaatctaattatgaacaagaccca

SEQ ID NO: 470328 - DNA, 25 bp, Artificial
  probe
  misc_feature (1)..(25): SEQ ID NO: 7524; WAN024EUE; Start 33; Stop 57
atctaattatgaacaagacccagaa

SEQ ID NO: 470329 - DNA, 25 bp, Artificial
  probe
  misc_feature (1)..(25): SEQ ID NO: 7524; WAN024EUE; Start 32; Stop 56
aatctaattatgaacaagacccaga

SEQ ID NO: 470330 - DNA, 25 bp, Artificial
  probe
  misc_feature (1)..(25): SEQ ID NO: 7524; WAN024EUE; Start 31; Stop 55
caatctaattatgaacaagacccag

SEQ ID NO: 470331 - DNA, 25 bp, Artificial
  probe
  misc_feature (1)..(25): SEQ ID NO: 7524; WAN024EUE; Start 4; Stop 28
attgcttcatctttcatgttctttt

SEQ ID NO: 470332 - DNA, 25 bp, Artificial
  probe
  misc_feature (1)..(25): SEQ ID NO: 7524; WAN024EUE; Start 82; Stop 106
tttaatagattaaagcacctagcac

SEQ ID NO: 470333 - DNA, 25 bp, Artificial
  probe
  misc_feature (1)..(25): SEQ ID NO: 7524; WAN024EUE; Start 35; Stop 59
ctaattatgaacaagacccagaaaa

SEQ ID NO: 470334 - DNA, 25 bp, Artificial
  probe
  misc_feature (1)..(25): SEQ ID NO: 7524; WAN024EUE; Start 29; Stop 53
ttcaatctaattatgaacaagaccc

SEQ ID NO: 470335 - DNA, 25 bp, Artificial
  probe
  misc_feature (1)..(25): SEQ ID NO: 7524; WAN024EUE; Start 28; Stop 52
tttcaatctaattatgaacaagacc

SEQ ID NO: 470336 - DNA, 25 bp, Artificial
  probe
  misc_feature (1)..(25): SEQ ID NO: 7524; WAN024EUE; Start 81; Stop 105
ttttaatagattaaagcacctagca

SEQ ID NO: 470337 - DNA, 25 bp, Artificial
  probe
  misc_feature (1)..(25): SEQ ID NO: 7524; WAN024EUE; Start 80; Stop 104
attttaatagattaaagcacctagc

SEQ ID NO: 470338 - DNA, 25 bp, Artificial
  probe
  misc_feature (1)..(25): SEQ ID NO: 7525; WAN024CXM; Start 16; Stop 40
aatcgctctatgactgacttcaact

SEQ ID NO: 470339 - DNA, 25 bp, Artificial
  probe
  misc_feature (1)..(25): SEQ ID NO: 7525; WAN024CXM; Start 17; Stop 41
atcgctctatgactgacttcaactc

SEQ ID NO: 470340 - DNA, 25 bp, Artificial
  probe
  misc_feature (1)..(25): SEQ ID NO: 7525; WAN024CXM; Start 47; Stop 71
ttacaccaaagttgacaatcttgac

SEQ ID NO: 470341 - DNA, 25 bp, Artificial
  probe
  misc_feature (1)..(25): SEQ ID NO: 7525; WAN024CXM; Start 46; Stop 70
tttacaccaaagttgacaatcttga

SEQ ID NO: 470342 - DNA, 25 bp, Artificial
  probe
  misc_feature (1)..(25): SEQ ID NO: 7525; WAN024CXM; Start 48; Stop 72
tacaccaaagttgacaatcttgaca

SEQ ID NO: 470343 - DNA, 25 bp, Artificial
  probe
  misc_feature (1)..(25): SEQ ID NO: 7525; WAN024CXM; Start 25; Stop 49
atgactgacttcaactccctcttta

SEQ ID NO: 470344 - DNA, 25 bp, Artificial
  probe
  misc_feature (1)..(25): SEQ ID NO: 7525; WAN024CXM; Start 24; Stop 48
tatgactgacttcaactccctcttt

SEQ ID NO: 470345 - DNA, 25 bp, Artificial
  probe
  misc_feature (1)..(25): SEQ ID NO: 7525; WAN024CXM; Start 15; Stop 39
aaatcgctctatgactgacttcaac

SEQ ID NO: 470346 - DNA, 25 bp, Artificial
  probe
  misc_feature (1)..(25): SEQ ID NO: 7525; WAN024CXM; Start 32; Stop 56
acttcaactccctctttacaccaaa

SEQ ID NO: 470347 - DNA, 25 bp, Artificial
  probe
  misc_feature (1)..(25): SEQ ID NO: 7525; WAN024CXM; Start 27; Stop 51
gactgacttcaactccctctttaca

SEQ ID NO: 470348 - DNA, 25 bp, Artificial
  probe
  misc_feature (1)..(25): SEQ ID NO: 7525; WAN024CXM; Start 23; Stop 47
ctatgactgacttcaactccctctt

SEQ ID NO: 470349 - DNA, 25 bp, Artificial
  probe
  misc_feature (1)..(25): SEQ ID NO: 7525; WAN024CXM; Start 28; Stop 52
actgacttcaactccctctttacac

SEQ ID NO: 470350 - DNA, 25 bp, Artificial
  probe
  misc_feature (1)..(25): SEQ ID NO: 7525; WAN024CXM; Start 31; Stop 55
gacttcaactccctctttacaccaa

SEQ ID NO: 470351 - DNA, 25 bp, Artificial
  probe
  misc_feature (1)..(25): SEQ ID NO: 7525; WAN024CXM; Start 50; Stop 74
caccaaagttgacaatcttgacact

SEQ ID NO: 470352 - DNA, 25 bp, Artificial
  probe
  misc_feature (1)..(25): SEQ ID NO: 7525; WAN024CXM; Start 26; Stop 50
tgactgacttcaactccctctttac

SEQ ID NO: 470353 - DNA, 25 bp, Artificial
  probe
  misc_feature (1)..(25): SEQ ID NO: 7525; WAN024CXM; Start 21; Stop 45
ctctatgactgacttcaactccctc

SEQ ID NO: 470354 - DNA, 25 bp, Artificial
  probe
  misc_feature (1)..(25): SEQ ID NO: 7525; WAN024CXM; Start 49; Stop 73
acaccaaagttgacaatcttgacac

SEQ ID NO: 470355 - DNA, 25 bp, Artificial
  probe
  misc_feature (1)..(25): SEQ ID NO: 7525; WAN024CXM; Start 22; Stop 46
tctatgactgacttcaactccctct

SEQ ID NO: 470356 - DNA, 25 bp, Artificial
  probe
  misc_feature (1)..(25): SEQ ID NO: 7525; WAN024CXM; Start 29; Stop 53
ctgacttcaactccctctttacacc

SEQ ID NO: 470357 - DNA, 25 bp, Artificial
  probe
  misc_feature (1)..(25): SEQ ID NO: 7525; WAN024CXM; Start 18; Stop 42
tcgctctatgactgacttcaactcc

SEQ ID NO: 470358 - DNA, 25 bp, Artificial
  probe
  misc_feature (1)..(25): SEQ ID NO: 7525; WAN024CXM; Start 42; Stop 66
cctctttacaccaaagttgacaatc

SEQ ID NO: 470359 - DNA, 25 bp, Artificial
  probe
  misc_feature (1)..(25): SEQ ID NO: 7525; WAN024CXM; Start 43; Stop 67
ctctttacaccaaagttgacaatct

SEQ ID NO: 470360 - DNA, 25 bp, Artificial
  probe
  misc_feature (1)..(25): SEQ ID NO: 7525; WAN024CXM; Start 45; Stop 69
ctttacaccaaagttgacaatcttg

SEQ ID NO: 470361 - DNA, 25 bp, Artificial
  probe
  misc_feature (1)..(25): SEQ ID NO: 7525; WAN024CXM; Start 44; Stop 68
tctttacaccaaagttgacaatctt

SEQ ID NO: 470362 - DNA, 25 bp, Artificial
  probe
  misc_feature (1)..(25): SEQ ID NO: 7525; WAN024CXM; Start 30; Stop 54
tgacttcaactccctctttacacca

SEQ ID NO: 470363 - DNA, 25 bp, Artificial
  probe
  misc_feature (1)..(25): SEQ ID NO: 7525; WAN024CXM; Start 41; Stop 65
ccctctttacaccaaagttgacaat

SEQ ID NO: 470364 - DNA, 25 bp, Artificial
  probe
  misc_feature (1)..(25): SEQ ID NO: 7525; WAN024CXM; Start 33; Stop 57
cttcaactccctctttacaccaaag

SEQ ID NO: 470365 - DNA, 25 bp, Artificial
  probe
  misc_feature (1)..(25): SEQ ID NO: 7525; WAN024CXM; Start 34; Stop 58
ttcaactccctctttacaccaaagt

SEQ ID NO: 470366 - DNA, 25 bp, Artificial
  probe
  misc_feature (1)..(25): SEQ ID NO: 7525; WAN024CXM; Start 14; Stop 38
aaaatcgctctatgactgacttcaa

SEQ ID NO: 470367 - DNA, 25 bp, Artificial
  probe
  misc_feature (1)..(25): SEQ ID NO: 7525; WAN024CXM; Start 40; Stop 64
tccctctttacaccaaagttgacaa

SEQ ID NO: 470368 - DNA, 25 bp, Artificial
  probe
  misc_feature (1)..(25): SEQ ID NO: 7525; WAN024CXM; Start 51; Stop 75
accaaagttgacaatcttgacactt

SEQ ID NO: 470369 - DNA, 25 bp, Artificial
  probe
  misc_feature (1)..(25): SEQ ID NO: 7525; WAN024CXM; Start 20; Stop 44
gctctatgactgacttcaactccct

SEQ ID NO: 470370 - DNA, 25 bp, Artificial
  probe
  misc_feature (1)..(25): SEQ ID NO: 7525; WAN024CXM; Start 39; Stop 63
ctccctctttacaccaaagttgaca

SEQ ID NO: 470371 - DNA, 25 bp, Artificial
  probe
  misc_feature (1)..(25): SEQ ID NO: 7526; WAN024BSX; Start 76; Stop 100
catgatttgagtaatccaaggtcaa

SEQ ID NO: 470372 - DNA, 25 bp, Artificial
  probe
  misc_feature (1)..(25): SEQ ID NO: 7526; WAN024BSX; Start 75; Stop 99
tcatgatttgagtaatccaaggtca

SEQ ID NO: 470373 - DNA, 25 bp, Artificial
  probe
  misc_feature (1)..(25): SEQ ID NO: 7526; WAN024BSX; Start 74; Stop 98
ttcatgatttgagtaatccaaggtc

SEQ ID NO: 470374 - DNA, 25 bp, Artificial
  probe
  misc_feature (1)..(25): SEQ ID NO: 7526; WAN024BSX; Start 69; Stop 93
gaccattcatgatttgagtaatcca

SEQ ID NO: 470375 - DNA, 25 bp, Artificial
  probe
  misc_feature (1)..(25): SEQ ID NO: 7526; WAN024BSX; Start 68; Stop 92
tgaccattcatgatttgagtaatcc

SEQ ID NO: 470376 - DNA, 25 bp, Artificial
  probe
  misc_feature (1)..(25): SEQ ID NO: 7526; WAN024BSX; Start 70; Stop 94
accattcatgatttgagtaatccaa

SEQ ID NO: 470377 - DNA, 25 bp, Artificial
  probe
  misc_feature (1)..(25): SEQ ID NO: 7526; WAN024BSX; Start 73; Stop 97
attcatgatttgagtaatccaaggt

SEQ ID NO: 470378 - DNA, 25 bp, Artificial
  probe
  misc_feature (1)..(25): SEQ ID NO: 7526; WAN024BSX; Start 51; Stop 75
tgttcaagatgttttgatgaccatt

SEQ ID NO: 470379 - DNA, 25 bp, Artificial
  probe
  misc_feature (1)..(25): SEQ ID NO: 7526; WAN024BSX; Start 50; Stop 74
ttgttcaagatgttttgatgaccat

SEQ ID NO: 470380 - DNA, 25 bp, Artificial
  probe
  misc_feature (1)..(25): SEQ ID NO: 7526; WAN024BSX; Start 49; Stop 73
attgttcaagatgttttgatgacca

SEQ ID NO: 470381 - DNA, 25 bp, Artificial
  probe
  misc_feature (1)..(25): SEQ ID NO: 7526; WAN024BSX; Start 72; Stop 96
cattcatgatttgagtaatccaagg

SEQ ID NO: 470382 - DNA, 25 bp, Artificial
  probe
  misc_feature (1)..(25): SEQ ID NO: 7526; WAN024BSX; Start 71; Stop 95
ccattcatgatttgagtaatccaag

SEQ ID NO: 470383 - DNA, 25 bp, Artificial
  probe
  misc_feature (1)..(25): SEQ ID NO: 7526; WAN024BSX; Start 53; Stop 77
ttcaagatgttttgatgaccattca

SEQ ID NO: 470384 - DNA, 25 bp, Artificial
  probe
  misc_feature (1)..(25): SEQ ID NO: 7526; WAN024BSX; Start 55; Stop 79
caagatgttttgatgaccattcatg

SEQ ID NO: 470385 - DNA, 25 bp, Artificial
  probe
  misc_feature (1)..(25): SEQ ID NO: 7526; WAN024BSX; Start 54; Stop 78
tcaagatgttttgatgaccattcat

SEQ ID NO: 470386 - DNA, 25 bp, Artificial
  probe
  misc_feature (1)..(25): SEQ ID NO: 7526; WAN024BSX; Start 52; Stop 76
gttcaagatgttttgatgaccattc

SEQ ID NO: 470387 - DNA, 25 bp, Artificial
  probe
  misc_feature (1)..(25): SEQ ID NO: 7526; WAN024BSX; Start 63; Stop 87
tttgatgaccattcatgatttgagt

SEQ ID NO: 470388 - DNA, 25 bp, Artificial
  probe
  misc_feature (1)..(25): SEQ ID NO: 7526; WAN024BSX; Start 65; Stop 89
tgatgaccattcatgatttgagtaa

SEQ ID NO: 470389 - DNA, 25 bp, Artificial
  probe
  misc_feature (1)..(25): SEQ ID NO: 7526; WAN024BSX; Start 64; Stop 88
ttgatgaccattcatgatttgagta

SEQ ID NO: 470390 - DNA, 25 bp, Artificial
  probe
  misc_feature (1)..(25): SEQ ID NO: 7526; WAN024BSX; Start 48; Stop 72
tattgttcaagatgttttgatgacc

SEQ ID NO: 470391 - DNA, 25 bp, Artificial
  probe
  misc_feature (1)..(25): SEQ ID NO: 7526; WAN024BSX; Start 67; Stop 91
atgaccattcatgatttgagtaatc

SEQ ID NO: 470392 - DNA, 25 bp, Artificial
  probe
  misc_feature (1)..(25): SEQ ID NO: 7526; WAN024BSX; Start 66; Stop 90
gatgaccattcatgatttgagtaat

SEQ ID NO: 470393 - DNA, 25 bp, Artificial
  probe
  misc_feature (1)..(25): SEQ ID NO: 7526; WAN024BSX; Start 45; Stop 69
tgttattgttcaagatgttttgatg

SEQ ID NO: 470394 - DNA, 25 bp, Artificial
  probe
  misc_feature (1)..(25): SEQ ID NO: 7526; WAN024BSX; Start 77; Stop 101
atgatttgagtaatccaaggtcaaa

SEQ ID NO: 470395 - DNA, 25 bp, Artificial
  probe
  misc_feature (1)..(25): SEQ ID NO: 7526; WAN024BSX; Start 47; Stop 71
ttattgttcaagatgttttgatgac

SEQ ID NO: 470396 - DNA, 25 bp, Artificial
  probe
  misc_feature (1)..(25): SEQ ID NO: 7526; WAN024BSX; Start 46; Stop 70
gttattgttcaagatgttttgatga

SEQ ID NO: 470397 - DNA, 25 bp, Artificial
  probe
  misc_feature (1)..(25): SEQ ID NO: 7526; WAN024BSX; Start 56; Stop 80
aagatgttttgatgaccattcatga

SEQ ID NO: 470398 - DNA, 25 bp, Artificial
  probe
  misc_feature (1)..(25): SEQ ID NO: 7526; WAN024BSX; Start 57; Stop 81
agatgttttgatgaccattcatgat

SEQ ID NO: 470399 - DNA, 25 bp, Artificial
  probe
  misc_feature (1)..(25): SEQ ID NO: 7526; WAN024BSX; Start 60; Stop 84
tgttttgatgaccattcatgatttg

SEQ ID NO: 470400 - DNA, 25 bp, Artificial
  probe
  misc_feature (1)..(25): SEQ ID NO: 7526; WAN024BSX; Start 61; Stop 85
gttttgatgaccattcatgatttga

SEQ ID NO: 470401 - DNA, 25 bp, Artificial
  probe
  misc_feature (1)..(25): SEQ ID NO: 7526; WAN024BSX; Start 58; Stop 82
gatgttttgatgaccattcatgatt

SEQ ID NO: 470402 - DNA, 25 bp, Artificial
  probe
  misc_feature (1)..(25): SEQ ID NO: 7526; WAN024BSX; Start 44; Stop 68
ttgttattgttcaagatgttttgat

SEQ ID NO: 470403 - DNA, 25 bp, Artificial
  probe
  misc_feature (1)..(25): SEQ ID NO: 7526; WAN024BSX; Start 43; Stop 67
cttgttattgttcaagatgttttga

SEQ ID NO: 470404 - DNA, 25 bp, Artificial
  probe
  misc_feature (1)..(25): SEQ ID NO: 7527; WAN024BKM; Start 12; Stop 36
tgactgtttcatcaggaatttcttg

SEQ ID NO: 470405 - DNA, 25 bp, Artificial
  probe
  misc_feature (1)..(25): SEQ ID NO: 7527; WAN024BKM; Start 13; Stop 37
gactgtttcatcaggaatttcttga

SEQ ID NO: 470406 - DNA, 25 bp, Artificial
  probe
  misc_feature (1)..(25): SEQ ID NO: 7527; WAN024BKM; Start 11; Stop 35
ttgactgtttcatcaggaatttctt

SEQ ID NO: 470407 - DNA, 25 bp, Artificial
  probe
  misc_feature (1)..(25): SEQ ID NO: 7527; WAN024BKM; Start 10; Stop 34
tttgactgtttcatcaggaatttct

SEQ ID NO: 470408 - DNA, 25 bp, Artificial
  probe
  misc_feature (1)..(25): SEQ ID NO: 7527; WAN024BKM; Start 14; Stop 38
actgtttcatcaggaatttcttgaa

SEQ ID NO: 470409 - DNA, 25 bp, Artificial
  probe
  misc_feature (1)..(25): SEQ ID NO: 7527; WAN024BKM; Start 9; Stop 33
ttttgactgtttcatcaggaatttc

SEQ ID NO: 470410 - DNA, 25 bp, Artificial
  probe
  misc_feature (1)..(25): SEQ ID NO: 7527; WAN024BKM; Start 39; Stop 63
aaataagtttgaaaccttggttaaa

SEQ ID NO: 470411 - DNA, 25 bp, Artificial
  probe
  misc_feature (1)..(25): SEQ ID NO: 7527; WAN024BKM; Start 40; Stop 64
aataagtttgaaaccttggttaaaa

SEQ ID NO: 470412 - DNA, 25 bp, Artificial
  probe
  misc_feature (1)..(25): SEQ ID NO: 7527; WAN024BKM; Start 38; Stop 62
aaaataagtttgaaaccttggttaa

SEQ ID NO: 470413 - DNA, 25 bp, Artificial
  probe
  misc_feature (1)..(25): SEQ ID NO: 7527; WAN024BKM; Start 15; Stop 39
ctgtttcatcaggaatttcttgaaa

SEQ ID NO: 470414 - DNA, 25 bp, Artificial
  probe
  misc_feature (1)..(25): SEQ ID NO: 7527; WAN024BKM; Start 16; Stop 40
tgtttcatcaggaatttcttgaaaa

SEQ ID NO: 470415 - DNA, 25 bp, Artificial
  probe
  misc_feature (1)..(25): SEQ ID NO: 7528; WAN024BQ5; Start 342; Stop 366
gtcgtctaatgtaatgttgagtgtg

SEQ ID NO: 470416 - DNA, 25 bp, Artificial
  probe
  misc_feature (1)..(25): SEQ ID NO: 7528; WAN024BQ5; Start 341; Stop 365
agtcgtctaatgtaatgttgagtgt

SEQ ID NO: 470417 - DNA, 25 bp, Artificial
  probe
  misc_feature (1)..(25): SEQ ID NO: 7528; WAN024BQ5; Start 340; Stop 364
cagtcgtctaatgtaatgttgagtg

SEQ ID NO: 470418 - DNA, 25 bp, Artificial
  probe
  misc_feature (1)..(25): SEQ ID NO: 7528; WAN024BQ5; Start 343; Stop 367
tcgtctaatgtaatgttgagtgtgt

SEQ ID NO: 470419 - DNA, 25 bp, Artificial
  probe
  misc_feature (1)..(25): SEQ ID NO: 7528; WAN024BQ5; Start 344; Stop 368
cgtctaatgtaatgttgagtgtgtt

SEQ ID NO: 470420 - DNA, 25 bp, Artificial
  probe
  misc_feature (1)..(25): SEQ ID NO: 7528; WAN024BQ5; Start 678; Stop 702
cgttggttctcgttattatacagga

SEQ ID NO: 470421 - DNA, 25 bp, Artificial
  probe
  misc_feature (1)..(25): SEQ ID NO: 7528; WAN024BQ5; Start 404; Stop 428
tatcaggaatacgccaatcaatagc

SEQ ID NO: 470422 - DNA, 25 bp, Artificial
  probe
  misc_feature (1)..(25): SEQ ID NO: 7528; WAN024BQ5; Start 850; Stop 874
ccaatacttcctactccatcaagaa

SEQ ID NO: 470423 - DNA, 25 bp, Artificial
  probe
  misc_feature (1)..(25): SEQ ID NO: 7528; WAN024BQ5; Start 715; Stop 739
caacaccaactattcacaatcgtta

SEQ ID NO: 470424 - DNA, 25 bp, Artificial
  probe
  misc_feature (1)..(25): SEQ ID NO: 7528; WAN024BQ5; Start 717; Stop 741
acaccaactattcacaatcgttatg

SEQ ID NO: 470425 - DNA, 25 bp, Artificial
  probe
  misc_feature (1)..(25): SEQ ID NO: 7528; WAN024BQ5; Start 403; Stop 427
ttatcaggaatacgccaatcaatag

SEQ ID NO: 470426 - DNA, 25 bp, Artificial
  probe
  misc_feature (1)..(25): SEQ ID NO: 7528; WAN024BQ5; Start 998; Stop 1022
ctataacggttctacagaggaatgc

SEQ ID NO: 470427 - DNA, 25 bp, Artificial
  probe
  misc_feature (1)..(25): SEQ ID NO: 7528; WAN024BQ5; Start 997; Stop 1021
tctataacggttctacagaggaatg

SEQ ID NO: 470428 - DNA, 25 bp, Artificial
  probe
  misc_feature (1)..(25): SEQ ID NO: 7528; WAN024BQ5; Start 113; Stop 137
ttatcttgataggagcacttagagc

SEQ ID NO: 470429 - DNA, 25 bp, Artificial
  probe
  misc_feature (1)..(25): SEQ ID NO: 7528; WAN024BQ5; Start 713; Stop 737
aacaacaccaactattcacaatcgt

SEQ ID NO: 470430 - DNA, 25 bp, Artificial
  probe
  misc_feature (1)..(25): SEQ ID NO: 7528; WAN024BQ5; Start 855; Stop 879
acttcctactccatcaagaactatt

SEQ ID NO: 470431 - DNA, 25 bp, Artificial
  probe
  misc_feature (1)..(25): SEQ ID NO: 7528; WAN024BQ5; Start 852; Stop 876
aatacttcctactccatcaagaact

SEQ ID NO: 470432 - DNA, 25 bp, Artificial
  probe
  misc_feature (1)..(25): SEQ ID NO: 7528; WAN024BQ5; Start 851; Stop 875
caatacttcctactccatcaagaac

SEQ ID NO: 470433 - DNA, 25 bp, Artificial
  probe
  misc_feature (1)..(25): SEQ ID NO: 7528; WAN024BQ5; Start 716; Stop 740
aacaccaactattcacaatcgttat

SEQ ID NO: 470434 - DNA, 25 bp, Artificial
  probe
  misc_feature (1)..(25): SEQ ID NO: 7528; WAN024BQ5; Start 996; Stop 1020
ttctataacggttctacagaggaat

SEQ ID NO: 470435 - DNA, 25 bp, Artificial
  probe
  misc_feature (1)..(25): SEQ ID NO: 7528; WAN024BQ5; Start 682; Stop 706
ggttctcgttattatacaggagcat

SEQ ID NO: 470436 - DNA, 25 bp, Artificial
  probe
  misc_feature (1)..(25): SEQ ID NO: 7528; WAN024BQ5; Start 680; Stop 704
ttggttctcgttattatacaggagc

SEQ ID NO: 470437 - DNA, 25 bp, Artificial
  probe
  misc_feature (1)..(25): SEQ ID NO: 7528; WAN024BQ5; Start 847; Stop 871
atgccaatacttcctactccatcaa

SEQ ID NO: 470438 - DNA, 25 bp, Artificial
  probe
  misc_feature (1)..(25): SEQ ID NO: 7528; WAN024BQ5; Start 714; Stop 738
acaacaccaactattcacaatcgtt

SEQ ID NO: 470439 - DNA, 25 bp, Artificial
  probe
  misc_feature (1)..(25): SEQ ID NO: 7528; WAN024BQ5; Start 842; Stop 866
taatcatgccaatacttcctactcc

SEQ ID NO: 470440 - DNA, 25 bp, Artificial
  probe
  misc_feature (1)..(25): SEQ ID NO: 7528; WAN024BQ5; Start 339; Stop 363
acagtcgtctaatgtaatgttgagt

SEQ ID NO: 470441 - DNA, 25 bp, Artificial
  probe
  misc_feature (1)..(25): SEQ ID NO: 7528; WAN024BQ5; Start 718; Stop 742
caccaactattcacaatcgttatgt

SEQ ID NO: 470442 - DNA, 25 bp, Artificial
  probe
  misc_feature (1)..(25): SEQ ID NO: 7528; WAN024BQ5; Start 679; Stop 703
gttggttctcgttattatacaggag

SEQ ID NO: 470443 - DNA, 25 bp, Artificial
  probe
  misc_feature (1)..(25): SEQ ID NO: 7528; WAN024BQ5; Start 334; Stop 358
gttcaacagtcgtctaatgtaatgt

SEQ ID NO: 470444 - DNA, 25 bp, Artificial
  probe
  misc_feature (1)..(25): SEQ ID NO: 7528; WAN024BQ5; Start 854; Stop 878
tacttcctactccatcaagaactat

SEQ ID NO: 470445 - DNA, 25 bp, Artificial
  probe
  misc_feature (1)..(25): SEQ ID NO: 7528; WAN024BQ5; Start 853; Stop 877
atacttcctactccatcaagaacta

SEQ ID NO: 470446 - DNA, 25 bp, Artificial
  probe
  misc_feature (1)..(25): SEQ ID NO: 7528; WAN024BQ5; Start 849; Stop 873
gccaatacttcctactccatcaaga

SEQ ID NO: 470447 - DNA, 25 bp, Artificial
  probe
  misc_feature (1)..(25): SEQ ID NO: 7528; WAN024BQ5; Start 15; Stop 39
tacgatgcttctctcaatgttgata

SEQ ID NO: 470448 - DNA, 25 bp, Artificial
  probe
  misc_feature (1)..(25): SEQ ID NO: 7529; WAN024BG5; Start 200; Stop 224
ttcttatgggcactcttcaatatgt

SEQ ID NO: 470449 - DNA, 25 bp, Artificial
  probe
  misc_feature (1)..(25): SEQ ID NO: 7529; WAN024BG5; Start 198; Stop 222
ccttcttatgggcactcttcaatat

SEQ ID NO: 470450 - DNA, 25 bp, Artificial
  probe
  misc_feature (1)..(25): SEQ ID NO: 7529; WAN024BG5; Start 199; Stop 223
cttcttatgggcactcttcaatatg

SEQ ID NO: 470451 - DNA, 25 bp, Artificial
  probe
  misc_feature (1)..(25): SEQ ID NO: 7529; WAN024BG5; Start 197; Stop 221
accttcttatgggcactcttcaata

SEQ ID NO: 470452 - DNA, 25 bp, Artificial
  probe
  misc_feature (1)..(25): SEQ ID NO: 7529; WAN024BG5; Start 50; Stop 74
aaggaagtaaacaactaactgatgc

SEQ ID NO: 470453 - DNA, 25 bp, Artificial
  probe
  misc_feature (1)..(25): SEQ ID NO: 7529; WAN024BG5; Start 201; Stop 225
tcttatgggcactcttcaatatgtg

SEQ ID NO: 470454 - DNA, 25 bp, Artificial
  probe
  misc_feature (1)..(25): SEQ ID NO: 7529; WAN024BG5; Start 48; Stop 72
tgaaggaagtaaacaactaactgat

SEQ ID NO: 470455 - DNA, 25 bp, Artificial
  probe
  misc_feature (1)..(25): SEQ ID NO: 7529; WAN024BG5; Start 47; Stop 71
atgaaggaagtaaacaactaactga

SEQ ID NO: 470456 - DNA, 25 bp, Artificial
  probe
  misc_feature (1)..(25): SEQ ID NO: 7529; WAN024BG5; Start 196; Stop 220
gaccttcttatgggcactcttcaat

SEQ ID NO: 470457 - DNA, 25 bp, Artificial
  probe
  misc_feature (1)..(25): SEQ ID NO: 7529; WAN024BG5; Start 49; Stop 73
gaaggaagtaaacaactaactgatg

SEQ ID NO: 470458 - DNA, 25 bp, Artificial
  probe
  misc_feature (1)..(25): SEQ ID NO: 7529; WAN024BG5; Start 184; Stop 208
ttaagcctagaagaccttcttatgg

SEQ ID NO: 470459 - DNA, 25 bp, Artificial
  probe
  misc_feature (1)..(25): SEQ ID NO: 7529; WAN024BG5; Start 60; Stop 84
acaactaactgatgcacgatttaaa

SEQ ID NO: 470460 - DNA, 25 bp, Artificial
  probe
  misc_feature (1)..(25): SEQ ID NO: 7529; WAN024BG5; Start 52; Stop 76
ggaagtaaacaactaactgatgcac

SEQ ID NO: 470461 - DNA, 25 bp, Artificial
  probe
  misc_feature (1)..(25): SEQ ID NO: 7529; WAN024BG5; Start 51; Stop 75
aggaagtaaacaactaactgatgca

SEQ ID NO: 470462 - DNA, 25 bp, Artificial
  probe
  misc_feature (1)..(25): SEQ ID NO: 7529; WAN024BG5; Start 53; Stop 77
gaagtaaacaactaactgatgcacg

SEQ ID NO: 470463 - DNA, 25 bp, Artificial
  probe
  misc_feature (1)..(25): SEQ ID NO: 7529; WAN024BG5; Start 46; Stop 70
tatgaaggaagtaaacaactaactg

SEQ ID NO: 470464 - DNA, 25 bp, Artificial
  probe
  misc_feature (1)..(25): SEQ ID NO: 7529; WAN024BG5; Start 195; Stop 219
agaccttcttatgggcactcttcaa

SEQ ID NO: 470465 - DNA, 25 bp, Artificial
  probe
  misc_feature (1)..(25): SEQ ID NO: 7529; WAN024BG5; Start 75; Stop 99
acgatttaaatgtcttgttggtgtt

SEQ ID NO: 470466 - DNA, 25 bp, Artificial
  probe
  misc_feature (1)..(25): SEQ ID NO: 7529; WAN024BG5; Start 70; Stop 94
gatgcacgatttaaatgtcttgttg

SEQ ID NO: 470467 - DNA, 25 bp, Artificial
  probe
  misc_feature (1)..(25): SEQ ID NO: 7529; WAN024BG5; Start 69; Stop 93
tgatgcacgatttaaatgtcttgtt

SEQ ID NO: 470468 - DNA, 25 bp, Artificial
  probe
  misc_feature (1)..(25): SEQ ID NO: 7529; WAN024BG5; Start 66; Stop 90
aactgatgcacgatttaaatgtctt

SEQ ID NO: 470469 - DNA, 25 bp, Artificial
  probe
  misc_feature (1)..(25): SEQ ID NO: 7529; WAN024BG5; Start 185; Stop 209
taagcctagaagaccttcttatggg

SEQ ID NO: 470470 - DNA, 25 bp, Artificial
  probe
  misc_feature (1)..(25): SEQ ID NO: 7529; WAN024BG5; Start 68; Stop 92
ctgatgcacgatttaaatgtcttgt

SEQ ID NO: 470471 - DNA, 25 bp, Artificial
  probe
  misc_feature (1)..(25): SEQ ID NO: 7529; WAN024BG5; Start 67; Stop 91
actgatgcacgatttaaatgtcttg

SEQ ID NO: 470472 - DNA, 25 bp, Artificial
  probe
  misc_feature (1)..(25): SEQ ID NO: 7529; WAN024BG5; Start 76; Stop 100
cgatttaaatgtcttgttggtgttc

SEQ ID NO: 470473 - DNA, 25 bp, Artificial
  probe
  misc_feature (1)..(25): SEQ ID NO: 7529; WAN024BG5; Start 63; Stop 87
actaactgatgcacgatttaaatgt

SEQ ID NO: 470474 - DNA, 25 bp, Artificial
  probe
  misc_feature (1)..(25): SEQ ID NO: 7529; WAN024BG5; Start 34; Stop 58
agttctatgaattatgaaggaagta

SEQ ID NO: 470475 - DNA, 25 bp, Artificial
  probe
  misc_feature (1)..(25): SEQ ID NO: 7529; WAN024BG5; Start 33; Stop 57
tagttctatgaattatgaaggaagt

SEQ ID NO: 470476 - DNA, 25 bp, Artificial
  probe
  misc_feature (1)..(25): SEQ ID NO: 7529; WAN024BG5; Start 71; Stop 95
atgcacgatttaaatgtcttgttgg

SEQ ID NO: 470477 - DNA, 25 bp, Artificial
  probe
  misc_feature (1)..(25): SEQ ID NO: 7529; WAN024BG5; Start 65; Stop 89
taactgatgcacgatttaaatgtct

SEQ ID NO: 470478 - DNA, 25 bp, Artificial
  probe
  misc_feature (1)..(25): SEQ ID NO: 7529; WAN024BG5; Start 64; Stop 88
ctaactgatgcacgatttaaatgtc

SEQ ID NO: 470479 - DNA, 25 bp, Artificial
  probe
  misc_feature (1)..(25): SEQ ID NO: 7529; WAN024BG5; Start 45; Stop 69
ttatgaaggaagtaaacaactaact

SEQ ID NO: 470480 - DNA, 25 bp, Artificial
  probe
  misc_feature (1)..(25): SEQ ID NO: 7529; WAN024BG5; Start 77; Stop 101
gatttaaatgtcttgttggtgttca

SEQ ID NO: 470481 - DNA, 25 bp, Artificial
  probe
  misc_feature (1)..(25): SEQ ID NO: 7530; WAN024CJU; Start 336; Stop 360
aagtcagcatatccttgtcacaatg

SEQ ID NO: 470482 - DNA, 25 bp, Artificial
  probe
  misc_feature (1)..(25): SEQ ID NO: 7530; WAN024CJU; Start 375; Stop 399
aaatactaacgatgatgggaaaggt

SEQ ID NO: 470483 - DNA, 25 bp, Artificial
  probe
  misc_feature (1)..(25): SEQ ID NO: 7530; WAN024CJU; Start 376; Stop 400
aatactaacgatgatgggaaaggtt

SEQ ID NO: 470484 - DNA, 25 bp, Artificial
  probe
  misc_feature (1)..(25): SEQ ID NO: 7530; WAN024CJU; Start 203; Stop 227
cactcagataccacagttgtgataa

SEQ ID NO: 470485 - DNA, 25 bp, Artificial
  probe
  misc_feature (1)..(25): SEQ ID NO: 7530; WAN024CJU; Start 377; Stop 401
atactaacgatgatgggaaaggttg

SEQ ID NO: 470486 - DNA, 25 bp, Artificial
  probe
  misc_feature (1)..(25): SEQ ID NO: 7530; WAN024CJU; Start 162; Stop 186
actgaatcatataaacaccaagacc

SEQ ID NO: 470487 - DNA, 25 bp, Artificial
  probe
  misc_feature (1)..(25): SEQ ID NO: 7530; WAN024CJU; Start 98; Stop 122
agactgataatcgacaccagaataa

SEQ ID NO: 470488 - DNA, 25 bp, Artificial
  probe
  misc_feature (1)..(25): SEQ ID NO: 7530; WAN024CJU; Start 97; Stop 121
aagactgataatcgacaccagaata

SEQ ID NO: 470489 - DNA, 25 bp, Artificial
  probe
  misc_feature (1)..(25): SEQ ID NO: 7530; WAN024CJU; Start 163; Stop 187
ctgaatcatataaacaccaagacct

SEQ ID NO: 470490 - DNA, 25 bp, Artificial
  probe
  misc_feature (1)..(25): SEQ ID NO: 7530; WAN024CJU; Start 328; Stop 352
actaaacaaagtcagcatatccttg

SEQ ID NO: 470491 - DNA, 25 bp, Artificial
  probe
  misc_feature (1)..(25): SEQ ID NO: 7530; WAN024CJU; Start 168; Stop 192
tcatataaacaccaagaccttcaaa

SEQ ID NO: 470492 - DNA, 25 bp, Artificial
  probe
  misc_feature (1)..(25): SEQ ID NO: 7530; WAN024CJU; Start 384; Stop 408
cgatgatgggaaaggttgttgttaa

SEQ ID NO: 470493 - DNA, 25 bp, Artificial
  probe
  misc_feature (1)..(25): SEQ ID NO: 7530; WAN024CJU; Start 167; Stop 191
atcatataaacaccaagaccttcaa

SEQ ID NO: 470494 - DNA, 25 bp, Artificial
  probe
  misc_feature (1)..(25): SEQ ID NO: 7530; WAN024CJU; Start 166; Stop 190
aatcatataaacaccaagaccttca

SEQ ID NO: 470495 - DNA, 25 bp, Artificial
  probe
  misc_feature (1)..(25): SEQ ID NO: 7530; WAN024CJU; Start 164; Stop 188
tgaatcatataaacaccaagacctt

SEQ ID NO: 470496 - DNA, 25 bp, Artificial
  probe
  misc_feature (1)..(25): SEQ ID NO: 7530; WAN024CJU; Start 99; Stop 123
gactgataatcgacaccagaataat

SEQ ID NO: 470497 - DNA, 25 bp, Artificial
  probe
  misc_feature (1)..(25): SEQ ID NO: 7530; WAN024CJU; Start 378; Stop 402
tactaacgatgatgggaaaggttgt

SEQ ID NO: 470498 - DNA, 25 bp, Artificial
  probe
  misc_feature (1)..(25): SEQ ID NO: 7530; WAN024CJU; Start 107; Stop 131
atcgacaccagaataataatggcaa

SEQ ID NO: 470499 - DNA, 25 bp, Artificial
  probe
  misc_feature (1)..(25): SEQ ID NO: 7530; WAN024CJU; Start 106; Stop 130
aatcgacaccagaataataatggca

SEQ ID NO: 470500 - DNA, 25 bp, Artificial
  probe
  misc_feature (1)..(25): SEQ ID NO: 7530; WAN024CJU; Start 202; Stop 226
ccactcagataccacagttgtgata

SEQ ID NO: 470501 - DNA, 25 bp, Artificial
  probe
  misc_feature (1)..(25): SEQ ID NO: 7530; WAN024CJU; Start 123; Stop 147
taatggcaaacatggtatcatactg

SEQ ID NO: 470502 - DNA, 25 bp, Artificial
  probe
  misc_feature (1)..(25): SEQ ID NO: 7530; WAN024CJU; Start 335; Stop 359
aaagtcagcatatccttgtcacaat

SEQ ID NO: 470503 - DNA, 25 bp, Artificial
  probe
  misc_feature (1)..(25): SEQ ID NO: 7530; WAN024CJU; Start 105; Stop 129
taatcgacaccagaataataatggc

SEQ ID NO: 470504 - DNA, 25 bp, Artificial
  probe
  misc_feature (1)..(25): SEQ ID NO: 7530; WAN024CJU; Start 128; Stop 152
gcaaacatggtatcatactgaaaca

SEQ ID NO: 470505 - DNA, 25 bp, Artificial
  probe
  misc_feature (1)..(25): SEQ ID NO: 7530; WAN024CJU; Start 161; Stop 185
gactgaatcatataaacaccaagac

SEQ ID NO: 470506 - DNA, 25 bp, Artificial
  probe
  misc_feature (1)..(25): SEQ ID NO: 7530; WAN024CJU; Start 127; Stop 151
ggcaaacatggtatcatactgaaac

SEQ ID NO: 470507 - DNA, 25 bp, Artificial
  probe
  misc_feature (1)..(25): SEQ ID NO: 7530; WAN024CJU; Start 125; Stop 149
atggcaaacatggtatcatactgaa

SEQ ID NO: 470508 - DNA, 25 bp, Artificial
  probe
  misc_feature (1)..(25): SEQ ID NO: 7530; WAN024CJU; Start 124; Stop 148
aatggcaaacatggtatcatactga

SEQ ID NO: 470509 - DNA, 25 bp, Artificial
  probe
  misc_feature (1)..(25): SEQ ID NO: 7530; WAN024CJU; Start 126; Stop 150
tggcaaacatggtatcatactgaaa

SEQ ID NO: 470510 - DNA, 25 bp, Artificial
  probe
  misc_feature (1)..(25): SEQ ID NO: 7530; WAN024CJU; Start 380; Stop 404
ctaacgatgatgggaaaggttgttg

SEQ ID NO: 470511 - DNA, 25 bp, Artificial
  probe
  misc_feature (1)..(25): SEQ ID NO: 7530; WAN024CJU; Start 160; Stop 184
agactgaatcatataaacaccaaga

SEQ ID NO: 470512 - DNA, 25 bp, Artificial
  probe
  misc_feature (1)..(25): SEQ ID NO: 7530; WAN024CJU; Start 67; Stop 91
ttcactgatatcgaccagcttcata

SEQ ID NO: 470513 - DNA, 25 bp, Artificial
  probe
  misc_feature (1)..(25): SEQ ID NO: 7530; WAN024CJU; Start 165; Stop 189
gaatcatataaacaccaagaccttc

SEQ ID NO: 470514 - DNA, 25 bp, Artificial
  probe
  misc_feature (1)..(25): SEQ ID NO: 7531; WAN024B7C; Start 54; Stop 78
actatacaataagagaacgactcaa

SEQ ID NO: 470515 - DNA, 25 bp, Artificial
  probe
  misc_feature (1)..(25): SEQ ID NO: 7531; WAN024B7C; Start 51; Stop 75
tctactatacaataagagaacgact

SEQ ID NO: 470516 - DNA, 25 bp, Artificial
  probe
  misc_feature (1)..(25): SEQ ID NO: 7531; WAN024B7C; Start 53; Stop 77
tactatacaataagagaacgactca

SEQ ID NO: 470517 - DNA, 25 bp, Artificial
  probe
  misc_feature (1)..(25): SEQ ID NO: 7531; WAN024B7C; Start 52; Stop 76
ctactatacaataagagaacgactc

SEQ ID NO: 470518 - DNA, 25 bp, Artificial
  probe
  misc_feature (1)..(25): SEQ ID NO: 7531; WAN024B7C; Start 50; Stop 74
atctactatacaataagagaacgac

SEQ ID NO: 470519 - DNA, 25 bp, Artificial
  probe
  misc_feature (1)..(25): SEQ ID NO: 7531; WAN024B7C; Start 55; Stop 79
ctatacaataagagaacgactcaaa

SEQ ID NO: 470520 - DNA, 25 bp, Artificial
  probe
  misc_feature (1)..(25): SEQ ID NO: 7531; WAN024B7C; Start 48; Stop 72
caatctactatacaataagagaacg

SEQ ID NO: 470521 - DNA, 25 bp, Artificial
  probe
  misc_feature (1)..(25): SEQ ID NO: 7531; WAN024B7C; Start 10; Stop 34
aacaatgttttagaagtagaagtgt

SEQ ID NO: 470522 - DNA, 25 bp, Artificial
  probe
  misc_feature (1)..(25): SEQ ID NO: 7531; WAN024B7C; Start 56; Stop 80
tatacaataagagaacgactcaaaa

SEQ ID NO: 470523 - DNA, 25 bp, Artificial
  probe
  misc_feature (1)..(25): SEQ ID NO: 7531; WAN024B7C; Start 21; Stop 45
agaagtagaagtgtactattctagt

SEQ ID NO: 470524 - DNA, 25 bp, Artificial
  probe
  misc_feature (1)..(25): SEQ ID NO: 7531; WAN024B7C; Start 12; Stop 36
caatgttttagaagtagaagtgtac

SEQ ID NO: 470525 - DNA, 25 bp, Artificial
  probe
  misc_feature (1)..(25): SEQ ID NO: 7531; WAN024B7C; Start 11; Stop 35
acaatgttttagaagtagaagtgta

SEQ ID NO: 470526 - DNA, 25 bp, Artificial
  probe
  misc_feature (1)..(25): SEQ ID NO: 7531; WAN024B7C; Start 22; Stop 46
gaagtagaagtgtactattctagtt

SEQ ID NO: 470527 - DNA, 25 bp, Artificial
  probe
  misc_feature (1)..(25): SEQ ID NO: 7531; WAN024B7C; Start 13; Stop 37
aatgttttagaagtagaagtgtact

SEQ ID NO: 470528 - DNA, 25 bp, Artificial
  probe
  misc_feature (1)..(25): SEQ ID NO: 7531; WAN024B7C; Start 9; Stop 33
taacaatgttttagaagtagaagtg

SEQ ID NO: 470529 - DNA, 25 bp, Artificial
  probe
  misc_feature (1)..(25): SEQ ID NO: 7531; WAN024B7C; Start 25; Stop 49
gtagaagtgtactattctagtttca

SEQ ID NO: 470530 - DNA, 25 bp, Artificial
  probe
  misc_feature (1)..(25): SEQ ID NO: 7531; WAN024B7C; Start 24; Stop 48
agtagaagtgtactattctagtttc

SEQ ID NO: 470531 - DNA, 25 bp, Artificial
  probe
  misc_feature (1)..(25): SEQ ID NO: 7531; WAN024B7C; Start 8; Stop 32
ctaacaatgttttagaagtagaagt

SEQ ID NO: 470532 - DNA, 25 bp, Artificial
  probe
  misc_feature (1)..(25): SEQ ID NO: 7531; WAN024B7C; Start 15; Stop 39
tgttttagaagtagaagtgtactat

SEQ ID NO: 470533 - DNA, 25 bp, Artificial
  probe
  misc_feature (1)..(25): SEQ ID NO: 7531; WAN024B7C; Start 14; Stop 38
atgttttagaagtagaagtgtacta

SEQ ID NO: 470534 - DNA, 25 bp, Artificial
  probe
  misc_feature (1)..(25): SEQ ID NO: 7532; WAN024COH; Start 240; Stop 264
tgatggattctttcttagtttggct

SEQ ID NO: 470535 - DNA, 25 bp, Artificial
  probe
  misc_feature (1)..(25): SEQ ID NO: 7532; WAN024COH; Start 239; Stop 263
atgatggattctttcttagtttggc

SEQ ID NO: 470536 - DNA, 25 bp, Artificial
  probe
  misc_feature (1)..(25): SEQ ID NO: 7532; WAN024COH; Start 245; Stop 269
gattctttcttagtttggcttcgtc

SEQ ID NO: 470537 - DNA, 25 bp, Artificial
  probe
  misc_feature (1)..(25): SEQ ID NO: 7532; WAN024COH; Start 242; Stop 266
atggattctttcttagtttggcttc

SEQ ID NO: 470538 - DNA, 25 bp, Artificial
  probe
  misc_feature (1)..(25): SEQ ID NO: 7532; WAN024COH; Start 241; Stop 265
gatggattctttcttagtttggctt

SEQ ID NO: 470539 - DNA, 25 bp, Artificial
  probe
  misc_feature (1)..(25): SEQ ID NO: 7532; WAN024COH; Start 92; Stop 116
acaatcccttcaacctcattcattt

SEQ ID NO: 470540 - DNA, 25 bp, Artificial
  probe
  misc_feature (1)..(25): SEQ ID NO: 7532; WAN024COH; Start 91; Stop 115
aacaatcccttcaacctcattcatt

SEQ ID NO: 470541 - DNA, 25 bp, Artificial
  probe
  misc_feature (1)..(25): SEQ ID NO: 7532; WAN024COH; Start 93; Stop 117
caatcccttcaacctcattcatttg

SEQ ID NO: 470542 - DNA, 25 bp, Artificial
  probe
  misc_feature (1)..(25): SEQ ID NO: 7532; WAN024COH; Start 246; Stop 270
attctttcttagtttggcttcgtcc

SEQ ID NO: 470543 - DNA, 25 bp, Artificial
  probe
  misc_feature (1)..(25): SEQ ID NO: 7532; WAN024COH; Start 244; Stop 268
ggattctttcttagtttggcttcgt

SEQ ID NO: 470544 - DNA, 25 bp, Artificial
  probe
  misc_feature (1)..(25): SEQ ID NO: 7532; WAN024COH; Start 243; Stop 267
tggattctttcttagtttggcttcg

SEQ ID NO: 470545 - DNA, 25 bp, Artificial
  probe
  misc_feature (1)..(25): SEQ ID NO: 7532; WAN024COH; Start 90; Stop 114
caacaatcccttcaacctcattcat

SEQ ID NO: 470546 - DNA, 25 bp, Artificial
  probe
  misc_feature (1)..(25): SEQ ID NO: 7532; WAN024COH; Start 88; Stop 112
ctcaacaatcccttcaacctcattc

SEQ ID NO: 470547 - DNA, 25 bp, Artificial
  probe
  misc_feature (1)..(25): SEQ ID NO: 7532; WAN024COH; Start 82; Stop 106
gaaagactcaacaatcccttcaacc

SEQ ID NO: 470548 - DNA, 25 bp, Artificial
  probe
  misc_feature (1)..(25): SEQ ID NO: 7532; WAN024COH; Start 89; Stop 113
tcaacaatcccttcaacctcattca

SEQ ID NO: 470549 - DNA, 25 bp, Artificial
  probe
  misc_feature (1)..(25): SEQ ID NO: 7532; WAN024COH; Start 87; Stop 111
actcaacaatcccttcaacctcatt

SEQ ID NO: 470550 - DNA, 25 bp, Artificial
  probe
  misc_feature (1)..(25): SEQ ID NO: 7532; WAN024COH; Start 27; Stop 51
catcaccataatcaatcgcctttcc

SEQ ID NO: 470551 - DNA, 25 bp, Artificial
  probe
  misc_feature (1)..(25): SEQ ID NO: 7532; WAN024COH; Start 94; Stop 118
aatcccttcaacctcattcatttgc

SEQ ID NO: 470552 - DNA, 25 bp, Artificial
  probe
  misc_feature (1)..(25): SEQ ID NO: 7532; WAN024COH; Start 83; Stop 107
aaagactcaacaatcccttcaacct

SEQ ID NO: 470553 - DNA, 25 bp, Artificial
  probe
  misc_feature (1)..(25): SEQ ID NO: 7532; WAN024COH; Start 103; Stop 127
aacctcattcatttgctcctgacta

SEQ ID NO: 470554 - DNA, 25 bp, Artificial
  probe
  misc_feature (1)..(25): SEQ ID NO: 7532; WAN024COH; Start 238; Stop 262
aatgatggattctttcttagtttgg

SEQ ID NO: 470555 - DNA, 25 bp, Artificial
  probe
  misc_feature (1)..(25): SEQ ID NO: 7532; WAN024COH; Start 99; Stop 123
cttcaacctcattcatttgctcctg

SEQ ID NO: 470556 - DNA, 25 bp, Artificial
  probe
  misc_feature (1)..(25): SEQ ID NO: 7532; WAN024COH; Start 86; Stop 110
gactcaacaatcccttcaacctcat

SEQ ID NO: 470557 - DNA, 25 bp, Artificial
  probe
  misc_feature (1)..(25): SEQ ID NO: 7532; WAN024COH; Start 34; Stop 58
ataatcaatcgcctttcccagattt

SEQ ID NO: 470558 - DNA, 25 bp, Artificial
  probe
  misc_feature (1)..(25): SEQ ID NO: 7532; WAN024COH; Start 84; Stop 108
aagactcaacaatcccttcaacctc

SEQ ID NO: 470559 - DNA, 25 bp, Artificial
  probe
  misc_feature (1)..(25): SEQ ID NO: 7532; WAN024COH; Start 26; Stop 50
gcatcaccataatcaatcgcctttc

SEQ ID NO: 470560 - DNA, 25 bp, Artificial
  probe
  misc_feature (1)..(25): SEQ ID NO: 7532; WAN024COH; Start 104; Stop 128
acctcattcatttgctcctgactag

SEQ ID NO: 470561 - DNA, 25 bp, Artificial
  probe
  misc_feature (1)..(25): SEQ ID NO: 7532; WAN024COH; Start 33; Stop 57
cataatcaatcgcctttcccagatt

SEQ ID NO: 470562 - DNA, 25 bp, Artificial
  probe
  misc_feature (1)..(25): SEQ ID NO: 7532; WAN024COH; Start 32; Stop 56
ccataatcaatcgcctttcccagat

SEQ ID NO: 470563 - DNA, 25 bp, Artificial
  probe
  misc_feature (1)..(25): SEQ ID NO: 7532; WAN024COH; Start 100; Stop 124
ttcaacctcattcatttgctcctga

SEQ ID NO: 470564 - DNA, 25 bp, Artificial
  probe
  misc_feature (1)..(25): SEQ ID NO: 7532; WAN024COH; Start 95; Stop 119
atcccttcaacctcattcatttgct

SEQ ID NO: 470565 - DNA, 25 bp, Artificial
  probe
  misc_feature (1)..(25): SEQ ID NO: 7532; WAN024COH; Start 247; Stop 271
ttctttcttagtttggcttcgtccc

SEQ ID NO: 470566 - DNA, 25 bp, Artificial
  probe
  misc_feature (1)..(25): SEQ ID NO: 7532; WAN024COH; Start 28; Stop 52
atcaccataatcaatcgcctttccc

SEQ ID NO: 470567 - DNA, 25 bp, Artificial
  probe
  misc_feature (1)..(25): SEQ ID NO: 7533; WAN024C2P; Start 177; Stop 201
gaactacaagcaaccaatcctacta

SEQ ID NO: 470568 - DNA, 25 bp, Artificial
  probe
  misc_feature (1)..(25): SEQ ID NO: 7533; WAN024C2P; Start 178; Stop 202
aactacaagcaaccaatcctactac

SEQ ID NO: 470569 - DNA, 25 bp, Artificial
  probe
  misc_feature (1)..(25): SEQ ID NO: 7533; WAN024C2P; Start 180; Stop 204
ctacaagcaaccaatcctactacag

SEQ ID NO: 470570 - DNA, 25 bp, Artificial
  probe
  misc_feature (1)..(25): SEQ ID NO: 7533; WAN024C2P; Start 179; Stop 203
actacaagcaaccaatcctactaca

SEQ ID NO: 470571 - DNA, 25 bp, Artificial
  probe
  misc_feature (1)..(25): SEQ ID NO: 7533; WAN024C2P; Start 23; Stop 47
tgccattaacagtgtacggtataac

SEQ ID NO: 470572 - DNA, 25 bp, Artificial
  probe
  misc_feature (1)..(25): SEQ ID NO: 7533; WAN024C2P; Start 90; Stop 114
atacgatctccagttccttgaagaa

SEQ ID NO: 470573 - DNA, 25 bp, Artificial
  probe
  misc_feature (1)..(25): SEQ ID NO: 7533; WAN024C2P; Start 186; Stop 210
gcaaccaatcctactacagctatta

SEQ ID NO: 470574 - DNA, 25 bp, Artificial
  probe
  misc_feature (1)..(25): SEQ ID NO: 7533; WAN024C2P; Start 89; Stop 113
gatacgatctccagttccttgaaga

SEQ ID NO: 470575 - DNA, 25 bp, Artificial
  probe
  misc_feature (1)..(25): SEQ ID NO: 7533; WAN024C2P; Start 24; Stop 48
gccattaacagtgtacggtataaca

SEQ ID NO: 470576 - DNA, 25 bp, Artificial
  probe
  misc_feature (1)..(25): SEQ ID NO: 7533; WAN024C2P; Start 181; Stop 205
tacaagcaaccaatcctactacagc

SEQ ID NO: 470577 - DNA, 25 bp, Artificial
  probe
  misc_feature (1)..(25): SEQ ID NO: 7533; WAN024C2P; Start 22; Stop 46
ctgccattaacagtgtacggtataa

SEQ ID NO: 470578 - DNA, 25 bp, Artificial
  probe
  misc_feature (1)..(25): SEQ ID NO: 7533; WAN024C2P; Start 25; Stop 49
ccattaacagtgtacggtataacaa

SEQ ID NO: 470579 - DNA, 25 bp, Artificial
  probe
  misc_feature (1)..(25): SEQ ID NO: 7533; WAN024C2P; Start 21; Stop 45
tctgccattaacagtgtacggtata

SEQ ID NO: 470580 - DNA, 25 bp, Artificial
  probe
  misc_feature (1)..(25): SEQ ID NO: 7533; WAN024C2P; Start 176; Stop 200
cgaactacaagcaaccaatcctact

SEQ ID NO: 470581 - DNA, 25 bp, Artificial
  probe
  misc_feature (1)..(25): SEQ ID NO: 7533; WAN024C2P; Start 16; Stop 40
ttgaatctgccattaacagtgtacg

SEQ ID NO: 470582 - DNA, 25 bp, Artificial
  probe
  misc_feature (1)..(25): SEQ ID NO: 7533; WAN024C2P; Start 20; Stop 44
atctgccattaacagtgtacggtat

SEQ ID NO: 470583 - DNA, 25 bp, Artificial
  probe
  misc_feature (1)..(25): SEQ ID NO: 7533; WAN024C2P; Start 187; Stop 211
caaccaatcctactacagctattaa

SEQ ID NO: 470584 - DNA, 25 bp, Artificial
  probe
  misc_feature (1)..(25): SEQ ID NO: 7533; WAN024C2P; Start 19; Stop 43
aatctgccattaacagtgtacggta

SEQ ID NO: 470585 - DNA, 25 bp, Artificial
  probe
  misc_feature (1)..(25): SEQ ID NO: 7533; WAN024C2P; Start 175; Stop 199
ccgaactacaagcaaccaatcctac

SEQ ID NO: 470586 - DNA, 25 bp, Artificial
  probe
  misc_feature (1)..(25): SEQ ID NO: 7533; WAN024C2P; Start 88; Stop 112
ggatacgatctccagttccttgaag

SEQ ID NO: 470587 - DNA, 25 bp, Artificial
  probe
  misc_feature (1)..(25): SEQ ID NO: 7533; WAN024C2P; Start 91; Stop 115
tacgatctccagttccttgaagaaa

SEQ ID NO: 470588 - DNA, 25 bp, Artificial
  probe
  misc_feature (1)..(25): SEQ ID NO: 7533; WAN024C2P; Start 15; Stop 39
tttgaatctgccattaacagtgtac

SEQ ID NO: 470589 - DNA, 25 bp, Artificial
  probe
  misc_feature (1)..(25): SEQ ID NO: 7533; WAN024C2P; Start 31; Stop 55
acagtgtacggtataacaaatatgg

SEQ ID NO: 470590 - DNA, 25 bp, Artificial
  probe
  misc_feature (1)..(25): SEQ ID NO: 7533; WAN024C2P; Start 32; Stop 56
cagtgtacggtataacaaatatgga

SEQ ID NO: 470591 - DNA, 25 bp, Artificial
  probe
  misc_feature (1)..(25): SEQ ID NO: 7533; WAN024C2P; Start 18; Stop 42
gaatctgccattaacagtgtacggt

SEQ ID NO: 470592 - DNA, 25 bp, Artificial
  probe
  misc_feature (1)..(25): SEQ ID NO: 7533; WAN024C2P; Start 17; Stop 41
tgaatctgccattaacagtgtacgg

SEQ ID NO: 470593 - DNA, 25 bp, Artificial
  probe
  misc_feature (1)..(25): SEQ ID NO: 7533; WAN024C2P; Start 185; Stop 209
agcaaccaatcctactacagctatt

SEQ ID NO: 470594 - DNA, 25 bp, Artificial
  probe
  misc_feature (1)..(25): SEQ ID NO: 7533; WAN024C2P; Start 184; Stop 208
aagcaaccaatcctactacagctat

SEQ ID NO: 470595 - DNA, 25 bp, Artificial
  probe
  misc_feature (1)..(25): SEQ ID NO: 7533; WAN024C2P; Start 34; Stop 58
gtgtacggtataacaaatatggaac

SEQ ID NO: 470596 - DNA, 25 bp, Artificial
  probe
  misc_feature (1)..(25): SEQ ID NO: 7533; WAN024C2P; Start 35; Stop 59
tgtacggtataacaaatatggaact

SEQ ID NO: 470597 - DNA, 25 bp, Artificial
  probe
  misc_feature (1)..(25): SEQ ID NO: 7533; WAN024C2P; Start 33; Stop 57
agtgtacggtataacaaatatggaa

SEQ ID NO: 470598 - DNA, 25 bp, Artificial
  probe
  misc_feature (1)..(25): SEQ ID NO: 7533; WAN024C2P; Start 183; Stop 207
caagcaaccaatcctactacagcta

SEQ ID NO: 470599 - DNA, 25 bp, Artificial
  probe
  misc_feature (1)..(25): SEQ ID NO: 7533; WAN024C2P; Start 26; Stop 50
cattaacagtgtacggtataacaaa

SEQ ID NO: 470600 - DNA, 25 bp, Artificial
  probe
  misc_feature (1)..(25): SEQ ID NO: 7534; WAN024CR9; Start 94; Stop 118
atgacgaagaatgagacggtattca

SEQ ID NO: 470601 - DNA, 25 bp, Artificial
  probe
  misc_feature (1)..(25): SEQ ID NO: 7534; WAN024CR9; Start 93; Stop 117
catgacgaagaatgagacggtattc

SEQ ID NO: 470602 - DNA, 25 bp, Artificial
  probe
  misc_feature (1)..(25): SEQ ID NO: 7534; WAN024CR9; Start 95; Stop 119
tgacgaagaatgagacggtattcag

SEQ ID NO: 470603 - DNA, 25 bp, Artificial
  probe
  misc_feature (1)..(25): SEQ ID NO: 7534; WAN024CR9; Start 96; Stop 120
gacgaagaatgagacggtattcagc

SEQ ID NO: 470604 - DNA, 25 bp, Artificial
  probe
  misc_feature (1)..(25): SEQ ID NO: 7534; WAN024CR9; Start 99; Stop 123
gaagaatgagacggtattcagcacg

SEQ ID NO: 470605 - DNA, 25 bp, Artificial
  probe
  misc_feature (1)..(25): SEQ ID NO: 7534; WAN024CR9; Start 98; Stop 122
cgaagaatgagacggtattcagcac

SEQ ID NO: 470606 - DNA, 25 bp, Artificial
  probe
  misc_feature (1)..(25): SEQ ID NO: 7534; WAN024CR9; Start 113; Stop 137
tattcagcacgactggtcaagagac

SEQ ID NO: 470607 - DNA, 25 bp, Artificial
  probe
  misc_feature (1)..(25): SEQ ID NO: 7534; WAN024CR9; Start 112; Stop 136
gtattcagcacgactggtcaagaga

SEQ ID NO: 470608 - DNA, 25 bp, Artificial
  probe
  misc_feature (1)..(25): SEQ ID NO: 7534; WAN024CR9; Start 100; Stop 124
aagaatgagacggtattcagcacga

SEQ ID NO: 470609 - DNA, 25 bp, Artificial
  probe
  misc_feature (1)..(25): SEQ ID NO: 7534; WAN024CR9; Start 97; Stop 121
acgaagaatgagacggtattcagca

SEQ ID NO: 470610 - DNA, 25 bp, Artificial
  probe
  misc_feature (1)..(25): SEQ ID NO: 7534; WAN024CR9; Start 176; Stop 200
atcatcaccccgatataaccatcac

SEQ ID NO: 470611 - DNA, 25 bp, Artificial
  probe
  misc_feature (1)..(25): SEQ ID NO: 7534; WAN024CR9; Start 175; Stop 199
gatcatcaccccgatataaccatca

SEQ ID NO: 470612 - DNA, 25 bp, Artificial
  probe
  misc_feature (1)..(25): SEQ ID NO: 7534; WAN024CR9; Start 131; Stop 155
aagagacggtagggttcaatggttc

SEQ ID NO: 470613 - DNA, 25 bp, Artificial
  probe
  misc_feature (1)..(25): SEQ ID NO: 7534; WAN024CR9; Start 211; Stop 235
aatcaattcaggcttgccttggatt

SEQ ID NO: 470614 - DNA, 25 bp, Artificial
  probe
  misc_feature (1)..(25): SEQ ID NO: 7534; WAN024CR9; Start 178; Stop 202
catcaccccgatataaccatcactg

SEQ ID NO: 470615 - DNA, 25 bp, Artificial
  probe
  misc_feature (1)..(25): SEQ ID NO: 7534; WAN024CR9; Start 177; Stop 201
tcatcaccccgatataaccatcact

SEQ ID NO: 470616 - DNA, 25 bp, Artificial
  probe
  misc_feature (1)..(25): SEQ ID NO: 7534; WAN024CR9; Start 130; Stop 154
caagagacggtagggttcaatggtt

SEQ ID NO: 470617 - DNA, 25 bp, Artificial
  probe
  misc_feature (1)..(25): SEQ ID NO: 7534; WAN024CR9; Start 103; Stop 127
aatgagacggtattcagcacgactg

SEQ ID NO: 470618 - DNA, 25 bp, Artificial
  probe
  misc_feature (1)..(25): SEQ ID NO: 7534; WAN024CR9; Start 102; Stop 126
gaatgagacggtattcagcacgact

SEQ ID NO: 470619 - DNA, 25 bp, Artificial
  probe
  misc_feature (1)..(25): SEQ ID NO: 7534; WAN024CR9; Start 101; Stop 125
agaatgagacggtattcagcacgac

SEQ ID NO: 470620 - DNA, 25 bp, Artificial
  probe
  misc_feature (1)..(25): SEQ ID NO: 7534; WAN024CR9; Start 92; Stop 116
tcatgacgaagaatgagacggtatt

SEQ ID NO: 470621 - DNA, 25 bp, Artificial
  probe
  misc_feature (1)..(25): SEQ ID NO: 7534; WAN024CR9; Start 7; Stop 31
tttcttgatttcaaaacgagcccag

SEQ ID NO: 470622 - DNA, 25 bp, Artificial
  probe
  misc_feature (1)..(25): SEQ ID NO: 7534; WAN024CR9; Start 174; Stop 198
cgatcatcaccccgatataaccatc

SEQ ID NO: 470623 - DNA, 25 bp, Artificial
  probe
  misc_feature (1)..(25): SEQ ID NO: 7534; WAN024CR9; Start 187; Stop 211
gatataaccatcactgcgcttcaaa

SEQ ID NO: 470624 - DNA, 25 bp, Artificial
  probe
  misc_feature (1)..(25): SEQ ID NO: 7534; WAN024CR9; Start 6; Stop 30
ttttcttgatttcaaaacgagccca

SEQ ID NO: 470625 - DNA, 25 bp, Artificial
  probe
  misc_feature (1)..(25): SEQ ID NO: 7534; WAN024CR9; Start 229; Stop 253
ttggattttcagagccgcattgata

SEQ ID NO: 470626 - DNA, 25 bp, Artificial
  probe
  misc_feature (1)..(25): SEQ ID NO: 7534; WAN024CR9; Start 186; Stop 210
cgatataaccatcactgcgcttcaa

SEQ ID NO: 470627 - DNA, 25 bp, Artificial
  probe
  misc_feature (1)..(25): SEQ ID NO: 7534; WAN024CR9; Start 212; Stop 236
atcaattcaggcttgccttggattt

SEQ ID NO: 470628 - DNA, 25 bp, Artificial
  probe
  misc_feature (1)..(25): SEQ ID NO: 7534; WAN024CR9; Start 210; Stop 234
aaatcaattcaggcttgccttggat

SEQ ID NO: 470629 - DNA, 25 bp, Artificial
  probe
  misc_feature (1)..(25): SEQ ID NO: 7534; WAN024CR9; Start 230; Stop 254
tggattttcagagccgcattgatac

SEQ ID NO: 470630 - DNA, 25 bp, Artificial
  probe
  misc_feature (1)..(25): SEQ ID NO: 7534; WAN024CR9; Start 128; Stop 152
gtcaagagacggtagggttcaatgg

SEQ ID NO: 470631 - DNA, 25 bp, Artificial
  probe
  misc_feature (1)..(25): SEQ ID NO: 7534; WAN024CR9; Start 127; Stop 151
ggtcaagagacggtagggttcaatg

SEQ ID NO: 470632 - DNA, 25 bp, Artificial
  probe
  misc_feature (1)..(25): SEQ ID NO: 7534; WAN024CR9; Start 206; Stop 230
ttcaaaatcaattcaggcttgcctt

SEQ ID NO: 470633 - DNA, 25 bp, Artificial
  probe
  misc_feature (1)..(25): SEQ ID NO: 7535; WAN024BLF; Start 82; Stop 106
aaatcgcttgactttcacggtttac

SEQ ID NO: 470634 - DNA, 25 bp, Artificial
  probe
  misc_feature (1)..(25): SEQ ID NO: 7535; WAN024BLF; Start 81; Stop 105
caaatcgcttgactttcacggttta

SEQ ID NO: 470635 - DNA, 25 bp, Artificial
  probe
  misc_feature (1)..(25): SEQ ID NO: 7535; WAN024BLF; Start 18; Stop 42
tttacagaggtttacgacacttttg

SEQ ID NO: 470636 - DNA, 25 bp, Artificial
  probe
  misc_feature (1)..(25): SEQ ID NO: 7535; WAN024BLF; Start 16; Stop 40
gttttacagaggtttacgacacttt

SEQ ID NO: 470637 - DNA, 25 bp, Artificial
  probe
  misc_feature (1)..(25): SEQ ID NO: 7535; WAN024BLF; Start 17; Stop 41
ttttacagaggtttacgacactttt

SEQ ID NO: 470638 - DNA, 25 bp, Artificial
  probe
  misc_feature (1)..(25): SEQ ID NO: 7535; WAN024BLF; Start 72; Stop 96
aaacttcatcaaatcgcttgacttt

SEQ ID NO: 470639 - DNA, 25 bp, Artificial
  probe
  misc_feature (1)..(25): SEQ ID NO: 7535; WAN024BLF; Start 73; Stop 97
aacttcatcaaatcgcttgactttc

SEQ ID NO: 470640 - DNA, 25 bp, Artificial
  probe
  misc_feature (1)..(25): SEQ ID NO: 7535; WAN024BLF; Start 19; Stop 43
ttacagaggtttacgacacttttgc

SEQ ID NO: 470641 - DNA, 25 bp, Artificial
  probe
  misc_feature (1)..(25): SEQ ID NO: 7535; WAN024BLF; Start 75; Stop 99
cttcatcaaatcgcttgactttcac

SEQ ID NO: 470642 - DNA, 25 bp, Artificial
  probe
  misc_feature (1)..(25): SEQ ID NO: 7535; WAN024BLF; Start 74; Stop 98
acttcatcaaatcgcttgactttca

SEQ ID NO: 470643 - DNA, 25 bp, Artificial
  probe
  misc_feature (1)..(25): SEQ ID NO: 7535; WAN024BLF; Start 8; Stop 32
tttacatcgttttacagaggtttac

SEQ ID NO: 470644 - DNA, 25 bp, Artificial
  probe
  misc_feature (1)..(25): SEQ ID NO: 7535; WAN024BLF; Start 83; Stop 107
aatcgcttgactttcacggtttacc

SEQ ID NO: 470645 - DNA, 25 bp, Artificial
  probe
  misc_feature (1)..(25): SEQ ID NO: 7535; WAN024BLF; Start 76; Stop 100
ttcatcaaatcgcttgactttcacg

SEQ ID NO: 470646 - DNA, 25 bp, Artificial
  probe
  misc_feature (1)..(25): SEQ ID NO: 7535; WAN024BLF; Start 7; Stop 31
ttttacatcgttttacagaggttta

SEQ ID NO: 470647 - DNA, 25 bp, Artificial
  probe
  misc_feature (1)..(25): SEQ ID NO: 7535; WAN024BLF; Start 20; Stop 44
tacagaggtttacgacacttttgcc

SEQ ID NO: 470648 - DNA, 25 bp, Artificial
  probe
  misc_feature (1)..(25): SEQ ID NO: 7535; WAN024BLF; Start 71; Stop 95
aaaacttcatcaaatcgcttgactt

SEQ ID NO: 470649 - DNA, 25 bp, Artificial
  probe
  misc_feature (1)..(25): SEQ ID NO: 7535; WAN024BLF; Start 9; Stop 33
ttacatcgttttacagaggtttacg

SEQ ID NO: 470650 - DNA, 25 bp, Artificial
  probe
  misc_feature (1)..(25): SEQ ID NO: 7535; WAN024BLF; Start 15; Stop 39
cgttttacagaggtttacgacactt

SEQ ID NO: 470651 - DNA, 25 bp, Artificial
  probe
  misc_feature (1)..(25): SEQ ID NO: 7535; WAN024BLF; Start 79; Stop 103
atcaaatcgcttgactttcacggtt

SEQ ID NO: 470652 - DNA, 25 bp, Artificial
  probe
  misc_feature (1)..(25): SEQ ID NO: 7535; WAN024BLF; Start 80; Stop 104
tcaaatcgcttgactttcacggttt

SEQ ID NO: 470653 - DNA, 25 bp, Artificial
  probe
  misc_feature (1)..(25): SEQ ID NO: 7535; WAN024BLF; Start 77; Stop 101
tcatcaaatcgcttgactttcacgg

SEQ ID NO: 470654 - DNA, 25 bp, Artificial
  probe
  misc_feature (1)..(25): SEQ ID NO: 7535; WAN024BLF; Start 26; Stop 50
ggtttacgacacttttgcccctttt

SEQ ID NO: 470655 - DNA, 25 bp, Artificial
  probe
  misc_feature (1)..(25): SEQ ID NO: 7535; WAN024BLF; Start 78; Stop 102
catcaaatcgcttgactttcacggt

SEQ ID NO: 470656 - DNA, 25 bp, Artificial
  probe
  misc_feature (1)..(25): SEQ ID NO: 7535; WAN024BLF; Start 25; Stop 49
aggtttacgacacttttgccccttt

SEQ ID NO: 470657 - DNA, 25 bp, Artificial
  probe
  misc_feature (1)..(25): SEQ ID NO: 7537; WAN024AYI; Start 20; Stop 44
aattgactaaacaaacccagagttg

SEQ ID NO: 470658 - DNA, 25 bp, Artificial
  probe
  misc_feature (1)..(25): SEQ ID NO: 7537; WAN024AYI; Start 17; Stop 41
aacaattgactaaacaaacccagag

SEQ ID NO: 470659 - DNA, 25 bp, Artificial
  probe
  misc_feature (1)..(25): SEQ ID NO: 7537; WAN024AYI; Start 16; Stop 40
aaacaattgactaaacaaacccaga

SEQ ID NO: 470660 - DNA, 25 bp, Artificial
  probe
  misc_feature (1)..(25): SEQ ID NO: 7537; WAN024AYI; Start 19; Stop 43
caattgactaaacaaacccagagtt

SEQ ID NO: 470661 - DNA, 25 bp, Artificial
  probe
  misc_feature (1)..(25): SEQ ID NO: 7537; WAN024AYI; Start 23; Stop 47
tgactaaacaaacccagagttgtat

SEQ ID NO: 470662 - DNA, 25 bp, Artificial
  probe
  misc_feature (1)..(25): SEQ ID NO: 7537; WAN024AYI; Start 22; Stop 46
ttgactaaacaaacccagagttgta

SEQ ID NO: 470663 - DNA, 25 bp, Artificial
  probe
  misc_feature (1)..(25): SEQ ID NO: 7537; WAN024AYI; Start 18; Stop 42
acaattgactaaacaaacccagagt

SEQ ID NO: 470664 - DNA, 25 bp, Artificial
  probe
  misc_feature (1)..(25): SEQ ID NO: 7537; WAN024AYI; Start 21; Stop 45
attgactaaacaaacccagagttgt

SEQ ID NO: 470665 - DNA, 25 bp, Artificial
  probe
  misc_feature (1)..(25): SEQ ID NO: 7537; WAN024AYI; Start 24; Stop 48
gactaaacaaacccagagttgtata

SEQ ID NO: 470666 - DNA, 25 bp, Artificial
  probe
  misc_feature (1)..(25): SEQ ID NO: 7537; WAN024AYI; Start 25; Stop 49
actaaacaaacccagagttgtataa

SEQ ID NO: 470667 - DNA, 25 bp, Artificial
  probe
  misc_feature (1)..(25): SEQ ID NO: 7537; WAN024AYI; Start 26; Stop 50
ctaaacaaacccagagttgtataat

SEQ ID NO: 470668 - DNA, 25 bp, Artificial
  probe
  misc_feature (1)..(25): SEQ ID NO: 7537; WAN024AYI; Start 31; Stop 55
caaacccagagttgtataataaaac

SEQ ID NO: 470669 - DNA, 25 bp, Artificial
  probe
  misc_feature (1)..(25): SEQ ID NO: 7537; WAN024AYI; Start 32; Stop 56
aaacccagagttgtataataaaaca

SEQ ID NO: 470670 - DNA, 25 bp, Artificial
  probe
  misc_feature (1)..(25): SEQ ID NO: 7537; WAN024AYI; Start 29; Stop 53
aacaaacccagagttgtataataaa

SEQ ID NO: 470671 - DNA, 25 bp, Artificial
  probe
  misc_feature (1)..(25): SEQ ID NO: 7537; WAN024AYI; Start 28; Stop 52
aaacaaacccagagttgtataataa

SEQ ID NO: 470672 - DNA, 25 bp, Artificial
  probe
  misc_feature (1)..(25): SEQ ID NO: 7537; WAN024AYI; Start 15; Stop 39
aaaacaattgactaaacaaacccag

SEQ ID NO: 470673 - DNA, 25 bp, Artificial
  probe
  misc_feature (1)..(25): SEQ ID NO: 7537; WAN024AYI; Start 27; Stop 51
taaacaaacccagagttgtataata

SEQ ID NO: 470674 - DNA, 25 bp, Artificial
  probe
  misc_feature (1)..(25): SEQ ID NO: 7537; WAN024AYI; Start 34; Stop 58
acccagagttgtataataaaacaaa

SEQ ID NO: 470675 - DNA, 25 bp, Artificial
  probe
  misc_feature (1)..(25): SEQ ID NO: 7537; WAN024AYI; Start 33; Stop 57
aacccagagttgtataataaaacaa

SEQ ID NO: 470676 - DNA, 25 bp, Artificial
  probe
  misc_feature (1)..(25): SEQ ID NO: 7537; WAN024AYI; Start 30; Stop 54
acaaacccagagttgtataataaaa

SEQ ID NO: 470677 - DNA, 25 bp, Artificial
  probe
  misc_feature (1)..(25): SEQ ID NO: 7537; WAN024AYI; Start 35; Stop 59
cccagagttgtataataaaacaaat

SEQ ID NO: 470678 - DNA, 25 bp, Artificial
  probe
  misc_feature (1)..(25): SEQ ID NO: 7538; WAN024CMC; Start 100; Stop 124
agttttcatttctttgctcctttct

SEQ ID NO: 470679 - DNA, 25 bp, Artificial
  probe
  misc_feature (1)..(25): SEQ ID NO: 7538; WAN024CMC; Start 101; Stop 125
gttttcatttctttgctcctttctt

SEQ ID NO: 470680 - DNA, 25 bp, Artificial
  probe
  misc_feature (1)..(25): SEQ ID NO: 7538; WAN024CMC; Start 99; Stop 123
aagttttcatttctttgctcctttc

SEQ ID NO: 470681 - DNA, 25 bp, Artificial
  probe
  misc_feature (1)..(25): SEQ ID NO: 7538; WAN024CMC; Start 103; Stop 127
tttcatttctttgctcctttctttt

SEQ ID NO: 470682 - DNA, 25 bp, Artificial
  probe
  misc_feature (1)..(25): SEQ ID NO: 7538; WAN024CMC; Start 102; Stop 126
ttttcatttctttgctcctttcttt

SEQ ID NO: 470683 - DNA, 25 bp, Artificial
  probe
  misc_feature (1)..(25): SEQ ID NO: 7538; WAN024CMC; Start 98; Stop 122
aaagttttcatttctttgctccttt

SEQ ID NO: 470684 - DNA, 25 bp, Artificial
  probe
  misc_feature (1)..(25): SEQ ID NO: 7538; WAN024CMC; Start 97; Stop 121
aaaagttttcatttctttgctcctt

SEQ ID NO: 470685 - DNA, 25 bp, Artificial
  probe
  misc_feature (1)..(25): SEQ ID NO: 7538; WAN024CMC; Start 96; Stop 120
gaaaagttttcatttctttgctcct

SEQ ID NO: 470686 - DNA, 25 bp, Artificial
  probe
  misc_feature (1)..(25): SEQ ID NO: 7538; WAN024CMC; Start 8; Stop 32
aacacttacccttttatacttcatt

SEQ ID NO: 470687 - DNA, 25 bp, Artificial
  probe
  misc_feature (1)..(25): SEQ ID NO: 7538; WAN024CMC; Start 7; Stop 31
aaacacttacccttttatacttcat

SEQ ID NO: 470688 - DNA, 25 bp, Artificial
  probe
  misc_feature (1)..(25): SEQ ID NO: 7538; WAN024CMC; Start 6; Stop 30
aaaacacttacccttttatacttca

SEQ ID NO: 470689 - DNA, 25 bp, Artificial
  probe
  misc_feature (1)..(25): SEQ ID NO: 7538; WAN024CMC; Start 15; Stop 39
acccttttatacttcattaacttct

SEQ ID NO: 470690 - DNA, 25 bp, Artificial
  probe
  misc_feature (1)..(25): SEQ ID NO: 7538; WAN024CMC; Start 9; Stop 33
acacttacccttttatacttcatta

SEQ ID NO: 470691 - DNA, 25 bp, Artificial
  probe
  misc_feature (1)..(25): SEQ ID NO: 7538; WAN024CMC; Start 95; Stop 119
agaaaagttttcatttctttgctcc

SEQ ID NO: 470692 - DNA, 25 bp, Artificial
  probe
  misc_feature (1)..(25): SEQ ID NO: 7538; WAN024CMC; Start 87; Stop 111
ttttagcaagaaaagttttcatttc

SEQ ID NO: 470693 - DNA, 25 bp, Artificial
  probe
  misc_feature (1)..(25): SEQ ID NO: 7538; WAN024CMC; Start 62; Stop 86
ccaaacgaaaggaagatgttccgtt

SEQ ID NO: 470694 - DNA, 25 bp, Artificial
  probe
  misc_feature (1)..(25): SEQ ID NO: 7538; WAN024CMC; Start 88; Stop 112
tttagcaagaaaagttttcatttct

SEQ ID NO: 470695 - DNA, 25 bp, Artificial
  probe
  misc_feature (1)..(25): SEQ ID NO: 7539; WAN024FIQ; Start 29; Stop 53
aaatcgtcgctagaaggaaagagtt

SEQ ID NO: 470696 - DNA, 25 bp, Artificial
  probe
  misc_feature (1)..(25): SEQ ID NO: 7539; WAN024FIQ; Start 30; Stop 54
aatcgtcgctagaaggaaagagttc

SEQ ID NO: 470697 - DNA, 25 bp, Artificial
  probe
  misc_feature (1)..(25): SEQ ID NO: 7539; WAN024FIQ; Start 12; Stop 36
aaaattgccaaaccagaaaatcgtc

SEQ ID NO: 470698 - DNA, 25 bp, Artificial
  probe
  misc_feature (1)..(25): SEQ ID NO: 7539; WAN024FIQ; Start 27; Stop 51
gaaaatcgtcgctagaaggaaagag

SEQ ID NO: 470699 - DNA, 25 bp, Artificial
  probe
  misc_feature (1)..(25): SEQ ID NO: 7539; WAN024FIQ; Start 26; Stop 50
agaaaatcgtcgctagaaggaaaga

SEQ ID NO: 470700 - DNA, 25 bp, Artificial
  probe
  misc_feature (1)..(25): SEQ ID NO: 7539; WAN024FIQ; Start 25; Stop 49
cagaaaatcgtcgctagaaggaaag

SEQ ID NO: 470701 - DNA, 25 bp, Artificial
  probe
  misc_feature (1)..(25): SEQ ID NO: 7539; WAN024FIQ; Start 28; Stop 52
aaaatcgtcgctagaaggaaagagt

SEQ ID NO: 470702 - DNA, 25 bp, Artificial
  probe
  misc_feature (1)..(25): SEQ ID NO: 7539; WAN024FIQ; Start 20; Stop 44
caaaccagaaaatcgtcgctagaag

SEQ ID NO: 470703 - DNA, 25 bp, Artificial
  probe
  misc_feature (1)..(25): SEQ ID NO: 7539; WAN024FIQ; Start 46; Stop 70
aaagagttccttaaaatgcaagagc

SEQ ID NO: 470704 - DNA, 25 bp, Artificial
  probe
  misc_feature (1)..(25): SEQ ID NO: 7539; WAN024FIQ; Start 45; Stop 69
gaaagagttccttaaaatgcaagag

SEQ ID NO: 470705 - DNA, 25 bp, Artificial
  probe
  misc_feature (1)..(25): SEQ ID NO: 7539; WAN024FIQ; Start 24; Stop 48
ccagaaaatcgtcgctagaaggaaa

SEQ ID NO: 470706 - DNA, 25 bp, Artificial
  probe
  misc_feature (1)..(25): SEQ ID NO: 7539; WAN024FIQ; Start 13; Stop 37
aaattgccaaaccagaaaatcgtcg

SEQ ID NO: 470707 - DNA, 25 bp, Artificial
  probe
  misc_feature (1)..(25): SEQ ID NO: 7539; WAN024FIQ; Start 21; Stop 45
aaaccagaaaatcgtcgctagaagg

SEQ ID NO: 470708 - DNA, 25 bp, Artificial
  probe
  misc_feature (1)..(25): SEQ ID NO: 7539; WAN024FIQ; Start 19; Stop 43
ccaaaccagaaaatcgtcgctagaa

SEQ ID NO: 470709 - DNA, 25 bp, Artificial
  probe
  misc_feature (1)..(25): SEQ ID NO: 7539; WAN024FIQ; Start 23; Stop 47
accagaaaatcgtcgctagaaggaa

SEQ ID NO: 470710 - DNA, 25 bp, Artificial
  probe
  misc_feature (1)..(25): SEQ ID NO: 7539; WAN024FIQ; Start 22; Stop 46
aaccagaaaatcgtcgctagaagga

SEQ ID NO: 470711 - DNA, 25 bp, Artificial
  probe
  misc_feature (1)..(25): SEQ ID NO: 7539; WAN024FIQ; Start 47; Stop 71
aagagttccttaaaatgcaagagca

SEQ ID NO: 470712 - DNA, 25 bp, Artificial
  probe
  misc_feature (1)..(25): SEQ ID NO: 7539; WAN024FIQ; Start 48; Stop 72
agagttccttaaaatgcaagagcag

SEQ ID NO: 470713 - DNA, 25 bp, Artificial
  probe
  misc_feature (1)..(25): SEQ ID NO: 7539; WAN024FIQ; Start 49; Stop 73
gagttccttaaaatgcaagagcagg

SEQ ID NO: 470714 - DNA, 25 bp, Artificial
  probe
  misc_feature (1)..(25): SEQ ID NO: 7539; WAN024FIQ; Start 44; Stop 68
ggaaagagttccttaaaatgcaaga

SEQ ID NO: 470715 - DNA, 25 bp, Artificial
  probe
  misc_feature (1)..(25): SEQ ID NO: 7539; WAN024FIQ; Start 31; Stop 55
atcgtcgctagaaggaaagagttcc

SEQ ID NO: 470716 - DNA, 25 bp, Artificial
  probe
  misc_feature (1)..(25): SEQ ID NO: 7539; WAN024FIQ; Start 50; Stop 74
agttccttaaaatgcaagagcaggg

SEQ ID NO: 470717 - DNA, 25 bp, Artificial
  probe
  misc_feature (1)..(25): SEQ ID NO: 7539; WAN024FIQ; Start 55; Stop 79
cttaaaatgcaagagcagggcactc

SEQ ID NO: 470718 - DNA, 25 bp, Artificial
  probe
  misc_feature (1)..(25): SEQ ID NO: 7539; WAN024FIQ; Start 51; Stop 75
gttccttaaaatgcaagagcagggc

SEQ ID NO: 470719 - DNA, 25 bp, Artificial
  probe
  misc_feature (1)..(25): SEQ ID NO: 7540; WAN024DON; Start 23; Stop 47
gtgatcttgcatggactttgaatat

SEQ ID NO: 470720 - DNA, 25 bp, Artificial
  probe
  misc_feature (1)..(25): SEQ ID NO: 7540; WAN024DON; Start 24; Stop 48
tgatcttgcatggactttgaatatt

SEQ ID NO: 470721 - DNA, 25 bp, Artificial
  probe
  misc_feature (1)..(25): SEQ ID NO: 7540; WAN024DON; Start 22; Stop 46
ggtgatcttgcatggactttgaata

SEQ ID NO: 470722 - DNA, 25 bp, Artificial
  probe
  misc_feature (1)..(25): SEQ ID NO: 7540; WAN024DON; Start 25; Stop 49
gatcttgcatggactttgaatattt

SEQ ID NO: 470723 - DNA, 25 bp, Artificial
  probe
  misc_feature (1)..(25): SEQ ID NO: 7540; WAN024DON; Start 54; Stop 78
aacagagaagcgaaaagatttaact

SEQ ID NO: 470724 - DNA, 25 bp, Artificial
  probe
  misc_feature (1)..(25): SEQ ID NO: 7540; WAN024DON; Start 55; Stop 79
acagagaagcgaaaagatttaactt

SEQ ID NO: 470725 - DNA, 25 bp, Artificial
  probe
  misc_feature (1)..(25): SEQ ID NO: 7540; WAN024DON; Start 21; Stop 45
aggtgatcttgcatggactttgaat

SEQ ID NO: 470726 - DNA, 25 bp, Artificial
  probe
  misc_feature (1)..(25): SEQ ID NO: 7540; WAN024DON; Start 53; Stop 77
taacagagaagcgaaaagatttaac

SEQ ID NO: 470727 - DNA, 25 bp, Artificial
  probe
  misc_feature (1)..(25): SEQ ID NO: 7540; WAN024DON; Start 20; Stop 44
gaggtgatcttgcatggactttgaa

SEQ ID NO: 470728 - DNA, 25 bp, Artificial
  probe
  misc_feature (1)..(25): SEQ ID NO: 7540; WAN024DON; Start 10; Stop 34
tttaagaagggaggtgatcttgcat

SEQ ID NO: 470729 - DNA, 25 bp, Artificial
  probe
  misc_feature (1)..(25): SEQ ID NO: 7540; WAN024DON; Start 52; Stop 76
ataacagagaagcgaaaagatttaa

SEQ ID NO: 470730 - DNA, 25 bp, Artificial
  probe
  misc_feature (1)..(25): SEQ ID NO: 7540; WAN024DON; Start 11; Stop 35
ttaagaagggaggtgatcttgcatg

SEQ ID NO: 470731 - DNA, 25 bp, Artificial
  probe
  misc_feature (1)..(25): SEQ ID NO: 7540; WAN024DON; Start 50; Stop 74
ttataacagagaagcgaaaagattt

SEQ ID NO: 470732 - DNA, 25 bp, Artificial
  probe
  misc_feature (1)..(25): SEQ ID NO: 7540; WAN024DON; Start 49; Stop 73
tttataacagagaagcgaaaagatt

SEQ ID NO: 470733 - DNA, 25 bp, Artificial
  probe
  misc_feature (1)..(25): SEQ ID NO: 7540; WAN024DON; Start 26; Stop 50
atcttgcatggactttgaatatttt

SEQ ID NO: 470734 - DNA, 25 bp, Artificial
  probe
  misc_feature (1)..(25): SEQ ID NO: 7540; WAN024DON; Start 51; Stop 75
tataacagagaagcgaaaagattta

SEQ ID NO: 470735 - DNA, 25 bp, Artificial
  probe
  misc_feature (1)..(25): SEQ ID NO: 7540; WAN024DON; Start 56; Stop 80
cagagaagcgaaaagatttaacttc

SEQ ID NO: 470736 - DNA, 25 bp, Artificial
  probe
  misc_feature (1)..(25): SEQ ID NO: 7540; WAN024DON; Start 48; Stop 72
ttttataacagagaagcgaaaagat

SEQ ID NO: 470737 - DNA, 25 bp, Artificial
  probe
  misc_feature (1)..(25): SEQ ID NO: 7540; WAN024DON; Start 19; Stop 43
ggaggtgatcttgcatggactttga

SEQ ID NO: 470738 - DNA, 25 bp, Artificial
  probe
  misc_feature (1)..(25): SEQ ID NO: 7540; WAN024DON; Start 9; Stop 33
ttttaagaagggaggtgatcttgca

SEQ ID NO: 470739 - DNA, 25 bp, Artificial
  probe
  misc_feature (1)..(25): SEQ ID NO: 7540; WAN024DON; Start 12; Stop 36
taagaagggaggtgatcttgcatgg

SEQ ID NO: 470740 - DNA, 25 bp, Artificial
  probe
  misc_feature (1)..(25): SEQ ID NO: 7541; WAN024FNU; Start 159; Stop 183
atatgacgaacagcttggacgatat

SEQ ID NO: 470741 - DNA, 25 bp, Artificial
  probe
  misc_feature (1)..(25): SEQ ID NO: 7541; WAN024FNU; Start 137; Stop 161
aatttcctgattcatcatacgcata

SEQ ID NO: 470742 - DNA, 25 bp, Artificial
  probe
  misc_feature (1)..(25): SEQ ID NO: 7541; WAN024FNU; Start 138; Stop 162
atttcctgattcatcatacgcatat

SEQ ID NO: 470743 - DNA, 25 bp, Artificial
  probe
  misc_feature (1)..(25): SEQ ID NO: 7541; WAN024FNU; Start 160; Stop 184
tatgacgaacagcttggacgatatc

SEQ ID NO: 470744 - DNA, 25 bp, Artificial
  probe
  misc_feature (1)..(25): SEQ ID NO: 7541; WAN024FNU; Start 136; Stop 160
gaatttcctgattcatcatacgcat

SEQ ID NO: 470745 - DNA, 25 bp, Artificial
  probe
  misc_feature (1)..(25): SEQ ID NO: 7541; WAN024FNU; Start 52; Stop 76
gaacatattggaccaattctacagg

SEQ ID NO: 470746 - DNA, 25 bp, Artificial
  probe
  misc_feature (1)..(25): SEQ ID NO: 7541; WAN024FNU; Start 51; Stop 75
tgaacatattggaccaattctacag

SEQ ID NO: 470747 - DNA, 25 bp, Artificial
  probe
  misc_feature (1)..(25): SEQ ID NO: 7541; WAN024FNU; Start 193; Stop 217
ctggttctcctttggtacgaatcat

SEQ ID NO: 470748 - DNA, 25 bp, Artificial
  probe
  misc_feature (1)..(25): SEQ ID NO: 7541; WAN024FNU; Start 158; Stop 182
catatgacgaacagcttggacgata

SEQ ID NO: 470749 - DNA, 25 bp, Artificial
  probe
  misc_feature (1)..(25): SEQ ID NO: 7541; WAN024FNU; Start 135; Stop 159
cgaatttcctgattcatcatacgca

SEQ ID NO: 470750 - DNA, 25 bp, Artificial
  probe
  misc_feature (1)..(25): SEQ ID NO: 7541; WAN024FNU; Start 50; Stop 74
atgaacatattggaccaattctaca

SEQ ID NO: 470751 - DNA, 25 bp, Artificial
  probe
  misc_feature (1)..(25): SEQ ID NO: 7541; WAN024FNU; Start 197; Stop 221
ttctcctttggtacgaatcatggaa

SEQ ID NO: 470752 - DNA, 25 bp, Artificial
  probe
  misc_feature (1)..(25): SEQ ID NO: 7541; WAN024FNU; Start 49; Stop 73
catgaacatattggaccaattctac

SEQ ID NO: 470753 - DNA, 25 bp, Artificial
  probe
  misc_feature (1)..(25): SEQ ID NO: 7541; WAN024FNU; Start 194; Stop 218
tggttctcctttggtacgaatcatg

SEQ ID NO: 470754 - DNA, 25 bp, Artificial
  probe
  misc_feature (1)..(25): SEQ ID NO: 7541; WAN024FNU; Start 198; Stop 222
tctcctttggtacgaatcatggaag

SEQ ID NO: 470755 - DNA, 25 bp, Artificial
  probe
  misc_feature (1)..(25): SEQ ID NO: 7541; WAN024FNU; Start 133; Stop 157
ggcgaatttcctgattcatcatacg

SEQ ID NO: 470756 - DNA, 25 bp, Artificial
  probe
  misc_feature (1)..(25): SEQ ID NO: 7541; WAN024FNU; Start 132; Stop 156
cggcgaatttcctgattcatcatac

SEQ ID NO: 470757 - DNA, 25 bp, Artificial
  probe
  misc_feature (1)..(25): SEQ ID NO: 7541; WAN024FNU; Start 196; Stop 220
gttctcctttggtacgaatcatgga

SEQ ID NO: 470758 - DNA, 25 bp, Artificial
  probe
  misc_feature (1)..(25): SEQ ID NO: 7541; WAN024FNU; Start 139; Stop 163
tttcctgattcatcatacgcatatg

SEQ ID NO: 470759 - DNA, 25 bp, Artificial
  probe
  misc_feature (1)..(25): SEQ ID NO: 7541; WAN024FNU; Start 83; Stop 107
caaatccttggcagcaacataaagc

SEQ ID NO: 470760 - DNA, 25 bp, Artificial
  probe
  misc_feature (1)..(25): SEQ ID NO: 7541; WAN024FNU; Start 82; Stop 106
gcaaatccttggcagcaacataaag

SEQ ID NO: 470761 - DNA, 25 bp, Artificial
  probe
  misc_feature (1)..(25): SEQ ID NO: 7541; WAN024FNU; Start 195; Stop 219
ggttctcctttggtacgaatcatgg

SEQ ID NO: 470762 - DNA, 25 bp, Artificial
  probe
  misc_feature (1)..(25): SEQ ID NO: 7541; WAN024FNU; Start 53; Stop 77
aacatattggaccaattctacaggg

SEQ ID NO: 470763 - DNA, 25 bp, Artificial
  probe
  misc_feature (1)..(25): SEQ ID NO: 7541; WAN024FNU; Start 56; Stop 80
atattggaccaattctacagggact

SEQ ID NO: 470764 - DNA, 25 bp, Artificial
  probe
  misc_feature (1)..(25): SEQ ID NO: 7541; WAN024FNU; Start 55; Stop 79
catattggaccaattctacagggac

SEQ ID NO: 470765 - DNA, 25 bp, Artificial
  probe
  misc_feature (1)..(25): SEQ ID NO: 7541; WAN024FNU; Start 57; Stop 81
tattggaccaattctacagggactt

SEQ ID NO: 470766 - DNA, 25 bp, Artificial
  probe
  misc_feature (1)..(25): SEQ ID NO: 7541; WAN024FNU; Start 54; Stop 78
acatattggaccaattctacaggga

SEQ ID NO: 470767 - DNA, 25 bp, Artificial
  probe
  misc_feature (1)..(25): SEQ ID NO: 7541; WAN024FNU; Start 118; Stop 142
gtaagttttgaatgcggcgaatttc

SEQ ID NO: 470768 - DNA, 25 bp, Artificial
  probe
  misc_feature (1)..(25): SEQ ID NO: 7541; WAN024FNU; Start 145; Stop 169
gattcatcatacgcatatgacgaac

SEQ ID NO: 470769 - DNA, 25 bp, Artificial
  probe
  misc_feature (1)..(25): SEQ ID NO: 7541; WAN024FNU; Start 140; Stop 164
ttcctgattcatcatacgcatatga

SEQ ID NO: 470770 - DNA, 25 bp, Artificial
  probe
  misc_feature (1)..(25): SEQ ID NO: 7541; WAN024FNU; Start 144; Stop 168
tgattcatcatacgcatatgacgaa

SEQ ID NO: 470771 - DNA, 25 bp, Artificial
  probe
  misc_feature (1)..(25): SEQ ID NO: 7541; WAN024FNU; Start 141; Stop 165
tcctgattcatcatacgcatatgac

SEQ ID NO: 470772 - DNA, 25 bp, Artificial
  probe
  misc_feature (1)..(25): SEQ ID NO: 7541; WAN024FNU; Start 48; Stop 72
tcatgaacatattggaccaattcta

SEQ ID NO: 470773 - DNA, 25 bp, Artificial
  probe
  misc_feature (1)..(25): SEQ ID NO: 7542; WAN024FBH; Start 186; Stop 210
tataagcaccacttgtctcaatcaa

SEQ ID NO: 470774 - DNA, 25 bp, Artificial
  probe
  misc_feature (1)..(25): SEQ ID NO: 7542; WAN024FBH; Start 183; Stop 207
atctataagcaccacttgtctcaat

SEQ ID NO: 470775 - DNA, 25 bp, Artificial
  probe
  misc_feature (1)..(25): SEQ ID NO: 7542; WAN024FBH; Start 182; Stop 206
aatctataagcaccacttgtctcaa

SEQ ID NO: 470776 - DNA, 25 bp, Artificial
  probe
  misc_feature (1)..(25): SEQ ID NO: 7542; WAN024FBH; Start 184; Stop 208
tctataagcaccacttgtctcaatc

SEQ ID NO: 470777 - DNA, 25 bp, Artificial
  probe
  misc_feature (1)..(25): SEQ ID NO: 7542; WAN024FBH; Start 185; Stop 209
ctataagcaccacttgtctcaatca

SEQ ID NO: 470778 - DNA, 25 bp, Artificial
  probe
  misc_feature (1)..(25): SEQ ID NO: 7542; WAN024FBH; Start 181; Stop 205
caatctataagcaccacttgtctca

SEQ ID NO: 470779 - DNA, 25 bp, Artificial
  probe
  misc_feature (1)..(25): SEQ ID NO: 7542; WAN024FBH; Start 180; Stop 204
ccaatctataagcaccacttgtctc

SEQ ID NO: 470780 - DNA, 25 bp, Artificial
  probe
  misc_feature (1)..(25): SEQ ID NO: 7542; WAN024FBH; Start 179; Stop 203
accaatctataagcaccacttgtct

SEQ ID NO: 470781 - DNA, 25 bp, Artificial
  probe
  misc_feature (1)..(25): SEQ ID NO: 7542; WAN024FBH; Start 178; Stop 202
caccaatctataagcaccacttgtc

SEQ ID NO: 470782 - DNA, 25 bp, Artificial
  probe
  misc_feature (1)..(25): SEQ ID NO: 7542; WAN024FBH; Start 176; Stop 200
gtcaccaatctataagcaccacttg

SEQ ID NO: 470783 - DNA, 25 bp, Artificial
  probe
  misc_feature (1)..(25): SEQ ID NO: 7542; WAN024FBH; Start 177; Stop 201
tcaccaatctataagcaccacttgt

SEQ ID NO: 470784 - DNA, 25 bp, Artificial
  probe
  misc_feature (1)..(25): SEQ ID NO: 7542; WAN024FBH; Start 77; Stop 101
taggcaataatggacaaggtctcaa

SEQ ID NO: 470785 - DNA, 25 bp, Artificial
  probe
  misc_feature (1)..(25): SEQ ID NO: 7542; WAN024FBH; Start 76; Stop 100
gtaggcaataatggacaaggtctca

SEQ ID NO: 470786 - DNA, 25 bp, Artificial
  probe
  misc_feature (1)..(25): SEQ ID NO: 7542; WAN024FBH; Start 75; Stop 99
tgtaggcaataatggacaaggtctc

SEQ ID NO: 470787 - DNA, 25 bp, Artificial
  probe
  misc_feature (1)..(25): SEQ ID NO: 7542; WAN024FBH; Start 63; Stop 87
taatcggctgtttgtaggcaataat

SEQ ID NO: 470788 - DNA, 25 bp, Artificial
  probe
  misc_feature (1)..(25): SEQ ID NO: 7542; WAN024FBH; Start 187; Stop 211
ataagcaccacttgtctcaatcaaa

SEQ ID NO: 470789 - DNA, 25 bp, Artificial
  probe
  misc_feature (1)..(25): SEQ ID NO: 7542; WAN024FBH; Start 78; Stop 102
aggcaataatggacaaggtctcaag

SEQ ID NO: 470790 - DNA, 25 bp, Artificial
  probe
  misc_feature (1)..(25): SEQ ID NO: 7542; WAN024FBH; Start 188; Stop 212
taagcaccacttgtctcaatcaaag

SEQ ID NO: 470791 - DNA, 25 bp, Artificial
  probe
  misc_feature (1)..(25): SEQ ID NO: 7542; WAN024FBH; Start 62; Stop 86
gtaatcggctgtttgtaggcaataa

SEQ ID NO: 470792 - DNA, 25 bp, Artificial
  probe
  misc_feature (1)..(25): SEQ ID NO: 7542; WAN024FBH; Start 175; Stop 199
ggtcaccaatctataagcaccactt

SEQ ID NO: 470793 - DNA, 25 bp, Artificial
  probe
  misc_feature (1)..(25): SEQ ID NO: 7542; WAN024FBH; Start 196; Stop 220
acttgtctcaatcaaagccaaactg

SEQ ID NO: 470794 - DNA, 25 bp, Artificial
  probe
  misc_feature (1)..(25): SEQ ID NO: 7542; WAN024FBH; Start 195; Stop 219
cacttgtctcaatcaaagccaaact

SEQ ID NO: 470795 - DNA, 25 bp, Artificial
  probe
  misc_feature (1)..(25): SEQ ID NO: 7542; WAN024FBH; Start 64; Stop 88
aatcggctgtttgtaggcaataatg

SEQ ID NO: 470796 - DNA, 25 bp, Artificial
  probe
  misc_feature (1)..(25): SEQ ID NO: 7542; WAN024FBH; Start 79; Stop 103
ggcaataatggacaaggtctcaagg

SEQ ID NO: 470797 - DNA, 25 bp, Artificial
  probe
  misc_feature (1)..(25): SEQ ID NO: 7542; WAN024FBH; Start 194; Stop 218
ccacttgtctcaatcaaagccaaac

SEQ ID NO: 470798 - DNA, 25 bp, Artificial
  probe
  misc_feature (1)..(25): SEQ ID NO: 7542; WAN024FBH; Start 133; Stop 157
cgccttagagtattccttcaaaatc

SEQ ID NO: 470799 - DNA, 25 bp, Artificial
  probe
  misc_feature (1)..(25): SEQ ID NO: 7542; WAN024FBH; Start 74; Stop 98
ttgtaggcaataatggacaaggtct

SEQ ID NO: 470800 - DNA, 25 bp, Artificial
  probe
  misc_feature (1)..(25): SEQ ID NO: 7542; WAN024FBH; Start 193; Stop 217
accacttgtctcaatcaaagccaaa

SEQ ID NO: 470801 - DNA, 25 bp, Artificial
  probe
  misc_feature (1)..(25): SEQ ID NO: 7542; WAN024FBH; Start 61; Stop 85
cgtaatcggctgtttgtaggcaata

SEQ ID NO: 470802 - DNA, 25 bp, Artificial
  probe
  misc_feature (1)..(25): SEQ ID NO: 7542; WAN024FBH; Start 197; Stop 221
cttgtctcaatcaaagccaaactgg

SEQ ID NO: 470803 - DNA, 25 bp, Artificial
  probe
  misc_feature (1)..(25): SEQ ID NO: 7542; WAN024FBH; Start 134; Stop 158
gccttagagtattccttcaaaatct

SEQ ID NO: 470804 - DNA, 25 bp, Artificial
  probe
  misc_feature (1)..(25): SEQ ID NO: 7542; WAN024FBH; Start 65; Stop 89
atcggctgtttgtaggcaataatgg

SEQ ID NO: 470805 - DNA, 25 bp, Artificial
  probe
  misc_feature (1)..(25): SEQ ID NO: 7542; WAN024FBH; Start 70; Stop 94
ctgtttgtaggcaataatggacaag

SEQ ID NO: 470806 - DNA, 25 bp, Artificial
  probe
  misc_feature (1)..(25): SEQ ID NO: 7543; WAN024BSH; Start 24; Stop 48
tgcaaatcgaacaccatattatcta

SEQ ID NO: 470807 - DNA, 25 bp, Artificial
  probe
  misc_feature (1)..(25): SEQ ID NO: 7543; WAN024BSH; Start 25; Stop 49
gcaaatcgaacaccatattatctaa

SEQ ID NO: 470808 - DNA, 25 bp, Artificial
  probe
  misc_feature (1)..(25): SEQ ID NO: 7543; WAN024BSH; Start 31; Stop 55
cgaacaccatattatctaaatacct

SEQ ID NO: 470809 - DNA, 25 bp, Artificial
  probe
  misc_feature (1)..(25): SEQ ID NO: 7543; WAN024BSH; Start 30; Stop 54
tcgaacaccatattatctaaatacc

SEQ ID NO: 470810 - DNA, 25 bp, Artificial
  probe
  misc_feature (1)..(25): SEQ ID NO: 7543; WAN024BSH; Start 23; Stop 47
ttgcaaatcgaacaccatattatct

SEQ ID NO: 470811 - DNA, 25 bp, Artificial
  probe
  misc_feature (1)..(25): SEQ ID NO: 7543; WAN024BSH; Start 26; Stop 50
caaatcgaacaccatattatctaaa

SEQ ID NO: 470812 - DNA, 25 bp, Artificial
  probe
  misc_feature (1)..(25): SEQ ID NO: 7543; WAN024BSH; Start 4; Stop 28
caagatgctcaattaaactttgcaa

SEQ ID NO: 470813 - DNA, 25 bp, Artificial
  probe
  misc_feature (1)..(25): SEQ ID NO: 7543; WAN024BSH; Start 1; Stop 25
ttgcaagatgctcaattaaactttg

SEQ ID NO: 470814 - DNA, 25 bp, Artificial
  probe
  misc_feature (1)..(25): SEQ ID NO: 7543; WAN024BSH; Start 3; Stop 27
gcaagatgctcaattaaactttgca

SEQ ID NO: 470815 - DNA, 25 bp, Artificial
  probe
  misc_feature (1)..(25): SEQ ID NO: 7543; WAN024BSH; Start 2; Stop 26
tgcaagatgctcaattaaactttgc

SEQ ID NO: 470816 - DNA, 25 bp, Artificial
  probe
  misc_feature (1)..(25): SEQ ID NO: 7544; WAN024FCB; Start 64; Stop 88
ctgatgataatcggcaactgtaaca

SEQ ID NO: 470817 - DNA, 25 bp, Artificial
  probe
  misc_feature (1)..(25): SEQ ID NO: 7544; WAN024FCB; Start 63; Stop 87
cctgatgataatcggcaactgtaac

SEQ ID NO: 470818 - DNA, 25 bp, Artificial
  probe
  misc_feature (1)..(25): SEQ ID NO: 7544; WAN024FCB; Start 62; Stop 86
tcctgatgataatcggcaactgtaa

SEQ ID NO: 470819 - DNA, 25 bp, Artificial
  probe
  misc_feature (1)..(25): SEQ ID NO: 7544; WAN024FCB; Start 220; Stop 244
atagataccatcaggatactctgct

SEQ ID NO: 470820 - DNA, 25 bp, Artificial
  probe
  misc_feature (1)..(25): SEQ ID NO: 7544; WAN024FCB; Start 219; Stop 243
gatagataccatcaggatactctgc

SEQ ID NO: 470821 - DNA, 25 bp, Artificial
  probe
  misc_feature (1)..(25): SEQ ID NO: 7544; WAN024FCB; Start 221; Stop 245
tagataccatcaggatactctgctg

SEQ ID NO: 470822 - DNA, 25 bp, Artificial
  probe
  misc_feature (1)..(25): SEQ ID NO: 7544; WAN024FCB; Start 61; Stop 85
ctcctgatgataatcggcaactgta

SEQ ID NO: 470823 - DNA, 25 bp, Artificial
  probe
  misc_feature (1)..(25): SEQ ID NO: 7544; WAN024FCB; Start 65; Stop 89
tgatgataatcggcaactgtaacag

SEQ ID NO: 470824 - DNA, 25 bp, Artificial
  probe
  misc_feature (1)..(25): SEQ ID NO: 7544; WAN024FCB; Start 24; Stop 48
gttagtctggatgttgggatttgag

SEQ ID NO: 470825 - DNA, 25 bp, Artificial
  probe
  misc_feature (1)..(25): SEQ ID NO: 7544; WAN024FCB; Start 26; Stop 50
tagtctggatgttgggatttgagtt

SEQ ID NO: 470826 - DNA, 25 bp, Artificial
  probe
  misc_feature (1)..(25): SEQ ID NO: 7544; WAN024FCB; Start 25; Stop 49
ttagtctggatgttgggatttgagt

SEQ ID NO: 470827 - DNA, 25 bp, Artificial
  probe
  misc_feature (1)..(25): SEQ ID NO: 7544; WAN024FCB; Start 188; Stop 212
ttcttgatatgttggacatccttgt

SEQ ID NO: 470828 - DNA, 25 bp, Artificial
  probe
  misc_feature (1)..(25): SEQ ID NO: 7544; WAN024FCB; Start 59; Stop 83
cactcctgatgataatcggcaactg

SEQ ID NO: 470829 - DNA, 25 bp, Artificial
  probe
  misc_feature (1)..(25): SEQ ID NO: 7544; WAN024FCB; Start 187; Stop 211
cttcttgatatgttggacatccttg

SEQ ID NO: 470830 - DNA, 25 bp, Artificial
  probe
  misc_feature (1)..(25): SEQ ID NO: 7544; WAN024FCB; Start 186; Stop 210
ccttcttgatatgttggacatcctt

SEQ ID NO: 470831 - DNA, 25 bp, Artificial
  probe
  misc_feature (1)..(25): SEQ ID NO: 7544; WAN024FCB; Start 184; Stop 208
ttccttcttgatatgttggacatcc

SEQ ID NO: 470832 - DNA, 25 bp, Artificial
  probe
  misc_feature (1)..(25): SEQ ID NO: 7544; WAN024FCB; Start 66; Stop 90
gatgataatcggcaactgtaacagc

SEQ ID NO: 470833 - DNA, 25 bp, Artificial
  probe
  misc_feature (1)..(25): SEQ ID NO: 7544; WAN024FCB; Start 189; Stop 213
tcttgatatgttggacatccttgtg

SEQ ID NO: 470834 - DNA, 25 bp, Artificial
  probe
  misc_feature (1)..(25): SEQ ID NO: 7544; WAN024FCB; Start 82; Stop 106
tgtaacagcttctcctacaagatag

SEQ ID NO: 470835 - DNA, 25 bp, Artificial
  probe
  misc_feature (1)..(25): SEQ ID NO: 7544; WAN024FCB; Start 81; Stop 105
ctgtaacagcttctcctacaagata

SEQ ID NO: 470836 - DNA, 25 bp, Artificial
  probe
  misc_feature (1)..(25): SEQ ID NO: 7544; WAN024FCB; Start 218; Stop 242
tgatagataccatcaggatactctg

SEQ ID NO: 470837 - DNA, 25 bp, Artificial
  probe
  misc_feature (1)..(25): SEQ ID NO: 7544; WAN024FCB; Start 159; Stop 183
ccatgacctcaatcaagccgatatt

SEQ ID NO: 470838 - DNA, 25 bp, Artificial
  probe
  misc_feature (1)..(25): SEQ ID NO: 7544; WAN024FCB; Start 185; Stop 209
tccttcttgatatgttggacatcct

SEQ ID NO: 470839 - DNA, 25 bp, Artificial
  probe
  misc_feature (1)..(25): SEQ ID NO: 7544; WAN024FCB; Start 83; Stop 107
gtaacagcttctcctacaagatagc

SEQ ID NO: 470840 - DNA, 25 bp, Artificial
  probe
  misc_feature (1)..(25): SEQ ID NO: 7544; WAN024FCB; Start 80; Stop 104
actgtaacagcttctcctacaagat

SEQ ID NO: 470841 - DNA, 25 bp, Artificial
  probe
  misc_feature (1)..(25): SEQ ID NO: 7544; WAN024FCB; Start 69; Stop 93
gataatcggcaactgtaacagcttc

SEQ ID NO: 470842 - DNA, 25 bp, Artificial
  probe
  misc_feature (1)..(25): SEQ ID NO: 7544; WAN024FCB; Start 79; Stop 103
aactgtaacagcttctcctacaaga

SEQ ID NO: 470843 - DNA, 25 bp, Artificial
  probe
  misc_feature (1)..(25): SEQ ID NO: 7544; WAN024FCB; Start 78; Stop 102
caactgtaacagcttctcctacaag

SEQ ID NO: 470844 - DNA, 25 bp, Artificial
  probe
  misc_feature (1)..(25): SEQ ID NO: 7544; WAN024FCB; Start 60; Stop 84
actcctgatgataatcggcaactgt

SEQ ID NO: 470845 - DNA, 25 bp, Artificial
  probe
  misc_feature (1)..(25): SEQ ID NO: 7544; WAN024FCB; Start 190; Stop 214
cttgatatgttggacatccttgtgg

SEQ ID NO: 470846 - DNA, 25 bp, Artificial
  probe
  misc_feature (1)..(25): SEQ ID NO: 7544; WAN024FCB; Start 160; Stop 184
catgacctcaatcaagccgatattt

SEQ ID NO: 470847 - DNA, 25 bp, Artificial
  probe
  misc_feature (1)..(25): SEQ ID NO: 7544; WAN024FCB; Start 70; Stop 94
ataatcggcaactgtaacagcttct

SEQ ID NO: 470848 - DNA, 25 bp, Artificial
  probe
  misc_feature (1)..(25): SEQ ID NO: 7544; WAN024FCB; Start 23; Stop 47
cgttagtctggatgttgggatttga

SEQ ID NO: 470849 - DNA, 25 bp, Artificial
  probe
  misc_feature (1)..(25): SEQ ID NO: 7545; WAN024CHV; Start 152; Stop 176
ttcttaacaatcggagcaataggag

SEQ ID NO: 470850 - DNA, 25 bp, Artificial
  probe
  misc_feature (1)..(25): SEQ ID NO: 7545; WAN024CHV; Start 153; Stop 177
tcttaacaatcggagcaataggagc

SEQ ID NO: 470851 - DNA, 25 bp, Artificial
  probe
  misc_feature (1)..(25): SEQ ID NO: 7545; WAN024CHV; Start 151; Stop 175
tttcttaacaatcggagcaatagga

SEQ ID NO: 470852 - DNA, 25 bp, Artificial
  probe
  misc_feature (1)..(25): SEQ ID NO: 7545; WAN024CHV; Start 94; Stop 118
ctgcaagccaattacataagtagat

SEQ ID NO: 470853 - DNA, 25 bp, Artificial
  probe
  misc_feature (1)..(25): SEQ ID NO: 7545; WAN024CHV; Start 93; Stop 117
cctgcaagccaattacataagtaga

SEQ ID NO: 470854 - DNA, 25 bp, Artificial
  probe
  misc_feature (1)..(25): SEQ ID NO: 7545; WAN024CHV; Start 92; Stop 116
tcctgcaagccaattacataagtag

SEQ ID NO: 470855 - DNA, 25 bp, Artificial
  probe
  misc_feature (1)..(25): SEQ ID NO: 7545; WAN024CHV; Start 121; Stop 145
aatcttagcaatttgacggtaatcc

SEQ ID NO: 470856 - DNA, 25 bp, Artificial
  probe
  misc_feature (1)..(25): SEQ ID NO: 7545; WAN024CHV; Start 122; Stop 146
atcttagcaatttgacggtaatcca

SEQ ID NO: 470857 - DNA, 25 bp, Artificial
  probe
  misc_feature (1)..(25): SEQ ID NO: 7545; WAN024CHV; Start 91; Stop 115
gtcctgcaagccaattacataagta

SEQ ID NO: 470858 - DNA, 25 bp, Artificial
  probe
  misc_feature (1)..(25): SEQ ID NO: 7545; WAN024CHV; Start 95; Stop 119
tgcaagccaattacataagtagatt

SEQ ID NO: 470859 - DNA, 25 bp, Artificial
  probe
  misc_feature (1)..(25): SEQ ID NO: 7545; WAN024CHV; Start 119; Stop 143
tgaatcttagcaatttgacggtaat

SEQ ID NO: 470860 - DNA, 25 bp, Artificial
  probe
  misc_feature (1)..(25): SEQ ID NO: 7545; WAN024CHV; Start 123; Stop 147
tcttagcaatttgacggtaatccag

SEQ ID NO: 470861 - DNA, 25 bp, Artificial
  probe
  misc_feature (1)..(25): SEQ ID NO: 7545; WAN024CHV; Start 56; Stop 80
tagcgagtatgaatctttccatcag

SEQ ID NO: 470862 - DNA, 25 bp, Artificial
  probe
  misc_feature (1)..(25): SEQ ID NO: 7545; WAN024CHV; Start 55; Stop 79
atagcgagtatgaatctttccatca

SEQ ID NO: 470863 - DNA, 25 bp, Artificial
  probe
  misc_feature (1)..(25): SEQ ID NO: 7545; WAN024CHV; Start 61; Stop 85
agtatgaatctttccatcagccaaa

SEQ ID NO: 470864 - DNA, 25 bp, Artificial
  probe
  misc_feature (1)..(25): SEQ ID NO: 7545; WAN024CHV; Start 118; Stop 142
ttgaatcttagcaatttgacggtaa

SEQ ID NO: 470865 - DNA, 25 bp, Artificial
  probe
  misc_feature (1)..(25): SEQ ID NO: 7545; WAN024CHV; Start 120; Stop 144
gaatcttagcaatttgacggtaatc

SEQ ID NO: 470866 - DNA, 25 bp, Artificial
  probe
  misc_feature (1)..(25): SEQ ID NO: 7545; WAN024CHV; Start 60; Stop 84
gagtatgaatctttccatcagccaa

SEQ ID NO: 470867 - DNA, 25 bp, Artificial
  probe
  misc_feature (1)..(25): SEQ ID NO: 7545; WAN024CHV; Start 96; Stop 120
gcaagccaattacataagtagattg

SEQ ID NO: 470868 - DNA, 25 bp, Artificial
  probe
  misc_feature (1)..(25): SEQ ID NO: 7545; WAN024CHV; Start 124; Stop 148
cttagcaatttgacggtaatccagg

SEQ ID NO: 470869 - DNA, 25 bp, Artificial
  probe
  misc_feature (1)..(25): SEQ ID NO: 7545; WAN024CHV; Start 89; Stop 113
cagtcctgcaagccaattacataag

SEQ ID NO: 470870 - DNA, 25 bp, Artificial
  probe
  misc_feature (1)..(25): SEQ ID NO: 7545; WAN024CHV; Start 53; Stop 77
acatagcgagtatgaatctttccat

SEQ ID NO: 470871 - DNA, 25 bp, Artificial
  probe
  misc_feature (1)..(25): SEQ ID NO: 7545; WAN024CHV; Start 54; Stop 78
catagcgagtatgaatctttccatc

SEQ ID NO: 470872 - DNA, 25 bp, Artificial
  probe
  misc_feature (1)..(25): SEQ ID NO: 7545; WAN024CHV; Start 90; Stop 114
agtcctgcaagccaattacataagt

SEQ ID NO: 470873 - DNA, 25 bp, Artificial
  probe
  misc_feature (1)..(25): SEQ ID NO: 7545; WAN024CHV; Start 52; Stop 76
cacatagcgagtatgaatctttcca

SEQ ID NO: 470874 - DNA, 25 bp, Artificial
  probe
  misc_feature (1)..(25): SEQ ID NO: 7545; WAN024CHV; Start 125; Stop 149
ttagcaatttgacggtaatccagga

SEQ ID NO: 470875 - DNA, 25 bp, Artificial
  probe
  misc_feature (1)..(25): SEQ ID NO: 7545; WAN024CHV; Start 154; Stop 178
cttaacaatcggagcaataggagcg

SEQ ID NO: 470876 - DNA, 25 bp, Artificial
  probe
  misc_feature (1)..(25): SEQ ID NO: 7545; WAN024CHV; Start 126; Stop 150
tagcaatttgacggtaatccaggat

SEQ ID NO: 470877 - DNA, 25 bp, Artificial
  probe
  misc_feature (1)..(25): SEQ ID NO: 7545; WAN024CHV; Start 45; Stop 69
aatcctgcacatagcgagtatgaat

SEQ ID NO: 470878 - DNA, 25 bp, Artificial
  probe
  misc_feature (1)..(25): SEQ ID NO: 7545; WAN024CHV; Start 51; Stop 75
gcacatagcgagtatgaatctttcc

SEQ ID NO: 470879 - DNA, 25 bp, Artificial
  probe
  misc_feature (1)..(25): SEQ ID NO: 7545; WAN024CHV; Start 116; Stop 140
gattgaatcttagcaatttgacggt

SEQ ID NO: 470880 - DNA, 25 bp, Artificial
  probe
  misc_feature (1)..(25): SEQ ID NO: 7545; WAN024CHV; Start 97; Stop 121
caagccaattacataagtagattga

SEQ ID NO: 470881 - DNA, 25 bp, Artificial
  probe
  misc_feature (1)..(25): SEQ ID NO: 7545; WAN024CHV; Start 59; Stop 83
cgagtatgaatctttccatcagcca

SEQ ID NO: 470882 - DNA, 25 bp, Artificial
  probe
  misc_feature (1)..(25): SEQ ID NO: 7546; WAN024ERL; Start 106; Stop 130
cattcatacctctctcaactagatg

SEQ ID NO: 470883 - DNA, 25 bp, Artificial
  probe
  misc_feature (1)..(25): SEQ ID NO: 7546; WAN024ERL; Start 105; Stop 129
tcattcatacctctctcaactagat

SEQ ID NO: 470884 - DNA, 25 bp, Artificial
  probe
  misc_feature (1)..(25): SEQ ID NO: 7546; WAN024ERL; Start 104; Stop 128
atcattcatacctctctcaactaga

SEQ ID NO: 470885 - DNA, 25 bp, Artificial
  probe
  misc_feature (1)..(25): SEQ ID NO: 7546; WAN024ERL; Start 103; Stop 127
aatcattcatacctctctcaactag

SEQ ID NO: 470886 - DNA, 25 bp, Artificial
  probe
  misc_feature (1)..(25): SEQ ID NO: 7546; WAN024ERL; Start 99; Stop 123
cccaaatcattcatacctctctcaa

SEQ ID NO: 470887 - DNA, 25 bp, Artificial
  probe
  misc_feature (1)..(25): SEQ ID NO: 7546; WAN024ERL; Start 97; Stop 121
aacccaaatcattcatacctctctc

SEQ ID NO: 470888 - DNA, 25 bp, Artificial
  probe
  misc_feature (1)..(25): SEQ ID NO: 7546; WAN024ERL; Start 100; Stop 124
ccaaatcattcatacctctctcaac

SEQ ID NO: 470889 - DNA, 25 bp, Artificial
  probe
  misc_feature (1)..(25): SEQ ID NO: 7546; WAN024ERL; Start 96; Stop 120
taacccaaatcattcatacctctct

SEQ ID NO: 470890 - DNA, 25 bp, Artificial
  probe
  misc_feature (1)..(25): SEQ ID NO: 7546; WAN024ERL; Start 64; Stop 88
ctttcaataaattcgtccaggcata

SEQ ID NO: 470891 - DNA, 25 bp, Artificial
  probe
  misc_feature (1)..(25): SEQ ID NO: 7546; WAN024ERL; Start 66; Stop 90
ttcaataaattcgtccaggcataaa

SEQ ID NO: 470892 - DNA, 25 bp, Artificial
  probe
  misc_feature (1)..(25): SEQ ID NO: 7546; WAN024ERL; Start 65; Stop 89
tttcaataaattcgtccaggcataa

SEQ ID NO: 470893 - DNA, 25 bp, Artificial
  probe
  misc_feature (1)..(25): SEQ ID NO: 7546; WAN024ERL; Start 59; Stop 83
gatgcctttcaataaattcgtccag

SEQ ID NO: 470894 - DNA, 25 bp, Artificial
  probe
  misc_feature (1)..(25): SEQ ID NO: 7546; WAN024ERL; Start 98; Stop 122
acccaaatcattcatacctctctca

SEQ ID NO: 470895 - DNA, 25 bp, Artificial
  probe
  misc_feature (1)..(25): SEQ ID NO: 7546; WAN024ERL; Start 67; Stop 91
tcaataaattcgtccaggcataaat

SEQ ID NO: 470896 - DNA, 25 bp, Artificial
  probe
  misc_feature (1)..(25): SEQ ID NO: 7546; WAN024ERL; Start 71; Stop 95
taaattcgtccaggcataaatcttt

SEQ ID NO: 470897 - DNA, 25 bp, Artificial
  probe
  misc_feature (1)..(25): SEQ ID NO: 7546; WAN024ERL; Start 68; Stop 92
caataaattcgtccaggcataaatc

SEQ ID NO: 470898 - DNA, 25 bp, Artificial
  probe
  misc_feature (1)..(25): SEQ ID NO: 7546; WAN024ERL; Start 101; Stop 125
caaatcattcatacctctctcaact

SEQ ID NO: 470899 - DNA, 25 bp, Artificial
  probe
  misc_feature (1)..(25): SEQ ID NO: 7546; WAN024ERL; Start 70; Stop 94
ataaattcgtccaggcataaatctt

SEQ ID NO: 470900 - DNA, 25 bp, Artificial
  probe
  misc_feature (1)..(25): SEQ ID NO: 7546; WAN024ERL; Start 69; Stop 93
aataaattcgtccaggcataaatct

SEQ ID NO: 470901 - DNA, 25 bp, Artificial
  probe
  misc_feature (1)..(25): SEQ ID NO: 7546; WAN024ERL; Start 95; Stop 119
ttaacccaaatcattcatacctctc

SEQ ID NO: 470902 - DNA, 25 bp, Artificial
  probe
  misc_feature (1)..(25): SEQ ID NO: 7546; WAN024ERL; Start 55; Stop 79
atcggatgcctttcaataaattcgt

SEQ ID NO: 470903 - DNA, 25 bp, Artificial
  probe
  misc_feature (1)..(25): SEQ ID NO: 7546; WAN024ERL; Start 53; Stop 77
tcatcggatgcctttcaataaattc

SEQ ID NO: 470904 - DNA, 25 bp, Artificial
  probe
  misc_feature (1)..(25): SEQ ID NO: 7546; WAN024ERL; Start 52; Stop 76
ctcatcggatgcctttcaataaatt

SEQ ID NO: 470905 - DNA, 25 bp, Artificial
  probe
  misc_feature (1)..(25): SEQ ID NO: 7546; WAN024ERL; Start 48; Stop 72
taaactcatcggatgcctttcaata

SEQ ID NO: 470906 - DNA, 25 bp, Artificial
  probe
  misc_feature (1)..(25): SEQ ID NO: 7546; WAN024ERL; Start 94; Stop 118
tttaacccaaatcattcatacctct

SEQ ID NO: 470907 - DNA, 25 bp, Artificial
  probe
  misc_feature (1)..(25): SEQ ID NO: 7546; WAN024ERL; Start 51; Stop 75
actcatcggatgcctttcaataaat

SEQ ID NO: 470908 - DNA, 25 bp, Artificial
  probe
  misc_feature (1)..(25): SEQ ID NO: 7546; WAN024ERL; Start 47; Stop 71
ataaactcatcggatgcctttcaat

SEQ ID NO: 470909 - DNA, 25 bp, Artificial
  probe
  misc_feature (1)..(25): SEQ ID NO: 7546; WAN024ERL; Start 56; Stop 80
tcggatgcctttcaataaattcgtc

SEQ ID NO: 470910 - DNA, 25 bp, Artificial
  probe
  misc_feature (1)..(25): SEQ ID NO: 7546; WAN024ERL; Start 50; Stop 74
aactcatcggatgcctttcaataaa

SEQ ID NO: 470911 - DNA, 25 bp, Artificial
  probe
  misc_feature (1)..(25): SEQ ID NO: 7546; WAN024ERL; Start 49; Stop 73
aaactcatcggatgcctttcaataa

SEQ ID NO: 470912 - DNA, 25 bp, Artificial
  probe
  misc_feature (1)..(25): SEQ ID NO: 7546; WAN024ERL; Start 54; Stop 78
catcggatgcctttcaataaattcg

SEQ ID NO: 470913 - DNA, 25 bp, Artificial
  probe
  misc_feature (1)..(25): SEQ ID NO: 7546; WAN024ERL; Start 46; Stop 70
gataaactcatcggatgcctttcaa

SEQ ID NO: 470914 - DNA, 25 bp, Artificial
  probe
  misc_feature (1)..(25): SEQ ID NO: 7546; WAN024ERL; Start 44; Stop 68
ctgataaactcatcggatgcctttc

SEQ ID NO: 470915 - DNA, 25 bp, Artificial
  probe
  misc_feature (1)..(25): SEQ ID NO: 7547; WAN024CAN; Start 228; Stop 252
attcttcaatctgccttactactcc

SEQ ID NO: 470916 - DNA, 25 bp, Artificial
  probe
  misc_feature (1)..(25): SEQ ID NO: 7547; WAN024CAN; Start 9; Stop 33
atcatcaataataactggcacttcc

SEQ ID NO: 470917 - DNA, 25 bp, Artificial
  probe
  misc_feature (1)..(25): SEQ ID NO: 7547; WAN024CAN; Start 221; Stop 245
aacctcaattcttcaatctgcctta

SEQ ID NO: 470918 - DNA, 25 bp, Artificial
  probe
  misc_feature (1)..(25): SEQ ID NO: 7547; WAN024CAN; Start 230; Stop 254
tcttcaatctgccttactactccaa

SEQ ID NO: 470919 - DNA, 25 bp, Artificial
  probe
  misc_feature (1)..(25): SEQ ID NO: 7547; WAN024CAN; Start 229; Stop 253
ttcttcaatctgccttactactcca

SEQ ID NO: 470920 - DNA, 25 bp, Artificial
  probe
  misc_feature (1)..(25): SEQ ID NO: 7547; WAN024CAN; Start 223; Stop 247
cctcaattcttcaatctgccttact

SEQ ID NO: 470921 - DNA, 25 bp, Artificial
  probe
  misc_feature (1)..(25): SEQ ID NO: 7547; WAN024CAN; Start 222; Stop 246
acctcaattcttcaatctgccttac

SEQ ID NO: 470922 - DNA, 25 bp, Artificial
  probe
  misc_feature (1)..(25): SEQ ID NO: 7547; WAN024CAN; Start 225; Stop 249
tcaattcttcaatctgccttactac

SEQ ID NO: 470923 - DNA, 25 bp, Artificial
  probe
  misc_feature (1)..(25): SEQ ID NO: 7547; WAN024CAN; Start 226; Stop 250
caattcttcaatctgccttactact

SEQ ID NO: 470924 - DNA, 25 bp, Artificial
  probe
  misc_feature (1)..(25): SEQ ID NO: 7547; WAN024CAN; Start 227; Stop 251
aattcttcaatctgccttactactc

SEQ ID NO: 470925 - DNA, 25 bp, Artificial
  probe
  misc_feature (1)..(25): SEQ ID NO: 7547; WAN024CAN; Start 224; Stop 248
ctcaattcttcaatctgccttacta

SEQ ID NO: 470926 - DNA, 25 bp, Artificial
  probe
  misc_feature (1)..(25): SEQ ID NO: 7547; WAN024CAN; Start 220; Stop 244
caacctcaattcttcaatctgcctt

SEQ ID NO: 470927 - DNA, 25 bp, Artificial
  probe
  misc_feature (1)..(25): SEQ ID NO: 7547; WAN024CAN; Start 217; Stop 241
ttccaacctcaattcttcaatctgc

SEQ ID NO: 470928 - DNA, 25 bp, Artificial
  probe
  misc_feature (1)..(25): SEQ ID NO: 7547; WAN024CAN; Start 7; Stop 31
caatcatcaataataactggcactt

SEQ ID NO: 470929 - DNA, 25 bp, Artificial
  probe
  misc_feature (1)..(25): SEQ ID NO: 7547; WAN024CAN; Start 318; Stop 342
ggttgaccttactgtccatcataat

SEQ ID NO: 470930 - DNA, 25 bp, Artificial
  probe
  misc_feature (1)..(25): SEQ ID NO: 7547; WAN024CAN; Start 8; Stop 32
aatcatcaataataactggcacttc

SEQ ID NO: 470931 - DNA, 25 bp, Artificial
  probe
  misc_feature (1)..(25): SEQ ID NO: 7547; WAN024CAN; Start 4; Stop 28
caccaatcatcaataataactggca

SEQ ID NO: 470932 - DNA, 25 bp, Artificial
  probe
  misc_feature (1)..(25): SEQ ID NO: 7547; WAN024CAN; Start 5; Stop 29
accaatcatcaataataactggcac

SEQ ID NO: 470933 - DNA, 25 bp, Artificial
  probe
  misc_feature (1)..(25): SEQ ID NO: 7547; WAN024CAN; Start 6; Stop 30
ccaatcatcaataataactggcact

SEQ ID NO: 470934 - DNA, 25 bp, Artificial
  probe
  misc_feature (1)..(25): SEQ ID NO: 7547; WAN024CAN; Start 3; Stop 27
gcaccaatcatcaataataactggc

SEQ ID NO: 470935 - DNA, 25 bp, Artificial
  probe
  misc_feature (1)..(25): SEQ ID NO: 7547; WAN024CAN; Start 319; Stop 343
gttgaccttactgtccatcataata

SEQ ID NO: 470936 - DNA, 25 bp, Artificial
  probe
  misc_feature (1)..(25): SEQ ID NO: 7547; WAN024CAN; Start 328; Stop 352
actgtccatcataatatcattgagt

SEQ ID NO: 470937 - DNA, 25 bp, Artificial
  probe
  misc_feature (1)..(25): SEQ ID NO: 7547; WAN024CAN; Start 231; Stop 255
cttcaatctgccttactactccaaa

SEQ ID NO: 470938 - DNA, 25 bp, Artificial
  probe
  misc_feature (1)..(25): SEQ ID NO: 7547; WAN024CAN; Start 124; Stop 148
ccttcaacaataataaactctggca

SEQ ID NO: 470939 - DNA, 25 bp, Artificial
  probe
  misc_feature (1)..(25): SEQ ID NO: 7547; WAN024CAN; Start 123; Stop 147
tccttcaacaataataaactctggc

SEQ ID NO: 470940 - DNA, 25 bp, Artificial
  probe
  misc_feature (1)..(25): SEQ ID NO: 7547; WAN024CAN; Start 10; Stop 34
tcatcaataataactggcacttccc

SEQ ID NO: 470941 - DNA, 25 bp, Artificial
  probe
  misc_feature (1)..(25): SEQ ID NO: 7547; WAN024CAN; Start 205; Stop 229
tacttcctcaatttccaacctcaat

SEQ ID NO: 470942 - DNA, 25 bp, Artificial
  probe
  misc_feature (1)..(25): SEQ ID NO: 7547; WAN024CAN; Start 204; Stop 228
atacttcctcaatttccaacctcaa

SEQ ID NO: 470943 - DNA, 25 bp, Artificial
  probe
  misc_feature (1)..(25): SEQ ID NO: 7547; WAN024CAN; Start 202; Stop 226
agatacttcctcaatttccaacctc

SEQ ID NO: 470944 - DNA, 25 bp, Artificial
  probe
  misc_feature (1)..(25): SEQ ID NO: 7547; WAN024CAN; Start 216; Stop 240
tttccaacctcaattcttcaatctg

SEQ ID NO: 470945 - DNA, 25 bp, Artificial
  probe
  misc_feature (1)..(25): SEQ ID NO: 7547; WAN024CAN; Start 203; Stop 227
gatacttcctcaatttccaacctca

SEQ ID NO: 470946 - DNA, 25 bp, Artificial
  probe
  misc_feature (1)..(25): SEQ ID NO: 7547; WAN024CAN; Start 323; Stop 347
accttactgtccatcataatatcat

SEQ ID NO: 470947 - DNA, 25 bp, Artificial
  probe
  misc_feature (1)..(25): SEQ ID NO: 7547; WAN024CAN; Start 201; Stop 225
tagatacttcctcaatttccaacct

SEQ ID NO: 470948 - DNA, 25 bp, Artificial
  probe
  misc_feature (1)..(25): SEQ ID NO: 7548; WAN024FRT; Start 132; Stop 156
taactggaatacgaatacgaggaat

SEQ ID NO: 470949 - DNA, 25 bp, Artificial
  probe
  misc_feature (1)..(25): SEQ ID NO: 7548; WAN024FRT; Start 133; Stop 157
aactggaatacgaatacgaggaatg

SEQ ID NO: 470950 - DNA, 25 bp, Artificial
  probe
  misc_feature (1)..(25): SEQ ID NO: 7548; WAN024FRT; Start 131; Stop 155
ttaactggaatacgaatacgaggaa

SEQ ID NO: 470951 - DNA, 25 bp, Artificial
  probe
  misc_feature (1)..(25): SEQ ID NO: 7548; WAN024FRT; Start 103; Stop 127
aatcacaacagagatattacgacct

SEQ ID NO: 470952 - DNA, 25 bp, Artificial
  probe
  misc_feature (1)..(25): SEQ ID NO: 7548; WAN024FRT; Start 102; Stop 126
caatcacaacagagatattacgacc

SEQ ID NO: 470953 - DNA, 25 bp, Artificial
  probe
  misc_feature (1)..(25): SEQ ID NO: 7548; WAN024FRT; Start 138; Stop 162
gaatacgaatacgaggaatggctac

SEQ ID NO: 470954 - DNA, 25 bp, Artificial
  probe
  misc_feature (1)..(25): SEQ ID NO: 7548; WAN024FRT; Start 101; Stop 125
tcaatcacaacagagatattacgac

SEQ ID NO: 470955 - DNA, 25 bp, Artificial
  probe
  misc_feature (1)..(25): SEQ ID NO: 7548; WAN024FRT; Start 97; Stop 121
tgcctcaatcacaacagagatatta

SEQ ID NO: 470956 - DNA, 25 bp, Artificial
  probe
  misc_feature (1)..(25): SEQ ID NO: 7548; WAN024FRT; Start 98; Stop 122
gcctcaatcacaacagagatattac

SEQ ID NO: 470957 - DNA, 25 bp, Artificial
  probe
  misc_feature (1)..(25): SEQ ID NO: 7548; WAN024FRT; Start 99; Stop 123
cctcaatcacaacagagatattacg

SEQ ID NO: 470958 - DNA, 25 bp, Artificial
  probe
  misc_feature (1)..(25): SEQ ID NO: 7548; WAN024FRT; Start 137; Stop 161
ggaatacgaatacgaggaatggcta

SEQ ID NO: 470959 - DNA, 25 bp, Artificial
  probe
  misc_feature (1)..(25): SEQ ID NO: 7548; WAN024FRT; Start 104; Stop 128
atcacaacagagatattacgacctg

SEQ ID NO: 470960 - DNA, 25 bp, Artificial
  probe
  misc_feature (1)..(25): SEQ ID NO: 7548; WAN024FRT; Start 134; Stop 158
actggaatacgaatacgaggaatgg

SEQ ID NO: 470961 - DNA, 25 bp, Artificial
  probe
  misc_feature (1)..(25): SEQ ID NO: 7548; WAN024FRT; Start 96; Stop 120
ctgcctcaatcacaacagagatatt

SEQ ID NO: 470962 - DNA, 25 bp, Artificial
  probe
  misc_feature (1)..(25): SEQ ID NO: 7548; WAN024FRT; Start 100; Stop 124
ctcaatcacaacagagatattacga

SEQ ID NO: 470963 - DNA, 25 bp, Artificial
  probe
  misc_feature (1)..(25): SEQ ID NO: 7548; WAN024FRT; Start 139; Stop 163
aatacgaatacgaggaatggctacg

SEQ ID NO: 470964 - DNA, 25 bp, Artificial
  probe
  misc_feature (1)..(25): SEQ ID NO: 7548; WAN024FRT; Start 203; Stop 227
tcaaaggtcttatgcgtatcgtaat

SEQ ID NO: 470965 - DNA, 25 bp, Artificial
  probe
  misc_feature (1)..(25): SEQ ID NO: 7548; WAN024FRT; Start 202; Stop 226
atcaaaggtcttatgcgtatcgtaa

SEQ ID NO: 470966 - DNA, 25 bp, Artificial
  probe
  misc_feature (1)..(25): SEQ ID NO: 7548; WAN024FRT; Start 130; Stop 154
tttaactggaatacgaatacgagga

SEQ ID NO: 470967 - DNA, 25 bp, Artificial
  probe
  misc_feature (1)..(25): SEQ ID NO: 7548; WAN024FRT; Start 204; Stop 228
caaaggtcttatgcgtatcgtaatt

SEQ ID NO: 470968 - DNA, 25 bp, Artificial
  probe
  misc_feature (1)..(25): SEQ ID NO: 7548; WAN024FRT; Start 205; Stop 229
aaaggtcttatgcgtatcgtaattt

SEQ ID NO: 470969 - DNA, 25 bp, Artificial
  probe
  misc_feature (1)..(25): SEQ ID NO: 7548; WAN024FRT; Start 201; Stop 225
gatcaaaggtcttatgcgtatcgta

SEQ ID NO: 470970 - DNA, 25 bp, Artificial
  probe
  misc_feature (1)..(25): SEQ ID NO: 7548; WAN024FRT; Start 135; Stop 159
ctggaatacgaatacgaggaatggc

SEQ ID NO: 470971 - DNA, 25 bp, Artificial
  probe
  misc_feature (1)..(25): SEQ ID NO: 7548; WAN024FRT; Start 95; Stop 119
gctgcctcaatcacaacagagatat

SEQ ID NO: 470972 - DNA, 25 bp, Artificial
  probe
  misc_feature (1)..(25): SEQ ID NO: 7548; WAN024FRT; Start 136; Stop 160
tggaatacgaatacgaggaatggct

SEQ ID NO: 470973 - DNA, 25 bp, Artificial
  probe
  misc_feature (1)..(25): SEQ ID NO: 7548; WAN024FRT; Start 67; Stop 91
catttccttggcacgataattcatg

SEQ ID NO: 470974 - DNA, 25 bp, Artificial
  probe
  misc_feature (1)..(25): SEQ ID NO: 7548; WAN024FRT; Start 68; Stop 92
atttccttggcacgataattcatgg

SEQ ID NO: 470975 - DNA, 25 bp, Artificial
  probe
  misc_feature (1)..(25): SEQ ID NO: 7548; WAN024FRT; Start 186; Stop 210
cattgtttccaagacgatcaaaggt

SEQ ID NO: 470976 - DNA, 25 bp, Artificial
  probe
  misc_feature (1)..(25): SEQ ID NO: 7548; WAN024FRT; Start 187; Stop 211
attgtttccaagacgatcaaaggtc

SEQ ID NO: 470977 - DNA, 25 bp, Artificial
  probe
  misc_feature (1)..(25): SEQ ID NO: 7548; WAN024FRT; Start 66; Stop 90
ccatttccttggcacgataattcat

SEQ ID NO: 470978 - DNA, 25 bp, Artificial
  probe
  misc_feature (1)..(25): SEQ ID NO: 7548; WAN024FRT; Start 208; Stop 232
ggtcttatgcgtatcgtaattttcc

SEQ ID NO: 470979 - DNA, 25 bp, Artificial
  probe
  misc_feature (1)..(25): SEQ ID NO: 7548; WAN024FRT; Start 209; Stop 233
gtcttatgcgtatcgtaattttcca

SEQ ID NO: 470980 - DNA, 25 bp, Artificial
  probe
  misc_feature (1)..(25): SEQ ID NO: 7548; WAN024FRT; Start 123; Stop 147
gacctgttttaactggaatacgaat

SEQ ID NO: 470981 - DNA, 25 bp, Artificial
  probe
  misc_feature (1)..(25): SEQ ID NO: 7549; WAN024BZK; Start 88; Stop 112
aagcatataaccgttagcaagattg

SEQ ID NO: 470982 - DNA, 25 bp, Artificial
  probe
  misc_feature (1)..(25): SEQ ID NO: 7549; WAN024BZK; Start 89; Stop 113
agcatataaccgttagcaagattgt

SEQ ID NO: 470983 - DNA, 25 bp, Artificial
  probe
  misc_feature (1)..(25): SEQ ID NO: 7549; WAN024BZK; Start 90; Stop 114
gcatataaccgttagcaagattgtt

SEQ ID NO: 470984 - DNA, 25 bp, Artificial
  probe
  misc_feature (1)..(25): SEQ ID NO: 7549; WAN024BZK; Start 83; Stop 107
acattaagcatataaccgttagcaa

SEQ ID NO: 470985 - DNA, 25 bp, Artificial
  probe
  misc_feature (1)..(25): SEQ ID NO: 7549; WAN024BZK; Start 82; Stop 106
aacattaagcatataaccgttagca

SEQ ID NO: 470986 - DNA, 25 bp, Artificial
  probe
  misc_feature (1)..(25): SEQ ID NO: 7549; WAN024BZK; Start 84; Stop 108
cattaagcatataaccgttagcaag

SEQ ID NO: 470987 - DNA, 25 bp, Artificial
  probe
  misc_feature (1)..(25): SEQ ID NO: 7549; WAN024BZK; Start 87; Stop 111
taagcatataaccgttagcaagatt

SEQ ID NO: 470988 - DNA, 25 bp, Artificial
  probe
  misc_feature (1)..(25): SEQ ID NO: 7549; WAN024BZK; Start 86; Stop 110
ttaagcatataaccgttagcaagat

SEQ ID NO: 470989 - DNA, 25 bp, Artificial
  probe
  misc_feature (1)..(25): SEQ ID NO: 7549; WAN024BZK; Start 85; Stop 109
attaagcatataaccgttagcaaga

SEQ ID NO: 470990 - DNA, 25 bp, Artificial
  probe
  misc_feature (1)..(25): SEQ ID NO: 7549; WAN024BZK; Start 127; Stop 151
ataatacgatacattctcaagcagt

SEQ ID NO: 470991 - DNA, 25 bp, Artificial
  probe
  misc_feature (1)..(25): SEQ ID NO: 7549; WAN024BZK; Start 126; Stop 150
gataatacgatacattctcaagcag

SEQ ID NO: 470992 - DNA, 25 bp, Artificial
  probe
  misc_feature (1)..(25): SEQ ID NO: 7549; WAN024BZK; Start 125; Stop 149
tgataatacgatacattctcaagca

SEQ ID NO: 470993 - DNA, 25 bp, Artificial
  probe
  misc_feature (1)..(25): SEQ ID NO: 7549; WAN024BZK; Start 128; Stop 152
taatacgatacattctcaagcagta

SEQ ID NO: 470994 - DNA, 25 bp, Artificial
  probe
  misc_feature (1)..(25): SEQ ID NO: 7549; WAN024BZK; Start 129; Stop 153
aatacgatacattctcaagcagtat

SEQ ID NO: 470995 - DNA, 25 bp, Artificial
  probe
  misc_feature (1)..(25): SEQ ID NO: 7549; WAN024BZK; Start 77; Stop 101
acaataacattaagcatataaccgt

SEQ ID NO: 470996 - DNA, 25 bp, Artificial
  probe
  misc_feature (1)..(25): SEQ ID NO: 7549; WAN024BZK; Start 94; Stop 118
ataaccgttagcaagattgtttcaa

SEQ ID NO: 470997 - DNA, 25 bp, Artificial
  probe
  misc_feature (1)..(25): SEQ ID NO: 7549; WAN024BZK; Start 131; Stop 155
tacgatacattctcaagcagtataa

SEQ ID NO: 470998 - DNA, 25 bp, Artificial
  probe
  misc_feature (1)..(25): SEQ ID NO: 7549; WAN024BZK; Start 93; Stop 117
tataaccgttagcaagattgtttca

SEQ ID NO: 470999 - DNA, 25 bp, Artificial
  probe
  misc_feature (1)..(25): SEQ ID NO: 7549; WAN024BZK; Start 130; Stop 154
atacgatacattctcaagcagtata

SEQ ID NO: 471000 - DNA, 25 bp, Artificial
  probe
  misc_feature (1)..(25): SEQ ID NO: 7549; WAN024BZK; Start 81; Stop 105
taacattaagcatataaccgttagc

SEQ ID NO: 471001 - DNA, 25 bp, Artificial
  probe
  misc_feature (1)..(25): SEQ ID NO: 7549; WAN024BZK; Start 91; Stop 115
catataaccgttagcaagattgttt

SEQ ID NO: 471002 - DNA, 25 bp, Artificial
  probe
  misc_feature (1)..(25): SEQ ID NO: 7549; WAN024BZK; Start 92; Stop 116
atataaccgttagcaagattgtttc

SEQ ID NO: 471003 - DNA, 25 bp, Artificial
  probe
  misc_feature (1)..(25): SEQ ID NO: 7549; WAN024BZK; Start 76; Stop 100
aacaataacattaagcatataaccg

SEQ ID NO: 471004 - DNA, 25 bp, Artificial
  probe
  misc_feature (1)..(25): SEQ ID NO: 7549; WAN024BZK; Start 132; Stop 156
acgatacattctcaagcagtataaa

SEQ ID NO: 471005 - DNA, 25 bp, Artificial
  probe
  misc_feature (1)..(25): SEQ ID NO: 7549; WAN024BZK; Start 78; Stop 102
caataacattaagcatataaccgtt

SEQ ID NO: 471006 - DNA, 25 bp, Artificial
  probe
  misc_feature (1)..(25): SEQ ID NO: 7549; WAN024BZK; Start 96; Stop 120
aaccgttagcaagattgtttcaata

SEQ ID NO: 471007 - DNA, 25 bp, Artificial
  probe
  misc_feature (1)..(25): SEQ ID NO: 7549; WAN024BZK; Start 95; Stop 119
taaccgttagcaagattgtttcaat

SEQ ID NO: 471008 - DNA, 25 bp, Artificial
  probe
  misc_feature (1)..(25): SEQ ID NO: 7549; WAN024BZK; Start 97; Stop 121
accgttagcaagattgtttcaatat

SEQ ID NO: 471009 - DNA, 25 bp, Artificial
  probe
  misc_feature (1)..(25): SEQ ID NO: 7549; WAN024BZK; Start 199; Stop 223
aacatactaagcctccttgctaaat

SEQ ID NO: 471010 - DNA, 25 bp, Artificial
  probe
  misc_feature (1)..(25): SEQ ID NO: 7549; WAN024BZK; Start 198; Stop 222
aaacatactaagcctccttgctaaa

SEQ ID NO: 471011 - DNA, 25 bp, Artificial
  probe
  misc_feature (1)..(25): SEQ ID NO: 7549; WAN024BZK; Start 197; Stop 221
taaacatactaagcctccttgctaa

SEQ ID NO: 471012 - DNA, 25 bp, Artificial
  probe
  misc_feature (1)..(25): SEQ ID NO: 7549; WAN024BZK; Start 196; Stop 220
ttaaacatactaagcctccttgcta

SEQ ID NO: 471013 - DNA, 25 bp, Artificial
  probe
  misc_feature (1)..(25): SEQ ID NO: 7549; WAN024BZK; Start 200; Stop 224
acatactaagcctccttgctaaata

SEQ ID NO: 471014 - DNA, 25 bp, Artificial
  probe
  misc_feature (1)..(25): SEQ ID NO: 7550; WAN024C5X; Start 48; Stop 72
gggttcattatttatcctcctcctt

SEQ ID NO: 471015 - DNA, 25 bp, Artificial
  probe
  misc_feature (1)..(25): SEQ ID NO: 7550; WAN024C5X; Start 13; Stop 37
agtggcttggtttgtttatattgtc

SEQ ID NO: 471016 - DNA, 25 bp, Artificial
  probe
  misc_feature (1)..(25): SEQ ID NO: 7550; WAN024C5X; Start 46; Stop 70
ctgggttcattatttatcctcctcc

SEQ ID NO: 471017 - DNA, 25 bp, Artificial
  probe
  misc_feature (1)..(25): SEQ ID NO: 7550; WAN024C5X; Start 45; Stop 69
tctgggttcattatttatcctcctc

SEQ ID NO: 471018 - DNA, 25 bp, Artificial
  probe
  misc_feature (1)..(25): SEQ ID NO: 7550; WAN024C5X; Start 14; Stop 38
gtggcttggtttgtttatattgtca

SEQ ID NO: 471019 - DNA, 25 bp, Artificial
  probe
  misc_feature (1)..(25): SEQ ID NO: 7550; WAN024C5X; Start 9; Stop 33
tggtagtggcttggtttgtttatat

SEQ ID NO: 471020 - DNA, 25 bp, Artificial
  probe
  misc_feature (1)..(25): SEQ ID NO: 7550; WAN024C5X; Start 10; Stop 34
ggtagtggcttggtttgtttatatt

SEQ ID NO: 471021 - DNA, 25 bp, Artificial
  probe
  misc_feature (1)..(25): SEQ ID NO: 7550; WAN024C5X; Start 8; Stop 32
ttggtagtggcttggtttgtttata

SEQ ID NO: 471022 - DNA, 25 bp, Artificial
  probe
  misc_feature (1)..(25): SEQ ID NO: 7550; WAN024C5X; Start 47; Stop 71
tgggttcattatttatcctcctcct

SEQ ID NO: 471023 - DNA, 25 bp, Artificial
  probe
  misc_feature (1)..(25): SEQ ID NO: 7550; WAN024C5X; Start 44; Stop 68
ttctgggttcattatttatcctcct

SEQ ID NO: 471024 - DNA, 25 bp, Artificial
  probe
  misc_feature (1)..(25): SEQ ID NO: 7550; WAN024C5X; Start 12; Stop 36
tagtggcttggtttgtttatattgt

SEQ ID NO: 471025 - DNA, 25 bp, Artificial
  probe
  misc_feature (1)..(25): SEQ ID NO: 7550; WAN024C5X; Start 11; Stop 35
gtagtggcttggtttgtttatattg

SEQ ID NO: 471026 - DNA, 25 bp, Artificial
  probe
  misc_feature (1)..(25): SEQ ID NO: 7550; WAN024C5X; Start 15; Stop 39
tggcttggtttgtttatattgtcaa

SEQ ID NO: 471027 - DNA, 25 bp, Artificial
  probe
  misc_feature (1)..(25): SEQ ID NO: 7550; WAN024C5X; Start 43; Stop 67
tttctgggttcattatttatcctcc

SEQ ID NO: 471028 - DNA, 25 bp, Artificial
  probe
  misc_feature (1)..(25): SEQ ID NO: 7550; WAN024C5X; Start 7; Stop 31
cttggtagtggcttggtttgtttat

SEQ ID NO: 471029 - DNA, 25 bp, Artificial
  probe
  misc_feature (1)..(25): SEQ ID NO: 7550; WAN024C5X; Start 16; Stop 40
ggcttggtttgtttatattgtcaat

SEQ ID NO: 471030 - DNA, 25 bp, Artificial
  probe
  misc_feature (1)..(25): SEQ ID NO: 7550; WAN024C5X; Start 49; Stop 73
ggttcattatttatcctcctcctta

SEQ ID NO: 471031 - DNA, 25 bp, Artificial
  probe
  misc_feature (1)..(25): SEQ ID NO: 7550; WAN024C5X; Start 32; Stop 56
attgtcaattatttctgggttcatt

SEQ ID NO: 471032 - DNA, 25 bp, Artificial
  probe
  misc_feature (1)..(25): SEQ ID NO: 7550; WAN024C5X; Start 42; Stop 66
atttctgggttcattatttatcctc

SEQ ID NO: 471033 - DNA, 25 bp, Artificial
  probe
  misc_feature (1)..(25): SEQ ID NO: 7550; WAN024C5X; Start 33; Stop 57
ttgtcaattatttctgggttcatta

SEQ ID NO: 471034 - DNA, 25 bp, Artificial
  probe
  misc_feature (1)..(25): SEQ ID NO: 7550; WAN024C5X; Start 6; Stop 30
ccttggtagtggcttggtttgttta

SEQ ID NO: 471035 - DNA, 25 bp, Artificial
  probe
  misc_feature (1)..(25): SEQ ID NO: 7550; WAN024C5X; Start 34; Stop 58
tgtcaattatttctgggttcattat

SEQ ID NO: 471036 - DNA, 25 bp, Artificial
  probe
  misc_feature (1)..(25): SEQ ID NO: 7550; WAN024C5X; Start 17; Stop 41
gcttggtttgtttatattgtcaatt

SEQ ID NO: 471037 - DNA, 25 bp, Artificial
  probe
  misc_feature (1)..(25): SEQ ID NO: 7550; WAN024C5X; Start 31; Stop 55
tattgtcaattatttctgggttcat

SEQ ID NO: 471038 - DNA, 25 bp, Artificial
  probe
  misc_feature (1)..(25): SEQ ID NO: 7550; WAN024C5X; Start 30; Stop 54
atattgtcaattatttctgggttca

SEQ ID NO: 471039 - DNA, 25 bp, Artificial
  probe
  misc_feature (1)..(25): SEQ ID NO: 7550; WAN024C5X; Start 50; Stop 74
gttcattatttatcctcctccttat

SEQ ID NO: 471040 - DNA, 25 bp, Artificial
  probe
  misc_feature (1)..(25): SEQ ID NO: 7550; WAN024C5X; Start 35; Stop 59
gtcaattatttctgggttcattatt

SEQ ID NO: 471041 - DNA, 25 bp, Artificial
  probe
  misc_feature (1)..(25): SEQ ID NO: 7550; WAN024C5X; Start 41; Stop 65
tatttctgggttcattatttatcct

SEQ ID NO: 471042 - DNA, 25 bp, Artificial
  probe
  misc_feature (1)..(25): SEQ ID NO: 7550; WAN024C5X; Start 52; Stop 76
tcattatttatcctcctccttattt

SEQ ID NO: 471043 - DNA, 25 bp, Artificial
  probe
  misc_feature (1)..(25): SEQ ID NO: 7550; WAN024C5X; Start 51; Stop 75
ttcattatttatcctcctccttatt

SEQ ID NO: 471044 - DNA, 25 bp, Artificial
  probe
  misc_feature (1)..(25): SEQ ID NO: 7550; WAN024C5X; Start 36; Stop 60
tcaattatttctgggttcattattt

SEQ ID NO: 471045 - DNA, 25 bp, Artificial
  probe
  misc_feature (1)..(25): SEQ ID NO: 7550; WAN024C5X; Start 40; Stop 64
ttatttctgggttcattatttatcc

SEQ ID NO: 471046 - DNA, 25 bp, Artificial
  probe
  misc_feature (1)..(25): SEQ ID NO: 7550; WAN024C5X; Start 29; Stop 53
tatattgtcaattatttctgggttc

SEQ ID NO: 471047 - DNA, 25 bp, Artificial
  probe
  misc_feature (1)..(25): SEQ ID NO: 7550; WAN024C5X; Start 5; Stop 29
accttggtagtggcttggtttgttt

SEQ ID NO: 471048 - DNA, 25 bp, Artificial
  probe
  misc_feature (1)..(25): SEQ ID NO: 7551; WAN024CQX; Start 91; Stop 115
aacgacttctccagatactccataa

SEQ ID NO: 471049 - DNA, 25 bp, Artificial
  probe
  misc_feature (1)..(25): SEQ ID NO: 7551; WAN024CQX; Start 92; Stop 116
acgacttctccagatactccataag

SEQ ID NO: 471050 - DNA, 25 bp, Artificial
  probe
  misc_feature (1)..(25): SEQ ID NO: 7551; WAN024CQX; Start 93; Stop 117
cgacttctccagatactccataagg

SEQ ID NO: 471051 - DNA, 25 bp, Artificial
  probe
  misc_feature (1)..(25): SEQ ID NO: 7551; WAN024CQX; Start 100; Stop 124
tccagatactccataaggaaccata

SEQ ID NO: 471052 - DNA, 25 bp, Artificial
  probe
  misc_feature (1)..(25): SEQ ID NO: 7551; WAN024CQX; Start 96; Stop 120
cttctccagatactccataaggaac

SEQ ID NO: 471053 - DNA, 25 bp, Artificial
  probe
  misc_feature (1)..(25): SEQ ID NO: 7551; WAN024CQX; Start 95; Stop 119
acttctccagatactccataaggaa

SEQ ID NO: 471054 - DNA, 25 bp, Artificial
  probe
  misc_feature (1)..(25): SEQ ID NO: 7551; WAN024CQX; Start 94; Stop 118
gacttctccagatactccataagga

SEQ ID NO: 471055 - DNA, 25 bp, Artificial
  probe
  misc_feature (1)..(25): SEQ ID NO: 7551; WAN024CQX; Start 101; Stop 125
ccagatactccataaggaaccataa

SEQ ID NO: 471056 - DNA, 25 bp, Artificial
  probe
  misc_feature (1)..(25): SEQ ID NO: 7551; WAN024CQX; Start 213; Stop 237
aatgccacttaatatctctatccaa

SEQ ID NO: 471057 - DNA, 25 bp, Artificial
  probe
  misc_feature (1)..(25): SEQ ID NO: 7551; WAN024CQX; Start 97; Stop 121
ttctccagatactccataaggaacc

SEQ ID NO: 471058 - DNA, 25 bp, Artificial
  probe
  misc_feature (1)..(25): SEQ ID NO: 7551; WAN024CQX; Start 99; Stop 123
ctccagatactccataaggaaccat

SEQ ID NO: 471059 - DNA, 25 bp, Artificial
  probe
  misc_feature (1)..(25): SEQ ID NO: 7551; WAN024CQX; Start 13; Stop 37
tcctttatagaaactaccgtccaat

SEQ ID NO: 471060 - DNA, 25 bp, Artificial
  probe
  misc_feature (1)..(25): SEQ ID NO: 7551; WAN024CQX; Start 90; Stop 114
aaacgacttctccagatactccata

SEQ ID NO: 471061 - DNA, 25 bp, Artificial
  probe
  misc_feature (1)..(25): SEQ ID NO: 7551; WAN024CQX; Start 12; Stop 36
ttcctttatagaaactaccgtccaa

SEQ ID NO: 471062 - DNA, 25 bp, Artificial
  probe
  misc_feature (1)..(25): SEQ ID NO: 7551; WAN024CQX; Start 11; Stop 35
gttcctttatagaaactaccgtcca

SEQ ID NO: 471063 - DNA, 25 bp, Artificial
  probe
  misc_feature (1)..(25): SEQ ID NO: 7551; WAN024CQX; Start 3; Stop 27
gcataagcgttcctttatagaaact

SEQ ID NO: 471064 - DNA, 25 bp, Artificial
  probe
  misc_feature (1)..(25): SEQ ID NO: 7551; WAN024CQX; Start 98; Stop 122
tctccagatactccataaggaacca

SEQ ID NO: 471065 - DNA, 25 bp, Artificial
  probe
  misc_feature (1)..(25): SEQ ID NO: 7551; WAN024CQX; Start 7; Stop 31
aagcgttcctttatagaaactaccg

SEQ ID NO: 471066 - DNA, 25 bp, Artificial
  probe
  misc_feature (1)..(25): SEQ ID NO: 7551; WAN024CQX; Start 10; Stop 34
cgttcctttatagaaactaccgtcc

SEQ ID NO: 471067 - DNA, 25 bp, Artificial
  probe
  misc_feature (1)..(25): SEQ ID NO: 7551; WAN024CQX; Start 130; Stop 154
atgattaactacctcggtttccttg

SEQ ID NO: 471068 - DNA, 25 bp, Artificial
  probe
  misc_feature (1)..(25): SEQ ID NO: 7551; WAN024CQX; Start 14; Stop 38
cctttatagaaactaccgtccaatt

SEQ ID NO: 471069 - DNA, 25 bp, Artificial
  probe
  misc_feature (1)..(25): SEQ ID NO: 7551; WAN024CQX; Start 215; Stop 239
tgccacttaatatctctatccaaac

SEQ ID NO: 471070 - DNA, 25 bp, Artificial
  probe
  misc_feature (1)..(25): SEQ ID NO: 7551; WAN024CQX; Start 129; Stop 153
tatgattaactacctcggtttcctt

SEQ ID NO: 471071 - DNA, 25 bp, Artificial
  probe
  misc_feature (1)..(25): SEQ ID NO: 7551; WAN024CQX; Start 128; Stop 152
ttatgattaactacctcggtttcct

SEQ ID NO: 471072 - DNA, 25 bp, Artificial
  probe
  misc_feature (1)..(25): SEQ ID NO: 7551; WAN024CQX; Start 162; Stop 186
caagaatatcacccgtactcacttt

SEQ ID NO: 471073 - DNA, 25 bp, Artificial
  probe
  misc_feature (1)..(25): SEQ ID NO: 7551; WAN024CQX; Start 9; Stop 33
gcgttcctttatagaaactaccgtc

SEQ ID NO: 471074 - DNA, 25 bp, Artificial
  probe
  misc_feature (1)..(25): SEQ ID NO: 7551; WAN024CQX; Start 216; Stop 240
gccacttaatatctctatccaaact

SEQ ID NO: 471075 - DNA, 25 bp, Artificial
  probe
  misc_feature (1)..(25): SEQ ID NO: 7551; WAN024CQX; Start 132; Stop 156
gattaactacctcggtttccttgac

SEQ ID NO: 471076 - DNA, 25 bp, Artificial
  probe
  misc_feature (1)..(25): SEQ ID NO: 7551; WAN024CQX; Start 102; Stop 126
cagatactccataaggaaccataat

SEQ ID NO: 471077 - DNA, 25 bp, Artificial
  probe
  misc_feature (1)..(25): SEQ ID NO: 7551; WAN024CQX; Start 6; Stop 30
taagcgttcctttatagaaactacc

SEQ ID NO: 471078 - DNA, 25 bp, Artificial
  probe
  misc_feature (1)..(25): SEQ ID NO: 7551; WAN024CQX; Start 89; Stop 113
gaaacgacttctccagatactccat

SEQ ID NO: 471079 - DNA, 25 bp, Artificial
  probe
  misc_feature (1)..(25): SEQ ID NO: 7551; WAN024CQX; Start 131; Stop 155
tgattaactacctcggtttccttga

SEQ ID NO: 471080 - DNA, 25 bp, Artificial
  probe
  misc_feature (1)..(25): SEQ ID NO: 7551; WAN024CQX; Start 127; Stop 151
tttatgattaactacctcggtttcc

SEQ ID NO: 471081 - DNA, 25 bp, Artificial
  probe
  misc_feature (1)..(25): SEQ ID NO: 7552; WAN024GM6; Start 129; Stop 153
agaacaccatcacgattatctagtc

SEQ ID NO: 471082 - DNA, 25 bp, Artificial
  probe
  misc_feature (1)..(25): SEQ ID NO: 7552; WAN024GM6; Start 128; Stop 152
tagaacaccatcacgattatctagt
